United States Patent Application Publication US 2018/0305408 A1 - sequence listing, part 5

SEQ ID NO: 73743 - protein, 27 aa, Artificial Sequence
  Cyclic GFR-binding peptide
VSQDLRSVKIAKVIGKTPKIKEVQVMI

SEQ ID NO: 73744 - protein, 37 aa, Artificial Sequence
  Cyclic GFR-binding peptide
  MOD_RES (3)..(4)..(36): Xaa is C or S
KPXXAPTQLRSVKVAKVDDSSNVIKEVQVNMVVRAXG

SEQ ID NO: 73745 - protein, 34 aa, Artificial Sequence
  Cyclic GFR-binding peptide
  MOD_RES (4)..(5): Xaa is C or S
PKPXXAPTQLSNITVQIMDDSSNVIIGEMSNMVV

SEQ ID NO: 73746 - protein, 30 aa, Artificial Sequence
  Cyclic GFR-binding peptide
  MOD_RES (4)..(5): Xaa is C or S
PKAXXVPTELSNITMQIMDEYDKVVIGEMS

SEQ ID NO: 73747 - protein, 39 aa, Artificial Sequence; identical to SEQ ID NO: 23583
  Cyclic GFR-binding peptide
  MOD_RES (4)..(4): Xaa is C or S

SEQ ID NO: 73748 - protein, 29 aa, Artificial Sequence
  Cyclic GFR-binding peptide
VPTELRPVQMRKIDEYDKVVKKATVEMVV

SEQ ID NO: 73749 - protein, 28 aa, Artificial Sequence
  Cyclic GFR-binding peptide
ELRPVQMRKIDENEKVVKKATVDMVVEG

SEQ ID NO: 73750 - protein, 35 aa, Artificial Sequence; identical to SEQ ID NO: 23591
  Cyclic GFR-binding peptide
  MOD_RES (5)..(5): Xaa is C or S

SEQ ID NO: 73751 - protein, 26 aa, Artificial Sequence
  Cyclic GFR-binding peptide
ELRPVQMRKIDEYDKVVKKATVEMVV

SEQ ID NO: 73752 - protein, 33 aa, Artificial Sequence
  Cyclic GFR-binding peptide
  MOD_RES (1)..(1): Xaa is C or S
XRPTQVQLEPLTVLYYEIVRKKPIFEQLSNTLE

SEQ ID NO: 73753 - protein, 36 aa, Artificial Sequence; identical to SEQ ID NO: 19426
  Cyclic GFR-binding peptide
  MOD_RES (3)..(4)..(35): Xaa is C or S

SEQ ID NO: 73754 - protein, 36 aa, Artificial Sequence; identical to SEQ ID NO: 19427
  Cyclic GFR-binding peptide
  MOD_RES (4)..(5): Xaa is C or S

SEQ ID NO: 73755 - protein, 25 aa, Artificial Sequence
  Cyclic GFR-binding peptide
PQDLRPVQIRKIVGRTPKVKKATVM

SEQ ID NO: 73756 - protein, 23 aa, Artificial Sequence
  Cyclic GFR-binding peptide
LSNITMQIMDENEKVVIGEMSDM

SEQ ID NO: 73757 - protein, 37 aa, Artificial Sequence
  Cyclic GFR-binding peptide
  MOD_RES (5)..(6): Xaa is C or S
VPKPXXAPTKLRSVKVAKVDDSSNVIKEVQVNMVVRS

SEQ ID NO: 73758 - protein, 22 aa, Artificial Sequence
  Cyclic GFR-binding peptide
DLSNITIQIMIGKTPKIIGEMS

SEQ ID NO: 73759 - protein, 41 aa, Artificial Sequence
  Cyclic GFR-binding peptide
  MOD_RES (6)..(7)..(38)..(40): Xaa is C or S
ASAAPXXVPQALRSVKIAKVVGRKPKVKEVQVMIVRSXKXS

SEQ ID NO: 73760 - protein, 31 aa, Artificial Sequence
  Cyclic GFR-binding peptide
  MOD_RES (28)..(30): Xaa is C or S
DLRSVKIAKVIGKTPKIKEVQVMIVKSXKXS

SEQ ID NO: 73761 - protein, 29 aa, Artificial Sequence
  Cyclic GFR-binding peptide
SQDLRSVKIAKVIGKTPKIKEVQVMIVKS

SEQ ID NO: 73762 - protein, 36 aa, Artificial Sequence
  Cyclic GFR-binding peptide
  MOD_RES (2)..(36): Xaa is C or S
EXVPTEEEPLTMLYYRIKPHQGQHEQLSNFLQHNKX

SEQ ID NO: 73763 - protein, 29 aa, Artificial Sequence
  Cyclic GFR-binding peptide
  MOD_RES (3)..(4): Xaa is C or S
SPXXVPQDLEPLPIVYYVGRTPKVEQLSN

SEQ ID NO: 73764 - protein, 26 aa, Artificial Sequence
  Cyclic GFR-binding peptide
LRSVKIAKVVGRTPKVKEVQVMVVKS

SEQ ID NO: 73765 - protein, 23 aa, Artificial Sequence
  Cyclic GFR-binding peptide
LEPLPMVYYDEYDKVVEQLSNEM

SEQ ID NO: 73766 - protein, 29 aa, Artificial Sequence
  Cyclic GFR-binding peptide
  MOD_RES (1)..(2): Xaa is C or S
XXVPQALEPLTILYYVGRKPKVEQLSNMI

SEQ ID NO: 73767 - protein, 27 aa, Artificial Sequence
  Cyclic GFR-binding peptide
  MOD_RES (27)..(27): Xaa is C or S
SNITMQIMDENEKVVIGEMSDMVVEGX

SEQ ID NO: 73768 - protein, 32 aa, Artificial Sequence; identical to SEQ ID NO: 23606
  Cyclic GFR-binding peptide
  MOD_RES (2)..(2): Xaa is C or S

SEQ ID NO: 73769 - protein, 34 aa, Artificial Sequence; identical to SEQ ID NO: 23607
  Cyclic GFR-binding peptide
  MOD_RES (5)..(5): Xaa is C or S

SEQ ID NO: 73770 - protein, 25 aa, Artificial Sequence
  Cyclic GFR-binding peptide
LRSVKIAKVVGRKPKVKEVQVMIVR

SEQ ID NO: 73771 - protein, 28 aa, Artificial Sequence
  Cyclic GFR-binding peptide
  MOD_RES (1)..(2): Xaa is C or S
XXAPTKLRSVKVAKVDDSSNVIKEVQVN

SEQ ID NO: 73772 - protein, 27 aa, Artificial Sequence
  Cyclic GFR-binding peptide
  MOD_RES (1)..(2): Xaa is C or S
XXVPQDLRSVKIAKVVGRTPKVKEVQV

SEQ ID NO: 73773 - protein, 25 aa, Artificial Sequence
  Cyclic GFR-binding peptide
LRPVQVRKIDDSSNVIKKATVNMVV

SEQ ID NO: 73774 - protein, 24 aa, Artificial Sequence
  Cyclic GFR-binding peptide
HHSNITVQIMEYVRKKPKLIGEMS

SEQ ID NO: 73775 - protein, 30 aa, Artificial Sequence
  Cyclic GFR-binding peptide
RVHHEPLTVLYYEYVRKKPKLEQLSNRLEE

SEQ ID NO: 73776 - protein, 36 aa, Artificial Sequence; identical to SEQ ID NO: 19444
  Cyclic GFR-binding peptide
  MOD_RES (4)..(5): Xaa is C or S

SEQ ID NO: 73777 - protein, 30 aa, Artificial Sequence; identical to SEQ ID NO: 19445
  Cyclic GFR-binding peptide
  MOD_RES (2)..(3): Xaa is C or S

SEQ ID NO: 73778 - protein, 23 aa, Artificial Sequence
  Cyclic GFR-binding peptide
TELSNITMQIMDEYDKVVIGEMS

SEQ ID NO: 73779 - protein, 33 aa, Artificial Sequence
  Cyclic GFR-binding peptide
  MOD_RES (3)..(4): Xaa is C or S
SPXXVPQDLRSVKIAKVVGRTPKVKEVQVMVVK

SEQ ID NO: 73780 - protein, 31 aa, Artificial Sequence
  Cyclic GFR-binding peptide
  MOD_RES (1)..(2): Xaa is C or S
XXAPTQLRPVQVRKIDDSSNVIKKATVNMVV

SEQ ID NO: 73781 - protein, 40 aa, Artificial Sequence
  Cyclic GFR-binding peptide
  MOD_RES (3)..(40): Xaa is C or S
VKXQPSRVHHEPLTVLYYEYVRKKPKLEQLSNRLEEHLEX

SEQ ID NO: 73782 - protein, 38 aa, Artificial Sequence; identical to SEQ ID NO: 19452
  Cyclic GFR-binding peptide
  MOD_RES (3)..(35)..(37): Xaa is C or S

SEQ ID NO: 73783 - protein, 35 aa, Artificial Sequence
  Cyclic GFR-binding peptide
  MOD_RES (32)..(34): Xaa is C or S
HHEPLPVVYYEYVRKKPKLEQLSNRLEEHLEXAXA

SEQ ID NO: 73784 - protein, 24 aa, Artificial Sequence
  Cyclic GFR-binding peptide
QDLRPVQIRKIIGKTPKIKKATVM

SEQ ID NO: 73785 - protein, 29 aa, Artificial Sequence
  Cyclic GFR-binding peptide
TQLEPLPVVYYDDSSNVIEQLSNNMVVRA

SEQ ID NO: 73786 - protein, 37 aa, Artificial Sequence; identical to SEQ ID NO: 23626
  Cyclic GFR-binding peptide
  MOD_RES (5)..(5): Xaa is C or S

SEQ ID NO: 73787 - protein, 22 aa, Artificial Sequence
  Cyclic GFR-binding peptide
DLRPVQIRKIIGKTPKIKKATV

SEQ ID NO: 73788 - protein, 34 aa, Artificial Sequence; identical to SEQ ID NO: 19463
  Cyclic GFR-binding peptide
  MOD_RES (5)..(6): Xaa is C or S

SEQ ID NO: 73789 - protein, 38 aa, Artificial Sequence
  Cyclic GFR-binding peptide
  MOD_RES (3)..(4)..(35)..(37): Xaa is C or S
APXXVPQALRSVKIAKVVGRKPKVKEVQVMIVRSXKXS

SEQ ID NO: 73790 - protein, 25 aa, Artificial Sequence
  Cyclic GFR-binding peptide
EERPVQMRKIRIKPHQGQHKKATVF

SEQ ID NO: 73791 - protein, 35 aa, Artificial Sequence
  Cyclic GFR-binding peptide
  MOD_RES (5)..(5): Xaa is C or S
EGLEXVPTEEEPLPMVYYRIKPHQGQHEQLSNFLQ

SEQ ID NO: 73792 - protein, 33 aa, Artificial Sequence; identical to SEQ ID NO: 19467
  Cyclic GFR-binding peptide
  MOD_RES (1)..(32): Xaa is C or S

SEQ ID NO: 73793 - protein, 28 aa, Artificial Sequence
  Cyclic GFR-binding peptide
LRSVKVAKVEIVRKKPIFKEVQVTLEDH

SEQ ID NO: 73794 - protein, 31 aa, Artificial Sequence
  Cyclic GFR-binding peptide
  MOD_RES (29)..(31): Xaa is C or S
QALRPVQIRKIVGRKPKVKKATVMIVRSXKX

SEQ ID NO: 73795 - protein, 26 aa, Artificial Sequence
  Cyclic GFR-binding peptide
VPTELEPLPMVYYDENEKVVEQLSND

SEQ ID NO: 73796 - protein, 37 aa, Artificial Sequence
  Cyclic GFR-binding peptide
  MOD_RES (6)..(7): Xaa is C or S
ASAAPXXVPQALSNITIQIMVGRKPKVIGEMSMIVRS

SEQ ID NO: 73797 - protein, 23 aa, Artificial Sequence
  Cyclic GFR-binding peptide
RSVKIAKVVGRTPKVKEVQVMVV

SEQ ID NO: 73798 - protein, 33 aa, Artificial Sequence
  Cyclic GFR-binding peptide
  MOD_RES (6)..(7): Xaa is C or S
TVPKPXXAPTQLSNITVQIMDDSSNVIIGEMSN

SEQ ID NO: 73799 - protein, 27 aa, Artificial Sequence
  Cyclic GFR-binding peptide
  MOD_RES (1)..(1): Xaa is C or S
XAPTQLEPLTVLYYDDSSNVIEQLSNN

SEQ ID NO: 73800 - protein, 30 aa, Artificial Sequence
  Cyclic GFR-binding peptide
  MOD_RES (5)..(5): Xaa is C or S
TKPTXAPTKLRSVKVAKVDDSSNVIKEVQV

SEQ ID NO: 73801 - protein, 26 aa, Artificial Sequence
  Cyclic GFR-binding peptide
LSNITVQIMEIVRKKPIFIGEMSTLE

SEQ ID NO: 73802 - protein, 36 aa, Artificial Sequence
  Cyclic GFR-binding peptide
  MOD_RES (2)..(3)..(34)..(36): Xaa is C or S
PXXVPQDLSNITIQIMVGRTPKVIGEMSMVVKSXKX

SEQ ID NO: 73803 - protein, 37 aa, Artificial Sequence; identical to SEQ ID NO: 19492
  Cyclic GFR-binding peptide
  MOD_RES (6)..(6): Xaa is C or S

SEQ ID NO: 73804 - protein, 26 aa, Artificial Sequence
  Cyclic GFR-binding peptide
APTQLSNITVQIMDDSSNVIIGEMSN

SEQ ID NO: 73805 - protein, 28 aa, Artificial Sequence
  Cyclic GFR-binding peptide
  MOD_RES (2)..(3): Xaa is C or S
PXXAPTKLRPVQVRKIDDSSNVIKKATV

SEQ ID NO: 73806 - protein, 35 aa, Artificial Sequence; identical to SEQ ID NO: 23649
  Cyclic GFR-binding peptide
  MOD_RES (34)..(34): Xaa is C or S

SEQ ID NO: 73807 - protein, 29 aa, Artificial Sequence
  Cyclic GFR-binding peptide
  MOD_RES (1)..(2): Xaa is C or S
XXVPQALSNITIQIMVGRKPKVIGEMSMI

SEQ ID NO: 73808 - protein, 41 aa, Artificial Sequence; identical to SEQ ID NO: 19496
  Cyclic GFR-binding peptide
  MOD_RES (5)..(6)..(38)..(40): Xaa is C or S

SEQ ID NO: 73809 - protein, 36 aa, Artificial Sequence; identical to SEQ ID NO: 23654
  Cyclic GFR-binding peptide
  MOD_RES (5)..(5): Xaa is C or S

SEQ ID NO: 73810 - protein, 28 aa, Artificial Sequence
  Cyclic GFR-binding peptide
  MOD_RES (26)..(28): Xaa is C or S
EPLPIVYYIGKTPKIEQLSNMIVKSXKX

SEQ ID NO: 73811 - protein, 27 aa, Artificial Sequence
  Cyclic GFR-binding peptide
  MOD_RES (1)..(1): Xaa is C or S
XAPTQLRSVKVAKVDDSSNVIKEVQVN

SEQ ID NO: 73812 - protein, 30 aa, Artificial Sequence; identical to SEQ ID NO: 23660
  Cyclic GFR-binding peptide

SEQ ID NO: 73813 - protein, 33 aa, Artificial Sequence; identical to SEQ ID NO: 19501
  Cyclic GFR-binding peptide
  MOD_RES (31)..(33): Xaa is C or S

SEQ ID NO: 73814 - protein, 24 aa, Artificial Sequence
  Cyclic GFR-binding peptide
SNITIQIMIGKTPKIIGEMSMIVK

SEQ ID NO: 73815 - protein, 35 aa, Artificial Sequence
  Cyclic GFR-binding peptide
  MOD_RES (6)..(7): Xaa is C or S
TVPKPXXAPTQLRPVQVRKIDDSSNVIKKATVNMV

SEQ ID NO: 73816 - protein, 40 aa, Artificial Sequence; identical to SEQ ID NO: 19504
  Cyclic GFR-binding peptide
  MOD_RES (6)..(7)..(39): Xaa is C or S

SEQ ID NO: 73817 - protein, 34 aa, Artificial Sequence
  Cyclic GFR-binding peptide
  MOD_RES (1)..(2)..(33): Xaa is C or S
XXVPQDLSNITIQIMVGRTPKVIGEMSMVVKSXK

SEQ ID NO: 73818 - protein, 28 aa, Artificial Sequence
  Cyclic GFR-binding peptide
  MOD_RES (1)..(1): Xaa is C or S
XVPQDLEPLPIVYYVGRTPKVEQLSNMV

SEQ ID NO: 73819 - protein, 24 aa, Artificial Sequence
  Cyclic GFR-binding peptide
QLRPVQVRKIDDSSNVIKKATVNM

SEQ ID NO: 73820 - protein, 36 aa, Artificial Sequence
  Cyclic GFR-binding peptide
  MOD_RES (1)..(2)..(33)..(35): Xaa is C or S
XXVPQALRSVKIAKVVGRKPKVKEVQVMIVRSXKXS

SEQ ID NO: 73821 - protein, 27 aa, Artificial Sequence
  Cyclic GFR-binding peptide
RVHHEPLPVVYYEYVRKKPKLEQLSNR

SEQ ID NO: 73822 - protein, 29 aa, Artificial Sequence
  Cyclic GFR-binding peptide
  MOD_RES (29)..(29): Xaa is C or S
EPLTMLYYRIKPHQGQHEQLSNFLQHNKX

SEQ ID NO: 73823 - protein, 39 aa, Artificial Sequence
  Cyclic GFR-binding peptide
  MOD_RES (5)..(6)..(37)..(39): Xaa is C or S
SAAPXXVPQALRSVKIAKVVGRKPKVKEVQVMIVRSXKX

SEQ ID NO: 73824 - protein, 28 aa, Artificial Sequence
  Cyclic GFR-binding peptide
PTEERSVKMAKVRIKPHQGQHKEVQVFL

SEQ ID NO: 73825 - protein, 36 aa, Artificial Sequence
  Cyclic GFR-binding peptide
  MOD_RES (6)..(7): Xaa is C or S
ASAAPXXVPQALRPVQIRKIVGRKPKVKKATVMIVR

SEQ ID NO: 73826 - protein, 24 aa, Artificial Sequence
  Cyclic GFR-binding peptide
LEPLTMLYYDEYDKVVEQLSNEMV

SEQ ID NO: 73827 - protein, 29 aa, Artificial Sequence
  Cyclic GFR-binding peptide
  MOD_RES (1)..(1): Xaa is C or S
XVPQALSNITIQIMVGRKPKVIGEMSMIV

SEQ ID NO: 73828 - protein, 29 aa, Artificial Sequence
  Cyclic GFR-binding peptide
  MOD_RES (27)..(29): Xaa is C or S
LRSVKIAKVIGKTPKIKEVQVMIVKSXKX

SEQ ID NO: 73829 - protein, 36 aa, Artificial Sequence
  Cyclic GFR-binding peptide
  MOD_RES (5)..(6): Xaa is C or S
SAAPXXVPQALSNITIQIMVGRKPKVIGEMSMIVRS

SEQ ID NO: 73830 - protein, 24 aa, Artificial Sequence
  Cyclic GFR-binding peptide
RSVKVAKVEIVRKKPIFKEVQVTL

SEQ ID NO: 73831 - protein, 32 aa, Artificial Sequence
  Cyclic GFR-binding peptide
  MOD_RES (30)..(32): Xaa is C or S
TELRPVQMRKIDENEKVVKKATVDMVVEGXGX

SEQ ID NO: 73832 - protein, 39 aa, Artificial Sequence
  Cyclic GFR-binding peptide
  MOD_RES (5)..(6)..(38): Xaa is C or S
VPKPXXAPTQLRSVKVAKVDDSSNVIKEVQVNMVVRAXG

SEQ ID NO: 73833 - protein, 30 aa, Artificial Sequence; identical to SEQ ID NO: 23681
  Cyclic GFR-binding peptide

SEQ ID NO: 73834 - protein, 29 aa, Artificial Sequence
  Cyclic GFR-binding peptide
  MOD_RES (2)..(2): Xaa is C or S
TXAPTKLEPLPVVYYDDSSNVIEQLSNNM

SEQ ID NO: 73835 - protein, 29 aa, Artificial Sequence
  Cyclic GFR-binding peptide
APTQLEPLTVLYYDDSSNVIEQLSNNMVV

SEQ ID NO: 73836 - protein, 37 aa, Artificial Sequence
  Cyclic GFR-binding peptide
  MOD_RES (2)..(36): Xaa is C or S
EXVPTEEEPLPMVYYRIKPHQGQHEQLSNFLQHNKXE

SEQ ID NO: 73837 - protein, 30 aa, Artificial Sequence; identical to SEQ ID NO: 23687
  Cyclic GFR-binding peptide
  MOD_RES (3)..(3): Xaa is C or S

SEQ ID NO: 73838 - protein, 30 aa, Artificial Sequence; identical to SEQ ID NO: 23691
  Cyclic GFR-binding peptide

SEQ ID NO: 73839 - protein, 32 aa, Artificial Sequence
  Cyclic GFR-binding peptide
  MOD_RES (30)..(32): Xaa is C or S
PQDLRPVQIRKIVGRTPKVKKATVMVVKSXKX

SEQ ID NO: 73840 - protein, 28 aa, Artificial Sequence
  Cyclic GFR-binding peptide
TEEEPLPMVYYRIKPHQGQHEQLSNFLQ

SEQ ID NO: 73841 - protein, 30 aa, Artificial Sequence
  Cyclic GFR-binding peptide
  MOD_RES (30)..(30): Xaa is C or S
PQALRSVKIAKVVGRKPKVKEVQVMIVRSX

SEQ ID NO: 73842 - protein, 24 aa, Artificial Sequence
  Cyclic GFR-binding peptide
SQDLSNITIQIMIGKTPKIIGEMS

SEQ ID NO: 73843 - protein, 29 aa, Artificial Sequence
  Cyclic GFR-binding peptide
EPLTVLYYEYVRKKPKLEQLSNRLEEHLE

SEQ ID NO: 73844 - protein, 34 aa, Artificial Sequence
  Cyclic GFR-binding peptide
  MOD_RES (1)..(33): Xaa is C or S
XVPTELSNITMQIMDEYDKVVIGEMSEMVVEGXG

SEQ ID NO: 73845 - protein, 37 aa, Artificial Sequence
  Cyclic GFR-binding peptide
  MOD_RES (3)..(4)..(36): Xaa is C or S
KPXXAPTKLRSVKVAKVDDSSNVIKEVQVNMVVRSXG

SEQ ID NO: 73846 - protein, 32 aa, Artificial Sequence; identical to SEQ ID NO: 19549
  Cyclic GFR-binding peptide
  MOD_RES (3)..(4): Xaa is C or S

SEQ ID NO: 73847 - protein, 34 aa, Artificial Sequence
  Cyclic GFR-binding peptide
QPSRVHHEPLTVLYYEYVRKKPKLEQLSNRLEEH

SEQ ID NO: 73848 - protein, 31 aa, Artificial Sequence; identical to SEQ ID NO: 19550
  Cyclic GFR-binding peptide
  MOD_RES (6)..(6): Xaa is C or S

SEQ ID NO: 73849 - protein, 32 aa, Artificial Sequence
  Cyclic GFR-binding peptide
  MOD_RES (4)..(4): Xaa is C or S
KPTXAPTKLSNITVQIMDDSSNVIIGEMSNMV

SEQ ID NO: 73850 - protein, 30 aa, Artificial Sequence; identical to SEQ ID NO: 19552
  Cyclic GFR-binding peptide
  MOD_RES (28)..(30): Xaa is C or S

SEQ ID NO: 73851 - protein, 34 aa, Artificial Sequence; identical to SEQ ID NO: 23700
  Cyclic GFR-binding peptide

SEQ ID NO: 73852 - protein, 30 aa, Artificial Sequence
  Cyclic GFR-binding peptide
  MOD_RES (3)..(4): Xaa is C or S
KAXXVPTELSNITMQIMDENEKVVIGEMSD

SEQ ID NO: 73853 - protein, 39 aa, Artificial Sequence
  Cyclic GFR-binding peptide
  MOD_RES (6)..(7)..(39): Xaa is C or S
KIPKAXXVPTELSNITMQIMDENEKVVIGEMSDMVVEGX

SEQ ID NO: 73854 - protein, 37 aa, Artificial Sequence; identical to SEQ ID NO: 23708
  Cyclic GFR-binding peptide
  MOD_RES (5)..(5): Xaa is C or S

SEQ ID NO: 73855 - protein, 32 aa, Artificial Sequence
  Cyclic GFR-binding peptide
  MOD_RES (32)..(32): Xaa is C or S
APTQLRPVQVRKIDDSSNVIKKATVNMVVRAX

SEQ ID NO: 73856 - protein, 33 aa, Artificial Sequence
  Cyclic GFR-binding peptide
PTQVQLEPLPVVYYEIVRKKPIFEQLSNTLEDH

SEQ ID NO: 73857 - protein, 34 aa, Artificial Sequence
  Cyclic GFR-binding peptide
  MOD_RES (1)..(2)..(33): Xaa is C or S
XXVPQALRSVKIAKVVGRKPKVKEVQVMIVRSXK

SEQ ID NO: 73858 - protein, 33 aa, Artificial Sequence; identical to SEQ ID NO: 19570
  Cyclic GFR-binding peptide
  MOD_RES (1)..(2)..(33): Xaa is C or S

SEQ ID NO: 73859 - protein, 37 aa, Artificial Sequence
  Cyclic GFR-binding peptide
  MOD_RES (1)..(1): Xaa is C or S
XRPTQVQLEPLPVVYYEIVRKKPIFEQLSNTLEDHLA

SEQ ID NO: 73860 - protein, 27 aa, Artificial Sequence
  Cyclic GFR-binding peptide
APTQLRPVQVRKIDDSSNVIKKATVNM

SEQ ID NO: 73861 - protein, 33 aa, Artificial Sequence; identical to SEQ ID NO: 19571
  Cyclic GFR-binding peptide
  MOD_RES (2)..(3): Xaa is C or S

SEQ ID NO: 73862 - protein, 32 aa, Artificial Sequence
  Cyclic GFR-binding peptide
  MOD_RES (1)..(1): Xaa is C or S
XQPSRVHHEPLTVLYYEYVRKKPKLEQLSNRL

SEQ ID NO: 73863 - protein, 25 aa, Artificial Sequence
  Cyclic GFR-binding peptide
VPTELRSVKMAKVDENEKVVKEVQV

SEQ ID NO: 73864 - protein, 30 aa, Artificial Sequence; identical to SEQ ID NO: 19579
  Cyclic GFR-binding peptide
  MOD_RES (1)..(2): Xaa is C or S

SEQ ID NO: 73865 - protein, 37 aa, Artificial Sequence
  Cyclic GFR-binding peptide
  MOD_RES (6)..(7): Xaa is C or S
ASAAPXXVPQALRSVKIAKVVGRKPKVKEVQVMIVRS

SEQ ID NO: 73866 - protein, 38 aa, Artificial Sequence; identical to SEQ ID NO: 19581
  Cyclic GFR-binding peptide
  MOD_RES (5)..(6)..(38): Xaa is C or S

SEQ ID NO: 73867 - protein, 28 aa, Artificial Sequence
  Cyclic GFR-binding peptide
  MOD_RES (27)..(27): Xaa is C or S
LRPVQIRKIVGRKPKVKKATVMIVRSXK

SEQ ID NO: 73868 - protein, 35 aa, Artificial Sequence; identical to SEQ ID NO: 19583
  Cyclic GFR-binding peptide
  MOD_RES (6)..(7): Xaa is C or S

SEQ ID NO: 73869 - protein, 35 aa, Artificial Sequence
  Cyclic GFR-binding peptide
  MOD_RES (2)..(3)..(34): Xaa is C or S
PXXVPQDLRPVQIRKIVGRTPKVKKATVMVVKSXK

SEQ ID NO: 73870 - protein, 36 aa, Artificial Sequence
  Cyclic GFR-binding peptide
  MOD_RES (1)..(33)..(35): Xaa is C or S
XVPTELRSVKMAKVDEYDKVVKEVQVEMVVEGXGXR

SEQ ID NO: 73871 - protein, 23 aa, Artificial Sequence
  Cyclic GFR-binding peptide
TQLRPVQVRKIDDSSNVIKKATV

SEQ ID NO: 73872 - protein, 27 aa, Artificial Sequence
  Cyclic GFR-binding peptide
  MOD_RES (26)..(26): Xaa is C or S
RSVKIAKVVGRTPKVKEVQVMVVKSXK

SEQ ID NO: 73873 - protein, 27 aa, Artificial Sequence
  Cyclic GFR-binding peptide
  MOD_RES (27)..(27): Xaa is C or S
EPLTMLYYDEYDKVVEQLSNEMVVEGX

SEQ ID NO: 73874 - protein, 37 aa, Artificial Sequence
  Cyclic GFR-binding peptide
  MOD_RES (5)..(6): Xaa is C or S
VPKPXXAPTKLRPVQVRKIDDSSNVIKKATVNMVVRS

SEQ ID NO: 73875 - protein, 22 aa, Artificial Sequence
  Cyclic GFR-binding peptide
EPLPVVYYDDSSNVIEQLSNNM

SEQ ID NO: 73876 - protein, 36 aa, Artificial Sequence
  Cyclic GFR-binding peptide
  MOD_RES (3)..(35): Xaa is C or S
PTXAPTKLRSVKVAKVDDSSNVIKEVQVNMVVRSXG

SEQ ID NO: 73877 - protein, 30 aa, Artificial Sequence; identical to SEQ ID NO: 23726
  Cyclic GFR-binding peptide
  MOD_RES (30)..(30): Xaa is C or S

SEQ ID NO: 73878 - protein, 24 aa, Artificial Sequence
  Cyclic GFR-binding peptide
PQDLRSVKIAKVVGRTPKVKEVQV

SEQ ID NO: 73879 - protein, 33 aa, Artificial Sequence; identical to SEQ ID NO: 19596
  Cyclic GFR-binding peptide
  MOD_RES (1)..(32): Xaa is C or S

SEQ ID NO: 73880 - protein, 30 aa, Artificial Sequence
  Cyclic GFR-binding peptide
  MOD_RES (2)..(2): Xaa is C or S
TXAPTKLSNITVQIMDDSSNVIIGEMSNMV

SEQ ID NO: 73881 - protein, 41 aa, Artificial Sequence; identical to SEQ ID NO: 19601
  Cyclic GFR-binding peptide
  MOD_RES (5)..(6)..(38)..(40): Xaa is C or S

SEQ ID NO: 73882 - protein, 34 aa, Artificial Sequence; identical to SEQ ID NO: 19602
  Cyclic GFR-binding peptide
  MOD_RES (5)..(6): Xaa is C or S

SEQ ID NO: 73883 - protein, 37 aa, Artificial Sequence
  Cyclic GFR-binding peptide
  MOD_RES (5)..(6): Xaa is C or S
IPKAXXVPTELRSVKMAKVDEYDKVVKEVQVEMVVEG

SEQ ID NO: 73884 - protein, 39 aa, Artificial Sequence
  Cyclic GFR-binding peptide
  MOD_RES (5)..(6)..(38): Xaa is C or S
IPKAXXVPTELRPVQMRKIDENEKVVKKATVDMVVEGXG

SEQ ID NO: 73885 - protein, 36 aa, Artificial Sequence; identical to SEQ ID NO: 19609
  Cyclic GFR-binding peptide
  MOD_RES (5)..(6): Xaa is C or S

SEQ ID NO: 73886 - protein, 28 aa, Artificial Sequence
  Cyclic GFR-binding peptide
  MOD_RES (1)..(2): Xaa is C or S
XXAPTQLEPLPVVYYDDSSNVIEQLSNN

SEQ ID NO: 73887 - protein, 36 aa, Artificial Sequence
  Cyclic GFR-binding peptide
  MOD_RES (1)..(1): Xaa is C or S
XQPSRVHHEPLPVVYYEYVRKKPKLEQLSNRLEEHL

SEQ ID NO: 73888 - protein, 38 aa, Artificial Sequence
  Cyclic GFR-binding peptide
  MOD_RES (3)..(3): Xaa is C or S
VQXRPTQVQLEPLPVVYYEIVRKKPIFEQLSNTLEDHL

SEQ ID NO: 73889 - protein, 35 aa, Artificial Sequence
  Cyclic GFR-binding peptide
QPSRVHHEPLPVVYYEYVRKKPKLEQLSNRLEEHL

SEQ ID NO: 73890 - protein, 39 aa, Artificial Sequence; identical to SEQ ID NO: 23734
  Cyclic GFR-binding peptide
  MOD_RES (7)..(7): Xaa is C or S

SEQ ID NO: 73891 - protein, 27 aa, Artificial Sequence
  Cyclic GFR-binding peptide
DLEPLPIVYYVGRTPKVEQLSNMVVKS

SEQ ID NO: 73892 - protein, 33 aa, Artificial Sequence
  Cyclic GFR-binding peptide
  MOD_RES (1)..(33): Xaa is C or S
XVPTELRPVQMRKIDEYDKVVKKATVEMVVEGX

SEQ ID NO: 73893 - protein, 27 aa, Artificial Sequence
  Cyclic GFR-binding peptide
VSQDLRPVQIRKIIGKTPKIKKATVMI

SEQ ID NO: 73894 - protein, 30 aa, Artificial Sequence
  Cyclic GFR-binding peptide
  MOD_RES (27)..(29): Xaa is C or S
RPVQMRKIDENEKVVKKATVDMVVEGXGXR

SEQ ID NO: 73895 - protein, 33 aa, Artificial Sequence
  Cyclic GFR-binding peptide
  MOD_RES (4)..(5): Xaa is C or S
ASPXXVSQDLRPVQIRKIIGKTPKIKKATVMIV

SEQ ID NO: 73896 - protein, 31 aa, Artificial Sequence
  Cyclic GFR-binding peptide
  MOD_RES (1)..(2): Xaa is C or S
XXVPTELSNITMQIMDEYDKVVIGEMSEMVV

SEQ ID NO: 73897 - protein, 34 aa, Artificial Sequence; identical to SEQ ID NO: 19624
  Cyclic GFR-binding peptide
  MOD_RES (1)..(33): Xaa is C or S

SEQ ID NO: 73898 - protein, 36 aa, Artificial Sequence
  Cyclic GFR-binding peptide
  MOD_RES (4)..(5): Xaa is C or S
PKPXXAPTQLSNITVQIMDDSSNVIIGEMSNMVVRA

SEQ ID NO: 73899 - protein, 26 aa, Artificial Sequence
  Cyclic GFR-binding peptide
  MOD_RES (1)..(1): Xaa is C or S
XAPTQLSNITVQIMDDSSNVIIGEMS

SEQ ID NO: 73900 - protein, 33 aa, Artificial Sequence; identical to SEQ ID NO: 23749
  Cyclic GFR-binding peptide
  MOD_RES (32)..(32): Xaa is C or S

SEQ ID NO: 73901 - protein, 29 aa, Artificial Sequence
  Cyclic GFR-binding peptide
  MOD_RES (1)..(1): Xaa is C or S
XAPTKLEPLTVLYYDDSSNVIEQLSNNMV

SEQ ID NO: 73902 - protein, 34 aa, Artificial Sequence; identical to SEQ ID NO: 23753
  Cyclic GFR-binding peptide
  MOD_RES (33)..(33): Xaa is C or S

SEQ ID NO: 73903 - protein, 34 aa, Artificial Sequence; identical to SEQ ID NO: 19637
  Cyclic GFR-binding peptide
  MOD_RES (3)..(4): Xaa is C or S

SEQ ID NO: 73904 - protein, 35 aa, Artificial Sequence; identical to SEQ ID NO: 23756
  Cyclic GFR-binding peptide
  MOD_RES (5)..(5): Xaa is C or S

SEQ ID NO: 73905 - protein, 33 aa, Artificial Sequence; identical to SEQ ID NO: 23757
  Cyclic GFR-binding peptide
  MOD_RES (3)..(3): Xaa is C or S

SEQ ID NO: 73906 - protein, 36 aa, Artificial Sequence
  Cyclic GFR-binding peptide
  MOD_RES (2)..(3)..(34)..(36): Xaa is C or S
PXXVPQDLRPVQIRKIVGRTPKVKKATVMVVKSXKX

SEQ ID NO: 73907 - protein, 31 aa, Artificial Sequence; identical to SEQ ID NO: 19638
  Cyclic GFR-binding peptide
  MOD_RES (1)..(2): Xaa is C or S

SEQ ID NO: 73908 - protein, 30 aa, Artificial Sequence
  Cyclic GFR-binding peptide
  MOD_RES (27)..(29): Xaa is C or S
RSVKMAKVDEYDKVVKEVQVEMVVEGXGXR

SEQ ID NO: 73909 - protein, 31 aa, Artificial Sequence
  Cyclic GFR-binding peptide
  MOD_RES (31)..(31): Xaa is C or S
PTELRPVQMRKIDENEKVVKKATVDMVVEGX

SEQ ID NO: 73910 - protein, 32 aa, Artificial Sequence
  Cyclic GFR-binding peptide
  MOD_RES (4)..(4): Xaa is C or S
GLEXVPTEEEPLTMLYYRIKPHQGQHEQLSNF

SEQ ID NO: 73911 - protein, 27 aa, Artificial Sequence
  Cyclic GFR-binding peptide
  MOD_RES (1)..(2): Xaa is C or S
XXVPTELSNITMQIMDENEKVVIGEMS

SEQ ID NO: 73912 - protein, 33 aa, Artificial Sequence; identical to SEQ ID NO: 19640
  Cyclic GFR-binding peptide
  MOD_RES (6)..(7): Xaa is C or S

SEQ ID NO: 73913 - protein, 25 aa, Artificial Sequence
  Cyclic GFR-binding peptide
PTQLEPLTVLYYDDSSNVIEQLSNN

SEQ ID NO: 73914 - protein, 26 aa, Artificial Sequence
  Cyclic GFR-binding peptide
VQLEPLTVLYYEIVRKKPIFEQLSNT

SEQ ID NO: 73915 - protein, 32 aa, Artificial Sequence
  Cyclic GFR-binding peptide
  MOD_RES (2)..(3): Xaa is C or S
PXXAPTKLSNITVQIMDDSSNVIIGEMSNMVV

SEQ ID NO: 73916 - protein, 24 aa, Artificial Sequence
  Cyclic GFR-binding peptide
RPVQMRKIRIKPHQGQHKKATVFL

SEQ ID NO: 73917 - protein, 34 aa, Artificial Sequence; identical to SEQ ID NO: 19644
  Cyclic GFR-binding peptide
  MOD_RES (1)..(2)..(33): Xaa is C or S

SEQ ID NO: 73918 - protein, 36 aa, Artificial Sequence
  Cyclic GFR-binding peptide
  MOD_RES (5)..(5): Xaa is C or S
RNVQXRPTQVQLEPLTVLYYEIVRKKPIFEQLSNTL

SEQ ID NO: 73919 - protein, 34 aa, Artificial Sequence
  Cyclic GFR-binding peptide
  MOD_RES (1)..(1): Xaa is C or S
XQPSRVHHEPLTVLYYEYVRKKPKLEQLSNRLEE

SEQ ID NO: 73920 - protein, 28 aa, Artificial Sequence
  Cyclic GFR-binding peptide
TQLRPVQVRKIDDSSNVIKKATVNMVVR

SEQ ID NO: 73921 - protein, 26 aa, Artificial Sequence
  Cyclic GFR-binding peptide
RSVKMAKVRIKPHQGQHKEVQVFLQH

SEQ ID NO: 73922 - protein, 28 aa, Artificial Sequence
  Cyclic GFR-binding peptide
APTQLEPLTVLYYDDSSNVIEQLSNNMV

SEQ ID NO: 73923 - protein, 36 aa, Artificial Sequence
  Cyclic GFR-binding peptide
  MOD_RES (1)..(33)..(35): Xaa is C or S
XVPTELRPVQMRKIDENEKVVKKATVDMVVEGXGXR

SEQ ID NO: 73924 - protein, 23 aa, Artificial Sequence
  Cyclic GFR-binding peptide
SNITIQIMVGRTPKVIGEMSMVV

SEQ ID NO: 73925 - protein, 32 aa, Artificial Sequence; identical to SEQ ID NO: 19666
  Cyclic GFR-binding peptide
  MOD_RES (4)..(5): Xaa is C or S

SEQ ID NO: 73926 - protein, 32 aa, Artificial Sequence
  Cyclic GFR-binding peptide
  MOD_RES (3)..(4): Xaa is C or S
KPXXAPTKLRSVKVAKVDDSSNVIKEVQVNMV

SEQ ID NO: 73927 - protein, 31 aa, Artificial Sequence; identical to SEQ ID NO: 23788
  Cyclic GFR-binding peptide

SEQ ID NO: 73928 - protein, 26 aa, Artificial Sequence
  Cyclic GFR-binding peptide
APTQLRSVKVAKVDDSSNVIKEVQVN

SEQ ID NO: 73929 - protein, 31 aa, Artificial Sequence
  Cyclic GFR-binding peptide
  MOD_RES (28)..(30): Xaa is C or S
ALSNITIQIMVGRKPKVIGEMSMIVRSXKXS

SEQ ID NO: 73930 - protein, 36 aa, Artificial Sequence
  Cyclic GFR-binding peptide
  MOD_RES (6)..(7): Xaa is C or S
KIPKAXXVPTELSNITMQIMDENEKVVIGEMSDMVV

SEQ ID NO: 73931 - protein, 29 aa, Artificial Sequence
  Cyclic GFR-binding peptide
  MOD_RES (1)..(2): Xaa is C or S
XXVPQDLEPLPIVYYVGRTPKVEQLSNMV

SEQ ID NO: 73932 - protein, 33 aa, Artificial Sequence; identical to SEQ ID NO: 23792
  Cyclic GFR-binding peptide
  MOD_RES (31)..(33): Xaa is C or S

SEQ ID NO: 73933 - protein, 33 aa, Artificial Sequence
  Cyclic GFR-binding peptide
PSRVHHEPLPVVYYEYVRKKPKLEQLSNRLEEH

SEQ ID NO: 73934 - protein, 30 aa, Artificial Sequence
  Cyclic GFR-binding peptide
  MOD_RES (29)..(29): Xaa is C or S
EPLTMLYYRIKPHQGQHEQLSNFLQHNKXE

SEQ ID NO: 73935 - protein, 31 aa, Artificial Sequence; identical to SEQ ID NO: 19679
  Cyclic GFR-binding peptide
  MOD_RES (1)..(2): Xaa is C or S

SEQ ID NO: 73936 - protein, 36 aa, Artificial Sequence
  Cyclic GFR-binding peptide
  MOD_RES (2)..(36): Xaa is C or S
EXVPTEEEPLPMVYYRIKPHQGQHEQLSNFLQHNKX

SEQ ID NO: 73937 - protein, 32 aa, Artificial Sequence
  Cyclic GFR-binding peptide
  MOD_RES (1)..(32): Xaa is C or S
XVPQDLRPVQIRKIVGRTPKVKKATVMVVKSX

SEQ ID NO: 73938 - protein, 33 aa, Artificial Sequence
  Cyclic GFR-binding peptide
  MOD_RES (2)..(3): Xaa is C or S
PXXAPTKLSNITVQIMDDSSNVIIGEMSNMVVR

SEQ ID NO: 73939 - protein, 33 aa, Artificial Sequence
  Cyclic GFR-binding peptide
SRVHHEPLTVLYYEYVRKKPKLEQLSNRLEEHL

SEQ ID NO: 73940 - protein, 34 aa, Artificial Sequence
  Cyclic GFR-binding peptide
  MOD_RES (1)..(33): Xaa is C or S
XAPTKLRPVQVRKIDDSSNVIKKATVNMVVRSXG

SEQ ID NO: 73941 - protein, 29 aa, Artificial Sequence
  Cyclic GFR-binding peptide
  MOD_RES (26)..(28): Xaa is C or S
SNITIQIMVGRTPKVIGEMSMVVKSXKXS

SEQ ID NO: 73942 - protein, 29 aa, Artificial Sequence
  Cyclic GFR-binding peptide
APTKLRSVKVAKVDDSSNVIKEVQVNMVV

SEQ ID NO: 73943 - protein, 26 aa, Artificial Sequence
  Cyclic GFR-binding peptide
DLSNITIQIMVGRTPKVIGEMSMVVK

SEQ ID NO: 73944 - protein, 41 aa, Artificial Sequence
  Cyclic GFR-binding peptide
  MOD_RES (5)..(6)..(38)..(40): Xaa is C or S
IPKAXXVPTELRPVQMRKIDENEKVVKKATVDMVVEGXGXR

SEQ ID NO: 73945 - protein, 31 aa, Artificial Sequence
  Cyclic GFR-binding peptide
  MOD_RES (28)..(30): Xaa is C or S
LRSVKMAKVDENEKVVKEVQVDMVVEGXGXR

SEQ ID NO: 73946 - protein, 29 aa, Artificial Sequence
  Cyclic GFR-binding peptide
  MOD_RES (2)..(2): Xaa is C or S
EXVPTEERPVQMRKIRIKPHQGQHKKATV

SEQ ID NO: 73947 - protein, 23 aa, Artificial Sequence
  Cyclic GFR-binding peptide
LEPLPVVYYEIVRKKPIFEQLSN

SEQ ID NO: 73948 - protein, 41 aa, Artificial Sequence
  Cyclic GFR-binding peptide
  MOD_RES (5)..(6)..(38)..(40): Xaa is C or S
VPKPXXAPTQLRPVQVRKIDDSSNVIKKATVNMVVRAXGXH

SEQ ID NO: 73949 - protein, 37 aa, Artificial Sequence; identical to SEQ ID NO: 19693
  Cyclic GFR-binding peptide
  MOD_RES (6)..(7): Xaa is C or S

SEQ ID NO: 73950 - protein, 36 aa, Artificial Sequence
  Cyclic GFR-binding peptide
  MOD_RES (3)..(4)..(35): Xaa is C or S
APXXVPQALSNITIQIMVGRKPKVIGEMSMIVRSXK

SEQ ID NO: 73951 - protein, 35 aa, Artificial Sequence
  Cyclic GFR-binding peptide
  MOD_RES (4)..(5): Xaa is C or S
PKPXXAPTQLRSVKVAKVDDSSNVIKEVQVNMVVR

SEQ ID NO: 73952 - protein, 42 aa, Artificial Sequence; identical to SEQ ID NO: 23808
  Cyclic GFR-binding peptide
  MOD_RES (7)..(41): Xaa is C or S

SEQ ID NO: 73953 - protein, 22 aa, Artificial Sequence
  Cyclic GFR-binding peptide
LEPLPIVYYVGRTPKVEQLSNM

SEQ ID NO: 73954 - protein, 31 aa, Artificial Sequence; identical to SEQ ID NO: 19700
  Cyclic GFR-binding peptide
  MOD_RES (31)..(31): Xaa is C or S

SEQ ID NO: 73955 - protein, 32 aa, Artificial Sequence; identical to SEQ ID NO: 19702
  Cyclic GFR-binding peptide
  MOD_RES (2)..(3): Xaa is C or S

SEQ ID NO: 73956 - protein, 34 aa, Artificial Sequence; identical to SEQ ID NO: 23811
  Cyclic GFR-binding peptide
  MOD_RES (4)..(4): Xaa is C or S

SEQ ID NO: 73957 - protein, 38 aa, Artificial Sequence; identical to SEQ ID NO: 23813
  Cyclic GFR-binding peptide
  MOD_RES (36)..(38): Xaa is C or S

SEQ ID NO: 73958 - protein, 27 aa, Artificial Sequence
  Cyclic GFR-binding peptide
PQALRPVQIRKIVGRKPKVKKATVMIV

SEQ ID NO: 73959 - protein, 36 aa, Artificial Sequence
  Cyclic GFR-binding peptide
  MOD_RES (4)..(5): Xaa is C or S
PKPXXAPTQLRPVQVRKIDDSSNVIKKATVNMVVRA

SEQ ID NO: 73960 - protein, 32 aa, Artificial Sequence; identical to SEQ ID NO: 19707
  Cyclic GFR-binding peptide
  MOD_RES (7)..(7): Xaa is C or S

SEQ ID NO: 73961 - protein, 38 aa, Artificial Sequence
  Cyclic GFR-binding peptide
  MOD_RES (3)..(4)..(36)..(38): Xaa is C or S
KAXXVPTELSNITMQIMDENEKVVIGEMSDMVVEGXGX

SEQ ID NO: 73962 - protein, 27 aa, Artificial Sequence
  Cyclic GFR-binding peptide
SRVHHEPLPVVYYEYVRKKPKLEQLSN

SEQ ID NO: 73963 - protein, 34 aa, Artificial Sequence
  Cyclic GFR-binding peptide
  MOD_RES (3)..(4): Xaa is C or S
KAXXVPTELSNITMQIMDENEKVVIGEMSDMVVE

SEQ ID NO: 73964 - protein, 39 aa, Artificial Sequence; identical to SEQ ID NO: 23819
  Cyclic GFR-binding peptide
  MOD_RES (36)..(38): Xaa is C or S

SEQ ID NO: 73965 - protein, 36 aa, Artificial Sequence
  Cyclic GFR-binding peptide
  MOD_RES (2)..(3)..(34)..(36): Xaa is C or S
PXXVSQDLRSVKIAKVIGKTPKIKEVQVMIVKSXKX

SEQ ID NO: 73966 - protein, 44 aa, Artificial Sequence
  Cyclic GFR-binding peptide
  MOD_RES (7)..(41)..(43): Xaa is C or S
NDEGLEXVPTEEEPLTMLYYRIKPHQGQHEQLSNFLQHNKXEXR

SEQ ID NO: 73967 - protein, 36 aa, Artificial Sequence
  Cyclic GFR-binding peptide
  MOD_RES (2)..(3)..(34)..(36): Xaa is C or S
PXXVPQALRSVKIAKVVGRKPKVKEVQVMIVRSXKX

SEQ ID NO: 73968 - protein, 39 aa, Artificial Sequence; identical to SEQ ID NO: 23825
  Cyclic GFR-binding peptide
  MOD_RES (5)..(39): Xaa is C or S

SEQ ID NO: 73969 - protein, 38 aa, Artificial Sequence
  Cyclic GFR-binding peptide
  MOD_RES (6)..(7): Xaa is C or S
TVPKPXXAPTQLRSVKVAKVDDSSNVIKEVQVNMVVRA

SEQ ID NO: 73970 - protein, 36 aa, Artificial Sequence; identical to SEQ ID NO: 19730
  Cyclic GFR-binding peptide
  MOD_RES (3)..(4)..(36): Xaa is C or S

SEQ ID NO: 73971 - protein, 30 aa, Artificial Sequence
  Cyclic GFR-binding peptide
  MOD_RES (1)..(1): Xaa is C or S
XVPTELRPVQMRKIDEYDKVVKKATVEMVV

SEQ ID NO: 73972 - protein, 27 aa, Artificial Sequence
  Cyclic GFR-binding peptide
LRSVKVAKVEIVRKKPIFKEVQVTLED

SEQ ID NO: 73973 - protein, 35 aa, Artificial Sequence; identical to SEQ ID NO: 19735
  Cyclic GFR-binding peptide
  MOD_RES (6)..(7): Xaa is C or S

SEQ ID NO: 73974 - protein, 38 aa, Artificial Sequence; identical to SEQ ID NO: 23833
  Cyclic GFR-binding peptide
  MOD_RES (2)..(36)..(38): Xaa is C or S

SEQ ID NO: 73975 - protein, 28 aa, Artificial Sequence
  Cyclic GFR-binding peptide
EPLPMVYYRIKPHQGQHEQLSNFLQHNK

SEQ ID NO: 73976 - protein, 24 aa, Artificial Sequence
  Cyclic GFR-binding peptide
ELRSVKMAKVDEYDKVVKEVQVEM

SEQ ID NO: 73977 - protein, 33 aa, Artificial Sequence
  Cyclic GFR-binding peptide
  MOD_RES (4)..(4): Xaa is C or S
NVQXRPTQVQLEPLPVVYYEIVRKKPIFEQLSN

SEQ ID NO: 73978 - protein, 39 aa, Artificial Sequence; identical to SEQ ID NO: 19747
  Cyclic GFR-binding peptide
  MOD_RES (4)..(5)..(37)..(39): Xaa is C or S

SEQ ID NO: 73979 - protein, 38 aa, Artificial Sequence; identical to SEQ ID NO: 23843
  Cyclic GFR-binding peptide
  MOD_RES (35)..(37): Xaa is C or S

SEQ ID NO: 73980 - protein, 32 aa, Artificial Sequence
  Cyclic GFR-binding peptide
  MOD_RES (1)..(2): Xaa is C or S
XXAPTKLSNITVQIMDDSSNVIIGEMSNMVVR

SEQ ID NO: 73981 - protein, 29 aa, Artificial Sequence
  Cyclic GFR-binding peptide
QLSNITVQIMEIVRKKPIFIGEMSTLEDH

SEQ ID NO: 73982 - protein, 32 aa, Artificial Sequence; identical to SEQ ID NO: 19751
  Cyclic GFR-binding peptide
  MOD_RES (5)..(6): Xaa is C or S

SEQ ID NO: 73983 - protein, 36 aa, Artificial Sequence
  Cyclic GFR-binding peptide
  MOD_RES (4)..(5): Xaa is C or S
PKPXXAPTKLSNITVQIMDDSSNVIIGEMSNMVVRS

SEQ ID NO: 73984 - protein, 30 aa, Artificial Sequence
  Cyclic GFR-binding peptide
  MOD_RES (27)..(29): Xaa is C or S
RPVQVRKIDDSSNVIKKATVNMVVRSXGXH

SEQ ID NO: 73985 - protein, 34 aa, Artificial Sequence
  Cyclic GFR-binding peptide
PTQVQLEPLPVVYYEIVRKKPIFEQLSNTLEDHL

SEQ ID NO: 73986 - protein, 34 aa, Artificial Sequence
  Cyclic GFR-binding peptide
  MOD_RES (1)..(2)..(34): Xaa is C or S
XXVPTELRPVQMRKIDENEKVVKKATVDMVVEGX

SEQ ID NO: 73987 - protein, 33 aa, Artificial Sequence
  Cyclic GFR-binding peptide
  MOD_RES (2)..(3): Xaa is C or S
PXXVSQDLSNITIQIMIGKTPKIIGEMSMIVKS

SEQ ID NO: 73988 - protein, 39 aa, Artificial Sequence; identical to SEQ ID NO: 23859
  Cyclic GFR-binding peptide
  MOD_RES (37)..(39): Xaa is C or S

SEQ ID NO: 73989 - protein, 29 aa, Artificial Sequence
  Cyclic GFR-binding peptide
VPQDLRPVQIRKIVGRTPKVKKATVMVVK

SEQ ID NO: 73990 - protein, 33 aa, Artificial Sequence
  Cyclic GFR-binding peptide
  MOD_RES (6)..(7): Xaa is C or S
YVPKPXXAPTKLSNITVQIMDDSSNVIIGEMSN

SEQ ID NO: 73991 - protein, 34 aa, Artificial Sequence
  Cyclic GFR-binding peptide
  MOD_RES (5)..(6): Xaa is C or S
SAAPXXVPQALRPVQIRKIVGRKPKVKKATVMIV

SEQ ID NO: 73992 - protein, 39 aa, Artificial Sequence
  Cyclic GFR-binding peptide
  MOD_RES (4)..(5)..(37)..(39): Xaa is C or S
PKAXXVPTELSNITMQIMDENEKVVIGEMSDMVVEGXGX

SEQ ID NO: 73993 - protein, 30 aa, Artificial Sequence
  Cyclic GFR-binding peptide
PSRVHHEPLPVVYYEYVRKKPKLEQLSNRL

SEQ ID NO: 73994 - protein, 36 aa, Artificial Sequence; identical to SEQ ID NO: 19766
  Cyclic GFR-binding peptide
  MOD_RES (4)..(5)..(36): Xaa is C or S

SEQ ID NO: 73995 - protein, 29 aa, Artificial Sequence
  Cyclic GFR-binding peptide
  MOD_RES (2)..(3): Xaa is C or S
PXXAPTQLEPLTVLYYDDSSNVIEQLSNN

SEQ ID NO: 73996 - protein, 42 aa, Artificial Sequence
  Cyclic GFR-binding peptide
  MOD_RES (6)..(40)..(42): Xaa is C or S
DEGLEXVPTEEEPLTMLYYRIKPHQGQHEQLSNFLQHNKXEX

SEQ ID NO: 73997 - protein, 28 aa, Artificial Sequence
  Cyclic GFR-binding peptide
  MOD_RES (1)..(1): Xaa is C or S
XVSQDLEPLPIVYYIGKTPKIEQLSNMI

SEQ ID NO: 73998 - protein, 32 aa, Artificial Sequence
  Cyclic GFR-binding peptide
  MOD_RES (32)..(32): Xaa is C or S
TEEEPLTMLYYRIKPHQGQHEQLSNFLQHNKX

SEQ ID NO: 73999 - protein, 28 aa, Artificial Sequence
  Cyclic GFR-binding peptide
PTKLRSVKVAKVDDSSNVIKEVQVNMVV

SEQ ID NO: 74000 - protein, 31 aa, Artificial Sequence
  Cyclic GFR-binding peptide
  MOD_RES (28)..(30): Xaa is C or S
DLRPVQIRKIIGKTPKIKKATVMIVKSXKXS

SEQ ID NO: 74001 - protein, 34 aa, Artificial Sequence; identical to SEQ ID NO: 19779
  Cyclic GFR-binding peptide
  MOD_RES (5)..(5): Xaa is C or S

SEQ ID NO: 74002 - protein, 35 aa, Artificial Sequence
  Cyclic GFR-binding peptide
  MOD_RES (1)..(33)..(35): Xaa is C or S
XVPTELSNITMQIMDEYDKVVIGEMSEMVVEGXGX

SEQ ID NO: 74003 - protein, 40 aa, Artificial Sequence
  Cyclic GFR-binding peptide
  MOD_RES (2)..(39): Xaa is C or S
KXQPSRVHHEPLPVVYYEYVRKKPKLEQLSNRLEEHLEXA

SEQ ID NO: 74004 - protein, 27 aa, Artificial Sequence
  Cyclic GFR-binding peptide
  MOD_RES (1)..(2): Xaa is C or S
XXVSQDLSNITIQIMIGKTPKIIGEMS

SEQ ID NO: 74005 - protein, 31 aa, Artificial Sequence
  Cyclic GFR-binding peptide
HHEPLPVVYYEYVRKKPKLEQLSNRLEEHLE

SEQ ID NO: 74006 - protein, 32 aa, Artificial Sequence; identical to SEQ ID NO: 23876
  Cyclic GFR-binding peptide
  MOD_RES (1)..(1): Xaa is C or S

SEQ ID NO: 74007 - protein, 24 aa, Artificial Sequence
  Cyclic GFR-binding peptide
PQDLSNITIQIMVGRTPKVIGEMS

SEQ ID NO: 74008 - protein, 36 aa, Artificial Sequence; identical to SEQ ID NO: 19788
  Cyclic GFR-binding peptide
  MOD_RES (3)..(4)..(36): Xaa is C or S

SEQ ID NO: 74009 - protein, 28 aa, Artificial Sequence
  Cyclic GFR-binding peptide
  MOD_RES (1)..(2): Xaa is C or S
XXAPTKLEPLPVVYYDDSSNVIEQLSNN

SEQ ID NO: 74010 - protein, 36 aa, Artificial Sequence
  Cyclic GFR-binding peptide
  MOD_RES (2)..(3)..(35): Xaa is C or S
PXXAPTKLSNITVQIMDDSSNVIIGEMSNMVVRSXG

SEQ ID NO: 74011 - protein, 30 aa, Artificial Sequence
  Cyclic GFR-binding peptide
  MOD_RES (1)..(1): Xaa is C or S
XVPTELSNITMQIMDENEKVVIGEMSDMVV

SEQ ID NO: 74012 - protein, 27 aa, Artificial Sequence
  Cyclic GFR-binding peptide
TQVQLEPLTVLYYEIVRKKPIFEQLSN

SEQ ID NO: 74013 - protein, 36 aa, Artificial Sequence; identical to SEQ ID NO: 23888
  Cyclic GFR-binding peptide
  MOD_RES (4)..(4): Xaa is C or S

SEQ ID NO: 74014 - protein, 23 aa, Artificial Sequence
  Cyclic GFR-binding peptide
DLRPVQIRKIVGRTPKVKKATVM

SEQ ID NO: 74015 - protein, 28 aa, Artificial Sequence
  Cyclic GFR-binding peptide
TQLSNITVQIMDDSSNVIIGEMSNMVVR

SEQ ID NO: 74016 - protein, 39 aa, Artificial Sequence; identical to SEQ ID NO: 19809
  Cyclic GFR-binding peptide
  MOD_RES (4)..(5)..(37)..(39): Xaa is C or S

SEQ ID NO: 74017 - protein, 35 aa, Artificial Sequence
  Cyclic GFR-binding peptide
  MOD_RES (1)..(32)..(34): Xaa is C or S
XVSQDLRPVQIRKIIGKTPKIKKATVMIVKSXKXS

SEQ ID NO: 74018 - protein, 33 aa, Artificial Sequence
  Cyclic GFR-binding peptide
  MOD_RES (4)..(5): Xaa is C or S
PKPXXAPTKLRSVKVAKVDDSSNVIKEVQVNMV

SEQ ID NO: 74019 - protein, 36 aa, Artificial Sequence; identical to SEQ ID NO: 19818
  Cyclic GFR-binding peptide
  MOD_RES (6)..(7): Xaa is C or S

SEQ ID NO: 74020 - protein, 42 aa, Artificial Sequence
  Cyclic GFR-binding peptide
  MOD_RES (6)..(7)..(39)..(41): Xaa is C or S
YVPKPXXAPTKLSNITVQIMDDSSNVIIGEMSNMVVRSXGXH

SEQ ID NO: 74021 - protein, 29 aa, Artificial Sequence
  Cyclic GFR-binding peptide
  MOD_RES (1)..(1): Xaa is C or S
XVPTELRPVQMRKIDEYDKVVKKATVEMV

SEQ ID NO: 74022 - protein, 37 aa, Artificial Sequence
  Cyclic GFR-binding peptide
  MOD_RES (2)..(3)..(34)..(36): Xaa is C or S
PXXVSQDLSNITIQIMIGKTPKIIGEMSMIVKSXKXS

SEQ ID NO: 74023 - protein, 36 aa, Artificial Sequence
  Cyclic GFR-binding peptide
  MOD_RES (5)..(6): Xaa is C or S
IPKAXXVPTELSNITMQIMDEYDKVVIGEMSEMVVE

SEQ ID NO: 74024 - protein, 35 aa, Artificial Sequence
  Cyclic GFR-binding peptide
  MOD_RES (5)..(6): Xaa is C or S
SASPXXVPQDLSNITIQIMVGRTPKVIGEMSMVVK

SEQ ID NO: 74025 - protein, 31 aa, Artificial Sequence
  Cyclic GFR-binding peptide
  MOD_RES (31)..(31): Xaa is C or S
VPQDLRSVKIAKVVGRTPKVKEVQVMVVKSX

SEQ ID NO: 74026 - protein, 33 aa, Artificial Sequence
  Cyclic GFR-binding peptide
  MOD_RES (4)..(5): Xaa is C or S
PKAXXVPTELRSVKMAKVDENEKVVKEVQVDMV

SEQ ID NO: 74027 - protein, 29 aa, Artificial Sequence
  Cyclic GFR-binding peptide
  MOD_RES (2)..(3): Xaa is C or S
AXXVPTELRSVKMAKVDEYDKVVKEVQVE

SEQ ID NO: 74028 - protein, 30 aa, Artificial Sequence; identical to SEQ ID NO: 19832
  Cyclic GFR-binding peptide
  MOD_RES (4)..(5): Xaa is C or S

SEQ ID NO: 74029 - protein, 35 aa, Artificial Sequence; identical to SEQ ID NO: 23902
  Cyclic GFR-binding peptide
  MOD_RES (33)..(35): Xaa is C or S

SEQ ID NO: 74030 - protein, 35 aa, Artificial Sequence; identical to SEQ ID NO: 19833
  Cyclic GFR-binding peptide
  MOD_RES (1)..(2)..(34): Xaa is C or S

SEQ ID NO: 74031 - protein, 33 aa, Artificial Sequence; identical to SEQ ID NO: 19835
  Cyclic GFR-binding peptide
  MOD_RES (2)..(2): Xaa is C or S

SEQ ID NO: 74032 - protein, 37 aa, Artificial Sequence; identical to SEQ ID NO: 23909
  Cyclic GFR-binding peptide
  MOD_RES (4)..(4): Xaa is C or S

SEQ ID NO: 74033 - protein, 31 aa, Artificial Sequence; identical to SEQ ID NO: 19838
  Cyclic GFR-binding peptide
  MOD_RES (5)..(6): Xaa is C or S

SEQ ID NO: 74034 - protein, 39 aa, Artificial Sequence
  Cyclic GFR-binding peptide
  MOD_RES (5)..(5): Xaa is C or S
SSVKXQPSRVHHEPLPVVYYEYVRKKPKLEQLSNRLEEH

SEQ ID NO: 74035 - protein, 30 aa, Artificial Sequence
  Cyclic GFR-binding peptide
  MOD_RES (1)..(2): Xaa is C or S
XXAPTQLRPVQVRKIDDSSNVIKKATVNMV

SEQ ID NO: 74036 - protein, 26 aa, Artificial Sequence
  Cyclic GFR-binding peptide
  MOD_RES (26)..(26): Xaa is C or S
RSVKIAKVVGRTPKVKEVQVMVVKSX

SEQ ID NO: 74037 - protein, 33 aa, Artificial Sequence
  Cyclic GFR-binding peptide
  MOD_RES (31)..(33): Xaa is C or S
VSQDLRSVKIAKVIGKTPKIKEVQVMIVKSXKX

SEQ ID NO: 74038 - protein, 37 aa, Artificial Sequence
  Cyclic GFR-binding peptide
  MOD_RES (1)..(2)..(34)..(36): Xaa is C or S
XXAPTKLRSVKVAKVDDSSNVIKEVQVNMVVRSXGXH

SEQ ID NO: 74039 - protein, 36 aa, Artificial Sequence; identical to SEQ ID NO: 19853
  Cyclic GFR-binding peptide
  MOD_RES (2)..(3)..(34)..(36): Xaa is C or S

SEQ ID NO: 74040 - protein, 36 aa, Artificial Sequence; identical to SEQ ID NO: 19854
  Cyclic GFR-binding peptide
  MOD_RES (6)..(7): Xaa is C or S

SEQ ID NO: 74041 - protein, 37 aa, Artificial Sequence
  Cyclic GFR-binding peptide
  MOD_RES (2)..(3)..(35)..(37): Xaa is C or S
PXXAPTKLSNITVQIMDDSSNVIIGEMSNMVVRSXGX

SEQ ID NO: 74042 - protein, 35 aa, Artificial Sequence; identical to SEQ ID NO: 23926
  Cyclic GFR-binding peptide
  MOD_RES (2)..(2): Xaa is C or S

SEQ ID NO: 74043 - protein, 31 aa, Artificial Sequence; identical to SEQ ID NO: 19858
  Cyclic GFR-binding peptide
  MOD_RES (29)..(31): Xaa is C or S

SEQ ID NO: 74044 - protein, 27 aa, Artificial Sequence
  Cyclic GFR-binding peptide
ALSNITIQIMVGRKPKVIGEMSMIVRS

SEQ ID NO: 74045 - protein, 34 aa, Artificial Sequence
  Cyclic GFR-binding peptide
  MOD_RES (6)..(7): Xaa is C or S
ASASPXXVSQDLRSVKIAKVIGKTPKIKEVQVMI

SEQ ID NO: 74046 - protein, 33 aa, Artificial Sequence
  Cyclic GFR-binding peptide
  MOD_RES (1)..(2): Xaa is C or S
XXAPTQLSNITVQIMDDSSNVIIGEMSNMVVRA

SEQ ID NO: 74047 - protein, 33 aa, Artificial Sequence
  Cyclic GFR-binding peptide
  MOD_RES (5)..(6): Xaa is C or S
VPKPXXAPTKLRPVQVRKIDDSSNVIKKATVNM

SEQ ID NO: 74048 - protein, 27 aa, Artificial Sequence
  Cyclic GFR-binding peptide
TQLRPVQVRKIDDSSNVIKKATVNMVV

SEQ ID NO: 74049 - protein, 25 aa, Artificial Sequence
  Cyclic GFR-binding peptide
APTQLRSVKVAKVDDSSNVIKEVQV

SEQ ID NO: 74050 - protein, 38 aa, Artificial Sequence; identical to SEQ ID NO: 19865
  Cyclic GFR-binding peptide
  MOD_RES (5)..(6)..(38): Xaa is C or S

SEQ ID NO: 74051 - protein, 29 aa, Artificial Sequence
  Cyclic GFR-binding peptide
  MOD_RES (28)..(28): Xaa is C or S
LRPVQMRKIDEYDKVVKKATVEMVVEGXG

SEQ ID NO: 74052 - protein, 22 aa, Artificial Sequence
  Cyclic GFR-binding peptide
LRPVQIRKIVGRTPKVKKATVM

SEQ ID NO: 74053 - protein, 25 aa, Artificial Sequence
  Cyclic GFR-binding peptide
SNITVQIMEIVRKKPIFIGEMSTLE

SEQ ID NO: 74054 - protein, 33 aa, Artificial Sequence; identical to SEQ ID NO: 23929
  Cyclic GFR-binding peptide
  MOD_RES (32)..(32): Xaa is C or S

SEQ ID NO: 74055 - protein, 30 aa, Artificial Sequence; identical to SEQ ID NO: 19874
  Cyclic GFR-binding peptide
  MOD_RES (1)..(2): Xaa is C or S

SEQ ID NO: 74056 - protein, 32 aa, Artificial Sequence
  Cyclic GFR-binding peptide
  MOD_RES (5)..(6): Xaa is C or S
VPKPXXAPTQLRSVKVAKVDDSSNVIKEVQVN

SEQ ID NO: 74057 - protein, 36 aa, Artificial Sequence; identical to SEQ ID NO: 19877
  Cyclic GFR-binding peptide
  MOD_RES (2)..(3)..(34)..(36): Xaa is C or S

SEQ ID NO: 74058 - protein, 31 aa, Artificial Sequence; identical to SEQ ID NO: 19879
  Cyclic GFR-binding peptide
  MOD_RES (31)..(31): Xaa is C or S

SEQ ID NO: 74059 - protein, 31 aa, Artificial Sequence
  Cyclic GFR-binding peptide
VPTELRSVKMAKVDENEKVVKEVQVDMVVEG

SEQ ID NO: 74060 - protein, 39 aa, Artificial Sequence
  Cyclic GFR-binding peptide
  MOD_RES (3)..(4)..(36)..(38): Xaa is C or S
KPXXAPTQLRSVKVAKVDDSSNVIKEVQVNMVVRAXGXH

SEQ ID NO: 74061 - protein, 41 aa, Artificial Sequence; identical to SEQ ID NO: 19887
  Cyclic GFR-binding peptide
  MOD_RES (5)..(6)..(38)..(40): Xaa is C or S

SEQ ID NO: 74062 - protein, 28 aa, Artificial Sequence
  Cyclic GFR-binding peptide
PQDLSNITIQIMVGRTPKVIGEMSMVVK

SEQ ID NO: 74063 - protein, 41 aa, Artificial Sequence
  Cyclic GFR-binding peptide
  MOD_RES (5)..(39)..(41): Xaa is C or S
EGLEXVPTEEEPLPMVYYRIKPHQGQHEQLSNFLQHNKXEX

SEQ ID NO: 74064 - protein, 21 aa, Artificial Sequence
  Cyclic GFR-binding peptide
EPLPMVYYDEYDKVVEQLSNE

SEQ ID NO: 74065 - protein, 42 aa, Artificial Sequence; identical to SEQ ID NO: 23948
  Cyclic GFR-binding peptide
  MOD_RES (5)..(39)..(41): Xaa is C or S

SEQ ID NO: 74066 - protein, 23 aa, Artificial Sequence
  Cyclic GFR-binding peptide
ELRSVKMAKVDEYDKVVKEVQVE

SEQ ID NO: 74067 - protein, 41 aa, Artificial Sequence
  Cyclic GFR-binding peptide
  MOD_RES (7)..(41): Xaa is C or S
NDEGLEXVPTEEEPLTMLYYRIKPHQGQHEQLSNFLQHNKX

SEQ ID NO: 74068 - protein, 35 aa, Artificial Sequence
  Cyclic GFR-binding peptide
  MOD_RES (1)..(33)..(35): Xaa is C or S
XAPTQLSNITVQIMDDSSNVIIGEMSNMVVRAXGX

SEQ ID NO: 74069 - protein, 28 aa, Artificial Sequence
  Cyclic GFR-binding peptide
  MOD_RES (1)..(1): Xaa is C or S
XVPQALEPLTILYYVGRKPKVEQLSNMI

SEQ ID NO: 74070 - protein, 40 aa, Artificial Sequence; identical to SEQ ID NO: 19900
  Cyclic GFR-binding peptide
  MOD_RES (4)..(5)..(37)..(39): Xaa is C or S

SEQ ID NO: 74071 - protein, 30 aa, Artificial Sequence
  Cyclic GFR-binding peptide
  MOD_RES (1)..(1): Xaa is C or S
XRPTQVQLEPLTVLYYEIVRKKPIFEQLSN

SEQ ID NO: 74072 - protein, 36 aa, Artificial Sequence; identical to SEQ ID NO: 23951
  Cyclic GFR-binding peptide
  MOD_RES (35)..(35): Xaa is C or S

SEQ ID NO: 74073 - protein, 31 aa, Artificial Sequence
  Cyclic GFR-binding peptide
VPTELRSVKMAKVDEYDKVVKEVQVEMVVEG

SEQ ID NO: 74074 - protein, 29 aa, Artificial Sequence
  Cyclic GFR-binding peptide
  MOD_RES (3)..(4): Xaa is C or S
KAXXVPTELEPLTMLYYDEYDKVVEQLSN

SEQ ID NO: 74075 - protein, 32 aa, Artificial Sequence; identical to SEQ ID NO: 23956
  Cyclic GFR-binding peptide
  MOD_RES (30)..(32): Xaa is C or S

SEQ ID NO: 74076 - protein, 26 aa, Artificial Sequence
  Cyclic GFR-binding peptide
TQLRSVKVAKVDDSSNVIKEVQVNMV

SEQ ID NO: 74077 - protein, 33 aa, Artificial Sequence
  Cyclic GFR-binding peptide
VPTEEEPLPMVYYRIKPHQGQHEQLSNFLQHNK

SEQ ID NO: 74078 - protein, 33 aa, Artificial Sequence
  Cyclic GFR-binding peptide
  MOD_RES (33)..(33): Xaa is C or S
VHHEPLTVLYYEYVRKKPKLEQLSNRLEEHLEX

SEQ ID NO: 74079 - protein, 32 aa, Artificial Sequence; identical to SEQ ID NO: 23961
  Cyclic GFR-binding peptide

SEQ ID NO: 74080 - protein, 35 aa, Artificial Sequence; identical to SEQ ID NO: 19912
  Cyclic GFR-binding peptide
  MOD_RES (1)..(2)..(34): Xaa is C or S

SEQ ID NO: 74081 - protein, 37 aa, Artificial Sequence
  Cyclic GFR-binding peptide
  MOD_RES (6)..(7): Xaa is C or S
ASASPXXVPQDLSNITIQIMVGRTPKVIGEMSMVVKS

SEQ ID NO: 74082 - protein, 31 aa, Artificial Sequence; identical to SEQ ID NO: 23967
  Cyclic GFR-binding peptide

SEQ ID NO: 74083 - protein, 35 aa, Artificial Sequence
  Cyclic GFR-binding peptide
RPTQVQLEPLTVLYYEIVRKKPIFEQLSNTLEDHL

SEQ ID NO: 74084 - protein, 26 aa, Artificial Sequence
  Cyclic GFR-binding peptide
  MOD_RES (1)..(1): Xaa is C or S
XVPTELRSVKMAKVDENEKVVKEVQV

SEQ ID NO: 74085 - protein, 30 aa, Artificial Sequence
  Cyclic GFR-binding peptide
  MOD_RES (1)..(2): Xaa is C or S
XXAPTKLRSVKVAKVDDSSNVIKEVQVNMV

SEQ ID NO: 74086 - protein, 34 aa, Artificial Sequence
  Cyclic GFR-binding peptide
  MOD_RES (5)..(5): Xaa is C or S
TKPTXAPTKLRPVQVRKIDDSSNVIKKATVNMVV

SEQ ID NO: 74087 - protein, 28 aa, Artificial Sequence
  Cyclic GFR-binding peptide
VQLRSVKVAKVEIVRKKPIFKEVQVTLE

SEQ ID NO: 74088 - protein, 34 aa, Artificial Sequence
  Cyclic GFR-binding peptide
  MOD_RES (6)..(7): Xaa is C or S
ASASPXXVPQDLRSVKIAKVVGRTPKVKEVQVMV

SEQ ID NO: 74089 - protein, 32 aa, Artificial Sequence; identical to SEQ ID NO: 19928
  Cyclic GFR-binding peptide
  MOD_RES (1)..(2): Xaa is C or S

SEQ ID NO: 74090 - protein, 22 aa, Artificial Sequence
  Cyclic GFR-binding peptide
LRSVKIAKVIGKTPKIKEVQVM

SEQ ID NO: 74091 - protein, 32 aa, Artificial Sequence; identical to SEQ ID NO: 19930
  Cyclic GFR-binding peptide
  MOD_RES (31)..(31): Xaa is C or S

SEQ ID NO: 74092 - protein, 32 aa, Artificial Sequence
  Cyclic GFR-binding peptide
  MOD_RES (31)..(31): Xaa is C or S
VPQALRSVKIAKVVGRKPKVKEVQVMIVRSXK

SEQ ID NO: 74093 - protein, 27 aa, Artificial Sequence
  Cyclic GFR-binding peptide
  MOD_RES (1)..(2): Xaa is C or S
XXAPTQLEPLPVVYYDDSSNVIEQLSN

SEQ ID NO: 74094 - protein, 27 aa, Artificial Sequence
  Cyclic GFR-binding peptide
DLRSVKIAKVVGRTPKVKEVQVMVVKS

SEQ ID NO: 74095 - protein, 36 aa, Artificial Sequence
  Cyclic GFR-binding peptide
  MOD_RES (33)..(35): Xaa is C or S
VQLEPLTVLYYEIVRKKPIFEQLSNTLEDHLAXKXE

SEQ ID NO: 74096 - protein, 28 aa, Artificial Sequence
  Cyclic GFR-binding peptide
QDLSNITIQIMVGRTPKVIGEMSMVVKS

SEQ ID NO: 74097 - protein, 35 aa, Artificial Sequence
  Cyclic GFR-binding peptide
  MOD_RES (6)..(7): Xaa is C or S
ASAAPXXVPQALRPVQIRKIVGRKPKVKKATVMIV

SEQ ID NO: 74098 - protein, 28 aa, Artificial Sequence
  Cyclic GFR-binding peptide
  MOD_RES (2)..(3): Xaa is C or S
PXXVPQALRPVQIRKIVGRKPKVKKATV

SEQ ID NO: 74099 - protein, 37 aa, Artificial Sequence
  Cyclic GFR-binding peptide
  MOD_RES (6)..(7): Xaa is C or S
ASAAPXXVPQALRPVQIRKIVGRKPKVKKATVMIVRS

SEQ ID NO: 74100 - protein, 30 aa, Artificial Sequence
  Cyclic GFR-binding peptide
  MOD_RES (1)..(1): Xaa is C or S
XVPQDLRPVQIRKIVGRTPKVKKATVMVVK

SEQ ID NO: 74101 - protein, 35 aa, Artificial Sequence; identical to SEQ ID NO: 19943
  Cyclic GFR-binding peptide
  MOD_RES (6)..(7): Xaa is C or S

SEQ ID NO: 74102 - protein, 29 aa, Artificial Sequence
  Cyclic GFR-binding peptide
  MOD_RES (1)..(2): Xaa is C or S
XXVSQDLEPLPIVYYIGKTPKIEQLSNMI

SEQ ID NO: 74103 - protein, 34 aa, Artificial Sequence
  Cyclic GFR-binding peptide
  MOD_RES (2)..(3)..(34): Xaa is C or S
PXXVPQALRPVQIRKIVGRKPKVKKATVMIVRSX

SEQ ID NO: 74104 - protein, 36 aa, Artificial Sequence; identical to SEQ ID NO: 23992
  Cyclic GFR-binding peptide
  MOD_RES (3)..(3): Xaa is C or S

SEQ ID NO: 74105 - protein, 28 aa, Artificial Sequence
  Cyclic GFR-binding peptide
HHEPLPVVYYEYVRKKPKLEQLSNRLEE

SEQ ID NO: 74106 - protein, 39 aa, Artificial Sequence
  Cyclic GFR-binding peptide
  MOD_RES (7)..(39): Xaa is C or S
HVTKPTXAPTKLSNITVQIMDDSSNVIIGEMSNMVVRSX

SEQ ID NO: 74107 - protein, 25 aa, Artificial Sequence
  Cyclic GFR-binding peptide
TQLSNITVQIMDDSSNVIIGEMSNM

SEQ ID NO: 74108 - protein, 27 aa, Artificial Sequence
  Cyclic GFR-binding peptide
  MOD_RES (27)..(27): Xaa is C or S
EPLPMVYYDENEKVVEQLSNDMVVEGX

SEQ ID NO: 74109 - protein, 33 aa, Artificial Sequence; identical to SEQ ID NO: 24004
  Cyclic GFR-binding peptide
  MOD_RES (4)..(4): Xaa is C or S

SEQ ID NO: 74110 - protein, 32 aa, Artificial Sequence; identical to SEQ ID NO: 19952
  Cyclic GFR-binding peptide
  MOD_RES (3)..(4): Xaa is C or S

SEQ ID NO: 74111 - protein, 31 aa, Artificial Sequence
  Cyclic GFR-binding peptide
APTKLRSVKVAKVDDSSNVIKEVQVNMVVRS

SEQ ID NO: 74112 - protein, 25 aa, Artificial Sequence
  Cyclic GFR-binding peptide
PTQLSNITVQIMDDSSNVIIGEMSN

SEQ ID NO: 74113 - protein, 39 aa, Artificial Sequence
  Cyclic GFR-binding peptide
  MOD_RES (1)..(38): Xaa is C or S
XRPTQVQLEPLPVVYYEIVRKKPIFEQLSNTLEDHLAXK

SEQ ID NO: 74114 - protein, 34 aa, Artificial Sequence
  Cyclic GFR-binding peptide
  MOD_RES (6)..(7): Xaa is C or S
ASAAPXXVPQALRPVQIRKIVGRKPKVKKATVMI

SEQ ID NO: 74115 - protein, 20 aa, Artificial Sequence
  Cyclic GFR-binding peptide
SNITIQIMIGKTPKIIGEMS

SEQ ID NO: 74116 - protein, 38 aa, Artificial Sequence
  Cyclic GFR-binding peptide
  MOD_RES (5)..(5): Xaa is C or S
SSVKXQPSRVHHEPLPVVYYEYVRKKPKLEQLSNRLEE

SEQ ID NO: 74117 - protein, 34 aa, Artificial Sequence; identical to SEQ ID NO: 19963
  Cyclic GFR-binding peptide
  MOD_RES (2)..(3): Xaa is C or S

SEQ ID NO: 74118 - protein, 26 aa, Artificial Sequence
  Cyclic GFR-binding peptide
ELSNITMQIMDENEKVVIGEMSDMVV

SEQ ID NO: 74119 - protein, 32 aa, Artificial Sequence; identical to SEQ ID NO: 19970
  Cyclic GFR-binding peptide
  MOD_RES (4)..(4): Xaa is C or S

SEQ ID NO: 74120 - protein, 32 aa, Artificial Sequence
  Cyclic GFR-binding peptide
  MOD_RES (4)..(5): Xaa is C or S
PKAXXVPTELRPVQMRKIDEYDKVVKKATVEM

SEQ ID NO: 74121 - protein, 29 aa, Artificial Sequence
  Cyclic GFR-binding peptide
  MOD_RES (1)..(1): Xaa is C or S
XVPQDLSNITIQIMVGRTPKVIGEMSMVV

SEQ ID NO: 74122 - protein, 31 aa, Artificial Sequence; identical to SEQ ID NO: 19974
  Cyclic GFR-binding peptide
  MOD_RES (31)..(31): Xaa is C or S

SEQ ID NO: 74123 - protein, 35 aa, Artificial Sequence
  Cyclic GFR-binding peptide
  MOD_RES (6)..(6): Xaa is C or S
VTKPTXAPTKLRPVQVRKIDDSSNVIKKATVNMVV

SEQ ID NO: 74124 - protein, 35 aa, Artificial Sequence; identical to SEQ ID NO: 19976
  Cyclic GFR-binding peptide
  MOD_RES (1)..(2)..(34): Xaa is C or S

SEQ ID NO: 74125 - protein, 32 aa, Artificial Sequence; identical to SEQ ID NO: 24024
  Cyclic GFR-binding peptide

SEQ ID NO: 74126 - protein, 25 aa, Artificial Sequence
  Cyclic GFR-binding peptide
ELRSVKMAKVDENEKVVKEVQVDMV

SEQ ID NO: 74127 - protein, 39 aa, Artificial Sequence
  Cyclic GFR-binding peptide
  MOD_RES (5)..(6)..(38): Xaa is C or S
IPKAXXVPTELRSVKMAKVDEYDKVVKEVQVEMVVEGXG

SEQ ID NO: 74128 - protein, 38 aa, Artificial Sequence
  Cyclic GFR-binding peptide
  MOD_RES (4)..(5)..(37): Xaa is C or S
PKAXXVPTELSNITMQIMDEYDKVVIGEMSEMVVEGXG

SEQ ID NO: 74129 - protein, 36 aa, Artificial Sequence
  Cyclic GFR-binding peptide
  MOD_RES (6)..(7): Xaa is C or S
ASASPXXVSQDLRSVKIAKVIGKTPKIKEVQVMIVK

SEQ ID NO: 74130 - protein, 35 aa, Artificial Sequence
  Cyclic GFR-binding peptide
  MOD_RES (3)..(3): Xaa is C or S
LEXVPTEEEPLTMLYYRIKPHQGQHEQLSNFLQHN

SEQ ID NO: 74131 - protein, 28 aa, Artificial Sequence
  Cyclic GFR-binding peptide
PSRVHHRPVQVRKIEYVRKKPKLKKATV

SEQ ID NO: 74132 - protein, 29 aa, Artificial Sequence
  Cyclic GFR-binding peptide
QVQLEPLPVVYYEIVRKKPIFEQLSNTLE

SEQ ID NO: 74133 - protein, 34 aa, Artificial Sequence; identical to SEQ ID NO: 19995
  Cyclic GFR-binding peptide
  MOD_RES (6)..(7): Xaa is C or S

SEQ ID NO: 74134 - protein, 35 aa, Artificial Sequence
  Cyclic GFR-binding peptide
  MOD_RES (32)..(34): Xaa is C or S
VPTELRSVKMAKVDEYDKVVKEVQVEMVVEGXGXR

SEQ ID NO: 74135 - protein, 28 aa, Artificial Sequence
  Cyclic GFR-binding peptide
  MOD_RES (1)..(2): Xaa is C or S
XXVPQALRSVKIAKVVGRKPKVKEVQVM

SEQ ID NO: 74136 - protein, 37 aa, Artificial Sequence; identical to SEQ ID NO: 19998
  Cyclic GFR-binding peptide
  MOD_RES (2)..(3)..(35)..(37): Xaa is C or S

SEQ ID NO: 74137 - protein, 31 aa, Artificial Sequence; identical to SEQ ID NO: 20005
  Cyclic GFR-binding peptide
  MOD_RES (28)..(30): Xaa is C or S

SEQ ID NO: 74138 - protein, 23 aa, Artificial Sequence
  Cyclic GFR-binding peptide
TQLSNITVQIMDDSSNVIIGEMS

SEQ ID NO: 74139 - protein, 28 aa, Artificial Sequence
  Cyclic GFR-binding peptide
TELSNITMQIMDEYDKVVIGEMSEMVVE

SEQ ID NO: 74140 - protein, 21 aa, Artificial Sequence
  Cyclic GFR-binding peptide
LRSVKIAKVVGRTPKVKEVQV

SEQ ID NO: 74141 - protein, 35 aa, Artificial Sequence
  Cyclic GFR-binding peptide
  MOD_RES (1)..(33)..(35): Xaa is C or S
XAPTKLRPVQVRKIDDSSNVIKKATVNMVVRSXGX

SEQ ID NO: 74142 - protein, 26 aa, Artificial Sequence
  Cyclic GFR-binding peptide
KLEPLPVVYYDDSSNVIEQLSNNMVV

SEQ ID NO: 74143 - protein, 34 aa, Artificial Sequence; identical to SEQ ID NO: 24046
  Cyclic GFR-binding peptide
  MOD_RES (31)..(33): Xaa is C or S

SEQ ID NO: 74144 - protein, 28 aa, Artificial Sequence
  Cyclic GFR-binding peptide
  MOD_RES (1)..(1): Xaa is C or S
XVPTEEEPLPMVYYRIKPHQGQHEQLSN

SEQ ID NO: 74145 - protein, 24 aa, Artificial Sequence
  Cyclic GFR-binding peptide
EEPLTMLYYRIKPHQGQHEQLSNF

SEQ ID NO: 74146 - protein, 31 aa, Artificial Sequence
  Cyclic GFR-binding peptide
PTQVQLEPLTVLYYEIVRKKPIFEQLSNTLE

SEQ ID NO: 74147 - protein, 33 aa, Artificial Sequence
  Cyclic GFR-binding peptide
  MOD_RES (3)..(4): Xaa is C or S
SPXXVSQDLRPVQIRKIIGKTPKIKKATVMIVK

SEQ ID NO: 74148 - protein, 30 aa, Artificial Sequence
  Cyclic GFR-binding peptide
  MOD_RES (3)..(4): Xaa is C or S
KPXXAPTQLRPVQVRKIDDSSNVIKKATVN

SEQ ID NO: 74149 - protein, 37 aa, Artificial Sequence
  Cyclic GFR-binding peptide
  MOD_RES (4)..(5)..(36): Xaa is C or S
ASPXXVSQDLRSVKIAKVIGKTPKIKEVQVMIVKSXK

SEQ ID NO: 74150 - protein, 38 aa, Artificial Sequence
  Cyclic GFR-binding peptide
  MOD_RES (7)..(7): Xaa is C or S
HVTKPTXAPTKLSNITVQIMDDSSNVIIGEMSNMVVRS

SEQ ID NO: 74151 - protein, 33 aa, Artificial Sequence
  Cyclic GFR-binding peptide
  MOD_RES (3)..(4): Xaa is C or S
APXXVPQALRSVKIAKVVGRKPKVKEVQVMIVR

SEQ ID NO: 74152 - protein, 42 aa, Artificial Sequence
  Cyclic GFR-binding peptide
  MOD_RES (2)..(39)..(41): Xaa is C or S
QXRPTQVQLEPLTVLYYEIVRKKPIFEQLSNTLEDHLAXKXE

SEQ ID NO: 74153 - protein, 41 aa, Artificial Sequence; identical to SEQ ID NO: 24053
  Cyclic GFR-binding peptide
  MOD_RES (7)..(41): Xaa is C or S

SEQ ID NO: 74154 - protein, 33 aa, Artificial Sequence
  Cyclic GFR-binding peptide
  MOD_RES (3)..(4): Xaa is C or S
KAXXVPTELSNITMQIMDENEKVVIGEMSDMVV

SEQ ID NO: 74155 - protein, 26 aa, Artificial Sequence
  Cyclic GFR-binding peptide
QLEPLPVVYYDDSSNVIEQLSNNMVV

SEQ ID NO: 74156 - protein, 32 aa, Artificial Sequence
  Cyclic GFR-binding peptide
  MOD_RES (6)..(7): Xaa is C or S
KIPKAXXVPTELSNITMQIMDENEKVVIGEMS

SEQ ID NO: 74157 - protein, 42 aa, Artificial Sequence
  Cyclic GFR-binding peptide
  MOD_RES (6)..(40)..(42): Xaa is C or S
DEGLEXVPTEEEPLPMVYYRIKPHQGQHEQLSNFLQHNKXEX

SEQ ID NO: 74158 - protein, 32 aa, Artificial Sequence; identical to SEQ ID NO: 20029
  Cyclic GFR-binding peptide
  MOD_RES (29)..(31): Xaa is C or S

SEQ ID NO: 74159 - protein, 23 aa, Artificial Sequence
  Cyclic GFR-binding peptide
HEPLPVVYYEYVRKKPKLEQLSN

SEQ ID NO: 74160 - protein, 30 aa, Artificial Sequence
  Cyclic GFR-binding peptide
QPSRVHHEPLTVLYYEYVRKKPKLEQLSNR

SEQ ID NO: 74161 - protein, 31 aa, Artificial Sequence; identical to SEQ ID NO: 20033
  Cyclic GFR-binding peptide
  MOD_RES (4)..(5): Xaa is C or S

SEQ ID NO: 74162 - protein, 32 aa, Artificial Sequence
  Cyclic GFR-binding peptide
  MOD_RES (1)..(2): Xaa is C or S
XXVPQALSNITIQIMVGRKPKVIGEMSMIVRS

SEQ ID NO: 74163 - protein, 36 aa, Artificial Sequence
  Cyclic GFR-binding peptide
  MOD_RES (7)..(7): Xaa is C or S
HVTKPTXAPTKLRSVKVAKVDDSSNVIKEVQVNMVV

SEQ ID NO: 74164 - protein, 37 aa, Artificial Sequence; identical to SEQ ID NO: 20037
  Cyclic GFR-binding peptide
  MOD_RES (2)..(3)..(35)..(37): Xaa is C or S

SEQ ID NO: 74165 - protein, 35 aa, Artificial Sequence
  Cyclic GFR-binding peptide
  MOD_RES (34)..(34): Xaa is C or S
RVHHEPLPVVYYEYVRKKPKLEQLSNRLEEHLEXA

SEQ ID NO: 74166 - protein, 31 aa, Artificial Sequence; identical to SEQ ID NO: 20040
  Cyclic GFR-binding peptide
  MOD_RES (2)..(3): Xaa is C or S

SEQ ID NO: 74167 - protein, 35 aa, Artificial Sequence
  Cyclic GFR-binding peptide
  MOD_RES (32)..(34): Xaa is C or S
APTQLRPVQVRKIDDSSNVIKKATVNMVVRAXGXH

SEQ ID NO: 74168 - protein, 24 aa, Artificial Sequence
  Cyclic GFR-binding peptide
QALEPLTILYYVGRKPKVEQLSNM

SEQ ID NO: 74169 - protein, 36 aa, Artificial Sequence
  Cyclic GFR-binding peptide
  MOD_RES (34)..(36): Xaa is C or S
RVHHEPLTVLYYEYVRKKPKLEQLSNRLEEHLEXAX

SEQ ID NO: 74170 - protein, 22 aa, Artificial Sequence
  Cyclic GFR-binding peptide
KLRSVKVAKVDDSSNVIKEVQV

SEQ ID NO: 74171 - protein, 32 aa, Artificial Sequence
  Cyclic GFR-binding peptide
PTEEEPLPMVYYRIKPHQGQHEQLSNFLQHNK

SEQ ID NO: 74172 - protein, 27 aa, Artificial Sequence
  Cyclic GFR-binding peptide
PQDLRSVKIAKVVGRTPKVKEVQVMVV

SEQ ID NO: 74173 - protein, 23 aa, Artificial Sequence
  Cyclic GFR-binding peptide
LRPVQIRKIIGKTPKIKKATVMI

SEQ ID NO: 74174 - protein, 35 aa, Artificial Sequence
  Cyclic GFR-binding peptide
  MOD_RES (4)..(5): Xaa is C or S
ASPXXVPQDLRSVKIAKVVGRTPKVKEVQVMVVKS

SEQ ID NO: 74175 - protein, 30 aa, Artificial Sequence
  Cyclic GFR-binding peptide
  MOD_RES (4)..(5): Xaa is C or S
PKAXXVPTELRPVQMRKIDEYDKVVKKATV

SEQ ID NO: 74176 - protein, 38 aa, Artificial Sequence; identical to SEQ ID NO: 20048
  Cyclic GFR-binding peptide
  MOD_RES (2)..(3)..(35)..(37): Xaa is C or S

SEQ ID NO: 74177 - protein, 32 aa, Artificial Sequence
  Cyclic GFR-binding peptide
  MOD_RES (2)..(2): Xaa is C or S
EXVPTEEEPLTMLYYRIKPHQGQHEQLSNFLQ

SEQ ID NO: 74178 - protein, 26 aa, Artificial Sequence
  Cyclic GFR-binding peptide
  MOD_RES (26)..(26): Xaa is C or S
SNITIQIMVGRTPKVIGEMSMVVKSX

SEQ ID NO: 74179 - protein, 41 aa, Artificial Sequence
  Cyclic GFR-binding peptide
  MOD_RES (6)..(7)..(38)..(40): Xaa is C or S
ASASPXXVPQDLRPVQIRKIVGRTPKVKKATVMVVKSXKXS

SEQ ID NO: 74180 - protein, 29 aa, Artificial Sequence
  Cyclic GFR-binding peptide
  MOD_RES (27)..(29): Xaa is C or S
RPVQMRKIDEYDKVVKKATVEMVVEGXGX

SEQ ID NO: 74181 - protein, 25 aa, Artificial Sequence
  Cyclic GFR-binding peptide
QALRPVQIRKIVGRKPKVKKATVMI

SEQ ID NO: 74182 - protein, 34 aa, Artificial Sequence
  Cyclic GFR-binding peptide
  MOD_RES (31)..(33): Xaa is C or S
LEPLTVLYYEIVRKKPIFEQLSNTLEDHLAXKXE

SEQ ID NO: 74183 - protein, 31 aa, Artificial Sequence
  Cyclic GFR-binding peptide
  MOD_RES (30)..(30): Xaa is C or S
EPLTVLYYEYVRKKPKLEQLSNRLEEHLEXA

SEQ ID NO: 74184 - protein, 23 aa, Artificial Sequence
  Cyclic GFR-binding peptide
ELRSVKMAKVDENEKVVKEVQVD

SEQ ID NO: 74185 - protein, 36 aa, Artificial Sequence
  Cyclic GFR-binding peptide
  MOD_RES (7)..(7): Xaa is C or S
NDEGLEXVPTEEEPLPMVYYRIKPHQGQHEQLSNFL

SEQ ID NO: 74186 - protein, 33 aa, Artificial Sequence; identical to SEQ ID NO: 20055
  Cyclic GFR-binding peptide
  MOD_RES (31)..(33): Xaa is C or S

SEQ ID NO: 74187 - protein, 31 aa, Artificial Sequence
  Cyclic GFR-binding peptide
  MOD_RES (1)..(1): Xaa is C or S
XVSQDLSNITIQIMIGKTPKIIGEMSMIVKS

SEQ ID NO: 74188 - protein, 32 aa, Artificial Sequence; identical to SEQ ID NO: 20058
  Cyclic GFR-binding peptide
  MOD_RES (6)..(7): Xaa is C or S

SEQ ID NO: 74189 - protein, 31 aa, Artificial Sequence
  Cyclic GFR-binding peptide
  MOD_RES (5)..(6): Xaa is C or S
SASPXXVSQDLRSVKIAKVIGKTPKIKEVQV

SEQ ID NO: 74190 - protein, 36 aa, Artificial Sequence
  Cyclic GFR-binding peptide
  MOD_RES (1)..(2)..(33)..(35): Xaa is C or S
XXVSQDLRSVKIAKVIGKTPKIKEVQVMIVKSXKXS

SEQ ID NO: 74191 - protein, 28 aa, Artificial Sequence
  Cyclic GFR-binding peptide
  MOD_RES (1)..(2): Xaa is C or S
XXVPTELEPLPMVYYDEYDKVVEQLSNE

SEQ ID NO: 74192 - protein, 40 aa, Artificial Sequence
  Cyclic GFR-binding peptide
  MOD_RES (5)..(6)..(38)..(40): Xaa is C or S
VPKPXXAPTKLRSVKVAKVDDSSNVIKEVQVNMVVRSXGX

SEQ ID NO: 74193 - protein, 26 aa, Artificial Sequence
  Cyclic GFR-binding peptide
LEPLPVVYYEIVRKKPIFEQLSNTLE

SEQ ID NO: 74194 - protein, 29 aa, Artificial Sequence
  Cyclic GFR-binding peptide
PTELEPLTMLYYDENEKVVEQLSNDMVVE

SEQ ID NO: 74195 - protein, 29 aa, Artificial Sequence
  Cyclic GFR-binding peptide
QLEPLTVLYYEIVRKKPIFEQLSNTLEDH

SEQ ID NO: 74196 - protein, 21 aa, Artificial Sequence
  Cyclic GFR-binding peptide
SNITIQIMIGKTPKIIGEMSM

SEQ ID NO: 74197 - protein, 36 aa, Artificial Sequence
  Cyclic GFR-binding peptide
  MOD_RES (5)..(6): Xaa is C or S
SASPXXVSQDLSNITIQIMIGKTPKIIGEMSMIVKS

SEQ ID NO: 74198 - protein, 30 aa, Artificial Sequence
  Cyclic GFR-binding peptide
PTQVQLEPLPVVYYEIVRKKPIFEQLSNTL

SEQ ID NO: 74199 - protein, 35 aa, Artificial Sequence; identical to SEQ ID NO: 20070
  Cyclic GFR-binding peptide
  MOD_RES (3)..(35): Xaa is C or S

SEQ ID NO: 74200 - protein, 30 aa, Artificial Sequence; identical to SEQ ID NO: 20071
  Cyclic GFR-binding peptide

SEQ ID NO: 74201 - protein, 32 aa, Artificial Sequence
  Cyclic GFR-binding peptide
  MOD_RES (5)..(6): Xaa is C or S
SAAPXXVPQALRSVKIAKVVGRKPKVKEVQVM

SEQ ID NO: 74202 - protein, 26 aa, Artificial Sequence
  Cyclic GFR-binding peptide
  MOD_RES (26)..(26): Xaa is C or S
RPVQIRKIVGRKPKVKKATVMIVRSX

SEQ ID NO: 74203 - protein, 24 aa, Artificial Sequence
  Cyclic GFR-binding peptide
LSNITVQIMDDSSNVIIGEMSNMV

SEQ ID NO: 74204 - protein, 34 aa, Artificial Sequence
  Cyclic GFR-binding peptide
  MOD_RES (2)..(3): Xaa is C or S
AXXVPTELSNITMQIMDENEKVVIGEMSDMVVEG

SEQ ID NO: 74205 - protein, 38 aa, Artificial Sequence
  Cyclic GFR-binding peptide
  MOD_RES (5)..(6)..(38): Xaa is C or S
IPKAXXVPTELSNITMQIMDENEKVVIGEMSDMVVEGX

SEQ ID NO: 74206 - protein, 30 aa, Artificial Sequence
  Cyclic GFR-binding peptide
  MOD_RES (3)..(4): Xaa is C or S
KPXXAPTKLRSVKVAKVDDSSNVIKEVQVN

SEQ ID NO: 74207 - protein, 33 aa, Artificial Sequence
  Cyclic GFR-binding peptide
  MOD_RES (4)..(4): Xaa is C or S
GLEXVPTEEEPLTMLYYRIKPHQGQHEQLSNFL

SEQ ID NO: 74208 - protein, 29 aa, Artificial Sequence
  Cyclic GFR-binding peptide
  MOD_RES (2)..(3): Xaa is C or S
PXXAPTQLSNITVQIMDDSSNVIIGEMSN

SEQ ID NO: 74209 - protein, 26 aa, Artificial Sequence
  Cyclic GFR-binding peptide
SNITMQIMDEYDKVVIGEMSEMVVEG

SEQ ID NO: 74210 - protein, 36 aa, Artificial Sequence
  Cyclic GFR-binding peptide
  MOD_RES (1)..(35): Xaa is C or S
XVPTEEEPLTMLYYRIKPHQGQHEQLSNFLQHNKXE

SEQ ID NO: 74211 - protein, 32 aa, Artificial Sequence
  Cyclic GFR-binding peptide
  MOD_RES (1)..(1): Xaa is C or S
XVPTELRSVKMAKVDEYDKVVKEVQVEMVVEG

SEQ ID NO: 74212 - protein, 25 aa, Artificial Sequence
  Cyclic GFR-binding peptide
DLRPVQIRKIVGRTPKVKKATVMVV

SEQ ID NO: 74213 - protein, 35 aa, Artificial Sequence; identical to SEQ ID NO: 20083
  Cyclic GFR-binding peptide
  MOD_RES (4)..(5): Xaa is C or S

SEQ ID NO: 74214 - protein, 35 aa, Artificial Sequence
  Cyclic GFR-binding peptide
  MOD_RES (6)..(7): Xaa is C or S
KIPKAXXVPTELRSVKMAKVDENEKVVKEVQVDMV

SEQ ID NO: 74215 - protein, 37 aa, Artificial Sequence; identical to SEQ ID NO: 24101
  Cyclic GFR-binding peptide
  MOD_RES (4)..(4): Xaa is C or S

SEQ ID NO: 74216 - protein, 36 aa, Artificial Sequence
  Cyclic GFR-binding peptide
  MOD_RES (7)..(7): Xaa is C or S
NDEGLEXVPTEEEPLTMLYYRIKPHQGQHEQLSNFL

SEQ ID NO: 74217 - protein, 34 aa, Artificial Sequence
  Cyclic GFR-binding peptide
  MOD_RES (34)..(34): Xaa is C or S
QVQLEPLTVLYYEIVRKKPIFEQLSNTLEDHLAX

SEQ ID NO: 74218 - protein, 36 aa, Artificial Sequence; identical to SEQ ID NO: 24102
  Cyclic GFR-binding peptide
  MOD_RES (5)..(5): Xaa is C or S

SEQ ID NO: 74219 - protein, 31 aa, Artificial Sequence
  Cyclic GFR-binding peptide
  MOD_RES (1)..(2): Xaa is C or S
XXVPQDLSNITIQIMVGRTPKVIGEMSMVVK

SEQ ID NO: 74220 - protein, 27 aa, Artificial Sequence
  Cyclic GFR-binding peptide
ELEPLPMVYYDEYDKVVEQLSNEMVVE

SEQ ID NO: 74221 - protein, 33 aa, Artificial Sequence
  Cyclic GFR-binding peptide
  MOD_RES (1)..(33): Xaa is C or S
XAPTKLRSVKVAKVDDSSNVIKEVQVNMVVRSX

SEQ ID NO: 74222 - protein, 34 aa, Artificial Sequence
  Cyclic GFR-binding peptide
  MOD_RES (1)..(33): Xaa is C or S
XAPTQLRPVQVRKIDDSSNVIKKATVNMVVRAXG

SEQ ID NO: 74223 - protein, 35 aa, Artificial Sequence
  Cyclic GFR-binding peptide
  MOD_RES (2)..(3)..(35): Xaa is C or S
AXXVPTELRSVKMAKVDENEKVVKEVQVDMVVEGX

SEQ ID NO: 74224 - protein, 38 aa, Artificial Sequence; identical to SEQ ID NO: 24107
  Cyclic GFR-binding peptide
  MOD_RES (36)..(38): Xaa is C or S

SEQ ID NO: 74225 - protein, 26 aa, Artificial Sequence
  Cyclic GFR-binding peptide
  MOD_RES (1)..(1): Xaa is C or S
XVSQDLEPLPIVYYIGKTPKIEQLSN

SEQ ID NO: 74226 - protein, 36 aa, Artificial Sequence; identical to SEQ ID NO: 20102
  Cyclic GFR-binding peptide
  MOD_RES (6)..(6): Xaa is C or S

SEQ ID NO: 74227 - protein, 28 aa, Artificial Sequence
  Cyclic GFR-binding peptide
VHHEPLPVVYYEYVRKKPKLEQLSNRLE

SEQ ID NO: 74228 - protein, 24 aa, Artificial Sequence
  Cyclic GFR-binding peptide
SQDLRPVQIRKIIGKTPKIKKATV

SEQ ID NO: 74229 - protein, 37 aa, Artificial Sequence; identical to SEQ ID NO: 24112
  Cyclic GFR-binding peptide
  MOD_RES (2)..(2): Xaa is C or S

SEQ ID NO: 74230 - protein, 25 aa, Artificial Sequence
  Cyclic GFR-binding peptide
ELSNITMQIMDENEKVVIGEMSDMV

SEQ ID NO: 74231 - protein, 37 aa, Artificial Sequence; identical to SEQ ID NO: 20105
  Cyclic GFR-binding peptide
  MOD_RES (6)..(7): Xaa is C or S

SEQ ID NO: 74232 - protein, 36 aa, Artificial Sequence
  Cyclic GFR-binding peptide
  MOD_RES (36)..(36): Xaa is C or S
PSRVHHEPLTVLYYEYVRKKPKLEQLSNRLEEHLEX

SEQ ID NO: 74233 - protein, 30 aa, Artificial Sequence
  Cyclic GFR-binding peptide
PTQVQLEPLTVLYYEIVRKKPIFEQLSNTL

SEQ ID NO: 74234 - protein, 23 aa, Artificial Sequence
  Cyclic GFR-binding peptide
RSVKVAKVEIVRKKPIFKEVQVT

SEQ ID NO: 74235 - protein, 28 aa, Artificial Sequence
  Cyclic GFR-binding peptide
TQLEPLPVVYYDDSSNVIEQLSNNMVVR

SEQ ID NO: 74236 - protein, 29 aa, Artificial Sequence
  Cyclic GFR-binding peptide
  MOD_RES (27)..(29): Xaa is C or S
RPVQVRKIDDSSNVIKKATVNMVVRSXGX

SEQ ID NO: 74237 - protein, 31 aa, Artificial Sequence
  Cyclic GFR-binding peptide
  MOD_RES (28)..(30): Xaa is C or S
LRSVKVAKVDDSSNVIKEVQVNMVVRSXGXH

SEQ ID NO: 74238 - protein, 39 aa, Artificial Sequence
  Cyclic GFR-binding peptide
  MOD_RES (2)..(39): Xaa is C or S
KXQPSRVHHEPLTVLYYEYVRKKPKLEQLSNRLEEHLEX

SEQ ID NO: 74239 - protein, 30 aa, Artificial Sequence
  Cyclic GFR-binding peptide
  MOD_RES (2)..(3): Xaa is C or S
PXXAPTKLRPVQVRKIDDSSNVIKKATVNM

SEQ ID NO: 74240 - protein, 27 aa, Artificial Sequence
  Cyclic GFR-binding peptide
PTQLEPLTVLYYDDSSNVIEQLSNNMV

SEQ ID NO: 74241 - protein, 36 aa, Artificial Sequence; identical to SEQ ID NO: 20123
  Cyclic GFR-binding peptide
  MOD_RES (5)..(6): Xaa is C or S

SEQ ID NO: 74242 - protein, 24 aa, Artificial Sequence
  Cyclic GFR-binding peptide
EPLPIVYYVGRTPKVEQLSNMVVK

SEQ ID NO: 74243 - protein, 36 aa, Artificial Sequence
  Cyclic GFR-binding peptide
  MOD_RES (3)..(4)..(35): Xaa is C or S
APXXVPQALRSVKIAKVVGRKPKVKEVQVMIVRSXK

SEQ ID NO: 74244 - protein, 34 aa, Artificial Sequence
  Cyclic GFR-binding peptide
  MOD_RES (2)..(3): Xaa is C or S
PXXAPTQLSNITVQIMDDSSNVIIGEMSNMVVRA

SEQ ID NO: 74245 - protein, 22 aa, Artificial Sequence
  Cyclic GFR-binding peptide
ELEPLPMVYYDENEKVVEQLSN

SEQ ID NO: 74246 - protein, 36 aa, Artificial Sequence
  Cyclic GFR-binding peptide
  MOD_RES (3)..(4)..(36): Xaa is C or S
KPXXAPTKLSNITVQIMDDSSNVIIGEMSNMVVRSX

SEQ ID NO: 74247 - protein, 25 aa, Artificial Sequence
  Cyclic GFR-binding peptide
TELSNITMQIMDEYDKVVIGEMSEM

SEQ ID NO: 74248 - protein, 31 aa, Artificial Sequence
  Cyclic GFR-binding peptide
  MOD_RES (5)..(6): Xaa is C or S
IPKAXXVPTELRPVQMRKIDEYDKVVKKATV

SEQ ID NO: 74249 - protein, 26 aa, Artificial Sequence
  Cyclic GFR-binding peptide
APTKLSNITVQIMDDSSNVIIGEMSN

SEQ ID NO: 74250 - protein, 31 aa, Artificial Sequence
  Cyclic GFR-binding peptide
  MOD_RES (30)..(30): Xaa is C or S
TQLRSVKVAKVDDSSNVIKEVQVNMVVRAXG

SEQ ID NO: 74251 - protein, 36 aa, Artificial Sequence; identical to SEQ ID NO: 24139
  Cyclic GFR-binding peptide

SEQ ID NO: 74252 - protein, 31 aa, Artificial Sequence
  Cyclic GFR-binding peptide
  MOD_RES (4)..(5): Xaa is C or S
PKPXXAPTQLSNITVQIMDDSSNVIIGEMSN

SEQ ID NO: 74253 - protein, 38 aa, Artificial Sequence
  Cyclic GFR-binding peptide
  MOD_RES (2)..(3)..(35)..(37): Xaa is C or S
AXXVPTELRPVQMRKIDENEKVVKKATVDMVVEGXGXR

SEQ ID NO: 74254 - protein, 25 aa, Artificial Sequence
  Cyclic GFR-binding peptide
APTKLEPLPVVYYDDSSNVIEQLSN

SEQ ID NO: 74255 - protein, 27 aa, Artificial Sequence
  Cyclic GFR-binding peptide
  MOD_RES (1)..(1): Xaa is C or S
XAPTKLEPLTVLYYDDSSNVIEQLSNN

SEQ ID NO: 74256 - protein, 29 aa, Artificial Sequence
  Cyclic GFR-binding peptide
  MOD_RES (2)..(3): Xaa is C or S
PXXVPQDLEPLPIVYYVGRTPKVEQLSNM

SEQ ID NO: 74257 - protein, 30 aa, Artificial Sequence; identical to SEQ ID NO: 24146
  Cyclic GFR-binding peptide
  MOD_RES (30)..(30): Xaa is C or S

SEQ ID NO: 74258 - protein, 40 aa, Artificial Sequence; identical to SEQ ID NO: 24148
  Cyclic GFR-binding peptide
  MOD_RES (3)..(37)..(39): Xaa is C or S

SEQ ID NO: 74259 - protein, 39 aa, Artificial Sequence
  Cyclic GFR-binding peptide
  MOD_RES (6)..(7)..(38): Xaa is C or S
ASASPXXVPQDLRPVQIRKIVGRTPKVKKATVMVVKSXK

SEQ ID NO: 74260 - protein, 29 aa, Artificial Sequence
  Cyclic GFR-binding peptide
  MOD_RES (29)..(29): Xaa is C or S
QLSNITVQIMDDSSNVIIGEMSNMVVRAX

SEQ ID NO: 74261 - protein, 28 aa, Artificial Sequence
  Cyclic GFR-binding peptide
VPTELEPLTMLYYDENEKVVEQLSNDMV

SEQ ID NO: 74262 - protein, 29 aa, Artificial Sequence
  Cyclic GFR-binding peptide
PTELSNITMQIMDEYDKVVIGEMSEMVVE

SEQ ID NO: 74263 - protein, 36 aa, Artificial Sequence
  Cyclic GFR-binding peptide
  MOD_RES (1)..(33)..(35): Xaa is C or S
XAPTQLRPVQVRKIDDSSNVIKKATVNMVVRAXGXH

SEQ ID NO: 74264 - protein, 33 aa, Artificial Sequence; identical to SEQ ID NO: 20163
  Cyclic GFR-binding peptide
  MOD_RES (1)..(33): Xaa is C or S

SEQ ID NO: 74265 - protein, 32 aa, Artificial Sequence
  Cyclic GFR-binding peptide
  MOD_RES (4)..(5): Xaa is C or S
PKPXXAPTKLRSVKVAKVDDSSNVIKEVQVNM

SEQ ID NO: 74266 - protein, 29 aa, Artificial Sequence
  Cyclic GFR-binding peptide
  MOD_RES (1)..(2): Xaa is C or S
XXVSQDLRSVKIAKVIGKTPKIKEVQVMI

SEQ ID NO: 74267 - protein, 27 aa, Artificial Sequence
  Cyclic GFR-binding peptide
PTKLRSVKVAKVDDSSNVIKEVQVNMV

SEQ ID NO: 74268 - protein, 37 aa, Artificial Sequence; identical to SEQ ID NO: 24152
  Cyclic GFR-binding peptide
  MOD_RES (2)..(2): Xaa is C or S

SEQ ID NO: 74269 - protein, 37 aa, Artificial Sequence; identical to SEQ ID NO: 24153
  Cyclic GFR-binding peptide
  MOD_RES (36)..(36): Xaa is C or S

SEQ ID NO: 74270 - protein, 38 aa, Artificial Sequence; identical to SEQ ID NO: 20173
  Cyclic GFR-binding peptide
  MOD_RES (4)..(5)..(37): Xaa is C or S

SEQ ID NO: 74271 - protein, 27 aa, Artificial Sequence
  Cyclic GFR-binding peptide
ELSNITMQIMDEYDKVVIGEMSEMVVE

SEQ ID NO: 74272 - protein, 28 aa, Artificial Sequence
  Cyclic GFR-binding peptide
VPTELRPVQMRKIDENEKVVKKATVDMV

SEQ ID NO: 74273 - protein, 30 aa, Artificial Sequence; identical to SEQ ID NO: 20180
  Cyclic GFR-binding peptide
  MOD_RES (29)..(29): Xaa is C or S

SEQ ID NO: 74274 - protein, 32 aa, Artificial Sequence
  Cyclic GFR-binding peptide
  MOD_RES (4)..(5): Xaa is C or S
ASPXXVPQDLSNITIQIMVGRTPKVIGEMSMV

SEQ ID NO: 74275 - protein, 38 aa, Artificial Sequence; identical to SEQ ID NO: 20181
  Cyclic GFR-binding peptide
  MOD_RES (5)..(6)..(38): Xaa is C or S

SEQ ID NO: 74276 - protein, 28 aa, Artificial Sequence
  Cyclic GFR-binding peptide
QLSNITVQIMEIVRKKPIFIGEMSTLED

SEQ ID NO: 74277 - protein, 37 aa, Artificial Sequence; identical to SEQ ID NO: 20182
  Cyclic GFR-binding peptide
  MOD_RES (1)..(2)..(34)..(36): Xaa is C or S

SEQ ID NO: 74278 - protein, 30 aa, Artificial Sequence; identical to SEQ ID NO: 20184
  Cyclic GFR-binding peptide
  MOD_RES (27)..(29): Xaa is C or S

SEQ ID NO: 74279 - protein, 27 aa, Artificial Sequence
  Cyclic GFR-binding peptide
ELEPLTMLYYDENEKVVEQLSNDMVVE

SEQ ID NO: 74280 - protein, 38 aa, Artificial Sequence
  Cyclic GFR-binding peptide
  MOD_RES (6)..(7)..(38): Xaa is C or S
ASAAPXXVPQALRPVQIRKIVGRKPKVKKATVMIVRSX

SEQ ID NO: 74281 - protein, 30 aa, Artificial Sequence
  Cyclic GFR-binding peptide
  MOD_RES (27)..(29): Xaa is C or S
RSVKVAKVDDSSNVIKEVQVNMVVRAXGXH

SEQ ID NO: 74282 - protein, 27 aa, Artificial Sequence
  Cyclic GFR-binding peptide
  MOD_RES (1)..(1): Xaa is C or S
XVPTELSNITMQIMDEYDKVVIGEMSE

SEQ ID NO: 74283 - protein, 36 aa, Artificial Sequence
  Cyclic GFR-binding peptide
  MOD_RES (36)..(36): Xaa is C or S
PSRVHHEPLPVVYYEYVRKKPKLEQLSNRLEEHLEX

SEQ ID NO: 74284 - protein, 41 aa, Artificial Sequence
  Cyclic GFR-binding peptide
  MOD_RES (6)..(40): Xaa is C or S
DEGLEXVPTEEEPLTMLYYRIKPHQGQHEQLSNFLQHNKXE

SEQ ID NO: 74285 - protein, 28 aa, Artificial Sequence
  Cyclic GFR-binding peptide
  MOD_RES (1)..(2): Xaa is C or S
XXVPTELSNITMQIMDENEKVVIGEMSD

SEQ ID NO: 74286 - protein, 31 aa, Artificial Sequence; identical to SEQ ID NO: 20197
  Cyclic GFR-binding peptide
  MOD_RES (30)..(30): Xaa is C or S

SEQ ID NO: 74287 - protein, 34 aa, Artificial Sequence; identical to SEQ ID NO: 24167
  Cyclic GFR-binding peptide
  MOD_RES (33)..(33): Xaa is C or S

SEQ ID NO: 74288 - protein, 35 aa, Artificial Sequence; identical to SEQ ID NO: 20200
  Cyclic GFR-binding peptide
  MOD_RES (2)..(3)..(35): Xaa is C or S

SEQ ID NO: 74289 - protein, 38 aa, Artificial Sequence
  Cyclic GFR-binding peptide
  MOD_RES (2)..(2): Xaa is C or S
QXRPTQVQLEPLPVVYYEIVRKKPIFEQLSNTLEDHLA

SEQ ID NO: 74290 - protein, 29 aa, Artificial Sequence
  Cyclic GFR-binding peptide
TELEPLTMLYYDENEKVVEQLSNDMVVEG

SEQ ID NO: 74291 - protein, 30 aa, Artificial Sequence; identical to SEQ ID NO: 20204
  Cyclic GFR-binding peptide
  MOD_RES (30)..(30): Xaa is C or S

SEQ ID NO: 74292 - protein, 44 aa, Artificial Sequence
  Cyclic GFR-binding peptide
  MOD_RES (5)..(42)..(44): Xaa is C or S
RNVQXRPTQVQLEPLPVVYYEIVRKKPIFEQLSNTLEDHLAXKX

SEQ ID NO: 74293 - protein, 27 aa, Artificial Sequence
  Cyclic GFR-binding peptide
PTQLRPVQVRKIDDSSNVIKKATVNMV

SEQ ID NO: 74294 - protein, 26 aa, Artificial Sequence
  Cyclic GFR-binding peptide
EPLPVVYYDDSSNVIEQLSNNMVVRS

SEQ ID NO: 74295 - protein, 30 aa, Artificial Sequence
  Cyclic GFR-binding peptide
  MOD_RES (1)..(1): Xaa is C or S
XAPTKLRSVKVAKVDDSSNVIKEVQVNMVV

SEQ ID NO: 74296 - protein, 38 aa, Artificial Sequence
  Cyclic GFR-binding peptide
  MOD_RES (5)..(6)..(38): Xaa is C or S
IPKAXXVPTELRSVKMAKVDENEKVVKEVQVDMVVEGX

SEQ ID NO: 74297 - protein, 29 aa, Artificial Sequence
  Cyclic GFR-binding peptide
VPTELSNITMQIMDENEKVVIGEMSDMVV

SEQ ID NO: 74298 - protein, 29 aa, Artificial Sequence
  Cyclic GFR-binding peptide
EEEPLTMLYYRIKPHQGQHEQLSNFLQHN

SEQ ID NO: 74299 - protein, 27 aa, Artificial Sequence
  Cyclic GFR-binding peptide
TKLRPVQVRKIDDSSNVIKKATVNMVV

SEQ ID NO: 74300 - protein, 28 aa, Artificial Sequence
  Cyclic GFR-binding peptide
PQALRPVQIRKIVGRKPKVKKATVMIVR

SEQ ID NO: 74301 - protein, 28 aa, Artificial Sequence
  Cyclic GFR-binding peptide
  MOD_RES (2)..(3): Xaa is C or S
PXXVPQALEPLTILYYVGRKPKVEQLSN

SEQ ID NO: 74302 - protein, 24 aa, Artificial Sequence
  Cyclic GFR-binding peptide
LRSVKVAKVDDSSNVIKEVQVNMV

SEQ ID NO: 74303 - protein, 23 aa, Artificial Sequence
  Cyclic GFR-binding peptide
EPLPVVYYEIVRKKPIFEQLSNT

SEQ ID NO: 74304 - protein, 26 aa, Artificial Sequence
  Cyclic GFR-binding peptide
PTQLSNITVQIMDDSSNVIIGEMSNM

SEQ ID NO: 74305 - protein, 29 aa, Artificial Sequence
  Cyclic GFR-binding peptide
  MOD_RES (3)..(3): Xaa is C or S
PTXAPTKLEPLPVVYYDDSSNVIEQLSNN

SEQ ID NO: 74306 - protein, 34 aa, Artificial Sequence; identical to SEQ ID NO: 20219
  Cyclic GFR-binding peptide
  MOD_RES (5)..(6): Xaa is C or S

SEQ ID NO: 74307 - protein, 33 aa, Artificial Sequence
  Cyclic GFR-binding peptide
  MOD_RES (4)..(5): Xaa is C or S
AAPXXVPQALSNITIQIMVGRKPKVIGEMSMIV

SEQ ID NO: 74308 - protein, 31 aa, Artificial Sequence
  Cyclic GFR-binding peptide
  MOD_RES (30)..(30): Xaa is C or S
TKLRSVKVAKVDDSSNVIKEVQVNMVVRSXG

SEQ ID NO: 74309 - protein, 38 aa, Artificial Sequence; identical to SEQ ID NO: 20230
  Cyclic GFR-binding peptide
  MOD_RES (4)..(36)..(38): Xaa is C or S

SEQ ID NO: 74310 - protein, 29 aa, Artificial Sequence
  Cyclic GFR-binding peptide
  MOD_RES (29)..(29): Xaa is C or S
ELSNITMQIMDENEKVVIGEMSDMVVEGX

SEQ ID NO: 74311 - protein, 32 aa, Artificial Sequence
  Cyclic GFR-binding peptide
  MOD_RES (2)..(2): Xaa is C or S
QXRPTQVQLEPLPVVYYEIVRKKPIFEQLSNT

SEQ ID NO: 74312 - protein, 34 aa, Artificial Sequence
  Cyclic GFR-binding peptide
  MOD_RES (4)..(5): Xaa is C or S
PKAXXVPTELSNITMQIMDENEKVVIGEMSDMVV

SEQ ID NO: 74313 - protein, 28 aa, Artificial Sequence
  Cyclic GFR-binding peptide
LEPLPVVYYEIVRKKPIFEQLSNTLEDH

SEQ ID NO: 74314 - protein, 31 aa, Artificial Sequence
  Cyclic GFR-binding peptide
  MOD_RES (2)..(3): Xaa is C or S
PXXVSQDLRPVQIRKIIGKTPKIKKATVMIV

SEQ ID NO: 74315 - protein, 27 aa, Artificial Sequence
  Cyclic GFR-binding peptide
DLRPVQIRKIVGRTPKVKKATVMVVKS

SEQ ID NO: 74316 - protein, 36 aa, Artificial Sequence; identical to SEQ ID NO: 20256
  Cyclic GFR-binding peptide
  MOD_RES (7)..(7): Xaa is C or S

SEQ ID NO: 74317 - protein, 26 aa, Artificial Sequence
  Cyclic GFR-binding peptide
EPLPVVYYDDSSNVIEQLSNNMVVRA

SEQ ID NO: 74318 - protein, 24 aa, Artificial Sequence
  Cyclic GFR-binding peptide
TKLEPLTVLYYDDSSNVIEQLSNN

SEQ ID NO: 74319 - protein, 40 aa, Artificial Sequence
  Cyclic GFR-binding peptide
  MOD_RES (6)..(7)..(39): Xaa is C or S
YVPKPXXAPTKLRSVKVAKVDDSSNVIKEVQVNMVVRSXG

SEQ ID NO: 74320 - protein, 27 aa, Artificial Sequence
  Cyclic GFR-binding peptide
PQDLSNITIQIMVGRTPKVIGEMSMVV

SEQ ID NO: 74321 - protein, 31 aa, Artificial Sequence; identical to SEQ ID NO: 24204
  Cyclic GFR-binding peptide

SEQ ID NO: 74322 - protein, 28 aa, Artificial Sequence
  Cyclic GFR-binding peptide
TELEPLTMLYYDENEKVVEQLSNDMVVE

SEQ ID NO: 74323 - protein, 23 aa, Artificial Sequence
  Cyclic GFR-binding peptide
TELRSVKMAKVDEYDKVVKEVQV

SEQ ID NO: 74324 - protein, 33 aa, Artificial Sequence
  Cyclic GFR-binding peptide
  MOD_RES (2)..(3): Xaa is C or S
AXXVPTELSNITMQIMDENEKVVIGEMSDMVVE

SEQ ID NO: 74325 - protein, 38 aa, Artificial Sequence
  Cyclic GFR-binding peptide
  MOD_RES (5)..(6)..(38): Xaa is C or S
IPKAXXVPTELRSVKMAKVDEYDKVVKEVQVEMVVEGX

SEQ ID NO: 74326 - protein, 26 aa, Artificial Sequence
  Cyclic GFR-binding peptide
PTQLEPLTVLYYDDSSNVIEQLSNNM

SEQ ID NO: 74327 - protein, 23 aa, Artificial Sequence
  Cyclic GFR-binding peptide
EPLPIVYYVGRTPKVEQLSNMVV

SEQ ID NO: 74328 - protein, 35 aa, Artificial Sequence
  Cyclic GFR-binding peptide
  MOD_RES (6)..(7): Xaa is C or S
KIPKAXXVPTELSNITMQIMDENEKVVIGEMSDMV

SEQ ID NO: 74329 - protein, 34 aa, Artificial Sequence
  Cyclic GFR-binding peptide
  MOD_RES (6)..(7): Xaa is C or S
KIPKAXXVPTELSNITMQIMDENEKVVIGEMSDM

SEQ ID NO: 74330 - protein, 30 aa, Artificial Sequence; identical to SEQ ID NO: 20277
  Cyclic GFR-binding peptide
  MOD_RES (30)..(30): Xaa is C or S

SEQ ID NO: 74331 - protein, 26 aa, Artificial Sequence
  Cyclic GFR-binding peptide
EEPLTMLYYRIKPHQGQHEQLSNFLQ

SEQ ID NO: 74332 - protein, 41 aa, Artificial Sequence
  Cyclic GFR-binding peptide
  MOD_RES (6)..(7)..(38)..(40): Xaa is C or S
ASASPXXVPQDLRSVKIAKVVGRTPKVKEVQVMVVKSXKXS

SEQ ID NO: 74333 - protein, 21 aa, Artificial Sequence
  Cyclic GFR-binding peptide
LRPVQMRKIDENEKVVKKATV

SEQ ID NO: 74334 - protein, 30 aa, Artificial Sequence
  Cyclic GFR-binding peptide
  MOD_RES (5)..(5): Xaa is C or S
TKPTXAPTKLSNITVQIMDDSSNVIIGEMS

SEQ ID NO: 74335 - protein, 41 aa, Artificial Sequence
  Cyclic GFR-binding peptide
  MOD_RES (5)..(6)..(38)..(40): Xaa is C or S
IPKAXXVPTELRSVKMAKVDEYDKVVKEVQVEMVVEGXGXR

SEQ ID NO: 74336 - protein, 29 aa, Artificial Sequence
  Cyclic GFR-binding peptide
RPVQVRKIEYVRKKPKLKKATVRLEEHLE

SEQ ID NO: 74337 - protein, 25 aa, Artificial Sequence
  Cyclic GFR-binding peptide
KLSNITVQIMDDSSNVIIGEMSNMV

SEQ ID NO: 74338 - protein, 30 aa, Artificial Sequence; identical to SEQ ID NO: 20285
  Cyclic GFR-binding peptide
  MOD_RES (29)..(29): Xaa is C or S

SEQ ID NO: 74339 - protein, 39 aa, Artificial Sequence
  Cyclic GFR-binding peptide
  MOD_RES (3)..(4)..(36)..(38): Xaa is C or S
KAXXVPTELSNITMQIMDEYDKVVIGEMSEMVVEGXGXR

SEQ ID NO: 74340 - protein, 41 aa, Artificial Sequence
  Cyclic GFR-binding peptide
  MOD_RES (1)..(38)..(40): Xaa is C or S
XRPTQVQLEPLTVLYYEIVRKKPIFEQLSNTLEDHLAXKXE

SEQ ID NO: 74341 - protein, 34 aa, Artificial Sequence
  Cyclic GFR-binding peptide
  MOD_RES (32)..(34): Xaa is C or S
APTQLSNITVQIMDDSSNVIIGEMSNMVVRAXGX

SEQ ID NO: 74342 - protein, 32 aa, Artificial Sequence
  Cyclic GFR-binding peptide
  MOD_RES (1)..(2): Xaa is C or S
XXVPTELSNITMQIMDEYDKVVIGEMSEMVVE

SEQ ID NO: 74343 - protein, 28 aa, Artificial Sequence
  Cyclic GFR-binding peptide
  MOD_RES (2)..(3): Xaa is C or S
PXXAPTQLRSVKVAKVDDSSNVIKEVQV

SEQ ID NO: 74344 - protein, 37 aa, Artificial Sequence
  Cyclic GFR-binding peptide
  MOD_RES (1)..(1): Xaa is C or S
XQPSRVHHEPLTVLYYEYVRKKPKLEQLSNRLEEHLE

SEQ ID NO: 74345 - protein, 36 aa, Artificial Sequence; identical to SEQ ID NO: 20294
  Cyclic GFR-binding peptide
  MOD_RES (4)..(5)..(36): Xaa is C or S

SEQ ID NO: 74346 - protein, 40 aa, Artificial Sequence
  Cyclic GFR-binding peptide
  MOD_RES (6)..(7)..(38)..(40): Xaa is C or S
ASASPXXVSQDLSNITIQIMIGKTPKIIGEMSMIVKSXKX

SEQ ID NO: 74347 - protein, 31 aa, Artificial Sequence; identical to SEQ ID NO: 20304
  Cyclic GFR-binding peptide
  MOD_RES (28)..(30): Xaa is C or S

SEQ ID NO: 74348 - protein, 28 aa, Artificial Sequence
  Cyclic GFR-binding peptide
  MOD_RES (1)..(1): Xaa is C or S
XVSQDLRSVKIAKVIGKTPKIKEVQVMI

SEQ ID NO: 74349 - protein, 31 aa, Artificial Sequence
  Cyclic GFR-binding peptide
  MOD_RES (4)..(4): Xaa is C or S
GLEXVPTEEEPLTMLYYRIKPHQGQHEQLSN

SEQ ID NO: 74350 - protein, 28 aa, Artificial Sequence
  Cyclic GFR-binding peptide
HSNITVQIMEYVRKKPKLIGEMSRLEEH

SEQ ID NO: 74351 - protein, 31 aa, Artificial Sequence; identical to SEQ ID NO: 20308
  Cyclic GFR-binding peptide

SEQ ID NO: 74352 - protein, 38 aa, Artificial Sequence
  Cyclic GFR-binding peptide
  MOD_RES (3)..(4)..(36)..(38): Xaa is C or S
KAXXVPTELRPVQMRKIDENEKVVKKATVDMVVEGXGX

SEQ ID NO: 74353 - protein, 30 aa, Artificial Sequence
  Cyclic GFR-binding peptide
  MOD_RES (1)..(1): Xaa is C or S
XAPTQLRPVQVRKIDDSSNVIKKATVNMVV

SEQ ID NO: 74354 - protein, 35 aa, Artificial Sequence; identical to SEQ ID NO: 24236
  Cyclic GFR-binding peptide
  MOD_RES (5)..(5): Xaa is C or S

SEQ ID NO: 74355 - protein, 29 aa, Artificial Sequence
  Cyclic GFR-binding peptide
  MOD_RES (1)..(2): Xaa is C or S
XXVPQDLRSVKIAKVVGRTPKVKEVQVMV

SEQ ID NO: 74356 - protein, 42 aa, Artificial Sequence; identical to SEQ ID NO: 24237
  Cyclic GFR-binding peptide
  MOD_RES (5)..(42): Xaa is C or S

SEQ ID NO: 74357 - protein, 35 aa, Artificial Sequence
  Cyclic GFR-binding peptide
  MOD_RES (2)..(2): Xaa is C or S
EXVPTEEEPLPMVYYRIKPHQGQHEQLSNFLQHNK

SEQ ID NO: 74358 - protein, 35 aa, Artificial Sequence; identical to SEQ ID NO: 24240
  Cyclic GFR-binding peptide
  MOD_RES (32)..(34): Xaa is C or S

SEQ ID NO: 74359 - protein, 27 aa, Artificial Sequence
  Cyclic GFR-binding peptide
QALRPVQIRKIVGRKPKVKKATVMIVR

SEQ ID NO: 74360 - protein, 34 aa, Artificial Sequence; identical to SEQ ID NO: 20309
  Cyclic GFR-binding peptide
  MOD_RES (32)..(34): Xaa is C or S

SEQ ID NO: 74361 - protein, 34 aa, Artificial Sequence
  Cyclic GFR-binding peptide
  MOD_RES (1)..(2)..(33): Xaa is C or S
XXVPQDLRSVKIAKVVGRTPKVKEVQVMVVKSXK

SEQ ID NO: 74362 - protein, 30 aa, Artificial Sequence; identical to SEQ ID NO: 20313
  Cyclic GFR-binding peptide
  MOD_RES (1)..(1): Xaa is C or S

SEQ ID NO: 74363 - protein, 39 aa, Artificial Sequence
  Cyclic GFR-binding peptide
  MOD_RES (7)..(39): Xaa is C or S
HVTKPTXAPTKLRSVKVAKVDDSSNVIKEVQVNMVVRSX

SEQ ID NO: 74364 - protein, 36 aa, Artificial Sequence; identical to SEQ ID NO: 24244
  Cyclic GFR-binding peptide
  MOD_RES (2)..(2): Xaa is C or S

SEQ ID NO: 74365 - protein, 35 aa, Artificial Sequence
  Cyclic GFR-binding peptide
  MOD_RES (3)..(4)..(35): Xaa is C or S
SPXXVPQDLRSVKIAKVVGRTPKVKEVQVMVVKSX

SEQ ID NO: 74366 - protein, 24 aa, Artificial Sequence
  Cyclic GFR-binding peptide
ELEPLPMVYYDEYDKVVEQLSNEM

SEQ ID NO: 74367 - protein, 26 aa, Artificial Sequence
  Cyclic GFR-binding peptide
HEPLPVVYYEYVRKKPKLEQLSNRLE

SEQ ID NO: 74368 - protein, 35 aa, Artificial Sequence; identical to SEQ ID NO: 24249
  Cyclic GFR-binding peptide

SEQ ID NO: 74369 - protein, 33 aa, Artificial Sequence
  Cyclic GFR-binding peptide
  MOD_RES (1)..(2)..(33): Xaa is C or S
XXVPQALRPVQIRKIVGRKPKVKKATVMIVRSX

SEQ ID NO: 74370 - protein, 21 aa, Artificial Sequence
  Cyclic GFR-binding peptide
LEPLPMVYYDENEKVVEQLSN

SEQ ID NO: 74371 - protein, 37 aa, Artificial Sequence; identical to SEQ ID NO: 24253
  Cyclic GFR-binding peptide
  MOD_RES (35)..(37): Xaa is C or S

SEQ ID NO: 74372 - protein, 34 aa, Artificial Sequence
  Cyclic GFR-binding peptide
  MOD_RES (33)..(33): Xaa is C or S
VHHEPLPVVYYEYVRKKPKLEQLSNRLEEHLEXA

SEQ ID NO: 74373 - protein, 34 aa, Artificial Sequence
  Cyclic GFR-binding peptide
  MOD_RES (6)..(7): Xaa is C or S
ASAAPXXVPQALRSVKIAKVVGRKPKVKEVQVMI

SEQ ID NO: 74374 - protein, 39 aa, Artificial Sequence; identical to SEQ ID NO: 24259
  Cyclic GFR-binding peptide
  MOD_RES (2)..(39): Xaa is C or S

SEQ ID NO: 74375 - protein, 30 aa, Artificial Sequence
  Cyclic GFR-binding peptide
  MOD_RES (30)..(30): Xaa is C or S
PQDLRSVKIAKVVGRTPKVKEVQVMVVKSX

SEQ ID NO: 74376 - protein, 34 aa, Artificial Sequence
  Cyclic GFR-binding peptide
  MOD_RES (1)..(32)..(34): Xaa is C or S
XVSQDLRSVKIAKVIGKTPKIKEVQVMIVKSXKX

SEQ ID NO: 74377 - protein, 32 aa, Artificial Sequence
  Cyclic GFR-binding peptide
  MOD_RES (1)..(32): Xaa is C or S
XVPQALRPVQIRKIVGRKPKVKKATVMIVRSX

SEQ ID NO: 74378 - protein, 25 aa, Artificial Sequence
  Cyclic GFR-binding peptide
VPQDLRSVKIAKVVGRTPKVKEVQV

SEQ ID NO: 74379 - protein, 28 aa, Artificial Sequence
  Cyclic GFR-binding peptide
QALSNITIQIMVGRKPKVIGEMSMIVRS

SEQ ID NO: 74380 - protein, 39 aa, Artificial Sequence
  Cyclic GFR-binding peptide
  MOD_RES (5)..(6)..(38): Xaa is C or S
VPKPXXAPTKLRSVKVAKVDDSSNVIKEVQVNMVVRSXG

SEQ ID NO: 74381 - protein, 43 aa, Artificial Sequence; identical to SEQ ID NO: 24272
  Cyclic GFR-binding peptide
  MOD_RES (5)..(42): Xaa is C or S

SEQ ID NO: 74382 - protein, 40 aa, Artificial Sequence
  Cyclic GFR-binding peptide
  MOD_RES (7)..(39): Xaa is C or S
HVTKPTXAPTKLSNITVQIMDDSSNVIIGEMSNMVVRSXG

SEQ ID NO: 74383 - protein, 33 aa, Artificial Sequence; identical to SEQ ID NO: 20342
  Cyclic GFR-binding peptide
  MOD_RES (2)..(3): Xaa is C or S

SEQ ID NO: 74384 - protein, 26 aa, Artificial Sequence
  Cyclic GFR-binding peptide
QLSNITVQIMEIVRKKPIFIGEMSTL

SEQ ID NO: 74385 - protein, 31 aa, Artificial Sequence
  Cyclic GFR-binding peptide
  MOD_RES (5)..(5): Xaa is C or S
TKPTXAPTKLSNITVQIMDDSSNVIIGEMSN

SEQ ID NO: 74386 - protein, 32 aa, Artificial Sequence
  Cyclic GFR-binding peptide
  MOD_RES (2)..(2): Xaa is C or S
KXQPSRVHHEPLTVLYYEYVRKKPKLEQLSNR

SEQ ID NO: 74387 - protein, 41 aa, Artificial Sequence
  Cyclic GFR-binding peptide
  MOD_RES (4)..(41): Xaa is C or S
SVKXQPSRVHHEPLPVVYYEYVRKKPKLEQLSNRLEEHLEX

SEQ ID NO: 74388 - protein, 42 aa, Artificial Sequence; identical to SEQ ID NO: 20353
  Cyclic GFR-binding peptide
  MOD_RES (6)..(7)..(39)..(41): Xaa is C or S

SEQ ID NO: 74389 - protein, 30 aa, Artificial Sequence
  Cyclic GFR-binding peptide
  MOD_RES (2)..(3): Xaa is C or S
AXXVPTELRPVQMRKIDENEKVVKKATVDM

SEQ ID NO: 74390 - protein, 30 aa, Artificial Sequence
  Cyclic GFR-binding peptide
  MOD_RES (27)..(29): Xaa is C or S
LRPVQIRKIVGRKPKVKKATVMIVRSXKXS

SEQ ID NO: 74391 - protein, 37 aa, Artificial Sequence
  Cyclic GFR-binding peptide
  MOD_RES (5)..(5): Xaa is C or S
RNVQXRPTQVQLEPLTVLYYEIVRKKPIFEQLSNTLE

SEQ ID NO: 74392 - protein, 30 aa, Artificial Sequence
  Cyclic GFR-binding peptide
  MOD_RES (3)..(4): Xaa is C or S
SPXXVSQDLRPVQIRKIIGKTPKIKKATVM

SEQ ID NO: 74393 - protein, 36 aa, Artificial Sequence
  Cyclic GFR-binding peptide
  MOD_RES (4)..(5)..(36): Xaa is C or S
AAPXXVPQALRPVQIRKIVGRKPKVKKATVMIVRSX

SEQ ID NO: 74394 - protein, 27 aa, Artificial Sequence
  Cyclic GFR-binding peptide
  MOD_RES (1)..(2): Xaa is C or S
XXVPTELRSVKMAKVDENEKVVKEVQV

SEQ ID NO: 74395 - protein, 29 aa, Artificial Sequence
  Cyclic GFR-binding peptide
EERPVQMRKIRIKPHQGQHKKATVFLQHN

SEQ ID NO: 74396 - protein, 39 aa, Artificial Sequence; identical to SEQ ID NO: 20364
  Cyclic GFR-binding peptide
  MOD_RES (3)..(4)..(36)..(38): Xaa is C or S

SEQ ID NO: 74397 - protein, 27 aa, Artificial Sequence
  Cyclic GFR-binding peptide
  MOD_RES (27)..(27): Xaa is C or S
RSVKMAKVDENEKVVKEVQVDMVVEGX

SEQ ID NO: 74398 - protein, 38 aa, Artificial Sequence; identical to SEQ ID NO: 20370
  Cyclic GFR-binding peptide
  MOD_RES (6)..(7)..(38): Xaa is C or S

SEQ ID NO: 74399 - protein, 23 aa, Artificial Sequence
  Cyclic GFR-binding peptide
DLRSVKIAKVVGRTPKVKEVQVM

SEQ ID NO: 74400 - protein, 35 aa, Artificial Sequence
  Cyclic GFR-binding peptide
  MOD_RES (1)..(32)..(34): Xaa is C or S
XVPQALSNITIQIMVGRKPKVIGEMSMIVRSXKXS

SEQ ID NO: 74401 - protein, 34 aa, Artificial Sequence
  Cyclic GFR-binding peptide
  MOD_RES (1)..(32)..(34): Xaa is C or S
XVPQDLRPVQIRKIVGRTPKVKKATVMVVKSXKX

SEQ ID NO: 74402 - protein, 43 aa, Artificial Sequence
  Cyclic GFR-binding peptide
  MOD_RES (3)..(40)..(42): Xaa is C or S
VKXQPSRVHHEPLPVVYYEYVRKKPKLEQLSNRLEEHLEXAXA

SEQ ID NO: 74403 - protein, 34 aa, Artificial Sequence; identical to SEQ ID NO: 24303
  Cyclic GFR-binding peptide
  MOD_RES (3)..(3): Xaa is C or S

SEQ ID NO: 74404 - protein, 23 aa, Artificial Sequence
  Cyclic GFR-binding peptide
LRSVKIAKVIGKTPKIKEVQVMI

SEQ ID NO: 74405 - protein, 40 aa, Artificial Sequence
  Cyclic GFR-binding peptide
  MOD_RES (4)..(5)..(37)..(39): Xaa is C or S
PKAXXVPTELRSVKMAKVDENEKVVKEVQVDMVVEGXGXR

SEQ ID NO: 74406 - protein, 35 aa, Artificial Sequence
  Cyclic GFR-binding peptide
  MOD_RES (2)..(2): Xaa is C or S
QXRPTQVQLEPLTVLYYEIVRKKPIFEQLSNTLED

SEQ ID NO: 74407 - protein, 30 aa, Artificial Sequence
  Cyclic GFR-binding peptide
  MOD_RES (30)..(30): Xaa is C or S
TELRPVQMRKIDENEKVVKKATVDMVVEGX

SEQ ID NO: 74408 - protein, 33 aa, Artificial Sequence
  Cyclic GFR-binding peptide
  MOD_RES (1)..(2): Xaa is C or S
XXVPTELRSVKMAKVDEYDKVVKEVQVEMVVEG

SEQ ID NO: 74409 - protein, 30 aa, Artificial Sequence
  Cyclic GFR-binding peptide
QLEPLPVVYYEIVRKKPIFEQLSNTLEDHL

SEQ ID NO: 74410 - protein, 41 aa, Artificial Sequence; identical to SEQ ID NO: 20391
  Cyclic GFR-binding peptide
  MOD_RES (6)..(7)..(39)..(41): Xaa is C or S

SEQ ID NO: 74411 - protein, 33 aa, Artificial Sequence
  Cyclic GFR-binding peptide
  MOD_RES (3)..(4): Xaa is C or S
KAXXVPTELRSVKMAKVDEYDKVVKEVQVEMVV

SEQ ID NO: 74412 - protein, 26 aa, Artificial Sequence
  Cyclic GFR-binding peptide
  MOD_RES (26)..(26): Xaa is C or S
EPLPIVYYIGKTPKIEQLSNMIVKSX

SEQ ID NO: 74413 - protein, 44 aa, Artificial Sequence
  Cyclic GFR-binding peptide
  MOD_RES (4)..(41)..(43): Xaa is C or S
SVKXQPSRVHHEPLPVVYYEYVRKKPKLEQLSNRLEEHLEXAXA

SEQ ID NO: 74414 - protein, 33 aa, Artificial Sequence
  Cyclic GFR-binding peptide
  MOD_RES (4)..(4): Xaa is C or S
KPTXAPTKLSNITVQIMDDSSNVIIGEMSNMVV

SEQ ID NO: 74415 - protein, 23 aa, Artificial Sequence
  Cyclic GFR-binding peptide
ELRPVQMRKIDENEKVVKKATVD

SEQ ID NO: 74416 - protein, 34 aa, Artificial Sequence
  Cyclic GFR-binding peptide
  MOD_RES (5)..(6): Xaa is C or S
IPKAXXVPTELSNITMQIMDENEKVVIGEMSDMV

SEQ ID NO: 74417 - protein, 30 aa, Artificial Sequence; identical to SEQ ID NO: 20400
  Cyclic GFR-binding peptide
  MOD_RES (28)..(30): Xaa is C or S

SEQ ID NO: 74418 - protein, 36 aa, Artificial Sequence
  Cyclic GFR-binding peptide
  MOD_RES (3)..(3): Xaa is C or S
LEXVPTEEEPLTMLYYRIKPHQGQHEQLSNFLQHNK

SEQ ID NO: 74419 - protein, 40 aa, Artificial Sequence
  Cyclic GFR-binding peptide
  MOD_RES (5)..(6)..(38)..(40): Xaa is C or S
VPKPXXAPTKLRPVQVRKIDDSSNVIKKATVNMVVRSXGX

SEQ ID NO: 74420 - protein, 20 aa, Artificial Sequence
  Cyclic GFR-binding peptide
RSVKIAKVIGKTPKIKEVQV

SEQ ID NO: 74421 - protein, 34 aa, Artificial Sequence
  Cyclic GFR-binding peptide
  MOD_RES (2)..(2): Xaa is C or S
KXQPSRVHHEPLPVVYYEYVRKKPKLEQLSNRLE

SEQ ID NO: 74422 - protein, 41 aa, Artificial Sequence; identical to SEQ ID NO: 24328
  Cyclic GFR-binding peptide
  MOD_RES (5)..(5): Xaa is C or S

SEQ ID NO: 74423 - protein, 24 aa, Artificial Sequence
  Cyclic GFR-binding peptide
QALSNITIQIMVGRKPKVIGEMSM

SEQ ID NO: 74424 - protein, 28 aa, Artificial Sequence
  Cyclic GFR-binding peptide
PQALRSVKIAKVVGRKPKVKEVQVMIVR

SEQ ID NO: 74425 - protein, 25 aa, Artificial Sequence
  Cyclic GFR-binding peptide
HHRPVQVRKIEYVRKKPKLKKATVR

SEQ ID NO: 74426 - protein, 32 aa, Artificial Sequence; identical to SEQ ID NO: 20411
  Cyclic GFR-binding peptide
  MOD_RES (29)..(31): Xaa is C or S

SEQ ID NO: 74427 - protein, 29 aa, Artificial Sequence
  Cyclic GFR-binding peptide
  MOD_RES (2)..(3): Xaa is C or S
PXXVSQDLSNITIQIMIGKTPKIIGEMSM

SEQ ID NO: 74428 - protein, 23 aa, Artificial Sequence
  Cyclic GFR-binding peptide
LEPLPVVYYDDSSNVIEQLSNNM

SEQ ID NO: 74429 - protein, 28 aa, Artificial Sequence
  Cyclic GFR-binding peptide
  MOD_RES (1)..(1): Xaa is C or S
XVPTELEPLTMLYYDEYDKVVEQLSNEM

SEQ ID NO: 74430 - protein, 30 aa, Artificial Sequence
  Cyclic GFR-binding peptide
  MOD_RES (27)..(29): Xaa is C or S
LRSVKIAKVVGRKPKVKEVQVMIVRSXKXS

SEQ ID NO: 74431 - protein, 38 aa, Artificial Sequence
  Cyclic GFR-binding peptide
  MOD_RES (1)..(38): Xaa is C or S
XRPTQVQLEPLPVVYYEIVRKKPIFEQLSNTLEDHLAX

SEQ ID NO: 74432 - protein, 30 aa, Artificial Sequence
  Cyclic GFR-binding peptide
QPSRVHHEPLPVVYYEYVRKKPKLEQLSNR

SEQ ID NO: 74433 - protein, 35 aa, Artificial Sequence
  Cyclic GFR-binding peptide
  MOD_RES (1)..(2)..(34): Xaa is C or S
XXAPTKLRPVQVRKIDDSSNVIKKATVNMVVRSXG

SEQ ID NO: 74434 - protein, 29 aa, Artificial Sequence
  Cyclic GFR-binding peptide
APTQLRPVQVRKIDDSSNVIKKATVNMVV

SEQ ID NO: 74435 - protein, 32 aa, Artificial Sequence; identical to SEQ ID NO: 24343
  Cyclic GFR-binding peptide
  MOD_RES (32)..(32): Xaa is C or S

SEQ ID NO: 74436 - protein, 37 aa, Artificial Sequence; identical to SEQ ID NO: 24344
  Cyclic GFR-binding peptide
  MOD_RES (7)..(7): Xaa is C or S

SEQ ID NO: 74437 - protein, 35 aa, Artificial Sequence
  Cyclic GFR-binding peptide
  MOD_RES (4)..(4): Xaa is C or S
KPTXAPTKLSNITVQIMDDSSNVIIGEMSNMVVRS

SEQ ID NO: 74438 - protein, 31 aa, Artificial Sequence
  Cyclic GFR-binding peptide
  MOD_RES (2)..(3): Xaa is C or S
PXXVSQDLSNITIQIMIGKTPKIIGEMSMIV

SEQ ID NO: 74439 - protein, 31 aa, Artificial Sequence
  Cyclic GFR-binding peptide
  MOD_RES (3)..(3): Xaa is C or S
PTXAPTKLSNITVQIMDDSSNVIIGEMSNMV

SEQ ID NO: 74440 - protein, 30 aa, Artificial Sequence; identical to SEQ ID NO: 20420
  Cyclic GFR-binding peptide
  MOD_RES (2)..(3): Xaa is C or S

SEQ ID NO: 74441 - protein, 30 aa, Artificial Sequence
  Cyclic GFR-binding peptide
  MOD_RES (4)..(4): Xaa is C or S
KPTXAPTKLRPVQVRKIDDSSNVIKKATVN

SEQ ID NO: 74442 - protein, 38 aa, Artificial Sequence
  Cyclic GFR-binding peptide
  MOD_RES (6)..(7): Xaa is C or S
SIPKAXXVPTELRPVQMRKIDEYDKVVKKATVEMVVEG

SEQ ID NO: 74443 - protein, 37 aa, Artificial Sequence; identical to SEQ ID NO: 20425
  Cyclic GFR-binding peptide
  MOD_RES (6)..(7): Xaa is C or S

SEQ ID NO: 74444 - protein, 34 aa, Artificial Sequence; identical to SEQ ID NO: 24354
  Cyclic GFR-binding peptide
  MOD_RES (3)..(3): Xaa is C or S

SEQ ID NO: 74445 - protein, 36 aa, Artificial Sequence; identical to SEQ ID NO: 24358
  Cyclic GFR-binding peptide
  MOD_RES (34)..(36): Xaa is C or S

SEQ ID NO: 74446 - protein, 33 aa, Artificial Sequence; identical to SEQ ID NO: 24359
  Cyclic GFR-binding peptide
  MOD_RES (31)..(33): Xaa is C or S

SEQ ID NO: 74447 - protein, 32 aa, Artificial Sequence; identical to SEQ ID NO: 24360
  Cyclic GFR-binding peptide
  MOD_RES (31)..(31): Xaa is C or S

SEQ ID NO: 74448 - protein, 37 aa, Artificial Sequence
  Cyclic GFR-binding peptide
  MOD_RES (1)..(2)..(34)..(36): Xaa is C or S
XXAPTKLRPVQVRKIDDSSNVIKKATVNMVVRSXGXH

SEQ ID NO: 74449 - protein, 36 aa, Artificial Sequence; identical to SEQ ID NO: 20440
  Cyclic GFR-binding peptide
  MOD_RES (1)..(2)..(33)..(35): Xaa is C or S

SEQ ID NO: 74450 - protein, 27 aa, Artificial Sequence
  Cyclic GFR-binding peptide
  MOD_RES (27)..(27): Xaa is C or S
LRSVKIAKVIGKTPKIKEVQVMIVKSX

SEQ ID NO: 74451 - protein, 30 aa, Artificial Sequence
  Cyclic GFR-binding peptide
  MOD_RES (3)..(3): Xaa is C or S
LEXVPTEEEPLTMLYYRIKPHQGQHEQLSN

SEQ ID NO: 74452 - protein, 33 aa, Artificial Sequence; identical to SEQ ID NO: 20444
  Cyclic GFR-binding peptide
  MOD_RES (1)..(33): Xaa is C or S

SEQ ID NO: 74453 - protein, 28 aa, Artificial Sequence
  Cyclic GFR-binding peptide
QLRPVQVRKIDDSSNVIKKATVNMVVRA

SEQ ID NO: 74454 - protein, 39 aa, Artificial Sequence; identical to SEQ ID NO: 20445
  Cyclic GFR-binding peptide
  MOD_RES (7)..(39): Xaa is C or S

SEQ ID NO: 74455 - protein, 36 aa, Artificial Sequence
  Cyclic GFR-binding peptide
  MOD_RES (1)..(2)..(33)..(35): Xaa is C or S
XXVSQDLRPVQIRKIIGKTPKIKKATVMIVKSXKXS

SEQ ID NO: 74456 - protein, 24 aa, Artificial Sequence
  Cyclic GFR-binding peptide
SNITIQIMVGRKPKVIGEMSMIVR

SEQ ID NO: 74457 - protein, 36 aa, Artificial Sequence; identical to SEQ ID NO: 20448
  Cyclic GFR-binding peptide
  MOD_RES (5)..(6): Xaa is C or S

SEQ ID NO: 74458 - protein, 32 aa, Artificial Sequence
  Cyclic GFR-binding peptide
  MOD_RES (31)..(31): Xaa is C or S
EEEPLTMLYYRIKPHQGQHEQLSNFLQHNKXE

SEQ ID NO: 74459 - protein, 38 aa, Artificial Sequence; identical to SEQ ID NO: 20454
  Cyclic GFR-binding peptide
  MOD_RES (6)..(7): Xaa is C or S

SEQ ID NO: 74460 - protein, 32 aa, Artificial Sequence; identical to SEQ ID NO: 20455
  Cyclic GFR-binding peptide
  MOD_RES (2)..(3): Xaa is C or S

SEQ ID NO: 74461 - protein, 37 aa, Artificial Sequence
  Cyclic GFR-binding peptide
  MOD_RES (4)..(5)..(37): Xaa is C or S
PKPXXAPTQLRSVKVAKVDDSSNVIKEVQVNMVVRAX

SEQ ID NO: 74462 - protein, 25 aa, Artificial Sequence
  Cyclic GFR-binding peptide
SNITMQIMDENEKVVIGEMSDMVVE

SEQ ID NO: 74463 - protein, 29 aa, Artificial Sequence
  Cyclic GFR-binding peptide
  MOD_RES (1)..(1): Xaa is C or S
XVPTEERSVKMAKVRIKPHQGQHKEVQVF

SEQ ID NO: 74464 - protein, 30 aa, Artificial Sequence
  Cyclic GFR-binding peptide
  MOD_RES (28)..(30): Xaa is C or S
ALRPVQIRKIVGRKPKVKKATVMIVRSXKX

SEQ ID NO: 74465 - protein, 37 aa, Artificial Sequence; identical to SEQ ID NO: 20462
  Cyclic GFR-binding peptide
  MOD_RES (3)..(4)..(35)..(37): Xaa is C or S

SEQ ID NO: 74466 - protein, 44 aa, Artificial Sequence; identical to SEQ ID NO: 24376
  Cyclic GFR-binding peptide
  MOD_RES (5)..(42)..(44): Xaa is C or S

SEQ ID NO: 74467 - protein, 33 aa, Artificial Sequence; identical to SEQ ID NO: 20464
  Cyclic GFR-binding peptide
  MOD_RES (4)..(5): Xaa is C or S

SEQ ID NO: 74468 - protein, 35 aa, Artificial Sequence
  Cyclic GFR-binding peptide
  MOD_RES (32)..(34): Xaa is C or S
QLEPLPVVYYEIVRKKPIFEQLSNTLEDHLAXKXE

SEQ ID NO: 74469 - protein, 32 aa, Artificial Sequence; identical to SEQ ID NO: 24382
  Cyclic GFR-binding peptide

SEQ ID NO: 74470 - protein, 28 aa, Artificial Sequence
  Cyclic GFR-binding peptide
PTELEPLPMVYYDENEKVVEQLSNDMVV

SEQ ID NO: 74471 - protein, 33 aa, Artificial Sequence
  Cyclic GFR-binding peptide
  MOD_RES (1)..(2): Xaa is C or S
XXAPTQLRSVKVAKVDDSSNVIKEVQVNMVVRA

SEQ ID NO: 74472 - protein, 28 aa, Artificial Sequence
  Cyclic GFR-binding peptide
EEEPLPMVYYRIKPHQGQHEQLSNFLQH

SEQ ID NO: 74473 - protein, 24 aa, Artificial Sequence
  Cyclic GFR-binding peptide
EPLPVVYYEIVRKKPIFEQLSNTL

SEQ ID NO: 74474 - protein, 32 aa, Artificial Sequence
  Cyclic GFR-binding peptide
  MOD_RES (5)..(6): Xaa is C or S
VPKPXXAPTQLRPVQVRKIDDSSNVIKKATVN

SEQ ID NO: 74475 - protein, 30 aa, Artificial Sequence; identical to SEQ ID NO: 20473
  Cyclic GFR-binding peptide
  MOD_RES (2)..(2): Xaa is C or S

SEQ ID NO: 74476 - protein, 39 aa, Artificial Sequence; identical to SEQ ID NO: 20474
  Cyclic GFR-binding peptide
  MOD_RES (4)..(36)..(38): Xaa is C or S

SEQ ID NO: 74477 - protein, 28 aa, Artificial Sequence
  Cyclic GFR-binding peptide
  MOD_RES (28)..(28): Xaa is C or S
LRSVKVAKVDDSSNVIKEVQVNMVVRSX

SEQ ID NO: 74478 - protein, 25 aa, Artificial Sequence
  Cyclic GFR-binding peptide
VHHSNITVQIMEYVRKKPKLIGEMS

SEQ ID NO: 74479 - protein, 28 aa, Artificial Sequence
  Cyclic GFR-binding peptide
SQDLRPVQIRKIIGKTPKIKKATVMIVK

SEQ ID NO: 74480 - protein, 30 aa, Artificial Sequence; identical to SEQ ID NO: 20476
  Cyclic GFR-binding peptide
  MOD_RES (3)..(4): Xaa is C or S

SEQ ID NO: 74481 - protein, 37 aa, Artificial Sequence
  Cyclic GFR-binding peptide
  MOD_RES (4)..(5)..(36): Xaa is C or S
ASPXXVPQDLRSVKIAKVVGRTPKVKEVQVMVVKSXK

SEQ ID NO: 74482 - protein, 29 aa, Artificial Sequence
  Cyclic GFR-binding peptide
  MOD_RES (28)..(28): Xaa is C or S
LRSVKMAKVDENEKVVKEVQVDMVVEGXG

SEQ ID NO: 74483 - protein, 29 aa, Artificial Sequence
  Cyclic GFR-binding peptide
  MOD_RES (1)..(1): Xaa is C or S
XVPQALEPLTILYYVGRKPKVEQLSNMIV

SEQ ID NO: 74484 - protein, 27 aa, Artificial Sequence
  Cyclic GFR-binding peptide
TELEPLTMLYYDEYDKVVEQLSNEMVV

SEQ ID NO: 74485 - protein, 31 aa, Artificial Sequence
  Cyclic GFR-binding peptide
APTQLRPVQVRKIDDSSNVIKKATVNMVVRA

SEQ ID NO: 74486 - protein, 31 aa, Artificial Sequence; identical to SEQ ID NO: 24390
  Cyclic GFR-binding peptide

SEQ ID NO: 74487 - protein, 33 aa, Artificial Sequence; identical to SEQ ID NO: 24391
  Cyclic GFR-binding peptide

SEQ ID NO: 74488 - protein, 29 aa, Artificial Sequence
  Cyclic GFR-binding peptide
APTKLEPLTVLYYDDSSNVIEQLSNNMVV

SEQ ID NO: 74489 - protein, 35 aa, Artificial Sequence
  Cyclic GFR-binding peptide
  MOD_RES (3)..(4): Xaa is C or S
KAXXVPTELRSVKMAKVDEYDKVVKEVQVEMVVEG

SEQ ID NO: 74490 - protein, 23 aa, Artificial Sequence
  Cyclic GFR-binding peptide
ALRSVKIAKVVGRKPKVKEVQVM

SEQ ID NO: 74491 - protein, 23 aa, Artificial Sequence
  Cyclic GFR-binding peptide
TELEPLPMVYYDEYDKVVEQLSN

SEQ ID NO: 74492 - protein, 37 aa, Artificial Sequence
  Cyclic GFR-binding peptide
  MOD_RES (3)..(4)..(35)..(37): Xaa is C or S
APXXVPQALSNITIQIMVGRKPKVIGEMSMIVRSXKX

SEQ ID NO: 74493 - protein, 39 aa, Artificial Sequence; identical to SEQ ID NO: 20489
  Cyclic GFR-binding peptide
  MOD_RES (3)..(4)..(36)..(38): Xaa is C or S

SEQ ID NO: 74494 - protein, 28 aa, Artificial Sequence
  Cyclic GFR-binding peptide
KLSNITVQIMDDSSNVIIGEMSNMVVRS

SEQ ID NO: 74495 - protein, 35 aa, Artificial Sequence; identical to SEQ ID NO: 20492
  Cyclic GFR-binding peptide
  MOD_RES (32)..(34): Xaa is C or S

SEQ ID NO: 74496 - protein, 45 aa, Artificial Sequence; identical to SEQ ID NO: 24410
  Cyclic GFR-binding peptide
  MOD_RES (5)..(42)..(44): Xaa is C or S

SEQ ID NO: 74497 - protein, 34 aa, Artificial Sequence
  Cyclic GFR-binding peptide
  MOD_RES (1)..(2)..(33): Xaa is C or S
XXVSQDLRSVKIAKVIGKTPKIKEVQVMIVKSXK

SEQ ID NO: 74498 - protein, 37 aa, Artificial Sequence
  Cyclic GFR-binding peptide
  MOD_RES (5)..(6)..(37): Xaa is C or S
SAAPXXVPQALRSVKIAKVVGRKPKVKEVQVMIVRSX

SEQ ID NO: 74499 - protein, 27 aa, Artificial Sequence
  Cyclic GFR-binding peptide
PQALRSVKIAKVVGRKPKVKEVQVMIV

SEQ ID NO: 74500 - protein, 36 aa, Artificial Sequence; identical to SEQ ID NO: 24412
  Cyclic GFR-binding peptide
  MOD_RES (7)..(7): Xaa is C or S

SEQ ID NO: 74501 - protein, 28 aa, Artificial Sequence
  Cyclic GFR-binding peptide
  MOD_RES (1)..(2): Xaa is C or S
XXVSQDLEPLPIVYYIGKTPKIEQLSNM

SEQ ID NO: 74502 - protein, 40 aa, Artificial Sequence
  Cyclic GFR-binding peptide
  MOD_RES (5)..(6)..(37)..(39): Xaa is C or S
SAAPXXVPQALSNITIQIMVGRKPKVIGEMSMIVRSXKXS

SEQ ID NO: 74503 - protein, 37 aa, Artificial Sequence; identical to SEQ ID NO: 20505
  Cyclic GFR-binding peptide
  MOD_RES (5)..(6)..(37): Xaa is C or S

SEQ ID NO: 74504 - protein, 29 aa, Artificial Sequence
  Cyclic GFR-binding peptide
  MOD_RES (29)..(29): Xaa is C or S
ELEPLTMLYYDEYDKVVEQLSNEMVVEGX

SEQ ID NO: 74505 - protein, 31 aa, Artificial Sequence; identical to SEQ ID NO: 20508
  Cyclic GFR-binding peptide
  MOD_RES (1)..(1): Xaa is C or S

SEQ ID NO: 74506 - protein, 35 aa, Artificial Sequence; identical to SEQ ID NO: 20510
  Cyclic GFR-binding peptide
  MOD_RES (32)..(34): Xaa is C or S

SEQ ID NO: 74507 - protein, 28 aa, Artificial Sequence
  Cyclic GFR-binding peptide
  MOD_RES (28)..(28): Xaa is C or S
LEPLTMLYYDENEKVVEQLSNDMVVEGX

SEQ ID NO: 74508 - protein, 32 aa, Artificial Sequence; identical to SEQ ID NO: 20512
  Cyclic GFR-binding peptide
  MOD_RES (1)..(2): Xaa is C or S

SEQ ID NO: 74509 - protein, 27 aa, Artificial Sequence
  Cyclic GFR-binding peptide
HHSNITVQIMEYVRKKPKLIGEMSRLE

SEQ ID NO: 74510 - protein, 31 aa, Artificial Sequence; identical to SEQ ID NO: 20514
  Cyclic GFR-binding peptide
  MOD_RES (1)..(2): Xaa is C or S

SEQ ID NO: 74511 - protein, 28 aa, Artificial Sequence
  Cyclic GFR-binding peptide
SRVHHRPVQVRKIEYVRKKPKLKKATVR

SEQ ID NO: 74512 - protein, 25 aa, Artificial Sequence
  Cyclic GFR-binding peptide
LRSVKIAKVIGKTPKIKEVQVMIVK

SEQ ID NO: 74513 - protein, 31 aa, Artificial Sequence
  Cyclic GFR-binding peptide
  MOD_RES (1)..(1): Xaa is C or S
XRPTQVQLEPLPVVYYEIVRKKPIFEQLSNT

SEQ ID NO: 74514 - protein, 33 aa, Artificial Sequence
  Cyclic GFR-binding peptide
  MOD_RES (31)..(33): Xaa is C or S
PTELSNITMQIMDEYDKVVIGEMSEMVVEGXGX

SEQ ID NO: 74515 - protein, 32 aa, Artificial Sequence
  Cyclic GFR-binding peptide
  MOD_RES (2)..(3): Xaa is C or S
PXXAPTQLSNITVQIMDDSSNVIIGEMSNMVV

SEQ ID NO: 74516 - protein, 39 aa, Artificial Sequence; identical to SEQ ID NO: 20519
  Cyclic GFR-binding peptide
  MOD_RES (4)..(5)..(37)..(39): Xaa is C or S

SEQ ID NO: 74517 - protein, 32 aa, Artificial Sequence
  Cyclic GFR-binding peptide
  MOD_RES (29)..(31): Xaa is C or S
ELRSVKMAKVDEYDKVVKEVQVEMVVEGXGXR

SEQ ID NO: 74518 - protein, 36 aa, Artificial Sequence; identical to SEQ ID NO: 20520
  Cyclic GFR-binding peptide
  MOD_RES (5)..(5): Xaa is C or S

SEQ ID NO: 74519 - protein, 34 aa, Artificial Sequence
  Cyclic GFR-binding peptide
  MOD_RES (2)..(3)..(34): Xaa is C or S
PXXVPQDLRPVQIRKIVGRTPKVKKATVMVVKSX

SEQ ID NO: 74520 - protein, 34 aa, Artificial Sequence; identical to SEQ ID NO: 24441
  Cyclic GFR-binding peptide
  MOD_RES (33)..(33): Xaa is C or S

SEQ ID NO: 74521 - protein, 23 aa, Artificial Sequence
  Cyclic GFR-binding peptide
TELRPVQMRKIDEYDKVVKKATV

SEQ ID NO: 74522 - protein, 44 aa, Artificial Sequence; identical to SEQ ID NO: 24444
  Cyclic GFR-binding peptide
  MOD_RES (4)..(41)..(43): Xaa is C or S

SEQ ID NO: 74523 - protein, 32 aa, Artificial Sequence; identical to SEQ ID NO: 20527
  Cyclic GFR-binding peptide
  MOD_RES (29)..(31): Xaa is C or S

SEQ ID NO: 74524 - protein, 37 aa, Artificial Sequence
  Cyclic GFR-binding peptide
  MOD_RES (6)..(6): Xaa is C or S
DEGLEXVPTEEEPLPMVYYRIKPHQGQHEQLSNFLQH

SEQ ID NO: 74525 - protein, 36 aa, Artificial Sequence
  Cyclic GFR-binding peptide
  MOD_RES (3)..(3): Xaa is C or S
VKXQPSRVHHEPLTVLYYEYVRKKPKLEQLSNRLEE

SEQ ID NO: 74526 - protein, 27 aa, Artificial Sequence
  Cyclic GFR-binding peptide
  MOD_RES (1)..(2): Xaa is C or S
XXVPQDLSNITIQIMVGRTPKVIGEMS

SEQ ID NO: 74527 - protein, 30 aa, Artificial Sequence
  Cyclic GFR-binding peptide
  MOD_RES (2)..(3): Xaa is C or S
AXXVPTELSNITMQIMDEYDKVVIGEMSEM

SEQ ID NO: 74528 - protein, 34 aa, Artificial Sequence; identical to SEQ ID NO: 20530
  Cyclic GFR-binding peptide
  MOD_RES (2)..(34): Xaa is C or S

SEQ ID NO: 74529 - protein, 27 aa, Artificial Sequence
  Cyclic GFR-binding peptide
EPLPMVYYRIKPHQGQHEQLSNFLQHN

SEQ ID NO: 74530 - protein, 27 aa, Artificial Sequence
  Cyclic GFR-binding peptide
QDLRPVQIRKIIGKTPKIKKATVMIVK

SEQ ID NO: 74531 - protein, 23 aa, Artificial Sequence
  Cyclic GFR-binding peptide
RPVQMRKIRIKPHQGQHKKATVF

SEQ ID NO: 74532 - protein, 33 aa, Artificial Sequence
  Cyclic GFR-binding peptide
  MOD_RES (6)..(7): Xaa is C or S
KIPKAXXVPTELSNITMQIMDENEKVVIGEMSD

SEQ ID NO: 74533 - protein, 22 aa, Artificial Sequence
  Cyclic GFR-binding peptide
EPLPIVYYVGRTPKVEQLSNMV

SEQ ID NO: 74534 - protein, 26 aa, Artificial Sequence
  Cyclic GFR-binding peptide
LRSVKVAKVEIVRKKPIFKEVQVTLE

SEQ ID NO: 74535 - protein, 31 aa, Artificial Sequence
  Cyclic GFR-binding peptide
APTKLSNITVQIMDDSSNVIIGEMSNMVVRS

SEQ ID NO: 74536 - protein, 24 aa, Artificial Sequence
  Cyclic GFR-binding peptide
QDLSNITIQIMVGRTPKVIGEMSM

SEQ ID NO: 74537 - protein, 34 aa, Artificial Sequence
  Cyclic GFR-binding peptide
  MOD_RES (34)..(34): Xaa is C or S
QVQLEPLPVVYYEIVRKKPIFEQLSNTLEDHLAX

SEQ ID NO: 74538 - protein, 41 aa, Artificial Sequence
  Cyclic GFR-binding peptide
  MOD_RES (6)..(38)..(40): Xaa is C or S
VTKPTXAPTKLRPVQVRKIDDSSNVIKKATVNMVVRSXGXH

SEQ ID NO: 74539 - protein, 31 aa, Artificial Sequence
  Cyclic GFR-binding peptide
  MOD_RES (1)..(2): Xaa is C or S
XXVPQALSNITIQIMVGRKPKVIGEMSMIVR

SEQ ID NO: 74540 - protein, 28 aa, Artificial Sequence
  Cyclic GFR-binding peptide
RPVQMRKIRIKPHQGQHKKATVFLQHNK

SEQ ID NO: 74541 - protein, 35 aa, Artificial Sequence
  Cyclic GFR-binding peptide
  MOD_RES (33)..(35): Xaa is C or S
PTEEEPLTMLYYRIKPHQGQHEQLSNFLQHNKXEX

SEQ ID NO: 74542 - protein, 25 aa, Artificial Sequence
  Cyclic GFR-binding peptide
VPQDLRPVQIRKIVGRTPKVKKATV

SEQ ID NO: 74543 - protein, 31 aa, Artificial Sequence
  Cyclic GFR-binding peptide
  MOD_RES (3)..(3): Xaa is C or S
PTXAPTKLRSVKVAKVDDSSNVIKEVQVNMV

SEQ ID NO: 74544 - protein, 32 aa, Artificial Sequence
  Cyclic GFR-binding peptide
  MOD_RES (31)..(31): Xaa is C or S
VSQDLRSVKIAKVIGKTPKIKEVQVMIVKSXK

SEQ ID NO: 74545 - protein, 33 aa, Artificial Sequence
  Cyclic GFR-binding peptide
  MOD_RES (4)..(5): Xaa is C or S
PKAXXVPTELSNITMQIMDENEKVVIGEMSDMV

SEQ ID NO: 74546 - protein, 34 aa, Artificial Sequence
  Cyclic GFR-binding peptide
  MOD_RES (2)..(3): Xaa is C or S
AXXVPTELRSVKMAKVDENEKVVKEVQVDMVVEG

SEQ ID NO: 74547 - protein, 36 aa, Artificial Sequence; identical to SEQ ID NO: 20552
  Cyclic GFR-binding peptide
  MOD_RES (5)..(6): Xaa is C or S

SEQ ID NO: 74548 - protein, 39 aa, Artificial Sequence
  Cyclic GFR-binding peptide
  MOD_RES (3)..(4)..(36)..(38): Xaa is C or S
KAXXVPTELSNITMQIMDENEKVVIGEMSDMVVEGXGXR

SEQ ID NO: 74549 - protein, 33 aa, Artificial Sequence; identical to SEQ ID NO: 20553
  Cyclic GFR-binding peptide
  MOD_RES (2)..(2): Xaa is C or S

SEQ ID NO: 74550 - protein, 31 aa, Artificial Sequence
  Cyclic GFR-binding peptide
  MOD_RES (31)..(31): Xaa is C or S
EEEPLTMLYYRIKPHQGQHEQLSNFLQHNKX

SEQ ID NO: 74551 - protein, 35 aa, Artificial Sequence; identical to SEQ ID NO: 20554
  Cyclic GFR-binding peptide
  MOD_RES (6)..(6): Xaa is C or S

SEQ ID NO: 74552 - protein, 33 aa, Artificial Sequence
  Cyclic GFR-binding peptide
  MOD_RES (3)..(4): Xaa is C or S
KAXXVPTELRPVQMRKIDEYDKVVKKATVEMVV

SEQ ID NO: 74553 - protein, 23 aa, Artificial Sequence
  Cyclic GFR-binding peptide
LRPVQIRKIVGRKPKVKKATVMI

SEQ ID NO: 74554 - protein, 40 aa, Artificial Sequence; identical to SEQ ID NO: 24471
  Cyclic GFR-binding peptide
  MOD_RES (4)..(38)..(40): Xaa is C or S

SEQ ID NO: 74555 - protein, 26 aa, Artificial Sequence
  Cyclic GFR-binding peptide
PTELRSVKMAKVDENEKVVKEVQVDM

SEQ ID NO: 74556 - protein, 30 aa, Artificial Sequence; identical to SEQ ID NO: 24472
  Cyclic GFR-binding peptide

SEQ ID NO: 74557 - protein, 32 aa, Artificial Sequence
  Cyclic GFR-binding peptide
  MOD_RES (1)..(2): Xaa is C or S
XXVPTELRSVKMAKVDEYDKVVKEVQVEMVVE

SEQ ID NO: 74558 - protein, 27 aa, Artificial Sequence
  Cyclic GFR-binding peptide
  MOD_RES (1)..(2): Xaa is C or S
XXVPTELEPLTMLYYDEYDKVVEQLSN

SEQ ID NO: 74559 - protein, 38 aa, Artificial Sequence; identical to SEQ ID NO: 24473
  Cyclic GFR-binding peptide
  MOD_RES (7)..(7): Xaa is C or S

SEQ ID NO: 74560 - protein, 32 aa, Artificial Sequence
  Cyclic GFR-binding peptide
  MOD_RES (29)..(31): Xaa is C or S
EPLPMVYYRIKPHQGQHEQLSNFLQHNKXEXR

SEQ ID NO: 74561 - protein, 30 aa, Artificial Sequence; identical to SEQ ID NO: 20563
  Cyclic GFR-binding peptide
  MOD_RES (4)..(5): Xaa is C or S

SEQ ID NO: 74562 - protein, 33 aa, Artificial Sequence
  Cyclic GFR-binding peptide
  MOD_RES (33)..(33): Xaa is C or S
VQLEPLPVVYYEIVRKKPIFEQLSNTLEDHLAX

SEQ ID NO: 74563 - protein, 38 aa, Artificial Sequence; identical to SEQ ID NO: 20567
  Cyclic GFR-binding peptide
  MOD_RES (5)..(37): Xaa is C or S

SEQ ID NO: 74564 - protein, 33 aa, Artificial Sequence
  Cyclic GFR-binding peptide
  MOD_RES (2)..(3): Xaa is C or S
PXXAPTKLRSVKVAKVDDSSNVIKEVQVNMVVR

SEQ ID NO: 74565 - protein, 29 aa, Artificial Sequence
  Cyclic GFR-binding peptide
  MOD_RES (28)..(28): Xaa is C or S
LRPVQVRKIDDSSNVIKKATVNMVVRAXG

SEQ ID NO: 74566 - protein, 33 aa, Artificial Sequence
  Cyclic GFR-binding peptide
  MOD_RES (6)..(6): Xaa is C or S
DEGLEXVPTEEEPLPMVYYRIKPHQGQHEQLSN

SEQ ID NO: 74567 - protein, 25 aa, Artificial Sequence
  Cyclic GFR-binding peptide
LRPVQIRKIIGKTPKIKKATVMIVK

SEQ ID NO: 74568 - protein, 32 aa, Artificial Sequence; identical to SEQ ID NO: 20573
  Cyclic GFR-binding peptide
  MOD_RES (6)..(7): Xaa is C or S

SEQ ID NO: 74569 - protein, 28 aa, Artificial Sequence
  Cyclic GFR-binding peptide
  MOD_RES (2)..(3): Xaa is C or S
PXXAPTKLSNITVQIMDDSSNVIIGEMS

SEQ ID NO: 74570 - protein, 32 aa, Artificial Sequence
  Cyclic GFR-binding peptide
  MOD_RES (1)..(1): Xaa is C or S
XRPTQVQLEPLTVLYYEIVRKKPIFEQLSNTL

SEQ ID NO: 74571 - protein, 37 aa, Artificial Sequence
  Cyclic GFR-binding peptide
  MOD_RES (6)..(7): Xaa is C or S
KIPKAXXVPTELSNITMQIMDENEKVVIGEMSDMVVE

SEQ ID NO: 74572 - protein, 29 aa, Artificial Sequence
  Cyclic GFR-binding peptide
  MOD_RES (1)..(2): Xaa is C or S
XXVPTELEPLTMLYYDEYDKVVEQLSNEM

SEQ ID NO: 74573 - protein, 25 aa, Artificial Sequence
  Cyclic GFR-binding peptide
VPQDLEPLPIVYYVGRTPKVEQLSN

SEQ ID NO: 74574 - protein, 30 aa, Artificial Sequence; identical to SEQ ID NO: 20585
  Cyclic GFR-binding peptide
  MOD_RES (1)..(1): Xaa is C or S

SEQ ID NO: 74575 - protein, 30 aa, Artificial Sequence
  Cyclic GFR-binding peptide
  MOD_RES (1)..(1): Xaa is C or S
XAPTQLRSVKVAKVDDSSNVIKEVQVNMVV

SEQ ID NO: 74576 - protein, 38 aa, Artificial Sequence; identical to SEQ ID NO: 20587
  Cyclic GFR-binding peptide
  MOD_RES (4)..(5)..(36)..(38): Xaa is C or S

SEQ ID NO: 74577 - protein, 38 aa, Artificial Sequence
  Cyclic GFR-binding peptide
  MOD_RES (4)..(5)..(36)..(38): Xaa is C or S
ASPXXVSQDLRPVQIRKIIGKTPKIKKATVMIVKSXKX

SEQ ID NO: 74578 - protein, 37 aa, Artificial Sequence; identical to SEQ ID NO: 20592
  Cyclic GFR-binding peptide
  MOD_RES (4)..(5)..(37): Xaa is C or S

SEQ ID NO: 74579 - protein, 25 aa, Artificial Sequence
  Cyclic GFR-binding peptide
RPVQMRKIRIKPHQGQHKKATVFLQ

SEQ ID NO: 74580 - protein, 32 aa, Artificial Sequence
  Cyclic GFR-binding peptide
  MOD_RES (32)..(32): Xaa is C or S
TEEEPLPMVYYRIKPHQGQHEQLSNFLQHNKX

SEQ ID NO: 74581 - protein, 38 aa, Artificial Sequence; identical to SEQ ID NO: 20600
  Cyclic GFR-binding peptide
  MOD_RES (6)..(7): Xaa is C or S

SEQ ID NO: 74582 - protein, 31 aa, Artificial Sequence
  Cyclic GFR-binding peptide
  MOD_RES (31)..(31): Xaa is C or S
PTQLRPVQVRKIDDSSNVIKKATVNMVVRAX

SEQ ID NO: 74583 - protein, 33 aa, Artificial Sequence
  Cyclic GFR-binding peptide
  MOD_RES (1)..(1): Xaa is C or S
XQPSRVHHEPLTVLYYEYVRKKPKLEQLSNRLE

SEQ ID NO: 74584 - protein, 30 aa, Artificial Sequence; identical to SEQ ID NO: 20603
  Cyclic GFR-binding peptide
  MOD_RES (27)..(29): Xaa is C or S

SEQ ID NO: 74585 - protein, 22 aa, Artificial Sequence
  Cyclic GFR-binding peptide
ALSNITIQIMVGRKPKVIGEMS

SEQ ID NO: 74586 - protein, 26 aa, Artificial Sequence
  Cyclic GFR-binding peptide
APTKLEPLTVLYYDDSSNVIEQLSNN

SEQ ID NO: 74587 - protein, 30 aa, Artificial Sequence; identical to SEQ ID NO: 20606
  Cyclic GFR-binding peptide

SEQ ID NO: 74588 - protein, 23 aa, Artificial Sequence
  Cyclic GFR-binding peptide
RPVQVRKIDDSSNVIKKATVNMV

SEQ ID NO: 74589 - protein, 34 aa, Artificial Sequence
  Cyclic GFR-binding peptide
  MOD_RES (4)..(5): Xaa is C or S
PKPXXAPTKLSNITVQIMDDSSNVIIGEMSNMVV

SEQ ID NO: 74590 - protein, 25 aa, Artificial Sequence
  Cyclic GFR-binding peptide
LRSVKIAKVVGRTPKVKEVQVMVVK

SEQ ID NO: 74591 - protein, 38 aa, Artificial Sequence; identical to SEQ ID NO: 20611
  Cyclic GFR-binding peptide
  MOD_RES (5)..(6)..(38): Xaa is C or S

SEQ ID NO: 74592 - protein, 25 aa, Artificial Sequence
  Cyclic GFR-binding peptide
TELRPVQMRKIDENEKVVKKATVDM

SEQ ID NO: 74593 - protein, 27 aa, Artificial Sequence
  Cyclic GFR-binding peptide
ELRPVQMRKIDEYDKVVKKATVEMVVE

SEQ ID NO: 74594 - protein, 26 aa, Artificial Sequence
  Cyclic GFR-binding peptide
RSVKMAKVDEYDKVVKEVQVEMVVEG

SEQ ID NO: 74595 - protein, 38 aa, Artificial Sequence; identical to SEQ ID NO: 24510
  Cyclic GFR-binding peptide
  MOD_RES (6)..(6): Xaa is C or S

SEQ ID NO: 74596 - protein, 35 aa, Artificial Sequence
  Cyclic GFR-binding peptide
  MOD_RES (33)..(35): Xaa is C or S
VHHEPLPVVYYEYVRKKPKLEQLSNRLEEHLEXAX

SEQ ID NO: 74597 - protein, 23 aa, Artificial Sequence
  Cyclic GFR-binding peptide
TELEPLTMLYYDENEKVVEQLSN

SEQ ID NO: 74598 - protein, 36 aa, Artificial Sequence; identical to SEQ ID NO: 20620
  Cyclic GFR-binding peptide
  MOD_RES (2)..(3)..(35): Xaa is C or S

SEQ ID NO: 74599 - protein, 32 aa, Artificial Sequence
  Cyclic GFR-binding peptide
  MOD_RES (6)..(7): Xaa is C or S
KIPKAXXVPTELRPVQMRKIDENEKVVKKATV

SEQ ID NO: 74600 - protein, 29 aa, Artificial Sequence
  Cyclic GFR-binding peptide
PQALRSVKIAKVVGRKPKVKEVQVMIVRS

SEQ ID NO: 74601 - protein, 34 aa, Artificial Sequence
  Cyclic GFR-binding peptide
  MOD_RES (32)..(34): Xaa is C or S
VPTELSNITMQIMDEYDKVVIGEMSEMVVEGXGX

SEQ ID NO: 74602 - protein, 28 aa, Artificial Sequence
  Cyclic GFR-binding peptide
QLEPLPVVYYDDSSNVIEQLSNNMVVRA

SEQ ID NO: 74603 - protein, 40 aa, Artificial Sequence
  Cyclic GFR-binding peptide
  MOD_RES (4)..(5)..(37)..(39): Xaa is C or S
PKPXXAPTQLRPVQVRKIDDSSNVIKKATVNMVVRAXGXH

SEQ ID NO: 74604 - protein, 35 aa, Artificial Sequence
  Cyclic GFR-binding peptide
  MOD_RES (34)..(34): Xaa is C or S
QVQLEPLPVVYYEIVRKKPIFEQLSNTLEDHLAXK

SEQ ID NO: 74605 - protein, 29 aa, Artificial Sequence
  Cyclic GFR-binding peptide
TEEEPLPMVYYRIKPHQGQHEQLSNFLQH

SEQ ID NO: 74606 - protein, 33 aa, Artificial Sequence; identical to SEQ ID NO: 20633
  Cyclic GFR-binding peptide
  MOD_RES (6)..(7): Xaa is C or S

SEQ ID NO: 74607 - protein, 32 aa, Artificial Sequence; identical to SEQ ID NO: 20634
  Cyclic GFR-binding peptide
  MOD_RES (4)..(4): Xaa is C or S

SEQ ID NO: 74608 - protein, 26 aa, Artificial Sequence
  Cyclic GFR-binding peptide
LRPVQIRKIIGKTPKIKKATVMIVKS

SEQ ID NO: 74609 - protein, 31 aa, Artificial Sequence; identical to SEQ ID NO: 20638
  Cyclic GFR-binding peptide

SEQ ID NO: 74610 - protein, 28 aa, Artificial Sequence
  Cyclic GFR-binding peptide
QLRSVKVAKVDDSSNVIKEVQVNMVVRA

SEQ ID NO: 74611 - protein, 30 aa, Artificial Sequence; identical to SEQ ID NO: 20641
  Cyclic GFR-binding peptide
  MOD_RES (3)..(4): Xaa is C or S

SEQ ID NO: 74612 - protein, 38 aa, Artificial Sequence
  Cyclic GFR-binding peptide
  MOD_RES (4)..(4): Xaa is C or S
NVQXRPTQVQLEPLTVLYYEIVRKKPIFEQLSNTLEDH

SEQ ID NO: 74613 - protein, 29 aa, Artificial Sequence
  Cyclic GFR-binding peptide
  MOD_RES (28)..(28): Xaa is C or S
ALRPVQIRKIVGRKPKVKKATVMIVRSXK

SEQ ID NO: 74614 - protein, 32 aa, Artificial Sequence
  Cyclic GFR-binding peptide
  MOD_RES (3)..(4): Xaa is C or S
APXXVPQALSNITIQIMVGRKPKVIGEMSMIV

SEQ ID NO: 74615 - protein, 35 aa, Artificial Sequence
  Cyclic GFR-binding peptide
  MOD_RES (4)..(5): Xaa is C or S
ASPXXVPQDLRPVQIRKIVGRTPKVKKATVMVVKS

SEQ ID NO: 74616 - protein, 35 aa, Artificial Sequence
  Cyclic GFR-binding peptide
  MOD_RES (4)..(4): Xaa is C or S
NVQXRPTQVQLEPLPVVYYEIVRKKPIFEQLSNTL

SEQ ID NO: 74617 - protein, 33 aa, Artificial Sequence
  Cyclic GFR-binding peptide
  MOD_RES (32)..(32): Xaa is C or S
HHEPLPVVYYEYVRKKPKLEQLSNRLEEHLEXA

SEQ ID NO: 74618 - protein, 25 aa, Artificial Sequence
  Cyclic GFR-binding peptide
PQDLEPLPIVYYVGRTPKVEQLSNM

SEQ ID NO: 74619 - protein, 27 aa, Artificial Sequence
  Cyclic GFR-binding peptide
TELSNITMQIMDENEKVVIGEMSDMVV

SEQ ID NO: 74620 - protein, 31 aa, Artificial Sequence; identical to SEQ ID NO: 20653
  Cyclic GFR-binding peptide
  MOD_RES (1)..(1): Xaa is C or S

SEQ ID NO: 74621 - protein, 32 aa, Artificial Sequence
  Cyclic GFR-binding peptide
  MOD_RES (2)..(2): Xaa is C or S
QXRPTQVQLEPLTVLYYEIVRKKPIFEQLSNT

SEQ ID NO: 74622 - protein, 26 aa, Artificial Sequence
  Cyclic GFR-binding peptide
PTELEPLPMVYYDENEKVVEQLSNDM

SEQ ID NO: 74623 - protein, 27 aa, Artificial Sequence
  Cyclic GFR-binding peptide
SRVHHSNITVQIMEYVRKKPKLIGEMS

SEQ ID NO: 74624 - protein, 30 aa, Artificial Sequence
  Cyclic GFR-binding peptide
  MOD_RES (28)..(30): Xaa is C or S
DLRSVKIAKVVGRTPKVKEVQVMVVKSXKX

SEQ ID NO: 74625 - protein, 36 aa, Artificial Sequence; identical to SEQ ID NO: 24536
  Cyclic GFR-binding peptide
  MOD_RES (3)..(3): Xaa is C or S

SEQ ID NO: 74626 - protein, 41 aa, Artificial Sequence
  Cyclic GFR-binding peptide
  MOD_RES (7)..(41): Xaa is C or S
NDEGLEXVPTEEEPLPMVYYRIKPHQGQHEQLSNFLQHNKX

SEQ ID NO: 74627 - protein, 26 aa, Artificial Sequence
  Cyclic GFR-binding peptide
HHEPLPVVYYEYVRKKPKLEQLSNRL

SEQ ID NO: 74628 - protein, 32 aa, Artificial Sequence
  Cyclic GFR-binding peptide
  MOD_RES (5)..(6): Xaa is C or S
SASPXXVPQDLRSVKIAKVVGRTPKVKEVQVM

SEQ ID NO: 74629 - protein, 45 aa, Artificial Sequence
  Cyclic GFR-binding peptide
  MOD_RES (5)..(42)..(44): Xaa is C or S
SSVKXQPSRVHHEPLPVVYYEYVRKKPKLEQLSNRLEEHLEXAXA

SEQ ID NO: 74630 - protein, 38 aa, Artificial Sequence
  Cyclic GFR-binding peptide
  MOD_RES (6)..(7)..(38): Xaa is C or S
ASASPXXVPQDLSNITIQIMVGRTPKVIGEMSMVVKSX

SEQ ID NO: 74631 - protein, 32 aa, Artificial Sequence
  Cyclic GFR-binding peptide
  MOD_RES (1)..(1): Xaa is C or S
XVPTELSNITMQIMDEYDKVVIGEMSEMVVEG

SEQ ID NO: 74632 - protein, 27 aa, Artificial Sequence
  Cyclic GFR-binding peptide
DLSNITIQIMVGRTPKVIGEMSMVVKS

SEQ ID NO: 74633 - protein, 34 aa, Artificial Sequence; identical to SEQ ID NO: 20669
  Cyclic GFR-binding peptide
  MOD_RES (2)..(3)..(34): Xaa is C or S

SEQ ID NO: 74634 - protein, 28 aa, Artificial Sequence
  Cyclic GFR-binding peptide
  MOD_RES (28)..(28): Xaa is C or S
ALSNITIQIMVGRKPKVIGEMSMIVRSX

SEQ ID NO: 74635 - protein, 30 aa, Artificial Sequence
  Cyclic GFR-binding peptide
  MOD_RES (29)..(29): Xaa is C or S
ELRSVKMAKVDEYDKVVKEVQVEMVVEGXG

SEQ ID NO: 74636 - protein, 22 aa, Artificial Sequence
  Cyclic GFR-binding peptide
EPLPMVYYDEYDKVVEQLSNEM

SEQ ID NO: 74637 - protein, 30 aa, Artificial Sequence
  Cyclic GFR-binding peptide
  MOD_RES (29)..(29): Xaa is C or S
QALRPVQIRKIVGRKPKVKKATVMIVRSXK

SEQ ID NO: 74638 - protein, 27 aa, Artificial Sequence
  Cyclic GFR-binding peptide
  MOD_RES (1)..(1): Xaa is C or S
XVPTELEPLPMVYYDENEKVVEQLSND

SEQ ID NO: 74639 - protein, 28 aa, Artificial Sequence
  Cyclic GFR-binding peptide
PTEEEPLPMVYYRIKPHQGQHEQLSNFL

SEQ ID NO: 74640 - protein, 24 aa, Artificial Sequence
  Cyclic GFR-binding peptide
LEPLPVVYYEIVRKKPIFEQLSNT

SEQ ID NO: 74641 - protein, 42 aa, Artificial Sequence
  Cyclic GFR-binding peptide
  MOD_RES (3)..(40)..(42): Xaa is C or S
VKXQPSRVHHEPLPVVYYEYVRKKPKLEQLSNRLEEHLEXAX

SEQ ID NO: 74642 - protein, 32 aa, Artificial Sequence
  Cyclic GFR-binding peptide
  MOD_RES (31)..(31): Xaa is C or S
VSQDLSNITIQIMIGKTPKIIGEMSMIVKSXK

SEQ ID NO: 74643 - protein, 34 aa, Artificial Sequence; identical to SEQ ID NO: 20684
  Cyclic GFR-binding peptide
  MOD_RES (1)..(33): Xaa is C or S

SEQ ID NO: 74644 - protein, 29 aa, Artificial Sequence
  Cyclic GFR-binding peptide
VPTELEPLPMVYYDEYDKVVEQLSNEMVV

SEQ ID NO: 74645 - protein, 26 aa, Artificial Sequence
  Cyclic GFR-binding peptide
VPTELRSVKMAKVDENEKVVKEVQVD

SEQ ID NO: 74646 - protein, 34 aa, Artificial Sequence
  Cyclic GFR-binding peptide
  MOD_RES (1)..(33): Xaa is C or S
XVPTELRSVKMAKVDENEKVVKEVQVDMVVEGXG

SEQ ID NO: 74647 - protein, 39 aa, Artificial Sequence
  Cyclic GFR-binding peptide
  MOD_RES (5)..(37)..(39): Xaa is C or S
TKPTXAPTKLSNITVQIMDDSSNVIIGEMSNMVVRSXGX

SEQ ID NO: 74648 - protein, 37 aa, Artificial Sequence
  Cyclic GFR-binding peptide
  MOD_RES (5)..(6)..(37): Xaa is C or S
SASPXXVSQDLSNITIQIMIGKTPKIIGEMSMIVKSX

SEQ ID NO: 74649 - protein, 40 aa, Artificial Sequence
  Cyclic GFR-binding peptide
  MOD_RES (4)..(4): Xaa is C or S
SVKXQPSRVHHEPLTVLYYEYVRKKPKLEQLSNRLEEHLE

SEQ ID NO: 74650 - protein, 39 aa, Artificial Sequence; identical to SEQ ID NO: 24559
  Cyclic GFR-binding peptide
  MOD_RES (5)..(5): Xaa is C or S

SEQ ID NO: 74651 - protein, 38 aa, Artificial Sequence; identical to SEQ ID NO: 24560
  Cyclic GFR-binding peptide
  MOD_RES (37)..(37): Xaa is C or S

SEQ ID NO: 74652 - protein, 30 aa, Artificial Sequence; identical to SEQ ID NO: 24564
  Cyclic GFR-binding peptide
  MOD_RES (29)..(29): Xaa is C or S

SEQ ID NO: 74653 - protein, 39 aa, Artificial Sequence; identical to SEQ ID NO: 20692
  Cyclic GFR-binding peptide
  MOD_RES (5)..(6)..(38): Xaa is C or S

SEQ ID NO: 74654 - protein, 27 aa, Artificial Sequence
  Cyclic GFR-binding peptide
QDLRSVKIAKVVGRTPKVKEVQVMVVK

SEQ ID NO: 74655 - protein, 23 aa, Artificial Sequence
  Cyclic GFR-binding peptide
SNITVQIMDDSSNVIIGEMSNMV

SEQ ID NO: 74656 - protein, 29 aa, Artificial Sequence
  Cyclic GFR-binding peptide
RPTQVQLEPLTVLYYEIVRKKPIFEQLSN

SEQ ID NO: 74657 - protein, 31 aa, Artificial Sequence; identical to SEQ ID NO: 24568
  Cyclic GFR-binding peptide
  MOD_RES (2)..(2): Xaa is C or S

SEQ ID NO: 74658 - protein, 25 aa, Artificial Sequence
  Cyclic GFR-binding peptide
SQDLSNITIQIMIGKTPKIIGEMSM

SEQ ID NO: 74659 - protein, 30 aa, Artificial Sequence
  Cyclic GFR-binding peptide
VPQDLSNITIQIMVGRTPKVIGEMSMVVKS

SEQ ID NO: 74660 - protein, 31 aa, Artificial Sequence
  Cyclic GFR-binding peptide
  MOD_RES (30)..(30): Xaa is C or S
TELRSVKMAKVDENEKVVKEVQVDMVVEGXG

SEQ ID NO: 74661 - protein, 41 aa, Artificial Sequence
  Cyclic GFR-binding peptide
  MOD_RES (4)..(41): Xaa is C or S
NVQXRPTQVQLEPLPVVYYEIVRKKPIFEQLSNTLEDHLAX

SEQ ID NO: 74662 - protein, 33 aa, Artificial Sequence
  Cyclic GFR-binding peptide
  MOD_RES (31)..(33): Xaa is C or S
HEPLTVLYYEYVRKKPKLEQLSNRLEEHLEXAX

SEQ ID NO: 74663 - protein, 42 aa, Artificial Sequence; identical to SEQ ID NO: 24578
  Cyclic GFR-binding peptide
  MOD_RES (7)..(41): Xaa is C or S

SEQ ID NO: 74664 - protein, 31 aa, Artificial Sequence
  Cyclic GFR-binding peptide
  MOD_RES (29)..(31): Xaa is C or S
QDLRPVQIRKIIGKTPKIKKATVMIVKSXKX

SEQ ID NO: 74665 - protein, 24 aa, Artificial Sequence
  Cyclic GFR-binding peptide
LSNITMQIMDEYDKVVIGEMSEMV

SEQ ID NO: 74666 - protein, 24 aa, Artificial Sequence
  Cyclic GFR-binding peptide
TQLEPLPVVYYDDSSNVIEQLSNN

SEQ ID NO: 74667 - protein, 38 aa, Artificial Sequence
  Cyclic GFR-binding peptide
  MOD_RES (5)..(6)..(37): Xaa is C or S
SASPXXVPQDLSNITIQIMVGRTPKVIGEMSMVVKSXK

SEQ ID NO: 74668 - protein, 37 aa, Artificial Sequence; identical to SEQ ID NO: 24583
  Cyclic GFR-binding peptide
  MOD_RES (4)..(4): Xaa is C or S

SEQ ID NO: 74669 - protein, 23 aa, Artificial Sequence
  Cyclic GFR-binding peptide
LRSVKVAKVDDSSNVIKEVQVNM

SEQ ID NO: 74670 - protein, 35 aa, Artificial Sequence
  Cyclic GFR-binding peptide
  MOD_RES (3)..(4): Xaa is C or S
KAXXVPTELRPVQMRKIDEYDKVVKKATVEMVVEG

SEQ ID NO: 74671 - protein, 31 aa, Artificial Sequence
  Cyclic GFR-binding peptide
  MOD_RES (30)..(30): Xaa is C or S
TELSNITMQIMDEYDKVVIGEMSEMVVEGXG

SEQ ID NO: 74672 - protein, 41 aa, Artificial Sequence; identical to SEQ ID NO: 20718
  Cyclic GFR-binding peptide
  MOD_RES (6)..(7)..(39)..(41): Xaa is C or S

SEQ ID NO: 74673 - protein, 22 aa, Artificial Sequence
  Cyclic GFR-binding peptide
RPVQIRKIIGKTPKIKKATVMI

SEQ ID NO: 74674 - protein, 41 aa, Artificial Sequence; identical to SEQ ID NO: 24585
  Cyclic GFR-binding peptide
  MOD_RES (2)..(39)..(41): Xaa is C or S

SEQ ID NO: 74675 - protein, 36 aa, Artificial Sequence
  Cyclic GFR-binding peptide
  MOD_RES (34)..(36): Xaa is C or S
QVQLEPLPVVYYEIVRKKPIFEQLSNTLEDHLAXKX

SEQ ID NO: 74676 - protein, 31 aa, Artificial Sequence; identical to SEQ ID NO: 24591
  Cyclic GFR-binding peptide
  MOD_RES (3)..(3): Xaa is C or S

SEQ ID NO: 74677 - protein, 29 aa, Artificial Sequence
  Cyclic GFR-binding peptide
  MOD_RES (28)..(28): Xaa is C or S
DLEPLPIVYYIGKTPKIEQLSNMIVKSXK

SEQ ID NO: 74678 - protein, 38 aa, Artificial Sequence; identical to SEQ ID NO: 20724
  Cyclic GFR-binding peptide
  MOD_RES (6)..(38): Xaa is C or S

SEQ ID NO: 74679 - protein, 28 aa, Artificial Sequence
  Cyclic GFR-binding peptide
  MOD_RES (28)..(28): Xaa is C or S
LSNITVQIMDDSSNVIIGEMSNMVVRAX

SEQ ID NO: 74680 - protein, 40 aa, Artificial Sequence
  Cyclic GFR-binding peptide
  MOD_RES (5)..(6)..(38)..(40): Xaa is C or S
IPKAXXVPTELRPVQMRKIDEYDKVVKKATVEMVVEGXGX

SEQ ID NO: 74681 - protein, 20 aa, Artificial Sequence
  Cyclic GFR-binding peptide
EPLTMLYYDEYDKVVEQLSN

SEQ ID NO: 74682 - protein, 32 aa, Artificial Sequence
  Cyclic GFR-binding peptide
  MOD_RES (3)..(4): Xaa is C or S
APXXVPQALRPVQIRKIVGRKPKVKKATVMIV

SEQ ID NO: 74683 - protein, 28 aa, Artificial Sequence
  Cyclic GFR-binding peptide
  MOD_RES (27)..(27): Xaa is C or S
RPVQVRKIDDSSNVIKKATVNMVVRSXG

SEQ ID NO: 74684 - protein, 38 aa, Artificial Sequence; identical to SEQ ID NO: 24599
  Cyclic GFR-binding peptide
  MOD_RES (1)..(38): Xaa is C or S

SEQ ID NO: 74685 - protein, 32 aa, Artificial Sequence
  Cyclic GFR-binding peptide
  MOD_RES (1)..(1): Xaa is C or S
XAPTQLSNITVQIMDDSSNVIIGEMSNMVVRA

SEQ ID NO: 74686 - protein, 24 aa, Artificial Sequence
  Cyclic GFR-binding peptide
EERPVQMRKIRIKPHQGQHKKATV

SEQ ID NO: 74687 - protein, 28 aa, Artificial Sequence
  Cyclic GFR-binding peptide
SQDLRSVKIAKVIGKTPKIKEVQVMIVK

SEQ ID NO: 74688 - protein, 39 aa, Artificial Sequence; identical to SEQ ID NO: 24602
  Cyclic GFR-binding peptide
  MOD_RES (1)..(38): Xaa is C or S

SEQ ID NO: 74689 - protein, 28 aa, Artificial Sequence
  Cyclic GFR-binding peptide
  MOD_RES (27)..(27): Xaa is C or S
SNITVQIMDDSSNVIIGEMSNMVVRAXG

SEQ ID NO: 74690 - protein, 22 aa, Artificial Sequence
  Cyclic GFR-binding peptide
RSVKIAKVVGRTPKVKEVQVMV

SEQ ID NO: 74691 - protein, 26 aa, Artificial Sequence
  Cyclic GFR-binding peptide
  MOD_RES (1)..(1): Xaa is C or S
XAPTKLEPLTVLYYDDSSNVIEQLSN

SEQ ID NO: 74692 - protein, 31 aa, Artificial Sequence
  Cyclic GFR-binding peptide
  MOD_RES (1)..(1): Xaa is C or S
XVPTELSNITMQIMDEYDKVVIGEMSEMVVE

SEQ ID NO: 74693 - protein, 32 aa, Artificial Sequence
  Cyclic GFR-binding peptide
PSRVHHEPLPVVYYEYVRKKPKLEQLSNRLEE

SEQ ID NO: 74694 - protein, 28 aa, Artificial Sequence
  Cyclic GFR-binding peptide
APTQLRPVQVRKIDDSSNVIKKATVNMV

SEQ ID NO: 74695 - protein, 33 aa, Artificial Sequence; identical to SEQ ID NO: 20753
  Cyclic GFR-binding peptide
  MOD_RES (31)..(33): Xaa is C or S

SEQ ID NO: 74696 - protein, 24 aa, Artificial Sequence
  Cyclic GFR-binding peptide
ELEPLTMLYYDENEKVVEQLSNDM

SEQ ID NO: 74697 - protein, 31 aa, Artificial Sequence; identical to SEQ ID NO: 20757
  Cyclic GFR-binding peptide

SEQ ID NO: 74698 - protein, 38 aa, Artificial Sequence; identical to SEQ ID NO: 24620
  Cyclic GFR-binding peptide
  MOD_RES (2)..(36)..(38): Xaa is C or S

SEQ ID NO: 74699 - protein, 24 aa, Artificial Sequence
  Cyclic GFR-binding peptide
ELSNITMQIMDENEKVVIGEMSDM

SEQ ID NO: 74700 - protein, 35 aa, Artificial Sequence
  Cyclic GFR-binding peptide
  MOD_RES (35)..(35): Xaa is C or S
SRVHHEPLPVVYYEYVRKKPKLEQLSNRLEEHLEX

SEQ ID NO: 74701 - protein, 42 aa, Artificial Sequence; identical to SEQ ID NO: 24626
  Cyclic GFR-binding peptide
  MOD_RES (5)..(42): Xaa is C or S

SEQ ID NO: 74702 - protein, 30 aa, Artificial Sequence; identical to SEQ ID NO: 20766
  Cyclic GFR-binding peptide
  MOD_RES (3)..(3): Xaa is C or S

SEQ ID NO: 74703 - protein, 37 aa, Artificial Sequence; identical to SEQ ID NO: 20768
  Cyclic GFR-binding peptide
  MOD_RES (4)..(5)..(36): Xaa is C or S

SEQ ID NO: 74704 - protein, 30 aa, Artificial Sequence
  Cyclic GFR-binding peptide
  MOD_RES (27)..(29): Xaa is C or S
LSNITIQIMIGKTPKIIGEMSMIVKSXKXS

SEQ ID NO: 74705 - protein, 37 aa, Artificial Sequence
  Cyclic GFR-binding peptide
  MOD_RES (6)..(7): Xaa is C or S
KIPKAXXVPTELRSVKMAKVDENEKVVKEVQVDMVVE

SEQ ID NO: 74706 - protein, 37 aa, Artificial Sequence
  Cyclic GFR-binding peptide
  MOD_RES (2)..(2): Xaa is C or S
KXQPSRVHHEPLTVLYYEYVRKKPKLEQLSNRLEEHL

SEQ ID NO: 74707 - protein, 23 aa, Artificial Sequence
  Cyclic GFR-binding peptide
SNITVQIMEIVRKKPIFIGEMST

SEQ ID NO: 74708 - protein, 40 aa, Artificial Sequence; identical to SEQ ID NO: 20775
  Cyclic GFR-binding peptide
  MOD_RES (5)..(6)..(38)..(40): Xaa is C or S

SEQ ID NO: 74709 - protein, 26 aa, Artificial Sequence
  Cyclic GFR-binding peptide
RVHHEPLPVVYYEYVRKKPKLEQLSN

SEQ ID NO: 74710 - protein, 38 aa, Artificial Sequence
  Cyclic GFR-binding peptide
  MOD_RES (37)..(37): Xaa is C or S
QPSRVHHEPLTVLYYEYVRKKPKLEQLSNRLEEHLEXA

SEQ ID NO: 74711 - protein, 27 aa, Artificial Sequence
  Cyclic GFR-binding peptide
LRSVKVAKVDDSSNVIKEVQVNMVVRS

SEQ ID NO: 74712 - protein, 28 aa, Artificial Sequence
  Cyclic GFR-binding peptide
RSVKVAKVEIVRKKPIFKEVQVTLEDHL

SEQ ID NO: 74713 - protein, 37 aa, Artificial Sequence
  Cyclic GFR-binding peptide
  MOD_RES (3)..(4)..(35)..(37): Xaa is C or S
SPXXVPQDLSNITIQIMVGRTPKVIGEMSMVVKSXKX

SEQ ID NO: 74714 - protein, 38 aa, Artificial Sequence
  Cyclic GFR-binding peptide
  MOD_RES (3)..(4)..(35)..(37): Xaa is C or S
SPXXVSQDLRPVQIRKIIGKTPKIKKATVMIVKSXKXS

SEQ ID NO: 74715 - protein, 36 aa, Artificial Sequence
  Cyclic GFR-binding peptide
  MOD_RES (5)..(6): Xaa is C or S
SASPXXVSQDLRPVQIRKIIGKTPKIKKATVMIVKS

SEQ ID NO: 74716 - protein, 30 aa, Artificial Sequence
  Cyclic GFR-binding peptide
  MOD_RES (3)..(4): Xaa is C or S
SPXXVPQDLSNITIQIMVGRTPKVIGEMSM

SEQ ID NO: 74717 - protein, 27 aa, Artificial Sequence
  Cyclic GFR-binding peptide
QDLRSVKIAKVIGKTPKIKEVQVMIVK

SEQ ID NO: 74718 - protein, 35 aa, Artificial Sequence
  Cyclic GFR-binding peptide
  MOD_RES (4)..(5): Xaa is C or S
PKAXXVPTELRPVQMRKIDENEKVVKKATVDMVVE

SEQ ID NO: 74719 - protein, 34 aa, Artificial Sequence
  Cyclic GFR-binding peptide
  MOD_RES (5)..(6): Xaa is C or S
VPKPXXAPTKLRSVKVAKVDDSSNVIKEVQVNMV

SEQ ID NO: 74720 - protein, 34 aa, Artificial Sequence
  Cyclic GFR-binding peptide
  MOD_RES (4)..(4): Xaa is C or S
GLEXVPTEEEPLPMVYYRIKPHQGQHEQLSNFLQ

SEQ ID NO: 74721 - protein, 27 aa, Artificial Sequence
  Cyclic GFR-binding peptide
LRSVKVAKVDDSSNVIKEVQVNMVVRA

SEQ ID NO: 74722 - protein, 32 aa, Artificial Sequence
  Cyclic GFR-binding peptide
  MOD_RES (6)..(7): Xaa is C or S
ASAAPXXVPQALRPVQIRKIVGRKPKVKKATV

SEQ ID NO: 74723 - protein, 25 aa, Artificial Sequence
  Cyclic GFR-binding peptide
HRPVQVRKIEYVRKKPKLKKATVRL

SEQ ID NO: 74724 - protein, 29 aa, Artificial Sequence
  Cyclic GFR-binding peptide
  MOD_RES (2)..(3): Xaa is C or S
AXXVPTELRPVQMRKIDENEKVVKKATVD

SEQ ID NO: 74725 - protein, 29 aa, Artificial Sequence
  Cyclic GFR-binding peptide
TEEEPLTMLYYRIKPHQGQHEQLSNFLQH

SEQ ID NO: 74726 - protein, 27 aa, Artificial Sequence
  Cyclic GFR-binding peptide
PTEEEPLPMVYYRIKPHQGQHEQLSNF

SEQ ID NO: 74727 - protein, 35 aa, Artificial Sequence; identical to SEQ ID NO: 24650
  Cyclic GFR-binding peptide
  MOD_RES (35)..(35): Xaa is C or S

SEQ ID NO: 74728 - protein, 36 aa, Artificial Sequence
  Cyclic GFR-binding peptide
  MOD_RES (4)..(5)..(36): Xaa is C or S
ASPXXVPQDLSNITIQIMVGRTPKVIGEMSMVVKSX

SEQ ID NO: 74729 - protein, 36 aa, Artificial Sequence; identical to SEQ ID NO: 24657
  Cyclic GFR-binding peptide
  MOD_RES (5)..(5): Xaa is C or S

SEQ ID NO: 74730 - protein, 42 aa, Artificial Sequence
  Cyclic GFR-binding peptide
  MOD_RES (5)..(42): Xaa is C or S
RNVQXRPTQVQLEPLTVLYYEIVRKKPIFEQLSNTLEDHLAX

SEQ ID NO: 74731 - protein, 33 aa, Artificial Sequence; identical to SEQ ID NO: 24658
  Cyclic GFR-binding peptide
  MOD_RES (33)..(33): Xaa is C or S

SEQ ID NO: 74732 - protein, 35 aa, Artificial Sequence; identical to SEQ ID NO: 24662
  Cyclic GFR-binding peptide
  MOD_RES (2)..(2): Xaa is C or S

SEQ ID NO: 74733 - protein, 32 aa, Artificial Sequence
  Cyclic GFR-binding peptide
  MOD_RES (32)..(32): Xaa is C or S
HHEPLPVVYYEYVRKKPKLEQLSNRLEEHLEX

SEQ ID NO: 74734 - protein, 32 aa, Artificial Sequence
  Cyclic GFR-binding peptide
SRVHHEPLTVLYYEYVRKKPKLEQLSNRLEEH

SEQ ID NO: 74735 - protein, 31 aa, Artificial Sequence
  Cyclic GFR-binding peptide
TEEEPLPMVYYRIKPHQGQHEQLSNFLQHNK

SEQ ID NO: 74736 - protein, 36 aa, Artificial Sequence
  Cyclic GFR-binding peptide
  MOD_RES (5)..(6): Xaa is C or S
IPKAXXVPTELRPVQMRKIDEYDKVVKKATVEMVVE

SEQ ID NO: 74737 - protein, 31 aa, Artificial Sequence
  Cyclic GFR-binding peptide
  MOD_RES (30)..(30): Xaa is C or S
PQALRPVQIRKIVGRKPKVKKATVMIVRSXK

SEQ ID NO: 74738 - protein, 35 aa, Artificial Sequence
  Cyclic GFR-binding peptide
  MOD_RES (4)..(4): Xaa is C or S
GLEXVPTEEEPLPMVYYRIKPHQGQHEQLSNFLQH

SEQ ID NO: 74739 - protein, 40 aa, Artificial Sequence
  Cyclic GFR-binding peptide
  MOD_RES (3)..(40): Xaa is C or S
VKXQPSRVHHEPLPVVYYEYVRKKPKLEQLSNRLEEHLEX

SEQ ID NO: 74740 - protein, 28 aa, Artificial Sequence
  Cyclic GFR-binding peptide
VQLSNITVQIMEIVRKKPIFIGEMSTLE

SEQ ID NO: 74741 - protein, 37 aa, Artificial Sequence
  Cyclic GFR-binding peptide
  MOD_RES (4)..(36): Xaa is C or S
KPTXAPTKLRPVQVRKIDDSSNVIKKATVNMVVRSXG

SEQ ID NO: 74742 - protein, 28 aa, Artificial Sequence
  Cyclic GFR-binding peptide
PTQLRSVKVAKVDDSSNVIKEVQVNMVV

SEQ ID NO: 74743 - protein, 23 aa, Artificial Sequence
  Cyclic GFR-binding peptide
RSVKVAKVDDSSNVIKEVQVNMV

SEQ ID NO: 74744 - protein, 31 aa, Artificial Sequence
  Cyclic GFR-binding peptide
  MOD_RES (31)..(31): Xaa is C or S
PTKLRPVQVRKIDDSSNVIKKATVNMVVRSX

SEQ ID NO: 74745 - protein, 35 aa, Artificial Sequence; identical to SEQ ID NO: 20824
  Cyclic GFR-binding peptide
  MOD_RES (6)..(7): Xaa is C or S

SEQ ID NO: 74746 - protein, 21 aa, Artificial Sequence
  Cyclic GFR-binding peptide
EPLTVLYYDDSSNVIEQLSNN

SEQ ID NO: 74747 - protein, 29 aa, Artificial Sequence
  Cyclic GFR-binding peptide
  MOD_RES (2)..(3): Xaa is C or S
AXXVPTELEPLPMVYYDENEKVVEQLSND

SEQ ID NO: 74748 - protein, 29 aa, Artificial Sequence
  Cyclic GFR-binding peptide
VQLEPLTVLYYEIVRKKPIFEQLSNTLED

SEQ ID NO: 74749 - protein, 34 aa, Artificial Sequence
  Cyclic GFR-binding peptide
  MOD_RES (32)..(34): Xaa is C or S
TEEEPLPMVYYRIKPHQGQHEQLSNFLQHNKXEX

SEQ ID NO: 74750 - protein, 26 aa, Artificial Sequence
  Cyclic GFR-binding peptide
QLEPLPVVYYEIVRKKPIFEQLSNTL

SEQ ID NO: 74751 - protein, 31 aa, Artificial Sequence
  Cyclic GFR-binding peptide
  MOD_RES (2)..(3): Xaa is C or S
PXXAPTQLRSVKVAKVDDSSNVIKEVQVNMV

SEQ ID NO: 74752 - protein, 30 aa, Artificial Sequence
  Cyclic GFR-binding peptide
  MOD_RES (30)..(30): Xaa is C or S
EPLTVLYYEYVRKKPKLEQLSNRLEEHLEX

SEQ ID NO: 74753 - protein, 30 aa, Artificial Sequence
  Cyclic GFR-binding peptide
TEEEPLTMLYYRIKPHQGQHEQLSNFLQHN

SEQ ID NO: 74754 - protein, 32 aa, Artificial Sequence
  Cyclic GFR-binding peptide
  MOD_RES (31)..(31): Xaa is C or S
PTELRSVKMAKVDEYDKVVKEVQVEMVVEGXG

SEQ ID NO: 74755 - protein, 39 aa, Artificial Sequence; identical to SEQ ID NO: 20834
  Cyclic GFR-binding peptide
  MOD_RES (3)..(4)..(36)..(38): Xaa is C or S

SEQ ID NO: 74756 - protein, 33 aa, Artificial Sequence; identical to SEQ ID NO: 20841
  Cyclic GFR-binding peptide
  MOD_RES (2)..(3): Xaa is C or S

SEQ ID NO: 74757 - protein, 32 aa, Artificial Sequence; identical to SEQ ID NO: 20843
  Cyclic GFR-binding peptide
  MOD_RES (29)..(31): Xaa is C or S

SEQ ID NO: 74758 - protein, 27 aa, Artificial Sequence
  Cyclic GFR-binding peptide
  MOD_RES (26)..(26): Xaa is C or S
RSVKIAKVVGRKPKVKEVQVMIVRSXK

SEQ ID NO: 74759 - protein, 30 aa, Artificial Sequence; identical to SEQ ID NO: 20845
  Cyclic GFR-binding peptide
  MOD_RES (5)..(5): Xaa is C or S

SEQ ID NO: 74760 - protein, 30 aa, Artificial Sequence
  Cyclic GFR-binding peptide
  MOD_RES (5)..(5): Xaa is C or S
TKPTXAPTKLRPVQVRKIDDSSNVIKKATV

SEQ ID NO: 74761 - protein, 30 aa, Artificial Sequence; identical to SEQ ID NO: 24695
  Cyclic GFR-binding peptide

SEQ ID NO: 74762 - protein, 28 aa, Artificial Sequence
  Cyclic GFR-binding peptide
EPLTVLYYEIVRKKPIFEQLSNTLEDHL

SEQ ID NO: 74763 - protein, 39 aa, Artificial Sequence; identical to SEQ ID NO: 20851
  Cyclic GFR-binding peptide
  MOD_RES (6)..(7)..(39): Xaa is C or S

SEQ ID NO: 74764 - protein, 31 aa, Artificial Sequence; identical to SEQ ID NO: 20852
  Cyclic GFR-binding peptide
  MOD_RES (1)..(2): Xaa is C or S

SEQ ID NO: 74765 - protein, 28 aa, Artificial Sequence
  Cyclic GFR-binding peptide
ELEPLTMLYYDENEKVVEQLSNDMVVEG

SEQ ID NO: 74766 - protein, 32 aa, Artificial Sequence
  Cyclic GFR-binding peptide
  MOD_RES (2)..(3): Xaa is C or S
PXXVPQALRPVQIRKIVGRKPKVKKATVMIVR

SEQ ID NO: 74767 - protein, 29 aa, Artificial Sequence
  Cyclic GFR-binding peptide
  MOD_RES (29)..(29): Xaa is C or S
KLRSVKVAKVDDSSNVIKEVQVNMVVRSX

SEQ ID NO: 74768 - protein, 38 aa, Artificial Sequence
  Cyclic GFR-binding peptide
  MOD_RES (36)..(38): Xaa is C or S
PTQVQLEPLTVLYYEIVRKKPIFEQLSNTLEDHLAXKX

SEQ ID NO: 74769 - protein, 38 aa, Artificial Sequence
  Cyclic GFR-binding peptide
  MOD_RES (3)..(4)..(35)..(37): Xaa is C or S
APXXVPQALRPVQIRKIVGRKPKVKKATVMIVRSXKXS

SEQ ID NO: 74770 - protein, 40 aa, Artificial Sequence
  Cyclic GFR-binding peptide
  MOD_RES (6)..(38)..(40): Xaa is C or S
VTKPTXAPTKLSNITVQIMDDSSNVIIGEMSNMVVRSXGX

SEQ ID NO: 74771 - protein, 23 aa, Artificial Sequence
  Cyclic GFR-binding peptide
EPLTVLYYEYVRKKPKLEQLSNR

SEQ ID NO: 74772 - protein, 27 aa, Artificial Sequence
  Cyclic GFR-binding peptide
  MOD_RES (1)..(1): Xaa is C or S
XVPTELRPVQMRKIDENEKVVKKATVD

SEQ ID NO: 74773 - protein, 32 aa, Artificial Sequence; identical to SEQ ID NO: 20866
  Cyclic GFR-binding peptide
  MOD_RES (2)..(3): Xaa is C or S

SEQ ID NO: 74774 - protein, 26 aa, Artificial Sequence
  Cyclic GFR-binding peptide
PTEEEPLTMLYYRIKPHQGQHEQLSN

SEQ ID NO: 74775 - protein, 34 aa, Artificial Sequence
  Cyclic GFR-binding peptide
  MOD_RES (5)..(6): Xaa is C or S
SAAPXXVPQALSNITIQIMVGRKPKVIGEMSMIV

SEQ ID NO: 74776 - protein, 31 aa, Artificial Sequence
  Cyclic GFR-binding peptide
  MOD_RES (1)..(1): Xaa is C or S
XVPQALRPVQIRKIVGRKPKVKKATVMIVRS

SEQ ID NO: 74777 - protein, 29 aa, Artificial Sequence
  Cyclic GFR-binding peptide
PTELRPVQMRKIDEYDKVVKKATVEMVVE

SEQ ID NO: 74778 - protein, 33 aa, Artificial Sequence
  Cyclic GFR-binding peptide
  MOD_RES (32)..(32): Xaa is C or S
VPTELRSVKMAKVDENEKVVKEVQVDMVVEGXG

SEQ ID NO: 74779 - protein, 33 aa, Artificial Sequence; identical to SEQ ID NO: 20873
  Cyclic GFR-binding peptide
  MOD_RES (32)..(32): Xaa is C or S

SEQ ID NO: 74780 - protein, 25 aa, Artificial Sequence
  Cyclic GFR-binding peptide
APTQLEPLPVVYYDDSSNVIEQLSN

SEQ ID NO: 74781 - protein, 32 aa, Artificial Sequence; identical to SEQ ID NO: 20877
  Cyclic GFR-binding peptide
  MOD_RES (31)..(31): Xaa is C or S

SEQ ID NO: 74782 - protein, 27 aa, Artificial Sequence
  Cyclic GFR-binding peptide
  MOD_RES (26)..(26): Xaa is C or S
EPLPIVYYVGRTPKVEQLSNMVVKSXK

SEQ ID NO: 74783 - protein, 25 aa, Artificial Sequence
  Cyclic GFR-binding peptide
APTQLRPVQVRKIDDSSNVIKKATV

SEQ ID NO: 74784 - protein, 25 aa, Artificial Sequence
  Cyclic GFR-binding peptide
DLRSVKIAKVVGRTPKVKEVQVMVV

SEQ ID NO: 74785 - protein, 32 aa, Artificial Sequence; identical to SEQ ID NO: 20884
  Cyclic GFR-binding peptide
  MOD_RES (30)..(32): Xaa is C or S

SEQ ID NO: 74786 - protein, 28 aa, Artificial Sequence
  Cyclic GFR-binding peptide
TEERSVKMAKVRIKPHQGQHKEVQVFLQ

SEQ ID NO: 74787 - protein, 32 aa, Artificial Sequence
  Cyclic GFR-binding peptide
  MOD_RES (1)..(2): Xaa is C or S
XXVPQALRSVKIAKVVGRKPKVKEVQVMIVRS

SEQ ID NO: 74788 - protein, 29 aa, Artificial Sequence
  Cyclic GFR-binding peptide
  MOD_RES (4)..(4): Xaa is C or S
KPTXAPTKLEPLTVLYYDDSSNVIEQLSN

SEQ ID NO: 74789 - protein, 29 aa, Artificial Sequence
  Cyclic GFR-binding peptide
  MOD_RES (29)..(29): Xaa is C or S
ELRPVQMRKIDEYDKVVKKATVEMVVEGX

SEQ ID NO: 74790 - protein, 28 aa, Artificial Sequence
  Cyclic GFR-binding peptide
  MOD_RES (28)..(28): Xaa is C or S
LRSVKVAKVDDSSNVIKEVQVNMVVRAX

SEQ ID NO: 74791 - protein, 35 aa, Artificial Sequence
  Cyclic GFR-binding peptide
  MOD_RES (1)..(2)..(34): Xaa is C or S
XXAPTQLRPVQVRKIDDSSNVIKKATVNMVVRAXG

SEQ ID NO: 74792 - protein, 29 aa, Artificial Sequence
  Cyclic GFR-binding peptide
  MOD_RES (27)..(29): Xaa is C or S
SNITVQIMDDSSNVIIGEMSNMVVRAXGX

SEQ ID NO: 74793 - protein, 33 aa, Artificial Sequence; identical to SEQ ID NO: 20898
  Cyclic GFR-binding peptide
  MOD_RES (4)..(5): Xaa is C or S

SEQ ID NO: 74794 - protein, 30 aa, Artificial Sequence
  Cyclic GFR-binding peptide
  MOD_RES (2)..(2): Xaa is C or S
TXAPTKLRSVKVAKVDDSSNVIKEVQVNMV

SEQ ID NO: 74795 - protein, 30 aa, Artificial Sequence
  Cyclic GFR-binding peptide
  MOD_RES (28)..(30): Xaa is C or S
DLSNITIQIMIGKTPKIIGEMSMIVKSXKX

SEQ ID NO: 74796 - protein, 31 aa, Artificial Sequence
  Cyclic GFR-binding peptide
QVQLEPLPVVYYEIVRKKPIFEQLSNTLEDH

SEQ ID NO: 74797 - protein, 24 aa, Artificial Sequence
  Cyclic GFR-binding peptide
TELRPVQMRKIDEYDKVVKKATVE

SEQ ID NO: 74798 - protein, 36 aa, Artificial Sequence
  Cyclic GFR-binding peptide
  MOD_RES (33)..(35): Xaa is C or S
VHHEPLTVLYYEYVRKKPKLEQLSNRLEEHLEXAXA

SEQ ID NO: 74799 - protein, 27 aa, Artificial Sequence
  Cyclic GFR-binding peptide
PQALSNITIQIMVGRKPKVIGEMSMIV

SEQ ID NO: 74800 - protein, 29 aa, Artificial Sequence
  Cyclic GFR-binding peptide
  MOD_RES (1)..(1): Xaa is C or S
XAPTKLEPLPVVYYDDSSNVIEQLSNNMV

SEQ ID NO: 74801 - protein, 34 aa, Artificial Sequence
  Cyclic GFR-binding peptide
  MOD_RES (5)..(6): Xaa is C or S
VPKPXXAPTKLSNITVQIMDDSSNVIIGEMSNMV

SEQ ID NO: 74802 - protein, 30 aa, Artificial Sequence
  Cyclic GFR-binding peptide
  MOD_RES (30)..(30): Xaa is C or S
TQLRPVQVRKIDDSSNVIKKATVNMVVRAX

SEQ ID NO: 74803 - protein, 34 aa, Artificial Sequence
  Cyclic GFR-binding peptide
  MOD_RES (2)..(3)..(34): Xaa is C or S
PXXVSQDLSNITIQIMIGKTPKIIGEMSMIVKSX

SEQ ID NO: 74804 - protein, 35 aa, Artificial Sequence
  Cyclic GFR-binding peptide
  MOD_RES (6)..(7): Xaa is C or S
KIPKAXXVPTELRPVQMRKIDENEKVVKKATVDMV

SEQ ID NO: 74805 - protein, 35 aa, Artificial Sequence; identical to SEQ ID NO: 20912
  Cyclic GFR-binding peptide
  MOD_RES (3)..(4): Xaa is C or S

SEQ ID NO: 74806 - protein, 31 aa, Artificial Sequence; identical to SEQ ID NO: 24749
  Cyclic GFR-binding peptide
  MOD_RES (30)..(30): Xaa is C or S

SEQ ID NO: 74807 - protein, 33 aa, Artificial Sequence
  Cyclic GFR-binding peptide
  MOD_RES (32)..(32): Xaa is C or S
APTKLRPVQVRKIDDSSNVIKKATVNMVVRSXG

SEQ ID NO: 74808 - protein, 34 aa, Artificial Sequence; identical to SEQ ID NO: 24750
  Cyclic GFR-binding peptide
  MOD_RES (4)..(4): Xaa is C or S

SEQ ID NO: 74809 - protein, 28 aa, Artificial Sequence
  Cyclic GFR-binding peptide
QDLRPVQIRKIVGRTPKVKKATVMVVKS

SEQ ID NO: 74810 - protein, 25 aa, Artificial Sequence
  Cyclic GFR-binding peptide
EPLPMVYYRIKPHQGQHEQLSNFLQ

SEQ ID NO: 74811 - protein, 32 aa, Artificial Sequence
  Cyclic GFR-binding peptide
  MOD_RES (29)..(31): Xaa is C or S
QDLRSVKIAKVVGRTPKVKEVQVMVVKSXKXS

SEQ ID NO: 74812 - protein, 31 aa, Artificial Sequence
  Cyclic GFR-binding peptide
  MOD_RES (1)..(2): Xaa is C or S
XXVPTELRSVKMAKVDENEKVVKEVQVDMVV

SEQ ID NO: 74813 - protein, 34 aa, Artificial Sequence
  Cyclic GFR-binding peptide
  MOD_RES (6)..(7): Xaa is C or S
YVPKPXXAPTKLRSVKVAKVDDSSNVIKEVQVNM

SEQ ID NO: 74814 - protein, 36 aa, Artificial Sequence; identical to SEQ ID NO: 20927
  Cyclic GFR-binding peptide
  MOD_RES (6)..(7): Xaa is C or S

SEQ ID NO: 74815 - protein, 25 aa, Artificial Sequence
  Cyclic GFR-binding peptide
DLEPLPIVYYIGKTPKIEQLSNMIV

SEQ ID NO: 74816 - protein, 39 aa, Artificial Sequence; identical to SEQ ID NO: 24758
  Cyclic GFR-binding peptide
  MOD_RES (3)..(3): Xaa is C or S

SEQ ID NO: 74817 - protein, 25 aa, Artificial Sequence
  Cyclic GFR-binding peptide
EPLPMVYYDENEKVVEQLSNDMVVE

SEQ ID NO: 74818 - protein, 31 aa, Artificial Sequence
  Cyclic GFR-binding peptide
SRVHHEPLPVVYYEYVRKKPKLEQLSNRLEE

SEQ ID NO: 74819 - protein, 28 aa, Artificial Sequence
  Cyclic GFR-binding peptide
  MOD_RES (2)..(2): Xaa is C or S
TXAPTKLSNITVQIMDDSSNVIIGEMSN

SEQ ID NO: 74820 - protein, 29 aa, Artificial Sequence
  Cyclic GFR-binding peptide
EPLPVVYYEIVRKKPIFEQLSNTLEDHLA

SEQ ID NO: 74821 - protein, 37 aa, Artificial Sequence; identical to SEQ ID NO: 24763
  Cyclic GFR-binding peptide
  MOD_RES (37)..(37): Xaa is C or S

SEQ ID NO: 74822 - protein, 33 aa, Artificial Sequence
  Cyclic GFR-binding peptide
  MOD_RES (6)..(7): Xaa is C or S
ASASPXXVSQDLSNITIQIMIGKTPKIIGEMSM

SEQ ID NO: 74823 - protein, 30 aa, Artificial Sequence; identical to SEQ ID NO: 24764
  Cyclic GFR-binding peptide

SEQ ID NO: 74824 - protein, 36 aa, Artificial Sequence; identical to SEQ ID NO: 24765
  Cyclic GFR-binding peptide
  MOD_RES (1)..(35): Xaa is C or S

SEQ ID NO: 74825 - protein, 36 aa, Artificial Sequence
  Cyclic GFR-binding peptide
  MOD_RES (1)..(2)..(34)..(36): Xaa is C or S
XXAPTQLRPVQVRKIDDSSNVIKKATVNMVVRAXGX

SEQ ID NO: 74826 - protein, 36 aa, Artificial Sequence
  Cyclic GFR-binding peptide
  MOD_RES (4)..(4): Xaa is C or S
SVKXQPSRVHHEPLTVLYYEYVRKKPKLEQLSNRLE

SEQ ID NO: 74827 - protein, 28 aa, Artificial Sequence
  Cyclic GFR-binding peptide
  MOD_RES (28)..(28): Xaa is C or S
LRPVQMRKIDENEKVVKKATVDMVVEGX

SEQ ID NO: 74828 - protein, 34 aa, Artificial Sequence
  Cyclic GFR-binding peptide
  MOD_RES (4)..(5): Xaa is C or S
AAPXXVPQALSNITIQIMVGRKPKVIGEMSMIVR

SEQ ID NO: 74829 - protein, 21 aa, Artificial Sequence
  Cyclic GFR-binding peptide
EPLTILYYVGRKPKVEQLSNM

SEQ ID NO: 74830 - protein, 34 aa, Artificial Sequence; identical to SEQ ID NO: 20946
  Cyclic GFR-binding peptide
  MOD_RES (1)..(2)..(34): Xaa is C or S

SEQ ID NO: 74831 - protein, 27 aa, Artificial Sequence
  Cyclic GFR-binding peptide
PTELEPLPMVYYDEYDKVVEQLSNEMV

SEQ ID NO: 74832 - protein, 37 aa, Artificial Sequence
  Cyclic GFR-binding peptide
  MOD_RES (3)..(3): Xaa is C or S
VKXQPSRVHHEPLTVLYYEYVRKKPKLEQLSNRLEEH

SEQ ID NO: 74833 - protein, 33 aa, Artificial Sequence
  Cyclic GFR-binding peptide
  MOD_RES (31)..(33): Xaa is C or S
VPQDLRPVQIRKIVGRTPKVKKATVMVVKSXKX

SEQ ID NO: 74834 - protein, 36 aa, Artificial Sequence; identical to SEQ ID NO: 24778
  Cyclic GFR-binding peptide
  MOD_RES (1)..(1): Xaa is C or S

SEQ ID NO: 74835 - protein, 24 aa, Artificial Sequence
  Cyclic GFR-binding peptide
SNITVQIMEYVRKKPKLIGEMSRL

SEQ ID NO: 74836 - protein, 23 aa, Artificial Sequence
  Cyclic GFR-binding peptide
LRPVQVRKIDDSSNVIKKATVNM

SEQ ID NO: 74837 - protein, 31 aa, Artificial Sequence; identical to SEQ ID NO: 20956
  Cyclic GFR-binding peptide

SEQ ID NO: 74838 - protein, 38 aa, Artificial Sequence; identical to SEQ ID NO: 20958
  Cyclic GFR-binding peptide
  MOD_RES (6)..(7): Xaa is C or S

SEQ ID NO: 74839 - protein, 31 aa, Artificial Sequence; identical to SEQ ID NO: 20959
  Cyclic GFR-binding peptide
  MOD_RES (28)..(30): Xaa is C or S

SEQ ID NO: 74840 - protein, 28 aa, Artificial Sequence
  Cyclic GFR-binding peptide
  MOD_RES (28)..(28): Xaa is C or S
DLRPVQIRKIIGKTPKIKKATVMIVKSX

SEQ ID NO: 74841 - protein, 32 aa, Artificial Sequence
  Cyclic GFR-binding peptide
  MOD_RES (31)..(31): Xaa is C or S
HEPLTVLYYEYVRKKPKLEQLSNRLEEHLEXA

SEQ ID NO: 74842 - protein, 28 aa, Artificial Sequence
  Cyclic GFR-binding peptide
PSRVHHEPLTVLYYEYVRKKPKLEQLSN

SEQ ID NO: 74843 - protein, 37 aa, Artificial Sequence
  Cyclic GFR-binding peptide
  MOD_RES (4)..(5)..(37): Xaa is C or S
PKAXXVPTELRPVQMRKIDENEKVVKKATVDMVVEGX

SEQ ID NO: 74844 - protein, 27 aa, Artificial Sequence
  Cyclic GFR-binding peptide
  MOD_RES (26)..(26): Xaa is C or S
RPVQIRKIIGKTPKIKKATVMIVKSXK

SEQ ID NO: 74845 - protein, 33 aa, Artificial Sequence; identical to SEQ ID NO: 20966
  Cyclic GFR-binding peptide
  MOD_RES (6)..(6): Xaa is C or S

SEQ ID NO: 74846 - protein, 36 aa, Artificial Sequence
  Cyclic GFR-binding peptide
  MOD_RES (2)..(34)..(36): Xaa is C or S
TXAPTKLRSVKVAKVDDSSNVIKEVQVNMVVRSXGX

SEQ ID NO: 74847 - protein, 28 aa, Artificial Sequence
  Cyclic GFR-binding peptide
  MOD_RES (27)..(27): Xaa is C or S
RSVKMAKVDEYDKVVKEVQVEMVVEGXG

SEQ ID NO: 74848 - protein, 39 aa, Artificial Sequence
  Cyclic GFR-binding peptide
  MOD_RES (5)..(6)..(37)..(39): Xaa is C or S
SASPXXVSQDLSNITIQIMIGKTPKIIGEMSMIVKSXKX

SEQ ID NO: 74849 - protein, 28 aa, Artificial Sequence
  Cyclic GFR-binding peptide
EPLTVLYYEYVRKKPKLEQLSNRLEEHL

SEQ ID NO: 74850 - protein, 35 aa, Artificial Sequence; identical to SEQ ID NO: 20970
  Cyclic GFR-binding peptide
  MOD_RES (5)..(6): Xaa is C or S

SEQ ID NO: 74851 - protein, 26 aa, Artificial Sequence
  Cyclic GFR-binding peptide
  MOD_RES (1)..(1): Xaa is C or S
XVPQDLEPLPIVYYVGRTPKVEQLSN

SEQ ID NO: 74852 - protein, 25 aa, Artificial Sequence
  Cyclic GFR-binding peptide
KLRSVKVAKVDDSSNVIKEVQVNMV

SEQ ID NO: 74853 - protein, 35 aa, Artificial Sequence
  Cyclic GFR-binding peptide
  MOD_RES (5)..(6): Xaa is C or S
IPKAXXVPTELRPVQMRKIDENEKVVKKATVDMVV

SEQ ID NO: 74854 - protein, 39 aa, Artificial Sequence
  Cyclic GFR-binding peptide
  MOD_RES (6)..(6): Xaa is C or S
DEGLEXVPTEEEPLPMVYYRIKPHQGQHEQLSNFLQHNK

SEQ ID NO: 74855 - protein, 36 aa, Artificial Sequence
  Cyclic GFR-binding peptide
  MOD_RES (5)..(5): Xaa is C or S
TKPTXAPTKLRPVQVRKIDDSSNVIKKATVNMVVRS

SEQ ID NO: 74856 - protein, 33 aa, Artificial Sequence
  Cyclic GFR-binding peptide
  MOD_RES (31)..(33): Xaa is C or S
PTELRSVKMAKVDENEKVVKEVQVDMVVEGXGX

SEQ ID NO: 74857 - protein, 38 aa, Artificial Sequence; identical to SEQ ID NO: 20987
  Cyclic GFR-binding peptide
  MOD_RES (3)..(4)..(35)..(37): Xaa is C or S

SEQ ID NO: 74858 - protein, 31 aa, Artificial Sequence
  Cyclic GFR-binding peptide
  MOD_RES (2)..(2): Xaa is C or S
EXVPTEEEPLTMLYYRIKPHQGQHEQLSNFL

SEQ ID NO: 74859 - protein, 34 aa, Artificial Sequence; identical to SEQ ID NO: 20993
  Cyclic GFR-binding peptide
  MOD_RES (3)..(4): Xaa is C or S

SEQ ID NO: 74860 - protein, 43 aa, Artificial Sequence; identical to SEQ ID NO: 24817
  Cyclic GFR-binding peptide
  MOD_RES (3)..(40)..(42): Xaa is C or S

SEQ ID NO: 74861 - protein, 21 aa, Artificial Sequence
  Cyclic GFR-binding peptide
LEPLPVVYYDDSSNVIEQLSN

SEQ ID NO: 74862 - protein, 40 aa, Artificial Sequence; identical to SEQ ID NO: 21006
  Cyclic GFR-binding peptide
  MOD_RES (6)..(38)..(40): Xaa is C or S

SEQ ID NO: 74863 - protein, 33 aa, Artificial Sequence; identical to SEQ ID NO: 24819
  Cyclic GFR-binding peptide

SEQ ID NO: 74864 - protein, 32 aa, Artificial Sequence
  Cyclic GFR-binding peptide
  MOD_RES (32)..(32): Xaa is C or S
VPTELRPVQMRKIDEYDKVVKKATVEMVVEGX

SEQ ID NO: 74865 - protein, 26 aa, Artificial Sequence
  Cyclic GFR-binding peptide
  MOD_RES (1)..(1): Xaa is C or S
XVPQDLRPVQIRKIVGRTPKVKKATV

SEQ ID NO: 74866 - protein, 37 aa, Artificial Sequence
  Cyclic GFR-binding peptide
  MOD_RES (3)..(4)..(35)..(37): Xaa is C or S
SPXXVPQDLRPVQIRKIVGRTPKVKKATVMVVKSXKX

SEQ ID NO: 74867 - protein, 31 aa, Artificial Sequence
  Cyclic GFR-binding peptide
  MOD_RES (28)..(30): Xaa is C or S
LSNITVQIMDDSSNVIIGEMSNMVVRAXGXH

SEQ ID NO: 74868 - protein, 32 aa, Artificial Sequence
  Cyclic GFR-binding peptide
  MOD_RES (29)..(31): Xaa is C or S
KLSNITVQIMDDSSNVIIGEMSNMVVRSXGXH

SEQ ID NO: 74869 - protein, 29 aa, Artificial Sequence
  Cyclic GFR-binding peptide
  MOD_RES (28)..(28): Xaa is C or S
LEPLPMVYYDEYDKVVEQLSNEMVVEGXG

SEQ ID NO: 74870 - protein, 41 aa, Artificial Sequence; identical to SEQ ID NO: 24824
  Cyclic GFR-binding peptide
  MOD_RES (4)..(38)..(40): Xaa is C or S

SEQ ID NO: 74871 - protein, 29 aa, Artificial Sequence
  Cyclic GFR-binding peptide
SQDLEPLPIVYYIGKTPKIEQLSNMIVKS

SEQ ID NO: 74872 - protein, 26 aa, Artificial Sequence
  Cyclic GFR-binding peptide
LEPLTVLYYDDSSNVIEQLSNNMVVR

SEQ ID NO: 74873 - protein, 31 aa, Artificial Sequence; identical to SEQ ID NO: 21016
  Cyclic GFR-binding peptide
  MOD_RES (2)..(2): Xaa is C or S

SEQ ID NO: 74874 - protein, 36 aa, Artificial Sequence
  Cyclic GFR-binding peptide
  MOD_RES (1)..(2)..(34)..(36): Xaa is C or S
XXVPTELRPVQMRKIDEYDKVVKKATVEMVVEGXGX

SEQ ID NO: 74875 - protein, 30 aa, Artificial Sequence
  Cyclic GFR-binding peptide
PTELRSVKMAKVDEYDKVVKEVQVEMVVEG

SEQ ID NO: 74876 - protein, 27 aa, Artificial Sequence
  Cyclic GFR-binding peptide
HRPVQVRKIEYVRKKPKLKKATVRLEE

SEQ ID NO: 74877 - protein, 23 aa, Artificial Sequence
  Cyclic GFR-binding peptide
LEPLPIVYYIGKTPKIEQLSNMI

SEQ ID NO: 74878 - protein, 23 aa, Artificial Sequence
  Cyclic GFR-binding peptide
LRSVKIAKVVGRTPKVKEVQVMV

SEQ ID NO: 74879 - protein, 26 aa, Artificial Sequence
  Cyclic GFR-binding peptide
TELEPLPMVYYDENEKVVEQLSNDMV

SEQ ID NO: 74880 - protein, 32 aa, Artificial Sequence
  Cyclic GFR-binding peptide
  MOD_RES (29)..(31): Xaa is C or S
ELRPVQMRKIDENEKVVKKATVDMVVEGXGXR

SEQ ID NO: 74881 - protein, 25 aa, Artificial Sequence
  Cyclic GFR-binding peptide
LEPLTVLYYDDSSNVIEQLSNNMVV

SEQ ID NO: 74882 - protein, 24 aa, Artificial Sequence
  Cyclic GFR-binding peptide
SNITVQIMEIVRKKPIFIGEMSTL

SEQ ID NO: 74883 - protein, 33 aa, Artificial Sequence; identical to SEQ ID NO: 21035
  Cyclic GFR-binding peptide
  MOD_RES (30)..(32): Xaa is C or S

SEQ ID NO: 74884 - protein, 33 aa, Artificial Sequence
  Cyclic GFR-binding peptide
  MOD_RES (2)..(3): Xaa is C or S
PXXVSQDLRPVQIRKIIGKTPKIKKATVMIVKS

SEQ ID NO: 74885 - protein, 30 aa, Artificial Sequence; identical to SEQ ID NO: 24844
  Cyclic GFR-binding peptide

SEQ ID NO: 74886 - protein, 35 aa, Artificial Sequence; identical to SEQ ID NO: 24845
  Cyclic GFR-binding peptide
  MOD_RES (32)..(34): Xaa is C or S

SEQ ID NO: 74887 - protein, 22 aa, Artificial Sequence
  Cyclic GFR-binding peptide
ELRSVKMAKVDENEKVVKEVQV

SEQ ID NO: 74888 - protein, 34 aa, Artificial Sequence; identical to SEQ ID NO: 24846
  Cyclic GFR-binding peptide
  MOD_RES (32)..(34): Xaa is C or S

SEQ ID NO: 74889 - protein, 36 aa, Artificial Sequence; identical to SEQ ID NO: 24847
  Cyclic GFR-binding peptide
  MOD_RES (2)..(36): Xaa is C or S

SEQ ID NO: 74890 - protein, 21 aa, Artificial Sequence
  Cyclic GFR-binding peptide
LRPVQVRKIDDSSNVIKKATV

SEQ ID NO: 74891 - protein, 26 aa, Artificial Sequence
  Cyclic GFR-binding peptide
ELEPLPMVYYDEYDKVVEQLSNEMVV

SEQ ID NO: 74892 - protein, 33 aa, Artificial Sequence
  Cyclic GFR-binding peptide
  MOD_RES (1)..(32): Xaa is C or S
XVPQDLRSVKIAKVVGRTPKVKEVQVMVVKSXK

SEQ ID NO: 74893 - protein, 39 aa, Artificial Sequence
  Cyclic GFR-binding peptide
  MOD_RES (4)..(36)..(38): Xaa is C or S
KPTXAPTKLSNITVQIMDDSSNVIIGEMSNMVVRSXGXH

SEQ ID NO: 74894 - protein, 26 aa, Artificial Sequence
  Cyclic GFR-binding peptide
PQALRSVKIAKVVGRKPKVKEVQVMI

SEQ ID NO: 74895 - protein, 31 aa, Artificial Sequence
  Cyclic GFR-binding peptide
  MOD_RES (2)..(3): Xaa is C or S
PXXVPQDLRPVQIRKIVGRTPKVKKATVMVV

SEQ ID NO: 74896 - protein, 22 aa, Artificial Sequence
  Cyclic GFR-binding peptide
LRSVKIAKVVGRKPKVKEVQVM

SEQ ID NO: 74897 - protein, 40 aa, Artificial Sequence; identical to SEQ ID NO: 24850
  Cyclic GFR-binding peptide
  MOD_RES (5)..(5): Xaa is C or S

SEQ ID NO: 74898 - protein, 32 aa, Artificial Sequence
  Cyclic GFR-binding peptide
  MOD_RES (5)..(6): Xaa is C or S
IPKAXXVPTELRPVQMRKIDEYDKVVKKATVE

SEQ ID NO: 74899 - protein, 34 aa, Artificial Sequence
  Cyclic GFR-binding peptide
  MOD_RES (2)..(2): Xaa is C or S
QXRPTQVQLEPLTVLYYEIVRKKPIFEQLSNTLE

SEQ ID NO: 74900 - protein, 36 aa, Artificial Sequence
  Cyclic GFR-binding peptide
  MOD_RES (3)..(4)..(36): Xaa is C or S
KPXXAPTQLRSVKVAKVDDSSNVIKEVQVNMVVRAX

SEQ ID NO: 74901 - protein, 32 aa, Artificial Sequence
  Cyclic GFR-binding peptide
  MOD_RES (3)..(3): Xaa is C or S
PTXAPTKLRPVQVRKIDDSSNVIKKATVNMVV

SEQ ID NO: 74902 - protein, 41 aa, Artificial Sequence; identical to SEQ ID NO: 21045
  Cyclic GFR-binding peptide
  MOD_RES (7)..(39)..(41): Xaa is C or S

SEQ ID NO: 74903 - protein, 35 aa, Artificial Sequence
  Cyclic GFR-binding peptide
  MOD_RES (5)..(5): Xaa is C or S
TKPTXAPTKLRSVKVAKVDDSSNVIKEVQVNMVVR

SEQ ID NO: 74904 - protein, 37 aa, Artificial Sequence; identical to SEQ ID NO: 24855
  Cyclic GFR-binding peptide
  MOD_RES (1)..(35)..(37): Xaa is C or S

SEQ ID NO: 74905 - protein, 30 aa, Artificial Sequence; identical to SEQ ID NO: 21050
  Cyclic GFR-binding peptide
  MOD_RES (30)..(30): Xaa is C or S

SEQ ID NO: 74906 - protein, 37 aa, Artificial Sequence
  Cyclic GFR-binding peptide
  MOD_RES (2)..(3)..(35)..(37): Xaa is C or S
AXXVPTELRPVQMRKIDENEKVVKKATVDMVVEGXGX

SEQ ID NO: 74907 - protein, 28 aa, Artificial Sequence
  Cyclic GFR-binding peptide
TQLRSVKVAKVDDSSNVIKEVQVNMVVR

SEQ ID NO: 74908 - protein, 34 aa, Artificial Sequence; identical to SEQ ID NO: 24858
  Cyclic GFR-binding peptide
  MOD_RES (2)..(2): Xaa is C or S

SEQ ID NO: 74909 - protein, 36 aa, Artificial Sequence
  Cyclic GFR-binding peptide
  MOD_RES (5)..(6): Xaa is C or S
SASPXXVSQDLRSVKIAKVIGKTPKIKEVQVMIVKS

SEQ ID NO: 74910 - protein, 30 aa, Artificial Sequence; identical to SEQ ID NO: 21052
  Cyclic GFR-binding peptide

SEQ ID NO: 74911 - protein, 38 aa, Artificial Sequence
  Cyclic GFR-binding peptide
  MOD_RES (4)..(5)..(36)..(38): Xaa is C or S
ASPXXVPQDLRSVKIAKVVGRTPKVKEVQVMVVKSXKX

SEQ ID NO: 74912 - protein, 32 aa, Artificial Sequence; identical to SEQ ID NO: 24863
  Cyclic GFR-binding peptide
  MOD_RES (32)..(32): Xaa is C or S

SEQ ID NO: 74913 - protein, 31 aa, Artificial Sequence; identical to SEQ ID NO: 24865
  Cyclic GFR-binding peptide
  MOD_RES (29)..(31): Xaa is C or S

SEQ ID NO: 74914 - protein, 29 aa, Artificial Sequence
  Cyclic GFR-binding peptide
TQLRPVQVRKIDDSSNVIKKATVNMVVRA

SEQ ID NO: 74915 - protein, 29 aa, Artificial Sequence
  Cyclic GFR-binding peptide
RVHHEPLTVLYYEYVRKKPKLEQLSNRLE

SEQ ID NO: 74916 - protein, 25 aa, Artificial Sequence
  Cyclic GFR-binding peptide
ALRPVQIRKIVGRKPKVKKATVMIV

SEQ ID NO: 74917 - protein, 35 aa, Artificial Sequence; identical to SEQ ID NO: 24869
  Cyclic GFR-binding peptide
  MOD_RES (4)..(4): Xaa is C or S

SEQ ID NO: 74918 - protein, 31 aa, Artificial Sequence
  Cyclic GFR-binding peptide
PTEEEPLPMVYYRIKPHQGQHEQLSNFLQHN

SEQ ID NO: 74919 - protein, 33 aa, Artificial Sequence
  Cyclic GFR-binding peptide
  MOD_RES (1)..(32): Xaa is C or S
XVSQDLRSVKIAKVIGKTPKIKEVQVMIVKSXK

SEQ ID NO: 74920 - protein, 33 aa, Artificial Sequence
  Cyclic GFR-binding peptide
  MOD_RES (30)..(32): Xaa is C or S
PQALSNITIQIMVGRKPKVIGEMSMIVRSXKXS

SEQ ID NO: 74921 - protein, 33 aa, Artificial Sequence; identical to SEQ ID NO: 21066
  Cyclic GFR-binding peptide
  MOD_RES (1)..(33): Xaa is C or S

SEQ ID NO: 74922 - protein, 32 aa, Artificial Sequence
  Cyclic GFR-binding peptide
  MOD_RES (3)..(3): Xaa is C or S
VKXQPSRVHHEPLPVVYYEYVRKKPKLEQLSN

SEQ ID NO: 74923 - protein, 35 aa, Artificial Sequence
  Cyclic GFR-binding peptide
  MOD_RES (32)..(34): Xaa is C or S
VPTELRPVQMRKIDENEKVVKKATVDMVVEGXGXR

SEQ ID NO: 74924 - protein, 36 aa, Artificial Sequence
  Cyclic GFR-binding peptide
  MOD_RES (1)..(2)..(34)..(36): Xaa is C or S
XXAPTKLRPVQVRKIDDSSNVIKKATVNMVVRSXGX

SEQ ID NO: 74925 - protein, 33 aa, Artificial Sequence
  Cyclic GFR-binding peptide
  MOD_RES (30)..(32): Xaa is C or S
SQDLSNITIQIMIGKTPKIIGEMSMIVKSXKXS

SEQ ID NO: 74926 - protein, 31 aa, Artificial Sequence
  Cyclic GFR-binding peptide
  MOD_RES (2)..(2): Xaa is C or S
KXQPSRVHHEPLTVLYYEYVRKKPKLEQLSN

SEQ ID NO: 74927 - protein, 28 aa, Artificial Sequence
  Cyclic GFR-binding peptide
  MOD_RES (27)..(27): Xaa is C or S
EPLTMLYYDEYDKVVEQLSNEMVVEGXG

SEQ ID NO: 74928 - protein, 29 aa, Artificial Sequence
  Cyclic GFR-binding peptide
TQLEPLTVLYYDDSSNVIEQLSNNMVVRA

SEQ ID NO: 74929 - protein, 28 aa, Artificial Sequence
  Cyclic GFR-binding peptide
ERPVQMRKIRIKPHQGQHKKATVFLQHN

SEQ ID NO: 74930 - protein, 30 aa, Artificial Sequence
  Cyclic GFR-binding peptide
SRVHHEPLPVVYYEYVRKKPKLEQLSNRLE

SEQ ID NO: 74931 - protein, 37 aa, Artificial Sequence
  Cyclic GFR-binding peptide
  MOD_RES (4)..(5)..(37): Xaa is C or S
PKPXXAPTQLSNITVQIMDDSSNVIIGEMSNMVVRAX

SEQ ID NO: 74932 - protein, 22 aa, Artificial Sequence
  Cyclic GFR-binding peptide
RPVQIRKIVGRTPKVKKATVMV

SEQ ID NO: 74933 - protein, 31 aa, Artificial Sequence; identical to SEQ ID NO: 24887
  Cyclic GFR-binding peptide
  MOD_RES (31)..(31): Xaa is C or S

SEQ ID NO: 74934 - protein, 38 aa, Artificial Sequence
  Cyclic GFR-binding peptide
  MOD_RES (5)..(37): Xaa is C or S
TKPTXAPTKLRSVKVAKVDDSSNVIKEVQVNMVVRSXG

SEQ ID NO: 74935 - protein, 41 aa, Artificial Sequence
  Cyclic GFR-binding peptide
  MOD_RES (1)..(38)..(40): Xaa is C or S
XQPSRVHHEPLTVLYYEYVRKKPKLEQLSNRLEEHLEXAXA

SEQ ID NO: 74936 - protein, 28 aa, Artificial Sequence
  Cyclic GFR-binding peptide
  MOD_RES (27)..(27): Xaa is C or S
RPVQMRKIDENEKVVKKATVDMVVEGXG

SEQ ID NO: 74937 - protein, 26 aa, Artificial Sequence
  Cyclic GFR-binding peptide
HHSNITVQIMEYVRKKPKLIGEMSRL

SEQ ID NO: 74938 - protein, 23 aa, Artificial Sequence
  Cyclic GFR-binding peptide
SNITVQIMEYVRKKPKLIGEMSR

SEQ ID NO: 74939 - protein, 36 aa, Artificial Sequence; identical to SEQ ID NO: 24896
  Cyclic GFR-binding peptide
  MOD_RES (36)..(36): Xaa is C or S

SEQ ID NO: 74940 - protein, 34 aa, Artificial Sequence
  Cyclic GFR-binding peptide
  MOD_RES (5)..(6): Xaa is C or S
IPKAXXVPTELRSVKMAKVDENEKVVKEVQVDMV

SEQ ID NO: 74941 - protein, 33 aa, Artificial Sequence; identical to SEQ ID NO: 21100
  Cyclic GFR-binding peptide
  MOD_RES (5)..(6): Xaa is C or S

SEQ ID NO: 74942 - protein, 35 aa, Artificial Sequence
  Cyclic GFR-binding peptide
  MOD_RES (1)..(2)..(34): Xaa is C or S
XXVPTELSNITMQIMDEYDKVVIGEMSEMVVEGXG

SEQ ID NO: 74943 - protein, 34 aa, Artificial Sequence; identical to SEQ ID NO: 21101
  Cyclic GFR-binding peptide
  MOD_RES (5)..(6): Xaa is C or S

SEQ ID NO: 74944 - protein, 33 aa, Artificial Sequence; identical to SEQ ID NO: 21104
  Cyclic GFR-binding peptide
  MOD_RES (3)..(4): Xaa is C or S

SEQ ID NO: 74945 - protein, 34 aa, Artificial Sequence
  Cyclic GFR-binding peptide
  MOD_RES (31)..(33): Xaa is C or S
PTKLRSVKVAKVDDSSNVIKEVQVNMVVRSXGXH

SEQ ID NO: 74946 - protein, 35 aa, Artificial Sequence
  Cyclic GFR-binding peptide
  MOD_RES (5)..(6): Xaa is C or S
VPKPXXAPTKLRSVKVAKVDDSSNVIKEVQVNMVV

SEQ ID NO: 74947 - protein, 33 aa, Artificial Sequence; identical to SEQ ID NO: 21113
  Cyclic GFR-binding peptide
  MOD_RES (1)..(2)..(33): Xaa is C or S

SEQ ID NO: 74948 - protein, 41 aa, Artificial Sequence; identical to SEQ ID NO: 21114
  Cyclic GFR-binding peptide
  MOD_RES (6)..(7)..(39)..(41): Xaa is C or S

SEQ ID NO: 74949 - protein, 35 aa, Artificial Sequence
  Cyclic GFR-binding peptide
  MOD_RES (3)..(3): Xaa is C or S
VQXRPTQVQLEPLTVLYYEIVRKKPIFEQLSNTLE

SEQ ID NO: 74950 - protein, 32 aa, Artificial Sequence
  Cyclic GFR-binding peptide
  MOD_RES (3)..(4): Xaa is C or S
KPXXAPTKLRPVQVRKIDDSSNVIKKATVNMV

SEQ ID NO: 74951 - protein, 25 aa, Artificial Sequence
  Cyclic GFR-binding peptide
EEPLPMVYYRIKPHQGQHEQLSNFL

SEQ ID NO: 74952 - protein, 31 aa, Artificial Sequence; identical to SEQ ID NO: 21119
  Cyclic GFR-binding peptide
  MOD_RES (29)..(31): Xaa is C or S

SEQ ID NO: 74953 - protein, 34 aa, Artificial Sequence
  Cyclic GFR-binding peptide
  MOD_RES (32)..(34): Xaa is C or S
TEEEPLTMLYYRIKPHQGQHEQLSNFLQHNKXEX

SEQ ID NO: 74954 - protein, 36 aa, Artificial Sequence; identical to SEQ ID NO: 21120
  Cyclic GFR-binding peptide
  MOD_RES (1)..(2)..(34)..(36): Xaa is C or S

SEQ ID NO: 74955 - protein, 32 aa, Artificial Sequence
  Cyclic GFR-binding peptide
  MOD_RES (31)..(31): Xaa is C or S
VPQDLSNITIQIMVGRTPKVIGEMSMVVKSXK

SEQ ID NO: 74956 - protein, 33 aa, Artificial Sequence
  Cyclic GFR-binding peptide
  MOD_RES (32)..(32): Xaa is C or S
APTQLRPVQVRKIDDSSNVIKKATVNMVVRAXG

SEQ ID NO: 74957 - protein, 26 aa, Artificial Sequence
  Cyclic GFR-binding peptide
LEPLTILYYVGRKPKVEQLSNMIVRS

SEQ ID NO: 74958 - protein, 22 aa, Artificial Sequence
  Cyclic GFR-binding peptide
ALRPVQIRKIVGRKPKVKKATV

SEQ ID NO: 74959 - protein, 27 aa, Artificial Sequence
  Cyclic GFR-binding peptide
  MOD_RES (1)..(1): Xaa is C or S
XVPTELRSVKMAKVDENEKVVKEVQVD

SEQ ID NO: 74960 - protein, 22 aa, Artificial Sequence
  Cyclic GFR-binding peptide
LEPLTMLYYDEYDKVVEQLSNE

SEQ ID NO: 74961 - protein, 32 aa, Artificial Sequence; identical to SEQ ID NO: 24917
  Cyclic GFR-binding peptide
  MOD_RES (31)..(31): Xaa is C or S

SEQ ID NO: 74962 - protein, 33 aa, Artificial Sequence; identical to SEQ ID NO: 24919
  Cyclic GFR-binding peptide
  MOD_RES (30)..(32): Xaa is C or S

SEQ ID NO: 74963 - protein, 33 aa, Artificial Sequence; identical to SEQ ID NO: 24923
  Cyclic GFR-binding peptide
  MOD_RES (31)..(33): Xaa is C or S

SEQ ID NO: 74964 - protein, 34 aa, Artificial Sequence; identical to SEQ ID NO: 21134
  Cyclic GFR-binding peptide
  MOD_RES (5)..(6): Xaa is C or S

SEQ ID NO: 74965 - protein, 26 aa, Artificial Sequence
  Cyclic GFR-binding peptide
VQLRSVKVAKVEIVRKKPIFKEVQVT

SEQ ID NO: 74966 - protein, 37 aa, Artificial Sequence; identical to SEQ ID NO: 21136
  Cyclic GFR-binding peptide
  MOD_RES (5)..(6): Xaa is C or S

SEQ ID NO: 74967 - protein, 33 aa, Artificial Sequence
  Cyclic GFR-binding peptide
  MOD_RES (6)..(6): Xaa is C or S
VTKPTXAPTKLSNITVQIMDDSSNVIIGEMSNM

SEQ ID NO: 74968 - protein, 34 aa, Artificial Sequence; identical to SEQ ID NO: 24933
  Cyclic GFR-binding peptide
  MOD_RES (1)..(1): Xaa is C or S

SEQ ID NO: 74969 - protein, 33 aa, Artificial Sequence
  Cyclic GFR-binding peptide
  MOD_RES (5)..(6): Xaa is C or S
VPKPXXAPTQLRSVKVAKVDDSSNVIKEVQVNM

SEQ ID NO: 74970 - protein, 34 aa, Artificial Sequence
  Cyclic GFR-binding peptide
  MOD_RES (5)..(5): Xaa is C or S
RNVQXRPTQVQLEPLTVLYYEIVRKKPIFEQLSN

SEQ ID NO: 74971 - protein, 34 aa, Artificial Sequence
  Cyclic GFR-binding peptide
  MOD_RES (5)..(5): Xaa is C or S
EGLEXVPTEEEPLPMVYYRIKPHQGQHEQLSNFL

SEQ ID NO: 74972 - protein, 28 aa, Artificial Sequence
  Cyclic GFR-binding peptide
PTQLEPLTVLYYDDSSNVIEQLSNNMVV

SEQ ID NO: 74973 - protein, 33 aa, Artificial Sequence
  Cyclic GFR-binding peptide
  MOD_RES (1)..(32): Xaa is C or S
XVSQDLSNITIQIMIGKTPKIIGEMSMIVKSXK

SEQ ID NO: 74974 - protein, 25 aa, Artificial Sequence
  Cyclic GFR-binding peptide
VPQDLSNITIQIMVGRTPKVIGEMS

SEQ ID NO: 74975 - protein, 33 aa, Artificial Sequence; identical to SEQ ID NO: 24945
  Cyclic GFR-binding peptide

SEQ ID NO: 74976 - protein, 28 aa, Artificial Sequence
  Cyclic GFR-binding peptide
QDLRSVKIAKVVGRTPKVKEVQVMVVKS

SEQ ID NO: 74977 - protein, 40 aa, Artificial Sequence
  Cyclic GFR-binding peptide
  MOD_RES (6)..(7)..(39): Xaa is C or S
KIPKAXXVPTELSNITMQIMDENEKVVIGEMSDMVVEGXG

SEQ ID NO: 74978 - protein, 23 aa, Artificial Sequence
  Cyclic GFR-binding peptide
ELEPLPMVYYDENEKVVEQLSND

SEQ ID NO: 74979 - protein, 34 aa, Artificial Sequence
  Cyclic GFR-binding peptide
  MOD_RES (32)..(34): Xaa is C or S
VPTELRSVKMAKVDENEKVVKEVQVDMVVEGXGX

SEQ ID NO: 74980 - protein, 37 aa, Artificial Sequence
  Cyclic GFR-binding peptide
  MOD_RES (4)..(5)..(36): Xaa is C or S
AAPXXVPQALSNITIQIMVGRKPKVIGEMSMIVRSXK

SEQ ID NO: 74981 - protein, 28 aa, Artificial Sequence
  Cyclic GFR-binding peptide
TKLRPVQVRKIDDSSNVIKKATVNMVVR

SEQ ID NO: 74982 - protein, 31 aa, Artificial Sequence
  Cyclic GFR-binding peptide
  MOD_RES (2)..(3): Xaa is C or S
PXXVSQDLRSVKIAKVIGKTPKIKEVQVMIV

SEQ ID NO: 74983 - protein, 37 aa, Artificial Sequence; identical to SEQ ID NO: 21155
  Cyclic GFR-binding peptide
  MOD_RES (2)..(3)..(35)..(37): Xaa is C or S

SEQ ID NO: 74984 - protein, 33 aa, Artificial Sequence; identical to SEQ ID NO: 21156
  Cyclic GFR-binding peptide
  MOD_RES (32)..(32): Xaa is C or S

SEQ ID NO: 74985 - protein, 35 aa, Artificial Sequence
  Cyclic GFR-binding peptide
  MOD_RES (4)..(5): Xaa is C or S
PKAXXVPTELRSVKMAKVDENEKVVKEVQVDMVVE

SEQ ID NO: 74986 - protein, 32 aa, Artificial Sequence
  Cyclic GFR-binding peptide
  MOD_RES (3)..(3): Xaa is C or S
LEXVPTEEEPLPMVYYRIKPHQGQHEQLSNFL

SEQ ID NO: 74987 - protein, 24 aa, Artificial Sequence
  Cyclic GFR-binding peptide
ELRPVQMRKIDEYDKVVKKATVEM

SEQ ID NO: 74988 - protein, 35 aa, Artificial Sequence
  Cyclic GFR-binding peptide
  MOD_RES (5)..(6): Xaa is C or S
IPKAXXVPTELRSVKMAKVDENEKVVKEVQVDMVV

SEQ ID NO: 74989 - protein, 26 aa, Artificial Sequence
  Cyclic GFR-binding peptide
RSVKVAKVDDSSNVIKEVQVNMVVRS

SEQ ID NO: 74990 - protein, 32 aa, Artificial Sequence; identical to SEQ ID NO: 21162
  Cyclic GFR-binding peptide
  MOD_RES (29)..(31): Xaa is C or S

SEQ ID NO: 74991 - protein, 42 aa, Artificial Sequence
  Cyclic GFR-binding peptide
  MOD_RES (6)..(7)..(39)..(41): Xaa is C or S
SIPKAXXVPTELRPVQMRKIDEYDKVVKKATVEMVVEGXGXR

SEQ ID NO: 74992 - protein, 30 aa, Artificial Sequence
  Cyclic GFR-binding peptide
HEPLPVVYYEYVRKKPKLEQLSNRLEEHLE

SEQ ID NO: 74993 - protein, 35 aa, Artificial Sequence
  Cyclic GFR-binding peptide
  MOD_RES (5)..(6): Xaa is C or S
VPKPXXAPTQLRSVKVAKVDDSSNVIKEVQVNMVV

SEQ ID NO: 74994 - protein, 32 aa, Artificial Sequence; identical to SEQ ID NO: 21167
  Cyclic GFR-binding peptide
  MOD_RES (3)..(3): Xaa is C or S

SEQ ID NO: 74995 - protein, 38 aa, Artificial Sequence
  Cyclic GFR-binding peptide
  MOD_RES (4)..(5)..(37): Xaa is C or S
PKPXXAPTQLSNITVQIMDDSSNVIIGEMSNMVVRAXG

SEQ ID NO: 74996 - protein, 36 aa, Artificial Sequence; identical to SEQ ID NO: 24965
  Cyclic GFR-binding peptide
  MOD_RES (4)..(4): Xaa is C or S

SEQ ID NO: 74997 - protein, 26 aa, Artificial Sequence
  Cyclic GFR-binding peptide
VPTELRPVQMRKIDENEKVVKKATVD

SEQ ID NO: 74998 - protein, 36 aa, Artificial Sequence; identical to SEQ ID NO: 24968
  Cyclic GFR-binding peptide
  MOD_RES (35)..(35): Xaa is C or S

SEQ ID NO: 74999 - protein, 32 aa, Artificial Sequence; identical to SEQ ID NO: 21173
  Cyclic GFR-binding peptide
  MOD_RES (3)..(4): Xaa is C or S

SEQ ID NO: 75000 - protein, 36 aa, Artificial Sequence
  Cyclic GFR-binding peptide
  MOD_RES (1)..(2)..(33)..(35): Xaa is C or S
XXVPQALRPVQIRKIVGRKPKVKKATVMIVRSXKXS

SEQ ID NO: 75001 - protein, 31 aa, Artificial Sequence; identical to SEQ ID NO: 21175
  Cyclic GFR-binding peptide
  MOD_RES (29)..(31): Xaa is C or S

SEQ ID NO: 75002 - protein, 45 aa, Artificial Sequence; identical to SEQ ID NO: 24977
  Cyclic GFR-binding peptide
  MOD_RES (5)..(42)..(44): Xaa is C or S

SEQ ID NO: 75003 - protein, 24 aa, Artificial Sequence
  Cyclic GFR-binding peptide
TQLRPVQVRKIDDSSNVIKKATVN

SEQ ID NO: 75004 - protein, 29 aa, Artificial Sequence
  Cyclic GFR-binding peptide
  MOD_RES (27)..(29): Xaa is C or S
RSVKVAKVDDSSNVIKEVQVNMVVRSXGX

SEQ ID NO: 75005 - protein, 38 aa, Artificial Sequence; identical to SEQ ID NO: 21180
  Cyclic GFR-binding peptide
  MOD_RES (3)..(4)..(36)..(38): Xaa is C or S

SEQ ID NO: 75006 - protein, 26 aa, Artificial Sequence
  Cyclic GFR-binding peptide
RSVKVAKVDDSSNVIKEVQVNMVVRA

SEQ ID NO: 75007 - protein, 29 aa, Artificial Sequence
  Cyclic GFR-binding peptide
  MOD_RES (27)..(29): Xaa is C or S
EPLPVVYYDDSSNVIEQLSNNMVVRAXGX

SEQ ID NO: 75008 - protein, 24 aa, Artificial Sequence
  Cyclic GFR-binding peptide
EPLPMVYYDEYDKVVEQLSNEMVV

SEQ ID NO: 75009 - protein, 32 aa, Artificial Sequence
  Cyclic GFR-binding peptide
  MOD_RES (3)..(3): Xaa is C or S
VQXRPTQVQLEPLTVLYYEIVRKKPIFEQLSN

SEQ ID NO: 75010 - protein, 33 aa, Artificial Sequence; identical to SEQ ID NO: 21186
  Cyclic GFR-binding peptide
  MOD_RES (30)..(32): Xaa is C or S

SEQ ID NO: 75011 - protein, 25 aa, Artificial Sequence
  Cyclic GFR-binding peptide
VSQDLEPLPIVYYIGKTPKIEQLSN

SEQ ID NO: 75012 - protein, 30 aa, Artificial Sequence
  Cyclic GFR-binding peptide
  MOD_RES (29)..(29): Xaa is C or S
ELRPVQMRKIDENEKVVKKATVDMVVEGXG

SEQ ID NO: 75013 - protein, 26 aa, Artificial Sequence
  Cyclic GFR-binding peptide
  MOD_RES (26)..(26): Xaa is C or S
SNITIQIMIGKTPKIIGEMSMIVKSX

SEQ ID NO: 75014 - protein, 27 aa, Artificial Sequence
  Cyclic GFR-binding peptide
RPVQVRKIEYVRKKPKLKKATVRLEEH

SEQ ID NO: 75015 - protein, 21 aa, Artificial Sequence
  Cyclic GFR-binding peptide
SNITIQIMVGRKPKVIGEMSM

SEQ ID NO: 75016 - protein, 36 aa, Artificial Sequence; identical to SEQ ID NO: 21195
  Cyclic GFR-binding peptide
  MOD_RES (4)..(36): Xaa is C or S

SEQ ID NO: 75017 - protein, 24 aa, Artificial Sequence
  Cyclic GFR-binding peptide
TELEPLPMVYYDEYDKVVEQLSNE

SEQ ID NO: 75018 - protein, 35 aa, Artificial Sequence
  Cyclic GFR-binding peptide
  MOD_RES (2)..(3)..(35): Xaa is C or S
AXXVPTELRPVQMRKIDEYDKVVKKATVEMVVEGX

SEQ ID NO: 75019 - protein, 23 aa, Artificial Sequence
  Cyclic GFR-binding peptide
EPLPMVYYDENEKVVEQLSNDMV

SEQ ID NO: 75020 - protein, 37 aa, Artificial Sequence
  Cyclic GFR-binding peptide
  MOD_RES (3)..(35)..(37): Xaa is C or S
PTXAPTKLRSVKVAKVDDSSNVIKEVQVNMVVRSXGX

SEQ ID NO: 75021 - protein, 34 aa, Artificial Sequence
  Cyclic GFR-binding peptide
  MOD_RES (31)..(33): Xaa is C or S
VSQDLSNITIQIMIGKTPKIIGEMSMIVKSXKXS

SEQ ID NO: 75022 - protein, 37 aa, Artificial Sequence
  Cyclic GFR-binding peptide
  MOD_RES (37)..(37): Xaa is C or S
RPTQVQLEPLTVLYYEIVRKKPIFEQLSNTLEDHLAX

SEQ ID NO: 75023 - protein, 31 aa, Artificial Sequence
  Cyclic GFR-binding peptide
  MOD_RES (4)..(5): Xaa is C or S
PKAXXVPTELSNITMQIMDEYDKVVIGEMSE

SEQ ID NO: 75024 - protein, 30 aa, Artificial Sequence; identical to SEQ ID NO: 21204
  Cyclic GFR-binding peptide
  MOD_RES (28)..(30): Xaa is C or S

SEQ ID NO: 75025 - protein, 31 aa, Artificial Sequence; identical to SEQ ID NO: 24991
  Cyclic GFR-binding peptide

SEQ ID NO: 75026 - protein, 38 aa, Artificial Sequence
  Cyclic GFR-binding peptide
  MOD_RES (5)..(5): Xaa is C or S
EGLEXVPTEEEPLTMLYYRIKPHQGQHEQLSNFLQHNK

SEQ ID NO: 75027 - protein, 32 aa, Artificial Sequence
  Cyclic GFR-binding peptide
  MOD_RES (3)..(4): Xaa is C or S
KAXXVPTELRPVQMRKIDENEKVVKKATVDMV

SEQ ID NO: 75028 - protein, 34 aa, Artificial Sequence; identical to SEQ ID NO: 21212
  Cyclic GFR-binding peptide
  MOD_RES (31)..(33): Xaa is C or S

SEQ ID NO: 75029 - protein, 32 aa, Artificial Sequence; identical to SEQ ID NO: 24994
  Cyclic GFR-binding peptide
  MOD_RES (1)..(1): Xaa is C or S

SEQ ID NO: 75030 - protein, 30 aa, Artificial Sequence; identical to SEQ ID NO: 21219
  Cyclic GFR-binding peptide
  MOD_RES (1)..(2): Xaa is C or S

SEQ ID NO: 75031 - protein, 30 aa, Artificial Sequence
  Cyclic GFR-binding peptide
TQVQLEPLPVVYYEIVRKKPIFEQLSNTLE

SEQ ID NO: 75032 - protein, 29 aa, Artificial Sequence
  Cyclic GFR-binding peptide
  MOD_RES (3)..(4): Xaa is C or S
SPXXVSQDLSNITIQIMIGKTPKIIGEMS

SEQ ID NO: 75033 - protein, 34 aa, Artificial Sequence
  Cyclic GFR-binding peptide
  MOD_RES (1)..(2)..(33): Xaa is C or S
XXVSQDLSNITIQIMIGKTPKIIGEMSMIVKSXK

SEQ ID NO: 75034 - protein, 33 aa, Artificial Sequence
  Cyclic GFR-binding peptide
  MOD_RES (30)..(32): Xaa is C or S
TKLRPVQVRKIDDSSNVIKKATVNMVVRSXGXH

SEQ ID NO: 75035 - protein, 32 aa, Artificial Sequence; identical to SEQ ID NO: 21222
  Cyclic GFR-binding peptide
  MOD_RES (3)..(4): Xaa is C or S

SEQ ID NO: 75036 - protein, 25 aa, Artificial Sequence
  Cyclic GFR-binding peptide
QDLSNITIQIMVGRTPKVIGEMSMV

SEQ ID NO: 75037 - protein, 26 aa, Artificial Sequence
  Cyclic GFR-binding peptide
VQLEPLPVVYYEIVRKKPIFEQLSNT

SEQ ID NO: 75038 - protein, 28 aa, Artificial Sequence
  Cyclic GFR-binding peptide
  MOD_RES (2)..(2): Xaa is C or S
TXAPTKLEPLTVLYYDDSSNVIEQLSNN

SEQ ID NO: 75039 - protein, 40 aa, Artificial Sequence; identical to SEQ ID NO: 25002
  Cyclic GFR-binding peptide
  MOD_RES (4)..(38)..(40): Xaa is C or S

SEQ ID NO: 75040 - protein, 34 aa, Artificial Sequence; identical to SEQ ID NO: 25003
  Cyclic GFR-binding peptide

SEQ ID NO: 75041 - protein, 23 aa, Artificial Sequence
  Cyclic GFR-binding peptide
LEPLPIVYYVGRTPKVEQLSNMV

SEQ ID NO: 75042 - protein, 34 aa, Artificial Sequence; identical to SEQ ID NO: 21231
  Cyclic GFR-binding peptide
  MOD_RES (2)..(3): Xaa is C or S

SEQ ID NO: 75043 - protein, 24 aa, Artificial Sequence
  Cyclic GFR-binding peptide
LEPLTVLYYDDSSNVIEQLSNNMV

SEQ ID NO: 75044 - protein, 41 aa, Artificial Sequence; identical to SEQ ID NO: 25014
  Cyclic GFR-binding peptide
  MOD_RES (7)..(41): Xaa is C or S

SEQ ID NO: 75045 - protein, 34 aa, Artificial Sequence; identical to SEQ ID NO: 21234
  Cyclic GFR-binding peptide
  MOD_RES (31)..(33): Xaa is C or S

SEQ ID NO: 75046 - protein, 29 aa, Artificial Sequence
  Cyclic GFR-binding peptide
PTELRSVKMAKVDEYDKVVKEVQVEMVVE

SEQ ID NO: 75047 - protein, 27 aa, Artificial Sequence
  Cyclic GFR-binding peptide
  MOD_RES (1)..(2): Xaa is C or S
XXVPQDLRPVQIRKIVGRTPKVKKATV

SEQ ID NO: 75048 - protein, 30 aa, Artificial Sequence
  Cyclic GFR-binding peptide
  MOD_RES (28)..(30): Xaa is C or S
LSNITVQIMDDSSNVIIGEMSNMVVRSXGX

SEQ ID NO: 75049 - protein, 29 aa, Artificial Sequence
  Cyclic GFR-binding peptide
  MOD_RES (1)..(1): Xaa is C or S
XVPTELEPLPMVYYDEYDKVVEQLSNEMV

SEQ ID NO: 75050 - protein, 38 aa, Artificial Sequence
  Cyclic GFR-binding peptide
  MOD_RES (4)..(5)..(37): Xaa is C or S
PKPXXAPTKLSNITVQIMDDSSNVIIGEMSNMVVRSXG

SEQ ID NO: 75051 - protein, 32 aa, Artificial Sequence
  Cyclic GFR-binding peptide
  MOD_RES (31)..(31): Xaa is C or S
VPQDLRSVKIAKVVGRTPKVKEVQVMVVKSXK

SEQ ID NO: 75052 - protein, 27 aa, Artificial Sequence
  Cyclic GFR-binding peptide
  MOD_RES (1)..(2): Xaa is C or S
XXVPQDLEPLPIVYYVGRTPKVEQLSN

SEQ ID NO: 75053 - protein, 37 aa, Artificial Sequence
  Cyclic GFR-binding peptide
  MOD_RES (5)..(6)..(37): Xaa is C or S
SASPXXVPQDLRPVQIRKIVGRTPKVKKATVMVVKSX

SEQ ID NO: 75054 - protein, 25 aa, Artificial Sequence
  Cyclic GFR-binding peptide
PTELEPLTMLYYDEYDKVVEQLSNE

SEQ ID NO: 75055 - protein, 25 aa, Artificial Sequence
  Cyclic GFR-binding peptide
VSQDLRPVQIRKIIGKTPKIKKATV

SEQ ID NO: 75056 - protein, 33 aa, Artificial Sequence; identical to SEQ ID NO: 25022
  Cyclic GFR-binding peptide
  MOD_RES (3)..(3): Xaa is C or S

SEQ ID NO: 75057 - protein, 33 aa, Artificial Sequence; identical to SEQ ID NO: 21251
  Cyclic GFR-binding peptide
  MOD_RES (6)..(7): Xaa is C or S

SEQ ID NO: 75058 - protein, 35 aa, Artificial Sequence
  Cyclic GFR-binding peptide
  MOD_RES (5)..(6): Xaa is C or S
VPKPXXAPTQLRPVQVRKIDDSSNVIKKATVNMVV

SEQ ID NO: 75059 - protein, 33 aa, Artificial Sequence
  Cyclic GFR-binding peptide
  MOD_RES (6)..(7): Xaa is C or S
ASAAPXXVPQALRPVQIRKIVGRKPKVKKATVM

SEQ ID NO: 75060 - protein, 37 aa, Artificial Sequence; identical to SEQ ID NO: 25028
  Cyclic GFR-binding peptide
  MOD_RES (34)..(36): Xaa is C or S

SEQ ID NO: 75061 - protein, 31 aa, Artificial Sequence
  Cyclic GFR-binding peptide
  MOD_RES (1)..(1): Xaa is C or S
XVPQALRSVKIAKVVGRKPKVKEVQVMIVRS

SEQ ID NO: 75062 - protein, 40 aa, Artificial Sequence; identical to SEQ ID NO: 25031
  Cyclic GFR-binding peptide
  MOD_RES (1)..(38)..(40): Xaa is C or S

SEQ ID NO: 75063 - protein, 32 aa, Artificial Sequence
  Cyclic GFR-binding peptide
  MOD_RES (5)..(6): Xaa is C or S
SASPXXVPQDLRPVQIRKIVGRTPKVKKATVM

SEQ ID NO: 75064 - protein, 31 aa, Artificial Sequence; identical to SEQ ID NO: 25037
  Cyclic GFR-binding peptide

SEQ ID NO: 75065 - protein, 24 aa, Artificial Sequence
  Cyclic GFR-binding peptide
ALRSVKIAKVVGRKPKVKEVQVMI

SEQ ID NO: 75066 - protein, 43 aa, Artificial Sequence
  Cyclic GFR-binding peptide
  MOD_RES (4)..(41)..(43): Xaa is C or S
NVQXRPTQVQLEPLTVLYYEIVRKKPIFEQLSNTLEDHLAXKX

SEQ ID NO: 75067 - protein, 29 aa, Artificial Sequence
  Cyclic GFR-binding peptide
HRPVQVRKIEYVRKKPKLKKATVRLEEHL

SEQ ID NO: 75068 - protein, 27 aa, Artificial Sequence
  Cyclic GFR-binding peptide
TELRSVKMAKVDEYDKVVKEVQVEMVV

SEQ ID NO: 75069 - protein, 28 aa, Artificial Sequence
  Cyclic GFR-binding peptide
  MOD_RES (27)..(27): Xaa is C or S
LEPLPIVYYIGKTPKIEQLSNMIVKSXK

SEQ ID NO: 75070 - protein, 39 aa, Artificial Sequence
  Cyclic GFR-binding peptide
  MOD_RES (3)..(4)..(36)..(38): Xaa is C or S
KPXXAPTKLRPVQVRKIDDSSNVIKKATVNMVVRSXGXH

SEQ ID NO: 75071 - protein, 32 aa, Artificial Sequence
  Cyclic GFR-binding peptide
  MOD_RES (3)..(3): Xaa is C or S
PTXAPTKLRSVKVAKVDDSSNVIKEVQVNMVV

SEQ ID NO: 75072 - protein, 34 aa, Artificial Sequence
  Cyclic GFR-binding peptide
  MOD_RES (3)..(4): Xaa is C or S
KAXXVPTELRPVQMRKIDENEKVVKKATVDMVVE

SEQ ID NO: 75073 - protein, 34 aa, Artificial Sequence; identical to SEQ ID NO: 21280
  Cyclic GFR-binding peptide
  MOD_RES (32)..(34): Xaa is C or S

SEQ ID NO: 75074 - protein, 41 aa, Artificial Sequence
  Cyclic GFR-binding peptide
  MOD_RES (6)..(7)..(39)..(41): Xaa is C or S
SIPKAXXVPTELSNITMQIMDEYDKVVIGEMSEMVVEGXGX

SEQ ID NO: 75075 - protein, 25 aa, Artificial Sequence
  Cyclic GFR-binding peptide
VPTELEPLTMLYYDEYDKVVEQLSN

SEQ ID NO: 75076 - protein, 32 aa, Artificial Sequence
  Cyclic GFR-binding peptide
  MOD_RES (30)..(32): Xaa is C or S
TQLRSVKVAKVDDSSNVIKEVQVNMVVRAXGX

SEQ ID NO: 75077 - protein, 39 aa, Artificial Sequence; identical to SEQ ID NO: 25055
  Cyclic GFR-binding peptide
  MOD_RES (3)..(3): Xaa is C or S

SEQ ID NO: 75078 - protein, 31 aa, Artificial Sequence; identical to SEQ ID NO: 21299
  Cyclic GFR-binding peptide
  MOD_RES (2)..(3): Xaa is C or S

SEQ ID NO: 75079 - protein, 34 aa, Artificial Sequence
  Cyclic GFR-binding peptide
  MOD_RES (5)..(6): Xaa is C or S
SAAPXXVPQALRSVKIAKVVGRKPKVKEVQVMIV

SEQ ID NO: 75080 - protein, 31 aa, Artificial Sequence
  Cyclic GFR-binding peptide
  MOD_RES (31)..(31): Xaa is C or S
VPQALRPVQIRKIVGRKPKVKKATVMIVRSX

SEQ ID NO: 75081 - protein, 31 aa, Artificial Sequence; identical to SEQ ID NO: 25061
  Cyclic GFR-binding peptide

SEQ ID NO: 75082 - protein, 35 aa, Artificial Sequence; identical to SEQ ID NO: 21304
  Cyclic GFR-binding peptide
  MOD_RES (5)..(6): Xaa is C or S

SEQ ID NO: 75083 - protein, 24 aa, Artificial Sequence
  Cyclic GFR-binding peptide
LRPVQVRKIDDSSNVIKKATVNMV

SEQ ID NO: 75084 - protein, 35 aa, Artificial Sequence; identical to SEQ ID NO: 25063
  Cyclic GFR-binding peptide
  MOD_RES (2)..(2): Xaa is C or S

SEQ ID NO: 75085 - protein, 33 aa, Artificial Sequence
  Cyclic GFR-binding peptide
  MOD_RES (2)..(3): Xaa is C or S
PXXVSQDLRSVKIAKVIGKTPKIKEVQVMIVKS

SEQ ID NO: 75086 - protein, 38 aa, Artificial Sequence
  Cyclic GFR-binding peptide
  MOD_RES (5)..(6)..(37): Xaa is C or S
SASPXXVSQDLSNITIQIMIGKTPKIIGEMSMIVKSXK

SEQ ID NO: 75087 - protein, 35 aa, Artificial Sequence
  Cyclic GFR-binding peptide
  MOD_RES (5)..(5): Xaa is C or S
RNVQXRPTQVQLEPLPVVYYEIVRKKPIFEQLSNT

SEQ ID NO: 75088 - protein, 34 aa, Artificial Sequence
  Cyclic GFR-binding peptide
  MOD_RES (31)..(33): Xaa is C or S
PTELSNITMQIMDEYDKVVIGEMSEMVVEGXGXR

SEQ ID NO: 75089 - protein, 31 aa, Artificial Sequence
  Cyclic GFR-binding peptide
  MOD_RES (2)..(3): Xaa is C or S
AXXVPTELRPVQMRKIDEYDKVVKKATVEMV

SEQ ID NO: 75090 - protein, 31 aa, Artificial Sequence; identical to SEQ ID NO: 21316
  Cyclic GFR-binding peptide
  MOD_RES (3)..(4): Xaa is C or S

SEQ ID NO: 75091 - protein, 30 aa, Artificial Sequence
  Cyclic GFR-binding peptide
  MOD_RES (27)..(29): Xaa is C or S
LRSVKIAKVVGRTPKVKEVQVMVVKSXKXS

SEQ ID NO: 75092 - protein, 37 aa, Artificial Sequence
  Cyclic GFR-binding peptide
  MOD_RES (1)..(2)..(34)..(36): Xaa is C or S
XXVPTELSNITMQIMDEYDKVVIGEMSEMVVEGXGXR

SEQ ID NO: 75093 - protein, 25 aa, Artificial Sequence
  Cyclic GFR-binding peptide
DLSNITIQIMVGRTPKVIGEMSMVV

SEQ ID NO: 75094 - protein, 31 aa, Artificial Sequence
  Cyclic GFR-binding peptide
  MOD_RES (5)..(6): Xaa is C or S
VPKPXXAPTKLRSVKVAKVDDSSNVIKEVQV

SEQ ID NO: 75095 - protein, 25 aa, Artificial Sequence
  Cyclic GFR-binding peptide
RSVKVAKVEIVRKKPIFKEVQVTLE

SEQ ID NO: 75096 - protein, 35 aa, Artificial Sequence
  Cyclic GFR-binding peptide
  MOD_RES (5)..(6): Xaa is C or S
IPKAXXVPTELSNITMQIMDEYDKVVIGEMSEMVV

SEQ ID NO: 75097 - protein, 34 aa, Artificial Sequence
  Cyclic GFR-binding peptide
SRVHHEPLTVLYYEYVRKKPKLEQLSNRLEEHLE

SEQ ID NO: 75098 - protein, 36 aa, Artificial Sequence
  Cyclic GFR-binding peptide
  MOD_RES (4)..(5): Xaa is C or S
PKPXXAPTQLRSVKVAKVDDSSNVIKEVQVNMVVRA

SEQ ID NO: 75099 - protein, 39 aa, Artificial Sequence; identical to SEQ ID NO: 21331
  Cyclic GFR-binding peptide
  MOD_RES (6)..(7)..(39): Xaa is C or S

SEQ ID NO: 75100 - protein, 37 aa, Artificial Sequence
  Cyclic GFR-binding peptide
  MOD_RES (5)..(5): Xaa is C or S
SSVKXQPSRVHHEPLPVVYYEYVRKKPKLEQLSNRLE

SEQ ID NO: 75101 - protein, 38 aa, Artificial Sequence
  Cyclic GFR-binding peptide
  MOD_RES (5)..(6)..(37): Xaa is C or S
SASPXXVSQDLRSVKIAKVIGKTPKIKEVQVMIVKSXK

SEQ ID NO: 75102 - protein, 31 aa, Artificial Sequence
  Cyclic GFR-binding peptide
  MOD_RES (3)..(4): Xaa is C or S
APXXVPQALSNITIQIMVGRKPKVIGEMSMI

SEQ ID NO: 75103 - protein, 37 aa, Artificial Sequence
  Cyclic GFR-binding peptide
  MOD_RES (5)..(6): Xaa is C or S
IPKAXXVPTELSNITMQIMDEYDKVVIGEMSEMVVEG

SEQ ID NO: 75104 - protein, 37 aa, Artificial Sequence
  Cyclic GFR-binding peptide
  MOD_RES (3)..(4)..(36): Xaa is C or S
KAXXVPTELSNITMQIMDENEKVVIGEMSDMVVEGXG

SEQ ID NO: 75105 - protein, 39 aa, Artificial Sequence
  Cyclic GFR-binding peptide
  MOD_RES (6)..(38): Xaa is C or S
VTKPTXAPTKLSNITVQIMDDSSNVIIGEMSNMVVRSXG

SEQ ID NO: 75106 - protein, 31 aa, Artificial Sequence
  Cyclic GFR-binding peptide
  MOD_RES (2)..(3): Xaa is C or S
PXXAPTQLSNITVQIMDDSSNVIIGEMSNMV

SEQ ID NO: 75107 - protein, 26 aa, Artificial Sequence
  Cyclic GFR-binding peptide
HRPVQVRKIEYVRKKPKLKKATVRLE

SEQ ID NO: 75108 - protein, 37 aa, Artificial Sequence
  Cyclic GFR-binding peptide
  MOD_RES (3)..(4)..(35)..(37): Xaa is C or S
SPXXVSQDLRSVKIAKVIGKTPKIKEVQVMIVKSXKX

SEQ ID NO: 75109 - protein, 35 aa, Artificial Sequence
  Cyclic GFR-binding peptide
  MOD_RES (2)..(3)..(34): Xaa is C or S
PXXVSQDLRPVQIRKIIGKTPKIKKATVMIVKSXK

SEQ ID NO: 75110 - protein, 34 aa, Artificial Sequence
  Cyclic GFR-binding peptide
  MOD_RES (3)..(4): Xaa is C or S
SPXXVSQDLSNITIQIMIGKTPKIIGEMSMIVKS

SEQ ID NO: 75111 - protein, 38 aa, Artificial Sequence
  Cyclic GFR-binding peptide
  MOD_RES (6)..(7)..(38): Xaa is C or S
ASASPXXVSQDLRPVQIRKIIGKTPKIKKATVMIVKSX

SEQ ID NO: 75112 - protein, 30 aa, Artificial Sequence; identical to SEQ ID NO: 21350
  Cyclic GFR-binding peptide
  MOD_RES (1)..(2): Xaa is C or S

SEQ ID NO: 75113 - protein, 33 aa, Artificial Sequence
  Cyclic GFR-binding peptide
  MOD_RES (5)..(6): Xaa is C or S
VPKPXXAPTKLRSVKVAKVDDSSNVIKEVQVNM

SEQ ID NO: 75114 - protein, 32 aa, Artificial Sequence
  Cyclic GFR-binding peptide
VQLEPLTVLYYEIVRKKPIFEQLSNTLEDHLA

SEQ ID NO: 75115 - protein, 38 aa, Artificial Sequence
  Cyclic GFR-binding peptide
  MOD_RES (2)..(3)..(35)..(37): Xaa is C or S
AXXVPTELRSVKMAKVDEYDKVVKEVQVEMVVEGXGXR

SEQ ID NO: 75116 - protein, 37 aa, Artificial Sequence; identical to SEQ ID NO: 21355
  Cyclic GFR-binding peptide
  MOD_RES (1)..(2)..(34)..(36): Xaa is C or S

SEQ ID NO: 75117 - protein, 35 aa, Artificial Sequence; identical to SEQ ID NO: 25101
  Cyclic GFR-binding peptide
  MOD_RES (5)..(5): Xaa is C or S

SEQ ID NO: 75118 - protein, 37 aa, Artificial Sequence
  Cyclic GFR-binding peptide
  MOD_RES (4)..(5)..(36): Xaa is C or S
AAPXXVPQALRSVKIAKVVGRKPKVKEVQVMIVRSXK

SEQ ID NO: 75119 - protein, 31 aa, Artificial Sequence
  Cyclic GFR-binding peptide
VPTELRPVQMRKIDEYDKVVKKATVEMVVEG

SEQ ID NO: 75120 - protein, 30 aa, Artificial Sequence; identical to SEQ ID NO: 25108
  Cyclic GFR-binding peptide

SEQ ID NO: 75121 - protein, 38 aa, Artificial Sequence; identical to SEQ ID NO: 21365
  Cyclic GFR-binding peptide
  MOD_RES (3)..(4)..(36)..(38): Xaa is C or S

SEQ ID NO: 75122 - protein, 33 aa, Artificial Sequence; identical to SEQ ID NO: 25110
  Cyclic GFR-binding peptide
  MOD_RES (4)..(4): Xaa is C or S

SEQ ID NO: 75123 - protein, 38 aa, Artificial Sequence; identical to SEQ ID NO: 749
  Cyclic GFR-binding peptide
  MOD_RES (32)..(33): Xaa is C or S

SEQ ID NO: 75124 - protein, 25 aa, Artificial Sequence
  Cyclic GFR-binding peptide
VMNRYKKLIVNSSDDFYLVSIANLQ

SEQ ID NO: 75125 - protein, 32 aa, Artificial Sequence
  Cyclic GFR-binding peptide
  MOD_RES (2)..(4): Xaa is C or S
SXGXRDVVMGRYKKLIIQQKDNFYLMSIANMK

SEQ ID NO: 75126 - protein, 36 aa, Artificial Sequence; identical to SEQ ID NO: 3514
  Cyclic GFR-binding peptide
  MOD_RES (1)..(33)..(34): Xaa is C or S

SEQ ID NO: 75127 - protein, 39 aa, Artificial Sequence; identical to SEQ ID NO: 3515
  Cyclic GFR-binding peptide
  MOD_RES (1)..(33)..(34): Xaa is C or S

SEQ ID NO: 75128 - protein, 33 aa, Artificial Sequence; identical to SEQ ID NO: 760
  Cyclic GFR-binding peptide
  MOD_RES (2)..(2): Xaa is C or S

SEQ ID NO: 75129 - protein, 25 aa, Artificial Sequence
  Cyclic GFR-binding peptide
VVMDRYKKLVVKENEDFYLMSIANL

SEQ ID NO: 75130 - protein, 25 aa, Artificial Sequence
  Cyclic GFR-binding peptide
RYKKLVVNNASDFYLISIANLRTPV

SEQ ID NO: 75131 - protein, 27 aa, Artificial Sequence
  Cyclic GFR-binding peptide
  MOD_RES (27)..(27): Xaa is C or S
NRYKKLIVNNSSDFYLVSIANLKTPAX

SEQ ID NO: 75132 - protein, 28 aa, Artificial Sequence
  Cyclic GFR-binding peptide
  MOD_RES (28)..(28): Xaa is C or S
MNRYKKLIVNSSDDFYLVSIANLQTPAX

SEQ ID NO: 75133 - protein, 32 aa, Artificial Sequence; identical to SEQ ID NO: 28874
  Cyclic GFR-binding peptide
  MOD_RES (30)..(31): Xaa is C or S

SEQ ID NO: 75134 - protein, 38 aa, Artificial Sequence; identical to SEQ ID NO: 3522
  Cyclic GFR-binding peptide
  MOD_RES (1)..(33)..(34): Xaa is C or S

SEQ ID NO: 75135 - protein, 30 aa, Artificial Sequence; identical to SEQ ID NO: 3529
  Cyclic GFR-binding peptide

SEQ ID NO: 75136 - protein, 27 aa, Artificial Sequence
  Cyclic GFR-binding peptide
VVMDRYKKLVVNNASDFYLISIANLRT

SEQ ID NO: 75137 - protein, 34 aa, Artificial Sequence; identical to SEQ ID NO: 776
  Cyclic GFR-binding peptide
  MOD_RES (1)..(3): Xaa is C or S

SEQ ID NO: 75138 - protein, 42 aa, Artificial Sequence; identical to SEQ ID NO: 777
  Cyclic GFR-binding peptide
  MOD_RES (2)..(4)..(36)..(37): Xaa is C or S

SEQ ID NO: 75139 - protein, 29 aa, Artificial Sequence
  Cyclic GFR-binding peptide
  MOD_RES (28)..(29): Xaa is C or S
MNRYKKLIVNNSSDFYLVSIANLKTPAXX

SEQ ID NO: 75140 - protein, 23 aa, Artificial Sequence
  Cyclic GFR-binding peptide
MNRYKKLIVNSSDDFYLVSIANL

SEQ ID NO: 75141 - protein, 29 aa, Artificial Sequence
  Cyclic GFR-binding peptide
  MOD_RES (1)..(1): Xaa is C or S
XSRVVMNRYKKLIVNSSDDFYLVSIANLK

SEQ ID NO: 75142 - protein, 30 aa, Artificial Sequence; identical to SEQ ID NO: 31818
  Cyclic GFR-binding peptide
  MOD_RES (28)..(29): Xaa is C or S

SEQ ID NO: 75143 - protein, 28 aa, Artificial Sequence
  Cyclic GFR-binding peptide
  MOD_RES (26)..(26): Xaa is C or S
RYKKLIVNSSDDFYLVSIANLKTPAXTP

SEQ ID NO: 75144 - protein, 35 aa, Artificial Sequence; identical to SEQ ID NO: 28892
  Cyclic GFR-binding peptide
  MOD_RES (29)..(30): Xaa is C or S

SEQ ID NO: 75145 - protein, 31 aa, Artificial Sequence
  Cyclic GFR-binding peptide
  MOD_RES (1)..(1): Xaa is C or S
XEEVIMRYKKLLLVRGNDFYLMSIANTKVPA

SEQ ID NO: 75146 - protein, 35 aa, Artificial Sequence; identical to SEQ ID NO: 783
  Cyclic GFR-binding peptide
  MOD_RES (30)..(31): Xaa is C or S

SEQ ID NO: 75147 - protein, 39 aa, Artificial Sequence; identical to SEQ ID NO: 784
  Cyclic GFR-binding peptide
  MOD_RES (1)..(3)..(35)..(36): Xaa is C or S

SEQ ID NO: 75148 - protein, 38 aa, Artificial Sequence; identical to SEQ ID NO: 785
  Cyclic GFR-binding peptide
  MOD_RES (1)..(33): Xaa is C or S

SEQ ID NO: 75149 - protein, 27 aa, Artificial Sequence
  Cyclic GFR-binding peptide
  MOD_RES (27)..(27): Xaa is C or S
DRYKKLVVNNASDFYLISIANLRTPVX

SEQ ID NO: 75150 - protein, 35 aa, Artificial Sequence; identical to SEQ ID NO: 31827
  Cyclic GFR-binding peptide
  MOD_RES (1)..(3)..(35): Xaa is C or S

SEQ ID NO: 75151 - protein, 34 aa, Artificial Sequence; identical to SEQ ID NO: 31830
  Cyclic GFR-binding peptide
  MOD_RES (1)..(33)..(34): Xaa is C or S

SEQ ID NO: 75152 - protein, 32 aa, Artificial Sequence; identical to SEQ ID NO: 14091
  Cyclic GFR-binding peptide
  MOD_RES (29)..(30): Xaa is C or S

SEQ ID NO: 75153 - protein, 32 aa, Artificial Sequence; identical to SEQ ID NO: 14095
  Cyclic GFR-binding peptide
  MOD_RES (27)..(28): Xaa is C or S

SEQ ID NO: 75154 - protein, 25 aa, Artificial Sequence
  Cyclic GFR-binding peptide
VVMGRYKKLIIQQKDNFYLMSIANM

SEQ ID NO: 75155 - protein, 28 aa, Artificial Sequence
  Cyclic GFR-binding peptide
VMDRYKKLVVKENEDFYLMSIANLETPV

SEQ ID NO: 75156 - protein, 41 aa, Artificial Sequence; identical to SEQ ID NO: 3561
  Cyclic GFR-binding peptide
  MOD_RES (2)..(4)..(36)..(37): Xaa is C or S

SEQ ID NO: 75157 - protein, 41 aa, Artificial Sequence; identical to SEQ ID NO: 3563
  Cyclic GFR-binding peptide
  MOD_RES (1)..(3)..(35): Xaa is C or S

SEQ ID NO: 75158 - protein, 26 aa, Artificial Sequence
  Cyclic GFR-binding peptide
NRYKKLIVNSSDDFYLVSIANLQTPA

SEQ ID NO: 75159 - protein, 31 aa, Artificial Sequence; identical to SEQ ID NO: 28907
  Cyclic GFR-binding peptide
  MOD_RES (31)..(31): Xaa is C or S

SEQ ID NO: 75160 - protein, 30 aa, Artificial Sequence; identical to SEQ ID NO: 807
  Cyclic GFR-binding peptide
  MOD_RES (27)..(28): Xaa is C or S

SEQ ID NO: 75161 - protein, 33 aa, Artificial Sequence; identical to SEQ ID NO: 14110
  Cyclic GFR-binding peptide
  MOD_RES (1)..(33): Xaa is C or S

SEQ ID NO: 75162 - protein, 32 aa, Artificial Sequence; identical to SEQ ID NO: 14115
  Cyclic GFR-binding peptide
  MOD_RES (30)..(31): Xaa is C or S

SEQ ID NO: 75163 - protein, 41 aa, Artificial Sequence
  Cyclic GFR-binding peptide
  MOD_RES (1)..(3)..(35)..(36): Xaa is C or S
XGXRDVVMGRYKKLIIQQKDNFYLMSIANMKTPTXXPGASG

SEQ ID NO: 75164 - protein, 33 aa, Artificial Sequence; identical to SEQ ID NO: 813
  Cyclic GFR-binding peptide
  MOD_RES (30)..(31): Xaa is C or S

SEQ ID NO: 75165 - protein, 25 aa, Artificial Sequence
  Cyclic GFR-binding peptide
NRYKKLIVNNSSDFYLVSIANLKTP

SEQ ID NO: 75166 - protein, 32 aa, Artificial Sequence; identical to SEQ ID NO: 817
  Cyclic GFR-binding peptide
  MOD_RES (31)..(32): Xaa is C or S

SEQ ID NO: 75167 - protein, 35 aa, Artificial Sequence; identical to SEQ ID NO: 3581
  Cyclic GFR-binding peptide
  MOD_RES (30)..(31): Xaa is C or S

SEQ ID NO: 75168 - protein, 33 aa, Artificial Sequence; identical to SEQ ID NO: 818
  Cyclic GFR-binding peptide
  MOD_RES (29)..(30): Xaa is C or S

SEQ ID NO: 75169 - protein, 36 aa, Artificial Sequence; identical to SEQ ID NO: 14127
  Cyclic GFR-binding peptide
  MOD_RES (1)..(3)..(35)..(36): Xaa is C or S

SEQ ID NO: 75170 - protein, 32 aa, Artificial Sequence; identical to SEQ ID NO: 3586
  Cyclic GFR-binding peptide
  MOD_RES (26)..(27): Xaa is C or S

SEQ ID NO: 75171 - protein, 22 aa, Artificial Sequence
  Cyclic GFR-binding peptide
DRYKKLVVNNASDFYLISIANL

SEQ ID NO: 75172 - protein, 31 aa, Artificial Sequence; identical to SEQ ID NO: 28927
  Cyclic GFR-binding peptide
  MOD_RES (30)..(31): Xaa is C or S

SEQ ID NO: 75173 - protein, 34 aa, Artificial Sequence
  Cyclic GFR-binding peptide
  MOD_RES (1)..(32)..(33): Xaa is C or S
XEEVIMRYKKLLLVRGNDFYLMSIANTKVPAXXT

SEQ ID NO: 75174 - protein, 35 aa, Artificial Sequence
  Cyclic GFR-binding peptide
  MOD_RES (2)..(34)..(35): Xaa is C or S
GXRDVVMGRYKKLIIQQKDNFYLMSIANMKTPTXX

SEQ ID NO: 75175 - protein, 26 aa, Artificial Sequence
  Cyclic GFR-binding peptide
  MOD_RES (26)..(26): Xaa is C or S
RYKKLVVKDYEDFYLMSIANLETPVX

SEQ ID NO: 75176 - protein, 40 aa, Artificial Sequence; identical to SEQ ID NO: 823
  Cyclic GFR-binding peptide
  MOD_RES (1)..(3)..(36)..(37): Xaa is C or S

SEQ ID NO: 75177 - protein, 37 aa, Artificial Sequence; identical to SEQ ID NO: 28933
  Cyclic GFR-binding peptide
  MOD_RES (1)..(33)..(34): Xaa is C or S

SEQ ID NO: 75178 - protein, 40 aa, Artificial Sequence; identical to SEQ ID NO: 824
  Cyclic GFR-binding peptide
  MOD_RES (1)..(3)..(35): Xaa is C or S

SEQ ID NO: 75179 - protein, 33 aa, Artificial Sequence; identical to SEQ ID NO: 826
  Cyclic GFR-binding peptide
  MOD_RES (1)..(3): Xaa is C or S

SEQ ID NO: 75180 - protein, 28 aa, Artificial Sequence
  Cyclic GFR-binding peptide
  MOD_RES (26)..(27): Xaa is C or S
RYKKLVVKENEDFYLMSIANLETPVXXA

SEQ ID NO: 75181 - protein, 42 aa, Artificial Sequence; identical to SEQ ID NO: 3596
  Cyclic GFR-binding peptide
  MOD_RES (2)..(4)..(37)..(38): Xaa is C or S

SEQ ID NO: 75182 - protein, 29 aa, Artificial Sequence
  Cyclic GFR-binding peptide
  MOD_RES (27)..(28): Xaa is C or S
ERYKKLTPVGMDDFYLVSIANLKTPVXXA

SEQ ID NO: 75183 - protein, 31 aa, Artificial Sequence; identical to SEQ ID NO: 14148
  Cyclic GFR-binding peptide
  MOD_RES (31)..(31): Xaa is C or S

SEQ ID NO: 75184 - protein, 25 aa, Artificial Sequence
  Cyclic GFR-binding peptide
EVIMRYKKLLLVRGNDFYLMSIANT

SEQ ID NO: 75185 - protein, 32 aa, Artificial Sequence
  Cyclic GFR-binding peptide
  MOD_RES (32)..(32): Xaa is C or S
RDVVMGRYKKLIIQQKDNFYLMSIANMKTPTX

SEQ ID NO: 75186 - protein, 29 aa, Artificial Sequence
  Cyclic GFR-binding peptide
  MOD_RES (27)..(28): Xaa is C or S
DRYKKLVVNNASDFYLISIANLRTPVXXT

SEQ ID NO: 75187 - protein, 31 aa, Artificial Sequence; identical to SEQ ID NO: 3606
  Cyclic GFR-binding peptide
  MOD_RES (29)..(30): Xaa is C or S

SEQ ID NO: 75188 - protein, 38 aa, Artificial Sequence; identical to SEQ ID NO: 31877
  Cyclic GFR-binding peptide
  MOD_RES (32)..(33): Xaa is C or S

SEQ ID NO: 75189 - protein, 32 aa, Artificial Sequence; identical to SEQ ID NO: 845
  Cyclic GFR-binding peptide
  MOD_RES (2)..(4): Xaa is C or S

SEQ ID NO: 75190 - protein, 38 aa, Artificial Sequence; identical to SEQ ID NO: 848
  Cyclic GFR-binding peptide
  MOD_RES (1)..(3)..(35)..(36): Xaa is C or S

SEQ ID NO: 75191 - protein, 30 aa, Artificial Sequence; identical to SEQ ID NO: 851
  Cyclic GFR-binding peptide
  MOD_RES (29)..(30): Xaa is C or S

SEQ ID NO: 75192 - protein, 27 aa, Artificial Sequence
  Cyclic GFR-binding peptide
GEVVMERYKKLVVKDYEDFYLMSIANL

SEQ ID NO: 75193 - protein, 31 aa, Artificial Sequence; identical to SEQ ID NO: 31890
  Cyclic GFR-binding peptide
  MOD_RES (28)..(29): Xaa is C or S

SEQ ID NO: 75194 - protein, 32 aa, Artificial Sequence; identical to SEQ ID NO: 859
  Cyclic GFR-binding peptide
  MOD_RES (2)..(2): Xaa is C or S

SEQ ID NO: 75195 - protein, 34 aa, Artificial Sequence
  Cyclic GFR-binding peptide
  MOD_RES (2)..(4): Xaa is C or S
LXGXEEVIMRYKKLLLVRGNDFYLMSIANTKVPA

SEQ ID NO: 75196 - protein, 30 aa, Artificial Sequence; identical to SEQ ID NO: 867
  Cyclic GFR-binding peptide
  MOD_RES (30)..(30): Xaa is C or S

SEQ ID NO: 75197 - protein, 31 aa, Artificial Sequence; identical to SEQ ID NO: 868
  Cyclic GFR-binding peptide

SEQ ID NO: 75198 - protein, 29 aa, Artificial Sequence
  Cyclic GFR-binding peptide
  MOD_RES (29)..(29): Xaa is C or S
VMDRYKKLVVNNAADFYLISIANLRAPVX

SEQ ID NO: 75199 - protein, 30 aa, Artificial Sequence; identical to SEQ ID NO: 11457
  Cyclic GFR-binding peptide
  MOD_RES (1)..(3): Xaa is C or S

SEQ ID NO: 75200 - protein, 40 aa, Artificial Sequence; identical to SEQ ID NO: 3646
  Cyclic GFR-binding peptide
  MOD_RES (2)..(4)..(36)..(37): Xaa is C or S

SEQ ID NO: 75201 - protein, 32 aa, Artificial Sequence; identical to SEQ ID NO: 3648
  Cyclic GFR-binding peptide
  MOD_RES (31)..(32): Xaa is C or S

SEQ ID NO: 75202 - protein, 30 aa, Artificial Sequence; identical to SEQ ID NO: 28980
  Cyclic GFR-binding peptide

SEQ ID NO: 75203 - protein, 28 aa, Artificial Sequence
  Cyclic GFR-binding peptide
  MOD_RES (28)..(28): Xaa is C or S
MGRYKKLIIQQKDNFYLMSIANMKTPTX

SEQ ID NO: 75204 - protein, 28 aa, Artificial Sequence
  Cyclic GFR-binding peptide
  MOD_RES (26)..(27): Xaa is C or S
RYKKLIVNSSDDFYLVSIANLKTPAXXP

SEQ ID NO: 75205 - protein, 32 aa, Artificial Sequence; identical to SEQ ID NO: 3653
  Cyclic GFR-binding peptide
  MOD_RES (1)..(1): Xaa is C or S

SEQ ID NO: 75206 - protein, 40 aa, Artificial Sequence
  Cyclic GFR-binding peptide
  MOD_RES (1)..(3)..(35)..(36): Xaa is C or S
XGXRDVVMGRYKKLIIQQKDNFYLMSIANMKTPTXXPGAS

SEQ ID NO: 75207 - protein, 34 aa, Artificial Sequence
  Cyclic GFR-binding peptide
  MOD_RES (30)..(31): Xaa is C or S
EVIMRYKKLLLVRGNDFYLMSIANTKVPAXXTSP

SEQ ID NO: 75208 - protein, 30 aa, Artificial Sequence
  Cyclic GFR-binding peptide
  MOD_RES (2)..(4): Xaa is C or S
SXGXRDVVMGRYKKLIIQQKDNFYLMSIAN

SEQ ID NO: 75209 - protein, 30 aa, Artificial Sequence; identical to SEQ ID NO: 886
  Cyclic GFR-binding peptide
  MOD_RES (28)..(29): Xaa is C or S

SEQ ID NO: 75210 - protein, 31 aa, Artificial Sequence; identical to SEQ ID NO: 3657
  Cyclic GFR-binding peptide
  MOD_RES (30)..(31): Xaa is C or S

SEQ ID NO: 75211 - protein, 27 aa, Artificial Sequence
  Cyclic GFR-binding peptide
  MOD_RES (1)..(1): Xaa is C or S
XAKVVMNRYKKLIVNNSSDFYLVSIAN

SEQ ID NO: 75212 - protein, 25 aa, Artificial Sequence
  Cyclic GFR-binding peptide
VVMDRYKKLVVNNAADFYLISIANL

SEQ ID NO: 75213 - protein, 33 aa, Artificial Sequence
  Cyclic GFR-binding peptide
  MOD_RES (28)..(29): Xaa is C or S
IMRYKKLLLVRGNDFYLMSIANTKVPAXXTSPV

SEQ ID NO: 75214 - protein, 30 aa, Artificial Sequence; identical to SEQ ID NO: 896
  Cyclic GFR-binding peptide
  MOD_RES (27)..(28): Xaa is C or S

SEQ ID NO: 75215 - protein, 27 aa, Artificial Sequence
  Cyclic GFR-binding peptide
VVMNRYKKLIVNSSDDFYLVSIANLQT

SEQ ID NO: 75216 - protein, 32 aa, Artificial Sequence
  Cyclic GFR-binding peptide
  MOD_RES (27)..(28): Xaa is C or S
GRYKKLIIQQKDNFYLMSIANMKTPTXXPGAS

SEQ ID NO: 75217 - protein, 32 aa, Artificial Sequence; identical to SEQ ID NO: 904
  Cyclic GFR-binding peptide
  MOD_RES (2)..(2): Xaa is C or S

SEQ ID NO: 75218 - protein, 26 aa, Artificial Sequence
  Cyclic GFR-binding peptide
VVMNRYKKLIVNSSDDFYLVSIANLQ

SEQ ID NO: 75219 - protein, 38 aa, Artificial Sequence; identical to SEQ ID NO: 3669
  Cyclic GFR-binding peptide
  MOD_RES (2)..(34)..(35): Xaa is C or S

SEQ ID NO: 75220 - protein, 24 aa, Artificial Sequence
  Cyclic GFR-binding peptide
RYKKLIVNSSDDFYLVSIANLKTP

SEQ ID NO: 75221 - protein, 38 aa, Artificial Sequence; identical to SEQ ID NO: 3683
  Cyclic GFR-binding peptide
  MOD_RES (1)..(33)..(34): Xaa is C or S

SEQ ID NO: 75222 - protein, 38 aa, Artificial Sequence; identical to SEQ ID NO: 911
  Cyclic GFR-binding peptide
  MOD_RES (2)..(4)..(36)..(37): Xaa is C or S

SEQ ID NO: 75223 - protein, 30 aa, Artificial Sequence; identical to SEQ ID NO: 29015
  Cyclic GFR-binding peptide
  MOD_RES (1)..(1): Xaa is C or S

SEQ ID NO: 75224 - protein, 23 aa, Artificial Sequence
  Cyclic GFR-binding peptide
MDRYKKLVVKENEDFYLMSIANL

SEQ ID NO: 75225 - protein, 30 aa, Artificial Sequence; identical to SEQ ID NO: 11499
  Cyclic GFR-binding peptide
  MOD_RES (1)..(1): Xaa is C or S

SEQ ID NO: 75226 - protein, 28 aa, Artificial Sequence
  Cyclic GFR-binding peptide
  MOD_RES (1)..(1): Xaa is C or S
XESVAMGRYKKLYTVVGKDFYLISIANL

SEQ ID NO: 75227 - protein, 26 aa, Artificial Sequence
  Cyclic GFR-binding peptide
EVIMRYKKLLLVRGNDFYLMSIANTK

SEQ ID NO: 75228 - protein, 33 aa, Artificial Sequence
  Cyclic GFR-binding peptide
  MOD_RES (29)..(30): Xaa is C or S
VMGRYKKLIIQQKDNFYLMSIANMKTPTXXPGA

SEQ ID NO: 75229 - protein, 32 aa, Artificial Sequence
  Cyclic GFR-binding peptide
  MOD_RES (1)..(3): Xaa is C or S
XGXRDVVMGRYKKLIIQQKDNFYLMSIANMKT

SEQ ID NO: 75230 - protein, 29 aa, Artificial Sequence
  Cyclic GFR-binding peptide
SRVVMNRYKKLIVNSSDDFYLVSIANLKT

SEQ ID NO: 75231 - protein, 27 aa, Artificial Sequence
  Cyclic GFR-binding peptide
EEVIMRYKKLLLVRGNDFYLMSIANTK

SEQ ID NO: 75232 - protein, 40 aa, Artificial Sequence; identical to SEQ ID NO: 11508
  Cyclic GFR-binding peptide
  MOD_RES (2)..(34)..(35): Xaa is C or S

SEQ ID NO: 75233 - protein, 37 aa, Artificial Sequence; identical to SEQ ID NO: 29033
  Cyclic GFR-binding peptide
  MOD_RES (2)..(34)..(35): Xaa is C or S

SEQ ID NO: 75234 - protein, 32 aa, Artificial Sequence; identical to SEQ ID NO: 935
  Cyclic GFR-binding peptide
  MOD_RES (31)..(32): Xaa is C or S

SEQ ID NO: 75235 - protein, 26 aa, Artificial Sequence
  Cyclic GFR-binding peptide
MDRYKKLVVKENEDFYLMSIANLETP

SEQ ID NO: 75236 - protein, 26 aa, Artificial Sequence
  Cyclic GFR-binding peptide
EEVIMRYKKLLLVRGNDFYLMSIANT

SEQ ID NO: 75237 - protein, 38 aa, Artificial Sequence; identical to SEQ ID NO: 29043
  Cyclic GFR-binding peptide
  MOD_RES (2)..(34)..(35): Xaa is C or S

SEQ ID NO: 75238 - protein, 35 aa, Artificial Sequence; identical to SEQ ID NO: 944
  Cyclic GFR-binding peptide
  MOD_RES (29)..(30): Xaa is C or S

SEQ ID NO: 75239 - protein, 36 aa, Artificial Sequence; identical to SEQ ID NO: 3718
  Cyclic GFR-binding peptide
  MOD_RES (31)..(32): Xaa is C or S

SEQ ID NO: 75240 - protein, 30 aa, Artificial Sequence
  Cyclic GFR-binding peptide
  MOD_RES (30)..(30): Xaa is C or S
EVIMRYKKLLLVRGNDFYLMSIANTKVPAX

SEQ ID NO: 75241 - protein, 38 aa, Artificial Sequence
  Cyclic GFR-binding peptide
  MOD_RES (2)..(34)..(35): Xaa is C or S
GXRDVVMGRYKKLIIQQKDNFYLMSIANMKTPTXXPGA

SEQ ID NO: 75242 - protein, 26 aa, Artificial Sequence
  Cyclic GFR-binding peptide
MRYKKLLLVRGNDFYLMSIANTKVPA

SEQ ID NO: 75243 - protein, 21 aa, Artificial Sequence
  Cyclic GFR-binding peptide
GRYKKLIIQQKDNFYLMSIAN

SEQ ID NO: 75244 - protein, 32 aa, Artificial Sequence; identical to SEQ ID NO: 951
  Cyclic GFR-binding peptide
  MOD_RES (1)..(3): Xaa is C or S

SEQ ID NO: 75245 - protein, 25 aa, Artificial Sequence
  Cyclic GFR-binding peptide
GERYKKLTPVGMDDFYLVSIANLKT

SEQ ID NO: 75246 - protein, 36 aa, Artificial Sequence
  Cyclic GFR-binding peptide
  MOD_RES (31)..(32): Xaa is C or S
EEVIMRYKKLLLVRGNDFYLMSIANTKVPAXXTSPV

SEQ ID NO: 75247 - protein, 26 aa, Artificial Sequence
  Cyclic GFR-binding peptide
RDVVMGRYKKLIIQQKDNFYLMSIAN

SEQ ID NO: 75248 - protein, 36 aa, Artificial Sequence; identical to SEQ ID NO: 32000
  Cyclic GFR-binding peptide
  MOD_RES (2)..(34)..(35): Xaa is C or S

SEQ ID NO: 75249 - protein, 33 aa, Artificial Sequence; identical to SEQ ID NO: 29061
  Cyclic GFR-binding peptide
  MOD_RES (31)..(32): Xaa is C or S

SEQ ID NO: 75250 - protein, 32 aa, Artificial Sequence
  Cyclic GFR-binding peptide
  MOD_RES (1)..(3): Xaa is C or S
XGXEEVIMRYKKLLLVRGNDFYLMSIANTKVP

SEQ ID NO: 75251 - protein, 23 aa, Artificial Sequence
  Cyclic GFR-binding peptide
NRYKKLIVNSSDDFYLVSIANLK

SEQ ID NO: 75252 - protein, 24 aa, Artificial Sequence
  Cyclic GFR-binding peptide
RYKKLYTVVGKDFYLISIANLKTP

SEQ ID NO: 75253 - protein, 38 aa, Artificial Sequence; identical to SEQ ID NO: 32005
  Cyclic GFR-binding peptide
  MOD_RES (1)..(3)..(35)..(36): Xaa is C or S

SEQ ID NO: 75254 - protein, 26 aa, Artificial Sequence
  Cyclic GFR-binding peptide
MDRYKKLVVNNASDFYLISIANLRTP

SEQ ID NO: 75255 - protein, 20 aa, Artificial Sequence
  Cyclic GFR-binding peptide
RYKKLVVNNASDFYLISIAN

SEQ ID NO: 75256 - protein, 29 aa, Artificial Sequence
  Cyclic GFR-binding peptide
  MOD_RES (1)..(1): Xaa is C or S
XEEVIMRYKKLLLVRGNDFYLMSIANTKV

SEQ ID NO: 75257 - protein, 33 aa, Artificial Sequence; identical to SEQ ID NO: 967
  Cyclic GFR-binding peptide
  MOD_RES (31)..(32): Xaa is C or S

SEQ ID NO: 75258 - protein, 27 aa, Artificial Sequence
  Cyclic GFR-binding peptide
  MOD_RES (26)..(27): Xaa is C or S
RYKKLVVNNAADFYLISIANLRAPVXX

SEQ ID NO: 75259 - protein, 42 aa, Artificial Sequence; identical to SEQ ID NO: 32013
  Cyclic GFR-binding peptide
  MOD_RES (2)..(4)..(36)..(37): Xaa is C or S

SEQ ID NO: 75260 - protein, 28 aa, Artificial Sequence
  Cyclic GFR-binding peptide
  MOD_RES (28)..(28): Xaa is C or S
MNRYKKLIVNSSDDFYLVSIANLKTPAX

SEQ ID NO: 75261 - protein, 32 aa, Artificial Sequence; identical to SEQ ID NO: 29071
  Cyclic GFR-binding peptide
  MOD_RES (27)..(28): Xaa is C or S

SEQ ID NO: 75262 - protein, 26 aa, Artificial Sequence
  Cyclic GFR-binding peptide
ERYKKLTPVGMDDFYLVSIANLKTPV

SEQ ID NO: 75263 - protein, 28 aa, Artificial Sequence
  Cyclic GFR-binding peptide
  MOD_RES (28)..(28): Xaa is C or S
GERYKKLTPVGMDDFYLVSIANLKTPVX

SEQ ID NO: 75264 - protein, 35 aa, Artificial Sequence; identical to SEQ ID NO: 14269
  Cyclic GFR-binding peptide
  MOD_RES (2)..(4): Xaa is C or S

SEQ ID NO: 75265 - protein, 34 aa, Artificial Sequence; identical to SEQ ID NO: 29078
  Cyclic GFR-binding peptide
  MOD_RES (2)..(4): Xaa is C or S

SEQ ID NO: 75266 - protein, 29 aa, Artificial Sequence
  Cyclic GFR-binding peptide
  MOD_RES (26)..(27): Xaa is C or S
RYKKLYTVVGKDFYLISIANLKTPVXXAK

SEQ ID NO: 75267 - protein, 31 aa, Artificial Sequence; identical to SEQ ID NO: 986
  Cyclic GFR-binding peptide
  MOD_RES (31)..(31): Xaa is C or S

SEQ ID NO: 75268 - protein, 34 aa, Artificial Sequence; identical to SEQ ID NO: 11558
  Cyclic GFR-binding peptide
  MOD_RES (32)..(33): Xaa is C or S

SEQ ID NO: 75269 - protein, 40 aa, Artificial Sequence; identical to SEQ ID NO: 3760
  Cyclic GFR-binding peptide
  MOD_RES (2)..(34)..(35): Xaa is C or S

SEQ ID NO: 75270 - protein, 31 aa, Artificial Sequence; identical to SEQ ID NO: 988
  Cyclic GFR-binding peptide
  MOD_RES (27)..(28): Xaa is C or S

SEQ ID NO: 75271 - protein, 27 aa, Artificial Sequence
  Cyclic GFR-binding peptide
RVVMNRYKKLIVNSSDDFYLVSIANLK

SEQ ID NO: 75272 - protein, 37 aa, Artificial Sequence; identical to SEQ ID NO: 3765
  Cyclic GFR-binding peptide
  MOD_RES (2)..(34)..(35): Xaa is C or S

SEQ ID NO: 75273 - protein, 29 aa, Artificial Sequence
  Cyclic GFR-binding peptide
  MOD_RES (27)..(28): Xaa is C or S
GRYKKLIIQQKDNFYLMSIANMKTPTXXP

SEQ ID NO: 75274 - protein, 30 aa, Artificial Sequence
  Cyclic GFR-binding peptide
  MOD_RES (1)..(3): Xaa is C or S
XGXRDVVMGRYKKLIIQQKDNFYLMSIANM

SEQ ID NO: 75275 - protein, 40 aa, Artificial Sequence; identical to SEQ ID NO: 993
  Cyclic GFR-binding peptide
  MOD_RES (2)..(4)..(36)..(37): Xaa is C or S

SEQ ID NO: 75276 - protein, 29 aa, Artificial Sequence
  Cyclic GFR-binding peptide
  MOD_RES (1)..(3): Xaa is C or S
XGXESVAMGRYKKLYTVVGKDFYLISIAN

SEQ ID NO: 75277 - protein, 30 aa, Artificial Sequence; identical to SEQ ID NO: 32039
  Cyclic GFR-binding peptide

SEQ ID NO: 75278 - protein, 27 aa, Artificial Sequence
  Cyclic GFR-binding peptide
AKVVMNRYKKLIVNNSSDFYLVSIANL

SEQ ID NO: 75279 - protein, 29 aa, Artificial Sequence
  Cyclic GFR-binding peptide
VVMDRYKKLVVNNASDFYLISIANLRTPV

SEQ ID NO: 75280 - protein, 30 aa, Artificial Sequence; identical to SEQ ID NO: 1001
  Cyclic GFR-binding peptide
  MOD_RES (26)..(27): Xaa is C or S

SEQ ID NO: 75281 - protein, 29 aa, Artificial Sequence
  Cyclic GFR-binding peptide
  MOD_RES (1)..(3): Xaa is C or S
XGXRDVVMGRYKKLIIQQKDNFYLMSIAN

SEQ ID NO: 75282 - protein, 34 aa, Artificial Sequence; identical to SEQ ID NO: 1008
  Cyclic GFR-binding peptide
  MOD_RES (30)..(31): Xaa is C or S

SEQ ID NO: 75283 - protein, 34 aa, Artificial Sequence; identical to SEQ ID NO: 3790
  Cyclic GFR-binding peptide
  MOD_RES (1)..(3): Xaa is C or S

SEQ ID NO: 75284 - protein, 35 aa, Artificial Sequence; identical to SEQ ID NO: 3792
  Cyclic GFR-binding peptide
  MOD_RES (2)..(34)..(35): Xaa is C or S

SEQ ID NO: 75285 - protein, 28 aa, Artificial Sequence
  Cyclic GFR-binding peptide
  MOD_RES (26)..(27): Xaa is C or S
RYKKLVVNNASDFYLISIANLRTPVXXT

SEQ ID NO: 75286 - protein, 40 aa, Artificial Sequence; identical to SEQ ID NO: 3799
  Cyclic GFR-binding peptide
  MOD_RES (2)..(4)..(36)..(37): Xaa is C or S

SEQ ID NO: 75287 - protein, 34 aa, Artificial Sequence; identical to SEQ ID NO: 3801
  Cyclic GFR-binding peptide
  MOD_RES (2)..(34): Xaa is C or S

SEQ ID NO: 75288 - protein, 29 aa, Artificial Sequence
  Cyclic GFR-binding peptide
  MOD_RES (28)..(29): Xaa is C or S
MGRYKKLIIQQKDNFYLMSIANMKTPTXX

SEQ ID NO: 75289 - protein, 41 aa, Artificial Sequence; identical to SEQ ID NO: 1026
  Cyclic GFR-binding peptide
  MOD_RES (2)..(4)..(36)..(37): Xaa is C or S

SEQ ID NO: 75290 - protein, 34 aa, Artificial Sequence
  Cyclic GFR-binding peptide
  MOD_RES (28)..(29): Xaa is C or S
MGRYKKLIIQQKDNFYLMSIANMKTPTXXPGASG

SEQ ID NO: 75291 - protein, 41 aa, Artificial Sequence; identical to SEQ ID NO: 32077
  Cyclic GFR-binding peptide
  MOD_RES (2)..(4)..(36)..(37): Xaa is C or S

SEQ ID NO: 75292 - protein, 33 aa, Artificial Sequence; identical to SEQ ID NO: 1028
  Cyclic GFR-binding peptide
  MOD_RES (1)..(33): Xaa is C or S

SEQ ID NO: 75293 - protein, 35 aa, Artificial Sequence; identical to SEQ ID NO: 3806
  Cyclic GFR-binding peptide
  MOD_RES (31)..(32): Xaa is C or S

SEQ ID NO: 75294 - protein, 21 aa, Artificial Sequence
  Cyclic GFR-binding peptide
RYKKLIVNNSSDFYLVSIANL

SEQ ID NO: 75295 - protein, 34 aa, Artificial Sequence
  Cyclic GFR-binding peptide
  MOD_RES (31)..(32): Xaa is C or S
EEVIMRYKKLLLVRGNDFYLMSIANTKVPAXXTS

SEQ ID NO: 75296 - protein, 28 aa, Artificial Sequence
  Cyclic GFR-binding peptide
SMGERYKKLTPVGMDDFYLVSIANLKTP

SEQ ID NO: 75297 - protein, 36 aa, Artificial Sequence; identical to SEQ ID NO: 3822
  Cyclic GFR-binding peptide
  MOD_RES (2)..(4): Xaa is C or S

SEQ ID NO: 75298 - protein, 36 aa, Artificial Sequence; identical to SEQ ID NO: 3823
  Cyclic GFR-binding peptide
  MOD_RES (30)..(31): Xaa is C or S

SEQ ID NO: 75299 - protein, 25 aa, Artificial Sequence
  Cyclic GFR-binding peptide
MRYKKLLLVRGNDFYLMSIANTKVP

SEQ ID NO: 75300 - protein, 25 aa, Artificial Sequence
  Cyclic GFR-binding peptide
VVMERYKKLVVKDYEDFYLMSIANL

SEQ ID NO: 75301 - protein, 41 aa, Artificial Sequence; identical to SEQ ID NO: 11624
  Cyclic GFR-binding peptide
  MOD_RES (2)..(4)..(36)..(37): Xaa is C or S

SEQ ID NO: 75302 - protein, 34 aa, Artificial Sequence; identical to SEQ ID NO: 3831
  Cyclic GFR-binding peptide
  MOD_RES (2)..(4): Xaa is C or S

SEQ ID NO: 75303 - protein, 29 aa, Artificial Sequence
  Cyclic GFR-binding peptide
  MOD_RES (1)..(3): Xaa is C or S
XGXAKVVMNRYKKLIVNNSSDFYLVSIAN

SEQ ID NO: 75304 - protein, 31 aa, Artificial Sequence
  Cyclic GFR-binding peptide
  MOD_RES (1)..(3): Xaa is C or S
XGXEEVIMRYKKLLLVRGNDFYLMSIANTKV

SEQ ID NO: 75305 - protein, 32 aa, Artificial Sequence; identical to SEQ ID NO: 1052
  Cyclic GFR-binding peptide
  MOD_RES (29)..(29): Xaa is C or S

SEQ ID NO: 75306 - protein, 25 aa, Artificial Sequence
  Cyclic GFR-binding peptide
VMDRYKKLVVKENEDFYLMSIANLE

SEQ ID NO: 75307 - protein, 38 aa, Artificial Sequence; identical to SEQ ID NO: 3844
  Cyclic GFR-binding peptide
  MOD_RES (1)..(3)..(36)..(37): Xaa is C or S

SEQ ID NO: 75308 - protein, 34 aa, Artificial Sequence
  Cyclic GFR-binding peptide
  MOD_RES (32)..(33): Xaa is C or S
RDVVMGRYKKLIIQQKDNFYLMSIANMKTPTXXP

SEQ ID NO: 75309 - protein, 32 aa, Artificial Sequence; identical to SEQ ID NO: 3849
  Cyclic GFR-binding peptide
  MOD_RES (2)..(4): Xaa is C or S

SEQ ID NO: 75310 - protein, 23 aa, Artificial Sequence
  Cyclic GFR-binding peptide
ERYKKLTPVGMDDFYLVSIANLK

SEQ ID NO: 75311 - protein, 28 aa, Artificial Sequence
  Cyclic GFR-binding peptide
SEVVMDRYKKLVVNNASDFYLISIANLR

SEQ ID NO: 75312 - protein, 23 aa, Artificial Sequence
  Cyclic GFR-binding peptide
VIMRYKKLLLVRGNDFYLMSIAN

SEQ ID NO: 75313 - protein, 38 aa, Artificial Sequence
  Cyclic GFR-binding peptide
  MOD_RES (1)..(3)..(35)..(36): Xaa is C or S
XGXRDVVMGRYKKLIIQQKDNFYLMSIANMKTPTXXPG

SEQ ID NO: 75314 - protein, 28 aa, Artificial Sequence
  Cyclic GFR-binding peptide
AEVVMDRYKKLVVNNAADFYLISIANLR

SEQ ID NO: 75315 - protein, 28 aa, Artificial Sequence
  Cyclic GFR-binding peptide
  MOD_RES (2)..(2): Xaa is C or S
GXAEVVMDRYKKLVVNNAADFYLISIAN

SEQ ID NO: 75316 - protein, 29 aa, Artificial Sequence
  Cyclic GFR-binding peptide
  MOD_RES (26)..(27): Xaa is C or S
RYKKLIVNNSSDFYLVSIANLKTPAXXAK

SEQ ID NO: 75317 - protein, 31 aa, Artificial Sequence; identical to SEQ ID NO: 3860
  Cyclic GFR-binding peptide
  MOD_RES (1)..(1): Xaa is C or S

SEQ ID NO: 75318 - protein, 35 aa, Artificial Sequence; identical to SEQ ID NO: 3862
  Cyclic GFR-binding peptide
  MOD_RES (29)..(30): Xaa is C or S

SEQ ID NO: 75319 - protein, 34 aa, Artificial Sequence; identical to SEQ ID NO: 11652
  Cyclic GFR-binding peptide
  MOD_RES (1)..(3): Xaa is C or S

SEQ ID NO: 75320 - protein, 27 aa, Artificial Sequence
  Cyclic GFR-binding peptide
VVMGRYKKLIIQQKDNFYLMSIANMKT

SEQ ID NO: 75321 - protein, 32 aa, Artificial Sequence; identical to SEQ ID NO: 1079
  Cyclic GFR-binding peptide
  MOD_RES (26)..(27): Xaa is C or S

SEQ ID NO: 75322 - protein, 34 aa, Artificial Sequence; identical to SEQ ID NO: 3869
  Cyclic GFR-binding peptide
  MOD_RES (29)..(30): Xaa is C or S

SEQ ID NO: 75323 - protein, 28 aa, Artificial Sequence
  Cyclic GFR-binding peptide
MGERYKKLTPVGMDDFYLVSIANLKTPV

SEQ ID NO: 75324 - protein, 29 aa, Artificial Sequence
  Cyclic GFR-binding peptide
  MOD_RES (28)..(29): Xaa is C or S
MERYKKLVVKDYEDFYLMSIANLETPVXX

SEQ ID NO: 75325 - protein, 30 aa, Artificial Sequence; identical to SEQ ID NO: 1087
  Cyclic GFR-binding peptide

SEQ ID NO: 75326 - protein, 33 aa, Artificial Sequence; identical to SEQ ID NO: 29171
  Cyclic GFR-binding peptide
  MOD_RES (29)..(30): Xaa is C or S

SEQ ID NO: 75327 - protein, 35 aa, Artificial Sequence; identical to SEQ ID NO: 11662
  Cyclic GFR-binding peptide
  MOD_RES (1)..(33)..(34): Xaa is C or S

SEQ ID NO: 75328 - protein, 21 aa, Artificial Sequence
  Cyclic GFR-binding peptide
RYKKLLLVRGNDFYLMSIANT

SEQ ID NO: 75329 - protein, 34 aa, Artificial Sequence
  Cyclic GFR-binding peptide
  MOD_RES (1)..(33)..(34): Xaa is C or S
XRDVVMGRYKKLIIQQKDNFYLMSIANMKTPTXX

SEQ ID NO: 75330 - protein, 28 aa, Artificial Sequence
  Cyclic GFR-binding peptide
EVVMERYKKLVVKDYEDFYLMSIANLET

SEQ ID NO: 75331 - protein, 32 aa, Artificial Sequence
  Cyclic GFR-binding peptide
  MOD_RES (30)..(31): Xaa is C or S
VVMGRYKKLIIQQKDNFYLMSIANMKTPTXXP

SEQ ID NO: 75332 - protein, 30 aa, Artificial Sequence; identical to SEQ ID NO: 32169
  Cyclic GFR-binding peptide
  MOD_RES (2)..(4): Xaa is C or S

SEQ ID NO: 75333 - protein, 32 aa, Artificial Sequence; identical to SEQ ID NO: 3881
  Cyclic GFR-binding peptide
  MOD_RES (30)..(31): Xaa is C or S

SEQ ID NO: 75334 - protein, 38 aa, Artificial Sequence; identical to SEQ ID NO: 32174
  Cyclic GFR-binding peptide
  MOD_RES (32)..(33): Xaa is C or S

SEQ ID NO: 75335 - protein, 33 aa, Artificial Sequence; identical to SEQ ID NO: 1096
  Cyclic GFR-binding peptide
  MOD_RES (2)..(2): Xaa is C or S

SEQ ID NO: 75336 - protein, 36 aa, Artificial Sequence; identical to SEQ ID NO: 1098
  Cyclic GFR-binding peptide
  MOD_RES (1)..(3)..(35)..(36): Xaa is C or S

SEQ ID NO: 75337 - protein, 32 aa, Artificial Sequence; identical to SEQ ID NO: 11674
  Cyclic GFR-binding peptide
  MOD_RES (31)..(32): Xaa is C or S

SEQ ID NO: 75338 - protein, 30 aa, Artificial Sequence; identical to SEQ ID NO: 3892
  Cyclic GFR-binding peptide
  MOD_RES (28)..(28): Xaa is C or S

SEQ ID NO: 75339 - protein, 29 aa, Artificial Sequence
  Cyclic GFR-binding peptide
  MOD_RES (1)..(3): Xaa is C or S
XGXAEVVMDRYKKLVVNNAADFYLISIAN

SEQ ID NO: 75340 - protein, 39 aa, Artificial Sequence
  Cyclic GFR-binding peptide
  MOD_RES (2)..(4)..(35)..(36): Xaa is C or S
LXGXEEVIMRYKKLLLVRGNDFYLMSIANTKVPAXXTSP

SEQ ID NO: 75341 - protein, 36 aa, Artificial Sequence
  Cyclic GFR-binding peptide
  MOD_RES (30)..(31): Xaa is C or S
EVIMRYKKLLLVRGNDFYLMSIANTKVPAXXTSPVR

SEQ ID NO: 75342 - protein, 28 aa, Artificial Sequence
  Cyclic GFR-binding peptide
VIMRYKKLLLVRGNDFYLMSIANTKVPA

SEQ ID NO: 75343 - protein, 41 aa, Artificial Sequence; identical to SEQ ID NO: 1105
  Cyclic GFR-binding peptide
  MOD_RES (2)..(4)..(36)..(37): Xaa is C or S

SEQ ID NO: 75344 - protein, 34 aa, Artificial Sequence; identical to SEQ ID NO: 11684
  Cyclic GFR-binding peptide
  MOD_RES (28)..(29): Xaa is C or S

SEQ ID NO: 75345 - protein, 32 aa, Artificial Sequence; identical to SEQ ID NO: 32198
  Cyclic GFR-binding peptide
  MOD_RES (31)..(32): Xaa is C or S

SEQ ID NO: 75346 - protein, 33 aa, Artificial Sequence
  Cyclic GFR-binding peptide
  MOD_RES (1)..(3): Xaa is C or S
XGXEEVIMRYKKLLLVRGNDFYLMSIANTKVPA

SEQ ID NO: 75347 - protein, 33 aa, Artificial Sequence
  Cyclic GFR-binding peptide
  MOD_RES (31)..(32): Xaa is C or S
DVVMGRYKKLIIQQKDNFYLMSIANMKTPTXXP

SEQ ID NO: 75348 - protein, 36 aa, Artificial Sequence; identical to SEQ ID NO: 1117
  Cyclic GFR-binding peptide
  MOD_RES (32)..(33): Xaa is C or S

SEQ ID NO: 75349 - protein, 35 aa, Artificial Sequence; identical to SEQ ID NO: 3908
  Cyclic GFR-binding peptide
  MOD_RES (30)..(31): Xaa is C or S

SEQ ID NO: 75350 - protein, 28 aa, Artificial Sequence
  Cyclic GFR-binding peptide
  MOD_RES (2)..(2): Xaa is C or S
GXRDVVMGRYKKLIIQQKDNFYLMSIAN

SEQ ID NO: 75351 - protein, 38 aa, Artificial Sequence; identical to SEQ ID NO: 14418
  Cyclic GFR-binding peptide
  MOD_RES (1)..(3)..(35)..(36): Xaa is C or S

SEQ ID NO: 75352 - protein, 36 aa, Artificial Sequence; identical to SEQ ID NO: 14420
  Cyclic GFR-binding peptide
  MOD_RES (2)..(4)..(36): Xaa is C or S

SEQ ID NO: 75353 - protein, 30 aa, Artificial Sequence; identical to SEQ ID NO: 32211
  Cyclic GFR-binding peptide
  MOD_RES (26)..(27): Xaa is C or S

SEQ ID NO: 75354 - protein, 31 aa, Artificial Sequence; identical to SEQ ID NO: 3915
  Cyclic GFR-binding peptide
  MOD_RES (1)..(1): Xaa is C or S

SEQ ID NO: 75355 - protein, 30 aa, Artificial Sequence
  Cyclic GFR-binding peptide
  MOD_RES (29)..(30): Xaa is C or S
VIMRYKKLLLVRGNDFYLMSIANTKVPAXX

SEQ ID NO: 75356 - protein, 40 aa, Artificial Sequence; identical to SEQ ID NO: 1128
  Cyclic GFR-binding peptide
  MOD_RES (1)..(3)..(35)..(36): Xaa is C or S

SEQ ID NO: 75357 - protein, 27 aa, Artificial Sequence
  Cyclic GFR-binding peptide
  MOD_RES (27)..(27): Xaa is C or S
GRYKKLYTVVGKDFYLISIANLKTPVX

SEQ ID NO: 75358 - protein, 25 aa, Artificial Sequence
  Cyclic GFR-binding peptide
RVVMNRYKKLIVNSSDDFYLVSIAN

SEQ ID NO: 75359 - protein, 36 aa, Artificial Sequence
  Cyclic GFR-binding peptide
  MOD_RES (1)..(33)..(34): Xaa is C or S
XRDVVMGRYKKLIIQQKDNFYLMSIANMKTPTXXPG

SEQ ID NO: 75360 - protein, 36 aa, Artificial Sequence; identical to SEQ ID NO: 3923
  Cyclic GFR-binding peptide
  MOD_RES (30)..(31): Xaa is C or S

SEQ ID NO: 75361 - protein, 27 aa, Artificial Sequence
  Cyclic GFR-binding peptide
  MOD_RES (26)..(27): Xaa is C or S
RYKKLIVNNSSDFYLVSIANLKTPAXX

SEQ ID NO: 75362 - protein, 24 aa, Artificial Sequence
  Cyclic GFR-binding peptide
RYKKLVVNNAADFYLISIANLRAP

SEQ ID NO: 75363 - protein, 35 aa, Artificial Sequence; identical to SEQ ID NO: 1142
  Cyclic GFR-binding peptide
  MOD_RES (1)..(33)..(34): Xaa is C or S

SEQ ID NO: 75364 - protein, 35 aa, Artificial Sequence; identical to SEQ ID NO: 1144
  Cyclic GFR-binding peptide
  MOD_RES (31)..(31): Xaa is C or S

SEQ ID NO: 75365 - protein, 29 aa, Artificial Sequence
  Cyclic GFR-binding peptide
  MOD_RES (2)..(2): Xaa is C or S
GXAEVVMDRYKKLVVNNAADFYLISIANL

SEQ ID NO: 75366 - protein, 29 aa, Artificial Sequence
  Cyclic GFR-binding peptide
VSMGERYKKLTPVGMDDFYLVSIANLKTP

SEQ ID NO: 75367 - protein, 36 aa, Artificial Sequence; identical to SEQ ID NO: 1148
  Cyclic GFR-binding peptide
  MOD_RES (30)..(31): Xaa is C or S

SEQ ID NO: 75368 - protein, 37 aa, Artificial Sequence
  Cyclic GFR-binding peptide
  MOD_RES (1)..(3)..(35)..(36): Xaa is C or S
XGXRDVVMGRYKKLIIQQKDNFYLMSIANMKTPTXXP

SEQ ID NO: 75369 - protein, 34 aa, Artificial Sequence
  Cyclic GFR-binding peptide
  MOD_RES (28)..(29): Xaa is C or S
IMRYKKLLLVRGNDFYLMSIANTKVPAXXTSPVR

SEQ ID NO: 75370 - protein, 37 aa, Artificial Sequence; identical to SEQ ID NO: 3944
  Cyclic GFR-binding peptide
  MOD_RES (2)..(34)..(35): Xaa is C or S

SEQ ID NO: 75371 - protein, 31 aa, Artificial Sequence
  Cyclic GFR-binding peptide
  MOD_RES (28)..(29): Xaa is C or S
MGRYKKLIIQQKDNFYLMSIANMKTPTXXPG

SEQ ID NO: 75372 - protein, 36 aa, Artificial Sequence
  Cyclic GFR-binding peptide
  MOD_RES (1)..(32)..(33): Xaa is C or S
XEEVIMRYKKLLLVRGNDFYLMSIANTKVPAXXTSP

SEQ ID NO: 75373 - protein, 30 aa, Artificial Sequence; identical to SEQ ID NO: 3949
  Cyclic GFR-binding peptide
  MOD_RES (2)..(2): Xaa is C or S

SEQ ID NO: 75374 - protein, 31 aa, Artificial Sequence; identical to SEQ ID NO: 3950
  Cyclic GFR-binding peptide
  MOD_RES (30)..(31): Xaa is C or S

SEQ ID NO: 75375 - protein, 29 aa, Artificial Sequence
  Cyclic GFR-binding peptide
  MOD_RES (1)..(1): Xaa is C or S
XARVVMNRYKKLIVNSSDDFYLVSIANLQ

SEQ ID NO: 75376 - protein, 25 aa, Artificial Sequence
  Cyclic GFR-binding peptide
NRYKKLIVNSSDDFYLVSIANLQTP

SEQ ID NO: 75377 - protein, 37 aa, Artificial Sequence; identical to SEQ ID NO: 14461
  Cyclic GFR-binding peptide
  MOD_RES (2)..(4)..(36)..(37): Xaa is C or S

SEQ ID NO: 75378 - protein, 27 aa, Artificial Sequence
  Cyclic GFR-binding peptide
RDVVMGRYKKLIIQQKDNFYLMSIANM

SEQ ID NO: 75379 - protein, 26 aa, Artificial Sequence
  Cyclic GFR-binding peptide
AEVVMDRYKKLVVNNAADFYLISIAN

SEQ ID NO: 75380 - protein, 29 aa, Artificial Sequence
  Cyclic GFR-binding peptide
SEVVMDRYKKLVVNNASDFYLISIANLRT

SEQ ID NO: 75381 - protein, 32 aa, Artificial Sequence; identical to SEQ ID NO: 1165
  Cyclic GFR-binding peptide
  MOD_RES (1)..(3): Xaa is C or S

SEQ ID NO: 75382 - protein, 29 aa, Artificial Sequence
  Cyclic GFR-binding peptide
  MOD_RES (1)..(1): Xaa is C or S
XEAVSMGERYKKLTPVGMDDFYLVSIANL

SEQ ID NO: 75383 - protein, 30 aa, Artificial Sequence
  Cyclic GFR-binding peptide
  MOD_RES (1)..(3): Xaa is C or S
XGXEEVIMRYKKLLLVRGNDFYLMSIANTK

SEQ ID NO: 75384 - protein, 27 aa, Artificial Sequence
  Cyclic GFR-binding peptide
GEVVMDRYKKLVVKENEDFYLMSIANL

SEQ ID NO: 75385 - protein, 23 aa, Artificial Sequence
  Cyclic GFR-binding peptide
VMDRYKKLVVNNAADFYLISIAN

SEQ ID NO: 75386 - protein, 27 aa, Artificial Sequence
  Cyclic GFR-binding peptide
  MOD_RES (27)..(27): Xaa is C or S
DRYKKLVVKENEDFYLMSIANLETPVX

SEQ ID NO: 75387 - protein, 37 aa, Artificial Sequence
  Cyclic GFR-binding peptide
  MOD_RES (31)..(32): Xaa is C or S
EEVIMRYKKLLLVRGNDFYLMSIANTKVPAXXTSPVR

SEQ ID NO: 75388 - protein, 35 aa, Artificial Sequence; identical to SEQ ID NO: 1183
  Cyclic GFR-binding peptide
  MOD_RES (31)..(32): Xaa is C or S

SEQ ID NO: 75389 - protein, 32 aa, Artificial Sequence
  Cyclic GFR-binding peptide
  MOD_RES (1)..(1): Xaa is C or S
XRDVVMGRYKKLIIQQKDNFYLMSIANMKTPT

SEQ ID NO: 75390 - protein, 23 aa, Artificial Sequence
  Cyclic GFR-binding peptide
MGRYKKLYTVVGKDFYLISIANL

SEQ ID NO: 75391 - protein, 26 aa, Artificial Sequence
  Cyclic GFR-binding peptide
DRYKKLVVNNASDFYLISIANLRTPV

SEQ ID NO: 75392 - protein, 28 aa, Artificial Sequence
  Cyclic GFR-binding peptide
  MOD_RES (28)..(28): Xaa is C or S
MNRYKKLIVNNSSDFYLVSIANLKTPAX

SEQ ID NO: 75393 - protein, 33 aa, Artificial Sequence; identical to SEQ ID NO: 32278
  Cyclic GFR-binding peptide
  MOD_RES (1)..(3): Xaa is C or S

SEQ ID NO: 75394 - protein, 30 aa, Artificial Sequence; identical to SEQ ID NO: 1192
  Cyclic GFR-binding peptide
  MOD_RES (1)..(1): Xaa is C or S

SEQ ID NO: 75395 - protein, 29 aa, Artificial Sequence
  Cyclic GFR-binding peptide
  MOD_RES (28)..(29): Xaa is C or S
GERYKKLTPVGMDDFYLVSIANLKTPVXX

SEQ ID NO: 75396 - protein, 31 aa, Artificial Sequence; identical to SEQ ID NO: 32282
  Cyclic GFR-binding peptide
  MOD_RES (29)..(30): Xaa is C or S

SEQ ID NO: 75397 - protein, 29 aa, Artificial Sequence
  Cyclic GFR-binding peptide
EAVSMGERYKKLTPVGMDDFYLVSIANLK

SEQ ID NO: 75398 - protein, 37 aa, Artificial Sequence; identical to SEQ ID NO: 1197
  Cyclic GFR-binding peptide
  MOD_RES (1)..(3)..(35)..(36): Xaa is C or S

SEQ ID NO: 75399 - protein, 26 aa, Artificial Sequence
  Cyclic GFR-binding peptide
SMGERYKKLTPVGMDDFYLVSIANLK

SEQ ID NO: 75400 - protein, 28 aa, Artificial Sequence
  Cyclic GFR-binding peptide
  MOD_RES (2)..(2): Xaa is C or S
GXGEVVMDRYKKLVVKENEDFYLMSIAN

SEQ ID NO: 75401 - protein, 20 aa, Artificial Sequence
  Cyclic GFR-binding peptide
RYKKLTPVGMDDFYLVSIAN

SEQ ID NO: 75402 - protein, 26 aa, Artificial Sequence
  Cyclic GFR-binding peptide
SEVVMDRYKKLVVNNASDFYLISIAN

SEQ ID NO: 75403 - protein, 28 aa, Artificial Sequence
  Cyclic GFR-binding peptide
EEVIMRYKKLLLVRGNDFYLMSIANTKV

SEQ ID NO: 75404 - protein, 29 aa, Artificial Sequence
  Cyclic GFR-binding peptide
  MOD_RES (28)..(29): Xaa is C or S
MDRYKKLVVNNAADFYLISIANLRAPVXX

SEQ ID NO: 75405 - protein, 24 aa, Artificial Sequence
  Cyclic GFR-binding peptide
IMRYKKLLLVRGNDFYLMSIANTK

SEQ ID NO: 75406 - protein, 30 aa, Artificial Sequence
  Cyclic GFR-binding peptide
  MOD_RES (1)..(1): Xaa is C or S
XRDVVMGRYKKLIIQQKDNFYLMSIANMKT

SEQ ID NO: 75407 - protein, 31 aa, Artificial Sequence; identical to SEQ ID NO: 3983
  Cyclic GFR-binding peptide
  MOD_RES (1)..(1): Xaa is C or S

SEQ ID NO: 75408 - protein, 36 aa, Artificial Sequence; identical to SEQ ID NO: 3987
  Cyclic GFR-binding peptide
  MOD_RES (32)..(33): Xaa is C or S

SEQ ID NO: 75409 - protein, 21 aa, Artificial Sequence
  Cyclic GFR-binding peptide
NRYKKLIVNNSSDFYLVSIAN

SEQ ID NO: 75410 - protein, 30 aa, Artificial Sequence; identical to SEQ ID NO: 1215
  Cyclic GFR-binding peptide
  MOD_RES (26)..(26): Xaa is C or S

SEQ ID NO: 75411 - protein, 41 aa, Artificial Sequence
  Cyclic GFR-binding peptide
  MOD_RES (2)..(4)..(35)..(36): Xaa is C or S
LXGXEEVIMRYKKLLLVRGNDFYLMSIANTKVPAXXTSPVR

SEQ ID NO: 75412 - protein, 34 aa, Artificial Sequence; identical to SEQ ID NO: 3994
  Cyclic GFR-binding peptide
  MOD_RES (2)..(34): Xaa is C or S

SEQ ID NO: 75413 - protein, 27 aa, Artificial Sequence
  Cyclic GFR-binding peptide
  MOD_RES (26)..(27): Xaa is C or S
RYKKLYTVVGKDFYLISIANLKTPVXX

SEQ ID NO: 75414 - protein, 37 aa, Artificial Sequence; identical to SEQ ID NO: 32308
  Cyclic GFR-binding peptide
  MOD_RES (2)..(4)..(36)..(37): Xaa is C or S

SEQ ID NO: 75415 - protein, 26 aa, Artificial Sequence
  Cyclic GFR-binding peptide
MGRYKKLYTVVGKDFYLISIANLKTP

SEQ ID NO: 75416 - protein, 34 aa, Artificial Sequence; identical to SEQ ID NO: 1217
  Cyclic GFR-binding peptide
  MOD_RES (31)..(32): Xaa is C or S

SEQ ID NO: 75417 - protein, 34 aa, Artificial Sequence; identical to SEQ ID NO: 3998
  Cyclic GFR-binding peptide
  MOD_RES (32)..(32): Xaa is C or S

SEQ ID NO: 75418 - protein, 39 aa, Artificial Sequence; identical to SEQ ID NO: 32319
  Cyclic GFR-binding peptide
  MOD_RES (1)..(3)..(35)..(36): Xaa is C or S

SEQ ID NO: 75419 - protein, 31 aa, Artificial Sequence; identical to SEQ ID NO: 1231
  Cyclic GFR-binding peptide
  MOD_RES (31)..(31): Xaa is C or S

SEQ ID NO: 75420 - protein, 34 aa, Artificial Sequence
  Cyclic GFR-binding peptide
  MOD_RES (1)..(3)..(34): Xaa is C or S
XGXEEVIMRYKKLLLVRGNDFYLMSIANTKVPAX

SEQ ID NO: 75421 - protein, 23 aa, Artificial Sequence
  Cyclic GFR-binding peptide
DRYKKLVVNNAADFYLISIANLR

SEQ ID NO: 75422 - protein, 36 aa, Artificial Sequence; identical to SEQ ID NO: 4005
  Cyclic GFR-binding peptide
  MOD_RES (2)..(34): Xaa is C or S

SEQ ID NO: 75423 - protein, 36 aa, Artificial Sequence; identical to SEQ ID NO: 4008
  Cyclic GFR-binding peptide
  MOD_RES (1)..(33)..(34): Xaa is C or S

SEQ ID NO: 75424 - protein, 25 aa, Artificial Sequence
  Cyclic GFR-binding peptide
EVVMDRYKKLVVNNASDFYLISIAN

SEQ ID NO: 75425 - protein, 23 aa, Artificial Sequence
  Cyclic GFR-binding peptide
VMERYKKLVVKDYEDFYLMSIAN

SEQ ID NO: 75426 - protein, 31 aa, Artificial Sequence; identical to SEQ ID NO: 29339
  Cyclic GFR-binding peptide

SEQ ID NO: 75427 - protein, 37 aa, Artificial Sequence; identical to SEQ ID NO: 1243
  Cyclic GFR-binding peptide
  MOD_RES (31)..(32): Xaa is C or S

SEQ ID NO: 75428 - protein, 35 aa, Artificial Sequence
  Cyclic GFR-binding peptide
  MOD_RES (1)..(3)..(34)..(35): Xaa is C or S
XGXEEVIMRYKKLLLVRGNDFYLMSIANTKVPAXX

SEQ ID NO: 75429 - protein, 29 aa, Artificial Sequence
  Cyclic GFR-binding peptide
  MOD_RES (27)..(28): Xaa is C or S
GRYKKLYTVVGKDFYLISIANLKTPVXXA

SEQ ID NO: 75430 - protein, 39 aa, Artificial Sequence; identical to SEQ ID NO: 4022
  Cyclic GFR-binding peptide
  MOD_RES (1)..(3)..(35)..(36): Xaa is C or S

SEQ ID NO: 75431 - protein, 36 aa, Artificial Sequence
  Cyclic GFR-binding peptide
  MOD_RES (2)..(4)..(35)..(36): Xaa is C or S
LXGXEEVIMRYKKLLLVRGNDFYLMSIANTKVPAXX

SEQ ID NO: 75432 - protein, 36 aa, Artificial Sequence; identical to SEQ ID NO: 11828
  Cyclic GFR-binding peptide
  MOD_RES (2)..(34)..(35): Xaa is C or S

SEQ ID NO: 75433 - protein, 26 aa, Artificial Sequence
  Cyclic GFR-binding peptide
AVSMGERYKKLTPVGMDDFYLVSIAN

SEQ ID NO: 75434 - protein, 30 aa, Artificial Sequence; identical to SEQ ID NO: 11831
  Cyclic GFR-binding peptide
  MOD_RES (28)..(29): Xaa is C or S

SEQ ID NO: 75435 - protein, 37 aa, Artificial Sequence; identical to SEQ ID NO: 1264
  Cyclic GFR-binding peptide
  MOD_RES (32)..(33): Xaa is C or S

SEQ ID NO: 75436 - protein, 38 aa, Artificial Sequence
  Cyclic GFR-binding peptide
  MOD_RES (1)..(33)..(34): Xaa is C or S
XRDVVMGRYKKLIIQQKDNFYLMSIANMKTPTXXPGAS

SEQ ID NO: 75437 - protein, 34 aa, Artificial Sequence; identical to SEQ ID NO: 29367
  Cyclic GFR-binding peptide
  MOD_RES (2)..(4): Xaa is C or S

SEQ ID NO: 75438 - protein, 32 aa, Artificial Sequence
  Cyclic GFR-binding peptide
  MOD_RES (27)..(28): Xaa is C or S
MRYKKLLLVRGNDFYLMSIANTKVPAXXTSPV

SEQ ID NO: 75439 - protein, 32 aa, Artificial Sequence; identical to SEQ ID NO: 32362
  Cyclic GFR-binding peptide
  MOD_RES (2)..(2): Xaa is C or S

SEQ ID NO: 75440 - protein, 21 aa, Artificial Sequence
  Cyclic GFR-binding peptide
ERYKKLTPVGMDDFYLVSIAN

SEQ ID NO: 75441 - protein, 22 aa, Artificial Sequence
  Cyclic GFR-binding peptide
MRYKKLLLVRGNDFYLMSIANT

SEQ ID NO: 75442 - protein, 27 aa, Artificial Sequence
  Cyclic GFR-binding peptide
MDRYKKLVVNNASDFYLISIANLRTPV

SEQ ID NO: 75443 - protein, 34 aa, Artificial Sequence; identical to SEQ ID NO: 1282
  Cyclic GFR-binding peptide
  MOD_RES (29)..(30): Xaa is C or S

SEQ ID NO: 75444 - protein, 27 aa, Artificial Sequence
  Cyclic GFR-binding peptide
SMGERYKKLTPVGMDDFYLVSIANLKT

SEQ ID NO: 75445 - protein, 38 aa, Artificial Sequence; identical to SEQ ID NO: 4069
  Cyclic GFR-binding peptide
  MOD_RES (2)..(4)..(36)..(37): Xaa is C or S

SEQ ID NO: 75446 - protein, 29 aa, Artificial Sequence
  Cyclic GFR-binding peptide
  MOD_RES (2)..(2): Xaa is C or S
GXGEVVMDRYKKLVVKENEDFYLMSIANL

SEQ ID NO: 75447 - protein, 32 aa, Artificial Sequence; identical to SEQ ID NO: 1300
  Cyclic GFR-binding peptide
  MOD_RES (29)..(30): Xaa is C or S

SEQ ID NO: 75448 - protein, 39 aa, Artificial Sequence; identical to SEQ ID NO: 4074
  Cyclic GFR-binding peptide
  MOD_RES (2)..(34)..(35): Xaa is C or S

SEQ ID NO: 75449 - protein, 39 aa, Artificial Sequence; identical to SEQ ID NO: 4077
  Cyclic GFR-binding peptide
  MOD_RES (1)..(3)..(35): Xaa is C or S

SEQ ID NO: 75450 - protein, 40 aa, Artificial Sequence; identical to SEQ ID NO: 1310
  Cyclic GFR-binding peptide
  MOD_RES (2)..(34): Xaa is C or S

SEQ ID NO: 75451 - protein, 21 aa, Artificial Sequence
  Cyclic GFR-binding peptide
DRYKKLVVKENEDFYLMSIAN

SEQ ID NO: 75452 - protein, 37 aa, Artificial Sequence; identical to SEQ ID NO: 1313
  Cyclic GFR-binding peptide
  MOD_RES (2)..(4)..(36)..(37): Xaa is C or S

SEQ ID NO: 75453 - protein, 30 aa, Artificial Sequence; identical to SEQ ID NO: 1314
  Cyclic GFR-binding peptide
  MOD_RES (1)..(3): Xaa is C or S

SEQ ID NO: 75454 - protein, 34 aa, Artificial Sequence; identical to SEQ ID NO: 14579
  Cyclic GFR-binding peptide
  MOD_RES (29)..(30): Xaa is C or S

SEQ ID NO: 75455 - protein, 31 aa, Artificial Sequence; identical to SEQ ID NO: 32392
  Cyclic GFR-binding peptide
  MOD_RES (1)..(3): Xaa is C or S

SEQ ID NO: 75456 - protein, 36 aa, Artificial Sequence; identical to SEQ ID NO: 1319
  Cyclic GFR-binding peptide
  MOD_RES (32)..(33): Xaa is C or S

SEQ ID NO: 75457 - protein, 23 aa, Artificial Sequence
  Cyclic GFR-binding peptide
VMDRYKKLVVNNASDFYLISIAN

SEQ ID NO: 75458 - protein, 26 aa, Artificial Sequence
  Cyclic GFR-binding peptide
ERYKKLVVKDYEDFYLMSIANLETPV

SEQ ID NO: 75459 - protein, 31 aa, Artificial Sequence; identical to SEQ ID NO: 11894
  Cyclic GFR-binding peptide
  MOD_RES (2)..(2): Xaa is C or S

SEQ ID NO: 75460 - protein, 30 aa, Artificial Sequence; identical to SEQ ID NO: 1320
  Cyclic GFR-binding peptide
  MOD_RES (27)..(28): Xaa is C or S

SEQ ID NO: 75461 - protein, 20 aa, Artificial Sequence
  Cyclic GFR-binding peptide
RYKKLYTVVGKDFYLISIAN

SEQ ID NO: 75462 - protein, 24 aa, Artificial Sequence
  Cyclic GFR-binding peptide
MERYKKLVVKDYEDFYLMSIANLE

SEQ ID NO: 75463 - protein, 33 aa, Artificial Sequence; identical to SEQ ID NO: 1328
  Cyclic GFR-binding peptide
  MOD_RES (32)..(33): Xaa is C or S

SEQ ID NO: 75464 - protein, 26 aa, Artificial Sequence
  Cyclic GFR-binding peptide
VMDRYKKLVVNNAADFYLISIANLRA

SEQ ID NO: 75465 - protein, 26 aa, Artificial Sequence
  Cyclic GFR-binding peptide
VVMDRYKKLVVNNASDFYLISIANLR

SEQ ID NO: 75466 - protein, 30 aa, Artificial Sequence; identical to SEQ ID NO: 14596
  Cyclic GFR-binding peptide
  MOD_RES (26)..(27): Xaa is C or S

SEQ ID NO: 75467 - protein, 36 aa, Artificial Sequence; identical to SEQ ID NO: 14597
  Cyclic GFR-binding peptide
  MOD_RES (30)..(31): Xaa is C or S

SEQ ID NO: 75468 - protein, 28 aa, Artificial Sequence
  Cyclic GFR-binding peptide
  MOD_RES (1)..(1): Xaa is C or S
XGEVVMDRYKKLVVKENEDFYLMSIANL

SEQ ID NO: 75469 - protein, 29 aa, Artificial Sequence
  Cyclic GFR-binding peptide
  MOD_RES (1)..(1): Xaa is C or S
XGEVVMERYKKLVVKDYEDFYLMSIANLE

SEQ ID NO: 75470 - protein, 30 aa, Artificial Sequence
  Cyclic GFR-binding peptide
RDVVMGRYKKLIIQQKDNFYLMSIANMKTP

SEQ ID NO: 75471 - protein, 21 aa, Artificial Sequence
  Cyclic GFR-binding peptide
DRYKKLVVNNAADFYLISIAN

SEQ ID NO: 75472 - protein, 34 aa, Artificial Sequence; identical to SEQ ID NO: 1343
  Cyclic GFR-binding peptide
  MOD_RES (30)..(31): Xaa is C or S

SEQ ID NO: 75473 - protein, 26 aa, Artificial Sequence
  Cyclic GFR-binding peptide
GRYKKLIIQQKDNFYLMSIANMKTPT

SEQ ID NO: 75474 - protein, 25 aa, Artificial Sequence
  Cyclic GFR-binding peptide
RYKKLVVKENEDFYLMSIANLETPV

SEQ ID NO: 75475 - protein, 31 aa, Artificial Sequence; identical to SEQ ID NO: 11922
  Cyclic GFR-binding peptide
  MOD_RES (29)..(30): Xaa is C or S

SEQ ID NO: 75476 - protein, 31 aa, Artificial Sequence; identical to SEQ ID NO: 4121
  Cyclic GFR-binding peptide
  MOD_RES (1)..(1): Xaa is C or S

SEQ ID NO: 75477 - protein, 27 aa, Artificial Sequence
  Cyclic GFR-binding peptide
  MOD_RES (1)..(1): Xaa is C or S
XESVAMGRYKKLYTVVGKDFYLISIAN

SEQ ID NO: 75478 - protein, 29 aa, Artificial Sequence
  Cyclic GFR-binding peptide
  MOD_RES (27)..(28): Xaa is C or S
DRYKKLVVNNAADFYLISIANLRAPVXXS

SEQ ID NO: 75479 - protein, 32 aa, Artificial Sequence; identical to SEQ ID NO: 11928
  Cyclic GFR-binding peptide
  MOD_RES (32)..(32): Xaa is C or S

SEQ ID NO: 75480 - protein, 41 aa, Artificial Sequence; identical to SEQ ID NO: 4127
  Cyclic GFR-binding peptide
  MOD_RES (2)..(4)..(36)..(37): Xaa is C or S

SEQ ID NO: 75481 - protein, 25 aa, Artificial Sequence
  Cyclic GFR-binding peptide
EVVMDRYKKLVVKENEDFYLMSIAN

SEQ ID NO: 75482 - protein, 33 aa, Artificial Sequence; identical to SEQ ID NO: 1365
  Cyclic GFR-binding peptide
  MOD_RES (32)..(33): Xaa is C or S

SEQ ID NO: 75483 - protein, 24 aa, Artificial Sequence
  Cyclic GFR-binding peptide
VIMRYKKLLLVRGNDFYLMSIANT

SEQ ID NO: 75484 - protein, 28 aa, Artificial Sequence
  Cyclic GFR-binding peptide
  MOD_RES (28)..(28): Xaa is C or S
MDRYKKLVVNNAADFYLISIANLRAPVX

SEQ ID NO: 75485 - protein, 38 aa, Artificial Sequence
  Cyclic GFR-binding peptide
  MOD_RES (2)..(33)..(34): Xaa is C or S
GXEEVIMRYKKLLLVRGNDFYLMSIANTKVPAXXTSPV

SEQ ID NO: 75486 - protein, 32 aa, Artificial Sequence; identical to SEQ ID NO: 4135
  Cyclic GFR-binding peptide
  MOD_RES (26)..(27): Xaa is C or S

SEQ ID NO: 75487 - protein, 27 aa, Artificial Sequence
  Cyclic GFR-binding peptide
  MOD_RES (27)..(27): Xaa is C or S
NRYKKLIVNSSDDFYLVSIANLQTPAX

SEQ ID NO: 75488 - protein, 34 aa, Artificial Sequence; identical to SEQ ID NO: 32440
  Cyclic GFR-binding peptide
  MOD_RES (31)..(32): Xaa is C or S

SEQ ID NO: 75489 - protein, 33 aa, Artificial Sequence; identical to SEQ ID NO: 32444
  Cyclic GFR-binding peptide
  MOD_RES (1)..(33): Xaa is C or S

SEQ ID NO: 75490 - protein, 32 aa, Artificial Sequence; identical to SEQ ID NO: 4145
  Cyclic GFR-binding peptide
  MOD_RES (28)..(29): Xaa is C or S

SEQ ID NO: 75491 - protein, 27 aa, Artificial Sequence
  Cyclic GFR-binding peptide
  MOD_RES (26)..(27): Xaa is C or S
RYKKLIIQQKDNFYLMSIANMKTPTXX

SEQ ID NO: 75492 - protein, 39 aa, Artificial Sequence
  Cyclic GFR-binding peptide
  MOD_RES (1)..(33)..(34): Xaa is C or S
XRDVVMGRYKKLIIQQKDNFYLMSIANMKTPTXXPGASG

SEQ ID NO: 75493 - protein, 32 aa, Artificial Sequence; identical to SEQ ID NO: 4147
  Cyclic GFR-binding peptide
  MOD_RES (1)..(3): Xaa is C or S

SEQ ID NO: 75494 - protein, 35 aa, Artificial Sequence; identical to SEQ ID NO: 29460
  Cyclic GFR-binding peptide
  MOD_RES (1)..(3)..(35): Xaa is C or S

SEQ ID NO: 75495 - protein, 32 aa, Artificial Sequence; identical to SEQ ID NO: 1380
  Cyclic GFR-binding peptide
  MOD_RES (27)..(28): Xaa is C or S

SEQ ID NO: 75496 - protein, 30 aa, Artificial Sequence; identical to SEQ ID NO: 4160
  Cyclic GFR-binding peptide
  MOD_RES (27)..(28): Xaa is C or S

SEQ ID NO: 75497 - protein, 22 aa, Artificial Sequence
  Cyclic GFR-binding peptide
MDRYKKLVVNNAADFYLISIAN

SEQ ID NO: 75498 - protein, 29 aa, Artificial Sequence
  Cyclic GFR-binding peptide
  MOD_RES (26)..(27): Xaa is C or S
RYKKLTPVGMDDFYLVSIANLKTPVXXAK

SEQ ID NO: 75499 - protein, 20 aa, Artificial Sequence
  Cyclic GFR-binding peptide
RYKKLIVNSSDDFYLVSIAN

SEQ ID NO: 75500 - protein, 31 aa, Artificial Sequence; identical to SEQ ID NO: 4170
  Cyclic GFR-binding peptide

SEQ ID NO: 75501 - protein, 30 aa, Artificial Sequence; identical to SEQ ID NO: 32470
  Cyclic GFR-binding peptide
  MOD_RES (30)..(30): Xaa is C or S

SEQ ID NO: 75502 - protein, 34 aa, Artificial Sequence
  Cyclic GFR-binding peptide
  MOD_RES (30)..(31): Xaa is C or S
VVMGRYKKLIIQQKDNFYLMSIANMKTPTXXPGA

SEQ ID NO: 75503 - protein, 35 aa, Artificial Sequence; identical to SEQ ID NO: 1393
  Cyclic GFR-binding peptide
  MOD_RES (1)..(33)..(34): Xaa is C or S

SEQ ID NO: 75504 - protein, 28 aa, Artificial Sequence
  Cyclic GFR-binding peptide
VSMGERYKKLTPVGMDDFYLVSIANLKT

SEQ ID NO: 75505 - protein, 36 aa, Artificial Sequence
  Cyclic GFR-binding peptide
  MOD_RES (1)..(3)..(34)..(35): Xaa is C or S
XGXEEVIMRYKKLLLVRGNDFYLMSIANTKVPAXXT

SEQ ID NO: 75506 - protein, 21 aa, Artificial Sequence
  Cyclic GFR-binding peptide
NRYKKLIVNSSDDFYLVSIAN

SEQ ID NO: 75507 - protein, 31 aa, Artificial Sequence; identical to SEQ ID NO: 32478
  Cyclic GFR-binding peptide
  MOD_RES (27)..(28): Xaa is C or S

SEQ ID NO: 75508 - protein, 24 aa, Artificial Sequence
  Cyclic GFR-binding peptide
NRYKKLIVNSSDDFYLVSIANLQT

SEQ ID NO: 75509 - protein, 29 aa, Artificial Sequence
  Cyclic GFR-binding peptide
  MOD_RES (1)..(1): Xaa is C or S
XGEVVMDRYKKLVVKENEDFYLMSIANLE

SEQ ID NO: 75510 - protein, 26 aa, Artificial Sequence
  Cyclic GFR-binding peptide
VVMGRYKKLIIQQKDNFYLMSIANMK

SEQ ID NO: 75511 - protein, 28 aa, Artificial Sequence
  Cyclic GFR-binding peptide
  MOD_RES (1)..(1): Xaa is C or S
XEEVIMRYKKLLLVRGNDFYLMSIANTK

SEQ ID NO: 75512 - protein, 30 aa, Artificial Sequence
  Cyclic GFR-binding peptide
  MOD_RES (26)..(27): Xaa is C or S
RYKKLLLVRGNDFYLMSIANTKVPAXXTSP

SEQ ID NO: 75513 - protein, 37 aa, Artificial Sequence; identical to SEQ ID NO: 1408
  Cyclic GFR-binding peptide
  MOD_RES (1)..(33)..(34): Xaa is C or S

SEQ ID NO: 75514 - protein, 37 aa, Artificial Sequence; identical to SEQ ID NO: 1409
  Cyclic GFR-binding peptide
  MOD_RES (2)..(35)..(36): Xaa is C or S

SEQ ID NO: 75515 - protein, 33 aa, Artificial Sequence; identical to SEQ ID NO: 1410
  Cyclic GFR-binding peptide
  MOD_RES (1)..(33): Xaa is C or S

SEQ ID NO: 75516 - protein, 36 aa, Artificial Sequence; identical to SEQ ID NO: 4193
  Cyclic GFR-binding peptide
  MOD_RES (1)..(33): Xaa is C or S

SEQ ID NO: 75517 - protein, 31 aa, Artificial Sequence; identical to SEQ ID NO: 4201
  Cyclic GFR-binding peptide
  MOD_RES (30)..(30): Xaa is C or S

SEQ ID NO: 75518 - protein, 31 aa, Artificial Sequence; identical to SEQ ID NO: 4205
  Cyclic GFR-binding peptide
  MOD_RES (27)..(28): Xaa is C or S

SEQ ID NO: 75519 - protein, 38 aa, Artificial Sequence
  Cyclic GFR-binding peptide
  MOD_RES (1)..(32)..(33): Xaa is C or S
XEEVIMRYKKLLLVRGNDFYLMSIANTKVPAXXTSPVR

SEQ ID NO: 75520 - protein, 33 aa, Artificial Sequence; identical to SEQ ID NO: 1417
  Cyclic GFR-binding peptide
  MOD_RES (31)..(32): Xaa is C or S

SEQ ID NO: 75521 - protein, 29 aa, Artificial Sequence
  Cyclic GFR-binding peptide
  MOD_RES (29)..(29): Xaa is C or S
VMNRYKKLIVNSSDDFYLVSIANLQTPAX

SEQ ID NO: 75522 - protein, 32 aa, Artificial Sequence; identical to SEQ ID NO: 4212
  Cyclic GFR-binding peptide
  MOD_RES (31)..(32): Xaa is C or S

SEQ ID NO: 75523 - protein, 38 aa, Artificial Sequence; identical to SEQ ID NO: 4215
  Cyclic GFR-binding peptide
  MOD_RES (1)..(33)..(34): Xaa is C or S

SEQ ID NO: 75524 - protein, 35 aa, Artificial Sequence
  Cyclic GFR-binding peptide
  MOD_RES (31)..(32): Xaa is C or S
DVVMGRYKKLIIQQKDNFYLMSIANMKTPTXXPGA

SEQ ID NO: 75525 - protein, 33 aa, Artificial Sequence
  Cyclic GFR-binding peptide
  MOD_RES (2)..(33): Xaa is C or S
GXEEVIMRYKKLLLVRGNDFYLMSIANTKVPAX

SEQ ID NO: 75526 - protein, 39 aa, Artificial Sequence; identical to SEQ ID NO: 4224
  Cyclic GFR-binding peptide
  MOD_RES (1)..(33)..(34): Xaa is C or S

SEQ ID NO: 75527 - protein, 23 aa, Artificial Sequence
  Cyclic GFR-binding peptide
GRYKKLIIQQKDNFYLMSIANMK

SEQ ID NO: 75528 - protein, 33 aa, Artificial Sequence; identical to SEQ ID NO: 32528
  Cyclic GFR-binding peptide
  MOD_RES (30)..(31): Xaa is C or S

SEQ ID NO: 75529 - protein, 32 aa, Artificial Sequence; identical to SEQ ID NO: 29526
  Cyclic GFR-binding peptide
  MOD_RES (2)..(4): Xaa is C or S

SEQ ID NO: 75530 - protein, 28 aa, Artificial Sequence
  Cyclic GFR-binding peptide
RVVMNRYKKLIVNSSDDFYLVSIANLQT

SEQ ID NO: 75531 - protein, 34 aa, Artificial Sequence; identical to SEQ ID NO: 4239
  Cyclic GFR-binding peptide
  MOD_RES (1)..(33)..(34): Xaa is C or S

SEQ ID NO: 75532 - protein, 32 aa, Artificial Sequence; identical to SEQ ID NO: 1442
  Cyclic GFR-binding peptide
  MOD_RES (32)..(32): Xaa is C or S

SEQ ID NO: 75533 - protein, 22 aa, Artificial Sequence
  Cyclic GFR-binding peptide
MGRYKKLIIQQKDNFYLMSIAN

SEQ ID NO: 75534 - protein, 31 aa, Artificial Sequence
  Cyclic GFR-binding peptide
  MOD_RES (31)..(31): Xaa is C or S
DVVMGRYKKLIIQQKDNFYLMSIANMKTPTX

SEQ ID NO: 75535 - protein, 35 aa, Artificial Sequence; identical to SEQ ID NO: 1444
  Cyclic GFR-binding peptide
  MOD_RES (2)..(4): Xaa is C or S

SEQ ID NO: 75536 - protein, 35 aa, Artificial Sequence; identical to SEQ ID NO: 32536
  Cyclic GFR-binding peptide
  MOD_RES (2)..(4): Xaa is C or S

SEQ ID NO: 75537 - protein, 32 aa, Artificial Sequence; identical to SEQ ID NO: 32537
  Cyclic GFR-binding peptide
  MOD_RES (31)..(32): Xaa is C or S

SEQ ID NO: 75538 - protein, 36 aa, Artificial Sequence; identical to SEQ ID NO: 4241
  Cyclic GFR-binding peptide
  MOD_RES (1)..(3)..(35)..(36): Xaa is C or S

SEQ ID NO: 75539 - protein, 30 aa, Artificial Sequence; identical to SEQ ID NO: 4242
  Cyclic GFR-binding peptide

SEQ ID NO: 75540 - protein, 27 aa, Artificial Sequence
  Cyclic GFR-binding peptide
ESVAMGRYKKLYTVVGKDFYLISIANL

SEQ ID NO: 75541 - protein, 36 aa, Artificial Sequence; identical to SEQ ID NO: 1457
  Cyclic GFR-binding peptide
  MOD_RES (32)..(33): Xaa is C or S

SEQ ID NO: 75542 - protein, 31 aa, Artificial Sequence; identical to SEQ ID NO: 12021
  Cyclic GFR-binding peptide
  MOD_RES (30)..(31): Xaa is C or S

SEQ ID NO: 75543 - protein, 37 aa, Artificial Sequence; identical to SEQ ID NO: 32543
  Cyclic GFR-binding peptide
  MOD_RES (31)..(32): Xaa is C or S

SEQ ID NO: 75544 - protein, 37 aa, Artificial Sequence; identical to SEQ ID NO: 32545
  Cyclic GFR-binding peptide
  MOD_RES (1)..(3)..(35)..(36): Xaa is C or S

SEQ ID NO: 75545 - protein, 27 aa, Artificial Sequence
  Cyclic GFR-binding peptide
  MOD_RES (1)..(1): Xaa is C or S
XSEVVMDRYKKLVVNNASDFYLISIAN

SEQ ID NO: 75546 - protein, 24 aa, Artificial Sequence
  Cyclic GFR-binding peptide
VMERYKKLVVKDYEDFYLMSIANL

SEQ ID NO: 75547 - protein, 25 aa, Artificial Sequence
  Cyclic GFR-binding peptide
MDRYKKLVVNNAADFYLISIANLRA

SEQ ID NO: 75548 - protein, 34 aa, Artificial Sequence; identical to SEQ ID NO: 1467
  Cyclic GFR-binding peptide
  MOD_RES (2)..(34): Xaa is C or S

SEQ ID NO: 75549 - protein, 37 aa, Artificial Sequence; identical to SEQ ID NO: 1468
  Cyclic GFR-binding peptide
  MOD_RES (33)..(34): Xaa is C or S

SEQ ID NO: 75550 - protein, 33 aa, Artificial Sequence; identical to SEQ ID NO: 32558
  Cyclic GFR-binding peptide
  MOD_RES (32)..(33): Xaa is C or S

SEQ ID NO: 75551 - protein, 32 aa, Artificial Sequence; identical to SEQ ID NO: 4262
  Cyclic GFR-binding peptide
  MOD_RES (31)..(32): Xaa is C or S

SEQ ID NO: 75552 - protein, 28 aa, Artificial Sequence
  Cyclic GFR-binding peptide
VVMDRYKKLVVNNASDFYLISIANLRTP

SEQ ID NO: 75553 - protein, 22 aa, Artificial Sequence
  Cyclic GFR-binding peptide
GRYKKLYTVVGKDFYLISIANL

SEQ ID NO: 75554 - protein, 23 aa, Artificial Sequence
  Cyclic GFR-binding peptide
MGRYKKLIIQQKDNFYLMSIANM

SEQ ID NO: 75555 - protein, 25 aa, Artificial Sequence
  Cyclic GFR-binding peptide
IMRYKKLLLVRGNDFYLMSIANTKV

SEQ ID NO: 75556 - protein, 34 aa, Artificial Sequence; identical to SEQ ID NO: 4266
  Cyclic GFR-binding peptide
  MOD_RES (1)..(3): Xaa is C or S

SEQ ID NO: 75557 - protein, 35 aa, Artificial Sequence; identical to SEQ ID NO: 1483
  Cyclic GFR-binding peptide
  MOD_RES (32)..(33): Xaa is C or S

SEQ ID NO: 75558 - protein, 39 aa, Artificial Sequence; identical to SEQ ID NO: 4273
  Cyclic GFR-binding peptide
  MOD_RES (2)..(34)..(35): Xaa is C or S

SEQ ID NO: 75559 - protein, 24 aa, Artificial Sequence
  Cyclic GFR-binding peptide
VVMERYKKLVVKDYEDFYLMSIAN

SEQ ID NO: 75560 - protein, 32 aa, Artificial Sequence; identical to SEQ ID NO: 12060
  Cyclic GFR-binding peptide
  MOD_RES (28)..(29): Xaa is C or S

SEQ ID NO: 75561 - protein, 33 aa, Artificial Sequence; identical to SEQ ID NO: 1496
  Cyclic GFR-binding peptide
  MOD_RES (32)..(33): Xaa is C or S

SEQ ID NO: 75562 - protein, 29 aa, Artificial Sequence
  Cyclic GFR-binding peptide
DVVMGRYKKLIIQQKDNFYLMSIANMKTP

SEQ ID NO: 75563 - protein, 23 aa, Artificial Sequence
  Cyclic GFR-binding peptide
VMNRYKKLIVNNSSDFYLVSIAN

SEQ ID NO: 75564 - protein, 25 aa, Artificial Sequence
  Cyclic GFR-binding peptide
KVVMNRYKKLIVNNSSDFYLVSIAN

SEQ ID NO: 75565 - protein, 32 aa, Artificial Sequence; identical to SEQ ID NO: 4285
  Cyclic GFR-binding peptide
  MOD_RES (30)..(31): Xaa is C or S

SEQ ID NO: 75566 - protein, 30 aa, Artificial Sequence; identical to SEQ ID NO: 14804
  Cyclic GFR-binding peptide
  MOD_RES (2)..(4): Xaa is C or S

SEQ ID NO: 75567 - protein, 37 aa, Artificial Sequence; identical to SEQ ID NO: 4294
  Cyclic GFR-binding peptide
  MOD_RES (1)..(3)..(35)..(36): Xaa is C or S

SEQ ID NO: 75568 - protein, 34 aa, Artificial Sequence; identical to SEQ ID NO: 4295
  Cyclic GFR-binding peptide
  MOD_RES (1)..(3): Xaa is C or S

SEQ ID NO: 75569 - protein, 31 aa, Artificial Sequence; identical to SEQ ID NO: 4296
  Cyclic GFR-binding peptide
  MOD_RES (2)..(2): Xaa is C or S

SEQ ID NO: 75570 - protein, 33 aa, Artificial Sequence
  Cyclic GFR-binding peptide
  MOD_RES (2)..(4): Xaa is C or S
LXGXEEVIMRYKKLLLVRGNDFYLMSIANTKVP

SEQ ID NO: 75571 - protein, 31 aa, Artificial Sequence; identical to SEQ ID NO: 4298
  Cyclic GFR-binding peptide
  MOD_RES (2)..(2): Xaa is C or S

SEQ ID NO: 75572 - protein, 30 aa, Artificial Sequence; identical to SEQ ID NO: 1519
  Cyclic GFR-binding peptide
  MOD_RES (26)..(27): Xaa is C or S

SEQ ID NO: 75573 - protein, 30 aa, Artificial Sequence; identical to SEQ ID NO: 1521
  Cyclic GFR-binding peptide

SEQ ID NO: 75574 - protein, 36 aa, Artificial Sequence; identical to SEQ ID NO: 32606
  Cyclic GFR-binding peptide
  MOD_RES (2)..(4)..(36): Xaa is C or S

SEQ ID NO: 75575 - protein, 34 aa, Artificial Sequence; identical to SEQ ID NO: 4306
  Cyclic GFR-binding peptide
  MOD_RES (31)..(32): Xaa is C or S

SEQ ID NO: 75576 - protein, 23 aa, Artificial Sequence
  Cyclic GFR-binding peptide
RYKKLLLVRGNDFYLMSIANTKV

SEQ ID NO: 75577 - protein, 22 aa, Artificial Sequence
  Cyclic GFR-binding peptide
MDRYKKLVVNNASDFYLISIAN

SEQ ID NO: 75578 - protein, 26 aa, Artificial Sequence
  Cyclic GFR-binding peptide
  MOD_RES (26)..(26): Xaa is C or S
RYKKLIIQQKDNFYLMSIANMKTPTX

SEQ ID NO: 75579 - protein, 28 aa, Artificial Sequence
  Cyclic GFR-binding peptide
  MOD_RES (1)..(1): Xaa is C or S
XGEVVMERYKKLVVKDYEDFYLMSIANL

SEQ ID NO: 75580 - protein, 28 aa, Artificial Sequence
  Cyclic GFR-binding peptide
  MOD_RES (1)..(1): Xaa is C or S
XAKVVMNRYKKLIVNNSSDFYLVSIANL

SEQ ID NO: 75581 - protein, 34 aa, Artificial Sequence; identical to SEQ ID NO: 1530
  Cyclic GFR-binding peptide
  MOD_RES (28)..(29): Xaa is C or S

SEQ ID NO: 75582 - protein, 28 aa, Artificial Sequence
  Cyclic GFR-binding peptide
  MOD_RES (1)..(1): Xaa is C or S
XRDVVMGRYKKLIIQQKDNFYLMSIANM

SEQ ID NO: 75583 - protein, 33 aa, Artificial Sequence; identical to SEQ ID NO: 4318
  Cyclic GFR-binding peptide
  MOD_RES (27)..(28): Xaa is C or S

SEQ ID NO: 75584 - protein, 38 aa, Artificial Sequence; identical to SEQ ID NO: 1542
  Cyclic GFR-binding peptide
  MOD_RES (2)..(4)..(36)..(37): Xaa is C or S

SEQ ID NO: 75585 - protein, 37 aa, Artificial Sequence; identical to SEQ ID NO: 14834
  Cyclic GFR-binding peptide
  MOD_RES (2)..(34)..(35): Xaa is C or S

SEQ ID NO: 75586 - protein, 26 aa, Artificial Sequence
  Cyclic GFR-binding peptide
EVVMDRYKKLVVNNASDFYLISIANL

SEQ ID NO: 75587 - protein, 33 aa, Artificial Sequence; identical to SEQ ID NO: 4333
  Cyclic GFR-binding peptide
  MOD_RES (2)..(4): Xaa is C or S

SEQ ID NO: 75588 - protein, 35 aa, Artificial Sequence
  Cyclic GFR-binding peptide
  MOD_RES (30)..(31): Xaa is C or S
EVIMRYKKLLLVRGNDFYLMSIANTKVPAXXTSPV

SEQ ID NO: 75589 - protein, 31 aa, Artificial Sequence; identical to SEQ ID NO: 4334
  Cyclic GFR-binding peptide
  MOD_RES (1)..(3): Xaa is C or S

SEQ ID NO: 75590 - protein, 29 aa, Artificial Sequence
  Cyclic GFR-binding peptide
ESVAMGRYKKLYTVVGKDFYLISIANLKT

SEQ ID NO: 75591 - protein, 29 aa, Artificial Sequence
  Cyclic GFR-binding peptide
  MOD_RES (2)..(2): Xaa is C or S
GXRDVVMGRYKKLIIQQKDNFYLMSIANM

SEQ ID NO: 75592 - protein, 29 aa, Artificial Sequence
  Cyclic GFR-binding peptide
  MOD_RES (2)..(2): Xaa is C or S
GXSRVVMNRYKKLIVNSSDDFYLVSIANL

SEQ ID NO: 75593 - protein, 26 aa, Artificial Sequence
  Cyclic GFR-binding peptide
  MOD_RES (26)..(26): Xaa is C or S
RYKKLLLVRGNDFYLMSIANTKVPAX

SEQ ID NO: 75594 - protein, 30 aa, Artificial Sequence; identical to SEQ ID NO: 4352
  Cyclic GFR-binding peptide
  MOD_RES (2)..(2): Xaa is C or S

SEQ ID NO: 75595 - protein, 34 aa, Artificial Sequence; identical to SEQ ID NO: 14860
  Cyclic GFR-binding peptide
  MOD_RES (31)..(32): Xaa is C or S

SEQ ID NO: 75596 - protein, 32 aa, Artificial Sequence; identical to SEQ ID NO: 4359
  Cyclic GFR-binding peptide
  MOD_RES (2)..(4): Xaa is C or S

SEQ ID NO: 75597 - protein, 29 aa, Artificial Sequence
  Cyclic GFR-binding peptide
RVVMNRYKKLIVNSSDDFYLVSIANLQTP

SEQ ID NO: 75598 - protein, 25 aa, Artificial Sequence
  Cyclic GFR-binding peptide
ERYKKLTPVGMDDFYLVSIANLKTP

SEQ ID NO: 75599 - protein, 39 aa, Artificial Sequence; identical to SEQ ID NO: 29652
  Cyclic GFR-binding peptide
  MOD_RES (1)..(33)..(34): Xaa is C or S

SEQ ID NO: 75600 - protein, 33 aa, Artificial Sequence
  Cyclic GFR-binding peptide
  MOD_RES (2)..(4): Xaa is C or S
SXGXRDVVMGRYKKLIIQQKDNFYLMSIANMKT

SEQ ID NO: 75601 - protein, 34 aa, Artificial Sequence; identical to SEQ ID NO: 1564
  Cyclic GFR-binding peptide
  MOD_RES (32)..(33): Xaa is C or S

SEQ ID NO: 75602 - protein, 33 aa, Artificial Sequence; identical to SEQ ID NO: 29658
  Cyclic GFR-binding peptide
  MOD_RES (28)..(29): Xaa is C or S

SEQ ID NO: 75603 - protein, 29 aa, Artificial Sequence
  Cyclic GFR-binding peptide
  MOD_RES (26)..(27): Xaa is C or S
RYKKLIVNSSDDFYLVSIANLQTPAXXPK

SEQ ID NO: 75604 - protein, 25 aa, Artificial Sequence
  Cyclic GFR-binding peptide
VAMGRYKKLYTVVGKDFYLISIANL

SEQ ID NO: 75605 - protein, 37 aa, Artificial Sequence; identical to SEQ ID NO: 4381
  Cyclic GFR-binding peptide
  MOD_RES (1)..(3)..(35)..(36): Xaa is C or S

SEQ ID NO: 75606 - protein, 29 aa, Artificial Sequence
  Cyclic GFR-binding peptide
VAMGRYKKLYTVVGKDFYLISIANLKTPV

SEQ ID NO: 75607 - protein, 36 aa, Artificial Sequence; identical to SEQ ID NO: 1578
  Cyclic GFR-binding peptide
  MOD_RES (1)..(3)..(35)..(36): Xaa is C or S

SEQ ID NO: 75608 - protein, 31 aa, Artificial Sequence; identical to SEQ ID NO: 14886
  Cyclic GFR-binding peptide
  MOD_RES (28)..(29): Xaa is C or S

SEQ ID NO: 75609 - protein, 36 aa, Artificial Sequence; identical to SEQ ID NO: 1581
  Cyclic GFR-binding peptide
  MOD_RES (1)..(3)..(35): Xaa is C or S

SEQ ID NO: 75610 - protein, 28 aa, Artificial Sequence
  Cyclic GFR-binding peptide
VVMGRYKKLIIQQKDNFYLMSIANMKTP

SEQ ID NO: 75611 - protein, 33 aa, Artificial Sequence; identical to SEQ ID NO: 4395
  Cyclic GFR-binding peptide
  MOD_RES (1)..(3): Xaa is C or S

SEQ ID NO: 75612 - protein, 37 aa, Artificial Sequence; identical to SEQ ID NO: 4400
  Cyclic GFR-binding peptide
  MOD_RES (32)..(33): Xaa is C or S

SEQ ID NO: 75613 - protein, 39 aa, Artificial Sequence; identical to SEQ ID NO: 4401
  Cyclic GFR-binding peptide
  MOD_RES (2)..(35)..(36): Xaa is C or S

SEQ ID NO: 75614 - protein, 30 aa, Artificial Sequence
  Cyclic GFR-binding peptide
  MOD_RES (28)..(29): Xaa is C or S
MGRYKKLIIQQKDNFYLMSIANMKTPTXXP

SEQ ID NO: 75615 - protein, 28 aa, Artificial Sequence
  Cyclic GFR-binding peptide
VVMNRYKKLIVNSSDDFYLVSIANLQTP

SEQ ID NO: 75616 - protein, 36 aa, Artificial Sequence; identical to SEQ ID NO: 4405
  Cyclic GFR-binding peptide
  MOD_RES (2)..(34)..(35): Xaa is C or S

SEQ ID NO: 75617 - protein, 28 aa, Artificial Sequence
  Cyclic GFR-binding peptide
SRVVMNRYKKLIVNSSDDFYLVSIANLK

SEQ ID NO: 75618 - protein, 22 aa, Artificial Sequence
  Cyclic GFR-binding peptide
RYKKLIIQQKDNFYLMSIANMK

SEQ ID NO: 75619 - protein, 32 aa, Artificial Sequence; identical to SEQ ID NO: 1598
  Cyclic GFR-binding peptide
  MOD_RES (27)..(27): Xaa is C or S

SEQ ID NO: 75620 - protein, 38 aa, Artificial Sequence; identical to SEQ ID NO: 12163
  Cyclic GFR-binding peptide
  MOD_RES (32)..(33): Xaa is C or S

SEQ ID NO: 75621 - protein, 41 aa, Artificial Sequence; identical to SEQ ID NO: 1600
  Cyclic GFR-binding peptide
  MOD_RES (2)..(4)..(36): Xaa is C or S

SEQ ID NO: 75622 - protein, 24 aa, Artificial Sequence
  Cyclic GFR-binding peptide
SMGERYKKLTPVGMDDFYLVSIAN

SEQ ID NO: 75623 - protein, 26 aa, Artificial Sequence
  Cyclic GFR-binding peptide
MGRYKKLIIQQKDNFYLMSIANMKTP

SEQ ID NO: 75624 - protein, 26 aa, Artificial Sequence
  Cyclic GFR-binding peptide
RVVMNRYKKLIVNSSDDFYLVSIANL

SEQ ID NO: 75625 - protein, 33 aa, Artificial Sequence; identical to SEQ ID NO: 29704
  Cyclic GFR-binding peptide
  MOD_RES (1)..(3): Xaa is C or S

SEQ ID NO: 75626 - protein, 32 aa, Artificial Sequence; identical to SEQ ID NO: 1611
  Cyclic GFR-binding peptide
  MOD_RES (32)..(32): Xaa is C or S

SEQ ID NO: 75627 - protein, 25 aa, Artificial Sequence
  Cyclic GFR-binding peptide
NRYKKLIVNSSDDFYLVSIANLKTP

SEQ ID NO: 75628 - protein, 23 aa, Artificial Sequence
  Cyclic GFR-binding peptide
RYKKLIVNNSSDFYLVSIANLKT

SEQ ID NO: 75629 - protein, 22 aa, Artificial Sequence
  Cyclic GFR-binding peptide
RYKKLVVKENEDFYLMSIANLE

SEQ ID NO: 75630 - protein, 32 aa, Artificial Sequence; identical to SEQ ID NO: 4434
  Cyclic GFR-binding peptide
  MOD_RES (32)..(32): Xaa is C or S

SEQ ID NO: 75631 - protein, 31 aa, Artificial Sequence
  Cyclic GFR-binding peptide
  MOD_RES (26)..(27): Xaa is C or S
RYKKLLLVRGNDFYLMSIANTKVPAXXTSPV

SEQ ID NO: 75632 - protein, 28 aa, Artificial Sequence
  Cyclic GFR-binding peptide
DVVMGRYKKLIIQQKDNFYLMSIANMKT

SEQ ID NO: 75633 - protein, 30 aa, Artificial Sequence
  Cyclic GFR-binding peptide
  MOD_RES (26)..(27): Xaa is C or S
RYKKLIIQQKDNFYLMSIANMKTPTXXPGA

SEQ ID NO: 75634 - protein, 38 aa, Artificial Sequence; identical to SEQ ID NO: 32726
  Cyclic GFR-binding peptide
  MOD_RES (1)..(33)..(34): Xaa is C or S

SEQ ID NO: 75635 - protein, 36 aa, Artificial Sequence; identical to SEQ ID NO: 12187
  Cyclic GFR-binding peptide
  MOD_RES (31)..(32): Xaa is C or S

SEQ ID NO: 75636 - protein, 27 aa, Artificial Sequence
  Cyclic GFR-binding peptide
  MOD_RES (26)..(27): Xaa is C or S
RYKKLTPVGMDDFYLVSIANLKTPVXX

SEQ ID NO: 75637 - protein, 37 aa, Artificial Sequence
  Cyclic GFR-binding peptide
  MOD_RES (1)..(3)..(34)..(35): Xaa is C or S
XGXEEVIMRYKKLLLVRGNDFYLMSIANTKVPAXXTS

SEQ ID NO: 75638 - protein, 31 aa, Artificial Sequence; identical to SEQ ID NO: 4441
  Cyclic GFR-binding peptide
  MOD_RES (2)..(4): Xaa is C or S

SEQ ID NO: 75639 - protein, 30 aa, Artificial Sequence; identical to SEQ ID NO: 4444
  Cyclic GFR-binding peptide

SEQ ID NO: 75640 - protein, 32 aa, Artificial Sequence; identical to SEQ ID NO: 4447
  Cyclic GFR-binding peptide
  MOD_RES (32)..(32): Xaa is C or S

SEQ ID NO: 75641 - protein, 33 aa, Artificial Sequence; identical to SEQ ID NO: 1627
  Cyclic GFR-binding peptide
  MOD_RES (33)..(33): Xaa is C or S

SEQ ID NO: 75642 - protein, 28 aa, Artificial Sequence
  Cyclic GFR-binding peptide
  MOD_RES (27)..(28): Xaa is C or S
NRYKKLIVNSSDDFYLVSIANLKTPAXX

SEQ ID NO: 75643 - protein, 31 aa, Artificial Sequence; identical to SEQ ID NO: 1628
  Cyclic GFR-binding peptide
  MOD_RES (26)..(27): Xaa is C or S

SEQ ID NO: 75644 - protein, 31 aa, Artificial Sequence; identical to SEQ ID NO: 1629
  Cyclic GFR-binding peptide
  MOD_RES (1)..(3): Xaa is C or S

SEQ ID NO: 75645 - protein, 37 aa, Artificial Sequence; identical to SEQ ID NO: 1630
  Cyclic GFR-binding peptide
  MOD_RES (32)..(33): Xaa is C or S

SEQ ID NO: 75646 - protein, 23 aa, Artificial Sequence
  Cyclic GFR-binding peptide
RYKKLVVNNASDFYLISIANLRT

SEQ ID NO: 75647 - protein, 36 aa, Artificial Sequence; identical to SEQ ID NO: 4452
  Cyclic GFR-binding peptide
  MOD_RES (1)..(3)..(36): Xaa is C or S

SEQ ID NO: 75648 - protein, 40 aa, Artificial Sequence; identical to SEQ ID NO: 4453
  Cyclic GFR-binding peptide
  MOD_RES (2)..(34)..(35): Xaa is C or S

SEQ ID NO: 75649 - protein, 32 aa, Artificial Sequence; identical to SEQ ID NO: 1636
  Cyclic GFR-binding peptide
  MOD_RES (30)..(31): Xaa is C or S

SEQ ID NO: 75650 - protein, 39 aa, Artificial Sequence; identical to SEQ ID NO: 4455
  Cyclic GFR-binding peptide
  MOD_RES (2)..(4)..(36)..(37): Xaa is C or S

SEQ ID NO: 75651 - protein, 36 aa, Artificial Sequence; identical to SEQ ID NO: 29742
  Cyclic GFR-binding peptide
  MOD_RES (1)..(3)..(35)..(36): Xaa is C or S

SEQ ID NO: 75652 - protein, 32 aa, Artificial Sequence; identical to SEQ ID NO: 32752
  Cyclic GFR-binding peptide
  MOD_RES (2)..(4): Xaa is C or S

SEQ ID NO: 75653 - protein, 41 aa, Artificial Sequence; identical to SEQ ID NO: 32757
  Cyclic GFR-binding peptide
  MOD_RES (2)..(4)..(36)..(37): Xaa is C or S

SEQ ID NO: 75654 - protein, 30 aa, Artificial Sequence
  Cyclic GFR-binding peptide
  MOD_RES (1)..(1): Xaa is C or S
XEEVIMRYKKLLLVRGNDFYLMSIANTKVP

SEQ ID NO: 75655 - protein, 31 aa, Artificial Sequence; identical to SEQ ID NO: 4464
  Cyclic GFR-binding peptide
  MOD_RES (30)..(31): Xaa is C or S

SEQ ID NO: 75656 - protein, 26 aa, Artificial Sequence
  Cyclic GFR-binding peptide
VMDRYKKLVVNNASDFYLISIANLRT

SEQ ID NO: 75657 - protein, 24 aa, Artificial Sequence
  Cyclic GFR-binding peptide
GRYKKLIIQQKDNFYLMSIANMKT

SEQ ID NO: 75658 - protein, 37 aa, Artificial Sequence; identical to SEQ ID NO: 1652
  Cyclic GFR-binding peptide
  MOD_RES (1)..(33)..(34): Xaa is C or S

SEQ ID NO: 75659 - protein, 29 aa, Artificial Sequence
  Cyclic GFR-binding peptide
  MOD_RES (2)..(2): Xaa is C or S
GXARVVMNRYKKLIVNSSDDFYLVSIANL

SEQ ID NO: 75660 - protein, 24 aa, Artificial Sequence
  Cyclic GFR-binding peptide
VMGRYKKLIIQQKDNFYLMSIANM

SEQ ID NO: 75661 - protein, 41 aa, Artificial Sequence; identical to SEQ ID NO: 4476
  Cyclic GFR-binding peptide
  MOD_RES (1)..(3)..(35)..(36): Xaa is C or S

SEQ ID NO: 75662 - protein, 40 aa, Artificial Sequence; identical to SEQ ID NO: 4480
  Cyclic GFR-binding peptide
  MOD_RES (2)..(4)..(36)..(37): Xaa is C or S

SEQ ID NO: 75663 - protein, 32 aa, Artificial Sequence
  Cyclic GFR-binding peptide
  MOD_RES (2)..(4): Xaa is C or S
LXGXEEVIMRYKKLLLVRGNDFYLMSIANTKV

SEQ ID NO: 75664 - protein, 27 aa, Artificial Sequence
  Cyclic GFR-binding peptide
IMRYKKLLLVRGNDFYLMSIANTKVPA

SEQ ID NO: 75665 - protein, 31 aa, Artificial Sequence
  Cyclic GFR-binding peptide
  MOD_RES (2)..(2): Xaa is C or S
GXRDVVMGRYKKLIIQQKDNFYLMSIANMKT

SEQ ID NO: 75666 - protein, 35 aa, Artificial Sequence; identical to SEQ ID NO: 1669
  Cyclic GFR-binding peptide
  MOD_RES (1)..(33)..(34): Xaa is C or S

SEQ ID NO: 75667 - protein, 30 aa, Artificial Sequence; identical to SEQ ID NO: 29767
  Cyclic GFR-binding peptide
  MOD_RES (2)..(2): Xaa is C or S

SEQ ID NO: 75668 - protein, 39 aa, Artificial Sequence; identical to SEQ ID NO: 4487
  Cyclic GFR-binding peptide
  MOD_RES (2)..(4)..(36)..(37): Xaa is C or S

SEQ ID NO: 75669 - protein, 25 aa, Artificial Sequence
  Cyclic GFR-binding peptide
RYKKLIVNSSDDFYLVSIANLKTPA

SEQ ID NO: 75670 - protein, 35 aa, Artificial Sequence; identical to SEQ ID NO: 4490
  Cyclic GFR-binding peptide
  MOD_RES (30)..(31): Xaa is C or S

SEQ ID NO: 75671 - protein, 25 aa, Artificial Sequence
  Cyclic GFR-binding peptide
EVVMERYKKLVVKDYEDFYLMSIAN

SEQ ID NO: 75672 - protein, 23 aa, Artificial Sequence
  Cyclic GFR-binding peptide
RYKKLIVNSSDDFYLVSIANLQT

SEQ ID NO: 75673 - protein, 41 aa, Artificial Sequence
  Cyclic GFR-binding peptide
  MOD_RES (2)..(4)..(36)..(37): Xaa is C or S
SXGXRDVVMGRYKKLIIQQKDNFYLMSIANMKTPTXXPGAS

SEQ ID NO: 75674 - protein, 37 aa, Artificial Sequence
  Cyclic GFR-binding peptide
  MOD_RES (32)..(33): Xaa is C or S
RDVVMGRYKKLIIQQKDNFYLMSIANMKTPTXXPGAS

SEQ ID NO: 75675 - protein, 24 aa, Artificial Sequence
  Cyclic GFR-binding peptide
RYKKLVVKDYEDFYLMSIANLETP

SEQ ID NO: 75676 - protein, 32 aa, Artificial Sequence; identical to SEQ ID NO: 4497
  Cyclic GFR-binding peptide

SEQ ID NO: 75677 - protein, 22 aa, Artificial Sequence
  Cyclic GFR-binding peptide
GRYKKLIIQQKDNFYLMSIANM

SEQ ID NO: 75678 - protein, 33 aa, Artificial Sequence
  Cyclic GFR-binding peptide
  MOD_RES (28)..(29): Xaa is C or S
MGRYKKLIIQQKDNFYLMSIANMKTPTXXPGAS

SEQ ID NO: 75679 - protein, 25 aa, Artificial Sequence
  Cyclic GFR-binding peptide
MGERYKKLTPVGMDDFYLVSIANLK

SEQ ID NO: 75680 - protein, 26 aa, Artificial Sequence
  Cyclic GFR-binding peptide
GRYKKLYTVVGKDFYLISIANLKTPV

SEQ ID NO: 75681 - protein, 33 aa, Artificial Sequence; identical to SEQ ID NO: 4503
  Cyclic GFR-binding peptide
  MOD_RES (28)..(29): Xaa is C or S

SEQ ID NO: 75682 - protein, 37 aa, Artificial Sequence; identical to SEQ ID NO: 32805
  Cyclic GFR-binding peptide
  MOD_RES (1)..(33)..(34): Xaa is C or S

SEQ ID NO: 75683 - protein, 30 aa, Artificial Sequence; identical to SEQ ID NO: 4511
  Cyclic GFR-binding peptide
  MOD_RES (29)..(30): Xaa is C or S

SEQ ID NO: 75684 - protein, 32 aa, Artificial Sequence; identical to SEQ ID NO: 29796
  Cyclic GFR-binding peptide
  MOD_RES (30)..(31): Xaa is C or S

SEQ ID NO: 75685 - protein, 29 aa, Artificial Sequence
  Cyclic GFR-binding peptide
  MOD_RES (26)..(27): Xaa is C or S
RYKKLVVKENEDFYLMSIANLETPVXXAK

SEQ ID NO: 75686 - protein, 36 aa, Artificial Sequence; identical to SEQ ID NO: 12266
  Cyclic GFR-binding peptide
  MOD_RES (32)..(33): Xaa is C or S

SEQ ID NO: 75687 - protein, 27 aa, Artificial Sequence
  Cyclic GFR-binding peptide
  MOD_RES (26)..(27): Xaa is C or S
RYKKLLLVRGNDFYLMSIANTKVPAXX

SEQ ID NO: 75688 - protein, 23 aa, Artificial Sequence
  Cyclic GFR-binding peptide
NRYKKLIVNSSDDFYLVSIANLQ

SEQ ID NO: 75689 - protein, 30 aa, Artificial Sequence; identical to SEQ ID NO: 1711
  Cyclic GFR-binding peptide

SEQ ID NO: 75690 - protein, 28 aa, Artificial Sequence
  Cyclic GFR-binding peptide
ARVVMNRYKKLIVNSSDDFYLVSIANLQ

SEQ ID NO: 75691 - protein, 28 aa, Artificial Sequence
  Cyclic GFR-binding peptide
  MOD_RES (26)..(27): Xaa is C or S
RYKKLYTVVGKDFYLISIANLKTPVXXA

SEQ ID NO: 75692 - protein, 34 aa, Artificial Sequence; identical to SEQ ID NO: 1715
  Cyclic GFR-binding peptide
  MOD_RES (30)..(31): Xaa is C or S

SEQ ID NO: 75693 - protein, 29 aa, Artificial Sequence
  Cyclic GFR-binding peptide
  MOD_RES (26)..(27): Xaa is C or S
RYKKLVVNNAADFYLISIANLRAPVXXSA

SEQ ID NO: 75694 - protein, 26 aa, Artificial Sequence
  Cyclic GFR-binding peptide
VAMGRYKKLYTVVGKDFYLISIANLK

SEQ ID NO: 75695 - protein, 30 aa, Artificial Sequence; identical to SEQ ID NO: 1724
  Cyclic GFR-binding peptide
  MOD_RES (1)..(3): Xaa is C or S

SEQ ID NO: 75696 - protein, 36 aa, Artificial Sequence
  Cyclic GFR-binding peptide
  MOD_RES (2)..(34)..(35): Xaa is C or S
GXRDVVMGRYKKLIIQQKDNFYLMSIANMKTPTXXP

SEQ ID NO: 75697 - protein, 34 aa, Artificial Sequence; identical to SEQ ID NO: 12292
  Cyclic GFR-binding peptide
  MOD_RES (30)..(31): Xaa is C or S

SEQ ID NO: 75698 - protein, 23 aa, Artificial Sequence
  Cyclic GFR-binding peptide
GRYKKLYTVVGKDFYLISIANLK

SEQ ID NO: 75699 - protein, 33 aa, Artificial Sequence
  Cyclic GFR-binding peptide
  MOD_RES (29)..(30): Xaa is C or S
VIMRYKKLLLVRGNDFYLMSIANTKVPAXXTSP

SEQ ID NO: 75700 - protein, 31 aa, Artificial Sequence; identical to SEQ ID NO: 4547
  Cyclic GFR-binding peptide
  MOD_RES (1)..(3): Xaa is C or S

SEQ ID NO: 75701 - protein, 37 aa, Artificial Sequence; identical to SEQ ID NO: 29841
  Cyclic GFR-binding peptide
  MOD_RES (2)..(34)..(35): Xaa is C or S

SEQ ID NO: 75702 - protein, 27 aa, Artificial Sequence
  Cyclic GFR-binding peptide
RVVMNRYKKLIVNSSDDFYLVSIANLQ

SEQ ID NO: 75703 - protein, 40 aa, Artificial Sequence
  Cyclic GFR-binding peptide
  MOD_RES (2)..(4)..(35)..(36): Xaa is C or S
LXGXEEVIMRYKKLLLVRGNDFYLMSIANTKVPAXXTSPV

SEQ ID NO: 75704 - protein, 30 aa, Artificial Sequence; identical to SEQ ID NO: 4556
  Cyclic GFR-binding peptide
  MOD_RES (28)..(29): Xaa is C or S

SEQ ID NO: 75705 - protein, 21 aa, Artificial Sequence
  Cyclic GFR-binding peptide
RYKKLVVNNASDFYLISIANL

SEQ ID NO: 75706 - protein, 26 aa, Artificial Sequence
  Cyclic GFR-binding peptide
EVVMDRYKKLVVKENEDFYLMSIANL

SEQ ID NO: 75707 - protein, 34 aa, Artificial Sequence; identical to SEQ ID NO: 4561
  Cyclic GFR-binding peptide
  MOD_RES (29)..(29): Xaa is C or S

SEQ ID NO: 75708 - protein, 32 aa, Artificial Sequence
  Cyclic GFR-binding peptide
  MOD_RES (29)..(30): Xaa is C or S
VIMRYKKLLLVRGNDFYLMSIANTKVPAXXTS

SEQ ID NO: 75709 - protein, 21 aa, Artificial Sequence
  Cyclic GFR-binding peptide
ERYKKLVVKDYEDFYLMSIAN

SEQ ID NO: 75710 - protein, 26 aa, Artificial Sequence
  Cyclic GFR-binding peptide
  MOD_RES (26)..(26): Xaa is C or S
RYKKLYTVVGKDFYLISIANLKTPVX

SEQ ID NO: 75711 - protein, 32 aa, Artificial Sequence; identical to SEQ ID NO: 1750
  Cyclic GFR-binding peptide
  MOD_RES (29)..(30): Xaa is C or S

SEQ ID NO: 75712 - protein, 33 aa, Artificial Sequence; identical to SEQ ID NO: 4568
  Cyclic GFR-binding peptide
  MOD_RES (29)..(30): Xaa is C or S

SEQ ID NO: 75713 - protein, 33 aa, Artificial Sequence; identical to SEQ ID NO: 1761
  Cyclic GFR-binding peptide
  MOD_RES (2)..(2): Xaa is C or S

SEQ ID NO: 75714 - protein, 25 aa, Artificial Sequence
  Cyclic GFR-binding peptide
GRYKKLIIQQKDNFYLMSIANMKTP

SEQ ID NO: 75715 - protein, 21 aa, Artificial Sequence
  Cyclic GFR-binding peptide
RYKKLVVKENEDFYLMSIANL

SEQ ID NO: 75716 - protein, 29 aa, Artificial Sequence
  Cyclic GFR-binding peptide
  MOD_RES (2)..(2): Xaa is C or S
GXAKVVMNRYKKLIVNNSSDFYLVSIANL

SEQ ID NO: 75717 - protein, 28 aa, Artificial Sequence
  Cyclic GFR-binding peptide
  MOD_RES (26)..(27): Xaa is C or S
RYKKLVVKDYEDFYLMSIANLETPVXXA

SEQ ID NO: 75718 - protein, 27 aa, Artificial Sequence
  Cyclic GFR-binding peptide
  MOD_RES (27)..(27): Xaa is C or S
ERYKKLVVKDYEDFYLMSIANLETPVX

SEQ ID NO: 75719 - protein, 29 aa, Artificial Sequence
  Cyclic GFR-binding peptide
  MOD_RES (26)..(27): Xaa is C or S
RYKKLVVNNASDFYLISIANLRTPVXXTP

SEQ ID NO: 75720 - protein, 31 aa, Artificial Sequence; identical to SEQ ID NO: 29880
  Cyclic GFR-binding peptide
  MOD_RES (2)..(4): Xaa is C or S

SEQ ID NO: 75721 - protein, 37 aa, Artificial Sequence; identical to SEQ ID NO: 4595
  Cyclic GFR-binding peptide
  MOD_RES (2)..(34)..(35): Xaa is C or S

SEQ ID NO: 75722 - protein, 26 aa, Artificial Sequence
  Cyclic GFR-binding peptide
MDRYKKLVVNNAADFYLISIANLRAP

SEQ ID NO: 75723 - protein, 24 aa, Artificial Sequence
  Cyclic GFR-binding peptide
VMNRYKKLIVNSSDDFYLVSIANL

SEQ ID NO: 75724 - protein, 39 aa, Artificial Sequence
  Cyclic GFR-binding peptide
  MOD_RES (1)..(3)..(34)..(35): Xaa is C or S
XGXEEVIMRYKKLLLVRGNDFYLMSIANTKVPAXXTSPV

SEQ ID NO: 75725 - protein, 29 aa, Artificial Sequence
  Cyclic GFR-binding peptide
SMGERYKKLTPVGMDDFYLVSIANLKTPV

SEQ ID NO: 75726 - protein, 35 aa, Artificial Sequence; identical to SEQ ID NO: 15092
  Cyclic GFR-binding peptide
  MOD_RES (2)..(34)..(35): Xaa is C or S

SEQ ID NO: 75727 - protein, 28 aa, Artificial Sequence
  Cyclic GFR-binding peptide
  MOD_RES (27)..(28): Xaa is C or S
DRYKKLVVKENEDFYLMSIANLETPVXX

SEQ ID NO: 75728 - protein, 24 aa, Artificial Sequence
  Cyclic GFR-binding peptide
VMDRYKKLVVKENEDFYLMSIANL

SEQ ID NO: 75729 - protein, 32 aa, Artificial Sequence; identical to SEQ ID NO: 15095
  Cyclic GFR-binding peptide
  MOD_RES (2)..(2): Xaa is C or S

SEQ ID NO: 75730 - protein, 30 aa, Artificial Sequence; identical to SEQ ID NO: 4601
  Cyclic GFR-binding peptide

SEQ ID NO: 75731 - protein, 31 aa, Artificial Sequence; identical to SEQ ID NO: 4603
  Cyclic GFR-binding peptide
  MOD_RES (29)..(30): Xaa is C or S

SEQ ID NO: 75732 - protein, 23 aa, Artificial Sequence
  Cyclic GFR-binding peptide
RYKKLVVKENEDFYLMSIANLET

SEQ ID NO: 75733 - protein, 25 aa, Artificial Sequence
  Cyclic GFR-binding peptide
MNRYKKLIVNNSSDFYLVSIANLKT

SEQ ID NO: 75734 - protein, 28 aa, Artificial Sequence
  Cyclic GFR-binding peptide
  MOD_RES (2)..(2): Xaa is C or S
GXESVAMGRYKKLYTVVGKDFYLISIAN

SEQ ID NO: 75735 - protein, 24 aa, Artificial Sequence
  Cyclic GFR-binding peptide
VVMDRYKKLVVKENEDFYLMSIAN

SEQ ID NO: 75736 - protein, 30 aa, Artificial Sequence; identical to SEQ ID NO: 4613
  Cyclic GFR-binding peptide
  MOD_RES (2)..(2): Xaa is C or S

SEQ ID NO: 75737 - protein, 34 aa, Artificial Sequence; identical to SEQ ID NO: 29906
  Cyclic GFR-binding peptide
  MOD_RES (29)..(30): Xaa is C or S

SEQ ID NO: 75738 - protein, 26 aa, Artificial Sequence
  Cyclic GFR-binding peptide
NRYKKLIVNSSDDFYLVSIANLKTPA

SEQ ID NO: 75739 - protein, 38 aa, Artificial Sequence; identical to SEQ ID NO: 4623
  Cyclic GFR-binding peptide
  MOD_RES (32)..(33): Xaa is C or S

SEQ ID NO: 75740 - protein, 32 aa, Artificial Sequence; identical to SEQ ID NO: 4628
  Cyclic GFR-binding peptide
  MOD_RES (26)..(26): Xaa is C or S

SEQ ID NO: 75741 - protein, 35 aa, Artificial Sequence
  Cyclic GFR-binding peptide
  MOD_RES (2)..(33)..(34): Xaa is C or S
GXEEVIMRYKKLLLVRGNDFYLMSIANTKVPAXXT

SEQ ID NO: 75742 - protein, 36 aa, Artificial Sequence; identical to SEQ ID NO: 4629
  Cyclic GFR-binding peptide
  MOD_RES (30)..(31): Xaa is C or S

SEQ ID NO: 75743 - protein, 24 aa, Artificial Sequence
  Cyclic GFR-binding peptide
NRYKKLIVNSSDDFYLVSIANLKT

SEQ ID NO: 75744 - protein, 35 aa, Artificial Sequence; identical to SEQ ID NO: 1812
  Cyclic GFR-binding peptide
  MOD_RES (32)..(33): Xaa is C or S

SEQ ID NO: 75745 - protein, 25 aa, Artificial Sequence
  Cyclic GFR-binding peptide
EEVIMRYKKLLLVRGNDFYLMSIAN

SEQ ID NO: 75746 - protein, 32 aa, Artificial Sequence; identical to SEQ ID NO: 1815
  Cyclic GFR-binding peptide
  MOD_RES (2)..(2): Xaa is C or S

SEQ ID NO: 75747 - protein, 32 aa, Artificial Sequence; identical to SEQ ID NO: 1817
  Cyclic GFR-binding peptide
  MOD_RES (26)..(27): Xaa is C or S

SEQ ID NO: 75748 - protein, 29 aa, Artificial Sequence
  Cyclic GFR-binding peptide
  MOD_RES (28)..(29): Xaa is C or S
IMRYKKLLLVRGNDFYLMSIANTKVPAXX

SEQ ID NO: 75749 - protein, 31 aa, Artificial Sequence; identical to SEQ ID NO: 1823
  Cyclic GFR-binding peptide
  MOD_RES (27)..(28): Xaa is C or S

SEQ ID NO: 75750 - protein, 28 aa, Artificial Sequence
  Cyclic GFR-binding peptide
  MOD_RES (27)..(28): Xaa is C or S
ERYKKLVVKDYEDFYLMSIANLETPVXX

SEQ ID NO: 75751 - protein, 32 aa, Artificial Sequence
  Cyclic GFR-binding peptide
  MOD_RES (1)..(32): Xaa is C or S
XEEVIMRYKKLLLVRGNDFYLMSIANTKVPAX

SEQ ID NO: 75752 - protein, 34 aa, Artificial Sequence; identical to SEQ ID NO: 4637
  Cyclic GFR-binding peptide
  MOD_RES (2)..(4): Xaa is C or S

SEQ ID NO: 75753 - protein, 25 aa, Artificial Sequence
  Cyclic GFR-binding peptide
VMDRYKKLVVNNAADFYLISIANLR

SEQ ID NO: 75754 - protein, 31 aa, Artificial Sequence; identical to SEQ ID NO: 15137
  Cyclic GFR-binding peptide
  MOD_RES (26)..(27): Xaa is C or S

SEQ ID NO: 75755 - protein, 29 aa, Artificial Sequence
  Cyclic GFR-binding peptide
  MOD_RES (29)..(29): Xaa is C or S
VIMRYKKLLLVRGNDFYLMSIANTKVPAX

SEQ ID NO: 75756 - protein, 35 aa, Artificial Sequence; identical to SEQ ID NO: 29939
  Cyclic GFR-binding peptide
  MOD_RES (32)..(33): Xaa is C or S

SEQ ID NO: 75757 - protein, 25 aa, Artificial Sequence
  Cyclic GFR-binding peptide
VSMGERYKKLTPVGMDDFYLVSIAN

SEQ ID NO: 75758 - protein, 31 aa, Artificial Sequence; identical to SEQ ID NO: 4640
  Cyclic GFR-binding peptide
  MOD_RES (27)..(28): Xaa is C or S

SEQ ID NO: 75759 - protein, 34 aa, Artificial Sequence; identical to SEQ ID NO: 4644
  Cyclic GFR-binding peptide
  MOD_RES (31)..(32): Xaa is C or S

SEQ ID NO: 75760 - protein, 39 aa, Artificial Sequence; identical to SEQ ID NO: 15143
  Cyclic GFR-binding peptide
  MOD_RES (1)..(3)..(35)..(36): Xaa is C or S

SEQ ID NO: 75761 - protein, 27 aa, Artificial Sequence
  Cyclic GFR-binding peptide
KVVMNRYKKLIVNNSSDFYLVSIANLK

SEQ ID NO: 75762 - protein, 31 aa, Artificial Sequence; identical to SEQ ID NO: 4650
  Cyclic GFR-binding peptide
  MOD_RES (29)..(30): Xaa is C or S

SEQ ID NO: 75763 - protein, 35 aa, Artificial Sequence; identical to SEQ ID NO: 1842
  Cyclic GFR-binding peptide
  MOD_RES (32)..(33): Xaa is C or S

SEQ ID NO: 75764 - protein, 35 aa, Artificial Sequence
  Cyclic GFR-binding peptide
  MOD_RES (2)..(4)..(35): Xaa is C or S
LXGXEEVIMRYKKLLLVRGNDFYLMSIANTKVPAX

SEQ ID NO: 75765 - protein, 28 aa, Artificial Sequence
  Cyclic GFR-binding peptide
  MOD_RES (27)..(28): Xaa is C or S
GRYKKLIIQQKDNFYLMSIANMKTPTXX

SEQ ID NO: 75766 - protein, 27 aa, Artificial Sequence
  Cyclic GFR-binding peptide
  MOD_RES (27)..(27): Xaa is C or S
GRYKKLIIQQKDNFYLMSIANMKTPTX

SEQ ID NO: 75767 - protein, 33 aa, Artificial Sequence; identical to SEQ ID NO: 32951
  Cyclic GFR-binding peptide
  MOD_RES (1)..(33): Xaa is C or S

SEQ ID NO: 75768 - protein, 35 aa, Artificial Sequence; identical to SEQ ID NO: 4656
  Cyclic GFR-binding peptide
  MOD_RES (2)..(34)..(35): Xaa is C or S

SEQ ID NO: 75769 - protein, 31 aa, Artificial Sequence; identical to SEQ ID NO: 4659
  Cyclic GFR-binding peptide
  MOD_RES (28)..(29): Xaa is C or S

SEQ ID NO: 75770 - protein, 36 aa, Artificial Sequence; identical to SEQ ID NO: 1849
  Cyclic GFR-binding peptide
  MOD_RES (2)..(34)..(35): Xaa is C or S

SEQ ID NO: 75771 - protein, 31 aa, Artificial Sequence; identical to SEQ ID NO: 4665
  Cyclic GFR-binding peptide
  MOD_RES (2)..(2): Xaa is C or S

SEQ ID NO: 75772 - protein, 39 aa, Artificial Sequence; identical to SEQ ID NO: 4668
  Cyclic GFR-binding peptide
  MOD_RES (1)..(3)..(35)..(36): Xaa is C or S

SEQ ID NO: 75773 - protein, 27 aa, Artificial Sequence
  Cyclic GFR-binding peptide
  MOD_RES (26)..(27): Xaa is C or S
RYKKLVVKDYEDFYLMSIANLETPVXX

SEQ ID NO: 75774 - protein, 26 aa, Artificial Sequence
  Cyclic GFR-binding peptide
  MOD_RES (26)..(26): Xaa is C or S
RYKKLIVNSSDDFYLVSIANLQTPAX

SEQ ID NO: 75775 - protein, 26 aa, Artificial Sequence
  Cyclic GFR-binding peptide
VVMERYKKLVVKDYEDFYLMSIANLE

SEQ ID NO: 75776 - protein, 31 aa, Artificial Sequence; identical to SEQ ID NO: 29973
  Cyclic GFR-binding peptide
  MOD_RES (27)..(28): Xaa is C or S

SEQ ID NO: 75777 - protein, 27 aa, Artificial Sequence
  Cyclic GFR-binding peptide
DVVMGRYKKLIIQQKDNFYLMSIANMK

SEQ ID NO: 75778 - protein, 35 aa, Artificial Sequence; identical to SEQ ID NO: 1861
  Cyclic GFR-binding peptide
  MOD_RES (30)..(31): Xaa is C or S

SEQ ID NO: 75779 - protein, 42 aa, Artificial Sequence
  Cyclic GFR-binding peptide
  MOD_RES (2)..(4)..(36)..(37): Xaa is C or S
HXGXSRVVMNRYKKLIVNSSDDFYLVSIANLKTPAXXPKPVH

SEQ ID NO: 75780 - protein, 32 aa, Artificial Sequence; identical to SEQ ID NO: 12405
  Cyclic GFR-binding peptide
  MOD_RES (2)..(4): Xaa is C or S

SEQ ID NO: 75781 - protein, 35 aa, Artificial Sequence
  Cyclic GFR-binding peptide
  MOD_RES (31)..(32): Xaa is C or S
EEVIMRYKKLLLVRGNDFYLMSIANTKVPAXXTSP

SEQ ID NO: 75782 - protein, 26 aa, Artificial Sequence
  Cyclic GFR-binding peptide
IMRYKKLLLVRGNDFYLMSIANTKVP

SEQ ID NO: 75783 - protein, 40 aa, Artificial Sequence; identical to SEQ ID NO: 32984
  Cyclic GFR-binding peptide
  MOD_RES (2)..(4)..(36)..(37): Xaa is C or S

SEQ ID NO: 75784 - protein, 28 aa, Artificial Sequence
  Cyclic GFR-binding peptide
AMGRYKKLYTVVGKDFYLISIANLKTPV

SEQ ID NO: 75785 - protein, 33 aa, Artificial Sequence
  Cyclic GFR-binding peptide
  MOD_RES (27)..(28): Xaa is C or S
MRYKKLLLVRGNDFYLMSIANTKVPAXXTSPVR

SEQ ID NO: 75786 - protein, 23 aa, Artificial Sequence
  Cyclic GFR-binding peptide
MRYKKLLLVRGNDFYLMSIANTK

SEQ ID NO: 75787 - protein, 28 aa, Artificial Sequence
  Cyclic GFR-binding peptide
VAMGRYKKLYTVVGKDFYLISIANLKTP

SEQ ID NO: 75788 - protein, 28 aa, Artificial Sequence
  Cyclic GFR-binding peptide
  MOD_RES (2)..(2): Xaa is C or S
GXEEVIMRYKKLLLVRGNDFYLMSIANT

SEQ ID NO: 75789 - protein, 32 aa, Artificial Sequence; identical to SEQ ID NO: 4696
  Cyclic GFR-binding peptide
  MOD_RES (2)..(4): Xaa is C or S

SEQ ID NO: 75790 - protein, 33 aa, Artificial Sequence; identical to SEQ ID NO: 32995
  Cyclic GFR-binding peptide
  MOD_RES (27)..(28): Xaa is C or S

SEQ ID NO: 75791 - protein, 39 aa, Artificial Sequence; identical to SEQ ID NO: 1881
  Cyclic GFR-binding peptide
  MOD_RES (2)..(4)..(36): Xaa is C or S

SEQ ID NO: 75792 - protein, 31 aa, Artificial Sequence; identical to SEQ ID NO: 30000
  Cyclic GFR-binding peptide
  MOD_RES (1)..(1): Xaa is C or S

SEQ ID NO: 75793 - protein, 28 aa, Artificial Sequence
  Cyclic GFR-binding peptide
  MOD_RES (28)..(28): Xaa is C or S
MDRYKKLVVKENEDFYLMSIANLETPVX

SEQ ID NO: 75794 - protein, 37 aa, Artificial Sequence; identical to SEQ ID NO: 1884
  Cyclic GFR-binding peptide
  MOD_RES (31)..(31): Xaa is C or S

SEQ ID NO: 75795 - protein, 29 aa, Artificial Sequence
  Cyclic GFR-binding peptide
EVVMERYKKLVVKDYEDFYLMSIANLETP

SEQ ID NO: 75796 - protein, 37 aa, Artificial Sequence; identical to SEQ ID NO: 1889
  Cyclic GFR-binding peptide
  MOD_RES (1)..(3)..(35)..(36): Xaa is C or S

SEQ ID NO: 75797 - protein, 32 aa, Artificial Sequence
  Cyclic GFR-binding peptide
  MOD_RES (2)..(2): Xaa is C or S
GXRDVVMGRYKKLIIQQKDNFYLMSIANMKTP

SEQ ID NO: 75798 - protein, 29 aa, Artificial Sequence
  Cyclic GFR-binding peptide
  MOD_RES (2)..(2): Xaa is C or S
GXSEVVMDRYKKLVVNNASDFYLISIANL

SEQ ID NO: 75799 - protein, 37 aa, Artificial Sequence; identical to SEQ ID NO: 1891
  Cyclic GFR-binding peptide
  MOD_RES (31)..(32): Xaa is C or S

SEQ ID NO: 75800 - protein, 28 aa, Artificial Sequence
  Cyclic GFR-binding peptide
VMGRYKKLIIQQKDNFYLMSIANMKTPT

SEQ ID NO: 75801 - protein, 27 aa, Artificial Sequence
  Cyclic GFR-binding peptide
VVMERYKKLVVKDYEDFYLMSIANLET

SEQ ID NO: 75802 - protein, 38 aa, Artificial Sequence; identical to SEQ ID NO: 4714
  Cyclic GFR-binding peptide
  MOD_RES (2)..(4)..(37)..(38): Xaa is C or S

SEQ ID NO: 75803 - protein, 31 aa, Artificial Sequence; identical to SEQ ID NO: 30024
  Cyclic GFR-binding peptide
  MOD_RES (30)..(31): Xaa is C or S

SEQ ID NO: 75804 - protein, 39 aa, Artificial Sequence; identical to SEQ ID NO: 1899
  Cyclic GFR-binding peptide
  MOD_RES (1)..(3)..(35)..(36): Xaa is C or S

SEQ ID NO: 75805 - protein, 32 aa, Artificial Sequence; identical to SEQ ID NO: 15211
  Cyclic GFR-binding peptide
  MOD_RES (1)..(3): Xaa is C or S

SEQ ID NO: 75806 - protein, 37 aa, Artificial Sequence; identical to SEQ ID NO: 4721
  Cyclic GFR-binding peptide
  MOD_RES (32)..(33): Xaa is C or S

SEQ ID NO: 75807 - protein, 29 aa, Artificial Sequence
  Cyclic GFR-binding peptide
  MOD_RES (28)..(28): Xaa is C or S
MNRYKKLIVNSSDDFYLVSIANLKTPAXT

SEQ ID NO: 75808 - protein, 31 aa, Artificial Sequence; identical to SEQ ID NO: 4727
  Cyclic GFR-binding peptide
  MOD_RES (1)..(3): Xaa is C or S

SEQ ID NO: 75809 - protein, 30 aa, Artificial Sequence; identical to SEQ ID NO: 4729
  Cyclic GFR-binding peptide
  MOD_RES (2)..(4): Xaa is C or S

SEQ ID NO: 75810 - protein, 33 aa, Artificial Sequence; identical to SEQ ID NO: 1911
  Cyclic GFR-binding peptide
  MOD_RES (28)..(28): Xaa is C or S

SEQ ID NO: 75811 - protein, 29 aa, Artificial Sequence
  Cyclic GFR-binding peptide
  MOD_RES (26)..(27): Xaa is C or S
RYKKLLLVRGNDFYLMSIANTKVPAXXTS

SEQ ID NO: 75812 - protein, 33 aa, Artificial Sequence; identical to SEQ ID NO: 12461
  Cyclic GFR-binding peptide
  MOD_RES (1)..(3): Xaa is C or S

SEQ ID NO: 75813 - protein, 32 aa, Artificial Sequence; identical to SEQ ID NO: 1913
  Cyclic GFR-binding peptide
  MOD_RES (1)..(1): Xaa is C or S

SEQ ID NO: 75814 - protein, 28 aa, Artificial Sequence
  Cyclic GFR-binding peptide
  MOD_RES (1)..(1): Xaa is C or S
XAEVVMDRYKKLVVNNAADFYLISIANL

SEQ ID NO: 75815 - protein, 25 aa, Artificial Sequence
  Cyclic GFR-binding peptide
EVVMDRYKKLVVNNAADFYLISIAN

SEQ ID NO: 75816 - protein, 30 aa, Artificial Sequence; identical to SEQ ID NO: 4732
  Cyclic GFR-binding peptide
  MOD_RES (26)..(27): Xaa is C or S

SEQ ID NO: 75817 - protein, 30 aa, Artificial Sequence; identical to SEQ ID NO: 1916
  Cyclic GFR-binding peptide
  MOD_RES (29)..(30): Xaa is C or S

SEQ ID NO: 75818 - protein, 23 aa, Artificial Sequence
  Cyclic GFR-binding peptide
RYKKLIIQQKDNFYLMSIANMKT

SEQ ID NO: 75819 - protein, 31 aa, Artificial Sequence; identical to SEQ ID NO: 1933
  Cyclic GFR-binding peptide
  MOD_RES (2)..(4): Xaa is C or S

SEQ ID NO: 75820 - protein, 27 aa, Artificial Sequence
  Cyclic GFR-binding peptide
AMGRYKKLYTVVGKDFYLISIANLKTP

SEQ ID NO: 75821 - protein, 40 aa, Artificial Sequence; identical to SEQ ID NO: 15231
  Cyclic GFR-binding peptide
  MOD_RES (2)..(4)..(36)..(37): Xaa is C or S

SEQ ID NO: 75822 - protein, 36 aa, Artificial Sequence; identical to SEQ ID NO: 4749
  Cyclic GFR-binding peptide
  MOD_RES (31)..(32): Xaa is C or S

SEQ ID NO: 75823 - protein, 27 aa, Artificial Sequence
  Cyclic GFR-binding peptide
MGRYKKLYTVVGKDFYLISIANLKTPV

SEQ ID NO: 75824 - protein, 31 aa, Artificial Sequence; identical to SEQ ID NO: 4755
  Cyclic GFR-binding peptide
  MOD_RES (26)..(27): Xaa is C or S

SEQ ID NO: 75825 - protein, 25 aa, Artificial Sequence
  Cyclic GFR-binding peptide
MGRYKKLYTVVGKDFYLISIANLKT

SEQ ID NO: 75826 - protein, 27 aa, Artificial Sequence
  Cyclic GFR-binding peptide
VAMGRYKKLYTVVGKDFYLISIANLKT

SEQ ID NO: 75827 - protein, 36 aa, Artificial Sequence
  Cyclic GFR-binding peptide
  MOD_RES (2)..(4)..(36): Xaa is C or S
SXGXRDVVMGRYKKLIIQQKDNFYLMSIANMKTPTX

SEQ ID NO: 75828 - protein, 27 aa, Artificial Sequence
  Cyclic GFR-binding peptide
  MOD_RES (27)..(27): Xaa is C or S
NRYKKLIVNSSDDFYLVSIANLKTPAX

SEQ ID NO: 75829 - protein, 34 aa, Artificial Sequence; identical to SEQ ID NO: 15249
  Cyclic GFR-binding peptide
  MOD_RES (1)..(33)..(34): Xaa is C or S

SEQ ID NO: 75830 - protein, 32 aa, Artificial Sequence
  Cyclic GFR-binding peptide
  MOD_RES (31)..(32): Xaa is C or S
EEVIMRYKKLLLVRGNDFYLMSIANTKVPAXX

SEQ ID NO: 75831 - protein, 36 aa, Artificial Sequence; identical to SEQ ID NO: 4762
  Cyclic GFR-binding peptide
  MOD_RES (1)..(33)..(34): Xaa is C or S

SEQ ID NO: 75832 - protein, 28 aa, Artificial Sequence
  Cyclic GFR-binding peptide
VVMDRYKKLVVKENEDFYLMSIANLETP

SEQ ID NO: 75833 - protein, 29 aa, Artificial Sequence
  Cyclic GFR-binding peptide
GEVVMDRYKKLVVKENEDFYLMSIANLET

SEQ ID NO: 75834 - protein, 28 aa, Artificial Sequence
  Cyclic GFR-binding peptide
VMNRYKKLIVNNSSDFYLVSIANLKTPA

SEQ ID NO: 75835 - protein, 33 aa, Artificial Sequence; identical to SEQ ID NO: 1953
  Cyclic GFR-binding peptide
  MOD_RES (27)..(28): Xaa is C or S

SEQ ID NO: 75836 - protein, 35 aa, Artificial Sequence; identical to SEQ ID NO: 33084
  Cyclic GFR-binding peptide
  MOD_RES (32)..(33): Xaa is C or S

SEQ ID NO: 75837 - protein, 29 aa, Artificial Sequence
  Cyclic GFR-binding peptide
  MOD_RES (1)..(1): Xaa is C or S
XAEVVMDRYKKLVVNNAADFYLISIANLR

SEQ ID NO: 75838 - protein, 28 aa, Artificial Sequence
  Cyclic GFR-binding peptide
KVVMNRYKKLIVNNSSDFYLVSIANLKT

SEQ ID NO: 75839 - protein, 29 aa, Artificial Sequence
  Cyclic GFR-binding peptide
  MOD_RES (27)..(27): Xaa is C or S
NRYKKLIVNSSDDFYLVSIANLKTPAXTP

SEQ ID NO: 75840 - protein, 31 aa, Artificial Sequence; identical to SEQ ID NO: 1954
  Cyclic GFR-binding peptide
  MOD_RES (27)..(27): Xaa is C or S

SEQ ID NO: 75841 - protein, 30 aa, Artificial Sequence; identical to SEQ ID NO: 12503
  Cyclic GFR-binding peptide
  MOD_RES (29)..(30): Xaa is C or S

SEQ ID NO: 75842 - protein, 25 aa, Artificial Sequence
  Cyclic GFR-binding peptide
MDRYKKLVVKENEDFYLMSIANLET

SEQ ID NO: 75843 - protein, 25 aa, Artificial Sequence
  Cyclic GFR-binding peptide
MGRYKKLIIQQKDNFYLMSIANMKT

SEQ ID NO: 75844 - protein, 35 aa, Artificial Sequence; identical to SEQ ID NO: 4778
  Cyclic GFR-binding peptide
  MOD_RES (30)..(31): Xaa is C or S

SEQ ID NO: 75845 - protein, 33 aa, Artificial Sequence; identical to SEQ ID NO: 1966
  Cyclic GFR-binding peptide
  MOD_RES (29)..(30): Xaa is C or S

SEQ ID NO: 75846 - protein, 29 aa, Artificial Sequence
  Cyclic GFR-binding peptide
  MOD_RES (28)..(29): Xaa is C or S
MGRYKKLYTVVGKDFYLISIANLKTPVXX

SEQ ID NO: 75847 - protein, 29 aa, Artificial Sequence
  Cyclic GFR-binding peptide
  MOD_RES (27)..(28): Xaa is C or S
NRYKKLIVNNSSDFYLVSIANLKTPAXXA

SEQ ID NO: 75848 - protein, 38 aa, Artificial Sequence; identical to SEQ ID NO: 4783
  Cyclic GFR-binding peptide
  MOD_RES (32)..(33): Xaa is C or S

SEQ ID NO: 75849 - protein, 34 aa, Artificial Sequence; identical to SEQ ID NO: 33104
  Cyclic GFR-binding peptide
  MOD_RES (1)..(33)..(34): Xaa is C or S

SEQ ID NO: 75850 - protein, 26 aa, Artificial Sequence
  Cyclic GFR-binding peptide
  MOD_RES (26)..(26): Xaa is C or S
RYKKLTPVGMDDFYLVSIANLKTPVX

SEQ ID NO: 75851 - protein, 29 aa, Artificial Sequence
  Cyclic GFR-binding peptide
  MOD_RES (1)..(3): Xaa is C or S
XGXARVVMNRYKKLIVNSSDDFYLVSIAN

SEQ ID NO: 75852 - protein, 35 aa, Artificial Sequence
  Cyclic GFR-binding peptide
  MOD_RES (1)..(3)..(35): Xaa is C or S
XGXRDVVMGRYKKLIIQQKDNFYLMSIANMKTPTX

SEQ ID NO: 75853 - protein, 34 aa, Artificial Sequence; identical to SEQ ID NO: 30122
  Cyclic GFR-binding peptide
  MOD_RES (30)..(31): Xaa is C or S

SEQ ID NO: 75854 - protein, 29 aa, Artificial Sequence
  Cyclic GFR-binding peptide
GEVVMERYKKLVVKDYEDFYLMSIANLET

SEQ ID NO: 75855 - protein, 40 aa, Artificial Sequence; identical to SEQ ID NO: 1991
  Cyclic GFR-binding peptide
  MOD_RES (2)..(4)..(37)..(38): Xaa is C or S

SEQ ID NO: 75856 - protein, 40 aa, Artificial Sequence
  Cyclic GFR-binding peptide
  MOD_RES (1)..(3)..(34)..(35): Xaa is C or S
XGXEEVIMRYKKLLLVRGNDFYLMSIANTKVPAXXTSPVR

SEQ ID NO: 75857 - protein, 33 aa, Artificial Sequence; identical to SEQ ID NO: 4816
  Cyclic GFR-binding peptide
  MOD_RES (29)..(30): Xaa is C or S

SEQ ID NO: 75858 - protein, 26 aa, Artificial Sequence
  Cyclic GFR-binding peptide
MGERYKKLTPVGMDDFYLVSIANLKT

SEQ ID NO: 75859 - protein, 29 aa, Artificial Sequence
  Cyclic GFR-binding peptide
  MOD_RES (27)..(28): Xaa is C or S
NRYKKLIVNSSDDFYLVSIANLQTPAXXP

SEQ ID NO: 75860 - protein, 33 aa, Artificial Sequence; identical to SEQ ID NO: 4819
  Cyclic GFR-binding peptide
  MOD_RES (30)..(31): Xaa is C or S

SEQ ID NO: 75861 - protein, 30 aa, Artificial Sequence; identical to SEQ ID NO: 4821
  Cyclic GFR-binding peptide

SEQ ID NO: 75862 - protein, 33 aa, Artificial Sequence; identical to SEQ ID NO: 12548
  Cyclic GFR-binding peptide
  MOD_RES (29)..(30): Xaa is C or S

SEQ ID NO: 75863 - protein, 37 aa, Artificial Sequence; identical to SEQ ID NO: 2002
  Cyclic GFR-binding peptide
  MOD_RES (2)..(4)..(36)..(37): Xaa is C or S

SEQ ID NO: 75864 - protein, 36 aa, Artificial Sequence; identical to SEQ ID NO: 33142
  Cyclic GFR-binding peptide
  MOD_RES (2)..(34)..(35): Xaa is C or S

SEQ ID NO: 75865 - protein, 36 aa, Artificial Sequence; identical to SEQ ID NO: 2003
  Cyclic GFR-binding peptide
  MOD_RES (1)..(34)..(35): Xaa is C or S

SEQ ID NO: 75866 - protein, 34 aa, Artificial Sequence; identical to SEQ ID NO: 30150
  Cyclic GFR-binding peptide
  MOD_RES (2)..(34): Xaa is C or S

SEQ ID NO: 75867 - protein, 28 aa, Artificial Sequence
  Cyclic GFR-binding peptide
  MOD_RES (1)..(1): Xaa is C or S
XARVVMNRYKKLIVNSSDDFYLVSIANL

SEQ ID NO: 75868 - protein, 20 aa, Artificial Sequence
  Cyclic GFR-binding peptide
RYKKLVVKENEDFYLMSIAN

SEQ ID NO: 75869 - protein, 35 aa, Artificial Sequence; identical to SEQ ID NO: 4830
  Cyclic GFR-binding peptide
  MOD_RES (1)..(3): Xaa is C or S

SEQ ID NO: 75870 - protein, 28 aa, Artificial Sequence
  Cyclic GFR-binding peptide
  MOD_RES (26)..(27): Xaa is C or S
RYKKLTPVGMDDFYLVSIANLKTPVXXA

SEQ ID NO: 75871 - protein, 30 aa, Artificial Sequence; identical to SEQ ID NO: 4833
  Cyclic GFR-binding peptide
  MOD_RES (29)..(30): Xaa is C or S

SEQ ID NO: 75872 - protein, 24 aa, Artificial Sequence
  Cyclic GFR-binding peptide
AMGRYKKLYTVVGKDFYLISIANL

SEQ ID NO: 75873 - protein, 35 aa, Artificial Sequence; identical to SEQ ID NO: 4835
  Cyclic GFR-binding peptide
  MOD_RES (32)..(33): Xaa is C or S

SEQ ID NO: 75874 - protein, 39 aa, Artificial Sequence; identical to SEQ ID NO: 15319
  Cyclic GFR-binding peptide
  MOD_RES (2)..(34)..(35): Xaa is C or S

SEQ ID NO: 75875 - protein, 36 aa, Artificial Sequence; identical to SEQ ID NO: 2013
  Cyclic GFR-binding peptide
  MOD_RES (1)..(3)..(35)..(36): Xaa is C or S

SEQ ID NO: 75876 - protein, 30 aa, Artificial Sequence; identical to SEQ ID NO: 33156
  Cyclic GFR-binding peptide
  MOD_RES (27)..(28): Xaa is C or S

SEQ ID NO: 75877 - protein, 24 aa, Artificial Sequence
  Cyclic GFR-binding peptide
VMDRYKKLVVNNAADFYLISIANL

SEQ ID NO: 75878 - protein, 31 aa, Artificial Sequence
  Cyclic GFR-binding peptide
  MOD_RES (26)..(27): Xaa is C or S
RYKKLIIQQKDNFYLMSIANMKTPTXXPGAS

SEQ ID NO: 75879 - protein, 25 aa, Artificial Sequence
  Cyclic GFR-binding peptide
DRYKKLVVNNAADFYLISIANLRAP

SEQ ID NO: 75880 - protein, 39 aa, Artificial Sequence; identical to SEQ ID NO: 33167
  Cyclic GFR-binding peptide
  MOD_RES (2)..(4)..(36)..(37): Xaa is C or S

SEQ ID NO: 75881 - protein, 31 aa, Artificial Sequence; identical to SEQ ID NO: 2023
  Cyclic GFR-binding peptide
  MOD_RES (28)..(29): Xaa is C or S

SEQ ID NO: 75882 - protein, 38 aa, Artificial Sequence; identical to SEQ ID NO: 2024
  Cyclic GFR-binding peptide
  MOD_RES (33)..(34): Xaa is C or S

SEQ ID NO: 75883 - protein, 31 aa, Artificial Sequence
  Cyclic GFR-binding peptide
  MOD_RES (1)..(1): Xaa is C or S
XRDVVMGRYKKLIIQQKDNFYLMSIANMKTP

SEQ ID NO: 75884 - protein, 24 aa, Artificial Sequence
  Cyclic GFR-binding peptide
MDRYKKLVVNNASDFYLISIANLR

SEQ ID NO: 75885 - protein, 27 aa, Artificial Sequence
  Cyclic GFR-binding peptide
MDRYKKLVVKENEDFYLMSIANLETPV

SEQ ID NO: 75886 - protein, 37 aa, Artificial Sequence; identical to SEQ ID NO: 4858
  Cyclic GFR-binding peptide
  MOD_RES (32)..(33): Xaa is C or S

SEQ ID NO: 75887 - protein, 32 aa, Artificial Sequence
  Cyclic GFR-binding peptide
  MOD_RES (30)..(31): Xaa is C or S
EVIMRYKKLLLVRGNDFYLMSIANTKVPAXXT

SEQ ID NO: 75888 - protein, 38 aa, Artificial Sequence; identical to SEQ ID NO: 4865
  Cyclic GFR-binding peptide
  MOD_RES (2)..(34)..(35): Xaa is C or S

SEQ ID NO: 75889 - protein, 32 aa, Artificial Sequence; identical to SEQ ID NO: 4866
  Cyclic GFR-binding peptide
  MOD_RES (1)..(1): Xaa is C or S

SEQ ID NO: 75890 - protein, 31 aa, Artificial Sequence; identical to SEQ ID NO: 2039
  Cyclic GFR-binding peptide
  MOD_RES (30)..(31): Xaa is C or S

SEQ ID NO: 75891 - protein, 27 aa, Artificial Sequence
  Cyclic GFR-binding peptide
  MOD_RES (26)..(27): Xaa is C or S
RYKKLIVNSSDDFYLVSIANLQTPAXX

SEQ ID NO: 75892 - protein, 32 aa, Artificial Sequence; identical to SEQ ID NO: 30197
  Cyclic GFR-binding peptide
  MOD_RES (32)..(32): Xaa is C or S

SEQ ID NO: 75893 - protein, 35 aa, Artificial Sequence; identical to SEQ ID NO: 2041
  Cyclic GFR-binding peptide
  MOD_RES (1)..(34)..(35): Xaa is C or S

SEQ ID NO: 75894 - protein, 40 aa, Artificial Sequence; identical to SEQ ID NO: 2042
  Cyclic GFR-binding peptide
  MOD_RES (1)..(3)..(35)..(36): Xaa is C or S

SEQ ID NO: 75895 - protein, 37 aa, Artificial Sequence; identical to SEQ ID NO: 2046
  Cyclic GFR-binding peptide
  MOD_RES (2)..(4)..(36)..(37): Xaa is C or S

SEQ ID NO: 75896 - protein, 29 aa, Artificial Sequence
  Cyclic GFR-binding peptide
  MOD_RES (29)..(29): Xaa is C or S
VMNRYKKLIVNNSSDFYLVSIANLKTPAX

SEQ ID NO: 75897 - protein, 26 aa, Artificial Sequence
  Cyclic GFR-binding peptide
AKVVMNRYKKLIVNNSSDFYLVSIAN

SEQ ID NO: 75898 - protein, 31 aa, Artificial Sequence; identical to SEQ ID NO: 2052
  Cyclic GFR-binding peptide
  MOD_RES (28)..(29): Xaa is C or S

SEQ ID NO: 75899 - protein, 39 aa, Artificial Sequence; identical to SEQ ID NO: 4881
  Cyclic GFR-binding peptide
  MOD_RES (1)..(33)..(34): Xaa is C or S

SEQ ID NO: 75900 - protein, 32 aa, Artificial Sequence; identical to SEQ ID NO: 2059
  Cyclic GFR-binding peptide
  MOD_RES (29)..(30): Xaa is C or S

SEQ ID NO: 75901 - protein, 42 aa, Artificial Sequence; identical to SEQ ID NO: 2061
  Cyclic GFR-binding peptide
  MOD_RES (2)..(4)..(36)..(37): Xaa is C or S

SEQ ID NO: 75902 - protein, 24 aa, Artificial Sequence
  Cyclic GFR-binding peptide
ERYKKLTPVGMDDFYLVSIANLKT

SEQ ID NO: 75903 - protein, 30 aa, Artificial Sequence; identical to SEQ ID NO: 4887
  Cyclic GFR-binding peptide

SEQ ID NO: 75904 - protein, 33 aa, Artificial Sequence; identical to SEQ ID NO: 15381
  Cyclic GFR-binding peptide
  MOD_RES (31)..(32): Xaa is C or S

SEQ ID NO: 75905 - protein, 22 aa, Artificial Sequence
  Cyclic GFR-binding peptide
RYKKLVVNNASDFYLISIANLR

SEQ ID NO: 75906 - protein, 36 aa, Artificial Sequence; identical to SEQ ID NO: 4893
  Cyclic GFR-binding peptide
  MOD_RES (2)..(34)..(35): Xaa is C or S

SEQ ID NO: 75907 - protein, 34 aa, Artificial Sequence; identical to SEQ ID NO: 4899
  Cyclic GFR-binding peptide
  MOD_RES (2)..(34): Xaa is C or S

SEQ ID NO: 75908 - protein, 29 aa, Artificial Sequence
  Cyclic GFR-binding peptide
  MOD_RES (2)..(4): Xaa is C or S
LXGXEEVIMRYKKLLLVRGNDFYLMSIAN

SEQ ID NO: 75909 - protein, 36 aa, Artificial Sequence; identical to SEQ ID NO: 33220
  Cyclic GFR-binding peptide
  MOD_RES (1)..(3)..(35)..(36): Xaa is C or S

SEQ ID NO: 75910 - protein, 22 aa, Artificial Sequence
  Cyclic GFR-binding peptide
GERYKKLTPVGMDDFYLVSIAN

SEQ ID NO: 75911 - protein, 34 aa, Artificial Sequence; identical to SEQ ID NO: 4910
  Cyclic GFR-binding peptide
  MOD_RES (32)..(33): Xaa is C or S

SEQ ID NO: 75912 - protein, 32 aa, Artificial Sequence; identical to SEQ ID NO: 2081
  Cyclic GFR-binding peptide
  MOD_RES (30)..(30): Xaa is C or S

SEQ ID NO: 75913 - protein, 30 aa, Artificial Sequence; identical to SEQ ID NO: 4914
  Cyclic GFR-binding peptide
  MOD_RES (2)..(2): Xaa is C or S

SEQ ID NO: 75914 - protein, 38 aa, Artificial Sequence
  Cyclic GFR-binding peptide
  MOD_RES (2)..(4)..(36)..(37): Xaa is C or S
SXGXRDVVMGRYKKLIIQQKDNFYLMSIANMKTPTXXP

SEQ ID NO: 75915 - protein, 24 aa, Artificial Sequence
  Cyclic GFR-binding peptide
DRYKKLVVNNAADFYLISIANLRA

SEQ ID NO: 75916 - protein, 29 aa, Artificial Sequence
  Cyclic GFR-binding peptide
  MOD_RES (29)..(29): Xaa is C or S
AMGRYKKLYTVVGKDFYLISIANLKTPVX

SEQ ID NO: 75917 - protein, 33 aa, Artificial Sequence; identical to SEQ ID NO: 2094
  Cyclic GFR-binding peptide
  MOD_RES (29)..(30): Xaa is C or S

SEQ ID NO: 75918 - protein, 25 aa, Artificial Sequence
  Cyclic GFR-binding peptide
VMDRYKKLVVNNASDFYLISIANLR

SEQ ID NO: 75919 - protein, 33 aa, Artificial Sequence; identical to SEQ ID NO: 2095
  Cyclic GFR-binding peptide
  MOD_RES (2)..(4): Xaa is C or S

SEQ ID NO: 75920 - protein, 32 aa, Artificial Sequence; identical to SEQ ID NO: 4928
  Cyclic GFR-binding peptide
  MOD_RES (29)..(30): Xaa is C or S

SEQ ID NO: 75921 - protein, 38 aa, Artificial Sequence; identical to SEQ ID NO: 2096
  Cyclic GFR-binding peptide
  MOD_RES (1)..(3)..(35)..(36): Xaa is C or S

SEQ ID NO: 75922 - protein, 28 aa, Artificial Sequence
  Cyclic GFR-binding peptide
AVSMGERYKKLTPVGMDDFYLVSIANLK

SEQ ID NO: 75923 - protein, 24 aa, Artificial Sequence
  Cyclic GFR-binding peptide
RYKKLTPVGMDDFYLVSIANLKTP

SEQ ID NO: 75924 - protein, 22 aa, Artificial Sequence
  Cyclic GFR-binding peptide
MERYKKLVVKDYEDFYLMSIAN

SEQ ID NO: 75925 - protein, 33 aa, Artificial Sequence
  Cyclic GFR-binding peptide
  MOD_RES (30)..(31): Xaa is C or S
VVMGRYKKLIIQQKDNFYLMSIANMKTPTXXPG

SEQ ID NO: 75926 - protein, 22 aa, Artificial Sequence
  Cyclic GFR-binding peptide
RYKKLIVNSSDDFYLVSIANLQ

SEQ ID NO: 75927 - protein, 25 aa, Artificial Sequence
  Cyclic GFR-binding peptide
VMERYKKLVVKDYEDFYLMSIANLE

SEQ ID NO: 75928 - protein, 31 aa, Artificial Sequence
  Cyclic GFR-binding peptide
  MOD_RES (31)..(31): Xaa is C or S
EEVIMRYKKLLLVRGNDFYLMSIANTKVPAX

SEQ ID NO: 75929 - protein, 28 aa, Artificial Sequence
  Cyclic GFR-binding peptide
  MOD_RES (28)..(28): Xaa is C or S
MGRYKKLYTVVGKDFYLISIANLKTPVX

SEQ ID NO: 75930 - protein, 42 aa, Artificial Sequence; identical to SEQ ID NO: 2114
  Cyclic GFR-binding peptide
  MOD_RES (2)..(4)..(36)..(37): Xaa is C or S

SEQ ID NO: 75931 - protein, 34 aa, Artificial Sequence; identical to SEQ ID NO: 33272
  Cyclic GFR-binding peptide
  MOD_RES (2)..(34): Xaa is C or S

SEQ ID NO: 75932 - protein, 26 aa, Artificial Sequence
  Cyclic GFR-binding peptide
VVMDRYKKLVVNNAADFYLISIANLR

SEQ ID NO: 75933 - protein, 33 aa, Artificial Sequence; identical to SEQ ID NO: 4964
  Cyclic GFR-binding peptide
  MOD_RES (28)..(29): Xaa is C or S

SEQ ID NO: 75934 - protein, 36 aa, Artificial Sequence; identical to SEQ ID NO: 4966
  Cyclic GFR-binding peptide
  MOD_RES (33)..(34): Xaa is C or S

SEQ ID NO: 75935 - protein, 41 aa, Artificial Sequence; identical to SEQ ID NO: 2121
  Cyclic GFR-binding peptide
  MOD_RES (2)..(35)..(36): Xaa is C or S

SEQ ID NO: 75936 - protein, 32 aa, Artificial Sequence; identical to SEQ ID NO: 2124
  Cyclic GFR-binding peptide
  MOD_RES (1)..(1): Xaa is C or S

SEQ ID NO: 75937 - protein, 31 aa, Artificial Sequence; identical to SEQ ID NO: 4969
  Cyclic GFR-binding peptide
  MOD_RES (1)..(1): Xaa is C or S

SEQ ID NO: 75938 - protein, 38 aa, Artificial Sequence
  Cyclic GFR-binding peptide
  MOD_RES (32)..(33): Xaa is C or S
RDVVMGRYKKLIIQQKDNFYLMSIANMKTPTXXPGASG

SEQ ID NO: 75939 - protein, 27 aa, Artificial Sequence
  Cyclic GFR-binding peptide
VIMRYKKLLLVRGNDFYLMSIANTKVP

SEQ ID NO: 75940 - protein, 30 aa, Artificial Sequence; identical to SEQ ID NO: 4980
  Cyclic GFR-binding peptide
  MOD_RES (1)..(3): Xaa is C or S

SEQ ID NO: 75941 - protein, 34 aa, Artificial Sequence; identical to SEQ ID NO: 2137
  Cyclic GFR-binding peptide
  MOD_RES (30)..(31): Xaa is C or S

SEQ ID NO: 75942 - protein, 27 aa, Artificial Sequence
  Cyclic GFR-binding peptide
SEVVMDRYKKLVVNNASDFYLISIANL

SEQ ID NO: 75943 - protein, 35 aa, Artificial Sequence; identical to SEQ ID NO: 4991
  Cyclic GFR-binding peptide
  MOD_RES (2)..(34)..(35): Xaa is C or S

SEQ ID NO: 75944 - protein, 31 aa, Artificial Sequence; identical to SEQ ID NO: 2151
  Cyclic GFR-binding peptide
  MOD_RES (29)..(30): Xaa is C or S

SEQ ID NO: 75945 - protein, 36 aa, Artificial Sequence; identical to SEQ ID NO: 33310
  Cyclic GFR-binding peptide
  MOD_RES (31)..(32): Xaa is C or S

SEQ ID NO: 75946 - protein, 27 aa, Artificial Sequence
  Cyclic GFR-binding peptide
  MOD_RES (26)..(27): Xaa is C or S
RYKKLVVKENEDFYLMSIANLETPVXX

SEQ ID NO: 75947 - protein, 26 aa, Artificial Sequence
  Cyclic GFR-binding peptide
VVMDRYKKLVVKENEDFYLMSIANLE

SEQ ID NO: 75948 - protein, 30 aa, Artificial Sequence; identical to SEQ ID NO: 2158
  Cyclic GFR-binding peptide
  MOD_RES (1)..(1): Xaa is C or S

SEQ ID NO: 75949 - protein, 35 aa, Artificial Sequence; identical to SEQ ID NO: 33320
  Cyclic GFR-binding peptide
  MOD_RES (2)..(34)..(35): Xaa is C or S

SEQ ID NO: 75950 - protein, 37 aa, Artificial Sequence
  Cyclic GFR-binding peptide
  MOD_RES (2)..(4)..(36)..(37): Xaa is C or S
SXGXRDVVMGRYKKLIIQQKDNFYLMSIANMKTPTXX

SEQ ID NO: 75951 - protein, 25 aa, Artificial Sequence
  Cyclic GFR-binding peptide
RYKKLIIQQKDNFYLMSIANMKTPT

SEQ ID NO: 75952 - protein, 28 aa, Artificial Sequence
  Cyclic GFR-binding peptide
  MOD_RES (27)..(28): Xaa is C or S
NRYKKLIVNNSSDFYLVSIANLKTPAXX

SEQ ID NO: 75953 - protein, 37 aa, Artificial Sequence
  Cyclic GFR-binding peptide
  MOD_RES (2)..(34)..(35): Xaa is C or S
GXRDVVMGRYKKLIIQQKDNFYLMSIANMKTPTXXPG

SEQ ID NO: 75954 - protein, 30 aa, Artificial Sequence; identical to SEQ ID NO: 30326
  Cyclic GFR-binding peptide

SEQ ID NO: 75955 - protein, 37 aa, Artificial Sequence; identical to SEQ ID NO: 15481
  Cyclic GFR-binding peptide
  MOD_RES (1)..(3)..(35)..(36): Xaa is C or S

SEQ ID NO: 75956 - protein, 33 aa, Artificial Sequence; identical to SEQ ID NO: 33330
  Cyclic GFR-binding peptide
  MOD_RES (28)..(29): Xaa is C or S

SEQ ID NO: 75957 - protein, 29 aa, Artificial Sequence
  Cyclic GFR-binding peptide
KVVMNRYKKLIVNNSSDFYLVSIANLKTP

SEQ ID NO: 75958 - protein, 27 aa, Artificial Sequence
  Cyclic GFR-binding peptide
VSMGERYKKLTPVGMDDFYLVSIANLK

SEQ ID NO: 75959 - protein, 32 aa, Artificial Sequence; identical to SEQ ID NO: 5006
  Cyclic GFR-binding peptide
  MOD_RES (2)..(4): Xaa is C or S

SEQ ID NO: 75960 - protein, 34 aa, Artificial Sequence; identical to SEQ ID NO: 2187
  Cyclic GFR-binding peptide
  MOD_RES (2)..(2): Xaa is C or S

SEQ ID NO: 75961 - protein, 40 aa, Artificial Sequence
  Cyclic GFR-binding peptide
  MOD_RES (2)..(4)..(36)..(37): Xaa is C or S
SXGXRDVVMGRYKKLIIQQKDNFYLMSIANMKTPTXXPGA

SEQ ID NO: 75962 - protein, 27 aa, Artificial Sequence
  Cyclic GFR-binding peptide
EVVMDRYKKLVVNNAADFYLISIANLR

SEQ ID NO: 75963 - protein, 29 aa, Artificial Sequence
  Cyclic GFR-binding peptide
  MOD_RES (26)..(27): Xaa is C or S
RYKKLIIQQKDNFYLMSIANMKTPTXXPG

SEQ ID NO: 75964 - protein, 22 aa, Artificial Sequence
  Cyclic GFR-binding peptide
ERYKKLTPVGMDDFYLVSIANL

SEQ ID NO: 75965 - protein, 36 aa, Artificial Sequence; identical to SEQ ID NO: 33343
  Cyclic GFR-binding peptide
  MOD_RES (30)..(31): Xaa is C or S

SEQ ID NO: 75966 - protein, 32 aa, Artificial Sequence; identical to SEQ ID NO: 2194
  Cyclic GFR-binding peptide
  MOD_RES (2)..(4): Xaa is C or S

SEQ ID NO: 75967 - protein, 33 aa, Artificial Sequence; identical to SEQ ID NO: 12736
  Cyclic GFR-binding peptide
  MOD_RES (30)..(31): Xaa is C or S

SEQ ID NO: 75968 - protein, 30 aa, Artificial Sequence
  Cyclic GFR-binding peptide
  MOD_RES (30)..(30): Xaa is C or S
VVMGRYKKLIIQQKDNFYLMSIANMKTPTX

SEQ ID NO: 75969 - protein, 29 aa, Artificial Sequence
  Cyclic GFR-binding peptide
  MOD_RES (1)..(1): Xaa is C or S
XSEVVMDRYKKLVVNNASDFYLISIANLR

SEQ ID NO: 75970 - protein, 39 aa, Artificial Sequence; identical to SEQ ID NO: 2205
  Cyclic GFR-binding peptide
  MOD_RES (1)..(33)..(34): Xaa is C or S

SEQ ID NO: 75971 - protein, 34 aa, Artificial Sequence; identical to SEQ ID NO: 33351
  Cyclic GFR-binding peptide
  MOD_RES (32)..(33): Xaa is C or S

SEQ ID NO: 75972 - protein, 40 aa, Artificial Sequence; identical to SEQ ID NO: 5025
  Cyclic GFR-binding peptide
  MOD_RES (2)..(4)..(36): Xaa is C or S

SEQ ID NO: 75973 - protein, 27 aa, Artificial Sequence
  Cyclic GFR-binding peptide
AEVVMDRYKKLVVNNAADFYLISIANL

SEQ ID NO: 75974 - protein, 33 aa, Artificial Sequence; identical to SEQ ID NO: 15502
  Cyclic GFR-binding peptide
  MOD_RES (2)..(2): Xaa is C or S

SEQ ID NO: 75975 - protein, 39 aa, Artificial Sequence; identical to SEQ ID NO: 5030
  Cyclic GFR-binding peptide
  MOD_RES (2)..(4)..(37)..(38): Xaa is C or S

SEQ ID NO: 75976 - protein, 32 aa, Artificial Sequence; identical to SEQ ID NO: 2212
  Cyclic GFR-binding peptide
  MOD_RES (1)..(3): Xaa is C or S

SEQ ID NO: 75977 - protein, 32 aa, Artificial Sequence; identical to SEQ ID NO: 2213
  Cyclic GFR-binding peptide
  MOD_RES (27)..(28): Xaa is C or S

SEQ ID NO: 75978 - protein, 38 aa, Artificial Sequence; identical to SEQ ID NO: 5032
  Cyclic GFR-binding peptide
  MOD_RES (1)..(3)..(35)..(36): Xaa is C or S

SEQ ID NO: 75979 - protein, 37 aa, Artificial Sequence; identical to SEQ ID NO: 5034
  Cyclic GFR-binding peptide
  MOD_RES (1)..(34)..(35): Xaa is C or S

SEQ ID NO: 75980 - protein, 36 aa, Artificial Sequence
  Cyclic GFR-binding peptide
  MOD_RES (30)..(31): Xaa is C or S
VVMGRYKKLIIQQKDNFYLMSIANMKTPTXXPGASG

SEQ ID NO: 75981 - protein, 32 aa, Artificial Sequence; identical to SEQ ID NO: 2217
  Cyclic GFR-binding peptide
  MOD_RES (29)..(30): Xaa is C or S

SEQ ID NO: 75982 - protein, 40 aa, Artificial Sequence; identical to SEQ ID NO: 5037
  Cyclic GFR-binding peptide
  MOD_RES (1)..(3)..(35)..(36): Xaa is C or S

SEQ ID NO: 75983 - protein, 30 aa, Artificial Sequence; identical to SEQ ID NO: 2231
  Cyclic GFR-binding peptide
  MOD_RES (2)..(4): Xaa is C or S

SEQ ID NO: 75984 - protein, 25 aa, Artificial Sequence
  Cyclic GFR-binding peptide
RYKKLVVNNAADFYLISIANLRAPV

SEQ ID NO: 75985 - protein, 27 aa, Artificial Sequence
  Cyclic GFR-binding peptide
VVMDRYKKLVVKENEDFYLMSIANLET

SEQ ID NO: 75986 - protein, 36 aa, Artificial Sequence; identical to SEQ ID NO: 2233
  Cyclic GFR-binding peptide
  MOD_RES (30)..(31): Xaa is C or S

SEQ ID NO: 75987 - protein, 34 aa, Artificial Sequence; identical to SEQ ID NO: 2236
  Cyclic GFR-binding peptide
  MOD_RES (29)..(30): Xaa is C or S

SEQ ID NO: 75988 - protein, 35 aa, Artificial Sequence; identical to SEQ ID NO: 30392
  Cyclic GFR-binding peptide
  MOD_RES (31)..(32): Xaa is C or S

SEQ ID NO: 75989 - protein, 33 aa, Artificial Sequence; identical to SEQ ID NO: 5049
  Cyclic GFR-binding peptide
  MOD_RES (32)..(32): Xaa is C or S

SEQ ID NO: 75990 - protein, 23 aa, Artificial Sequence
  Cyclic GFR-binding peptide
VMGRYKKLIIQQKDNFYLMSIAN

SEQ ID NO: 75991 - protein, 39 aa, Artificial Sequence; identical to SEQ ID NO: 30395
  Cyclic GFR-binding peptide
  MOD_RES (1)..(33)..(34): Xaa is C or S

SEQ ID NO: 75992 - protein, 22 aa, Artificial Sequence
  Cyclic GFR-binding peptide
MNRYKKLIVNSSDDFYLVSIAN

SEQ ID NO: 75993 - protein, 38 aa, Artificial Sequence; identical to SEQ ID NO: 5052
  Cyclic GFR-binding peptide
  MOD_RES (32)..(33): Xaa is C or S

SEQ ID NO: 75994 - protein, 29 aa, Artificial Sequence
  Cyclic GFR-binding peptide
ARVVMNRYKKLIVNSSDDFYLVSIANLQT

SEQ ID NO: 75995 - protein, 33 aa, Artificial Sequence; identical to SEQ ID NO: 2251
  Cyclic GFR-binding peptide
  MOD_RES (31)..(32): Xaa is C or S

SEQ ID NO: 75996 - protein, 33 aa, Artificial Sequence; identical to SEQ ID NO: 5057
  Cyclic GFR-binding peptide
  MOD_RES (1)..(3): Xaa is C or S

SEQ ID NO: 75997 - protein, 33 aa, Artificial Sequence; identical to SEQ ID NO: 33384
  Cyclic GFR-binding peptide
  MOD_RES (30)..(31): Xaa is C or S

SEQ ID NO: 75998 - protein, 36 aa, Artificial Sequence; identical to SEQ ID NO: 5058
  Cyclic GFR-binding peptide
  MOD_RES (30)..(31): Xaa is C or S

SEQ ID NO: 75999 - protein, 31 aa, Artificial Sequence
  Cyclic GFR-binding peptide
  MOD_RES (29)..(30): Xaa is C or S
VIMRYKKLLLVRGNDFYLMSIANTKVPAXXT

SEQ ID NO: 76000 - protein, 32 aa, Artificial Sequence; identical to SEQ ID NO: 2253
  Cyclic GFR-binding peptide
  MOD_RES (26)..(27): Xaa is C or S

SEQ ID NO: 76001 - protein, 26 aa, Artificial Sequence
  Cyclic GFR-binding peptide
DVVMGRYKKLIIQQKDNFYLMSIANM

SEQ ID NO: 76002 - protein, 31 aa, Artificial Sequence
  Cyclic GFR-binding peptide
  MOD_RES (30)..(31): Xaa is C or S
EVIMRYKKLLLVRGNDFYLMSIANTKVPAXX

SEQ ID NO: 76003 - protein, 37 aa, Artificial Sequence; identical to SEQ ID NO: 2258
  Cyclic GFR-binding peptide
  MOD_RES (2)..(4)..(36)..(37): Xaa is C or S

SEQ ID NO: 76004 - protein, 41 aa, Artificial Sequence; identical to SEQ ID NO: 30409
  Cyclic GFR-binding peptide
  MOD_RES (1)..(3)..(35)..(36): Xaa is C or S

SEQ ID NO: 76005 - protein, 31 aa, Artificial Sequence; identical to SEQ ID NO: 2262
  Cyclic GFR-binding peptide
  MOD_RES (2)..(4): Xaa is C or S

SEQ ID NO: 76006 - protein, 26 aa, Artificial Sequence
  Cyclic GFR-binding peptide
VVMNRYKKLIVNSSDDFYLVSIANLK

SEQ ID NO: 76007 - protein, 27 aa, Artificial Sequence
  Cyclic GFR-binding peptide
VMDRYKKLVVNNASDFYLISIANLRTP

SEQ ID NO: 76008 - protein, 35 aa, Artificial Sequence; identical to SEQ ID NO: 5073
  Cyclic GFR-binding peptide
  MOD_RES (1)..(3)..(35): Xaa is C or S

SEQ ID NO: 76009 - protein, 28 aa, Artificial Sequence
  Cyclic GFR-binding peptide
ESVAMGRYKKLYTVVGKDFYLISIANLK

SEQ ID NO: 76010 - protein, 34 aa, Artificial Sequence
  Cyclic GFR-binding peptide
  MOD_RES (29)..(30): Xaa is C or S
VIMRYKKLLLVRGNDFYLMSIANTKVPAXXTSPV

SEQ ID NO: 76011 - protein, 34 aa, Artificial Sequence; identical to SEQ ID NO: 2270
  Cyclic GFR-binding peptide
  MOD_RES (29)..(30): Xaa is C or S

SEQ ID NO: 76012 - protein, 28 aa, Artificial Sequence
  Cyclic GFR-binding peptide
RVVMNRYKKLIVNSSDDFYLVSIANLKT

SEQ ID NO: 76013 - protein, 25 aa, Artificial Sequence
  Cyclic GFR-binding peptide
DRYKKLVVKENEDFYLMSIANLETP

SEQ ID NO: 76014 - protein, 31 aa, Artificial Sequence; identical to SEQ ID NO: 12806
  Cyclic GFR-binding peptide
  MOD_RES (2)..(4): Xaa is C or S

SEQ ID NO: 76015 - protein, 36 aa, Artificial Sequence; identical to SEQ ID NO: 33413
  Cyclic GFR-binding peptide
  MOD_RES (1)..(33)..(34): Xaa is C or S

SEQ ID NO: 76016 - protein, 35 aa, Artificial Sequence; identical to SEQ ID NO: 5091
  Cyclic GFR-binding peptide
  MOD_RES (2)..(4): Xaa is C or S

SEQ ID NO: 76017 - protein, 34 aa, Artificial Sequence; identical to SEQ ID NO: 33418
  Cyclic GFR-binding peptide
  MOD_RES (28)..(29): Xaa is C or S

SEQ ID NO: 76018 - protein, 25 aa, Artificial Sequence
  Cyclic GFR-binding peptide
RYKKLIVNNSSDFYLVSIANLKTPA

SEQ ID NO: 76019 - protein, 30 aa, Artificial Sequence; identical to SEQ ID NO: 2279
  Cyclic GFR-binding peptide
  MOD_RES (30)..(30): Xaa is C or S

SEQ ID NO: 76020 - protein, 25 aa, Artificial Sequence
  Cyclic GFR-binding peptide
VIMRYKKLLLVRGNDFYLMSIANTK

SEQ ID NO: 76021 - protein, 32 aa, Artificial Sequence; identical to SEQ ID NO: 5100
  Cyclic GFR-binding peptide
  MOD_RES (26)..(27): Xaa is C or S

SEQ ID NO: 76022 - protein, 40 aa, Artificial Sequence; identical to SEQ ID NO: 12818
  Cyclic GFR-binding peptide
  MOD_RES (1)..(3)..(35)..(36): Xaa is C or S

SEQ ID NO: 76023 - protein, 36 aa, Artificial Sequence; identical to SEQ ID NO: 2285
  Cyclic GFR-binding peptide
  MOD_RES (2)..(4)..(36): Xaa is C or S

SEQ ID NO: 76024 - protein, 39 aa, Artificial Sequence; identical to SEQ ID NO: 5104
  Cyclic GFR-binding peptide
  MOD_RES (2)..(4)..(36)..(37): Xaa is C or S

SEQ ID NO: 76025 - protein, 38 aa, Artificial Sequence; identical to SEQ ID NO: 5105
  Cyclic GFR-binding peptide
  MOD_RES (1)..(33)..(34): Xaa is C or S

SEQ ID NO: 76026 - protein, 28 aa, Artificial Sequence
  Cyclic GFR-binding peptide
VMNRYKKLIVNSSDDFYLVSIANLQTPA

SEQ ID NO: 76027 - protein, 27 aa, Artificial Sequence
  Cyclic GFR-binding peptide
  MOD_RES (1)..(1): Xaa is C or S
XSRVVMNRYKKLIVNSSDDFYLVSIAN

SEQ ID NO: 76028 - protein, 29 aa, Artificial Sequence
  Cyclic GFR-binding peptide
  MOD_RES (1)..(1): Xaa is C or S
XAKVVMNRYKKLIVNNSSDFYLVSIANLK

SEQ ID NO: 76029 - protein, 31 aa, Artificial Sequence; identical to SEQ ID NO: 15590
  Cyclic GFR-binding peptide
  MOD_RES (1)..(1): Xaa is C or S

SEQ ID NO: 76030 - protein, 24 aa, Artificial Sequence
  Cyclic GFR-binding peptide
MNRYKKLIVNSSDDFYLVSIANLK

SEQ ID NO: 76031 - protein, 25 aa, Artificial Sequence
  Cyclic GFR-binding peptide
GRYKKLYTVVGKDFYLISIANLKTP

SEQ ID NO: 76032 - protein, 30 aa, Artificial Sequence; identical to SEQ ID NO: 15596
  Cyclic GFR-binding peptide

SEQ ID NO: 76033 - protein, 30 aa, Artificial Sequence; identical to SEQ ID NO: 33446
  Cyclic GFR-binding peptide
  MOD_RES (30)..(30): Xaa is C or S

SEQ ID NO: 76034 - protein, 32 aa, Artificial Sequence; identical to SEQ ID NO: 30451
  Cyclic GFR-binding peptide
  MOD_RES (27)..(28): Xaa is C or S

SEQ ID NO: 76035 - protein, 27 aa, Artificial Sequence
  Cyclic GFR-binding peptide
VMGRYKKLIIQQKDNFYLMSIANMKTP

SEQ ID NO: 76036 - protein, 30 aa, Artificial Sequence; identical to SEQ ID NO: 2311
  Cyclic GFR-binding peptide
  MOD_RES (1)..(1): Xaa is C or S

SEQ ID NO: 76037 - protein, 33 aa, Artificial Sequence; identical to SEQ ID NO: 12847
  Cyclic GFR-binding peptide
  MOD_RES (28)..(29): Xaa is C or S

SEQ ID NO: 76038 - protein, 22 aa, Artificial Sequence
  Cyclic GFR-binding peptide
NRYKKLIVNSSDDFYLVSIANL

SEQ ID NO: 76039 - protein, 27 aa, Artificial Sequence
  Cyclic GFR-binding peptide
VVMNRYKKLIVNSSDDFYLVSIANLKT

SEQ ID NO: 76040 - protein, 35 aa, Artificial Sequence; identical to SEQ ID NO: 2315
  Cyclic GFR-binding peptide
  MOD_RES (2)..(34)..(35): Xaa is C or S

SEQ ID NO: 76041 - protein, 30 aa, Artificial Sequence; identical to SEQ ID NO: 5122
  Cyclic GFR-binding peptide
  MOD_RES (1)..(1): Xaa is C or S

SEQ ID NO: 76042 - protein, 30 aa, Artificial Sequence; identical to SEQ ID NO: 5123
  Cyclic GFR-binding peptide
  MOD_RES (1)..(3): Xaa is C or S

SEQ ID NO: 76043 - protein, 27 aa, Artificial Sequence
  Cyclic GFR-binding peptide
  MOD_RES (1)..(1): Xaa is C or S
XGEVVMERYKKLVVKDYEDFYLMSIAN

SEQ ID NO: 76044 - protein, 27 aa, Artificial Sequence
  Cyclic GFR-binding peptide
VVMNRYKKLIVNNSSDFYLVSIANLKT

SEQ ID NO: 76045 - protein, 32 aa, Artificial Sequence; identical to SEQ ID NO: 2320
  Cyclic GFR-binding peptide
  MOD_RES (30)..(31): Xaa is C or S

SEQ ID NO: 76046 - protein, 33 aa, Artificial Sequence; identical to SEQ ID NO: 5134
  Cyclic GFR-binding peptide
  MOD_RES (1)..(33): Xaa is C or S

SEQ ID NO: 76047 - protein, 27 aa, Artificial Sequence
  Cyclic GFR-binding peptide
VMNRYKKLIVNSSDDFYLVSIANLKTP

SEQ ID NO: 76048 - protein, 24 aa, Artificial Sequence
  Cyclic GFR-binding peptide
VMDRYKKLVVNNASDFYLISIANL

SEQ ID NO: 76049 - protein, 34 aa, Artificial Sequence
  Cyclic GFR-binding peptide
  MOD_RES (31)..(32): Xaa is C or S
DVVMGRYKKLIIQQKDNFYLMSIANMKTPTXXPG

SEQ ID NO: 76050 - protein, 31 aa, Artificial Sequence; identical to SEQ ID NO: 5147
  Cyclic GFR-binding peptide
  MOD_RES (26)..(27): Xaa is C or S

SEQ ID NO: 76051 - protein, 32 aa, Artificial Sequence; identical to SEQ ID NO: 5149
  Cyclic GFR-binding peptide
  MOD_RES (27)..(28): Xaa is C or S

SEQ ID NO: 76052 - protein, 24 aa, Artificial Sequence
  Cyclic GFR-binding peptide
VVMDRYKKLVVNNASDFYLISIAN

SEQ ID NO: 76053 - protein, 21 aa, Artificial Sequence
  Cyclic GFR-binding peptide
DRYKKLVVNNASDFYLISIAN

SEQ ID NO: 76054 - protein, 32 aa, Artificial Sequence; identical to SEQ ID NO: 2334
  Cyclic GFR-binding peptide
  MOD_RES (2)..(2): Xaa is C or S

SEQ ID NO: 76055 - protein, 40 aa, Artificial Sequence; identical to SEQ ID NO: 2337
  Cyclic GFR-binding peptide
  MOD_RES (2)..(34)..(35): Xaa is C or S

SEQ ID NO: 76056 - protein, 30 aa, Artificial Sequence; identical to SEQ ID NO: 2340
  Cyclic GFR-binding peptide
  MOD_RES (26)..(27): Xaa is C or S

SEQ ID NO: 76057 - protein, 38 aa, Artificial Sequence; identical to SEQ ID NO: 5161
  Cyclic GFR-binding peptide
  MOD_RES (1)..(3)..(35)..(36): Xaa is C or S

SEQ ID NO: 76058 - protein, 30 aa, Artificial Sequence; identical to SEQ ID NO: 12881
  Cyclic GFR-binding peptide

SEQ ID NO: 76059 - protein, 24 aa, Artificial Sequence
  Cyclic GFR-binding peptide
MDRYKKLVVNNAADFYLISIANLR

SEQ ID NO: 76060 - protein, 31 aa, Artificial Sequence; identical to SEQ ID NO: 2346
  Cyclic GFR-binding peptide
  MOD_RES (2)..(2): Xaa is C or S

SEQ ID NO: 76061 - protein, 31 aa, Artificial Sequence; identical to SEQ ID NO: 15632
  Cyclic GFR-binding peptide

SEQ ID NO: 76062 - protein, 32 aa, Artificial Sequence
  Cyclic GFR-binding peptide
  MOD_RES (28)..(29): Xaa is C or S
MGRYKKLIIQQKDNFYLMSIANMKTPTXXPGA

SEQ ID NO: 76063 - protein, 33 aa, Artificial Sequence; identical to SEQ ID NO: 5170
  Cyclic GFR-binding peptide
  MOD_RES (32)..(33): Xaa is C or S

SEQ ID NO: 76064 - protein, 31 aa, Artificial Sequence; identical to SEQ ID NO: 30496
  Cyclic GFR-binding peptide
  MOD_RES (26)..(27): Xaa is C or S

SEQ ID NO: 76065 - protein, 22 aa, Artificial Sequence
  Cyclic GFR-binding peptide
RYKKLVVKDYEDFYLMSIANLE

SEQ ID NO: 76066 - protein, 41 aa, Artificial Sequence; identical to SEQ ID NO: 5182
  Cyclic GFR-binding peptide
  MOD_RES (1)..(3)..(35)..(36): Xaa is C or S

SEQ ID NO: 76067 - protein, 27 aa, Artificial Sequence
  Cyclic GFR-binding peptide
MNRYKKLIVNNSSDFYLVSIANLKTPA

SEQ ID NO: 76068 - protein, 31 aa, Artificial Sequence; identical to SEQ ID NO: 2364
  Cyclic GFR-binding peptide
  MOD_RES (28)..(29): Xaa is C or S

SEQ ID NO: 76069 - protein, 36 aa, Artificial Sequence
  Cyclic GFR-binding peptide
  MOD_RES (31)..(32): Xaa is C or S
DVVMGRYKKLIIQQKDNFYLMSIANMKTPTXXPGAS

SEQ ID NO: 76070 - protein, 40 aa, Artificial Sequence; identical to SEQ ID NO: 30516
  Cyclic GFR-binding peptide
  MOD_RES (1)..(3)..(35)..(36): Xaa is C or S

SEQ ID NO: 76071 - protein, 29 aa, Artificial Sequence
  Cyclic GFR-binding peptide
  MOD_RES (2)..(2): Xaa is C or S
GXEEVIMRYKKLLLVRGNDFYLMSIANTK

SEQ ID NO: 76072 - protein, 24 aa, Artificial Sequence
  Cyclic GFR-binding peptide
VAMGRYKKLYTVVGKDFYLISIAN

SEQ ID NO: 76073 - protein, 34 aa, Artificial Sequence; identical to SEQ ID NO: 2376
  Cyclic GFR-binding peptide
  MOD_RES (1)..(33): Xaa is C or S

SEQ ID NO: 76074 - protein, 35 aa, Artificial Sequence; identical to SEQ ID NO: 5197
  Cyclic GFR-binding peptide
  MOD_RES (33)..(34): Xaa is C or S

SEQ ID NO: 76075 - protein, 29 aa, Artificial Sequence
  Cyclic GFR-binding peptide
VVMGRYKKLIIQQKDNFYLMSIANMKTPT

SEQ ID NO: 76076 - protein, 35 aa, Artificial Sequence; identical to SEQ ID NO: 15666
  Cyclic GFR-binding peptide
  MOD_RES (29)..(30): Xaa is C or S

SEQ ID NO: 76077 - protein, 33 aa, Artificial Sequence; identical to SEQ ID NO: 5199
  Cyclic GFR-binding peptide
  MOD_RES (1)..(33): Xaa is C or S

SEQ ID NO: 76078 - protein, 26 aa, Artificial Sequence
  Cyclic GFR-binding peptide
VMERYKKLVVKDYEDFYLMSIANLET

SEQ ID NO: 76079 - protein, 29 aa, Artificial Sequence
  Cyclic GFR-binding peptide
RVVMNRYKKLIVNSSDDFYLVSIANLKTP

SEQ ID NO: 76080 - protein, 28 aa, Artificial Sequence
  Cyclic GFR-binding peptide
  MOD_RES (28)..(28): Xaa is C or S
IMRYKKLLLVRGNDFYLMSIANTKVPAX

SEQ ID NO: 76081 - protein, 25 aa, Artificial Sequence
  Cyclic GFR-binding peptide
VVMNRYKKLIVNSSDDFYLVSIANL

SEQ ID NO: 76082 - protein, 35 aa, Artificial Sequence; identical to SEQ ID NO: 33526
  Cyclic GFR-binding peptide
  MOD_RES (31)..(32): Xaa is C or S

SEQ ID NO: 76083 - protein, 35 aa, Artificial Sequence; identical to SEQ ID NO: 33527
  Cyclic GFR-binding peptide
  MOD_RES (30)..(31): Xaa is C or S

SEQ ID NO: 76084 - protein, 32 aa, Artificial Sequence; identical to SEQ ID NO: 30545
  Cyclic GFR-binding peptide
  MOD_RES (1)..(1): Xaa is C or S

SEQ ID NO: 76085 - protein, 39 aa, Artificial Sequence; identical to SEQ ID NO: 2394
  Cyclic GFR-binding peptide
  MOD_RES (1)..(33)..(34): Xaa is C or S

SEQ ID NO: 76086 - protein, 28 aa, Artificial Sequence
  Cyclic GFR-binding peptide
VMDRYKKLVVNNAADFYLISIANLRAPV

SEQ ID NO: 76087 - protein, 33 aa, Artificial Sequence
  Cyclic GFR-binding peptide
  MOD_RES (1)..(3): Xaa is C or S
XGXRDVVMGRYKKLIIQQKDNFYLMSIANMKTP

SEQ ID NO: 76088 - protein, 21 aa, Artificial Sequence
  Cyclic GFR-binding peptide
RYKKLTPVGMDDFYLVSIANL

SEQ ID NO: 76089 - protein, 24 aa, Artificial Sequence
  Cyclic GFR-binding peptide
DRYKKLVVKENEDFYLMSIANLET

SEQ ID NO: 76090 - protein, 37 aa, Artificial Sequence; identical to SEQ ID NO: 5214
  Cyclic GFR-binding peptide
  MOD_RES (2)..(34)..(35): Xaa is C or S

SEQ ID NO: 76091 - protein, 34 aa, Artificial Sequence; identical to SEQ ID NO: 2399
  Cyclic GFR-binding peptide
  MOD_RES (31)..(32): Xaa is C or S

SEQ ID NO: 76092 - protein, 35 aa, Artificial Sequence; identical to SEQ ID NO: 30557
  Cyclic GFR-binding peptide
  MOD_RES (30)..(31): Xaa is C or S

SEQ ID NO: 76093 - protein, 39 aa, Artificial Sequence; identical to SEQ ID NO: 2403
  Cyclic GFR-binding peptide
  MOD_RES (2)..(34)..(35): Xaa is C or S

SEQ ID NO: 76094 - protein, 42 aa, Artificial Sequence; identical to SEQ ID NO: 15700
  Cyclic GFR-binding peptide
  MOD_RES (2)..(4)..(36)..(37): Xaa is C or S

SEQ ID NO: 76095 - protein, 34 aa, Artificial Sequence; identical to SEQ ID NO: 30567
  Cyclic GFR-binding peptide
  MOD_RES (32)..(33): Xaa is C or S

SEQ ID NO: 76096 - protein, 33 aa, Artificial Sequence; identical to SEQ ID NO: 2410
  Cyclic GFR-binding peptide
  MOD_RES (2)..(2): Xaa is C or S

SEQ ID NO: 76097 - protein, 35 aa, Artificial Sequence
  Cyclic GFR-binding peptide
  MOD_RES (2)..(4): Xaa is C or S
SXGXRDVVMGRYKKLIIQQKDNFYLMSIANMKTPT

SEQ ID NO: 76098 - protein, 29 aa, Artificial Sequence
  Cyclic GFR-binding peptide
  MOD_RES (28)..(29): Xaa is C or S
MDRYKKLVVNNASDFYLISIANLRTPVXX

SEQ ID NO: 76099 - protein, 33 aa, Artificial Sequence; identical to SEQ ID NO: 33542
  Cyclic GFR-binding peptide
  MOD_RES (2)..(2): Xaa is C or S

SEQ ID NO: 76100 - protein, 35 aa, Artificial Sequence
  Cyclic GFR-binding peptide
  MOD_RES (32)..(33): Xaa is C or S
RDVVMGRYKKLIIQQKDNFYLMSIANMKTPTXXPG

SEQ ID NO: 76101 - protein, 35 aa, Artificial Sequence; identical to SEQ ID NO: 2419
  Cyclic GFR-binding peptide
  MOD_RES (31)..(32): Xaa is C or S

SEQ ID NO: 76102 - protein, 27 aa, Artificial Sequence
  Cyclic GFR-binding peptide
EVVMERYKKLVVKDYEDFYLMSIANLE

SEQ ID NO: 76103 - protein, 34 aa, Artificial Sequence; identical to SEQ ID NO: 2424
  Cyclic GFR-binding peptide
  MOD_RES (31)..(31): Xaa is C or S

SEQ ID NO: 76104 - protein, 28 aa, Artificial Sequence
  Cyclic GFR-binding peptide
  MOD_RES (27)..(28): Xaa is C or S
DRYKKLVVNNASDFYLISIANLRTPVXX

SEQ ID NO: 76105 - protein, 30 aa, Artificial Sequence; identical to SEQ ID NO: 5237
  Cyclic GFR-binding peptide
  MOD_RES (29)..(30): Xaa is C or S

SEQ ID NO: 76106 - protein, 37 aa, Artificial Sequence; identical to SEQ ID NO: 2427
  Cyclic GFR-binding peptide
  MOD_RES (1)..(33): Xaa is C or S

SEQ ID NO: 76107 - protein, 30 aa, Artificial Sequence
  Cyclic GFR-binding peptide
EEVIMRYKKLLLVRGNDFYLMSIANTKVPA

SEQ ID NO: 76108 - protein, 22 aa, Artificial Sequence
  Cyclic GFR-binding peptide
DRYKKLVVKENEDFYLMSIANL

SEQ ID NO: 76109 - protein, 31 aa, Artificial Sequence; identical to SEQ ID NO: 33554
  Cyclic GFR-binding peptide
  MOD_RES (28)..(29): Xaa is C or S

SEQ ID NO: 76110 - protein, 33 aa, Artificial Sequence
  Cyclic GFR-binding peptide
  MOD_RES (27)..(28): Xaa is C or S
GRYKKLIIQQKDNFYLMSIANMKTPTXXPGASG

SEQ ID NO: 76111 - protein, 29 aa, Artificial Sequence
  Cyclic GFR-binding peptide
  MOD_RES (29)..(29): Xaa is C or S
VMGRYKKLIIQQKDNFYLMSIANMKTPTX

SEQ ID NO: 76112 - protein, 32 aa, Artificial Sequence; identical to SEQ ID NO: 12967
  Cyclic GFR-binding peptide
  MOD_RES (1)..(1): Xaa is C or S

SEQ ID NO: 76113 - protein, 24 aa, Artificial Sequence
  Cyclic GFR-binding peptide
MNRYKKLIVNSSDDFYLVSIANLQ

SEQ ID NO: 76114 - protein, 29 aa, Artificial Sequence
  Cyclic GFR-binding peptide
  MOD_RES (28)..(29): Xaa is C or S
MDRYKKLVVKENEDFYLMSIANLETPVXX

SEQ ID NO: 76115 - protein, 39 aa, Artificial Sequence; identical to SEQ ID NO: 2432
  Cyclic GFR-binding peptide
  MOD_RES (1)..(3)..(35)..(36): Xaa is C or S

SEQ ID NO: 76116 - protein, 35 aa, Artificial Sequence; identical to SEQ ID NO: 2435
  Cyclic GFR-binding peptide
  MOD_RES (29)..(30): Xaa is C or S

SEQ ID NO: 76117 - protein, 32 aa, Artificial Sequence; identical to SEQ ID NO: 5247
  Cyclic GFR-binding peptide
  MOD_RES (28)..(29): Xaa is C or S

SEQ ID NO: 76118 - protein, 29 aa, Artificial Sequence
  Cyclic GFR-binding peptide
EVVMDRYKKLVVKENEDFYLMSIANLETP

SEQ ID NO: 76119 - protein, 30 aa, Artificial Sequence; identical to SEQ ID NO: 33564
  Cyclic GFR-binding peptide
  MOD_RES (1)..(3): Xaa is C or S

SEQ ID NO: 76120 - protein, 35 aa, Artificial Sequence; identical to SEQ ID NO: 30605
  Cyclic GFR-binding peptide
  MOD_RES (1)..(33)..(34): Xaa is C or S

SEQ ID NO: 76121 - protein, 33 aa, Artificial Sequence; identical to SEQ ID NO: 5252
  Cyclic GFR-binding peptide
  MOD_RES (28)..(29): Xaa is C or S

SEQ ID NO: 76122 - protein, 32 aa, Artificial Sequence; identical to SEQ ID NO: 33567
  Cyclic GFR-binding peptide
  MOD_RES (28)..(29): Xaa is C or S

SEQ ID NO: 76123 - protein, 31 aa, Artificial Sequence; identical to SEQ ID NO: 5254
  Cyclic GFR-binding peptide
  MOD_RES (31)..(31): Xaa is C or S

SEQ ID NO: 76124 - protein, 37 aa, Artificial Sequence
  Cyclic GFR-binding peptide
  MOD_RES (1)..(33)..(34): Xaa is C or S
XRDVVMGRYKKLIIQQKDNFYLMSIANMKTPTXXPGA

SEQ ID NO: 76125 - protein, 23 aa, Artificial Sequence
  Cyclic GFR-binding peptide
MERYKKLVVKDYEDFYLMSIANL

SEQ ID NO: 76126 - protein, 33 aa, Artificial Sequence; identical to SEQ ID NO: 5262
  Cyclic GFR-binding peptide
  MOD_RES (2)..(4): Xaa is C or S

SEQ ID NO: 76127 - protein, 40 aa, Artificial Sequence; identical to SEQ ID NO: 2444
  Cyclic GFR-binding peptide
  MOD_RES (1)..(3)..(35)..(36): Xaa is C or S

SEQ ID NO: 76128 - protein, 35 aa, Artificial Sequence; identical to SEQ ID NO: 12994
  Cyclic GFR-binding peptide
  MOD_RES (31)..(32): Xaa is C or S

SEQ ID NO: 76129 - protein, 29 aa, Artificial Sequence
  Cyclic GFR-binding peptide
VVMERYKKLVVKDYEDFYLMSIANLETPV

SEQ ID NO: 76130 - protein, 24 aa, Artificial Sequence
  Cyclic GFR-binding peptide
MNRYKKLIVNNSSDFYLVSIANLK

SEQ ID NO: 76131 - protein, 28 aa, Artificial Sequence
  Cyclic GFR-binding peptide
VVMERYKKLVVKDYEDFYLMSIANLETP

SEQ ID NO: 76132 - protein, 29 aa, Artificial Sequence
  Cyclic GFR-binding peptide
  MOD_RES (2)..(2): Xaa is C or S
GXGEVVMERYKKLVVKDYEDFYLMSIANL

SEQ ID NO: 76133 - protein, 32 aa, Artificial Sequence; identical to SEQ ID NO: 2448
  Cyclic GFR-binding peptide
  MOD_RES (28)..(29): Xaa is C or S

SEQ ID NO: 76134 - protein, 32 aa, Artificial Sequence; identical to SEQ ID NO: 2449
  Cyclic GFR-binding peptide
  MOD_RES (30)..(31): Xaa is C or S

SEQ ID NO: 76135 - protein, 32 aa, Artificial Sequence; identical to SEQ ID NO: 2459
  Cyclic GFR-binding peptide
  MOD_RES (1)..(1): Xaa is C or S

SEQ ID NO: 76136 - protein, 30 aa, Artificial Sequence; identical to SEQ ID NO: 33595
  Cyclic GFR-binding peptide
  MOD_RES (1)..(3): Xaa is C or S

SEQ ID NO: 76137 - protein, 42 aa, Artificial Sequence; identical to SEQ ID NO: 2461
  Cyclic GFR-binding peptide
  MOD_RES (2)..(4)..(36): Xaa is C or S

SEQ ID NO: 76138 - protein, 40 aa, Artificial Sequence; identical to SEQ ID NO: 2462
  Cyclic GFR-binding peptide
  MOD_RES (2)..(34)..(35): Xaa is C or S

SEQ ID NO: 76139 - protein, 32 aa, Artificial Sequence; identical to SEQ ID NO: 5296
  Cyclic GFR-binding peptide
  MOD_RES (1)..(3): Xaa is C or S

SEQ ID NO: 76140 - protein, 38 aa, Artificial Sequence; identical to SEQ ID NO: 30649
  Cyclic GFR-binding peptide
  MOD_RES (2)..(4)..(36)..(37): Xaa is C or S

SEQ ID NO: 76141 - protein, 36 aa, Artificial Sequence; identical to SEQ ID NO: 5299
  Cyclic GFR-binding peptide
  MOD_RES (32)..(33): Xaa is C or S

SEQ ID NO: 76142 - protein, 32 aa, Artificial Sequence; identical to SEQ ID NO: 30651
  Cyclic GFR-binding peptide
  MOD_RES (1)..(3): Xaa is C or S

SEQ ID NO: 76143 - protein, 24 aa, Artificial Sequence
  Cyclic GFR-binding peptide
GRYKKLYTVVGKDFYLISIANLKT

SEQ ID NO: 76144 - protein, 35 aa, Artificial Sequence; identical to SEQ ID NO: 30653
  Cyclic GFR-binding peptide
  MOD_RES (1)..(33)..(34): Xaa is C or S

SEQ ID NO: 76145 - protein, 26 aa, Artificial Sequence
  Cyclic GFR-binding peptide
DRYKKLVVNNAADFYLISIANLRAPV

SEQ ID NO: 76146 - protein, 32 aa, Artificial Sequence; identical to SEQ ID NO: 2473
  Cyclic GFR-binding peptide
  MOD_RES (28)..(29): Xaa is C or S

SEQ ID NO: 76147 - protein, 35 aa, Artificial Sequence; identical to SEQ ID NO: 2475
  Cyclic GFR-binding peptide
  MOD_RES (29)..(30): Xaa is C or S

SEQ ID NO: 76148 - protein, 43 aa, Artificial Sequence; identical to SEQ ID NO: 2476
  Cyclic GFR-binding peptide
  MOD_RES (2)..(4)..(37)..(38): Xaa is C or S

SEQ ID NO: 76149 - protein, 34 aa, Artificial Sequence; identical to SEQ ID NO: 30668
  Cyclic GFR-binding peptide
  MOD_RES (31)..(32): Xaa is C or S

SEQ ID NO: 76150 - protein, 38 aa, Artificial Sequence
  Cyclic GFR-binding peptide
  MOD_RES (2)..(4)..(35)..(36): Xaa is C or S
LXGXEEVIMRYKKLLLVRGNDFYLMSIANTKVPAXXTS

SEQ ID NO: 76151 - protein, 38 aa, Artificial Sequence; identical to SEQ ID NO: 30669
  Cyclic GFR-binding peptide
  MOD_RES (2)..(34)..(35): Xaa is C or S

SEQ ID NO: 76152 - protein, 34 aa, Artificial Sequence
  Cyclic GFR-binding peptide
  MOD_RES (2)..(4): Xaa is C or S
SXGXRDVVMGRYKKLIIQQKDNFYLMSIANMKTP

SEQ ID NO: 76153 - protein, 30 aa, Artificial Sequence; identical to SEQ ID NO: 2485
  Cyclic GFR-binding peptide
  MOD_RES (30)..(30): Xaa is C or S

SEQ ID NO: 76154 - protein, 31 aa, Artificial Sequence
  Cyclic GFR-binding peptide
RDVVMGRYKKLIIQQKDNFYLMSIANMKTPT

SEQ ID NO: 76155 - protein, 33 aa, Artificial Sequence; identical to SEQ ID NO: 2486
  Cyclic GFR-binding peptide
  MOD_RES (30)..(31): Xaa is C or S

SEQ ID NO: 76156 - protein, 28 aa, Artificial Sequence
  Cyclic GFR-binding peptide
EVVMDRYKKLVVKENEDFYLMSIANLET

SEQ ID NO: 76157 - protein, 33 aa, Artificial Sequence; identical to SEQ ID NO: 2492
  Cyclic GFR-binding peptide
  MOD_RES (1)..(3): Xaa is C or S

SEQ ID NO: 76158 - protein, 38 aa, Artificial Sequence; identical to SEQ ID NO: 2498
  Cyclic GFR-binding peptide
  MOD_RES (1)..(3)..(35)..(36): Xaa is C or S

SEQ ID NO: 76159 - protein, 30 aa, Artificial Sequence
  Cyclic GFR-binding peptide
  MOD_RES (2)..(2): Xaa is C or S
GXEEVIMRYKKLLLVRGNDFYLMSIANTKV

SEQ ID NO: 76160 - protein, 33 aa, Artificial Sequence; identical to SEQ ID NO: 33641
  Cyclic GFR-binding peptide
  MOD_RES (29)..(30): Xaa is C or S

SEQ ID NO: 76161 - protein, 31 aa, Artificial Sequence; identical to SEQ ID NO: 2502
  Cyclic GFR-binding peptide
  MOD_RES (29)..(29): Xaa is C or S

SEQ ID NO: 76162 - protein, 38 aa, Artificial Sequence; identical to SEQ ID NO: 33644
  Cyclic GFR-binding peptide
  MOD_RES (1)..(33)..(34): Xaa is C or S

SEQ ID NO: 76163 - protein, 28 aa, Artificial Sequence
  Cyclic GFR-binding peptide
AKVVMNRYKKLIVNNSSDFYLVSIANLK

SEQ ID NO: 76164 - protein, 24 aa, Artificial Sequence
  Cyclic GFR-binding peptide
RYKKLIVNNSSDFYLVSIANLKTP

SEQ ID NO: 76165 - protein, 31 aa, Artificial Sequence; identical to SEQ ID NO: 2512
  Cyclic GFR-binding peptide
  MOD_RES (30)..(31): Xaa is C or S

SEQ ID NO: 76166 - protein, 22 aa, Artificial Sequence
  Cyclic GFR-binding peptide
DRYKKLVVNNAADFYLISIANL

SEQ ID NO: 76167 - protein, 25 aa, Artificial Sequence
  Cyclic GFR-binding peptide
RYKKLIVNSSDDFYLVSIANLQTPA

SEQ ID NO: 76168 - protein, 34 aa, Artificial Sequence; identical to SEQ ID NO: 33658
  Cyclic GFR-binding peptide
  MOD_RES (1)..(3): Xaa is C or S

SEQ ID NO: 76169 - protein, 31 aa, Artificial Sequence; identical to SEQ ID NO: 33664
  Cyclic GFR-binding peptide
  MOD_RES (29)..(30): Xaa is C or S

SEQ ID NO: 76170 - protein, 31 aa, Artificial Sequence; identical to SEQ ID NO: 5363
  Cyclic GFR-binding peptide
  MOD_RES (1)..(3): Xaa is C or S

SEQ ID NO: 76171 - protein, 37 aa, Artificial Sequence; identical to SEQ ID NO: 2521
  Cyclic GFR-binding peptide
  MOD_RES (2)..(4)..(37): Xaa is C or S

SEQ ID NO: 76172 - protein, 33 aa, Artificial Sequence; identical to SEQ ID NO: 2526
  Cyclic GFR-binding peptide
  MOD_RES (27)..(28): Xaa is C or S

SEQ ID NO: 76173 - protein, 21 aa, Artificial Sequence
  Cyclic GFR-binding peptide
RYKKLIVNSSDDFYLVSIANL

SEQ ID NO: 76174 - protein, 35 aa, Artificial Sequence; identical to SEQ ID NO: 2538
  Cyclic GFR-binding peptide
  MOD_RES (2)..(4): Xaa is C or S

SEQ ID NO: 76175 - protein, 36 aa, Artificial Sequence; identical to SEQ ID NO: 33679
  Cyclic GFR-binding peptide
  MOD_RES (1)..(33)..(34): Xaa is C or S

SEQ ID NO: 76176 - protein, 33 aa, Artificial Sequence; identical to SEQ ID NO: 13094
  Cyclic GFR-binding peptide
  MOD_RES (32)..(33): Xaa is C or S

SEQ ID NO: 76177 - protein, 20 aa, Artificial Sequence
  Cyclic GFR-binding peptide
RYKKLLLVRGNDFYLMSIAN

SEQ ID NO: 76178 - protein, 32 aa, Artificial Sequence; identical to SEQ ID NO: 5378
  Cyclic GFR-binding peptide
  MOD_RES (2)..(2): Xaa is C or S

SEQ ID NO: 76179 - protein, 30 aa, Artificial Sequence; identical to SEQ ID NO: 30734
  Cyclic GFR-binding peptide
  MOD_RES (28)..(29): Xaa is C or S

SEQ ID NO: 76180 - protein, 24 aa, Artificial Sequence
  Cyclic GFR-binding peptide
VVMGRYKKLIIQQKDNFYLMSIAN

SEQ ID NO: 76181 - protein, 35 aa, Artificial Sequence; identical to SEQ ID NO: 5382
  Cyclic GFR-binding peptide
  MOD_RES (32)..(32): Xaa is C or S

SEQ ID NO: 76182 - protein, 32 aa, Artificial Sequence
  Cyclic GFR-binding peptide
  MOD_RES (31)..(32): Xaa is C or S
DVVMGRYKKLIIQQKDNFYLMSIANMKTPTXX

SEQ ID NO: 76183 - protein, 35 aa, Artificial Sequence; identical to SEQ ID NO: 5385
  Cyclic GFR-binding peptide
  MOD_RES (31)..(32): Xaa is C or S

SEQ ID NO: 76184 - protein, 39 aa, Artificial Sequence
  Cyclic GFR-binding peptide
  MOD_RES (1)..(3)..(35)..(36): Xaa is C or S
XGXRDVVMGRYKKLIIQQKDNFYLMSIANMKTPTXXPGA

SEQ ID NO: 76185 - protein, 31 aa, Artificial Sequence; identical to SEQ ID NO: 5387
  Cyclic GFR-binding peptide
  MOD_RES (28)..(29): Xaa is C or S

SEQ ID NO: 76186 - protein, 27 aa, Artificial Sequence
  Cyclic GFR-binding peptide
MDRYKKLVVNNAADFYLISIANLRAPV

SEQ ID NO: 76187 - protein, 39 aa, Artificial Sequence; identical to SEQ ID NO: 5389
  Cyclic GFR-binding peptide
  MOD_RES (1)..(3)..(36)..(37): Xaa is C or S

SEQ ID NO: 76188 - protein, 40 aa, Artificial Sequence; identical to SEQ ID NO: 30747
  Cyclic GFR-binding peptide
  MOD_RES (2)..(34)..(35): Xaa is C or S

SEQ ID NO: 76189 - protein, 32 aa, Artificial Sequence; identical to SEQ ID NO: 30749
  Cyclic GFR-binding peptide
  MOD_RES (1)..(3): Xaa is C or S

SEQ ID NO: 76190 - protein, 30 aa, Artificial Sequence; identical to SEQ ID NO: 2563
  Cyclic GFR-binding peptide
  MOD_RES (2)..(4): Xaa is C or S

SEQ ID NO: 76191 - protein, 28 aa, Artificial Sequence
  Cyclic GFR-binding peptide
  MOD_RES (27)..(28): Xaa is C or S
GRYKKLYTVVGKDFYLISIANLKTPVXX

SEQ ID NO: 76192 - protein, 38 aa, Artificial Sequence; identical to SEQ ID NO: 15860
  Cyclic GFR-binding peptide
  MOD_RES (2)..(34)..(35): Xaa is C or S

SEQ ID NO: 76193 - protein, 26 aa, Artificial Sequence
  Cyclic GFR-binding peptide
ESVAMGRYKKLYTVVGKDFYLISIAN

SEQ ID NO: 76194 - protein, 22 aa, Artificial Sequence
  Cyclic GFR-binding peptide
RYKKLLLVRGNDFYLMSIANTK

SEQ ID NO: 76195 - protein, 35 aa, Artificial Sequence; identical to SEQ ID NO: 5410
  Cyclic GFR-binding peptide
  MOD_RES (2)..(4): Xaa is C or S

SEQ ID NO: 76196 - protein, 41 aa, Artificial Sequence; identical to SEQ ID NO: 2573
  Cyclic GFR-binding peptide
  MOD_RES (1)..(3)..(36)..(37): Xaa is C or S

SEQ ID NO: 76197 - protein, 35 aa, Artificial Sequence; identical to SEQ ID NO: 5411
  Cyclic GFR-binding peptide
  MOD_RES (30)..(30): Xaa is C or S

SEQ ID NO: 76198 - protein, 33 aa, Artificial Sequence; identical to SEQ ID NO: 2574
  Cyclic GFR-binding peptide
  MOD_RES (30)..(30): Xaa is C or S

SEQ ID NO: 76199 - protein, 30 aa, Artificial Sequence; identical to SEQ ID NO: 2575
  Cyclic GFR-binding peptide
  MOD_RES (28)..(29): Xaa is C or S

SEQ ID NO: 76200 - protein, 35 aa, Artificial Sequence
  Cyclic GFR-binding peptide
  MOD_RES (29)..(30): Xaa is C or S
VMGRYKKLIIQQKDNFYLMSIANMKTPTXXPGASG

SEQ ID NO: 76201 - protein, 36 aa, Artificial Sequence; identical to SEQ ID NO: 30767
  Cyclic GFR-binding peptide
  MOD_RES (32)..(33): Xaa is C or S

SEQ ID NO: 76202 - protein, 34 aa, Artificial Sequence; identical to SEQ ID NO: 2579
  Cyclic GFR-binding peptide
  MOD_RES (2)..(4): Xaa is C or S

SEQ ID NO: 76203 - protein, 27 aa, Artificial Sequence
  Cyclic GFR-binding peptide
  MOD_RES (1)..(1): Xaa is C or S
XAEVVMDRYKKLVVNNAADFYLISIAN

SEQ ID NO: 76204 - protein, 23 aa, Artificial Sequence
  Cyclic GFR-binding peptide
IMRYKKLLLVRGNDFYLMSIANT

SEQ ID NO: 76205 - protein, 28 aa, Artificial Sequence
  Cyclic GFR-binding peptide
  MOD_RES (26)..(27): Xaa is C or S
RYKKLIVNNSSDFYLVSIANLKTPAXXA

SEQ ID NO: 76206 - protein, 38 aa, Artificial Sequence; identical to SEQ ID NO: 2592
  Cyclic GFR-binding peptide
  MOD_RES (1)..(34)..(35): Xaa is C or S

SEQ ID NO: 76207 - protein, 41 aa, Artificial Sequence; identical to SEQ ID NO: 2594
  Cyclic GFR-binding peptide
  MOD_RES (1)..(3)..(35)..(36): Xaa is C or S

SEQ ID NO: 76208 - protein, 25 aa, Artificial Sequence
  Cyclic GFR-binding peptide
VVMDRYKKLVVNNASDFYLISIANL

SEQ ID NO: 76209 - protein, 29 aa, Artificial Sequence
  Cyclic GFR-binding peptide
  MOD_RES (29)..(29): Xaa is C or S
VMNRYKKLIVNSSDDFYLVSIANLKTPAX

SEQ ID NO: 76210 - protein, 31 aa, Artificial Sequence; identical to SEQ ID NO: 2600
  Cyclic GFR-binding peptide

SEQ ID NO: 76211 - protein, 30 aa, Artificial Sequence; identical to SEQ ID NO: 2602
  Cyclic GFR-binding peptide
  MOD_RES (27)..(27): Xaa is C or S

SEQ ID NO: 76212 - protein, 36 aa, Artificial Sequence; identical to SEQ ID NO: 33752
  Cyclic GFR-binding peptide
  MOD_RES (32)..(33): Xaa is C or S

SEQ ID NO: 76213 - protein, 32 aa, Artificial Sequence; identical to SEQ ID NO: 33756
  Cyclic GFR-binding peptide
  MOD_RES (32)..(32): Xaa is C or S

SEQ ID NO: 76214 - protein, 33 aa, Artificial Sequence; identical to SEQ ID NO: 5442
  Cyclic GFR-binding peptide
  MOD_RES (30)..(31): Xaa is C or S

SEQ ID NO: 76215 - protein, 30 aa, Artificial Sequence; identical to SEQ ID NO: 5443
  Cyclic GFR-binding peptide
  MOD_RES (1)..(3): Xaa is C or S

SEQ ID NO: 76216 - protein, 25 aa, Artificial Sequence
  Cyclic GFR-binding peptide
SVAMGRYKKLYTVVGKDFYLISIAN

SEQ ID NO: 76217 - protein, 36 aa, Artificial Sequence; identical to SEQ ID NO: 30812
  Cyclic GFR-binding peptide
  MOD_RES (31)..(32): Xaa is C or S

SEQ ID NO: 76218 - protein, 27 aa, Artificial Sequence
  Cyclic GFR-binding peptide
MGERYKKLTPVGMDDFYLVSIANLKTP

SEQ ID NO: 76219 - protein, 33 aa, Artificial Sequence; identical to SEQ ID NO: 5453
  Cyclic GFR-binding peptide
  MOD_RES (28)..(29): Xaa is C or S

SEQ ID NO: 76220 - protein, 37 aa, Artificial Sequence
  Cyclic GFR-binding peptide
  MOD_RES (2)..(4)..(35)..(36): Xaa is C or S
LXGXEEVIMRYKKLLLVRGNDFYLMSIANTKVPAXXT

SEQ ID NO: 76221 - protein, 35 aa, Artificial Sequence; identical to SEQ ID NO: 2620
  Cyclic GFR-binding peptide
  MOD_RES (2)..(35): Xaa is C or S

SEQ ID NO: 76222 - protein, 31 aa, Artificial Sequence; identical to SEQ ID NO: 2625
  Cyclic GFR-binding peptide
  MOD_RES (2)..(2): Xaa is C or S

SEQ ID NO: 76223 - protein, 33 aa, Artificial Sequence; identical to SEQ ID NO: 2627
  Cyclic GFR-binding peptide
  MOD_RES (2)..(2): Xaa is C or S

SEQ ID NO: 76224 - protein, 33 aa, Artificial Sequence; identical to SEQ ID NO: 2628
  Cyclic GFR-binding peptide
  MOD_RES (1)..(33): Xaa is C or S

SEQ ID NO: 76225 - protein, 31 aa, Artificial Sequence; identical to SEQ ID NO: 2630
  Cyclic GFR-binding peptide
  MOD_RES (2)..(2): Xaa is C or S

SEQ ID NO: 76226 - protein, 34 aa, Artificial Sequence; identical to SEQ ID NO: 5462
  Cyclic GFR-binding peptide
  MOD_RES (28)..(29): Xaa is C or S

SEQ ID NO: 76227 - protein, 32 aa, Artificial Sequence; identical to SEQ ID NO: 2632
  Cyclic GFR-binding peptide
  MOD_RES (27)..(28): Xaa is C or S

SEQ ID NO: 76228 - protein, 34 aa, Artificial Sequence; identical to SEQ ID NO: 2634
  Cyclic GFR-binding peptide
  MOD_RES (1)..(33)..(34): Xaa is C or S

SEQ ID NO: 76229 - protein, 39 aa, Artificial Sequence; identical to SEQ ID NO: 2635
  Cyclic GFR-binding peptide
  MOD_RES (33)..(34): Xaa is C or S

SEQ ID NO: 76230 - protein, 30 aa, Artificial Sequence
  Cyclic GFR-binding peptide
  MOD_RES (28)..(29): Xaa is C or S
IMRYKKLLLVRGNDFYLMSIANTKVPAXXT

SEQ ID NO: 76231 - protein, 30 aa, Artificial Sequence
  Cyclic GFR-binding peptide
  MOD_RES (2)..(4): Xaa is C or S
LXGXEEVIMRYKKLLLVRGNDFYLMSIANT

SEQ ID NO: 76232 - protein, 26 aa, Artificial Sequence
  Cyclic GFR-binding peptide
SVAMGRYKKLYTVVGKDFYLISIANL

SEQ ID NO: 76233 - protein, 33 aa, Artificial Sequence; identical to SEQ ID NO: 33788
  Cyclic GFR-binding peptide
  MOD_RES (2)..(4): Xaa is C or S

SEQ ID NO: 76234 - protein, 24 aa, Artificial Sequence
  Cyclic GFR-binding peptide
EVIMRYKKLLLVRGNDFYLMSIAN

SEQ ID NO: 76235 - protein, 26 aa, Artificial Sequence
  Cyclic GFR-binding peptide
VMDRYKKLVVKENEDFYLMSIANLET

SEQ ID NO: 76236 - protein, 28 aa, Artificial Sequence
  Cyclic GFR-binding peptide
  MOD_RES (27)..(28): Xaa is C or S
NRYKKLIVNSSDDFYLVSIANLQTPAXX

SEQ ID NO: 76237 - protein, 28 aa, Artificial Sequence
  Cyclic GFR-binding peptide
  MOD_RES (1)..(1): Xaa is C or S
XSRVVMNRYKKLIVNSSDDFYLVSIANL

SEQ ID NO: 76238 - protein, 27 aa, Artificial Sequence
  Cyclic GFR-binding peptide
VMNRYKKLIVNNSSDFYLVSIANLKTP

SEQ ID NO: 76239 - protein, 26 aa, Artificial Sequence
  Cyclic GFR-binding peptide
AMGRYKKLYTVVGKDFYLISIANLKT

SEQ ID NO: 76240 - protein, 34 aa, Artificial Sequence
  Cyclic GFR-binding peptide
  MOD_RES (2)..(34): Xaa is C or S
GXRDVVMGRYKKLIIQQKDNFYLMSIANMKTPTX

SEQ ID NO: 76241 - protein, 38 aa, Artificial Sequence; identical to SEQ ID NO: 2655
  Cyclic GFR-binding peptide
  MOD_RES (1)..(33)..(34): Xaa is C or S

SEQ ID NO: 76242 - protein, 32 aa, Artificial Sequence; identical to SEQ ID NO: 2658
  Cyclic GFR-binding peptide
  MOD_RES (28)..(29): Xaa is C or S

SEQ ID NO: 76243 - protein, 37 aa, Artificial Sequence
  Cyclic GFR-binding peptide
  MOD_RES (2)..(33)..(34): Xaa is C or S
GXEEVIMRYKKLLLVRGNDFYLMSIANTKVPAXXTSP

SEQ ID NO: 76244 - protein, 21 aa, Artificial Sequence
  Cyclic GFR-binding peptide
MRYKKLLLVRGNDFYLMSIAN

SEQ ID NO: 76245 - protein, 26 aa, Artificial Sequence
  Cyclic GFR-binding peptide
VMNRYKKLIVNSSDDFYLVSIANLQT

SEQ ID NO: 76246 - protein, 34 aa, Artificial Sequence; identical to SEQ ID NO: 15945
  Cyclic GFR-binding peptide
  MOD_RES (2)..(34): Xaa is C or S

SEQ ID NO: 76247 - protein, 31 aa, Artificial Sequence; identical to SEQ ID NO: 33813
  Cyclic GFR-binding peptide
  MOD_RES (1)..(1): Xaa is C or S

SEQ ID NO: 76248 - protein, 28 aa, Artificial Sequence
  Cyclic GFR-binding peptide
RDVVMGRYKKLIIQQKDNFYLMSIANMK

SEQ ID NO: 76249 - protein, 33 aa, Artificial Sequence
  Cyclic GFR-binding peptide
  MOD_RES (30)..(31): Xaa is C or S
EVIMRYKKLLLVRGNDFYLMSIANTKVPAXXTS

SEQ ID NO: 76250 - protein, 26 aa, Artificial Sequence
  Cyclic GFR-binding peptide
  MOD_RES (26)..(26): Xaa is C or S
RYKKLVVNNAADFYLISIANLRAPVX

SEQ ID NO: 76251 - protein, 34 aa, Artificial Sequence
  Cyclic GFR-binding peptide
  MOD_RES (2)..(33)..(34): Xaa is C or S
GXEEVIMRYKKLLLVRGNDFYLMSIANTKVPAXX

SEQ ID NO: 76252 - protein, 31 aa, Artificial Sequence; identical to SEQ ID NO: 2675
  Cyclic GFR-binding peptide
  MOD_RES (30)..(31): Xaa is C or S

SEQ ID NO: 76253 - protein, 33 aa, Artificial Sequence
  Cyclic GFR-binding peptide
  MOD_RES (32)..(33): Xaa is C or S
RDVVMGRYKKLIIQQKDNFYLMSIANMKTPTXX

SEQ ID NO: 76254 - protein, 31 aa, Artificial Sequence
  Cyclic GFR-binding peptide
  MOD_RES (29)..(30): Xaa is C or S
VMGRYKKLIIQQKDNFYLMSIANMKTPTXXP

SEQ ID NO: 76255 - protein, 30 aa, Artificial Sequence; identical to SEQ ID NO: 33830
  Cyclic GFR-binding peptide
  MOD_RES (29)..(30): Xaa is C or S

SEQ ID NO: 76256 - protein, 25 aa, Artificial Sequence
  Cyclic GFR-binding peptide
DVVMGRYKKLIIQQKDNFYLMSIAN

SEQ ID NO: 76257 - protein, 36 aa, Artificial Sequence
  Cyclic GFR-binding peptide
  MOD_RES (32)..(33): Xaa is C or S
RDVVMGRYKKLIIQQKDNFYLMSIANMKTPTXXPGA

SEQ ID NO: 76258 - protein, 32 aa, Artificial Sequence; identical to SEQ ID NO: 2685
  Cyclic GFR-binding peptide
  MOD_RES (28)..(29): Xaa is C or S

SEQ ID NO: 76259 - protein, 24 aa, Artificial Sequence
  Cyclic GFR-binding peptide
MGERYKKLTPVGMDDFYLVSIANL

SEQ ID NO: 76260 - protein, 26 aa, Artificial Sequence
  Cyclic GFR-binding peptide
DRYKKLVVKENEDFYLMSIANLETPV

SEQ ID NO: 76261 - protein, 36 aa, Artificial Sequence; identical to SEQ ID NO: 5521
  Cyclic GFR-binding peptide
  MOD_RES (2)..(4)..(36): Xaa is C or S

SEQ ID NO: 76262 - protein, 40 aa, Artificial Sequence; identical to SEQ ID NO: 30893
  Cyclic GFR-binding peptide
  MOD_RES (2)..(34)..(35): Xaa is C or S

SEQ ID NO: 76263 - protein, 31 aa, Artificial Sequence; identical to SEQ ID NO: 5522
  Cyclic GFR-binding peptide
  MOD_RES (1)..(3): Xaa is C or S

SEQ ID NO: 76264 - protein, 37 aa, Artificial Sequence; identical to SEQ ID NO: 5527
  Cyclic GFR-binding peptide
  MOD_RES (31)..(32): Xaa is C or S

SEQ ID NO: 76265 - protein, 41 aa, Artificial Sequence; identical to SEQ ID NO: 2695
  Cyclic GFR-binding peptide
  MOD_RES (1)..(3)..(35)..(36): Xaa is C or S

SEQ ID NO: 76266 - protein, 37 aa, Artificial Sequence; identical to SEQ ID NO: 2701
  Cyclic GFR-binding peptide
  MOD_RES (2)..(4)..(36): Xaa is C or S

SEQ ID NO: 76267 - protein, 24 aa, Artificial Sequence
  Cyclic GFR-binding peptide
VVMNRYKKLIVNNSSDFYLVSIAN

SEQ ID NO: 76268 - protein, 24 aa, Artificial Sequence
  Cyclic GFR-binding peptide
MDRYKKLVVKENEDFYLMSIANLE

SEQ ID NO: 76269 - protein, 33 aa, Artificial Sequence
  Cyclic GFR-binding peptide
  MOD_RES (1)..(33): Xaa is C or S
XRDVVMGRYKKLIIQQKDNFYLMSIANMKTPTX

SEQ ID NO: 76270 - protein, 29 aa, Artificial Sequence
  Cyclic GFR-binding peptide
  MOD_RES (26)..(26): Xaa is C or S
RYKKLIVNSSDDFYLVSIANLKTPAXTPK

SEQ ID NO: 76271 - protein, 28 aa, Artificial Sequence
  Cyclic GFR-binding peptide
  MOD_RES (2)..(2): Xaa is C or S
GXGEVVMERYKKLVVKDYEDFYLMSIAN

SEQ ID NO: 76272 - protein, 39 aa, Artificial Sequence
  Cyclic GFR-binding peptide
  MOD_RES (2)..(4)..(36)..(37): Xaa is C or S
SXGXRDVVMGRYKKLIIQQKDNFYLMSIANMKTPTXXPG

SEQ ID NO: 76273 - protein, 30 aa, Artificial Sequence; identical to SEQ ID NO: 5550
  Cyclic GFR-binding peptide
  MOD_RES (1)..(3): Xaa is C or S

SEQ ID NO: 76274 - protein, 31 aa, Artificial Sequence; identical to SEQ ID NO: 2721
  Cyclic GFR-binding peptide
  MOD_RES (2)..(4): Xaa is C or S

SEQ ID NO: 76275 - protein, 29 aa, Artificial Sequence
  Cyclic GFR-binding peptide
VVMNRYKKLIVNSSDDFYLVSIANLQTPA

SEQ ID NO: 76276 - protein, 34 aa, Artificial Sequence; identical to SEQ ID NO: 2727
  Cyclic GFR-binding peptide
  MOD_RES (2)..(34): Xaa is C or S

SEQ ID NO: 76277 - protein, 30 aa, Artificial Sequence; identical to SEQ ID NO: 2728
  Cyclic GFR-binding peptide
  MOD_RES (30)..(30): Xaa is C or S

SEQ ID NO: 76278 - protein, 32 aa, Artificial Sequence; identical to SEQ ID NO: 2729
  Cyclic GFR-binding peptide
  MOD_RES (27)..(28): Xaa is C or S

SEQ ID NO: 76279 - protein, 34 aa, Artificial Sequence; identical to SEQ ID NO: 2732
  Cyclic GFR-binding peptide
  MOD_RES (1)..(33)..(34): Xaa is C or S

SEQ ID NO: 76280 - protein, 41 aa, Artificial Sequence; identical to SEQ ID NO: 2737
  Cyclic GFR-binding peptide
  MOD_RES (2)..(4)..(37)..(38): Xaa is C or S

SEQ ID NO: 76281 - protein, 37 aa, Artificial Sequence
  Cyclic GFR-binding peptide
  MOD_RES (31)..(32): Xaa is C or S
DVVMGRYKKLIIQQKDNFYLMSIANMKTPTXXPGASG

SEQ ID NO: 76282 - protein, 29 aa, Artificial Sequence
  Cyclic GFR-binding peptide
VVMDRYKKLVVKENEDFYLMSIANLETPV

SEQ ID NO: 76283 - protein, 21 aa, Artificial Sequence
  Cyclic GFR-binding peptide
RYKKLYTVVGKDFYLISIANL

SEQ ID NO: 76284 - protein, 33 aa, Artificial Sequence; identical to SEQ ID NO: 2746
  Cyclic GFR-binding peptide
  MOD_RES (32)..(33): Xaa is C or S

SEQ ID NO: 76285 - protein, 29 aa, Artificial Sequence
  Cyclic GFR-binding peptide
  MOD_RES (26)..(27): Xaa is C or S
RYKKLIVNSSDDFYLVSIANLKTPAXXPK

SEQ ID NO: 76286 - protein, 27 aa, Artificial Sequence
  Cyclic GFR-binding peptide
MGRYKKLIIQQKDNFYLMSIANMKTPT

SEQ ID NO: 76287 - protein, 40 aa, Artificial Sequence; identical to SEQ ID NO: 5566
  Cyclic GFR-binding peptide
  MOD_RES (1)..(3)..(35)..(36): Xaa is C or S

SEQ ID NO: 76288 - protein, 28 aa, Artificial Sequence
  Cyclic GFR-binding peptide
VVMNRYKKLIVNSSDDFYLVSIANLKTP

SEQ ID NO: 76289 - protein, 29 aa, Artificial Sequence
  Cyclic GFR-binding peptide
  MOD_RES (1)..(3): Xaa is C or S
XGXSEVVMDRYKKLVVNNASDFYLISIAN

SEQ ID NO: 76290 - protein, 28 aa, Artificial Sequence
  Cyclic GFR-binding peptide
  MOD_RES (26)..(27): Xaa is C or S
RYKKLIIQQKDNFYLMSIANMKTPTXXP

SEQ ID NO: 76291 - protein, 26 aa, Artificial Sequence
  Cyclic GFR-binding peptide
KVVMNRYKKLIVNNSSDFYLVSIANL

SEQ ID NO: 76292 - protein, 37 aa, Artificial Sequence; identical to SEQ ID NO: 2755
  Cyclic GFR-binding peptide
  MOD_RES (2)..(4)..(36)..(37): Xaa is C or S

SEQ ID NO: 76293 - protein, 31 aa, Artificial Sequence; identical to SEQ ID NO: 2756
  Cyclic GFR-binding peptide

SEQ ID NO: 76294 - protein, 30 aa, Artificial Sequence; identical to SEQ ID NO: 5574
  Cyclic GFR-binding peptide
  MOD_RES (2)..(4): Xaa is C or S

SEQ ID NO: 76295 - protein, 32 aa, Artificial Sequence; identical to SEQ ID NO: 2758
  Cyclic GFR-binding peptide
  MOD_RES (28)..(28): Xaa is C or S

SEQ ID NO: 76296 - protein, 29 aa, Artificial Sequence
  Cyclic GFR-binding peptide
  MOD_RES (27)..(28): Xaa is C or S
NRYKKLIVNSSDDFYLVSIANLKTPAXXP

SEQ ID NO: 76297 - protein, 31 aa, Artificial Sequence; identical to SEQ ID NO: 33909
  Cyclic GFR-binding peptide
  MOD_RES (31)..(31): Xaa is C or S

SEQ ID NO: 76298 - protein, 40 aa, Artificial Sequence; identical to SEQ ID NO: 33917
  Cyclic GFR-binding peptide
  MOD_RES (1)..(3)..(35)..(36): Xaa is C or S

SEQ ID NO: 76299 - protein, 26 aa, Artificial Sequence
  Cyclic GFR-binding peptide
VVMNRYKKLIVNNSSDFYLVSIANLK

SEQ ID NO: 76300 - protein, 29 aa, Artificial Sequence
  Cyclic GFR-binding peptide
RDVVMGRYKKLIIQQKDNFYLMSIANMKT

SEQ ID NO: 76301 - protein, 30 aa, Artificial Sequence; identical to SEQ ID NO: 33918
  Cyclic GFR-binding peptide
  MOD_RES (2)..(4): Xaa is C or S

SEQ ID NO: 76302 - protein, 29 aa, Artificial Sequence
  Cyclic GFR-binding peptide
VVMDRYKKLVVNNAADFYLISIANLRAPV

SEQ ID NO: 76303 - protein, 22 aa, Artificial Sequence
  Cyclic GFR-binding peptide
NRYKKLIVNNSSDFYLVSIANL

SEQ ID NO: 76304 - protein, 39 aa, Artificial Sequence; identical to SEQ ID NO: 33923
  Cyclic GFR-binding peptide
  MOD_RES (2)..(4)..(36)..(37): Xaa is C or S

SEQ ID NO: 76305 - protein, 22 aa, Artificial Sequence
  Cyclic GFR-binding peptide
MNRYKKLIVNNSSDFYLVSIAN

SEQ ID NO: 76306 - protein, 29 aa, Artificial Sequence
  Cyclic GFR-binding peptide
  MOD_RES (29)..(29): Xaa is C or S
MGERYKKLTPVGMDDFYLVSIANLKTPVX

SEQ ID NO: 76307 - protein, 29 aa, Artificial Sequence
  Cyclic GFR-binding peptide
AKVVMNRYKKLIVNNSSDFYLVSIANLKT

SEQ ID NO: 76308 - protein, 38 aa, Artificial Sequence; identical to SEQ ID NO: 33938
  Cyclic GFR-binding peptide
  MOD_RES (1)..(3)..(35)..(36): Xaa is C or S

SEQ ID NO: 76309 - protein, 24 aa, Artificial Sequence
  Cyclic GFR-binding peptide
MGRYKKLIIQQKDNFYLMSIANMK

SEQ ID NO: 76310 - protein, 36 aa, Artificial Sequence; identical to SEQ ID NO: 2792
  Cyclic GFR-binding peptide
  MOD_RES (1)..(3)..(35)..(36): Xaa is C or S

SEQ ID NO: 76311 - protein, 24 aa, Artificial Sequence
  Cyclic GFR-binding peptide
VMNRYKKLIVNNSSDFYLVSIANL

SEQ ID NO: 76312 - protein, 29 aa, Artificial Sequence
  Cyclic GFR-binding peptide
AEVVMDRYKKLVVNNAADFYLISIANLRA

SEQ ID NO: 76313 - protein, 37 aa, Artificial Sequence; identical to SEQ ID NO: 2798
  Cyclic GFR-binding peptide
  MOD_RES (1)..(3)..(35): Xaa is C or S

SEQ ID NO: 76314 - protein, 34 aa, Artificial Sequence; identical to SEQ ID NO: 2799
  Cyclic GFR-binding peptide
  MOD_RES (28)..(29): Xaa is C or S

SEQ ID NO: 76315 - protein, 30 aa, Artificial Sequence; identical to SEQ ID NO: 2800
  Cyclic GFR-binding peptide
  MOD_RES (28)..(29): Xaa is C or S

SEQ ID NO: 76316 - protein, 28 aa, Artificial Sequence
  Cyclic GFR-binding peptide
  MOD_RES (2)..(2): Xaa is C or S
GXARVVMNRYKKLIVNSSDDFYLVSIAN

SEQ ID NO: 76317 - protein, 33 aa, Artificial Sequence; identical to SEQ ID NO: 2803
  Cyclic GFR-binding peptide
  MOD_RES (1)..(1): Xaa is C or S

SEQ ID NO: 76318 - protein, 31 aa, Artificial Sequence; identical to SEQ ID NO: 5619
  Cyclic GFR-binding peptide
  MOD_RES (31)..(31): Xaa is C or S

SEQ ID NO: 76319 - protein, 30 aa, Artificial Sequence; identical to SEQ ID NO: 5621
  Cyclic GFR-binding peptide

SEQ ID NO: 76320 - protein, 34 aa, Artificial Sequence; identical to SEQ ID NO: 2808
  Cyclic GFR-binding peptide
  MOD_RES (30)..(31): Xaa is C or S

SEQ ID NO: 76321 - protein, 36 aa, Artificial Sequence; identical to SEQ ID NO: 33950
  Cyclic GFR-binding peptide
  MOD_RES (30)..(31): Xaa is C or S

SEQ ID NO: 76322 - protein, 26 aa, Artificial Sequence
  Cyclic GFR-binding peptide
VMNRYKKLIVNSSDDFYLVSIANLKT

SEQ ID NO: 76323 - protein, 37 aa, Artificial Sequence; identical to SEQ ID NO: 31022
  Cyclic GFR-binding peptide
  MOD_RES (31)..(32): Xaa is C or S

SEQ ID NO: 76324 - protein, 36 aa, Artificial Sequence; identical to SEQ ID NO: 2816
  Cyclic GFR-binding peptide
  MOD_RES (31)..(32): Xaa is C or S

SEQ ID NO: 76325 - protein, 38 aa, Artificial Sequence; identical to SEQ ID NO: 2817
  Cyclic GFR-binding peptide
  MOD_RES (32)..(33): Xaa is C or S

SEQ ID NO: 76326 - protein, 35 aa, Artificial Sequence; identical to SEQ ID NO: 5629
  Cyclic GFR-binding peptide
  MOD_RES (1)..(3)..(35): Xaa is C or S

SEQ ID NO: 76327 - protein, 31 aa, Artificial Sequence; identical to SEQ ID NO: 31030
  Cyclic GFR-binding peptide

SEQ ID NO: 76328 - protein, 25 aa, Artificial Sequence
  Cyclic GFR-binding peptide
AMGRYKKLYTVVGKDFYLISIANLK

SEQ ID NO: 76329 - protein, 37 aa, Artificial Sequence; identical to SEQ ID NO: 5637
  Cyclic GFR-binding peptide
  MOD_RES (2)..(34)..(35): Xaa is C or S

SEQ ID NO: 76330 - protein, 27 aa, Artificial Sequence
  Cyclic GFR-binding peptide
VMDRYKKLVVKENEDFYLMSIANLETP

SEQ ID NO: 76331 - protein, 24 aa, Artificial Sequence
  Cyclic GFR-binding peptide
DRYKKLVVNNASDFYLISIANLRT

SEQ ID NO: 76332 - protein, 31 aa, Artificial Sequence; identical to SEQ ID NO: 13374
  Cyclic GFR-binding peptide
  MOD_RES (27)..(28): Xaa is C or S

SEQ ID NO: 76333 - protein, 30 aa, Artificial Sequence
  Cyclic GFR-binding peptide
DVVMGRYKKLIIQQKDNFYLMSIANMKTPT

SEQ ID NO: 76334 - protein, 37 aa, Artificial Sequence; identical to SEQ ID NO: 16084
  Cyclic GFR-binding peptide
  MOD_RES (31)..(32): Xaa is C or S

SEQ ID NO: 76335 - protein, 34 aa, Artificial Sequence
  Cyclic GFR-binding peptide
  MOD_RES (1)..(3): Xaa is C or S
XGXRDVVMGRYKKLIIQQKDNFYLMSIANMKTPT

SEQ ID NO: 76336 - protein, 37 aa, Artificial Sequence; identical to SEQ ID NO: 31050
  Cyclic GFR-binding peptide
  MOD_RES (32)..(33): Xaa is C or S

SEQ ID NO: 76337 - protein, 30 aa, Artificial Sequence; identical to SEQ ID NO: 31052
  Cyclic GFR-binding peptide
  MOD_RES (2)..(2): Xaa is C or S

SEQ ID NO: 76338 - protein, 37 aa, Artificial Sequence; identical to SEQ ID NO: 2837
  Cyclic GFR-binding peptide
  MOD_RES (31)..(32): Xaa is C or S

SEQ ID NO: 76339 - protein, 32 aa, Artificial Sequence
  Cyclic GFR-binding peptide
  MOD_RES (29)..(30): Xaa is C or S
VMGRYKKLIIQQKDNFYLMSIANMKTPTXXPG

SEQ ID NO: 76340 - protein, 35 aa, Artificial Sequence; identical to SEQ ID NO: 2838
  Cyclic GFR-binding peptide
  MOD_RES (2)..(4): Xaa is C or S

SEQ ID NO: 76341 - protein, 30 aa, Artificial Sequence; identical to SEQ ID NO: 31056
  Cyclic GFR-binding peptide
  MOD_RES (27)..(28): Xaa is C or S

SEQ ID NO: 76342 - protein, 28 aa, Artificial Sequence
  Cyclic GFR-binding peptide
  MOD_RES (26)..(27): Xaa is C or S
RYKKLVVNNAADFYLISIANLRAPVXXS

SEQ ID NO: 76343 - protein, 31 aa, Artificial Sequence; identical to SEQ ID NO: 5657
  Cyclic GFR-binding peptide

SEQ ID NO: 76344 - protein, 27 aa, Artificial Sequence
  Cyclic GFR-binding peptide
EAVSMGERYKKLTPVGMDDFYLVSIAN

SEQ ID NO: 76345 - protein, 33 aa, Artificial Sequence; identical to SEQ ID NO: 2851
  Cyclic GFR-binding peptide
  MOD_RES (31)..(32): Xaa is C or S

SEQ ID NO: 76346 - protein, 35 aa, Artificial Sequence; identical to SEQ ID NO: 33989
  Cyclic GFR-binding peptide
  MOD_RES (2)..(4): Xaa is C or S

SEQ ID NO: 76347 - protein, 23 aa, Artificial Sequence
  Cyclic GFR-binding peptide
GERYKKLTPVGMDDFYLVSIANL

SEQ ID NO: 76348 - protein, 25 aa, Artificial Sequence
  Cyclic GFR-binding peptide
MERYKKLVVKDYEDFYLMSIANLET

SEQ ID NO: 76349 - protein, 23 aa, Artificial Sequence
  Cyclic GFR-binding peptide
VMDRYKKLVVKENEDFYLMSIAN

SEQ ID NO: 76350 - protein, 32 aa, Artificial Sequence; identical to SEQ ID NO: 5670
  Cyclic GFR-binding peptide
  MOD_RES (32)..(32): Xaa is C or S

SEQ ID NO: 76351 - protein, 34 aa, Artificial Sequence; identical to SEQ ID NO: 2867
  Cyclic GFR-binding peptide
  MOD_RES (1)..(34): Xaa is C or S

SEQ ID NO: 76352 - protein, 27 aa, Artificial Sequence
  Cyclic GFR-binding peptide
  MOD_RES (26)..(27): Xaa is C or S
RYKKLIVNSSDDFYLVSIANLKTPAXX

SEQ ID NO: 76353 - protein, 26 aa, Artificial Sequence
  Cyclic GFR-binding peptide
MNRYKKLIVNNSSDFYLVSIANLKTP

SEQ ID NO: 76354 - protein, 39 aa, Artificial Sequence; identical to SEQ ID NO: 5673
  Cyclic GFR-binding peptide
  MOD_RES (2)..(34)..(35): Xaa is C or S

SEQ ID NO: 76355 - protein, 28 aa, Artificial Sequence
  Cyclic GFR-binding peptide
EVVMDRYKKLVVNNASDFYLISIANLRT

SEQ ID NO: 76356 - protein, 23 aa, Artificial Sequence
  Cyclic GFR-binding peptide
MDRYKKLVVNNAADFYLISIANL

SEQ ID NO: 76357 - protein, 34 aa, Artificial Sequence; identical to SEQ ID NO: 2879
  Cyclic GFR-binding peptide
  MOD_RES (28)..(29): Xaa is C or S

SEQ ID NO: 76358 - protein, 21 aa, Artificial Sequence
  Cyclic GFR-binding peptide
GRYKKLYTVVGKDFYLISIAN

SEQ ID NO: 76359 - protein, 27 aa, Artificial Sequence
  Cyclic GFR-binding peptide
  MOD_RES (1)..(1): Xaa is C or S
XGEVVMDRYKKLVVKENEDFYLMSIAN

SEQ ID NO: 76360 - protein, 23 aa, Artificial Sequence
  Cyclic GFR-binding peptide
VMNRYKKLIVNSSDDFYLVSIAN

SEQ ID NO: 76361 - protein, 30 aa, Artificial Sequence; identical to SEQ ID NO: 2882
  Cyclic GFR-binding peptide
  MOD_RES (27)..(28): Xaa is C or S

SEQ ID NO: 76362 - protein, 31 aa, Artificial Sequence; identical to SEQ ID NO: 5688
  Cyclic GFR-binding peptide
  MOD_RES (2)..(4): Xaa is C or S

SEQ ID NO: 76363 - protein, 35 aa, Artificial Sequence; identical to SEQ ID NO: 5692
  Cyclic GFR-binding peptide
  MOD_RES (29)..(30): Xaa is C or S

SEQ ID NO: 76364 - protein, 30 aa, Artificial Sequence; identical to SEQ ID NO: 16134
  Cyclic GFR-binding peptide
  MOD_RES (2)..(2): Xaa is C or S

SEQ ID NO: 76365 - protein, 30 aa, Artificial Sequence; identical to SEQ ID NO: 34029
  Cyclic GFR-binding peptide

SEQ ID NO: 76366 - protein, 26 aa, Artificial Sequence
  Cyclic GFR-binding peptide
SRVVMNRYKKLIVNSSDDFYLVSIAN

SEQ ID NO: 76367 - protein, 30 aa, Artificial Sequence; identical to SEQ ID NO: 2892
  Cyclic GFR-binding peptide
  MOD_RES (29)..(29): Xaa is C or S

SEQ ID NO: 76368 - protein, 31 aa, Artificial Sequence; identical to SEQ ID NO: 34033
  Cyclic GFR-binding peptide
  MOD_RES (26)..(27): Xaa is C or S

SEQ ID NO: 76369 - protein, 26 aa, Artificial Sequence
  Cyclic GFR-binding peptide
  MOD_RES (26)..(26): Xaa is C or S
RYKKLIVNNSSDFYLVSIANLKTPAX

SEQ ID NO: 76370 - protein, 26 aa, Artificial Sequence
  Cyclic GFR-binding peptide
ARVVMNRYKKLIVNSSDDFYLVSIAN

SEQ ID NO: 76371 - protein, 23 aa, Artificial Sequence
  Cyclic GFR-binding peptide
MDRYKKLVVNNASDFYLISIANL

SEQ ID NO: 76372 - protein, 30 aa, Artificial Sequence; identical to SEQ ID NO: 31107
  Cyclic GFR-binding peptide
  MOD_RES (26)..(27): Xaa is C or S

SEQ ID NO: 76373 - protein, 41 aa, Artificial Sequence; identical to SEQ ID NO: 5704
  Cyclic GFR-binding peptide
  MOD_RES (1)..(3)..(35)..(36): Xaa is C or S

SEQ ID NO: 76374 - protein, 33 aa, Artificial Sequence; identical to SEQ ID NO: 2902
  Cyclic GFR-binding peptide
  MOD_RES (29)..(29): Xaa is C or S

SEQ ID NO: 76375 - protein, 31 aa, Artificial Sequence; identical to SEQ ID NO: 5707
  Cyclic GFR-binding peptide
  MOD_RES (26)..(27): Xaa is C or S

SEQ ID NO: 76376 - protein, 22 aa, Artificial Sequence
  Cyclic GFR-binding peptide
RYKKLIVNNSSDFYLVSIANLK

SEQ ID NO: 76377 - protein, 38 aa, Artificial Sequence; identical to SEQ ID NO: 5710
  Cyclic GFR-binding peptide
  MOD_RES (2)..(4)..(36)..(37): Xaa is C or S

SEQ ID NO: 76378 - protein, 23 aa, Artificial Sequence
  Cyclic GFR-binding peptide
RYKKLYTVVGKDFYLISIANLKT

SEQ ID NO: 76379 - protein, 32 aa, Artificial Sequence; identical to SEQ ID NO: 31113
  Cyclic GFR-binding peptide
  MOD_RES (2)..(2): Xaa is C or S

SEQ ID NO: 76380 - protein, 21 aa, Artificial Sequence
  Cyclic GFR-binding peptide
RYKKLVVKDYEDFYLMSIANL

SEQ ID NO: 76381 - protein, 35 aa, Artificial Sequence; identical to SEQ ID NO: 5721
  Cyclic GFR-binding peptide
  MOD_RES (2)..(4): Xaa is C or S

SEQ ID NO: 76382 - protein, 24 aa, Artificial Sequence
  Cyclic GFR-binding peptide
MGRYKKLYTVVGKDFYLISIANLK

SEQ ID NO: 76383 - protein, 29 aa, Artificial Sequence
  Cyclic GFR-binding peptide
  MOD_RES (27)..(28): Xaa is C or S
DRYKKLVVKENEDFYLMSIANLETPVXXA

SEQ ID NO: 76384 - protein, 31 aa, Artificial Sequence; identical to SEQ ID NO: 5723
  Cyclic GFR-binding peptide
  MOD_RES (31)..(31): Xaa is C or S

SEQ ID NO: 76385 - protein, 34 aa, Artificial Sequence; identical to SEQ ID NO: 5724
  Cyclic GFR-binding peptide
  MOD_RES (29)..(30): Xaa is C or S

SEQ ID NO: 76386 - protein, 30 aa, Artificial Sequence
  Cyclic GFR-binding peptide
  MOD_RES (27)..(28): Xaa is C or S
MRYKKLLLVRGNDFYLMSIANTKVPAXXTS

SEQ ID NO: 76387 - protein, 25 aa, Artificial Sequence
  Cyclic GFR-binding peptide
MDRYKKLVVNNASDFYLISIANLRT

SEQ ID NO: 76388 - protein, 33 aa, Artificial Sequence; identical to SEQ ID NO: 5727
  Cyclic GFR-binding peptide
  MOD_RES (2)..(4): Xaa is C or S

SEQ ID NO: 76389 - protein, 31 aa, Artificial Sequence; identical to SEQ ID NO: 2923
  Cyclic GFR-binding peptide

SEQ ID NO: 76390 - protein, 36 aa, Artificial Sequence; identical to SEQ ID NO: 2925
  Cyclic GFR-binding peptide
  MOD_RES (2)..(4)..(36): Xaa is C or S

SEQ ID NO: 76391 - protein, 30 aa, Artificial Sequence; identical to SEQ ID NO: 5733
  Cyclic GFR-binding peptide
  MOD_RES (30)..(30): Xaa is C or S

SEQ ID NO: 76392 - protein, 42 aa, Artificial Sequence
  Cyclic GFR-binding peptide
  MOD_RES (2)..(4)..(36)..(37): Xaa is C or S
SXGXRDVVMGRYKKLIIQQKDNFYLMSIANMKTPTXXPGASG

SEQ ID NO: 76393 - protein, 35 aa, Artificial Sequence; identical to SEQ ID NO: 2927
  Cyclic GFR-binding peptide
  MOD_RES (31)..(32): Xaa is C or S

SEQ ID NO: 76394 - protein, 25 aa, Artificial Sequence
  Cyclic GFR-binding peptide
MNRYKKLIVNSSDDFYLVSIANLKT

SEQ ID NO: 76395 - protein, 36 aa, Artificial Sequence
  Cyclic GFR-binding peptide
  MOD_RES (2)..(33)..(34): Xaa is C or S
GXEEVIMRYKKLLLVRGNDFYLMSIANTKVPAXXTS

SEQ ID NO: 76396 - protein, 33 aa, Artificial Sequence; identical to SEQ ID NO: 5742
  Cyclic GFR-binding peptide
  MOD_RES (31)..(31): Xaa is C or S

SEQ ID NO: 76397 - protein, 28 aa, Artificial Sequence
  Cyclic GFR-binding peptide
VVMNRYKKLIVNNSSDFYLVSIANLKTP

SEQ ID NO: 76398 - protein, 32 aa, Artificial Sequence; identical to SEQ ID NO: 2942
  Cyclic GFR-binding peptide
  MOD_RES (1)..(1): Xaa is C or S

SEQ ID NO: 76399 - protein, 40 aa, Artificial Sequence
  Cyclic GFR-binding peptide
  MOD_RES (2)..(34)..(35): Xaa is C or S
GXRDVVMGRYKKLIIQQKDNFYLMSIANMKTPTXXPGASG

SEQ ID NO: 76400 - protein, 39 aa, Artificial Sequence; identical to SEQ ID NO: 34080
  Cyclic GFR-binding peptide
  MOD_RES (2)..(34)..(35): Xaa is C or S

SEQ ID NO: 76401 - protein, 31 aa, Artificial Sequence; identical to SEQ ID NO: 2948
  Cyclic GFR-binding peptide
  MOD_RES (28)..(29): Xaa is C or S

SEQ ID NO: 76402 - protein, 28 aa, Artificial Sequence
  Cyclic GFR-binding peptide
  MOD_RES (2)..(2): Xaa is C or S
GXSRVVMNRYKKLIVNSSDDFYLVSIAN

SEQ ID NO: 76403 - protein, 35 aa, Artificial Sequence; identical to SEQ ID NO: 2952
  Cyclic GFR-binding peptide
  MOD_RES (32)..(33): Xaa is C or S

SEQ ID NO: 76404 - protein, 25 aa, Artificial Sequence
  Cyclic GFR-binding peptide
RYKKLVVKDYEDFYLMSIANLETPV

SEQ ID NO: 76405 - protein, 34 aa, Artificial Sequence; identical to SEQ ID NO: 2957
  Cyclic GFR-binding peptide
  MOD_RES (2)..(4): Xaa is C or S

SEQ ID NO: 76406 - protein, 34 aa, Artificial Sequence; identical to SEQ ID NO: 5755
  Cyclic GFR-binding peptide
  MOD_RES (1)..(33)..(34): Xaa is C or S

SEQ ID NO: 76407 - protein, 24 aa, Artificial Sequence
  Cyclic GFR-binding peptide
RYKKLIIQQKDNFYLMSIANMKTP

SEQ ID NO: 76408 - protein, 30 aa, Artificial Sequence; identical to SEQ ID NO: 5761
  Cyclic GFR-binding peptide
  MOD_RES (2)..(4): Xaa is C or S

SEQ ID NO: 76409 - protein, 36 aa, Artificial Sequence; identical to SEQ ID NO: 5765
  Cyclic GFR-binding peptide
  MOD_RES (2)..(35)..(36): Xaa is C or S

SEQ ID NO: 76410 - protein, 28 aa, Artificial Sequence
  Cyclic GFR-binding peptide
  MOD_RES (1)..(3): Xaa is C or S
XGXEEVIMRYKKLLLVRGNDFYLMSIAN

SEQ ID NO: 76411 - protein, 27 aa, Artificial Sequence
  Cyclic GFR-binding peptide
EVVMDRYKKLVVKENEDFYLMSIANLE

SEQ ID NO: 76412 - protein, 34 aa, Artificial Sequence; identical to SEQ ID NO: 13518
  Cyclic GFR-binding peptide
  MOD_RES (2)..(4): Xaa is C or S

SEQ ID NO: 76413 - protein, 27 aa, Artificial Sequence
  Cyclic GFR-binding peptide
  MOD_RES (27)..(27): Xaa is C or S
DRYKKLVVNNAADFYLISIANLRAPVX

SEQ ID NO: 76414 - protein, 31 aa, Artificial Sequence
  Cyclic GFR-binding peptide
  MOD_RES (2)..(4): Xaa is C or S
SXGXRDVVMGRYKKLIIQQKDNFYLMSIANM

SEQ ID NO: 76415 - protein, 30 aa, Artificial Sequence; identical to SEQ ID NO: 5771
  Cyclic GFR-binding peptide
  MOD_RES (30)..(30): Xaa is C or S

SEQ ID NO: 76416 - protein, 32 aa, Artificial Sequence; identical to SEQ ID NO: 5776
  Cyclic GFR-binding peptide
  MOD_RES (31)..(31): Xaa is C or S

SEQ ID NO: 76417 - protein, 36 aa, Artificial Sequence
  Cyclic GFR-binding peptide
  MOD_RES (1)..(3)..(35)..(36): Xaa is C or S
XGXRDVVMGRYKKLIIQQKDNFYLMSIANMKTPTXX

SEQ ID NO: 76418 - protein, 30 aa, Artificial Sequence; identical to SEQ ID NO: 34123
  Cyclic GFR-binding peptide
  MOD_RES (1)..(1): Xaa is C or S

SEQ ID NO: 76419 - protein, 33 aa, Artificial Sequence; identical to SEQ ID NO: 2985
  Cyclic GFR-binding peptide
  MOD_RES (2)..(4): Xaa is C or S

SEQ ID NO: 76420 - protein, 27 aa, Artificial Sequence
  Cyclic GFR-binding peptide
VVMDRYKKLVVNNAADFYLISIANLRA

SEQ ID NO: 76421 - protein, 29 aa, Artificial Sequence
  Cyclic GFR-binding peptide
  MOD_RES (29)..(29): Xaa is C or S
VMDRYKKLVVNNASDFYLISIANLRTPVX

SEQ ID NO: 76422 - protein, 22 aa, Artificial Sequence
  Cyclic GFR-binding peptide
RYKKLYTVVGKDFYLISIANLK

SEQ ID NO: 76423 - protein, 25 aa, Artificial Sequence
  Cyclic GFR-binding peptide
VMNRYKKLIVNNSSDFYLVSIANLK

SEQ ID NO: 76424 - protein, 35 aa, Artificial Sequence; identical to SEQ ID NO: 3001
  Cyclic GFR-binding peptide
  MOD_RES (29)..(29): Xaa is C or S

SEQ ID NO: 76425 - protein, 33 aa, Artificial Sequence; identical to SEQ ID NO: 5806
  Cyclic GFR-binding peptide
  MOD_RES (30)..(31): Xaa is C or S

SEQ ID NO: 76426 - protein, 39 aa, Artificial Sequence
  Cyclic GFR-binding peptide
  MOD_RES (2)..(33)..(34): Xaa is C or S
GXEEVIMRYKKLLLVRGNDFYLMSIANTKVPAXXTSPVR

SEQ ID NO: 76427 - protein, 22 aa, Artificial Sequence
  Cyclic GFR-binding peptide
MGRYKKLYTVVGKDFYLISIAN

SEQ ID NO: 76428 - protein, 28 aa, Artificial Sequence
  Cyclic GFR-binding peptide
  MOD_RES (28)..(28): Xaa is C or S
MDRYKKLVVNNASDFYLISIANLRTPVX

SEQ ID NO: 76429 - protein, 35 aa, Artificial Sequence; identical to SEQ ID NO: 3007
  Cyclic GFR-binding peptide
  MOD_RES (1)..(33): Xaa is C or S

SEQ ID NO: 76430 - protein, 41 aa, Artificial Sequence; identical to SEQ ID NO: 16246
  Cyclic GFR-binding peptide
  MOD_RES (1)..(3)..(35)..(36): Xaa is C or S

SEQ ID NO: 76431 - protein, 28 aa, Artificial Sequence
  Cyclic GFR-binding peptide
VMNRYKKLIVNSSDDFYLVSIANLKTPA

SEQ ID NO: 76432 - protein, 31 aa, Artificial Sequence; identical to SEQ ID NO: 3016
  Cyclic GFR-binding peptide
  MOD_RES (29)..(30): Xaa is C or S

SEQ ID NO: 76433 - protein, 31 aa, Artificial Sequence
  Cyclic GFR-binding peptide
  MOD_RES (2)..(2): Xaa is C or S
GXEEVIMRYKKLLLVRGNDFYLMSIANTKVP

SEQ ID NO: 76434 - protein, 31 aa, Artificial Sequence; identical to SEQ ID NO: 3024
  Cyclic GFR-binding peptide
  MOD_RES (27)..(28): Xaa is C or S

SEQ ID NO: 76435 - protein, 26 aa, Artificial Sequence
  Cyclic GFR-binding peptide
GEVVMERYKKLVVKDYEDFYLMSIAN

SEQ ID NO: 76436 - protein, 35 aa, Artificial Sequence
  Cyclic GFR-binding peptide
  MOD_RES (29)..(30): Xaa is C or S
VIMRYKKLLLVRGNDFYLMSIANTKVPAXXTSPVR

SEQ ID NO: 76437 - protein, 23 aa, Artificial Sequence
  Cyclic GFR-binding peptide
RYKKLTPVGMDDFYLVSIANLKT

SEQ ID NO: 76438 - protein, 29 aa, Artificial Sequence
  Cyclic GFR-binding peptide
VVMNRYKKLIVNNSSDFYLVSIANLKTPA

SEQ ID NO: 76439 - protein, 23 aa, Artificial Sequence
  Cyclic GFR-binding peptide
RYKKLIVNSSDDFYLVSIANLKT

SEQ ID NO: 76440 - protein, 23 aa, Artificial Sequence
  Cyclic GFR-binding peptide
RYKKLVVNNAADFYLISIANLRA

SEQ ID NO: 76441 - protein, 36 aa, Artificial Sequence; identical to SEQ ID NO: 3032
  Cyclic GFR-binding peptide
  MOD_RES (2)..(4)..(36): Xaa is C or S

SEQ ID NO: 76442 - protein, 33 aa, Artificial Sequence; identical to SEQ ID NO: 5835
  Cyclic GFR-binding peptide
  MOD_RES (2)..(4): Xaa is C or S

SEQ ID NO: 76443 - protein, 31 aa, Artificial Sequence; identical to SEQ ID NO: 3035
  Cyclic GFR-binding peptide
  MOD_RES (26)..(27): Xaa is C or S

SEQ ID NO: 76444 - protein, 33 aa, Artificial Sequence; identical to SEQ ID NO: 3037
  Cyclic GFR-binding peptide
  MOD_RES (32)..(33): Xaa is C or S

SEQ ID NO: 76445 - protein, 31 aa, Artificial Sequence; identical to SEQ ID NO: 34177
  Cyclic GFR-binding peptide
  MOD_RES (1)..(3): Xaa is C or S

SEQ ID NO: 76446 - protein, 29 aa, Artificial Sequence
  Cyclic GFR-binding peptide
VVMNRYKKLIVNSSDDFYLVSIANLKTPA

SEQ ID NO: 76447 - protein, 31 aa, Artificial Sequence; identical to SEQ ID NO: 5842
  Cyclic GFR-binding peptide
  MOD_RES (26)..(27): Xaa is C or S

SEQ ID NO: 76448 - protein, 24 aa, Artificial Sequence
  Cyclic GFR-binding peptide
MRYKKLLLVRGNDFYLMSIANTKV

SEQ ID NO: 76449 - protein, 23 aa, Artificial Sequence
  Cyclic GFR-binding peptide
AMGRYKKLYTVVGKDFYLISIAN

SEQ ID NO: 76450 - protein, 31 aa, Artificial Sequence
  Cyclic GFR-binding peptide
  MOD_RES (27)..(28): Xaa is C or S
GRYKKLIIQQKDNFYLMSIANMKTPTXXPGA

SEQ ID NO: 76451 - protein, 36 aa, Artificial Sequence; identical to SEQ ID NO: 3047
  Cyclic GFR-binding peptide
  MOD_RES (31)..(32): Xaa is C or S

SEQ ID NO: 76452 - protein, 34 aa, Artificial Sequence; identical to SEQ ID NO: 5845
  Cyclic GFR-binding peptide
  MOD_RES (32)..(33): Xaa is C or S

SEQ ID NO: 76453 - protein, 33 aa, Artificial Sequence
  Cyclic GFR-binding peptide
  MOD_RES (31)..(32): Xaa is C or S
EEVIMRYKKLLLVRGNDFYLMSIANTKVPAXXT

SEQ ID NO: 76454 - protein, 28 aa, Artificial Sequence
  Cyclic GFR-binding peptide
  MOD_RES (28)..(28): Xaa is C or S
MERYKKLVVKDYEDFYLMSIANLETPVX

SEQ ID NO: 76455 - protein, 27 aa, Artificial Sequence
  Cyclic GFR-binding peptide
MNRYKKLIVNSSDDFYLVSIANLKTPA

SEQ ID NO: 76456 - protein, 25 aa, Artificial Sequence
  Cyclic GFR-binding peptide
MNRYKKLIVNSSDDFYLVSIANLQT

SEQ ID NO: 76457 - protein, 33 aa, Artificial Sequence; identical to SEQ ID NO: 3054
  Cyclic GFR-binding peptide
  MOD_RES (2)..(2): Xaa is C or S

SEQ ID NO: 76458 - protein, 36 aa, Artificial Sequence; identical to SEQ ID NO: 5855
  Cyclic GFR-binding peptide
  MOD_RES (31)..(31): Xaa is C or S

SEQ ID NO: 76459 - protein, 41 aa, Artificial Sequence; identical to SEQ ID NO: 34191
  Cyclic GFR-binding peptide
  MOD_RES (1)..(3)..(35)..(36): Xaa is C or S

SEQ ID NO: 76460 - protein, 30 aa, Artificial Sequence; identical to SEQ ID NO: 31290
  Cyclic GFR-binding peptide
  MOD_RES (29)..(30): Xaa is C or S

SEQ ID NO: 76461 - protein, 26 aa, Artificial Sequence
  Cyclic GFR-binding peptide
NRYKKLIVNNSSDFYLVSIANLKTPA

SEQ ID NO: 76462 - protein, 25 aa, Artificial Sequence
  Cyclic GFR-binding peptide
DRYKKLVVNNASDFYLISIANLRTP

SEQ ID NO: 76463 - protein, 26 aa, Artificial Sequence
  Cyclic GFR-binding peptide
VMGRYKKLIIQQKDNFYLMSIANMKT

SEQ ID NO: 76464 - protein, 38 aa, Artificial Sequence
  Cyclic GFR-binding peptide
  MOD_RES (1)..(3)..(34)..(35): Xaa is C or S
XGXEEVIMRYKKLLLVRGNDFYLMSIANTKVPAXXTSP

SEQ ID NO: 76465 - protein, 24 aa, Artificial Sequence
  Cyclic GFR-binding peptide
GERYKKLTPVGMDDFYLVSIANLK

SEQ ID NO: 76466 - protein, 34 aa, Artificial Sequence; identical to SEQ ID NO: 3067
  Cyclic GFR-binding peptide
  MOD_RES (1)..(3): Xaa is C or S

SEQ ID NO: 76467 - protein, 39 aa, Artificial Sequence; identical to SEQ ID NO: 16292
  Cyclic GFR-binding peptide
  MOD_RES (1)..(33)..(34): Xaa is C or S

SEQ ID NO: 76468 - protein, 30 aa, Artificial Sequence; identical to SEQ ID NO: 5868
  Cyclic GFR-binding peptide
  MOD_RES (1)..(1): Xaa is C or S

SEQ ID NO: 76469 - protein, 29 aa, Artificial Sequence
  Cyclic GFR-binding peptide
EVVMDRYKKLVVNNASDFYLISIANLRTP

SEQ ID NO: 76470 - protein, 42 aa, Artificial Sequence; identical to SEQ ID NO: 3070
  Cyclic GFR-binding peptide
  MOD_RES (2)..(4)..(36)..(37): Xaa is C or S

SEQ ID NO: 76471 - protein, 30 aa, Artificial Sequence; identical to SEQ ID NO: 3072
  Cyclic GFR-binding peptide
  MOD_RES (2)..(2): Xaa is C or S

SEQ ID NO: 76472 - protein, 39 aa, Artificial Sequence; identical to SEQ ID NO: 5874
  Cyclic GFR-binding peptide
  MOD_RES (2)..(34)..(35): Xaa is C or S

SEQ ID NO: 76473 - protein, 25 aa, Artificial Sequence
  Cyclic GFR-binding peptide
VMNRYKKLIVNSSDDFYLVSIANLK

SEQ ID NO: 76474 - protein, 36 aa, Artificial Sequence; identical to SEQ ID NO: 3076
  Cyclic GFR-binding peptide
  MOD_RES (2)..(34)..(35): Xaa is C or S

SEQ ID NO: 76475 - protein, 28 aa, Artificial Sequence
  Cyclic GFR-binding peptide
  MOD_RES (26)..(27): Xaa is C or S
RYKKLLLVRGNDFYLMSIANTKVPAXXT

SEQ ID NO: 76476 - protein, 27 aa, Artificial Sequence
  Cyclic GFR-binding peptide
GERYKKLTPVGMDDFYLVSIANLKTPV

SEQ ID NO: 76477 - protein, 32 aa, Artificial Sequence; identical to SEQ ID NO: 31322
  Cyclic GFR-binding peptide
  MOD_RES (28)..(29): Xaa is C or S

SEQ ID NO: 76478 - protein, 37 aa, Artificial Sequence
  Cyclic GFR-binding peptide
  MOD_RES (1)..(32)..(33): Xaa is C or S
XEEVIMRYKKLLLVRGNDFYLMSIANTKVPAXXTSPV

SEQ ID NO: 76479 - protein, 34 aa, Artificial Sequence; identical to SEQ ID NO: 3079
  Cyclic GFR-binding peptide
  MOD_RES (30)..(31): Xaa is C or S

SEQ ID NO: 76480 - protein, 37 aa, Artificial Sequence; identical to SEQ ID NO: 5878
  Cyclic GFR-binding peptide
  MOD_RES (32)..(33): Xaa is C or S

SEQ ID NO: 76481 - protein, 27 aa, Artificial Sequence
  Cyclic GFR-binding peptide
  MOD_RES (1)..(1): Xaa is C or S
XARVVMNRYKKLIVNSSDDFYLVSIAN

SEQ ID NO: 76482 - protein, 32 aa, Artificial Sequence; identical to SEQ ID NO: 31326
  Cyclic GFR-binding peptide
  MOD_RES (1)..(1): Xaa is C or S

SEQ ID NO: 76483 - protein, 37 aa, Artificial Sequence; identical to SEQ ID NO: 34216
  Cyclic GFR-binding peptide
  MOD_RES (32)..(33): Xaa is C or S

SEQ ID NO: 76484 - protein, 35 aa, Artificial Sequence; identical to SEQ ID NO: 3087
  Cyclic GFR-binding peptide
  MOD_RES (29)..(30): Xaa is C or S

SEQ ID NO: 76485 - protein, 37 aa, Artificial Sequence; identical to SEQ ID NO: 5885
  Cyclic GFR-binding peptide
  MOD_RES (31)..(32): Xaa is C or S

SEQ ID NO: 76486 - protein, 31 aa, Artificial Sequence; identical to SEQ ID NO: 5890
  Cyclic GFR-binding peptide

SEQ ID NO: 76487 - protein, 34 aa, Artificial Sequence; identical to SEQ ID NO: 3091
  Cyclic GFR-binding peptide
  MOD_RES (32)..(33): Xaa is C or S

SEQ ID NO: 76488 - protein, 31 aa, Artificial Sequence; identical to SEQ ID NO: 5892
  Cyclic GFR-binding peptide
  MOD_RES (26)..(26): Xaa is C or S

SEQ ID NO: 76489 - protein, 33 aa, Artificial Sequence
  Cyclic GFR-binding peptide
  MOD_RES (2)..(2): Xaa is C or S
GXRDVVMGRYKKLIIQQKDNFYLMSIANMKTPT

SEQ ID NO: 76490 - protein, 40 aa, Artificial Sequence; identical to SEQ ID NO: 3094
  Cyclic GFR-binding peptide
  MOD_RES (2)..(35)..(36): Xaa is C or S

SEQ ID NO: 76491 - protein, 37 aa, Artificial Sequence; identical to SEQ ID NO: 5898
  Cyclic GFR-binding peptide
  MOD_RES (1)..(33)..(34): Xaa is C or S

SEQ ID NO: 76492 - protein, 39 aa, Artificial Sequence; identical to SEQ ID NO: 5899
  Cyclic GFR-binding peptide
  MOD_RES (1)..(33): Xaa is C or S

SEQ ID NO: 76493 - protein, 32 aa, Artificial Sequence; identical to SEQ ID NO: 5900
  Cyclic GFR-binding peptide
  MOD_RES (31)..(32): Xaa is C or S

SEQ ID NO: 76494 - protein, 30 aa, Artificial Sequence; identical to SEQ ID NO: 13637
  Cyclic GFR-binding peptide
  MOD_RES (30)..(30): Xaa is C or S

SEQ ID NO: 76495 - protein, 31 aa, Artificial Sequence
  Cyclic GFR-binding peptide
  MOD_RES (28)..(29): Xaa is C or S
IMRYKKLLLVRGNDFYLMSIANTKVPAXXTS

SEQ ID NO: 76496 - protein, 30 aa, Artificial Sequence; identical to SEQ ID NO: 5902
  Cyclic GFR-binding peptide
  MOD_RES (29)..(30): Xaa is C or S

SEQ ID NO: 76497 - protein, 37 aa, Artificial Sequence; identical to SEQ ID NO: 3098
  Cyclic GFR-binding peptide
  MOD_RES (32)..(32): Xaa is C or S

SEQ ID NO: 76498 - protein, 32 aa, Artificial Sequence; identical to SEQ ID NO: 31355
  Cyclic GFR-binding peptide
  MOD_RES (29)..(30): Xaa is C or S

SEQ ID NO: 76499 - protein, 29 aa, Artificial Sequence
  Cyclic GFR-binding peptide
  MOD_RES (1)..(3): Xaa is C or S
XGXSRVVMNRYKKLIVNSSDDFYLVSIAN

SEQ ID NO: 76500 - protein, 33 aa, Artificial Sequence; identical to SEQ ID NO: 5911
  Cyclic GFR-binding peptide
  MOD_RES (28)..(29): Xaa is C or S

SEQ ID NO: 76501 - protein, 30 aa, Artificial Sequence
  Cyclic GFR-binding peptide
  MOD_RES (27)..(28): Xaa is C or S
GRYKKLIIQQKDNFYLMSIANMKTPTXXPG

SEQ ID NO: 76502 - protein, 35 aa, Artificial Sequence; identical to SEQ ID NO: 5913
  Cyclic GFR-binding peptide
  MOD_RES (2)..(34)..(35): Xaa is C or S

SEQ ID NO: 76503 - protein, 32 aa, Artificial Sequence
  Cyclic GFR-binding peptide
  MOD_RES (2)..(2): Xaa is C or S
GXEEVIMRYKKLLLVRGNDFYLMSIANTKVPA

SEQ ID NO: 76504 - protein, 36 aa, Artificial Sequence; identical to SEQ ID NO: 5914
  Cyclic GFR-binding peptide
  MOD_RES (2)..(4)..(36): Xaa is C or S

SEQ ID NO: 76505 - protein, 30 aa, Artificial Sequence; identical to SEQ ID NO: 5915
  Cyclic GFR-binding peptide
  MOD_RES (28)..(29): Xaa is C or S

SEQ ID NO: 76506 - protein, 35 aa, Artificial Sequence; identical to SEQ ID NO: 3111
  Cyclic GFR-binding peptide
  MOD_RES (1)..(33)..(34): Xaa is C or S

SEQ ID NO: 76507 - protein, 36 aa, Artificial Sequence; identical to SEQ ID NO: 31367
  Cyclic GFR-binding peptide
  MOD_RES (2)..(4)..(36): Xaa is C or S

SEQ ID NO: 76508 - protein, 23 aa, Artificial Sequence
  Cyclic GFR-binding peptide
MGERYKKLTPVGMDDFYLVSIAN

SEQ ID NO: 76509 - protein, 26 aa, Artificial Sequence
  Cyclic GFR-binding peptide
GEVVMDRYKKLVVKENEDFYLMSIAN

SEQ ID NO: 76510 - protein, 35 aa, Artificial Sequence; identical to SEQ ID NO: 13664
  Cyclic GFR-binding peptide
  MOD_RES (32)..(33): Xaa is C or S

SEQ ID NO: 76511 - protein, 29 aa, Artificial Sequence
  Cyclic GFR-binding peptide
  MOD_RES (29)..(29): Xaa is C or S
VMERYKKLVVKDYEDFYLMSIANLETPVX

SEQ ID NO: 76512 - protein, 27 aa, Artificial Sequence
  Cyclic GFR-binding peptide
AVSMGERYKKLTPVGMDDFYLVSIANL

SEQ ID NO: 76513 - protein, 20 aa, Artificial Sequence
  Cyclic GFR-binding peptide
RYKKLIVNNSSDFYLVSIAN

SEQ ID NO: 76514 - protein, 22 aa, Artificial Sequence
  Cyclic GFR-binding peptide
RYKKLVVNNAADFYLISIANLR

SEQ ID NO: 76515 - protein, 23 aa, Artificial Sequence
  Cyclic GFR-binding peptide
MNRYKKLIVNNSSDFYLVSIANL

SEQ ID NO: 76516 - protein, 37 aa, Artificial Sequence; identical to SEQ ID NO: 34282
  Cyclic GFR-binding peptide
  MOD_RES (2)..(4)..(36)..(37): Xaa is C or S

SEQ ID NO: 76517 - protein, 39 aa, Artificial Sequence; identical to SEQ ID NO: 5941
  Cyclic GFR-binding peptide
  MOD_RES (2)..(4)..(36)..(37): Xaa is C or S

SEQ ID NO: 76518 - protein, 34 aa, Artificial Sequence; identical to SEQ ID NO: 3143
  Cyclic GFR-binding peptide
  MOD_RES (1)..(3): Xaa is C or S

SEQ ID NO: 76519 - protein, 33 aa, Artificial Sequence; identical to SEQ ID NO: 5943
  Cyclic GFR-binding peptide
  MOD_RES (27)..(28): Xaa is C or S

SEQ ID NO: 76520 - protein, 34 aa, Artificial Sequence; identical to SEQ ID NO: 3145
  Cyclic GFR-binding peptide
  MOD_RES (28)..(28): Xaa is C or S

SEQ ID NO: 76521 - protein, 20 aa, Artificial Sequence
  Cyclic GFR-binding peptide
RYKKLIIQQKDNFYLMSIAN

SEQ ID NO: 76522 - protein, 29 aa, Artificial Sequence
  Cyclic GFR-binding peptide
  MOD_RES (26)..(27): Xaa is C or S
RYKKLVVKDYEDFYLMSIANLETPVXXAK

SEQ ID NO: 76523 - protein, 39 aa, Artificial Sequence; identical to SEQ ID NO: 3150
  Cyclic GFR-binding peptide
  MOD_RES (2)..(4)..(36)..(37): Xaa is C or S

SEQ ID NO: 76524 - protein, 38 aa, Artificial Sequence; identical to SEQ ID NO: 5952
  Cyclic GFR-binding peptide
  MOD_RES (32)..(33): Xaa is C or S

SEQ ID NO: 76525 - protein, 34 aa, Artificial Sequence; identical to SEQ ID NO: 31411
  Cyclic GFR-binding peptide
  MOD_RES (28)..(29): Xaa is C or S

SEQ ID NO: 76526 - protein, 31 aa, Artificial Sequence; identical to SEQ ID NO: 5954
  Cyclic GFR-binding peptide
  MOD_RES (1)..(1): Xaa is C or S

SEQ ID NO: 76527 - protein, 34 aa, Artificial Sequence; identical to SEQ ID NO: 3156
  Cyclic GFR-binding peptide
  MOD_RES (2)..(4): Xaa is C or S

SEQ ID NO: 76528 - protein, 38 aa, Artificial Sequence; identical to SEQ ID NO: 3157
  Cyclic GFR-binding peptide
  MOD_RES (2)..(4)..(36): Xaa is C or S

SEQ ID NO: 76529 - protein, 27 aa, Artificial Sequence
  Cyclic GFR-binding peptide
VMDRYKKLVVNNAADFYLISIANLRAP

SEQ ID NO: 76530 - protein, 32 aa, Artificial Sequence; identical to SEQ ID NO: 16391
  Cyclic GFR-binding peptide
  MOD_RES (26)..(27): Xaa is C or S

SEQ ID NO: 76531 - protein, 31 aa, Artificial Sequence; identical to SEQ ID NO: 3166
  Cyclic GFR-binding peptide
  MOD_RES (29)..(30): Xaa is C or S

SEQ ID NO: 76532 - protein, 33 aa, Artificial Sequence; identical to SEQ ID NO: 34308
  Cyclic GFR-binding peptide
  MOD_RES (27)..(28): Xaa is C or S

SEQ ID NO: 76533 - protein, 33 aa, Artificial Sequence; identical to SEQ ID NO: 3168
  Cyclic GFR-binding peptide
  MOD_RES (28)..(29): Xaa is C or S

SEQ ID NO: 76534 - protein, 24 aa, Artificial Sequence
  Cyclic GFR-binding peptide
RYKKLVVKENEDFYLMSIANLETP

SEQ ID NO: 76535 - protein, 34 aa, Artificial Sequence; identical to SEQ ID NO: 3170
  Cyclic GFR-binding peptide
  MOD_RES (1)..(33)..(34): Xaa is C or S

SEQ ID NO: 76536 - protein, 35 aa, Artificial Sequence; identical to SEQ ID NO: 34313
  Cyclic GFR-binding peptide
  MOD_RES (2)..(34)..(35): Xaa is C or S

SEQ ID NO: 76537 - protein, 34 aa, Artificial Sequence; identical to SEQ ID NO: 3171
  Cyclic GFR-binding peptide
  MOD_RES (28)..(29): Xaa is C or S

SEQ ID NO: 76538 - protein, 37 aa, Artificial Sequence; identical to SEQ ID NO: 5973
  Cyclic GFR-binding peptide
  MOD_RES (1)..(3)..(36)..(37): Xaa is C or S

SEQ ID NO: 76539 - protein, 26 aa, Artificial Sequence
  Cyclic GFR-binding peptide
  MOD_RES (26)..(26): Xaa is C or S
RYKKLVVKENEDFYLMSIANLETPVX

SEQ ID NO: 76540 - protein, 38 aa, Artificial Sequence; identical to SEQ ID NO: 3176
  Cyclic GFR-binding peptide
  MOD_RES (2)..(34): Xaa is C or S

SEQ ID NO: 76541 - protein, 27 aa, Artificial Sequence
  Cyclic GFR-binding peptide
VMERYKKLVVKDYEDFYLMSIANLETP

SEQ ID NO: 76542 - protein, 33 aa, Artificial Sequence; identical to SEQ ID NO: 5977
  Cyclic GFR-binding peptide
  MOD_RES (30)..(31): Xaa is C or S

SEQ ID NO: 76543 - protein, 36 aa, Artificial Sequence; identical to SEQ ID NO: 16410
  Cyclic GFR-binding peptide
  MOD_RES (1)..(33)..(34): Xaa is C or S

SEQ ID NO: 76544 - protein, 41 aa, Artificial Sequence; identical to SEQ ID NO: 5979
  Cyclic GFR-binding peptide
  MOD_RES (2)..(4)..(36)..(37): Xaa is C or S

SEQ ID NO: 76545 - protein, 34 aa, Artificial Sequence; identical to SEQ ID NO: 5981
  Cyclic GFR-binding peptide
  MOD_RES (28)..(29): Xaa is C or S

SEQ ID NO: 76546 - protein, 40 aa, Artificial Sequence; identical to SEQ ID NO: 5983
  Cyclic GFR-binding peptide
  MOD_RES (1)..(34)..(35): Xaa is C or S

SEQ ID NO: 76547 - protein, 32 aa, Artificial Sequence; identical to SEQ ID NO: 3183
  Cyclic GFR-binding peptide
  MOD_RES (30)..(31): Xaa is C or S

SEQ ID NO: 76548 - protein, 32 aa, Artificial Sequence; identical to SEQ ID NO: 5986
  Cyclic GFR-binding peptide
  MOD_RES (32)..(32): Xaa is C or S

SEQ ID NO: 76549 - protein, 39 aa, Artificial Sequence
  Cyclic GFR-binding peptide
  MOD_RES (2)..(34)..(35): Xaa is C or S
GXRDVVMGRYKKLIIQQKDNFYLMSIANMKTPTXXPGAS

SEQ ID NO: 76550 - protein, 27 aa, Artificial Sequence
  Cyclic GFR-binding peptide
MNRYKKLIVNSSDDFYLVSIANLQTPA

SEQ ID NO: 76551 - protein, 29 aa, Artificial Sequence
  Cyclic GFR-binding peptide
  MOD_RES (1)..(1): Xaa is C or S
XESVAMGRYKKLYTVVGKDFYLISIANLK

SEQ ID NO: 76552 - protein, 26 aa, Artificial Sequence
  Cyclic GFR-binding peptide
EVVMDRYKKLVVNNAADFYLISIANL

SEQ ID NO: 76553 - protein, 29 aa, Artificial Sequence
  Cyclic GFR-binding peptide
AVSMGERYKKLTPVGMDDFYLVSIANLKT

SEQ ID NO: 76554 - protein, 34 aa, Artificial Sequence; identical to SEQ ID NO: 31455
  Cyclic GFR-binding peptide
  MOD_RES (29)..(30): Xaa is C or S

SEQ ID NO: 76555 - protein, 35 aa, Artificial Sequence; identical to SEQ ID NO: 5999
  Cyclic GFR-binding peptide
  MOD_RES (2)..(34): Xaa is C or S

SEQ ID NO: 76556 - protein, 23 aa, Artificial Sequence
  Cyclic GFR-binding peptide
DRYKKLVVKENEDFYLMSIANLE

SEQ ID NO: 76557 - protein, 21 aa, Artificial Sequence
  Cyclic GFR-binding peptide
RYKKLVVNNAADFYLISIANL

SEQ ID NO: 76558 - protein, 28 aa, Artificial Sequence
  Cyclic GFR-binding peptide
  MOD_RES (27)..(28): Xaa is C or S
MRYKKLLLVRGNDFYLMSIANTKVPAXX

SEQ ID NO: 76559 - protein, 27 aa, Artificial Sequence
  Cyclic GFR-binding peptide
  MOD_RES (27)..(27): Xaa is C or S
MRYKKLLLVRGNDFYLMSIANTKVPAX

SEQ ID NO: 76560 - protein, 22 aa, Artificial Sequence
  Cyclic GFR-binding peptide
RYKKLIVNSSDDFYLVSIANLK

SEQ ID NO: 76561 - protein, 22 aa, Artificial Sequence
  Cyclic GFR-binding peptide
RYKKLTPVGMDDFYLVSIANLK

SEQ ID NO: 76562 - protein, 35 aa, Artificial Sequence
  Cyclic GFR-binding peptide
  MOD_RES (1)..(33)..(34): Xaa is C or S
XRDVVMGRYKKLIIQQKDNFYLMSIANMKTPTXXP

SEQ ID NO: 76563 - protein, 42 aa, Artificial Sequence; identical to SEQ ID NO: 31468
  Cyclic GFR-binding peptide
  MOD_RES (2)..(4)..(36)..(37): Xaa is C or S

SEQ ID NO: 76564 - protein, 31 aa, Artificial Sequence; identical to SEQ ID NO: 3203
  Cyclic GFR-binding peptide
  MOD_RES (28)..(28): Xaa is C or S

SEQ ID NO: 76565 - protein, 29 aa, Artificial Sequence
  Cyclic GFR-binding peptide
  MOD_RES (2)..(2): Xaa is C or S
GXESVAMGRYKKLYTVVGKDFYLISIANL

SEQ ID NO: 76566 - protein, 32 aa, Artificial Sequence
  Cyclic GFR-binding peptide
  MOD_RES (28)..(29): Xaa is C or S
IMRYKKLLLVRGNDFYLMSIANTKVPAXXTSP

SEQ ID NO: 76567 - protein, 26 aa, Artificial Sequence
  Cyclic GFR-binding peptide
  MOD_RES (26)..(26): Xaa is C or S
RYKKLIVNSSDDFYLVSIANLKTPAX

SEQ ID NO: 76568 - protein, 38 aa, Artificial Sequence; identical to SEQ ID NO: 16449
  Cyclic GFR-binding peptide
  MOD_RES (1)..(33)..(34): Xaa is C or S

SEQ ID NO: 76569 - protein, 28 aa, Artificial Sequence
  Cyclic GFR-binding peptide
  MOD_RES (2)..(2): Xaa is C or S
GXAKVVMNRYKKLIVNNSSDFYLVSIAN

SEQ ID NO: 76570 - protein, 36 aa, Artificial Sequence; identical to SEQ ID NO: 3212
  Cyclic GFR-binding peptide
  MOD_RES (31)..(32): Xaa is C or S

SEQ ID NO: 76571 - protein, 33 aa, Artificial Sequence; identical to SEQ ID NO: 16452
  Cyclic GFR-binding peptide
  MOD_RES (2)..(4): Xaa is C or S

SEQ ID NO: 76572 - protein, 24 aa, Artificial Sequence
  Cyclic GFR-binding peptide
RYKKLLLVRGNDFYLMSIANTKVP

SEQ ID NO: 76573 - protein, 36 aa, Artificial Sequence; identical to SEQ ID NO: 6024
  Cyclic GFR-binding peptide
  MOD_RES (32)..(32): Xaa is C or S

SEQ ID NO: 76574 - protein, 38 aa, Artificial Sequence; identical to SEQ ID NO: 6025
  Cyclic GFR-binding peptide
  MOD_RES (1)..(3)..(35): Xaa is C or S

SEQ ID NO: 76575 - protein, 38 aa, Artificial Sequence; identical to SEQ ID NO: 6026
  Cyclic GFR-binding peptide
  MOD_RES (2)..(34)..(35): Xaa is C or S

SEQ ID NO: 76576 - protein, 22 aa, Artificial Sequence
  Cyclic GFR-binding peptide
IMRYKKLLLVRGNDFYLMSIAN

SEQ ID NO: 76577 - protein, 25 aa, Artificial Sequence
  Cyclic GFR-binding peptide
RYKKLTPVGMDDFYLVSIANLKTPV

SEQ ID NO: 76578 - protein, 34 aa, Artificial Sequence; identical to SEQ ID NO: 6029
  Cyclic GFR-binding peptide
  MOD_RES (31)..(32): Xaa is C or S

SEQ ID NO: 76579 - protein, 33 aa, Artificial Sequence; identical to SEQ ID NO: 6030
  Cyclic GFR-binding peptide
  MOD_RES (29)..(30): Xaa is C or S

SEQ ID NO: 76580 - protein, 26 aa, Artificial Sequence
  Cyclic GFR-binding peptide
EVVMERYKKLVVKDYEDFYLMSIANL

SEQ ID NO: 76581 - protein, 39 aa, Artificial Sequence; identical to SEQ ID NO: 31492
  Cyclic GFR-binding peptide
  MOD_RES (2)..(34)..(35): Xaa is C or S

SEQ ID NO: 76582 - protein, 39 aa, Artificial Sequence; identical to SEQ ID NO: 6038
  Cyclic GFR-binding peptide
  MOD_RES (1)..(34)..(35): Xaa is C or S

SEQ ID NO: 76583 - protein, 29 aa, Artificial Sequence
  Cyclic GFR-binding peptide
  MOD_RES (1)..(3): Xaa is C or S
XGXGEVVMERYKKLVVKDYEDFYLMSIAN

SEQ ID NO: 76584 - protein, 33 aa, Artificial Sequence; identical to SEQ ID NO: 3233
  Cyclic GFR-binding peptide
  MOD_RES (1)..(3): Xaa is C or S

SEQ ID NO: 76585 - protein, 28 aa, Artificial Sequence
  Cyclic GFR-binding peptide
  MOD_RES (1)..(1): Xaa is C or S
XEAVSMGERYKKLTPVGMDDFYLVSIAN

SEQ ID NO: 76586 - protein, 37 aa, Artificial Sequence; identical to SEQ ID NO: 34402
  Cyclic GFR-binding peptide
  MOD_RES (1)..(3)..(35)..(36): Xaa is C or S

SEQ ID NO: 76587 - protein, 36 aa, Artificial Sequence; identical to SEQ ID NO: 3235
  Cyclic GFR-binding peptide
  MOD_RES (2)..(34)..(35): Xaa is C or S

SEQ ID NO: 76588 - protein, 34 aa, Artificial Sequence; identical to SEQ ID NO: 31506
  Cyclic GFR-binding peptide
  MOD_RES (30)..(31): Xaa is C or S

SEQ ID NO: 76589 - protein, 26 aa, Artificial Sequence
  Cyclic GFR-binding peptide
MERYKKLVVKDYEDFYLMSIANLETP

SEQ ID NO: 76590 - protein, 27 aa, Artificial Sequence
  Cyclic GFR-binding peptide
  MOD_RES (27)..(27): Xaa is C or S
ERYKKLTPVGMDDFYLVSIANLKTPVX

SEQ ID NO: 76591 - protein, 28 aa, Artificial Sequence
  Cyclic GFR-binding peptide
  MOD_RES (27)..(28): Xaa is C or S
ERYKKLTPVGMDDFYLVSIANLKTPVXX

SEQ ID NO: 76592 - protein, 39 aa, Artificial Sequence; identical to SEQ ID NO: 13800
  Cyclic GFR-binding peptide
  MOD_RES (2)..(4)..(36)..(37): Xaa is C or S

SEQ ID NO: 76593 - protein, 35 aa, Artificial Sequence; identical to SEQ ID NO: 6067
  Cyclic GFR-binding peptide
  MOD_RES (31)..(32): Xaa is C or S

SEQ ID NO: 76594 - protein, 32 aa, Artificial Sequence; identical to SEQ ID NO: 6070
  Cyclic GFR-binding peptide
  MOD_RES (1)..(3): Xaa is C or S

SEQ ID NO: 76595 - protein, 33 aa, Artificial Sequence; identical to SEQ ID NO: 34415
  Cyclic GFR-binding peptide
  MOD_RES (2)..(2): Xaa is C or S

SEQ ID NO: 76596 - protein, 34 aa, Artificial Sequence; identical to SEQ ID NO: 6071
  Cyclic GFR-binding peptide
  MOD_RES (2)..(4): Xaa is C or S

SEQ ID NO: 76597 - protein, 37 aa, Artificial Sequence; identical to SEQ ID NO: 3247
  Cyclic GFR-binding peptide
  MOD_RES (1)..(3)..(35)..(36): Xaa is C or S

SEQ ID NO: 76598 - protein, 29 aa, Artificial Sequence
  Cyclic GFR-binding peptide
EEVIMRYKKLLLVRGNDFYLMSIANTKVP

SEQ ID NO: 76599 - protein, 24 aa, Artificial Sequence
  Cyclic GFR-binding peptide
ERYKKLVVKDYEDFYLMSIANLET

SEQ ID NO: 76600 - protein, 24 aa, Artificial Sequence
  Cyclic GFR-binding peptide
RYKKLVVNNASDFYLISIANLRTP

SEQ ID NO: 76601 - protein, 35 aa, Artificial Sequence
  Cyclic GFR-binding peptide
  MOD_RES (30)..(31): Xaa is C or S
VVMGRYKKLIIQQKDNFYLMSIANMKTPTXXPGAS

SEQ ID NO: 76602 - protein, 31 aa, Artificial Sequence; identical to SEQ ID NO: 34432
  Cyclic GFR-binding peptide
  MOD_RES (2)..(2): Xaa is C or S

SEQ ID NO: 76603 - protein, 23 aa, Artificial Sequence
  Cyclic GFR-binding peptide
NRYKKLIVNNSSDFYLVSIANLK

SEQ ID NO: 76604 - protein, 33 aa, Artificial Sequence; identical to SEQ ID NO: 3255
  Cyclic GFR-binding peptide
  MOD_RES (1)..(3): Xaa is C or S

SEQ ID NO: 76605 - protein, 39 aa, Artificial Sequence; identical to SEQ ID NO: 6085
  Cyclic GFR-binding peptide
  MOD_RES (2)..(34): Xaa is C or S

SEQ ID NO: 76606 - protein, 23 aa, Artificial Sequence
  Cyclic GFR-binding peptide
ERYKKLVVKDYEDFYLMSIANLE

SEQ ID NO: 76607 - protein, 38 aa, Artificial Sequence; identical to SEQ ID NO: 13816
  Cyclic GFR-binding peptide
  MOD_RES (2)..(4)..(36)..(37): Xaa is C or S

SEQ ID NO: 76608 - protein, 29 aa, Artificial Sequence
  Cyclic GFR-binding peptide
  MOD_RES (1)..(1): Xaa is C or S
XRDVVMGRYKKLIIQQKDNFYLMSIANMK

SEQ ID NO: 76609 - protein, 29 aa, Artificial Sequence
  Cyclic GFR-binding peptide
  MOD_RES (28)..(29): Xaa is C or S
MNRYKKLIVNSSDDFYLVSIANLKTPAXX

SEQ ID NO: 76610 - protein, 35 aa, Artificial Sequence; identical to SEQ ID NO: 6091
  Cyclic GFR-binding peptide
  MOD_RES (1)..(3)..(35): Xaa is C or S

SEQ ID NO: 76611 - protein, 32 aa, Artificial Sequence; identical to SEQ ID NO: 3265
  Cyclic GFR-binding peptide
  MOD_RES (2)..(2): Xaa is C or S

SEQ ID NO: 76612 - protein, 39 aa, Artificial Sequence; identical to SEQ ID NO: 31543
  Cyclic GFR-binding peptide
  MOD_RES (1)..(3)..(35)..(36): Xaa is C or S

SEQ ID NO: 76613 - protein, 28 aa, Artificial Sequence
  Cyclic GFR-binding peptide
  MOD_RES (2)..(2): Xaa is C or S
GXSEVVMDRYKKLVVNNASDFYLISIAN

SEQ ID NO: 76614 - protein, 35 aa, Artificial Sequence; identical to SEQ ID NO: 31549
  Cyclic GFR-binding peptide
  MOD_RES (29)..(30): Xaa is C or S

SEQ ID NO: 76615 - protein, 26 aa, Artificial Sequence
  Cyclic GFR-binding peptide
MNRYKKLIVNSSDDFYLVSIANLKTP

SEQ ID NO: 76616 - protein, 28 aa, Artificial Sequence
  Cyclic GFR-binding peptide
VMERYKKLVVKDYEDFYLMSIANLETPV

SEQ ID NO: 76617 - protein, 34 aa, Artificial Sequence; identical to SEQ ID NO: 3283
  Cyclic GFR-binding peptide
  MOD_RES (29)..(30): Xaa is C or S

SEQ ID NO: 76618 - protein, 35 aa, Artificial Sequence; identical to SEQ ID NO: 16519
  Cyclic GFR-binding peptide
  MOD_RES (30)..(31): Xaa is C or S

SEQ ID NO: 76619 - protein, 27 aa, Artificial Sequence
  Cyclic GFR-binding peptide
  MOD_RES (2)..(2): Xaa is C or S
GXEEVIMRYKKLLLVRGNDFYLMSIAN

SEQ ID NO: 76620 - protein, 38 aa, Artificial Sequence; identical to SEQ ID NO: 3284
  Cyclic GFR-binding peptide
  MOD_RES (2)..(4)..(36)..(37): Xaa is C or S

SEQ ID NO: 76621 - protein, 36 aa, Artificial Sequence; identical to SEQ ID NO: 6121
  Cyclic GFR-binding peptide
  MOD_RES (32)..(33): Xaa is C or S

SEQ ID NO: 76622 - protein, 27 aa, Artificial Sequence
  Cyclic GFR-binding peptide
  MOD_RES (1)..(1): Xaa is C or S
XRDVVMGRYKKLIIQQKDNFYLMSIAN

SEQ ID NO: 76623 - protein, 29 aa, Artificial Sequence
  Cyclic GFR-binding peptide
  MOD_RES (1)..(3): Xaa is C or S
XGXEEVIMRYKKLLLVRGNDFYLMSIANT

SEQ ID NO: 76624 - protein, 27 aa, Artificial Sequence
  Cyclic GFR-binding peptide
ARVVMNRYKKLIVNSSDDFYLVSIANL

SEQ ID NO: 76625 - protein, 28 aa, Artificial Sequence
  Cyclic GFR-binding peptide
EVVMDRYKKLVVNNAADFYLISIANLRA

SEQ ID NO: 76626 - protein, 27 aa, Artificial Sequence
  Cyclic GFR-binding peptide
VMNRYKKLIVNSSDDFYLVSIANLQTP

SEQ ID NO: 76627 - protein, 35 aa, Artificial Sequence
  Cyclic GFR-binding peptide
  MOD_RES (1)..(32)..(33): Xaa is C or S
XEEVIMRYKKLLLVRGNDFYLMSIANTKVPAXXTS

SEQ ID NO: 76628 - protein, 33 aa, Artificial Sequence; identical to SEQ ID NO: 3300
  Cyclic GFR-binding peptide
  MOD_RES (27)..(28): Xaa is C or S

SEQ ID NO: 76629 - protein, 37 aa, Artificial Sequence; identical to SEQ ID NO: 16543
  Cyclic GFR-binding peptide
  MOD_RES (1)..(33)..(34): Xaa is C or S

SEQ ID NO: 76630 - protein, 29 aa, Artificial Sequence
  Cyclic GFR-binding peptide
EVIMRYKKLLLVRGNDFYLMSIANTKVPA

SEQ ID NO: 76631 - protein, 26 aa, Artificial Sequence
  Cyclic GFR-binding peptide
VSMGERYKKLTPVGMDDFYLVSIANL

SEQ ID NO: 76632 - protein, 28 aa, Artificial Sequence
  Cyclic GFR-binding peptide
EVIMRYKKLLLVRGNDFYLMSIANTKVP

SEQ ID NO: 76633 - protein, 22 aa, Artificial Sequence
  Cyclic GFR-binding peptide
ERYKKLVVKDYEDFYLMSIANL

SEQ ID NO: 76634 - protein, 25 aa, Artificial Sequence
  Cyclic GFR-binding peptide
VVMNRYKKLIVNNSSDFYLVSIANL

SEQ ID NO: 76635 - protein, 31 aa, Artificial Sequence
  Cyclic GFR-binding peptide
  MOD_RES (1)..(3): Xaa is C or S
XGXRDVVMGRYKKLIIQQKDNFYLMSIANMK

SEQ ID NO: 76636 - protein, 33 aa, Artificial Sequence; identical to SEQ ID NO: 34504
  Cyclic GFR-binding peptide
  MOD_RES (32)..(33): Xaa is C or S

SEQ ID NO: 76637 - protein, 36 aa, Artificial Sequence; identical to SEQ ID NO: 6156
  Cyclic GFR-binding peptide
  MOD_RES (1)..(33)..(34): Xaa is C or S

SEQ ID NO: 76638 - protein, 29 aa, Artificial Sequence
  Cyclic GFR-binding peptide
SVAMGRYKKLYTVVGKDFYLISIANLKTP

SEQ ID NO: 76639 - protein, 28 aa, Artificial Sequence
  Cyclic GFR-binding peptide
EAVSMGERYKKLTPVGMDDFYLVSIANL

SEQ ID NO: 76640 - protein, 40 aa, Artificial Sequence; identical to SEQ ID NO: 3316
  Cyclic GFR-binding peptide
  MOD_RES (2)..(4)..(36)..(37): Xaa is C or S

SEQ ID NO: 76641 - protein, 32 aa, Artificial Sequence; identical to SEQ ID NO: 6161
  Cyclic GFR-binding peptide
  MOD_RES (27)..(28): Xaa is C or S

SEQ ID NO: 76642 - protein, 26 aa, Artificial Sequence
  Cyclic GFR-binding peptide
VMNRYKKLIVNNSSDFYLVSIANLKT

SEQ ID NO: 76643 - protein, 27 aa, Artificial Sequence
  Cyclic GFR-binding peptide
SRVVMNRYKKLIVNSSDDFYLVSIANL

SEQ ID NO: 76644 - protein, 25 aa, Artificial Sequence
  Cyclic GFR-binding peptide
RYKKLLLVRGNDFYLMSIANTKVPA

SEQ ID NO: 76645 - protein, 27 aa, Artificial Sequence
  Cyclic GFR-binding peptide
  MOD_RES (26)..(27): Xaa is C or S
RYKKLVVNNASDFYLISIANLRTPVXX

SEQ ID NO: 76646 - protein, 37 aa, Artificial Sequence; identical to SEQ ID NO: 6175
  Cyclic GFR-binding peptide
  MOD_RES (31)..(32): Xaa is C or S

SEQ ID NO: 76647 - protein, 38 aa, Artificial Sequence; identical to SEQ ID NO: 3337
  Cyclic GFR-binding peptide
  MOD_RES (2)..(35)..(36): Xaa is C or S

SEQ ID NO: 76648 - protein, 28 aa, Artificial Sequence
  Cyclic GFR-binding peptide
  MOD_RES (27)..(28): Xaa is C or S
DRYKKLVVNNAADFYLISIANLRAPVXX

SEQ ID NO: 76649 - protein, 26 aa, Artificial Sequence
  Cyclic GFR-binding peptide
GERYKKLTPVGMDDFYLVSIANLKTP

SEQ ID NO: 76650 - protein, 33 aa, Artificial Sequence; identical to SEQ ID NO: 16574
  Cyclic GFR-binding peptide
  MOD_RES (27)..(28): Xaa is C or S

SEQ ID NO: 76651 - protein, 24 aa, Artificial Sequence
  Cyclic GFR-binding peptide
VVMNRYKKLIVNSSDDFYLVSIAN

SEQ ID NO: 76652 - protein, 36 aa, Artificial Sequence; identical to SEQ ID NO: 6185
  Cyclic GFR-binding peptide
  MOD_RES (31)..(32): Xaa is C or S

SEQ ID NO: 76653 - protein, 26 aa, Artificial Sequence
  Cyclic GFR-binding peptide
  MOD_RES (26)..(26): Xaa is C or S
RYKKLVVNNASDFYLISIANLRTPVX

SEQ ID NO: 76654 - protein, 38 aa, Artificial Sequence; identical to SEQ ID NO: 6186
  Cyclic GFR-binding peptide
  MOD_RES (2)..(34)..(35): Xaa is C or S

SEQ ID NO: 76655 - protein, 24 aa, Artificial Sequence
  Cyclic GFR-binding peptide
NRYKKLIVNNSSDFYLVSIANLKT

SEQ ID NO: 76656 - protein, 36 aa, Artificial Sequence; identical to SEQ ID NO: 3355
  Cyclic GFR-binding peptide
  MOD_RES (1)..(33)..(34): Xaa is C or S

SEQ ID NO: 76657 - protein, 32 aa, Artificial Sequence
  Cyclic GFR-binding peptide
  MOD_RES (26)..(27): Xaa is C or S
RYKKLLLVRGNDFYLMSIANTKVPAXXTSPVR

SEQ ID NO: 76658 - protein, 28 aa, Artificial Sequence
  Cyclic GFR-binding peptide
  MOD_RES (27)..(27): Xaa is C or S
NRYKKLIVNSSDDFYLVSIANLKTPAXT

SEQ ID NO: 76659 - protein, 30 aa, Artificial Sequence; identical to SEQ ID NO: 16598
  Cyclic GFR-binding peptide
  MOD_RES (27)..(28): Xaa is C or S

SEQ ID NO: 76660 - protein, 37 aa, Artificial Sequence; identical to SEQ ID NO: 3370
  Cyclic GFR-binding peptide
  MOD_RES (1)..(33)..(34): Xaa is C or S

SEQ ID NO: 76661 - protein, 34 aa, Artificial Sequence; identical to SEQ ID NO: 6204
  Cyclic GFR-binding peptide
  MOD_RES (30)..(30): Xaa is C or S

SEQ ID NO: 76662 - protein, 33 aa, Artificial Sequence; identical to SEQ ID NO: 6206
  Cyclic GFR-binding peptide
  MOD_RES (27)..(27): Xaa is C or S

SEQ ID NO: 76663 - protein, 42 aa, Artificial Sequence; identical to SEQ ID NO: 6207
  Cyclic GFR-binding peptide
  MOD_RES (1)..(3)..(36)..(37): Xaa is C or S

SEQ ID NO: 76664 - protein, 28 aa, Artificial Sequence
  Cyclic GFR-binding peptide
VMDRYKKLVVNNASDFYLISIANLRTPV

SEQ ID NO: 76665 - protein, 27 aa, Artificial Sequence
  Cyclic GFR-binding peptide
EVVMDRYKKLVVNNASDFYLISIANLR

SEQ ID NO: 76666 - protein, 31 aa, Artificial Sequence
  Cyclic GFR-binding peptide
  MOD_RES (2)..(4): Xaa is C or S
LXGXEEVIMRYKKLLLVRGNDFYLMSIANTK

SEQ ID NO: 76667 - protein, 30 aa, Artificial Sequence; identical to SEQ ID NO: 6219
  Cyclic GFR-binding peptide

SEQ ID NO: 76668 - protein, 37 aa, Artificial Sequence; identical to SEQ ID NO: 16626
  Cyclic GFR-binding peptide
  MOD_RES (32)..(33): Xaa is C or S

SEQ ID NO: 76669 - protein, 31 aa, Artificial Sequence; identical to SEQ ID NO: 6221
  Cyclic GFR-binding peptide
  MOD_RES (31)..(31): Xaa is C or S

SEQ ID NO: 76670 - protein, 32 aa, Artificial Sequence; identical to SEQ ID NO: 3383
  Cyclic GFR-binding peptide
  MOD_RES (29)..(30): Xaa is C or S

SEQ ID NO: 76671 - protein, 20 aa, Artificial Sequence
  Cyclic GFR-binding peptide
RYKKLVVNNAADFYLISIAN

SEQ ID NO: 76672 - protein, 38 aa, Artificial Sequence; identical to SEQ ID NO: 34583
  Cyclic GFR-binding peptide
  MOD_RES (2)..(4)..(36)..(37): Xaa is C or S

SEQ ID NO: 76673 - protein, 29 aa, Artificial Sequence
  Cyclic GFR-binding peptide
  MOD_RES (2)..(2): Xaa is C or S
GXEAVSMGERYKKLTPVGMDDFYLVSIAN

SEQ ID NO: 76674 - protein, 34 aa, Artificial Sequence; identical to SEQ ID NO: 6227
  Cyclic GFR-binding peptide
  MOD_RES (31)..(32): Xaa is C or S

SEQ ID NO: 76675 - protein, 35 aa, Artificial Sequence; identical to SEQ ID NO: 3392
  Cyclic GFR-binding peptide
  MOD_RES (1)..(3)..(35): Xaa is C or S

SEQ ID NO: 76676 - protein, 34 aa, Artificial Sequence
  Cyclic GFR-binding peptide
  MOD_RES (29)..(30): Xaa is C or S
VMGRYKKLIIQQKDNFYLMSIANMKTPTXXPGAS

SEQ ID NO: 76677 - protein, 25 aa, Artificial Sequence
  Cyclic GFR-binding peptide
SMGERYKKLTPVGMDDFYLVSIANL

SEQ ID NO: 76678 - protein, 29 aa, Artificial Sequence
  Cyclic GFR-binding peptide
  MOD_RES (29)..(29): Xaa is C or S
VMDRYKKLVVKENEDFYLMSIANLETPVX

SEQ ID NO: 76679 - protein, 31 aa, Artificial Sequence
  Cyclic GFR-binding peptide
  MOD_RES (27)..(28): Xaa is C or S
MRYKKLLLVRGNDFYLMSIANTKVPAXXTSP

SEQ ID NO: 76680 - protein, 29 aa, Artificial Sequence
  Cyclic GFR-binding peptide
  MOD_RES (28)..(29): Xaa is C or S
MNRYKKLIVNSSDDFYLVSIANLQTPAXX

SEQ ID NO: 76681 - protein, 35 aa, Artificial Sequence; identical to SEQ ID NO: 6237
  Cyclic GFR-binding peptide
  MOD_RES (1)..(3)..(35): Xaa is C or S

SEQ ID NO: 76682 - protein, 33 aa, Artificial Sequence; identical to SEQ ID NO: 6238
  Cyclic GFR-binding peptide
  MOD_RES (27)..(28): Xaa is C or S

SEQ ID NO: 76683 - protein, 32 aa, Artificial Sequence; identical to SEQ ID NO: 31684
  Cyclic GFR-binding peptide
  MOD_RES (26)..(27): Xaa is C or S

SEQ ID NO: 76684 - protein, 33 aa, Artificial Sequence; identical to SEQ ID NO: 3404
  Cyclic GFR-binding peptide
  MOD_RES (31)..(32): Xaa is C or S

SEQ ID NO: 76685 - protein, 42 aa, Artificial Sequence; identical to SEQ ID NO: 3408
  Cyclic GFR-binding peptide
  MOD_RES (2)..(4)..(36)..(37): Xaa is C or S

SEQ ID NO: 76686 - protein, 27 aa, Artificial Sequence
  Cyclic GFR-binding peptide
MERYKKLVVKDYEDFYLMSIANLETPV

SEQ ID NO: 76687 - protein, 30 aa, Artificial Sequence
  Cyclic GFR-binding peptide
  MOD_RES (2)..(2): Xaa is C or S
GXRDVVMGRYKKLIIQQKDNFYLMSIANMK

SEQ ID NO: 76688 - protein, 26 aa, Artificial Sequence
  Cyclic GFR-binding peptide
VIMRYKKLLLVRGNDFYLMSIANTKV

SEQ ID NO: 76689 - protein, 26 aa, Artificial Sequence
  Cyclic GFR-binding peptide
MNRYKKLIVNSSDDFYLVSIANLQTP

SEQ ID NO: 76690 - protein, 28 aa, Artificial Sequence
  Cyclic GFR-binding peptide
  MOD_RES (1)..(1): Xaa is C or S
XSEVVMDRYKKLVVNNASDFYLISIANL

SEQ ID NO: 76691 - protein, 30 aa, Artificial Sequence; identical to SEQ ID NO: 3422
  Cyclic GFR-binding peptide

SEQ ID NO: 76692 - protein, 36 aa, Artificial Sequence; identical to SEQ ID NO: 6252
  Cyclic GFR-binding peptide
  MOD_RES (30)..(30): Xaa is C or S

SEQ ID NO: 76693 - protein, 34 aa, Artificial Sequence; identical to SEQ ID NO: 6254
  Cyclic GFR-binding peptide
  MOD_RES (32)..(33): Xaa is C or S

SEQ ID NO: 76694 - protein, 27 aa, Artificial Sequence
  Cyclic GFR-binding peptide
EVIMRYKKLLLVRGNDFYLMSIANTKV

SEQ ID NO: 76695 - protein, 34 aa, Artificial Sequence; identical to SEQ ID NO: 3426
  Cyclic GFR-binding peptide
  MOD_RES (33)..(34): Xaa is C or S

SEQ ID NO: 76696 - protein, 33 aa, Artificial Sequence; identical to SEQ ID NO: 34610
  Cyclic GFR-binding peptide
  MOD_RES (31)..(32): Xaa is C or S

SEQ ID NO: 76697 - protein, 28 aa, Artificial Sequence
  Cyclic GFR-binding peptide
SVAMGRYKKLYTVVGKDFYLISIANLKT

SEQ ID NO: 76698 - protein, 37 aa, Artificial Sequence; identical to SEQ ID NO: 6259
  Cyclic GFR-binding peptide
  MOD_RES (1)..(33)..(34): Xaa is C or S

SEQ ID NO: 76699 - protein, 30 aa, Artificial Sequence; identical to SEQ ID NO: 6261
  Cyclic GFR-binding peptide
  MOD_RES (27)..(28): Xaa is C or S

SEQ ID NO: 76700 - protein, 30 aa, Artificial Sequence; identical to SEQ ID NO: 3429
  Cyclic GFR-binding peptide
  MOD_RES (28)..(29): Xaa is C or S

SEQ ID NO: 76701 - protein, 35 aa, Artificial Sequence; identical to SEQ ID NO: 3431
  Cyclic GFR-binding peptide
  MOD_RES (32)..(33): Xaa is C or S

SEQ ID NO: 76702 - protein, 38 aa, Artificial Sequence; identical to SEQ ID NO: 6268
  Cyclic GFR-binding peptide
  MOD_RES (32)..(32): Xaa is C or S

SEQ ID NO: 76703 - protein, 30 aa, Artificial Sequence; identical to SEQ ID NO: 3441
  Cyclic GFR-binding peptide
  MOD_RES (1)..(1): Xaa is C or S

SEQ ID NO: 76704 - protein, 40 aa, Artificial Sequence; identical to SEQ ID NO: 6282
  Cyclic GFR-binding peptide
  MOD_RES (2)..(34)..(35): Xaa is C or S

SEQ ID NO: 76705 - protein, 35 aa, Artificial Sequence; identical to SEQ ID NO: 3444
  Cyclic GFR-binding peptide
  MOD_RES (1)..(33)..(34): Xaa is C or S

SEQ ID NO: 76706 - protein, 21 aa, Artificial Sequence
  Cyclic GFR-binding peptide
RYKKLIIQQKDNFYLMSIANM

SEQ ID NO: 76707 - protein, 25 aa, Artificial Sequence
  Cyclic GFR-binding peptide
RYKKLYTVVGKDFYLISIANLKTPV

SEQ ID NO: 76708 - protein, 29 aa, Artificial Sequence
  Cyclic GFR-binding peptide
  MOD_RES (1)..(3): Xaa is C or S
XGXGEVVMDRYKKLVVKENEDFYLMSIAN

SEQ ID NO: 76709 - protein, 37 aa, Artificial Sequence; identical to SEQ ID NO: 3446
  Cyclic GFR-binding peptide
  MOD_RES (2)..(34): Xaa is C or S

SEQ ID NO: 76710 - protein, 34 aa, Artificial Sequence; identical to SEQ ID NO: 3452
  Cyclic GFR-binding peptide
  MOD_RES (32)..(33): Xaa is C or S

SEQ ID NO: 76711 - protein, 27 aa, Artificial Sequence
  Cyclic GFR-binding peptide
  MOD_RES (1)..(1): Xaa is C or S
XEEVIMRYKKLLLVRGNDFYLMSIANT

SEQ ID NO: 76712 - protein, 20 aa, Artificial Sequence
  Cyclic GFR-binding peptide
RYKKLVVKDYEDFYLMSIAN

SEQ ID NO: 76713 - protein, 32 aa, Artificial Sequence; identical to SEQ ID NO: 34647
  Cyclic GFR-binding peptide
  MOD_RES (29)..(30): Xaa is C or S

SEQ ID NO: 76714 - protein, 23 aa, Artificial Sequence
  Cyclic GFR-binding peptide
DRYKKLVVNNASDFYLISIANLR

SEQ ID NO: 76715 - protein, 24 aa, Artificial Sequence
  Cyclic GFR-binding peptide
VVMDRYKKLVVNNAADFYLISIAN

SEQ ID NO: 76716 - protein, 31 aa, Artificial Sequence; identical to SEQ ID NO: 14004
  Cyclic GFR-binding peptide
  MOD_RES (1)..(3): Xaa is C or S

SEQ ID NO: 76717 - protein, 30 aa, Artificial Sequence; identical to SEQ ID NO: 6298
  Cyclic GFR-binding peptide

SEQ ID NO: 76718 - protein, 32 aa, Artificial Sequence; identical to SEQ ID NO: 31734
  Cyclic GFR-binding peptide
  MOD_RES (26)..(27): Xaa is C or S

SEQ ID NO: 76719 - protein, 31 aa, Artificial Sequence; identical to SEQ ID NO: 34654
  Cyclic GFR-binding peptide
  MOD_RES (2)..(2): Xaa is C or S

SEQ ID NO: 76720 - protein, 28 aa, Artificial Sequence
  Cyclic GFR-binding peptide
  MOD_RES (26)..(27): Xaa is C or S
RYKKLIVNSSDDFYLVSIANLQTPAXXP

SEQ ID NO: 76721 - protein, 30 aa, Artificial Sequence; identical to SEQ ID NO: 3462
  Cyclic GFR-binding peptide
  MOD_RES (26)..(27): Xaa is C or S

SEQ ID NO: 76722 - protein, 40 aa, Artificial Sequence; identical to SEQ ID NO: 34659
  Cyclic GFR-binding peptide
  MOD_RES (2)..(4)..(36)..(37): Xaa is C or S

SEQ ID NO: 76723 - protein, 31 aa, Artificial Sequence
  Cyclic GFR-binding peptide
  MOD_RES (30)..(31): Xaa is C or S
VVMGRYKKLIIQQKDNFYLMSIANMKTPTXX

SEQ ID NO: 76724 - protein, 33 aa, Artificial Sequence
  Cyclic GFR-binding peptide
  MOD_RES (1)..(32)..(33): Xaa is C or S
XEEVIMRYKKLLLVRGNDFYLMSIANTKVPAXX

SEQ ID NO: 76725 - protein, 25 aa, Artificial Sequence
  Cyclic GFR-binding peptide
VMGRYKKLIIQQKDNFYLMSIANMK

SEQ ID NO: 76726 - protein, 24 aa, Artificial Sequence
  Cyclic GFR-binding peptide
RYKKLIVNSSDDFYLVSIANLQTP

SEQ ID NO: 76727 - protein, 34 aa, Artificial Sequence; identical to SEQ ID NO: 34673
  Cyclic GFR-binding peptide
  MOD_RES (1)..(3): Xaa is C or S

SEQ ID NO: 76728 - protein, 28 aa, Artificial Sequence
  Cyclic GFR-binding peptide
GEVVMERYKKLVVKDYEDFYLMSIANLE

SEQ ID NO: 76729 - protein, 31 aa, Artificial Sequence; identical to SEQ ID NO: 3479
  Cyclic GFR-binding peptide
  MOD_RES (27)..(28): Xaa is C or S

SEQ ID NO: 76730 - protein, 29 aa, Artificial Sequence
  Cyclic GFR-binding peptide
EVVMDRYKKLVVNNAADFYLISIANLRAP

SEQ ID NO: 76731 - protein, 35 aa, Artificial Sequence; identical to SEQ ID NO: 14029
  Cyclic GFR-binding peptide
  MOD_RES (1)..(3)..(35): Xaa is C or S

SEQ ID NO: 76732 - protein, 29 aa, Artificial Sequence
  Cyclic GFR-binding peptide
  MOD_RES (27)..(28): Xaa is C or S
MRYKKLLLVRGNDFYLMSIANTKVPAXXT

SEQ ID NO: 76733 - protein, 30 aa, Artificial Sequence
  Cyclic GFR-binding peptide
  MOD_RES (29)..(30): Xaa is C or S
VMGRYKKLIIQQKDNFYLMSIANMKTPTXX

SEQ ID NO: 76734 - protein, 27 aa, Artificial Sequence
  Cyclic GFR-binding peptide
SVAMGRYKKLYTVVGKDFYLISIANLK

SEQ ID NO: 76735 - protein, 22 aa, Artificial Sequence
  Cyclic GFR-binding peptide
MDRYKKLVVKENEDFYLMSIAN

SEQ ID NO: 76736 - protein, 31 aa, Artificial Sequence; identical to SEQ ID NO: 3484
  Cyclic GFR-binding peptide
  MOD_RES (2)..(4): Xaa is C or S

SEQ ID NO: 76737 - protein, 38 aa, Artificial Sequence; identical to SEQ ID NO: 6333
  Cyclic GFR-binding peptide
  MOD_RES (2)..(34)..(35): Xaa is C or S

SEQ ID NO: 76738 - protein, 32 aa, Artificial Sequence
  Cyclic GFR-binding peptide
  MOD_RES (26)..(27): Xaa is C or S
RYKKLIIQQKDNFYLMSIANMKTPTXXPGASG

SEQ ID NO: 76739 - protein, 26 aa, Artificial Sequence
  Cyclic GFR-binding peptide
  MOD_RES (1)..(1): Xaa is C or S
XEEVIMRYKKLLLVRGNDFYLMSIAN

SEQ ID NO: 76740 - protein, 29 aa, Artificial Sequence
  Cyclic GFR-binding peptide
  MOD_RES (27)..(28): Xaa is C or S
ERYKKLVVKDYEDFYLMSIANLETPVXXA

SEQ ID NO: 76741 - protein, 25 aa, Artificial Sequence
  Cyclic GFR-binding peptide
ERYKKLVVKDYEDFYLMSIANLETP

SEQ ID NO: 76742 - protein, 33 aa, Artificial Sequence; identical to SEQ ID NO: 31774
  Cyclic GFR-binding peptide
  MOD_RES (2)..(4): Xaa is C or S

SEQ ID NO: 76743 - protein, 23 aa, Artificial Sequence
  Cyclic GFR-binding peptide
RYKKLVVKDYEDFYLMSIANLET

SEQ ID NO: 76744 - protein, 31 aa, Artificial Sequence; identical to SEQ ID NO: 31777
  Cyclic GFR-binding peptide
  MOD_RES (2)..(4): Xaa is C or S

SEQ ID NO: 76745 - protein, 30 aa, Artificial Sequence; identical to SEQ ID NO: 3497
  Cyclic GFR-binding peptide
  MOD_RES (26)..(27): Xaa is C or S

SEQ ID NO: 76746 - protein, 28 aa, Artificial Sequence
  Cyclic GFR-binding peptide
GEVVMDRYKKLVVKENEDFYLMSIANLE

SEQ ID NO: 76747 - protein, 33 aa, Artificial Sequence; identical to SEQ ID NO: 6348
  Cyclic GFR-binding peptide
  MOD_RES (31)..(32): Xaa is C or S

SEQ ID NO: 76748 - protein, 28 aa, Artificial Sequence
  Cyclic GFR-binding peptide
VVMDRYKKLVVNNAADFYLISIANLRAP

SEQ ID NO: 76749 - protein, 30 aa, Artificial Sequence; identical to SEQ ID NO: 3507
  Cyclic GFR-binding peptide
  MOD_RES (2)..(2): Xaa is C or S

SEQ ID NO: 76750 - protein, 27 aa, Artificial Sequence
  Cyclic GFR-binding peptide
  MOD_RES (26)..(26): Xaa is C or S
RYKKLIVNSSDDFYLVSIANLKTPAXT

SEQ ID NO: 76751 - protein, 38 aa, Artificial Sequence; identical to SEQ ID NO: 6355
  Cyclic GFR-binding peptide
  MOD_RES (6)..(7): Xaa is C or S

SEQ ID NO: 76752 - protein, 32 aa, Artificial Sequence
  Cyclic GFR-binding peptide
  MOD_RES (29)..(31): Xaa is C or S
KMNAISMLYFNDKQQIILKKYRGMVVDRXGXS

SEQ ID NO: 76753 - protein, 33 aa, Artificial Sequence; identical to SEQ ID NO: 6366
  Cyclic GFR-binding peptide
  MOD_RES (32)..(32): Xaa is C or S

SEQ ID NO: 76754 - protein, 25 aa, Artificial Sequence
  Cyclic GFR-binding peptide
LNAISMLYFDENEKVVLKKYRDMVV

SEQ ID NO: 76755 - protein, 25 aa, Artificial Sequence
  Cyclic GFR-binding peptide
VPTRLNAISILYFDSANNVVLKKYR

SEQ ID NO: 76756 - protein, 27 aa, Artificial Sequence
  Cyclic GFR-binding peptide
  MOD_RES (1)..(1): Xaa is C or S
XAPTKLNAISVLYFDSSNNVILKKYRN

SEQ ID NO: 76757 - protein, 32 aa, Artificial Sequence; identical to SEQ ID NO: 34732
  Cyclic GFR-binding peptide
  MOD_RES (2)..(3): Xaa is C or S

SEQ ID NO: 76758 - protein, 38 aa, Artificial Sequence; identical to SEQ ID NO: 8819
  Cyclic GFR-binding peptide
  MOD_RES (5)..(6)..(38): Xaa is C or S

SEQ ID NO: 76759 - protein, 30 aa, Artificial Sequence; identical to SEQ ID NO: 8826
  Cyclic GFR-binding peptide

SEQ ID NO: 76760 - protein, 27 aa, Artificial Sequence
  Cyclic GFR-binding peptide
TRLNAISILYFDSANNVVLKKYRDMVV

SEQ ID NO: 76761 - protein, 34 aa, Artificial Sequence; identical to SEQ ID NO: 6381
  Cyclic GFR-binding peptide
  MOD_RES (32)..(34): Xaa is C or S

SEQ ID NO: 76762 - protein, 29 aa, Artificial Sequence
  Cyclic GFR-binding peptide
  MOD_RES (1)..(2): Xaa is C or S
XXAPTKLNAISVLYFDSSNNVILKKYRNM

SEQ ID NO: 76763 - protein, 30 aa, Artificial Sequence; identical to SEQ ID NO: 37550
  Cyclic GFR-binding peptide
  MOD_RES (2)..(3): Xaa is C or S

SEQ ID NO: 76764 - protein, 35 aa, Artificial Sequence; identical to SEQ ID NO: 34748
  Cyclic GFR-binding peptide
  MOD_RES (6)..(7): Xaa is C or S

SEQ ID NO: 76765 - protein, 31 aa, Artificial Sequence
  Cyclic GFR-binding peptide
  MOD_RES (31)..(31): Xaa is C or S
APVKTNAISMLYFDNGRVLLLKKYRMIVEEX

SEQ ID NO: 76766 - protein, 35 aa, Artificial Sequence; identical to SEQ ID NO: 6385
  Cyclic GFR-binding peptide
  MOD_RES (5)..(6): Xaa is C or S

SEQ ID NO: 76767 - protein, 39 aa, Artificial Sequence; identical to SEQ ID NO: 6386
  Cyclic GFR-binding peptide
  MOD_RES (4)..(5)..(37)..(39): Xaa is C or S

SEQ ID NO: 76768 - protein, 27 aa, Artificial Sequence
  Cyclic GFR-binding peptide
  MOD_RES (1)..(1): Xaa is C or S
XVPTRLNAISILYFDSANNVVLKKYRD

SEQ ID NO: 76769 - protein, 35 aa, Artificial Sequence; identical to SEQ ID NO: 37558
  Cyclic GFR-binding peptide
  MOD_RES (1)..(33)..(35): Xaa is C or S

SEQ ID NO: 76770 - protein, 34 aa, Artificial Sequence; identical to SEQ ID NO: 37561
  Cyclic GFR-binding peptide
  MOD_RES (1)..(2)..(34): Xaa is C or S

SEQ ID NO: 76771 - protein, 32 aa, Artificial Sequence; identical to SEQ ID NO: 19119
  Cyclic GFR-binding peptide
  MOD_RES (3)..(4): Xaa is C or S

SEQ ID NO: 76772 - protein, 32 aa, Artificial Sequence; identical to SEQ ID NO: 19123
  Cyclic GFR-binding peptide
  MOD_RES (5)..(6): Xaa is C or S

SEQ ID NO: 76773 - protein, 25 aa, Artificial Sequence
  Cyclic GFR-binding peptide
MNAISMLYFNDKQQIILKKYRGMVV

SEQ ID NO: 76774 - protein, 28 aa, Artificial Sequence
  Cyclic GFR-binding peptide
VPTELNAISMLYFDENEKVVLKKYRDMV

SEQ ID NO: 76775 - protein, 41 aa, Artificial Sequence; identical to SEQ ID NO: 8854
  Cyclic GFR-binding peptide
  MOD_RES (5)..(6)..(38)..(40): Xaa is C or S

SEQ ID NO: 76776 - protein, 31 aa, Artificial Sequence; identical to SEQ ID NO: 34762
  Cyclic GFR-binding peptide
  MOD_RES (1)..(1): Xaa is C or S

SEQ ID NO: 76777 - protein, 30 aa, Artificial Sequence; identical to SEQ ID NO: 6406
  Cyclic GFR-binding peptide
  MOD_RES (3)..(4): Xaa is C or S

SEQ ID NO: 76778 - protein, 33 aa, Artificial Sequence; identical to SEQ ID NO: 19135
  Cyclic GFR-binding peptide
  MOD_RES (1)..(33): Xaa is C or S

SEQ ID NO: 76779 - protein, 32 aa, Artificial Sequence; identical to SEQ ID NO: 19140
  Cyclic GFR-binding peptide
  MOD_RES (2)..(3): Xaa is C or S

SEQ ID NO: 76780 - protein, 41 aa, Artificial Sequence
  Cyclic GFR-binding peptide
  MOD_RES (6)..(7)..(39)..(41): Xaa is C or S
GSAGPXXTPTKMNAISMLYFNDKQQIILKKYRGMVVDRXGX

SEQ ID NO: 76781 - protein, 33 aa, Artificial Sequence; identical to SEQ ID NO: 6412
  Cyclic GFR-binding peptide
  MOD_RES (3)..(4): Xaa is C or S

SEQ ID NO: 76782 - protein, 25 aa, Artificial Sequence
  Cyclic GFR-binding peptide
PTKLNAISVLYFDSSNNVILKKYRN

SEQ ID NO: 76783 - protein, 35 aa, Artificial Sequence; identical to SEQ ID NO: 8869
  Cyclic GFR-binding peptide
  MOD_RES (5)..(6): Xaa is C or S

SEQ ID NO: 76784 - protein, 33 aa, Artificial Sequence; identical to SEQ ID NO: 6416
  Cyclic GFR-binding peptide
  MOD_RES (4)..(5): Xaa is C or S

SEQ ID NO: 76785 - protein, 36 aa, Artificial Sequence; identical to SEQ ID NO: 19150
  Cyclic GFR-binding peptide
  MOD_RES (1)..(2)..(34)..(36): Xaa is C or S

SEQ ID NO: 76786 - protein, 32 aa, Artificial Sequence; identical to SEQ ID NO: 8874
  Cyclic GFR-binding peptide
  MOD_RES (6)..(7): Xaa is C or S

SEQ ID NO: 76787 - protein, 22 aa, Artificial Sequence
  Cyclic GFR-binding peptide
LNAISILYFDSANNVVLKKYRD

SEQ ID NO: 76788 - protein, 31 aa, Artificial Sequence; identical to SEQ ID NO: 34782
  Cyclic GFR-binding peptide
  MOD_RES (1)..(2): Xaa is C or S

SEQ ID NO: 76789 - protein, 34 aa, Artificial Sequence
  Cyclic GFR-binding peptide
  MOD_RES (2)..(3)..(34): Xaa is C or S
TXXAPVKTNAISMLYFDNGRVLLLKKYRMIVEEX

SEQ ID NO: 76790 - protein, 35 aa, Artificial Sequence
  Cyclic GFR-binding peptide
  MOD_RES (1)..(2)..(34): Xaa is C or S
XXTPTKMNAISMLYFNDKQQIILKKYRGMVVDRXG

SEQ ID NO: 76791 - protein, 26 aa, Artificial Sequence
  Cyclic GFR-binding peptide
  MOD_RES (1)..(1): Xaa is C or S
XVPTELNAISMLYFDEYDKVVLKKYR

SEQ ID NO: 76792 - protein, 40 aa, Artificial Sequence; identical to SEQ ID NO: 6421
  Cyclic GFR-binding peptide
  MOD_RES (4)..(5)..(38)..(40): Xaa is C or S

SEQ ID NO: 76793 - protein, 37 aa, Artificial Sequence; identical to SEQ ID NO: 34788
  Cyclic GFR-binding peptide
  MOD_RES (4)..(5)..(37): Xaa is C or S

SEQ ID NO: 76794 - protein, 28 aa, Artificial Sequence
  Cyclic GFR-binding peptide
  MOD_RES (2)..(3): Xaa is C or S
AXXVPTELNAISMLYFDENEKVVLKKYR

SEQ ID NO: 76795 - protein, 42 aa, Artificial Sequence; identical to SEQ ID NO: 8884
  Cyclic GFR-binding peptide
  MOD_RES (5)..(6)..(39)..(41): Xaa is C or S

SEQ ID NO: 76796 - protein, 29 aa, Artificial Sequence
  Cyclic GFR-binding peptide
  MOD_RES (2)..(3): Xaa is C or S
AXXVPTKLNAISVLYFDDMGVPTLKKYRE

SEQ ID NO: 76797 - protein, 31 aa, Artificial Sequence; identical to SEQ ID NO: 19170
  Cyclic GFR-binding peptide
  MOD_RES (1)..(1): Xaa is C or S

SEQ ID NO: 76798 - protein, 25 aa, Artificial Sequence
  Cyclic GFR-binding peptide
TNAISMLYFDNGRVLLLKKYRMIVE

SEQ ID NO: 76799 - protein, 32 aa, Artificial Sequence
  Cyclic GFR-binding peptide
  MOD_RES (1)..(1): Xaa is C or S
XTPTKMNAISMLYFNDKQQIILKKYRGMVVDR

SEQ ID NO: 76800 - protein, 29 aa, Artificial Sequence
  Cyclic GFR-binding peptide
  MOD_RES (2)..(3): Xaa is C or S
TXXVPTRLNAISILYFDSANNVVLKKYRD

SEQ ID NO: 76801 - protein, 38 aa, Artificial Sequence; identical to SEQ ID NO: 37606
  Cyclic GFR-binding peptide
  MOD_RES (6)..(7): Xaa is C or S

SEQ ID NO: 76802 - protein, 32 aa, Artificial Sequence; identical to SEQ ID NO: 6441
  Cyclic GFR-binding peptide
  MOD_RES (29)..(31): Xaa is C or S

SEQ ID NO: 76803 - protein, 30 aa, Artificial Sequence; identical to SEQ ID NO: 6445
  Cyclic GFR-binding peptide
  MOD_RES (1)..(2): Xaa is C or S

SEQ ID NO: 76804 - protein, 27 aa, Artificial Sequence
  Cyclic GFR-binding peptide
LNAISMLYFDEYDKVVLKKYREMVVEG

SEQ ID NO: 76805 - protein, 31 aa, Artificial Sequence; identical to SEQ ID NO: 37619
  Cyclic GFR-binding peptide
  MOD_RES (3)..(4): Xaa is C or S

SEQ ID NO: 76806 - protein, 34 aa, Artificial Sequence
  Cyclic GFR-binding peptide
  MOD_RES (31)..(33): Xaa is C or S
APVKTNAISMLYFDNGRVLLLKKYRMIVEEXGXL

SEQ ID NO: 76807 - protein, 30 aa, Artificial Sequence; identical to SEQ ID NO: 6458
  Cyclic GFR-binding peptide
  MOD_RES (1)..(1): Xaa is C or S

SEQ ID NO: 76808 - protein, 31 aa, Artificial Sequence; identical to SEQ ID NO: 6459
  Cyclic GFR-binding peptide

SEQ ID NO: 76809 - protein, 29 aa, Artificial Sequence
  Cyclic GFR-binding peptide
  MOD_RES (1)..(1): Xaa is C or S
XVPARLNAISILYFDAANNVVLKKYRDMV

SEQ ID NO: 76810 - protein, 30 aa, Artificial Sequence; identical to SEQ ID NO: 16850
  Cyclic GFR-binding peptide
  MOD_RES (28)..(30): Xaa is C or S

SEQ ID NO: 76811 - protein, 40 aa, Artificial Sequence; identical to SEQ ID NO: 8929
  Cyclic GFR-binding peptide
  MOD_RES (4)..(5)..(37)..(39): Xaa is C or S

SEQ ID NO: 76812 - protein, 32 aa, Artificial Sequence; identical to SEQ ID NO: 8931
  Cyclic GFR-binding peptide
  MOD_RES (1)..(2): Xaa is C or S

SEQ ID NO: 76813 - protein, 30 aa, Artificial Sequence; identical to SEQ ID NO: 34833
  Cyclic GFR-binding peptide

SEQ ID NO: 76814 - protein, 28 aa, Artificial Sequence
  Cyclic GFR-binding peptide
  MOD_RES (1)..(1): Xaa is C or S
XTPTKMNAISMLYFNDKQQIILKKYRGM

SEQ ID NO: 76815 - protein, 32 aa, Artificial Sequence; identical to SEQ ID NO: 8936
  Cyclic GFR-binding peptide
  MOD_RES (32)..(32): Xaa is C or S

SEQ ID NO: 76816 - protein, 40 aa, Artificial Sequence
  Cyclic GFR-binding peptide
  MOD_RES (5)..(6)..(38)..(40): Xaa is C or S
SAGPXXTPTKMNAISMLYFNDKQQIILKKYRGMVVDRXGX

SEQ ID NO: 76817 - protein, 34 aa, Artificial Sequence
  Cyclic GFR-binding peptide
  MOD_RES (4)..(5): Xaa is C or S
PSTXXAPVKTNAISMLYFDNGRVLLLKKYRMIVE

SEQ ID NO: 76818 - protein, 30 aa, Artificial Sequence
  Cyclic GFR-binding peptide
  MOD_RES (27)..(29): Xaa is C or S
NAISMLYFNDKQQIILKKYRGMVVDRXGXS

SEQ ID NO: 76819 - protein, 30 aa, Artificial Sequence; identical to SEQ ID NO: 6475
  Cyclic GFR-binding peptide
  MOD_RES (2)..(3): Xaa is C or S

SEQ ID NO: 76820 - protein, 31 aa, Artificial Sequence; identical to SEQ ID NO: 8939
  Cyclic GFR-binding peptide
  MOD_RES (1)..(2): Xaa is C or S

SEQ ID NO: 76821 - protein, 27 aa, Artificial Sequence
  Cyclic GFR-binding peptide
  MOD_RES (27)..(27): Xaa is C or S
NAISVLYFDSSNNVILKKYRNMVVKAX

SEQ ID NO: 76822 - protein, 25 aa, Artificial Sequence
  Cyclic GFR-binding peptide
LNAISILYFDAANNVVLKKYRDMVV

SEQ ID NO: 76823 - protein, 33 aa, Artificial Sequence
  Cyclic GFR-binding peptide
  MOD_RES (5)..(6): Xaa is C or S
VPSTXXAPVKTNAISMLYFDNGRVLLLKKYRMI

SEQ ID NO: 76824 - protein, 32 aa, Artificial Sequence
  Cyclic GFR-binding peptide
  MOD_RES (5)..(6): Xaa is C or S
SAGPXXTPTKMNAISMLYFNDKQQIILKKYRG

SEQ ID NO: 76825 - protein, 32 aa, Artificial Sequence; identical to SEQ ID NO: 6490
  Cyclic GFR-binding peptide
  MOD_RES (31)..(31): Xaa is C or S

SEQ ID NO: 76826 - protein, 38 aa, Artificial Sequence; identical to SEQ ID NO: 8949
  Cyclic GFR-binding peptide
  MOD_RES (4)..(5)..(37): Xaa is C or S

SEQ ID NO: 76827 - protein, 38 aa, Artificial Sequence; identical to SEQ ID NO: 6497
  Cyclic GFR-binding peptide
  MOD_RES (2)..(3)..(35)..(37): Xaa is C or S

SEQ ID NO: 76828 - protein, 30 aa, Artificial Sequence; identical to SEQ ID NO: 34867
  Cyclic GFR-binding peptide
  MOD_RES (30)..(30): Xaa is C or S

SEQ ID NO: 76829 - protein, 23 aa, Artificial Sequence
  Cyclic GFR-binding peptide
LNAISMLYFDENEKVVLKKYRDM

SEQ ID NO: 76830 - protein, 30 aa, Artificial Sequence; identical to SEQ ID NO: 16887
  Cyclic GFR-binding peptide
  MOD_RES (30)..(30): Xaa is C or S

SEQ ID NO: 76831 - protein, 28 aa, Artificial Sequence
  Cyclic GFR-binding peptide
  MOD_RES (28)..(28): Xaa is C or S
LNAISILYFDKGVVTYLKKYRGMAVSEX

SEQ ID NO: 76832 - protein, 26 aa, Artificial Sequence
  Cyclic GFR-binding peptide
KTNAISMLYFDNGRVLLLKKYRMIVE

SEQ ID NO: 76833 - protein, 33 aa, Artificial Sequence
  Cyclic GFR-binding peptide
  MOD_RES (4)..(5): Xaa is C or S
AGPXXTPTKMNAISMLYFNDKQQIILKKYRGMV

SEQ ID NO: 76834 - protein, 32 aa, Artificial Sequence
  Cyclic GFR-binding peptide
  MOD_RES (30)..(32): Xaa is C or S
TKMNAISMLYFNDKQQIILKKYRGMVVDRXGX

SEQ ID NO: 76835 - protein, 27 aa, Artificial Sequence
  Cyclic GFR-binding peptide
KTNAISMLYFDNGRVLLLKKYRMIVEE

SEQ ID NO: 76836 - protein, 40 aa, Artificial Sequence; identical to SEQ ID NO: 16893
  Cyclic GFR-binding peptide
  MOD_RES (6)..(7)..(39): Xaa is C or S

SEQ ID NO: 76837 - protein, 37 aa, Artificial Sequence; identical to SEQ ID NO: 34884
  Cyclic GFR-binding peptide
  MOD_RES (3)..(4)..(36): Xaa is C or S

SEQ ID NO: 76838 - protein, 32 aa, Artificial Sequence; identical to SEQ ID NO: 6518
  Cyclic GFR-binding peptide
  MOD_RES (1)..(2): Xaa is C or S

SEQ ID NO: 76839 - protein, 26 aa, Artificial Sequence
  Cyclic GFR-binding peptide
PTELNAISMLYFDENEKVVLKKYRDM

SEQ ID NO: 76840 - protein, 26 aa, Artificial Sequence
  Cyclic GFR-binding peptide
TNAISMLYFDNGRVLLLKKYRMIVEE

SEQ ID NO: 76841 - protein, 38 aa, Artificial Sequence; identical to SEQ ID NO: 34894
  Cyclic GFR-binding peptide
  MOD_RES (4)..(5)..(37): Xaa is C or S

SEQ ID NO: 76842 - protein, 35 aa, Artificial Sequence; identical to SEQ ID NO: 6527
  Cyclic GFR-binding peptide
  MOD_RES (6)..(7): Xaa is C or S

SEQ ID NO: 76843 - protein, 30 aa, Artificial Sequence
  Cyclic GFR-binding peptide
  MOD_RES (1)..(1): Xaa is C or S
XAPVKTNAISMLYFDNGRVLLLKKYRMIVE

SEQ ID NO: 76844 - protein, 38 aa, Artificial Sequence
  Cyclic GFR-binding peptide
  MOD_RES (4)..(5)..(37): Xaa is C or S
AGPXXTPTKMNAISMLYFNDKQQIILKKYRGMVVDRXG

SEQ ID NO: 76845 - protein, 26 aa, Artificial Sequence
  Cyclic GFR-binding peptide
APVKTNAISMLYFDNGRVLLLKKYRM

SEQ ID NO: 76846 - protein, 21 aa, Artificial Sequence
  Cyclic GFR-binding peptide
NAISMLYFNDKQQIILKKYRG

SEQ ID NO: 76847 - protein, 25 aa, Artificial Sequence
  Cyclic GFR-binding peptide
TKLNAISVLYFDDMGVPTLKKYREG

SEQ ID NO: 76848 - protein, 36 aa, Artificial Sequence
  Cyclic GFR-binding peptide
  MOD_RES (5)..(6): Xaa is C or S
VPSTXXAPVKTNAISMLYFDNGRVLLLKKYRMIVEE

SEQ ID NO: 76849 - protein, 26 aa, Artificial Sequence
  Cyclic GFR-binding peptide
NAISMLYFNDKQQIILKKYRGMVVDR

SEQ ID NO: 76850 - protein, 36 aa, Artificial Sequence; identical to SEQ ID NO: 37726
  Cyclic GFR-binding peptide
  MOD_RES (2)..(3)..(35): Xaa is C or S

SEQ ID NO: 76851 - protein, 33 aa, Artificial Sequence; identical to SEQ ID NO: 34911
  Cyclic GFR-binding peptide
  MOD_RES (2)..(3): Xaa is C or S

SEQ ID NO: 76852 - protein, 32 aa, Artificial Sequence
  Cyclic GFR-binding peptide
  MOD_RES (30)..(32): Xaa is C or S
PVKTNAISMLYFDNGRVLLLKKYRMIVEEXGX

SEQ ID NO: 76853 - protein, 24 aa, Artificial Sequence
  Cyclic GFR-binding peptide
PTKLNAISILYFDKGVVTYLKKYR

SEQ ID NO: 76854 - protein, 38 aa, Artificial Sequence; identical to SEQ ID NO: 37731
  Cyclic GFR-binding peptide
  MOD_RES (3)..(4)..(36)..(38): Xaa is C or S

SEQ ID NO: 76855 - protein, 26 aa, Artificial Sequence
  Cyclic GFR-binding peptide
PTRLNAISILYFDSANNVVLKKYRDM

SEQ ID NO: 76856 - protein, 20 aa, Artificial Sequence
  Cyclic GFR-binding peptide
NAISILYFDSANNVVLKKYR

SEQ ID NO: 76857 - protein, 29 aa, Artificial Sequence
  Cyclic GFR-binding peptide
  MOD_RES (29)..(29): Xaa is C or S
VKTNAISMLYFDNGRVLLLKKYRMIVEEX

SEQ ID NO: 76858 - protein, 33 aa, Artificial Sequence; identical to SEQ ID NO: 6548
  Cyclic GFR-binding peptide
  MOD_RES (2)..(3): Xaa is C or S

SEQ ID NO: 76859 - protein, 27 aa, Artificial Sequence
  Cyclic GFR-binding peptide
  MOD_RES (1)..(2): Xaa is C or S
XXVPARLNAISILYFDAANNVVLKKYR

SEQ ID NO: 76860 - protein, 42 aa, Artificial Sequence; identical to SEQ ID NO: 37739
  Cyclic GFR-binding peptide
  MOD_RES (6)..(7)..(39)..(41): Xaa is C or S

SEQ ID NO: 76861 - protein, 32 aa, Artificial Sequence; identical to SEQ ID NO: 34920
  Cyclic GFR-binding peptide
  MOD_RES (5)..(6): Xaa is C or S

SEQ ID NO: 76862 - protein, 26 aa, Artificial Sequence
  Cyclic GFR-binding peptide
VPTKLNAISVLYFDDMGVPTLKKYRE

SEQ ID NO: 76863 - protein, 28 aa, Artificial Sequence
  Cyclic GFR-binding peptide
  MOD_RES (1)..(1): Xaa is C or S
XVPTKLNAISVLYFDDMGVPTLKKYREG

SEQ ID NO: 76864 - protein, 35 aa, Artificial Sequence; identical to SEQ ID NO: 19272
  Cyclic GFR-binding peptide
  MOD_RES (32)..(34): Xaa is C or S

SEQ ID NO: 76865 - protein, 34 aa, Artificial Sequence; identical to SEQ ID NO: 34927
  Cyclic GFR-binding peptide
  MOD_RES (31)..(33): Xaa is C or S

SEQ ID NO: 76866 - protein, 29 aa, Artificial Sequence
  Cyclic GFR-binding peptide
  MOD_RES (3)..(4): Xaa is C or S
KAXXVPTKLNAISILYFDKGVVTYLKKYR

SEQ ID NO: 76867 - protein, 31 aa, Artificial Sequence; identical to SEQ ID NO: 6567
  Cyclic GFR-binding peptide
  MOD_RES (1)..(1): Xaa is C or S

SEQ ID NO: 76868 - protein, 34 aa, Artificial Sequence; identical to SEQ ID NO: 16941
  Cyclic GFR-binding peptide
  MOD_RES (2)..(3): Xaa is C or S

SEQ ID NO: 76869 - protein, 31 aa, Artificial Sequence; identical to SEQ ID NO: 6569
  Cyclic GFR-binding peptide
  MOD_RES (4)..(5): Xaa is C or S

SEQ ID NO: 76870 - protein, 29 aa, Artificial Sequence
  Cyclic GFR-binding peptide
  MOD_RES (2)..(3): Xaa is C or S
PXXTPTKMNAISMLYFNDKQQIILKKYRG

SEQ ID NO: 76871 - protein, 30 aa, Artificial Sequence
  Cyclic GFR-binding peptide
  MOD_RES (28)..(30): Xaa is C or S
MNAISMLYFNDKQQIILKKYRGMVVDRXGX

SEQ ID NO: 76872 - protein, 40 aa, Artificial Sequence; identical to SEQ ID NO: 6573
  Cyclic GFR-binding peptide
  MOD_RES (4)..(5)..(37)..(39): Xaa is C or S

SEQ ID NO: 76873 - protein, 29 aa, Artificial Sequence
  Cyclic GFR-binding peptide
  MOD_RES (27)..(29): Xaa is C or S
NAISILYFDKGVVTYLKKYRGMAVSEXGX

SEQ ID NO: 76874 - protein, 30 aa, Artificial Sequence; identical to SEQ ID NO: 37763
  Cyclic GFR-binding peptide

SEQ ID NO: 76875 - protein, 27 aa, Artificial Sequence
  Cyclic GFR-binding peptide
LNAISVLYFDSSNNVILKKYRNMVVKA

SEQ ID NO: 76876 - protein, 29 aa, Artificial Sequence
  Cyclic GFR-binding peptide
VPTRLNAISILYFDSANNVVLKKYRDMVV

SEQ ID NO: 76877 - protein, 30 aa, Artificial Sequence; identical to SEQ ID NO: 6581
  Cyclic GFR-binding peptide
  MOD_RES (4)..(5): Xaa is C or S

SEQ ID NO: 76878 - protein, 29 aa, Artificial Sequence
  Cyclic GFR-binding peptide
  MOD_RES (27)..(29): Xaa is C or S
NAISMLYFNDKQQIILKKYRGMVVDRXGX

SEQ ID NO: 76879 - protein, 34 aa, Artificial Sequence; identical to SEQ ID NO: 9059
  Cyclic GFR-binding peptide
  MOD_RES (32)..(34): Xaa is C or S

SEQ ID NO: 76880 - protein, 28 aa, Artificial Sequence
  Cyclic GFR-binding peptide
  MOD_RES (2)..(3): Xaa is C or S
TXXVPTRLNAISILYFDSANNVVLKKYR

SEQ ID NO: 76881 - protein, 34 aa, Artificial Sequence; identical to SEQ ID NO: 9068
  Cyclic GFR-binding peptide
  MOD_RES (1)..(33): Xaa is C or S

SEQ ID NO: 76882 - protein, 29 aa, Artificial Sequence
  Cyclic GFR-binding peptide
  MOD_RES (1)..(2): Xaa is C or S
XXTPTKMNAISMLYFNDKQQIILKKYRGM

SEQ ID NO: 76883 - protein, 34 aa, Artificial Sequence
  Cyclic GFR-binding peptide
  MOD_RES (6)..(7): Xaa is C or S
GSAGPXXTPTKMNAISMLYFNDKQQIILKKYRGM

SEQ ID NO: 76884 - protein, 41 aa, Artificial Sequence; identical to SEQ ID NO: 37800
  Cyclic GFR-binding peptide
  MOD_RES (5)..(6)..(38)..(40): Xaa is C or S

SEQ ID NO: 76885 - protein, 35 aa, Artificial Sequence; identical to SEQ ID NO: 9073
  Cyclic GFR-binding peptide
  MOD_RES (4)..(5): Xaa is C or S

SEQ ID NO: 76886 - protein, 21 aa, Artificial Sequence
  Cyclic GFR-binding peptide
LNAISVLYFDSSNNVILKKYR

SEQ ID NO: 76887 - protein, 34 aa, Artificial Sequence
  Cyclic GFR-binding peptide
  MOD_RES (3)..(4): Xaa is C or S
STXXAPVKTNAISMLYFDNGRVLLLKKYRMIVEE

SEQ ID NO: 76888 - protein, 28 aa, Artificial Sequence
  Cyclic GFR-binding peptide
PTKLNAISVLYFDDMGVPTLKKYREGMS

SEQ ID NO: 76889 - protein, 36 aa, Artificial Sequence; identical to SEQ ID NO: 9087
  Cyclic GFR-binding peptide
  MOD_RES (33)..(35): Xaa is C or S

SEQ ID NO: 76890 - protein, 36 aa, Artificial Sequence; identical to SEQ ID NO: 9088
  Cyclic GFR-binding peptide
  MOD_RES (6)..(7): Xaa is C or S

SEQ ID NO: 76891 - protein, 25 aa, Artificial Sequence
  Cyclic GFR-binding peptide
PVKTNAISMLYFDNGRVLLLKKYRM

SEQ ID NO: 76892 - protein, 25 aa, Artificial Sequence
  Cyclic GFR-binding peptide
LNAISMLYFDEYDKVVLKKYREMVV

SEQ ID NO: 76893 - protein, 41 aa, Artificial Sequence; identical to SEQ ID NO: 17000
  Cyclic GFR-binding peptide
  MOD_RES (5)..(6)..(38)..(40): Xaa is C or S

SEQ ID NO: 76894 - protein, 34 aa, Artificial Sequence; identical to SEQ ID NO: 9096
  Cyclic GFR-binding peptide
  MOD_RES (31)..(33): Xaa is C or S

SEQ ID NO: 76895 - protein, 29 aa, Artificial Sequence
  Cyclic GFR-binding peptide
  MOD_RES (27)..(29): Xaa is C or S
NAISVLYFDSSNNVILKKYRNMVVKAXGX

SEQ ID NO: 76896 - protein, 31 aa, Artificial Sequence
  Cyclic GFR-binding peptide
  MOD_RES (29)..(31): Xaa is C or S
VKTNAISMLYFDNGRVLLLKKYRMIVEEXGX

SEQ ID NO: 76897 - protein, 25 aa, Artificial Sequence
  Cyclic GFR-binding peptide
ELNAISMLYFDENEKVVLKKYRDMV

SEQ ID NO: 76898 - protein, 38 aa, Artificial Sequence; identical to SEQ ID NO: 9109
  Cyclic GFR-binding peptide
  MOD_RES (2)..(3)..(36)..(38): Xaa is C or S

SEQ ID NO: 76899 - protein, 34 aa, Artificial Sequence
  Cyclic GFR-binding peptide
  MOD_RES (2)..(3): Xaa is C or S
PXXTPTKMNAISMLYFNDKQQIILKKYRGMVVDR

SEQ ID NO: 76900 - protein, 23 aa, Artificial Sequence
  Cyclic GFR-binding peptide
KLNAISVLYFDDMGVPTLKKYRE

SEQ ID NO: 76901 - protein, 28 aa, Artificial Sequence
  Cyclic GFR-binding peptide
RLNAISILYFDSANNVVLKKYRDMVVES

SEQ ID NO: 76902 - protein, 23 aa, Artificial Sequence
  Cyclic GFR-binding peptide
NAISMLYFDNGRVLLLKKYRMIV

SEQ ID NO: 76903 - protein, 38 aa, Artificial Sequence
  Cyclic GFR-binding peptide
  MOD_RES (3)..(4)..(36)..(38): Xaa is C or S
GPXXTPTKMNAISMLYFNDKQQIILKKYRGMVVDRXGX

SEQ ID NO: 76904 - protein, 28 aa, Artificial Sequence
  Cyclic GFR-binding peptide
RLNAISILYFDAANNVVLKKYRDMVVEA

SEQ ID NO: 76905 - protein, 28 aa, Artificial Sequence
  Cyclic GFR-binding peptide
  MOD_RES (27)..(27): Xaa is C or S
NAISILYFDAANNVVLKKYRDMVVEAXG

SEQ ID NO: 76906 - protein, 29 aa, Artificial Sequence
  Cyclic GFR-binding peptide
  MOD_RES (3)..(4): Xaa is C or S
KAXXAPTKLNAISVLYFDSSNNVILKKYR

SEQ ID NO: 76907 - protein, 31 aa, Artificial Sequence; identical to SEQ ID NO: 9124
  Cyclic GFR-binding peptide
  MOD_RES (31)..(31): Xaa is C or S

SEQ ID NO: 76908 - protein, 34 aa, Artificial Sequence; identical to SEQ ID NO: 17027
  Cyclic GFR-binding peptide
  MOD_RES (32)..(34): Xaa is C or S

SEQ ID NO: 76909 - protein, 27 aa, Artificial Sequence
  Cyclic GFR-binding peptide
TKMNAISMLYFNDKQQIILKKYRGMVV

SEQ ID NO: 76910 - protein, 32 aa, Artificial Sequence; identical to SEQ ID NO: 6653
  Cyclic GFR-binding peptide
  MOD_RES (6)..(7): Xaa is C or S

SEQ ID NO: 76911 - protein, 34 aa, Artificial Sequence; identical to SEQ ID NO: 9132
  Cyclic GFR-binding peptide
  MOD_RES (5)..(6): Xaa is C or S

SEQ ID NO: 76912 - protein, 28 aa, Artificial Sequence
  Cyclic GFR-binding peptide
VPTKLNAISVLYFDDMGVPTLKKYREGM

SEQ ID NO: 76913 - protein, 29 aa, Artificial Sequence
  Cyclic GFR-binding peptide
  MOD_RES (1)..(2): Xaa is C or S
XXVPTELNAISMLYFDEYDKVVLKKYREM

SEQ ID NO: 76914 - protein, 30 aa, Artificial Sequence; identical to SEQ ID NO: 6661
  Cyclic GFR-binding peptide

SEQ ID NO: 76915 - protein, 33 aa, Artificial Sequence; identical to SEQ ID NO: 35016
  Cyclic GFR-binding peptide
  MOD_RES (4)..(5): Xaa is C or S

SEQ ID NO: 76916 - protein, 35 aa, Artificial Sequence; identical to SEQ ID NO: 17036
  Cyclic GFR-binding peptide
  MOD_RES (2)..(3)..(35): Xaa is C or S

SEQ ID NO: 76917 - protein, 21 aa, Artificial Sequence
  Cyclic GFR-binding peptide
TNAISMLYFDNGRVLLLKKYR

SEQ ID NO: 76918 - protein, 34 aa, Artificial Sequence
  Cyclic GFR-binding peptide
  MOD_RES (1)..(2)..(34): Xaa is C or S
XXTPTKMNAISMLYFNDKQQIILKKYRGMVVDRX

SEQ ID NO: 76919 - protein, 28 aa, Artificial Sequence
  Cyclic GFR-binding peptide
TELNAISMLYFDEYDKVVLKKYREMVVE

SEQ ID NO: 76920 - protein, 32 aa, Artificial Sequence
  Cyclic GFR-binding peptide
  MOD_RES (2)..(3): Xaa is C or S
PXXTPTKMNAISMLYFNDKQQIILKKYRGMVV

SEQ ID NO: 76921 - protein, 30 aa, Artificial Sequence; identical to SEQ ID NO: 37891
  Cyclic GFR-binding peptide
  MOD_RES (27)..(29): Xaa is C or S

SEQ ID NO: 76922 - protein, 32 aa, Artificial Sequence; identical to SEQ ID NO: 9142
  Cyclic GFR-binding peptide
  MOD_RES (2)..(3): Xaa is C or S

SEQ ID NO: 76923 - protein, 38 aa, Artificial Sequence; identical to SEQ ID NO: 37896
  Cyclic GFR-binding peptide
  MOD_RES (6)..(7): Xaa is C or S

SEQ ID NO: 76924 - protein, 33 aa, Artificial Sequence; identical to SEQ ID NO: 6670
  Cyclic GFR-binding peptide
  MOD_RES (32)..(32): Xaa is C or S

SEQ ID NO: 76925 - protein, 36 aa, Artificial Sequence; identical to SEQ ID NO: 6672
  Cyclic GFR-binding peptide
  MOD_RES (1)..(2)..(34)..(36): Xaa is C or S

SEQ ID NO: 76926 - protein, 32 aa, Artificial Sequence; identical to SEQ ID NO: 17048
  Cyclic GFR-binding peptide
  MOD_RES (1)..(2): Xaa is C or S

SEQ ID NO: 76927 - protein, 29 aa, Artificial Sequence
  Cyclic GFR-binding peptide
  MOD_RES (27)..(29): Xaa is C or S
NAISILYFDAANNVVLKKYRDMVVEAXGX

SEQ ID NO: 76928 - protein, 39 aa, Artificial Sequence
  Cyclic GFR-binding peptide
  MOD_RES (4)..(5)..(36)..(38): Xaa is C or S
PSTXXAPVKTNAISMLYFDNGRVLLLKKYRMIVEEXGXL

SEQ ID NO: 76929 - protein, 36 aa, Artificial Sequence
  Cyclic GFR-binding peptide
  MOD_RES (6)..(7): Xaa is C or S
RVPSTXXAPVKTNAISMLYFDNGRVLLLKKYRMIVE

SEQ ID NO: 76930 - protein, 28 aa, Artificial Sequence
  Cyclic GFR-binding peptide
APVKTNAISMLYFDNGRVLLLKKYRMIV

SEQ ID NO: 76931 - protein, 41 aa, Artificial Sequence; identical to SEQ ID NO: 6678
  Cyclic GFR-binding peptide
  MOD_RES (5)..(6)..(38)..(40): Xaa is C or S

SEQ ID NO: 76932 - protein, 34 aa, Artificial Sequence; identical to SEQ ID NO: 17056
  Cyclic GFR-binding peptide
  MOD_RES (6)..(7): Xaa is C or S

SEQ ID NO: 76933 - protein, 32 aa, Artificial Sequence; identical to SEQ ID NO: 37918
  Cyclic GFR-binding peptide
  MOD_RES (1)..(2): Xaa is C or S

SEQ ID NO: 76934 - protein, 33 aa, Artificial Sequence
  Cyclic GFR-binding peptide
  MOD_RES (31)..(33): Xaa is C or S
APVKTNAISMLYFDNGRVLLLKKYRMIVEEXGX

SEQ ID NO: 76935 - protein, 33 aa, Artificial Sequence
  Cyclic GFR-binding peptide
  MOD_RES (2)..(3): Xaa is C or S
PXXTPTKMNAISMLYFNDKQQIILKKYRGMVVD

SEQ ID NO: 76936 - protein, 36 aa, Artificial Sequence; identical to SEQ ID NO: 6688
  Cyclic GFR-binding peptide
  MOD_RES (4)..(5): Xaa is C or S

SEQ ID NO: 76937 - protein, 35 aa, Artificial Sequence; identical to SEQ ID NO: 9165
  Cyclic GFR-binding peptide
  MOD_RES (5)..(6): Xaa is C or S

SEQ ID NO: 76938 - protein, 28 aa, Artificial Sequence
  Cyclic GFR-binding peptide
  MOD_RES (27)..(27): Xaa is C or S
NAISMLYFNDKQQIILKKYRGMVVDRXG

SEQ ID NO: 76939 - protein, 38 aa, Artificial Sequence; identical to SEQ ID NO: 19406
  Cyclic GFR-binding peptide
  MOD_RES (3)..(4)..(36)..(38): Xaa is C or S

SEQ ID NO: 76940 - protein, 36 aa, Artificial Sequence; identical to SEQ ID NO: 19408
  Cyclic GFR-binding peptide
  MOD_RES (1)..(33)..(35): Xaa is C or S

SEQ ID NO: 76941 - protein, 30 aa, Artificial Sequence; identical to SEQ ID NO: 37931
  Cyclic GFR-binding peptide
  MOD_RES (4)..(5): Xaa is C or S

SEQ ID NO: 76942 - protein, 31 aa, Artificial Sequence; identical to SEQ ID NO: 9172
  Cyclic GFR-binding peptide
  MOD_RES (31)..(31): Xaa is C or S

SEQ ID NO: 76943 - protein, 30 aa, Artificial Sequence
  Cyclic GFR-binding peptide
  MOD_RES (1)..(2): Xaa is C or S
XXAPVKTNAISMLYFDNGRVLLLKKYRMIV

SEQ ID NO: 76944 - protein, 27 aa, Artificial Sequence
  Cyclic GFR-binding peptide
  MOD_RES (1)..(1): Xaa is C or S
XVPTKLNAISILYFDKGVVTYLKKYRG

SEQ ID NO: 76945 - protein, 36 aa, Artificial Sequence
  Cyclic GFR-binding peptide
  MOD_RES (3)..(4)..(36): Xaa is C or S
GPXXTPTKMNAISMLYFNDKQQIILKKYRGMVVDRX

SEQ ID NO: 76946 - protein, 36 aa, Artificial Sequence; identical to SEQ ID NO: 9180
  Cyclic GFR-binding peptide
  MOD_RES (6)..(7): Xaa is C or S

SEQ ID NO: 76947 - protein, 27 aa, Artificial Sequence
  Cyclic GFR-binding peptide
  MOD_RES (1)..(2): Xaa is C or S
XXAPTKLNAISVLYFDSSNNVILKKYR

SEQ ID NO: 76948 - protein, 24 aa, Artificial Sequence
  Cyclic GFR-binding peptide
PARLNAISILYFDAANNVVLKKYR

SEQ ID NO: 76949 - protein, 35 aa, Artificial Sequence; identical to SEQ ID NO: 6711
  Cyclic GFR-binding peptide
  MOD_RES (2)..(3)..(35): Xaa is C or S

SEQ ID NO: 76950 - protein, 29 aa, Artificial Sequence
  Cyclic GFR-binding peptide
  MOD_RES (28)..(28): Xaa is C or S
LNAISILYFDAANNVVLKKYRDMVVEAXG

SEQ ID NO: 76951 - protein, 29 aa, Artificial Sequence
  Cyclic GFR-binding peptide
PTKLNAISVLYFDDMGVPTLKKYREGMSV

SEQ ID NO: 76952 - protein, 36 aa, Artificial Sequence; identical to SEQ ID NO: 6716
  Cyclic GFR-binding peptide
  MOD_RES (6)..(7): Xaa is C or S

SEQ ID NO: 76953 - protein, 37 aa, Artificial Sequence
  Cyclic GFR-binding peptide
  MOD_RES (2)..(3)..(35)..(37): Xaa is C or S
PXXTPTKMNAISMLYFNDKQQIILKKYRGMVVDRXGX

SEQ ID NO: 76954 - protein, 34 aa, Artificial Sequence
  Cyclic GFR-binding peptide
  MOD_RES (6)..(7): Xaa is C or S
RVPSTXXAPVKTNAISMLYFDNGRVLLLKKYRMI

SEQ ID NO: 76955 - protein, 37 aa, Artificial Sequence; identical to SEQ ID NO: 9199
  Cyclic GFR-binding peptide
  MOD_RES (3)..(4)..(36): Xaa is C or S

SEQ ID NO: 76956 - protein, 31 aa, Artificial Sequence
  Cyclic GFR-binding peptide
  MOD_RES (3)..(4): Xaa is C or S
GPXXTPTKMNAISMLYFNDKQQIILKKYRGM

SEQ ID NO: 76957 - protein, 36 aa, Artificial Sequence
  Cyclic GFR-binding peptide
  MOD_RES (4)..(5)..(36): Xaa is C or S
PSTXXAPVKTNAISMLYFDNGRVLLLKKYRMIVEEX

SEQ ID NO: 76958 - protein, 37 aa, Artificial Sequence; identical to SEQ ID NO: 19441
  Cyclic GFR-binding peptide
  MOD_RES (1)..(2)..(34)..(36): Xaa is C or S

SEQ ID NO: 76959 - protein, 27 aa, Artificial Sequence
  Cyclic GFR-binding peptide
MNAISMLYFNDKQQIILKKYRGMVVDR

SEQ ID NO: 76960 - protein, 26 aa, Artificial Sequence
  Cyclic GFR-binding peptide
NAISILYFDAANNVVLKKYRDMVVEA

SEQ ID NO: 76961 - protein, 29 aa, Artificial Sequence
  Cyclic GFR-binding peptide
TRLNAISILYFDSANNVVLKKYRDMVVES

SEQ ID NO: 76962 - protein, 32 aa, Artificial Sequence; identical to SEQ ID NO: 6732
  Cyclic GFR-binding peptide
  MOD_RES (30)..(32): Xaa is C or S

SEQ ID NO: 76963 - protein, 29 aa, Artificial Sequence
  Cyclic GFR-binding peptide
  MOD_RES (29)..(29): Xaa is C or S
LNAISVLYFDDMGVPTLKKYREGMSVAEX

SEQ ID NO: 76964 - protein, 30 aa, Artificial Sequence
  Cyclic GFR-binding peptide
  MOD_RES (28)..(30): Xaa is C or S
KTNAISMLYFDNGRVLLLKKYRMIVEEXGX

SEQ ID NO: 76965 - protein, 27 aa, Artificial Sequence
  Cyclic GFR-binding peptide
LNAISMLYFDENEKVVLKKYRDMVVEG

SEQ ID NO: 76966 - protein, 23 aa, Artificial Sequence
  Cyclic GFR-binding peptide
NAISILYFDAANNVVLKKYRDMV

SEQ ID NO: 76967 - protein, 27 aa, Artificial Sequence
  Cyclic GFR-binding peptide
  MOD_RES (1)..(1): Xaa is C or S
XVPTELNAISMLYFDENEKVVLKKYRD

SEQ ID NO: 76968 - protein, 37 aa, Artificial Sequence
  Cyclic GFR-binding peptide
  MOD_RES (6)..(7): Xaa is C or S
RVPSTXXAPVKTNAISMLYFDNGRVLLLKKYRMIVEE

SEQ ID NO: 76969 - protein, 35 aa, Artificial Sequence; identical to SEQ ID NO: 6749
  Cyclic GFR-binding peptide
  MOD_RES (4)..(5): Xaa is C or S

SEQ ID NO: 76970 - protein, 32 aa, Artificial Sequence
  Cyclic GFR-binding peptide
  MOD_RES (32)..(32): Xaa is C or S
TPTKMNAISMLYFNDKQQIILKKYRGMVVDRX

SEQ ID NO: 76971 - protein, 23 aa, Artificial Sequence
  Cyclic GFR-binding peptide
LNAISILYFDKGVVTYLKKYRGM

SEQ ID NO: 76972 - protein, 26 aa, Artificial Sequence
  Cyclic GFR-binding peptide
VPTRLNAISILYFDSANNVVLKKYRD

SEQ ID NO: 76973 - protein, 28 aa, Artificial Sequence
  Cyclic GFR-binding peptide
  MOD_RES (1)..(1): Xaa is C or S
XAPTKLNAISVLYFDSSNNVILKKYRNM

SEQ ID NO: 76974 - protein, 33 aa, Artificial Sequence; identical to SEQ ID NO: 37996
  Cyclic GFR-binding peptide
  MOD_RES (31)..(33): Xaa is C or S

SEQ ID NO: 76975 - protein, 30 aa, Artificial Sequence; identical to SEQ ID NO: 6758
  Cyclic GFR-binding peptide
  MOD_RES (30)..(30): Xaa is C or S

SEQ ID NO: 76976 - protein, 29 aa, Artificial Sequence
  Cyclic GFR-binding peptide
  MOD_RES (1)..(2): Xaa is C or S
XXVPTKLNAISVLYFDDMGVPTLKKYREG

SEQ ID NO: 76977 - protein, 31 aa, Artificial Sequence; identical to SEQ ID NO: 38000
  Cyclic GFR-binding peptide
  MOD_RES (2)..(3): Xaa is C or S

SEQ ID NO: 76978 - protein, 29 aa, Artificial Sequence
  Cyclic GFR-binding peptide
KLNAISVLYFDDMGVPTLKKYREGMSVAE

SEQ ID NO: 76979 - protein, 26 aa, Artificial Sequence
  Cyclic GFR-binding peptide
KLNAISVLYFDDMGVPTLKKYREGMS

SEQ ID NO: 76980 - protein, 28 aa, Artificial Sequence
  Cyclic GFR-binding peptide
  MOD_RES (27)..(27): Xaa is C or S
NAISMLYFDENEKVVLKKYRDMVVEGXG

SEQ ID NO: 76981 - protein, 20 aa, Artificial Sequence
  Cyclic GFR-binding peptide
NAISVLYFDDMGVPTLKKYR

SEQ ID NO: 76982 - protein, 26 aa, Artificial Sequence
  Cyclic GFR-binding peptide
NAISILYFDSANNVVLKKYRDMVVES

SEQ ID NO: 76983 - protein, 28 aa, Artificial Sequence
  Cyclic GFR-binding peptide
VKTNAISMLYFDNGRVLLLKKYRMIVEE

SEQ ID NO: 76984 - protein, 29 aa, Artificial Sequence
  Cyclic GFR-binding peptide
  MOD_RES (1)..(2): Xaa is C or S
XXVPARLNAISILYFDAANNVVLKKYRDM

SEQ ID NO: 76985 - protein, 24 aa, Artificial Sequence
  Cyclic GFR-binding peptide
KTNAISMLYFDNGRVLLLKKYRMI

SEQ ID NO: 76986 - protein, 30 aa, Artificial Sequence
  Cyclic GFR-binding peptide
  MOD_RES (30)..(30): Xaa is C or S
TKMNAISMLYFNDKQQIILKKYRGMVVDRX

SEQ ID NO: 76987 - protein, 31 aa, Artificial Sequence; identical to SEQ ID NO: 9231
  Cyclic GFR-binding peptide
  MOD_RES (31)..(31): Xaa is C or S

SEQ ID NO: 76988 - protein, 21 aa, Artificial Sequence
  Cyclic GFR-binding peptide
NAISVLYFDSSNNVILKKYRN

SEQ ID NO: 76989 - protein, 41 aa, Artificial Sequence
  Cyclic GFR-binding peptide
  MOD_RES (6)..(7)..(38)..(40): Xaa is C or S
RVPSTXXAPVKTNAISMLYFDNGRVLLLKKYRMIVEEXGXL

SEQ ID NO: 76990 - protein, 34 aa, Artificial Sequence; identical to SEQ ID NO: 9241
  Cyclic GFR-binding peptide
  MOD_RES (1)..(33): Xaa is C or S

SEQ ID NO: 76991 - protein, 27 aa, Artificial Sequence
  Cyclic GFR-binding peptide
  MOD_RES (1)..(2): Xaa is C or S
XXVPTKLNAISILYFDKGVVTYLKKYR

SEQ ID NO: 76992 - protein, 37 aa, Artificial Sequence; identical to SEQ ID NO: 38026
  Cyclic GFR-binding peptide
  MOD_RES (1)..(2)..(34)..(36): Xaa is C or S

SEQ ID NO: 76993 - protein, 26 aa, Artificial Sequence
  Cyclic GFR-binding peptide
PTKLNAISILYFDKGVVTYLKKYRGM

SEQ ID NO: 76994 - protein, 39 aa, Artificial Sequence; identical to SEQ ID NO: 38036
  Cyclic GFR-binding peptide
  MOD_RES (4)..(5)..(37)..(39): Xaa is C or S

SEQ ID NO: 76995 - protein, 31 aa, Artificial Sequence; identical to SEQ ID NO: 6792
  Cyclic GFR-binding peptide
  MOD_RES (1)..(1): Xaa is C or S

SEQ ID NO: 76996 - protein, 34 aa, Artificial Sequence
  Cyclic GFR-binding peptide
  MOD_RES (1)..(32)..(34): Xaa is C or S
XAPVKTNAISMLYFDNGRVLLLKKYRMIVEEXGX

SEQ ID NO: 76997 - protein, 23 aa, Artificial Sequence
  Cyclic GFR-binding peptide
RLNAISILYFDAANNVVLKKYRD

SEQ ID NO: 76998 - protein, 25 aa, Artificial Sequence
  Cyclic GFR-binding peptide
NAISILYFDSANNVVLKKYRDMVVE

SEQ ID NO: 76999 - protein, 23 aa, Artificial Sequence
  Cyclic GFR-binding peptide
NAISMLYFDEYDKVVLKKYREMV

SEQ ID NO: 77000 - protein, 31 aa, Artificial Sequence; identical to SEQ ID NO: 35179
  Cyclic GFR-binding peptide

SEQ ID NO: 77001 - protein, 37 aa, Artificial Sequence; identical to SEQ ID NO: 6803
  Cyclic GFR-binding peptide
  MOD_RES (6)..(7): Xaa is C or S

SEQ ID NO: 77002 - protein, 35 aa, Artificial Sequence
  Cyclic GFR-binding peptide
  MOD_RES (1)..(2)..(33)..(35): Xaa is C or S
XXAPVKTNAISMLYFDNGRVLLLKKYRMIVEEXGX

SEQ ID NO: 77003 - protein, 29 aa, Artificial Sequence
  Cyclic GFR-binding peptide
  MOD_RES (2)..(3): Xaa is C or S
AXXVPTKLNAISILYFDKGVVTYLKKYRG

SEQ ID NO: 77004 - protein, 39 aa, Artificial Sequence; identical to SEQ ID NO: 9265
  Cyclic GFR-binding peptide
  MOD_RES (4)..(5)..(37)..(39): Xaa is C or S

SEQ ID NO: 77005 - protein, 36 aa, Artificial Sequence
  Cyclic GFR-binding peptide
  MOD_RES (1)..(2)..(33)..(35): Xaa is C or S
XXAPVKTNAISMLYFDNGRVLLLKKYRMIVEEXGXL

SEQ ID NO: 77006 - protein, 36 aa, Artificial Sequence; identical to SEQ ID NO: 17184
  Cyclic GFR-binding peptide
  MOD_RES (2)..(3)..(35): Xaa is C or S

SEQ ID NO: 77007 - protein, 26 aa, Artificial Sequence
  Cyclic GFR-binding peptide
NAISVLYFDDMGVPTLKKYREGMSVA

SEQ ID NO: 77008 - protein, 30 aa, Artificial Sequence; identical to SEQ ID NO: 17187
  Cyclic GFR-binding peptide
  MOD_RES (2)..(3): Xaa is C or S

SEQ ID NO: 77009 - protein, 37 aa, Artificial Sequence; identical to SEQ ID NO: 6824
  Cyclic GFR-binding peptide
  MOD_RES (5)..(6): Xaa is C or S

SEQ ID NO: 77010 - protein, 38 aa, Artificial Sequence
  Cyclic GFR-binding peptide
  MOD_RES (5)..(6)..(38): Xaa is C or S
SAGPXXTPTKMNAISMLYFNDKQQIILKKYRGMVVDRX

SEQ ID NO: 77011 - protein, 34 aa, Artificial Sequence; identical to SEQ ID NO: 35206
  Cyclic GFR-binding peptide
  MOD_RES (31)..(33): Xaa is C or S

SEQ ID NO: 77012 - protein, 32 aa, Artificial Sequence
  Cyclic GFR-binding peptide
  MOD_RES (5)..(6): Xaa is C or S
VPSTXXAPVKTNAISMLYFDNGRVLLLKKYRM

SEQ ID NO: 77013 - protein, 32 aa, Artificial Sequence; identical to SEQ ID NO: 38078
  Cyclic GFR-binding peptide
  MOD_RES (31)..(31): Xaa is C or S

SEQ ID NO: 77014 - protein, 21 aa, Artificial Sequence
  Cyclic GFR-binding peptide
NAISVLYFDDMGVPTLKKYRE

SEQ ID NO: 77015 - protein, 22 aa, Artificial Sequence
  Cyclic GFR-binding peptide
TNAISMLYFDNGRVLLLKKYRM

SEQ ID NO: 77016 - protein, 27 aa, Artificial Sequence
  Cyclic GFR-binding peptide
VPTRLNAISILYFDSANNVVLKKYRDM

SEQ ID NO: 77017 - protein, 34 aa, Artificial Sequence; identical to SEQ ID NO: 6839
  Cyclic GFR-binding peptide
  MOD_RES (5)..(6): Xaa is C or S

SEQ ID NO: 77018 - protein, 27 aa, Artificial Sequence
  Cyclic GFR-binding peptide
TKLNAISVLYFDDMGVPTLKKYREGMS

SEQ ID NO: 77019 - protein, 29 aa, Artificial Sequence
  Cyclic GFR-binding peptide
  MOD_RES (28)..(28): Xaa is C or S
LNAISMLYFDENEKVVLKKYRDMVVEGXG

SEQ ID NO: 77020 - protein, 32 aa, Artificial Sequence; identical to SEQ ID NO: 6855
  Cyclic GFR-binding peptide
  MOD_RES (3)..(4): Xaa is C or S

SEQ ID NO: 77021 - protein, 21 aa, Artificial Sequence
  Cyclic GFR-binding peptide
NAISMLYFDENEKVVLKKYRD

SEQ ID NO: 77022 - protein, 34 aa, Artificial Sequence; identical to SEQ ID NO: 19544
  Cyclic GFR-binding peptide
  MOD_RES (5)..(6): Xaa is C or S

SEQ ID NO: 77023 - protein, 31 aa, Artificial Sequence; identical to SEQ ID NO: 38106
  Cyclic GFR-binding peptide
  MOD_RES (29)..(31): Xaa is C or S

SEQ ID NO: 77024 - protein, 36 aa, Artificial Sequence; identical to SEQ ID NO: 6871
  Cyclic GFR-binding peptide
  MOD_RES (4)..(5): Xaa is C or S

SEQ ID NO: 77025 - protein, 23 aa, Artificial Sequence
  Cyclic GFR-binding peptide
NAISILYFDSANNVVLKKYRDMV

SEQ ID NO: 77026 - protein, 26 aa, Artificial Sequence
  Cyclic GFR-binding peptide
VPTELNAISMLYFDEYDKVVLKKYRE

SEQ ID NO: 77027 - protein, 31 aa, Artificial Sequence; identical to SEQ ID NO: 17241
  Cyclic GFR-binding peptide
  MOD_RES (30)..(30): Xaa is C or S

SEQ ID NO: 77028 - protein, 30 aa, Artificial Sequence; identical to SEQ ID NO: 6872
  Cyclic GFR-binding peptide
  MOD_RES (3)..(4): Xaa is C or S

SEQ ID NO: 77029 - protein, 20 aa, Artificial Sequence
  Cyclic GFR-binding peptide
NAISILYFDKGVVTYLKKYR

SEQ ID NO: 77030 - protein, 24 aa, Artificial Sequence
  Cyclic GFR-binding peptide
ELNAISMLYFDEYDKVVLKKYREM

SEQ ID NO: 77031 - protein, 33 aa, Artificial Sequence; identical to SEQ ID NO: 6880
  Cyclic GFR-binding peptide
  MOD_RES (1)..(2): Xaa is C or S

SEQ ID NO: 77032 - protein, 26 aa, Artificial Sequence
  Cyclic GFR-binding peptide
ARLNAISILYFDAANNVVLKKYRDMV

SEQ ID NO: 77033 - protein, 26 aa, Artificial Sequence
  Cyclic GFR-binding peptide
RLNAISILYFDSANNVVLKKYRDMVV

SEQ ID NO: 77034 - protein, 30 aa, Artificial Sequence; identical to SEQ ID NO: 19560
  Cyclic GFR-binding peptide
  MOD_RES (4)..(5): Xaa is C or S

SEQ ID NO: 77035 - protein, 36 aa, Artificial Sequence; identical to SEQ ID NO: 19561
  Cyclic GFR-binding peptide
  MOD_RES (6)..(7): Xaa is C or S

SEQ ID NO: 77036 - protein, 28 aa, Artificial Sequence
  Cyclic GFR-binding peptide
  MOD_RES (28)..(28): Xaa is C or S
LNAISMLYFDENEKVVLKKYRDMVVEGX

SEQ ID NO: 77037 - protein, 29 aa, Artificial Sequence
  Cyclic GFR-binding peptide
  MOD_RES (29)..(29): Xaa is C or S
ELNAISMLYFDEYDKVVLKKYREMVVEGX

SEQ ID NO: 77038 - protein, 30 aa, Artificial Sequence
  Cyclic GFR-binding peptide
PTKMNAISMLYFNDKQQIILKKYRGMVVDR

SEQ ID NO: 77039 - protein, 21 aa, Artificial Sequence
  Cyclic GFR-binding peptide
NAISILYFDAANNVVLKKYRD

SEQ ID NO: 77040 - protein, 34 aa, Artificial Sequence; identical to SEQ ID NO: 6893
  Cyclic GFR-binding peptide
  MOD_RES (4)..(5): Xaa is C or S

SEQ ID NO: 77041 - protein, 26 aa, Artificial Sequence
  Cyclic GFR-binding peptide
TPTKMNAISMLYFNDKQQIILKKYRG

SEQ ID NO: 77042 - protein, 25 aa, Artificial Sequence
  Cyclic GFR-binding peptide
VPTELNAISMLYFDENEKVVLKKYR

SEQ ID NO: 77043 - protein, 31 aa, Artificial Sequence; identical to SEQ ID NO: 17265
  Cyclic GFR-binding peptide
  MOD_RES (2)..(3): Xaa is C or S

SEQ ID NO: 77044 - protein, 27 aa, Artificial Sequence
  Cyclic GFR-binding peptide
  MOD_RES (27)..(27): Xaa is C or S
NAISILYFDKGVVTYLKKYRGMAVSEX

SEQ ID NO: 77045 - protein, 29 aa, Artificial Sequence
  Cyclic GFR-binding peptide
  MOD_RES (2)..(3): Xaa is C or S
SXXVPARLNAISILYFDAANNVVLKKYRD

SEQ ID NO: 77046 - protein, 32 aa, Artificial Sequence; identical to SEQ ID NO: 17271
  Cyclic GFR-binding peptide
  MOD_RES (1)..(1): Xaa is C or S

SEQ ID NO: 77047 - protein, 41 aa, Artificial Sequence; identical to SEQ ID NO: 9364
  Cyclic GFR-binding peptide
  MOD_RES (5)..(6)..(38)..(40): Xaa is C or S

SEQ ID NO: 77048 - protein, 25 aa, Artificial Sequence
  Cyclic GFR-binding peptide
NAISMLYFDENEKVVLKKYRDMVVE

SEQ ID NO: 77049 - protein, 24 aa, Artificial Sequence
  Cyclic GFR-binding peptide
TNAISMLYFDNGRVLLLKKYRMIV

SEQ ID NO: 77050 - protein, 28 aa, Artificial Sequence
  Cyclic GFR-binding peptide
  MOD_RES (1)..(1): Xaa is C or S
XVPARLNAISILYFDAANNVVLKKYRDM

SEQ ID NO: 77051 - protein, 38 aa, Artificial Sequence
  Cyclic GFR-binding peptide
  MOD_RES (5)..(6)..(37): Xaa is C or S
VPSTXXAPVKTNAISMLYFDNGRVLLLKKYRMIVEEXG

SEQ ID NO: 77052 - protein, 32 aa, Artificial Sequence; identical to SEQ ID NO: 9372
  Cyclic GFR-binding peptide
  MOD_RES (6)..(7): Xaa is C or S

SEQ ID NO: 77053 - protein, 34 aa, Artificial Sequence; identical to SEQ ID NO: 38153
  Cyclic GFR-binding peptide
  MOD_RES (3)..(4): Xaa is C or S

SEQ ID NO: 77054 - protein, 33 aa, Artificial Sequence; identical to SEQ ID NO: 38157
  Cyclic GFR-binding peptide
  MOD_RES (1)..(33): Xaa is C or S

SEQ ID NO: 77055 - protein, 32 aa, Artificial Sequence; identical to SEQ ID NO: 9379
  Cyclic GFR-binding peptide
  MOD_RES (4)..(5): Xaa is C or S

SEQ ID NO: 77056 - protein, 27 aa, Artificial Sequence
  Cyclic GFR-binding peptide
  MOD_RES (1)..(2): Xaa is C or S
XXTPTKMNAISMLYFNDKQQIILKKYR

SEQ ID NO: 77057 - protein, 39 aa, Artificial Sequence
  Cyclic GFR-binding peptide
  MOD_RES (6)..(7)..(39): Xaa is C or S
GSAGPXXTPTKMNAISMLYFNDKQQIILKKYRGMVVDRX

SEQ ID NO: 77058 - protein, 32 aa, Artificial Sequence; identical to SEQ ID NO: 9381
  Cyclic GFR-binding peptide
  MOD_RES (30)..(32): Xaa is C or S

SEQ ID NO: 77059 - protein, 35 aa, Artificial Sequence; identical to SEQ ID NO: 35296
  Cyclic GFR-binding peptide
  MOD_RES (1)..(33)..(35): Xaa is C or S

SEQ ID NO: 77060 - protein, 32 aa, Artificial Sequence; identical to SEQ ID NO: 6924
  Cyclic GFR-binding peptide
  MOD_RES (5)..(6): Xaa is C or S

SEQ ID NO: 77061 - protein, 30 aa, Artificial Sequence; identical to SEQ ID NO: 9394
  Cyclic GFR-binding peptide
  MOD_RES (3)..(4): Xaa is C or S

SEQ ID NO: 77062 - protein, 22 aa, Artificial Sequence
  Cyclic GFR-binding peptide
NAISILYFDAANNVVLKKYRDM

SEQ ID NO: 77063 - protein, 29 aa, Artificial Sequence
  Cyclic GFR-binding peptide
  MOD_RES (3)..(4): Xaa is C or S
KAXXVPTKLNAISVLYFDDMGVPTLKKYR

SEQ ID NO: 77064 - protein, 31 aa, Artificial Sequence; identical to SEQ ID NO: 9403
  Cyclic GFR-binding peptide

SEQ ID NO: 77065 - protein, 30 aa, Artificial Sequence; identical to SEQ ID NO: 38182
  Cyclic GFR-binding peptide
  MOD_RES (1)..(1): Xaa is C or S

SEQ ID NO: 77066 - protein, 34 aa, Artificial Sequence
  Cyclic GFR-binding peptide
  MOD_RES (4)..(5): Xaa is C or S
AGPXXTPTKMNAISMLYFNDKQQIILKKYRGMVV

SEQ ID NO: 77067 - protein, 35 aa, Artificial Sequence; identical to SEQ ID NO: 6935
  Cyclic GFR-binding peptide
  MOD_RES (2)..(3)..(35): Xaa is C or S

SEQ ID NO: 77068 - protein, 28 aa, Artificial Sequence
  Cyclic GFR-binding peptide
TKLNAISVLYFDDMGVPTLKKYREGMSV

SEQ ID NO: 77069 - protein, 36 aa, Artificial Sequence
  Cyclic GFR-binding peptide
  MOD_RES (2)..(3)..(34)..(36): Xaa is C or S
TXXAPVKTNAISMLYFDNGRVLLLKKYRMIVEEXGX

SEQ ID NO: 77070 - protein, 31 aa, Artificial Sequence; identical to SEQ ID NO: 38190
  Cyclic GFR-binding peptide
  MOD_RES (4)..(5): Xaa is C or S

SEQ ID NO: 77071 - protein, 29 aa, Artificial Sequence
  Cyclic GFR-binding peptide
  MOD_RES (29)..(29): Xaa is C or S
ELNAISMLYFDENEKVVLKKYRDMVVEGX

SEQ ID NO: 77072 - protein, 26 aa, Artificial Sequence
  Cyclic GFR-binding peptide
KMNAISMLYFNDKQQIILKKYRGMVV

SEQ ID NO: 77073 - protein, 28 aa, Artificial Sequence
  Cyclic GFR-binding peptide
  MOD_RES (28)..(28): Xaa is C or S
KTNAISMLYFDNGRVLLLKKYRMIVEEX

SEQ ID NO: 77074 - protein, 30 aa, Artificial Sequence
  Cyclic GFR-binding peptide
  MOD_RES (4)..(5): Xaa is C or S
PSTXXAPVKTNAISMLYFDNGRVLLLKKYR

SEQ ID NO: 77075 - protein, 37 aa, Artificial Sequence; identical to SEQ ID NO: 6949
  Cyclic GFR-binding peptide
  MOD_RES (2)..(3)..(36): Xaa is C or S

SEQ ID NO: 77076 - protein, 38 aa, Artificial Sequence
  Cyclic GFR-binding peptide
  MOD_RES (6)..(7)..(38): Xaa is C or S
RVPSTXXAPVKTNAISMLYFDNGRVLLLKKYRMIVEEX

SEQ ID NO: 77077 - protein, 35 aa, Artificial Sequence
  Cyclic GFR-binding peptide
  MOD_RES (4)..(5): Xaa is C or S
AGPXXTPTKMNAISMLYFNDKQQIILKKYRGMVVD

SEQ ID NO: 77078 - protein, 33 aa, Artificial Sequence
  Cyclic GFR-binding peptide
  MOD_RES (1)..(32): Xaa is C or S
XAPVKTNAISMLYFDNGRVLLLKKYRMIVEEXG

SEQ ID NO: 77079 - protein, 39 aa, Artificial Sequence; identical to SEQ ID NO: 9449
  Cyclic GFR-binding peptide
  MOD_RES (6)..(7)..(39): Xaa is C or S

SEQ ID NO: 77080 - protein, 23 aa, Artificial Sequence
  Cyclic GFR-binding peptide
KMNAISMLYFNDKQQIILKKYRG

SEQ ID NO: 77081 - protein, 33 aa, Artificial Sequence; identical to SEQ ID NO: 38235
  Cyclic GFR-binding peptide
  MOD_RES (3)..(4): Xaa is C or S

SEQ ID NO: 77082 - protein, 32 aa, Artificial Sequence; identical to SEQ ID NO: 35359
  Cyclic GFR-binding peptide
  MOD_RES (29)..(31): Xaa is C or S

SEQ ID NO: 77083 - protein, 34 aa, Artificial Sequence; identical to SEQ ID NO: 9460
  Cyclic GFR-binding peptide
  MOD_RES (1)..(2)..(34): Xaa is C or S

SEQ ID NO: 77084 - protein, 22 aa, Artificial Sequence
  Cyclic GFR-binding peptide
NAISMLYFNDKQQIILKKYRGM

SEQ ID NO: 77085 - protein, 31 aa, Artificial Sequence
  Cyclic GFR-binding peptide
  MOD_RES (1)..(1): Xaa is C or S
XTPTKMNAISMLYFNDKQQIILKKYRGMVVD

SEQ ID NO: 77086 - protein, 35 aa, Artificial Sequence; identical to SEQ ID NO: 38243
  Cyclic GFR-binding peptide
  MOD_RES (32)..(34): Xaa is C or S

SEQ ID NO: 77087 - protein, 32 aa, Artificial Sequence; identical to SEQ ID NO: 38244
  Cyclic GFR-binding peptide
  MOD_RES (1)..(2): Xaa is C or S

SEQ ID NO: 77088 - protein, 36 aa, Artificial Sequence; identical to SEQ ID NO: 9461
  Cyclic GFR-binding peptide
  MOD_RES (1)..(2)..(34)..(36): Xaa is C or S

SEQ ID NO: 77089 - protein, 27 aa, Artificial Sequence
  Cyclic GFR-binding peptide
LNAISILYFDKGVVTYLKKYRGMAVSE

SEQ ID NO: 77090 - protein, 36 aa, Artificial Sequence; identical to SEQ ID NO: 6989
  Cyclic GFR-binding peptide
  MOD_RES (4)..(5): Xaa is C or S

SEQ ID NO: 77091 - protein, 31 aa, Artificial Sequence; identical to SEQ ID NO: 17344
  Cyclic GFR-binding peptide
  MOD_RES (1)..(2): Xaa is C or S

SEQ ID NO: 77092 - protein, 37 aa, Artificial Sequence; identical to SEQ ID NO: 38250
  Cyclic GFR-binding peptide
  MOD_RES (6)..(7): Xaa is C or S

SEQ ID NO: 77093 - protein, 37 aa, Artificial Sequence; identical to SEQ ID NO: 38252
  Cyclic GFR-binding peptide
  MOD_RES (2)..(3)..(35)..(37): Xaa is C or S

SEQ ID NO: 77094 - protein, 27 aa, Artificial Sequence
  Cyclic GFR-binding peptide
  MOD_RES (27)..(27): Xaa is C or S
NAISILYFDSANNVVLKKYRDMVVESX

SEQ ID NO: 77095 - protein, 24 aa, Artificial Sequence
  Cyclic GFR-binding peptide
LNAISMLYFDEYDKVVLKKYREMV

SEQ ID NO: 77096 - protein, 25 aa, Artificial Sequence
  Cyclic GFR-binding peptide
ARLNAISILYFDAANNVVLKKYRDM

SEQ ID NO: 77097 - protein, 37 aa, Artificial Sequence; identical to SEQ ID NO: 6999
  Cyclic GFR-binding peptide
  MOD_RES (4)..(5): Xaa is C or S

SEQ ID NO: 77098 - protein, 33 aa, Artificial Sequence; identical to SEQ ID NO: 38265
  Cyclic GFR-binding peptide
  MOD_RES (1)..(2): Xaa is C or S

SEQ ID NO: 77099 - protein, 32 aa, Artificial Sequence; identical to SEQ ID NO: 9480
  Cyclic GFR-binding peptide
  MOD_RES (1)..(2): Xaa is C or S

SEQ ID NO: 77100 - protein, 28 aa, Artificial Sequence
  Cyclic GFR-binding peptide
PTRLNAISILYFDSANNVVLKKYRDMVV

SEQ ID NO: 77101 - protein, 22 aa, Artificial Sequence
  Cyclic GFR-binding peptide
LNAISILYFDKGVVTYLKKYRG

SEQ ID NO: 77102 - protein, 23 aa, Artificial Sequence
  Cyclic GFR-binding peptide
MNAISMLYFNDKQQIILKKYRGM

SEQ ID NO: 77103 - protein, 25 aa, Artificial Sequence
  Cyclic GFR-binding peptide
VKTNAISMLYFDNGRVLLLKKYRMI

SEQ ID NO: 77104 - protein, 35 aa, Artificial Sequence; identical to SEQ ID NO: 7013
  Cyclic GFR-binding peptide
  MOD_RES (3)..(4): Xaa is C or S

SEQ ID NO: 77105 - protein, 24 aa, Artificial Sequence
  Cyclic GFR-binding peptide
NAISMLYFDEYDKVVLKKYREMVV

SEQ ID NO: 77106 - protein, 32 aa, Artificial Sequence; identical to SEQ ID NO: 17378
  Cyclic GFR-binding peptide
  MOD_RES (4)..(5): Xaa is C or S

SEQ ID NO: 77107 - protein, 33 aa, Artificial Sequence; identical to SEQ ID NO: 7025
  Cyclic GFR-binding peptide
  MOD_RES (1)..(2): Xaa is C or S

SEQ ID NO: 77108 - protein, 29 aa, Artificial Sequence
  Cyclic GFR-binding peptide
PTKMNAISMLYFNDKQQIILKKYRGMVVD

SEQ ID NO: 77109 - protein, 23 aa, Artificial Sequence
  Cyclic GFR-binding peptide
NAISVLYFDSSNNVILKKYRNMV

SEQ ID NO: 77110 - protein, 25 aa, Artificial Sequence
  Cyclic GFR-binding peptide
NAISVLYFDSSNNVILKKYRNMVVK

SEQ ID NO: 77111 - protein, 32 aa, Artificial Sequence; identical to SEQ ID NO: 9500
  Cyclic GFR-binding peptide
  MOD_RES (2)..(3): Xaa is C or S

SEQ ID NO: 77112 - protein, 30 aa, Artificial Sequence; identical to SEQ ID NO: 19737
  Cyclic GFR-binding peptide
  MOD_RES (27)..(29): Xaa is C or S

SEQ ID NO: 77113 - protein, 37 aa, Artificial Sequence; identical to SEQ ID NO: 9508
  Cyclic GFR-binding peptide
  MOD_RES (2)..(3)..(35)..(37): Xaa is C or S

SEQ ID NO: 77114 - protein, 33 aa, Artificial Sequence
  Cyclic GFR-binding peptide
  MOD_RES (30)..(32): Xaa is C or S
PVKTNAISMLYFDNGRVLLLKKYRMIVEEXGXL

SEQ ID NO: 77115 - protein, 31 aa, Artificial Sequence; identical to SEQ ID NO: 9510
  Cyclic GFR-binding peptide
  MOD_RES (30)..(30): Xaa is C or S

SEQ ID NO: 77116 - protein, 30 aa, Artificial Sequence; identical to SEQ ID NO: 7048
  Cyclic GFR-binding peptide
  MOD_RES (4)..(5): Xaa is C or S

SEQ ID NO: 77117 - protein, 30 aa, Artificial Sequence; identical to SEQ ID NO: 7050
  Cyclic GFR-binding peptide

SEQ ID NO: 77118 - protein, 36 aa, Artificial Sequence; identical to SEQ ID NO: 38310
  Cyclic GFR-binding peptide
  MOD_RES (1)..(33)..(35): Xaa is C or S

SEQ ID NO: 77119 - protein, 34 aa, Artificial Sequence; identical to SEQ ID NO: 9517
  Cyclic GFR-binding peptide
  MOD_RES (3)..(4): Xaa is C or S

SEQ ID NO: 77120 - protein, 23 aa, Artificial Sequence
  Cyclic GFR-binding peptide
VKTNAISMLYFDNGRVLLLKKYR

SEQ ID NO: 77121 - protein, 22 aa, Artificial Sequence
  Cyclic GFR-binding peptide
NAISILYFDSANNVVLKKYRDM

SEQ ID NO: 77122 - protein, 26 aa, Artificial Sequence
  Cyclic GFR-binding peptide
  MOD_RES (1)..(1): Xaa is C or S
XTPTKMNAISMLYFNDKQQIILKKYR

SEQ ID NO: 77123 - protein, 28 aa, Artificial Sequence
  Cyclic GFR-binding peptide
  MOD_RES (28)..(28): Xaa is C or S
LNAISMLYFDEYDKVVLKKYREMVVEGX

SEQ ID NO: 77124 - protein, 28 aa, Artificial Sequence
  Cyclic GFR-binding peptide
  MOD_RES (28)..(28): Xaa is C or S
LNAISVLYFDSSNNVILKKYRNMVVKAX

SEQ ID NO: 77125 - protein, 28 aa, Artificial Sequence
  Cyclic GFR-binding peptide
  MOD_RES (28)..(28): Xaa is C or S
MNAISMLYFNDKQQIILKKYRGMVVDRX

SEQ ID NO: 77126 - protein, 33 aa, Artificial Sequence; identical to SEQ ID NO: 9529
  Cyclic GFR-binding peptide
  MOD_RES (6)..(7): Xaa is C or S

SEQ ID NO: 77127 - protein, 38 aa, Artificial Sequence; identical to SEQ ID NO: 7070
  Cyclic GFR-binding peptide
  MOD_RES (2)..(3)..(35)..(37): Xaa is C or S

SEQ ID NO: 77128 - protein, 37 aa, Artificial Sequence; identical to SEQ ID NO: 19764
  Cyclic GFR-binding peptide
  MOD_RES (3)..(4)..(36): Xaa is C or S

SEQ ID NO: 77129 - protein, 26 aa, Artificial Sequence
  Cyclic GFR-binding peptide
LNAISILYFDSANNVVLKKYRDMVVE

SEQ ID NO: 77130 - protein, 33 aa, Artificial Sequence; identical to SEQ ID NO: 9544
  Cyclic GFR-binding peptide
  MOD_RES (30)..(32): Xaa is C or S

SEQ ID NO: 77131 - protein, 35 aa, Artificial Sequence
  Cyclic GFR-binding peptide
  MOD_RES (5)..(6): Xaa is C or S
VPSTXXAPVKTNAISMLYFDNGRVLLLKKYRMIVE

SEQ ID NO: 77132 - protein, 29 aa, Artificial Sequence
  Cyclic GFR-binding peptide
TKLNAISILYFDKGVVTYLKKYRGMAVSE

SEQ ID NO: 77133 - protein, 29 aa, Artificial Sequence
  Cyclic GFR-binding peptide
  MOD_RES (28)..(28): Xaa is C or S
MNAISMLYFNDKQQIILKKYRGMVVDRXG

SEQ ID NO: 77134 - protein, 26 aa, Artificial Sequence
  Cyclic GFR-binding peptide
  MOD_RES (1)..(1): Xaa is C or S
XAPVKTNAISMLYFDNGRVLLLKKYR

SEQ ID NO: 77135 - protein, 34 aa, Artificial Sequence; identical to SEQ ID NO: 19784
  Cyclic GFR-binding peptide
  MOD_RES (3)..(4): Xaa is C or S

SEQ ID NO: 77136 - protein, 32 aa, Artificial Sequence; identical to SEQ ID NO: 9565
  Cyclic GFR-binding peptide
  MOD_RES (29)..(31): Xaa is C or S

SEQ ID NO: 77137 - protein, 25 aa, Artificial Sequence
  Cyclic GFR-binding peptide
PTKLNAISVLYFDDMGVPTLKKYRE

SEQ ID NO: 77138 - protein, 39 aa, Artificial Sequence; identical to SEQ ID NO: 35482
  Cyclic GFR-binding peptide
  MOD_RES (6)..(7)..(39): Xaa is C or S

SEQ ID NO: 77139 - protein, 33 aa, Artificial Sequence
  Cyclic GFR-binding peptide
  MOD_RES (30)..(32): Xaa is C or S
TKMNAISMLYFNDKQQIILKKYRGMVVDRXGXS

SEQ ID NO: 77140 - protein, 34 aa, Artificial Sequence; identical to SEQ ID NO: 7089
  Cyclic GFR-binding peptide
  MOD_RES (2)..(3): Xaa is C or S

SEQ ID NO: 77141 - protein, 33 aa, Artificial Sequence; identical to SEQ ID NO: 35488
  Cyclic GFR-binding peptide
  MOD_RES (5)..(6): Xaa is C or S

SEQ ID NO: 77142 - protein, 25 aa, Artificial Sequence
  Cyclic GFR-binding peptide
LNAISILYFDKGVVTYLKKYRGMAV

SEQ ID NO: 77143 - protein, 37 aa, Artificial Sequence; identical to SEQ ID NO: 9585
  Cyclic GFR-binding peptide
  MOD_RES (2)..(3)..(35)..(37): Xaa is C or S

SEQ ID NO: 77144 - protein, 29 aa, Artificial Sequence
  Cyclic GFR-binding peptide
VPTKLNAISILYFDKGVVTYLKKYRGMAV

SEQ ID NO: 77145 - protein, 31 aa, Artificial Sequence; identical to SEQ ID NO: 19806
  Cyclic GFR-binding peptide
  MOD_RES (3)..(4): Xaa is C or S

SEQ ID NO: 77146 - protein, 28 aa, Artificial Sequence
  Cyclic GFR-binding peptide
PTKMNAISMLYFNDKQQIILKKYRGMVV

SEQ ID NO: 77147 - protein, 33 aa, Artificial Sequence; identical to SEQ ID NO: 9598
  Cyclic GFR-binding peptide
  MOD_RES (31)..(33): Xaa is C or S

SEQ ID NO: 77148 - protein, 37 aa, Artificial Sequence; identical to SEQ ID NO: 9603
  Cyclic GFR-binding peptide
  MOD_RES (5)..(6): Xaa is C or S

SEQ ID NO: 77149 - protein, 39 aa, Artificial Sequence; identical to SEQ ID NO: 9604
  Cyclic GFR-binding peptide
  MOD_RES (4)..(5)..(38): Xaa is C or S

SEQ ID NO: 77150 - protein, 30 aa, Artificial Sequence
  Cyclic GFR-binding peptide
  MOD_RES (2)..(3): Xaa is C or S
PXXTPTKMNAISMLYFNDKQQIILKKYRGM

SEQ ID NO: 77151 - protein, 22 aa, Artificial Sequence
  Cyclic GFR-binding peptide
KMNAISMLYFNDKQQIILKKYR

SEQ ID NO: 77152 - protein, 38 aa, Artificial Sequence; identical to SEQ ID NO: 17467
  Cyclic GFR-binding peptide
  MOD_RES (6)..(7): Xaa is C or S

SEQ ID NO: 77153 - protein, 24 aa, Artificial Sequence
  Cyclic GFR-binding peptide
NAISVLYFDDMGVPTLKKYREGMS

SEQ ID NO: 77154 - protein, 26 aa, Artificial Sequence
  Cyclic GFR-binding peptide
PTKMNAISMLYFNDKQQIILKKYRGM

SEQ ID NO: 77155 - protein, 33 aa, Artificial Sequence; identical to SEQ ID NO: 35529
  Cyclic GFR-binding peptide
  MOD_RES (31)..(33): Xaa is C or S

SEQ ID NO: 77156 - protein, 23 aa, Artificial Sequence
  Cyclic GFR-binding peptide
TKLNAISVLYFDSSNNVILKKYR

SEQ ID NO: 77157 - protein, 22 aa, Artificial Sequence
  Cyclic GFR-binding peptide
ELNAISMLYFDENEKVVLKKYR

SEQ ID NO: 77158 - protein, 32 aa, Artificial Sequence; identical to SEQ ID NO: 9632
  Cyclic GFR-binding peptide
  MOD_RES (1)..(1): Xaa is C or S

SEQ ID NO: 77159 - protein, 31 aa, Artificial Sequence
  Cyclic GFR-binding peptide
  MOD_RES (5)..(6): Xaa is C or S
VPSTXXAPVKTNAISMLYFDNGRVLLLKKYR

SEQ ID NO: 77160 - protein, 28 aa, Artificial Sequence
  Cyclic GFR-binding peptide
TKMNAISMLYFNDKQQIILKKYRGMVVD

SEQ ID NO: 77161 - protein, 30 aa, Artificial Sequence
  Cyclic GFR-binding peptide
  MOD_RES (4)..(5): Xaa is C or S
AGPXXTPTKMNAISMLYFNDKQQIILKKYR

SEQ ID NO: 77162 - protein, 38 aa, Artificial Sequence; identical to SEQ ID NO: 38427
  Cyclic GFR-binding peptide
  MOD_RES (5)..(6)..(38): Xaa is C or S

SEQ ID NO: 77163 - protein, 36 aa, Artificial Sequence; identical to SEQ ID NO: 17484
  Cyclic GFR-binding peptide
  MOD_RES (5)..(6): Xaa is C or S

SEQ ID NO: 77164 - protein, 27 aa, Artificial Sequence
  Cyclic GFR-binding peptide
  MOD_RES (1)..(2): Xaa is C or S
XXVPTKLNAISVLYFDDMGVPTLKKYR

SEQ ID NO: 77165 - protein, 37 aa, Artificial Sequence
  Cyclic GFR-binding peptide
  MOD_RES (3)..(4)..(35)..(37): Xaa is C or S
STXXAPVKTNAISMLYFDNGRVLLLKKYRMIVEEXGX

SEQ ID NO: 77166 - protein, 31 aa, Artificial Sequence; identical to SEQ ID NO: 9638
  Cyclic GFR-binding peptide
  MOD_RES (28)..(30): Xaa is C or S

SEQ ID NO: 77167 - protein, 32 aa, Artificial Sequence; identical to SEQ ID NO: 9643
  Cyclic GFR-binding peptide
  MOD_RES (1)..(1): Xaa is C or S

SEQ ID NO: 77168 - protein, 33 aa, Artificial Sequence; identical to SEQ ID NO: 7142
  Cyclic GFR-binding peptide
  MOD_RES (1)..(1): Xaa is C or S

SEQ ID NO: 77169 - protein, 31 aa, Artificial Sequence; identical to SEQ ID NO: 7143
  Cyclic GFR-binding peptide
  MOD_RES (5)..(6): Xaa is C or S

SEQ ID NO: 77170 - protein, 31 aa, Artificial Sequence; identical to SEQ ID NO: 7144
  Cyclic GFR-binding peptide
  MOD_RES (29)..(31): Xaa is C or S

SEQ ID NO: 77171 - protein, 23 aa, Artificial Sequence
  Cyclic GFR-binding peptide
TRLNAISILYFDSANNVVLKKYR

SEQ ID NO: 77172 - protein, 36 aa, Artificial Sequence; identical to SEQ ID NO: 9646
  Cyclic GFR-binding peptide
  MOD_RES (1)..(34)..(36): Xaa is C or S

SEQ ID NO: 77173 - protein, 40 aa, Artificial Sequence; identical to SEQ ID NO: 9647
  Cyclic GFR-binding peptide
  MOD_RES (6)..(7)..(39): Xaa is C or S

SEQ ID NO: 77174 - protein, 32 aa, Artificial Sequence; identical to SEQ ID NO: 7150
  Cyclic GFR-binding peptide
  MOD_RES (2)..(3): Xaa is C or S

SEQ ID NO: 77175 - protein, 36 aa, Artificial Sequence; identical to SEQ ID NO: 35566
  Cyclic GFR-binding peptide
  MOD_RES (1)..(2)..(34)..(36): Xaa is C or S

SEQ ID NO: 77176 - protein, 32 aa, Artificial Sequence; identical to SEQ ID NO: 38450
  Cyclic GFR-binding peptide
  MOD_RES (29)..(31): Xaa is C or S

SEQ ID NO: 77177 - protein, 41 aa, Artificial Sequence; identical to SEQ ID NO: 38455
  Cyclic GFR-binding peptide
  MOD_RES (5)..(6)..(38)..(40): Xaa is C or S

SEQ ID NO: 77178 - protein, 30 aa, Artificial Sequence
  Cyclic GFR-binding peptide
  MOD_RES (30)..(30): Xaa is C or S
PVKTNAISMLYFDNGRVLLLKKYRMIVEEX

SEQ ID NO: 77179 - protein, 31 aa, Artificial Sequence; identical to SEQ ID NO: 9657
  Cyclic GFR-binding peptide
  MOD_RES (1)..(2): Xaa is C or S

SEQ ID NO: 77180 - protein, 26 aa, Artificial Sequence
  Cyclic GFR-binding peptide
TRLNAISILYFDSANNVVLKKYRDMV

SEQ ID NO: 77181 - protein, 24 aa, Artificial Sequence
  Cyclic GFR-binding peptide
TKMNAISMLYFNDKQQIILKKYRG

SEQ ID NO: 77182 - protein, 37 aa, Artificial Sequence; identical to SEQ ID NO: 7165
  Cyclic GFR-binding peptide
  MOD_RES (4)..(5)..(37): Xaa is C or S

SEQ ID NO: 77183 - protein, 24 aa, Artificial Sequence
  Cyclic GFR-binding peptide
MNAISMLYFNDKQQIILKKYRGMV

SEQ ID NO: 77184 - protein, 41 aa, Artificial Sequence; identical to SEQ ID NO: 9668
  Cyclic GFR-binding peptide
  MOD_RES (6)..(7)..(39)..(41): Xaa is C or S

SEQ ID NO: 77185 - protein, 40 aa, Artificial Sequence; identical to SEQ ID NO: 9672
  Cyclic GFR-binding peptide
  MOD_RES (4)..(5)..(37)..(39): Xaa is C or S

SEQ ID NO: 77186 - protein, 32 aa, Artificial Sequence
  Cyclic GFR-binding peptide
  MOD_RES (29)..(31): Xaa is C or S
VKTNAISMLYFDNGRVLLLKKYRMIVEEXGXL

SEQ ID NO: 77187 - protein, 27 aa, Artificial Sequence
  Cyclic GFR-binding peptide
APVKTNAISMLYFDNGRVLLLKKYRMI

SEQ ID NO: 77188 - protein, 31 aa, Artificial Sequence
  Cyclic GFR-binding peptide
  MOD_RES (30)..(30): Xaa is C or S
TKMNAISMLYFNDKQQIILKKYRGMVVDRXG

SEQ ID NO: 77189 - protein, 30 aa, Artificial Sequence; identical to SEQ ID NO: 35590
  Cyclic GFR-binding peptide
  MOD_RES (29)..(29): Xaa is C or S

SEQ ID NO: 77190 - protein, 39 aa, Artificial Sequence; identical to SEQ ID NO: 9678
  Cyclic GFR-binding peptide
  MOD_RES (3)..(4)..(36)..(38): Xaa is C or S

SEQ ID NO: 77191 - protein, 25 aa, Artificial Sequence
  Cyclic GFR-binding peptide
NAISMLYFDEYDKVVLKKYREMVVE

SEQ ID NO: 77192 - protein, 41 aa, Artificial Sequence
  Cyclic GFR-binding peptide
  MOD_RES (5)..(6)..(38)..(40): Xaa is C or S
SAGPXXTPTKMNAISMLYFNDKQQIILKKYRGMVVDRXGXS

SEQ ID NO: 77193 - protein, 37 aa, Artificial Sequence
  Cyclic GFR-binding peptide
  MOD_RES (5)..(6): Xaa is C or S
SAGPXXTPTKMNAISMLYFNDKQQIILKKYRGMVVDR

SEQ ID NO: 77194 - protein, 24 aa, Artificial Sequence
  Cyclic GFR-binding peptide
PTELNAISMLYFDEYDKVVLKKYR

SEQ ID NO: 77195 - protein, 32 aa, Artificial Sequence; identical to SEQ ID NO: 9685
  Cyclic GFR-binding peptide

SEQ ID NO: 77196 - protein, 22 aa, Artificial Sequence
  Cyclic GFR-binding peptide
MNAISMLYFNDKQQIILKKYRG

SEQ ID NO: 77197 - protein, 33 aa, Artificial Sequence
  Cyclic GFR-binding peptide
  MOD_RES (5)..(6): Xaa is C or S
SAGPXXTPTKMNAISMLYFNDKQQIILKKYRGM

SEQ ID NO: 77198 - protein, 25 aa, Artificial Sequence
  Cyclic GFR-binding peptide
KLNAISVLYFDDMGVPTLKKYREGM

SEQ ID NO: 77199 - protein, 26 aa, Artificial Sequence
  Cyclic GFR-binding peptide
VPTKLNAISILYFDKGVVTYLKKYRG

SEQ ID NO: 77200 - protein, 33 aa, Artificial Sequence; identical to SEQ ID NO: 9691
  Cyclic GFR-binding peptide
  MOD_RES (5)..(6): Xaa is C or S

SEQ ID NO: 77201 - protein, 37 aa, Artificial Sequence; identical to SEQ ID NO: 38502
  Cyclic GFR-binding peptide
  MOD_RES (4)..(5)..(37): Xaa is C or S

SEQ ID NO: 77202 - protein, 30 aa, Artificial Sequence; identical to SEQ ID NO: 9699
  Cyclic GFR-binding peptide
  MOD_RES (1)..(2): Xaa is C or S

SEQ ID NO: 77203 - protein, 32 aa, Artificial Sequence; identical to SEQ ID NO: 35619
  Cyclic GFR-binding peptide
  MOD_RES (2)..(3): Xaa is C or S

SEQ ID NO: 77204 - protein, 29 aa, Artificial Sequence
  Cyclic GFR-binding peptide
  MOD_RES (3)..(4): Xaa is C or S
KAXXVPTELNAISMLYFDENEKVVLKKYR

SEQ ID NO: 77205 - protein, 36 aa, Artificial Sequence; identical to SEQ ID NO: 17556
  Cyclic GFR-binding peptide
  MOD_RES (4)..(5): Xaa is C or S

SEQ ID NO: 77206 - protein, 27 aa, Artificial Sequence
  Cyclic GFR-binding peptide
  MOD_RES (1)..(2): Xaa is C or S
XXAPVKTNAISMLYFDNGRVLLLKKYR

SEQ ID NO: 77207 - protein, 28 aa, Artificial Sequence
  Cyclic GFR-binding peptide
  MOD_RES (2)..(3): Xaa is C or S
AXXVPTKLNAISILYFDKGVVTYLKKYR

SEQ ID NO: 77208 - protein, 34 aa, Artificial Sequence; identical to SEQ ID NO: 7221
  Cyclic GFR-binding peptide
  MOD_RES (4)..(5): Xaa is C or S

SEQ ID NO: 77209 - protein, 29 aa, Artificial Sequence
  Cyclic GFR-binding peptide
  MOD_RES (3)..(4): Xaa is C or S
ASXXVPARLNAISILYFDAANNVVLKKYR

SEQ ID NO: 77210 - protein, 26 aa, Artificial Sequence
  Cyclic GFR-binding peptide
KLNAISILYFDKGVVTYLKKYRGMAV

SEQ ID NO: 77211 - protein, 36 aa, Artificial Sequence
  Cyclic GFR-binding peptide
  MOD_RES (2)..(3)..(35): Xaa is C or S
PXXTPTKMNAISMLYFNDKQQIILKKYRGMVVDRXG

SEQ ID NO: 77212 - protein, 34 aa, Artificial Sequence; identical to SEQ ID NO: 17576
  Cyclic GFR-binding peptide
  MOD_RES (4)..(5): Xaa is C or S

SEQ ID NO: 77213 - protein, 23 aa, Artificial Sequence
  Cyclic GFR-binding peptide
KLNAISILYFDKGVVTYLKKYRG

SEQ ID NO: 77214 - protein, 33 aa, Artificial Sequence
  Cyclic GFR-binding peptide
  MOD_RES (4)..(5): Xaa is C or S
PSTXXAPVKTNAISMLYFDNGRVLLLKKYRMIV

SEQ ID NO: 77215 - protein, 37 aa, Artificial Sequence; identical to SEQ ID NO: 35663
  Cyclic GFR-binding peptide
  MOD_RES (3)..(4)..(36): Xaa is C or S

SEQ ID NO: 77216 - protein, 40 aa, Artificial Sequence
  Cyclic GFR-binding peptide
  MOD_RES (5)..(6)..(37)..(39): Xaa is C or S
VPSTXXAPVKTNAISMLYFDNGRVLLLKKYRMIVEEXGXL

SEQ ID NO: 77217 - protein, 30 aa, Artificial Sequence; identical to SEQ ID NO: 9738
  Cyclic GFR-binding peptide
  MOD_RES (2)..(3): Xaa is C or S

SEQ ID NO: 77218 - protein, 21 aa, Artificial Sequence
  Cyclic GFR-binding peptide
LNAISILYFDSANNVVLKKYR

SEQ ID NO: 77219 - protein, 26 aa, Artificial Sequence
  Cyclic GFR-binding peptide
LNAISMLYFDENEKVVLKKYRDMVVE

SEQ ID NO: 77220 - protein, 32 aa, Artificial Sequence
  Cyclic GFR-binding peptide
  MOD_RES (3)..(4): Xaa is C or S
STXXAPVKTNAISMLYFDNGRVLLLKKYRMIV

SEQ ID NO: 77221 - protein, 21 aa, Artificial Sequence
  Cyclic GFR-binding peptide
NAISMLYFDEYDKVVLKKYRE

SEQ ID NO: 77222 - protein, 26 aa, Artificial Sequence
  Cyclic GFR-binding peptide
  MOD_RES (1)..(1): Xaa is C or S
XVPTKLNAISILYFDKGVVTYLKKYR

SEQ ID NO: 77223 - protein, 32 aa, Artificial Sequence; identical to SEQ ID NO: 7252
  Cyclic GFR-binding peptide
  MOD_RES (3)..(4): Xaa is C or S

SEQ ID NO: 77224 - protein, 33 aa, Artificial Sequence; identical to SEQ ID NO: 9746
  Cyclic GFR-binding peptide
  MOD_RES (4)..(5): Xaa is C or S

SEQ ID NO: 77225 - protein, 33 aa, Artificial Sequence; identical to SEQ ID NO: 7262
  Cyclic GFR-binding peptide
  MOD_RES (32)..(32): Xaa is C or S

SEQ ID NO: 77226 - protein, 25 aa, Artificial Sequence
  Cyclic GFR-binding peptide
PTKMNAISMLYFNDKQQIILKKYRG

SEQ ID NO: 77227 - protein, 21 aa, Artificial Sequence
  Cyclic GFR-binding peptide
LNAISMLYFDENEKVVLKKYR

SEQ ID NO: 77228 - protein, 29 aa, Artificial Sequence
  Cyclic GFR-binding peptide
  MOD_RES (28)..(28): Xaa is C or S
LNAISVLYFDSSNNVILKKYRNMVVKAXG

SEQ ID NO: 77229 - protein, 28 aa, Artificial Sequence
  Cyclic GFR-binding peptide
  MOD_RES (2)..(3): Xaa is C or S
AXXVPTELNAISMLYFDEYDKVVLKKYR

SEQ ID NO: 77230 - protein, 27 aa, Artificial Sequence
  Cyclic GFR-binding peptide
  MOD_RES (1)..(1): Xaa is C or S
XVPTELNAISMLYFDEYDKVVLKKYRE

SEQ ID NO: 77231 - protein, 29 aa, Artificial Sequence
  Cyclic GFR-binding peptide
  MOD_RES (3)..(4): Xaa is C or S
PTXXVPTRLNAISILYFDSANNVVLKKYR

SEQ ID NO: 77232 - protein, 31 aa, Artificial Sequence; identical to SEQ ID NO: 35702
  Cyclic GFR-binding peptide
  MOD_RES (28)..(30): Xaa is C or S

SEQ ID NO: 77233 - protein, 37 aa, Artificial Sequence; identical to SEQ ID NO: 9772
  Cyclic GFR-binding peptide
  MOD_RES (3)..(4)..(36): Xaa is C or S

SEQ ID NO: 77234 - protein, 26 aa, Artificial Sequence
  Cyclic GFR-binding peptide
PARLNAISILYFDAANNVVLKKYRDM

SEQ ID NO: 77235 - protein, 39 aa, Artificial Sequence
  Cyclic GFR-binding peptide
  MOD_RES (5)..(6)..(37)..(39): Xaa is C or S
VPSTXXAPVKTNAISMLYFDNGRVLLLKKYRMIVEEXGX

SEQ ID NO: 77236 - protein, 29 aa, Artificial Sequence
  Cyclic GFR-binding peptide
VPTKLNAISVLYFDDMGVPTLKKYREGMS

SEQ ID NO: 77237 - protein, 35 aa, Artificial Sequence; identical to SEQ ID NO: 19977
  Cyclic GFR-binding peptide
  MOD_RES (1)..(2)..(34): Xaa is C or S

SEQ ID NO: 77238 - protein, 28 aa, Artificial Sequence
  Cyclic GFR-binding peptide
  MOD_RES (1)..(2): Xaa is C or S
XXVPTELNAISMLYFDENEKVVLKKYRD

SEQ ID NO: 77239 - protein, 24 aa, Artificial Sequence
  Cyclic GFR-binding peptide
LNAISMLYFDENEKVVLKKYRDMV

SEQ ID NO: 77240 - protein, 32 aa, Artificial Sequence; identical to SEQ ID NO: 19980
  Cyclic GFR-binding peptide
  MOD_RES (31)..(31): Xaa is C or S

SEQ ID NO: 77241 - protein, 31 aa, Artificial Sequence; identical to SEQ ID NO: 9778
  Cyclic GFR-binding peptide
  MOD_RES (2)..(3): Xaa is C or S

SEQ ID NO: 77242 - protein, 23 aa, Artificial Sequence
  Cyclic GFR-binding peptide
TELNAISMLYFDENEKVVLKKYR

SEQ ID NO: 77243 - protein, 25 aa, Artificial Sequence
  Cyclic GFR-binding peptide
TKLNAISVLYFDSSNNVILKKYRNM

SEQ ID NO: 77244 - protein, 28 aa, Artificial Sequence
  Cyclic GFR-binding peptide
  MOD_RES (27)..(27): Xaa is C or S
NAISILYFDKGVVTYLKKYRGMAVSEXG

SEQ ID NO: 77245 - protein, 24 aa, Artificial Sequence
  Cyclic GFR-binding peptide
NAISMLYFDENEKVVLKKYRDMVV

SEQ ID NO: 77246 - protein, 30 aa, Artificial Sequence; identical to SEQ ID NO: 9787
  Cyclic GFR-binding peptide
  MOD_RES (29)..(29): Xaa is C or S

SEQ ID NO: 77247 - protein, 34 aa, Artificial Sequence; identical to SEQ ID NO: 35727
  Cyclic GFR-binding peptide
  MOD_RES (5)..(6): Xaa is C or S

SEQ ID NO: 77248 - protein, 35 aa, Artificial Sequence
  Cyclic GFR-binding peptide
  MOD_RES (2)..(3)..(34): Xaa is C or S
TXXAPVKTNAISMLYFDNGRVLLLKKYRMIVEEXG

SEQ ID NO: 77249 - protein, 36 aa, Artificial Sequence; identical to SEQ ID NO: 9799
  Cyclic GFR-binding peptide
  MOD_RES (6)..(7): Xaa is C or S

SEQ ID NO: 77250 - protein, 35 aa, Artificial Sequence; identical to SEQ ID NO: 7312
  Cyclic GFR-binding peptide
  MOD_RES (3)..(4): Xaa is C or S

SEQ ID NO: 77251 - protein, 25 aa, Artificial Sequence
  Cyclic GFR-binding peptide
NAISMLYFDNGRVLLLKKYRMIVEE

SEQ ID NO: 77252 - protein, 32 aa, Artificial Sequence; identical to SEQ ID NO: 7315
  Cyclic GFR-binding peptide
  MOD_RES (31)..(31): Xaa is C or S

SEQ ID NO: 77253 - protein, 29 aa, Artificial Sequence
  Cyclic GFR-binding peptide
  MOD_RES (1)..(2): Xaa is C or S
XXAPVKTNAISMLYFDNGRVLLLKKYRMI

SEQ ID NO: 77254 - protein, 31 aa, Artificial Sequence; identical to SEQ ID NO: 7321
  Cyclic GFR-binding peptide
  MOD_RES (4)..(5): Xaa is C or S

SEQ ID NO: 77255 - protein, 28 aa, Artificial Sequence
  Cyclic GFR-binding peptide
  MOD_RES (1)..(2): Xaa is C or S
XXVPTELNAISMLYFDEYDKVVLKKYRE

SEQ ID NO: 77256 - protein, 32 aa, Artificial Sequence
  Cyclic GFR-binding peptide
  MOD_RES (1)..(32): Xaa is C or S
XAPVKTNAISMLYFDNGRVLLLKKYRMIVEEX

SEQ ID NO: 77257 - protein, 25 aa, Artificial Sequence
  Cyclic GFR-binding peptide
RLNAISILYFDAANNVVLKKYRDMV

SEQ ID NO: 77258 - protein, 31 aa, Artificial Sequence; identical to SEQ ID NO: 20012
  Cyclic GFR-binding peptide
  MOD_RES (5)..(6): Xaa is C or S

SEQ ID NO: 77259 - protein, 29 aa, Artificial Sequence
  Cyclic GFR-binding peptide
  MOD_RES (1)..(1): Xaa is C or S
XAPVKTNAISMLYFDNGRVLLLKKYRMIV

SEQ ID NO: 77260 - protein, 35 aa, Artificial Sequence; identical to SEQ ID NO: 35759
  Cyclic GFR-binding peptide
  MOD_RES (3)..(4): Xaa is C or S

SEQ ID NO: 77261 - protein, 25 aa, Artificial Sequence
  Cyclic GFR-binding peptide
NAISVLYFDDMGVPTLKKYREGMSV

SEQ ID NO: 77262 - protein, 39 aa, Artificial Sequence; identical to SEQ ID NO: 20016
  Cyclic GFR-binding peptide
  MOD_RES (4)..(5)..(37)..(39): Xaa is C or S

SEQ ID NO: 77263 - protein, 27 aa, Artificial Sequence
  Cyclic GFR-binding peptide
KLNAISVLYFDSSNNVILKKYRNMVVK

SEQ ID NO: 77264 - protein, 31 aa, Artificial Sequence; identical to SEQ ID NO: 9815
  Cyclic GFR-binding peptide
  MOD_RES (2)..(3): Xaa is C or S

SEQ ID NO: 77265 - protein, 35 aa, Artificial Sequence
  Cyclic GFR-binding peptide
  MOD_RES (1)..(32)..(34): Xaa is C or S
XAPVKTNAISMLYFDNGRVLLLKKYRMIVEEXGXL

SEQ ID NO: 77266 - protein, 28 aa, Artificial Sequence
  Cyclic GFR-binding peptide
  MOD_RES (1)..(2): Xaa is C or S
XXTPTKMNAISMLYFNDKQQIILKKYRG

SEQ ID NO: 77267 - protein, 27 aa, Artificial Sequence
  Cyclic GFR-binding peptide
  MOD_RES (1)..(1): Xaa is C or S
XTPTKMNAISMLYFNDKQQIILKKYRG

SEQ ID NO: 77268 - protein, 33 aa, Artificial Sequence; identical to SEQ ID NO: 38641
  Cyclic GFR-binding peptide
  MOD_RES (1)..(33): Xaa is C or S

SEQ ID NO: 77269 - protein, 35 aa, Artificial Sequence; identical to SEQ ID NO: 9821
  Cyclic GFR-binding peptide
  MOD_RES (1)..(2)..(34): Xaa is C or S

SEQ ID NO: 77270 - protein, 31 aa, Artificial Sequence; identical to SEQ ID NO: 9829
  Cyclic GFR-binding peptide
  MOD_RES (30)..(30): Xaa is C or S

SEQ ID NO: 77271 - protein, 39 aa, Artificial Sequence; identical to SEQ ID NO: 9832
  Cyclic GFR-binding peptide
  MOD_RES (4)..(5)..(37)..(39): Xaa is C or S

SEQ ID NO: 77272 - protein, 27 aa, Artificial Sequence
  Cyclic GFR-binding peptide
  MOD_RES (1)..(2): Xaa is C or S
XXVPTELNAISMLYFDEYDKVVLKKYR

SEQ ID NO: 77273 - protein, 26 aa, Artificial Sequence
  Cyclic GFR-binding peptide
ELNAISMLYFDEYDKVVLKKYREMVV

SEQ ID NO: 77274 - protein, 31 aa, Artificial Sequence; identical to SEQ ID NO: 35791
  Cyclic GFR-binding peptide
  MOD_RES (4)..(5): Xaa is C or S

SEQ ID NO: 77275 - protein, 27 aa, Artificial Sequence
  Cyclic GFR-binding peptide
KMNAISMLYFNDKQQIILKKYRGMVVD

SEQ ID NO: 77276 - protein, 35 aa, Artificial Sequence; identical to SEQ ID NO: 7356
  Cyclic GFR-binding peptide
  MOD_RES (5)..(6): Xaa is C or S

SEQ ID NO: 77277 - protein, 32 aa, Artificial Sequence; identical to SEQ ID NO: 17674
  Cyclic GFR-binding peptide
  MOD_RES (29)..(31): Xaa is C or S

SEQ ID NO: 77278 - protein, 35 aa, Artificial Sequence
  Cyclic GFR-binding peptide
  MOD_RES (4)..(5): Xaa is C or S
PSTXXAPVKTNAISMLYFDNGRVLLLKKYRMIVEE

SEQ ID NO: 77279 - protein, 26 aa, Artificial Sequence
  Cyclic GFR-binding peptide
PVKTNAISMLYFDNGRVLLLKKYRMI

SEQ ID NO: 77280 - protein, 40 aa, Artificial Sequence; identical to SEQ ID NO: 38673
  Cyclic GFR-binding peptide
  MOD_RES (4)..(5)..(37)..(39): Xaa is C or S

SEQ ID NO: 77281 - protein, 28 aa, Artificial Sequence
  Cyclic GFR-binding peptide
VPTKLNAISILYFDKGVVTYLKKYRGMA

SEQ ID NO: 77282 - protein, 33 aa, Artificial Sequence
  Cyclic GFR-binding peptide
  MOD_RES (6)..(7): Xaa is C or S
RVPSTXXAPVKTNAISMLYFDNGRVLLLKKYRM

SEQ ID NO: 77283 - protein, 23 aa, Artificial Sequence
  Cyclic GFR-binding peptide
KTNAISMLYFDNGRVLLLKKYRM

SEQ ID NO: 77284 - protein, 28 aa, Artificial Sequence
  Cyclic GFR-binding peptide
PTKLNAISILYFDKGVVTYLKKYRGMAV

SEQ ID NO: 77285 - protein, 28 aa, Artificial Sequence
  Cyclic GFR-binding peptide
  MOD_RES (27)..(27): Xaa is C or S
TNAISMLYFDNGRVLLLKKYRMIVEEXG

SEQ ID NO: 77286 - protein, 32 aa, Artificial Sequence; identical to SEQ ID NO: 9859
  Cyclic GFR-binding peptide
  MOD_RES (29)..(31): Xaa is C or S

SEQ ID NO: 77287 - protein, 33 aa, Artificial Sequence; identical to SEQ ID NO: 38684
  Cyclic GFR-binding peptide
  MOD_RES (6)..(7): Xaa is C or S

SEQ ID NO: 77288 - protein, 31 aa, Artificial Sequence; identical to SEQ ID NO: 35817
  Cyclic GFR-binding peptide
  MOD_RES (31)..(31): Xaa is C or S

SEQ ID NO: 77289 - protein, 28 aa, Artificial Sequence
  Cyclic GFR-binding peptide
  MOD_RES (1)..(1): Xaa is C or S
XVPTELNAISMLYFDENEKVVLKKYRDM

SEQ ID NO: 77290 - protein, 29 aa, Artificial Sequence
  Cyclic GFR-binding peptide
PTELNAISMLYFDEYDKVVLKKYREMVVE

SEQ ID NO: 77291 - protein, 37 aa, Artificial Sequence; identical to SEQ ID NO: 7381
  Cyclic GFR-binding peptide
  MOD_RES (2)..(3)..(35)..(37): Xaa is C or S

SEQ ID NO: 77292 - protein, 32 aa, Artificial Sequence
  Cyclic GFR-binding peptide
  MOD_RES (31)..(31): Xaa is C or S
PTKMNAISMLYFNDKQQIILKKYRGMVVDRXG

SEQ ID NO: 77293 - protein, 29 aa, Artificial Sequence
  Cyclic GFR-binding peptide
  MOD_RES (28)..(28): Xaa is C or S
LNAISILYFDSANNVVLKKYRDMVVESXG

SEQ ID NO: 77294 - protein, 28 aa, Artificial Sequence
  Cyclic GFR-binding peptide
TPTKMNAISMLYFNDKQQIILKKYRGMV

SEQ ID NO: 77295 - protein, 27 aa, Artificial Sequence
  Cyclic GFR-binding peptide
TELNAISMLYFDEYDKVVLKKYREMVV

SEQ ID NO: 77296 - protein, 38 aa, Artificial Sequence; identical to SEQ ID NO: 9875
  Cyclic GFR-binding peptide
  MOD_RES (1)..(2)..(35)..(37): Xaa is C or S

SEQ ID NO: 77297 - protein, 31 aa, Artificial Sequence; identical to SEQ ID NO: 35839
  Cyclic GFR-binding peptide
  MOD_RES (1)..(2): Xaa is C or S

SEQ ID NO: 77298 - protein, 32 aa, Artificial Sequence; identical to SEQ ID NO: 20074
  Cyclic GFR-binding peptide
  MOD_RES (30)..(32): Xaa is C or S

SEQ ID NO: 77299 - protein, 37 aa, Artificial Sequence; identical to SEQ ID NO: 9881
  Cyclic GFR-binding peptide
  MOD_RES (5)..(6): Xaa is C or S

SEQ ID NO: 77300 - protein, 31 aa, Artificial Sequence; identical to SEQ ID NO: 9887
  Cyclic GFR-binding peptide
  MOD_RES (29)..(31): Xaa is C or S

SEQ ID NO: 77301 - protein, 30 aa, Artificial Sequence; identical to SEQ ID NO: 9889
  Cyclic GFR-binding peptide
  MOD_RES (27)..(29): Xaa is C or S

SEQ ID NO: 77302 - protein, 29 aa, Artificial Sequence
  Cyclic GFR-binding peptide
  MOD_RES (3)..(4): Xaa is C or S
STXXAPVKTNAISMLYFDNGRVLLLKKYR

SEQ ID NO: 77303 - protein, 33 aa, Artificial Sequence; identical to SEQ ID NO: 17720
  Cyclic GFR-binding peptide
  MOD_RES (31)..(33): Xaa is C or S

SEQ ID NO: 77304 - protein, 32 aa, Artificial Sequence; identical to SEQ ID NO: 7400
  Cyclic GFR-binding peptide
  MOD_RES (32)..(32): Xaa is C or S

SEQ ID NO: 77305 - protein, 28 aa, Artificial Sequence
  Cyclic GFR-binding peptide
  MOD_RES (28)..(28): Xaa is C or S
LNAISILYFDAANNVVLKKYRDMVVEAX

SEQ ID NO: 77306 - protein, 25 aa, Artificial Sequence
  Cyclic GFR-binding peptide
NAISILYFDAANNVVLKKYRDMVVE

SEQ ID NO: 77307 - protein, 23 aa, Artificial Sequence
  Cyclic GFR-binding peptide
TKMNAISMLYFNDKQQIILKKYR

SEQ ID NO: 77308 - protein, 31 aa, Artificial Sequence; identical to SEQ ID NO: 7417
  Cyclic GFR-binding peptide
  MOD_RES (28)..(30): Xaa is C or S

SEQ ID NO: 77309 - protein, 27 aa, Artificial Sequence
  Cyclic GFR-binding peptide
PTKLNAISILYFDKGVVTYLKKYRGMA

SEQ ID NO: 77310 - protein, 40 aa, Artificial Sequence; identical to SEQ ID NO: 20093
  Cyclic GFR-binding peptide
  MOD_RES (4)..(5)..(37)..(39): Xaa is C or S

SEQ ID NO: 77311 - protein, 36 aa, Artificial Sequence; identical to SEQ ID NO: 9908
  Cyclic GFR-binding peptide
  MOD_RES (5)..(6): Xaa is C or S

SEQ ID NO: 77312 - protein, 27 aa, Artificial Sequence
  Cyclic GFR-binding peptide
VPTKLNAISILYFDKGVVTYLKKYRGM

SEQ ID NO: 77313 - protein, 25 aa, Artificial Sequence
  Cyclic GFR-binding peptide
TKLNAISILYFDKGVVTYLKKYRGM

SEQ ID NO: 77314 - protein, 27 aa, Artificial Sequence
  Cyclic GFR-binding peptide
TKLNAISILYFDKGVVTYLKKYRGMAV

SEQ ID NO: 77315 - protein, 36 aa, Artificial Sequence
  Cyclic GFR-binding peptide
  MOD_RES (1)..(33)..(35): Xaa is C or S
XTPTKMNAISMLYFNDKQQIILKKYRGMVVDRXGXS

SEQ ID NO: 77316 - protein, 34 aa, Artificial Sequence; identical to SEQ ID NO: 20109
  Cyclic GFR-binding peptide
  MOD_RES (1)..(2)..(34): Xaa is C or S

SEQ ID NO: 77317 - protein, 32 aa, Artificial Sequence
  Cyclic GFR-binding peptide
  MOD_RES (1)..(2): Xaa is C or S
XXAPVKTNAISMLYFDNGRVLLLKKYRMIVEE

SEQ ID NO: 77318 - protein, 36 aa, Artificial Sequence; identical to SEQ ID NO: 9919
  Cyclic GFR-binding peptide
  MOD_RES (3)..(4)..(36): Xaa is C or S

SEQ ID NO: 77319 - protein, 28 aa, Artificial Sequence
  Cyclic GFR-binding peptide
PTELNAISMLYFDENEKVVLKKYRDMVV

SEQ ID NO: 77320 - protein, 29 aa, Artificial Sequence
  Cyclic GFR-binding peptide
TELNAISMLYFDENEKVVLKKYRDMVVEG

SEQ ID NO: 77321 - protein, 28 aa, Artificial Sequence
  Cyclic GFR-binding peptide
APTKLNAISVLYFDSSNNVILKKYRNMV

SEQ ID NO: 77322 - protein, 33 aa, Artificial Sequence; identical to SEQ ID NO: 7437
  Cyclic GFR-binding peptide
  MOD_RES (6)..(7): Xaa is C or S

SEQ ID NO: 77323 - protein, 35 aa, Artificial Sequence; identical to SEQ ID NO: 38770
  Cyclic GFR-binding peptide
  MOD_RES (3)..(4): Xaa is C or S

SEQ ID NO: 77324 - protein, 29 aa, Artificial Sequence
  Cyclic GFR-binding peptide
  MOD_RES (29)..(29): Xaa is C or S
RLNAISILYFDAANNVVLKKYRDMVVEAX

SEQ ID NO: 77325 - protein, 28 aa, Artificial Sequence
  Cyclic GFR-binding peptide
TKLNAISVLYFDSSNNVILKKYRNMVVK

SEQ ID NO: 77326 - protein, 30 aa, Artificial Sequence; identical to SEQ ID NO: 17756
  Cyclic GFR-binding peptide
  MOD_RES (1)..(2): Xaa is C or S

SEQ ID NO: 77327 - protein, 25 aa, Artificial Sequence
  Cyclic GFR-binding peptide
TELNAISMLYFDENEKVVLKKYRDM

SEQ ID NO: 77328 - protein, 25 aa, Artificial Sequence
  Cyclic GFR-binding peptide
TKMNAISMLYFNDKQQIILKKYRGM

SEQ ID NO: 77329 - protein, 29 aa, Artificial Sequence
  Cyclic GFR-binding peptide
  MOD_RES (1)..(2): Xaa is C or S
XXVPTKLNAISILYFDKGVVTYLKKYRGM

SEQ ID NO: 77330 - protein, 29 aa, Artificial Sequence
  Cyclic GFR-binding peptide
  MOD_RES (2)..(3): Xaa is C or S
AXXAPTKLNAISVLYFDSSNNVILKKYRN

SEQ ID NO: 77331 - protein, 38 aa, Artificial Sequence; identical to SEQ ID NO: 9936
  Cyclic GFR-binding peptide
  MOD_RES (6)..(7): Xaa is C or S

SEQ ID NO: 77332 - protein, 34 aa, Artificial Sequence; identical to SEQ ID NO: 38788
  Cyclic GFR-binding peptide
  MOD_RES (1)..(2)..(34): Xaa is C or S

SEQ ID NO: 77333 - protein, 26 aa, Artificial Sequence
  Cyclic GFR-binding peptide
  MOD_RES (1)..(1): Xaa is C or S
XVPTKLNAISVLYFDDMGVPTLKKYR

SEQ ID NO: 77334 - protein, 35 aa, Artificial Sequence
  Cyclic GFR-binding peptide
  MOD_RES (1)..(33)..(35): Xaa is C or S
XTPTKMNAISMLYFNDKQQIILKKYRGMVVDRXGX

SEQ ID NO: 77335 - protein, 34 aa, Artificial Sequence; identical to SEQ ID NO: 35929
  Cyclic GFR-binding peptide
  MOD_RES (4)..(5): Xaa is C or S

SEQ ID NO: 77336 - protein, 29 aa, Artificial Sequence
  Cyclic GFR-binding peptide
TELNAISMLYFDEYDKVVLKKYREMVVEG

SEQ ID NO: 77337 - protein, 40 aa, Artificial Sequence; identical to SEQ ID NO: 7470
  Cyclic GFR-binding peptide
  MOD_RES (3)..(4)..(37)..(39): Xaa is C or S

SEQ ID NO: 77338 - protein, 40 aa, Artificial Sequence
  Cyclic GFR-binding peptide
  MOD_RES (6)..(7)..(38)..(40): Xaa is C or S
RVPSTXXAPVKTNAISMLYFDNGRVLLLKKYRMIVEEXGX

SEQ ID NO: 77339 - protein, 33 aa, Artificial Sequence; identical to SEQ ID NO: 9966
  Cyclic GFR-binding peptide
  MOD_RES (4)..(5): Xaa is C or S

SEQ ID NO: 77340 - protein, 26 aa, Artificial Sequence
  Cyclic GFR-binding peptide
TKLNAISVLYFDDMGVPTLKKYREGM

SEQ ID NO: 77341 - protein, 33 aa, Artificial Sequence; identical to SEQ ID NO: 9968
  Cyclic GFR-binding peptide
  MOD_RES (3)..(4): Xaa is C or S

SEQ ID NO: 77342 - protein, 30 aa, Artificial Sequence; identical to SEQ ID NO: 9970
  Cyclic GFR-binding peptide

SEQ ID NO: 77343 - protein, 33 aa, Artificial Sequence; identical to SEQ ID NO: 17795
  Cyclic GFR-binding peptide
  MOD_RES (4)..(5): Xaa is C or S

SEQ ID NO: 77344 - protein, 37 aa, Artificial Sequence; identical to SEQ ID NO: 7481
  Cyclic GFR-binding peptide
  MOD_RES (1)..(2)..(34)..(36): Xaa is C or S

SEQ ID NO: 77345 - protein, 36 aa, Artificial Sequence; identical to SEQ ID NO: 38825
  Cyclic GFR-binding peptide
  MOD_RES (2)..(3)..(35): Xaa is C or S

SEQ ID NO: 77346 - protein, 36 aa, Artificial Sequence; identical to SEQ ID NO: 7482
  Cyclic GFR-binding peptide
  MOD_RES (2)..(3)..(36): Xaa is C or S

SEQ ID NO: 77347 - protein, 34 aa, Artificial Sequence; identical to SEQ ID NO: 35957
  Cyclic GFR-binding peptide
  MOD_RES (1)..(33): Xaa is C or S

SEQ ID NO: 77348 - protein, 20 aa, Artificial Sequence
  Cyclic GFR-binding peptide
NAISMLYFDENEKVVLKKYR

SEQ ID NO: 77349 - protein, 35 aa, Artificial Sequence; identical to SEQ ID NO: 9977
  Cyclic GFR-binding peptide
  MOD_RES (33)..(35): Xaa is C or S

SEQ ID NO: 77350 - protein, 28 aa, Artificial Sequence
  Cyclic GFR-binding peptide
  MOD_RES (2)..(3): Xaa is C or S
AXXVPTKLNAISVLYFDDMGVPTLKKYR

SEQ ID NO: 77351 - protein, 30 aa, Artificial Sequence; identical to SEQ ID NO: 9980
  Cyclic GFR-binding peptide
  MOD_RES (1)..(2): Xaa is C or S

SEQ ID NO: 77352 - protein, 24 aa, Artificial Sequence
  Cyclic GFR-binding peptide
LNAISILYFDKGVVTYLKKYRGMA

SEQ ID NO: 77353 - protein, 39 aa, Artificial Sequence; identical to SEQ ID NO: 20166
  Cyclic GFR-binding peptide
  MOD_RES (5)..(6)..(38): Xaa is C or S

SEQ ID NO: 77354 - protein, 36 aa, Artificial Sequence; identical to SEQ ID NO: 7491
  Cyclic GFR-binding peptide
  MOD_RES (1)..(2)..(34)..(36): Xaa is C or S

SEQ ID NO: 77355 - protein, 30 aa, Artificial Sequence; identical to SEQ ID NO: 38839
  Cyclic GFR-binding peptide
  MOD_RES (3)..(4): Xaa is C or S

SEQ ID NO: 77356 - protein, 24 aa, Artificial Sequence
  Cyclic GFR-binding peptide
LNAISILYFDAANNVVLKKYRDMV

SEQ ID NO: 77357 - protein, 31 aa, Artificial Sequence
  Cyclic GFR-binding peptide
  MOD_RES (5)..(6): Xaa is C or S
SAGPXXTPTKMNAISMLYFNDKQQIILKKYR

SEQ ID NO: 77358 - protein, 25 aa, Artificial Sequence
  Cyclic GFR-binding peptide
PARLNAISILYFDAANNVVLKKYRD

SEQ ID NO: 77359 - protein, 39 aa, Artificial Sequence; identical to SEQ ID NO: 38850
  Cyclic GFR-binding peptide
  MOD_RES (3)..(4)..(36)..(38): Xaa is C or S

SEQ ID NO: 77360 - protein, 31 aa, Artificial Sequence; identical to SEQ ID NO: 7499
  Cyclic GFR-binding peptide
  MOD_RES (3)..(4): Xaa is C or S

SEQ ID NO: 77361 - protein, 38 aa, Artificial Sequence; identical to SEQ ID NO: 7500
  Cyclic GFR-binding peptide
  MOD_RES (5)..(6): Xaa is C or S

SEQ ID NO: 77362 - protein, 31 aa, Artificial Sequence
  Cyclic GFR-binding peptide
  MOD_RES (31)..(31): Xaa is C or S
PTKMNAISMLYFNDKQQIILKKYRGMVVDRX

SEQ ID NO: 77363 - protein, 24 aa, Artificial Sequence
  Cyclic GFR-binding peptide
RLNAISILYFDSANNVVLKKYRDM

SEQ ID NO: 77364 - protein, 27 aa, Artificial Sequence
  Cyclic GFR-binding peptide
VPTELNAISMLYFDENEKVVLKKYRDM

SEQ ID NO: 77365 - protein, 32 aa, Artificial Sequence
  Cyclic GFR-binding peptide
  MOD_RES (2)..(3): Xaa is C or S
TXXAPVKTNAISMLYFDNGRVLLLKKYRMIVE

SEQ ID NO: 77366 - protein, 38 aa, Artificial Sequence; identical to SEQ ID NO: 10009
  Cyclic GFR-binding peptide
  MOD_RES (4)..(5)..(37): Xaa is C or S

SEQ ID NO: 77367 - protein, 32 aa, Artificial Sequence; identical to SEQ ID NO: 10010
  Cyclic GFR-binding peptide
  MOD_RES (32)..(32): Xaa is C or S

SEQ ID NO: 77368 - protein, 31 aa, Artificial Sequence; identical to SEQ ID NO: 7514
  Cyclic GFR-binding peptide
  MOD_RES (1)..(2): Xaa is C or S

SEQ ID NO: 77369 - protein, 32 aa, Artificial Sequence; identical to SEQ ID NO: 36004
  Cyclic GFR-binding peptide
  MOD_RES (1)..(1): Xaa is C or S

SEQ ID NO: 77370 - protein, 35 aa, Artificial Sequence; identical to SEQ ID NO: 7516
  Cyclic GFR-binding peptide
  MOD_RES (1)..(2)..(35): Xaa is C or S

SEQ ID NO: 77371 - protein, 40 aa, Artificial Sequence; identical to SEQ ID NO: 7517
  Cyclic GFR-binding peptide
  MOD_RES (5)..(6)..(38)..(40): Xaa is C or S

SEQ ID NO: 77372 - protein, 29 aa, Artificial Sequence
  Cyclic GFR-binding peptide
  MOD_RES (1)..(1): Xaa is C or S
XAPTKLNAISVLYFDSSNNVILKKYRNMV

SEQ ID NO: 77373 - protein, 26 aa, Artificial Sequence
  Cyclic GFR-binding peptide
NAISVLYFDSSNNVILKKYRNMVVKA

SEQ ID NO: 77374 - protein, 39 aa, Artificial Sequence; identical to SEQ ID NO: 10023
  Cyclic GFR-binding peptide
  MOD_RES (6)..(7)..(39): Xaa is C or S

SEQ ID NO: 77375 - protein, 42 aa, Artificial Sequence; identical to SEQ ID NO: 7533
  Cyclic GFR-binding peptide
  MOD_RES (6)..(7)..(39)..(41): Xaa is C or S

SEQ ID NO: 77376 - protein, 24 aa, Artificial Sequence
  Cyclic GFR-binding peptide
TKLNAISVLYFDDMGVPTLKKYRE

SEQ ID NO: 77377 - protein, 30 aa, Artificial Sequence; identical to SEQ ID NO: 10029
  Cyclic GFR-binding peptide

SEQ ID NO: 77378 - protein, 33 aa, Artificial Sequence; identical to SEQ ID NO: 20223
  Cyclic GFR-binding peptide
  MOD_RES (2)..(3): Xaa is C or S

SEQ ID NO: 77379 - protein, 22 aa, Artificial Sequence
  Cyclic GFR-binding peptide
RLNAISILYFDSANNVVLKKYR

SEQ ID NO: 77380 - protein, 36 aa, Artificial Sequence; identical to SEQ ID NO: 10034
  Cyclic GFR-binding peptide
  MOD_RES (2)..(3)..(35): Xaa is C or S

SEQ ID NO: 77381 - protein, 29 aa, Artificial Sequence
  Cyclic GFR-binding peptide
  MOD_RES (26)..(28): Xaa is C or S
NAISMLYFDNGRVLLLKKYRMIVEEXGXL

SEQ ID NO: 77382 - protein, 36 aa, Artificial Sequence; identical to SEQ ID NO: 38901
  Cyclic GFR-binding peptide
  MOD_RES (1)..(2)..(34)..(36): Xaa is C or S

SEQ ID NO: 77383 - protein, 22 aa, Artificial Sequence
  Cyclic GFR-binding peptide
NAISVLYFDDMGVPTLKKYREG

SEQ ID NO: 77384 - protein, 34 aa, Artificial Sequence; identical to SEQ ID NO: 10048
  Cyclic GFR-binding peptide
  MOD_RES (2)..(3): Xaa is C or S

SEQ ID NO: 77385 - protein, 30 aa, Artificial Sequence; identical to SEQ ID NO: 10052
  Cyclic GFR-binding peptide
  MOD_RES (29)..(29): Xaa is C or S

SEQ ID NO: 77386 - protein, 38 aa, Artificial Sequence
  Cyclic GFR-binding peptide
  MOD_RES (2)..(3)..(35)..(37): Xaa is C or S
PXXTPTKMNAISMLYFNDKQQIILKKYRGMVVDRXGXS

SEQ ID NO: 77387 - protein, 24 aa, Artificial Sequence
  Cyclic GFR-binding peptide
ARLNAISILYFDAANNVVLKKYRD

SEQ ID NO: 77388 - protein, 29 aa, Artificial Sequence
  Cyclic GFR-binding peptide
  MOD_RES (1)..(1): Xaa is C or S
XVPTKLNAISILYFDKGVVTYLKKYRGMA

SEQ ID NO: 77389 - protein, 33 aa, Artificial Sequence; identical to SEQ ID NO: 7563
  Cyclic GFR-binding peptide
  MOD_RES (4)..(5): Xaa is C or S

SEQ ID NO: 77390 - protein, 25 aa, Artificial Sequence
  Cyclic GFR-binding peptide
RLNAISILYFDSANNVVLKKYRDMV

SEQ ID NO: 77391 - protein, 32 aa, Artificial Sequence; identical to SEQ ID NO: 10066
  Cyclic GFR-binding peptide
  MOD_RES (3)..(4): Xaa is C or S

SEQ ID NO: 77392 - protein, 28 aa, Artificial Sequence
  Cyclic GFR-binding peptide
KLNAISVLYFDDMGVPTLKKYREGMSVA

SEQ ID NO: 77393 - protein, 24 aa, Artificial Sequence
  Cyclic GFR-binding peptide
PTKLNAISVLYFDDMGVPTLKKYR

SEQ ID NO: 77394 - protein, 22 aa, Artificial Sequence
  Cyclic GFR-binding peptide
NAISMLYFDEYDKVVLKKYREM

SEQ ID NO: 77395 - protein, 33 aa, Artificial Sequence
  Cyclic GFR-binding peptide
  MOD_RES (3)..(4): Xaa is C or S
GPXXTPTKMNAISMLYFNDKQQIILKKYRGMVV

SEQ ID NO: 77396 - protein, 25 aa, Artificial Sequence
  Cyclic GFR-binding peptide
ELNAISMLYFDEYDKVVLKKYREMV

SEQ ID NO: 77397 - protein, 31 aa, Artificial Sequence
  Cyclic GFR-binding peptide
  MOD_RES (1)..(1): Xaa is C or S
XAPVKTNAISMLYFDNGRVLLLKKYRMIVEE

SEQ ID NO: 77398 - protein, 28 aa, Artificial Sequence
  Cyclic GFR-binding peptide
  MOD_RES (1)..(1): Xaa is C or S
XVPTKLNAISILYFDKGVVTYLKKYRGM

SEQ ID NO: 77399 - protein, 42 aa, Artificial Sequence; identical to SEQ ID NO: 7581
  Cyclic GFR-binding peptide
  MOD_RES (6)..(7)..(39)..(41): Xaa is C or S

SEQ ID NO: 77400 - protein, 34 aa, Artificial Sequence; identical to SEQ ID NO: 38953
  Cyclic GFR-binding peptide
  MOD_RES (1)..(33): Xaa is C or S

SEQ ID NO: 77401 - protein, 26 aa, Artificial Sequence
  Cyclic GFR-binding peptide
RLNAISILYFDAANNVVLKKYRDMVV

SEQ ID NO: 77402 - protein, 36 aa, Artificial Sequence; identical to SEQ ID NO: 10099
  Cyclic GFR-binding peptide
  MOD_RES (3)..(4): Xaa is C or S

SEQ ID NO: 77403 - protein, 41 aa, Artificial Sequence; identical to SEQ ID NO: 7588
  Cyclic GFR-binding peptide
  MOD_RES (6)..(7)..(40): Xaa is C or S

SEQ ID NO: 77404 - protein, 31 aa, Artificial Sequence; identical to SEQ ID NO: 10102
  Cyclic GFR-binding peptide
  MOD_RES (31)..(31): Xaa is C or S

SEQ ID NO: 77405 - protein, 38 aa, Artificial Sequence
  Cyclic GFR-binding peptide
  MOD_RES (6)..(7): Xaa is C or S
GSAGPXXTPTKMNAISMLYFNDKQQIILKKYRGMVVDR

SEQ ID NO: 77406 - protein, 27 aa, Artificial Sequence
  Cyclic GFR-binding peptide
PVKTNAISMLYFDNGRVLLLKKYRMIV

SEQ ID NO: 77407 - protein, 30 aa, Artificial Sequence; identical to SEQ ID NO: 10113
  Cyclic GFR-binding peptide
  MOD_RES (28)..(30): Xaa is C or S

SEQ ID NO: 77408 - protein, 27 aa, Artificial Sequence
  Cyclic GFR-binding peptide
LNAISILYFDSANNVVLKKYRDMVVES

SEQ ID NO: 77409 - protein, 35 aa, Artificial Sequence; identical to SEQ ID NO: 10123
  Cyclic GFR-binding peptide
  MOD_RES (1)..(2)..(34): Xaa is C or S

SEQ ID NO: 77410 - protein, 31 aa, Artificial Sequence; identical to SEQ ID NO: 7616
  Cyclic GFR-binding peptide
  MOD_RES (2)..(3): Xaa is C or S

SEQ ID NO: 77411 - protein, 36 aa, Artificial Sequence; identical to SEQ ID NO: 38990
  Cyclic GFR-binding peptide
  MOD_RES (5)..(6): Xaa is C or S

SEQ ID NO: 77412 - protein, 27 aa, Artificial Sequence
  Cyclic GFR-binding peptide
  MOD_RES (1)..(2): Xaa is C or S
XXVPTELNAISMLYFDENEKVVLKKYR

SEQ ID NO: 77413 - protein, 26 aa, Artificial Sequence
  Cyclic GFR-binding peptide
ELNAISMLYFDENEKVVLKKYRDMVV

SEQ ID NO: 77414 - protein, 30 aa, Artificial Sequence; identical to SEQ ID NO: 7623
  Cyclic GFR-binding peptide
  MOD_RES (30)..(30): Xaa is C or S

SEQ ID NO: 77415 - protein, 35 aa, Artificial Sequence; identical to SEQ ID NO: 39000
  Cyclic GFR-binding peptide
  MOD_RES (1)..(2)..(34): Xaa is C or S

SEQ ID NO: 77416 - protein, 37 aa, Artificial Sequence
  Cyclic GFR-binding peptide
  MOD_RES (1)..(2)..(34)..(36): Xaa is C or S
XXTPTKMNAISMLYFNDKQQIILKKYRGMVVDRXGXS

SEQ ID NO: 77417 - protein, 25 aa, Artificial Sequence
  Cyclic GFR-binding peptide
TPTKMNAISMLYFNDKQQIILKKYR

SEQ ID NO: 77418 - protein, 28 aa, Artificial Sequence
  Cyclic GFR-binding peptide
  MOD_RES (1)..(2): Xaa is C or S
XXAPTKLNAISVLYFDSSNNVILKKYRN

SEQ ID NO: 77419 - protein, 37 aa, Artificial Sequence
  Cyclic GFR-binding peptide
  MOD_RES (3)..(4)..(36): Xaa is C or S
GPXXTPTKMNAISMLYFNDKQQIILKKYRGMVVDRXG

SEQ ID NO: 77420 - protein, 30 aa, Artificial Sequence; identical to SEQ ID NO: 36127
  Cyclic GFR-binding peptide

SEQ ID NO: 77421 - protein, 37 aa, Artificial Sequence; identical to SEQ ID NO: 20311
  Cyclic GFR-binding peptide
  MOD_RES (2)..(3)..(35)..(37): Xaa is C or S

SEQ ID NO: 77422 - protein, 33 aa, Artificial Sequence; identical to SEQ ID NO: 39010
  Cyclic GFR-binding peptide
  MOD_RES (5)..(6): Xaa is C or S

SEQ ID NO: 77423 - protein, 29 aa, Artificial Sequence
  Cyclic GFR-binding peptide
PTKLNAISVLYFDSSNNVILKKYRNMVVK

SEQ ID NO: 77424 - protein, 27 aa, Artificial Sequence
  Cyclic GFR-binding peptide
KLNAISVLYFDDMGVPTLKKYREGMSV

SEQ ID NO: 77425 - protein, 32 aa, Artificial Sequence; identical to SEQ ID NO: 10137
  Cyclic GFR-binding peptide
  MOD_RES (29)..(31): Xaa is C or S

SEQ ID NO: 77426 - protein, 34 aa, Artificial Sequence; identical to SEQ ID NO: 7652
  Cyclic GFR-binding peptide
  MOD_RES (33)..(33): Xaa is C or S

SEQ ID NO: 77427 - protein, 40 aa, Artificial Sequence
  Cyclic GFR-binding peptide
  MOD_RES (4)..(5)..(37)..(39): Xaa is C or S
AGPXXTPTKMNAISMLYFNDKQQIILKKYRGMVVDRXGXS

SEQ ID NO: 77428 - protein, 27 aa, Artificial Sequence
  Cyclic GFR-binding peptide
RLNAISILYFDAANNVVLKKYRDMVVE

SEQ ID NO: 77429 - protein, 29 aa, Artificial Sequence
  Cyclic GFR-binding peptide
  MOD_RES (3)..(4): Xaa is C or S
GPXXTPTKMNAISMLYFNDKQQIILKKYR

SEQ ID NO: 77430 - protein, 22 aa, Artificial Sequence
  Cyclic GFR-binding peptide
LNAISVLYFDDMGVPTLKKYRE

SEQ ID NO: 77431 - protein, 36 aa, Artificial Sequence; identical to SEQ ID NO: 39023
  Cyclic GFR-binding peptide
  MOD_RES (6)..(7): Xaa is C or S

SEQ ID NO: 77432 - protein, 33 aa, Artificial Sequence; identical to SEQ ID NO: 17966
  Cyclic GFR-binding peptide
  MOD_RES (3)..(4): Xaa is C or S

SEQ ID NO: 77433 - protein, 30 aa, Artificial Sequence
  Cyclic GFR-binding peptide
  MOD_RES (1)..(1): Xaa is C or S
XTPTKMNAISMLYFNDKQQIILKKYRGMVV

SEQ ID NO: 77434 - protein, 29 aa, Artificial Sequence
  Cyclic GFR-binding peptide
  MOD_RES (29)..(29): Xaa is C or S
RLNAISILYFDSANNVVLKKYRDMVVESX

SEQ ID NO: 77435 - protein, 39 aa, Artificial Sequence; identical to SEQ ID NO: 7668
  Cyclic GFR-binding peptide
  MOD_RES (6)..(7)..(39): Xaa is C or S

SEQ ID NO: 77436 - protein, 34 aa, Artificial Sequence; identical to SEQ ID NO: 39031
  Cyclic GFR-binding peptide
  MOD_RES (2)..(3): Xaa is C or S

SEQ ID NO: 77437 - protein, 27 aa, Artificial Sequence
  Cyclic GFR-binding peptide
LNAISILYFDAANNVVLKKYRDMVVEA

SEQ ID NO: 77438 - protein, 33 aa, Artificial Sequence; identical to SEQ ID NO: 20330
  Cyclic GFR-binding peptide
  MOD_RES (32)..(32): Xaa is C or S

SEQ ID NO: 77439 - protein, 39 aa, Artificial Sequence; identical to SEQ ID NO: 10159
  Cyclic GFR-binding peptide
  MOD_RES (2)..(3)..(36)..(38): Xaa is C or S

SEQ ID NO: 77440 - protein, 32 aa, Artificial Sequence; identical to SEQ ID NO: 7675
  Cyclic GFR-binding peptide
  MOD_RES (5)..(6): Xaa is C or S

SEQ ID NO: 77441 - protein, 38 aa, Artificial Sequence; identical to SEQ ID NO: 10161
  Cyclic GFR-binding peptide
  MOD_RES (3)..(4)..(36)..(38): Xaa is C or S

SEQ ID NO: 77442 - protein, 37 aa, Artificial Sequence; identical to SEQ ID NO: 10163
  Cyclic GFR-binding peptide
  MOD_RES (3)..(4)..(37): Xaa is C or S

SEQ ID NO: 77443 - protein, 36 aa, Artificial Sequence
  Cyclic GFR-binding peptide
  MOD_RES (6)..(7): Xaa is C or S
GSAGPXXTPTKMNAISMLYFNDKQQIILKKYRGMVV

SEQ ID NO: 77444 - protein, 32 aa, Artificial Sequence; identical to SEQ ID NO: 7679
  Cyclic GFR-binding peptide
  MOD_RES (3)..(4): Xaa is C or S

SEQ ID NO: 77445 - protein, 40 aa, Artificial Sequence; identical to SEQ ID NO: 10166
  Cyclic GFR-binding peptide
  MOD_RES (5)..(6)..(38)..(40): Xaa is C or S

SEQ ID NO: 77446 - protein, 30 aa, Artificial Sequence; identical to SEQ ID NO: 7693
  Cyclic GFR-binding peptide
  MOD_RES (27)..(29): Xaa is C or S

SEQ ID NO: 77447 - protein, 25 aa, Artificial Sequence
  Cyclic GFR-binding peptide
VPARLNAISILYFDAANNVVLKKYR

SEQ ID NO: 77448 - protein, 27 aa, Artificial Sequence
  Cyclic GFR-binding peptide
TELNAISMLYFDENEKVVLKKYRDMVV

SEQ ID NO: 77449 - protein, 35 aa, Artificial Sequence; identical to SEQ ID NO: 36191
  Cyclic GFR-binding peptide
  MOD_RES (4)..(5): Xaa is C or S

SEQ ID NO: 77450 - protein, 23 aa, Artificial Sequence
  Cyclic GFR-binding peptide
NAISMLYFNDKQQIILKKYRGMV

SEQ ID NO: 77451 - protein, 39 aa, Artificial Sequence; identical to SEQ ID NO: 36194
  Cyclic GFR-binding peptide
  MOD_RES (6)..(7)..(39): Xaa is C or S

SEQ ID NO: 77452 - protein, 33 aa, Artificial Sequence; identical to SEQ ID NO: 7709
  Cyclic GFR-binding peptide
  MOD_RES (2)..(3): Xaa is C or S

SEQ ID NO: 77453 - protein, 33 aa, Artificial Sequence; identical to SEQ ID NO: 39060
  Cyclic GFR-binding peptide
  MOD_RES (3)..(4): Xaa is C or S

SEQ ID NO: 77454 - protein, 31 aa, Artificial Sequence
  Cyclic GFR-binding peptide
  MOD_RES (2)..(3): Xaa is C or S
TXXAPVKTNAISMLYFDNGRVLLLKKYRMIV

SEQ ID NO: 77455 - protein, 32 aa, Artificial Sequence; identical to SEQ ID NO: 7711
  Cyclic GFR-binding peptide
  MOD_RES (6)..(7): Xaa is C or S

SEQ ID NO: 77456 - protein, 26 aa, Artificial Sequence
  Cyclic GFR-binding peptide
MNAISMLYFNDKQQIILKKYRGMVVD

SEQ ID NO: 77457 - protein, 31 aa, Artificial Sequence
  Cyclic GFR-binding peptide
  MOD_RES (1)..(2): Xaa is C or S
XXAPVKTNAISMLYFDNGRVLLLKKYRMIVE

SEQ ID NO: 77458 - protein, 37 aa, Artificial Sequence; identical to SEQ ID NO: 7715
  Cyclic GFR-binding peptide
  MOD_RES (1)..(2)..(34)..(36): Xaa is C or S

SEQ ID NO: 77459 - protein, 41 aa, Artificial Sequence; identical to SEQ ID NO: 36207
  Cyclic GFR-binding peptide
  MOD_RES (6)..(7)..(39)..(41): Xaa is C or S

SEQ ID NO: 77460 - protein, 27 aa, Artificial Sequence
  Cyclic GFR-binding peptide
PTRLNAISILYFDSANNVVLKKYRDMV

SEQ ID NO: 77461 - protein, 35 aa, Artificial Sequence; identical to SEQ ID NO: 10195
  Cyclic GFR-binding peptide
  MOD_RES (1)..(33)..(35): Xaa is C or S

SEQ ID NO: 77462 - protein, 28 aa, Artificial Sequence
  Cyclic GFR-binding peptide
KLNAISILYFDKGVVTYLKKYRGMAVSE

SEQ ID NO: 77463 - protein, 34 aa, Artificial Sequence
  Cyclic GFR-binding peptide
  MOD_RES (5)..(6): Xaa is C or S
VPSTXXAPVKTNAISMLYFDNGRVLLLKKYRMIV

SEQ ID NO: 77464 - protein, 34 aa, Artificial Sequence; identical to SEQ ID NO: 7723
  Cyclic GFR-binding peptide
  MOD_RES (5)..(6): Xaa is C or S

SEQ ID NO: 77465 - protein, 25 aa, Artificial Sequence
  Cyclic GFR-binding peptide
PTELNAISMLYFDENEKVVLKKYRD

SEQ ID NO: 77466 - protein, 31 aa, Artificial Sequence; identical to SEQ ID NO: 18023
  Cyclic GFR-binding peptide
  MOD_RES (28)..(30): Xaa is C or S

SEQ ID NO: 77467 - protein, 36 aa, Artificial Sequence; identical to SEQ ID NO: 39086
  Cyclic GFR-binding peptide
  MOD_RES (3)..(4)..(36): Xaa is C or S

SEQ ID NO: 77468 - protein, 35 aa, Artificial Sequence; identical to SEQ ID NO: 10210
  Cyclic GFR-binding peptide
  MOD_RES (32)..(34): Xaa is C or S

SEQ ID NO: 77469 - protein, 34 aa, Artificial Sequence; identical to SEQ ID NO: 39091
  Cyclic GFR-binding peptide
  MOD_RES (6)..(7): Xaa is C or S

SEQ ID NO: 77470 - protein, 25 aa, Artificial Sequence
  Cyclic GFR-binding peptide
APTKLNAISVLYFDSSNNVILKKYR

SEQ ID NO: 77471 - protein, 30 aa, Artificial Sequence; identical to SEQ ID NO: 7732
  Cyclic GFR-binding peptide
  MOD_RES (1)..(1): Xaa is C or S

SEQ ID NO: 77472 - protein, 25 aa, Artificial Sequence
  Cyclic GFR-binding peptide
KTNAISMLYFDNGRVLLLKKYRMIV

SEQ ID NO: 77473 - protein, 40 aa, Artificial Sequence; identical to SEQ ID NO: 18035
  Cyclic GFR-binding peptide
  MOD_RES (5)..(6)..(38)..(40): Xaa is C or S

SEQ ID NO: 77474 - protein, 36 aa, Artificial Sequence; identical to SEQ ID NO: 7738
  Cyclic GFR-binding peptide
  MOD_RES (1)..(33)..(35): Xaa is C or S

SEQ ID NO: 77475 - protein, 39 aa, Artificial Sequence; identical to SEQ ID NO: 10222
  Cyclic GFR-binding peptide
  MOD_RES (3)..(4)..(36)..(38): Xaa is C or S

SEQ ID NO: 77476 - protein, 38 aa, Artificial Sequence; identical to SEQ ID NO: 10223
  Cyclic GFR-binding peptide
  MOD_RES (5)..(6)..(38): Xaa is C or S

SEQ ID NO: 77477 - protein, 29 aa, Artificial Sequence
  Cyclic GFR-binding peptide
  MOD_RES (29)..(29): Xaa is C or S
KLNAISVLYFDSSNNVILKKYRNMVVKAX

SEQ ID NO: 77478 - protein, 31 aa, Artificial Sequence; identical to SEQ ID NO: 20401
  Cyclic GFR-binding peptide
  MOD_RES (31)..(31): Xaa is C or S

SEQ ID NO: 77479 - protein, 25 aa, Artificial Sequence
  Cyclic GFR-binding peptide
PTKLNAISILYFDKGVVTYLKKYRG

SEQ ID NO: 77480 - protein, 30 aa, Artificial Sequence; identical to SEQ ID NO: 20407
  Cyclic GFR-binding peptide

SEQ ID NO: 77481 - protein, 30 aa, Artificial Sequence; identical to SEQ ID NO: 39119
  Cyclic GFR-binding peptide
  MOD_RES (1)..(1): Xaa is C or S

SEQ ID NO: 77482 - protein, 32 aa, Artificial Sequence; identical to SEQ ID NO: 36245
  Cyclic GFR-binding peptide
  MOD_RES (5)..(6): Xaa is C or S

SEQ ID NO: 77483 - protein, 27 aa, Artificial Sequence
  Cyclic GFR-binding peptide
PTKMNAISMLYFNDKQQIILKKYRGMV

SEQ ID NO: 77484 - protein, 33 aa, Artificial Sequence; identical to SEQ ID NO: 18059
  Cyclic GFR-binding peptide
  MOD_RES (5)..(6): Xaa is C or S

SEQ ID NO: 77485 - protein, 30 aa, Artificial Sequence; identical to SEQ ID NO: 10238
  Cyclic GFR-binding peptide
  MOD_RES (28)..(30): Xaa is C or S

SEQ ID NO: 77486 - protein, 27 aa, Artificial Sequence
  Cyclic GFR-binding peptide
  MOD_RES (27)..(27): Xaa is C or S
NAISMLYFDEYDKVVLKKYREMVVEGX

SEQ ID NO: 77487 - protein, 27 aa, Artificial Sequence
  Cyclic GFR-binding peptide
TKLNAISVLYFDSSNNVILKKYRNMVV

SEQ ID NO: 77488 - protein, 32 aa, Artificial Sequence; identical to SEQ ID NO: 7766
  Cyclic GFR-binding peptide
  MOD_RES (2)..(3): Xaa is C or S

SEQ ID NO: 77489 - protein, 33 aa, Artificial Sequence; identical to SEQ ID NO: 10249
  Cyclic GFR-binding peptide
  MOD_RES (1)..(33): Xaa is C or S

SEQ ID NO: 77490 - protein, 24 aa, Artificial Sequence
  Cyclic GFR-binding peptide
LNAISILYFDSANNVVLKKYRDMV

SEQ ID NO: 77491 - protein, 34 aa, Artificial Sequence
  Cyclic GFR-binding peptide
  MOD_RES (3)..(4): Xaa is C or S
GPXXTPTKMNAISMLYFNDKQQIILKKYRGMVVD

SEQ ID NO: 77492 - protein, 31 aa, Artificial Sequence; identical to SEQ ID NO: 10261
  Cyclic GFR-binding peptide
  MOD_RES (5)..(6): Xaa is C or S

SEQ ID NO: 77493 - protein, 32 aa, Artificial Sequence; identical to SEQ ID NO: 10263
  Cyclic GFR-binding peptide
  MOD_RES (5)..(6): Xaa is C or S

SEQ ID NO: 77494 - protein, 24 aa, Artificial Sequence
  Cyclic GFR-binding peptide
NAISILYFDSANNVVLKKYRDMVV

SEQ ID NO: 77495 - protein, 21 aa, Artificial Sequence
  Cyclic GFR-binding peptide
NAISILYFDSANNVVLKKYRD

SEQ ID NO: 77496 - protein, 32 aa, Artificial Sequence; identical to SEQ ID NO: 7778
  Cyclic GFR-binding peptide
  MOD_RES (31)..(31): Xaa is C or S

SEQ ID NO: 77497 - protein, 30 aa, Artificial Sequence; identical to SEQ ID NO: 7782
  Cyclic GFR-binding peptide
  MOD_RES (4)..(5): Xaa is C or S

SEQ ID NO: 77498 - protein, 38 aa, Artificial Sequence; identical to SEQ ID NO: 10274
  Cyclic GFR-binding peptide
  MOD_RES (3)..(4)..(36)..(38): Xaa is C or S

SEQ ID NO: 77499 - protein, 30 aa, Artificial Sequence; identical to SEQ ID NO: 18086
  Cyclic GFR-binding peptide

SEQ ID NO: 77500 - protein, 24 aa, Artificial Sequence
  Cyclic GFR-binding peptide
RLNAISILYFDAANNVVLKKYRDM

SEQ ID NO: 77501 - protein, 31 aa, Artificial Sequence; identical to SEQ ID NO: 20439
  Cyclic GFR-binding peptide

SEQ ID NO: 77502 - protein, 32 aa, Artificial Sequence
  Cyclic GFR-binding peptide
  MOD_RES (4)..(5): Xaa is C or S
AGPXXTPTKMNAISMLYFNDKQQIILKKYRGM

SEQ ID NO: 77503 - protein, 33 aa, Artificial Sequence; identical to SEQ ID NO: 10283
  Cyclic GFR-binding peptide
  MOD_RES (1)..(2): Xaa is C or S

SEQ ID NO: 77504 - protein, 31 aa, Artificial Sequence; identical to SEQ ID NO: 36286
  Cyclic GFR-binding peptide
  MOD_RES (5)..(6): Xaa is C or S

SEQ ID NO: 77505 - protein, 22 aa, Artificial Sequence
  Cyclic GFR-binding peptide
ELNAISMLYFDEYDKVVLKKYR

SEQ ID NO: 77506 - protein, 27 aa, Artificial Sequence
  Cyclic GFR-binding peptide
APTKLNAISVLYFDSSNNVILKKYRNM

SEQ ID NO: 77507 - protein, 31 aa, Artificial Sequence; identical to SEQ ID NO: 7804
  Cyclic GFR-binding peptide
  MOD_RES (3)..(4): Xaa is C or S

SEQ ID NO: 77508 - protein, 36 aa, Artificial Sequence
  Cyclic GFR-binding peptide
  MOD_RES (5)..(6): Xaa is C or S
SAGPXXTPTKMNAISMLYFNDKQQIILKKYRGMVVD

SEQ ID NO: 77509 - protein, 40 aa, Artificial Sequence; identical to SEQ ID NO: 36306
  Cyclic GFR-binding peptide
  MOD_RES (5)..(6)..(38)..(40): Xaa is C or S

SEQ ID NO: 77510 - protein, 29 aa, Artificial Sequence
  Cyclic GFR-binding peptide
  MOD_RES (28)..(28): Xaa is C or S
KTNAISMLYFDNGRVLLLKKYRMIVEEXG

SEQ ID NO: 77511 - protein, 24 aa, Artificial Sequence
  Cyclic GFR-binding peptide
NAISILYFDKGVVTYLKKYRGMAV

SEQ ID NO: 77512 - protein, 35 aa, Artificial Sequence; identical to SEQ ID NO: 10308
  Cyclic GFR-binding peptide
  MOD_RES (2)..(3): Xaa is C or S

SEQ ID NO: 77513 - protein, 29 aa, Artificial Sequence
  Cyclic GFR-binding peptide
TPTKMNAISMLYFNDKQQIILKKYRGMVV

SEQ ID NO: 77514 - protein, 35 aa, Artificial Sequence; identical to SEQ ID NO: 20470
  Cyclic GFR-binding peptide
  MOD_RES (6)..(7): Xaa is C or S

SEQ ID NO: 77515 - protein, 33 aa, Artificial Sequence; identical to SEQ ID NO: 10310
  Cyclic GFR-binding peptide
  MOD_RES (1)..(33): Xaa is C or S

SEQ ID NO: 77516 - protein, 26 aa, Artificial Sequence
  Cyclic GFR-binding peptide
TELNAISMLYFDEYDKVVLKKYREMV

SEQ ID NO: 77517 - protein, 28 aa, Artificial Sequence
  Cyclic GFR-binding peptide
  MOD_RES (1)..(1): Xaa is C or S
XAPVKTNAISMLYFDNGRVLLLKKYRMI

SEQ ID NO: 77518 - protein, 35 aa, Artificial Sequence; identical to SEQ ID NO: 39196
  Cyclic GFR-binding peptide
  MOD_RES (4)..(5): Xaa is C or S

SEQ ID NO: 77519 - protein, 35 aa, Artificial Sequence; identical to SEQ ID NO: 39197
  Cyclic GFR-binding peptide
  MOD_RES (5)..(6): Xaa is C or S

SEQ ID NO: 77520 - protein, 32 aa, Artificial Sequence; identical to SEQ ID NO: 36333
  Cyclic GFR-binding peptide
  MOD_RES (32)..(32): Xaa is C or S

SEQ ID NO: 77521 - protein, 28 aa, Artificial Sequence
  Cyclic GFR-binding peptide
VPARLNAISILYFDAANNVVLKKYRDMV

SEQ ID NO: 77522 - protein, 33 aa, Artificial Sequence
  Cyclic GFR-binding peptide
  MOD_RES (31)..(33): Xaa is C or S
PTKMNAISMLYFNDKQQIILKKYRGMVVDRXGX

SEQ ID NO: 77523 - protein, 21 aa, Artificial Sequence
  Cyclic GFR-binding peptide
LNAISVLYFDDMGVPTLKKYR

SEQ ID NO: 77524 - protein, 24 aa, Artificial Sequence
  Cyclic GFR-binding peptide
TELNAISMLYFDENEKVVLKKYRD

SEQ ID NO: 77525 - protein, 34 aa, Artificial Sequence; identical to SEQ ID NO: 7834
  Cyclic GFR-binding peptide
  MOD_RES (3)..(4): Xaa is C or S

SEQ ID NO: 77526 - protein, 35 aa, Artificial Sequence; identical to SEQ ID NO: 36344
  Cyclic GFR-binding peptide
  MOD_RES (5)..(6): Xaa is C or S

SEQ ID NO: 77527 - protein, 39 aa, Artificial Sequence; identical to SEQ ID NO: 7838
  Cyclic GFR-binding peptide
  MOD_RES (5)..(6)..(38): Xaa is C or S

SEQ ID NO: 77528 - protein, 42 aa, Artificial Sequence; identical to SEQ ID NO: 20500
  Cyclic GFR-binding peptide
  MOD_RES (6)..(7)..(39)..(41): Xaa is C or S

SEQ ID NO: 77529 - protein, 34 aa, Artificial Sequence; identical to SEQ ID NO: 36354
  Cyclic GFR-binding peptide
  MOD_RES (2)..(3): Xaa is C or S

SEQ ID NO: 77530 - protein, 35 aa, Artificial Sequence
  Cyclic GFR-binding peptide
  MOD_RES (32)..(34): Xaa is C or S
TPTKMNAISMLYFNDKQQIILKKYRGMVVDRXGXS

SEQ ID NO: 77531 - protein, 29 aa, Artificial Sequence
  Cyclic GFR-binding peptide
  MOD_RES (1)..(2): Xaa is C or S
XXVPTRLNAISILYFDSANNVVLKKYRDM

SEQ ID NO: 77532 - protein, 33 aa, Artificial Sequence; identical to SEQ ID NO: 39212
  Cyclic GFR-binding peptide
  MOD_RES (32)..(32): Xaa is C or S

SEQ ID NO: 77533 - protein, 35 aa, Artificial Sequence
  Cyclic GFR-binding peptide
  MOD_RES (3)..(4): Xaa is C or S
GPXXTPTKMNAISMLYFNDKQQIILKKYRGMVVDR

SEQ ID NO: 77534 - protein, 35 aa, Artificial Sequence; identical to SEQ ID NO: 7852
  Cyclic GFR-binding peptide
  MOD_RES (4)..(5): Xaa is C or S

SEQ ID NO: 77535 - protein, 27 aa, Artificial Sequence
  Cyclic GFR-binding peptide
ELNAISMLYFDEYDKVVLKKYREMVVE

SEQ ID NO: 77536 - protein, 28 aa, Artificial Sequence
  Cyclic GFR-binding peptide
  MOD_RES (1)..(2): Xaa is C or S
XXVPTRLNAISILYFDSANNVVLKKYRD

SEQ ID NO: 77537 - protein, 30 aa, Artificial Sequence
  Cyclic GFR-binding peptide
APVKTNAISMLYFDNGRVLLLKKYRMIVEE

SEQ ID NO: 77538 - protein, 22 aa, Artificial Sequence
  Cyclic GFR-binding peptide
LNAISMLYFDENEKVVLKKYRD

SEQ ID NO: 77539 - protein, 31 aa, Artificial Sequence; identical to SEQ ID NO: 39224
  Cyclic GFR-binding peptide
  MOD_RES (3)..(4): Xaa is C or S

SEQ ID NO: 77540 - protein, 33 aa, Artificial Sequence
  Cyclic GFR-binding peptide
  MOD_RES (6)..(7): Xaa is C or S
GSAGPXXTPTKMNAISMLYFNDKQQIILKKYRG

SEQ ID NO: 77541 - protein, 29 aa, Artificial Sequence
  Cyclic GFR-binding peptide
  MOD_RES (1)..(1): Xaa is C or S
XTPTKMNAISMLYFNDKQQIILKKYRGMV

SEQ ID NO: 77542 - protein, 32 aa, Artificial Sequence; identical to SEQ ID NO: 18161
  Cyclic GFR-binding peptide
  MOD_RES (32)..(32): Xaa is C or S

SEQ ID NO: 77543 - protein, 29 aa, Artificial Sequence
  Cyclic GFR-binding peptide
  MOD_RES (1)..(2): Xaa is C or S
XXVPTELNAISMLYFDENEKVVLKKYRDM

SEQ ID NO: 77544 - protein, 35 aa, Artificial Sequence; identical to SEQ ID NO: 7864
  Cyclic GFR-binding peptide
  MOD_RES (6)..(7): Xaa is C or S

SEQ ID NO: 77545 - protein, 32 aa, Artificial Sequence; identical to SEQ ID NO: 10350
  Cyclic GFR-binding peptide
  MOD_RES (4)..(5): Xaa is C or S

SEQ ID NO: 77546 - protein, 29 aa, Artificial Sequence
  Cyclic GFR-binding peptide
PTELNAISMLYFDENEKVVLKKYRDMVVE

SEQ ID NO: 77547 - protein, 30 aa, Artificial Sequence; identical to SEQ ID NO: 39234
  Cyclic GFR-binding peptide
  MOD_RES (28)..(30): Xaa is C or S

SEQ ID NO: 77548 - protein, 35 aa, Artificial Sequence; identical to SEQ ID NO: 36389
  Cyclic GFR-binding peptide
  MOD_RES (2)..(3)..(35): Xaa is C or S

SEQ ID NO: 77549 - protein, 33 aa, Artificial Sequence; identical to SEQ ID NO: 10355
  Cyclic GFR-binding peptide
  MOD_RES (5)..(6): Xaa is C or S

SEQ ID NO: 77550 - protein, 32 aa, Artificial Sequence; identical to SEQ ID NO: 39237
  Cyclic GFR-binding peptide
  MOD_RES (4)..(5): Xaa is C or S

SEQ ID NO: 77551 - protein, 31 aa, Artificial Sequence; identical to SEQ ID NO: 10357
  Cyclic GFR-binding peptide
  MOD_RES (1)..(1): Xaa is C or S

SEQ ID NO: 77552 - protein, 37 aa, Artificial Sequence
  Cyclic GFR-binding peptide
  MOD_RES (4)..(5)..(37): Xaa is C or S
AGPXXTPTKMNAISMLYFNDKQQIILKKYRGMVVDRX

SEQ ID NO: 77553 - protein, 23 aa, Artificial Sequence
  Cyclic GFR-binding peptide
LNAISMLYFDEYDKVVLKKYREM

SEQ ID NO: 77554 - protein, 33 aa, Artificial Sequence; identical to SEQ ID NO: 10365
  Cyclic GFR-binding peptide
  MOD_RES (30)..(32): Xaa is C or S

SEQ ID NO: 77555 - protein, 35 aa, Artificial Sequence; identical to SEQ ID NO: 18184
  Cyclic GFR-binding peptide
  MOD_RES (4)..(5): Xaa is C or S

SEQ ID NO: 77556 - protein, 29 aa, Artificial Sequence
  Cyclic GFR-binding peptide
VPTELNAISMLYFDEYDKVVLKKYREMVV

SEQ ID NO: 77557 - protein, 24 aa, Artificial Sequence
  Cyclic GFR-binding peptide
KLNAISVLYFDSSNNVILKKYRNM

SEQ ID NO: 77558 - protein, 28 aa, Artificial Sequence
  Cyclic GFR-binding peptide
PTELNAISMLYFDEYDKVVLKKYREMVV

SEQ ID NO: 77559 - protein, 29 aa, Artificial Sequence
  Cyclic GFR-binding peptide
  MOD_RES (28)..(28): Xaa is C or S
LNAISMLYFDEYDKVVLKKYREMVVEGXG

SEQ ID NO: 77560 - protein, 32 aa, Artificial Sequence; identical to SEQ ID NO: 7876
  Cyclic GFR-binding peptide
  MOD_RES (4)..(5): Xaa is C or S

SEQ ID NO: 77561 - protein, 30 aa, Artificial Sequence; identical to SEQ ID NO: 39265
  Cyclic GFR-binding peptide
  MOD_RES (28)..(30): Xaa is C or S

SEQ ID NO: 77562 - protein, 40 aa, Artificial Sequence; identical to SEQ ID NO: 7887
  Cyclic GFR-binding peptide
  MOD_RES (6)..(7)..(39): Xaa is C or S

SEQ ID NO: 77563 - protein, 32 aa, Artificial Sequence; identical to SEQ ID NO: 10392
  Cyclic GFR-binding peptide
  MOD_RES (30)..(32): Xaa is C or S

SEQ ID NO: 77564 - protein, 38 aa, Artificial Sequence; identical to SEQ ID NO: 36431
  Cyclic GFR-binding peptide
  MOD_RES (2)..(3)..(35)..(37): Xaa is C or S

SEQ ID NO: 77565 - protein, 32 aa, Artificial Sequence; identical to SEQ ID NO: 36433
  Cyclic GFR-binding peptide
  MOD_RES (30)..(32): Xaa is C or S

SEQ ID NO: 77566 - protein, 24 aa, Artificial Sequence
  Cyclic GFR-binding peptide
TKLNAISILYFDKGVVTYLKKYRG

SEQ ID NO: 77567 - protein, 35 aa, Artificial Sequence; identical to SEQ ID NO: 36435
  Cyclic GFR-binding peptide
  MOD_RES (2)..(3)..(35): Xaa is C or S

SEQ ID NO: 77568 - protein, 26 aa, Artificial Sequence
  Cyclic GFR-binding peptide
VPARLNAISILYFDAANNVVLKKYRD

SEQ ID NO: 77569 - protein, 43 aa, Artificial Sequence; identical to SEQ ID NO: 7899
  Cyclic GFR-binding peptide
  MOD_RES (6)..(7)..(40)..(42): Xaa is C or S

SEQ ID NO: 77570 - protein, 34 aa, Artificial Sequence; identical to SEQ ID NO: 36448
  Cyclic GFR-binding peptide
  MOD_RES (3)..(4): Xaa is C or S

SEQ ID NO: 77571 - protein, 38 aa, Artificial Sequence
  Cyclic GFR-binding peptide
  MOD_RES (3)..(4)..(35)..(37): Xaa is C or S
STXXAPVKTNAISMLYFDNGRVLLLKKYRMIVEEXGXL

SEQ ID NO: 77572 - protein, 38 aa, Artificial Sequence; identical to SEQ ID NO: 36449
  Cyclic GFR-binding peptide
  MOD_RES (4)..(5)..(37): Xaa is C or S

SEQ ID NO: 77573 - protein, 34 aa, Artificial Sequence
  Cyclic GFR-binding peptide
  MOD_RES (31)..(33): Xaa is C or S
PTKMNAISMLYFNDKQQIILKKYRGMVVDRXGXS

SEQ ID NO: 77574 - protein, 30 aa, Artificial Sequence; identical to SEQ ID NO: 7906
  Cyclic GFR-binding peptide
  MOD_RES (1)..(1): Xaa is C or S

SEQ ID NO: 77575 - protein, 31 aa, Artificial Sequence
  Cyclic GFR-binding peptide
TPTKMNAISMLYFNDKQQIILKKYRGMVVDR

SEQ ID NO: 77576 - protein, 33 aa, Artificial Sequence; identical to SEQ ID NO: 7907
  Cyclic GFR-binding peptide
  MOD_RES (3)..(4): Xaa is C or S

SEQ ID NO: 77577 - protein, 28 aa, Artificial Sequence
  Cyclic GFR-binding peptide
TELNAISMLYFDENEKVVLKKYRDMVVE

SEQ ID NO: 77578 - protein, 33 aa, Artificial Sequence; identical to SEQ ID NO: 7913
  Cyclic GFR-binding peptide
  MOD_RES (31)..(33): Xaa is C or S

SEQ ID NO: 77579 - protein, 38 aa, Artificial Sequence; identical to SEQ ID NO: 7919
  Cyclic GFR-binding peptide
  MOD_RES (3)..(4)..(36)..(38): Xaa is C or S

SEQ ID NO: 77580 - protein, 30 aa, Artificial Sequence
  Cyclic GFR-binding peptide
  MOD_RES (29)..(29): Xaa is C or S
VKTNAISMLYFDNGRVLLLKKYRMIVEEXG

SEQ ID NO: 77581 - protein, 33 aa, Artificial Sequence; identical to SEQ ID NO: 39310
  Cyclic GFR-binding peptide
  MOD_RES (4)..(5): Xaa is C or S

SEQ ID NO: 77582 - protein, 38 aa, Artificial Sequence; identical to SEQ ID NO: 39313
  Cyclic GFR-binding peptide
  MOD_RES (5)..(6)..(38): Xaa is C or S

SEQ ID NO: 77583 - protein, 28 aa, Artificial Sequence
  Cyclic GFR-binding peptide
KLNAISVLYFDSSNNVILKKYRNMVVKA

SEQ ID NO: 77584 - protein, 24 aa, Artificial Sequence
  Cyclic GFR-binding peptide
PTKLNAISVLYFDSSNNVILKKYR

SEQ ID NO: 77585 - protein, 22 aa, Artificial Sequence
  Cyclic GFR-binding peptide
LNAISILYFDAANNVVLKKYRD

SEQ ID NO: 77586 - protein, 34 aa, Artificial Sequence; identical to SEQ ID NO: 39327
  Cyclic GFR-binding peptide
  MOD_RES (32)..(34): Xaa is C or S

SEQ ID NO: 77587 - protein, 31 aa, Artificial Sequence; identical to SEQ ID NO: 39333
  Cyclic GFR-binding peptide
  MOD_RES (2)..(3): Xaa is C or S

SEQ ID NO: 77588 - protein, 31 aa, Artificial Sequence; identical to SEQ ID NO: 10452
  Cyclic GFR-binding peptide
  MOD_RES (29)..(31): Xaa is C or S

SEQ ID NO: 77589 - protein, 37 aa, Artificial Sequence; identical to SEQ ID NO: 7938
  Cyclic GFR-binding peptide
  MOD_RES (1)..(34)..(36): Xaa is C or S

SEQ ID NO: 77590 - protein, 35 aa, Artificial Sequence; identical to SEQ ID NO: 7953
  Cyclic GFR-binding peptide
  MOD_RES (32)..(34): Xaa is C or S

SEQ ID NO: 77591 - protein, 36 aa, Artificial Sequence; identical to SEQ ID NO: 39347
  Cyclic GFR-binding peptide
  MOD_RES (3)..(4)..(36): Xaa is C or S

SEQ ID NO: 77592 - protein, 33 aa, Artificial Sequence; identical to SEQ ID NO: 18269
  Cyclic GFR-binding peptide
  MOD_RES (1)..(2): Xaa is C or S

SEQ ID NO: 77593 - protein, 20 aa, Artificial Sequence
  Cyclic GFR-binding peptide
NAISMLYFDNGRVLLLKKYR

SEQ ID NO: 77594 - protein, 30 aa, Artificial Sequence; identical to SEQ ID NO: 36511
  Cyclic GFR-binding peptide
  MOD_RES (2)..(3): Xaa is C or S

SEQ ID NO: 77595 - protein, 24 aa, Artificial Sequence
  Cyclic GFR-binding peptide
NAISMLYFNDKQQIILKKYRGMVV

SEQ ID NO: 77596 - protein, 32 aa, Artificial Sequence
  Cyclic GFR-binding peptide
  MOD_RES (1)..(2): Xaa is C or S
XXTPTKMNAISMLYFNDKQQIILKKYRGMVVD

SEQ ID NO: 77597 - protein, 39 aa, Artificial Sequence
  Cyclic GFR-binding peptide
  MOD_RES (4)..(5)..(37)..(39): Xaa is C or S
AGPXXTPTKMNAISMLYFNDKQQIILKKYRGMVVDRXGX

SEQ ID NO: 77598 - protein, 31 aa, Artificial Sequence; identical to SEQ ID NO: 10473
  Cyclic GFR-binding peptide
  MOD_RES (3)..(4): Xaa is C or S

SEQ ID NO: 77599 - protein, 27 aa, Artificial Sequence
  Cyclic GFR-binding peptide
VPARLNAISILYFDAANNVVLKKYRDM

SEQ ID NO: 77600 - protein, 39 aa, Artificial Sequence; identical to SEQ ID NO: 10475
  Cyclic GFR-binding peptide
  MOD_RES (3)..(4)..(37)..(39): Xaa is C or S

SEQ ID NO: 77601 - protein, 40 aa, Artificial Sequence; identical to SEQ ID NO: 36524
  Cyclic GFR-binding peptide
  MOD_RES (6)..(7)..(39): Xaa is C or S

SEQ ID NO: 77602 - protein, 32 aa, Artificial Sequence; identical to SEQ ID NO: 36526
  Cyclic GFR-binding peptide
  MOD_RES (30)..(32): Xaa is C or S

SEQ ID NO: 77603 - protein, 30 aa, Artificial Sequence; identical to SEQ ID NO: 7977
  Cyclic GFR-binding peptide
  MOD_RES (27)..(29): Xaa is C or S

SEQ ID NO: 77604 - protein, 28 aa, Artificial Sequence
  Cyclic GFR-binding peptide
  MOD_RES (1)..(2): Xaa is C or S
XXVPTKLNAISILYFDKGVVTYLKKYRG

SEQ ID NO: 77605 - protein, 38 aa, Artificial Sequence; identical to SEQ ID NO: 20632
  Cyclic GFR-binding peptide
  MOD_RES (4)..(5)..(37): Xaa is C or S

SEQ ID NO: 77606 - protein, 26 aa, Artificial Sequence
  Cyclic GFR-binding peptide
NAISILYFDKGVVTYLKKYRGMAVSE

SEQ ID NO: 77607 - protein, 22 aa, Artificial Sequence
  Cyclic GFR-binding peptide
KTNAISMLYFDNGRVLLLKKYR

SEQ ID NO: 77608 - protein, 35 aa, Artificial Sequence; identical to SEQ ID NO: 10494
  Cyclic GFR-binding peptide
  MOD_RES (32)..(34): Xaa is C or S

SEQ ID NO: 77609 - protein, 41 aa, Artificial Sequence; identical to SEQ ID NO: 7987
  Cyclic GFR-binding peptide
  MOD_RES (5)..(6)..(39)..(41): Xaa is C or S

SEQ ID NO: 77610 - protein, 35 aa, Artificial Sequence
  Cyclic GFR-binding peptide
  MOD_RES (6)..(7): Xaa is C or S
GSAGPXXTPTKMNAISMLYFNDKQQIILKKYRGMV

SEQ ID NO: 77611 - protein, 36 aa, Artificial Sequence; identical to SEQ ID NO: 36543
  Cyclic GFR-binding peptide
  MOD_RES (4)..(5): Xaa is C or S

SEQ ID NO: 77612 - protein, 34 aa, Artificial Sequence; identical to SEQ ID NO: 7990
  Cyclic GFR-binding peptide
  MOD_RES (31)..(33): Xaa is C or S

SEQ ID NO: 77613 - protein, 27 aa, Artificial Sequence
  Cyclic GFR-binding peptide
  MOD_RES (27)..(27): Xaa is C or S
NAISILYFDAANNVVLKKYRDMVVEAX

SEQ ID NO: 77614 - protein, 23 aa, Artificial Sequence
  Cyclic GFR-binding peptide
TNAISMLYFDNGRVLLLKKYRMI

SEQ ID NO: 77615 - protein, 28 aa, Artificial Sequence
  Cyclic GFR-binding peptide
  MOD_RES (2)..(3): Xaa is C or S
AXXAPTKLNAISVLYFDSSNNVILKKYR

SEQ ID NO: 77616 - protein, 38 aa, Artificial Sequence; identical to SEQ ID NO: 8002
  Cyclic GFR-binding peptide
  MOD_RES (4)..(5)..(38): Xaa is C or S

SEQ ID NO: 77617 - protein, 25 aa, Artificial Sequence
  Cyclic GFR-binding peptide
LNAISILYFDSANNVVLKKYRDMVV

SEQ ID NO: 77618 - protein, 36 aa, Artificial Sequence; identical to SEQ ID NO: 39416
  Cyclic GFR-binding peptide
  MOD_RES (4)..(5): Xaa is C or S

SEQ ID NO: 77619 - protein, 32 aa, Artificial Sequence; identical to SEQ ID NO: 39420
  Cyclic GFR-binding peptide
  MOD_RES (1)..(1): Xaa is C or S

SEQ ID NO: 77620 - protein, 30 aa, Artificial Sequence; identical to SEQ ID NO: 10522
  Cyclic GFR-binding peptide
  MOD_RES (28)..(30): Xaa is C or S

SEQ ID NO: 77621 - protein, 25 aa, Artificial Sequence
  Cyclic GFR-binding peptide
NAISILYFDKGVVTYLKKYRGMAVS

SEQ ID NO: 77622 - protein, 36 aa, Artificial Sequence; identical to SEQ ID NO: 36585
  Cyclic GFR-binding peptide
  MOD_RES (5)..(6): Xaa is C or S

SEQ ID NO: 77623 - protein, 27 aa, Artificial Sequence
  Cyclic GFR-binding peptide
PTKLNAISVLYFDDMGVPTLKKYREGM

SEQ ID NO: 77624 - protein, 37 aa, Artificial Sequence
  Cyclic GFR-binding peptide
  MOD_RES (2)..(3)..(34)..(36): Xaa is C or S
TXXAPVKTNAISMLYFDNGRVLLLKKYRMIVEEXGXL

SEQ ID NO: 77625 - protein, 35 aa, Artificial Sequence; identical to SEQ ID NO: 8027
  Cyclic GFR-binding peptide
  MOD_RES (1)..(34): Xaa is C or S

SEQ ID NO: 77626 - protein, 31 aa, Artificial Sequence; identical to SEQ ID NO: 8031
  Cyclic GFR-binding peptide
  MOD_RES (30)..(30): Xaa is C or S

SEQ ID NO: 77627 - protein, 33 aa, Artificial Sequence; identical to SEQ ID NO: 8033
  Cyclic GFR-binding peptide
  MOD_RES (32)..(32): Xaa is C or S

SEQ ID NO: 77628 - protein, 33 aa, Artificial Sequence; identical to SEQ ID NO: 8034
  Cyclic GFR-binding peptide
  MOD_RES (1)..(33): Xaa is C or S

SEQ ID NO: 77629 - protein, 31 aa, Artificial Sequence; identical to SEQ ID NO: 8036
  Cyclic GFR-binding peptide
  MOD_RES (30)..(30): Xaa is C or S

SEQ ID NO: 77630 - protein, 32 aa, Artificial Sequence; identical to SEQ ID NO: 8038
  Cyclic GFR-binding peptide
  MOD_RES (5)..(6): Xaa is C or S

SEQ ID NO: 77631 - protein, 34 aa, Artificial Sequence; identical to SEQ ID NO: 8040
  Cyclic GFR-binding peptide
  MOD_RES (1)..(2)..(34): Xaa is C or S

SEQ ID NO: 77632 - protein, 39 aa, Artificial Sequence; identical to SEQ ID NO: 8041
  Cyclic GFR-binding peptide
  MOD_RES (6)..(7): Xaa is C or S

SEQ ID NO: 77633 - protein, 30 aa, Artificial Sequence
  Cyclic GFR-binding peptide
  MOD_RES (2)..(3): Xaa is C or S
TXXAPVKTNAISMLYFDNGRVLLLKKYRMI

SEQ ID NO: 77634 - protein, 30 aa, Artificial Sequence
  Cyclic GFR-binding peptide
  MOD_RES (27)..(29): Xaa is C or S
TNAISMLYFDNGRVLLLKKYRMIVEEXGXL

SEQ ID NO: 77635 - protein, 26 aa, Artificial Sequence
  Cyclic GFR-binding peptide
LNAISILYFDKGVVTYLKKYRGMAVS

SEQ ID NO: 77636 - protein, 33 aa, Artificial Sequence; identical to SEQ ID NO: 39451
  Cyclic GFR-binding peptide
  MOD_RES (30)..(32): Xaa is C or S

SEQ ID NO: 77637 - protein, 24 aa, Artificial Sequence
  Cyclic GFR-binding peptide
NAISMLYFDNGRVLLLKKYRMIVE

SEQ ID NO: 77638 - protein, 26 aa, Artificial Sequence
  Cyclic GFR-binding peptide
TELNAISMLYFDENEKVVLKKYRDMV

SEQ ID NO: 77639 - protein, 27 aa, Artificial Sequence
  Cyclic GFR-binding peptide
PTKLNAISVLYFDSSNNVILKKYRNMV

SEQ ID NO: 77640 - protein, 26 aa, Artificial Sequence
  Cyclic GFR-binding peptide
TKLNAISILYFDKGVVTYLKKYRGMA

SEQ ID NO: 77641 - protein, 34 aa, Artificial Sequence
  Cyclic GFR-binding peptide
  MOD_RES (1)..(33): Xaa is C or S
XTPTKMNAISMLYFNDKQQIILKKYRGMVVDRXG

SEQ ID NO: 77642 - protein, 38 aa, Artificial Sequence; identical to SEQ ID NO: 8060
  Cyclic GFR-binding peptide
  MOD_RES (5)..(6)..(38): Xaa is C or S

SEQ ID NO: 77643 - protein, 37 aa, Artificial Sequence
  Cyclic GFR-binding peptide
  MOD_RES (4)..(5)..(36): Xaa is C or S
PSTXXAPVKTNAISMLYFDNGRVLLLKKYRMIVEEXG

SEQ ID NO: 77644 - protein, 21 aa, Artificial Sequence
  Cyclic GFR-binding peptide
NAISMLYFDNGRVLLLKKYRM

SEQ ID NO: 77645 - protein, 34 aa, Artificial Sequence; identical to SEQ ID NO: 20699
  Cyclic GFR-binding peptide
  MOD_RES (1)..(33): Xaa is C or S

SEQ ID NO: 77646 - protein, 31 aa, Artificial Sequence; identical to SEQ ID NO: 39476
  Cyclic GFR-binding peptide
  MOD_RES (31)..(31): Xaa is C or S

SEQ ID NO: 77647 - protein, 28 aa, Artificial Sequence
  Cyclic GFR-binding peptide
KMNAISMLYFNDKQQIILKKYRGMVVDR

SEQ ID NO: 77648 - protein, 33 aa, Artificial Sequence
  Cyclic GFR-binding peptide
  MOD_RES (3)..(4): Xaa is C or S
STXXAPVKTNAISMLYFDNGRVLLLKKYRMIVE

SEQ ID NO: 77649 - protein, 26 aa, Artificial Sequence
  Cyclic GFR-binding peptide
  MOD_RES (1)..(1): Xaa is C or S
XVPARLNAISILYFDAANNVVLKKYR

SEQ ID NO: 77650 - protein, 34 aa, Artificial Sequence
  Cyclic GFR-binding peptide
  MOD_RES (1)..(2)..(33): Xaa is C or S
XXAPVKTNAISMLYFDNGRVLLLKKYRMIVEEXG

SEQ ID NO: 77651 - protein, 31 aa, Artificial Sequence; identical to SEQ ID NO: 8076
  Cyclic GFR-binding peptide
  MOD_RES (1)..(2): Xaa is C or S

SEQ ID NO: 77652 - protein, 33 aa, Artificial Sequence
  Cyclic GFR-binding peptide
  MOD_RES (1)..(2): Xaa is C or S
XXTPTKMNAISMLYFNDKQQIILKKYRGMVVDR

SEQ ID NO: 77653 - protein, 31 aa, Artificial Sequence
  Cyclic GFR-binding peptide
  MOD_RES (2)..(3): Xaa is C or S
PXXTPTKMNAISMLYFNDKQQIILKKYRGMV

SEQ ID NO: 77654 - protein, 30 aa, Artificial Sequence; identical to SEQ ID NO: 39493
  Cyclic GFR-binding peptide
  MOD_RES (1)..(2): Xaa is C or S

SEQ ID NO: 77655 - protein, 25 aa, Artificial Sequence
  Cyclic GFR-binding peptide
NAISMLYFNDKQQIILKKYRGMVVD

SEQ ID NO: 77656 - protein, 36 aa, Artificial Sequence
  Cyclic GFR-binding peptide
  MOD_RES (4)..(5): Xaa is C or S
AGPXXTPTKMNAISMLYFNDKQQIILKKYRGMVVDR

SEQ ID NO: 77657 - protein, 32 aa, Artificial Sequence; identical to SEQ ID NO: 8085
  Cyclic GFR-binding peptide
  MOD_RES (4)..(5): Xaa is C or S

SEQ ID NO: 77658 - protein, 24 aa, Artificial Sequence
  Cyclic GFR-binding peptide
LNAISVLYFDDMGVPTLKKYREGM

SEQ ID NO: 77659 - protein, 26 aa, Artificial Sequence
  Cyclic GFR-binding peptide
VPTELNAISMLYFDENEKVVLKKYRD

SEQ ID NO: 77660 - protein, 36 aa, Artificial Sequence; identical to SEQ ID NO: 10590
  Cyclic GFR-binding peptide
  MOD_RES (1)..(33)..(35): Xaa is C or S

SEQ ID NO: 77661 - protein, 40 aa, Artificial Sequence; identical to SEQ ID NO: 36664
  Cyclic GFR-binding peptide
  MOD_RES (6)..(7)..(39): Xaa is C or S

SEQ ID NO: 77662 - protein, 31 aa, Artificial Sequence; identical to SEQ ID NO: 10591
  Cyclic GFR-binding peptide
  MOD_RES (29)..(31): Xaa is C or S

SEQ ID NO: 77663 - protein, 41 aa, Artificial Sequence; identical to SEQ ID NO: 8094
  Cyclic GFR-binding peptide
  MOD_RES (6)..(7)..(39)..(41): Xaa is C or S

SEQ ID NO: 77664 - protein, 24 aa, Artificial Sequence
  Cyclic GFR-binding peptide
NAISVLYFDSSNNVILKKYRNMVV

SEQ ID NO: 77665 - protein, 24 aa, Artificial Sequence
  Cyclic GFR-binding peptide
ELNAISMLYFDENEKVVLKKYRDM

SEQ ID NO: 77666 - protein, 33 aa, Artificial Sequence
  Cyclic GFR-binding peptide
  MOD_RES (1)..(33): Xaa is C or S
XTPTKMNAISMLYFNDKQQIILKKYRGMVVDRX

SEQ ID NO: 77667 - protein, 28 aa, Artificial Sequence
  Cyclic GFR-binding peptide
  MOD_RES (27)..(27): Xaa is C or S
NAISMLYFDEYDKVVLKKYREMVVEGXG

SEQ ID NO: 77668 - protein, 39 aa, Artificial Sequence
  Cyclic GFR-binding peptide
  MOD_RES (3)..(4)..(36)..(38): Xaa is C or S
GPXXTPTKMNAISMLYFNDKQQIILKKYRGMVVDRXGXS

SEQ ID NO: 77669 - protein, 30 aa, Artificial Sequence; identical to SEQ ID NO: 10617
  Cyclic GFR-binding peptide
  MOD_RES (28)..(30): Xaa is C or S

SEQ ID NO: 77670 - protein, 31 aa, Artificial Sequence; identical to SEQ ID NO: 8119
  Cyclic GFR-binding peptide
  MOD_RES (28)..(30): Xaa is C or S

SEQ ID NO: 77671 - protein, 34 aa, Artificial Sequence; identical to SEQ ID NO: 8125
  Cyclic GFR-binding peptide
  MOD_RES (1)..(33): Xaa is C or S

SEQ ID NO: 77672 - protein, 30 aa, Artificial Sequence; identical to SEQ ID NO: 8126
  Cyclic GFR-binding peptide
  MOD_RES (1)..(1): Xaa is C or S

SEQ ID NO: 77673 - protein, 41 aa, Artificial Sequence; identical to SEQ ID NO: 8132
  Cyclic GFR-binding peptide
  MOD_RES (4)..(5)..(38)..(40): Xaa is C or S

SEQ ID NO: 77674 - protein, 37 aa, Artificial Sequence
  Cyclic GFR-binding peptide
  MOD_RES (6)..(7): Xaa is C or S
GSAGPXXTPTKMNAISMLYFNDKQQIILKKYRGMVVD

SEQ ID NO: 77675 - protein, 29 aa, Artificial Sequence
  Cyclic GFR-binding peptide
VPTELNAISMLYFDENEKVVLKKYRDMVV

SEQ ID NO: 77676 - protein, 21 aa, Artificial Sequence
  Cyclic GFR-binding peptide
LNAISILYFDKGVVTYLKKYR

SEQ ID NO: 77677 - protein, 33 aa, Artificial Sequence; identical to SEQ ID NO: 8140
  Cyclic GFR-binding peptide
  MOD_RES (1)..(2): Xaa is C or S

SEQ ID NO: 77678 - protein, 27 aa, Artificial Sequence
  Cyclic GFR-binding peptide
TPTKMNAISMLYFNDKQQIILKKYRGM

SEQ ID NO: 77679 - protein, 40 aa, Artificial Sequence; identical to SEQ ID NO: 10629
  Cyclic GFR-binding peptide
  MOD_RES (5)..(6)..(38)..(40): Xaa is C or S

SEQ ID NO: 77680 - protein, 29 aa, Artificial Sequence
  Cyclic GFR-binding peptide
  MOD_RES (27)..(29): Xaa is C or S
NAISILYFDSANNVVLKKYRDMVVESXGX

SEQ ID NO: 77681 - protein, 28 aa, Artificial Sequence
  Cyclic GFR-binding peptide
  MOD_RES (2)..(3): Xaa is C or S
PXXTPTKMNAISMLYFNDKQQIILKKYR

SEQ ID NO: 77682 - protein, 26 aa, Artificial Sequence
  Cyclic GFR-binding peptide
LNAISVLYFDSSNNVILKKYRNMVVK

SEQ ID NO: 77683 - protein, 37 aa, Artificial Sequence; identical to SEQ ID NO: 8149
  Cyclic GFR-binding peptide
  MOD_RES (1)..(2)..(34)..(36): Xaa is C or S

SEQ ID NO: 77684 - protein, 31 aa, Artificial Sequence; identical to SEQ ID NO: 8150
  Cyclic GFR-binding peptide

SEQ ID NO: 77685 - protein, 31 aa, Artificial Sequence; identical to SEQ ID NO: 39567
  Cyclic GFR-binding peptide
  MOD_RES (1)..(1): Xaa is C or S

SEQ ID NO: 77686 - protein, 40 aa, Artificial Sequence; identical to SEQ ID NO: 39575
  Cyclic GFR-binding peptide
  MOD_RES (5)..(6)..(38)..(40): Xaa is C or S

SEQ ID NO: 77687 - protein, 26 aa, Artificial Sequence
  Cyclic GFR-binding peptide
KLNAISVLYFDSSNNVILKKYRNMVV

SEQ ID NO: 77688 - protein, 29 aa, Artificial Sequence
  Cyclic GFR-binding peptide
TKMNAISMLYFNDKQQIILKKYRGMVVDR

SEQ ID NO: 77689 - protein, 30 aa, Artificial Sequence; identical to SEQ ID NO: 39576
  Cyclic GFR-binding peptide
  MOD_RES (27)..(29): Xaa is C or S

SEQ ID NO: 77690 - protein, 29 aa, Artificial Sequence
  Cyclic GFR-binding peptide
VPARLNAISILYFDAANNVVLKKYRDMVV

SEQ ID NO: 77691 - protein, 22 aa, Artificial Sequence
  Cyclic GFR-binding peptide
LNAISVLYFDSSNNVILKKYRN

SEQ ID NO: 77692 - protein, 39 aa, Artificial Sequence; identical to SEQ ID NO: 39581
  Cyclic GFR-binding peptide
  MOD_RES (3)..(4)..(36)..(38): Xaa is C or S

SEQ ID NO: 77693 - protein, 22 aa, Artificial Sequence
  Cyclic GFR-binding peptide
NAISVLYFDSSNNVILKKYRNM

SEQ ID NO: 77694 - protein, 29 aa, Artificial Sequence
  Cyclic GFR-binding peptide
  MOD_RES (1)..(1): Xaa is C or S
XVPTKLNAISVLYFDDMGVPTLKKYREGM

SEQ ID NO: 77695 - protein, 29 aa, Artificial Sequence
  Cyclic GFR-binding peptide
TKLNAISVLYFDSSNNVILKKYRNMVVKA

SEQ ID NO: 77696 - protein, 38 aa, Artificial Sequence; identical to SEQ ID NO: 39596
  Cyclic GFR-binding peptide
  MOD_RES (3)..(4)..(36)..(38): Xaa is C or S

SEQ ID NO: 77697 - protein, 24 aa, Artificial Sequence
  Cyclic GFR-binding peptide
KMNAISMLYFNDKQQIILKKYRGM

SEQ ID NO: 77698 - protein, 24 aa, Artificial Sequence
  Cyclic GFR-binding peptide
LNAISVLYFDSSNNVILKKYRNMV

SEQ ID NO: 77699 - protein, 29 aa, Artificial Sequence
  Cyclic GFR-binding peptide
ARLNAISILYFDAANNVVLKKYRDMVVEA

SEQ ID NO: 77700 - protein, 34 aa, Artificial Sequence; identical to SEQ ID NO: 8190
  Cyclic GFR-binding peptide
  MOD_RES (6)..(7): Xaa is C or S

SEQ ID NO: 77701 - protein, 33 aa, Artificial Sequence; identical to SEQ ID NO: 8193
  Cyclic GFR-binding peptide
  MOD_RES (33)..(33): Xaa is C or S

SEQ ID NO: 77702 - protein, 30 aa, Artificial Sequence; identical to SEQ ID NO: 10677
  Cyclic GFR-binding peptide

SEQ ID NO: 77703 - protein, 34 aa, Artificial Sequence; identical to SEQ ID NO: 8198
  Cyclic GFR-binding peptide
  MOD_RES (4)..(5): Xaa is C or S

SEQ ID NO: 77704 - protein, 36 aa, Artificial Sequence; identical to SEQ ID NO: 39607
  Cyclic GFR-binding peptide
  MOD_RES (6)..(7): Xaa is C or S

SEQ ID NO: 77705 - protein, 37 aa, Artificial Sequence; identical to SEQ ID NO: 36787
  Cyclic GFR-binding peptide
  MOD_RES (6)..(7): Xaa is C or S

SEQ ID NO: 77706 - protein, 36 aa, Artificial Sequence; identical to SEQ ID NO: 8205
  Cyclic GFR-binding peptide
  MOD_RES (5)..(6): Xaa is C or S

SEQ ID NO: 77707 - protein, 38 aa, Artificial Sequence; identical to SEQ ID NO: 8206
  Cyclic GFR-binding peptide
  MOD_RES (6)..(7): Xaa is C or S

SEQ ID NO: 77708 - protein, 35 aa, Artificial Sequence; identical to SEQ ID NO: 10685
  Cyclic GFR-binding peptide
  MOD_RES (1)..(33)..(35): Xaa is C or S

SEQ ID NO: 77709 - protein, 31 aa, Artificial Sequence; identical to SEQ ID NO: 36795
  Cyclic GFR-binding peptide

SEQ ID NO: 77710 - protein, 25 aa, Artificial Sequence
  Cyclic GFR-binding peptide
KLNAISILYFDKGVVTYLKKYRGMA

SEQ ID NO: 77711 - protein, 37 aa, Artificial Sequence; identical to SEQ ID NO: 10693
  Cyclic GFR-binding peptide
  MOD_RES (3)..(4)..(36): Xaa is C or S

SEQ ID NO: 77712 - protein, 27 aa, Artificial Sequence
  Cyclic GFR-binding peptide
PTELNAISMLYFDENEKVVLKKYRDMV

SEQ ID NO: 77713 - protein, 24 aa, Artificial Sequence
  Cyclic GFR-binding peptide
TRLNAISILYFDSANNVVLKKYRD

SEQ ID NO: 77714 - protein, 31 aa, Artificial Sequence; identical to SEQ ID NO: 18519
  Cyclic GFR-binding peptide
  MOD_RES (4)..(5): Xaa is C or S

SEQ ID NO: 77715 - protein, 30 aa, Artificial Sequence
  Cyclic GFR-binding peptide
TPTKMNAISMLYFNDKQQIILKKYRGMVVD

SEQ ID NO: 77716 - protein, 37 aa, Artificial Sequence; identical to SEQ ID NO: 20823
  Cyclic GFR-binding peptide
  MOD_RES (6)..(7): Xaa is C or S

SEQ ID NO: 77717 - protein, 34 aa, Artificial Sequence
  Cyclic GFR-binding peptide
  MOD_RES (32)..(34): Xaa is C or S
TPTKMNAISMLYFNDKQQIILKKYRGMVVDRXGX

SEQ ID NO: 77718 - protein, 37 aa, Artificial Sequence; identical to SEQ ID NO: 36815
  Cyclic GFR-binding peptide
  MOD_RES (5)..(6): Xaa is C or S

SEQ ID NO: 77719 - protein, 30 aa, Artificial Sequence; identical to SEQ ID NO: 36817
  Cyclic GFR-binding peptide
  MOD_RES (29)..(29): Xaa is C or S

SEQ ID NO: 77720 - protein, 37 aa, Artificial Sequence; identical to SEQ ID NO: 8225
  Cyclic GFR-binding peptide
  MOD_RES (6)..(7): Xaa is C or S

SEQ ID NO: 77721 - protein, 32 aa, Artificial Sequence
  Cyclic GFR-binding peptide
  MOD_RES (3)..(4): Xaa is C or S
GPXXTPTKMNAISMLYFNDKQQIILKKYRGMV

SEQ ID NO: 77722 - protein, 35 aa, Artificial Sequence; identical to SEQ ID NO: 8226
  Cyclic GFR-binding peptide
  MOD_RES (32)..(34): Xaa is C or S

SEQ ID NO: 77723 - protein, 30 aa, Artificial Sequence; identical to SEQ ID NO: 36821
  Cyclic GFR-binding peptide
  MOD_RES (3)..(4): Xaa is C or S

SEQ ID NO: 77724 - protein, 28 aa, Artificial Sequence
  Cyclic GFR-binding peptide
  MOD_RES (2)..(3): Xaa is C or S
SXXVPARLNAISILYFDAANNVVLKKYR

SEQ ID NO: 77725 - protein, 31 aa, Artificial Sequence; identical to SEQ ID NO: 10712
  Cyclic GFR-binding peptide

SEQ ID NO: 77726 - protein, 27 aa, Artificial Sequence
  Cyclic GFR-binding peptide
NAISVLYFDDMGVPTLKKYREGMSVAE

SEQ ID NO: 77727 - protein, 33 aa, Artificial Sequence; identical to SEQ ID NO: 8238
  Cyclic GFR-binding peptide
  MOD_RES (2)..(3): Xaa is C or S

SEQ ID NO: 77728 - protein, 35 aa, Artificial Sequence; identical to SEQ ID NO: 39646
  Cyclic GFR-binding peptide
  MOD_RES (32)..(34): Xaa is C or S

SEQ ID NO: 77729 - protein, 23 aa, Artificial Sequence
  Cyclic GFR-binding peptide
LNAISVLYFDDMGVPTLKKYREG

SEQ ID NO: 77730 - protein, 25 aa, Artificial Sequence
  Cyclic GFR-binding peptide
TELNAISMLYFDEYDKVVLKKYREM

SEQ ID NO: 77731 - protein, 23 aa, Artificial Sequence
  Cyclic GFR-binding peptide
NAISMLYFDENEKVVLKKYRDMV

SEQ ID NO: 77732 - protein, 32 aa, Artificial Sequence; identical to SEQ ID NO: 10723
  Cyclic GFR-binding peptide
  MOD_RES (1)..(1): Xaa is C or S

SEQ ID NO: 77733 - protein, 34 aa, Artificial Sequence; identical to SEQ ID NO: 8253
  Cyclic GFR-binding peptide
  MOD_RES (1)..(34): Xaa is C or S

SEQ ID NO: 77734 - protein, 26 aa, Artificial Sequence
  Cyclic GFR-binding peptide
PTKLNAISVLYFDSSNNVILKKYRNM

SEQ ID NO: 77735 - protein, 39 aa, Artificial Sequence; identical to SEQ ID NO: 10725
  Cyclic GFR-binding peptide
  MOD_RES (5)..(6)..(38): Xaa is C or S

SEQ ID NO: 77736 - protein, 28 aa, Artificial Sequence
  Cyclic GFR-binding peptide
TRLNAISILYFDSANNVVLKKYRDMVVE

SEQ ID NO: 77737 - protein, 23 aa, Artificial Sequence
  Cyclic GFR-binding peptide
LNAISILYFDAANNVVLKKYRDM

SEQ ID NO: 77738 - protein, 34 aa, Artificial Sequence; identical to SEQ ID NO: 8264
  Cyclic GFR-binding peptide
  MOD_RES (6)..(7): Xaa is C or S

SEQ ID NO: 77739 - protein, 21 aa, Artificial Sequence
  Cyclic GFR-binding peptide
NAISILYFDKGVVTYLKKYRG

SEQ ID NO: 77740 - protein, 27 aa, Artificial Sequence
  Cyclic GFR-binding peptide
  MOD_RES (27)..(27): Xaa is C or S
NAISMLYFDENEKVVLKKYRDMVVEGX

SEQ ID NO: 77741 - protein, 30 aa, Artificial Sequence; identical to SEQ ID NO: 8266
  Cyclic GFR-binding peptide
  MOD_RES (3)..(4): Xaa is C or S

SEQ ID NO: 77742 - protein, 31 aa, Artificial Sequence; identical to SEQ ID NO: 10739
  Cyclic GFR-binding peptide
  MOD_RES (28)..(30): Xaa is C or S

SEQ ID NO: 77743 - protein, 35 aa, Artificial Sequence; identical to SEQ ID NO: 10743
  Cyclic GFR-binding peptide
  MOD_RES (6)..(7): Xaa is C or S

SEQ ID NO: 77744 - protein, 30 aa, Artificial Sequence; identical to SEQ ID NO: 20865
  Cyclic GFR-binding peptide
  MOD_RES (29)..(29): Xaa is C or S

SEQ ID NO: 77745 - protein, 30 aa, Artificial Sequence; identical to SEQ ID NO: 39685
  Cyclic GFR-binding peptide

SEQ ID NO: 77746 - protein, 31 aa, Artificial Sequence; identical to SEQ ID NO: 39689
  Cyclic GFR-binding peptide
  MOD_RES (5)..(6): Xaa is C or S

SEQ ID NO: 77747 - protein, 26 aa, Artificial Sequence
  Cyclic GFR-binding peptide
  MOD_RES (1)..(1): Xaa is C or S
XAPTKLNAISVLYFDSSNNVILKKYR

SEQ ID NO: 77748 - protein, 23 aa, Artificial Sequence
  Cyclic GFR-binding peptide
LNAISILYFDSANNVVLKKYRDM

SEQ ID NO: 77749 - protein, 30 aa, Artificial Sequence; identical to SEQ ID NO: 36869
  Cyclic GFR-binding peptide
  MOD_RES (4)..(5): Xaa is C or S

SEQ ID NO: 77750 - protein, 41 aa, Artificial Sequence; identical to SEQ ID NO: 10754
  Cyclic GFR-binding peptide
  MOD_RES (6)..(7)..(39)..(41): Xaa is C or S

SEQ ID NO: 77751 - protein, 22 aa, Artificial Sequence
  Cyclic GFR-binding peptide
KLNAISVLYFDSSNNVILKKYR

SEQ ID NO: 77752 - protein, 23 aa, Artificial Sequence
  Cyclic GFR-binding peptide
TKLNAISILYFDKGVVTYLKKYR

SEQ ID NO: 77753 - protein, 32 aa, Artificial Sequence; identical to SEQ ID NO: 36874
  Cyclic GFR-binding peptide
  MOD_RES (31)..(31): Xaa is C or S

SEQ ID NO: 77754 - protein, 21 aa, Artificial Sequence
  Cyclic GFR-binding peptide
LNAISMLYFDEYDKVVLKKYR

SEQ ID NO: 77755 - protein, 24 aa, Artificial Sequence
  Cyclic GFR-binding peptide
KLNAISILYFDKGVVTYLKKYRGM

SEQ ID NO: 77756 - protein, 29 aa, Artificial Sequence
  Cyclic GFR-binding peptide
  MOD_RES (2)..(3): Xaa is C or S
AXXVPTELNAISMLYFDENEKVVLKKYRD

SEQ ID NO: 77757 - protein, 31 aa, Artificial Sequence; identical to SEQ ID NO: 10770
  Cyclic GFR-binding peptide
  MOD_RES (1)..(1): Xaa is C or S

SEQ ID NO: 77758 - protein, 30 aa, Artificial Sequence
  Cyclic GFR-binding peptide
  MOD_RES (3)..(4): Xaa is C or S
STXXAPVKTNAISMLYFDNGRVLLLKKYRM

SEQ ID NO: 77759 - protein, 25 aa, Artificial Sequence
  Cyclic GFR-binding peptide
TRLNAISILYFDSANNVVLKKYRDM

SEQ ID NO: 77760 - protein, 31 aa, Artificial Sequence; identical to SEQ ID NO: 8301
  Cyclic GFR-binding peptide

SEQ ID NO: 77761 - protein, 42 aa, Artificial Sequence
  Cyclic GFR-binding peptide
  MOD_RES (6)..(7)..(39)..(41): Xaa is C or S
GSAGPXXTPTKMNAISMLYFNDKQQIILKKYRGMVVDRXGXS

SEQ ID NO: 77762 - protein, 35 aa, Artificial Sequence; identical to SEQ ID NO: 8304
  Cyclic GFR-binding peptide
  MOD_RES (4)..(5): Xaa is C or S

SEQ ID NO: 77763 - protein, 36 aa, Artificial Sequence
  Cyclic GFR-binding peptide
  MOD_RES (3)..(4)..(35): Xaa is C or S
STXXAPVKTNAISMLYFDNGRVLLLKKYRMIVEEXG

SEQ ID NO: 77764 - protein, 28 aa, Artificial Sequence
  Cyclic GFR-binding peptide
PTKLNAISVLYFDSSNNVILKKYRNMVV

SEQ ID NO: 77765 - protein, 32 aa, Artificial Sequence; identical to SEQ ID NO: 8316
  Cyclic GFR-binding peptide
  MOD_RES (32)..(32): Xaa is C or S

SEQ ID NO: 77766 - protein, 40 aa, Artificial Sequence
  Cyclic GFR-binding peptide
  MOD_RES (6)..(7)..(39): Xaa is C or S
GSAGPXXTPTKMNAISMLYFNDKQQIILKKYRGMVVDRXG

SEQ ID NO: 77767 - protein, 39 aa, Artificial Sequence; identical to SEQ ID NO: 39733
  Cyclic GFR-binding peptide
  MOD_RES (5)..(6)..(38): Xaa is C or S

SEQ ID NO: 77768 - protein, 31 aa, Artificial Sequence; identical to SEQ ID NO: 8322
  Cyclic GFR-binding peptide
  MOD_RES (3)..(4): Xaa is C or S

SEQ ID NO: 77769 - protein, 35 aa, Artificial Sequence; identical to SEQ ID NO: 8325
  Cyclic GFR-binding peptide
  MOD_RES (3)..(4): Xaa is C or S

SEQ ID NO: 77770 - protein, 25 aa, Artificial Sequence
  Cyclic GFR-binding peptide
VPTELNAISMLYFDEYDKVVLKKYR

SEQ ID NO: 77771 - protein, 34 aa, Artificial Sequence; identical to SEQ ID NO: 8330
  Cyclic GFR-binding peptide
  MOD_RES (31)..(33): Xaa is C or S

SEQ ID NO: 77772 - protein, 34 aa, Artificial Sequence; identical to SEQ ID NO: 10796
  Cyclic GFR-binding peptide
  MOD_RES (1)..(2)..(34): Xaa is C or S

SEQ ID NO: 77773 - protein, 24 aa, Artificial Sequence
  Cyclic GFR-binding peptide
PTKMNAISMLYFNDKQQIILKKYR

SEQ ID NO: 77774 - protein, 36 aa, Artificial Sequence; identical to SEQ ID NO: 10805
  Cyclic GFR-binding peptide
  MOD_RES (1)..(2)..(35): Xaa is C or S

SEQ ID NO: 77775 - protein, 28 aa, Artificial Sequence
  Cyclic GFR-binding peptide
  MOD_RES (26)..(28): Xaa is C or S
NAISMLYFDNGRVLLLKKYRMIVEEXGX

SEQ ID NO: 77776 - protein, 27 aa, Artificial Sequence
  Cyclic GFR-binding peptide
ELNAISMLYFDENEKVVLKKYRDMVVE

SEQ ID NO: 77777 - protein, 34 aa, Artificial Sequence; identical to SEQ ID NO: 18639
  Cyclic GFR-binding peptide
  MOD_RES (31)..(33): Xaa is C or S

SEQ ID NO: 77778 - protein, 27 aa, Artificial Sequence
  Cyclic GFR-binding peptide
  MOD_RES (1)..(1): Xaa is C or S
XVPARLNAISILYFDAANNVVLKKYRD

SEQ ID NO: 77779 - protein, 31 aa, Artificial Sequence
  Cyclic GFR-binding peptide
  MOD_RES (28)..(30): Xaa is C or S
MNAISMLYFNDKQQIILKKYRGMVVDRXGXS

SEQ ID NO: 77780 - protein, 36 aa, Artificial Sequence
  Cyclic GFR-binding peptide
  MOD_RES (1)..(2)..(34)..(36): Xaa is C or S
XXTPTKMNAISMLYFNDKQQIILKKYRGMVVDRXGX

SEQ ID NO: 77781 - protein, 30 aa, Artificial Sequence; identical to SEQ ID NO: 39774
  Cyclic GFR-binding peptide
  MOD_RES (30)..(30): Xaa is C or S

SEQ ID NO: 77782 - protein, 33 aa, Artificial Sequence; identical to SEQ ID NO: 8355
  Cyclic GFR-binding peptide
  MOD_RES (30)..(32): Xaa is C or S

SEQ ID NO: 77783 - protein, 27 aa, Artificial Sequence
  Cyclic GFR-binding peptide
ARLNAISILYFDAANNVVLKKYRDMVV

SEQ ID NO: 77784 - protein, 29 aa, Artificial Sequence
  Cyclic GFR-binding peptide
  MOD_RES (1)..(1): Xaa is C or S
XVPTRLNAISILYFDSANNVVLKKYRDMV

SEQ ID NO: 77785 - protein, 22 aa, Artificial Sequence
  Cyclic GFR-binding peptide
KLNAISILYFDKGVVTYLKKYR

SEQ ID NO: 77786 - protein, 25 aa, Artificial Sequence
  Cyclic GFR-binding peptide
KLNAISVLYFDSSNNVILKKYRNMV

SEQ ID NO: 77787 - protein, 33 aa, Artificial Sequence; identical to SEQ ID NO: 10842
  Cyclic GFR-binding peptide
  MOD_RES (3)..(4): Xaa is C or S

SEQ ID NO: 77788 - protein, 39 aa, Artificial Sequence
  Cyclic GFR-binding peptide
  MOD_RES (6)..(7)..(38): Xaa is C or S
RVPSTXXAPVKTNAISMLYFDNGRVLLLKKYRMIVEEXG

SEQ ID NO: 77789 - protein, 22 aa, Artificial Sequence
  Cyclic GFR-binding peptide
NAISILYFDKGVVTYLKKYRGM

SEQ ID NO: 77790 - protein, 28 aa, Artificial Sequence
  Cyclic GFR-binding peptide
  MOD_RES (1)..(1): Xaa is C or S
XVPTRLNAISILYFDSANNVVLKKYRDM

SEQ ID NO: 77791 - protein, 41 aa, Artificial Sequence; identical to SEQ ID NO: 20962
  Cyclic GFR-binding peptide
  MOD_RES (6)..(7)..(39)..(41): Xaa is C or S

SEQ ID NO: 77792 - protein, 31 aa, Artificial Sequence; identical to SEQ ID NO: 8381
  Cyclic GFR-binding peptide
  MOD_RES (2)..(3): Xaa is C or S

SEQ ID NO: 77793 - protein, 31 aa, Artificial Sequence
  Cyclic GFR-binding peptide
  MOD_RES (30)..(30): Xaa is C or S
PVKTNAISMLYFDNGRVLLLKKYRMIVEEXG

SEQ ID NO: 77794 - protein, 31 aa, Artificial Sequence; identical to SEQ ID NO: 8389
  Cyclic GFR-binding peptide
  MOD_RES (4)..(5): Xaa is C or S

SEQ ID NO: 77795 - protein, 26 aa, Artificial Sequence
  Cyclic GFR-binding peptide
NAISMLYFDEYDKVVLKKYREMVVEG

SEQ ID NO: 77796 - protein, 35 aa, Artificial Sequence
  Cyclic GFR-binding peptide
  MOD_RES (6)..(7): Xaa is C or S
RVPSTXXAPVKTNAISMLYFDNGRVLLLKKYRMIV

SEQ ID NO: 77797 - protein, 23 aa, Artificial Sequence
  Cyclic GFR-binding peptide
TKLNAISVLYFDDMGVPTLKKYR

SEQ ID NO: 77798 - protein, 29 aa, Artificial Sequence
  Cyclic GFR-binding peptide
APTKLNAISVLYFDSSNNVILKKYRNMVV

SEQ ID NO: 77799 - protein, 23 aa, Artificial Sequence
  Cyclic GFR-binding peptide
ARLNAISILYFDAANNVVLKKYR

SEQ ID NO: 77800 - protein, 33 aa, Artificial Sequence; identical to SEQ ID NO: 10867
  Cyclic GFR-binding peptide
  MOD_RES (30)..(32): Xaa is C or S

SEQ ID NO: 77801 - protein, 31 aa, Artificial Sequence; identical to SEQ ID NO: 8398
  Cyclic GFR-binding peptide
  MOD_RES (5)..(6): Xaa is C or S

SEQ ID NO: 77802 - protein, 31 aa, Artificial Sequence; identical to SEQ ID NO: 39826
  Cyclic GFR-binding peptide
  MOD_RES (29)..(31): Xaa is C or S

SEQ ID NO: 77803 - protein, 31 aa, Artificial Sequence; identical to SEQ ID NO: 10873
  Cyclic GFR-binding peptide
  MOD_RES (5)..(6): Xaa is C or S

SEQ ID NO: 77804 - protein, 24 aa, Artificial Sequence
  Cyclic GFR-binding peptide
VKTNAISMLYFDNGRVLLLKKYRM

SEQ ID NO: 77805 - protein, 23 aa, Artificial Sequence
  Cyclic GFR-binding peptide
NAISILYFDKGVVTYLKKYRGMA

SEQ ID NO: 77806 - protein, 31 aa, Artificial Sequence
  Cyclic GFR-binding peptide
  MOD_RES (4)..(5): Xaa is C or S
AGPXXTPTKMNAISMLYFNDKQQIILKKYRG

SEQ ID NO: 77807 - protein, 36 aa, Artificial Sequence; identical to SEQ ID NO: 8409
  Cyclic GFR-binding peptide
  MOD_RES (5)..(6): Xaa is C or S

SEQ ID NO: 77808 - protein, 33 aa, Artificial Sequence
  Cyclic GFR-binding peptide
  MOD_RES (2)..(3): Xaa is C or S
TXXAPVKTNAISMLYFDNGRVLLLKKYRMIVEE

SEQ ID NO: 77809 - protein, 28 aa, Artificial Sequence
  Cyclic GFR-binding peptide
  MOD_RES (1)..(1): Xaa is C or S
XVPTELNAISMLYFDEYDKVVLKKYREM

SEQ ID NO: 77810 - protein, 41 aa, Artificial Sequence; identical to SEQ ID NO: 39838
  Cyclic GFR-binding peptide
  MOD_RES (6)..(7)..(39)..(41): Xaa is C or S

SEQ ID NO: 77811 - protein, 30 aa, Artificial Sequence; identical to SEQ ID NO: 37045
  Cyclic GFR-binding peptide
  MOD_RES (1)..(2): Xaa is C or S

SEQ ID NO: 77812 - protein, 26 aa, Artificial Sequence
  Cyclic GFR-binding peptide
APTKLNAISVLYFDSSNNVILKKYRN

SEQ ID NO: 77813 - protein, 25 aa, Artificial Sequence
  Cyclic GFR-binding peptide
PTRLNAISILYFDSANNVVLKKYRD

SEQ ID NO: 77814 - protein, 26 aa, Artificial Sequence
  Cyclic GFR-binding peptide
TKMNAISMLYFNDKQQIILKKYRGMV

SEQ ID NO: 77815 - protein, 38 aa, Artificial Sequence
  Cyclic GFR-binding peptide
  MOD_RES (4)..(5)..(36)..(38): Xaa is C or S
PSTXXAPVKTNAISMLYFDNGRVLLLKKYRMIVEEXGX

SEQ ID NO: 77816 - protein, 24 aa, Artificial Sequence
  Cyclic GFR-binding peptide
KLNAISVLYFDDMGVPTLKKYREG

SEQ ID NO: 77817 - protein, 34 aa, Artificial Sequence; identical to SEQ ID NO: 8426
  Cyclic GFR-binding peptide
  MOD_RES (32)..(34): Xaa is C or S

SEQ ID NO: 77818 - protein, 39 aa, Artificial Sequence; identical to SEQ ID NO: 21000
  Cyclic GFR-binding peptide
  MOD_RES (6)..(7)..(39): Xaa is C or S

SEQ ID NO: 77819 - protein, 30 aa, Artificial Sequence; identical to SEQ ID NO: 10896
  Cyclic GFR-binding peptide
  MOD_RES (30)..(30): Xaa is C or S

SEQ ID NO: 77820 - protein, 29 aa, Artificial Sequence
  Cyclic GFR-binding peptide
PTRLNAISILYFDSANNVVLKKYRDMVVE

SEQ ID NO: 77821 - protein, 30 aa, Artificial Sequence; identical to SEQ ID NO: 8429
  Cyclic GFR-binding peptide
  MOD_RES (29)..(29): Xaa is C or S

SEQ ID NO: 77822 - protein, 39 aa, Artificial Sequence; identical to SEQ ID NO: 10902
  Cyclic GFR-binding peptide
  MOD_RES (5)..(6)..(38): Xaa is C or S

SEQ ID NO: 77823 - protein, 36 aa, Artificial Sequence; identical to SEQ ID NO: 8432
  Cyclic GFR-binding peptide
  MOD_RES (2)..(3)..(35): Xaa is C or S

SEQ ID NO: 77824 - protein, 28 aa, Artificial Sequence
  Cyclic GFR-binding peptide
  MOD_RES (2)..(3): Xaa is C or S
TXXAPVKTNAISMLYFDNGRVLLLKKYR

SEQ ID NO: 77825 - protein, 27 aa, Artificial Sequence
  Cyclic GFR-binding peptide
VPTKLNAISVLYFDDMGVPTLKKYREG

SEQ ID NO: 77826 - protein, 32 aa, Artificial Sequence; identical to SEQ ID NO: 37075
  Cyclic GFR-binding peptide
  MOD_RES (4)..(5): Xaa is C or S

SEQ ID NO: 77827 - protein, 37 aa, Artificial Sequence
  Cyclic GFR-binding peptide
  MOD_RES (5)..(6)..(37): Xaa is C or S
VPSTXXAPVKTNAISMLYFDNGRVLLLKKYRMIVEEX

SEQ ID NO: 77828 - protein, 34 aa, Artificial Sequence; identical to SEQ ID NO: 8435
  Cyclic GFR-binding peptide
  MOD_RES (4)..(5): Xaa is C or S

SEQ ID NO: 77829 - protein, 37 aa, Artificial Sequence; identical to SEQ ID NO: 10906
  Cyclic GFR-binding peptide
  MOD_RES (5)..(6): Xaa is C or S

SEQ ID NO: 77830 - protein, 32 aa, Artificial Sequence; identical to SEQ ID NO: 37079
  Cyclic GFR-binding peptide
  MOD_RES (32)..(32): Xaa is C or S

SEQ ID NO: 77831 - protein, 37 aa, Artificial Sequence; identical to SEQ ID NO: 39863
  Cyclic GFR-binding peptide
  MOD_RES (5)..(6): Xaa is C or S

SEQ ID NO: 77832 - protein, 35 aa, Artificial Sequence; identical to SEQ ID NO: 8442
  Cyclic GFR-binding peptide
  MOD_RES (6)..(7): Xaa is C or S

SEQ ID NO: 77833 - protein, 37 aa, Artificial Sequence; identical to SEQ ID NO: 10913
  Cyclic GFR-binding peptide
  MOD_RES (6)..(7): Xaa is C or S

SEQ ID NO: 77834 - protein, 33 aa, Artificial Sequence
  Cyclic GFR-binding peptide
  MOD_RES (32)..(32): Xaa is C or S
TPTKMNAISMLYFNDKQQIILKKYRGMVVDRXG

SEQ ID NO: 77835 - protein, 40 aa, Artificial Sequence; identical to SEQ ID NO: 8448
  Cyclic GFR-binding peptide
  MOD_RES (5)..(6)..(39): Xaa is C or S

SEQ ID NO: 77836 - protein, 32 aa, Artificial Sequence; identical to SEQ ID NO: 10923
  Cyclic GFR-binding peptide
  MOD_RES (1)..(2): Xaa is C or S

SEQ ID NO: 77837 - protein, 30 aa, Artificial Sequence; identical to SEQ ID NO: 18736
  Cyclic GFR-binding peptide
  MOD_RES (1)..(1): Xaa is C or S

SEQ ID NO: 77838 - protein, 31 aa, Artificial Sequence
  Cyclic GFR-binding peptide
  MOD_RES (3)..(4): Xaa is C or S
STXXAPVKTNAISMLYFDNGRVLLLKKYRMI

SEQ ID NO: 77839 - protein, 30 aa, Artificial Sequence; identical to SEQ ID NO: 10925
  Cyclic GFR-binding peptide
  MOD_RES (1)..(2): Xaa is C or S

SEQ ID NO: 77840 - protein, 32 aa, Artificial Sequence; identical to SEQ ID NO: 37106
  Cyclic GFR-binding peptide
  MOD_RES (3)..(4): Xaa is C or S

SEQ ID NO: 77841 - protein, 33 aa, Artificial Sequence; identical to SEQ ID NO: 10932
  Cyclic GFR-binding peptide
  MOD_RES (5)..(6): Xaa is C or S

SEQ ID NO: 77842 - protein, 30 aa, Artificial Sequence
  Cyclic GFR-binding peptide
  MOD_RES (3)..(4): Xaa is C or S
GPXXTPTKMNAISMLYFNDKQQIILKKYRG

SEQ ID NO: 77843 - protein, 35 aa, Artificial Sequence; identical to SEQ ID NO: 10934
  Cyclic GFR-binding peptide
  MOD_RES (1)..(2)..(34): Xaa is C or S

SEQ ID NO: 77844 - protein, 32 aa, Artificial Sequence
  Cyclic GFR-binding peptide
  MOD_RES (31)..(31): Xaa is C or S
APVKTNAISMLYFDNGRVLLLKKYRMIVEEXG

SEQ ID NO: 77845 - protein, 36 aa, Artificial Sequence; identical to SEQ ID NO: 10935
  Cyclic GFR-binding peptide
  MOD_RES (1)..(33)..(35): Xaa is C or S

SEQ ID NO: 77846 - protein, 30 aa, Artificial Sequence; identical to SEQ ID NO: 10936
  Cyclic GFR-binding peptide
  MOD_RES (2)..(3): Xaa is C or S

SEQ ID NO: 77847 - protein, 35 aa, Artificial Sequence; identical to SEQ ID NO: 8463
  Cyclic GFR-binding peptide
  MOD_RES (2)..(3)..(35): Xaa is C or S

SEQ ID NO: 77848 - protein, 36 aa, Artificial Sequence; identical to SEQ ID NO: 37117
  Cyclic GFR-binding peptide
  MOD_RES (1)..(33)..(35): Xaa is C or S

SEQ ID NO: 77849 - protein, 23 aa, Artificial Sequence
  Cyclic GFR-binding peptide
NAISVLYFDDMGVPTLKKYREGM

SEQ ID NO: 77850 - protein, 26 aa, Artificial Sequence
  Cyclic GFR-binding peptide
NAISMLYFDENEKVVLKKYRDMVVEG

SEQ ID NO: 77851 - protein, 35 aa, Artificial Sequence; identical to SEQ ID NO: 18759
  Cyclic GFR-binding peptide
  MOD_RES (3)..(4): Xaa is C or S

SEQ ID NO: 77852 - protein, 29 aa, Artificial Sequence
  Cyclic GFR-binding peptide
  MOD_RES (1)..(1): Xaa is C or S
XVPTELNAISMLYFDEYDKVVLKKYREMV

SEQ ID NO: 77853 - protein, 27 aa, Artificial Sequence
  Cyclic GFR-binding peptide
LNAISVLYFDDMGVPTLKKYREGMSVA

SEQ ID NO: 77854 - protein, 20 aa, Artificial Sequence
  Cyclic GFR-binding peptide
NAISVLYFDSSNNVILKKYR

SEQ ID NO: 77855 - protein, 22 aa, Artificial Sequence
  Cyclic GFR-binding peptide
RLNAISILYFDAANNVVLKKYR

SEQ ID NO: 77856 - protein, 23 aa, Artificial Sequence
  Cyclic GFR-binding peptide
LNAISVLYFDSSNNVILKKYRNM

SEQ ID NO: 77857 - protein, 37 aa, Artificial Sequence; identical to SEQ ID NO: 39927
  Cyclic GFR-binding peptide
  MOD_RES (1)..(2)..(34)..(36): Xaa is C or S

SEQ ID NO: 77858 - protein, 34 aa, Artificial Sequence; identical to SEQ ID NO: 8494
  Cyclic GFR-binding peptide
  MOD_RES (32)..(34): Xaa is C or S

SEQ ID NO: 77859 - protein, 20 aa, Artificial Sequence
  Cyclic GFR-binding peptide
NAISMLYFNDKQQIILKKYR

SEQ ID NO: 77860 - protein, 29 aa, Artificial Sequence
  Cyclic GFR-binding peptide
  MOD_RES (3)..(4): Xaa is C or S
KAXXVPTELNAISMLYFDEYDKVVLKKYR

SEQ ID NO: 77861 - protein, 39 aa, Artificial Sequence; identical to SEQ ID NO: 8499
  Cyclic GFR-binding peptide
  MOD_RES (3)..(4)..(36)..(38): Xaa is C or S

SEQ ID NO: 77862 - protein, 38 aa, Artificial Sequence; identical to SEQ ID NO: 10969
  Cyclic GFR-binding peptide
  MOD_RES (6)..(7): Xaa is C or S

SEQ ID NO: 77863 - protein, 34 aa, Artificial Sequence; identical to SEQ ID NO: 37159
  Cyclic GFR-binding peptide
  MOD_RES (6)..(7): Xaa is C or S

SEQ ID NO: 77864 - protein, 27 aa, Artificial Sequence
  Cyclic GFR-binding peptide
PARLNAISILYFDAANNVVLKKYRDMV

SEQ ID NO: 77865 - protein, 32 aa, Artificial Sequence; identical to SEQ ID NO: 21083
  Cyclic GFR-binding peptide
  MOD_RES (6)..(7): Xaa is C or S

SEQ ID NO: 77866 - protein, 33 aa, Artificial Sequence; identical to SEQ ID NO: 39953
  Cyclic GFR-binding peptide
  MOD_RES (6)..(7): Xaa is C or S

SEQ ID NO: 77867 - protein, 33 aa, Artificial Sequence; identical to SEQ ID NO: 8513
  Cyclic GFR-binding peptide
  MOD_RES (5)..(6): Xaa is C or S

SEQ ID NO: 77868 - protein, 24 aa, Artificial Sequence
  Cyclic GFR-binding peptide
PTELNAISMLYFDENEKVVLKKYR

SEQ ID NO: 77869 - protein, 35 aa, Artificial Sequence; identical to SEQ ID NO: 39958
  Cyclic GFR-binding peptide
  MOD_RES (1)..(2)..(34): Xaa is C or S

SEQ ID NO: 77870 - protein, 34 aa, Artificial Sequence; identical to SEQ ID NO: 8515
  Cyclic GFR-binding peptide
  MOD_RES (6)..(7): Xaa is C or S

SEQ ID NO: 77871 - protein, 37 aa, Artificial Sequence; identical to SEQ ID NO: 10987
  Cyclic GFR-binding peptide
  MOD_RES (1)..(2)..(35)..(37): Xaa is C or S

SEQ ID NO: 77872 - protein, 26 aa, Artificial Sequence
  Cyclic GFR-binding peptide
  MOD_RES (1)..(1): Xaa is C or S
XVPTELNAISMLYFDENEKVVLKKYR

SEQ ID NO: 77873 - protein, 27 aa, Artificial Sequence
  Cyclic GFR-binding peptide
PTELNAISMLYFDEYDKVVLKKYREMV

SEQ ID NO: 77874 - protein, 36 aa, Artificial Sequence; identical to SEQ ID NO: 21098
  Cyclic GFR-binding peptide
  MOD_RES (3)..(4)..(36): Xaa is C or S

SEQ ID NO: 77875 - protein, 34 aa, Artificial Sequence; identical to SEQ ID NO: 10992
  Cyclic GFR-binding peptide
  MOD_RES (6)..(7): Xaa is C or S

SEQ ID NO: 77876 - protein, 40 aa, Artificial Sequence; identical to SEQ ID NO: 10994
  Cyclic GFR-binding peptide
  MOD_RES (6)..(7)..(40): Xaa is C or S

SEQ ID NO: 77877 - protein, 32 aa, Artificial Sequence; identical to SEQ ID NO: 10997
  Cyclic GFR-binding peptide
  MOD_RES (1)..(1): Xaa is C or S

SEQ ID NO: 77878 - protein, 39 aa, Artificial Sequence
  Cyclic GFR-binding peptide
  MOD_RES (5)..(6)..(38): Xaa is C or S
SAGPXXTPTKMNAISMLYFNDKQQIILKKYRGMVVDRXG

SEQ ID NO: 77879 - protein, 29 aa, Artificial Sequence
  Cyclic GFR-binding peptide
  MOD_RES (29)..(29): Xaa is C or S
KLNAISILYFDKGVVTYLKKYRGMAVSEX

SEQ ID NO: 77880 - protein, 26 aa, Artificial Sequence
  Cyclic GFR-binding peptide
LNAISILYFDAANNVVLKKYRDMVVE

SEQ ID NO: 77881 - protein, 29 aa, Artificial Sequence
  Cyclic GFR-binding peptide
TKLNAISVLYFDDMGVPTLKKYREGMSVA

SEQ ID NO: 77882 - protein, 34 aa, Artificial Sequence; identical to SEQ ID NO: 37198
  Cyclic GFR-binding peptide
  MOD_RES (5)..(6): Xaa is C or S

SEQ ID NO: 77883 - protein, 23 aa, Artificial Sequence
  Cyclic GFR-binding peptide
ELNAISMLYFDENEKVVLKKYRD

SEQ ID NO: 77884 - protein, 21 aa, Artificial Sequence
  Cyclic GFR-binding peptide
LNAISILYFDAANNVVLKKYR

SEQ ID NO: 77885 - protein, 28 aa, Artificial Sequence
  Cyclic GFR-binding peptide
  MOD_RES (1)..(2): Xaa is C or S
XXAPVKTNAISMLYFDNGRVLLLKKYRM

SEQ ID NO: 77886 - protein, 27 aa, Artificial Sequence
  Cyclic GFR-binding peptide
  MOD_RES (1)..(1): Xaa is C or S
XAPVKTNAISMLYFDNGRVLLLKKYRM

SEQ ID NO: 77887 - protein, 22 aa, Artificial Sequence
  Cyclic GFR-binding peptide
KLNAISVLYFDDMGVPTLKKYR

SEQ ID NO: 77888 - protein, 35 aa, Artificial Sequence
  Cyclic GFR-binding peptide
  MOD_RES (2)..(3)..(35): Xaa is C or S
PXXTPTKMNAISMLYFNDKQQIILKKYRGMVVDRX

SEQ ID NO: 77889 - protein, 42 aa, Artificial Sequence; identical to SEQ ID NO: 37211
  Cyclic GFR-binding peptide
  MOD_RES (6)..(7)..(39)..(41): Xaa is C or S

SEQ ID NO: 77890 - protein, 29 aa, Artificial Sequence
  Cyclic GFR-binding peptide
  MOD_RES (28)..(28): Xaa is C or S
LNAISILYFDKGVVTYLKKYRGMAVSEXG

SEQ ID NO: 77891 - protein, 32 aa, Artificial Sequence
  Cyclic GFR-binding peptide
  MOD_RES (4)..(5): Xaa is C or S
PSTXXAPVKTNAISMLYFDNGRVLLLKKYRMI

SEQ ID NO: 77892 - protein, 38 aa, Artificial Sequence; identical to SEQ ID NO: 21130
  Cyclic GFR-binding peptide
  MOD_RES (5)..(6)..(38): Xaa is C or S

SEQ ID NO: 77893 - protein, 28 aa, Artificial Sequence
  Cyclic GFR-binding peptide
  MOD_RES (27)..(27): Xaa is C or S
NAISVLYFDSSNNVILKKYRNMVVKAXG

SEQ ID NO: 77894 - protein, 33 aa, Artificial Sequence; identical to SEQ ID NO: 21133
  Cyclic GFR-binding peptide
  MOD_RES (30)..(32): Xaa is C or S

SEQ ID NO: 77895 - protein, 24 aa, Artificial Sequence
  Cyclic GFR-binding peptide
PVKTNAISMLYFDNGRVLLLKKYR

SEQ ID NO: 77896 - protein, 38 aa, Artificial Sequence; identical to SEQ ID NO: 11029
  Cyclic GFR-binding peptide
  MOD_RES (4)..(5)..(37): Xaa is C or S

SEQ ID NO: 77897 - protein, 22 aa, Artificial Sequence
  Cyclic GFR-binding peptide
NAISMLYFDNGRVLLLKKYRMI

SEQ ID NO: 77898 - protein, 25 aa, Artificial Sequence
  Cyclic GFR-binding peptide
VPTKLNAISVLYFDDMGVPTLKKYR

SEQ ID NO: 77899 - protein, 34 aa, Artificial Sequence; identical to SEQ ID NO: 11031
  Cyclic GFR-binding peptide
  MOD_RES (3)..(4): Xaa is C or S

SEQ ID NO: 77900 - protein, 26 aa, Artificial Sequence
  Cyclic GFR-binding peptide
LNAISMLYFDEYDKVVLKKYREMVVE

SEQ ID NO: 77901 - protein, 39 aa, Artificial Sequence; identical to SEQ ID NO: 37234
  Cyclic GFR-binding peptide
  MOD_RES (5)..(6)..(38): Xaa is C or S

SEQ ID NO: 77902 - protein, 39 aa, Artificial Sequence; identical to SEQ ID NO: 11038
  Cyclic GFR-binding peptide
  MOD_RES (5)..(6)..(39): Xaa is C or S

SEQ ID NO: 77903 - protein, 29 aa, Artificial Sequence
  Cyclic GFR-binding peptide
  MOD_RES (27)..(29): Xaa is C or S
NAISMLYFDEYDKVVLKKYREMVVEGXGX

SEQ ID NO: 77904 - protein, 33 aa, Artificial Sequence; identical to SEQ ID NO: 8567
  Cyclic GFR-binding peptide
  MOD_RES (31)..(33): Xaa is C or S

SEQ ID NO: 77905 - protein, 28 aa, Artificial Sequence
  Cyclic GFR-binding peptide
  MOD_RES (28)..(28): Xaa is C or S
NAISVLYFDDMGVPTLKKYREGMSVAEX

SEQ ID NO: 77906 - protein, 37 aa, Artificial Sequence; identical to SEQ ID NO: 40040
  Cyclic GFR-binding peptide
  MOD_RES (2)..(3)..(35)..(37): Xaa is C or S

SEQ ID NO: 77907 - protein, 36 aa, Artificial Sequence; identical to SEQ ID NO: 8569
  Cyclic GFR-binding peptide
  MOD_RES (2)..(3)..(35): Xaa is C or S

SEQ ID NO: 77908 - protein, 34 aa, Artificial Sequence; identical to SEQ ID NO: 37248
  Cyclic GFR-binding peptide
  MOD_RES (4)..(5): Xaa is C or S

SEQ ID NO: 77909 - protein, 26 aa, Artificial Sequence
  Cyclic GFR-binding peptide
PTELNAISMLYFDEYDKVVLKKYREM

SEQ ID NO: 77910 - protein, 27 aa, Artificial Sequence
  Cyclic GFR-binding peptide
  MOD_RES (1)..(1): Xaa is C or S
XVPTKLNAISVLYFDDMGVPTLKKYRE

SEQ ID NO: 77911 - protein, 28 aa, Artificial Sequence
  Cyclic GFR-binding peptide
  MOD_RES (1)..(2): Xaa is C or S
XXVPTKLNAISVLYFDDMGVPTLKKYRE

SEQ ID NO: 77912 - protein, 39 aa, Artificial Sequence; identical to SEQ ID NO: 18876
  Cyclic GFR-binding peptide
  MOD_RES (3)..(4)..(36)..(38): Xaa is C or S

SEQ ID NO: 77913 - protein, 32 aa, Artificial Sequence; identical to SEQ ID NO: 11069
  Cyclic GFR-binding peptide
  MOD_RES (30)..(32): Xaa is C or S

SEQ ID NO: 77914 - protein, 33 aa, Artificial Sequence; identical to SEQ ID NO: 40053
  Cyclic GFR-binding peptide
  MOD_RES (32)..(32): Xaa is C or S

SEQ ID NO: 77915 - protein, 34 aa, Artificial Sequence; identical to SEQ ID NO: 11070
  Cyclic GFR-binding peptide
  MOD_RES (31)..(33): Xaa is C or S

SEQ ID NO: 77916 - protein, 29 aa, Artificial Sequence
  Cyclic GFR-binding peptide
PVKTNAISMLYFDNGRVLLLKKYRMIVEE

SEQ ID NO: 77917 - protein, 24 aa, Artificial Sequence
  Cyclic GFR-binding peptide
TELNAISMLYFDEYDKVVLKKYRE

SEQ ID NO: 77918 - protein, 24 aa, Artificial Sequence
  Cyclic GFR-binding peptide
PTRLNAISILYFDSANNVVLKKYR

SEQ ID NO: 77919 - protein, 35 aa, Artificial Sequence
  Cyclic GFR-binding peptide
  MOD_RES (5)..(6): Xaa is C or S
SAGPXXTPTKMNAISMLYFNDKQQIILKKYRGMVV

SEQ ID NO: 77920 - protein, 31 aa, Artificial Sequence; identical to SEQ ID NO: 40070
  Cyclic GFR-binding peptide
  MOD_RES (30)..(30): Xaa is C or S

SEQ ID NO: 77921 - protein, 23 aa, Artificial Sequence
  Cyclic GFR-binding peptide
KLNAISVLYFDSSNNVILKKYRN

SEQ ID NO: 77922 - protein, 33 aa, Artificial Sequence; identical to SEQ ID NO: 8586
  Cyclic GFR-binding peptide
  MOD_RES (31)..(33): Xaa is C or S

SEQ ID NO: 77923 - protein, 23 aa, Artificial Sequence
  Cyclic GFR-binding peptide
ELNAISMLYFDEYDKVVLKKYRE

SEQ ID NO: 77924 - protein, 38 aa, Artificial Sequence; identical to SEQ ID NO: 18889
  Cyclic GFR-binding peptide
  MOD_RES (2)..(3)..(35)..(37): Xaa is C or S

SEQ ID NO: 77925 - protein, 29 aa, Artificial Sequence
  Cyclic GFR-binding peptide
  MOD_RES (29)..(29): Xaa is C or S
KMNAISMLYFNDKQQIILKKYRGMVVDRX

SEQ ID NO: 77926 - protein, 32 aa, Artificial Sequence; identical to SEQ ID NO: 8595
  Cyclic GFR-binding peptide
  MOD_RES (31)..(31): Xaa is C or S

SEQ ID NO: 77927 - protein, 39 aa, Artificial Sequence; identical to SEQ ID NO: 37284
  Cyclic GFR-binding peptide
  MOD_RES (4)..(5)..(37)..(39): Xaa is C or S

SEQ ID NO: 77928 - protein, 28 aa, Artificial Sequence
  Cyclic GFR-binding peptide
  MOD_RES (27)..(27): Xaa is C or S
NAISILYFDSANNVVLKKYRDMVVESXG

SEQ ID NO: 77929 - protein, 35 aa, Artificial Sequence; identical to SEQ ID NO: 37290
  Cyclic GFR-binding peptide
  MOD_RES (6)..(7): Xaa is C or S

SEQ ID NO: 77930 - protein, 28 aa, Artificial Sequence
  Cyclic GFR-binding peptide
VPTELNAISMLYFDEYDKVVLKKYREMV

SEQ ID NO: 77931 - protein, 34 aa, Artificial Sequence; identical to SEQ ID NO: 8612
  Cyclic GFR-binding peptide
  MOD_RES (5)..(6): Xaa is C or S

SEQ ID NO: 77932 - protein, 35 aa, Artificial Sequence; identical to SEQ ID NO: 21188
  Cyclic GFR-binding peptide
  MOD_RES (5)..(6): Xaa is C or S

SEQ ID NO: 77933 - protein, 27 aa, Artificial Sequence
  Cyclic GFR-binding peptide
  MOD_RES (26)..(26): Xaa is C or S
NAISMLYFDNGRVLLLKKYRMIVEEXG

SEQ ID NO: 77934 - protein, 38 aa, Artificial Sequence; identical to SEQ ID NO: 8613
  Cyclic GFR-binding peptide
  MOD_RES (2)..(3)..(35)..(37): Xaa is C or S

SEQ ID NO: 77935 - protein, 36 aa, Artificial Sequence; identical to SEQ ID NO: 11116
  Cyclic GFR-binding peptide
  MOD_RES (4)..(5): Xaa is C or S

SEQ ID NO: 77936 - protein, 27 aa, Artificial Sequence
  Cyclic GFR-binding peptide
  MOD_RES (27)..(27): Xaa is C or S
NAISMLYFNDKQQIILKKYRGMVVDRX

SEQ ID NO: 77937 - protein, 29 aa, Artificial Sequence
  Cyclic GFR-binding peptide
  MOD_RES (27)..(29): Xaa is C or S
TNAISMLYFDNGRVLLLKKYRMIVEEXGX

SEQ ID NO: 77938 - protein, 28 aa, Artificial Sequence
  Cyclic GFR-binding peptide
ARLNAISILYFDAANNVVLKKYRDMVVE

SEQ ID NO: 77939 - protein, 35 aa, Artificial Sequence
  Cyclic GFR-binding peptide
  MOD_RES (3)..(4)..(35): Xaa is C or S
STXXAPVKTNAISMLYFDNGRVLLLKKYRMIVEEX

SEQ ID NO: 77940 - protein, 33 aa, Artificial Sequence; identical to SEQ ID NO: 8627
  Cyclic GFR-binding peptide
  MOD_RES (6)..(7): Xaa is C or S

SEQ ID NO: 77941 - protein, 37 aa, Artificial Sequence; identical to SEQ ID NO: 21209
  Cyclic GFR-binding peptide
  MOD_RES (4)..(5)..(37): Xaa is C or S

SEQ ID NO: 77942 - protein, 29 aa, Artificial Sequence
  Cyclic GFR-binding peptide
APVKTNAISMLYFDNGRVLLLKKYRMIVE

SEQ ID NO: 77943 - protein, 26 aa, Artificial Sequence
  Cyclic GFR-binding peptide
LNAISVLYFDDMGVPTLKKYREGMSV

SEQ ID NO: 77944 - protein, 28 aa, Artificial Sequence
  Cyclic GFR-binding peptide
PVKTNAISMLYFDNGRVLLLKKYRMIVE

SEQ ID NO: 77945 - protein, 22 aa, Artificial Sequence
  Cyclic GFR-binding peptide
LNAISMLYFDEYDKVVLKKYRE

SEQ ID NO: 77946 - protein, 25 aa, Artificial Sequence
  Cyclic GFR-binding peptide
LNAISVLYFDSSNNVILKKYRNMVV

SEQ ID NO: 77947 - protein, 31 aa, Artificial Sequence
  Cyclic GFR-binding peptide
  MOD_RES (29)..(31): Xaa is C or S
KMNAISMLYFNDKQQIILKKYRGMVVDRXGX

SEQ ID NO: 77948 - protein, 33 aa, Artificial Sequence; identical to SEQ ID NO: 40139
  Cyclic GFR-binding peptide
  MOD_RES (1)..(2): Xaa is C or S

SEQ ID NO: 77949 - protein, 36 aa, Artificial Sequence; identical to SEQ ID NO: 11148
  Cyclic GFR-binding peptide
  MOD_RES (3)..(4)..(36): Xaa is C or S

SEQ ID NO: 77950 - protein, 29 aa, Artificial Sequence
  Cyclic GFR-binding peptide
PTKLNAISILYFDKGVVTYLKKYRGMAVS

SEQ ID NO: 77951 - protein, 28 aa, Artificial Sequence
  Cyclic GFR-binding peptide
LNAISVLYFDDMGVPTLKKYREGMSVAE

SEQ ID NO: 77952 - protein, 26 aa, Artificial Sequence
  Cyclic GFR-binding peptide
TKLNAISVLYFDSSNNVILKKYRNMV

SEQ ID NO: 77953 - protein, 25 aa, Artificial Sequence
  Cyclic GFR-binding peptide
APVKTNAISMLYFDNGRVLLLKKYR

SEQ ID NO: 77954 - protein, 27 aa, Artificial Sequence
  Cyclic GFR-binding peptide
  MOD_RES (1)..(2): Xaa is C or S
XXVPTRLNAISILYFDSANNVVLKKYR

SEQ ID NO: 77955 - protein, 37 aa, Artificial Sequence; identical to SEQ ID NO: 11165
  Cyclic GFR-binding peptide
  MOD_RES (6)..(7): Xaa is C or S

SEQ ID NO: 77956 - protein, 38 aa, Artificial Sequence; identical to SEQ ID NO: 8660
  Cyclic GFR-binding peptide
  MOD_RES (3)..(4)..(37): Xaa is C or S

SEQ ID NO: 77957 - protein, 28 aa, Artificial Sequence
  Cyclic GFR-binding peptide
  MOD_RES (1)..(2): Xaa is C or S
XXVPARLNAISILYFDAANNVVLKKYRD

SEQ ID NO: 77958 - protein, 26 aa, Artificial Sequence
  Cyclic GFR-binding peptide
PTKLNAISVLYFDDMGVPTLKKYREG

SEQ ID NO: 77959 - protein, 33 aa, Artificial Sequence; identical to SEQ ID NO: 21237
  Cyclic GFR-binding peptide
  MOD_RES (6)..(7): Xaa is C or S

SEQ ID NO: 77960 - protein, 36 aa, Artificial Sequence; identical to SEQ ID NO: 11174
  Cyclic GFR-binding peptide
  MOD_RES (5)..(6): Xaa is C or S

SEQ ID NO: 77961 - protein, 26 aa, Artificial Sequence
  Cyclic GFR-binding peptide
  MOD_RES (1)..(1): Xaa is C or S
XVPTRLNAISILYFDSANNVVLKKYR

SEQ ID NO: 77962 - protein, 24 aa, Artificial Sequence
  Cyclic GFR-binding peptide
TKLNAISVLYFDSSNNVILKKYRN

SEQ ID NO: 77963 - protein, 36 aa, Artificial Sequence; identical to SEQ ID NO: 8678
  Cyclic GFR-binding peptide
  MOD_RES (3)..(4)..(36): Xaa is C or S

SEQ ID NO: 77964 - protein, 32 aa, Artificial Sequence
  Cyclic GFR-binding peptide
  MOD_RES (6)..(7): Xaa is C or S
RVPSTXXAPVKTNAISMLYFDNGRVLLLKKYR

SEQ ID NO: 77965 - protein, 30 aa, Artificial Sequence; identical to SEQ ID NO: 21257
  Cyclic GFR-binding peptide
  MOD_RES (3)..(4): Xaa is C or S

SEQ ID NO: 77966 - protein, 37 aa, Artificial Sequence; identical to SEQ ID NO: 8690
  Cyclic GFR-binding peptide
  MOD_RES (4)..(5)..(37): Xaa is C or S

SEQ ID NO: 77967 - protein, 42 aa, Artificial Sequence; identical to SEQ ID NO: 11193
  Cyclic GFR-binding peptide
  MOD_RES (6)..(7)..(40)..(42): Xaa is C or S

SEQ ID NO: 77968 - protein, 28 aa, Artificial Sequence
  Cyclic GFR-binding peptide
VPTRLNAISILYFDSANNVVLKKYRDMV

SEQ ID NO: 77969 - protein, 27 aa, Artificial Sequence
  Cyclic GFR-binding peptide
RLNAISILYFDSANNVVLKKYRDMVVE

SEQ ID NO: 77970 - protein, 31 aa, Artificial Sequence
  Cyclic GFR-binding peptide
  MOD_RES (28)..(30): Xaa is C or S
KTNAISMLYFDNGRVLLLKKYRMIVEEXGXL

SEQ ID NO: 77971 - protein, 30 aa, Artificial Sequence; identical to SEQ ID NO: 11203
  Cyclic GFR-binding peptide

SEQ ID NO: 77972 - protein, 37 aa, Artificial Sequence; identical to SEQ ID NO: 21279
  Cyclic GFR-binding peptide
  MOD_RES (5)..(6): Xaa is C or S

SEQ ID NO: 77973 - protein, 20 aa, Artificial Sequence
  Cyclic GFR-binding peptide
NAISILYFDAANNVVLKKYR

SEQ ID NO: 77974 - protein, 38 aa, Artificial Sequence; identical to SEQ ID NO: 40213
  Cyclic GFR-binding peptide
  MOD_RES (2)..(3)..(35)..(37): Xaa is C or S

SEQ ID NO: 77975 - protein, 29 aa, Artificial Sequence
  Cyclic GFR-binding peptide
  MOD_RES (28)..(28): Xaa is C or S
NAISVLYFDDMGVPTLKKYREGMSVAEXG

SEQ ID NO: 77976 - protein, 34 aa, Artificial Sequence; identical to SEQ ID NO: 11209
  Cyclic GFR-binding peptide
  MOD_RES (3)..(4): Xaa is C or S

SEQ ID NO: 77977 - protein, 35 aa, Artificial Sequence; identical to SEQ ID NO: 8708
  Cyclic GFR-binding peptide
  MOD_RES (1)..(33)..(35): Xaa is C or S

SEQ ID NO: 77978 - protein, 34 aa, Artificial Sequence
  Cyclic GFR-binding peptide
  MOD_RES (5)..(6): Xaa is C or S
SAGPXXTPTKMNAISMLYFNDKQQIILKKYRGMV

SEQ ID NO: 77979 - protein, 25 aa, Artificial Sequence
  Cyclic GFR-binding peptide
LNAISVLYFDDMGVPTLKKYREGMS

SEQ ID NO: 77980 - protein, 29 aa, Artificial Sequence
  Cyclic GFR-binding peptide
  MOD_RES (1)..(1): Xaa is C or S
XVPTELNAISMLYFDENEKVVLKKYRDMV

SEQ ID NO: 77981 - protein, 31 aa, Artificial Sequence
  Cyclic GFR-binding peptide
  MOD_RES (4)..(5): Xaa is C or S
PSTXXAPVKTNAISMLYFDNGRVLLLKKYRM

SEQ ID NO: 77982 - protein, 33 aa, Artificial Sequence; identical to SEQ ID NO: 11219
  Cyclic GFR-binding peptide
  MOD_RES (6)..(7): Xaa is C or S

SEQ ID NO: 77983 - protein, 32 aa, Artificial Sequence; identical to SEQ ID NO: 37422
  Cyclic GFR-binding peptide
  MOD_RES (6)..(7): Xaa is C or S

SEQ ID NO: 77984 - protein, 42 aa, Artificial Sequence; identical to SEQ ID NO: 8720
  Cyclic GFR-binding peptide
  MOD_RES (6)..(7)..(39)..(41): Xaa is C or S

SEQ ID NO: 77985 - protein, 27 aa, Artificial Sequence
  Cyclic GFR-binding peptide
VPTELNAISMLYFDEYDKVVLKKYREM

SEQ ID NO: 77986 - protein, 30 aa, Artificial Sequence
  Cyclic GFR-binding peptide
  MOD_RES (29)..(29): Xaa is C or S
KMNAISMLYFNDKQQIILKKYRGMVVDRXG

SEQ ID NO: 77987 - protein, 26 aa, Artificial Sequence
  Cyclic GFR-binding peptide
VKTNAISMLYFDNGRVLLLKKYRMIV

SEQ ID NO: 77988 - protein, 28 aa, Artificial Sequence
  Cyclic GFR-binding peptide
  MOD_RES (28)..(28): Xaa is C or S
LNAISILYFDSANNVVLKKYRDMVVESX

SEQ ID NO: 77989 - protein, 30 aa, Artificial Sequence; identical to SEQ ID NO: 8733
  Cyclic GFR-binding peptide

SEQ ID NO: 77990 - protein, 34 aa, Artificial Sequence; identical to SEQ ID NO: 11231
  Cyclic GFR-binding peptide
  MOD_RES (2)..(3): Xaa is C or S

SEQ ID NO: 77991 - protein, 27 aa, Artificial Sequence
  Cyclic GFR-binding peptide
VKTNAISMLYFDNGRVLLLKKYRMIVE

SEQ ID NO: 77992 - protein, 34 aa, Artificial Sequence; identical to SEQ ID NO: 8737
  Cyclic GFR-binding peptide
  MOD_RES (1)..(2): Xaa is C or S

SEQ ID NO: 77993 - protein, 33 aa, Artificial Sequence; identical to SEQ ID NO: 40239
  Cyclic GFR-binding peptide
  MOD_RES (2)..(3): Xaa is C or S

SEQ ID NO: 77994 - protein, 28 aa, Artificial Sequence
  Cyclic GFR-binding peptide
TKLNAISILYFDKGVVTYLKKYRGMAVS

SEQ ID NO: 77995 - protein, 37 aa, Artificial Sequence; identical to SEQ ID NO: 11236
  Cyclic GFR-binding peptide
  MOD_RES (4)..(5)..(37): Xaa is C or S

SEQ ID NO: 77996 - protein, 30 aa, Artificial Sequence; identical to SEQ ID NO: 8740
  Cyclic GFR-binding peptide
  MOD_RES (2)..(3): Xaa is C or S

SEQ ID NO: 77997 - protein, 35 aa, Artificial Sequence; identical to SEQ ID NO: 8742
  Cyclic GFR-binding peptide
  MOD_RES (3)..(4): Xaa is C or S

SEQ ID NO: 77998 - protein, 30 aa, Artificial Sequence; identical to SEQ ID NO: 8751
  Cyclic GFR-binding peptide
  MOD_RES (30)..(30): Xaa is C or S

SEQ ID NO: 77999 - protein, 40 aa, Artificial Sequence; identical to SEQ ID NO: 11254
  Cyclic GFR-binding peptide
  MOD_RES (6)..(7)..(39): Xaa is C or S

SEQ ID NO: 78000 - protein, 21 aa, Artificial Sequence
  Cyclic GFR-binding peptide
MNAISMLYFNDKQQIILKKYR

SEQ ID NO: 78001 - protein, 25 aa, Artificial Sequence
  Cyclic GFR-binding peptide
VPTKLNAISILYFDKGVVTYLKKYR

SEQ ID NO: 78002 - protein, 29 aa, Artificial Sequence
  Cyclic GFR-binding peptide
  MOD_RES (27)..(29): Xaa is C or S
NAISMLYFDENEKVVLKKYRDMVVEGXGX

SEQ ID NO: 78003 - protein, 34 aa, Artificial Sequence; identical to SEQ ID NO: 8760
  Cyclic GFR-binding peptide
  MOD_RES (2)..(3): Xaa is C or S

SEQ ID NO: 78004 - protein, 27 aa, Artificial Sequence
  Cyclic GFR-binding peptide
  MOD_RES (27)..(27): Xaa is C or S
TNAISMLYFDNGRVLLLKKYRMIVEEX

SEQ ID NO: 78005 - protein, 20 aa, Artificial Sequence
  Cyclic GFR-binding peptide
NAISMLYFDEYDKVVLKKYR

SEQ ID NO: 78006 - protein, 32 aa, Artificial Sequence; identical to SEQ ID NO: 40273
  Cyclic GFR-binding peptide
  MOD_RES (3)..(4): Xaa is C or S

SEQ ID NO: 78007 - protein, 23 aa, Artificial Sequence
  Cyclic GFR-binding peptide
RLNAISILYFDSANNVVLKKYRD

SEQ ID NO: 78008 - protein, 24 aa, Artificial Sequence
  Cyclic GFR-binding peptide
NAISILYFDAANNVVLKKYRDMVV

SEQ ID NO: 78009 - protein, 31 aa, Artificial Sequence; identical to SEQ ID NO: 19048
  Cyclic GFR-binding peptide
  MOD_RES (29)..(31): Xaa is C or S

SEQ ID NO: 78010 - protein, 30 aa, Artificial Sequence; identical to SEQ ID NO: 11270
  Cyclic GFR-binding peptide

SEQ ID NO: 78011 - protein, 32 aa, Artificial Sequence; identical to SEQ ID NO: 37471
  Cyclic GFR-binding peptide
  MOD_RES (6)..(7): Xaa is C or S

SEQ ID NO: 78012 - protein, 31 aa, Artificial Sequence; identical to SEQ ID NO: 40280
  Cyclic GFR-binding peptide
  MOD_RES (30)..(30): Xaa is C or S

SEQ ID NO: 78013 - protein, 40 aa, Artificial Sequence; identical to SEQ ID NO: 40285
  Cyclic GFR-binding peptide
  MOD_RES (4)..(5)..(37)..(39): Xaa is C or S

SEQ ID NO: 78014 - protein, 31 aa, Artificial Sequence
  Cyclic GFR-binding peptide
  MOD_RES (1)..(2): Xaa is C or S
XXTPTKMNAISMLYFNDKQQIILKKYRGMVV

SEQ ID NO: 78015 - protein, 33 aa, Artificial Sequence
  Cyclic GFR-binding peptide
  MOD_RES (1)..(2)..(33): Xaa is C or S
XXAPVKTNAISMLYFDNGRVLLLKKYRMIVEEX

SEQ ID NO: 78016 - protein, 25 aa, Artificial Sequence
  Cyclic GFR-binding peptide
KMNAISMLYFNDKQQIILKKYRGMV

SEQ ID NO: 78017 - protein, 34 aa, Artificial Sequence; identical to SEQ ID NO: 40299
  Cyclic GFR-binding peptide
  MOD_RES (32)..(34): Xaa is C or S

SEQ ID NO: 78018 - protein, 28 aa, Artificial Sequence
  Cyclic GFR-binding peptide
ELNAISMLYFDEYDKVVLKKYREMVVEG

SEQ ID NO: 78019 - protein, 31 aa, Artificial Sequence; identical to SEQ ID NO: 8784
  Cyclic GFR-binding peptide
  MOD_RES (4)..(5): Xaa is C or S

SEQ ID NO: 78020 - protein, 29 aa, Artificial Sequence
  Cyclic GFR-binding peptide
PARLNAISILYFDAANNVVLKKYRDMVVE

SEQ ID NO: 78021 - protein, 35 aa, Artificial Sequence; identical to SEQ ID NO: 19069
  Cyclic GFR-binding peptide
  MOD_RES (1)..(33)..(35): Xaa is C or S

SEQ ID NO: 78022 - protein, 29 aa, Artificial Sequence
  Cyclic GFR-binding peptide
  MOD_RES (2)..(3): Xaa is C or S
TXXAPVKTNAISMLYFDNGRVLLLKKYRM

SEQ ID NO: 78023 - protein, 30 aa, Artificial Sequence
  Cyclic GFR-binding peptide
  MOD_RES (1)..(2): Xaa is C or S
XXTPTKMNAISMLYFNDKQQIILKKYRGMV

SEQ ID NO: 78024 - protein, 27 aa, Artificial Sequence
  Cyclic GFR-binding peptide
KLNAISILYFDKGVVTYLKKYRGMAVS

SEQ ID NO: 78025 - protein, 22 aa, Artificial Sequence
  Cyclic GFR-binding peptide
NAISMLYFDENEKVVLKKYRDM

SEQ ID NO: 78026 - protein, 32 aa, Artificial Sequence
  Cyclic GFR-binding peptide
  MOD_RES (6)..(7): Xaa is C or S
GSAGPXXTPTKMNAISMLYFNDKQQIILKKYR

SEQ ID NO: 78027 - protein, 26 aa, Artificial Sequence
  Cyclic GFR-binding peptide
  MOD_RES (26)..(26): Xaa is C or S
NAISMLYFDNGRVLLLKKYRMIVEEX

SEQ ID NO: 78028 - protein, 29 aa, Artificial Sequence
  Cyclic GFR-binding peptide
  MOD_RES (2)..(3): Xaa is C or S
AXXVPTELNAISMLYFDEYDKVVLKKYRE

SEQ ID NO: 78029 - protein, 25 aa, Artificial Sequence
  Cyclic GFR-binding peptide
PTELNAISMLYFDEYDKVVLKKYRE

SEQ ID NO: 78030 - protein, 33 aa, Artificial Sequence; identical to SEQ ID NO: 37510
  Cyclic GFR-binding peptide
  MOD_RES (30)..(32): Xaa is C or S

SEQ ID NO: 78031 - protein, 23 aa, Artificial Sequence
  Cyclic GFR-binding peptide
TELNAISMLYFDEYDKVVLKKYR

SEQ ID NO: 78032 - protein, 31 aa, Artificial Sequence; identical to SEQ ID NO: 37513
  Cyclic GFR-binding peptide
  MOD_RES (28)..(30): Xaa is C or S

SEQ ID NO: 78033 - protein, 30 aa, Artificial Sequence; identical to SEQ ID NO: 8800
  Cyclic GFR-binding peptide
  MOD_RES (4)..(5): Xaa is C or S

SEQ ID NO: 78034 - protein, 28 aa, Artificial Sequence
  Cyclic GFR-binding peptide
ELNAISMLYFDENEKVVLKKYRDMVVEG

SEQ ID NO: 78035 - protein, 33 aa, Artificial Sequence; identical to SEQ ID NO: 11316
  Cyclic GFR-binding peptide
  MOD_RES (2)..(3): Xaa is C or S

SEQ ID NO: 78036 - protein, 28 aa, Artificial Sequence
  Cyclic GFR-binding peptide
PARLNAISILYFDAANNVVLKKYRDMVV

SEQ ID NO: 78037 - protein, 30 aa, Artificial Sequence; identical to SEQ ID NO: 8810
  Cyclic GFR-binding peptide
  MOD_RES (29)..(29): Xaa is C or S

SEQ ID NO: 78038 - protein, 35 aa, Artificial Sequence
  Cyclic GFR-binding peptide
  MOD_RES (30)..(31): Xaa is C or S
VTMNEYKFKVVNKNEDLYLISIPEMKEPVXXPEPI

SEQ ID NO: 78039 - protein, 32 aa, Artificial Sequence
  Cyclic GFR-binding peptide
  MOD_RES (28)..(29): Xaa is C or S
MDYHYKLVVNNASDKYLISIPSLRTPVXXTPP

SEQ ID NO: 78040 - protein, 27 aa, Artificial Sequence
  Cyclic GFR-binding peptide
VMNYHYKLIVNSSDDKYLVSIPSLKTP

SEQ ID NO: 78041 - protein, 36 aa, Artificial Sequence
  Cyclic GFR-binding peptide
  MOD_RES (31)..(32): Xaa is C or S
EVTMNEYKFKVVNKNEDLYLISIPEMKEPVXXPEPI

SEQ ID NO: 78042 - protein, 31 aa, Artificial Sequence
  Cyclic GFR-binding peptide
  MOD_RES (31)..(31): Xaa is C or S
SRVIMPIKGYVKPKRGVFYLINIPSLAQPVX

SEQ ID NO: 78043 - protein, 29 aa, Artificial Sequence
  Cyclic GFR-binding peptide
  MOD_RES (26)..(27): Xaa is C or S
RHKRLVVKDYEDYYLMSTASLETPVXXAK

SEQ ID NO: 78044 - protein, 31 aa, Artificial Sequence; identical to SEQ ID NO: 756
  Cyclic GFR-binding peptide
  MOD_RES (2)..(2): Xaa is C or S

SEQ ID NO: 78045 - protein, 32 aa, Artificial Sequence
  Cyclic GFR-binding peptide
  MOD_RES (31)..(32): Xaa is C or S
EVTMNRHKRLVVNKNEDYYLISTASMKEPVXX

SEQ ID NO: 78046 - protein, 40 aa, Artificial Sequence; identical to SEQ ID NO: 28865
  Cyclic GFR-binding peptide
  MOD_RES (2)..(4)..(36)..(37): Xaa is C or S

SEQ ID NO: 78047 - protein, 28 aa, Artificial Sequence
  Cyclic GFR-binding peptide
  MOD_RES (26)..(27): Xaa is C or S
YHYKLVVNNASDKYLISIPSLRTPVXXT

SEQ ID NO: 78048 - protein, 28 aa, Artificial Sequence
  Cyclic GFR-binding peptide
RVIMRYKKLVKPKRGVFYLISIANLAQP

SEQ ID NO: 78049 - protein, 25 aa, Artificial Sequence
  Cyclic GFR-binding peptide
VVMDRYKKLVVKENEDFYLMSIANL

SEQ ID NO: 78050 - protein, 39 aa, Artificial Sequence
  Cyclic GFR-binding peptide
  MOD_RES (1)..(33)..(34): Xaa is C or S
XSEVTMNRYKKLVVNKNEDFYLISIANMKEPVXXPEPIG

SEQ ID NO: 78051 - protein, 29 aa, Artificial Sequence
  Cyclic GFR-binding peptide
  MOD_RES (1)..(3): Xaa is C or S
XGXSEVVMDYHYKLVVNNASDKYLISIPS

SEQ ID NO: 78052 - protein, 36 aa, Artificial Sequence; identical to SEQ ID NO: 765
  Cyclic GFR-binding peptide
  MOD_RES (1)..(33)..(34): Xaa is C or S

SEQ ID NO: 78053 - protein, 25 aa, Artificial Sequence
  Cyclic GFR-binding peptide
VMNRHKRLIVNSSDDYYLVSTASLK

SEQ ID NO: 78054 - protein, 32 aa, Artificial Sequence; identical to SEQ ID NO: 767
  Cyclic GFR-binding peptide
  MOD_RES (1)..(32): Xaa is C or S

SEQ ID NO: 78055 - protein, 27 aa, Artificial Sequence
  Cyclic GFR-binding peptide
  MOD_RES (27)..(27): Xaa is C or S
NRYKKLIVNNSSDFYLVSIANLKTPAX

SEQ ID NO: 78056 - protein, 32 aa, Artificial Sequence
  Cyclic GFR-binding peptide
  MOD_RES (28)..(29): Xaa is C or S
MDRHKRLVVNNASDYYLISTASLRTPVXXTPP

SEQ ID NO: 78057 - protein, 33 aa, Artificial Sequence
  Cyclic GFR-binding peptide
  MOD_RES (1)..(33): Xaa is C or S
XSEVVMDYHYKLVVNNASDKYLISIPSLRTPVX

SEQ ID NO: 78058 - protein, 32 aa, Artificial Sequence
  Cyclic GFR-binding peptide
  MOD_RES (32)..(32): Xaa is C or S
SEVVMDEYKFKVVNNASDLYLISIPELRTPVX

SEQ ID NO: 78059 - protein, 22 aa, Artificial Sequence
  Cyclic GFR-binding peptide
DPIKGYVVNNAADFYLINIPSL

SEQ ID NO: 78060 - protein, 35 aa, Artificial Sequence; identical to SEQ ID NO: 775
  Cyclic GFR-binding peptide
  MOD_RES (31)..(32): Xaa is C or S

SEQ ID NO: 78061 - protein, 29 aa, Artificial Sequence
  Cyclic GFR-binding peptide
  MOD_RES (26)..(26): Xaa is C or S
EYKFKIVNSSDDLYLVSIPELKTPAXTPK

SEQ ID NO: 78062 - protein, 36 aa, Artificial Sequence; identical to SEQ ID NO: 40367
  Cyclic GFR-binding peptide
  MOD_RES (32)..(33): Xaa is C or S

SEQ ID NO: 78063 - protein, 33 aa, Artificial Sequence
  Cyclic GFR-binding peptide
  MOD_RES (29)..(30): Xaa is C or S
VMDYHYKLVVNNASDKYLISIPSLRTPVXXTPP

SEQ ID NO: 78064 - protein, 42 aa, Artificial Sequence; identical to SEQ ID NO: 777
  Cyclic GFR-binding peptide
  MOD_RES (2)..(4)..(36)..(37): Xaa is C or S

SEQ ID NO: 78065 - protein, 23 aa, Artificial Sequence
  Cyclic GFR-binding peptide
MNRYKKLIVNSSDDFYLVSIANL

SEQ ID NO: 78066 - protein, 28 aa, Artificial Sequence
  Cyclic GFR-binding peptide
VMEEYKFKVVKDYEDLYLMSIPELETPV

SEQ ID NO: 78067 - protein, 37 aa, Artificial Sequence; identical to SEQ ID NO: 28890
  Cyclic GFR-binding peptide
  MOD_RES (2)..(33)..(34): Xaa is C or S

SEQ ID NO: 78068 - protein, 23 aa, Artificial Sequence
  Cyclic GFR-binding peptide
EYKFKVVNNASDLYLISIPELRT

SEQ ID NO: 78069 - protein, 30 aa, Artificial Sequence; identical to SEQ ID NO: 40379
  Cyclic GFR-binding peptide
  MOD_RES (1)..(3): Xaa is C or S

SEQ ID NO: 78070 - protein, 32 aa, Artificial Sequence; identical to SEQ ID NO: 781
  Cyclic GFR-binding peptide
  MOD_RES (30)..(31): Xaa is C or S

SEQ ID NO: 78071 - protein, 33 aa, Artificial Sequence
  Cyclic GFR-binding peptide
  MOD_RES (1)..(32)..(33): Xaa is C or S
XSRVIMPIKGYVKPKRGVFYLINIPSLAQPVXX

SEQ ID NO: 78072 - protein, 35 aa, Artificial Sequence; identical to SEQ ID NO: 783
  Cyclic GFR-binding peptide
  MOD_RES (30)..(31): Xaa is C or S

SEQ ID NO: 78073 - protein, 39 aa, Artificial Sequence; identical to SEQ ID NO: 784
  Cyclic GFR-binding peptide
  MOD_RES (1)..(3)..(35)..(36): Xaa is C or S

SEQ ID NO: 78074 - protein, 34 aa, Artificial Sequence; identical to SEQ ID NO: 28898
  Cyclic GFR-binding peptide
  MOD_RES (1)..(33)..(34): Xaa is C or S

SEQ ID NO: 78075 - protein, 38 aa, Artificial Sequence; identical to SEQ ID NO: 785
  Cyclic GFR-binding peptide
  MOD_RES (1)..(33): Xaa is C or S

SEQ ID NO: 78076 - protein, 23 aa, Artificial Sequence
  Cyclic GFR-binding peptide
RHKRLVKPTRGVYYLISTASLDQ

SEQ ID NO: 78077 - protein, 32 aa, Artificial Sequence; identical to SEQ ID NO: 789
  Cyclic GFR-binding peptide
  MOD_RES (31)..(32): Xaa is C or S

SEQ ID NO: 78078 - protein, 24 aa, Artificial Sequence
  Cyclic GFR-binding peptide
MDEYKFKVVKENEDLYLMSIPELE

SEQ ID NO: 78079 - protein, 29 aa, Artificial Sequence
  Cyclic GFR-binding peptide
RVIMPIKGYVKPKRGVFYLINIPSLAQPV

SEQ ID NO: 78080 - protein, 31 aa, Artificial Sequence; identical to SEQ ID NO: 790
  Cyclic GFR-binding peptide
  MOD_RES (28)..(29): Xaa is C or S

SEQ ID NO: 78081 - protein, 35 aa, Artificial Sequence; identical to SEQ ID NO: 28903
  Cyclic GFR-binding peptide
  MOD_RES (1)..(3)..(35): Xaa is C or S

SEQ ID NO: 78082 - protein, 33 aa, Artificial Sequence
  Cyclic GFR-binding peptide
  MOD_RES (1)..(3): Xaa is C or S
XGXAEVVMDRHKRLVVNNAADYYLISTASLRAP

SEQ ID NO: 78083 - protein, 22 aa, Artificial Sequence
  Cyclic GFR-binding peptide
MEPIKGYVVKDYEDFYLMNIPS

SEQ ID NO: 78084 - protein, 35 aa, Artificial Sequence; identical to SEQ ID NO: 798
  Cyclic GFR-binding peptide
  MOD_RES (1)..(33)..(34): Xaa is C or S

SEQ ID NO: 78085 - protein, 34 aa, Artificial Sequence
  Cyclic GFR-binding peptide
  MOD_RES (1)..(32)..(33): Xaa is C or S
XSKVVMPIKGYVKPTRGVFYLINIPSLDQPVXXP

SEQ ID NO: 78086 - protein, 32 aa, Artificial Sequence; identical to SEQ ID NO: 799
  Cyclic GFR-binding peptide
  MOD_RES (30)..(31): Xaa is C or S

SEQ ID NO: 78087 - protein, 25 aa, Artificial Sequence
  Cyclic GFR-binding peptide
EVVMDPIKGYVVNNAADFYLINIPS

SEQ ID NO: 78088 - protein, 37 aa, Artificial Sequence
  Cyclic GFR-binding peptide
  MOD_RES (32)..(33): Xaa is C or S
SEVTMNRYKKLVVNKNEDFYLISIANMKEPVXXPEPI

SEQ ID NO: 78089 - protein, 29 aa, Artificial Sequence
  Cyclic GFR-binding peptide
EVVMDYHYKLVVNNASDKYLISIPSLRTP

SEQ ID NO: 78090 - protein, 29 aa, Artificial Sequence
  Cyclic GFR-binding peptide
SRVIMRYKKLVKPKRGVFYLISIANLAQP

SEQ ID NO: 78091 - protein, 31 aa, Artificial Sequence; identical to SEQ ID NO: 28907
  Cyclic GFR-binding peptide
  MOD_RES (31)..(31): Xaa is C or S

SEQ ID NO: 78092 - protein, 35 aa, Artificial Sequence; identical to SEQ ID NO: 805
  Cyclic GFR-binding peptide
  MOD_RES (30)..(31): Xaa is C or S

SEQ ID NO: 78093 - protein, 30 aa, Artificial Sequence; identical to SEQ ID NO: 807
  Cyclic GFR-binding peptide
  MOD_RES (27)..(28): Xaa is C or S

SEQ ID NO: 78094 - protein, 35 aa, Artificial Sequence
  Cyclic GFR-binding peptide
  MOD_RES (32)..(33): Xaa is C or S
SEVTMNRHKRLVVNKNEDYYLISTASMKEPVXXPE

SEQ ID NO: 78095 - protein, 35 aa, Artificial Sequence; identical to SEQ ID NO: 809
  Cyclic GFR-binding peptide
  MOD_RES (29)..(30): Xaa is C or S

SEQ ID NO: 78096 - protein, 32 aa, Artificial Sequence; identical to SEQ ID NO: 810
  Cyclic GFR-binding peptide
  MOD_RES (1)..(1): Xaa is C or S

SEQ ID NO: 78097 - protein, 32 aa, Artificial Sequence; identical to SEQ ID NO: 40406
  Cyclic GFR-binding peptide
  MOD_RES (2)..(2): Xaa is C or S

SEQ ID NO: 78098 - protein, 34 aa, Artificial Sequence; identical to SEQ ID NO: 812
  Cyclic GFR-binding peptide
  MOD_RES (30)..(31): Xaa is C or S

SEQ ID NO: 78099 - protein, 24 aa, Artificial Sequence
  Cyclic GFR-binding peptide
NEYKFKIVNSSDDLYLVSIPELKT

SEQ ID NO: 78100 - protein, 35 aa, Artificial Sequence
  Cyclic GFR-binding peptide
  MOD_RES (29)..(30): Xaa is C or S
VIMRHKRLLLVRGNDYYLMSTASTKVPAXXTSPVR

SEQ ID NO: 78101 - protein, 42 aa, Artificial Sequence; identical to SEQ ID NO: 28915
  Cyclic GFR-binding peptide
  MOD_RES (2)..(4)..(36)..(37): Xaa is C or S

SEQ ID NO: 78102 - protein, 33 aa, Artificial Sequence; identical to SEQ ID NO: 813
  Cyclic GFR-binding peptide
  MOD_RES (30)..(31): Xaa is C or S

SEQ ID NO: 78103 - protein, 38 aa, Artificial Sequence; identical to SEQ ID NO: 814
  Cyclic GFR-binding peptide
  MOD_RES (2)..(34)..(35): Xaa is C or S

SEQ ID NO: 78104 - protein, 37 aa, Artificial Sequence; identical to SEQ ID NO: 40412
  Cyclic GFR-binding peptide
  MOD_RES (31)..(32): Xaa is C or S

SEQ ID NO: 78105 - protein, 23 aa, Artificial Sequence
  Cyclic GFR-binding peptide
EEYKFKTPVGMDDLYLVSIPELK

SEQ ID NO: 78106 - protein, 37 aa, Artificial Sequence
  Cyclic GFR-binding peptide
  MOD_RES (31)..(32): Xaa is C or S
DVVMGYHYKLIIQQKDNKYLMSIPSMKTPTXXPGASG

SEQ ID NO: 78107 - protein, 32 aa, Artificial Sequence; identical to SEQ ID NO: 28918
  Cyclic GFR-binding peptide
  MOD_RES (28)..(29): Xaa is C or S

SEQ ID NO: 78108 - protein, 33 aa, Artificial Sequence; identical to SEQ ID NO: 818
  Cyclic GFR-binding peptide
  MOD_RES (29)..(30): Xaa is C or S

SEQ ID NO: 78109 - protein, 25 aa, Artificial Sequence
  Cyclic GFR-binding peptide
VMDEYKFKVVKENEDLYLMSIPELE

SEQ ID NO: 78110 - protein, 31 aa, Artificial Sequence; identical to SEQ ID NO: 28927
  Cyclic GFR-binding peptide
  MOD_RES (30)..(31): Xaa is C or S

SEQ ID NO: 78111 - protein, 24 aa, Artificial Sequence
  Cyclic GFR-binding peptide
VVMDPIKGYVVKENEDFYLMNIPS

SEQ ID NO: 78112 - protein, 34 aa, Artificial Sequence; identical to SEQ ID NO: 75173
  Cyclic GFR-binding peptide
  MOD_RES (1)..(32)..(33): Xaa is C or S

SEQ ID NO: 78113 - protein, 40 aa, Artificial Sequence; identical to SEQ ID NO: 28930
  Cyclic GFR-binding peptide
  MOD_RES (1)..(3)..(35)..(36): Xaa is C or S

SEQ ID NO: 78114 - protein, 26 aa, Artificial Sequence
  Cyclic GFR-binding peptide
  MOD_RES (26)..(26): Xaa is C or S
RYKKLVVKDYEDFYLMSIANLETPVX

SEQ ID NO: 78115 - protein, 31 aa, Artificial Sequence; identical to SEQ ID NO: 822
  Cyclic GFR-binding peptide
  MOD_RES (28)..(29): Xaa is C or S

SEQ ID NO: 78116 - protein, 40 aa, Artificial Sequence; identical to SEQ ID NO: 823
  Cyclic GFR-binding peptide
  MOD_RES (1)..(3)..(36)..(37): Xaa is C or S

SEQ ID NO: 78117 - protein, 40 aa, Artificial Sequence; identical to SEQ ID NO: 824
  Cyclic GFR-binding peptide
  MOD_RES (1)..(3)..(35): Xaa is C or S

SEQ ID NO: 78118 - protein, 26 aa, Artificial Sequence
  Cyclic GFR-binding peptide
VMDPIKGYVVKENEDFYLMNIPSLET

SEQ ID NO: 78119 - protein, 20 aa, Artificial Sequence
  Cyclic GFR-binding peptide
RHKRLVKPTRGVYYLISTAS

SEQ ID NO: 78120 - protein, 37 aa, Artificial Sequence; identical to SEQ ID NO: 40440
  Cyclic GFR-binding peptide
  MOD_RES (2)..(34)..(35): Xaa is C or S

SEQ ID NO: 78121 - protein, 31 aa, Artificial Sequence; identical to SEQ ID NO: 833
  Cyclic GFR-binding peptide
  MOD_RES (1)..(3): Xaa is C or S

SEQ ID NO: 78122 - protein, 25 aa, Artificial Sequence
  Cyclic GFR-binding peptide
EVIMRYKKLLLVRGNDFYLMSIANT

SEQ ID NO: 78123 - protein, 27 aa, Artificial Sequence
  Cyclic GFR-binding peptide
VAMGYHYKLYTVVGKDKYLISIPSLKT

SEQ ID NO: 78124 - protein, 32 aa, Artificial Sequence; identical to SEQ ID NO: 40446
  Cyclic GFR-binding peptide
  MOD_RES (32)..(32): Xaa is C or S

SEQ ID NO: 78125 - protein, 26 aa, Artificial Sequence
  Cyclic GFR-binding peptide
  MOD_RES (26)..(26): Xaa is C or S
EYKFKVVNNAADLYLISIPELRAPVX

SEQ ID NO: 78126 - protein, 26 aa, Artificial Sequence
  Cyclic GFR-binding peptide
NRYKKLVVNKNEDFYLISIANMKEPV

SEQ ID NO: 78127 - protein, 26 aa, Artificial Sequence
  Cyclic GFR-binding peptide
  MOD_RES (26)..(26): Xaa is C or S
YHYKLVVKENEDKYLMSIPSLETPVX

SEQ ID NO: 78128 - protein, 37 aa, Artificial Sequence; identical to SEQ ID NO: 28944
  Cyclic GFR-binding peptide
  MOD_RES (2)..(34)..(35): Xaa is C or S

SEQ ID NO: 78129 - protein, 30 aa, Artificial Sequence
  Cyclic GFR-binding peptide
SKVIMPIKGYIKPTKGIFYLINIPSLDQSV

SEQ ID NO: 78130 - protein, 30 aa, Artificial Sequence; identical to SEQ ID NO: 838
  Cyclic GFR-binding peptide

SEQ ID NO: 78131 - protein, 33 aa, Artificial Sequence; identical to SEQ ID NO: 839
  Cyclic GFR-binding peptide
  MOD_RES (2)..(4): Xaa is C or S

SEQ ID NO: 78132 - protein, 34 aa, Artificial Sequence
  Cyclic GFR-binding peptide
  MOD_RES (31)..(32): Xaa is C or S
SKVVMPIKGYVKPTRGVFYLINIPSLDQPVXXPS

SEQ ID NO: 78133 - protein, 37 aa, Artificial Sequence
  Cyclic GFR-binding peptide
  MOD_RES (32)..(33): Xaa is C or S
SEVTMNEYKFKVVNKNEDLYLISIPEMKEPVXXPEPI

SEQ ID NO: 78134 - protein, 32 aa, Artificial Sequence; identical to SEQ ID NO: 845
  Cyclic GFR-binding peptide
  MOD_RES (2)..(4): Xaa is C or S

SEQ ID NO: 78135 - protein, 30 aa, Artificial Sequence; identical to SEQ ID NO: 851
  Cyclic GFR-binding peptide
  MOD_RES (29)..(30): Xaa is C or S

SEQ ID NO: 78136 - protein, 26 aa, Artificial Sequence
  Cyclic GFR-binding peptide
SEVVMDYHYKLVVNNASDKYLISIPS

SEQ ID NO: 78137 - protein, 21 aa, Artificial Sequence
  Cyclic GFR-binding peptide
DRHKRLVVKENEDYYLMSTAS

SEQ ID NO: 78138 - protein, 34 aa, Artificial Sequence; identical to SEQ ID NO: 28957
  Cyclic GFR-binding peptide
  MOD_RES (28)..(29): Xaa is C or S

SEQ ID NO: 78139 - protein, 34 aa, Artificial Sequence; identical to SEQ ID NO: 40484
  Cyclic GFR-binding peptide
  MOD_RES (2)..(34): Xaa is C or S

SEQ ID NO: 78140 - protein, 34 aa, Artificial Sequence; identical to SEQ ID NO: 75195
  Cyclic GFR-binding peptide
  MOD_RES (2)..(4): Xaa is C or S

SEQ ID NO: 78141 - protein, 40 aa, Artificial Sequence; identical to SEQ ID NO: 40489
  Cyclic GFR-binding peptide
  MOD_RES (2)..(4)..(36)..(37): Xaa is C or S

SEQ ID NO: 78142 - protein, 28 aa, Artificial Sequence
  Cyclic GFR-binding peptide
  MOD_RES (27)..(28): Xaa is C or S
DPIKGYVVNNAADFYLINIPSLRAPVXX

SEQ ID NO: 78143 - protein, 33 aa, Artificial Sequence; identical to SEQ ID NO: 28966
  Cyclic GFR-binding peptide
  MOD_RES (1)..(33): Xaa is C or S

SEQ ID NO: 78144 - protein, 30 aa, Artificial Sequence; identical to SEQ ID NO: 28967
  Cyclic GFR-binding peptide
  MOD_RES (2)..(4): Xaa is C or S

SEQ ID NO: 78145 - protein, 32 aa, Artificial Sequence; identical to SEQ ID NO: 40501
  Cyclic GFR-binding peptide
  MOD_RES (32)..(32): Xaa is C or S

SEQ ID NO: 78146 - protein, 33 aa, Artificial Sequence
  Cyclic GFR-binding peptide
  MOD_RES (32)..(33): Xaa is C or S
SEVTMNRHKRLVVNKNEDYYLISTASMKEPVXX

SEQ ID NO: 78147 - protein, 31 aa, Artificial Sequence; identical to SEQ ID NO: 868
  Cyclic GFR-binding peptide

SEQ ID NO: 78148 - protein, 26 aa, Artificial Sequence
  Cyclic GFR-binding peptide
VVMNYHYKLIVNNSSDKYLVSIPSLK

SEQ ID NO: 78149 - protein, 36 aa, Artificial Sequence; identical to SEQ ID NO: 28972
  Cyclic GFR-binding peptide
  MOD_RES (2)..(4)..(35)..(36): Xaa is C or S

SEQ ID NO: 78150 - protein, 37 aa, Artificial Sequence; identical to SEQ ID NO: 871
  Cyclic GFR-binding peptide
  MOD_RES (32)..(33): Xaa is C or S

SEQ ID NO: 78151 - protein, 30 aa, Artificial Sequence; identical to SEQ ID NO: 11457
  Cyclic GFR-binding peptide
  MOD_RES (1)..(3): Xaa is C or S

SEQ ID NO: 78152 - protein, 27 aa, Artificial Sequence
  Cyclic GFR-binding peptide
  MOD_RES (26)..(27): Xaa is C or S
RHKRLLLVRGNDYYLMSTASTKVPAXX

SEQ ID NO: 78153 - protein, 38 aa, Artificial Sequence; identical to SEQ ID NO: 876
  Cyclic GFR-binding peptide
  MOD_RES (1)..(33)..(34): Xaa is C or S

SEQ ID NO: 78154 - protein, 31 aa, Artificial Sequence; identical to SEQ ID NO: 877
  Cyclic GFR-binding peptide
  MOD_RES (27)..(28): Xaa is C or S

SEQ ID NO: 78155 - protein, 23 aa, Artificial Sequence
  Cyclic GFR-binding peptide
EEYKFKVVKDYEDLYLMSIPELE

SEQ ID NO: 78156 - protein, 39 aa, Artificial Sequence; identical to SEQ ID NO: 879
  Cyclic GFR-binding peptide
  MOD_RES (2)..(34)..(35): Xaa is C or S

SEQ ID NO: 78157 - protein, 28 aa, Artificial Sequence
  Cyclic GFR-binding peptide
  MOD_RES (28)..(28): Xaa is C or S
MDYHYKLVVNNASDKYLISIPSLRTPVX

SEQ ID NO: 78158 - protein, 28 aa, Artificial Sequence
  Cyclic GFR-binding peptide
  MOD_RES (28)..(28): Xaa is C or S
MDRHKRLVVNNASDYYLISTASLRTPVX

SEQ ID NO: 78159 - protein, 37 aa, Artificial Sequence; identical to SEQ ID NO: 881
  Cyclic GFR-binding peptide
  MOD_RES (2)..(4)..(37): Xaa is C or S

SEQ ID NO: 78160 - protein, 24 aa, Artificial Sequence
  Cyclic GFR-binding peptide
VVMGRHKRLIIQQKDNYYLMSTAS

SEQ ID NO: 78161 - protein, 30 aa, Artificial Sequence; identical to SEQ ID NO: 28980
  Cyclic GFR-binding peptide

SEQ ID NO: 78162 - protein, 20 aa, Artificial Sequence
  Cyclic GFR-binding peptide
YHYKLVVNNASDKYLISIPS

SEQ ID NO: 78163 - protein, 36 aa, Artificial Sequence; identical to SEQ ID NO: 884
  Cyclic GFR-binding peptide
  MOD_RES (30)..(31): Xaa is C or S

SEQ ID NO: 78164 - protein, 26 aa, Artificial Sequence
  Cyclic GFR-binding peptide
KVVMYHYKLVKPTRGVKYLISIPSLD

SEQ ID NO: 78165 - protein, 30 aa, Artificial Sequence; identical to SEQ ID NO: 886
  Cyclic GFR-binding peptide
  MOD_RES (28)..(29): Xaa is C or S

SEQ ID NO: 78166 - protein, 37 aa, Artificial Sequence; identical to SEQ ID NO: 887
  Cyclic GFR-binding peptide
  MOD_RES (31)..(32): Xaa is C or S

SEQ ID NO: 78167 - protein, 28 aa, Artificial Sequence
  Cyclic GFR-binding peptide
SRVIMRYKKLVKPKRGVFYLISIANLAQ

SEQ ID NO: 78168 - protein, 28 aa, Artificial Sequence
  Cyclic GFR-binding peptide
EVVMDYHYKLVVNNASDKYLISIPSLRT

SEQ ID NO: 78169 - protein, 30 aa, Artificial Sequence; identical to SEQ ID NO: 893
  Cyclic GFR-binding peptide
  MOD_RES (2)..(2): Xaa is C or S

SEQ ID NO: 78170 - protein, 32 aa, Artificial Sequence; identical to SEQ ID NO: 40524
  Cyclic GFR-binding peptide
  MOD_RES (30)..(31): Xaa is C or S

SEQ ID NO: 78171 - protein, 28 aa, Artificial Sequence
  Cyclic GFR-binding peptide
VVMNYHYKLIVNSSDDKYLVSIPSLKTP

SEQ ID NO: 78172 - protein, 37 aa, Artificial Sequence
  Cyclic GFR-binding peptide
  MOD_RES (2)..(33)..(34): Xaa is C or S
KXSKVVMPIKGYVKPTRGVFYLINIPSLDQPVXXPSA

SEQ ID NO: 78173 - protein, 27 aa, Artificial Sequence
  Cyclic GFR-binding peptide
MNPIKGYVVNKNEDFYLINIPSMKEPV

SEQ ID NO: 78174 - protein, 30 aa, Artificial Sequence; identical to SEQ ID NO: 896
  Cyclic GFR-binding peptide
  MOD_RES (27)..(28): Xaa is C or S

SEQ ID NO: 78175 - protein, 35 aa, Artificial Sequence; identical to SEQ ID NO: 900
  Cyclic GFR-binding peptide
  MOD_RES (1)..(3)..(35): Xaa is C or S

SEQ ID NO: 78176 - protein, 25 aa, Artificial Sequence
  Cyclic GFR-binding peptide
NEYKFKIVNSSDDLYLVSIPELKTP

SEQ ID NO: 78177 - protein, 23 aa, Artificial Sequence
  Cyclic GFR-binding peptide
EYHYKLVVKDYEDKYLMSIPSLE

SEQ ID NO: 78178 - protein, 41 aa, Artificial Sequence; identical to SEQ ID NO: 29000
  Cyclic GFR-binding peptide
  MOD_RES (1)..(3)..(35)..(36): Xaa is C or S

SEQ ID NO: 78179 - protein, 31 aa, Artificial Sequence; identical to SEQ ID NO: 29001
  Cyclic GFR-binding peptide
  MOD_RES (28)..(29): Xaa is C or S

SEQ ID NO: 78180 - protein, 34 aa, Artificial Sequence; identical to SEQ ID NO: 40532
  Cyclic GFR-binding peptide
  MOD_RES (29)..(30): Xaa is C or S

SEQ ID NO: 78181 - protein, 23 aa, Artificial Sequence
  Cyclic GFR-binding peptide
EYKFKIVNNSSDLYLVSIPELKT

SEQ ID NO: 78182 - protein, 39 aa, Artificial Sequence; identical to SEQ ID NO: 40534
  Cyclic GFR-binding peptide
  MOD_RES (1)..(3)..(34)..(35): Xaa is C or S

SEQ ID NO: 78183 - protein, 27 aa, Artificial Sequence
  Cyclic GFR-binding peptide
VMNYHYKLIVNNSSDKYLVSIPSLKTP

SEQ ID NO: 78184 - protein, 42 aa, Artificial Sequence; identical to SEQ ID NO: 40536
  Cyclic GFR-binding peptide
  MOD_RES (2)..(4)..(36)..(37): Xaa is C or S

SEQ ID NO: 78185 - protein, 34 aa, Artificial Sequence; identical to SEQ ID NO: 907
  Cyclic GFR-binding peptide
  MOD_RES (1)..(32)..(33): Xaa is C or S

SEQ ID NO: 78186 - protein, 34 aa, Artificial Sequence; identical to SEQ ID NO: 40541
  Cyclic GFR-binding peptide
  MOD_RES (30)..(31): Xaa is C or S

SEQ ID NO: 78187 - protein, 24 aa, Artificial Sequence
  Cyclic GFR-binding peptide
VTMNEYKFKVVNKNEDLYLISIPE

SEQ ID NO: 78188 - protein, 27 aa, Artificial Sequence
  Cyclic GFR-binding peptide
VMEPIKGYVVKDYEDFYLMNIPSLETP

SEQ ID NO: 78189 - protein, 26 aa, Artificial Sequence
  Cyclic GFR-binding peptide
  MOD_RES (26)..(26): Xaa is C or S
EYKFKIIQQKDNLYLMSIPEMKTPTX

SEQ ID NO: 78190 - protein, 29 aa, Artificial Sequence
  Cyclic GFR-binding peptide
  MOD_RES (1)..(3): Xaa is C or S
XGXARVVMNPIKGYIVNSSDDFYLVNIPS

SEQ ID NO: 78191 - protein, 25 aa, Artificial Sequence
  Cyclic GFR-binding peptide
MNRHKRLIVNSSDDYYLVSTASLQT

SEQ ID NO: 78192 - protein, 28 aa, Artificial Sequence
  Cyclic GFR-binding peptide
  MOD_RES (26)..(27): Xaa is C or S
RHKRLVVNNAADYYLISTASLRAPVXXS

SEQ ID NO: 78193 - protein, 37 aa, Artificial Sequence; identical to SEQ ID NO: 40549
  Cyclic GFR-binding peptide
  MOD_RES (1)..(33)..(34): Xaa is C or S

SEQ ID NO: 78194 - protein, 34 aa, Artificial Sequence
  Cyclic GFR-binding peptide
  MOD_RES (1)..(33)..(34): Xaa is C or S
XSEVTMNPIKGYVVNKNEDFYLINIPSMKEPVXX

SEQ ID NO: 78195 - protein, 28 aa, Artificial Sequence
  Cyclic GFR-binding peptide
  MOD_RES (1)..(1): Xaa is C or S
XESVAMGYHYKLYTVVGKDKYLISIPSL

SEQ ID NO: 78196 - protein, 22 aa, Artificial Sequence
  Cyclic GFR-binding peptide
DYHYKLVVNNASDKYLISIPSL

SEQ ID NO: 78197 - protein, 30 aa, Artificial Sequence; identical to SEQ ID NO: 29015
  Cyclic GFR-binding peptide
  MOD_RES (1)..(1): Xaa is C or S

SEQ ID NO: 78198 - protein, 40 aa, Artificial Sequence; identical to SEQ ID NO: 918
  Cyclic GFR-binding peptide
  MOD_RES (2)..(4)..(36)..(37): Xaa is C or S

SEQ ID NO: 78199 - protein, 31 aa, Artificial Sequence
  Cyclic GFR-binding peptide
  MOD_RES (31)..(31): Xaa is C or S
DVVMGYHYKLIIQQKDNKYLMSIPSMKTPTX

SEQ ID NO: 78200 - protein, 30 aa, Artificial Sequence
  Cyclic GFR-binding peptide
  MOD_RES (30)..(30): Xaa is C or S
VVMDEYKFKVVNNASDLYLISIPELRTPVX

SEQ ID NO: 78201 - protein, 20 aa, Artificial Sequence
  Cyclic GFR-binding peptide
RHKRLIIQQKDNYYLMSTAS

SEQ ID NO: 78202 - protein, 29 aa, Artificial Sequence
  Cyclic GFR-binding peptide
SRVVMNRYKKLIVNSSDDFYLVSIANLKT

SEQ ID NO: 78203 - protein, 42 aa, Artificial Sequence
  Cyclic GFR-binding peptide
  MOD_RES (2)..(4)..(36)..(37): Xaa is C or S
RXGXSEVVMDRHKRLVVNNASDYYLISTASLRTPVXXTPPTS

SEQ ID NO: 78204 - protein, 34 aa, Artificial Sequence
  Cyclic GFR-binding peptide
  MOD_RES (1)..(3)..(34): Xaa is C or S
XKXSRVIMPIKGYVKPKRGVFYLINIPSLAQPVX

SEQ ID NO: 78205 - protein, 40 aa, Artificial Sequence; identical to SEQ ID NO: 29027
  Cyclic GFR-binding peptide
  MOD_RES (1)..(3)..(35)..(36): Xaa is C or S

SEQ ID NO: 78206 - protein, 38 aa, Artificial Sequence
  Cyclic GFR-binding peptide
  MOD_RES (1)..(3)..(35)..(36): Xaa is C or S
XGXSEVVMDRHKRLVVNNASDYYLISTASLRTPVXXTP

SEQ ID NO: 78207 - protein, 40 aa, Artificial Sequence
  Cyclic GFR-binding peptide
  MOD_RES (2)..(34)..(35): Xaa is C or S
GXRDVVMGYHYKLIIQQKDNKYLMSIPSMKTPTXXPGASG

SEQ ID NO: 78208 - protein, 37 aa, Artificial Sequence; identical to SEQ ID NO: 29033
  Cyclic GFR-binding peptide
  MOD_RES (2)..(34)..(35): Xaa is C or S

SEQ ID NO: 78209 - protein, 31 aa, Artificial Sequence; identical to SEQ ID NO: 29034
  Cyclic GFR-binding peptide
  MOD_RES (27)..(28): Xaa is C or S

SEQ ID NO: 78210 - protein, 32 aa, Artificial Sequence; identical to SEQ ID NO: 935
  Cyclic GFR-binding peptide
  MOD_RES (31)..(32): Xaa is C or S

SEQ ID NO: 78211 - protein, 38 aa, Artificial Sequence; identical to SEQ ID NO: 936
  Cyclic GFR-binding peptide
  MOD_RES (1)..(33)..(34): Xaa is C or S

SEQ ID NO: 78212 - protein, 37 aa, Artificial Sequence
  Cyclic GFR-binding peptide
  MOD_RES (2)..(4)..(36)..(37): Xaa is C or S
RXAXSEVTMNEYKFKVVNKNEDLYLISIPEMKEPVXX

SEQ ID NO: 78213 - protein, 30 aa, Artificial Sequence
  Cyclic GFR-binding peptide
  MOD_RES (1)..(1): Xaa is C or S
XEEVIMYHYKLLLVRGNDKYLMSIPSTKVP

SEQ ID NO: 78214 - protein, 26 aa, Artificial Sequence
  Cyclic GFR-binding peptide
MDRYKKLVVKENEDFYLMSIANLETP

SEQ ID NO: 78215 - protein, 37 aa, Artificial Sequence
  Cyclic GFR-binding peptide
  MOD_RES (1)..(3)..(35)..(36): Xaa is C or S
XGXSEVVMDEYKFKVVNNASDLYLISIPELRTPVXXT

SEQ ID NO: 78216 - protein, 37 aa, Artificial Sequence; identical to SEQ ID NO: 940
  Cyclic GFR-binding peptide
  MOD_RES (1)..(3)..(34)..(35): Xaa is C or S

SEQ ID NO: 78217 - protein, 31 aa, Artificial Sequence
  Cyclic GFR-binding peptide
  MOD_RES (2)..(4): Xaa is C or S
RXAXSEVTMNYHYKLVVNKNEDKYLISIPSM

SEQ ID NO: 78218 - protein, 38 aa, Artificial Sequence; identical to SEQ ID NO: 29043
  Cyclic GFR-binding peptide
  MOD_RES (2)..(34)..(35): Xaa is C or S

SEQ ID NO: 78219 - protein, 29 aa, Artificial Sequence
  Cyclic GFR-binding peptide
ARVVMNRHKRLIVNSSDDYYLVSTASLQT

SEQ ID NO: 78220 - protein, 29 aa, Artificial Sequence
  Cyclic GFR-binding peptide
  MOD_RES (28)..(29): Xaa is C or S
MEPIKGYVVKDYEDFYLMNIPSLETPVXX

SEQ ID NO: 78221 - protein, 34 aa, Artificial Sequence
  Cyclic GFR-binding peptide
  MOD_RES (1)..(3)..(34): Xaa is C or S
XGXEEVIMYHYKLLLVRGNDKYLMSIPSTKVPAX

SEQ ID NO: 78222 - protein, 32 aa, Artificial Sequence; identical to SEQ ID NO: 40570
  Cyclic GFR-binding peptide
  MOD_RES (1)..(3): Xaa is C or S

SEQ ID NO: 78223 - protein, 23 aa, Artificial Sequence
  Cyclic GFR-binding peptide
EYKFKVVKENEDLYLMSIPELET

SEQ ID NO: 78224 - protein, 35 aa, Artificial Sequence; identical to SEQ ID NO: 944
  Cyclic GFR-binding peptide
  MOD_RES (29)..(30): Xaa is C or S

SEQ ID NO: 78225 - protein, 34 aa, Artificial Sequence; identical to SEQ ID NO: 29046
  Cyclic GFR-binding peptide
  MOD_RES (30)..(31): Xaa is C or S

SEQ ID NO: 78226 - protein, 38 aa, Artificial Sequence; identical to SEQ ID NO: 75241
  Cyclic GFR-binding peptide
  MOD_RES (2)..(34)..(35): Xaa is C or S

SEQ ID NO: 78227 - protein, 26 aa, Artificial Sequence
  Cyclic GFR-binding peptide
MRYKKLLLVRGNDFYLMSIANTKVPA

SEQ ID NO: 78228 - protein, 33 aa, Artificial Sequence; identical to SEQ ID NO: 949
  Cyclic GFR-binding peptide
  MOD_RES (29)..(30): Xaa is C or S

SEQ ID NO: 78229 - protein, 36 aa, Artificial Sequence; identical to SEQ ID NO: 950
  Cyclic GFR-binding peptide
  MOD_RES (1)..(33)..(34): Xaa is C or S

SEQ ID NO: 78230 - protein, 32 aa, Artificial Sequence; identical to SEQ ID NO: 951
  Cyclic GFR-binding peptide
  MOD_RES (1)..(3): Xaa is C or S

SEQ ID NO: 78231 - protein, 32 aa, Artificial Sequence; identical to SEQ ID NO: 952
  Cyclic GFR-binding peptide
  MOD_RES (32)..(32): Xaa is C or S

SEQ ID NO: 78232 - protein, 27 aa, Artificial Sequence
  Cyclic GFR-binding peptide
  MOD_RES (26)..(27): Xaa is C or S
RYKKLVKPTRGVFYLISIANLDQPVXX

SEQ ID NO: 78233 - protein, 35 aa, Artificial Sequence; identical to SEQ ID NO: 958
  Cyclic GFR-binding peptide
  MOD_RES (1)..(33)..(34): Xaa is C or S

SEQ ID NO: 78234 - protein, 27 aa, Artificial Sequence
  Cyclic GFR-binding peptide
IMRHKRLLLVRGNDYYLMSTASTKVPA

SEQ ID NO: 78235 - protein, 36 aa, Artificial Sequence
  Cyclic GFR-binding peptide
  MOD_RES (1)..(32)..(33): Xaa is C or S
XSRVIMPIKGYVKPKRGVFYLINIPSLAQPVXXPAA

SEQ ID NO: 78236 - protein, 38 aa, Artificial Sequence
  Cyclic GFR-binding peptide
  MOD_RES (32)..(33): Xaa is C or S
SRVVMNYHYKLIVNSSDDKYLVSIPSLKTPAXXPKPVH

SEQ ID NO: 78237 - protein, 31 aa, Artificial Sequence; identical to SEQ ID NO: 961
  Cyclic GFR-binding peptide
  MOD_RES (26)..(27): Xaa is C or S

SEQ ID NO: 78238 - protein, 40 aa, Artificial Sequence
  Cyclic GFR-binding peptide
  MOD_RES (2)..(34)..(35): Xaa is C or S
AXSEVTMNRYKKLVVNKNEDFYLISIANMKEPVXXPEPIG

SEQ ID NO: 78239 - protein, 20 aa, Artificial Sequence
  Cyclic GFR-binding peptide
RYKKLVVNNASDFYLISIAN

SEQ ID NO: 78240 - protein, 33 aa, Artificial Sequence
  Cyclic GFR-binding peptide
  MOD_RES (30)..(31): Xaa is C or S
EVIMYHYKLLLVRGNDKYLMSIPSTKVPAXXTS

SEQ ID NO: 78241 - protein, 34 aa, Artificial Sequence
  Cyclic GFR-binding peptide
  MOD_RES (32)..(33): Xaa is C or S
SEVVMDEYKFKVVNNASDLYLISIPELRTPVXXT

SEQ ID NO: 78242 - protein, 33 aa, Artificial Sequence; identical to SEQ ID NO: 967
  Cyclic GFR-binding peptide
  MOD_RES (31)..(32): Xaa is C or S

SEQ ID NO: 78243 - protein, 36 aa, Artificial Sequence
  Cyclic GFR-binding peptide
  MOD_RES (2)..(4)..(36): Xaa is C or S
RXAXSEVTMNYHYKLVVNKNEDKYLISIPSMKEPVX

SEQ ID NO: 78244 - protein, 25 aa, Artificial Sequence
  Cyclic GFR-binding peptide
VMDYHYKLVVNNASDKYLISIPSLR

SEQ ID NO: 78245 - protein, 27 aa, Artificial Sequence
  Cyclic GFR-binding peptide
  MOD_RES (27)..(27): Xaa is C or S
MRHKRLLLVRGNDYYLMSTASTKVPAX

SEQ ID NO: 78246 - protein, 27 aa, Artificial Sequence
  Cyclic GFR-binding peptide
  MOD_RES (1)..(1): Xaa is C or S
XSKVVMPIKGYVKPTRGVFYLINIPSL

SEQ ID NO: 78247 - protein, 31 aa, Artificial Sequence
  Cyclic GFR-binding peptide
  MOD_RES (1)..(3): Xaa is C or S
XGXSEVVMDEYKFKVVNNASDLYLISIPELR

SEQ ID NO: 78248 - protein, 34 aa, Artificial Sequence
  Cyclic GFR-binding peptide
  MOD_RES (2)..(4): Xaa is C or S
SXKXSKVIMPIKGYIKPTKGIFYLINIPSLDQSV

SEQ ID NO: 78249 - protein, 35 aa, Artificial Sequence; identical to SEQ ID NO: 29072
  Cyclic GFR-binding peptide
  MOD_RES (2)..(34)..(35): Xaa is C or S

SEQ ID NO: 78250 - protein, 26 aa, Artificial Sequence
  Cyclic GFR-binding peptide
NYHYKLIVNSSDDKYLVSIPSLQTPA

SEQ ID NO: 78251 - protein, 33 aa, Artificial Sequence; identical to SEQ ID NO: 29074
  Cyclic GFR-binding peptide
  MOD_RES (30)..(31): Xaa is C or S

SEQ ID NO: 78252 - protein, 32 aa, Artificial Sequence; identical to SEQ ID NO: 40608
  Cyclic GFR-binding peptide
  MOD_RES (2)..(4): Xaa is C or S

SEQ ID NO: 78253 - protein, 22 aa, Artificial Sequence
  Cyclic GFR-binding peptide
EYKFKIKPTKGILYLISIPELD

SEQ ID NO: 78254 - protein, 28 aa, Artificial Sequence
  Cyclic GFR-binding peptide
  MOD_RES (28)..(28): Xaa is C or S
GERYKKLTPVGMDDFYLVSIANLKTPVX

SEQ ID NO: 78255 - protein, 34 aa, Artificial Sequence; identical to SEQ ID NO: 29078
  Cyclic GFR-binding peptide
  MOD_RES (2)..(4): Xaa is C or S

SEQ ID NO: 78256 - protein, 34 aa, Artificial Sequence; identical to SEQ ID NO: 11558
  Cyclic GFR-binding peptide
  MOD_RES (32)..(33): Xaa is C or S

SEQ ID NO: 78257 - protein, 30 aa, Artificial Sequence; identical to SEQ ID NO: 40616
  Cyclic GFR-binding peptide
  MOD_RES (1)..(3): Xaa is C or S

SEQ ID NO: 78258 - protein, 27 aa, Artificial Sequence
  Cyclic GFR-binding peptide
VMDYHYKLVVNNASDKYLISIPSLRTP

SEQ ID NO: 78259 - protein, 32 aa, Artificial Sequence
  Cyclic GFR-binding peptide
  MOD_RES (29)..(30): Xaa is C or S
VMGRHKRLIIQQKDNYYLMSTASMKTPTXXPG

SEQ ID NO: 78260 - protein, 27 aa, Artificial Sequence
  Cyclic GFR-binding peptide
RVVMNRYKKLIVNSSDDFYLVSIANLK

SEQ ID NO: 78261 - protein, 37 aa, Artificial Sequence; identical to SEQ ID NO: 29086
  Cyclic GFR-binding peptide
  MOD_RES (1)..(3)..(35): Xaa is C or S

SEQ ID NO: 78262 - protein, 24 aa, Artificial Sequence
  Cyclic GFR-binding peptide
EVIMEYKFKLLVRGNDLYLMSIPE

SEQ ID NO: 78263 - protein, 34 aa, Artificial Sequence
  Cyclic GFR-binding peptide
  MOD_RES (1)..(3): Xaa is C or S
XGXRDVVMGRHKRLIIQQKDNYYLMSTASMKTPT

SEQ ID NO: 78264 - protein, 25 aa, Artificial Sequence
  Cyclic GFR-binding peptide
VMDRHKRLVVNNASDYYLISTASLR

SEQ ID NO: 78265 - protein, 33 aa, Artificial Sequence; identical to SEQ ID NO: 992
  Cyclic GFR-binding peptide
  MOD_RES (32)..(32): Xaa is C or S

SEQ ID NO: 78266 - protein, 37 aa, Artificial Sequence
  Cyclic GFR-binding peptide
  MOD_RES (2)..(34)..(35): Xaa is C or S
GXSEVVMDRHKRLVVNNASDYYLISTASLRTPVXXTP

SEQ ID NO: 78267 - protein, 40 aa, Artificial Sequence; identical to SEQ ID NO: 993
  Cyclic GFR-binding peptide
  MOD_RES (2)..(4)..(36)..(37): Xaa is C or S

SEQ ID NO: 78268 - protein, 29 aa, Artificial Sequence
  Cyclic GFR-binding peptide
VVMDRYKKLVVNNASDFYLISIANLRTPV

SEQ ID NO: 78269 - protein, 32 aa, Artificial Sequence; identical to SEQ ID NO: 997
  Cyclic GFR-binding peptide
  MOD_RES (29)..(30): Xaa is C or S

SEQ ID NO: 78270 - protein, 33 aa, Artificial Sequence; identical to SEQ ID NO: 998
  Cyclic GFR-binding peptide
  MOD_RES (29)..(30): Xaa is C or S

SEQ ID NO: 78271 - protein, 23 aa, Artificial Sequence
  Cyclic GFR-binding peptide
RHKRLIIQQKDNYYLMSTASMKT

SEQ ID NO: 78272 - protein, 37 aa, Artificial Sequence
  Cyclic GFR-binding peptide
  MOD_RES (2)..(4)..(36)..(37): Xaa is C or S
SXGXRDVVMGRHKRLIIQQKDNYYLMSTASMKTPTXX

SEQ ID NO: 78273 - protein, 30 aa, Artificial Sequence; identical to SEQ ID NO: 1001
  Cyclic GFR-binding peptide
  MOD_RES (26)..(27): Xaa is C or S

SEQ ID NO: 78274 - protein, 33 aa, Artificial Sequence
  Cyclic GFR-binding peptide
  MOD_RES (2)..(4): Xaa is C or S
LXGXEEVIMRHKRLLLVRGNDYYLMSTASTKVP

SEQ ID NO: 78275 - protein, 26 aa, Artificial Sequence
  Cyclic GFR-binding peptide
MNPIKGYIVNSSDDFYLVNIPSLKTP

SEQ ID NO: 78276 - protein, 27 aa, Artificial Sequence
  Cyclic GFR-binding peptide
TMNRYKKLVVNKNEDFYLISIANMKEP

SEQ ID NO: 78277 - protein, 37 aa, Artificial Sequence
  Cyclic GFR-binding peptide
  MOD_RES (1)..(3)..(34)..(35): Xaa is C or S
XGXEEVIMEYKFKLLVRGNDLYLMSIPETKVPAXXTS

SEQ ID NO: 78278 - protein, 31 aa, Artificial Sequence
  Cyclic GFR-binding peptide
  MOD_RES (1)..(3): Xaa is C or S
XKXSKVVMPIKGYVKPTRGVFYLINIPSLDQ

SEQ ID NO: 78279 - protein, 26 aa, Artificial Sequence
  Cyclic GFR-binding peptide
RVIMRHKRLVKPKRGVYYLISTASLA

SEQ ID NO: 78280 - protein, 26 aa, Artificial Sequence
  Cyclic GFR-binding peptide
KVVMNPIKGYIVNNSSDFYLVNIPSL

SEQ ID NO: 78281 - protein, 41 aa, Artificial Sequence; identical to SEQ ID NO: 40646
  Cyclic GFR-binding peptide
  MOD_RES (1)..(3)..(35)..(36): Xaa is C or S

SEQ ID NO: 78282 - protein, 38 aa, Artificial Sequence
  Cyclic GFR-binding peptide
  MOD_RES (1)..(3)..(35)..(36): Xaa is C or S
XGXESVAMGRHKRLYTVVGKDYYLISTASLKTPVXXAK

SEQ ID NO: 78283 - protein, 27 aa, Artificial Sequence
  Cyclic GFR-binding peptide
  MOD_RES (26)..(27): Xaa is C or S
YHYKLVKPTRGVKYLISIPSLDQPVXX

SEQ ID NO: 78284 - protein, 31 aa, Artificial Sequence; identical to SEQ ID NO: 1013
  Cyclic GFR-binding peptide
  MOD_RES (26)..(27): Xaa is C or S

SEQ ID NO: 78285 - protein, 26 aa, Artificial Sequence
  Cyclic GFR-binding peptide
MDPIKGYVVNNASDFYLINIPSLRTP

SEQ ID NO: 78286 - protein, 28 aa, Artificial Sequence
  Cyclic GFR-binding peptide
  MOD_RES (26)..(27): Xaa is C or S
RYKKLVVNNASDFYLISIANLRTPVXXT

SEQ ID NO: 78287 - protein, 37 aa, Artificial Sequence; identical to SEQ ID NO: 1016
  Cyclic GFR-binding peptide
  MOD_RES (32)..(33): Xaa is C or S

SEQ ID NO: 78288 - protein, 33 aa, Artificial Sequence; identical to SEQ ID NO: 1019
  Cyclic GFR-binding peptide
  MOD_RES (27)..(28): Xaa is C or S

SEQ ID NO: 78289 - protein, 40 aa, Artificial Sequence; identical to SEQ ID NO: 1020
  Cyclic GFR-binding peptide
  MOD_RES (1)..(3)..(34)..(35): Xaa is C or S

SEQ ID NO: 78290 - protein, 28 aa, Artificial Sequence
  Cyclic GFR-binding peptide
  MOD_RES (26)..(27): Xaa is C or S
PIKGYIKPTKGIFYLINIPSLDQSVXXP

SEQ ID NO: 78291 - protein, 31 aa, Artificial Sequence
  Cyclic GFR-binding peptide
  MOD_RES (1)..(3): Xaa is C or S
XGXEEVIMYHYKLLLVRGNDKYLMSIPSTKV

SEQ ID NO: 78292 - protein, 33 aa, Artificial Sequence; identical to SEQ ID NO: 1023
  Cyclic GFR-binding peptide
  MOD_RES (29)..(30): Xaa is C or S

SEQ ID NO: 78293 - protein, 37 aa, Artificial Sequence; identical to SEQ ID NO: 1024
  Cyclic GFR-binding peptide
  MOD_RES (1)..(3)..(35)..(36): Xaa is C or S

SEQ ID NO: 78294 - protein, 25 aa, Artificial Sequence
  Cyclic GFR-binding peptide
KVIMRYKKLIKPTKGIFYLISIANL

SEQ ID NO: 78295 - protein, 41 aa, Artificial Sequence; identical to SEQ ID NO: 1026
  Cyclic GFR-binding peptide
  MOD_RES (2)..(4)..(36)..(37): Xaa is C or S

SEQ ID NO: 78296 - protein, 36 aa, Artificial Sequence
  Cyclic GFR-binding peptide
  MOD_RES (31)..(32): Xaa is C or S
EEVIMEYKFKLLVRGNDLYLMSIPETKVPAXXTSPV

SEQ ID NO: 78297 - protein, 37 aa, Artificial Sequence
  Cyclic GFR-binding peptide
  MOD_RES (1)..(3)..(34)..(35): Xaa is C or S
XKXSRVIMPIKGYVKPKRGVFYLINIPSLAQPVXXPA

SEQ ID NO: 78298 - protein, 26 aa, Artificial Sequence
  Cyclic GFR-binding peptide
GEYKFKIIQQKDNLYLMSIPEMKTPT

SEQ ID NO: 78299 - protein, 33 aa, Artificial Sequence; identical to SEQ ID NO: 1028
  Cyclic GFR-binding peptide
  MOD_RES (1)..(33): Xaa is C or S

SEQ ID NO: 78300 - protein, 39 aa, Artificial Sequence; identical to SEQ ID NO: 1029
  Cyclic GFR-binding peptide
  MOD_RES (2)..(4)..(35)..(36): Xaa is C or S

SEQ ID NO: 78301 - protein, 22 aa, Artificial Sequence
  Cyclic GFR-binding peptide
IMRHKRLIKPTKGIYYLISTAS

SEQ ID NO: 78302 - protein, 30 aa, Artificial Sequence
  Cyclic GFR-binding peptide
  MOD_RES (28)..(29): Xaa is C or S
MNRYKKLVVNKNEDFYLISIANMKEPVXXP

SEQ ID NO: 78303 - protein, 31 aa, Artificial Sequence
  Cyclic GFR-binding peptide
  MOD_RES (28)..(29): Xaa is C or S
MNRYKKLVVNKNEDFYLISIANMKEPVXXPE

SEQ ID NO: 78304 - protein, 31 aa, Artificial Sequence; identical to SEQ ID NO: 1031
  Cyclic GFR-binding peptide
  MOD_RES (27)..(28): Xaa is C or S

SEQ ID NO: 78305 - protein, 35 aa, Artificial Sequence
  Cyclic GFR-binding peptide
  MOD_RES (1)..(33)..(34): Xaa is C or S
XSEVVMDRHKRLVVNNASDYYLISTASLRTPVXXT

SEQ ID NO: 78306 - protein, 23 aa, Artificial Sequence
  Cyclic GFR-binding peptide
IMYHYKLVKPKRGVKYLISIPSL

SEQ ID NO: 78307 - protein, 40 aa, Artificial Sequence; identical to SEQ ID NO: 1034
  Cyclic GFR-binding peptide
  MOD_RES (2)..(4)..(35)..(36): Xaa is C or S

SEQ ID NO: 78308 - protein, 35 aa, Artificial Sequence; identical to SEQ ID NO: 29120
  Cyclic GFR-binding peptide
  MOD_RES (29)..(30): Xaa is C or S

SEQ ID NO: 78309 - protein, 36 aa, Artificial Sequence
  Cyclic GFR-binding peptide
  MOD_RES (2)..(34)..(35): Xaa is C or S
GXSEVVMDEYKFKVVNNASDLYLISIPELRTPVXXT

SEQ ID NO: 78310 - protein, 27 aa, Artificial Sequence
  Cyclic GFR-binding peptide
VVMNPIKGYIVNSSDDFYLVNIPSLQT

SEQ ID NO: 78311 - protein, 30 aa, Artificial Sequence; identical to SEQ ID NO: 29122
  Cyclic GFR-binding peptide
  MOD_RES (1)..(1): Xaa is C or S

SEQ ID NO: 78312 - protein, 26 aa, Artificial Sequence
  Cyclic GFR-binding peptide
EEYKFKVVKDYEDLYLMSIPELETPV

SEQ ID NO: 78313 - protein, 31 aa, Artificial Sequence
  Cyclic GFR-binding peptide
  MOD_RES (28)..(29): Xaa is C or S
VMPIKGYVKPTRGVFYLINIPSLDQPVXXPS

SEQ ID NO: 78314 - protein, 29 aa, Artificial Sequence
  Cyclic GFR-binding peptide
  MOD_RES (1)..(3): Xaa is C or S
XGXAEVVMDRHKRLVVNNAADYYLISTAS

SEQ ID NO: 78315 - protein, 38 aa, Artificial Sequence; identical to SEQ ID NO: 1041
  Cyclic GFR-binding peptide
  MOD_RES (2)..(34)..(35): Xaa is C or S

SEQ ID NO: 78316 - protein, 34 aa, Artificial Sequence; identical to SEQ ID NO: 40691
  Cyclic GFR-binding peptide
  MOD_RES (29)..(29): Xaa is C or S

SEQ ID NO: 78317 - protein, 31 aa, Artificial Sequence
  Cyclic GFR-binding peptide
  MOD_RES (31)..(31): Xaa is C or S
DVVMGRHKRLIIQQKDNYYLMSTASMKTPTX

SEQ ID NO: 78318 - protein, 31 aa, Artificial Sequence; identical to SEQ ID NO: 40699
  Cyclic GFR-binding peptide
  MOD_RES (1)..(1): Xaa is C or S

SEQ ID NO: 78319 - protein, 29 aa, Artificial Sequence
  Cyclic GFR-binding peptide
  MOD_RES (27)..(28): Xaa is C or S
DEYKFKVVNNASDLYLISIPELRTPVXXT

SEQ ID NO: 78320 - protein, 32 aa, Artificial Sequence; identical to SEQ ID NO: 1050
  Cyclic GFR-binding peptide
  MOD_RES (31)..(31): Xaa is C or S

SEQ ID NO: 78321 - protein, 31 aa, Artificial Sequence; identical to SEQ ID NO: 75304
  Cyclic GFR-binding peptide
  MOD_RES (1)..(3): Xaa is C or S

SEQ ID NO: 78322 - protein, 24 aa, Artificial Sequence
  Cyclic GFR-binding peptide
KVIMPIKGYIKPTKGIFYLINIPS

SEQ ID NO: 78323 - protein, 31 aa, Artificial Sequence
  Cyclic GFR-binding peptide
  MOD_RES (2)..(2): Xaa is C or S
GXSEVVMDEYKFKVVNNASDLYLISIPELRT

SEQ ID NO: 78324 - protein, 29 aa, Artificial Sequence
  Cyclic GFR-binding peptide
  MOD_RES (1)..(1): Xaa is C or S
XSRVVMNYHYKLIVNSSDDKYLVSIPSLK

SEQ ID NO: 78325 - protein, 35 aa, Artificial Sequence; identical to SEQ ID NO: 29145
  Cyclic GFR-binding peptide
  MOD_RES (1)..(34)..(35): Xaa is C or S

SEQ ID NO: 78326 - protein, 24 aa, Artificial Sequence
  Cyclic GFR-binding peptide
MPIKGYVKPTRGVFYLINIPSLDQ

SEQ ID NO: 78327 - protein, 39 aa, Artificial Sequence; identical to SEQ ID NO: 1058
  Cyclic GFR-binding peptide
  MOD_RES (1)..(33)..(34): Xaa is C or S

SEQ ID NO: 78328 - protein, 34 aa, Artificial Sequence; identical to SEQ ID NO: 75308
  Cyclic GFR-binding peptide
  MOD_RES (32)..(33): Xaa is C or S

SEQ ID NO: 78329 - protein, 35 aa, Artificial Sequence; identical to SEQ ID NO: 1061
  Cyclic GFR-binding peptide
  MOD_RES (30)..(31): Xaa is C or S

SEQ ID NO: 78330 - protein, 28 aa, Artificial Sequence
  Cyclic GFR-binding peptide
VVMDEYKFKVVNNASDLYLISIPELRTP

SEQ ID NO: 78331 - protein, 32 aa, Artificial Sequence; identical to SEQ ID NO: 1062
  Cyclic GFR-binding peptide
  MOD_RES (28)..(29): Xaa is C or S

SEQ ID NO: 78332 - protein, 31 aa, Artificial Sequence; identical to SEQ ID NO: 1063
  Cyclic GFR-binding peptide
  MOD_RES (2)..(2): Xaa is C or S

SEQ ID NO: 78333 - protein, 23 aa, Artificial Sequence
  Cyclic GFR-binding peptide
IMRHKRLVKPKRGVYYLISTASL

SEQ ID NO: 78334 - protein, 38 aa, Artificial Sequence; identical to SEQ ID NO: 1065
  Cyclic GFR-binding peptide
  MOD_RES (1)..(3)..(35)..(36): Xaa is C or S

SEQ ID NO: 78335 - protein, 30 aa, Artificial Sequence; identical to SEQ ID NO: 29154
  Cyclic GFR-binding peptide

SEQ ID NO: 78336 - protein, 28 aa, Artificial Sequence
  Cyclic GFR-binding peptide
GEVVMEYHYKLVVKDYEDKYLMSIPSLE

SEQ ID NO: 78337 - protein, 37 aa, Artificial Sequence; identical to SEQ ID NO: 40714
  Cyclic GFR-binding peptide
  MOD_RES (1)..(33)..(34): Xaa is C or S

SEQ ID NO: 78338 - protein, 41 aa, Artificial Sequence; identical to SEQ ID NO: 40715
  Cyclic GFR-binding peptide
  MOD_RES (2)..(4)..(36)..(37): Xaa is C or S

SEQ ID NO: 78339 - protein, 32 aa, Artificial Sequence
  Cyclic GFR-binding peptide
  MOD_RES (2)..(2): Xaa is C or S
AXSEVTMNRHKRLVVNKNEDYYLISTASMKEP

SEQ ID NO: 78340 - protein, 26 aa, Artificial Sequence
  Cyclic GFR-binding peptide
MPIKGYVKPKRGVFYLINIPSLAQPV

SEQ ID NO: 78341 - protein, 33 aa, Artificial Sequence; identical to SEQ ID NO: 40719
  Cyclic GFR-binding peptide
  MOD_RES (2)..(33): Xaa is C or S

SEQ ID NO: 78342 - protein, 37 aa, Artificial Sequence
  Cyclic GFR-binding peptide
  MOD_RES (1)..(33)..(34): Xaa is C or S
XSEVVMDRHKRLVVNNASDYYLISTASLRTPVXXTPP

SEQ ID NO: 78343 - protein, 33 aa, Artificial Sequence; identical to SEQ ID NO: 29157
  Cyclic GFR-binding peptide
  MOD_RES (29)..(30): Xaa is C or S

SEQ ID NO: 78344 - protein, 22 aa, Artificial Sequence
  Cyclic GFR-binding peptide
IMYHYKLIKPTKGIKYLISIPS

SEQ ID NO: 78345 - protein, 31 aa, Artificial Sequence; identical to SEQ ID NO: 1072
  Cyclic GFR-binding peptide
  MOD_RES (26)..(27): Xaa is C or S

SEQ ID NO: 78346 - protein, 32 aa, Artificial Sequence; identical to SEQ ID NO: 40721
  Cyclic GFR-binding peptide
  MOD_RES (26)..(26): Xaa is C or S

SEQ ID NO: 78347 - protein, 38 aa, Artificial Sequence
  Cyclic GFR-binding peptide
  MOD_RES (1)..(33)..(34): Xaa is C or S
XSEVTMNYHYKLVVNKNEDKYLISIPSMKEPVXXPEPI

SEQ ID NO: 78348 - protein, 32 aa, Artificial Sequence; identical to SEQ ID NO: 1073
  Cyclic GFR-binding peptide
  MOD_RES (2)..(2): Xaa is C or S

SEQ ID NO: 78349 - protein, 30 aa, Artificial Sequence; identical to SEQ ID NO: 29159
  Cyclic GFR-binding peptide
  MOD_RES (1)..(3): Xaa is C or S

SEQ ID NO: 78350 - protein, 25 aa, Artificial Sequence
  Cyclic GFR-binding peptide
MNYHYKLIVNSSDDKYLVSIPSLQT

SEQ ID NO: 78351 - protein, 27 aa, Artificial Sequence
  Cyclic GFR-binding peptide
VIMPIKGYLLVRGNDFYLMNIPSTKVP

SEQ ID NO: 78352 - protein, 30 aa, Artificial Sequence; identical to SEQ ID NO: 40732
  Cyclic GFR-binding peptide
  MOD_RES (30)..(30): Xaa is C or S

SEQ ID NO: 78353 - protein, 32 aa, Artificial Sequence; identical to SEQ ID NO: 1079
  Cyclic GFR-binding peptide
  MOD_RES (26)..(27): Xaa is C or S

SEQ ID NO: 78354 - protein, 28 aa, Artificial Sequence
  Cyclic GFR-binding peptide
MGERYKKLTPVGMDDFYLVSIANLKTPV

SEQ ID NO: 78355 - protein, 24 aa, Artificial Sequence
  Cyclic GFR-binding peptide
MNYHYKLIVNNSSDKYLVSIPSLK

SEQ ID NO: 78356 - protein, 35 aa, Artificial Sequence; identical to SEQ ID NO: 1086
  Cyclic GFR-binding peptide
  MOD_RES (2)..(34): Xaa is C or S

SEQ ID NO: 78357 - protein, 31 aa, Artificial Sequence; identical to SEQ ID NO: 40740
  Cyclic GFR-binding peptide
  MOD_RES (1)..(3): Xaa is C or S

SEQ ID NO: 78358 - protein, 35 aa, Artificial Sequence; identical to SEQ ID NO: 11662
  Cyclic GFR-binding peptide
  MOD_RES (1)..(33)..(34): Xaa is C or S

SEQ ID NO: 78359 - protein, 31 aa, Artificial Sequence
  Cyclic GFR-binding peptide
  MOD_RES (2)..(2): Xaa is C or S
KXSRVIMPIKGYVKPKRGVFYLINIPSLAQP

SEQ ID NO: 78360 - protein, 37 aa, Artificial Sequence; identical to SEQ ID NO: 29172
  Cyclic GFR-binding peptide
  MOD_RES (2)..(4)..(36)..(37): Xaa is C or S

SEQ ID NO: 78361 - protein, 36 aa, Artificial Sequence; identical to SEQ ID NO: 1088
  Cyclic GFR-binding peptide
  MOD_RES (1)..(33)..(34): Xaa is C or S

SEQ ID NO: 78362 - protein, 27 aa, Artificial Sequence
  Cyclic GFR-binding peptide
EVTMNPIKGYVVNKNEDFYLINIPSMK

SEQ ID NO: 78363 - protein, 29 aa, Artificial Sequence
  Cyclic GFR-binding peptide
  MOD_RES (2)..(2): Xaa is C or S
KXSKVIMPIKGYIKPTKGIFYLINIPSLD

SEQ ID NO: 78364 - protein, 32 aa, Artificial Sequence; identical to SEQ ID NO: 75331
  Cyclic GFR-binding peptide
  MOD_RES (30)..(31): Xaa is C or S

SEQ ID NO: 78365 - protein, 35 aa, Artificial Sequence; identical to SEQ ID NO: 29177
  Cyclic GFR-binding peptide
  MOD_RES (1)..(3)..(34)..(35): Xaa is C or S

SEQ ID NO: 78366 - protein, 30 aa, Artificial Sequence
  Cyclic GFR-binding peptide
  MOD_RES (27)..(28): Xaa is C or S
MPIKGYVKPTRGVFYLINIPSLDQPVXXPS

SEQ ID NO: 78367 - protein, 34 aa, Artificial Sequence; identical to SEQ ID NO: 1091
  Cyclic GFR-binding peptide
  MOD_RES (32)..(33): Xaa is C or S

SEQ ID NO: 78368 - protein, 35 aa, Artificial Sequence
  Cyclic GFR-binding peptide
  MOD_RES (29)..(30): Xaa is C or S
VIMYHYKLLLVRGNDKYLMSIPSTKVPAXXTSPVR

SEQ ID NO: 78369 - protein, 36 aa, Artificial Sequence; identical to SEQ ID NO: 1094
  Cyclic GFR-binding peptide
  MOD_RES (30)..(31): Xaa is C or S

SEQ ID NO: 78370 - protein, 34 aa, Artificial Sequence
  Cyclic GFR-binding peptide
  MOD_RES (1)..(33)..(34): Xaa is C or S
XRDVVMGYHYKLIIQQKDNKYLMSIPSMKTPTXX

SEQ ID NO: 78371 - protein, 33 aa, Artificial Sequence; identical to SEQ ID NO: 1096
  Cyclic GFR-binding peptide
  MOD_RES (2)..(2): Xaa is C or S

SEQ ID NO: 78372 - protein, 36 aa, Artificial Sequence; identical to SEQ ID NO: 1098
  Cyclic GFR-binding peptide
  MOD_RES (1)..(3)..(35)..(36): Xaa is C or S

SEQ ID NO: 78373 - protein, 30 aa, Artificial Sequence; identical to SEQ ID NO: 40753
  Cyclic GFR-binding peptide
  MOD_RES (27)..(28): Xaa is C or S

SEQ ID NO: 78374 - protein, 30 aa, Artificial Sequence; identical to SEQ ID NO: 1099
  Cyclic GFR-binding peptide
  MOD_RES (2)..(4): Xaa is C or S

SEQ ID NO: 78375 - protein, 28 aa, Artificial Sequence
  Cyclic GFR-binding peptide
KVVMNYHYKLIVNNSSDKYLVSIPSLKT

SEQ ID NO: 78376 - protein, 37 aa, Artificial Sequence; identical to SEQ ID NO: 1101
  Cyclic GFR-binding peptide
  MOD_RES (2)..(33)..(34): Xaa is C or S

SEQ ID NO: 78377 - protein, 30 aa, Artificial Sequence
  Cyclic GFR-binding peptide
  MOD_RES (30)..(30): Xaa is C or S
VVMGRHKRLIIQQKDNYYLMSTASMKTPTX

SEQ ID NO: 78378 - protein, 22 aa, Artificial Sequence
  Cyclic GFR-binding peptide
RHKRLYTVVGKDYYLISTASLK

SEQ ID NO: 78379 - protein, 36 aa, Artificial Sequence; identical to SEQ ID NO: 75341
  Cyclic GFR-binding peptide
  MOD_RES (30)..(31): Xaa is C or S

SEQ ID NO: 78380 - protein, 28 aa, Artificial Sequence
  Cyclic GFR-binding peptide
VIMRYKKLLLVRGNDFYLMSIANTKVPA

SEQ ID NO: 78381 - protein, 28 aa, Artificial Sequence
  Cyclic GFR-binding peptide
VVMNYHYKLIVNNSSDKYLVSIPSLKTP

SEQ ID NO: 78382 - protein, 26 aa, Artificial Sequence
  Cyclic GFR-binding peptide
MRHKRLLLVRGNDYYLMSTASTKVPA

SEQ ID NO: 78383 - protein, 24 aa, Artificial Sequence
  Cyclic GFR-binding peptide
VIMRYKKLIKPTKGIFYLISIANL

SEQ ID NO: 78384 - protein, 30 aa, Artificial Sequence
  Cyclic GFR-binding peptide
  MOD_RES (30)..(30): Xaa is C or S
VVMGYHYKLIIQQKDNKYLMSIPSMKTPTX

SEQ ID NO: 78385 - protein, 36 aa, Artificial Sequence; identical to SEQ ID NO: 29197
  Cyclic GFR-binding peptide
  MOD_RES (2)..(4)..(36): Xaa is C or S

SEQ ID NO: 78386 - protein, 25 aa, Artificial Sequence
  Cyclic GFR-binding peptide
VMNYHYKLIVNNSSDKYLVSIPSLK

SEQ ID NO: 78387 - protein, 33 aa, Artificial Sequence; identical to SEQ ID NO: 40760
  Cyclic GFR-binding peptide
  MOD_RES (29)..(30): Xaa is C or S

SEQ ID NO: 78388 - protein, 27 aa, Artificial Sequence
  Cyclic GFR-binding peptide
RDVVMGEYKFKIIQQKDNLYLMSIPEM

SEQ ID NO: 78389 - protein, 21 aa, Artificial Sequence
  Cyclic GFR-binding peptide
PIKGYVVKDYEDFYLMNIPSL

SEQ ID NO: 78390 - protein, 26 aa, Artificial Sequence
  Cyclic GFR-binding peptide
RDVVMGYHYKLIIQQKDNKYLMSIPS

SEQ ID NO: 78391 - protein, 33 aa, Artificial Sequence; identical to SEQ ID NO: 75346
  Cyclic GFR-binding peptide
  MOD_RES (1)..(3): Xaa is C or S

SEQ ID NO: 78392 - protein, 35 aa, Artificial Sequence; identical to SEQ ID NO: 1113
  Cyclic GFR-binding peptide
  MOD_RES (2)..(34)..(35): Xaa is C or S

SEQ ID NO: 78393 - protein, 33 aa, Artificial Sequence; identical to SEQ ID NO: 75347
  Cyclic GFR-binding peptide
  MOD_RES (31)..(32): Xaa is C or S

SEQ ID NO: 78394 - protein, 33 aa, Artificial Sequence; identical to SEQ ID NO: 1116
  Cyclic GFR-binding peptide
  MOD_RES (31)..(32): Xaa is C or S

SEQ ID NO: 78395 - protein, 36 aa, Artificial Sequence; identical to SEQ ID NO: 1117
  Cyclic GFR-binding peptide
  MOD_RES (32)..(33): Xaa is C or S

SEQ ID NO: 78396 - protein, 23 aa, Artificial Sequence
  Cyclic GFR-binding peptide
RHKRLTPVGMDDYYLVSTASLKT

SEQ ID NO: 78397 - protein, 36 aa, Artificial Sequence; identical to SEQ ID NO: 1119
  Cyclic GFR-binding peptide
  MOD_RES (30)..(31): Xaa is C or S

SEQ ID NO: 78398 - protein, 39 aa, Artificial Sequence
  Cyclic GFR-binding peptide
  MOD_RES (1)..(33)..(34): Xaa is C or S
XSEVTMNEYKFKVVNKNEDLYLISIPEMKEPVXXPEPIG

SEQ ID NO: 78399 - protein, 34 aa, Artificial Sequence; identical to SEQ ID NO: 40780
  Cyclic GFR-binding peptide
  MOD_RES (29)..(30): Xaa is C or S

SEQ ID NO: 78400 - protein, 29 aa, Artificial Sequence
  Cyclic GFR-binding peptide
  MOD_RES (26)..(27): Xaa is C or S
PIKGYVKPTRGVFYLINIPSLDQPVXXPS

SEQ ID NO: 78401 - protein, 27 aa, Artificial Sequence
  Cyclic GFR-binding peptide
VIMYHYKLVKPKRGVKYLISIPSLAQP

SEQ ID NO: 78402 - protein, 32 aa, Artificial Sequence
  Cyclic GFR-binding peptide
  MOD_RES (29)..(30): Xaa is C or S
VMGEYKFKIIQQKDNLYLMSIPEMKTPTXXPG

SEQ ID NO: 78403 - protein, 29 aa, Artificial Sequence
  Cyclic GFR-binding peptide
  MOD_RES (29)..(29): Xaa is C or S
VMNEYKFKIVNSSDDLYLVSIPELQTPAX

SEQ ID NO: 78404 - protein, 29 aa, Artificial Sequence
  Cyclic GFR-binding peptide
SRVVMNEYKFKIVNSSDDLYLVSIPELKT

SEQ ID NO: 78405 - protein, 29 aa, Artificial Sequence
  Cyclic GFR-binding peptide
  MOD_RES (28)..(29): Xaa is C or S
MNRHKRLVVNKNEDYYLISTASMKEPVXX

SEQ ID NO: 78406 - protein, 28 aa, Artificial Sequence
  Cyclic GFR-binding peptide
  MOD_RES (2)..(2): Xaa is C or S
KXSRVIMYHYKLVKPKRGVKYLISIPSL

SEQ ID NO: 78407 - protein, 26 aa, Artificial Sequence
  Cyclic GFR-binding peptide
NRHKRLVVNKNEDYYLISTASMKEPV

SEQ ID NO: 78408 - protein, 36 aa, Artificial Sequence; identical to SEQ ID NO: 1127
  Cyclic GFR-binding peptide
  MOD_RES (2)..(4)..(36): Xaa is C or S

SEQ ID NO: 78409 - protein, 32 aa, Artificial Sequence
  Cyclic GFR-binding peptide
  MOD_RES (31)..(32): Xaa is C or S
EVTMNEYKFKVVNKNEDLYLISIPEMKEPVXX

SEQ ID NO: 78410 - protein, 31 aa, Artificial Sequence; identical to SEQ ID NO: 29215
  Cyclic GFR-binding peptide
  MOD_RES (28)..(29): Xaa is C or S

SEQ ID NO: 78411 - protein, 40 aa, Artificial Sequence; identical to SEQ ID NO: 1128
  Cyclic GFR-binding peptide
  MOD_RES (1)..(3)..(35)..(36): Xaa is C or S

SEQ ID NO: 78412 - protein, 24 aa, Artificial Sequence
  Cyclic GFR-binding peptide
DEYKFKVVNNASDLYLISIPELRT

SEQ ID NO: 78413 - protein, 27 aa, Artificial Sequence
  Cyclic GFR-binding peptide
  MOD_RES (27)..(27): Xaa is C or S
GRYKKLYTVVGKDFYLISIANLKTPVX

SEQ ID NO: 78414 - protein, 32 aa, Artificial Sequence; identical to SEQ ID NO: 1132
  Cyclic GFR-binding peptide
  MOD_RES (28)..(29): Xaa is C or S

SEQ ID NO: 78415 - protein, 25 aa, Artificial Sequence
  Cyclic GFR-binding peptide
RVVMNRYKKLIVNSSDDFYLVSIAN

SEQ ID NO: 78416 - protein, 40 aa, Artificial Sequence; identical to SEQ ID NO: 1134
  Cyclic GFR-binding peptide
  MOD_RES (1)..(3)..(35)..(36): Xaa is C or S

SEQ ID NO: 78417 - protein, 26 aa, Artificial Sequence
  Cyclic GFR-binding peptide
RVVMNPIKGYIVNSSDDFYLVNIPSL

SEQ ID NO: 78418 - protein, 34 aa, Artificial Sequence; identical to SEQ ID NO: 1136
  Cyclic GFR-binding peptide
  MOD_RES (32)..(33): Xaa is C or S

SEQ ID NO: 78419 - protein, 39 aa, Artificial Sequence; identical to SEQ ID NO: 1140
  Cyclic GFR-binding peptide
  MOD_RES (2)..(35)..(36): Xaa is C or S

SEQ ID NO: 78420 - protein, 35 aa, Artificial Sequence; identical to SEQ ID NO: 29232
  Cyclic GFR-binding peptide
  MOD_RES (29)..(30): Xaa is C or S

SEQ ID NO: 78421 - protein, 29 aa, Artificial Sequence
  Cyclic GFR-binding peptide
  MOD_RES (28)..(29): Xaa is C or S
IMRYKKLVKPKRGVFYLISIANLAQPVXX

SEQ ID NO: 78422 - protein, 35 aa, Artificial Sequence; identical to SEQ ID NO: 1142
  Cyclic GFR-binding peptide
  MOD_RES (1)..(33)..(34): Xaa is C or S

SEQ ID NO: 78423 - protein, 33 aa, Artificial Sequence; identical to SEQ ID NO: 29236
  Cyclic GFR-binding peptide
  MOD_RES (1)..(3): Xaa is C or S

SEQ ID NO: 78424 - protein, 32 aa, Artificial Sequence; identical to SEQ ID NO: 40807
  Cyclic GFR-binding peptide
  MOD_RES (1)..(3): Xaa is C or S

SEQ ID NO: 78425 - protein, 27 aa, Artificial Sequence
  Cyclic GFR-binding peptide
KVIMRYKKLIKPTKGIFYLISIANLDQ

SEQ ID NO: 78426 - protein, 35 aa, Artificial Sequence; identical to SEQ ID NO: 1144
  Cyclic GFR-binding peptide
  MOD_RES (31)..(31): Xaa is C or S

SEQ ID NO: 78427 - protein, 25 aa, Artificial Sequence
  Cyclic GFR-binding peptide
VIMRHKRLIKPTKGIYYLISTASLD

SEQ ID NO: 78428 - protein, 30 aa, Artificial Sequence; identical to SEQ ID NO: 29239
  Cyclic GFR-binding peptide

SEQ ID NO: 78429 - protein, 25 aa, Artificial Sequence
  Cyclic GFR-binding peptide
EVVMDPIKGYVVNNASDFYLINIPS

SEQ ID NO: 78430 - protein, 32 aa, Artificial Sequence; identical to SEQ ID NO: 1147
  Cyclic GFR-binding peptide
  MOD_RES (27)..(27): Xaa is C or S

SEQ ID NO: 78431 - protein, 37 aa, Artificial Sequence; identical to SEQ ID NO: 75368
  Cyclic GFR-binding peptide
  MOD_RES (1)..(3)..(35)..(36): Xaa is C or S

SEQ ID NO: 78432 - protein, 31 aa, Artificial Sequence; identical to SEQ ID NO: 1150
  Cyclic GFR-binding peptide
  MOD_RES (30)..(31): Xaa is C or S

SEQ ID NO: 78433 - protein, 29 aa, Artificial Sequence
  Cyclic GFR-binding peptide
  MOD_RES (26)..(27): Xaa is C or S
RHKRLLLVRGNDYYLMSTASTKVPAXXTS

SEQ ID NO: 78434 - protein, 36 aa, Artificial Sequence
  Cyclic GFR-binding peptide
  MOD_RES (31)..(32): Xaa is C or S
EVTMNRHKRLVVNKNEDYYLISTASMKEPVXXPEPI

SEQ ID NO: 78435 - protein, 34 aa, Artificial Sequence
  Cyclic GFR-binding peptide
  MOD_RES (28)..(29): Xaa is C or S
IMPIKGYVKPKRGVFYLINIPSLAQPVXXPAASA

SEQ ID NO: 78436 - protein, 23 aa, Artificial Sequence
  Cyclic GFR-binding peptide
MNPIKGYIVNNSSDFYLVNIPSL

SEQ ID NO: 78437 - protein, 28 aa, Artificial Sequence
  Cyclic GFR-binding peptide
  MOD_RES (2)..(2): Xaa is C or S
GXSEVVMDRHKRLVVNNASDYYLISTAS

SEQ ID NO: 78438 - protein, 38 aa, Artificial Sequence; identical to SEQ ID NO: 1156
  Cyclic GFR-binding peptide
  MOD_RES (2)..(4)..(35)..(36): Xaa is C or S

SEQ ID NO: 78439 - protein, 30 aa, Artificial Sequence; identical to SEQ ID NO: 1158
  Cyclic GFR-binding peptide
  MOD_RES (27)..(28): Xaa is C or S

SEQ ID NO: 78440 - protein, 33 aa, Artificial Sequence; identical to SEQ ID NO: 40821
  Cyclic GFR-binding peptide
  MOD_RES (31)..(32): Xaa is C or S

SEQ ID NO: 78441 - protein, 41 aa, Artificial Sequence; identical to SEQ ID NO: 29249
  Cyclic GFR-binding peptide
  MOD_RES (2)..(4)..(36)..(37): Xaa is C or S

SEQ ID NO: 78442 - protein, 38 aa, Artificial Sequence; identical to SEQ ID NO: 29252
  Cyclic GFR-binding peptide
  MOD_RES (32)..(33): Xaa is C or S

SEQ ID NO: 78443 - protein, 30 aa, Artificial Sequence
  Cyclic GFR-binding peptide
  MOD_RES (1)..(1): Xaa is C or S
XEEVIMEYKFKLLVRGNDLYLMSIPETKVP

SEQ ID NO: 78444 - protein, 29 aa, Artificial Sequence
  Cyclic GFR-binding peptide
AVSMGERHKRLTPVGMDDYYLVSTASLKT

SEQ ID NO: 78445 - protein, 31 aa, Artificial Sequence; identical to SEQ ID NO: 40827
  Cyclic GFR-binding peptide
  MOD_RES (29)..(30): Xaa is C or S

SEQ ID NO: 78446 - protein, 28 aa, Artificial Sequence
  Cyclic GFR-binding peptide
VMNPIKGYIVNSSDDFYLVNIPSLQTPA

SEQ ID NO: 78447 - protein, 27 aa, Artificial Sequence
  Cyclic GFR-binding peptide
RDVVMGRYKKLIIQQKDNFYLMSIANM

SEQ ID NO: 78448 - protein, 26 aa, Artificial Sequence
  Cyclic GFR-binding peptide
AEVVMDRYKKLVVNNAADFYLISIAN

SEQ ID NO: 78449 - protein, 21 aa, Artificial Sequence
  Cyclic GFR-binding peptide
EYKFKVKPTRGVLYLISIPEL

SEQ ID NO: 78450 - protein, 38 aa, Artificial Sequence; identical to SEQ ID NO: 40839
  Cyclic GFR-binding peptide
  MOD_RES (1)..(3)..(35)..(36): Xaa is C or S

SEQ ID NO: 78451 - protein, 34 aa, Artificial Sequence; identical to SEQ ID NO: 1174
  Cyclic GFR-binding peptide
  MOD_RES (2)..(4): Xaa is C or S

SEQ ID NO: 78452 - protein, 27 aa, Artificial Sequence
  Cyclic GFR-binding peptide
GEVVMDRYKKLVVKENEDFYLMSIANL

SEQ ID NO: 78453 - protein, 26 aa, Artificial Sequence
  Cyclic GFR-binding peptide
VVMNRHKRLIVNSSDDYYLVSTASLK

SEQ ID NO: 78454 - protein, 34 aa, Artificial Sequence; identical to SEQ ID NO: 40841
  Cyclic GFR-binding peptide
  MOD_RES (28)..(29): Xaa is C or S

SEQ ID NO: 78455 - protein, 27 aa, Artificial Sequence
  Cyclic GFR-binding peptide
  MOD_RES (27)..(27): Xaa is C or S
DRYKKLVVKENEDFYLMSIANLETPVX

SEQ ID NO: 78456 - protein, 40 aa, Artificial Sequence
  Cyclic GFR-binding peptide
  MOD_RES (2)..(34)..(35): Xaa is C or S
AXSEVTMNEYKFKVVNKNEDLYLISIPEMKEPVXXPEPIG

SEQ ID NO: 78457 - protein, 36 aa, Artificial Sequence; identical to SEQ ID NO: 29273
  Cyclic GFR-binding peptide
  MOD_RES (2)..(34)..(35): Xaa is C or S

SEQ ID NO: 78458 - protein, 37 aa, Artificial Sequence; identical to SEQ ID NO: 75387
  Cyclic GFR-binding peptide
  MOD_RES (31)..(32): Xaa is C or S

SEQ ID NO: 78459 - protein, 30 aa, Artificial Sequence; identical to SEQ ID NO: 40849
  Cyclic GFR-binding peptide

SEQ ID NO: 78460 - protein, 37 aa, Artificial Sequence; identical to SEQ ID NO: 29274
  Cyclic GFR-binding peptide
  MOD_RES (2)..(4)..(35)..(36): Xaa is C or S

SEQ ID NO: 78461 - protein, 41 aa, Artificial Sequence
  Cyclic GFR-binding peptide
  MOD_RES (1)..(3)..(35)..(36): Xaa is C or S
XAXSEVTMNEYKFKVVNKNEDLYLISIPEMKEPVXXPEPIG

SEQ ID NO: 78462 - protein, 35 aa, Artificial Sequence
  Cyclic GFR-binding peptide
  MOD_RES (1)..(32)..(33): Xaa is C or S
XSRVIMPIKGYVKPKRGVFYLINIPSLAQPVXXPA

SEQ ID NO: 78463 - protein, 28 aa, Artificial Sequence
  Cyclic GFR-binding peptide
  MOD_RES (1)..(1): Xaa is C or S
XGEVVMDPIKGYVVKENEDFYLMNIPSL

SEQ ID NO: 78464 - protein, 25 aa, Artificial Sequence
  Cyclic GFR-binding peptide
GEPIKGYTPVGMDDFYLVNIPSLKT

SEQ ID NO: 78465 - protein, 29 aa, Artificial Sequence
  Cyclic GFR-binding peptide
KVVMEYKFKVKPTRGVLYLISIPELDQPV

SEQ ID NO: 78466 - protein, 35 aa, Artificial Sequence; identical to SEQ ID NO: 1183
  Cyclic GFR-binding peptide
  MOD_RES (31)..(32): Xaa is C or S

SEQ ID NO: 78467 - protein, 29 aa, Artificial Sequence
  Cyclic GFR-binding peptide
  MOD_RES (1)..(3): Xaa is C or S
XGXEEVIMEYKFKLLVRGNDLYLMSIPET

SEQ ID NO: 78468 - protein, 28 aa, Artificial Sequence
  Cyclic GFR-binding peptide
  MOD_RES (28)..(28): Xaa is C or S
MNRYKKLIVNNSSDFYLVSIANLKTPAX

SEQ ID NO: 78469 - protein, 27 aa, Artificial Sequence
  Cyclic GFR-binding peptide
IMEYKFKVKPKRGVLYLISIPELAQPV

SEQ ID NO: 78470 - protein, 29 aa, Artificial Sequence
  Cyclic GFR-binding peptide
  MOD_RES (26)..(27): Xaa is C or S
RHKRLVVKENEDYYLMSTASLETPVXXAK

SEQ ID NO: 78471 - protein, 30 aa, Artificial Sequence; identical to SEQ ID NO: 29298
  Cyclic GFR-binding peptide
  MOD_RES (26)..(27): Xaa is C or S

SEQ ID NO: 78472 - protein, 32 aa, Artificial Sequence; identical to SEQ ID NO: 1199
  Cyclic GFR-binding peptide
  MOD_RES (2)..(4): Xaa is C or S

SEQ ID NO: 78473 - protein, 39 aa, Artificial Sequence
  Cyclic GFR-binding peptide
  MOD_RES (2)..(34)..(35): Xaa is C or S
GXSEVVMDRHKRLVVNNASDYYLISTASLRTPVXXTPPT

SEQ ID NO: 78474 - protein, 28 aa, Artificial Sequence
  Cyclic GFR-binding peptide
EEVIMPIKGYLLVRGNDFYLMNIPSTKV

SEQ ID NO: 78475 - protein, 28 aa, Artificial Sequence
  Cyclic GFR-binding peptide
  MOD_RES (2)..(2): Xaa is C or S
GXGEVVMDRYKKLVVKENEDFYLMSIAN

SEQ ID NO: 78476 - protein, 20 aa, Artificial Sequence
  Cyclic GFR-binding peptide
RYKKLTPVGMDDFYLVSIAN

SEQ ID NO: 78477 - protein, 30 aa, Artificial Sequence; identical to SEQ ID NO: 29305
  Cyclic GFR-binding peptide
  MOD_RES (28)..(29): Xaa is C or S

SEQ ID NO: 78478 - protein, 38 aa, Artificial Sequence; identical to SEQ ID NO: 40874
  Cyclic GFR-binding peptide
  MOD_RES (2)..(34)..(35): Xaa is C or S

SEQ ID NO: 78479 - protein, 31 aa, Artificial Sequence
  Cyclic GFR-binding peptide
  MOD_RES (27)..(28): Xaa is C or S
NEYKFKVVNKNEDLYLISIPEMKEPVXXPEP

SEQ ID NO: 78480 - protein, 39 aa, Artificial Sequence; identical to SEQ ID NO: 1213
  Cyclic GFR-binding peptide
  MOD_RES (1)..(3)..(35)..(36): Xaa is C or S

SEQ ID NO: 78481 - protein, 25 aa, Artificial Sequence
  Cyclic GFR-binding peptide
NYHYKLIVNSSDDKYLVSIPSLKTP

SEQ ID NO: 78482 - protein, 41 aa, Artificial Sequence; identical to SEQ ID NO: 75411
  Cyclic GFR-binding peptide
  MOD_RES (2)..(4)..(35)..(36): Xaa is C or S

SEQ ID NO: 78483 - protein, 27 aa, Artificial Sequence
  Cyclic GFR-binding peptide
  MOD_RES (27)..(27): Xaa is C or S
NRYKKLVVNKNEDFYLISIANMKEPVX

SEQ ID NO: 78484 - protein, 25 aa, Artificial Sequence
  Cyclic GFR-binding peptide
VMNEYKFKIVNSSDDLYLVSIPELK

SEQ ID NO: 78485 - protein, 31 aa, Artificial Sequence; identical to SEQ ID NO: 1218
  Cyclic GFR-binding peptide
  MOD_RES (30)..(31): Xaa is C or S

SEQ ID NO: 78486 - protein, 28 aa, Artificial Sequence
  Cyclic GFR-binding peptide
VVMDPIKGYVVKENEDFYLMNIPSLETP

SEQ ID NO: 78487 - protein, 28 aa, Artificial Sequence
  Cyclic GFR-binding peptide
  MOD_RES (1)..(1): Xaa is C or S
XSEVTMNRHKRLVVNKNEDYYLISTASM

SEQ ID NO: 78488 - protein, 28 aa, Artificial Sequence
  Cyclic GFR-binding peptide
  MOD_RES (1)..(1): Xaa is C or S
XGEVVMEPIKGYVVKDYEDFYLMNIPSL

SEQ ID NO: 78489 - protein, 29 aa, Artificial Sequence
  Cyclic GFR-binding peptide
  MOD_RES (28)..(29): Xaa is C or S
MNYHYKLVVNKNEDKYLISIPSMKEPVXX

SEQ ID NO: 78490 - protein, 30 aa, Artificial Sequence; identical to SEQ ID NO: 1220
  Cyclic GFR-binding peptide
  MOD_RES (30)..(30): Xaa is C or S

SEQ ID NO: 78491 - protein, 34 aa, Artificial Sequence
  Cyclic GFR-binding peptide
  MOD_RES (32)..(33): Xaa is C or S
RDVVMGEYKFKIIQQKDNLYLMSIPEMKTPTXXP

SEQ ID NO: 78492 - protein, 29 aa, Artificial Sequence
  Cyclic GFR-binding peptide
  MOD_RES (2)..(2): Xaa is C or S
GXARVVMNYHYKLIVNSSDDKYLVSIPSL

SEQ ID NO: 78493 - protein, 40 aa, Artificial Sequence
  Cyclic GFR-binding peptide
  MOD_RES (2)..(4)..(35)..(36): Xaa is C or S
SXKXSKVIMPIKGYIKPTKGIFYLINIPSLDQSVXXPSAS

SEQ ID NO: 78494 - protein, 28 aa, Artificial Sequence
  Cyclic GFR-binding peptide
  MOD_RES (2)..(2): Xaa is C or S
GXRDVVMGYHYKLIIQQKDNKYLMSIPS

SEQ ID NO: 78495 - protein, 41 aa, Artificial Sequence; identical to SEQ ID NO: 1228
  Cyclic GFR-binding peptide
  MOD_RES (2)..(4)..(35)..(36): Xaa is C or S

SEQ ID NO: 78496 - protein, 38 aa, Artificial Sequence
  Cyclic GFR-binding peptide
  MOD_RES (2)..(33)..(34): Xaa is C or S
GXEEVIMYHYKLLLVRGNDKYLMSIPSTKVPAXXTSPV

SEQ ID NO: 78497 - protein, 31 aa, Artificial Sequence; identical to SEQ ID NO: 1231
  Cyclic GFR-binding peptide
  MOD_RES (31)..(31): Xaa is C or S

SEQ ID NO: 78498 - protein, 38 aa, Artificial Sequence; identical to SEQ ID NO: 40887
  Cyclic GFR-binding peptide
  MOD_RES (2)..(4)..(35)..(36): Xaa is C or S

SEQ ID NO: 78499 - protein, 34 aa, Artificial Sequence; identical to SEQ ID NO: 75420
  Cyclic GFR-binding peptide
  MOD_RES (1)..(3)..(34): Xaa is C or S

SEQ ID NO: 78500 - protein, 39 aa, Artificial Sequence
  Cyclic GFR-binding peptide
  MOD_RES (1)..(33)..(34): Xaa is C or S
XRDVVMGEYKFKIIQQKDNLYLMSIPEMKTPTXXPGASG

SEQ ID NO: 78501 - protein, 32 aa, Artificial Sequence; identical to SEQ ID NO: 40890
  Cyclic GFR-binding peptide
  MOD_RES (30)..(31): Xaa is C or S

SEQ ID NO: 78502 - protein, 31 aa, Artificial Sequence
  Cyclic GFR-binding peptide
  MOD_RES (27)..(28): Xaa is C or S
NYHYKLVVNKNEDKYLISIPSMKEPVXXPEP

SEQ ID NO: 78503 - protein, 31 aa, Artificial Sequence; identical to SEQ ID NO: 29334
  Cyclic GFR-binding peptide

SEQ ID NO: 78504 - protein, 32 aa, Artificial Sequence
  Cyclic GFR-binding peptide
  MOD_RES (32)..(32): Xaa is C or S
ESVAMGRHKRLYTVVGKDYYLISTASLKTPVX

SEQ ID NO: 78505 - protein, 33 aa, Artificial Sequence
  Cyclic GFR-binding peptide
  MOD_RES (30)..(31): Xaa is C or S
VTMNEYKFKVVNKNEDLYLISIPEMKEPVXXPE

SEQ ID NO: 78506 - protein, 32 aa, Artificial Sequence; identical to SEQ ID NO: 1239
  Cyclic GFR-binding peptide
  MOD_RES (1)..(3): Xaa is C or S

SEQ ID NO: 78507 - protein, 28 aa, Artificial Sequence
  Cyclic GFR-binding peptide
SMGEPIKGYTPVGMDDFYLVNIPSLKTP

SEQ ID NO: 78508 - protein, 32 aa, Artificial Sequence
  Cyclic GFR-binding peptide
  MOD_RES (26)..(27): Xaa is C or S
RHKRLVVNNAADYYLISTASLRAPVXXSAPAA

SEQ ID NO: 78509 - protein, 31 aa, Artificial Sequence; identical to SEQ ID NO: 29339
  Cyclic GFR-binding peptide

SEQ ID NO: 78510 - protein, 33 aa, Artificial Sequence; identical to SEQ ID NO: 29340
  Cyclic GFR-binding peptide
  MOD_RES (1)..(33): Xaa is C or S

SEQ ID NO: 78511 - protein, 23 aa, Artificial Sequence
  Cyclic GFR-binding peptide
EYKFKVVNKNEDLYLISIPEMKE

SEQ ID NO: 78512 - protein, 34 aa, Artificial Sequence; identical to SEQ ID NO: 1244
  Cyclic GFR-binding peptide
  MOD_RES (2)..(4): Xaa is C or S

SEQ ID NO: 78513 - protein, 35 aa, Artificial Sequence; identical to SEQ ID NO: 75428
  Cyclic GFR-binding peptide
  MOD_RES (1)..(3)..(34)..(35): Xaa is C or S

SEQ ID NO: 78514 - protein, 35 aa, Artificial Sequence; identical to SEQ ID NO: 40911
  Cyclic GFR-binding peptide
  MOD_RES (2)..(4): Xaa is C or S

SEQ ID NO: 78515 - protein, 33 aa, Artificial Sequence; identical to SEQ ID NO: 29345
  Cyclic GFR-binding peptide
  MOD_RES (28)..(29): Xaa is C or S

SEQ ID NO: 78516 - protein, 38 aa, Artificial Sequence; identical to SEQ ID NO: 40912
  Cyclic GFR-binding peptide
  MOD_RES (1)..(3)..(35)..(36): Xaa is C or S

SEQ ID NO: 78517 - protein, 26 aa, Artificial Sequence
  Cyclic GFR-binding peptide
EEYKFKTPVGMDDLYLVSIPELKTPV

SEQ ID NO: 78518 - protein, 28 aa, Artificial Sequence
  Cyclic GFR-binding peptide
  MOD_RES (1)..(1): Xaa is C or S
XSRVVMNEYKFKIVNSSDDLYLVSIPEL

SEQ ID NO: 78519 - protein, 27 aa, Artificial Sequence
  Cyclic GFR-binding peptide
IMRHKRLIKPTKGIYYLISTASLDQSV

SEQ ID NO: 78520 - protein, 36 aa, Artificial Sequence; identical to SEQ ID NO: 11828
  Cyclic GFR-binding peptide
  MOD_RES (2)..(34)..(35): Xaa is C or S

SEQ ID NO: 78521 - protein, 30 aa, Artificial Sequence; identical to SEQ ID NO: 11831
  Cyclic GFR-binding peptide
  MOD_RES (28)..(29): Xaa is C or S

SEQ ID NO: 78522 - protein, 24 aa, Artificial Sequence
  Cyclic GFR-binding peptide
RVIMYHYKLVKPKRGVKYLISIPS

SEQ ID NO: 78523 - protein, 22 aa, Artificial Sequence
  Cyclic GFR-binding peptide
RHKRLIVNSSDDYYLVSTASLK

SEQ ID NO: 78524 - protein, 35 aa, Artificial Sequence; identical to SEQ ID NO: 1258
  Cyclic GFR-binding peptide
  MOD_RES (2)..(4)..(35): Xaa is C or S

SEQ ID NO: 78525 - protein, 32 aa, Artificial Sequence; identical to SEQ ID NO: 1262
  Cyclic GFR-binding peptide
  MOD_RES (2)..(4): Xaa is C or S

SEQ ID NO: 78526 - protein, 30 aa, Artificial Sequence
  Cyclic GFR-binding peptide
EVTMNPIKGYVVNKNEDFYLINIPSMKEPV

SEQ ID NO: 78527 - protein, 28 aa, Artificial Sequence
  Cyclic GFR-binding peptide
  MOD_RES (27)..(28): Xaa is C or S
MYHYKLVKPKRGVKYLISIPSLAQPVXX

SEQ ID NO: 78528 - protein, 32 aa, Artificial Sequence; identical to SEQ ID NO: 75438
  Cyclic GFR-binding peptide
  MOD_RES (27)..(28): Xaa is C or S

SEQ ID NO: 78529 - protein, 31 aa, Artificial Sequence; identical to SEQ ID NO: 29368
  Cyclic GFR-binding peptide
  MOD_RES (28)..(29): Xaa is C or S

SEQ ID NO: 78530 - protein, 29 aa, Artificial Sequence
  Cyclic GFR-binding peptide
  MOD_RES (2)..(4): Xaa is C or S
SXKXSRVIMRHKRLVKPKRGVYYLISTAS

SEQ ID NO: 78531 - protein, 38 aa, Artificial Sequence
  Cyclic GFR-binding peptide
  MOD_RES (1)..(33)..(34): Xaa is C or S
XRDVVMGYHYKLIIQQKDNKYLMSIPSMKTPTXXPGAS

SEQ ID NO: 78532 - protein, 26 aa, Artificial Sequence
  Cyclic GFR-binding peptide
AKVVMNPIKGYIVNNSSDFYLVNIPS

SEQ ID NO: 78533 - protein, 40 aa, Artificial Sequence; identical to SEQ ID NO: 40954
  Cyclic GFR-binding peptide
  MOD_RES (1)..(3)..(36)..(37): Xaa is C or S

SEQ ID NO: 78534 - protein, 35 aa, Artificial Sequence; identical to SEQ ID NO: 1274
  Cyclic GFR-binding peptide
  MOD_RES (29)..(30): Xaa is C or S

SEQ ID NO: 78535 - protein, 26 aa, Artificial Sequence
  Cyclic GFR-binding peptide
SKVIMRHKRLIKPTKGIYYLISTASL

SEQ ID NO: 78536 - protein, 32 aa, Artificial Sequence; identical to SEQ ID NO: 29373
  Cyclic GFR-binding peptide
  MOD_RES (30)..(31): Xaa is C or S

SEQ ID NO: 78537 - protein, 26 aa, Artificial Sequence
  Cyclic GFR-binding peptide
EVVMEPIKGYVVKDYEDFYLMNIPSL

SEQ ID NO: 78538 - protein, 28 aa, Artificial Sequence
  Cyclic GFR-binding peptide
SEVTMNPIKGYVVNKNEDFYLINIPSMK

SEQ ID NO: 78539 - protein, 37 aa, Artificial Sequence; identical to SEQ ID NO: 1283
  Cyclic GFR-binding peptide
  MOD_RES (31)..(32): Xaa is C or S

SEQ ID NO: 78540 - protein, 30 aa, Artificial Sequence; identical to SEQ ID NO: 40962
  Cyclic GFR-binding peptide
  MOD_RES (26)..(27): Xaa is C or S

SEQ ID NO: 78541 - protein, 32 aa, Artificial Sequence; identical to SEQ ID NO: 29378
  Cyclic GFR-binding peptide
  MOD_RES (2)..(2): Xaa is C or S

SEQ ID NO: 78542 - protein, 36 aa, Artificial Sequence; identical to SEQ ID NO: 40963
  Cyclic GFR-binding peptide
  MOD_RES (1)..(3)..(35): Xaa is C or S

SEQ ID NO: 78543 - protein, 24 aa, Artificial Sequence
  Cyclic GFR-binding peptide
RVIMRHKRLVKPKRGVYYLISTAS

SEQ ID NO: 78544 - protein, 33 aa, Artificial Sequence; identical to SEQ ID NO: 1289
  Cyclic GFR-binding peptide
  MOD_RES (30)..(31): Xaa is C or S

SEQ ID NO: 78545 - protein, 39 aa, Artificial Sequence
  Cyclic GFR-binding peptide
  MOD_RES (1)..(3)..(35)..(36): Xaa is C or S
XGXSEVVMDEYKFKVVNNASDLYLISIPELRTPVXXTPP

SEQ ID NO: 78546 - protein, 30 aa, Artificial Sequence
  Cyclic GFR-binding peptide
  MOD_RES (26)..(27): Xaa is C or S
YHYKLLLVRGNDKYLMSIPSTKVPAXXTSP

SEQ ID NO: 78547 - protein, 25 aa, Artificial Sequence
  Cyclic GFR-binding peptide
DEYKFKVVNNASDLYLISIPELRTP

SEQ ID NO: 78548 - protein, 35 aa, Artificial Sequence; identical to SEQ ID NO: 1297
  Cyclic GFR-binding peptide
  MOD_RES (1)..(33)..(34): Xaa is C or S

SEQ ID NO: 78549 - protein, 38 aa, Artificial Sequence
  Cyclic GFR-binding peptide
  MOD_RES (2)..(4)..(36)..(37): Xaa is C or S
RXGXSEVVMDYHYKLVVNNASDKYLISIPSLRTPVXXT

SEQ ID NO: 78550 - protein, 29 aa, Artificial Sequence
  Cyclic GFR-binding peptide
  MOD_RES (2)..(2): Xaa is C or S
GXGEVVMDRYKKLVVKENEDFYLMSIANL

SEQ ID NO: 78551 - protein, 39 aa, Artificial Sequence; identical to SEQ ID NO: 40968
  Cyclic GFR-binding peptide
  MOD_RES (1)..(34)..(35): Xaa is C or S

SEQ ID NO: 78552 - protein, 30 aa, Artificial Sequence; identical to SEQ ID NO: 1299
  Cyclic GFR-binding peptide

SEQ ID NO: 78553 - protein, 30 aa, Artificial Sequence
  Cyclic GFR-binding peptide
  MOD_RES (2)..(2): Xaa is C or S
KXSKVVMPIKGYVKPTRGVFYLINIPSLDQ

SEQ ID NO: 78554 - protein, 36 aa, Artificial Sequence; identical to SEQ ID NO: 1301
  Cyclic GFR-binding peptide
  MOD_RES (30)..(31): Xaa is C or S

SEQ ID NO: 78555 - protein, 38 aa, Artificial Sequence; identical to SEQ ID NO: 1311
  Cyclic GFR-binding peptide
  MOD_RES (1)..(33)..(34): Xaa is C or S

SEQ ID NO: 78556 - protein, 21 aa, Artificial Sequence
  Cyclic GFR-binding peptide
DRYKKLVVKENEDFYLMSIAN

SEQ ID NO: 78557 - protein, 37 aa, Artificial Sequence; identical to SEQ ID NO: 1313
  Cyclic GFR-binding peptide
  MOD_RES (2)..(4)..(36)..(37): Xaa is C or S

SEQ ID NO: 78558 - protein, 23 aa, Artificial Sequence
  Cyclic GFR-binding peptide
EYKFKIVNSSDDLYLVSIPELQT

SEQ ID NO: 78559 - protein, 32 aa, Artificial Sequence; identical to SEQ ID NO: 1317
  Cyclic GFR-binding peptide
  MOD_RES (31)..(32): Xaa is C or S

SEQ ID NO: 78560 - protein, 38 aa, Artificial Sequence; identical to SEQ ID NO: 29397
  Cyclic GFR-binding peptide
  MOD_RES (2)..(34)..(35): Xaa is C or S

SEQ ID NO: 78561 - protein, 32 aa, Artificial Sequence; identical to SEQ ID NO: 29398
  Cyclic GFR-binding peptide
  MOD_RES (31)..(32): Xaa is C or S

SEQ ID NO: 78562 - protein, 35 aa, Artificial Sequence
  Cyclic GFR-binding peptide
  MOD_RES (1)..(3)..(34)..(35): Xaa is C or S
XKXSRVIMPIKGYVKPKRGVFYLINIPSLAQPVXX

SEQ ID NO: 78563 - protein, 28 aa, Artificial Sequence
  Cyclic GFR-binding peptide
  MOD_RES (26)..(27): Xaa is C or S
RHKRLIVNSSDDYYLVSTASLKTPAXXP

SEQ ID NO: 78564 - protein, 31 aa, Artificial Sequence; identical to SEQ ID NO: 11894
  Cyclic GFR-binding peptide
  MOD_RES (2)..(2): Xaa is C or S

SEQ ID NO: 78565 - protein, 27 aa, Artificial Sequence
  Cyclic GFR-binding peptide
EAVSMGEPIKGYTPVGMDDFYLVNIPS

SEQ ID NO: 78566 - protein, 30 aa, Artificial Sequence; identical to SEQ ID NO: 1320
  Cyclic GFR-binding peptide
  MOD_RES (27)..(28): Xaa is C or S

SEQ ID NO: 78567 - protein, 25 aa, Artificial Sequence
  Cyclic GFR-binding peptide
MPIKGYIKPTKGIFYLINIPSLDQS

SEQ ID NO: 78568 - protein, 27 aa, Artificial Sequence
  Cyclic GFR-binding peptide
VTMNPIKGYVVNKNEDFYLINIPSMKE

SEQ ID NO: 78569 - protein, 36 aa, Artificial Sequence; identical to SEQ ID NO: 1323
  Cyclic GFR-binding peptide
  MOD_RES (30)..(31): Xaa is C or S

SEQ ID NO: 78570 - protein, 34 aa, Artificial Sequence; identical to SEQ ID NO: 29408
  Cyclic GFR-binding peptide
  MOD_RES (30)..(31): Xaa is C or S

SEQ ID NO: 78571 - protein, 20 aa, Artificial Sequence
  Cyclic GFR-binding peptide
EYKFKTPVGMDDLYLVSIPE

SEQ ID NO: 78572 - protein, 35 aa, Artificial Sequence
  Cyclic GFR-binding peptide
  MOD_RES (2)..(4): Xaa is C or S
RXAXSEVTMNYHYKLVVNKNEDKYLISIPSMKEPV

SEQ ID NO: 78573 - protein, 33 aa, Artificial Sequence
  Cyclic GFR-binding peptide
  MOD_RES (27)..(28): Xaa is C or S
MRHKRLLLVRGNDYYLMSTASTKVPAXXTSPVR

SEQ ID NO: 78574 - protein, 29 aa, Artificial Sequence
  Cyclic GFR-binding peptide
KVVMNYHYKLIVNNSSDKYLVSIPSLKTP

SEQ ID NO: 78575 - protein, 30 aa, Artificial Sequence; identical to SEQ ID NO: 1334
  Cyclic GFR-binding peptide

SEQ ID NO: 78576 - protein, 30 aa, Artificial Sequence; identical to SEQ ID NO: 40995
  Cyclic GFR-binding peptide
  MOD_RES (30)..(30): Xaa is C or S

SEQ ID NO: 78577 - protein, 25 aa, Artificial Sequence
  Cyclic GFR-binding peptide
MDRHKRLVVKENEDYYLMSTASLET

SEQ ID NO: 78578 - protein, 36 aa, Artificial Sequence
  Cyclic GFR-binding peptide
  MOD_RES (1)..(3)..(35)..(36): Xaa is C or S
XGXSEVVMDRHKRLVVNNASDYYLISTASLRTPVXX

SEQ ID NO: 78579 - protein, 30 aa, Artificial Sequence; identical to SEQ ID NO: 1338
  Cyclic GFR-binding peptide
  MOD_RES (29)..(30): Xaa is C or S

SEQ ID NO: 78580 - protein, 28 aa, Artificial Sequence
  Cyclic GFR-binding peptide
  MOD_RES (2)..(2): Xaa is C or S
GXARVVMNYHYKLIVNSSDDKYLVSIPS

SEQ ID NO: 78581 - protein, 32 aa, Artificial Sequence; identical to SEQ ID NO: 29420
  Cyclic GFR-binding peptide
  MOD_RES (26)..(27): Xaa is C or S

SEQ ID NO: 78582 - protein, 25 aa, Artificial Sequence
  Cyclic GFR-binding peptide
VIMYHYKLIKPTKGIKYLISIPSLD

SEQ ID NO: 78583 - protein, 36 aa, Artificial Sequence
  Cyclic GFR-binding peptide
  MOD_RES (2)..(4)..(36): Xaa is C or S
RXGXSEVVMDEYKFKVVNNASDLYLISIPELRTPVX

SEQ ID NO: 78584 - protein, 21 aa, Artificial Sequence
  Cyclic GFR-binding peptide
DRYKKLVVNNAADFYLISIAN

SEQ ID NO: 78585 - protein, 26 aa, Artificial Sequence
  Cyclic GFR-binding peptide
  MOD_RES (26)..(26): Xaa is C or S
EYKFKIVNNSSDLYLVSIPELKTPAX

SEQ ID NO: 78586 - protein, 31 aa, Artificial Sequence; identical to SEQ ID NO: 1348
  Cyclic GFR-binding peptide
  MOD_RES (27)..(28): Xaa is C or S

SEQ ID NO: 78587 - protein, 24 aa, Artificial Sequence
  Cyclic GFR-binding peptide
NYHYKLIVNSSDDKYLVSIPSLKT

SEQ ID NO: 78588 - protein, 33 aa, Artificial Sequence; identical to SEQ ID NO: 1353
  Cyclic GFR-binding peptide
  MOD_RES (30)..(31): Xaa is C or S

SEQ ID NO: 78589 - protein, 27 aa, Artificial Sequence
  Cyclic GFR-binding peptide
  MOD_RES (1)..(1): Xaa is C or S
XESVAMGRYKKLYTVVGKDFYLISIAN

SEQ ID NO: 78590 - protein, 34 aa, Artificial Sequence; identical to SEQ ID NO: 1354
  Cyclic GFR-binding peptide
  MOD_RES (31)..(31): Xaa is C or S

SEQ ID NO: 78591 - protein, 31 aa, Artificial Sequence; identical to SEQ ID NO: 1355
  Cyclic GFR-binding peptide
  MOD_RES (2)..(4): Xaa is C or S

SEQ ID NO: 78592 - protein, 31 aa, Artificial Sequence
  Cyclic GFR-binding peptide
  MOD_RES (1)..(3): Xaa is C or S
XAXSEVTMNYHYKLVVNKNEDKYLISIPSMK

SEQ ID NO: 78593 - protein, 24 aa, Artificial Sequence
  Cyclic GFR-binding peptide
VVMNEYKFKIVNSSDDLYLVSIPE

SEQ ID NO: 78594 - protein, 32 aa, Artificial Sequence; identical to SEQ ID NO: 11928
  Cyclic GFR-binding peptide
  MOD_RES (32)..(32): Xaa is C or S

SEQ ID NO: 78595 - protein, 24 aa, Artificial Sequence
  Cyclic GFR-binding peptide
VMNPIKGYIVNNSSDFYLVNIPSL

SEQ ID NO: 78596 - protein, 38 aa, Artificial Sequence; identical to SEQ ID NO: 41030
  Cyclic GFR-binding peptide
  MOD_RES (2)..(34)..(35): Xaa is C or S

SEQ ID NO: 78597 - protein, 33 aa, Artificial Sequence; identical to SEQ ID NO: 1359
  Cyclic GFR-binding peptide
  MOD_RES (2)..(4): Xaa is C or S

SEQ ID NO: 78598 - protein, 37 aa, Artificial Sequence; identical to SEQ ID NO: 29442
  Cyclic GFR-binding peptide
  MOD_RES (1)..(32)..(33): Xaa is C or S

SEQ ID NO: 78599 - protein, 22 aa, Artificial Sequence
  Cyclic GFR-binding peptide
ERHKRLVVKDYEDYYLMSTASL

SEQ ID NO: 78600 - protein, 25 aa, Artificial Sequence
  Cyclic GFR-binding peptide
MDYHYKLVVKENEDKYLMSIPSLET

SEQ ID NO: 78601 - protein, 32 aa, Artificial Sequence; identical to SEQ ID NO: 29444
  Cyclic GFR-binding peptide
  MOD_RES (29)..(30): Xaa is C or S

SEQ ID NO: 78602 - protein, 34 aa, Artificial Sequence; identical to SEQ ID NO: 29445
  Cyclic GFR-binding peptide
  MOD_RES (1)..(3): Xaa is C or S

SEQ ID NO: 78603 - protein, 28 aa, Artificial Sequence
  Cyclic GFR-binding peptide
VIMRYKKLIKPTKGIFYLISIANLDQSV

SEQ ID NO: 78604 - protein, 36 aa, Artificial Sequence
  Cyclic GFR-binding peptide
  MOD_RES (1)..(3)..(35)..(36): Xaa is C or S
XAXSEVTMNPIKGYVVNKNEDFYLINIPSMKEPVXX

SEQ ID NO: 78605 - protein, 32 aa, Artificial Sequence; identical to SEQ ID NO: 1364
  Cyclic GFR-binding peptide
  MOD_RES (1)..(3): Xaa is C or S

SEQ ID NO: 78606 - protein, 38 aa, Artificial Sequence
  Cyclic GFR-binding peptide
  MOD_RES (2)..(34)..(35): Xaa is C or S
GXRDVVMGEYKFKIIQQKDNLYLMSIPEMKTPTXXPGA

SEQ ID NO: 78607 - protein, 28 aa, Artificial Sequence
  Cyclic GFR-binding peptide
  MOD_RES (28)..(28): Xaa is C or S
MDRYKKLVVNNAADFYLISIANLRAPVX

SEQ ID NO: 78608 - protein, 35 aa, Artificial Sequence
  Cyclic GFR-binding peptide
  MOD_RES (32)..(33): Xaa is C or S
SEVVMDYHYKLVVNNASDKYLISIPSLRTPVXXTP

SEQ ID NO: 78609 - protein, 32 aa, Artificial Sequence; identical to SEQ ID NO: 29451
  Cyclic GFR-binding peptide
  MOD_RES (30)..(30): Xaa is C or S

SEQ ID NO: 78610 - protein, 26 aa, Artificial Sequence
  Cyclic GFR-binding peptide
VMNPIKGYIVNSSDDFYLVNIPSLKT

SEQ ID NO: 78611 - protein, 39 aa, Artificial Sequence; identical to SEQ ID NO: 75492
  Cyclic GFR-binding peptide
  MOD_RES (1)..(33)..(34): Xaa is C or S

SEQ ID NO: 78612 - protein, 36 aa, Artificial Sequence; identical to SEQ ID NO: 1372
  Cyclic GFR-binding peptide
  MOD_RES (1)..(3)..(35)..(36): Xaa is C or S

SEQ ID NO: 78613 - protein, 31 aa, Artificial Sequence; identical to SEQ ID NO: 1373
  Cyclic GFR-binding peptide
  MOD_RES (1)..(1): Xaa is C or S

SEQ ID NO: 78614 - protein, 30 aa, Artificial Sequence; identical to SEQ ID NO: 29462
  Cyclic GFR-binding peptide

SEQ ID NO: 78615 - protein, 35 aa, Artificial Sequence; identical to SEQ ID NO: 29463
  Cyclic GFR-binding peptide
  MOD_RES (33)..(34): Xaa is C or S

SEQ ID NO: 78616 - protein, 37 aa, Artificial Sequence; identical to SEQ ID NO: 41052
  Cyclic GFR-binding peptide
  MOD_RES (32)..(33): Xaa is C or S

SEQ ID NO: 78617 - protein, 39 aa, Artificial Sequence; identical to SEQ ID NO: 1381
  Cyclic GFR-binding peptide
  MOD_RES (2)..(4)..(35)..(36): Xaa is C or S

SEQ ID NO: 78618 - protein, 27 aa, Artificial Sequence
  Cyclic GFR-binding peptide
  MOD_RES (27)..(27): Xaa is C or S
NPIKGYVVNKNEDFYLINIPSMKEPVX

SEQ ID NO: 78619 - protein, 35 aa, Artificial Sequence; identical to SEQ ID NO: 41056
  Cyclic GFR-binding peptide
  MOD_RES (32)..(33): Xaa is C or S

SEQ ID NO: 78620 - protein, 36 aa, Artificial Sequence
  Cyclic GFR-binding peptide
  MOD_RES (1)..(32)..(33): Xaa is C or S
XEEVIMYHYKLLLVRGNDKYLMSIPSTKVPAXXTSP

SEQ ID NO: 78621 - protein, 30 aa, Artificial Sequence
  Cyclic GFR-binding peptide
  MOD_RES (28)..(29): Xaa is C or S
MGEYKFKIIQQKDNLYLMSIPEMKTPTXXP

SEQ ID NO: 78622 - protein, 38 aa, Artificial Sequence; identical to SEQ ID NO: 1387
  Cyclic GFR-binding peptide
  MOD_RES (1)..(33)..(34): Xaa is C or S

SEQ ID NO: 78623 - protein, 32 aa, Artificial Sequence; identical to SEQ ID NO: 1388
  Cyclic GFR-binding peptide
  MOD_RES (30)..(31): Xaa is C or S

SEQ ID NO: 78624 - protein, 41 aa, Artificial Sequence; identical to SEQ ID NO: 1389
  Cyclic GFR-binding peptide
  MOD_RES (1)..(3)..(36)..(37): Xaa is C or S

SEQ ID NO: 78625 - protein, 35 aa, Artificial Sequence; identical to SEQ ID NO: 1393
  Cyclic GFR-binding peptide
  MOD_RES (1)..(33)..(34): Xaa is C or S

SEQ ID NO: 78626 - protein, 21 aa, Artificial Sequence
  Cyclic GFR-binding peptide
NRYKKLIVNSSDDFYLVSIAN

SEQ ID NO: 78627 - protein, 36 aa, Artificial Sequence; identical to SEQ ID NO: 29480
  Cyclic GFR-binding peptide
  MOD_RES (1)..(3)..(35)..(36): Xaa is C or S

SEQ ID NO: 78628 - protein, 32 aa, Artificial Sequence; identical to SEQ ID NO: 41067
  Cyclic GFR-binding peptide
  MOD_RES (27)..(28): Xaa is C or S

SEQ ID NO: 78629 - protein, 26 aa, Artificial Sequence
  Cyclic GFR-binding peptide
SRVVMNRHKRLIVNSSDDYYLVSTAS

SEQ ID NO: 78630 - protein, 26 aa, Artificial Sequence
  Cyclic GFR-binding peptide
VVMGRYKKLIIQQKDNFYLMSIANMK

SEQ ID NO: 78631 - protein, 30 aa, Artificial Sequence; identical to SEQ ID NO: 41068
  Cyclic GFR-binding peptide
  MOD_RES (1)..(1): Xaa is C or S

SEQ ID NO: 78632 - protein, 31 aa, Artificial Sequence
  Cyclic GFR-binding peptide
  MOD_RES (29)..(30): Xaa is C or S
VMDEYKFKVVNNASDLYLISIPELRTPVXXT

SEQ ID NO: 78633 - protein, 30 aa, Artificial Sequence
  Cyclic GFR-binding peptide
  MOD_RES (26)..(27): Xaa is C or S
PIKGYVVNKNEDFYLINIPSMKEPVXXPEP

SEQ ID NO: 78634 - protein, 39 aa, Artificial Sequence; identical to SEQ ID NO: 1403
  Cyclic GFR-binding peptide
  MOD_RES (33)..(34): Xaa is C or S

SEQ ID NO: 78635 - protein, 39 aa, Artificial Sequence; identical to SEQ ID NO: 1404
  Cyclic GFR-binding peptide
  MOD_RES (2)..(4)..(35)..(36): Xaa is C or S

SEQ ID NO: 78636 - protein, 30 aa, Artificial Sequence; identical to SEQ ID NO: 41077
  Cyclic GFR-binding peptide
  MOD_RES (1)..(3): Xaa is C or S

SEQ ID NO: 78637 - protein, 30 aa, Artificial Sequence; identical to SEQ ID NO: 41078
  Cyclic GFR-binding peptide
  MOD_RES (2)..(4): Xaa is C or S

SEQ ID NO: 78638 - protein, 33 aa, Artificial Sequence; identical to SEQ ID NO: 29488
  Cyclic GFR-binding peptide
  MOD_RES (1)..(3): Xaa is C or S

SEQ ID NO: 78639 - protein, 29 aa, Artificial Sequence
  Cyclic GFR-binding peptide
EVIMYHYKLLLVRGNDKYLMSIPSTKVPA

SEQ ID NO: 78640 - protein, 31 aa, Artificial Sequence
  Cyclic GFR-binding peptide
  MOD_RES (1)..(1): Xaa is C or S
XSRVIMPIKGYVKPKRGVFYLINIPSLAQPV

SEQ ID NO: 78641 - protein, 33 aa, Artificial Sequence; identical to SEQ ID NO: 1407
  Cyclic GFR-binding peptide
  MOD_RES (1)..(3): Xaa is C or S

SEQ ID NO: 78642 - protein, 30 aa, Artificial Sequence; identical to SEQ ID NO: 75512
  Cyclic GFR-binding peptide
  MOD_RES (26)..(27): Xaa is C or S

SEQ ID NO: 78643 - protein, 33 aa, Artificial Sequence; identical to SEQ ID NO: 1410
  Cyclic GFR-binding peptide
  MOD_RES (1)..(33): Xaa is C or S

SEQ ID NO: 78644 - protein, 33 aa, Artificial Sequence; identical to SEQ ID NO: 29494
  Cyclic GFR-binding peptide
  MOD_RES (1)..(33): Xaa is C or S

SEQ ID NO: 78645 - protein, 26 aa, Artificial Sequence
  Cyclic GFR-binding peptide
ARVVMNRHKRLIVNSSDDYYLVSTAS

SEQ ID NO: 78646 - protein, 32 aa, Artificial Sequence; identical to SEQ ID NO: 29500
  Cyclic GFR-binding peptide
  MOD_RES (26)..(27): Xaa is C or S

SEQ ID NO: 78647 - protein, 30 aa, Artificial Sequence; identical to SEQ ID NO: 29501
  Cyclic GFR-binding peptide
  MOD_RES (29)..(30): Xaa is C or S

SEQ ID NO: 78648 - protein, 29 aa, Artificial Sequence
  Cyclic GFR-binding peptide
EEVIMPIKGYLLVRGNDFYLMNIPSTKVP

SEQ ID NO: 78649 - protein, 37 aa, Artificial Sequence
  Cyclic GFR-binding peptide
  MOD_RES (2)..(34)..(35): Xaa is C or S
GXRDVVMGRHKRLIIQQKDNYYLMSTASMKTPTXXPG

SEQ ID NO: 78650 - protein, 33 aa, Artificial Sequence
  Cyclic GFR-binding peptide
  MOD_RES (29)..(30): Xaa is C or S
VMDRHKRLVVNNAADYYLISTASLRAPVXXSAP

SEQ ID NO: 78651 - protein, 28 aa, Artificial Sequence
  Cyclic GFR-binding peptide
RVVMNYHYKLIVNSSDDKYLVSIPSLKT

SEQ ID NO: 78652 - protein, 28 aa, Artificial Sequence
  Cyclic GFR-binding peptide
  MOD_RES (2)..(2): Xaa is C or S
GXESVAMGPIKGYYTVVGKDFYLINIPS

SEQ ID NO: 78653 - protein, 24 aa, Artificial Sequence
  Cyclic GFR-binding peptide
RYKKLVKPTRGVFYLISIANLDQP

SEQ ID NO: 78654 - protein, 29 aa, Artificial Sequence
  Cyclic GFR-binding peptide
  MOD_RES (1)..(1): Xaa is C or S
XARVVMNYHYKLIVNSSDDKYLVSIPSLQ

SEQ ID NO: 78655 - protein, 37 aa, Artificial Sequence; identical to SEQ ID NO: 41098
  Cyclic GFR-binding peptide
  MOD_RES (1)..(33)..(34): Xaa is C or S

SEQ ID NO: 78656 - protein, 24 aa, Artificial Sequence
  Cyclic GFR-binding peptide
ERHKRLVVKDYEDYYLMSTASLET

SEQ ID NO: 78657 - protein, 38 aa, Artificial Sequence
  Cyclic GFR-binding peptide
  MOD_RES (1)..(3)..(35)..(36): Xaa is C or S
XAXSEVTMNEYKFKVVNKNEDLYLISIPEMKEPVXXPE

SEQ ID NO: 78658 - protein, 24 aa, Artificial Sequence
  Cyclic GFR-binding peptide
VVMGYHYKLIIQQKDNKYLMSIPS

SEQ ID NO: 78659 - protein, 22 aa, Artificial Sequence
  Cyclic GFR-binding peptide
RHKRLVKPTRGVYYLISTASLD

SEQ ID NO: 78660 - protein, 35 aa, Artificial Sequence; identical to SEQ ID NO: 29519
  Cyclic GFR-binding peptide
  MOD_RES (2)..(34)..(35): Xaa is C or S

SEQ ID NO: 78661 - protein, 38 aa, Artificial Sequence; identical to SEQ ID NO: 29521
  Cyclic GFR-binding peptide
  MOD_RES (1)..(3)..(34)..(35): Xaa is C or S

SEQ ID NO: 78662 - protein, 33 aa, Artificial Sequence; identical to SEQ ID NO: 41111
  Cyclic GFR-binding peptide
  MOD_RES (27)..(28): Xaa is C or S

SEQ ID NO: 78663 - protein, 25 aa, Artificial Sequence
  Cyclic GFR-binding peptide
VSMGERHKRLTPVGMDDYYLVSTAS

SEQ ID NO: 78664 - protein, 30 aa, Artificial Sequence; identical to SEQ ID NO: 1432
  Cyclic GFR-binding peptide
  MOD_RES (26)..(27): Xaa is C or S

SEQ ID NO: 78665 - protein, 29 aa, Artificial Sequence
  Cyclic GFR-binding peptide
  MOD_RES (27)..(28): Xaa is C or S
NEYKFKIVNSSDDLYLVSIPELKTPAXXP

SEQ ID NO: 78666 - protein, 40 aa, Artificial Sequence; identical to SEQ ID NO: 1434
  Cyclic GFR-binding peptide
  MOD_RES (2)..(4)..(35)..(36): Xaa is C or S

SEQ ID NO: 78667 - protein, 23 aa, Artificial Sequence
  Cyclic GFR-binding peptide
VIMEYKFKLLVRGNDLYLMSIPE

SEQ ID NO: 78668 - protein, 31 aa, Artificial Sequence; identical to SEQ ID NO: 29525
  Cyclic GFR-binding peptide
  MOD_RES (31)..(31): Xaa is C or S

SEQ ID NO: 78669 - protein, 32 aa, Artificial Sequence; identical to SEQ ID NO: 29526
  Cyclic GFR-binding peptide
  MOD_RES (2)..(4): Xaa is C or S

SEQ ID NO: 78670 - protein, 32 aa, Artificial Sequence; identical to SEQ ID NO: 1439
  Cyclic GFR-binding peptide
  MOD_RES (30)..(31): Xaa is C or S

SEQ ID NO: 78671 - protein, 34 aa, Artificial Sequence; identical to SEQ ID NO: 1440
  Cyclic GFR-binding peptide
  MOD_RES (2)..(33)..(34): Xaa is C or S

SEQ ID NO: 78672 - protein, 32 aa, Artificial Sequence; identical to SEQ ID NO: 1442
  Cyclic GFR-binding peptide
  MOD_RES (32)..(32): Xaa is C or S

SEQ ID NO: 78673 - protein, 22 aa, Artificial Sequence
  Cyclic GFR-binding peptide
MGRYKKLIIQQKDNFYLMSIAN

SEQ ID NO: 78674 - protein, 39 aa, Artificial Sequence; identical to SEQ ID NO: 41134
  Cyclic GFR-binding peptide
  MOD_RES (2)..(4)..(36)..(37): Xaa is C or S

SEQ ID NO: 78675 - protein, 24 aa, Artificial Sequence
  Cyclic GFR-binding peptide
MGERHKRLTPVGMDDYYLVSTASL

SEQ ID NO: 78676 - protein, 37 aa, Artificial Sequence; identical to SEQ ID NO: 41137
  Cyclic GFR-binding peptide
  MOD_RES (1)..(3)..(34)..(35): Xaa is C or S

SEQ ID NO: 78677 - protein, 30 aa, Artificial Sequence; identical to SEQ ID NO: 41138
  Cyclic GFR-binding peptide
  MOD_RES (29)..(30): Xaa is C or S

SEQ ID NO: 78678 - protein, 35 aa, Artificial Sequence
  Cyclic GFR-binding peptide
  MOD_RES (1)..(33)..(34): Xaa is C or S
XSEVVMDEYKFKVVNNASDLYLISIPELRTPVXXT

SEQ ID NO: 78679 - protein, 35 aa, Artificial Sequence; identical to SEQ ID NO: 1451
  Cyclic GFR-binding peptide
  MOD_RES (2)..(4)..(35): Xaa is C or S

SEQ ID NO: 78680 - protein, 21 aa, Artificial Sequence
  Cyclic GFR-binding peptide
NYHYKLIVNNSSDKYLVSIPS

SEQ ID NO: 78681 - protein, 29 aa, Artificial Sequence
  Cyclic GFR-binding peptide
  MOD_RES (2)..(2): Xaa is C or S
KXSRVIMEYKFKVKPKRGVLYLISIPELA

SEQ ID NO: 78682 - protein, 31 aa, Artificial Sequence; identical to SEQ ID NO: 29544
  Cyclic GFR-binding peptide
  MOD_RES (2)..(4): Xaa is C or S

SEQ ID NO: 78683 - protein, 36 aa, Artificial Sequence; identical to SEQ ID NO: 29545
  Cyclic GFR-binding peptide
  MOD_RES (1)..(3)..(35)..(36): Xaa is C or S

SEQ ID NO: 78684 - protein, 29 aa, Artificial Sequence
  Cyclic GFR-binding peptide
  MOD_RES (1)..(3): Xaa is C or S
XKXSKVIMRHKRLIKPTKGIYYLISTASL

SEQ ID NO: 78685 - protein, 27 aa, Artificial Sequence
  Cyclic GFR-binding peptide
VVMDEYKFKVVKENEDLYLMSIPELET

SEQ ID NO: 78686 - protein, 33 aa, Artificial Sequence; identical to SEQ ID NO: 1463
  Cyclic GFR-binding peptide
  MOD_RES (1)..(33): Xaa is C or S

SEQ ID NO: 78687 - protein, 28 aa, Artificial Sequence
  Cyclic GFR-binding peptide
  MOD_RES (1)..(1): Xaa is C or S
XSEVVMDRHKRLVVNNASDYYLISTASL

SEQ ID NO: 78688 - protein, 39 aa, Artificial Sequence; identical to SEQ ID NO: 41143
  Cyclic GFR-binding peptide
  MOD_RES (2)..(34)..(35): Xaa is C or S

SEQ ID NO: 78689 - protein, 29 aa, Artificial Sequence
  Cyclic GFR-binding peptide
  MOD_RES (29)..(29): Xaa is C or S
VIMEYKFKLLVRGNDLYLMSIPETKVPAX

SEQ ID NO: 78690 - protein, 26 aa, Artificial Sequence
  Cyclic GFR-binding peptide
KVVMRHKRLVKPTRGVYYLISTASLD

SEQ ID NO: 78691 - protein, 40 aa, Artificial Sequence; identical to SEQ ID NO: 29550
  Cyclic GFR-binding peptide
  MOD_RES (2)..(34)..(35): Xaa is C or S

SEQ ID NO: 78692 - protein, 33 aa, Artificial Sequence; identical to SEQ ID NO: 1469
  Cyclic GFR-binding peptide
  MOD_RES (29)..(30): Xaa is C or S

SEQ ID NO: 78693 - protein, 27 aa, Artificial Sequence
  Cyclic GFR-binding peptide
  MOD_RES (27)..(27): Xaa is C or S
EEYKFKVVKDYEDLYLMSIPELETPVX

SEQ ID NO: 78694 - protein, 29 aa, Artificial Sequence
  Cyclic GFR-binding peptide
  MOD_RES (26)..(27): Xaa is C or S
PIKGYVVNNASDFYLINIPSLRTPVXXTP

SEQ ID NO: 78695 - protein, 29 aa, Artificial Sequence
  Cyclic GFR-binding peptide
RVVMNEYKFKIVNSSDDLYLVSIPELQTP

SEQ ID NO: 78696 - protein, 28 aa, Artificial Sequence
  Cyclic GFR-binding peptide
  MOD_RES (28)..(28): Xaa is C or S
MNRHKRLIVNSSDDYYLVSTASLQTPAX

SEQ ID NO: 78697 - protein, 27 aa, Artificial Sequence
  Cyclic GFR-binding peptide
VVMNEYKFKIVNSSDDLYLVSIPELQT

SEQ ID NO: 78698 - protein, 23 aa, Artificial Sequence
  Cyclic GFR-binding peptide
DYHYKLVVNNAADKYLISIPSLR

SEQ ID NO: 78699 - protein, 23 aa, Artificial Sequence
  Cyclic GFR-binding peptide
MGRYKKLIIQQKDNFYLMSIANM

SEQ ID NO: 78700 - protein, 25 aa, Artificial Sequence
  Cyclic GFR-binding peptide
IMRYKKLLLVRGNDFYLMSIANTKV

SEQ ID NO: 78701 - protein, 25 aa, Artificial Sequence
  Cyclic GFR-binding peptide
IMRHKRLIKPTKGIYYLISTASLDQ

SEQ ID NO: 78702 - protein, 30 aa, Artificial Sequence
  Cyclic GFR-binding peptide
  MOD_RES (2)..(2): Xaa is C or S
GXEEVIMRHKRLLLVRGNDYYLMSTASTKV

SEQ ID NO: 78703 - protein, 30 aa, Artificial Sequence; identical to SEQ ID NO: 29567
  Cyclic GFR-binding peptide
  MOD_RES (1)..(3): Xaa is C or S

SEQ ID NO: 78704 - protein, 30 aa, Artificial Sequence
  Cyclic GFR-binding peptide
  MOD_RES (26)..(27): Xaa is C or S
PIKGYVKPKRGVFYLINIPSLAQPVXXPAA

SEQ ID NO: 78705 - protein, 30 aa, Artificial Sequence; identical to SEQ ID NO: 41161
  Cyclic GFR-binding peptide
  MOD_RES (28)..(29): Xaa is C or S

SEQ ID NO: 78706 - protein, 24 aa, Artificial Sequence
  Cyclic GFR-binding peptide
DPIKGYVVKENEDFYLMNIPSLET

SEQ ID NO: 78707 - protein, 37 aa, Artificial Sequence
  Cyclic GFR-binding peptide
  MOD_RES (31)..(32): Xaa is C or S
RVVMNEYKFKIVNSSDDLYLVSIPELKTPAXXPKPVH

SEQ ID NO: 78708 - protein, 30 aa, Artificial Sequence; identical to SEQ ID NO: 1488
  Cyclic GFR-binding peptide
  MOD_RES (27)..(27): Xaa is C or S

SEQ ID NO: 78709 - protein, 32 aa, Artificial Sequence; identical to SEQ ID NO: 1489
  Cyclic GFR-binding peptide
  MOD_RES (28)..(29): Xaa is C or S

SEQ ID NO: 78710 - protein, 25 aa, Artificial Sequence
  Cyclic GFR-binding peptide
DVVMGYHYKLIIQQKDNKYLMSIPS

SEQ ID NO: 78711 - protein, 40 aa, Artificial Sequence
  Cyclic GFR-binding peptide
  MOD_RES (2)..(34)..(35): Xaa is C or S
GXSRVVMNYHYKLIVNSSDDKYLVSIPSLKTPAXXPKPVH

SEQ ID NO: 78712 - protein, 25 aa, Artificial Sequence
  Cyclic GFR-binding peptide
DYHYKLVVNNASDKYLISIPSLRTP

SEQ ID NO: 78713 - protein, 29 aa, Artificial Sequence
  Cyclic GFR-binding peptide
  MOD_RES (29)..(29): Xaa is C or S
AMGYHYKLYTVVGKDKYLISIPSLKTPVX

SEQ ID NO: 78714 - protein, 33 aa, Artificial Sequence
  Cyclic GFR-binding peptide
  MOD_RES (1)..(3): Xaa is C or S
XGXEEVIMYHYKLLLVRGNDKYLMSIPSTKVPA

SEQ ID NO: 78715 - protein, 32 aa, Artificial Sequence; identical to SEQ ID NO: 1490
  Cyclic GFR-binding peptide
  MOD_RES (29)..(30): Xaa is C or S

SEQ ID NO: 78716 - protein, 26 aa, Artificial Sequence
  Cyclic GFR-binding peptide
  MOD_RES (26)..(26): Xaa is C or S
RYKKLVVNKNEDFYLISIANMKEPVX

SEQ ID NO: 78717 - protein, 25 aa, Artificial Sequence
  Cyclic GFR-binding peptide
KVIMYHYKLIKPTKGIKYLISIPSL

SEQ ID NO: 78718 - protein, 28 aa, Artificial Sequence
  Cyclic GFR-binding peptide
TMNYHYKLVVNKNEDKYLISIPSMKEPV

SEQ ID NO: 78719 - protein, 26 aa, Artificial Sequence
  Cyclic GFR-binding peptide
MGERHKRLTPVGMDDYYLVSTASLKT

SEQ ID NO: 78720 - protein, 30 aa, Artificial Sequence; identical to SEQ ID NO: 29574
  Cyclic GFR-binding peptide
  MOD_RES (26)..(27): Xaa is C or S

SEQ ID NO: 78721 - protein, 36 aa, Artificial Sequence; identical to SEQ ID NO: 1495
  Cyclic GFR-binding peptide
  MOD_RES (2)..(4)..(36): Xaa is C or S

SEQ ID NO: 78722 - protein, 24 aa, Artificial Sequence
  Cyclic GFR-binding peptide
MERHKRLVVKDYEDYYLMSTASLE

SEQ ID NO: 78723 - protein, 34 aa, Artificial Sequence; identical to SEQ ID NO: 41172
  Cyclic GFR-binding peptide
  MOD_RES (32)..(33): Xaa is C or S

SEQ ID NO: 78724 - protein, 26 aa, Artificial Sequence
  Cyclic GFR-binding peptide
  MOD_RES (1)..(1): Xaa is C or S
XSRVIMRYKKLVKPKRGVFYLISIAN

SEQ ID NO: 78725 - protein, 28 aa, Artificial Sequence
  Cyclic GFR-binding peptide
VVMNRHKRLIVNSSDDYYLVSTASLKTP

SEQ ID NO: 78726 - protein, 33 aa, Artificial Sequence; identical to SEQ ID NO: 41174
  Cyclic GFR-binding peptide
  MOD_RES (2)..(4): Xaa is C or S

SEQ ID NO: 78727 - protein, 32 aa, Artificial Sequence; identical to SEQ ID NO: 29581
  Cyclic GFR-binding peptide
  MOD_RES (28)..(29): Xaa is C or S

SEQ ID NO: 78728 - protein, 29 aa, Artificial Sequence
  Cyclic GFR-binding peptide
GEVVMDEYKFKVVKENEDLYLMSIPELET

SEQ ID NO: 78729 - protein, 25 aa, Artificial Sequence
  Cyclic GFR-binding peptide
KVVMNRYKKLIVNNSSDFYLVSIAN

SEQ ID NO: 78730 - protein, 34 aa, Artificial Sequence; identical to SEQ ID NO: 29585
  Cyclic GFR-binding peptide
  MOD_RES (1)..(32)..(33): Xaa is C or S

SEQ ID NO: 78731 - protein, 39 aa, Artificial Sequence; identical to SEQ ID NO: 1510
  Cyclic GFR-binding peptide
  MOD_RES (1)..(3)..(34)..(35): Xaa is C or S

SEQ ID NO: 78732 - protein, 34 aa, Artificial Sequence
  Cyclic GFR-binding peptide
  MOD_RES (2)..(4): Xaa is C or S
SXGXRDVVMGYHYKLIIQQKDNKYLMSIPSMKTP

SEQ ID NO: 78733 - protein, 25 aa, Artificial Sequence
  Cyclic GFR-binding peptide
VMDEYKFKVVNNASDLYLISIPELR

SEQ ID NO: 78734 - protein, 35 aa, Artificial Sequence; identical to SEQ ID NO: 29592
  Cyclic GFR-binding peptide
  MOD_RES (1)..(33)..(34): Xaa is C or S

SEQ ID NO: 78735 - protein, 39 aa, Artificial Sequence; identical to SEQ ID NO: 1511
  Cyclic GFR-binding peptide
  MOD_RES (2)..(4)..(36)..(37): Xaa is C or S

SEQ ID NO: 78736 - protein, 27 aa, Artificial Sequence
  Cyclic GFR-binding peptide
AKVVMNYHYKLIVNNSSDKYLVSIPSL

SEQ ID NO: 78737 - protein, 34 aa, Artificial Sequence; identical to SEQ ID NO: 41183
  Cyclic GFR-binding peptide
  MOD_RES (1)..(33): Xaa is C or S

SEQ ID NO: 78738 - protein, 29 aa, Artificial Sequence
  Cyclic GFR-binding peptide
  MOD_RES (2)..(2): Xaa is C or S
GXEEVIMRHKRLLLVRGNDYYLMSTASTK

SEQ ID NO: 78739 - protein, 37 aa, Artificial Sequence
  Cyclic GFR-binding peptide
  MOD_RES (32)..(33): Xaa is C or S
RDVVMGRHKRLIIQQKDNYYLMSTASMKTPTXXPGAS

SEQ ID NO: 78740 - protein, 28 aa, Artificial Sequence
  Cyclic GFR-binding peptide
  MOD_RES (26)..(27): Xaa is C or S
PIKGYVVKDYEDFYLMNIPSLETPVXXA

SEQ ID NO: 78741 - protein, 28 aa, Artificial Sequence
  Cyclic GFR-binding peptide
KVVMRYKKLVKPTRGVFYLISIANLDQP

SEQ ID NO: 78742 - protein, 36 aa, Artificial Sequence; identical to SEQ ID NO: 41186
  Cyclic GFR-binding peptide
  MOD_RES (1)..(3)..(35)..(36): Xaa is C or S

SEQ ID NO: 78743 - protein, 40 aa, Artificial Sequence; identical to SEQ ID NO: 41187
  Cyclic GFR-binding peptide
  MOD_RES (1)..(3)..(35)..(36): Xaa is C or S

SEQ ID NO: 78744 - protein, 30 aa, Artificial Sequence; identical to SEQ ID NO: 1519
  Cyclic GFR-binding peptide
  MOD_RES (26)..(27): Xaa is C or S

SEQ ID NO: 78745 - protein, 39 aa, Artificial Sequence; identical to SEQ ID NO: 1520
  Cyclic GFR-binding peptide
  MOD_RES (1)..(3)..(34)..(35): Xaa is C or S

SEQ ID NO: 78746 - protein, 31 aa, Artificial Sequence
  Cyclic GFR-binding peptide
  MOD_RES (30)..(31): Xaa is C or S
VVMGRHKRLIIQQKDNYYLMSTASMKTPTXX

SEQ ID NO: 78747 - protein, 30 aa, Artificial Sequence; identical to SEQ ID NO: 1521
  Cyclic GFR-binding peptide

SEQ ID NO: 78748 - protein, 27 aa, Artificial Sequence
  Cyclic GFR-binding peptide
VMNPIKGYIVNSSDDFYLVNIPSLQTP

SEQ ID NO: 78749 - protein, 38 aa, Artificial Sequence; identical to SEQ ID NO: 1522
  Cyclic GFR-binding peptide
  MOD_RES (2)..(4)..(36): Xaa is C or S

SEQ ID NO: 78750 - protein, 34 aa, Artificial Sequence; identical to SEQ ID NO: 41199
  Cyclic GFR-binding peptide
  MOD_RES (2)..(4): Xaa is C or S

SEQ ID NO: 78751 - protein, 37 aa, Artificial Sequence; identical to SEQ ID NO: 1523
  Cyclic GFR-binding peptide
  MOD_RES (1)..(32)..(33): Xaa is C or S

SEQ ID NO: 78752 - protein, 27 aa, Artificial Sequence
  Cyclic GFR-binding peptide
  MOD_RES (1)..(1): Xaa is C or S
XAKVVMNPIKGYIVNNSSDFYLVNIPS

SEQ ID NO: 78753 - protein, 33 aa, Artificial Sequence
  Cyclic GFR-binding peptide
  MOD_RES (28)..(29): Xaa is C or S
IMRHKRLLLVRGNDYYLMSTASTKVPAXXTSPV

SEQ ID NO: 78754 - protein, 22 aa, Artificial Sequence
  Cyclic GFR-binding peptide
MRHKRLVKPTRGVYYLISTASL

SEQ ID NO: 78755 - protein, 22 aa, Artificial Sequence
  Cyclic GFR-binding peptide
MDRYKKLVVNNASDFYLISIAN

SEQ ID NO: 78756 - protein, 32 aa, Artificial Sequence; identical to SEQ ID NO: 1525
  Cyclic GFR-binding peptide
  MOD_RES (2)..(2): Xaa is C or S

SEQ ID NO: 78757 - protein, 37 aa, Artificial Sequence; identical to SEQ ID NO: 41209
  Cyclic GFR-binding peptide
  MOD_RES (2)..(4)..(36)..(37): Xaa is C or S

SEQ ID NO: 78758 - protein, 26 aa, Artificial Sequence
  Cyclic GFR-binding peptide
  MOD_RES (26)..(26): Xaa is C or S
RYKKLIIQQKDNFYLMSIANMKTPTX

SEQ ID NO: 78759 - protein, 32 aa, Artificial Sequence; identical to SEQ ID NO: 41211
  Cyclic GFR-binding peptide
  MOD_RES (30)..(30): Xaa is C or S

SEQ ID NO: 78760 - protein, 29 aa, Artificial Sequence
  Cyclic GFR-binding peptide
  MOD_RES (28)..(29): Xaa is C or S
MGRHKRLYTVVGKDYYLISTASLKTPVXX

SEQ ID NO: 78761 - protein, 32 aa, Artificial Sequence; identical to SEQ ID NO: 1527
  Cyclic GFR-binding peptide
  MOD_RES (27)..(28): Xaa is C or S

SEQ ID NO: 78762 - protein, 30 aa, Artificial Sequence
  Cyclic GFR-binding peptide
  MOD_RES (1)..(1): Xaa is C or S
XESVAMGRHKRLYTVVGKDYYLISTASLKT

SEQ ID NO: 78763 - protein, 26 aa, Artificial Sequence
  Cyclic GFR-binding peptide
EEVIMRHKRLLLVRGNDYYLMSTAST

SEQ ID NO: 78764 - protein, 34 aa, Artificial Sequence; identical to SEQ ID NO: 1530
  Cyclic GFR-binding peptide
  MOD_RES (28)..(29): Xaa is C or S

SEQ ID NO: 78765 - protein, 36 aa, Artificial Sequence
  Cyclic GFR-binding peptide
  MOD_RES (30)..(31): Xaa is C or S
EVIMYHYKLLLVRGNDKYLMSIPSTKVPAXXTSPVR

SEQ ID NO: 78766 - protein, 26 aa, Artificial Sequence
  Cyclic GFR-binding peptide
VMNPIKGYIVNNSSDFYLVNIPSLKT

SEQ ID NO: 78767 - protein, 38 aa, Artificial Sequence; identical to SEQ ID NO: 1531
  Cyclic GFR-binding peptide
  MOD_RES (32)..(33): Xaa is C or S

SEQ ID NO: 78768 - protein, 32 aa, Artificial Sequence; identical to SEQ ID NO: 1532
  Cyclic GFR-binding peptide
  MOD_RES (30)..(31): Xaa is C or S

SEQ ID NO: 78769 - protein, 30 aa, Artificial Sequence
  Cyclic GFR-binding peptide
  MOD_RES (2)..(2): Xaa is C or S
GXSEVVMDEYKFKVVNNASDLYLISIPELR

SEQ ID NO: 78770 - protein, 24 aa, Artificial Sequence
  Cyclic GFR-binding peptide
YHYKLVKPTRGVKYLISIPSLDQP

SEQ ID NO: 78771 - protein, 33 aa, Artificial Sequence; identical to SEQ ID NO: 1537
  Cyclic GFR-binding peptide
  MOD_RES (2)..(4): Xaa is C or S

SEQ ID NO: 78772 - protein, 36 aa, Artificial Sequence
  Cyclic GFR-binding peptide
  MOD_RES (1)..(3)..(34)..(35): Xaa is C or S
XGXEEVIMRHKRLLLVRGNDYYLMSTASTKVPAXXT

SEQ ID NO: 78773 - protein, 37 aa, Artificial Sequence
  Cyclic GFR-binding peptide
  MOD_RES (32)..(33): Xaa is C or S
SEVTMNPIKGYVVNKNEDFYLINIPSMKEPVXXPEPI

SEQ ID NO: 78774 - protein, 36 aa, Artificial Sequence; identical to SEQ ID NO: 1539
  Cyclic GFR-binding peptide
  MOD_RES (31)..(32): Xaa is C or S

SEQ ID NO: 78775 - protein, 28 aa, Artificial Sequence
  Cyclic GFR-binding peptide
  MOD_RES (28)..(28): Xaa is C or S
MEEYKFKVVKDYEDLYLMSIPELETPVX

SEQ ID NO: 78776 - protein, 35 aa, Artificial Sequence; identical to SEQ ID NO: 1543
  Cyclic GFR-binding peptide
  MOD_RES (1)..(3)..(35): Xaa is C or S

SEQ ID NO: 78777 - protein, 35 aa, Artificial Sequence; identical to SEQ ID NO: 41222
  Cyclic GFR-binding peptide
  MOD_RES (2)..(34)..(35): Xaa is C or S

SEQ ID NO: 78778 - protein, 28 aa, Artificial Sequence
  Cyclic GFR-binding peptide
  MOD_RES (26)..(27): Xaa is C or S
RHKRLIVNSSDDYYLVSTASLQTPAXXP

SEQ ID NO: 78779 - protein, 26 aa, Artificial Sequence
  Cyclic GFR-binding peptide
SRVIMRHKRLVKPKRGVYYLISTASL

SEQ ID NO: 78780 - protein, 26 aa, Artificial Sequence
  Cyclic GFR-binding peptide
EVVMDRYKKLVVNNASDFYLISIANL

SEQ ID NO: 78781 - protein, 31 aa, Artificial Sequence; identical to SEQ ID NO: 41223
  Cyclic GFR-binding peptide

SEQ ID NO: 78782 - protein, 35 aa, Artificial Sequence; identical to SEQ ID NO: 41224
  Cyclic GFR-binding peptide
  MOD_RES (31)..(32): Xaa is C or S

SEQ ID NO: 78783 - protein, 36 aa, Artificial Sequence; identical to SEQ ID NO: 1546
  Cyclic GFR-binding peptide
  MOD_RES (30)..(31): Xaa is C or S

SEQ ID NO: 78784 - protein, 41 aa, Artificial Sequence; identical to SEQ ID NO: 29628
  Cyclic GFR-binding peptide
  MOD_RES (2)..(4)..(36)..(37): Xaa is C or S

SEQ ID NO: 78785 - protein, 36 aa, Artificial Sequence; identical to SEQ ID NO: 41226
  Cyclic GFR-binding peptide
  MOD_RES (1)..(3)..(35)..(36): Xaa is C or S

SEQ ID NO: 78786 - protein, 33 aa, Artificial Sequence; identical to SEQ ID NO: 41227
  Cyclic GFR-binding peptide
  MOD_RES (31)..(32): Xaa is C or S

SEQ ID NO: 78787 - protein, 35 aa, Artificial Sequence; identical to SEQ ID NO: 75588
  Cyclic GFR-binding peptide
  MOD_RES (30)..(31): Xaa is C or S

SEQ ID NO: 78788 - protein, 24 aa, Artificial Sequence
  Cyclic GFR-binding peptide
MRHKRLVKPTRGVYYLISTASLDQ

SEQ ID NO: 78789 - protein, 34 aa, Artificial Sequence; identical to SEQ ID NO: 41229
  Cyclic GFR-binding peptide
  MOD_RES (30)..(31): Xaa is C or S

SEQ ID NO: 78790 - protein, 35 aa, Artificial Sequence; identical to SEQ ID NO: 29633
  Cyclic GFR-binding peptide
  MOD_RES (1)..(33)..(34): Xaa is C or S

SEQ ID NO: 78791 - protein, 24 aa, Artificial Sequence
  Cyclic GFR-binding peptide
AMGRHKRLYTVVGKDYYLISTASL

SEQ ID NO: 78792 - protein, 34 aa, Artificial Sequence
  Cyclic GFR-binding peptide
  MOD_RES (1)..(3): Xaa is C or S
XGXRDVVMGYHYKLIIQQKDNKYLMSIPSMKTPT

SEQ ID NO: 78793 - protein, 24 aa, Artificial Sequence
  Cyclic GFR-binding peptide
ERHKRLTPVGMDDYYLVSTASLKT

SEQ ID NO: 78794 - protein, 41 aa, Artificial Sequence
  Cyclic GFR-binding peptide
  MOD_RES (1)..(3)..(35)..(36): Xaa is C or S
XGXESVAMGRHKRLYTVVGKDYYLISTASLKTPVXXAKSAK

SEQ ID NO: 78795 - protein, 36 aa, Artificial Sequence; identical to SEQ ID NO: 41238
  Cyclic GFR-binding peptide
  MOD_RES (30)..(31): Xaa is C or S

SEQ ID NO: 78796 - protein, 41 aa, Artificial Sequence
  Cyclic GFR-binding peptide
  MOD_RES (1)..(3)..(35)..(36): Xaa is C or S
XGXSEVVMDYHYKLVVNNASDKYLISIPSLRTPVXXTPPTS

SEQ ID NO: 78797 - protein, 27 aa, Artificial Sequence
  Cyclic GFR-binding peptide
GEPIKGYTPVGMDDFYLVNIPSLKTPV

SEQ ID NO: 78798 - protein, 30 aa, Artificial Sequence; identical to SEQ ID NO: 41244
  Cyclic GFR-binding peptide
  MOD_RES (27)..(28): Xaa is C or S

SEQ ID NO: 78799 - protein, 33 aa, Artificial Sequence
  Cyclic GFR-binding peptide
  MOD_RES (30)..(31): Xaa is C or S
VTMNPIKGYVVNKNEDFYLINIPSMKEPVXXPE

SEQ ID NO: 78800 - protein, 25 aa, Artificial Sequence
  Cyclic GFR-binding peptide
ERYKKLTPVGMDDFYLVSIANLKTP

SEQ ID NO: 78801 - protein, 29 aa, Artificial Sequence
  Cyclic GFR-binding peptide
AEVVMDPIKGYVVNNAADFYLINIPSLRA

SEQ ID NO: 78802 - protein, 37 aa, Artificial Sequence
  Cyclic GFR-binding peptide
  MOD_RES (32)..(33): Xaa is C or S
RDVVMGEYKFKIIQQKDNLYLMSIPEMKTPTXXPGAS

SEQ ID NO: 78803 - protein, 26 aa, Artificial Sequence
  Cyclic GFR-binding peptide
  MOD_RES (26)..(26): Xaa is C or S
PIKGYTPVGMDDFYLVNIPSLKTPVX

SEQ ID NO: 78804 - protein, 37 aa, Artificial Sequence; identical to SEQ ID NO: 29651
  Cyclic GFR-binding peptide
  MOD_RES (31)..(32): Xaa is C or S

SEQ ID NO: 78805 - protein, 39 aa, Artificial Sequence; identical to SEQ ID NO: 29652
  Cyclic GFR-binding peptide
  MOD_RES (1)..(33)..(34): Xaa is C or S

SEQ ID NO: 78806 - protein, 38 aa, Artificial Sequence
  Cyclic GFR-binding peptide
  MOD_RES (1)..(33)..(34): Xaa is C or S
XSEVVMDEYKFKVVNNASDLYLISIPELRTPVXXTPPT

SEQ ID NO: 78807 - protein, 31 aa, Artificial Sequence; identical to SEQ ID NO: 41255
  Cyclic GFR-binding peptide
  MOD_RES (26)..(26): Xaa is C or S

SEQ ID NO: 78808 - protein, 22 aa, Artificial Sequence
  Cyclic GFR-binding peptide
PIKGYIVNSSDDFYLVNIPSLQ

SEQ ID NO: 78809 - protein, 33 aa, Artificial Sequence; identical to SEQ ID NO: 29658
  Cyclic GFR-binding peptide
  MOD_RES (28)..(29): Xaa is C or S

SEQ ID NO: 78810 - protein, 31 aa, Artificial Sequence; identical to SEQ ID NO: 1570
  Cyclic GFR-binding peptide

SEQ ID NO: 78811 - protein, 28 aa, Artificial Sequence
  Cyclic GFR-binding peptide
EVVMDEYKFKVVNNASDLYLISIPELRT

SEQ ID NO: 78812 - protein, 29 aa, Artificial Sequence
  Cyclic GFR-binding peptide
  MOD_RES (28)..(29): Xaa is C or S
VMRYKKLVKPTRGVFYLISIANLDQPVXX

SEQ ID NO: 78813 - protein, 30 aa, Artificial Sequence; identical to SEQ ID NO: 29661
  Cyclic GFR-binding peptide
  MOD_RES (1)..(3): Xaa is C or S

SEQ ID NO: 78814 - protein, 25 aa, Artificial Sequence
  Cyclic GFR-binding peptide
VAMGRYKKLYTVVGKDFYLISIANL

SEQ ID NO: 78815 - protein, 30 aa, Artificial Sequence
  Cyclic GFR-binding peptide
  MOD_RES (29)..(30): Xaa is C or S
VIMPIKGYIKPTKGIFYLINIPSLDQSVXX

SEQ ID NO: 78816 - protein, 21 aa, Artificial Sequence
  Cyclic GFR-binding peptide
DRHKRLVVNNAADYYLISTAS

SEQ ID NO: 78817 - protein, 35 aa, Artificial Sequence
  Cyclic GFR-binding peptide
  MOD_RES (29)..(30): Xaa is C or S
VMNRYKKLIVNSSDDFYLVSIANLKTPAXXPKPVH

SEQ ID NO: 78818 - protein, 33 aa, Artificial Sequence; identical to SEQ ID NO: 29666
  Cyclic GFR-binding peptide
  MOD_RES (1)..(33): Xaa is C or S

SEQ ID NO: 78819 - protein, 22 aa, Artificial Sequence
  Cyclic GFR-binding peptide
DPIKGYVVKENEDFYLMNIPSL

SEQ ID NO: 78820 - protein, 36 aa, Artificial Sequence
  Cyclic GFR-binding peptide
  MOD_RES (31)..(32): Xaa is C or S
EEVIMRHKRLLLVRGNDYYLMSTASTKVPAXXTSPV

SEQ ID NO: 78821 - protein, 34 aa, Artificial Sequence; identical to SEQ ID NO: 29672
  Cyclic GFR-binding peptide
  MOD_RES (30)..(31): Xaa is C or S

SEQ ID NO: 78822 - protein, 30 aa, Artificial Sequence
  Cyclic GFR-binding peptide
DVVMGEYKFKIIQQKDNLYLMSIPEMKTPT

SEQ ID NO: 78823 - protein, 35 aa, Artificial Sequence
  Cyclic GFR-binding peptide
  MOD_RES (29)..(30): Xaa is C or S
VIMPIKGYVKPKRGVFYLINIPSLAQPVXXPAASA

SEQ ID NO: 78824 - protein, 32 aa, Artificial Sequence; identical to SEQ ID NO: 1582
  Cyclic GFR-binding peptide
  MOD_RES (2)..(4): Xaa is C or S

SEQ ID NO: 78825 - protein, 36 aa, Artificial Sequence
  Cyclic GFR-binding peptide
  MOD_RES (30)..(31): Xaa is C or S
VVMGEYKFKIIQQKDNLYLMSIPEMKTPTXXPGASG

SEQ ID NO: 78826 - protein, 28 aa, Artificial Sequence
  Cyclic GFR-binding peptide
VVMGRYKKLIIQQKDNFYLMSIANMKTP

SEQ ID NO: 78827 - protein, 20 aa, Artificial Sequence
  Cyclic GFR-binding peptide
EYKFKIKPTKGILYLISIPE

SEQ ID NO: 78828 - protein, 34 aa, Artificial Sequence; identical to SEQ ID NO: 1585
  Cyclic GFR-binding peptide
  MOD_RES (30)..(31): Xaa is C or S

SEQ ID NO: 78829 - protein, 33 aa, Artificial Sequence; identical to SEQ ID NO: 1587
  Cyclic GFR-binding peptide
  MOD_RES (2)..(4): Xaa is C or S

SEQ ID NO: 78830 - protein, 22 aa, Artificial Sequence
  Cyclic GFR-binding peptide
YHYKLVVNNAADKYLISIPSLR

SEQ ID NO: 78831 - protein, 37 aa, Artificial Sequence; identical to SEQ ID NO: 29678
  Cyclic GFR-binding peptide
  MOD_RES (1)..(3)..(34)..(35): Xaa is C or S

SEQ ID NO: 78832 - protein, 36 aa, Artificial Sequence
  Cyclic GFR-binding peptide
  MOD_RES (32)..(33): Xaa is C or S
SEVVMDEYKFKVVNNASDLYLISIPELRTPVXXTPP

SEQ ID NO: 78833 - protein, 31 aa, Artificial Sequence
  Cyclic GFR-binding peptide
  MOD_RES (31)..(31): Xaa is C or S
EVTMNPIKGYVVNKNEDFYLINIPSMKEPVX

SEQ ID NO: 78834 - protein, 30 aa, Artificial Sequence; identical to SEQ ID NO: 29681
  Cyclic GFR-binding peptide
  MOD_RES (26)..(27): Xaa is C or S

SEQ ID NO: 78835 - protein, 23 aa, Artificial Sequence
  Cyclic GFR-binding peptide
TMNRYKKLVVNKNEDFYLISIAN

SEQ ID NO: 78836 - protein, 33 aa, Artificial Sequence; identical to SEQ ID NO: 41292
  Cyclic GFR-binding peptide
  MOD_RES (32)..(33): Xaa is C or S

SEQ ID NO: 78837 - protein, 28 aa, Artificial Sequence
  Cyclic GFR-binding peptide
  MOD_RES (2)..(2): Xaa is C or S
GXAEVVMDPIKGYVVNNAADFYLINIPS

SEQ ID NO: 78838 - protein, 37 aa, Artificial Sequence; identical to SEQ ID NO: 41296
  Cyclic GFR-binding peptide
  MOD_RES (1)..(3)..(35)..(36): Xaa is C or S

SEQ ID NO: 78839 - protein, 35 aa, Artificial Sequence; identical to SEQ ID NO: 29688
  Cyclic GFR-binding peptide
  MOD_RES (30)..(31): Xaa is C or S

SEQ ID NO: 78840 - protein, 27 aa, Artificial Sequence
  Cyclic GFR-binding peptide
SRVVMNPIKGYIVNSSDDFYLVNIPSL

SEQ ID NO: 78841 - protein, 27 aa, Artificial Sequence
  Cyclic GFR-binding peptide
  MOD_RES (2)..(2): Xaa is C or S
KXSKVIMPIKGYIKPTKGIFYLINIPS

SEQ ID NO: 78842 - protein, 37 aa, Artificial Sequence; identical to SEQ ID NO: 1595
  Cyclic GFR-binding peptide
  MOD_RES (2)..(4)..(35)..(36): Xaa is C or S

SEQ ID NO: 78843 - protein, 27 aa, Artificial Sequence
  Cyclic GFR-binding peptide
VMNEYKFKIVNNSSDLYLVSIPELKTP

SEQ ID NO: 78844 - protein, 29 aa, Artificial Sequence
  Cyclic GFR-binding peptide
  MOD_RES (1)..(3): Xaa is C or S
XGXSRVVMNYHYKLIVNSSDDKYLVSIPS

SEQ ID NO: 78845 - protein, 27 aa, Artificial Sequence
  Cyclic GFR-binding peptide
  MOD_RES (2)..(2): Xaa is C or S
GXEEVIMRHKRLLLVRGNDYYLMSTAS

SEQ ID NO: 78846 - protein, 32 aa, Artificial Sequence; identical to SEQ ID NO: 1598
  Cyclic GFR-binding peptide
  MOD_RES (27)..(27): Xaa is C or S

SEQ ID NO: 78847 - protein, 25 aa, Artificial Sequence
  Cyclic GFR-binding peptide
ERHKRLTPVGMDDYYLVSTASLKTP

SEQ ID NO: 78848 - protein, 38 aa, Artificial Sequence; identical to SEQ ID NO: 12163
  Cyclic GFR-binding peptide
  MOD_RES (32)..(33): Xaa is C or S

SEQ ID NO: 78849 - protein, 31 aa, Artificial Sequence; identical to SEQ ID NO: 41301
  Cyclic GFR-binding peptide
  MOD_RES (29)..(30): Xaa is C or S

SEQ ID NO: 78850 - protein, 41 aa, Artificial Sequence; identical to SEQ ID NO: 1600
  Cyclic GFR-binding peptide
  MOD_RES (2)..(4)..(36): Xaa is C or S

SEQ ID NO: 78851 - protein, 36 aa, Artificial Sequence
  Cyclic GFR-binding peptide
  MOD_RES (1)..(32)..(33): Xaa is C or S
XEEVIMEYKFKLLVRGNDLYLMSIPETKVPAXXTSP

SEQ ID NO: 78852 - protein, 29 aa, Artificial Sequence
  Cyclic GFR-binding peptide
  MOD_RES (26)..(27): Xaa is C or S
RHKRLIIQQKDNYYLMSTASMKTPTXXPG

SEQ ID NO: 78853 - protein, 27 aa, Artificial Sequence
  Cyclic GFR-binding peptide
IMYHYKLIKPTKGIKYLISIPSLDQSV

SEQ ID NO: 78854 - protein, 26 aa, Artificial Sequence
  Cyclic GFR-binding peptide
MNEYKFKVVNKNEDLYLISIPEMKEP

SEQ ID NO: 78855 - protein, 30 aa, Artificial Sequence; identical to SEQ ID NO: 1602
  Cyclic GFR-binding peptide

SEQ ID NO: 78856 - protein, 27 aa, Artificial Sequence
  Cyclic GFR-binding peptide
GEVVMDRHKRLVVKENEDYYLMSTASL

SEQ ID NO: 78857 - protein, 32 aa, Artificial Sequence; identical to SEQ ID NO: 41305
  Cyclic GFR-binding peptide
  MOD_RES (32)..(32): Xaa is C or S

SEQ ID NO: 78858 - protein, 27 aa, Artificial Sequence
  Cyclic GFR-binding peptide
ARVVMNPIKGYIVNSSDDFYLVNIPSL

SEQ ID NO: 78859 - protein, 26 aa, Artificial Sequence
  Cyclic GFR-binding peptide
SRVIMPIKGYVKPKRGVFYLINIPSL

SEQ ID NO: 78860 - protein, 41 aa, Artificial Sequence; identical to SEQ ID NO: 29705
  Cyclic GFR-binding peptide
  MOD_RES (1)..(3)..(35)..(36): Xaa is C or S

SEQ ID NO: 78861 - protein, 32 aa, Artificial Sequence; identical to SEQ ID NO: 1611
  Cyclic GFR-binding peptide
  MOD_RES (32)..(32): Xaa is C or S

SEQ ID NO: 78862 - protein, 39 aa, Artificial Sequence; identical to SEQ ID NO: 29707
  Cyclic GFR-binding peptide
  MOD_RES (2)..(4)..(35)..(36): Xaa is C or S

SEQ ID NO: 78863 - protein, 35 aa, Artificial Sequence; identical to SEQ ID NO: 1615
  Cyclic GFR-binding peptide
  MOD_RES (30)..(31): Xaa is C or S

SEQ ID NO: 78864 - protein, 30 aa, Artificial Sequence
  Cyclic GFR-binding peptide
  MOD_RES (27)..(28): Xaa is C or S
MPIKGYIKPTKGIFYLINIPSLDQSVXXPS

SEQ ID NO: 78865 - protein, 23 aa, Artificial Sequence
  Cyclic GFR-binding peptide
RYKKLIVNNSSDFYLVSIANLKT

SEQ ID NO: 78866 - protein, 25 aa, Artificial Sequence
  Cyclic GFR-binding peptide
VTMNYHYKLVVNKNEDKYLISIPSM

SEQ ID NO: 78867 - protein, 38 aa, Artificial Sequence; identical to SEQ ID NO: 1621
  Cyclic GFR-binding peptide
  MOD_RES (2)..(4)..(36)..(37): Xaa is C or S

SEQ ID NO: 78868 - protein, 32 aa, Artificial Sequence
  Cyclic GFR-binding peptide
  MOD_RES (1)..(3): Xaa is C or S
XAXSEVTMNPIKGYVVNKNEDFYLINIPSMKE

SEQ ID NO: 78869 - protein, 26 aa, Artificial Sequence
  Cyclic GFR-binding peptide
AEVVMDEYKFKVVNNAADLYLISIPE

SEQ ID NO: 78870 - protein, 35 aa, Artificial Sequence; identical to SEQ ID NO: 29716
  Cyclic GFR-binding peptide
  MOD_RES (32)..(33): Xaa is C or S

SEQ ID NO: 78871 - protein, 30 aa, Artificial Sequence; identical to SEQ ID NO: 75633
  Cyclic GFR-binding peptide
  MOD_RES (26)..(27): Xaa is C or S

SEQ ID NO: 78872 - protein, 36 aa, Artificial Sequence; identical to SEQ ID NO: 12187
  Cyclic GFR-binding peptide
  MOD_RES (31)..(32): Xaa is C or S

SEQ ID NO: 78873 - protein, 38 aa, Artificial Sequence; identical to SEQ ID NO: 29718
  Cyclic GFR-binding peptide
  MOD_RES (1)..(33)..(34): Xaa is C or S

SEQ ID NO: 78874 - protein, 27 aa, Artificial Sequence
  Cyclic GFR-binding peptide
  MOD_RES (26)..(27): Xaa is C or S
RYKKLTPVGMDDFYLVSIANLKTPVXX

SEQ ID NO: 78875 - protein, 26 aa, Artificial Sequence
  Cyclic GFR-binding peptide
  MOD_RES (26)..(26): Xaa is C or S
EYKFKVKPKRGVLYLISIPELAQPVX

SEQ ID NO: 78876 - protein, 33 aa, Artificial Sequence; identical to SEQ ID NO: 29725
  Cyclic GFR-binding peptide
  MOD_RES (27)..(28): Xaa is C or S

SEQ ID NO: 78877 - protein, 33 aa, Artificial Sequence; identical to SEQ ID NO: 1627
  Cyclic GFR-binding peptide
  MOD_RES (33)..(33): Xaa is C or S

SEQ ID NO: 78878 - protein, 31 aa, Artificial Sequence; identical to SEQ ID NO: 1628
  Cyclic GFR-binding peptide
  MOD_RES (26)..(27): Xaa is C or S

SEQ ID NO: 78879 - protein, 27 aa, Artificial Sequence
  Cyclic GFR-binding peptide
AEVVMDPIKGYVVNNAADFYLINIPSL

SEQ ID NO: 78880 - protein, 29 aa, Artificial Sequence
  Cyclic GFR-binding peptide
VVMEEYKFKVVKDYEDLYLMSIPELETPV

SEQ ID NO: 78881 - protein, 37 aa, Artificial Sequence; identical to SEQ ID NO: 1630
  Cyclic GFR-binding peptide
  MOD_RES (32)..(33): Xaa is C or S

SEQ ID NO: 78882 - protein, 23 aa, Artificial Sequence
  Cyclic GFR-binding peptide
RYKKLVVNNASDFYLISIANLRT

SEQ ID NO: 78883 - protein, 32 aa, Artificial Sequence; identical to SEQ ID NO: 1636
  Cyclic GFR-binding peptide
  MOD_RES (30)..(31): Xaa is C or S

SEQ ID NO: 78884 - protein, 35 aa, Artificial Sequence
  Cyclic GFR-binding peptide
  MOD_RES (1)..(3)..(35): Xaa is C or S
XGXAEVVMDRHKRLVVNNAADYYLISTASLRAPVX

SEQ ID NO: 78885 - protein, 27 aa, Artificial Sequence
  Cyclic GFR-binding peptide
KVIMYHYKLIKPTKGIKYLISIPSLDQ

SEQ ID NO: 78886 - protein, 32 aa, Artificial Sequence
  Cyclic GFR-binding peptide
  MOD_RES (28)..(29): Xaa is C or S
MNEYKFKVVNKNEDLYLISIPEMKEPVXXPEP

SEQ ID NO: 78887 - protein, 31 aa, Artificial Sequence; identical to SEQ ID NO: 41352
  Cyclic GFR-binding peptide
  MOD_RES (27)..(28): Xaa is C or S

SEQ ID NO: 78888 - protein, 34 aa, Artificial Sequence
  Cyclic GFR-binding peptide
  MOD_RES (30)..(31): Xaa is C or S
VTMNPIKGYVVNKNEDFYLINIPSMKEPVXXPEP

SEQ ID NO: 78889 - protein, 41 aa, Artificial Sequence; identical to SEQ ID NO: 41353
  Cyclic GFR-binding peptide
  MOD_RES (1)..(3)..(35)..(36): Xaa is C or S

SEQ ID NO: 78890 - protein, 36 aa, Artificial Sequence; identical to SEQ ID NO: 41357
  Cyclic GFR-binding peptide
  MOD_RES (32)..(32): Xaa is C or S

SEQ ID NO: 78891 - protein, 23 aa, Artificial Sequence
  Cyclic GFR-binding peptide
PIKGYIVNSSDDFYLVNIPSLKT

SEQ ID NO: 78892 - protein, 30 aa, Artificial Sequence; identical to SEQ ID NO: 1649
  Cyclic GFR-binding peptide
  MOD_RES (2)..(2): Xaa is C or S

SEQ ID NO: 78893 - protein, 35 aa, Artificial Sequence
  Cyclic GFR-binding peptide
  MOD_RES (1)..(3)..(35): Xaa is C or S
XAXSEVTMNEYKFKVVNKNEDLYLISIPEMKEPVX

SEQ ID NO: 78894 - protein, 26 aa, Artificial Sequence
  Cyclic GFR-binding peptide
VMDRYKKLVVNNASDFYLISIANLRT

SEQ ID NO: 78895 - protein, 32 aa, Artificial Sequence
  Cyclic GFR-binding peptide
  MOD_RES (29)..(30): Xaa is C or S
VMGYHYKLIIQQKDNKYLMSIPSMKTPTXXPG

SEQ ID NO: 78896 - protein, 29 aa, Artificial Sequence
  Cyclic GFR-binding peptide
  MOD_RES (2)..(2): Xaa is C or S
GXSEVVMDPIKGYVVNNASDFYLINIPSL

SEQ ID NO: 78897 - protein, 29 aa, Artificial Sequence
  Cyclic GFR-binding peptide
VVMNRHKRLIVNSSDDYYLVSTASLKTPA

SEQ ID NO: 78898 - protein, 32 aa, Artificial Sequence; identical to SEQ ID NO: 29756
  Cyclic GFR-binding peptide
  MOD_RES (2)..(4): Xaa is C or S

SEQ ID NO: 78899 - protein, 23 aa, Artificial Sequence
  Cyclic GFR-binding peptide
MDYHYKLVVKENEDKYLMSIPSL

SEQ ID NO: 78900 - protein, 22 aa, Artificial Sequence
  Cyclic GFR-binding peptide
PIKGYVVNNASDFYLINIPSLR

SEQ ID NO: 78901 - protein, 39 aa, Artificial Sequence; identical to SEQ ID NO: 41375
  Cyclic GFR-binding peptide
  MOD_RES (1)..(33)..(34): Xaa is C or S

SEQ ID NO: 78902 - protein, 30 aa, Artificial Sequence; identical to SEQ ID NO: 29759
  Cyclic GFR-binding peptide
  MOD_RES (27)..(27): Xaa is C or S

SEQ ID NO: 78903 - protein, 24 aa, Artificial Sequence
  Cyclic GFR-binding peptide
DEYKFKVVNNAADLYLISIPELRA

SEQ ID NO: 78904 - protein, 34 aa, Artificial Sequence; identical to SEQ ID NO: 1663
  Cyclic GFR-binding peptide
  MOD_RES (2)..(4): Xaa is C or S

SEQ ID NO: 78905 - protein, 30 aa, Artificial Sequence; identical to SEQ ID NO: 41379
  Cyclic GFR-binding peptide
  MOD_RES (27)..(28): Xaa is C or S

SEQ ID NO: 78906 - protein, 29 aa, Artificial Sequence
  Cyclic GFR-binding peptide
  MOD_RES (1)..(3): Xaa is C or S
XKXSKVIMYHYKLIKPTKGIKYLISIPSL

SEQ ID NO: 78907 - protein, 32 aa, Artificial Sequence; identical to SEQ ID NO: 1668
  Cyclic GFR-binding peptide
  MOD_RES (29)..(30): Xaa is C or S

SEQ ID NO: 78908 - protein, 35 aa, Artificial Sequence; identical to SEQ ID NO: 1669
  Cyclic GFR-binding peptide
  MOD_RES (1)..(33)..(34): Xaa is C or S

SEQ ID NO: 78909 - protein, 33 aa, Artificial Sequence
  Cyclic GFR-binding peptide
  MOD_RES (28)..(29): Xaa is C or S
MNPIKGYVVNKNEDFYLINIPSMKEPVXXPEPI

SEQ ID NO: 78910 - protein, 34 aa, Artificial Sequence; identical to SEQ ID NO: 29769
  Cyclic GFR-binding peptide
  MOD_RES (2)..(4): Xaa is C or S

SEQ ID NO: 78911 - protein, 31 aa, Artificial Sequence; identical to SEQ ID NO: 41389
  Cyclic GFR-binding peptide

SEQ ID NO: 78912 - protein, 23 aa, Artificial Sequence
  Cyclic GFR-binding peptide
EYKFKIKPTKGILYLISIPELDQ

SEQ ID NO: 78913 - protein, 37 aa, Artificial Sequence; identical to SEQ ID NO: 29772
  Cyclic GFR-binding peptide
  MOD_RES (1)..(33)..(34): Xaa is C or S

SEQ ID NO: 78914 - protein, 32 aa, Artificial Sequence; identical to SEQ ID NO: 1673
  Cyclic GFR-binding peptide
  MOD_RES (26)..(27): Xaa is C or S

SEQ ID NO: 78915 - protein, 27 aa, Artificial Sequence
  Cyclic GFR-binding peptide
VMDPIKGYVVNNAADFYLINIPSLRAP

SEQ ID NO: 78916 - protein, 25 aa, Artificial Sequence
  Cyclic GFR-binding peptide
EVVMERYKKLVVKDYEDFYLMSIAN

SEQ ID NO: 78917 - protein, 23 aa, Artificial Sequence
  Cyclic GFR-binding peptide
RYKKLIVNSSDDFYLVSIANLQT

SEQ ID NO: 78918 - protein, 41 aa, Artificial Sequence; identical to SEQ ID NO: 75673
  Cyclic GFR-binding peptide
  MOD_RES (2)..(4)..(36)..(37): Xaa is C or S

SEQ ID NO: 78919 - protein, 39 aa, Artificial Sequence; identical to SEQ ID NO: 1678
  Cyclic GFR-binding peptide
  MOD_RES (2)..(34): Xaa is C or S

SEQ ID NO: 78920 - protein, 37 aa, Artificial Sequence; identical to SEQ ID NO: 75674
  Cyclic GFR-binding peptide
  MOD_RES (32)..(33): Xaa is C or S

SEQ ID NO: 78921 - protein, 32 aa, Artificial Sequence
  Cyclic GFR-binding peptide
  MOD_RES (27)..(28): Xaa is C or S
NEYKFKVVNKNEDLYLISIPEMKEPVXXPEPI

SEQ ID NO: 78922 - protein, 35 aa, Artificial Sequence; identical to SEQ ID NO: 1686
  Cyclic GFR-binding peptide
  MOD_RES (2)..(4): Xaa is C or S

SEQ ID NO: 78923 - protein, 23 aa, Artificial Sequence
  Cyclic GFR-binding peptide
MDEYKFKVVNNASDLYLISIPEL

SEQ ID NO: 78924 - protein, 31 aa, Artificial Sequence; identical to SEQ ID NO: 1689
  Cyclic GFR-binding peptide
  MOD_RES (2)..(2): Xaa is C or S

SEQ ID NO: 78925 - protein, 27 aa, Artificial Sequence
  Cyclic GFR-binding peptide
MGPIKGYYTVVGKDFYLINIPSLKTPV

SEQ ID NO: 78926 - protein, 37 aa, Artificial Sequence; identical to SEQ ID NO: 41408
  Cyclic GFR-binding peptide
  MOD_RES (2)..(33)..(34): Xaa is C or S

SEQ ID NO: 78927 - protein, 26 aa, Artificial Sequence
  Cyclic GFR-binding peptide
GRYKKLYTVVGKDFYLISIANLKTPV

SEQ ID NO: 78928 - protein, 26 aa, Artificial Sequence
  Cyclic GFR-binding peptide
SRVIMEYKFKVKPKRGVLYLISIPEL

SEQ ID NO: 78929 - protein, 33 aa, Artificial Sequence; identical to SEQ ID NO: 29789
  Cyclic GFR-binding peptide
  MOD_RES (2)..(2): Xaa is C or S

SEQ ID NO: 78930 - protein, 31 aa, Artificial Sequence; identical to SEQ ID NO: 41410
  Cyclic GFR-binding peptide
  MOD_RES (2)..(2): Xaa is C or S

SEQ ID NO: 78931 - protein, 23 aa, Artificial Sequence
  Cyclic GFR-binding peptide
MDPIKGYVVNNAADFYLINIPSL

SEQ ID NO: 78932 - protein, 29 aa, Artificial Sequence
  Cyclic GFR-binding peptide
  MOD_RES (29)..(29): Xaa is C or S
MGERHKRLTPVGMDDYYLVSTASLKTPVX

SEQ ID NO: 78933 - protein, 23 aa, Artificial Sequence
  Cyclic GFR-binding peptide
EYKFKVVKDYEDLYLMSIPELET

SEQ ID NO: 78934 - protein, 37 aa, Artificial Sequence; identical to SEQ ID NO: 41412
  Cyclic GFR-binding peptide
  MOD_RES (1)..(32)..(33): Xaa is C or S

SEQ ID NO: 78935 - protein, 22 aa, Artificial Sequence
  Cyclic GFR-binding peptide
RHKRLVVKDYEDYYLMSTASLE

SEQ ID NO: 78936 - protein, 37 aa, Artificial Sequence; identical to SEQ ID NO: 1695
  Cyclic GFR-binding peptide
  MOD_RES (1)..(34)..(35): Xaa is C or S

SEQ ID NO: 78937 - protein, 30 aa, Artificial Sequence; identical to SEQ ID NO: 1696
  Cyclic GFR-binding peptide

SEQ ID NO: 78938 - protein, 32 aa, Artificial Sequence; identical to SEQ ID NO: 29796
  Cyclic GFR-binding peptide
  MOD_RES (30)..(31): Xaa is C or S

SEQ ID NO: 78939 - protein, 23 aa, Artificial Sequence
  Cyclic GFR-binding peptide
VVMRYKKLVKPTRGVFYLISIAN

SEQ ID NO: 78940 - protein, 21 aa, Artificial Sequence
  Cyclic GFR-binding peptide
EYKFKVVNNAADLYLISIPEL

SEQ ID NO: 78941 - protein, 32 aa, Artificial Sequence; identical to SEQ ID NO: 41420
  Cyclic GFR-binding peptide
  MOD_RES (1)..(1): Xaa is C or S

SEQ ID NO: 78942 - protein, 28 aa, Artificial Sequence
  Cyclic GFR-binding peptide
RVVMNEYKFKIVNSSDDLYLVSIPELQT

SEQ ID NO: 78943 - protein, 21 aa, Artificial Sequence
  Cyclic GFR-binding peptide
YHYKLVKPTRGVKYLISIPSL

SEQ ID NO: 78944 - protein, 22 aa, Artificial Sequence
  Cyclic GFR-binding peptide
NPIKGYIVNSSDDFYLVNIPSL

SEQ ID NO: 78945 - protein, 40 aa, Artificial Sequence; identical to SEQ ID NO: 1702
  Cyclic GFR-binding peptide
  MOD_RES (2)..(34)..(35): Xaa is C or S

SEQ ID NO: 78946 - protein, 29 aa, Artificial Sequence
  Cyclic GFR-binding peptide
RVVMNRHKRLIVNSSDDYYLVSTASLQTP

SEQ ID NO: 78947 - protein, 33 aa, Artificial Sequence
  Cyclic GFR-binding peptide
  MOD_RES (29)..(30): Xaa is C or S
VMDRHKRLVVNNASDYYLISTASLRTPVXXTPP

SEQ ID NO: 78948 - protein, 24 aa, Artificial Sequence
  Cyclic GFR-binding peptide
DYHYKLVVNNASDKYLISIPSLRT

SEQ ID NO: 78949 - protein, 31 aa, Artificial Sequence; identical to SEQ ID NO: 1705
  Cyclic GFR-binding peptide
  MOD_RES (26)..(27): Xaa is C or S

SEQ ID NO: 78950 - protein, 36 aa, Artificial Sequence; identical to SEQ ID NO: 12266
  Cyclic GFR-binding peptide
  MOD_RES (32)..(33): Xaa is C or S

SEQ ID NO: 78951 - protein, 26 aa, Artificial Sequence
  Cyclic GFR-binding peptide
VIMRYKKLVKPKRGVFYLISIANLAQ

SEQ ID NO: 78952 - protein, 37 aa, Artificial Sequence; identical to SEQ ID NO: 29811
  Cyclic GFR-binding peptide
  MOD_RES (32)..(33): Xaa is C or S

SEQ ID NO: 78953 - protein, 30 aa, Artificial Sequence
  Cyclic GFR-binding peptide
  MOD_RES (26)..(27): Xaa is C or S
EYKFKLLVRGNDLYLMSIPETKVPAXXTSP

SEQ ID NO: 78954 - protein, 40 aa, Artificial Sequence; identical to SEQ ID NO: 1707
  Cyclic GFR-binding peptide
  MOD_RES (1)..(3)..(34)..(35): Xaa is C or S

SEQ ID NO: 78955 - protein, 32 aa, Artificial Sequence; identical to SEQ ID NO: 29813
  Cyclic GFR-binding peptide
  MOD_RES (29)..(29): Xaa is C or S

SEQ ID NO: 78956 - protein, 23 aa, Artificial Sequence
  Cyclic GFR-binding peptide
NRYKKLIVNSSDDFYLVSIANLQ

SEQ ID NO: 78957 - protein, 23 aa, Artificial Sequence
  Cyclic GFR-binding peptide
MRHKRLVKPTRGVYYLISTASLD

SEQ ID NO: 78958 - protein, 37 aa, Artificial Sequence; identical to SEQ ID NO: 41436
  Cyclic GFR-binding peptide
  MOD_RES (2)..(34)..(35): Xaa is C or S

SEQ ID NO: 78959 - protein, 29 aa, Artificial Sequence
  Cyclic GFR-binding peptide
  MOD_RES (2)..(2): Xaa is C or S
GXESVAMGRHKRLYTVVGKDYYLISTASL

SEQ ID NO: 78960 - protein, 26 aa, Artificial Sequence
  Cyclic GFR-binding peptide
GRHKRLYTVVGKDYYLISTASLKTPV

SEQ ID NO: 78961 - protein, 40 aa, Artificial Sequence
  Cyclic GFR-binding peptide
  MOD_RES (2)..(4)..(36)..(37): Xaa is C or S
RXAXSEVTMNYHYKLVVNKNEDKYLISIPSMKEPVXXPEP

SEQ ID NO: 78962 - protein, 24 aa, Artificial Sequence
  Cyclic GFR-binding peptide
VVMDEYKFKVVKENEDLYLMSIPE

SEQ ID NO: 78963 - protein, 24 aa, Artificial Sequence
  Cyclic GFR-binding peptide
EYKFKVKPTRGVLYLISIPELDQP

SEQ ID NO: 78964 - protein, 28 aa, Artificial Sequence
  Cyclic GFR-binding peptide
  MOD_RES (1)..(1): Xaa is C or S
XSRVIMRYKKLVKPKRGVFYLISIANLA

SEQ ID NO: 78965 - protein, 37 aa, Artificial Sequence; identical to SEQ ID NO: 41438
  Cyclic GFR-binding peptide
  MOD_RES (31)..(32): Xaa is C or S

SEQ ID NO: 78966 - protein, 21 aa, Artificial Sequence
  Cyclic GFR-binding peptide
PIKGYVVKENEDFYLMNIPSL

SEQ ID NO: 78967 - protein, 29 aa, Artificial Sequence
  Cyclic GFR-binding peptide
AKVVMNYHYKLIVNNSSDKYLVSIPSLKT

SEQ ID NO: 78968 - protein, 32 aa, Artificial Sequence; identical to SEQ ID NO: 41441
  Cyclic GFR-binding peptide
  MOD_RES (31)..(32): Xaa is C or S

SEQ ID NO: 78969 - protein, 26 aa, Artificial Sequence
  Cyclic GFR-binding peptide
VVMNYHYKLIVNSSDDKYLVSIPSLK

SEQ ID NO: 78970 - protein, 30 aa, Artificial Sequence; identical to SEQ ID NO: 1724
  Cyclic GFR-binding peptide
  MOD_RES (1)..(3): Xaa is C or S

SEQ ID NO: 78971 - protein, 34 aa, Artificial Sequence; identical to SEQ ID NO: 12292
  Cyclic GFR-binding peptide
  MOD_RES (30)..(31): Xaa is C or S

SEQ ID NO: 78972 - protein, 27 aa, Artificial Sequence
  Cyclic GFR-binding peptide
VVMRYKKLVKPTRGVFYLISIANLDQP

SEQ ID NO: 78973 - protein, 25 aa, Artificial Sequence
  Cyclic GFR-binding peptide
EVVMDYHYKLVVNNAADKYLISIPS

SEQ ID NO: 78974 - protein, 27 aa, Artificial Sequence
  Cyclic GFR-binding peptide
MNYHYKLIVNNSSDKYLVSIPSLKTPA

SEQ ID NO: 78975 - protein, 23 aa, Artificial Sequence
  Cyclic GFR-binding peptide
GRYKKLYTVVGKDFYLISIANLK

SEQ ID NO: 78976 - protein, 29 aa, Artificial Sequence
  Cyclic GFR-binding peptide
EVVMDEYKFKVVNNASDLYLISIPELRTP

SEQ ID NO: 78977 - protein, 33 aa, Artificial Sequence; identical to SEQ ID NO: 75699
  Cyclic GFR-binding peptide
  MOD_RES (29)..(30): Xaa is C or S

SEQ ID NO: 78978 - protein, 24 aa, Artificial Sequence
  Cyclic GFR-binding peptide
YHYKLIIQQKDNKYLMSIPSMKTP

SEQ ID NO: 78979 - protein, 32 aa, Artificial Sequence; identical to SEQ ID NO: 1730
  Cyclic GFR-binding peptide
  MOD_RES (32)..(32): Xaa is C or S

SEQ ID NO: 78980 - protein, 21 aa, Artificial Sequence
  Cyclic GFR-binding peptide
PIKGYVKPKRGVFYLINIPSL

SEQ ID NO: 78981 - protein, 37 aa, Artificial Sequence; identical to SEQ ID NO: 29841
  Cyclic GFR-binding peptide
  MOD_RES (2)..(34)..(35): Xaa is C or S

SEQ ID NO: 78982 - protein, 26 aa, Artificial Sequence
  Cyclic GFR-binding peptide
  MOD_RES (26)..(26): Xaa is C or S
EYKFKIVNSSDDLYLVSIPELKTPAX

SEQ ID NO: 78983 - protein, 37 aa, Artificial Sequence; identical to SEQ ID NO: 1738
  Cyclic GFR-binding peptide
  MOD_RES (2)..(4)..(35)..(36): Xaa is C or S

SEQ ID NO: 78984 - protein, 33 aa, Artificial Sequence; identical to SEQ ID NO: 41458
  Cyclic GFR-binding peptide
  MOD_RES (31)..(32): Xaa is C or S

SEQ ID NO: 78985 - protein, 41 aa, Artificial Sequence; identical to SEQ ID NO: 29845
  Cyclic GFR-binding peptide
  MOD_RES (2)..(4)..(36)..(37): Xaa is C or S

SEQ ID NO: 78986 - protein, 40 aa, Artificial Sequence; identical to SEQ ID NO: 75703
  Cyclic GFR-binding peptide
  MOD_RES (2)..(4)..(35)..(36): Xaa is C or S

SEQ ID NO: 78987 - protein, 28 aa, Artificial Sequence
  Cyclic GFR-binding peptide
  MOD_RES (28)..(28): Xaa is C or S
IMYHYKLVKPKRGVKYLISIPSLAQPVX

SEQ ID NO: 78988 - protein, 27 aa, Artificial Sequence
  Cyclic GFR-binding peptide
VMNEYKFKIVNSSDDLYLVSIPELKTP

SEQ ID NO: 78989 - protein, 35 aa, Artificial Sequence
  Cyclic GFR-binding peptide
  MOD_RES (2)..(34)..(35): Xaa is C or S
GXRDVVMGYHYKLIIQQKDNKYLMSIPSMKTPTXX

SEQ ID NO: 78990 - protein, 26 aa, Artificial Sequence
  Cyclic GFR-binding peptide
EVVMDRYKKLVVKENEDFYLMSIANL

SEQ ID NO: 78991 - protein, 30 aa, Artificial Sequence; identical to SEQ ID NO: 41461
  Cyclic GFR-binding peptide

SEQ ID NO: 78992 - protein, 28 aa, Artificial Sequence
  Cyclic GFR-binding peptide
  MOD_RES (28)..(28): Xaa is C or S
MNEYKFKVVNKNEDLYLISIPEMKEPVX

SEQ ID NO: 78993 - protein, 27 aa, Artificial Sequence
  Cyclic GFR-binding peptide
VSMGEPIKGYTPVGMDDFYLVNIPSLK

SEQ ID NO: 78994 - protein, 24 aa, Artificial Sequence
  Cyclic GFR-binding peptide
IMPIKGYLLVRGNDFYLMNIPSTK

SEQ ID NO: 78995 - protein, 32 aa, Artificial Sequence; identical to SEQ ID NO: 75708
  Cyclic GFR-binding peptide
  MOD_RES (29)..(30): Xaa is C or S

SEQ ID NO: 78996 - protein, 23 aa, Artificial Sequence
  Cyclic GFR-binding peptide
YHYKLVVNKNEDKYLISIPSMKE

SEQ ID NO: 78997 - protein, 26 aa, Artificial Sequence
  Cyclic GFR-binding peptide
  MOD_RES (26)..(26): Xaa is C or S
RYKKLYTVVGKDFYLISIANLKTPVX

SEQ ID NO: 78998 - protein, 32 aa, Artificial Sequence; identical to SEQ ID NO: 1750
  Cyclic GFR-binding peptide
  MOD_RES (29)..(30): Xaa is C or S

SEQ ID NO: 78999 - protein, 27 aa, Artificial Sequence
  Cyclic GFR-binding peptide
  MOD_RES (27)..(27): Xaa is C or S
MPIKGYLLVRGNDFYLMNIPSTKVPAX

SEQ ID NO: 79000 - protein, 24 aa, Artificial Sequence
  Cyclic GFR-binding peptide
MDRHKRLVVNNAADYYLISTASLR

SEQ ID NO: 79001 - protein, 26 aa, Artificial Sequence
  Cyclic GFR-binding peptide
RVIMYHYKLVKPKRGVKYLISIPSLA

SEQ ID NO: 79002 - protein, 34 aa, Artificial Sequence
  Cyclic GFR-binding peptide
  MOD_RES (28)..(29): Xaa is C or S
MNRHKRLIVNSSDDYYLVSTASLKTPAXXPKPVH

SEQ ID NO: 79003 - protein, 35 aa, Artificial Sequence
  Cyclic GFR-binding peptide
  MOD_RES (30)..(31): Xaa is C or S
KVIMPIKGYIKPTKGIFYLINIPSLDQSVXXPSAS

SEQ ID NO: 79004 - protein, 33 aa, Artificial Sequence; identical to SEQ ID NO: 1761
  Cyclic GFR-binding peptide
  MOD_RES (2)..(2): Xaa is C or S

SEQ ID NO: 79005 - protein, 31 aa, Artificial Sequence
  Cyclic GFR-binding peptide
  MOD_RES (26)..(27): Xaa is C or S
EYKFKVVNKNEDLYLISIPEMKEPVXXPEPI

SEQ ID NO: 79006 - protein, 23 aa, Artificial Sequence
  Cyclic GFR-binding peptide
MGYHYKLYTVVGKDKYLISIPSL

SEQ ID NO: 79007 - protein, 31 aa, Artificial Sequence; identical to SEQ ID NO: 1766
  Cyclic GFR-binding peptide
  MOD_RES (27)..(28): Xaa is C or S

SEQ ID NO: 79008 - protein, 29 aa, Artificial Sequence
  Cyclic GFR-binding peptide
  MOD_RES (2)..(2): Xaa is C or S
GXAKVVMNRYKKLIVNNSSDFYLVSIANL

SEQ ID NO: 79009 - protein, 21 aa, Artificial Sequence
  Cyclic GFR-binding peptide
MRHKRLLLVRGNDYYLMSTAS

SEQ ID NO: 79010 - protein, 26 aa, Artificial Sequence
  Cyclic GFR-binding peptide
AEVVMDPIKGYVVNNAADFYLINIPS

SEQ ID NO: 79011 - protein, 27 aa, Artificial Sequence
  Cyclic GFR-binding peptide
SKVVMEYKFKVKPTRGVLYLISIPELD

SEQ ID NO: 79012 - protein, 42 aa, Artificial Sequence
  Cyclic GFR-binding peptide
  MOD_RES (2)..(4)..(36)..(37): Xaa is C or S
HXGXSRVVMNRHKRLIVNSSDDYYLVSTASLKTPAXXPKPVH

SEQ ID NO: 79013 - protein, 31 aa, Artificial Sequence; identical to SEQ ID NO: 29880
  Cyclic GFR-binding peptide
  MOD_RES (2)..(4): Xaa is C or S

SEQ ID NO: 79014 - protein, 32 aa, Artificial Sequence
  Cyclic GFR-binding peptide
  MOD_RES (26)..(27): Xaa is C or S
RHKRLVVNNASDYYLISTASLRTPVXXTPPTS

SEQ ID NO: 79015 - protein, 33 aa, Artificial Sequence; identical to SEQ ID NO: 1773
  Cyclic GFR-binding peptide
  MOD_RES (31)..(32): Xaa is C or S

SEQ ID NO: 79016 - protein, 38 aa, Artificial Sequence; identical to SEQ ID NO: 1774
  Cyclic GFR-binding peptide
  MOD_RES (2)..(34): Xaa is C or S

SEQ ID NO: 79017 - protein, 33 aa, Artificial Sequence; identical to SEQ ID NO: 1775
  Cyclic GFR-binding peptide
  MOD_RES (29)..(30): Xaa is C or S

SEQ ID NO: 79018 - protein, 31 aa, Artificial Sequence; identical to SEQ ID NO: 29884
  Cyclic GFR-binding peptide
  MOD_RES (26)..(27): Xaa is C or S

SEQ ID NO: 79019 - protein, 26 aa, Artificial Sequence
  Cyclic GFR-binding peptide
MDRYKKLVVNNAADFYLISIANLRAP

SEQ ID NO: 79020 - protein, 24 aa, Artificial Sequence
  Cyclic GFR-binding peptide
VMNRYKKLIVNSSDDFYLVSIANL

SEQ ID NO: 79021 - protein, 29 aa, Artificial Sequence
  Cyclic GFR-binding peptide
  MOD_RES (29)..(29): Xaa is C or S
AMGRHKRLYTVVGKDYYLISTASLKTPVX

SEQ ID NO: 79022 - protein, 35 aa, Artificial Sequence; identical to SEQ ID NO: 29889
  Cyclic GFR-binding peptide
  MOD_RES (1)..(3)..(34)..(35): Xaa is C or S

SEQ ID NO: 79023 - protein, 39 aa, Artificial Sequence; identical to SEQ ID NO: 75724
  Cyclic GFR-binding peptide
  MOD_RES (1)..(3)..(34)..(35): Xaa is C or S

SEQ ID NO: 79024 - protein, 29 aa, Artificial Sequence
  Cyclic GFR-binding peptide
SMGERYKKLTPVGMDDFYLVSIANLKTPV

SEQ ID NO: 79025 - protein, 28 aa, Artificial Sequence
  Cyclic GFR-binding peptide
VMNYHYKLIVNNSSDKYLVSIPSLKTPA

SEQ ID NO: 79026 - protein, 37 aa, Artificial Sequence; identical to SEQ ID NO: 29892
  Cyclic GFR-binding peptide
  MOD_RES (31)..(32): Xaa is C or S

SEQ ID NO: 79027 - protein, 30 aa, Artificial Sequence; identical to SEQ ID NO: 1783
  Cyclic GFR-binding peptide
  MOD_RES (27)..(28): Xaa is C or S

SEQ ID NO: 79028 - protein, 33 aa, Artificial Sequence; identical to SEQ ID NO: 1786
  Cyclic GFR-binding peptide
  MOD_RES (27)..(28): Xaa is C or S

SEQ ID NO: 79029 - protein, 24 aa, Artificial Sequence
  Cyclic GFR-binding peptide
VMDRYKKLVVKENEDFYLMSIANL

SEQ ID NO: 79030 - protein, 29 aa, Artificial Sequence
  Cyclic GFR-binding peptide
EVVMDPIKGYVVNNASDFYLINIPSLRTP

SEQ ID NO: 79031 - protein, 31 aa, Artificial Sequence; identical to SEQ ID NO: 1788
  Cyclic GFR-binding peptide
  MOD_RES (27)..(28): Xaa is C or S

SEQ ID NO: 79032 - protein, 23 aa, Artificial Sequence
  Cyclic GFR-binding peptide
RYKKLVVKENEDFYLMSIANLET

SEQ ID NO: 79033 - protein, 25 aa, Artificial Sequence
  Cyclic GFR-binding peptide
RHKRLVVNKNEDYYLISTASMKEPV

SEQ ID NO: 79034 - protein, 25 aa, Artificial Sequence
  Cyclic GFR-binding peptide
MRHKRLVKPTRGVYYLISTASLDQP

SEQ ID NO: 79035 - protein, 26 aa, Artificial Sequence
  Cyclic GFR-binding peptide
GEVVMDRHKRLVVKENEDYYLMSTAS

SEQ ID NO: 79036 - protein, 25 aa, Artificial Sequence
  Cyclic GFR-binding peptide
MNRYKKLIVNNSSDFYLVSIANLKT

SEQ ID NO: 79037 - protein, 24 aa, Artificial Sequence
  Cyclic GFR-binding peptide
AMGYHYKLYTVVGKDKYLISIPSL

SEQ ID NO: 79038 - protein, 40 aa, Artificial Sequence; identical to SEQ ID NO: 1794
  Cyclic GFR-binding peptide
  MOD_RES (2)..(4)..(35)..(36): Xaa is C or S

SEQ ID NO: 79039 - protein, 39 aa, Artificial Sequence; identical to SEQ ID NO: 29903
  Cyclic GFR-binding peptide
  MOD_RES (2)..(34): Xaa is C or S

SEQ ID NO: 79040 - protein, 34 aa, Artificial Sequence; identical to SEQ ID NO: 29906
  Cyclic GFR-binding peptide
  MOD_RES (29)..(30): Xaa is C or S

SEQ ID NO: 79041 - protein, 27 aa, Artificial Sequence
  Cyclic GFR-binding peptide
MDRHKRLVVNNAADYYLISTASLRAPV

SEQ ID NO: 79042 - protein, 30 aa, Artificial Sequence; identical to SEQ ID NO: 1804
  Cyclic GFR-binding peptide
  MOD_RES (29)..(30): Xaa is C or S

SEQ ID NO: 79043 - protein, 29 aa, Artificial Sequence
  Cyclic GFR-binding peptide
VVMDYHYKLVVKENEDKYLMSIPSLETPV

SEQ ID NO: 79044 - protein, 41 aa, Artificial Sequence; identical to SEQ ID NO: 1806
  Cyclic GFR-binding peptide
  MOD_RES (2)..(4)..(36)..(37): Xaa is C or S

SEQ ID NO: 79045 - protein, 37 aa, Artificial Sequence; identical to SEQ ID NO: 29914
  Cyclic GFR-binding peptide
  MOD_RES (1)..(3)..(35)..(36): Xaa is C or S

SEQ ID NO: 79046 - protein, 23 aa, Artificial Sequence
  Cyclic GFR-binding peptide
PIKGYYTVVGKDFYLINIPSLKT

SEQ ID NO: 79047 - protein, 38 aa, Artificial Sequence; identical to SEQ ID NO: 29919
  Cyclic GFR-binding peptide
  MOD_RES (2)..(4)..(36)..(37): Xaa is C or S

SEQ ID NO: 79048 - protein, 29 aa, Artificial Sequence
  Cyclic GFR-binding peptide
  MOD_RES (29)..(29): Xaa is C or S
VMDPIKGYVVKENEDFYLMNIPSLETPVX

SEQ ID NO: 79049 - protein, 35 aa, Artificial Sequence; identical to SEQ ID NO: 1812
  Cyclic GFR-binding peptide
  MOD_RES (32)..(33): Xaa is C or S

SEQ ID NO: 79050 - protein, 29 aa, Artificial Sequence
  Cyclic GFR-binding peptide
  MOD_RES (26)..(27): Xaa is C or S
RHKRLIVNSSDDYYLVSTASLQTPAXXPK

SEQ ID NO: 79051 - protein, 25 aa, Artificial Sequence
  Cyclic GFR-binding peptide
EEVIMRYKKLLLVRGNDFYLMSIAN

SEQ ID NO: 79052 - protein, 32 aa, Artificial Sequence; identical to SEQ ID NO: 1815
  Cyclic GFR-binding peptide
  MOD_RES (2)..(2): Xaa is C or S

SEQ ID NO: 79053 - protein, 35 aa, Artificial Sequence; identical to SEQ ID NO: 29925
  Cyclic GFR-binding peptide
  MOD_RES (2)..(4): Xaa is C or S

SEQ ID NO: 79054 - protein, 25 aa, Artificial Sequence
  Cyclic GFR-binding peptide
RHKRLIKPTKGIYYLISTASLDQSV

SEQ ID NO: 79055 - protein, 30 aa, Artificial Sequence; identical to SEQ ID NO: 41530
  Cyclic GFR-binding peptide
  MOD_RES (29)..(29): Xaa is C or S

SEQ ID NO: 79056 - protein, 35 aa, Artificial Sequence
  Cyclic GFR-binding peptide
  MOD_RES (2)..(33)..(34): Xaa is C or S
GXEEVIMYHYKLLLVRGNDKYLMSIPSTKVPAXXT

SEQ ID NO: 79057 - protein, 29 aa, Artificial Sequence
  Cyclic GFR-binding peptide
VVMDRHKRLVVKENEDYYLMSTASLETPV

SEQ ID NO: 79058 - protein, 39 aa, Artificial Sequence; identical to SEQ ID NO: 29933
  Cyclic GFR-binding peptide
  MOD_RES (33)..(34): Xaa is C or S

SEQ ID NO: 79059 - protein, 27 aa, Artificial Sequence
  Cyclic GFR-binding peptide
  MOD_RES (27)..(27): Xaa is C or S
NPIKGYIVNNSSDFYLVNIPSLKTPAX

SEQ ID NO: 79060 - protein, 22 aa, Artificial Sequence
  Cyclic GFR-binding peptide
PIKGYIVNNSSDFYLVNIPSLK

SEQ ID NO: 79061 - protein, 37 aa, Artificial Sequence; identical to SEQ ID NO: 41543
  Cyclic GFR-binding peptide
  MOD_RES (1)..(33)..(34): Xaa is C or S

SEQ ID NO: 79062 - protein, 37 aa, Artificial Sequence; identical to SEQ ID NO: 41544
  Cyclic GFR-binding peptide
  MOD_RES (1)..(33)..(34): Xaa is C or S

SEQ ID NO: 79063 - protein, 33 aa, Artificial Sequence; identical to SEQ ID NO: 41546
  Cyclic GFR-binding peptide
  MOD_RES (27)..(27): Xaa is C or S

SEQ ID NO: 79064 - protein, 25 aa, Artificial Sequence
  Cyclic GFR-binding peptide
MPIKGYVKPTRGVFYLINIPSLDQP

SEQ ID NO: 79065 - protein, 33 aa, Artificial Sequence; identical to SEQ ID NO: 29945
  Cyclic GFR-binding peptide
  MOD_RES (32)..(33): Xaa is C or S

SEQ ID NO: 79066 - protein, 24 aa, Artificial Sequence
  Cyclic GFR-binding peptide
MNEYKFKIVNSSDDLYLVSIPELQ

SEQ ID NO: 79067 - protein, 27 aa, Artificial Sequence
  Cyclic GFR-binding peptide
KVVMNRYKKLIVNNSSDFYLVSIANLK

SEQ ID NO: 79068 - protein, 36 aa, Artificial Sequence; identical to SEQ ID NO: 1841
  Cyclic GFR-binding peptide
  MOD_RES (2)..(34): Xaa is C or S

SEQ ID NO: 79069 - protein, 39 aa, Artificial Sequence; identical to SEQ ID NO: 1844
  Cyclic GFR-binding peptide
  MOD_RES (2)..(33)..(34): Xaa is C or S

SEQ ID NO: 79070 - protein, 34 aa, Artificial Sequence
  Cyclic GFR-binding peptide
  MOD_RES (32)..(33): Xaa is C or S
RDVVMGRHKRLIIQQKDNYYLMSTASMKTPTXXP

SEQ ID NO: 79071 - protein, 42 aa, Artificial Sequence; identical to SEQ ID NO: 29962
  Cyclic GFR-binding peptide
  MOD_RES (2)..(4)..(36)..(37): Xaa is C or S

SEQ ID NO: 79072 - protein, 28 aa, Artificial Sequence
  Cyclic GFR-binding peptide
RVVMNRHKRLIVNSSDDYYLVSTASLKT

SEQ ID NO: 79073 - protein, 36 aa, Artificial Sequence
  Cyclic GFR-binding peptide
  MOD_RES (31)..(32): Xaa is C or S
EEVIMYHYKLLLVRGNDKYLMSIPSTKVPAXXTSPV

SEQ ID NO: 79074 - protein, 29 aa, Artificial Sequence
  Cyclic GFR-binding peptide
  MOD_RES (1)..(1): Xaa is C or S
XSEVVMDRHKRLVVNNASDYYLISTASLR

SEQ ID NO: 79075 - protein, 36 aa, Artificial Sequence; identical to SEQ ID NO: 29970
  Cyclic GFR-binding peptide
  MOD_RES (30)..(31): Xaa is C or S

SEQ ID NO: 79076 - protein, 39 aa, Artificial Sequence; identical to SEQ ID NO: 41572
  Cyclic GFR-binding peptide
  MOD_RES (1)..(3)..(35)..(36): Xaa is C or S

SEQ ID NO: 79077 - protein, 32 aa, Artificial Sequence
  Cyclic GFR-binding peptide
  MOD_RES (26)..(27): Xaa is C or S
RYKKLVVNKNEDFYLISIANMKEPVXXPEPIG

SEQ ID NO: 79078 - protein, 29 aa, Artificial Sequence
  Cyclic GFR-binding peptide
  MOD_RES (2)..(2): Xaa is C or S
GXAKVVMNYHYKLIVNNSSDKYLVSIPSL

SEQ ID NO: 79079 - protein, 26 aa, Artificial Sequence
  Cyclic GFR-binding peptide
  MOD_RES (26)..(26): Xaa is C or S
RYKKLIVNSSDDFYLVSIANLQTPAX

SEQ ID NO: 79080 - protein, 32 aa, Artificial Sequence; identical to SEQ ID NO: 1856
  Cyclic GFR-binding peptide
  MOD_RES (31)..(32): Xaa is C or S

SEQ ID NO: 79081 - protein, 26 aa, Artificial Sequence
  Cyclic GFR-binding peptide
VVMERYKKLVVKDYEDFYLMSIANLE

SEQ ID NO: 79082 - protein, 35 aa, Artificial Sequence; identical to SEQ ID NO: 1861
  Cyclic GFR-binding peptide
  MOD_RES (30)..(31): Xaa is C or S

SEQ ID NO: 79083 - protein, 32 aa, Artificial Sequence; identical to SEQ ID NO: 12405
  Cyclic GFR-binding peptide
  MOD_RES (2)..(4): Xaa is C or S

SEQ ID NO: 79084 - protein, 31 aa, Artificial Sequence; identical to SEQ ID NO: 29978
  Cyclic GFR-binding peptide
  MOD_RES (30)..(31): Xaa is C or S

SEQ ID NO: 79085 - protein, 24 aa, Artificial Sequence
  Cyclic GFR-binding peptide
EYKFKIIQQKDNLYLMSIPEMKTP

SEQ ID NO: 79086 - protein, 35 aa, Artificial Sequence; identical to SEQ ID NO: 75781
  Cyclic GFR-binding peptide
  MOD_RES (31)..(32): Xaa is C or S

SEQ ID NO: 79087 - protein, 29 aa, Artificial Sequence
  Cyclic GFR-binding peptide
  MOD_RES (28)..(29): Xaa is C or S
MDRHKRLVVNNAADYYLISTASLRAPVXX

SEQ ID NO: 79088 - protein, 35 aa, Artificial Sequence; identical to SEQ ID NO: 1869
  Cyclic GFR-binding peptide
  MOD_RES (31)..(32): Xaa is C or S

SEQ ID NO: 79089 - protein, 20 aa, Artificial Sequence
  Cyclic GFR-binding peptide
RHKRLVVNKNEDYYLISTAS

SEQ ID NO: 79090 - protein, 30 aa, Artificial Sequence; identical to SEQ ID NO: 1870
  Cyclic GFR-binding peptide
  MOD_RES (26)..(27): Xaa is C or S

SEQ ID NO: 79091 - protein, 34 aa, Artificial Sequence; identical to SEQ ID NO: 29983
  Cyclic GFR-binding peptide
  MOD_RES (1)..(33)..(34): Xaa is C or S

SEQ ID NO: 79092 - protein, 21 aa, Artificial Sequence
  Cyclic GFR-binding peptide
RHKRLIVNSSDDYYLVSTASL

SEQ ID NO: 79093 - protein, 34 aa, Artificial Sequence; identical to SEQ ID NO: 1873
  Cyclic GFR-binding peptide
  MOD_RES (1)..(3): Xaa is C or S

SEQ ID NO: 79094 - protein, 40 aa, Artificial Sequence; identical to SEQ ID NO: 29984
  Cyclic GFR-binding peptide
  MOD_RES (2)..(4)..(36)..(37): Xaa is C or S

SEQ ID NO: 79095 - protein, 34 aa, Artificial Sequence; identical to SEQ ID NO: 1874
  Cyclic GFR-binding peptide
  MOD_RES (1)..(32)..(33): Xaa is C or S

SEQ ID NO: 79096 - protein, 30 aa, Artificial Sequence; identical to SEQ ID NO: 1875
  Cyclic GFR-binding peptide
  MOD_RES (27)..(28): Xaa is C or S

SEQ ID NO: 79097 - protein, 28 aa, Artificial Sequence
  Cyclic GFR-binding peptide
AMGRYKKLYTVVGKDFYLISIANLKTPV

SEQ ID NO: 79098 - protein, 34 aa, Artificial Sequence
  Cyclic GFR-binding peptide
  MOD_RES (2)..(34): Xaa is C or S
AXSEVTMNPIKGYVVNKNEDFYLINIPSMKEPVX

SEQ ID NO: 79099 - protein, 33 aa, Artificial Sequence; identical to SEQ ID NO: 75785
  Cyclic GFR-binding peptide
  MOD_RES (27)..(28): Xaa is C or S

SEQ ID NO: 79100 - protein, 32 aa, Artificial Sequence; identical to SEQ ID NO: 41594
  Cyclic GFR-binding peptide
  MOD_RES (2)..(2): Xaa is C or S

SEQ ID NO: 79101 - protein, 26 aa, Artificial Sequence
  Cyclic GFR-binding peptide
MRHKRLVKPKRGVYYLISTASLAQPV

SEQ ID NO: 79102 - protein, 32 aa, Artificial Sequence; identical to SEQ ID NO: 29988
  Cyclic GFR-binding peptide
  MOD_RES (2)..(4): Xaa is C or S

SEQ ID NO: 79103 - protein, 32 aa, Artificial Sequence; identical to SEQ ID NO: 29989
  Cyclic GFR-binding peptide
  MOD_RES (29)..(30): Xaa is C or S

SEQ ID NO: 79104 - protein, 31 aa, Artificial Sequence; identical to SEQ ID NO: 29990
  Cyclic GFR-binding peptide
  MOD_RES (1)..(3): Xaa is C or S

SEQ ID NO: 79105 - protein, 23 aa, Artificial Sequence
  Cyclic GFR-binding peptide
MRYKKLLLVRGNDFYLMSIANTK

SEQ ID NO: 79106 - protein, 32 aa, Artificial Sequence; identical to SEQ ID NO: 41599
  Cyclic GFR-binding peptide
  MOD_RES (27)..(28): Xaa is C or S

SEQ ID NO: 79107 - protein, 34 aa, Artificial Sequence; identical to SEQ ID NO: 41600
  Cyclic GFR-binding peptide
  MOD_RES (31)..(31): Xaa is C or S

SEQ ID NO: 79108 - protein, 32 aa, Artificial Sequence
  Cyclic GFR-binding peptide
  MOD_RES (1)..(3): Xaa is C or S
XGXSEVVMDRHKRLVVNNASDYYLISTASLRT

SEQ ID NO: 79109 - protein, 29 aa, Artificial Sequence
  Cyclic GFR-binding peptide
  MOD_RES (2)..(2): Xaa is C or S
GXAEVVMDRHKRLVVNNAADYYLISTASL

SEQ ID NO: 79110 - protein, 30 aa, Artificial Sequence; identical to SEQ ID NO: 1880
  Cyclic GFR-binding peptide
  MOD_RES (1)..(3): Xaa is C or S

SEQ ID NO: 79111 - protein, 34 aa, Artificial Sequence; identical to SEQ ID NO: 41602
  Cyclic GFR-binding peptide
  MOD_RES (2)..(4): Xaa is C or S

SEQ ID NO: 79112 - protein, 31 aa, Artificial Sequence
  Cyclic GFR-binding peptide
  MOD_RES (27)..(28): Xaa is C or S
MPIKGYIKPTKGIFYLINIPSLDQSVXXPSA

SEQ ID NO: 79113 - protein, 39 aa, Artificial Sequence; identical to SEQ ID NO: 1881
  Cyclic GFR-binding peptide
  MOD_RES (2)..(4)..(36): Xaa is C or S

SEQ ID NO: 79114 - protein, 26 aa, Artificial Sequence
  Cyclic GFR-binding peptide
GEEYKFKTPVGMDDLYLVSIPELKTP

SEQ ID NO: 79115 - protein, 28 aa, Artificial Sequence
  Cyclic GFR-binding peptide
RVIMYHYKLVKPKRGVKYLISIPSLAQP

SEQ ID NO: 79116 - protein, 38 aa, Artificial Sequence
  Cyclic GFR-binding peptide
  MOD_RES (2)..(4)..(35)..(36): Xaa is C or S
SXKXSKVVMPIKGYVKPTRGVFYLINIPSLDQPVXXPS

SEQ ID NO: 79117 - protein, 32 aa, Artificial Sequence; identical to SEQ ID NO: 30010
  Cyclic GFR-binding peptide
  MOD_RES (26)..(27): Xaa is C or S

SEQ ID NO: 79118 - protein, 32 aa, Artificial Sequence; identical to SEQ ID NO: 30012
  Cyclic GFR-binding peptide
  MOD_RES (32)..(32): Xaa is C or S

SEQ ID NO: 79119 - protein, 26 aa, Artificial Sequence
  Cyclic GFR-binding peptide
  MOD_RES (26)..(26): Xaa is C or S
YHYKLVVNNASDKYLISIPSLRTPVX

SEQ ID NO: 79120 - protein, 36 aa, Artificial Sequence; identical to SEQ ID NO: 1893
  Cyclic GFR-binding peptide
  MOD_RES (1)..(3)..(35)..(36): Xaa is C or S

SEQ ID NO: 79121 - protein, 36 aa, Artificial Sequence; identical to SEQ ID NO: 30022
  Cyclic GFR-binding peptide
  MOD_RES (2)..(34)..(35): Xaa is C or S

SEQ ID NO: 79122 - protein, 27 aa, Artificial Sequence
  Cyclic GFR-binding peptide
  MOD_RES (27)..(27): Xaa is C or S
MRYKKLIKPTKGIFYLISIANLDQSVX

SEQ ID NO: 79123 - protein, 32 aa, Artificial Sequence; identical to SEQ ID NO: 1898
  Cyclic GFR-binding peptide
  MOD_RES (1)..(3): Xaa is C or S

SEQ ID NO: 79124 - protein, 39 aa, Artificial Sequence; identical to SEQ ID NO: 1899
  Cyclic GFR-binding peptide
  MOD_RES (1)..(3)..(35)..(36): Xaa is C or S

SEQ ID NO: 79125 - protein, 36 aa, Artificial Sequence; identical to SEQ ID NO: 1900
  Cyclic GFR-binding peptide
  MOD_RES (32)..(33): Xaa is C or S

SEQ ID NO: 79126 - protein, 38 aa, Artificial Sequence; identical to SEQ ID NO: 41623
  Cyclic GFR-binding peptide
  MOD_RES (2)..(4)..(36)..(37): Xaa is C or S

SEQ ID NO: 79127 - protein, 26 aa, Artificial Sequence
  Cyclic GFR-binding peptide
VVMDEYKFKVVNNASDLYLISIPELR

SEQ ID NO: 79128 - protein, 31 aa, Artificial Sequence; identical to SEQ ID NO: 1901
  Cyclic GFR-binding peptide
  MOD_RES (27)..(28): Xaa is C or S

SEQ ID NO: 79129 - protein, 35 aa, Artificial Sequence; identical to SEQ ID NO: 1902
  Cyclic GFR-binding peptide
  MOD_RES (33)..(34): Xaa is C or S

SEQ ID NO: 79130 - protein, 32 aa, Artificial Sequence
  Cyclic GFR-binding peptide
  MOD_RES (1)..(3): Xaa is C or S
XGXEEVIMRHKRLLLVRGNDYYLMSTASTKVP

SEQ ID NO: 79131 - protein, 26 aa, Artificial Sequence
  Cyclic GFR-binding peptide
EVIMRHKRLLLVRGNDYYLMSTASTK

SEQ ID NO: 79132 - protein, 29 aa, Artificial Sequence
  Cyclic GFR-binding peptide
  MOD_RES (28)..(28): Xaa is C or S
MNRYKKLIVNSSDDFYLVSIANLKTPAXT

SEQ ID NO: 79133 - protein, 27 aa, Artificial Sequence
  Cyclic GFR-binding peptide
  MOD_RES (26)..(27): Xaa is C or S
EYKFKVKPTRGVLYLISIPELDQPVXX

SEQ ID NO: 79134 - protein, 33 aa, Artificial Sequence; identical to SEQ ID NO: 12461
  Cyclic GFR-binding peptide
  MOD_RES (1)..(3): Xaa is C or S

SEQ ID NO: 79135 - protein, 33 aa, Artificial Sequence; identical to SEQ ID NO: 30043
  Cyclic GFR-binding peptide
  MOD_RES (1)..(3): Xaa is C or S

SEQ ID NO: 79136 - protein, 36 aa, Artificial Sequence; identical to SEQ ID NO: 30045
  Cyclic GFR-binding peptide
  MOD_RES (31)..(32): Xaa is C or S

SEQ ID NO: 79137 - protein, 33 aa, Artificial Sequence
  Cyclic GFR-binding peptide
  MOD_RES (29)..(30): Xaa is C or S
TMNRYKKLVVNKNEDFYLISIANMKEPVXXPEP

SEQ ID NO: 79138 - protein, 38 aa, Artificial Sequence
  Cyclic GFR-binding peptide
  MOD_RES (2)..(34)..(35): Xaa is C or S
AXSEVTMNRHKRLVVNKNEDYYLISTASMKEPVXXPEP

SEQ ID NO: 79139 - protein, 27 aa, Artificial Sequence
  Cyclic GFR-binding peptide
VMRYKKLVKPTRGVFYLISIANLDQPV

SEQ ID NO: 79140 - protein, 26 aa, Artificial Sequence
  Cyclic GFR-binding peptide
KVVMNYHYKLIVNNSSDKYLVSIPSL

SEQ ID NO: 79141 - protein, 22 aa, Artificial Sequence
  Cyclic GFR-binding peptide
PIKGYVVKENEDFYLMNIPSLE

SEQ ID NO: 79142 - protein, 27 aa, Artificial Sequence
  Cyclic GFR-binding peptide
IMYHYKLLLVRGNDKYLMSIPSTKVPA

SEQ ID NO: 79143 - protein, 32 aa, Artificial Sequence; identical to SEQ ID NO: 1932
  Cyclic GFR-binding peptide
  MOD_RES (31)..(32): Xaa is C or S

SEQ ID NO: 79144 - protein, 29 aa, Artificial Sequence
  Cyclic GFR-binding peptide
AEVVMDEYKFKVVNNAADLYLISIPELRA

SEQ ID NO: 79145 - protein, 30 aa, Artificial Sequence; identical to SEQ ID NO: 1935
  Cyclic GFR-binding peptide
  MOD_RES (27)..(28): Xaa is C or S

SEQ ID NO: 79146 - protein, 31 aa, Artificial Sequence; identical to SEQ ID NO: 30068
  Cyclic GFR-binding peptide
  MOD_RES (2)..(4): Xaa is C or S

SEQ ID NO: 79147 - protein, 26 aa, Artificial Sequence
  Cyclic GFR-binding peptide
VVMGYHYKLIIQQKDNKYLMSIPSMK

SEQ ID NO: 79148 - protein, 33 aa, Artificial Sequence; identical to SEQ ID NO: 30073
  Cyclic GFR-binding peptide
  MOD_RES (2)..(4): Xaa is C or S

SEQ ID NO: 79149 - protein, 33 aa, Artificial Sequence
  Cyclic GFR-binding peptide
  MOD_RES (30)..(31): Xaa is C or S
EVIMRHKRLLLVRGNDYYLMSTASTKVPAXXTS

SEQ ID NO: 79150 - protein, 40 aa, Artificial Sequence
  Cyclic GFR-binding peptide
  MOD_RES (2)..(4)..(36)..(37): Xaa is C or S
RXGXESVAMGRHKRLYTVVGKDYYLISTASLKTPVXXAKS

SEQ ID NO: 79151 - protein, 29 aa, Artificial Sequence
  Cyclic GFR-binding peptide
  MOD_RES (2)..(4): Xaa is C or S
LXGXEEVIMPIKGYLLVRGNDFYLMNIPS

SEQ ID NO: 79152 - protein, 26 aa, Artificial Sequence
  Cyclic GFR-binding peptide
AEVVMDRHKRLVVNNAADYYLISTAS

SEQ ID NO: 79153 - protein, 30 aa, Artificial Sequence; identical to SEQ ID NO: 41656
  Cyclic GFR-binding peptide
  MOD_RES (2)..(4): Xaa is C or S

SEQ ID NO: 79154 - protein, 29 aa, Artificial Sequence
  Cyclic GFR-binding peptide
  MOD_RES (28)..(29): Xaa is C or S
MDEYKFKVVNNASDLYLISIPELRTPVXX

SEQ ID NO: 79155 - protein, 31 aa, Artificial Sequence; identical to SEQ ID NO: 30078
  Cyclic GFR-binding peptide
  MOD_RES (2)..(4): Xaa is C or S

SEQ ID NO: 79156 - protein, 27 aa, Artificial Sequence
  Cyclic GFR-binding peptide
  MOD_RES (27)..(27): Xaa is C or S
GRHKRLYTVVGKDYYLISTASLKTPVX

SEQ ID NO: 79157 - protein, 35 aa, Artificial Sequence
  Cyclic GFR-binding peptide
  MOD_RES (1)..(3)..(35): Xaa is C or S
XGXSEVVMDYHYKLVVNNASDKYLISIPSLRTPVX

SEQ ID NO: 79158 - protein, 32 aa, Artificial Sequence; identical to SEQ ID NO: 1941
  Cyclic GFR-binding peptide
  MOD_RES (1)..(32): Xaa is C or S

SEQ ID NO: 79159 - protein, 27 aa, Artificial Sequence
  Cyclic GFR-binding peptide
VAMGRYKKLYTVVGKDFYLISIANLKT

SEQ ID NO: 79160 - protein, 32 aa, Artificial Sequence; identical to SEQ ID NO: 1942
  Cyclic GFR-binding peptide
  MOD_RES (31)..(32): Xaa is C or S

SEQ ID NO: 79161 - protein, 31 aa, Artificial Sequence; identical to SEQ ID NO: 41662
  Cyclic GFR-binding peptide
  MOD_RES (30)..(31): Xaa is C or S

SEQ ID NO: 79162 - protein, 25 aa, Artificial Sequence
  Cyclic GFR-binding peptide
VMDRHKRLVVKENEDYYLMSTASLE

SEQ ID NO: 79163 - protein, 32 aa, Artificial Sequence; identical to SEQ ID NO: 30083
  Cyclic GFR-binding peptide
  MOD_RES (26)..(27): Xaa is C or S

SEQ ID NO: 79164 - protein, 31 aa, Artificial Sequence
  Cyclic GFR-binding peptide
  MOD_RES (1)..(1): Xaa is C or S
XRDVVMGYHYKLIIQQKDNKYLMSIPSMKTP

SEQ ID NO: 79165 - protein, 34 aa, Artificial Sequence
  Cyclic GFR-binding peptide
  MOD_RES (30)..(31): Xaa is C or S
EVIMRHKRLLLVRGNDYYLMSTASTKVPAXXTSP

SEQ ID NO: 79166 - protein, 33 aa, Artificial Sequence
  Cyclic GFR-binding peptide
  MOD_RES (29)..(30): Xaa is C or S
VMDEYKFKVVNNASDLYLISIPELRTPVXXTPP

SEQ ID NO: 79167 - protein, 26 aa, Artificial Sequence
  Cyclic GFR-binding peptide
SRVIMYHYKLVKPKRGVKYLISIPSL

SEQ ID NO: 79168 - protein, 21 aa, Artificial Sequence
  Cyclic GFR-binding peptide
NEYKFKIVNNSSDLYLVSIPE

SEQ ID NO: 79169 - protein, 30 aa, Artificial Sequence; identical to SEQ ID NO: 41672
  Cyclic GFR-binding peptide
  MOD_RES (28)..(28): Xaa is C or S

SEQ ID NO: 79170 - protein, 33 aa, Artificial Sequence; identical to SEQ ID NO: 30090
  Cyclic GFR-binding peptide
  MOD_RES (29)..(30): Xaa is C or S

SEQ ID NO: 79171 - protein, 29 aa, Artificial Sequence
  Cyclic GFR-binding peptide
GEVVMDRYKKLVVKENEDFYLMSIANLET

SEQ ID NO: 79172 - protein, 29 aa, Artificial Sequence
  Cyclic GFR-binding peptide
  MOD_RES (1)..(1): Xaa is C or S
XRDVVMGRHKRLIIQQKDNYYLMSTASMK

SEQ ID NO: 79173 - protein, 30 aa, Artificial Sequence; identical to SEQ ID NO: 41680
  Cyclic GFR-binding peptide
  MOD_RES (1)..(1): Xaa is C or S

SEQ ID NO: 79174 - protein, 31 aa, Artificial Sequence; identical to SEQ ID NO: 41681
  Cyclic GFR-binding peptide

SEQ ID NO: 79175 - protein, 38 aa, Artificial Sequence; identical to SEQ ID NO: 30096
  Cyclic GFR-binding peptide
  MOD_RES (1)..(3)..(34)..(35): Xaa is C or S

SEQ ID NO: 79176 - protein, 30 aa, Artificial Sequence; identical to SEQ ID NO: 30098
  Cyclic GFR-binding peptide
  MOD_RES (2)..(4): Xaa is C or S

SEQ ID NO: 79177 - protein, 30 aa, Artificial Sequence; identical to SEQ ID NO: 12503
  Cyclic GFR-binding peptide
  MOD_RES (29)..(30): Xaa is C or S

SEQ ID NO: 79178 - protein, 29 aa, Artificial Sequence
  Cyclic GFR-binding peptide
  MOD_RES (29)..(29): Xaa is C or S
VIMYHYKLLLVRGNDKYLMSIPSTKVPAX

SEQ ID NO: 79179 - protein, 33 aa, Artificial Sequence
  Cyclic GFR-binding peptide
  MOD_RES (2)..(4): Xaa is C or S
RXGXSEVVMDEYKFKVVNNASDLYLISIPELRT

SEQ ID NO: 79180 - protein, 30 aa, Artificial Sequence; identical to SEQ ID NO: 1956
  Cyclic GFR-binding peptide
  MOD_RES (26)..(26): Xaa is C or S

SEQ ID NO: 79181 - protein, 32 aa, Artificial Sequence; identical to SEQ ID NO: 1958
  Cyclic GFR-binding peptide
  MOD_RES (29)..(30): Xaa is C or S

SEQ ID NO: 79182 - protein, 36 aa, Artificial Sequence; identical to SEQ ID NO: 1959
  Cyclic GFR-binding peptide
  MOD_RES (2)..(4)..(35)..(36): Xaa is C or S

SEQ ID NO: 79183 - protein, 30 aa, Artificial Sequence; identical to SEQ ID NO: 1961
  Cyclic GFR-binding peptide
  MOD_RES (27)..(28): Xaa is C or S

SEQ ID NO: 79184 - protein, 39 aa, Artificial Sequence; identical to SEQ ID NO: 41686
  Cyclic GFR-binding peptide
  MOD_RES (2)..(4)..(36)..(37): Xaa is C or S

SEQ ID NO: 79185 - protein, 34 aa, Artificial Sequence; identical to SEQ ID NO: 1964
  Cyclic GFR-binding peptide
  MOD_RES (31)..(32): Xaa is C or S

SEQ ID NO: 79186 - protein, 38 aa, Artificial Sequence; identical to SEQ ID NO: 1967
  Cyclic GFR-binding peptide
  MOD_RES (1)..(32)..(33): Xaa is C or S

SEQ ID NO: 79187 - protein, 42 aa, Artificial Sequence; identical to SEQ ID NO: 30112
  Cyclic GFR-binding peptide
  MOD_RES (2)..(4)..(36)..(37): Xaa is C or S

SEQ ID NO: 79188 - protein, 37 aa, Artificial Sequence
  Cyclic GFR-binding peptide
  MOD_RES (31)..(32): Xaa is C or S
DVVMGEYKFKIIQQKDNLYLMSIPEMKTPTXXPGASG

SEQ ID NO: 79189 - protein, 38 aa, Artificial Sequence; identical to SEQ ID NO: 1978
  Cyclic GFR-binding peptide
  MOD_RES (2)..(4)..(36)..(37): Xaa is C or S

SEQ ID NO: 79190 - protein, 37 aa, Artificial Sequence; identical to SEQ ID NO: 30115
  Cyclic GFR-binding peptide
  MOD_RES (1)..(3)..(36)..(37): Xaa is C or S

SEQ ID NO: 79191 - protein, 31 aa, Artificial Sequence
  Cyclic GFR-binding peptide
  MOD_RES (1)..(1): Xaa is C or S
XSEVTMNYHYKLVVNKNEDKYLISIPSMKEP

SEQ ID NO: 79192 - protein, 31 aa, Artificial Sequence; identical to SEQ ID NO: 41699
  Cyclic GFR-binding peptide
  MOD_RES (2)..(4): Xaa is C or S

SEQ ID NO: 79193 - protein, 28 aa, Artificial Sequence
  Cyclic GFR-binding peptide
  MOD_RES (2)..(2): Xaa is C or S
GXGEVVMDEYKFKVVKENEDLYLMSIPE

SEQ ID NO: 79194 - protein, 32 aa, Artificial Sequence
  Cyclic GFR-binding peptide
  MOD_RES (27)..(28): Xaa is C or S
DRHKRLVVNNAADYYLISTASLRAPVXXSAPA

SEQ ID NO: 79195 - protein, 23 aa, Artificial Sequence
  Cyclic GFR-binding peptide
VIMRHKRLLLVRGNDYYLMSTAS

SEQ ID NO: 79196 - protein, 33 aa, Artificial Sequence; identical to SEQ ID NO: 1983
  Cyclic GFR-binding peptide
  MOD_RES (2)..(4): Xaa is C or S

SEQ ID NO: 79197 - protein, 22 aa, Artificial Sequence
  Cyclic GFR-binding peptide
EYKFKVKPKRGVLYLISIPELA

SEQ ID NO: 79198 - protein, 28 aa, Artificial Sequence
  Cyclic GFR-binding peptide
  MOD_RES (28)..(28): Xaa is C or S
IMRYKKLIKPTKGIFYLISIANLDQSVX

SEQ ID NO: 79199 - protein, 37 aa, Artificial Sequence; identical to SEQ ID NO: 1987
  Cyclic GFR-binding peptide
  MOD_RES (2)..(4)..(36): Xaa is C or S

SEQ ID NO: 79200 - protein, 26 aa, Artificial Sequence
  Cyclic GFR-binding peptide
VIMPIKGYIKPTKGIFYLINIPSLDQ

SEQ ID NO: 79201 - protein, 25 aa, Artificial Sequence
  Cyclic GFR-binding peptide
VMDYHYKLVVKENEDKYLMSIPSLE

SEQ ID NO: 79202 - protein, 36 aa, Artificial Sequence; identical to SEQ ID NO: 1990
  Cyclic GFR-binding peptide
  MOD_RES (2)..(4)..(35)..(36): Xaa is C or S

SEQ ID NO: 79203 - protein, 32 aa, Artificial Sequence; identical to SEQ ID NO: 30131
  Cyclic GFR-binding peptide
  MOD_RES (32)..(32): Xaa is C or S

SEQ ID NO: 79204 - protein, 40 aa, Artificial Sequence; identical to SEQ ID NO: 1991
  Cyclic GFR-binding peptide
  MOD_RES (2)..(4)..(37)..(38): Xaa is C or S

SEQ ID NO: 79205 - protein, 21 aa, Artificial Sequence
  Cyclic GFR-binding peptide
RHKRLYTVVGKDYYLISTASL

SEQ ID NO: 79206 - protein, 33 aa, Artificial Sequence; identical to SEQ ID NO: 1994
  Cyclic GFR-binding peptide
  MOD_RES (2)..(33): Xaa is C or S

SEQ ID NO: 79207 - protein, 29 aa, Artificial Sequence
  Cyclic GFR-binding peptide
VVMDYHYKLVVNNASDKYLISIPSLRTPV

SEQ ID NO: 79208 - protein, 34 aa, Artificial Sequence; identical to SEQ ID NO: 41713
  Cyclic GFR-binding peptide
  MOD_RES (31)..(32): Xaa is C or S

SEQ ID NO: 79209 - protein, 24 aa, Artificial Sequence
  Cyclic GFR-binding peptide
EVIMPIKGYLLVRGNDFYLMNIPS

SEQ ID NO: 79210 - protein, 29 aa, Artificial Sequence
  Cyclic GFR-binding peptide
  MOD_RES (29)..(29): Xaa is C or S
VIMRHKRLLLVRGNDYYLMSTASTKVPAX

SEQ ID NO: 79211 - protein, 34 aa, Artificial Sequence; identical to SEQ ID NO: 1998
  Cyclic GFR-binding peptide
  MOD_RES (2)..(34): Xaa is C or S

SEQ ID NO: 79212 - protein, 30 aa, Artificial Sequence
  Cyclic GFR-binding peptide
EVTMNYHYKLVVNKNEDKYLISIPSMKEPV

SEQ ID NO: 79213 - protein, 33 aa, Artificial Sequence
  Cyclic GFR-binding peptide
  MOD_RES (28)..(29): Xaa is C or S
IMPIKGYIKPTKGIFYLINIPSLDQSVXXPSAS

SEQ ID NO: 79214 - protein, 37 aa, Artificial Sequence; identical to SEQ ID NO: 2002
  Cyclic GFR-binding peptide
  MOD_RES (2)..(4)..(36)..(37): Xaa is C or S

SEQ ID NO: 79215 - protein, 36 aa, Artificial Sequence; identical to SEQ ID NO: 2003
  Cyclic GFR-binding peptide
  MOD_RES (1)..(34)..(35): Xaa is C or S

SEQ ID NO: 79216 - protein, 35 aa, Artificial Sequence
  Cyclic GFR-binding peptide
  MOD_RES (1)..(3)..(34)..(35): Xaa is C or S
XGXEEVIMYHYKLLLVRGNDKYLMSIPSTKVPAXX

SEQ ID NO: 79217 - protein, 38 aa, Artificial Sequence; identical to SEQ ID NO: 41721
  Cyclic GFR-binding peptide
  MOD_RES (1)..(3)..(35)..(36): Xaa is C or S

SEQ ID NO: 79218 - protein, 37 aa, Artificial Sequence; identical to SEQ ID NO: 41724
  Cyclic GFR-binding peptide
  MOD_RES (31)..(32): Xaa is C or S

SEQ ID NO: 79219 - protein, 26 aa, Artificial Sequence
  Cyclic GFR-binding peptide
VMYHYKLVKPTRGVKYLISIPSLDQP

SEQ ID NO: 79220 - protein, 29 aa, Artificial Sequence
  Cyclic GFR-binding peptide
  MOD_RES (2)..(2): Xaa is C or S
AXSEVTMNPIKGYVVNKNEDFYLINIPSM

SEQ ID NO: 79221 - protein, 31 aa, Artificial Sequence; identical to SEQ ID NO: 2008
  Cyclic GFR-binding peptide
  MOD_RES (30)..(31): Xaa is C or S

SEQ ID NO: 79222 - protein, 33 aa, Artificial Sequence; identical to SEQ ID NO: 30157
  Cyclic GFR-binding peptide
  MOD_RES (29)..(30): Xaa is C or S

SEQ ID NO: 79223 - protein, 22 aa, Artificial Sequence
  Cyclic GFR-binding peptide
RYKKLIKPTKGIFYLISIANLD

SEQ ID NO: 79224 - protein, 34 aa, Artificial Sequence
  Cyclic GFR-binding peptide
  MOD_RES (1)..(33)..(34): Xaa is C or S
XSEVVMDYHYKLVVNNASDKYLISIPSLRTPVXX

SEQ ID NO: 79225 - protein, 23 aa, Artificial Sequence
  Cyclic GFR-binding peptide
DEYKFKVVNNAADLYLISIPELR

SEQ ID NO: 79226 - protein, 27 aa, Artificial Sequence
  Cyclic GFR-binding peptide
  MOD_RES (1)..(1): Xaa is C or S
XARVVMNPIKGYIVNSSDDFYLVNIPS

SEQ ID NO: 79227 - protein, 24 aa, Artificial Sequence
  Cyclic GFR-binding peptide
VMDRYKKLVVNNAADFYLISIANL

SEQ ID NO: 79228 - protein, 29 aa, Artificial Sequence
  Cyclic GFR-binding peptide
SRVVMNPIKGYIVNSSDDFYLVNIPSLKT

SEQ ID NO: 79229 - protein, 30 aa, Artificial Sequence; identical to SEQ ID NO: 30171
  Cyclic GFR-binding peptide
  MOD_RES (26)..(27): Xaa is C or S

SEQ ID NO: 79230 - protein, 31 aa, Artificial Sequence; identical to SEQ ID NO: 30173
  Cyclic GFR-binding peptide
  MOD_RES (28)..(29): Xaa is C or S

SEQ ID NO: 79231 - protein, 31 aa, Artificial Sequence; identical to SEQ ID NO: 2023
  Cyclic GFR-binding peptide
  MOD_RES (28)..(29): Xaa is C or S

SEQ ID NO: 79232 - protein, 38 aa, Artificial Sequence; identical to SEQ ID NO: 2024
  Cyclic GFR-binding peptide
  MOD_RES (33)..(34): Xaa is C or S

SEQ ID NO: 79233 - protein, 21 aa, Artificial Sequence
  Cyclic GFR-binding peptide
RHKRLLLVRGNDYYLMSTAST

SEQ ID NO: 79234 - protein, 36 aa, Artificial Sequence; identical to SEQ ID NO: 2025
  Cyclic GFR-binding peptide
  MOD_RES (2)..(33)..(34): Xaa is C or S

SEQ ID NO: 79235 - protein, 30 aa, Artificial Sequence; identical to SEQ ID NO: 30180
  Cyclic GFR-binding peptide
  MOD_RES (28)..(29): Xaa is C or S

SEQ ID NO: 79236 - protein, 24 aa, Artificial Sequence
  Cyclic GFR-binding peptide
MDRYKKLVVNNASDFYLISIANLR

SEQ ID NO: 79237 - protein, 30 aa, Artificial Sequence; identical to SEQ ID NO: 30181
  Cyclic GFR-binding peptide
  MOD_RES (29)..(30): Xaa is C or S

SEQ ID NO: 79238 - protein, 39 aa, Artificial Sequence; identical to SEQ ID NO: 41740
  Cyclic GFR-binding peptide
  MOD_RES (2)..(34)..(35): Xaa is C or S

SEQ ID NO: 79239 - protein, 28 aa, Artificial Sequence
  Cyclic GFR-binding peptide
  MOD_RES (1)..(3): Xaa is C or S
XGXEEVIMRHKRLLLVRGNDYYLMSTAS

SEQ ID NO: 79240 - protein, 27 aa, Artificial Sequence
  Cyclic GFR-binding peptide
  MOD_RES (1)..(1): Xaa is C or S
XSKVIMPIKGYIKPTKGIFYLINIPSL

SEQ ID NO: 79241 - protein, 26 aa, Artificial Sequence
  Cyclic GFR-binding peptide
KVIMEYKFKIKPTKGILYLISIPELD

SEQ ID NO: 79242 - protein, 26 aa, Artificial Sequence
  Cyclic GFR-binding peptide
MGEEYKFKTPVGMDDLYLVSIPELKT

SEQ ID NO: 79243 - protein, 27 aa, Artificial Sequence
  Cyclic GFR-binding peptide
  MOD_RES (1)..(1): Xaa is C or S
XGEVVMERHKRLVVKDYEDYYLMSTAS

SEQ ID NO: 79244 - protein, 34 aa, Artificial Sequence; identical to SEQ ID NO: 30194
  Cyclic GFR-binding peptide
  MOD_RES (2)..(4): Xaa is C or S

SEQ ID NO: 79245 - protein, 30 aa, Artificial Sequence; identical to SEQ ID NO: 2037
  Cyclic GFR-binding peptide
  MOD_RES (2)..(4): Xaa is C or S

SEQ ID NO: 79246 - protein, 27 aa, Artificial Sequence
  Cyclic GFR-binding peptide
  MOD_RES (2)..(2): Xaa is C or S
GXEEVIMEYKFKLLVRGNDLYLMSIPE

SEQ ID NO: 79247 - protein, 31 aa, Artificial Sequence; identical to SEQ ID NO: 2039
  Cyclic GFR-binding peptide
  MOD_RES (30)..(31): Xaa is C or S

SEQ ID NO: 79248 - protein, 32 aa, Artificial Sequence; identical to SEQ ID NO: 30197
  Cyclic GFR-binding peptide
  MOD_RES (32)..(32): Xaa is C or S

SEQ ID NO: 79249 - protein, 38 aa, Artificial Sequence
  Cyclic GFR-binding peptide
  MOD_RES (2)..(4)..(36)..(37): Xaa is C or S
RXAXSEVTMNPIKGYVVNKNEDFYLINIPSMKEPVXXP

SEQ ID NO: 79250 - protein, 35 aa, Artificial Sequence; identical to SEQ ID NO: 2041
  Cyclic GFR-binding peptide
  MOD_RES (1)..(34)..(35): Xaa is C or S

SEQ ID NO: 79251 - protein, 40 aa, Artificial Sequence; identical to SEQ ID NO: 2042
  Cyclic GFR-binding peptide
  MOD_RES (1)..(3)..(35)..(36): Xaa is C or S

SEQ ID NO: 79252 - protein, 38 aa, Artificial Sequence
  Cyclic GFR-binding peptide
  MOD_RES (2)..(34)..(35): Xaa is C or S
GXSEVVMDRHKRLVVNNASDYYLISTASLRTPVXXTPP

SEQ ID NO: 79253 - protein, 32 aa, Artificial Sequence; identical to SEQ ID NO: 2044
  Cyclic GFR-binding peptide
  MOD_RES (28)..(29): Xaa is C or S

SEQ ID NO: 79254 - protein, 34 aa, Artificial Sequence
  Cyclic GFR-binding peptide
  MOD_RES (28)..(29): Xaa is C or S
MDRHKRLVVNNASDYYLISTASLRTPVXXTPPTS

SEQ ID NO: 79255 - protein, 37 aa, Artificial Sequence; identical to SEQ ID NO: 2046
  Cyclic GFR-binding peptide
  MOD_RES (2)..(4)..(36)..(37): Xaa is C or S

SEQ ID NO: 79256 - protein, 35 aa, Artificial Sequence; identical to SEQ ID NO: 41765
  Cyclic GFR-binding peptide
  MOD_RES (2)..(4)..(35): Xaa is C or S

SEQ ID NO: 79257 - protein, 26 aa, Artificial Sequence
  Cyclic GFR-binding peptide
AKVVMNRYKKLIVNNSSDFYLVSIAN

SEQ ID NO: 79258 - protein, 29 aa, Artificial Sequence
  Cyclic GFR-binding peptide
SRVVMNRHKRLIVNSSDDYYLVSTASLKT

SEQ ID NO: 79259 - protein, 22 aa, Artificial Sequence
  Cyclic GFR-binding peptide
MRYKKLVKPTRGVFYLISIANL

SEQ ID NO: 79260 - protein, 34 aa, Artificial Sequence; identical to SEQ ID NO: 2055
  Cyclic GFR-binding peptide
  MOD_RES (2)..(4): Xaa is C or S

SEQ ID NO: 79261 - protein, 39 aa, Artificial Sequence; identical to SEQ ID NO: 41773
  Cyclic GFR-binding peptide
  MOD_RES (2)..(34)..(35): Xaa is C or S

SEQ ID NO: 79262 - protein, 36 aa, Artificial Sequence; identical to SEQ ID NO: 2060
  Cyclic GFR-binding peptide
  MOD_RES (31)..(32): Xaa is C or S

SEQ ID NO: 79263 - protein, 31 aa, Artificial Sequence
  Cyclic GFR-binding peptide
RDVVMGRHKRLIIQQKDNYYLMSTASMKTPT

SEQ ID NO: 79264 - protein, 42 aa, Artificial Sequence; identical to SEQ ID NO: 2061
  Cyclic GFR-binding peptide
  MOD_RES (2)..(4)..(36)..(37): Xaa is C or S

SEQ ID NO: 79265 - protein, 23 aa, Artificial Sequence
  Cyclic GFR-binding peptide
PIKGYVKPKRGVFYLINIPSLAQ

SEQ ID NO: 79266 - protein, 24 aa, Artificial Sequence
  Cyclic GFR-binding peptide
ERYKKLTPVGMDDFYLVSIANLKT

SEQ ID NO: 79267 - protein, 29 aa, Artificial Sequence
  Cyclic GFR-binding peptide
  MOD_RES (28)..(29): Xaa is C or S
MNYHYKLIVNNSSDKYLVSIPSLKTPAXX

SEQ ID NO: 79268 - protein, 32 aa, Artificial Sequence
  Cyclic GFR-binding peptide
  MOD_RES (2)..(2): Xaa is C or S
GXSEVVMDYHYKLVVNNASDKYLISIPSLRTP

SEQ ID NO: 79269 - protein, 38 aa, Artificial Sequence; identical to SEQ ID NO: 2072
  Cyclic GFR-binding peptide
  MOD_RES (1)..(32)..(33): Xaa is C or S

SEQ ID NO: 79270 - protein, 25 aa, Artificial Sequence
  Cyclic GFR-binding peptide
RHKRLVVKDYEDYYLMSTASLETPV

SEQ ID NO: 79271 - protein, 30 aa, Artificial Sequence; identical to SEQ ID NO: 2080
  Cyclic GFR-binding peptide
  MOD_RES (1)..(1): Xaa is C or S

SEQ ID NO: 79272 - protein, 27 aa, Artificial Sequence
  Cyclic GFR-binding peptide
GEVVMDEYKFKVVKENEDLYLMSIPEL

SEQ ID NO: 79273 - protein, 27 aa, Artificial Sequence
  Cyclic GFR-binding peptide
  MOD_RES (2)..(2): Xaa is C or S
KXSRVIMRYKKLVKPKRGVFYLISIAN

SEQ ID NO: 79274 - protein, 31 aa, Artificial Sequence; identical to SEQ ID NO: 41794
  Cyclic GFR-binding peptide

SEQ ID NO: 79275 - protein, 33 aa, Artificial Sequence; identical to SEQ ID NO: 2086
  Cyclic GFR-binding peptide
  MOD_RES (31)..(32): Xaa is C or S

SEQ ID NO: 79276 - protein, 32 aa, Artificial Sequence; identical to SEQ ID NO: 30237
  Cyclic GFR-binding peptide
  MOD_RES (1)..(3): Xaa is C or S

SEQ ID NO: 79277 - protein, 31 aa, Artificial Sequence; identical to SEQ ID NO: 2088
  Cyclic GFR-binding peptide
  MOD_RES (1)..(3): Xaa is C or S

SEQ ID NO: 79278 - protein, 23 aa, Artificial Sequence
  Cyclic GFR-binding peptide
IMPIKGYIKPTKGIFYLINIPSL

SEQ ID NO: 79279 - protein, 27 aa, Artificial Sequence
  Cyclic GFR-binding peptide
  MOD_RES (27)..(27): Xaa is C or S
MPIKGYVKPKRGVFYLINIPSLAQPVX

SEQ ID NO: 79280 - protein, 32 aa, Artificial Sequence; identical to SEQ ID NO: 2089
  Cyclic GFR-binding peptide
  MOD_RES (1)..(1): Xaa is C or S

SEQ ID NO: 79281 - protein, 26 aa, Artificial Sequence
  Cyclic GFR-binding peptide
  MOD_RES (26)..(26): Xaa is C or S
EYKFKVVKENEDLYLMSIPELETPVX

SEQ ID NO: 79282 - protein, 30 aa, Artificial Sequence
  Cyclic GFR-binding peptide
SEVVMDYHYKLVVNNASDKYLISIPSLRTP

SEQ ID NO: 79283 - protein, 27 aa, Artificial Sequence
  Cyclic GFR-binding peptide
MNEYKFKIVNSSDDLYLVSIPELQTPA

SEQ ID NO: 79284 - protein, 38 aa, Artificial Sequence; identical to SEQ ID NO: 41802
  Cyclic GFR-binding peptide
  MOD_RES (1)..(32)..(33): Xaa is C or S

SEQ ID NO: 79285 - protein, 38 aa, Artificial Sequence; identical to SEQ ID NO: 2096
  Cyclic GFR-binding peptide
  MOD_RES (1)..(3)..(35)..(36): Xaa is C or S

SEQ ID NO: 79286 - protein, 24 aa, Artificial Sequence
  Cyclic GFR-binding peptide
RYKKLTPVGMDDFYLVSIANLKTP

SEQ ID NO: 79287 - protein, 32 aa, Artificial Sequence; identical to SEQ ID NO: 2101
  Cyclic GFR-binding peptide
  MOD_RES (2)..(2): Xaa is C or S

SEQ ID NO: 79288 - protein, 26 aa, Artificial Sequence
  Cyclic GFR-binding peptide
SMGEPIKGYTPVGMDDFYLVNIPSLK

SEQ ID NO: 79289 - protein, 36 aa, Artificial Sequence; identical to SEQ ID NO: 2102
  Cyclic GFR-binding peptide
  MOD_RES (1)..(33)..(34): Xaa is C or S

SEQ ID NO: 79290 - protein, 32 aa, Artificial Sequence
  Cyclic GFR-binding peptide
  MOD_RES (27)..(28): Xaa is C or S
NYHYKLVVNKNEDKYLISIPSMKEPVXXPEPI

SEQ ID NO: 79291 - protein, 25 aa, Artificial Sequence
  Cyclic GFR-binding peptide
DPIKGYVVKENEDFYLMNIPSLETP

SEQ ID NO: 79292 - protein, 22 aa, Artificial Sequence
  Cyclic GFR-binding peptide
DEYKFKVVNNASDLYLISIPEL

SEQ ID NO: 79293 - protein, 32 aa, Artificial Sequence; identical to SEQ ID NO: 30262
  Cyclic GFR-binding peptide
  MOD_RES (2)..(2): Xaa is C or S

SEQ ID NO: 79294 - protein, 26 aa, Artificial Sequence
  Cyclic GFR-binding peptide
MPIKGYLLVRGNDFYLMNIPSTKVPA

SEQ ID NO: 79295 - protein, 37 aa, Artificial Sequence
  Cyclic GFR-binding peptide
  MOD_RES (1)..(33)..(34): Xaa is C or S
XSEVVMDEYKFKVVNNASDLYLISIPELRTPVXXTPP

SEQ ID NO: 79296 - protein, 29 aa, Artificial Sequence
  Cyclic GFR-binding peptide
  MOD_RES (27)..(28): Xaa is C or S
NYHYKLIVNSSDDKYLVSIPSLKTPAXXP

SEQ ID NO: 79297 - protein, 27 aa, Artificial Sequence
  Cyclic GFR-binding peptide
VMNRHKRLIVNSSDDYYLVSTASLKTP

SEQ ID NO: 79298 - protein, 22 aa, Artificial Sequence
  Cyclic GFR-binding peptide
MNYHYKLVVNKNEDKYLISIPS

SEQ ID NO: 79299 - protein, 33 aa, Artificial Sequence
  Cyclic GFR-binding peptide
  MOD_RES (2)..(4): Xaa is C or S
SXGXRDVVMGYHYKLIIQQKDNKYLMSIPSMKT

SEQ ID NO: 79300 - protein, 36 aa, Artificial Sequence; identical to SEQ ID NO: 30270
  Cyclic GFR-binding peptide
  MOD_RES (2)..(34)..(35): Xaa is C or S

SEQ ID NO: 79301 - protein, 31 aa, Artificial Sequence; identical to SEQ ID NO: 75928
  Cyclic GFR-binding peptide
  MOD_RES (31)..(31): Xaa is C or S

SEQ ID NO: 79302 - protein, 28 aa, Artificial Sequence
  Cyclic GFR-binding peptide
  MOD_RES (28)..(28): Xaa is C or S
MGRYKKLYTVVGKDFYLISIANLKTPVX

SEQ ID NO: 79303 - protein, 31 aa, Artificial Sequence; identical to SEQ ID NO: 2115
  Cyclic GFR-binding peptide
  MOD_RES (30)..(31): Xaa is C or S

SEQ ID NO: 79304 - protein, 29 aa, Artificial Sequence
  Cyclic GFR-binding peptide
  MOD_RES (1)..(1): Xaa is C or S
XSEVVMDYHYKLVVNNASDKYLISIPSLR

SEQ ID NO: 79305 - protein, 32 aa, Artificial Sequence
  Cyclic GFR-binding peptide
  MOD_RES (32)..(32): Xaa is C or S
SEVVMDRHKRLVVNNASDYYLISTASLRTPVX

SEQ ID NO: 79306 - protein, 31 aa, Artificial Sequence
  Cyclic GFR-binding peptide
  MOD_RES (1)..(3): Xaa is C or S
XAXSEVTMNRHKRLVVNKNEDYYLISTASMK

SEQ ID NO: 79307 - protein, 22 aa, Artificial Sequence
  Cyclic GFR-binding peptide
EPIKGYVVKDYEDFYLMNIPSL

SEQ ID NO: 79308 - protein, 39 aa, Artificial Sequence; identical to SEQ ID NO: 2120
  Cyclic GFR-binding peptide
  MOD_RES (1)..(33)..(34): Xaa is C or S

SEQ ID NO: 79309 - protein, 30 aa, Artificial Sequence; identical to SEQ ID NO: 2122
  Cyclic GFR-binding peptide
  MOD_RES (2)..(2): Xaa is C or S

SEQ ID NO: 79310 - protein, 39 aa, Artificial Sequence
  Cyclic GFR-binding peptide
  MOD_RES (2)..(4)..(36)..(37): Xaa is C or S
RXGXAEVVMDRHKRLVVNNAADYYLISTASLRAPVXXSA

SEQ ID NO: 79311 - protein, 35 aa, Artificial Sequence; identical to SEQ ID NO: 40343
  Cyclic GFR-binding peptide
  MOD_RES (32)..(33): Xaa is C or S

SEQ ID NO: 79312 - protein, 27 aa, Artificial Sequence
  Cyclic GFR-binding peptide
  MOD_RES (27)..(27): Xaa is C or S
DPIKGYVVKENEDFYLMNIPSLETPVX

SEQ ID NO: 79313 - protein, 30 aa, Artificial Sequence; identical to SEQ ID NO: 30284
  Cyclic GFR-binding peptide
  MOD_RES (1)..(3): Xaa is C or S

SEQ ID NO: 79314 - protein, 39 aa, Artificial Sequence; identical to SEQ ID NO: 40347
  Cyclic GFR-binding peptide
  MOD_RES (2)..(4)..(36)..(37): Xaa is C or S

SEQ ID NO: 79315 - protein, 30 aa, Artificial Sequence
  Cyclic GFR-binding peptide
SRVIMPIKGYVKPKRGVFYLINIPSLAQPV

SEQ ID NO: 79316 - protein, 31 aa, Artificial Sequence
  Cyclic GFR-binding peptide
  MOD_RES (30)..(31): Xaa is C or S
KVIMPIKGYIKPTKGIFYLINIPSLDQSVXX

SEQ ID NO: 79317 - protein, 29 aa, Artificial Sequence
  Cyclic GFR-binding peptide
VTMNRHKRLVVNKNEDYYLISTASMKEPV

SEQ ID NO: 79318 - protein, 22 aa, Artificial Sequence
  Cyclic GFR-binding peptide
RHKRLVVKENEDYYLMSTASLE

SEQ ID NO: 79319 - protein, 34 aa, Artificial Sequence; identical to SEQ ID NO: 2133
  Cyclic GFR-binding peptide
  MOD_RES (31)..(32): Xaa is C or S

SEQ ID NO: 79320 - protein, 31 aa, Artificial Sequence; identical to SEQ ID NO: 2134
  Cyclic GFR-binding peptide
  MOD_RES (2)..(4): Xaa is C or S

SEQ ID NO: 79321 - protein, 35 aa, Artificial Sequence; identical to SEQ ID NO: 2136
  Cyclic GFR-binding peptide
  MOD_RES (1)..(3)..(34)..(35): Xaa is C or S

SEQ ID NO: 79322 - protein, 31 aa, Artificial Sequence; identical to SEQ ID NO: 40354
  Cyclic GFR-binding peptide
  MOD_RES (26)..(27): Xaa is C or S

SEQ ID NO: 79323 - protein, 34 aa, Artificial Sequence; identical to SEQ ID NO: 2137
  Cyclic GFR-binding peptide
  MOD_RES (30)..(31): Xaa is C or S

SEQ ID NO: 79324 - protein, 25 aa, Artificial Sequence
  Cyclic GFR-binding peptide
VVMERHKRLVVKDYEDYYLMSTASL

SEQ ID NO: 79325 - protein, 26 aa, Artificial Sequence
  Cyclic GFR-binding peptide
  MOD_RES (26)..(26): Xaa is C or S
RYKKLVKPKRGVFYLISIANLAQPVX

SEQ ID NO: 79326 - protein, 34 aa, Artificial Sequence; identical to SEQ ID NO: 40356
  Cyclic GFR-binding peptide
  MOD_RES (2)..(34): Xaa is C or S

SEQ ID NO: 79327 - protein, 23 aa, Artificial Sequence
  Cyclic GFR-binding peptide
GERHKRLTPVGMDDYYLVSTASL

SEQ ID NO: 79328 - protein, 32 aa, Artificial Sequence; identical to SEQ ID NO: 2146
  Cyclic GFR-binding peptide
  MOD_RES (1)..(1): Xaa is C or S

SEQ ID NO: 79329 - protein, 28 aa, Artificial Sequence
  Cyclic GFR-binding peptide
  MOD_RES (1)..(1): Xaa is C or S
XSKVVMPIKGYVKPTRGVFYLINIPSLD

SEQ ID NO: 79330 - protein, 32 aa, Artificial Sequence
  Cyclic GFR-binding peptide
  MOD_RES (2)..(2): Xaa is C or S
GXAEVVMDRHKRLVVNNAADYYLISTASLRAP

SEQ ID NO: 79331 - protein, 22 aa, Artificial Sequence
  Cyclic GFR-binding peptide
GEYKFKIIQQKDNLYLMSIPEM

SEQ ID NO: 79332 - protein, 25 aa, Artificial Sequence
  Cyclic GFR-binding peptide
MGPIKGYYTVVGKDFYLINIPSLKT

SEQ ID NO: 79333 - protein, 30 aa, Artificial Sequence; identical to SEQ ID NO: 30307
  Cyclic GFR-binding peptide
  MOD_RES (1)..(3): Xaa is C or S

SEQ ID NO: 79334 - protein, 31 aa, Artificial Sequence; identical to SEQ ID NO: 2151
  Cyclic GFR-binding peptide
  MOD_RES (29)..(30): Xaa is C or S

SEQ ID NO: 79335 - protein, 29 aa, Artificial Sequence
  Cyclic GFR-binding peptide
SMGERHKRLTPVGMDDYYLVSTASLKTPV

SEQ ID NO: 79336 - protein, 26 aa, Artificial Sequence
  Cyclic GFR-binding peptide
  MOD_RES (26)..(26): Xaa is C or S
EYKFKVVNNASDLYLISIPELRTPVX

SEQ ID NO: 79337 - protein, 22 aa, Artificial Sequence
  Cyclic GFR-binding peptide
DRHKRLVVKENEDYYLMSTASL

SEQ ID NO: 79338 - protein, 26 aa, Artificial Sequence
  Cyclic GFR-binding peptide
  MOD_RES (1)..(1): Xaa is C or S
XEEVIMYHYKLLLVRGNDKYLMSIPS

SEQ ID NO: 79339 - protein, 34 aa, Artificial Sequence; identical to SEQ ID NO: 30310
  Cyclic GFR-binding peptide
  MOD_RES (31)..(31): Xaa is C or S

SEQ ID NO: 79340 - protein, 30 aa, Artificial Sequence; identical to SEQ ID NO: 2158
  Cyclic GFR-binding peptide
  MOD_RES (1)..(1): Xaa is C or S

SEQ ID NO: 79341 - protein, 31 aa, Artificial Sequence; identical to SEQ ID NO: 2160
  Cyclic GFR-binding peptide
  MOD_RES (30)..(31): Xaa is C or S

SEQ ID NO: 79342 - protein, 29 aa, Artificial Sequence
  Cyclic GFR-binding peptide
SKVIMRYKKLIKPTKGIFYLISIANLDQS

SEQ ID NO: 79343 - protein, 37 aa, Artificial Sequence
  Cyclic GFR-binding peptide
  MOD_RES (2)..(34)..(35): Xaa is C or S
GXRDVVMGEYKFKIIQQKDNLYLMSIPEMKTPTXXPG

SEQ ID NO: 79344 - protein, 29 aa, Artificial Sequence
  Cyclic GFR-binding peptide
EVVMEPIKGYVVKDYEDFYLMNIPSLETP

SEQ ID NO: 79345 - protein, 30 aa, Artificial Sequence
  Cyclic GFR-binding peptide
  MOD_RES (27)..(28): Xaa is C or S
DRHKRLVVNNASDYYLISTASLRTPVXXTP

SEQ ID NO: 79346 - protein, 34 aa, Artificial Sequence; identical to SEQ ID NO: 2166
  Cyclic GFR-binding peptide
  MOD_RES (28)..(29): Xaa is C or S

SEQ ID NO: 79347 - protein, 37 aa, Artificial Sequence; identical to SEQ ID NO: 75953
  Cyclic GFR-binding peptide
  MOD_RES (2)..(34)..(35): Xaa is C or S

SEQ ID NO: 79348 - protein, 26 aa, Artificial Sequence
  Cyclic GFR-binding peptide
SRVVMNPIKGYIVNSSDDFYLVNIPS

SEQ ID NO: 79349 - protein, 31 aa, Artificial Sequence; identical to SEQ ID NO: 30325
  Cyclic GFR-binding peptide
  MOD_RES (26)..(27): Xaa is C or S

SEQ ID NO: 79350 - protein, 30 aa, Artificial Sequence; identical to SEQ ID NO: 30326
  Cyclic GFR-binding peptide

SEQ ID NO: 79351 - protein, 29 aa, Artificial Sequence
  Cyclic GFR-binding peptide
RVVMNYHYKLIVNSSDDKYLVSIPSLQTP

SEQ ID NO: 79352 - protein, 33 aa, Artificial Sequence; identical to SEQ ID NO: 30328
  Cyclic GFR-binding peptide
  MOD_RES (1)..(32)..(33): Xaa is C or S

SEQ ID NO: 79353 - protein, 26 aa, Artificial Sequence
  Cyclic GFR-binding peptide
SKVVMEYKFKVKPTRGVLYLISIPEL

SEQ ID NO: 79354 - protein, 21 aa, Artificial Sequence
  Cyclic GFR-binding peptide
NRHKRLVVNKNEDYYLISTAS

SEQ ID NO: 79355 - protein, 24 aa, Artificial Sequence
  Cyclic GFR-binding peptide
DRHKRLVVKENEDYYLMSTASLET

SEQ ID NO: 79356 - protein, 31 aa, Artificial Sequence
  Cyclic GFR-binding peptide
  MOD_RES (30)..(31): Xaa is C or S
VVMDEYKFKVVNNASDLYLISIPELRTPVXX

SEQ ID NO: 79357 - protein, 26 aa, Artificial Sequence
  Cyclic GFR-binding peptide
MNYHYKLIVNNSSDKYLVSIPSLKTP

SEQ ID NO: 79358 - protein, 30 aa, Artificial Sequence; identical to SEQ ID NO: 2182
  Cyclic GFR-binding peptide
  MOD_RES (30)..(30): Xaa is C or S

SEQ ID NO: 79359 - protein, 37 aa, Artificial Sequence; identical to SEQ ID NO: 2185
  Cyclic GFR-binding peptide
  MOD_RES (32)..(33): Xaa is C or S

SEQ ID NO: 79360 - protein, 29 aa, Artificial Sequence
  Cyclic GFR-binding peptide
  MOD_RES (1)..(1): Xaa is C or S
XAKVVMNYHYKLIVNNSSDKYLVSIPSLK

SEQ ID NO: 79361 - protein, 24 aa, Artificial Sequence
  Cyclic GFR-binding peptide
EPIKGYVVKDYEDFYLMNIPSLET

SEQ ID NO: 79362 - protein, 28 aa, Artificial Sequence
  Cyclic GFR-binding peptide
  MOD_RES (28)..(28): Xaa is C or S
MNEYKFKIVNSSDDLYLVSIPELKTPAX

SEQ ID NO: 79363 - protein, 27 aa, Artificial Sequence
  Cyclic GFR-binding peptide
EVVMDRYKKLVVNNAADFYLISIANLR

SEQ ID NO: 79364 - protein, 30 aa, Artificial Sequence
  Cyclic GFR-binding peptide
  MOD_RES (2)..(2): Xaa is C or S
GXEEVIMEYKFKLLVRGNDLYLMSIPETKV

SEQ ID NO: 79365 - protein, 34 aa, Artificial Sequence; identical to SEQ ID NO: 40407
  Cyclic GFR-binding peptide
  MOD_RES (1)..(3)..(34): Xaa is C or S

SEQ ID NO: 79366 - protein, 30 aa, Artificial Sequence; identical to SEQ ID NO: 2193
  Cyclic GFR-binding peptide

SEQ ID NO: 79367 - protein, 36 aa, Artificial Sequence
  Cyclic GFR-binding peptide
  MOD_RES (30)..(31): Xaa is C or S
EVIMRHKRLLLVRGNDYYLMSTASTKVPAXXTSPVR

SEQ ID NO: 79368 - protein, 32 aa, Artificial Sequence; identical to SEQ ID NO: 2194
  Cyclic GFR-binding peptide
  MOD_RES (2)..(4): Xaa is C or S

SEQ ID NO: 79369 - protein, 33 aa, Artificial Sequence; identical to SEQ ID NO: 12736
  Cyclic GFR-binding peptide
  MOD_RES (30)..(31): Xaa is C or S

SEQ ID NO: 79370 - protein, 38 aa, Artificial Sequence
  Cyclic GFR-binding peptide
  MOD_RES (1)..(32)..(33): Xaa is C or S
XSKVVMPIKGYVKPTRGVFYLINIPSLDQPVXXPSASA

SEQ ID NO: 79371 - protein, 37 aa, Artificial Sequence
  Cyclic GFR-binding peptide
  MOD_RES (2)..(34)..(35): Xaa is C or S
AXSEVTMNRHKRLVVNKNEDYYLISTASMKEPVXXPE

SEQ ID NO: 79372 - protein, 30 aa, Artificial Sequence; identical to SEQ ID NO: 75968
  Cyclic GFR-binding peptide
  MOD_RES (30)..(30): Xaa is C or S

SEQ ID NO: 79373 - protein, 29 aa, Artificial Sequence
  Cyclic GFR-binding peptide
  MOD_RES (1)..(1): Xaa is C or S
XSEVVMDRYKKLVVNNASDFYLISIANLR

SEQ ID NO: 79374 - protein, 25 aa, Artificial Sequence
  Cyclic GFR-binding peptide
GRHKRLYTVVGKDYYLISTASLKTP

SEQ ID NO: 79375 - protein, 23 aa, Artificial Sequence
  Cyclic GFR-binding peptide
PIKGYVVKENEDFYLMNIPSLET

SEQ ID NO: 79376 - protein, 27 aa, Artificial Sequence
  Cyclic GFR-binding peptide
  MOD_RES (27)..(27): Xaa is C or S
MRHKRLVKPKRGVYYLISTASLAQPVX

SEQ ID NO: 79377 - protein, 38 aa, Artificial Sequence; identical to SEQ ID NO: 30355
  Cyclic GFR-binding peptide
  MOD_RES (2)..(33)..(34): Xaa is C or S

SEQ ID NO: 79378 - protein, 27 aa, Artificial Sequence
  Cyclic GFR-binding peptide
AEVVMDEYKFKVVNNAADLYLISIPEL

SEQ ID NO: 79379 - protein, 33 aa, Artificial Sequence
  Cyclic GFR-binding peptide
  MOD_RES (32)..(33): Xaa is C or S
RDVVMGEYKFKIIQQKDNLYLMSIPEMKTPTXX

SEQ ID NO: 79380 - protein, 25 aa, Artificial Sequence
  Cyclic GFR-binding peptide
EVVMDRHKRLVVNNAADYYLISTAS

SEQ ID NO: 79381 - protein, 30 aa, Artificial Sequence
  Cyclic GFR-binding peptide
  MOD_RES (2)..(2): Xaa is C or S
GXAEVVMDRHKRLVVNNAADYYLISTASLR

SEQ ID NO: 79382 - protein, 25 aa, Artificial Sequence
  Cyclic GFR-binding peptide
MDRHKRLVVNNAADYYLISTASLRA

SEQ ID NO: 79383 - protein, 25 aa, Artificial Sequence
  Cyclic GFR-binding peptide
RYKKLVKPTRGVFYLISIANLDQPV

SEQ ID NO: 79384 - protein, 27 aa, Artificial Sequence
  Cyclic GFR-binding peptide
AEVVMDRYKKLVVNNAADFYLISIANL

SEQ ID NO: 79385 - protein, 41 aa, Artificial Sequence; identical to SEQ ID NO: 2209
  Cyclic GFR-binding peptide
  MOD_RES (2)..(4)..(35)..(36): Xaa is C or S

SEQ ID NO: 79386 - protein, 32 aa, Artificial Sequence; identical to SEQ ID NO: 2213
  Cyclic GFR-binding peptide
  MOD_RES (27)..(28): Xaa is C or S

SEQ ID NO: 79387 - protein, 26 aa, Artificial Sequence
  Cyclic GFR-binding peptide
ARVVMNPIKGYIVNSSDDFYLVNIPS

SEQ ID NO: 79388 - protein, 30 aa, Artificial Sequence; identical to SEQ ID NO: 40431
  Cyclic GFR-binding peptide
  MOD_RES (1)..(3): Xaa is C or S

SEQ ID NO: 79389 - protein, 27 aa, Artificial Sequence
  Cyclic GFR-binding peptide
EVTMNEYKFKVVNKNEDLYLISIPEMK

SEQ ID NO: 79390 - protein, 32 aa, Artificial Sequence; identical to SEQ ID NO: 2217
  Cyclic GFR-binding peptide
  MOD_RES (29)..(30): Xaa is C or S

SEQ ID NO: 79391 - protein, 32 aa, Artificial Sequence; identical to SEQ ID NO: 40438
  Cyclic GFR-binding peptide
  MOD_RES (32)..(32): Xaa is C or S

SEQ ID NO: 79392 - protein, 33 aa, Artificial Sequence; identical to SEQ ID NO: 40439
  Cyclic GFR-binding peptide
  MOD_RES (28)..(29): Xaa is C or S

SEQ ID NO: 79393 - protein, 41 aa, Artificial Sequence
  Cyclic GFR-binding peptide
  MOD_RES (1)..(3)..(35)..(36): Xaa is C or S
XGXSRVVMNEYKFKIVNSSDDLYLVSIPELKTPAXXPKPVH

SEQ ID NO: 79394 - protein, 28 aa, Artificial Sequence
  Cyclic GFR-binding peptide
  MOD_RES (26)..(27): Xaa is C or S
PIKGYYTVVGKDFYLINIPSLKTPVXXA

SEQ ID NO: 79395 - protein, 37 aa, Artificial Sequence; identical to SEQ ID NO: 2221
  Cyclic GFR-binding peptide
  MOD_RES (1)..(32)..(33): Xaa is C or S

SEQ ID NO: 79396 - protein, 35 aa, Artificial Sequence; identical to SEQ ID NO: 30374
  Cyclic GFR-binding peptide
  MOD_RES (1)..(33)..(34): Xaa is C or S

SEQ ID NO: 79397 - protein, 31 aa, Artificial Sequence
  Cyclic GFR-binding peptide
  MOD_RES (1)..(1): Xaa is C or S
XAEVVMDRHKRLVVNNAADYYLISTASLRAP

SEQ ID NO: 79398 - protein, 24 aa, Artificial Sequence
  Cyclic GFR-binding peptide
KVVMRHKRLVKPTRGVYYLISTAS

SEQ ID NO: 79399 - protein, 30 aa, Artificial Sequence; identical to SEQ ID NO: 2225
  Cyclic GFR-binding peptide
  MOD_RES (29)..(30): Xaa is C or S

SEQ ID NO: 79400 - protein, 28 aa, Artificial Sequence
  Cyclic GFR-binding peptide
  MOD_RES (1)..(1): Xaa is C or S
XEEVIMEYKFKLLVRGNDLYLMSIPETK

SEQ ID NO: 79401 - protein, 28 aa, Artificial Sequence
  Cyclic GFR-binding peptide
  MOD_RES (27)..(28): Xaa is C or S
NEYKFKIVNSSDDLYLVSIPELKTPAXX

SEQ ID NO: 79402 - protein, 27 aa, Artificial Sequence
  Cyclic GFR-binding peptide
  MOD_RES (27)..(27): Xaa is C or S
GPIKGYYTVVGKDFYLINIPSLKTPVX

SEQ ID NO: 79403 - protein, 25 aa, Artificial Sequence
  Cyclic GFR-binding peptide
MNEYKFKIVNNSSDLYLVSIPELKT

SEQ ID NO: 79404 - protein, 29 aa, Artificial Sequence
  Cyclic GFR-binding peptide
  MOD_RES (1)..(3): Xaa is C or S
XGXAKVVMNPIKGYIVNNSSDFYLVNIPS

SEQ ID NO: 79405 - protein, 35 aa, Artificial Sequence
  Cyclic GFR-binding peptide
  MOD_RES (2)..(4): Xaa is C or S
RXGXGEVVMDPIKGYVVKENEDFYLMNIPSLETPV

SEQ ID NO: 79406 - protein, 35 aa, Artificial Sequence; identical to SEQ ID NO: 2229
  Cyclic GFR-binding peptide
  MOD_RES (29)..(30): Xaa is C or S

SEQ ID NO: 79407 - protein, 28 aa, Artificial Sequence
  Cyclic GFR-binding peptide
VVMYHYKLVKPTRGVKYLISIPSLDQPV

SEQ ID NO: 79408 - protein, 34 aa, Artificial Sequence
  Cyclic GFR-binding peptide
  MOD_RES (31)..(32): Xaa is C or S
DVVMGEYKFKIIQQKDNLYLMSIPEMKTPTXXPG

SEQ ID NO: 79409 - protein, 30 aa, Artificial Sequence; identical to SEQ ID NO: 2231
  Cyclic GFR-binding peptide
  MOD_RES (2)..(4): Xaa is C or S

SEQ ID NO: 79410 - protein, 30 aa, Artificial Sequence; identical to SEQ ID NO: 40461
  Cyclic GFR-binding peptide
  MOD_RES (2)..(4): Xaa is C or S

SEQ ID NO: 79411 - protein, 35 aa, Artificial Sequence
  Cyclic GFR-binding peptide
  MOD_RES (1)..(33)..(34): Xaa is C or S
XAEVVMDRHKRLVVNNAADYYLISTASLRAPVXXS

SEQ ID NO: 79412 - protein, 31 aa, Artificial Sequence; identical to SEQ ID NO: 40462
  Cyclic GFR-binding peptide
  MOD_RES (2)..(4): Xaa is C or S

SEQ ID NO: 79413 - protein, 36 aa, Artificial Sequence; identical to SEQ ID NO: 2233
  Cyclic GFR-binding peptide
  MOD_RES (30)..(31): Xaa is C or S

SEQ ID NO: 79414 - protein, 31 aa, Artificial Sequence; identical to SEQ ID NO: 40465
  Cyclic GFR-binding peptide
  MOD_RES (2)..(4): Xaa is C or S

SEQ ID NO: 79415 - protein, 34 aa, Artificial Sequence; identical to SEQ ID NO: 2236
  Cyclic GFR-binding peptide
  MOD_RES (29)..(30): Xaa is C or S

SEQ ID NO: 79416 - protein, 41 aa, Artificial Sequence; identical to SEQ ID NO: 40466
  Cyclic GFR-binding peptide
  MOD_RES (1)..(3)..(35)..(36): Xaa is C or S

SEQ ID NO: 79417 - protein, 28 aa, Artificial Sequence
  Cyclic GFR-binding peptide
  MOD_RES (1)..(1): Xaa is C or S
XSEVVMDEYKFKVVNNASDLYLISIPEL

SEQ ID NO: 79418 - protein, 31 aa, Artificial Sequence; identical to SEQ ID NO: 40467
  Cyclic GFR-binding peptide
  MOD_RES (30)..(31): Xaa is C or S

SEQ ID NO: 79419 - protein, 24 aa, Artificial Sequence
  Cyclic GFR-binding peptide
RVIMRYKKLVKPKRGVFYLISIAN

SEQ ID NO: 79420 - protein, 36 aa, Artificial Sequence; identical to SEQ ID NO: 2239
  Cyclic GFR-binding peptide
  MOD_RES (2)..(34)..(35): Xaa is C or S

SEQ ID NO: 79421 - protein, 36 aa, Artificial Sequence
  Cyclic GFR-binding peptide
  MOD_RES (1)..(3)..(35)..(36): Xaa is C or S
XGXSEVVMDYHYKLVVNNASDKYLISIPSLRTPVXX

SEQ ID NO: 79422 - protein, 31 aa, Artificial Sequence
  Cyclic GFR-binding peptide
  MOD_RES (29)..(30): Xaa is C or S
TMNPIKGYVVNKNEDFYLINIPSMKEPVXXP

SEQ ID NO: 79423 - protein, 31 aa, Artificial Sequence; identical to SEQ ID NO: 2242
  Cyclic GFR-binding peptide
  MOD_RES (31)..(31): Xaa is C or S

SEQ ID NO: 79424 - protein, 35 aa, Artificial Sequence; identical to SEQ ID NO: 30392
  Cyclic GFR-binding peptide
  MOD_RES (31)..(32): Xaa is C or S

SEQ ID NO: 79425 - protein, 23 aa, Artificial Sequence
  Cyclic GFR-binding peptide
YHYKLVVKENEDKYLMSIPSLET

SEQ ID NO: 79426 - protein, 22 aa, Artificial Sequence
  Cyclic GFR-binding peptide
MNRYKKLIVNSSDDFYLVSIAN

SEQ ID NO: 79427 - protein, 31 aa, Artificial Sequence; identical to SEQ ID NO: 2250
  Cyclic GFR-binding peptide

SEQ ID NO: 79428 - protein, 30 aa, Artificial Sequence; identical to SEQ ID NO: 40479
  Cyclic GFR-binding peptide
  MOD_RES (2)..(4): Xaa is C or S

SEQ ID NO: 79429 - protein, 34 aa, Artificial Sequence
  Cyclic GFR-binding peptide
  MOD_RES (30)..(31): Xaa is C or S
VVMDRHKRLVVNNASDYYLISTASLRTPVXXTPP

SEQ ID NO: 79430 - protein, 38 aa, Artificial Sequence
  Cyclic GFR-binding peptide
  MOD_RES (1)..(3)..(34)..(35): Xaa is C or S
XKXSKVIMPIKGYIKPTKGIFYLINIPSLDQSVXXPSA

SEQ ID NO: 79431 - protein, 32 aa, Artificial Sequence; identical to SEQ ID NO: 2253
  Cyclic GFR-binding peptide
  MOD_RES (26)..(27): Xaa is C or S

SEQ ID NO: 79432 - protein, 29 aa, Artificial Sequence
  Cyclic GFR-binding peptide
  MOD_RES (1)..(1): Xaa is C or S
XSKVVMRHKRLVKPTRGVYYLISTASLDQ

SEQ ID NO: 79433 - protein, 29 aa, Artificial Sequence
  Cyclic GFR-binding peptide
  MOD_RES (2)..(4): Xaa is C or S
SXKXSKVVMRYKKLVKPTRGVFYLISIAN

SEQ ID NO: 79434 - protein, 30 aa, Artificial Sequence
  Cyclic GFR-binding peptide
  MOD_RES (26)..(27): Xaa is C or S
PIKGYIKPTKGIFYLINIPSLDQSVXXPSA

SEQ ID NO: 79435 - protein, 37 aa, Artificial Sequence; identical to SEQ ID NO: 2258
  Cyclic GFR-binding peptide
  MOD_RES (2)..(4)..(36)..(37): Xaa is C or S

SEQ ID NO: 79436 - protein, 40 aa, Artificial Sequence; identical to SEQ ID NO: 40491
  Cyclic GFR-binding peptide
  MOD_RES (2)..(34)..(35): Xaa is C or S

SEQ ID NO: 79437 - protein, 36 aa, Artificial Sequence; identical to SEQ ID NO: 40493
  Cyclic GFR-binding peptide
  MOD_RES (2)..(34)..(35): Xaa is C or S

SEQ ID NO: 79438 - protein, 28 aa, Artificial Sequence
  Cyclic GFR-binding peptide
VVMDEYKFKVVKENEDLYLMSIPELETP

SEQ ID NO: 79439 - protein, 36 aa, Artificial Sequence
  Cyclic GFR-binding peptide
  MOD_RES (2)..(4)..(36): Xaa is C or S
SXGXRDVVMGYHYKLIIQQKDNKYLMSIPSMKTPTX

SEQ ID NO: 79440 - protein, 41 aa, Artificial Sequence; identical to SEQ ID NO: 30409
  Cyclic GFR-binding peptide
  MOD_RES (1)..(3)..(35)..(36): Xaa is C or S

SEQ ID NO: 79441 - protein, 33 aa, Artificial Sequence
  Cyclic GFR-binding peptide
  MOD_RES (31)..(32): Xaa is C or S
EVTMNRHKRLVVNKNEDYYLISTASMKEPVXXP

SEQ ID NO: 79442 - protein, 31 aa, Artificial Sequence; identical to SEQ ID NO: 2262
  Cyclic GFR-binding peptide
  MOD_RES (2)..(4): Xaa is C or S

SEQ ID NO: 79443 - protein, 34 aa, Artificial Sequence; identical to SEQ ID NO: 40494
  Cyclic GFR-binding peptide
  MOD_RES (1)..(3): Xaa is C or S

SEQ ID NO: 79444 - protein, 30 aa, Artificial Sequence; identical to SEQ ID NO: 40496
  Cyclic GFR-binding peptide

SEQ ID NO: 79445 - protein, 39 aa, Artificial Sequence; identical to SEQ ID NO: 40498
  Cyclic GFR-binding peptide
  MOD_RES (2)..(34)..(35): Xaa is C or S

SEQ ID NO: 79446 - protein, 37 aa, Artificial Sequence; identical to SEQ ID NO: 2265
  Cyclic GFR-binding peptide
  MOD_RES (1)..(3)..(34)..(35): Xaa is C or S

SEQ ID NO: 79447 - protein, 33 aa, Artificial Sequence; identical to SEQ ID NO: 2268
  Cyclic GFR-binding peptide
  MOD_RES (2)..(4): Xaa is C or S

SEQ ID NO: 79448 - protein, 34 aa, Artificial Sequence; identical to SEQ ID NO: 2270
  Cyclic GFR-binding peptide
  MOD_RES (29)..(30): Xaa is C or S

SEQ ID NO: 79449 - protein, 34 aa, Artificial Sequence; identical to SEQ ID NO: 2271
  Cyclic GFR-binding peptide
  MOD_RES (1)..(3): Xaa is C or S

SEQ ID NO: 79450 - protein, 40 aa, Artificial Sequence; identical to SEQ ID NO: 2272
  Cyclic GFR-binding peptide
  MOD_RES (2)..(34)..(35): Xaa is C or S

SEQ ID NO: 79451 - protein, 37 aa, Artificial Sequence; identical to SEQ ID NO: 30424
  Cyclic GFR-binding peptide
  MOD_RES (31)..(32): Xaa is C or S

SEQ ID NO: 79452 - protein, 31 aa, Artificial Sequence; identical to SEQ ID NO: 12806
  Cyclic GFR-binding peptide
  MOD_RES (2)..(4): Xaa is C or S

SEQ ID NO: 79453 - protein, 28 aa, Artificial Sequence
  Cyclic GFR-binding peptide
GEVVMEPIKGYVVKDYEDFYLMNIPSLE

SEQ ID NO: 79454 - protein, 27 aa, Artificial Sequence
  Cyclic GFR-binding peptide
VSMGEEYKFKTPVGMDDLYLVSIPELK

SEQ ID NO: 79455 - protein, 34 aa, Artificial Sequence
  Cyclic GFR-binding peptide
  MOD_RES (2)..(34): Xaa is C or S
AXSEVTMNRHKRLVVNKNEDYYLISTASMKEPVX

SEQ ID NO: 79456 - protein, 23 aa, Artificial Sequence
  Cyclic GFR-binding peptide
VMEPIKGYVVKDYEDFYLMNIPS

SEQ ID NO: 79457 - protein, 30 aa, Artificial Sequence; identical to SEQ ID NO: 2279
  Cyclic GFR-binding peptide
  MOD_RES (30)..(30): Xaa is C or S

SEQ ID NO: 79458 - protein, 32 aa, Artificial Sequence; identical to SEQ ID NO: 40520
  Cyclic GFR-binding peptide
  MOD_RES (31)..(32): Xaa is C or S

SEQ ID NO: 79459 - protein, 25 aa, Artificial Sequence
  Cyclic GFR-binding peptide
RHKRLIVNSSDDYYLVSTASLQTPA

SEQ ID NO: 79460 - protein, 40 aa, Artificial Sequence; identical to SEQ ID NO: 12818
  Cyclic GFR-binding peptide
  MOD_RES (1)..(3)..(35)..(36): Xaa is C or S

SEQ ID NO: 79461 - protein, 37 aa, Artificial Sequence; identical to SEQ ID NO: 2283
  Cyclic GFR-binding peptide
  MOD_RES (31)..(32): Xaa is C or S

SEQ ID NO: 79462 - protein, 30 aa, Artificial Sequence; identical to SEQ ID NO: 2284
  Cyclic GFR-binding peptide
  MOD_RES (27)..(28): Xaa is C or S

SEQ ID NO: 79463 - protein, 36 aa, Artificial Sequence; identical to SEQ ID NO: 2285
  Cyclic GFR-binding peptide
  MOD_RES (2)..(4)..(36): Xaa is C or S

SEQ ID NO: 79464 - protein, 32 aa, Artificial Sequence; identical to SEQ ID NO: 2286
  Cyclic GFR-binding peptide
  MOD_RES (29)..(30): Xaa is C or S

SEQ ID NO: 79465 - protein, 28 aa, Artificial Sequence
  Cyclic GFR-binding peptide
  MOD_RES (2)..(2): Xaa is C or S
KXSKVVMRYKKLVKPTRGVFYLISIANL

SEQ ID NO: 79466 - protein, 32 aa, Artificial Sequence; identical to SEQ ID NO: 30441
  Cyclic GFR-binding peptide
  MOD_RES (32)..(32): Xaa is C or S

SEQ ID NO: 79467 - protein, 29 aa, Artificial Sequence
  Cyclic GFR-binding peptide
RVVMNEYKFKIVNSSDDLYLVSIPELKTP

SEQ ID NO: 79468 - protein, 29 aa, Artificial Sequence
  Cyclic GFR-binding peptide
  MOD_RES (1)..(1): Xaa is C or S
XAKVVMNRYKKLIVNNSSDFYLVSIANLK

SEQ ID NO: 79469 - protein, 37 aa, Artificial Sequence
  Cyclic GFR-binding peptide
  MOD_RES (32)..(33): Xaa is C or S
SEVTMNRHKRLVVNKNEDYYLISTASMKEPVXXPEPI

SEQ ID NO: 79470 - protein, 30 aa, Artificial Sequence
  Cyclic GFR-binding peptide
  MOD_RES (30)..(30): Xaa is C or S
VAMGRHKRLYTVVGKDYYLISTASLKTPVX

SEQ ID NO: 79471 - protein, 35 aa, Artificial Sequence
  Cyclic GFR-binding peptide
  MOD_RES (32)..(33): Xaa is C or S
SEVTMNEYKFKVVNKNEDLYLISIPEMKEPVXXPE

SEQ ID NO: 79472 - protein, 34 aa, Artificial Sequence; identical to SEQ ID NO: 40535
  Cyclic GFR-binding peptide
  MOD_RES (31)..(32): Xaa is C or S

SEQ ID NO: 79473 - protein, 36 aa, Artificial Sequence
  Cyclic GFR-binding peptide
  MOD_RES (1)..(33)..(34): Xaa is C or S
XSEVVMDEYKFKVVNNASDLYLISIPELRTPVXXTP

SEQ ID NO: 79474 - protein, 24 aa, Artificial Sequence
  Cyclic GFR-binding peptide
GRHKRLYTVVGKDYYLISTASLKT

SEQ ID NO: 79475 - protein, 24 aa, Artificial Sequence
  Cyclic GFR-binding peptide
NPIKGYVVNKNEDFYLINIPSMKE

SEQ ID NO: 79476 - protein, 24 aa, Artificial Sequence
  Cyclic GFR-binding peptide
MNRYKKLIVNSSDDFYLVSIANLK

SEQ ID NO: 79477 - protein, 34 aa, Artificial Sequence; identical to SEQ ID NO: 2306
  Cyclic GFR-binding peptide
  MOD_RES (1)..(33)..(34): Xaa is C or S

SEQ ID NO: 79478 - protein, 30 aa, Artificial Sequence
  Cyclic GFR-binding peptide
  MOD_RES (2)..(2): Xaa is C or S
GXSEVVMDYHYKLVVNNASDKYLISIPSLR

SEQ ID NO: 79479 - protein, 32 aa, Artificial Sequence
  Cyclic GFR-binding peptide
  MOD_RES (2)..(4): Xaa is C or S
RXAXSEVTMNRHKRLVVNKNEDYYLISTASMK

SEQ ID NO: 79480 - protein, 24 aa, Artificial Sequence
  Cyclic GFR-binding peptide
MGRHKRLYTVVGKDYYLISTASLK

SEQ ID NO: 79481 - protein, 28 aa, Artificial Sequence
  Cyclic GFR-binding peptide
SKVIMRYKKLIKPTKGIFYLISIANLDQ

SEQ ID NO: 79482 - protein, 40 aa, Artificial Sequence
  Cyclic GFR-binding peptide
  MOD_RES (2)..(34)..(35): Xaa is C or S
GXSRVVMNRYKKLIVNSSDDFYLVSIANLKTPAXXPKPVH

SEQ ID NO: 79483 - protein, 34 aa, Artificial Sequence
  Cyclic GFR-binding peptide
  MOD_RES (2)..(33)..(34): Xaa is C or S
KXSRVIMPIKGYVKPKRGVFYLINIPSLAQPVXX

SEQ ID NO: 79484 - protein, 32 aa, Artificial Sequence; identical to SEQ ID NO: 30451
  Cyclic GFR-binding peptide
  MOD_RES (27)..(28): Xaa is C or S

SEQ ID NO: 79485 - protein, 27 aa, Artificial Sequence
  Cyclic GFR-binding peptide
VMGRYKKLIIQQKDNFYLMSIANMKTP

SEQ ID NO: 79486 - protein, 33 aa, Artificial Sequence; identical to SEQ ID NO: 12847
  Cyclic GFR-binding peptide
  MOD_RES (28)..(29): Xaa is C or S

SEQ ID NO: 79487 - protein, 27 aa, Artificial Sequence
  Cyclic GFR-binding peptide
VVMNRYKKLIVNSSDDFYLVSIANLKT

SEQ ID NO: 79488 - protein, 35 aa, Artificial Sequence; identical to SEQ ID NO: 2315
  Cyclic GFR-binding peptide
  MOD_RES (2)..(34)..(35): Xaa is C or S

SEQ ID NO: 79489 - protein, 27 aa, Artificial Sequence
  Cyclic GFR-binding peptide
  MOD_RES (1)..(1): Xaa is C or S
XGEVVMERYKKLVVKDYEDFYLMSIAN

SEQ ID NO: 79490 - protein, 32 aa, Artificial Sequence; identical to SEQ ID NO: 2320
  Cyclic GFR-binding peptide
  MOD_RES (30)..(31): Xaa is C or S

SEQ ID NO: 79491 - protein, 34 aa, Artificial Sequence; identical to SEQ ID NO: 2322
  Cyclic GFR-binding peptide
  MOD_RES (28)..(28): Xaa is C or S

SEQ ID NO: 79492 - protein, 22 aa, Artificial Sequence
  Cyclic GFR-binding peptide
GYHYKLIIQQKDNKYLMSIPSM

SEQ ID NO: 79493 - protein, 34 aa, Artificial Sequence; identical to SEQ ID NO: 2323
  Cyclic GFR-binding peptide
  MOD_RES (28)..(28): Xaa is C or S

SEQ ID NO: 79494 - protein, 36 aa, Artificial Sequence; identical to SEQ ID NO: 30461
  Cyclic GFR-binding peptide
  MOD_RES (2)..(35)..(36): Xaa is C or S

SEQ ID NO: 79495 - protein, 39 aa, Artificial Sequence; identical to SEQ ID NO: 2325
  Cyclic GFR-binding peptide
  MOD_RES (2)..(34)..(35): Xaa is C or S

SEQ ID NO: 79496 - protein, 32 aa, Artificial Sequence; identical to SEQ ID NO: 40557
  Cyclic GFR-binding peptide
  MOD_RES (31)..(32): Xaa is C or S

SEQ ID NO: 79497 - protein, 24 aa, Artificial Sequence
  Cyclic GFR-binding peptide
VMDRYKKLVVNNASDFYLISIANL

SEQ ID NO: 79498 - protein, 27 aa, Artificial Sequence
  Cyclic GFR-binding peptide
  MOD_RES (2)..(2): Xaa is C or S
KXSKVVMPIKGYVKPTRGVFYLINIPS

SEQ ID NO: 79499 - protein, 38 aa, Artificial Sequence; identical to SEQ ID NO: 30463
  Cyclic GFR-binding peptide
  MOD_RES (1)..(3)..(35)..(36): Xaa is C or S

SEQ ID NO: 79500 - protein, 37 aa, Artificial Sequence; identical to SEQ ID NO: 2327
  Cyclic GFR-binding peptide
  MOD_RES (31)..(32): Xaa is C or S

SEQ ID NO: 79501 - protein, 35 aa, Artificial Sequence; identical to SEQ ID NO: 2328
  Cyclic GFR-binding peptide
  MOD_RES (30)..(31): Xaa is C or S

SEQ ID NO: 79502 - protein, 34 aa, Artificial Sequence; identical to SEQ ID NO: 2329
  Cyclic GFR-binding peptide
  MOD_RES (1)..(33): Xaa is C or S

SEQ ID NO: 79503 - protein, 23 aa, Artificial Sequence
  Cyclic GFR-binding peptide
PIKGYIKPTKGIFYLINIPSLDQ

SEQ ID NO: 79504 - protein, 28 aa, Artificial Sequence
  Cyclic GFR-binding peptide
  MOD_RES (26)..(27): Xaa is C or S
RHKRLYTVVGKDYYLISTASLKTPVXXA

SEQ ID NO: 79505 - protein, 33 aa, Artificial Sequence
  Cyclic GFR-binding peptide
  MOD_RES (32)..(33): Xaa is C or S
SEVTMNEYKFKVVNKNEDLYLISIPEMKEPVXX

SEQ ID NO: 79506 - protein, 24 aa, Artificial Sequence
  Cyclic GFR-binding peptide
MGYHYKLYTVVGKDKYLISIPSLK

SEQ ID NO: 79507 - protein, 27 aa, Artificial Sequence
  Cyclic GFR-binding peptide
  MOD_RES (1)..(1): Xaa is C or S
XGEVVMEYHYKLVVKDYEDKYLMSIPS

SEQ ID NO: 79508 - protein, 37 aa, Artificial Sequence; identical to SEQ ID NO: 30473
  Cyclic GFR-binding peptide
  MOD_RES (2)..(33)..(34): Xaa is C or S

SEQ ID NO: 79509 - protein, 36 aa, Artificial Sequence; identical to SEQ ID NO: 30476
  Cyclic GFR-binding peptide
  MOD_RES (30)..(31): Xaa is C or S

SEQ ID NO: 79510 - protein, 38 aa, Artificial Sequence; identical to SEQ ID NO: 30478
  Cyclic GFR-binding peptide
  MOD_RES (1)..(33)..(34): Xaa is C or S

SEQ ID NO: 79511 - protein, 32 aa, Artificial Sequence; identical to SEQ ID NO: 2334
  Cyclic GFR-binding peptide
  MOD_RES (2)..(2): Xaa is C or S

SEQ ID NO: 79512 - protein, 29 aa, Artificial Sequence
  Cyclic GFR-binding peptide
KVVMNEYKFKIVNNSSDLYLVSIPELKTP

SEQ ID NO: 79513 - protein, 38 aa, Artificial Sequence; identical to SEQ ID NO: 40573
  Cyclic GFR-binding peptide
  MOD_RES (1)..(33)..(34): Xaa is C or S

SEQ ID NO: 79514 - protein, 35 aa, Artificial Sequence; identical to SEQ ID NO: 2339
  Cyclic GFR-binding peptide
  MOD_RES (32)..(33): Xaa is C or S

SEQ ID NO: 79515 - protein, 30 aa, Artificial Sequence; identical to SEQ ID NO: 2340
  Cyclic GFR-binding peptide
  MOD_RES (26)..(27): Xaa is C or S

SEQ ID NO: 79516 - protein, 29 aa, Artificial Sequence
  Cyclic GFR-binding peptide
RVVMNRHKRLIVNSSDDYYLVSTASLKTP

SEQ ID NO: 79517 - protein, 34 aa, Artificial Sequence
  Cyclic GFR-binding peptide
  MOD_RES (2)..(34): Xaa is C or S
GXSEVVMDEYKFKVVNNASDLYLISIPELRTPVX

SEQ ID NO: 79518 - protein, 27 aa, Artificial Sequence
  Cyclic GFR-binding peptide
  MOD_RES (1)..(1): Xaa is C or S
XAEVVMDEYKFKVVNNAADLYLISIPE

SEQ ID NO: 79519 - protein, 30 aa, Artificial Sequence; identical to SEQ ID NO: 12881
  Cyclic GFR-binding peptide

SEQ ID NO: 79520 - protein, 30 aa, Artificial Sequence
  Cyclic GFR-binding peptide
  MOD_RES (1)..(3): Xaa is C or S
XGXAEVVMDRHKRLVVNNAADYYLISTASL

SEQ ID NO: 79521 - protein, 23 aa, Artificial Sequence
  Cyclic GFR-binding peptide
MNRHKRLVVNKNEDYYLISTASM

SEQ ID NO: 79522 - protein, 35 aa, Artificial Sequence; identical to SEQ ID NO: 30492
  Cyclic GFR-binding peptide
  MOD_RES (32)..(32): Xaa is C or S

SEQ ID NO: 79523 - protein, 31 aa, Artificial Sequence; identical to SEQ ID NO: 2346
  Cyclic GFR-binding peptide
  MOD_RES (2)..(2): Xaa is C or S

SEQ ID NO: 79524 - protein, 27 aa, Artificial Sequence
  Cyclic GFR-binding peptide
GERHKRLTPVGMDDYYLVSTASLKTPV

SEQ ID NO: 79525 - protein, 25 aa, Artificial Sequence
  Cyclic GFR-binding peptide
EPIKGYVVKDYEDFYLMNIPSLETP

SEQ ID NO: 79526 - protein, 23 aa, Artificial Sequence
  Cyclic GFR-binding peptide
MNYHYKLIVNNSSDKYLVSIPSL

SEQ ID NO: 79527 - protein, 33 aa, Artificial Sequence; identical to SEQ ID NO: 40585
  Cyclic GFR-binding peptide
  MOD_RES (31)..(32): Xaa is C or S

SEQ ID NO: 79528 - protein, 32 aa, Artificial Sequence; identical to SEQ ID NO: 76062
  Cyclic GFR-binding peptide
  MOD_RES (28)..(29): Xaa is C or S

SEQ ID NO: 79529 - protein, 31 aa, Artificial Sequence; identical to SEQ ID NO: 30496
  Cyclic GFR-binding peptide
  MOD_RES (26)..(27): Xaa is C or S

SEQ ID NO: 79530 - protein, 30 aa, Artificial Sequence; identical to SEQ ID NO: 40586
  Cyclic GFR-binding peptide
  MOD_RES (27)..(28): Xaa is C or S

SEQ ID NO: 79531 - protein, 33 aa, Artificial Sequence; identical to SEQ ID NO: 30497
  Cyclic GFR-binding peptide
  MOD_RES (30)..(31): Xaa is C or S

SEQ ID NO: 79532 - protein, 32 aa, Artificial Sequence; identical to SEQ ID NO: 40587
  Cyclic GFR-binding peptide
  MOD_RES (27)..(28): Xaa is C or S

SEQ ID NO: 79533 - protein, 26 aa, Artificial Sequence
  Cyclic GFR-binding peptide
MGYHYKLIIQQKDNKYLMSIPSMKTP

SEQ ID NO: 79534 - protein, 35 aa, Artificial Sequence; identical to SEQ ID NO: 30498
  Cyclic GFR-binding peptide
  MOD_RES (2)..(4): Xaa is C or S

SEQ ID NO: 79535 - protein, 35 aa, Artificial Sequence
  Cyclic GFR-binding peptide
  MOD_RES (2)..(4): Xaa is C or S
RXGXSEVVMDRHKRLVVNNASDYYLISTASLRTPV

SEQ ID NO: 79536 - protein, 40 aa, Artificial Sequence; identical to SEQ ID NO: 2355
  Cyclic GFR-binding peptide
  MOD_RES (2)..(4)..(36): Xaa is C or S

SEQ ID NO: 79537 - protein, 31 aa, Artificial Sequence
  Cyclic GFR-binding peptide
  MOD_RES (28)..(29): Xaa is C or S
IMRHKRLLLVRGNDYYLMSTASTKVPAXXTS

SEQ ID NO: 79538 - protein, 37 aa, Artificial Sequence; identical to SEQ ID NO: 2356
  Cyclic GFR-binding peptide
  MOD_RES (1)..(33): Xaa is C or S

SEQ ID NO: 79539 - protein, 30 aa, Artificial Sequence; identical to SEQ ID NO: 30508
  Cyclic GFR-binding peptide
  MOD_RES (30)..(30): Xaa is C or S

SEQ ID NO: 79540 - protein, 34 aa, Artificial Sequence
  Cyclic GFR-binding peptide
  MOD_RES (2)..(34): Xaa is C or S
GXRDVVMGRHKRLIIQQKDNYYLMSTASMKTPTX

SEQ ID NO: 79541 - protein, 30 aa, Artificial Sequence; identical to SEQ ID NO: 40596
  Cyclic GFR-binding peptide
  MOD_RES (30)..(30): Xaa is C or S

SEQ ID NO: 79542 - protein, 24 aa, Artificial Sequence
  Cyclic GFR-binding peptide
MNPIKGYIVNNSSDFYLVNIPSLK

SEQ ID NO: 79543 - protein, 31 aa, Artificial Sequence; identical to SEQ ID NO: 2364
  Cyclic GFR-binding peptide
  MOD_RES (28)..(29): Xaa is C or S

SEQ ID NO: 79544 - protein, 25 aa, Artificial Sequence
  Cyclic GFR-binding peptide
NPIKGYVVNKNEDFYLINIPSMKEP

SEQ ID NO: 79545 - protein, 31 aa, Artificial Sequence; identical to SEQ ID NO: 2367
  Cyclic GFR-binding peptide
  MOD_RES (2)..(2): Xaa is C or S

SEQ ID NO: 79546 - protein, 40 aa, Artificial Sequence; identical to SEQ ID NO: 30516
  Cyclic GFR-binding peptide
  MOD_RES (1)..(3)..(35)..(36): Xaa is C or S

SEQ ID NO: 79547 - protein, 23 aa, Artificial Sequence
  Cyclic GFR-binding peptide
VMEYHYKLVVKDYEDKYLMSIPS

SEQ ID NO: 79548 - protein, 30 aa, Artificial Sequence
  Cyclic GFR-binding peptide
  MOD_RES (2)..(4): Xaa is C or S
RXAXSEVTMNRHKRLVVNKNEDYYLISTAS

SEQ ID NO: 79549 - protein, 28 aa, Artificial Sequence
  Cyclic GFR-binding peptide
  MOD_RES (2)..(2): Xaa is C or S
GXGEVVMEPIKGYVVKDYEDFYLMNIPS

SEQ ID NO: 79550 - protein, 27 aa, Artificial Sequence
  Cyclic GFR-binding peptide
  MOD_RES (1)..(1): Xaa is C or S
XAEVVMDYHYKLVVNNAADKYLISIPS

SEQ ID NO: 79551 - protein, 39 aa, Artificial Sequence
  Cyclic GFR-binding peptide
  MOD_RES (1)..(3)..(35)..(36): Xaa is C or S
XGXSEVVMDRHKRLVVNNASDYYLISTASLRTPVXXTPP

SEQ ID NO: 79552 - protein, 40 aa, Artificial Sequence; identical to SEQ ID NO: 2370
  Cyclic GFR-binding peptide
  MOD_RES (2)..(4)..(35)..(36): Xaa is C or S

SEQ ID NO: 79553 - protein, 25 aa, Artificial Sequence
  Cyclic GFR-binding peptide
VMNPIKGYIVNSSDDFYLVNIPSLQ

SEQ ID NO: 79554 - protein, 32 aa, Artificial Sequence
  Cyclic GFR-binding peptide
  MOD_RES (31)..(32): Xaa is C or S
EVTMNPIKGYVVNKNEDFYLINIPSMKEPVXX

SEQ ID NO: 79555 - protein, 29 aa, Artificial Sequence
  Cyclic GFR-binding peptide
  MOD_RES (2)..(2): Xaa is C or S
GXEEVIMEYKFKLLVRGNDLYLMSIPETK

SEQ ID NO: 79556 - protein, 42 aa, Artificial Sequence; identical to SEQ ID NO: 40619
  Cyclic GFR-binding peptide
  MOD_RES (2)..(4)..(36)..(37): Xaa is C or S

SEQ ID NO: 79557 - protein, 34 aa, Artificial Sequence; identical to SEQ ID NO: 2378
  Cyclic GFR-binding peptide
  MOD_RES (30)..(31): Xaa is C or S

SEQ ID NO: 79558 - protein, 27 aa, Artificial Sequence
  Cyclic GFR-binding peptide
  MOD_RES (27)..(27): Xaa is C or S
MRHKRLIKPTKGIYYLISTASLDQSVX

SEQ ID NO: 79559 - protein, 23 aa, Artificial Sequence
  Cyclic GFR-binding peptide
MNYHYKLVVNKNEDKYLISIPSM

SEQ ID NO: 79560 - protein, 22 aa, Artificial Sequence
  Cyclic GFR-binding peptide
NRHKRLIVNSSDDYYLVSTASL

SEQ ID NO: 79561 - protein, 38 aa, Artificial Sequence
  Cyclic GFR-binding peptide
  MOD_RES (2)..(4)..(36)..(37): Xaa is C or S
RXGXESVAMGRHKRLYTVVGKDYYLISTASLKTPVXXA

SEQ ID NO: 79562 - protein, 22 aa, Artificial Sequence
  Cyclic GFR-binding peptide
MNPIKGYIVNSSDDFYLVNIPS

SEQ ID NO: 79563 - protein, 35 aa, Artificial Sequence; identical to SEQ ID NO: 30543
  Cyclic GFR-binding peptide
  MOD_RES (29)..(30): Xaa is C or S

SEQ ID NO: 79564 - protein, 37 aa, Artificial Sequence
  Cyclic GFR-binding peptide
  MOD_RES (2)..(4)..(36)..(37): Xaa is C or S
SXGXRDVVMGEYKFKIIQQKDNLYLMSIPEMKTPTXX

SEQ ID NO: 79565 - protein, 27 aa, Artificial Sequence
  Cyclic GFR-binding peptide
  MOD_RES (27)..(27): Xaa is C or S
NPIKGYIVNSSDDFYLVNIPSLKTPAX

SEQ ID NO: 79566 - protein, 22 aa, Artificial Sequence
  Cyclic GFR-binding peptide
RHKRLLLVRGNDYYLMSTASTK

SEQ ID NO: 79567 - protein, 32 aa, Artificial Sequence; identical to SEQ ID NO: 30545
  Cyclic GFR-binding peptide
  MOD_RES (1)..(1): Xaa is C or S

SEQ ID NO: 79568 - protein, 32 aa, Artificial Sequence
  Cyclic GFR-binding peptide
  MOD_RES (1)..(32): Xaa is C or S
XEEVIMRHKRLLLVRGNDYYLMSTASTKVPAX

SEQ ID NO: 79569 - protein, 36 aa, Artificial Sequence; identical to SEQ ID NO: 30550
  Cyclic GFR-binding peptide
  MOD_RES (2)..(34)..(35): Xaa is C or S

SEQ ID NO: 79570 - protein, 25 aa, Artificial Sequence
  Cyclic GFR-binding peptide
PIKGYLLVRGNDFYLMNIPSTKVPA

SEQ ID NO: 79571 - protein, 28 aa, Artificial Sequence
  Cyclic GFR-binding peptide
  MOD_RES (1)..(1): Xaa is C or S
XSRVVMNRHKRLIVNSSDDYYLVSTASL

SEQ ID NO: 79572 - protein, 27 aa, Artificial Sequence
  Cyclic GFR-binding peptide
MNPIKGYIVNNSSDFYLVNIPSLKTPA

SEQ ID NO: 79573 - protein, 32 aa, Artificial Sequence; identical to SEQ ID NO: 30552
  Cyclic GFR-binding peptide
  MOD_RES (29)..(30): Xaa is C or S

SEQ ID NO: 79574 - protein, 28 aa, Artificial Sequence
  Cyclic GFR-binding peptide
  MOD_RES (26)..(27): Xaa is C or S
PIKGYIVNNSSDFYLVNIPSLKTPAXXA

SEQ ID NO: 79575 - protein, 27 aa, Artificial Sequence
  Cyclic GFR-binding peptide
VTMNEYKFKVVNKNEDLYLISIPEMKE

SEQ ID NO: 79576 - protein, 30 aa, Artificial Sequence; identical to SEQ ID NO: 2400
  Cyclic GFR-binding peptide
  MOD_RES (30)..(30): Xaa is C or S

SEQ ID NO: 79577 - protein, 36 aa, Artificial Sequence; identical to SEQ ID NO: 2402
  Cyclic GFR-binding peptide
  MOD_RES (2)..(4)..(36): Xaa is C or S

SEQ ID NO: 79578 - protein, 20 aa, Artificial Sequence
  Cyclic GFR-binding peptide
PIKGYIKPTKGIFYLINIPS

SEQ ID NO: 79579 - protein, 33 aa, Artificial Sequence; identical to SEQ ID NO: 2406
  Cyclic GFR-binding peptide
  MOD_RES (2)..(2): Xaa is C or S

SEQ ID NO: 79580 - protein, 28 aa, Artificial Sequence
  Cyclic GFR-binding peptide
VMNPIKGYIVNSSDDFYLVNIPSLKTPA

SEQ ID NO: 79581 - protein, 29 aa, Artificial Sequence
  Cyclic GFR-binding peptide
  MOD_RES (29)..(29): Xaa is C or S
VMNYHYKLIVNSSDDKYLVSIPSLQTPAX

SEQ ID NO: 79582 - protein, 30 aa, Artificial Sequence
  Cyclic GFR-binding peptide
EVTMNEYKFKVVNKNEDLYLISIPEMKEPV

SEQ ID NO: 79583 - protein, 26 aa, Artificial Sequence
  Cyclic GFR-binding peptide
VIMYHYKLIKPTKGIKYLISIPSLDQ

SEQ ID NO: 79584 - protein, 32 aa, Artificial Sequence; identical to SEQ ID NO: 30571
  Cyclic GFR-binding peptide
  MOD_RES (1)..(1): Xaa is C or S

SEQ ID NO: 79585 - protein, 29 aa, Artificial Sequence
  Cyclic GFR-binding peptide
  MOD_RES (28)..(29): Xaa is C or S
MDRYKKLVVNNASDFYLISIANLRTPVXX

SEQ ID NO: 79586 - protein, 29 aa, Artificial Sequence
  Cyclic GFR-binding peptide
  MOD_RES (27)..(27): Xaa is C or S
NEYKFKIVNSSDDLYLVSIPELKTPAXTP

SEQ ID NO: 79587 - protein, 38 aa, Artificial Sequence; identical to SEQ ID NO: 2412
  Cyclic GFR-binding peptide
  MOD_RES (1)..(3)..(35)..(36): Xaa is C or S

SEQ ID NO: 79588 - protein, 38 aa, Artificial Sequence; identical to SEQ ID NO: 40665
  Cyclic GFR-binding peptide
  MOD_RES (2)..(34)..(35): Xaa is C or S

SEQ ID NO: 79589 - protein, 34 aa, Artificial Sequence; identical to SEQ ID NO: 2413
  Cyclic GFR-binding peptide
  MOD_RES (2)..(33)..(34): Xaa is C or S

SEQ ID NO: 79590 - protein, 35 aa, Artificial Sequence; identical to SEQ ID NO: 76100
  Cyclic GFR-binding peptide
  MOD_RES (32)..(33): Xaa is C or S

SEQ ID NO: 79591 - protein, 29 aa, Artificial Sequence
  Cyclic GFR-binding peptide
  MOD_RES (29)..(29): Xaa is C or S
VMDPIKGYVVNNASDFYLINIPSLRTPVX

SEQ ID NO: 79592 - protein, 37 aa, Artificial Sequence; identical to SEQ ID NO: 2418
  Cyclic GFR-binding peptide
  MOD_RES (31)..(32): Xaa is C or S

SEQ ID NO: 79593 - protein, 33 aa, Artificial Sequence
  Cyclic GFR-binding peptide
  MOD_RES (29)..(30): Xaa is C or S
VIMPIKGYVKPKRGVFYLINIPSLAQPVXXPAA

SEQ ID NO: 79594 - protein, 27 aa, Artificial Sequence
  Cyclic GFR-binding peptide
EVVMERYKKLVVKDYEDFYLMSIANLE

SEQ ID NO: 79595 - protein, 32 aa, Artificial Sequence; identical to SEQ ID NO: 2423
  Cyclic GFR-binding peptide
  MOD_RES (26)..(27): Xaa is C or S

SEQ ID NO: 79596 - protein, 33 aa, Artificial Sequence; identical to SEQ ID NO: 40679
  Cyclic GFR-binding peptide
  MOD_RES (1)..(3): Xaa is C or S

SEQ ID NO: 79597 - protein, 28 aa, Artificial Sequence
  Cyclic GFR-binding peptide
  MOD_RES (27)..(28): Xaa is C or S
DRYKKLVVNNASDFYLISIANLRTPVXX

SEQ ID NO: 79598 - protein, 31 aa, Artificial Sequence; identical to SEQ ID NO: 30588
  Cyclic GFR-binding peptide
  MOD_RES (31)..(31): Xaa is C or S

SEQ ID NO: 79599 - protein, 29 aa, Artificial Sequence
  Cyclic GFR-binding peptide
  MOD_RES (1)..(1): Xaa is C or S
XESVAMGPIKGYYTVVGKDFYLINIPSLK

SEQ ID NO: 79600 - protein, 29 aa, Artificial Sequence
  Cyclic GFR-binding peptide
  MOD_RES (26)..(26): Xaa is C or S
PIKGYIVNSSDDFYLVNIPSLKTPAXTPK

SEQ ID NO: 79601 - protein, 22 aa, Artificial Sequence
  Cyclic GFR-binding peptide
IMPIKGYIKPTKGIFYLINIPS

SEQ ID NO: 79602 - protein, 24 aa, Artificial Sequence
  Cyclic GFR-binding peptide
MNRYKKLIVNSSDDFYLVSIANLQ

SEQ ID NO: 79603 - protein, 29 aa, Artificial Sequence
  Cyclic GFR-binding peptide
  MOD_RES (28)..(29): Xaa is C or S
MERHKRLVVKDYEDYYLMSTASLETPVXX

SEQ ID NO: 79604 - protein, 34 aa, Artificial Sequence
  Cyclic GFR-binding peptide
  MOD_RES (31)..(32): Xaa is C or S
DVVMGRHKRLIIQQKDNYYLMSTASMKTPTXXPG

SEQ ID NO: 79605 - protein, 30 aa, Artificial Sequence; identical to SEQ ID NO: 2433
  Cyclic GFR-binding peptide
  MOD_RES (1)..(1): Xaa is C or S

SEQ ID NO: 79606 - protein, 34 aa, Artificial Sequence; identical to SEQ ID NO: 30601
  Cyclic GFR-binding peptide
  MOD_RES (29)..(30): Xaa is C or S

SEQ ID NO: 79607 - protein, 28 aa, Artificial Sequence
  Cyclic GFR-binding peptide
  MOD_RES (27)..(28): Xaa is C or S
DYHYKLVVKENEDKYLMSIPSLETPVXX

SEQ ID NO: 79608 - protein, 35 aa, Artificial Sequence; identical to SEQ ID NO: 30605
  Cyclic GFR-binding peptide
  MOD_RES (1)..(33)..(34): Xaa is C or S

SEQ ID NO: 79609 - protein, 27 aa, Artificial Sequence
  Cyclic GFR-binding peptide
DVVMGRHKRLIIQQKDNYYLMSTASMK

SEQ ID NO: 79610 - protein, 37 aa, Artificial Sequence; identical to SEQ ID NO: 76124
  Cyclic GFR-binding peptide
  MOD_RES (1)..(33)..(34): Xaa is C or S

SEQ ID NO: 79611 - protein, 40 aa, Artificial Sequence
  Cyclic GFR-binding peptide
  MOD_RES (2)..(34)..(35): Xaa is C or S
GXAEVVMDRHKRLVVNNAADYYLISTASLRAPVXXSAPAA

SEQ ID NO: 79612 - protein, 37 aa, Artificial Sequence; identical to SEQ ID NO: 2437
  Cyclic GFR-binding peptide
  MOD_RES (1)..(3)..(34)..(35): Xaa is C or S

SEQ ID NO: 79613 - protein, 30 aa, Artificial Sequence
  Cyclic GFR-binding peptide
  MOD_RES (29)..(30): Xaa is C or S
VIMYHYKLLLVRGNDKYLMSIPSTKVPAXX

SEQ ID NO: 79614 - protein, 31 aa, Artificial Sequence; identical to SEQ ID NO: 2439
  Cyclic GFR-binding peptide
  MOD_RES (2)..(2): Xaa is C or S

SEQ ID NO: 79615 - protein, 23 aa, Artificial Sequence
  Cyclic GFR-binding peptide
MERYKKLVVKDYEDFYLMSIANL

SEQ ID NO: 79616 - protein, 26 aa, Artificial Sequence
  Cyclic GFR-binding peptide
AKVVMNYHYKLIVNNSSDKYLVSIPS

SEQ ID NO: 79617 - protein, 31 aa, Artificial Sequence
  Cyclic GFR-binding peptide
  MOD_RES (2)..(2): Xaa is C or S
GXRDVVMGYHYKLIIQQKDNKYLMSIPSMKT

SEQ ID NO: 79618 - protein, 28 aa, Artificial Sequence
  Cyclic GFR-binding peptide
VVMPIKGYVKPTRGVFYLINIPSLDQPV

SEQ ID NO: 79619 - protein, 29 aa, Artificial Sequence
  Cyclic GFR-binding peptide
  MOD_RES (28)..(29): Xaa is C or S
MEYHYKLVVKDYEDKYLMSIPSLETPVXX

SEQ ID NO: 79620 - protein, 25 aa, Artificial Sequence
  Cyclic GFR-binding peptide
DEYKFKVVNNAADLYLISIPELRAP

SEQ ID NO: 79621 - protein, 35 aa, Artificial Sequence; identical to SEQ ID NO: 30618
  Cyclic GFR-binding peptide
  MOD_RES (2)..(4): Xaa is C or S

SEQ ID NO: 79622 - protein, 27 aa, Artificial Sequence
  Cyclic GFR-binding peptide
GEVVMDPIKGYVVKENEDFYLMNIPSL

SEQ ID NO: 79623 - protein, 35 aa, Artificial Sequence; identical to SEQ ID NO: 12994
  Cyclic GFR-binding peptide
  MOD_RES (31)..(32): Xaa is C or S

SEQ ID NO: 79624 - protein, 31 aa, Artificial Sequence
  Cyclic GFR-binding peptide
  MOD_RES (2)..(4): Xaa is C or S
RXGXSEVVMDYHYKLVVNNASDKYLISIPSL

SEQ ID NO: 79625 - protein, 40 aa, Artificial Sequence; identical to SEQ ID NO: 2447
  Cyclic GFR-binding peptide
  MOD_RES (2)..(4)..(36)..(37): Xaa is C or S

SEQ ID NO: 79626 - protein, 30 aa, Artificial Sequence
  Cyclic GFR-binding peptide
  MOD_RES (2)..(2): Xaa is C or S
GXEEVIMYHYKLLLVRGNDKYLMSIPSTKV

SEQ ID NO: 79627 - protein, 24 aa, Artificial Sequence
  Cyclic GFR-binding peptide
VIMRHKRLLLVRGNDYYLMSTAST

SEQ ID NO: 79628 - protein, 37 aa, Artificial Sequence; identical to SEQ ID NO: 40717
  Cyclic GFR-binding peptide
  MOD_RES (1)..(3)..(35)..(36): Xaa is C or S

SEQ ID NO: 79629 - protein, 23 aa, Artificial Sequence
  Cyclic GFR-binding peptide
MPIKGYVKPKRGVFYLINIPSLA

SEQ ID NO: 79630 - protein, 28 aa, Artificial Sequence
  Cyclic GFR-binding peptide
VAMGRHKRLYTVVGKDYYLISTASLKTP

SEQ ID NO: 79631 - protein, 32 aa, Artificial Sequence; identical to SEQ ID NO: 2449
  Cyclic GFR-binding peptide
  MOD_RES (30)..(31): Xaa is C or S

SEQ ID NO: 79632 - protein, 31 aa, Artificial Sequence
  Cyclic GFR-binding peptide
  MOD_RES (26)..(27): Xaa is C or S
RHKRLVVNNASDYYLISTASLRTPVXXTPPT

SEQ ID NO: 79633 - protein, 40 aa, Artificial Sequence
  Cyclic GFR-binding peptide
  MOD_RES (2)..(4)..(35)..(36): Xaa is C or S
LXGXEEVIMRHKRLLLVRGNDYYLMSTASTKVPAXXTSPV

SEQ ID NO: 79634 - protein, 30 aa, Artificial Sequence; identical to SEQ ID NO: 2453
  Cyclic GFR-binding peptide
  MOD_RES (28)..(29): Xaa is C or S

SEQ ID NO: 79635 - protein, 32 aa, Artificial Sequence; identical to SEQ ID NO: 30637
  Cyclic GFR-binding peptide
  MOD_RES (29)..(30): Xaa is C or S

SEQ ID NO: 79636 - protein, 38 aa, Artificial Sequence
  Cyclic GFR-binding peptide
  MOD_RES (2)..(34)..(35): Xaa is C or S
GXESVAMGRHKRLYTVVGKDYYLISTASLKTPVXXAKS

SEQ ID NO: 79637 - protein, 42 aa, Artificial Sequence; identical to SEQ ID NO: 2461
  Cyclic GFR-binding peptide
  MOD_RES (2)..(4)..(36): Xaa is C or S

SEQ ID NO: 79638 - protein, 30 aa, Artificial Sequence; identical to SEQ ID NO: 40735
  Cyclic GFR-binding peptide
  MOD_RES (29)..(30): Xaa is C or S

SEQ ID NO: 79639 - protein, 28 aa, Artificial Sequence
  Cyclic GFR-binding peptide
  MOD_RES (26)..(27): Xaa is C or S
PIKGYIVNSSDDFYLVNIPSLQTPAXXP

SEQ ID NO: 79640 - protein, 22 aa, Artificial Sequence
  Cyclic GFR-binding peptide
IMRHKRLLLVRGNDYYLMSTAS

SEQ ID NO: 79641 - protein, 36 aa, Artificial Sequence; identical to SEQ ID NO: 30646
  Cyclic GFR-binding peptide
  MOD_RES (2)..(34)..(35): Xaa is C or S

SEQ ID NO: 79642 - protein, 28 aa, Artificial Sequence
  Cyclic GFR-binding peptide
VVMDPIKGYVVNNASDFYLINIPSLRTP

SEQ ID NO: 79643 - protein, 32 aa, Artificial Sequence; identical to SEQ ID NO: 2467
  Cyclic GFR-binding peptide
  MOD_RES (1)..(1): Xaa is C or S

SEQ ID NO: 79644 - protein, 38 aa, Artificial Sequence; identical to SEQ ID NO: 30649
  Cyclic GFR-binding peptide
  MOD_RES (2)..(4)..(36)..(37): Xaa is C or S

SEQ ID NO: 79645 - protein, 35 aa, Artificial Sequence; identical to SEQ ID NO: 30653
  Cyclic GFR-binding peptide
  MOD_RES (1)..(33)..(34): Xaa is C or S

SEQ ID NO: 79646 - protein, 32 aa, Artificial Sequence; identical to SEQ ID NO: 2470
  Cyclic GFR-binding peptide
  MOD_RES (29)..(30): Xaa is C or S

SEQ ID NO: 79647 - protein, 22 aa, Artificial Sequence
  Cyclic GFR-binding peptide
YHYKLVVNKNEDKYLISIPSMK

SEQ ID NO: 79648 - protein, 32 aa, Artificial Sequence; identical to SEQ ID NO: 2472
  Cyclic GFR-binding peptide
  MOD_RES (2)..(4): Xaa is C or S

SEQ ID NO: 79649 - protein, 24 aa, Artificial Sequence
  Cyclic GFR-binding peptide
DYHYKLVVNNAADKYLISIPSLRA

SEQ ID NO: 79650 - protein, 35 aa, Artificial Sequence; identical to SEQ ID NO: 30664
  Cyclic GFR-binding peptide
  MOD_RES (32)..(33): Xaa is C or S

SEQ ID NO: 79651 - protein, 22 aa, Artificial Sequence
  Cyclic GFR-binding peptide
IMYHYKLLLVRGNDKYLMSIPS

SEQ ID NO: 79652 - protein, 28 aa, Artificial Sequence
  Cyclic GFR-binding peptide
VMNYHYKLIVNSSDDKYLVSIPSLKTPA

SEQ ID NO: 79653 - protein, 31 aa, Artificial Sequence; identical to SEQ ID NO: 30667
  Cyclic GFR-binding peptide
  MOD_RES (30)..(31): Xaa is C or S

SEQ ID NO: 79654 - protein, 29 aa, Artificial Sequence
  Cyclic GFR-binding peptide
  MOD_RES (28)..(29): Xaa is C or S
IMYHYKLLLVRGNDKYLMSIPSTKVPAXX

SEQ ID NO: 79655 - protein, 36 aa, Artificial Sequence
  Cyclic GFR-binding peptide
  MOD_RES (2)..(33)..(34): Xaa is C or S
GXEEVIMRHKRLLLVRGNDYYLMSTASTKVPAXXTS

SEQ ID NO: 79656 - protein, 31 aa, Artificial Sequence; identical to SEQ ID NO: 76154
  Cyclic GFR-binding peptide

SEQ ID NO: 79657 - protein, 33 aa, Artificial Sequence; identical to SEQ ID NO: 2486
  Cyclic GFR-binding peptide
  MOD_RES (30)..(31): Xaa is C or S

SEQ ID NO: 79658 - protein, 28 aa, Artificial Sequence
  Cyclic GFR-binding peptide
EVVMDRYKKLVVKENEDFYLMSIANLET

SEQ ID NO: 79659 - protein, 34 aa, Artificial Sequence; identical to SEQ ID NO: 30680
  Cyclic GFR-binding peptide
  MOD_RES (32)..(33): Xaa is C or S

SEQ ID NO: 79660 - protein, 31 aa, Artificial Sequence
  Cyclic GFR-binding peptide
SEVVMDYHYKLVVNNASDKYLISIPSLRTPV

SEQ ID NO: 79661 - protein, 27 aa, Artificial Sequence
  Cyclic GFR-binding peptide
SVAMGYHYKLYTVVGKDKYLISIPSLK

SEQ ID NO: 79662 - protein, 26 aa, Artificial Sequence
  Cyclic GFR-binding peptide
NPIKGYVVNKNEDFYLINIPSMKEPV

SEQ ID NO: 79663 - protein, 27 aa, Artificial Sequence
  Cyclic GFR-binding peptide
  MOD_RES (26)..(27): Xaa is C or S
RHKRLVVNNASDYYLISTASLRTPVXX

SEQ ID NO: 79664 - protein, 33 aa, Artificial Sequence; identical to SEQ ID NO: 2492
  Cyclic GFR-binding peptide
  MOD_RES (1)..(3): Xaa is C or S

SEQ ID NO: 79665 - protein, 24 aa, Artificial Sequence
  Cyclic GFR-binding peptide
IMYHYKLIKPTKGIKYLISIPSLD

SEQ ID NO: 79666 - protein, 23 aa, Artificial Sequence
  Cyclic GFR-binding peptide
YHYKLLLVRGNDKYLMSIPSTKV

SEQ ID NO: 79667 - protein, 26 aa, Artificial Sequence
  Cyclic GFR-binding peptide
  MOD_RES (26)..(26): Xaa is C or S
PIKGYYTVVGKDFYLINIPSLKTPVX

SEQ ID NO: 79668 - protein, 39 aa, Artificial Sequence
  Cyclic GFR-binding peptide
  MOD_RES (2)..(34)..(35): Xaa is C or S
GXRDVVMGRHKRLIIQQKDNYYLMSTASMKTPTXXPGAS

SEQ ID NO: 79669 - protein, 35 aa, Artificial Sequence
  Cyclic GFR-binding peptide
  MOD_RES (30)..(31): Xaa is C or S
VTMNPIKGYVVNKNEDFYLINIPSMKEPVXXPEPI

SEQ ID NO: 79670 - protein, 29 aa, Artificial Sequence
  Cyclic GFR-binding peptide
  MOD_RES (28)..(29): Xaa is C or S
IMYHYKLIKPTKGIKYLISIPSLDQSVXX

SEQ ID NO: 79671 - protein, 35 aa, Artificial Sequence; identical to SEQ ID NO: 30690
  Cyclic GFR-binding peptide
  MOD_RES (1)..(3)..(35): Xaa is C or S

SEQ ID NO: 79672 - protein, 30 aa, Artificial Sequence; identical to SEQ ID NO: 76159
  Cyclic GFR-binding peptide
  MOD_RES (2)..(2): Xaa is C or S

SEQ ID NO: 79673 - protein, 27 aa, Artificial Sequence
  Cyclic GFR-binding peptide
MDEYKFKVVNNASDLYLISIPELRTPV

SEQ ID NO: 79674 - protein, 33 aa, Artificial Sequence; identical to SEQ ID NO: 30693
  Cyclic GFR-binding peptide
  MOD_RES (2)..(2): Xaa is C or S

SEQ ID NO: 79675 - protein, 28 aa, Artificial Sequence
  Cyclic GFR-binding peptide
  MOD_RES (26)..(27): Xaa is C or S
EYKFKVVNNASDLYLISIPELRTPVXXT

SEQ ID NO: 79676 - protein, 25 aa, Artificial Sequence
  Cyclic GFR-binding peptide
EVIMRHKRLLLVRGNDYYLMSTAST

SEQ ID NO: 79677 - protein, 29 aa, Artificial Sequence
  Cyclic GFR-binding peptide
  MOD_RES (1)..(3): Xaa is C or S
XGXAEVVMDYHYKLVVNNAADKYLISIPS

SEQ ID NO: 79678 - protein, 28 aa, Artificial Sequence
  Cyclic GFR-binding peptide
AKVVMNRYKKLIVNNSSDFYLVSIANLK

SEQ ID NO: 79679 - protein, 30 aa, Artificial Sequence; identical to SEQ ID NO: 2510
  Cyclic GFR-binding peptide
  MOD_RES (1)..(3): Xaa is C or S

SEQ ID NO: 79680 - protein, 22 aa, Artificial Sequence
  Cyclic GFR-binding peptide
DRYKKLVVNNAADFYLISIANL

SEQ ID NO: 79681 - protein, 29 aa, Artificial Sequence
  Cyclic GFR-binding peptide
  MOD_RES (26)..(26): Xaa is C or S
YHYKLIVNSSDDKYLVSIPSLKTPAXTPK

SEQ ID NO: 79682 - protein, 30 aa, Artificial Sequence; identical to SEQ ID NO: 40795
  Cyclic GFR-binding peptide
  MOD_RES (2)..(2): Xaa is C or S

SEQ ID NO: 79683 - protein, 30 aa, Artificial Sequence; identical to SEQ ID NO: 2517
  Cyclic GFR-binding peptide
  MOD_RES (2)..(2): Xaa is C or S

SEQ ID NO: 79684 - protein, 36 aa, Artificial Sequence; identical to SEQ ID NO: 40799
  Cyclic GFR-binding peptide
  MOD_RES (30)..(31): Xaa is C or S

SEQ ID NO: 79685 - protein, 26 aa, Artificial Sequence
  Cyclic GFR-binding peptide
  MOD_RES (26)..(26): Xaa is C or S
PIKGYIVNNSSDFYLVNIPSLKTPAX

SEQ ID NO: 79686 - protein, 36 aa, Artificial Sequence; identical to SEQ ID NO: 40801
  Cyclic GFR-binding peptide
  MOD_RES (2)..(4)..(35)..(36): Xaa is C or S

SEQ ID NO: 79687 - protein, 37 aa, Artificial Sequence; identical to SEQ ID NO: 2521
  Cyclic GFR-binding peptide
  MOD_RES (2)..(4)..(37): Xaa is C or S

SEQ ID NO: 79688 - protein, 22 aa, Artificial Sequence
  Cyclic GFR-binding peptide
GYHYKLYTVVGKDKYLISIPSL

SEQ ID NO: 79689 - protein, 33 aa, Artificial Sequence; identical to SEQ ID NO: 2522
  Cyclic GFR-binding peptide
  MOD_RES (2)..(2): Xaa is C or S

SEQ ID NO: 79690 - protein, 33 aa, Artificial Sequence; identical to SEQ ID NO: 40809
  Cyclic GFR-binding peptide
  MOD_RES (1)..(3): Xaa is C or S

SEQ ID NO: 79691 - protein, 25 aa, Artificial Sequence
  Cyclic GFR-binding peptide
VIMEYKFKLLVRGNDLYLMSIPETK

SEQ ID NO: 79692 - protein, 33 aa, Artificial Sequence; identical to SEQ ID NO: 2524
  Cyclic GFR-binding peptide
  MOD_RES (30)..(31): Xaa is C or S

SEQ ID NO: 79693 - protein, 34 aa, Artificial Sequence; identical to SEQ ID NO: 40814
  Cyclic GFR-binding peptide
  MOD_RES (28)..(29): Xaa is C or S

SEQ ID NO: 79694 - protein, 35 aa, Artificial Sequence; identical to SEQ ID NO: 30717
  Cyclic GFR-binding peptide
  MOD_RES (1)..(33)..(34): Xaa is C or S

SEQ ID NO: 79695 - protein, 41 aa, Artificial Sequence
  Cyclic GFR-binding peptide
  MOD_RES (2)..(4)..(35)..(36): Xaa is C or S
LXGXEEVIMYHYKLLLVRGNDKYLMSIPSTKVPAXXTSPVR

SEQ ID NO: 79696 - protein, 31 aa, Artificial Sequence; identical to SEQ ID NO: 2528
  Cyclic GFR-binding peptide
  MOD_RES (1)..(3): Xaa is C or S

SEQ ID NO: 79697 - protein, 35 aa, Artificial Sequence; identical to SEQ ID NO: 2531
  Cyclic GFR-binding peptide
  MOD_RES (32)..(33): Xaa is C or S

SEQ ID NO: 79698 - protein, 31 aa, Artificial Sequence
  Cyclic GFR-binding peptide
  MOD_RES (1)..(3): Xaa is C or S
XGXEEVIMRHKRLLLVRGNDYYLMSTASTKV

SEQ ID NO: 79699 - protein, 39 aa, Artificial Sequence; identical to SEQ ID NO: 2535
  Cyclic GFR-binding peptide
  MOD_RES (2)..(4)..(36)..(37): Xaa is C or S

SEQ ID NO: 79700 - protein, 36 aa, Artificial Sequence; identical to SEQ ID NO: 2539
  Cyclic GFR-binding peptide
  MOD_RES (31)..(32): Xaa is C or S

SEQ ID NO: 79701 - protein, 20 aa, Artificial Sequence
  Cyclic GFR-binding peptide
RYKKLLLVRGNDFYLMSIAN

SEQ ID NO: 79702 - protein, 26 aa, Artificial Sequence
  Cyclic GFR-binding peptide
MRHKRLIKPTKGIYYLISTASLDQSV

SEQ ID NO: 79703 - protein, 31 aa, Artificial Sequence; identical to SEQ ID NO: 2543
  Cyclic GFR-binding peptide
  MOD_RES (28)..(28): Xaa is C or S

SEQ ID NO: 79704 - protein, 34 aa, Artificial Sequence; identical to SEQ ID NO: 2544
  Cyclic GFR-binding peptide
  MOD_RES (2)..(4): Xaa is C or S

SEQ ID NO: 79705 - protein, 32 aa, Artificial Sequence; identical to SEQ ID NO: 2546
  Cyclic GFR-binding peptide
  MOD_RES (27)..(28): Xaa is C or S

SEQ ID NO: 79706 - protein, 21 aa, Artificial Sequence
  Cyclic GFR-binding peptide
MPIKGYLLVRGNDFYLMNIPS

SEQ ID NO: 79707 - protein, 27 aa, Artificial Sequence
  Cyclic GFR-binding peptide
EVVMERHKRLVVKDYEDYYLMSTASLE

SEQ ID NO: 79708 - protein, 30 aa, Artificial Sequence; identical to SEQ ID NO: 30734
  Cyclic GFR-binding peptide
  MOD_RES (28)..(29): Xaa is C or S

SEQ ID NO: 79709 - protein, 39 aa, Artificial Sequence; identical to SEQ ID NO: 30735
  Cyclic GFR-binding peptide
  MOD_RES (2)..(33)..(34): Xaa is C or S

SEQ ID NO: 79710 - protein, 35 aa, Artificial Sequence; identical to SEQ ID NO: 2551
  Cyclic GFR-binding peptide
  MOD_RES (1)..(33): Xaa is C or S

SEQ ID NO: 79711 - protein, 24 aa, Artificial Sequence
  Cyclic GFR-binding peptide
MGEEYKFKTPVGMDDLYLVSIPEL

SEQ ID NO: 79712 - protein, 26 aa, Artificial Sequence
  Cyclic GFR-binding peptide
SKVIMPIKGYIKPTKGIFYLINIPSL

SEQ ID NO: 79713 - protein, 29 aa, Artificial Sequence
  Cyclic GFR-binding peptide
  MOD_RES (28)..(28): Xaa is C or S
MNPIKGYIVNSSDDFYLVNIPSLKTPAXT

SEQ ID NO: 79714 - protein, 35 aa, Artificial Sequence
  Cyclic GFR-binding peptide
  MOD_RES (30)..(31): Xaa is C or S
VVMGEYKFKIIQQKDNLYLMSIPEMKTPTXXPGAS

SEQ ID NO: 79715 - protein, 21 aa, Artificial Sequence
  Cyclic GFR-binding peptide
EPIKGYTPVGMDDFYLVNIPS

SEQ ID NO: 79716 - protein, 25 aa, Artificial Sequence
  Cyclic GFR-binding peptide
SMGEEYKFKTPVGMDDLYLVSIPEL

SEQ ID NO: 79717 - protein, 29 aa, Artificial Sequence
  Cyclic GFR-binding peptide
SKVIMRHKRLIKPTKGIYYLISTASLDQS

SEQ ID NO: 79718 - protein, 32 aa, Artificial Sequence
  Cyclic GFR-binding peptide
  MOD_RES (1)..(1): Xaa is C or S
XSEVTMNRHKRLVVNKNEDYYLISTASMKEPV

SEQ ID NO: 79719 - protein, 25 aa, Artificial Sequence
  Cyclic GFR-binding peptide
YHYKLVKPTRGVKYLISIPSLDQPV

SEQ ID NO: 79720 - protein, 26 aa, Artificial Sequence
  Cyclic GFR-binding peptide
  MOD_RES (1)..(1): Xaa is C or S
XEEVIMEYKFKLLVRGNDLYLMSIPE

SEQ ID NO: 79721 - protein, 38 aa, Artificial Sequence; identical to SEQ ID NO: 2558
  Cyclic GFR-binding peptide
  MOD_RES (2)..(4)..(35)..(36): Xaa is C or S

SEQ ID NO: 79722 - protein, 31 aa, Artificial Sequence
  Cyclic GFR-binding peptide
  MOD_RES (26)..(27): Xaa is C or S
PIKGYVVNKNEDFYLINIPSMKEPVXXPEPI

SEQ ID NO: 79723 - protein, 40 aa, Artificial Sequence; identical to SEQ ID NO: 30747
  Cyclic GFR-binding peptide
  MOD_RES (2)..(34)..(35): Xaa is C or S

SEQ ID NO: 79724 - protein, 36 aa, Artificial Sequence; identical to SEQ ID NO: 40843
  Cyclic GFR-binding peptide
  MOD_RES (33)..(34): Xaa is C or S

SEQ ID NO: 79725 - protein, 26 aa, Artificial Sequence
  Cyclic GFR-binding peptide
VAMGRHKRLYTVVGKDYYLISTASLK

SEQ ID NO: 79726 - protein, 39 aa, Artificial Sequence; identical to SEQ ID NO: 40846
  Cyclic GFR-binding peptide
  MOD_RES (1)..(3)..(35): Xaa is C or S

SEQ ID NO: 79727 - protein, 31 aa, Artificial Sequence; identical to SEQ ID NO: 40847
  Cyclic GFR-binding peptide
  MOD_RES (27)..(28): Xaa is C or S

SEQ ID NO: 79728 - protein, 35 aa, Artificial Sequence; identical to SEQ ID NO: 2566
  Cyclic GFR-binding peptide
  MOD_RES (30)..(31): Xaa is C or S

SEQ ID NO: 79729 - protein, 33 aa, Artificial Sequence; identical to SEQ ID NO: 2568
  Cyclic GFR-binding peptide
  MOD_RES (28)..(28): Xaa is C or S

SEQ ID NO: 79730 - protein, 30 aa, Artificial Sequence; identical to SEQ ID NO: 30759
  Cyclic GFR-binding peptide

SEQ ID NO: 79731 - protein, 37 aa, Artificial Sequence
  Cyclic GFR-binding peptide
  MOD_RES (32)..(33): Xaa is C or S
SEVVMDYHYKLVVNNASDKYLISIPSLRTPVXXTPPT

SEQ ID NO: 79732 - protein, 23 aa, Artificial Sequence
  Cyclic GFR-binding peptide
VMDRHKRLVVNNAADYYLISTAS

SEQ ID NO: 79733 - protein, 27 aa, Artificial Sequence
  Cyclic GFR-binding peptide
MNYHYKLVVNKNEDKYLISIPSMKEPV

SEQ ID NO: 79734 - protein, 33 aa, Artificial Sequence
  Cyclic GFR-binding peptide
  MOD_RES (2)..(33): Xaa is C or S
KXSRVIMPIKGYVKPKRGVFYLINIPSLAQPVX

SEQ ID NO: 79735 - protein, 28 aa, Artificial Sequence
  Cyclic GFR-binding peptide
SVAMGPIKGYYTVVGKDFYLINIPSLKT

SEQ ID NO: 79736 - protein, 35 aa, Artificial Sequence; identical to SEQ ID NO: 76200
  Cyclic GFR-binding peptide
  MOD_RES (29)..(30): Xaa is C or S

SEQ ID NO: 79737 - protein, 27 aa, Artificial Sequence
  Cyclic GFR-binding peptide
EVTMNRHKRLVVNKNEDYYLISTASMK

SEQ ID NO: 79738 - protein, 27 aa, Artificial Sequence
  Cyclic GFR-binding peptide
VVMDYHYKLVVNNASDKYLISIPSLRT

SEQ ID NO: 79739 - protein, 34 aa, Artificial Sequence; identical to SEQ ID NO: 2579
  Cyclic GFR-binding peptide
  MOD_RES (2)..(4): Xaa is C or S

SEQ ID NO: 79740 - protein, 31 aa, Artificial Sequence; identical to SEQ ID NO: 2580
  Cyclic GFR-binding peptide
  MOD_RES (28)..(29): Xaa is C or S

SEQ ID NO: 79741 - protein, 36 aa, Artificial Sequence
  Cyclic GFR-binding peptide
  MOD_RES (31)..(32): Xaa is C or S
EVTMNPIKGYVVNKNEDFYLINIPSMKEPVXXPEPI

SEQ ID NO: 79742 - protein, 36 aa, Artificial Sequence; identical to SEQ ID NO: 2582
  Cyclic GFR-binding peptide
  MOD_RES (1)..(3)..(35)..(36): Xaa is C or S

SEQ ID NO: 79743 - protein, 31 aa, Artificial Sequence
  Cyclic GFR-binding peptide
SEVVMDEYKFKVVNNASDLYLISIPELRTPV

SEQ ID NO: 79744 - protein, 22 aa, Artificial Sequence
  Cyclic GFR-binding peptide
NPIKGYIVNNSSDFYLVNIPSL

SEQ ID NO: 79745 - protein, 37 aa, Artificial Sequence
  Cyclic GFR-binding peptide
  MOD_RES (1)..(33)..(34): Xaa is C or S
XRDVVMGEYKFKIIQQKDNLYLMSIPEMKTPTXXPGA

SEQ ID NO: 79746 - protein, 26 aa, Artificial Sequence
  Cyclic GFR-binding peptide
GPIKGYYTVVGKDFYLINIPSLKTPV

SEQ ID NO: 79747 - protein, 27 aa, Artificial Sequence
  Cyclic GFR-binding peptide
  MOD_RES (1)..(1): Xaa is C or S
XAEVVMDRYKKLVVNNAADFYLISIAN

SEQ ID NO: 79748 - protein, 23 aa, Artificial Sequence
  Cyclic GFR-binding peptide
IMRYKKLLLVRGNDFYLMSIANT

SEQ ID NO: 79749 - protein, 39 aa, Artificial Sequence
  Cyclic GFR-binding peptide
  MOD_RES (2)..(34)..(35): Xaa is C or S
GXSEVVMDEYKFKVVNNASDLYLISIPELRTPVXXTPPT

SEQ ID NO: 79750 - protein, 32 aa, Artificial Sequence; identical to SEQ ID NO: 40881
  Cyclic GFR-binding peptide
  MOD_RES (1)..(1): Xaa is C or S

SEQ ID NO: 79751 - protein, 38 aa, Artificial Sequence; identical to SEQ ID NO: 2592
  Cyclic GFR-binding peptide
  MOD_RES (1)..(34)..(35): Xaa is C or S

SEQ ID NO: 79752 - protein, 28 aa, Artificial Sequence
  Cyclic GFR-binding peptide
RVVMNRHKRLIVNSSDDYYLVSTASLQT

SEQ ID NO: 79753 - protein, 26 aa, Artificial Sequence
  Cyclic GFR-binding peptide
  MOD_RES (26)..(26): Xaa is C or S
YHYKLYTVVGKDKYLISIPSLKTPVX

SEQ ID NO: 79754 - protein, 29 aa, Artificial Sequence
  Cyclic GFR-binding peptide
  MOD_RES (1)..(3): Xaa is C or S
XGXAEVVMDEYKFKVVNNAADLYLISIPE

SEQ ID NO: 79755 - protein, 39 aa, Artificial Sequence; identical to SEQ ID NO: 2597
  Cyclic GFR-binding peptide
  MOD_RES (1)..(3)..(34)..(35): Xaa is C or S

SEQ ID NO: 79756 - protein, 30 aa, Artificial Sequence; identical to SEQ ID NO: 40886
  Cyclic GFR-binding peptide
  MOD_RES (2)..(2): Xaa is C or S

SEQ ID NO: 79757 - protein, 36 aa, Artificial Sequence; identical to SEQ ID NO: 2598
  Cyclic GFR-binding peptide
  MOD_RES (31)..(32): Xaa is C or S

SEQ ID NO: 79758 - protein, 31 aa, Artificial Sequence; identical to SEQ ID NO: 2600
  Cyclic GFR-binding peptide

SEQ ID NO: 79759 - protein, 35 aa, Artificial Sequence; identical to SEQ ID NO: 2601
  Cyclic GFR-binding peptide
  MOD_RES (31)..(32): Xaa is C or S

SEQ ID NO: 79760 - protein, 30 aa, Artificial Sequence; identical to SEQ ID NO: 2605
  Cyclic GFR-binding peptide
  MOD_RES (2)..(2): Xaa is C or S

SEQ ID NO: 79761 - protein, 31 aa, Artificial Sequence; identical to SEQ ID NO: 30799
  Cyclic GFR-binding peptide
  MOD_RES (1)..(3): Xaa is C or S

SEQ ID NO: 79762 - protein, 31 aa, Artificial Sequence; identical to SEQ ID NO: 30800
  Cyclic GFR-binding peptide
  MOD_RES (29)..(30): Xaa is C or S

SEQ ID NO: 79763 - protein, 32 aa, Artificial Sequence; identical to SEQ ID NO: 2607
  Cyclic GFR-binding peptide
  MOD_RES (26)..(27): Xaa is C or S

SEQ ID NO: 79764 - protein, 35 aa, Artificial Sequence; identical to SEQ ID NO: 2608
  Cyclic GFR-binding peptide
  MOD_RES (30)..(31): Xaa is C or S

SEQ ID NO: 79765 - protein, 21 aa, Artificial Sequence
  Cyclic GFR-binding peptide
NPIKGYIVNSSDDFYLVNIPS

SEQ ID NO: 79766 - protein, 42 aa, Artificial Sequence; identical to SEQ ID NO: 2611
  Cyclic GFR-binding peptide
  MOD_RES (2)..(4)..(36)..(37): Xaa is C or S

SEQ ID NO: 79767 - protein, 28 aa, Artificial Sequence
  Cyclic GFR-binding peptide
  MOD_RES (27)..(28): Xaa is C or S
NYHYKLIVNSSDDKYLVSIPSLKTPAXX

SEQ ID NO: 79768 - protein, 33 aa, Artificial Sequence
  Cyclic GFR-binding peptide
  MOD_RES (2)..(4): Xaa is C or S
SXKXSKVVMPIKGYVKPTRGVFYLINIPSLDQP

SEQ ID NO: 79769 - protein, 29 aa, Artificial Sequence
  Cyclic GFR-binding peptide
  MOD_RES (1)..(3): Xaa is C or S
XKXSKVIMRYKKLIKPTKGIFYLISIANL

SEQ ID NO: 79770 - protein, 36 aa, Artificial Sequence
  Cyclic GFR-binding peptide
  MOD_RES (1)..(32)..(33): Xaa is C or S
XEEVIMRHKRLLLVRGNDYYLMSTASTKVPAXXTSP

SEQ ID NO: 79771 - protein, 33 aa, Artificial Sequence; identical to SEQ ID NO: 2617
  Cyclic GFR-binding peptide
  MOD_RES (28)..(29): Xaa is C or S

SEQ ID NO: 79772 - protein, 31 aa, Artificial Sequence; identical to SEQ ID NO: 30813
  Cyclic GFR-binding peptide
  MOD_RES (27)..(28): Xaa is C or S

SEQ ID NO: 79773 - protein, 33 aa, Artificial Sequence
  Cyclic GFR-binding peptide
  MOD_RES (1)..(33): Xaa is C or S
XRDVVMGYHYKLIIQQKDNKYLMSIPSMKTPTX

SEQ ID NO: 79774 - protein, 43 aa, Artificial Sequence; identical to SEQ ID NO: 2622
  Cyclic GFR-binding peptide
  MOD_RES (2)..(4)..(37)..(38): Xaa is C or S

SEQ ID NO: 79775 - protein, 34 aa, Artificial Sequence; identical to SEQ ID NO: 40910
  Cyclic GFR-binding peptide
  MOD_RES (2)..(4): Xaa is C or S

SEQ ID NO: 79776 - protein, 33 aa, Artificial Sequence; identical to SEQ ID NO: 30821
  Cyclic GFR-binding peptide
  MOD_RES (31)..(32): Xaa is C or S

SEQ ID NO: 79777 - protein, 33 aa, Artificial Sequence; identical to SEQ ID NO: 2627
  Cyclic GFR-binding peptide
  MOD_RES (2)..(2): Xaa is C or S

SEQ ID NO: 79778 - protein, 33 aa, Artificial Sequence; identical to SEQ ID NO: 2628
  Cyclic GFR-binding peptide
  MOD_RES (1)..(33): Xaa is C or S

SEQ ID NO: 79779 - protein, 27 aa, Artificial Sequence
  Cyclic GFR-binding peptide
AVSMGEPIKGYTPVGMDDFYLVNIPSL

SEQ ID NO: 79780 - protein, 34 aa, Artificial Sequence; identical to SEQ ID NO: 2629
  Cyclic GFR-binding peptide
  MOD_RES (29)..(30): Xaa is C or S

SEQ ID NO: 79781 - protein, 37 aa, Artificial Sequence
  Cyclic GFR-binding peptide
  MOD_RES (31)..(32): Xaa is C or S
SVAMGRHKRLYTVVGKDYYLISTASLKTPVXXAKSAK

SEQ ID NO: 79782 - protein, 25 aa, Artificial Sequence
  Cyclic GFR-binding peptide
MNPIKGYVVNKNEDFYLINIPSMKE

SEQ ID NO: 79783 - protein, 33 aa, Artificial Sequence; identical to SEQ ID NO: 30829
  Cyclic GFR-binding peptide
  MOD_RES (29)..(30): Xaa is C or S

SEQ ID NO: 79784 - protein, 27 aa, Artificial Sequence
  Cyclic GFR-binding peptide
  MOD_RES (1)..(1): Xaa is C or S
XSRVVMNPIKGYIVNSSDDFYLVNIPS

SEQ ID NO: 79785 - protein, 34 aa, Artificial Sequence; identical to SEQ ID NO: 40929
  Cyclic GFR-binding peptide
  MOD_RES (30)..(31): Xaa is C or S

SEQ ID NO: 79786 - protein, 29 aa, Artificial Sequence
  Cyclic GFR-binding peptide
ARVVMNEYKFKIVNSSDDLYLVSIPELQT

SEQ ID NO: 79787 - protein, 34 aa, Artificial Sequence; identical to SEQ ID NO: 2634
  Cyclic GFR-binding peptide
  MOD_RES (1)..(33)..(34): Xaa is C or S

SEQ ID NO: 79788 - protein, 24 aa, Artificial Sequence
  Cyclic GFR-binding peptide
RYKKLVKPKRGVFYLISIANLAQP

SEQ ID NO: 79789 - protein, 33 aa, Artificial Sequence; identical to SEQ ID NO: 40938
  Cyclic GFR-binding peptide
  MOD_RES (1)..(3): Xaa is C or S

SEQ ID NO: 79790 - protein, 37 aa, Artificial Sequence; identical to SEQ ID NO: 40941
  Cyclic GFR-binding peptide
  MOD_RES (32)..(33): Xaa is C or S

SEQ ID NO: 79791 - protein, 28 aa, Artificial Sequence
  Cyclic GFR-binding peptide
EEVIMRHKRLLLVRGNDYYLMSTASTKV

SEQ ID NO: 79792 - protein, 37 aa, Artificial Sequence; identical to SEQ ID NO: 2642
  Cyclic GFR-binding peptide
  MOD_RES (1)..(3)..(34)..(35): Xaa is C or S

SEQ ID NO: 79793 - protein, 27 aa, Artificial Sequence
  Cyclic GFR-binding peptide
  MOD_RES (1)..(1): Xaa is C or S
XEEVIMPIKGYLLVRGNDFYLMNIPST

SEQ ID NO: 79794 - protein, 24 aa, Artificial Sequence
  Cyclic GFR-binding peptide
KVIMEYKFKIKPTKGILYLISIPE

SEQ ID NO: 79795 - protein, 42 aa, Artificial Sequence
  Cyclic GFR-binding peptide
  MOD_RES (2)..(4)..(36)..(37): Xaa is C or S
SXGXRDVVMGRHKRLIIQQKDNYYLMSTASMKTPTXXPGASG

SEQ ID NO: 79796 - protein, 33 aa, Artificial Sequence; identical to SEQ ID NO: 30848
  Cyclic GFR-binding peptide
  MOD_RES (30)..(31): Xaa is C or S

SEQ ID NO: 79797 - protein, 25 aa, Artificial Sequence
  Cyclic GFR-binding peptide
RHKRLIIQQKDNYYLMSTASMKTPT

SEQ ID NO: 79798 - protein, 28 aa, Artificial Sequence
  Cyclic GFR-binding peptide
  MOD_RES (1)..(1): Xaa is C or S
XSRVVMNRYKKLIVNSSDDFYLVSIANL

SEQ ID NO: 79799 - protein, 25 aa, Artificial Sequence
  Cyclic GFR-binding peptide
DVVMGRHKRLIIQQKDNYYLMSTAS

SEQ ID NO: 79800 - protein, 25 aa, Artificial Sequence
  Cyclic GFR-binding peptide
EVVMDRHKRLVVNNASDYYLISTAS

SEQ ID NO: 79801 - protein, 34 aa, Artificial Sequence
  Cyclic GFR-binding peptide
  MOD_RES (30)..(31): Xaa is C or S
VTMNEYKFKVVNKNEDLYLISIPEMKEPVXXPEP

SEQ ID NO: 79802 - protein, 29 aa, Artificial Sequence
  Cyclic GFR-binding peptide
VVMEPIKGYVVKDYEDFYLMNIPSLETPV

SEQ ID NO: 79803 - protein, 27 aa, Artificial Sequence
  Cyclic GFR-binding peptide
MDYHYKLVVKENEDKYLMSIPSLETPV

SEQ ID NO: 79804 - protein, 24 aa, Artificial Sequence
  Cyclic GFR-binding peptide
KVVMEYKFKVKPTRGVLYLISIPE

SEQ ID NO: 79805 - protein, 36 aa, Artificial Sequence
  Cyclic GFR-binding peptide
  MOD_RES (32)..(33): Xaa is C or S
SEVVMDRHKRLVVNNASDYYLISTASLRTPVXXTPP

SEQ ID NO: 79806 - protein, 31 aa, Artificial Sequence
  Cyclic GFR-binding peptide
  MOD_RES (30)..(31): Xaa is C or S
VTMNRYKKLVVNKNEDFYLISIANMKEPVXX

SEQ ID NO: 79807 - protein, 29 aa, Artificial Sequence
  Cyclic GFR-binding peptide
  MOD_RES (28)..(29): Xaa is C or S
IMEYKFKVKPKRGVLYLISIPELAQPVXX

SEQ ID NO: 79808 - protein, 38 aa, Artificial Sequence; identical to SEQ ID NO: 2655
  Cyclic GFR-binding peptide
  MOD_RES (1)..(33)..(34): Xaa is C or S

SEQ ID NO: 79809 - protein, 32 aa, Artificial Sequence
  Cyclic GFR-binding peptide
  MOD_RES (28)..(29): Xaa is C or S
VMPIKGYVKPTRGVFYLINIPSLDQPVXXPSA

SEQ ID NO: 79810 - protein, 27 aa, Artificial Sequence
  Cyclic GFR-binding peptide
  MOD_RES (1)..(1): Xaa is C or S
XSEVTMNRYKKLVVNKNEDFYLISIAN

SEQ ID NO: 79811 - protein, 32 aa, Artificial Sequence; identical to SEQ ID NO: 2658
  Cyclic GFR-binding peptide
  MOD_RES (28)..(29): Xaa is C or S

SEQ ID NO: 79812 - protein, 37 aa, Artificial Sequence
  Cyclic GFR-binding peptide
  MOD_RES (1)..(3)..(35)..(36): Xaa is C or S
XGXSEVVMDRHKRLVVNNASDYYLISTASLRTPVXXT

SEQ ID NO: 79813 - protein, 32 aa, Artificial Sequence
  Cyclic GFR-binding peptide
  MOD_RES (27)..(28): Xaa is C or S
MPIKGYVKPTRGVFYLINIPSLDQPVXXPSAS

SEQ ID NO: 79814 - protein, 33 aa, Artificial Sequence; identical to SEQ ID NO: 30870
  Cyclic GFR-binding peptide
  MOD_RES (1)..(33): Xaa is C or S

SEQ ID NO: 79815 - protein, 31 aa, Artificial Sequence; identical to SEQ ID NO: 2663
  Cyclic GFR-binding peptide
  MOD_RES (30)..(31): Xaa is C or S

SEQ ID NO: 79816 - protein, 33 aa, Artificial Sequence; identical to SEQ ID NO: 30872
  Cyclic GFR-binding peptide
  MOD_RES (31)..(32): Xaa is C or S

SEQ ID NO: 79817 - protein, 25 aa, Artificial Sequence
  Cyclic GFR-binding peptide
DRHKRLVVKENEDYYLMSTASLETP

SEQ ID NO: 79818 - protein, 37 aa, Artificial Sequence
  Cyclic GFR-binding peptide
  MOD_RES (2)..(33)..(34): Xaa is C or S
GXEEVIMYHYKLLLVRGNDKYLMSIPSTKVPAXXTSP

SEQ ID NO: 79819 - protein, 25 aa, Artificial Sequence
  Cyclic GFR-binding peptide
DYHYKLVVNNAADKYLISIPSLRAP

SEQ ID NO: 79820 - protein, 37 aa, Artificial Sequence; identical to SEQ ID NO: 40967
  Cyclic GFR-binding peptide
  MOD_RES (1)..(33)..(34): Xaa is C or S

SEQ ID NO: 79821 - protein, 27 aa, Artificial Sequence
  Cyclic GFR-binding peptide
VVMDPIKGYVVNNAADFYLINIPSLRA

SEQ ID NO: 79822 - protein, 40 aa, Artificial Sequence; identical to SEQ ID NO: 2676
  Cyclic GFR-binding peptide
  MOD_RES (1)..(3)..(34)..(35): Xaa is C or S

SEQ ID NO: 79823 - protein, 28 aa, Artificial Sequence
  Cyclic GFR-binding peptide
  MOD_RES (28)..(28): Xaa is C or S
VMYHYKLVKPTRGVKYLISIPSLDQPVX

SEQ ID NO: 79824 - protein, 23 aa, Artificial Sequence
  Cyclic GFR-binding peptide
MYHYKLLLVRGNDKYLMSIPSTK

SEQ ID NO: 79825 - protein, 30 aa, Artificial Sequence; identical to SEQ ID NO: 2681
  Cyclic GFR-binding peptide
  MOD_RES (28)..(29): Xaa is C or S

SEQ ID NO: 79826 - protein, 32 aa, Artificial Sequence; identical to SEQ ID NO: 2683
  Cyclic GFR-binding peptide
  MOD_RES (32)..(32): Xaa is C or S

SEQ ID NO: 79827 - protein, 35 aa, Artificial Sequence
  Cyclic GFR-binding peptide
  MOD_RES (31)..(32): Xaa is C or S
EVTMNRYKKLVVNKNEDFYLISIANMKEPVXXPEP

SEQ ID NO: 79828 - protein, 38 aa, Artificial Sequence; identical to SEQ ID NO: 40979
  Cyclic GFR-binding peptide
  MOD_RES (2)..(4)..(36)..(37): Xaa is C or S

SEQ ID NO: 79829 - protein, 35 aa, Artificial Sequence; identical to SEQ ID NO: 40980
  Cyclic GFR-binding peptide
  MOD_RES (30)..(31): Xaa is C or S

SEQ ID NO: 79830 - protein, 26 aa, Artificial Sequence
  Cyclic GFR-binding peptide
  MOD_RES (1)..(1): Xaa is C or S
XSKVVMRHKRLVKPTRGVYYLISTAS

SEQ ID NO: 79831 - protein, 26 aa, Artificial Sequence
  Cyclic GFR-binding peptide
DRYKKLVVKENEDFYLMSIANLETPV

SEQ ID NO: 79832 - protein, 40 aa, Artificial Sequence; identical to SEQ ID NO: 30893
  Cyclic GFR-binding peptide
  MOD_RES (2)..(34)..(35): Xaa is C or S

SEQ ID NO: 79833 - protein, 28 aa, Artificial Sequence
  Cyclic GFR-binding peptide
  MOD_RES (28)..(28): Xaa is C or S
MNEYKFKIVNNSSDLYLVSIPELKTPAX

SEQ ID NO: 79834 - protein, 36 aa, Artificial Sequence; identical to SEQ ID NO: 2694
  Cyclic GFR-binding peptide
  MOD_RES (32)..(32): Xaa is C or S

SEQ ID NO: 79835 - protein, 34 aa, Artificial Sequence; identical to SEQ ID NO: 30898
  Cyclic GFR-binding peptide
  MOD_RES (32)..(33): Xaa is C or S

SEQ ID NO: 79836 - protein, 29 aa, Artificial Sequence
  Cyclic GFR-binding peptide
  MOD_RES (2)..(2): Xaa is C or S
GXGEVVMERHKRLVVKDYEDYYLMSTASL

SEQ ID NO: 79837 - protein, 35 aa, Artificial Sequence; identical to SEQ ID NO: 30902
  Cyclic GFR-binding peptide
  MOD_RES (2)..(34)..(35): Xaa is C or S

SEQ ID NO: 79838 - protein, 32 aa, Artificial Sequence
  Cyclic GFR-binding peptide
  MOD_RES (2)..(2): Xaa is C or S
GXEEVIMEYKFKLLVRGNDLYLMSIPETKVPA

SEQ ID NO: 79839 - protein, 27 aa, Artificial Sequence
  Cyclic GFR-binding peptide
SKVIMYHYKLIKPTKGIKYLISIPSLD

SEQ ID NO: 79840 - protein, 33 aa, Artificial Sequence; identical to SEQ ID NO: 2704
  Cyclic GFR-binding peptide
  MOD_RES (29)..(30): Xaa is C or S

SEQ ID NO: 79841 - protein, 40 aa, Artificial Sequence; identical to SEQ ID NO: 2705
  Cyclic GFR-binding peptide
  MOD_RES (1)..(3)..(35)..(36): Xaa is C or S

SEQ ID NO: 79842 - protein, 33 aa, Artificial Sequence
  Cyclic GFR-binding peptide
  MOD_RES (28)..(29): Xaa is C or S
IMYHYKLLLVRGNDKYLMSIPSTKVPAXXTSPV

SEQ ID NO: 79843 - protein, 32 aa, Artificial Sequence; identical to SEQ ID NO: 40998
  Cyclic GFR-binding peptide
  MOD_RES (31)..(31): Xaa is C or S

SEQ ID NO: 79844 - protein, 24 aa, Artificial Sequence
  Cyclic GFR-binding peptide
MDRYKKLVVKENEDFYLMSIANLE

SEQ ID NO: 79845 - protein, 30 aa, Artificial Sequence; identical to SEQ ID NO: 30916
  Cyclic GFR-binding peptide
  MOD_RES (28)..(29): Xaa is C or S

SEQ ID NO: 79846 - protein, 34 aa, Artificial Sequence
  Cyclic GFR-binding peptide
  MOD_RES (28)..(29): Xaa is C or S
IMPIKGYIKPTKGIFYLINIPSLDQSVXXPSASA

SEQ ID NO: 79847 - protein, 33 aa, Artificial Sequence
  Cyclic GFR-binding peptide
  MOD_RES (31)..(32): Xaa is C or S
EVTMNEYKFKVVNKNEDLYLISIPEMKEPVXXP

SEQ ID NO: 79848 - protein, 31 aa, Artificial Sequence; identical to SEQ ID NO: 2712
  Cyclic GFR-binding peptide
  MOD_RES (27)..(28): Xaa is C or S

SEQ ID NO: 79849 - protein, 26 aa, Artificial Sequence
  Cyclic GFR-binding peptide
DPIKGYVVKENEDFYLMNIPSLETPV

SEQ ID NO: 79850 - protein, 30 aa, Artificial Sequence; identical to SEQ ID NO: 41012
  Cyclic GFR-binding peptide
  MOD_RES (27)..(28): Xaa is C or S

SEQ ID NO: 79851 - protein, 39 aa, Artificial Sequence
  Cyclic GFR-binding peptide
  MOD_RES (2)..(4)..(36)..(37): Xaa is C or S
RXGXSEVVMDYHYKLVVNNASDKYLISIPSLRTPVXXTP

SEQ ID NO: 79852 - protein, 31 aa, Artificial Sequence; identical to SEQ ID NO: 41014
  Cyclic GFR-binding peptide
  MOD_RES (29)..(30): Xaa is C or S

SEQ ID NO: 79853 - protein, 27 aa, Artificial Sequence
  Cyclic GFR-binding peptide
MNRHKRLVVNKNEDYYLISTASMKEPV

SEQ ID NO: 79854 - protein, 23 aa, Artificial Sequence
  Cyclic GFR-binding peptide
VMDYHYKLVVKENEDKYLMSIPS

SEQ ID NO: 79855 - protein, 36 aa, Artificial Sequence
  Cyclic GFR-binding peptide
  MOD_RES (2)..(34)..(35): Xaa is C or S
GXSEVVMDYHYKLVVNNASDKYLISIPSLRTPVXXT

SEQ ID NO: 79856 - protein, 32 aa, Artificial Sequence; identical to SEQ ID NO: 2720
  Cyclic GFR-binding peptide
  MOD_RES (32)..(32): Xaa is C or S

SEQ ID NO: 79857 - protein, 30 aa, Artificial Sequence; identical to SEQ ID NO: 30924
  Cyclic GFR-binding peptide
  MOD_RES (2)..(2): Xaa is C or S

SEQ ID NO: 79858 - protein, 30 aa, Artificial Sequence; identical to SEQ ID NO: 41020
  Cyclic GFR-binding peptide
  MOD_RES (2)..(4): Xaa is C or S

SEQ ID NO: 79859 - protein, 29 aa, Artificial Sequence
  Cyclic GFR-binding peptide
  MOD_RES (28)..(29): Xaa is C or S
MGYHYKLYTVVGKDKYLISIPSLKTPVXX

SEQ ID NO: 79860 - protein, 31 aa, Artificial Sequence; identical to SEQ ID NO: 2721
  Cyclic GFR-binding peptide
  MOD_RES (2)..(4): Xaa is C or S

SEQ ID NO: 79861 - protein, 34 aa, Artificial Sequence
  Cyclic GFR-binding peptide
  MOD_RES (29)..(30): Xaa is C or S
VIMEYKFKLLVRGNDLYLMSIPETKVPAXXTSPV

SEQ ID NO: 79862 - protein, 40 aa, Artificial Sequence; identical to SEQ ID NO: 41021
  Cyclic GFR-binding peptide
  MOD_RES (2)..(34)..(35): Xaa is C or S

SEQ ID NO: 79863 - protein, 24 aa, Artificial Sequence
  Cyclic GFR-binding peptide
PIKGYLLVRGNDFYLMNIPSTKVP

SEQ ID NO: 79864 - protein, 28 aa, Artificial Sequence
  Cyclic GFR-binding peptide
  MOD_RES (1)..(1): Xaa is C or S
XGEVVMEYHYKLVVKDYEDKYLMSIPSL

SEQ ID NO: 79865 - protein, 32 aa, Artificial Sequence; identical to SEQ ID NO: 2729
  Cyclic GFR-binding peptide
  MOD_RES (27)..(28): Xaa is C or S

SEQ ID NO: 79866 - protein, 33 aa, Artificial Sequence; identical to SEQ ID NO: 30932
  Cyclic GFR-binding peptide
  MOD_RES (28)..(29): Xaa is C or S

SEQ ID NO: 79867 - protein, 35 aa, Artificial Sequence
  Cyclic GFR-binding peptide
  MOD_RES (1)..(32)..(33): Xaa is C or S
XSKVVMPIKGYVKPTRGVFYLINIPSLDQPVXXPS

SEQ ID NO: 79868 - protein, 27 aa, Artificial Sequence
  Cyclic GFR-binding peptide
SKVVMYHYKLVKPTRGVKYLISIPSLD

SEQ ID NO: 79869 - protein, 34 aa, Artificial Sequence; identical to SEQ ID NO: 2732
  Cyclic GFR-binding peptide
  MOD_RES (1)..(33)..(34): Xaa is C or S

SEQ ID NO: 79870 - protein, 37 aa, Artificial Sequence; identical to SEQ ID NO: 2734
  Cyclic GFR-binding peptide
  MOD_RES (31)..(32): Xaa is C or S

SEQ ID NO: 79871 - protein, 32 aa, Artificial Sequence; identical to SEQ ID NO: 41033
  Cyclic GFR-binding peptide
  MOD_RES (2)..(2): Xaa is C or S

SEQ ID NO: 79872 - protein, 41 aa, Artificial Sequence; identical to SEQ ID NO: 2737
  Cyclic GFR-binding peptide
  MOD_RES (2)..(4)..(37)..(38): Xaa is C or S

SEQ ID NO: 79873 - protein, 29 aa, Artificial Sequence
  Cyclic GFR-binding peptide
VVMDRYKKLVVKENEDFYLMSIANLETPV

SEQ ID NO: 79874 - protein, 31 aa, Artificial Sequence; identical to SEQ ID NO: 2741
  Cyclic GFR-binding peptide

SEQ ID NO: 79875 - protein, 34 aa, Artificial Sequence; identical to SEQ ID NO: 30942
  Cyclic GFR-binding peptide
  MOD_RES (1)..(3)..(34): Xaa is C or S

SEQ ID NO: 79876 - protein, 22 aa, Artificial Sequence
  Cyclic GFR-binding peptide
MEYHYKLVVKDYEDKYLMSIPS

SEQ ID NO: 79877 - protein, 36 aa, Artificial Sequence; identical to SEQ ID NO: 30945
  Cyclic GFR-binding peptide
  MOD_RES (32)..(32): Xaa is C or S

SEQ ID NO: 79878 - protein, 34 aa, Artificial Sequence; identical to SEQ ID NO: 30946
  Cyclic GFR-binding peptide
  MOD_RES (32)..(33): Xaa is C or S

SEQ ID NO: 79879 - protein, 39 aa, Artificial Sequence; identical to SEQ ID NO: 41039
  Cyclic GFR-binding peptide
  MOD_RES (1)..(3)..(35)..(36): Xaa is C or S

SEQ ID NO: 79880 - protein, 33 aa, Artificial Sequence; identical to SEQ ID NO: 2746
  Cyclic GFR-binding peptide
  MOD_RES (32)..(33): Xaa is C or S

SEQ ID NO: 79881 - protein, 29 aa, Artificial Sequence
  Cyclic GFR-binding peptide
  MOD_RES (27)..(27): Xaa is C or S
NYHYKLIVNSSDDKYLVSIPSLKTPAXTP

SEQ ID NO: 79882 - protein, 32 aa, Artificial Sequence; identical to SEQ ID NO: 2749
  Cyclic GFR-binding peptide
  MOD_RES (30)..(31): Xaa is C or S

SEQ ID NO: 79883 - protein, 23 aa, Artificial Sequence
  Cyclic GFR-binding peptide
DYHYKLVVKENEDKYLMSIPSLE

SEQ ID NO: 79884 - protein, 32 aa, Artificial Sequence; identical to SEQ ID NO: 2751
  Cyclic GFR-binding peptide
  MOD_RES (29)..(29): Xaa is C or S

SEQ ID NO: 79885 - protein, 27 aa, Artificial Sequence
  Cyclic GFR-binding peptide
MGRYKKLIIQQKDNFYLMSIANMKTPT

SEQ ID NO: 79886 - protein, 29 aa, Artificial Sequence
  Cyclic GFR-binding peptide
EVIMRHKRLLLVRGNDYYLMSTASTKVPA

SEQ ID NO: 79887 - protein, 33 aa, Artificial Sequence
  Cyclic GFR-binding peptide
  MOD_RES (27)..(28): Xaa is C or S
NRHKRLVVNKNEDYYLISTASMKEPVXXPEPIG

SEQ ID NO: 79888 - protein, 34 aa, Artificial Sequence; identical to SEQ ID NO: 30959
  Cyclic GFR-binding peptide
  MOD_RES (30)..(30): Xaa is C or S

SEQ ID NO: 79889 - protein, 31 aa, Artificial Sequence; identical to SEQ ID NO: 2756
  Cyclic GFR-binding peptide

SEQ ID NO: 79890 - protein, 34 aa, Artificial Sequence; identical to SEQ ID NO: 30963
  Cyclic GFR-binding peptide
  MOD_RES (32)..(33): Xaa is C or S

SEQ ID NO: 79891 - protein, 32 aa, Artificial Sequence; identical to SEQ ID NO: 2758
  Cyclic GFR-binding peptide
  MOD_RES (28)..(28): Xaa is C or S

SEQ ID NO: 79892 - protein, 30 aa, Artificial Sequence; identical to SEQ ID NO: 2759
  Cyclic GFR-binding peptide
  MOD_RES (1)..(1): Xaa is C or S

SEQ ID NO: 79893 - protein, 30 aa, Artificial Sequence; identical to SEQ ID NO: 2765
  Cyclic GFR-binding peptide
  MOD_RES (26)..(27): Xaa is C or S

SEQ ID NO: 79894 - protein, 29 aa, Artificial Sequence
  Cyclic GFR-binding peptide
  MOD_RES (1)..(3): Xaa is C or S
XGXSEVVMDRHKRLVVNNASDYYLISTAS

SEQ ID NO: 79895 - protein, 31 aa, Artificial Sequence; identical to SEQ ID NO: 2767
  Cyclic GFR-binding peptide
  MOD_RES (28)..(28): Xaa is C or S

SEQ ID NO: 79896 - protein, 30 aa, Artificial Sequence; identical to SEQ ID NO: 30973
  Cyclic GFR-binding peptide
  MOD_RES (30)..(30): Xaa is C or S

SEQ ID NO: 79897 - protein, 35 aa, Artificial Sequence; identical to SEQ ID NO: 2769
  Cyclic GFR-binding peptide
  MOD_RES (2)..(4)..(35): Xaa is C or S

SEQ ID NO: 79898 - protein, 20 aa, Artificial Sequence
  Cyclic GFR-binding peptide
YHYKLIKPTKGIKYLISIPS

SEQ ID NO: 79899 - protein, 24 aa, Artificial Sequence
  Cyclic GFR-binding peptide
VIMEYKFKLLVRGNDLYLMSIPET

SEQ ID NO: 79900 - protein, 26 aa, Artificial Sequence
  Cyclic GFR-binding peptide
VVMNRYKKLIVNNSSDFYLVSIANLK

SEQ ID NO: 79901 - protein, 35 aa, Artificial Sequence; identical to SEQ ID NO: 2772
  Cyclic GFR-binding peptide
  MOD_RES (1)..(3)..(35): Xaa is C or S

SEQ ID NO: 79902 - protein, 35 aa, Artificial Sequence
  Cyclic GFR-binding peptide
  MOD_RES (31)..(32): Xaa is C or S
SKVVMPIKGYVKPTRGVFYLINIPSLDQPVXXPSA

SEQ ID NO: 79903 - protein, 35 aa, Artificial Sequence; identical to SEQ ID NO: 2774
  Cyclic GFR-binding peptide
  MOD_RES (2)..(4)..(35): Xaa is C or S

SEQ ID NO: 79904 - protein, 40 aa, Artificial Sequence
  Cyclic GFR-binding peptide
  MOD_RES (1)..(3)..(34)..(35): Xaa is C or S
XKXSRVIMPIKGYVKPKRGVFYLINIPSLAQPVXXPAASA

SEQ ID NO: 79905 - protein, 26 aa, Artificial Sequence
  Cyclic GFR-binding peptide
KVVMRYKKLVKPTRGVFYLISIANLD

SEQ ID NO: 79906 - protein, 39 aa, Artificial Sequence; identical to SEQ ID NO: 2778
  Cyclic GFR-binding peptide
  MOD_RES (2)..(34)..(35): Xaa is C or S

SEQ ID NO: 79907 - protein, 30 aa, Artificial Sequence; identical to SEQ ID NO: 30986
  Cyclic GFR-binding peptide
  MOD_RES (2)..(4): Xaa is C or S

SEQ ID NO: 79908 - protein, 32 aa, Artificial Sequence
  Cyclic GFR-binding peptide
  MOD_RES (29)..(30): Xaa is C or S
VMDRHKRLVVNNAADYYLISTASLRAPVXXSA

SEQ ID NO: 79909 - protein, 22 aa, Artificial Sequence
  Cyclic GFR-binding peptide
NRYKKLIVNNSSDFYLVSIANL

SEQ ID NO: 79910 - protein, 27 aa, Artificial Sequence
  Cyclic GFR-binding peptide
  MOD_RES (1)..(1): Xaa is C or S
XAEVVMDRHKRLVVNNAADYYLISTAS

SEQ ID NO: 79911 - protein, 36 aa, Artificial Sequence
  Cyclic GFR-binding peptide
  MOD_RES (30)..(31): Xaa is C or S
VTMNRHKRLVVNKNEDYYLISTASMKEPVXXPEPIG

SEQ ID NO: 79912 - protein, 24 aa, Artificial Sequence
  Cyclic GFR-binding peptide
MDPIKGYVVNNASDFYLINIPSLR

SEQ ID NO: 79913 - protein, 29 aa, Artificial Sequence
  Cyclic GFR-binding peptide
AKVVMNRYKKLIVNNSSDFYLVSIANLKT

SEQ ID NO: 79914 - protein, 28 aa, Artificial Sequence
  Cyclic GFR-binding peptide
  MOD_RES (27)..(28): Xaa is C or S
NYHYKLIVNNSSDKYLVSIPSLKTPAXX

SEQ ID NO: 79915 - protein, 32 aa, Artificial Sequence; identical to SEQ ID NO: 41072
  Cyclic GFR-binding peptide
  MOD_RES (1)..(1): Xaa is C or S

SEQ ID NO: 79916 - protein, 32 aa, Artificial Sequence; identical to SEQ ID NO: 41075
  Cyclic GFR-binding peptide
  MOD_RES (1)..(3): Xaa is C or S

SEQ ID NO: 79917 - protein, 40 aa, Artificial Sequence; identical to SEQ ID NO: 2788
  Cyclic GFR-binding peptide
  MOD_RES (1)..(3)..(35): Xaa is C or S

SEQ ID NO: 79918 - protein, 32 aa, Artificial Sequence; identical to SEQ ID NO: 2789
  Cyclic GFR-binding peptide
  MOD_RES (27)..(28): Xaa is C or S

SEQ ID NO: 79919 - protein, 30 aa, Artificial Sequence; identical to SEQ ID NO: 30998
  Cyclic GFR-binding peptide
  MOD_RES (2)..(2): Xaa is C or S

SEQ ID NO: 79920 - protein, 39 aa, Artificial Sequence; identical to SEQ ID NO: 41080
  Cyclic GFR-binding peptide
  MOD_RES (2)..(4)..(35)..(36): Xaa is C or S

SEQ ID NO: 79921 - protein, 34 aa, Artificial Sequence; identical to SEQ ID NO: 30999
  Cyclic GFR-binding peptide
  MOD_RES (1)..(33)..(34): Xaa is C or S

SEQ ID NO: 79922 - protein, 33 aa, Artificial Sequence
  Cyclic GFR-binding peptide
  MOD_RES (27)..(28): Xaa is C or S
DRHKRLVVNNASDYYLISTASLRTPVXXTPPTS

SEQ ID NO: 79923 - protein, 24 aa, Artificial Sequence
  Cyclic GFR-binding peptide
MGRYKKLIIQQKDNFYLMSIANMK

SEQ ID NO: 79924 - protein, 40 aa, Artificial Sequence
  Cyclic GFR-binding peptide
  MOD_RES (1)..(3)..(34)..(35): Xaa is C or S
XGXEEVIMEYKFKLLVRGNDLYLMSIPETKVPAXXTSPVR

SEQ ID NO: 79925 - protein, 36 aa, Artificial Sequence; identical to SEQ ID NO: 2792
  Cyclic GFR-binding peptide
  MOD_RES (1)..(3)..(35)..(36): Xaa is C or S

SEQ ID NO: 79926 - protein, 25 aa, Artificial Sequence
  Cyclic GFR-binding peptide
SMGERHKRLTPVGMDDYYLVSTASL

SEQ ID NO: 79927 - protein, 40 aa, Artificial Sequence; identical to SEQ ID NO: 2795
  Cyclic GFR-binding peptide
  MOD_RES (2)..(4)..(36)..(37): Xaa is C or S

SEQ ID NO: 79928 - protein, 24 aa, Artificial Sequence
  Cyclic GFR-binding peptide
VMNRYKKLIVNNSSDFYLVSIANL

SEQ ID NO: 79929 - protein, 29 aa, Artificial Sequence
  Cyclic GFR-binding peptide
AEVVMDRYKKLVVNNAADFYLISIANLRA

SEQ ID NO: 79930 - protein, 34 aa, Artificial Sequence; identical to SEQ ID NO: 2799
  Cyclic GFR-binding peptide
  MOD_RES (28)..(29): Xaa is C or S

SEQ ID NO: 79931 - protein, 23 aa, Artificial Sequence
  Cyclic GFR-binding peptide
PIKGYVVNKNEDFYLINIPSMKE

SEQ ID NO: 79932 - protein, 30 aa, Artificial Sequence; identical to SEQ ID NO: 2800
  Cyclic GFR-binding peptide
  MOD_RES (28)..(29): Xaa is C or S

SEQ ID NO: 79933 - protein, 37 aa, Artificial Sequence; identical to SEQ ID NO: 2802
  Cyclic GFR-binding peptide
  MOD_RES (31)..(31): Xaa is C or S

SEQ ID NO: 79934 - protein, 33 aa, Artificial Sequence; identical to SEQ ID NO: 2803
  Cyclic GFR-binding peptide
  MOD_RES (1)..(1): Xaa is C or S

SEQ ID NO: 79935 - protein, 33 aa, Artificial Sequence; identical to SEQ ID NO: 2805
  Cyclic GFR-binding peptide
  MOD_RES (27)..(27): Xaa is C or S

SEQ ID NO: 79936 - protein, 34 aa, Artificial Sequence; identical to SEQ ID NO: 2808
  Cyclic GFR-binding peptide
  MOD_RES (30)..(31): Xaa is C or S

SEQ ID NO: 79937 - protein, 31 aa, Artificial Sequence
  Cyclic GFR-binding peptide
  MOD_RES (2)..(2): Xaa is C or S
KXSKVIMPIKGYIKPTKGIFYLINIPSLDQS

SEQ ID NO: 79938 - protein, 32 aa, Artificial Sequence; identical to SEQ ID NO: 31018
  Cyclic GFR-binding peptide
  MOD_RES (31)..(32): Xaa is C or S

SEQ ID NO: 79939 - protein, 28 aa, Artificial Sequence
  Cyclic GFR-binding peptide
  MOD_RES (27)..(28): Xaa is C or S
DEYKFKVVKENEDLYLMSIPELETPVXX

SEQ ID NO: 79940 - protein, 31 aa, Artificial Sequence
  Cyclic GFR-binding peptide
  MOD_RES (27)..(28): Xaa is C or S
MPIKGYVKPTRGVFYLINIPSLDQPVXXPSA

SEQ ID NO: 79941 - protein, 25 aa, Artificial Sequence
  Cyclic GFR-binding peptide
MDPIKGYVVKENEDFYLMNIPSLET

SEQ ID NO: 79942 - protein, 22 aa, Artificial Sequence
  Cyclic GFR-binding peptide
IMRHKRLVKPKRGVYYLISTAS

SEQ ID NO: 79943 - protein, 26 aa, Artificial Sequence
  Cyclic GFR-binding peptide
VMNRYKKLIVNSSDDFYLVSIANLKT

SEQ ID NO: 79944 - protein, 32 aa, Artificial Sequence; identical to SEQ ID NO: 41097
  Cyclic GFR-binding peptide
  MOD_RES (1)..(1): Xaa is C or S

SEQ ID NO: 79945 - protein, 34 aa, Artificial Sequence; identical to SEQ ID NO: 2819
  Cyclic GFR-binding peptide
  MOD_RES (28)..(29): Xaa is C or S

SEQ ID NO: 79946 - protein, 22 aa, Artificial Sequence
  Cyclic GFR-binding peptide
PIKGYIVNSSDDFYLVNIPSLK

SEQ ID NO: 79947 - protein, 30 aa, Artificial Sequence; identical to SEQ ID NO: 2824
  Cyclic GFR-binding peptide
  MOD_RES (26)..(27): Xaa is C or S

SEQ ID NO: 79948 - protein, 33 aa, Artificial Sequence; identical to SEQ ID NO: 31036
  Cyclic GFR-binding peptide
  MOD_RES (1)..(1): Xaa is C or S

SEQ ID NO: 79949 - protein, 34 aa, Artificial Sequence
  Cyclic GFR-binding peptide
  MOD_RES (31)..(32): Xaa is C or S
DVVMGYHYKLIIQQKDNKYLMSIPSMKTPTXXPG

SEQ ID NO: 79950 - protein, 21 aa, Artificial Sequence
  Cyclic GFR-binding peptide
ERHKRLVVKDYEDYYLMSTAS

SEQ ID NO: 79951 - protein, 34 aa, Artificial Sequence
  Cyclic GFR-binding peptide
  MOD_RES (2)..(34): Xaa is C or S
GXESVAMGRHKRLYTVVGKDYYLISTASLKTPVX

SEQ ID NO: 79952 - protein, 36 aa, Artificial Sequence
  Cyclic GFR-binding peptide
  MOD_RES (30)..(31): Xaa is C or S
VVMNEYKFKIVNSSDDLYLVSIPELKTPAXXPKPVH

SEQ ID NO: 79953 - protein, 26 aa, Artificial Sequence
  Cyclic GFR-binding peptide
EEVIMPIKGYLLVRGNDFYLMNIPST

SEQ ID NO: 79954 - protein, 34 aa, Artificial Sequence; identical to SEQ ID NO: 2832
  Cyclic GFR-binding peptide
  MOD_RES (1)..(3): Xaa is C or S

SEQ ID NO: 79955 - protein, 22 aa, Artificial Sequence
  Cyclic GFR-binding peptide
RYKKLVKPKRGVFYLISIANLA

SEQ ID NO: 79956 - protein, 36 aa, Artificial Sequence; identical to SEQ ID NO: 41117
  Cyclic GFR-binding peptide
  MOD_RES (2)..(34)..(35): Xaa is C or S

SEQ ID NO: 79957 - protein, 28 aa, Artificial Sequence
  Cyclic GFR-binding peptide
  MOD_RES (27)..(28): Xaa is C or S
NYHYKLVVNKNEDKYLISIPSMKEPVXX

SEQ ID NO: 79958 - protein, 35 aa, Artificial Sequence; identical to SEQ ID NO: 31048
  Cyclic GFR-binding peptide
  MOD_RES (1)..(33)..(34): Xaa is C or S

SEQ ID NO: 79959 - protein, 34 aa, Artificial Sequence; identical to SEQ ID NO: 76335
  Cyclic GFR-binding peptide
  MOD_RES (1)..(3): Xaa is C or S

SEQ ID NO: 79960 - protein, 30 aa, Artificial Sequence
  Cyclic GFR-binding peptide
  MOD_RES (29)..(30): Xaa is C or S
TMNYHYKLVVNKNEDKYLISIPSMKEPVXX

SEQ ID NO: 79961 - protein, 28 aa, Artificial Sequence
  Cyclic GFR-binding peptide
  MOD_RES (28)..(28): Xaa is C or S
IMEYKFKIKPTKGILYLISIPELDQSVX

SEQ ID NO: 79962 - protein, 30 aa, Artificial Sequence; identical to SEQ ID NO: 31052
  Cyclic GFR-binding peptide
  MOD_RES (2)..(2): Xaa is C or S

SEQ ID NO: 79963 - protein, 37 aa, Artificial Sequence; identical to SEQ ID NO: 2837
  Cyclic GFR-binding peptide
  MOD_RES (31)..(32): Xaa is C or S

SEQ ID NO: 79964 - protein, 30 aa, Artificial Sequence
  Cyclic GFR-binding peptide
  MOD_RES (2)..(2): Xaa is C or S
GXRDVVMGYHYKLIIQQKDNKYLMSIPSMK

SEQ ID NO: 79965 - protein, 28 aa, Artificial Sequence
  Cyclic GFR-binding peptide
KVVMNPIKGYIVNNSSDFYLVNIPSLKT

SEQ ID NO: 79966 - protein, 29 aa, Artificial Sequence
  Cyclic GFR-binding peptide
  MOD_RES (1)..(3): Xaa is C or S
XGXGEVVMDPIKGYVVKENEDFYLMNIPS

SEQ ID NO: 79967 - protein, 30 aa, Artificial Sequence; identical to SEQ ID NO: 31056
  Cyclic GFR-binding peptide
  MOD_RES (27)..(28): Xaa is C or S

SEQ ID NO: 79968 - protein, 27 aa, Artificial Sequence
  Cyclic GFR-binding peptide
EVTMNYHYKLVVNKNEDKYLISIPSMK

SEQ ID NO: 79969 - protein, 23 aa, Artificial Sequence
  Cyclic GFR-binding peptide
GYHYKLYTVVGKDKYLISIPSLK

SEQ ID NO: 79970 - protein, 33 aa, Artificial Sequence; identical to SEQ ID NO: 31063
  Cyclic GFR-binding peptide
  MOD_RES (2)..(4): Xaa is C or S

SEQ ID NO: 79971 - protein, 33 aa, Artificial Sequence; identical to SEQ ID NO: 2853
  Cyclic GFR-binding peptide
  MOD_RES (27)..(28): Xaa is C or S

SEQ ID NO: 79972 - protein, 38 aa, Artificial Sequence; identical to SEQ ID NO: 2856
  Cyclic GFR-binding peptide
  MOD_RES (2)..(34)..(35): Xaa is C or S

SEQ ID NO: 79973 - protein, 31 aa, Artificial Sequence; identical to SEQ ID NO: 31069
  Cyclic GFR-binding peptide
  MOD_RES (28)..(29): Xaa is C or S

SEQ ID NO: 79974 - protein, 40 aa, Artificial Sequence; identical to SEQ ID NO: 2858
  Cyclic GFR-binding peptide
  MOD_RES (1)..(3)..(35)..(36): Xaa is C or S

SEQ ID NO: 79975 - protein, 36 aa, Artificial Sequence; identical to SEQ ID NO: 31071
  Cyclic GFR-binding peptide
  MOD_RES (30)..(31): Xaa is C or S

SEQ ID NO: 79976 - protein, 33 aa, Artificial Sequence; identical to SEQ ID NO: 31072
  Cyclic GFR-binding peptide
  MOD_RES (31)..(32): Xaa is C or S

SEQ ID NO: 79977 - protein, 34 aa, Artificial Sequence; identical to SEQ ID NO: 31076
  Cyclic GFR-binding peptide
  MOD_RES (29)..(30): Xaa is C or S

SEQ ID NO: 79978 - protein, 32 aa, Artificial Sequence
  Cyclic GFR-binding peptide
  MOD_RES (26)..(27): Xaa is C or S
RHKRLLLVRGNDYYLMSTASTKVPAXXTSPVR

SEQ ID NO: 79979 - protein, 41 aa, Artificial Sequence; identical to SEQ ID NO: 2870
  Cyclic GFR-binding peptide
  MOD_RES (2)..(4)..(36)..(37): Xaa is C or S

SEQ ID NO: 79980 - protein, 32 aa, Artificial Sequence; identical to SEQ ID NO: 2871
  Cyclic GFR-binding peptide
  MOD_RES (27)..(28): Xaa is C or S

SEQ ID NO: 79981 - protein, 33 aa, Artificial Sequence; identical to SEQ ID NO: 2873
  Cyclic GFR-binding peptide
  MOD_RES (30)..(31): Xaa is C or S

SEQ ID NO: 79982 - protein, 30 aa, Artificial Sequence; identical to SEQ ID NO: 41149
  Cyclic GFR-binding peptide
  MOD_RES (1)..(3): Xaa is C or S

SEQ ID NO: 79983 - protein, 30 aa, Artificial Sequence; identical to SEQ ID NO: 2875
  Cyclic GFR-binding peptide
  MOD_RES (1)..(1): Xaa is C or S

SEQ ID NO: 79984 - protein, 35 aa, Artificial Sequence; identical to SEQ ID NO: 2876
  Cyclic GFR-binding peptide
  MOD_RES (1)..(3)..(35): Xaa is C or S

SEQ ID NO: 79985 - protein, 41 aa, Artificial Sequence; identical to SEQ ID NO: 41156
  Cyclic GFR-binding peptide
  MOD_RES (2)..(4)..(36): Xaa is C or S

SEQ ID NO: 79986 - protein, 35 aa, Artificial Sequence; identical to SEQ ID NO: 2878
  Cyclic GFR-binding peptide
  MOD_RES (29)..(30): Xaa is C or S

SEQ ID NO: 79987 - protein, 23 aa, Artificial Sequence
  Cyclic GFR-binding peptide
VMDEYKFKVVNNAADLYLISIPE

SEQ ID NO: 79988 - protein, 27 aa, Artificial Sequence
  Cyclic GFR-binding peptide
VMEYKFKVKPTRGVLYLISIPELDQPV

SEQ ID NO: 79989 - protein, 34 aa, Artificial Sequence; identical to SEQ ID NO: 2879
  Cyclic GFR-binding peptide
  MOD_RES (28)..(29): Xaa is C or S

SEQ ID NO: 79990 - protein, 37 aa, Artificial Sequence; identical to SEQ ID NO: 2880
  Cyclic GFR-binding peptide
  MOD_RES (1)..(3)..(35)..(36): Xaa is C or S

SEQ ID NO: 79991 - protein, 30 aa, Artificial Sequence; identical to SEQ ID NO: 2882
  Cyclic GFR-binding peptide
  MOD_RES (27)..(28): Xaa is C or S

SEQ ID NO: 79992 - protein, 33 aa, Artificial Sequence
  Cyclic GFR-binding peptide
  MOD_RES (32)..(33): Xaa is C or S
RDVVMGYHYKLIIQQKDNKYLMSIPSMKTPTXX

SEQ ID NO: 79993 - protein, 37 aa, Artificial Sequence; identical to SEQ ID NO: 31098
  Cyclic GFR-binding peptide
  MOD_RES (1)..(3)..(35)..(36): Xaa is C or S

SEQ ID NO: 79994 - protein, 28 aa, Artificial Sequence
  Cyclic GFR-binding peptide
  MOD_RES (2)..(2): Xaa is C or S
GXEEVIMEYKFKLLVRGNDLYLMSIPET

SEQ ID NO: 79995 - protein, 27 aa, Artificial Sequence
  Cyclic GFR-binding peptide
EVIMPIKGYLLVRGNDFYLMNIPSTKV

SEQ ID NO: 79996 - protein, 32 aa, Artificial Sequence; identical to SEQ ID NO: 41166
  Cyclic GFR-binding peptide
  MOD_RES (1)..(1): Xaa is C or S

SEQ ID NO: 79997 - protein, 34 aa, Artificial Sequence
  Cyclic GFR-binding peptide
  MOD_RES (2)..(34): Xaa is C or S
GXSEVVMDYHYKLVVNNASDKYLISIPSLRTPVX

SEQ ID NO: 79998 - protein, 26 aa, Artificial Sequence
  Cyclic GFR-binding peptide
AMGRHKRLYTVVGKDYYLISTASLKT

SEQ ID NO: 79999 - protein, 40 aa, Artificial Sequence; identical to SEQ ID NO: 2888
  Cyclic GFR-binding peptide
  MOD_RES (2)..(4)..(35)..(36): Xaa is C or S

SEQ ID NO: 80000 - protein, 37 aa, Artificial Sequence
  Cyclic GFR-binding peptide
  MOD_RES (2)..(4)..(36)..(37): Xaa is C or S
RXGXSEVVMDYHYKLVVNNASDKYLISIPSLRTPVXX

SEQ ID NO: 80001 - protein, 26 aa, Artificial Sequence
  Cyclic GFR-binding peptide
  MOD_RES (26)..(26): Xaa is C or S
EYKFKVVKDYEDLYLMSIPELETPVX

SEQ ID NO: 80002 - protein, 26 aa, Artificial Sequence
  Cyclic GFR-binding peptide
SRVVMNRYKKLIVNSSDDFYLVSIAN

SEQ ID NO: 80003 - protein, 36 aa, Artificial Sequence
  Cyclic GFR-binding peptide
  MOD_RES (1)..(33)..(34): Xaa is C or S
XESVAMGRHKRLYTVVGKDYYLISTASLKTPVXXAK

SEQ ID NO: 80004 - protein, 34 aa, Artificial Sequence
  Cyclic GFR-binding peptide
  MOD_RES (29)..(30): Xaa is C or S
TMNEYKFKVVNKNEDLYLISIPEMKEPVXXPEPI

SEQ ID NO: 80005 - protein, 30 aa, Artificial Sequence; identical to SEQ ID NO: 2892
  Cyclic GFR-binding peptide
  MOD_RES (29)..(29): Xaa is C or S

SEQ ID NO: 80006 - protein, 25 aa, Artificial Sequence
  Cyclic GFR-binding peptide
MRYKKLIKPTKGIFYLISIANLDQS

SEQ ID NO: 80007 - protein, 35 aa, Artificial Sequence; identical to SEQ ID NO: 2894
  Cyclic GFR-binding peptide
  MOD_RES (2)..(4): Xaa is C or S

SEQ ID NO: 80008 - protein, 38 aa, Artificial Sequence; identical to SEQ ID NO: 31106
  Cyclic GFR-binding peptide
  MOD_RES (2)..(34)..(35): Xaa is C or S

SEQ ID NO: 80009 - protein, 31 aa, Artificial Sequence; identical to SEQ ID NO: 2895
  Cyclic GFR-binding peptide
  MOD_RES (2)..(4): Xaa is C or S

SEQ ID NO: 80010 - protein, 34 aa, Artificial Sequence; identical to SEQ ID NO: 41176
  Cyclic GFR-binding peptide
  MOD_RES (32)..(33): Xaa is C or S

SEQ ID NO: 80011 - protein, 26 aa, Artificial Sequence
  Cyclic GFR-binding peptide
ARVVMNRYKKLIVNSSDDFYLVSIAN

SEQ ID NO: 80012 - protein, 29 aa, Artificial Sequence
  Cyclic GFR-binding peptide
  MOD_RES (1)..(1): Xaa is C or S
XARVVMNRHKRLIVNSSDDYYLVSTASLQ

SEQ ID NO: 80013 - protein, 30 aa, Artificial Sequence; identical to SEQ ID NO: 31107
  Cyclic GFR-binding peptide
  MOD_RES (26)..(27): Xaa is C or S

SEQ ID NO: 80014 - protein, 31 aa, Artificial Sequence
  Cyclic GFR-binding peptide
  MOD_RES (1)..(3): Xaa is C or S
XGXEEVIMEYKFKLLVRGNDLYLMSIPETKV

SEQ ID NO: 80015 - protein, 38 aa, Artificial Sequence; identical to SEQ ID NO: 41179
  Cyclic GFR-binding peptide
  MOD_RES (32)..(33): Xaa is C or S

SEQ ID NO: 80016 - protein, 21 aa, Artificial Sequence
  Cyclic GFR-binding peptide
PIKGYVKPTRGVFYLINIPSL

SEQ ID NO: 80017 - protein, 35 aa, Artificial Sequence
  Cyclic GFR-binding peptide
  MOD_RES (2)..(34)..(35): Xaa is C or S
AXSEVTMNYHYKLVVNKNEDKYLISIPSMKEPVXX

SEQ ID NO: 80018 - protein, 31 aa, Artificial Sequence
  Cyclic GFR-binding peptide
  MOD_RES (29)..(30): Xaa is C or S
TMNEYKFKVVNKNEDLYLISIPEMKEPVXXP

SEQ ID NO: 80019 - protein, 34 aa, Artificial Sequence
  Cyclic GFR-binding peptide
  MOD_RES (29)..(30): Xaa is C or S
VIMRHKRLLLVRGNDYYLMSTASTKVPAXXTSPV

SEQ ID NO: 80020 - protein, 23 aa, Artificial Sequence
  Cyclic GFR-binding peptide
RYKKLYTVVGKDFYLISIANLKT

SEQ ID NO: 80021 - protein, 38 aa, Artificial Sequence; identical to SEQ ID NO: 2906
  Cyclic GFR-binding peptide
  MOD_RES (2)..(33)..(34): Xaa is C or S

SEQ ID NO: 80022 - protein, 36 aa, Artificial Sequence; identical to SEQ ID NO: 31115
  Cyclic GFR-binding peptide
  MOD_RES (1)..(32)..(33): Xaa is C or S

SEQ ID NO: 80023 - protein, 25 aa, Artificial Sequence
  Cyclic GFR-binding peptide
MEYKFKLLVRGNDLYLMSIPETKVP

SEQ ID NO: 80024 - protein, 40 aa, Artificial Sequence; identical to SEQ ID NO: 2911
  Cyclic GFR-binding peptide
  MOD_RES (1)..(3)..(35)..(36): Xaa is C or S

SEQ ID NO: 80025 - protein, 32 aa, Artificial Sequence
  Cyclic GFR-binding peptide
  MOD_RES (2)..(2): Xaa is C or S
AXSEVTMNPIKGYVVNKNEDFYLINIPSMKEP

SEQ ID NO: 80026 - protein, 41 aa, Artificial Sequence
  Cyclic GFR-binding peptide
  MOD_RES (2)..(4)..(35)..(36): Xaa is C or S
SXKXSRVIMPIKGYVKPKRGVFYLINIPSLAQPVXXPAASA

SEQ ID NO: 80027 - protein, 23 aa, Artificial Sequence
  Cyclic GFR-binding peptide
DEYKFKVVKENEDLYLMSIPELE

SEQ ID NO: 80028 - protein, 31 aa, Artificial Sequence; identical to SEQ ID NO: 2912
  Cyclic GFR-binding peptide
  MOD_RES (26)..(27): Xaa is C or S

SEQ ID NO: 80029 - protein, 24 aa, Artificial Sequence
  Cyclic GFR-binding peptide
MRYKKLVKPTRGVFYLISIANLDQ

SEQ ID NO: 80030 - protein, 30 aa, Artificial Sequence; identical to SEQ ID NO: 41188
  Cyclic GFR-binding peptide
  MOD_RES (1)..(1): Xaa is C or S

SEQ ID NO: 80031 - protein, 22 aa, Artificial Sequence
  Cyclic GFR-binding peptide
RYKKLVVNKNEDFYLISIANMK

SEQ ID NO: 80032 - protein, 33 aa, Artificial Sequence; identical to SEQ ID NO: 2916
  Cyclic GFR-binding peptide
  MOD_RES (27)..(28): Xaa is C or S

SEQ ID NO: 80033 - protein, 26 aa, Artificial Sequence
  Cyclic GFR-binding peptide
NPIKGYIVNSSDDFYLVNIPSLKTPA

SEQ ID NO: 80034 - protein, 30 aa, Artificial Sequence; identical to SEQ ID NO: 2918
  Cyclic GFR-binding peptide
  MOD_RES (1)..(3): Xaa is C or S

SEQ ID NO: 80035 - protein, 41 aa, Artificial Sequence; identical to SEQ ID NO: 31124
  Cyclic GFR-binding peptide
  MOD_RES (1)..(3)..(35)..(36): Xaa is C or S

SEQ ID NO: 80036 - protein, 34 aa, Artificial Sequence; identical to SEQ ID NO: 41196
  Cyclic GFR-binding peptide
  MOD_RES (1)..(3): Xaa is C or S

SEQ ID NO: 80037 - protein, 37 aa, Artificial Sequence; identical to SEQ ID NO: 31125
  Cyclic GFR-binding peptide
  MOD_RES (31)..(32): Xaa is C or S

SEQ ID NO: 80038 - protein, 29 aa, Artificial Sequence
  Cyclic GFR-binding peptide
  MOD_RES (26)..(27): Xaa is C or S
EYKFKVKPTRGVLYLISIPELDQPVXXPS

SEQ ID NO: 80039 - protein, 26 aa, Artificial Sequence
  Cyclic GFR-binding peptide
IMPIKGYVKPKRGVFYLINIPSLAQP

SEQ ID NO: 80040 - protein, 30 aa, Artificial Sequence; identical to SEQ ID NO: 76386
  Cyclic GFR-binding peptide
  MOD_RES (27)..(28): Xaa is C or S

SEQ ID NO: 80041 - protein, 39 aa, Artificial Sequence; identical to SEQ ID NO: 31130
  Cyclic GFR-binding peptide
  MOD_RES (2)..(34)..(35): Xaa is C or S

SEQ ID NO: 80042 - protein, 35 aa, Artificial Sequence; identical to SEQ ID NO: 31133
  Cyclic GFR-binding peptide
  MOD_RES (2)..(34)..(35): Xaa is C or S

SEQ ID NO: 80043 - protein, 21 aa, Artificial Sequence
  Cyclic GFR-binding peptide
GEYKFKIIQQKDNLYLMSIPE

SEQ ID NO: 80044 - protein, 38 aa, Artificial Sequence; identical to SEQ ID NO: 2924
  Cyclic GFR-binding peptide
  MOD_RES (1)..(32)..(33): Xaa is C or S

SEQ ID NO: 80045 - protein, 41 aa, Artificial Sequence; identical to SEQ ID NO: 41212
  Cyclic GFR-binding peptide
  MOD_RES (1)..(3)..(35)..(36): Xaa is C or S

SEQ ID NO: 80046 - protein, 32 aa, Artificial Sequence; identical to SEQ ID NO: 41213
  Cyclic GFR-binding peptide
  MOD_RES (2)..(2): Xaa is C or S

SEQ ID NO: 80047 - protein, 35 aa, Artificial Sequence; identical to SEQ ID NO: 2927
  Cyclic GFR-binding peptide
  MOD_RES (31)..(32): Xaa is C or S

SEQ ID NO: 80048 - protein, 24 aa, Artificial Sequence
  Cyclic GFR-binding peptide
VVMYHYKLVKPTRGVKYLISIPSL

SEQ ID NO: 80049 - protein, 36 aa, Artificial Sequence; identical to SEQ ID NO: 76395
  Cyclic GFR-binding peptide
  MOD_RES (2)..(33)..(34): Xaa is C or S

SEQ ID NO: 80050 - protein, 29 aa, Artificial Sequence
  Cyclic GFR-binding peptide
GEVVMDRHKRLVVKENEDYYLMSTASLET

SEQ ID NO: 80051 - protein, 25 aa, Artificial Sequence
  Cyclic GFR-binding peptide
VIMRHKRLLLVRGNDYYLMSTASTK

SEQ ID NO: 80052 - protein, 36 aa, Artificial Sequence; identical to SEQ ID NO: 2935
  Cyclic GFR-binding peptide
  MOD_RES (30)..(31): Xaa is C or S

SEQ ID NO: 80053 - protein, 33 aa, Artificial Sequence; identical to SEQ ID NO: 31153
  Cyclic GFR-binding peptide
  MOD_RES (27)..(28): Xaa is C or S

SEQ ID NO: 80054 - protein, 32 aa, Artificial Sequence; identical to SEQ ID NO: 31154
  Cyclic GFR-binding peptide
  MOD_RES (32)..(32): Xaa is C or S

SEQ ID NO: 80055 - protein, 27 aa, Artificial Sequence
  Cyclic GFR-binding peptide
RVIMRYKKLVKPKRGVFYLISIANLAQ

SEQ ID NO: 80056 - protein, 28 aa, Artificial Sequence
  Cyclic GFR-binding peptide
VVMNRYKKLIVNNSSDFYLVSIANLKTP

SEQ ID NO: 80057 - protein, 37 aa, Artificial Sequence; identical to SEQ ID NO: 41225
  Cyclic GFR-binding peptide
  MOD_RES (2)..(4)..(36)..(37): Xaa is C or S

SEQ ID NO: 80058 - protein, 33 aa, Artificial Sequence
  Cyclic GFR-binding peptide
  MOD_RES (31)..(32): Xaa is C or S
EVTMNYHYKLVVNKNEDKYLISIPSMKEPVXXP

SEQ ID NO: 80059 - protein, 32 aa, Artificial Sequence; identical to SEQ ID NO: 41235
  Cyclic GFR-binding peptide
  MOD_RES (26)..(27): Xaa is C or S

SEQ ID NO: 80060 - protein, 35 aa, Artificial Sequence
  Cyclic GFR-binding peptide
  MOD_RES (29)..(30): Xaa is C or S
TMNRHKRLVVNKNEDYYLISTASMKEPVXXPEPIG

SEQ ID NO: 80061 - protein, 25 aa, Artificial Sequence
  Cyclic GFR-binding peptide
MRYKKLVKPTRGVFYLISIANLDQP

SEQ ID NO: 80062 - protein, 35 aa, Artificial Sequence; identical to SEQ ID NO: 41236
  Cyclic GFR-binding peptide
  MOD_RES (29)..(30): Xaa is C or S

SEQ ID NO: 80063 - protein, 33 aa, Artificial Sequence; identical to SEQ ID NO: 41237
  Cyclic GFR-binding peptide
  MOD_RES (31)..(32): Xaa is C or S

SEQ ID NO: 80064 - protein, 29 aa, Artificial Sequence
  Cyclic GFR-binding peptide
RVVMNYHYKLIVNSSDDKYLVSIPSLKTP

SEQ ID NO: 80065 - protein, 28 aa, Artificial Sequence
  Cyclic GFR-binding peptide
  MOD_RES (1)..(1): Xaa is C or S
XSKVIMPIKGYIKPTKGIFYLINIPSLD

SEQ ID NO: 80066 - protein, 36 aa, Artificial Sequence; identical to SEQ ID NO: 41239
  Cyclic GFR-binding peptide
  MOD_RES (2)..(4)..(36): Xaa is C or S

SEQ ID NO: 80067 - protein, 34 aa, Artificial Sequence; identical to SEQ ID NO: 2957
  Cyclic GFR-binding peptide
  MOD_RES (2)..(4): Xaa is C or S

SEQ ID NO: 80068 - protein, 26 aa, Artificial Sequence
  Cyclic GFR-binding peptide
DYHYKLVVKENEDKYLMSIPSLETPV

SEQ ID NO: 80069 - protein, 32 aa, Artificial Sequence
  Cyclic GFR-binding peptide
  MOD_RES (30)..(31): Xaa is C or S
VVMGRHKRLIIQQKDNYYLMSTASMKTPTXXP

SEQ ID NO: 80070 - protein, 33 aa, Artificial Sequence
  Cyclic GFR-binding peptide
  MOD_RES (29)..(30): Xaa is C or S
TMNPIKGYVVNKNEDFYLINIPSMKEPVXXPEP

SEQ ID NO: 80071 - protein, 38 aa, Artificial Sequence; identical to SEQ ID NO: 2962
  Cyclic GFR-binding peptide
  MOD_RES (1)..(33)..(34): Xaa is C or S

SEQ ID NO: 80072 - protein, 24 aa, Artificial Sequence
  Cyclic GFR-binding peptide
RYKKLIIQQKDNFYLMSIANMKTP

SEQ ID NO: 80073 - protein, 25 aa, Artificial Sequence
  Cyclic GFR-binding peptide
RVIMPIKGYVKPKRGVFYLINIPSL

SEQ ID NO: 80074 - protein, 30 aa, Artificial Sequence; identical to SEQ ID NO: 41249
  Cyclic GFR-binding peptide

SEQ ID NO: 80075 - protein, 28 aa, Artificial Sequence
  Cyclic GFR-binding peptide
EAVSMGEPIKGYTPVGMDDFYLVNIPSL

SEQ ID NO: 80076 - protein, 29 aa, Artificial Sequence
  Cyclic GFR-binding peptide
  MOD_RES (29)..(29): Xaa is C or S
VIMYHYKLIKPTKGIKYLISIPSLDQSVX

SEQ ID NO: 80077 - protein, 28 aa, Artificial Sequence
  Cyclic GFR-binding peptide
  MOD_RES (26)..(27): Xaa is C or S
PIKGYVVNKNEDFYLINIPSMKEPVXXP

SEQ ID NO: 80078 - protein, 24 aa, Artificial Sequence
  Cyclic GFR-binding peptide
VAMGPIKGYYTVVGKDFYLINIPS

SEQ ID NO: 80079 - protein, 27 aa, Artificial Sequence
  Cyclic GFR-binding peptide
SKVVMRHKRLVKPTRGVYYLISTASLD

SEQ ID NO: 80080 - protein, 34 aa, Artificial Sequence; identical to SEQ ID NO: 13518
  Cyclic GFR-binding peptide
  MOD_RES (2)..(4): Xaa is C or S

SEQ ID NO: 80081 - protein, 35 aa, Artificial Sequence; identical to SEQ ID NO: 31196
  Cyclic GFR-binding peptide
  MOD_RES (29)..(30): Xaa is C or S

SEQ ID NO: 80082 - protein, 28 aa, Artificial Sequence
  Cyclic GFR-binding peptide
  MOD_RES (28)..(28): Xaa is C or S
MNYHYKLIVNSSDDKYLVSIPSLQTPAX

SEQ ID NO: 80083 - protein, 31 aa, Artificial Sequence
  Cyclic GFR-binding peptide
  MOD_RES (28)..(29): Xaa is C or S
MGEYKFKIIQQKDNLYLMSIPEMKTPTXXPG

SEQ ID NO: 80084 - protein, 33 aa, Artificial Sequence
  Cyclic GFR-binding peptide
  MOD_RES (28)..(29): Xaa is C or S
MNRYKKLVVNKNEDFYLISIANMKEPVXXPEPI

SEQ ID NO: 80085 - protein, 25 aa, Artificial Sequence
  Cyclic GFR-binding peptide
MDPIKGYVVNNAADFYLINIPSLRA

SEQ ID NO: 80086 - protein, 35 aa, Artificial Sequence; identical to SEQ ID NO: 2974
  Cyclic GFR-binding peptide
  MOD_RES (1)..(33): Xaa is C or S

SEQ ID NO: 80087 - protein, 25 aa, Artificial Sequence
  Cyclic GFR-binding peptide
VSMGEPIKGYTPVGMDDFYLVNIPS

SEQ ID NO: 80088 - protein, 40 aa, Artificial Sequence
  Cyclic GFR-binding peptide
  MOD_RES (2)..(4)..(36)..(37): Xaa is C or S
RXGXAEVVMDRHKRLVVNNAADYYLISTASLRAPVXXSAP

SEQ ID NO: 80089 - protein, 32 aa, Artificial Sequence; identical to SEQ ID NO: 31201
  Cyclic GFR-binding peptide
  MOD_RES (27)..(28): Xaa is C or S

SEQ ID NO: 80090 - protein, 21 aa, Artificial Sequence
  Cyclic GFR-binding peptide
PIKGYVVNNAADFYLINIPSL

SEQ ID NO: 80091 - protein, 30 aa, Artificial Sequence; identical to SEQ ID NO: 41263
  Cyclic GFR-binding peptide
  MOD_RES (30)..(30): Xaa is C or S

SEQ ID NO: 80092 - protein, 28 aa, Artificial Sequence
  Cyclic GFR-binding peptide
EVTMNRYKKLVVNKNEDFYLISIANMKE

SEQ ID NO: 80093 - protein, 29 aa, Artificial Sequence
  Cyclic GFR-binding peptide
  MOD_RES (2)..(2): Xaa is C or S
KXSKVVMPIKGYVKPTRGVFYLINIPSLD

SEQ ID NO: 80094 - protein, 27 aa, Artificial Sequence
  Cyclic GFR-binding peptide
VMNYHYKLIVNSSDDKYLVSIPSLQTP

SEQ ID NO: 80095 - protein, 26 aa, Artificial Sequence
  Cyclic GFR-binding peptide
  MOD_RES (26)..(26): Xaa is C or S
PIKGYIVNSSDDFYLVNIPSLKTPAX

SEQ ID NO: 80096 - protein, 31 aa, Artificial Sequence; identical to SEQ ID NO: 31208
  Cyclic GFR-binding peptide
  MOD_RES (2)..(4): Xaa is C or S

SEQ ID NO: 80097 - protein, 22 aa, Artificial Sequence
  Cyclic GFR-binding peptide
GEEYKFKTPVGMDDLYLVSIPE

SEQ ID NO: 80098 - protein, 31 aa, Artificial Sequence; identical to SEQ ID NO: 31211
  Cyclic GFR-binding peptide

SEQ ID NO: 80099 - protein, 30 aa, Artificial Sequence
  Cyclic GFR-binding peptide
  MOD_RES (2)..(2): Xaa is C or S
KXSKVIMPIKGYIKPTKGIFYLINIPSLDQ

SEQ ID NO: 80100 - protein, 34 aa, Artificial Sequence; identical to SEQ ID NO: 2983
  Cyclic GFR-binding peptide
  MOD_RES (29)..(30): Xaa is C or S

SEQ ID NO: 80101 - protein, 28 aa, Artificial Sequence
  Cyclic GFR-binding peptide
AMGPIKGYYTVVGKDFYLINIPSLKTPV

SEQ ID NO: 80102 - protein, 29 aa, Artificial Sequence
  Cyclic GFR-binding peptide
  MOD_RES (26)..(27): Xaa is C or S
YHYKLIKPTKGIKYLISIPSLDQSVXXPS

SEQ ID NO: 80103 - protein, 31 aa, Artificial Sequence; identical to SEQ ID NO: 31221
  Cyclic GFR-binding peptide
  MOD_RES (1)..(3): Xaa is C or S

SEQ ID NO: 80104 - protein, 24 aa, Artificial Sequence
  Cyclic GFR-binding peptide
MYHYKLLLVRGNDKYLMSIPSTKV

SEQ ID NO: 80105 - protein, 32 aa, Artificial Sequence; identical to SEQ ID NO: 2993
  Cyclic GFR-binding peptide
  MOD_RES (26)..(27): Xaa is C or S

SEQ ID NO: 80106 - protein, 38 aa, Artificial Sequence; identical to SEQ ID NO: 31223
  Cyclic GFR-binding peptide
  MOD_RES (2)..(4)..(36)..(37): Xaa is C or S

SEQ ID NO: 80107 - protein, 32 aa, Artificial Sequence; identical to SEQ ID NO: 31224
  Cyclic GFR-binding peptide
  MOD_RES (29)..(30): Xaa is C or S

SEQ ID NO: 80108 - protein, 33 aa, Artificial Sequence; identical to SEQ ID NO: 31225
  Cyclic GFR-binding peptide
  MOD_RES (28)..(29): Xaa is C or S

SEQ ID NO: 80109 - protein, 33 aa, Artificial Sequence; identical to SEQ ID NO: 31227
  Cyclic GFR-binding peptide
  MOD_RES (2)..(4): Xaa is C or S

SEQ ID NO: 80110 - protein, 39 aa, Artificial Sequence
  Cyclic GFR-binding peptide
  MOD_RES (2)..(4)..(36)..(37): Xaa is C or S
SXGXRDVVMGYHYKLIIQQKDNKYLMSIPSMKTPTXXPG

SEQ ID NO: 80111 - protein, 31 aa, Artificial Sequence; identical to SEQ ID NO: 31230
  Cyclic GFR-binding peptide
  MOD_RES (1)..(1): Xaa is C or S

SEQ ID NO: 80112 - protein, 32 aa, Artificial Sequence; identical to SEQ ID NO: 31233
  Cyclic GFR-binding peptide
  MOD_RES (28)..(29): Xaa is C or S

SEQ ID NO: 80113 - protein, 33 aa, Artificial Sequence; identical to SEQ ID NO: 41298
  Cyclic GFR-binding peptide
  MOD_RES (2)..(4): Xaa is C or S

SEQ ID NO: 80114 - protein, 37 aa, Artificial Sequence; identical to SEQ ID NO: 3000
  Cyclic GFR-binding peptide
  MOD_RES (2)..(34)..(35): Xaa is C or S

SEQ ID NO: 80115 - protein, 35 aa, Artificial Sequence; identical to SEQ ID NO: 3001
  Cyclic GFR-binding peptide
  MOD_RES (29)..(29): Xaa is C or S

SEQ ID NO: 80116 - protein, 35 aa, Artificial Sequence; identical to SEQ ID NO: 3003
  Cyclic GFR-binding peptide
  MOD_RES (30)..(31): Xaa is C or S

SEQ ID NO: 80117 - protein, 32 aa, Artificial Sequence
  Cyclic GFR-binding peptide
  MOD_RES (26)..(27): Xaa is C or S
YHYKLVVNKNEDKYLISIPSMKEPVXXPEPIG

SEQ ID NO: 80118 - protein, 36 aa, Artificial Sequence
  Cyclic GFR-binding peptide
  MOD_RES (1)..(3)..(34)..(35): Xaa is C or S
XKXSRVIMPIKGYVKPKRGVFYLINIPSLAQPVXXP

SEQ ID NO: 80119 - protein, 30 aa, Artificial Sequence; identical to SEQ ID NO: 3005
  Cyclic GFR-binding peptide
  MOD_RES (1)..(3): Xaa is C or S

SEQ ID NO: 80120 - protein, 30 aa, Artificial Sequence; identical to SEQ ID NO: 41302
  Cyclic GFR-binding peptide
  MOD_RES (26)..(27): Xaa is C or S

SEQ ID NO: 80121 - protein, 26 aa, Artificial Sequence
  Cyclic GFR-binding peptide
  MOD_RES (26)..(26): Xaa is C or S
YHYKLLLVRGNDKYLMSIPSTKVPAX

SEQ ID NO: 80122 - protein, 35 aa, Artificial Sequence; identical to SEQ ID NO: 3007
  Cyclic GFR-binding peptide
  MOD_RES (1)..(33): Xaa is C or S

SEQ ID NO: 80123 - protein, 33 aa, Artificial Sequence; identical to SEQ ID NO: 3013
  Cyclic GFR-binding peptide
  MOD_RES (2)..(2): Xaa is C or S

SEQ ID NO: 80124 - protein, 33 aa, Artificial Sequence; identical to SEQ ID NO: 3014
  Cyclic GFR-binding peptide
  MOD_RES (27)..(28): Xaa is C or S

SEQ ID NO: 80125 - protein, 28 aa, Artificial Sequence
  Cyclic GFR-binding peptide
  MOD_RES (1)..(1): Xaa is C or S
XARVVMNRHKRLIVNSSDDYYLVSTASL

SEQ ID NO: 80126 - protein, 32 aa, Artificial Sequence; identical to SEQ ID NO: 3017
  Cyclic GFR-binding peptide
  MOD_RES (26)..(27): Xaa is C or S

SEQ ID NO: 80127 - protein, 28 aa, Artificial Sequence
  Cyclic GFR-binding peptide
EEVIMEYKFKLLVRGNDLYLMSIPETKV

SEQ ID NO: 80128 - protein, 33 aa, Artificial Sequence; identical to SEQ ID NO: 3019
  Cyclic GFR-binding peptide
  MOD_RES (2)..(33): Xaa is C or S

SEQ ID NO: 80129 - protein, 39 aa, Artificial Sequence; identical to SEQ ID NO: 3022
  Cyclic GFR-binding peptide
  MOD_RES (1)..(3)..(35)..(36): Xaa is C or S

SEQ ID NO: 80130 - protein, 31 aa, Artificial Sequence; identical to SEQ ID NO: 3024
  Cyclic GFR-binding peptide
  MOD_RES (27)..(28): Xaa is C or S

SEQ ID NO: 80131 - protein, 25 aa, Artificial Sequence
  Cyclic GFR-binding peptide
NPIKGYIVNSSDDFYLVNIPSLQTP

SEQ ID NO: 80132 - protein, 21 aa, Artificial Sequence
  Cyclic GFR-binding peptide
DPIKGYVVKENEDFYLMNIPS

SEQ ID NO: 80133 - protein, 28 aa, Artificial Sequence
  Cyclic GFR-binding peptide
  MOD_RES (26)..(27): Xaa is C or S
RHKRLVVKDYEDYYLMSTASLETPVXXA

SEQ ID NO: 80134 - protein, 35 aa, Artificial Sequence; identical to SEQ ID NO: 31261
  Cyclic GFR-binding peptide
  MOD_RES (2)..(4): Xaa is C or S

SEQ ID NO: 80135 - protein, 36 aa, Artificial Sequence; identical to SEQ ID NO: 41317
  Cyclic GFR-binding peptide
  MOD_RES (31)..(32): Xaa is C or S

SEQ ID NO: 80136 - protein, 29 aa, Artificial Sequence
  Cyclic GFR-binding peptide
  MOD_RES (2)..(2): Xaa is C or S
GXGEVVMDEYKFKVVKENEDLYLMSIPEL

SEQ ID NO: 80137 - protein, 33 aa, Artificial Sequence; identical to SEQ ID NO: 31263
  Cyclic GFR-binding peptide
  MOD_RES (2)..(2): Xaa is C or S

SEQ ID NO: 80138 - protein, 29 aa, Artificial Sequence
  Cyclic GFR-binding peptide
VVMNRYKKLIVNNSSDFYLVSIANLKTPA

SEQ ID NO: 80139 - protein, 31 aa, Artificial Sequence; identical to SEQ ID NO: 3035
  Cyclic GFR-binding peptide
  MOD_RES (26)..(27): Xaa is C or S

SEQ ID NO: 80140 - protein, 28 aa, Artificial Sequence
  Cyclic GFR-binding peptide
  MOD_RES (27)..(28): Xaa is C or S
NEYKFKVVNKNEDLYLISIPEMKEPVXX

SEQ ID NO: 80141 - protein, 28 aa, Artificial Sequence
  Cyclic GFR-binding peptide
SMGEEYKFKTPVGMDDLYLVSIPELKTP

SEQ ID NO: 80142 - protein, 23 aa, Artificial Sequence
  Cyclic GFR-binding peptide
NRHKRLIVNSSDDYYLVSTASLQ

SEQ ID NO: 80143 - protein, 23 aa, Artificial Sequence
  Cyclic GFR-binding peptide
AMGRYKKLYTVVGKDFYLISIAN

SEQ ID NO: 80144 - protein, 36 aa, Artificial Sequence; identical to SEQ ID NO: 3047
  Cyclic GFR-binding peptide
  MOD_RES (31)..(32): Xaa is C or S

SEQ ID NO: 80145 - protein, 28 aa, Artificial Sequence
  Cyclic GFR-binding peptide
VMEYHYKLVVKDYEDKYLMSIPSLETPV

SEQ ID NO: 80146 - protein, 24 aa, Artificial Sequence
  Cyclic GFR-binding peptide
YHYKLYTVVGKDKYLISIPSLKTP

SEQ ID NO: 80147 - protein, 28 aa, Artificial Sequence
  Cyclic GFR-binding peptide
  MOD_RES (28)..(28): Xaa is C or S
MERYKKLVVKDYEDFYLMSIANLETPVX

SEQ ID NO: 80148 - protein, 27 aa, Artificial Sequence
  Cyclic GFR-binding peptide
MNRYKKLIVNSSDDFYLVSIANLKTPA

SEQ ID NO: 80149 - protein, 31 aa, Artificial Sequence; identical to SEQ ID NO: 31285
  Cyclic GFR-binding peptide
  MOD_RES (29)..(30): Xaa is C or S

SEQ ID NO: 80150 - protein, 30 aa, Artificial Sequence
  Cyclic GFR-binding peptide
  MOD_RES (1)..(3): Xaa is C or S
XAXSEVTMNRYKKLVVNKNEDFYLISIANM

SEQ ID NO: 80151 - protein, 35 aa, Artificial Sequence
  Cyclic GFR-binding peptide
  MOD_RES (1)..(3)..(34)..(35): Xaa is C or S
XGXEEVIMEYKFKLLVRGNDLYLMSIPETKVPAXX

SEQ ID NO: 80152 - protein, 25 aa, Artificial Sequence
  Cyclic GFR-binding peptide
RHKRLVVNNASDYYLISTASLRTPV

SEQ ID NO: 80153 - protein, 29 aa, Artificial Sequence
  Cyclic GFR-binding peptide
KVVMPIKGYVKPTRGVFYLINIPSLDQPV

SEQ ID NO: 80154 - protein, 26 aa, Artificial Sequence
  Cyclic GFR-binding peptide
VMDPIKGYVVNNASDFYLINIPSLRT

SEQ ID NO: 80155 - protein, 38 aa, Artificial Sequence; identical to SEQ ID NO: 41345
  Cyclic GFR-binding peptide
  MOD_RES (2)..(34): Xaa is C or S

SEQ ID NO: 80156 - protein, 30 aa, Artificial Sequence; identical to SEQ ID NO: 31290
  Cyclic GFR-binding peptide
  MOD_RES (29)..(30): Xaa is C or S

SEQ ID NO: 80157 - protein, 26 aa, Artificial Sequence
  Cyclic GFR-binding peptide
NRYKKLIVNNSSDFYLVSIANLKTPA

SEQ ID NO: 80158 - protein, 25 aa, Artificial Sequence
  Cyclic GFR-binding peptide
EVVMDEYKFKVVNNASDLYLISIPE

SEQ ID NO: 80159 - protein, 37 aa, Artificial Sequence; identical to SEQ ID NO: 3061
  Cyclic GFR-binding peptide
  MOD_RES (2)..(4)..(35)..(36): Xaa is C or S

SEQ ID NO: 80160 - protein, 32 aa, Artificial Sequence
  Cyclic GFR-binding peptide
  MOD_RES (26)..(27): Xaa is C or S
EYKFKVVNKNEDLYLISIPEMKEPVXXPEPIG

SEQ ID NO: 80161 - protein, 25 aa, Artificial Sequence
  Cyclic GFR-binding peptide
MYHYKLLLVRGNDKYLMSIPSTKVP

SEQ ID NO: 80162 - protein, 30 aa, Artificial Sequence
  Cyclic GFR-binding peptide
  MOD_RES (30)..(30): Xaa is C or S
EVIMEYKFKLLVRGNDLYLMSIPETKVPAX

SEQ ID NO: 80163 - protein, 39 aa, Artificial Sequence; identical to SEQ ID NO: 31295
  Cyclic GFR-binding peptide
  MOD_RES (2)..(4)..(35)..(36): Xaa is C or S

SEQ ID NO: 80164 - protein, 35 aa, Artificial Sequence; identical to SEQ ID NO: 31296
  Cyclic GFR-binding peptide
  MOD_RES (1)..(33)..(34): Xaa is C or S

SEQ ID NO: 80165 - protein, 26 aa, Artificial Sequence
  Cyclic GFR-binding peptide
VMGRYKKLIIQQKDNFYLMSIANMKT

SEQ ID NO: 80166 - protein, 26 aa, Artificial Sequence
  Cyclic GFR-binding peptide
MDEYKFKVVNNAADLYLISIPELRAP

SEQ ID NO: 80167 - protein, 27 aa, Artificial Sequence
  Cyclic GFR-binding peptide
SKVIMEYKFKIKPTKGILYLISIPELD

SEQ ID NO: 80168 - protein, 26 aa, Artificial Sequence
  Cyclic GFR-binding peptide
MRHKRLVKPTRGVYYLISTASLDQPV

SEQ ID NO: 80169 - protein, 23 aa, Artificial Sequence
  Cyclic GFR-binding peptide
MGEYKFKIIQQKDNLYLMSIPEM

SEQ ID NO: 80170 - protein, 34 aa, Artificial Sequence; identical to SEQ ID NO: 41361
  Cyclic GFR-binding peptide
  MOD_RES (1)..(33)..(34): Xaa is C or S

SEQ ID NO: 80171 - protein, 29 aa, Artificial Sequence
  Cyclic GFR-binding peptide
  MOD_RES (2)..(2): Xaa is C or S
GXESVAMGPIKGYYTVVGKDFYLINIPSL

SEQ ID NO: 80172 - protein, 25 aa, Artificial Sequence
  Cyclic GFR-binding peptide
VVMEEYKFKVVKDYEDLYLMSIPEL

SEQ ID NO: 80173 - protein, 25 aa, Artificial Sequence
  Cyclic GFR-binding peptide
IMEYKFKLLVRGNDLYLMSIPETKV

SEQ ID NO: 80174 - protein, 28 aa, Artificial Sequence
  Cyclic GFR-binding peptide
  MOD_RES (27)..(27): Xaa is C or S
NEYKFKIVNSSDDLYLVSIPELKTPAXT

SEQ ID NO: 80175 - protein, 26 aa, Artificial Sequence
  Cyclic GFR-binding peptide
  MOD_RES (1)..(1): Xaa is C or S
XSRVIMPIKGYVKPKRGVFYLINIPS

SEQ ID NO: 80176 - protein, 30 aa, Artificial Sequence; identical to SEQ ID NO: 3072
  Cyclic GFR-binding peptide
  MOD_RES (2)..(2): Xaa is C or S

SEQ ID NO: 80177 - protein, 36 aa, Artificial Sequence; identical to SEQ ID NO: 3076
  Cyclic GFR-binding peptide
  MOD_RES (2)..(34)..(35): Xaa is C or S

SEQ ID NO: 80178 - protein, 34 aa, Artificial Sequence; identical to SEQ ID NO: 31321
  Cyclic GFR-binding peptide
  MOD_RES (30)..(31): Xaa is C or S

SEQ ID NO: 80179 - protein, 32 aa, Artificial Sequence; identical to SEQ ID NO: 31322
  Cyclic GFR-binding peptide
  MOD_RES (28)..(29): Xaa is C or S

SEQ ID NO: 80180 - protein, 34 aa, Artificial Sequence; identical to SEQ ID NO: 3079
  Cyclic GFR-binding peptide
  MOD_RES (30)..(31): Xaa is C or S

SEQ ID NO: 80181 - protein, 29 aa, Artificial Sequence
  Cyclic GFR-binding peptide
  MOD_RES (28)..(29): Xaa is C or S
MGRHKRLIIQQKDNYYLMSTASMKTPTXX

SEQ ID NO: 80182 - protein, 32 aa, Artificial Sequence; identical to SEQ ID NO: 41374
  Cyclic GFR-binding peptide
  MOD_RES (1)..(1): Xaa is C or S

SEQ ID NO: 80183 - protein, 37 aa, Artificial Sequence
  Cyclic GFR-binding peptide
  MOD_RES (1)..(3)..(35)..(36): Xaa is C or S
XGXAEVVMDRHKRLVVNNAADYYLISTASLRAPVXXS

SEQ ID NO: 80184 - protein, 21 aa, Artificial Sequence
  Cyclic GFR-binding peptide
GYHYKLIIQQKDNKYLMSIPS

SEQ ID NO: 80185 - protein, 29 aa, Artificial Sequence
  Cyclic GFR-binding peptide
SKVIMYHYKLIKPTKGIKYLISIPSLDQS

SEQ ID NO: 80186 - protein, 35 aa, Artificial Sequence; identical to SEQ ID NO: 31328
  Cyclic GFR-binding peptide
  MOD_RES (29)..(30): Xaa is C or S

SEQ ID NO: 80187 - protein, 31 aa, Artificial Sequence; identical to SEQ ID NO: 3084
  Cyclic GFR-binding peptide
  MOD_RES (28)..(29): Xaa is C or S

SEQ ID NO: 80188 - protein, 33 aa, Artificial Sequence; identical to SEQ ID NO: 41378
  Cyclic GFR-binding peptide
  MOD_RES (1)..(33): Xaa is C or S

SEQ ID NO: 80189 - protein, 32 aa, Artificial Sequence; identical to SEQ ID NO: 3089
  Cyclic GFR-binding peptide
  MOD_RES (1)..(1): Xaa is C or S

SEQ ID NO: 80190 - protein, 30 aa, Artificial Sequence; identical to SEQ ID NO: 31339
  Cyclic GFR-binding peptide
  MOD_RES (2)..(2): Xaa is C or S

SEQ ID NO: 80191 - protein, 23 aa, Artificial Sequence
  Cyclic GFR-binding peptide
IMPIKGYVKPKRGVFYLINIPSL

SEQ ID NO: 80192 - protein, 35 aa, Artificial Sequence; identical to SEQ ID NO: 3092
  Cyclic GFR-binding peptide
  MOD_RES (31)..(32): Xaa is C or S

SEQ ID NO: 80193 - protein, 36 aa, Artificial Sequence
  Cyclic GFR-binding peptide
  MOD_RES (2)..(33)..(34): Xaa is C or S
GXEEVIMYHYKLLLVRGNDKYLMSIPSTKVPAXXTS

SEQ ID NO: 80194 - protein, 33 aa, Artificial Sequence; identical to SEQ ID NO: 3093
  Cyclic GFR-binding peptide
  MOD_RES (31)..(32): Xaa is C or S

SEQ ID NO: 80195 - protein, 29 aa, Artificial Sequence
  Cyclic GFR-binding peptide
  MOD_RES (28)..(29): Xaa is C or S
VMEYKFKVKPTRGVLYLISIPELDQPVXX

SEQ ID NO: 80196 - protein, 36 aa, Artificial Sequence
  Cyclic GFR-binding peptide
  MOD_RES (32)..(33): Xaa is C or S
RDVVMGEYKFKIIQQKDNLYLMSIPEMKTPTXXPGA

SEQ ID NO: 80197 - protein, 31 aa, Artificial Sequence; identical to SEQ ID NO: 41400
  Cyclic GFR-binding peptide
  MOD_RES (26)..(27): Xaa is C or S

SEQ ID NO: 80198 - protein, 37 aa, Artificial Sequence
  Cyclic GFR-binding peptide
  MOD_RES (1)..(33)..(34): Xaa is C or S
XSEVTMNPIKGYVVNKNEDFYLINIPSMKEPVXXPEP

SEQ ID NO: 80199 - protein, 25 aa, Artificial Sequence
  Cyclic GFR-binding peptide
VVMDPIKGYVVNNAADFYLINIPSL

SEQ ID NO: 80200 - protein, 35 aa, Artificial Sequence; identical to SEQ ID NO: 3096
  Cyclic GFR-binding peptide
  MOD_RES (1)..(34)..(35): Xaa is C or S

SEQ ID NO: 80201 - protein, 24 aa, Artificial Sequence
  Cyclic GFR-binding peptide
VMDPIKGYVVNNASDFYLINIPSL

SEQ ID NO: 80202 - protein, 23 aa, Artificial Sequence
  Cyclic GFR-binding peptide
VIMEYKFKIKPTKGILYLISIPE

SEQ ID NO: 80203 - protein, 36 aa, Artificial Sequence; identical to SEQ ID NO: 3102
  Cyclic GFR-binding peptide
  MOD_RES (31)..(32): Xaa is C or S

SEQ ID NO: 80204 - protein, 32 aa, Artificial Sequence; identical to SEQ ID NO: 3103
  Cyclic GFR-binding peptide
  MOD_RES (2)..(2): Xaa is C or S

SEQ ID NO: 80205 - protein, 26 aa, Artificial Sequence
  Cyclic GFR-binding peptide
MDYHYKLVVNNASDKYLISIPSLRTP

SEQ ID NO: 80206 - protein, 29 aa, Artificial Sequence
  Cyclic GFR-binding peptide
  MOD_RES (28)..(29): Xaa is C or S
MDYHYKLVVKENEDKYLMSIPSLETPVXX

SEQ ID NO: 80207 - protein, 25 aa, Artificial Sequence
  Cyclic GFR-binding peptide
VTMNRYKKLVVNKNEDFYLISIANM

SEQ ID NO: 80208 - protein, 29 aa, Artificial Sequence
  Cyclic GFR-binding peptide
  MOD_RES (1)..(3): Xaa is C or S
XGXSRVVMNRYKKLIVNSSDDFYLVSIAN

SEQ ID NO: 80209 - protein, 33 aa, Artificial Sequence
  Cyclic GFR-binding peptide
  MOD_RES (30)..(31): Xaa is C or S
VVMDRHKRLVVNNAADYYLISTASLRAPVXXSA

SEQ ID NO: 80210 - protein, 32 aa, Artificial Sequence
  Cyclic GFR-binding peptide
  MOD_RES (31)..(32): Xaa is C or S
SRVIMPIKGYVKPKRGVFYLINIPSLAQPVXX

SEQ ID NO: 80211 - protein, 28 aa, Artificial Sequence
  Cyclic GFR-binding peptide
  MOD_RES (2)..(2): Xaa is C or S
GXGEVVMERHKRLVVKDYEDYYLMSTAS

SEQ ID NO: 80212 - protein, 32 aa, Artificial Sequence
  Cyclic GFR-binding peptide
  MOD_RES (1)..(3): Xaa is C or S
XGXSEVVMDEYKFKVVNNASDLYLISIPELRT

SEQ ID NO: 80213 - protein, 28 aa, Artificial Sequence
  Cyclic GFR-binding peptide
EVTMNRHKRLVVNKNEDYYLISTASMKE

SEQ ID NO: 80214 - protein, 35 aa, Artificial Sequence; identical to SEQ ID NO: 3111
  Cyclic GFR-binding peptide
  MOD_RES (1)..(33)..(34): Xaa is C or S

SEQ ID NO: 80215 - protein, 38 aa, Artificial Sequence; identical to SEQ ID NO: 41424
  Cyclic GFR-binding peptide
  MOD_RES (32)..(33): Xaa is C or S

SEQ ID NO: 80216 - protein, 31 aa, Artificial Sequence; identical to SEQ ID NO: 3113
  Cyclic GFR-binding peptide
  MOD_RES (26)..(27): Xaa is C or S

SEQ ID NO: 80217 - protein, 35 aa, Artificial Sequence; identical to SEQ ID NO: 3114
  Cyclic GFR-binding peptide
  MOD_RES (1)..(33)..(34): Xaa is C or S

SEQ ID NO: 80218 - protein, 29 aa, Artificial Sequence
  Cyclic GFR-binding peptide
VVMNYHYKLIVNNSSDKYLVSIPSLKTPA

SEQ ID NO: 80219 - protein, 30 aa, Artificial Sequence; identical to SEQ ID NO: 31370
  Cyclic GFR-binding peptide
  MOD_RES (1)..(1): Xaa is C or S

SEQ ID NO: 80220 - protein, 23 aa, Artificial Sequence
  Cyclic GFR-binding peptide
MGERYKKLTPVGMDDFYLVSIAN

SEQ ID NO: 80221 - protein, 22 aa, Artificial Sequence
  Cyclic GFR-binding peptide
NEYKFKIVNNSSDLYLVSIPEL

SEQ ID NO: 80222 - protein, 35 aa, Artificial Sequence; identical to SEQ ID NO: 3117
  Cyclic GFR-binding peptide
  MOD_RES (1)..(3)..(34)..(35): Xaa is C or S

SEQ ID NO: 80223 - protein, 34 aa, Artificial Sequence; identical to SEQ ID NO: 41428
  Cyclic GFR-binding peptide
  MOD_RES (1)..(33)..(34): Xaa is C or S

SEQ ID NO: 80224 - protein, 27 aa, Artificial Sequence
  Cyclic GFR-binding peptide
VIMRHKRLVKPKRGVYYLISTASLAQP

SEQ ID NO: 80225 - protein, 35 aa, Artificial Sequence; identical to SEQ ID NO: 13664
  Cyclic GFR-binding peptide
  MOD_RES (32)..(33): Xaa is C or S

SEQ ID NO: 80226 - protein, 32 aa, Artificial Sequence
  Cyclic GFR-binding peptide
  MOD_RES (30)..(31): Xaa is C or S
VTMNPIKGYVVNKNEDFYLINIPSMKEPVXXP

SEQ ID NO: 80227 - protein, 32 aa, Artificial Sequence; identical to SEQ ID NO: 41431
  Cyclic GFR-binding peptide
  MOD_RES (27)..(27): Xaa is C or S

SEQ ID NO: 80228 - protein, 34 aa, Artificial Sequence
  Cyclic GFR-binding peptide
  MOD_RES (28)..(29): Xaa is C or S
MNYHYKLIVNSSDDKYLVSIPSLKTPAXXPKPVH

SEQ ID NO: 80229 - protein, 26 aa, Artificial Sequence
  Cyclic GFR-binding peptide
VTMNYHYKLVVNKNEDKYLISIPSMK

SEQ ID NO: 80230 - protein, 27 aa, Artificial Sequence
  Cyclic GFR-binding peptide
AVSMGERYKKLTPVGMDDFYLVSIANL

SEQ ID NO: 80231 - protein, 30 aa, Artificial Sequence; identical to SEQ ID NO: 41440
  Cyclic GFR-binding peptide
  MOD_RES (29)..(30): Xaa is C or S

SEQ ID NO: 80232 - protein, 35 aa, Artificial Sequence; identical to SEQ ID NO: 3128
  Cyclic GFR-binding peptide
  MOD_RES (1)..(3)..(34)..(35): Xaa is C or S

SEQ ID NO: 80233 - protein, 31 aa, Artificial Sequence; identical to SEQ ID NO: 31388
  Cyclic GFR-binding peptide
  MOD_RES (30)..(31): Xaa is C or S

SEQ ID NO: 80234 - protein, 25 aa, Artificial Sequence
  Cyclic GFR-binding peptide
VVMRYKKLVKPTRGVFYLISIANLD

SEQ ID NO: 80235 - protein, 36 aa, Artificial Sequence
  Cyclic GFR-binding peptide
  MOD_RES (31)..(32): Xaa is C or S
EVVMDEYKFKVVNNASDLYLISIPELRTPVXXTPPT

SEQ ID NO: 80236 - protein, 33 aa, Artificial Sequence; identical to SEQ ID NO: 41442
  Cyclic GFR-binding peptide
  MOD_RES (29)..(30): Xaa is C or S

SEQ ID NO: 80237 - protein, 36 aa, Artificial Sequence; identical to SEQ ID NO: 41445
  Cyclic GFR-binding peptide
  MOD_RES (32)..(33): Xaa is C or S

SEQ ID NO: 80238 - protein, 32 aa, Artificial Sequence; identical to SEQ ID NO: 31394
  Cyclic GFR-binding peptide
  MOD_RES (32)..(32): Xaa is C or S

SEQ ID NO: 80239 - protein, 33 aa, Artificial Sequence
  Cyclic GFR-binding peptide
  MOD_RES (2)..(4): Xaa is C or S
LXGXEEVIMYHYKLLLVRGNDKYLMSIPSTKVP

SEQ ID NO: 80240 - protein, 36 aa, Artificial Sequence
  Cyclic GFR-binding peptide
  MOD_RES (2)..(33)..(34): Xaa is C or S
KXSKVVMPIKGYVKPTRGVFYLINIPSLDQPVXXPS

SEQ ID NO: 80241 - protein, 37 aa, Artificial Sequence; identical to SEQ ID NO: 31398
  Cyclic GFR-binding peptide
  MOD_RES (31)..(31): Xaa is C or S

SEQ ID NO: 80242 - protein, 34 aa, Artificial Sequence; identical to SEQ ID NO: 3143
  Cyclic GFR-binding peptide
  MOD_RES (1)..(3): Xaa is C or S

SEQ ID NO: 80243 - protein, 40 aa, Artificial Sequence; identical to SEQ ID NO: 31406
  Cyclic GFR-binding peptide
  MOD_RES (2)..(34)..(35): Xaa is C or S

SEQ ID NO: 80244 - protein, 32 aa, Artificial Sequence; identical to SEQ ID NO: 41454
  Cyclic GFR-binding peptide
  MOD_RES (2)..(4): Xaa is C or S

SEQ ID NO: 80245 - protein, 28 aa, Artificial Sequence
  Cyclic GFR-binding peptide
KVIMYHYKLIKPTKGIKYLISIPSLDQS

SEQ ID NO: 80246 - protein, 23 aa, Artificial Sequence
  Cyclic GFR-binding peptide
MPIKGYLLVRGNDFYLMNIPSTK

SEQ ID NO: 80247 - protein, 39 aa, Artificial Sequence; identical to SEQ ID NO: 3150
  Cyclic GFR-binding peptide
  MOD_RES (2)..(4)..(36)..(37): Xaa is C or S

SEQ ID NO: 80248 - protein, 29 aa, Artificial Sequence
  Cyclic GFR-binding peptide
EAVSMGEEYKFKTPVGMDDLYLVSIPELK

SEQ ID NO: 80249 - protein, 34 aa, Artificial Sequence; identical to SEQ ID NO: 31411
  Cyclic GFR-binding peptide
  MOD_RES (28)..(29): Xaa is C or S

SEQ ID NO: 80250 - protein, 40 aa, Artificial Sequence; identical to SEQ ID NO: 31412
  Cyclic GFR-binding peptide
  MOD_RES (2)..(4)..(35)..(36): Xaa is C or S

SEQ ID NO: 80251 - protein, 32 aa, Artificial Sequence
  Cyclic GFR-binding peptide
  MOD_RES (2)..(2): Xaa is C or S
GXESVAMGRHKRLYTVVGKDYYLISTASLKTP

SEQ ID NO: 80252 - protein, 31 aa, Artificial Sequence
  Cyclic GFR-binding peptide
  MOD_RES (29)..(30): Xaa is C or S
VMDRHKRLVVNNASDYYLISTASLRTPVXXT

SEQ ID NO: 80253 - protein, 28 aa, Artificial Sequence
  Cyclic GFR-binding peptide
  MOD_RES (1)..(1): Xaa is C or S
XRDVVMGRHKRLIIQQKDNYYLMSTASM

SEQ ID NO: 80254 - protein, 37 aa, Artificial Sequence; identical to SEQ ID NO: 3163
  Cyclic GFR-binding peptide
  MOD_RES (2)..(34)..(35): Xaa is C or S

SEQ ID NO: 80255 - protein, 31 aa, Artificial Sequence; identical to SEQ ID NO: 3166
  Cyclic GFR-binding peptide
  MOD_RES (29)..(30): Xaa is C or S

SEQ ID NO: 80256 - protein, 27 aa, Artificial Sequence
  Cyclic GFR-binding peptide
VVMPIKGYVKPTRGVFYLINIPSLDQP

SEQ ID NO: 80257 - protein, 28 aa, Artificial Sequence
  Cyclic GFR-binding peptide
  MOD_RES (27)..(28): Xaa is C or S
NEYKFKIVNNSSDLYLVSIPELKTPAXX

SEQ ID NO: 80258 - protein, 33 aa, Artificial Sequence; identical to SEQ ID NO: 3168
  Cyclic GFR-binding peptide
  MOD_RES (28)..(29): Xaa is C or S

SEQ ID NO: 80259 - protein, 26 aa, Artificial Sequence
  Cyclic GFR-binding peptide
MEYHYKLVVKDYEDKYLMSIPSLETP

SEQ ID NO: 80260 - protein, 31 aa, Artificial Sequence
  Cyclic GFR-binding peptide
  MOD_RES (1)..(1): Xaa is C or S
XSEVVMDRHKRLVVNNASDYYLISTASLRTP

SEQ ID NO: 80261 - protein, 29 aa, Artificial Sequence
  Cyclic GFR-binding peptide
  MOD_RES (27)..(28): Xaa is C or S
EPIKGYTPVGMDDFYLVNIPSLKTPVXXA

SEQ ID NO: 80262 - protein, 36 aa, Artificial Sequence; identical to SEQ ID NO: 31428
  Cyclic GFR-binding peptide
  MOD_RES (31)..(32): Xaa is C or S

SEQ ID NO: 80263 - protein, 34 aa, Artificial Sequence; identical to SEQ ID NO: 3170
  Cyclic GFR-binding peptide
  MOD_RES (1)..(33)..(34): Xaa is C or S

SEQ ID NO: 80264 - protein, 31 aa, Artificial Sequence; identical to SEQ ID NO: 41480
  Cyclic GFR-binding peptide
  MOD_RES (30)..(31): Xaa is C or S

SEQ ID NO: 80265 - protein, 26 aa, Artificial Sequence
  Cyclic GFR-binding peptide
VVMDPIKGYVVKENEDFYLMNIPSLE

SEQ ID NO: 80266 - protein, 39 aa, Artificial Sequence; identical to SEQ ID NO: 41486
  Cyclic GFR-binding peptide
  MOD_RES (1)..(33)..(34): Xaa is C or S

SEQ ID NO: 80267 - protein, 25 aa, Artificial Sequence
  Cyclic GFR-binding peptide
EVVMDEYKFKVVKENEDLYLMSIPE

SEQ ID NO: 80268 - protein, 31 aa, Artificial Sequence; identical to SEQ ID NO: 31435
  Cyclic GFR-binding peptide
  MOD_RES (1)..(1): Xaa is C or S

SEQ ID NO: 80269 - protein, 27 aa, Artificial Sequence
  Cyclic GFR-binding peptide
  MOD_RES (1)..(1): Xaa is C or S
XSEVVMDEYKFKVVNNASDLYLISIPE

SEQ ID NO: 80270 - protein, 34 aa, Artificial Sequence; identical to SEQ ID NO: 3180
  Cyclic GFR-binding peptide
  MOD_RES (31)..(32): Xaa is C or S

SEQ ID NO: 80271 - protein, 30 aa, Artificial Sequence; identical to SEQ ID NO: 3182
  Cyclic GFR-binding peptide
  MOD_RES (29)..(30): Xaa is C or S

SEQ ID NO: 80272 - protein, 26 aa, Artificial Sequence
  Cyclic GFR-binding peptide
SMGEEYKFKTPVGMDDLYLVSIPELK

SEQ ID NO: 80273 - protein, 27 aa, Artificial Sequence
  Cyclic GFR-binding peptide
MNRYKKLIVNSSDDFYLVSIANLQTPA

SEQ ID NO: 80274 - protein, 26 aa, Artificial Sequence
  Cyclic GFR-binding peptide
MGEPIKGYTPVGMDDFYLVNIPSLKT

SEQ ID NO: 80275 - protein, 32 aa, Artificial Sequence
  Cyclic GFR-binding peptide
  MOD_RES (27)..(28): Xaa is C or S
MPIKGYIKPTKGIFYLINIPSLDQSVXXPSAS

SEQ ID NO: 80276 - protein, 30 aa, Artificial Sequence
  Cyclic GFR-binding peptide
RDVVMGYHYKLIIQQKDNKYLMSIPSMKTP

SEQ ID NO: 80277 - protein, 29 aa, Artificial Sequence
  Cyclic GFR-binding peptide
  MOD_RES (1)..(3): Xaa is C or S
XKXSKVVMPIKGYVKPTRGVFYLINIPSL

SEQ ID NO: 80278 - protein, 26 aa, Artificial Sequence
  Cyclic GFR-binding peptide
EVVMDRYKKLVVNNAADFYLISIANL

SEQ ID NO: 80279 - protein, 26 aa, Artificial Sequence
  Cyclic GFR-binding peptide
  MOD_RES (26)..(26): Xaa is C or S
YHYKLVVKDYEDKYLMSIPSLETPVX

SEQ ID NO: 80280 - protein, 30 aa, Artificial Sequence
  Cyclic GFR-binding peptide
  MOD_RES (29)..(30): Xaa is C or S
AMGRHKRLYTVVGKDYYLISTASLKTPVXX

SEQ ID NO: 80281 - protein, 29 aa, Artificial Sequence
  Cyclic GFR-binding peptide
AVSMGERYKKLTPVGMDDFYLVSIANLKT

SEQ ID NO: 80282 - protein, 38 aa, Artificial Sequence; identical to SEQ ID NO: 41501
  Cyclic GFR-binding peptide
  MOD_RES (2)..(35)..(36): Xaa is C or S

SEQ ID NO: 80283 - protein, 36 aa, Artificial Sequence
  Cyclic GFR-binding peptide
  MOD_RES (1)..(33)..(34): Xaa is C or S
XSEVTMNPIKGYVVNKNEDFYLINIPSMKEPVXXPE

SEQ ID NO: 80284 - protein, 32 aa, Artificial Sequence; identical to SEQ ID NO: 3191
  Cyclic GFR-binding peptide
  MOD_RES (32)..(32): Xaa is C or S

SEQ ID NO: 80285 - protein, 40 aa, Artificial Sequence
  Cyclic GFR-binding peptide
  MOD_RES (2)..(4)..(36)..(37): Xaa is C or S
SXGXRDVVMGYHYKLIIQQKDNKYLMSIPSMKTPTXXPGA

SEQ ID NO: 80286 - protein, 31 aa, Artificial Sequence; identical to SEQ ID NO: 3192
  Cyclic GFR-binding peptide
  MOD_RES (29)..(30): Xaa is C or S

SEQ ID NO: 80287 - protein, 23 aa, Artificial Sequence
  Cyclic GFR-binding peptide
DRYKKLVVKENEDFYLMSIANLE

SEQ ID NO: 80288 - protein, 28 aa, Artificial Sequence
  Cyclic GFR-binding peptide
EVVMDRHKRLVVNNASDYYLISTASLRT

SEQ ID NO: 80289 - protein, 34 aa, Artificial Sequence; identical to SEQ ID NO: 31463
  Cyclic GFR-binding peptide
  MOD_RES (2)..(33)..(34): Xaa is C or S

SEQ ID NO: 80290 - protein, 29 aa, Artificial Sequence
  Cyclic GFR-binding peptide
VVMDEYKFKVVNNAADLYLISIPELRAPV

SEQ ID NO: 80291 - protein, 30 aa, Artificial Sequence; identical to SEQ ID NO: 3199
  Cyclic GFR-binding peptide
  MOD_RES (28)..(29): Xaa is C or S

SEQ ID NO: 80292 - protein, 33 aa, Artificial Sequence; identical to SEQ ID NO: 41509
  Cyclic GFR-binding peptide
  MOD_RES (1)..(33): Xaa is C or S

SEQ ID NO: 80293 - protein, 29 aa, Artificial Sequence
  Cyclic GFR-binding peptide
RDVVMGEYKFKIIQQKDNLYLMSIPEMKT

SEQ ID NO: 80294 - protein, 42 aa, Artificial Sequence; identical to SEQ ID NO: 31468
  Cyclic GFR-binding peptide
  MOD_RES (2)..(4)..(36)..(37): Xaa is C or S

SEQ ID NO: 80295 - protein, 29 aa, Artificial Sequence
  Cyclic GFR-binding peptide
  MOD_RES (1)..(1): Xaa is C or S
XEEVIMEYKFKLLVRGNDLYLMSIPETKV

SEQ ID NO: 80296 - protein, 39 aa, Artificial Sequence; identical to SEQ ID NO: 3202
  Cyclic GFR-binding peptide
  MOD_RES (2)..(4)..(37)..(38): Xaa is C or S

SEQ ID NO: 80297 - protein, 37 aa, Artificial Sequence
  Cyclic GFR-binding peptide
  MOD_RES (1)..(3)..(35)..(36): Xaa is C or S
XAXSEVTMNPIKGYVVNKNEDFYLINIPSMKEPVXXP

SEQ ID NO: 80298 - protein, 32 aa, Artificial Sequence; identical to SEQ ID NO: 3205
  Cyclic GFR-binding peptide
  MOD_RES (30)..(31): Xaa is C or S

SEQ ID NO: 80299 - protein, 30 aa, Artificial Sequence; identical to SEQ ID NO: 31473
  Cyclic GFR-binding peptide

SEQ ID NO: 80300 - protein, 32 aa, Artificial Sequence; identical to SEQ ID NO: 3206
  Cyclic GFR-binding peptide
  MOD_RES (32)..(32): Xaa is C or S

SEQ ID NO: 80301 - protein, 33 aa, Artificial Sequence; identical to SEQ ID NO: 41517
  Cyclic GFR-binding peptide
  MOD_RES (29)..(30): Xaa is C or S

SEQ ID NO: 80302 - protein, 32 aa, Artificial Sequence; identical to SEQ ID NO: 76566
  Cyclic GFR-binding peptide
  MOD_RES (28)..(29): Xaa is C or S

SEQ ID NO: 80303 - protein, 28 aa, Artificial Sequence
  Cyclic GFR-binding peptide
RVVMNPIKGYIVNSSDDFYLVNIPSLKT

SEQ ID NO: 80304 - protein, 26 aa, Artificial Sequence
  Cyclic GFR-binding peptide
SEVVMDPIKGYVVNNASDFYLINIPS

SEQ ID NO: 80305 - protein, 36 aa, Artificial Sequence; identical to SEQ ID NO: 3212
  Cyclic GFR-binding peptide
  MOD_RES (31)..(32): Xaa is C or S

SEQ ID NO: 80306 - protein, 27 aa, Artificial Sequence
  Cyclic GFR-binding peptide
RDVVMGRHKRLIIQQKDNYYLMSTASM

SEQ ID NO: 80307 - protein, 35 aa, Artificial Sequence
  Cyclic GFR-binding peptide
  MOD_RES (30)..(31): Xaa is C or S
EVIMYHYKLLLVRGNDKYLMSIPSTKVPAXXTSPV

SEQ ID NO: 80308 - protein, 26 aa, Artificial Sequence
  Cyclic GFR-binding peptide
MDEYKFKVVKENEDLYLMSIPELETP

SEQ ID NO: 80309 - protein, 25 aa, Artificial Sequence
  Cyclic GFR-binding peptide
RYKKLTPVGMDDFYLVSIANLKTPV

SEQ ID NO: 80310 - protein, 37 aa, Artificial Sequence; identical to SEQ ID NO: 3223
  Cyclic GFR-binding peptide
  MOD_RES (1)..(3)..(34)..(35): Xaa is C or S

SEQ ID NO: 80311 - protein, 39 aa, Artificial Sequence; identical to SEQ ID NO: 31492
  Cyclic GFR-binding peptide
  MOD_RES (2)..(34)..(35): Xaa is C or S

SEQ ID NO: 80312 - protein, 30 aa, Artificial Sequence; identical to SEQ ID NO: 3229
  Cyclic GFR-binding peptide
  MOD_RES (30)..(30): Xaa is C or S

SEQ ID NO: 80313 - protein, 25 aa, Artificial Sequence
  Cyclic GFR-binding peptide
VVMDRHKRLVVKENEDYYLMSTASL

SEQ ID NO: 80314 - protein, 30 aa, Artificial Sequence; identical to SEQ ID NO: 31499
  Cyclic GFR-binding peptide
  MOD_RES (26)..(27): Xaa is C or S

SEQ ID NO: 80315 - protein, 33 aa, Artificial Sequence
  Cyclic GFR-binding peptide
  MOD_RES (2)..(4): Xaa is C or S
RXGXSEVVMDRHKRLVVNNASDYYLISTASLRT

SEQ ID NO: 80316 - protein, 29 aa, Artificial Sequence
  Cyclic GFR-binding peptide
  MOD_RES (1)..(3): Xaa is C or S
XGXEEVIMPIKGYLLVRGNDFYLMNIPST

SEQ ID NO: 80317 - protein, 34 aa, Artificial Sequence; identical to SEQ ID NO: 31500
  Cyclic GFR-binding peptide
  MOD_RES (31)..(32): Xaa is C or S

SEQ ID NO: 80318 - protein, 29 aa, Artificial Sequence
  Cyclic GFR-binding peptide
RDVVMGRHKRLIIQQKDNYYLMSTASMKT

SEQ ID NO: 80319 - protein, 33 aa, Artificial Sequence; identical to SEQ ID NO: 31502
  Cyclic GFR-binding peptide
  MOD_RES (2)..(4): Xaa is C or S

SEQ ID NO: 80320 - protein, 30 aa, Artificial Sequence; identical to SEQ ID NO: 3234
  Cyclic GFR-binding peptide
  MOD_RES (29)..(30): Xaa is C or S

SEQ ID NO: 80321 - protein, 41 aa, Artificial Sequence
  Cyclic GFR-binding peptide
  MOD_RES (1)..(3)..(35)..(36): Xaa is C or S
XGXAEVVMDRHKRLVVNNAADYYLISTASLRAPVXXSAPAA

SEQ ID NO: 80322 - protein, 36 aa, Artificial Sequence; identical to SEQ ID NO: 3235
  Cyclic GFR-binding peptide
  MOD_RES (2)..(34)..(35): Xaa is C or S

SEQ ID NO: 80323 - protein, 38 aa, Artificial Sequence; identical to SEQ ID NO: 3236
  Cyclic GFR-binding peptide
  MOD_RES (2)..(33)..(34): Xaa is C or S

SEQ ID NO: 80324 - protein, 34 aa, Artificial Sequence; identical to SEQ ID NO: 31506
  Cyclic GFR-binding peptide
  MOD_RES (30)..(31): Xaa is C or S

SEQ ID NO: 80325 - protein, 29 aa, Artificial Sequence
  Cyclic GFR-binding peptide
RVIMEYKFKVKPKRGVLYLISIPELAQPV

SEQ ID NO: 80326 - protein, 31 aa, Artificial Sequence; identical to SEQ ID NO: 41551
  Cyclic GFR-binding peptide
  MOD_RES (26)..(27): Xaa is C or S

SEQ ID NO: 80327 - protein, 29 aa, Artificial Sequence
  Cyclic GFR-binding peptide
  MOD_RES (29)..(29): Xaa is C or S
VIMRYKKLVKPKRGVFYLISIANLAQPVX

SEQ ID NO: 80328 - protein, 30 aa, Artificial Sequence; identical to SEQ ID NO: 41553
  Cyclic GFR-binding peptide
  MOD_RES (29)..(30): Xaa is C or S

SEQ ID NO: 80329 - protein, 39 aa, Artificial Sequence; identical to SEQ ID NO: 13800
  Cyclic GFR-binding peptide
  MOD_RES (2)..(4)..(36)..(37): Xaa is C or S

SEQ ID NO: 80330 - protein, 26 aa, Artificial Sequence
  Cyclic GFR-binding peptide
KVIMPIKGYIKPTKGIFYLINIPSLD

SEQ ID NO: 80331 - protein, 24 aa, Artificial Sequence
  Cyclic GFR-binding peptide
MDPIKGYVVNNAADFYLINIPSLR

SEQ ID NO: 80332 - protein, 40 aa, Artificial Sequence; identical to SEQ ID NO: 31513
  Cyclic GFR-binding peptide
  MOD_RES (2)..(4)..(36)..(37): Xaa is C or S

SEQ ID NO: 80333 - protein, 37 aa, Artificial Sequence; identical to SEQ ID NO: 3246
  Cyclic GFR-binding peptide
  MOD_RES (1)..(3)..(34)..(35): Xaa is C or S

SEQ ID NO: 80334 - protein, 37 aa, Artificial Sequence; identical to SEQ ID NO: 3247
  Cyclic GFR-binding peptide
  MOD_RES (1)..(3)..(35)..(36): Xaa is C or S

SEQ ID NO: 80335 - protein, 35 aa, Artificial Sequence
  Cyclic GFR-binding peptide
  MOD_RES (2)..(4): Xaa is C or S
RXGXSEVVMDEYKFKVVNNASDLYLISIPELRTPV

SEQ ID NO: 80336 - protein, 24 aa, Artificial Sequence
  Cyclic GFR-binding peptide
ERYKKLVVKDYEDFYLMSIANLET

SEQ ID NO: 80337 - protein, 27 aa, Artificial Sequence
  Cyclic GFR-binding peptide
AKVVMNPIKGYIVNNSSDFYLVNIPSL

SEQ ID NO: 80338 - protein, 38 aa, Artificial Sequence; identical to SEQ ID NO: 41565
  Cyclic GFR-binding peptide
  MOD_RES (1)..(3)..(35): Xaa is C or S

SEQ ID NO: 80339 - protein, 38 aa, Artificial Sequence; identical to SEQ ID NO: 41568
  Cyclic GFR-binding peptide
  MOD_RES (32)..(33): Xaa is C or S

SEQ ID NO: 80340 - protein, 33 aa, Artificial Sequence; identical to SEQ ID NO: 41569
  Cyclic GFR-binding peptide
  MOD_RES (28)..(29): Xaa is C or S

SEQ ID NO: 80341 - protein, 31 aa, Artificial Sequence; identical to SEQ ID NO: 41573
  Cyclic GFR-binding peptide
  MOD_RES (31)..(31): Xaa is C or S

SEQ ID NO: 80342 - protein, 38 aa, Artificial Sequence; identical to SEQ ID NO: 41574
  Cyclic GFR-binding peptide
  MOD_RES (1)..(33)..(34): Xaa is C or S

SEQ ID NO: 80343 - protein, 41 aa, Artificial Sequence; identical to SEQ ID NO: 31528
  Cyclic GFR-binding peptide
  MOD_RES (2)..(4)..(36)..(37): Xaa is C or S

SEQ ID NO: 80344 - protein, 37 aa, Artificial Sequence
  Cyclic GFR-binding peptide
  MOD_RES (2)..(4)..(36)..(37): Xaa is C or S
RXAXSEVTMNPIKGYVVNKNEDFYLINIPSMKEPVXX

SEQ ID NO: 80345 - protein, 38 aa, Artificial Sequence; identical to SEQ ID NO: 13816
  Cyclic GFR-binding peptide
  MOD_RES (2)..(4)..(36)..(37): Xaa is C or S

SEQ ID NO: 80346 - protein, 25 aa, Artificial Sequence
  Cyclic GFR-binding peptide
EVVMDYHYKLVVKENEDKYLMSIPS

SEQ ID NO: 80347 - protein, 31 aa, Artificial Sequence; identical to SEQ ID NO: 41580
  Cyclic GFR-binding peptide
  MOD_RES (1)..(3): Xaa is C or S

SEQ ID NO: 80348 - protein, 32 aa, Artificial Sequence
  Cyclic GFR-binding peptide
  MOD_RES (28)..(29): Xaa is C or S
MNRYKKLVVNKNEDFYLISIANMKEPVXXPEP

SEQ ID NO: 80349 - protein, 29 aa, Artificial Sequence
  Cyclic GFR-binding peptide
  MOD_RES (28)..(29): Xaa is C or S
MNRYKKLIVNSSDDFYLVSIANLKTPAXX

SEQ ID NO: 80350 - protein, 26 aa, Artificial Sequence
  Cyclic GFR-binding peptide
IMEYKFKIKPTKGILYLISIPELDQS

SEQ ID NO: 80351 - protein, 28 aa, Artificial Sequence
  Cyclic GFR-binding peptide
  MOD_RES (1)..(1): Xaa is C or S
XARVVMNEYKFKIVNSSDDLYLVSIPEL

SEQ ID NO: 80352 - protein, 31 aa, Artificial Sequence; identical to SEQ ID NO: 41585
  Cyclic GFR-binding peptide
  MOD_RES (31)..(31): Xaa is C or S

SEQ ID NO: 80353 - protein, 32 aa, Artificial Sequence; identical to SEQ ID NO: 3265
  Cyclic GFR-binding peptide
  MOD_RES (2)..(2): Xaa is C or S

SEQ ID NO: 80354 - protein, 35 aa, Artificial Sequence
  Cyclic GFR-binding peptide
  MOD_RES (29)..(30): Xaa is C or S
TMNEYKFKVVNKNEDLYLISIPEMKEPVXXPEPIG

SEQ ID NO: 80355 - protein, 37 aa, Artificial Sequence; identical to SEQ ID NO: 31541
  Cyclic GFR-binding peptide
  MOD_RES (2)..(4)..(36)..(37): Xaa is C or S

SEQ ID NO: 80356 - protein, 30 aa, Artificial Sequence; identical to SEQ ID NO: 3268
  Cyclic GFR-binding peptide
  MOD_RES (1)..(1): Xaa is C or S

SEQ ID NO: 80357 - protein, 39 aa, Artificial Sequence; identical to SEQ ID NO: 31543
  Cyclic GFR-binding peptide
  MOD_RES (1)..(3)..(35)..(36): Xaa is C or S

SEQ ID NO: 80358 - protein, 33 aa, Artificial Sequence; identical to SEQ ID NO: 3269
  Cyclic GFR-binding peptide
  MOD_RES (2)..(4): Xaa is C or S

SEQ ID NO: 80359 - protein, 31 aa, Artificial Sequence
  Cyclic GFR-binding peptide
  MOD_RES (29)..(30): Xaa is C or S
TMNRHKRLVVNKNEDYYLISTASMKEPVXXP

SEQ ID NO: 80360 - protein, 25 aa, Artificial Sequence
  Cyclic GFR-binding peptide
TMNPIKGYVVNKNEDFYLINIPSMK

SEQ ID NO: 80361 - protein, 35 aa, Artificial Sequence; identical to SEQ ID NO: 3273
  Cyclic GFR-binding peptide
  MOD_RES (30)..(31): Xaa is C or S

SEQ ID NO: 80362 - protein, 23 aa, Artificial Sequence
  Cyclic GFR-binding peptide
VMNEYKFKIVNSSDDLYLVSIPE

SEQ ID NO: 80363 - protein, 37 aa, Artificial Sequence; identical to SEQ ID NO: 3274
  Cyclic GFR-binding peptide
  MOD_RES (1)..(3)..(36)..(37): Xaa is C or S

SEQ ID NO: 80364 - protein, 28 aa, Artificial Sequence
  Cyclic GFR-binding peptide
  MOD_RES (2)..(2): Xaa is C or S
GXAEVVMDRHKRLVVNNAADYYLISTAS

SEQ ID NO: 80365 - protein, 29 aa, Artificial Sequence
  Cyclic GFR-binding peptide
  MOD_RES (28)..(29): Xaa is C or S
MDYHYKLVVNNAADKYLISIPSLRAPVXX

SEQ ID NO: 80366 - protein, 32 aa, Artificial Sequence; identical to SEQ ID NO: 41604
  Cyclic GFR-binding peptide
  MOD_RES (2)..(4): Xaa is C or S

SEQ ID NO: 80367 - protein, 34 aa, Artificial Sequence; identical to SEQ ID NO: 41605
  Cyclic GFR-binding peptide
  MOD_RES (30)..(31): Xaa is C or S

SEQ ID NO: 80368 - protein, 35 aa, Artificial Sequence; identical to SEQ ID NO: 31549
  Cyclic GFR-binding peptide
  MOD_RES (29)..(30): Xaa is C or S

SEQ ID NO: 80369 - protein, 28 aa, Artificial Sequence
  Cyclic GFR-binding peptide
EVVMDEYKFKVVKENEDLYLMSIPELET

SEQ ID NO: 80370 - protein, 28 aa, Artificial Sequence
  Cyclic GFR-binding peptide
  MOD_RES (26)..(27): Xaa is C or S
PIKGYVVKENEDFYLMNIPSLETPVXXA

SEQ ID NO: 80371 - protein, 36 aa, Artificial Sequence; identical to SEQ ID NO: 41610
  Cyclic GFR-binding peptide
  MOD_RES (32)..(33): Xaa is C or S

SEQ ID NO: 80372 - protein, 37 aa, Artificial Sequence; identical to SEQ ID NO: 31556
  Cyclic GFR-binding peptide
  MOD_RES (2)..(34)..(35): Xaa is C or S

SEQ ID NO: 80373 - protein, 34 aa, Artificial Sequence; identical to SEQ ID NO: 3283
  Cyclic GFR-binding peptide
  MOD_RES (29)..(30): Xaa is C or S

SEQ ID NO: 80374 - protein, 38 aa, Artificial Sequence; identical to SEQ ID NO: 3284
  Cyclic GFR-binding peptide
  MOD_RES (2)..(4)..(36)..(37): Xaa is C or S

SEQ ID NO: 80375 - protein, 29 aa, Artificial Sequence
  Cyclic GFR-binding peptide
  MOD_RES (1)..(1): Xaa is C or S
XAEVVMDPIKGYVVNNAADFYLINIPSLR

SEQ ID NO: 80376 - protein, 37 aa, Artificial Sequence
  Cyclic GFR-binding peptide
  MOD_RES (1)..(33)..(34): Xaa is C or S
XRDVVMGRHKRLIIQQKDNYYLMSTASMKTPTXXPGA

SEQ ID NO: 80377 - protein, 29 aa, Artificial Sequence
  Cyclic GFR-binding peptide
  MOD_RES (1)..(3): Xaa is C or S
XGXEEVIMRYKKLLLVRGNDFYLMSIANT

SEQ ID NO: 80378 - protein, 24 aa, Artificial Sequence
  Cyclic GFR-binding peptide
MEYKFKLLVRGNDLYLMSIPETKV

SEQ ID NO: 80379 - protein, 34 aa, Artificial Sequence; identical to SEQ ID NO: 3286
  Cyclic GFR-binding peptide
  MOD_RES (31)..(31): Xaa is C or S

SEQ ID NO: 80380 - protein, 33 aa, Artificial Sequence; identical to SEQ ID NO: 31561
  Cyclic GFR-binding peptide
  MOD_RES (29)..(29): Xaa is C or S

SEQ ID NO: 80381 - protein, 37 aa, Artificial Sequence; identical to SEQ ID NO: 31563
  Cyclic GFR-binding peptide
  MOD_RES (31)..(32): Xaa is C or S

SEQ ID NO: 80382 - protein, 32 aa, Artificial Sequence; identical to SEQ ID NO: 3289
  Cyclic GFR-binding peptide
  MOD_RES (2)..(2): Xaa is C or S

SEQ ID NO: 80383 - protein, 31 aa, Artificial Sequence
  Cyclic GFR-binding peptide
  MOD_RES (1)..(1): Xaa is C or S
XSEVTMNPIKGYVVNKNEDFYLINIPSMKEP

SEQ ID NO: 80384 - protein, 27 aa, Artificial Sequence
  Cyclic GFR-binding peptide
ARVVMNRYKKLIVNSSDDFYLVSIANL

SEQ ID NO: 80385 - protein, 35 aa, Artificial Sequence; identical to SEQ ID NO: 3294
  Cyclic GFR-binding peptide
  MOD_RES (1)..(32)..(33): Xaa is C or S

SEQ ID NO: 80386 - protein, 28 aa, Artificial Sequence
  Cyclic GFR-binding peptide
EVVMDRYKKLVVNNAADFYLISIANLRA

SEQ ID NO: 80387 - protein, 21 aa, Artificial Sequence
  Cyclic GFR-binding peptide
PIKGYYTVVGKDFYLINIPSL

SEQ ID NO: 80388 - protein, 31 aa, Artificial Sequence
  Cyclic GFR-binding peptide
  MOD_RES (28)..(29): Xaa is C or S
IMYHYKLLLVRGNDKYLMSIPSTKVPAXXTS

SEQ ID NO: 80389 - protein, 35 aa, Artificial Sequence
  Cyclic GFR-binding peptide
  MOD_RES (1)..(33)..(34): Xaa is C or S
XRDVVMGYHYKLIIQQKDNKYLMSIPSMKTPTXXP

SEQ ID NO: 80390 - protein, 35 aa, Artificial Sequence; identical to SEQ ID NO: 76627
  Cyclic GFR-binding peptide
  MOD_RES (1)..(32)..(33): Xaa is C or S

SEQ ID NO: 80391 - protein, 33 aa, Artificial Sequence; identical to SEQ ID NO: 3300
  Cyclic GFR-binding peptide
  MOD_RES (27)..(28): Xaa is C or S

SEQ ID NO: 80392 - protein, 36 aa, Artificial Sequence
  Cyclic GFR-binding peptide
  MOD_RES (32)..(33): Xaa is C or S
RDVVMGRHKRLIIQQKDNYYLMSTASMKTPTXXPGA

SEQ ID NO: 80393 - protein, 32 aa, Artificial Sequence; identical to SEQ ID NO: 31574
  Cyclic GFR-binding peptide
  MOD_RES (1)..(32): Xaa is C or S

SEQ ID NO: 80394 - protein, 29 aa, Artificial Sequence
  Cyclic GFR-binding peptide
AKVVMNPIKGYIVNNSSDFYLVNIPSLKT

SEQ ID NO: 80395 - protein, 29 aa, Artificial Sequence
  Cyclic GFR-binding peptide
  MOD_RES (28)..(29): Xaa is C or S
GERHKRLTPVGMDDYYLVSTASLKTPVXX

SEQ ID NO: 80396 - protein, 26 aa, Artificial Sequence
  Cyclic GFR-binding peptide
VSMGERYKKLTPVGMDDFYLVSIANL

SEQ ID NO: 80397 - protein, 37 aa, Artificial Sequence; identical to SEQ ID NO: 3309
  Cyclic GFR-binding peptide
  MOD_RES (1)..(32)..(33): Xaa is C or S

SEQ ID NO: 80398 - protein, 22 aa, Artificial Sequence
  Cyclic GFR-binding peptide
ERYKKLVVKDYEDFYLMSIANL

SEQ ID NO: 80399 - protein, 25 aa, Artificial Sequence
  Cyclic GFR-binding peptide
VVMNRYKKLIVNNSSDFYLVSIANL

SEQ ID NO: 80400 - protein, 27 aa, Artificial Sequence
  Cyclic GFR-binding peptide
MDYHYKLVVNNAADKYLISIPSLRAPV

SEQ ID NO: 80401 - protein, 38 aa, Artificial Sequence; identical to SEQ ID NO: 31582
  Cyclic GFR-binding peptide
  MOD_RES (32)..(33): Xaa is C or S

SEQ ID NO: 80402 - protein, 41 aa, Artificial Sequence
  Cyclic GFR-binding peptide
  MOD_RES (1)..(3)..(35)..(36): Xaa is C or S
XGXSEVVMDRHKRLVVNNASDYYLISTASLRTPVXXTPPTS

SEQ ID NO: 80403 - protein, 31 aa, Artificial Sequence; identical to SEQ ID NO: 76635
  Cyclic GFR-binding peptide
  MOD_RES (1)..(3): Xaa is C or S

SEQ ID NO: 80404 - protein, 33 aa, Artificial Sequence; identical to SEQ ID NO: 31585
  Cyclic GFR-binding peptide
  MOD_RES (2)..(2): Xaa is C or S

SEQ ID NO: 80405 - protein, 31 aa, Artificial Sequence; identical to SEQ ID NO: 31587
  Cyclic GFR-binding peptide
  MOD_RES (2)..(2): Xaa is C or S

SEQ ID NO: 80406 - protein, 32 aa, Artificial Sequence; identical to SEQ ID NO: 41647
  Cyclic GFR-binding peptide
  MOD_RES (26)..(27): Xaa is C or S

SEQ ID NO: 80407 - protein, 27 aa, Artificial Sequence
  Cyclic GFR-binding peptide
  MOD_RES (2)..(2): Xaa is C or S
KXSRVIMRHKRLVKPKRGVYYLISTAS

SEQ ID NO: 80408 - protein, 30 aa, Artificial Sequence; identical to SEQ ID NO: 3313
  Cyclic GFR-binding peptide
  MOD_RES (28)..(29): Xaa is C or S

SEQ ID NO: 80409 - protein, 27 aa, Artificial Sequence
  Cyclic GFR-binding peptide
  MOD_RES (2)..(2): Xaa is C or S
KXSRVIMEYKFKVKPKRGVLYLISIPE

SEQ ID NO: 80410 - protein, 28 aa, Artificial Sequence
  Cyclic GFR-binding peptide
EAVSMGERYKKLTPVGMDDFYLVSIANL

SEQ ID NO: 80411 - protein, 21 aa, Artificial Sequence
  Cyclic GFR-binding peptide
MPIKGYIKPTKGIFYLINIPS

SEQ ID NO: 80412 - protein, 27 aa, Artificial Sequence
  Cyclic GFR-binding peptide
SRVVMNRYKKLIVNSSDDFYLVSIANL

SEQ ID NO: 80413 - protein, 26 aa, Artificial Sequence
  Cyclic GFR-binding peptide
DEYKFKVVKENEDLYLMSIPELETPV

SEQ ID NO: 80414 - protein, 27 aa, Artificial Sequence
  Cyclic GFR-binding peptide
  MOD_RES (27)..(27): Xaa is C or S
DYHYKLVVNNASDKYLISIPSLRTPVX

SEQ ID NO: 80415 - protein, 23 aa, Artificial Sequence
  Cyclic GFR-binding peptide
PIKGYVVNNAADFYLINIPSLRA

SEQ ID NO: 80416 - protein, 23 aa, Artificial Sequence
  Cyclic GFR-binding peptide
VIMRYKKLVKPKRGVFYLISIAN

SEQ ID NO: 80417 - protein, 33 aa, Artificial Sequence
  Cyclic GFR-binding peptide
  MOD_RES (30)..(31): Xaa is C or S
KVIMPIKGYIKPTKGIFYLINIPSLDQSVXXPS

SEQ ID NO: 80418 - protein, 33 aa, Artificial Sequence; identical to SEQ ID NO: 41658
  Cyclic GFR-binding peptide
  MOD_RES (27)..(28): Xaa is C or S

SEQ ID NO: 80419 - protein, 35 aa, Artificial Sequence; identical to SEQ ID NO: 3323
  Cyclic GFR-binding peptide
  MOD_RES (32)..(32): Xaa is C or S

SEQ ID NO: 80420 - protein, 34 aa, Artificial Sequence; identical to SEQ ID NO: 31605
  Cyclic GFR-binding peptide
  MOD_RES (28)..(29): Xaa is C or S

SEQ ID NO: 80421 - protein, 28 aa, Artificial Sequence
  Cyclic GFR-binding peptide
EVVMDYHYKLVVKENEDKYLMSIPSLET

SEQ ID NO: 80422 - protein, 34 aa, Artificial Sequence
  Cyclic GFR-binding peptide
  MOD_RES (29)..(30): Xaa is C or S
TMNRHKRLVVNKNEDYYLISTASMKEPVXXPEPI

SEQ ID NO: 80423 - protein, 28 aa, Artificial Sequence
  Cyclic GFR-binding peptide
  MOD_RES (1)..(1): Xaa is C or S
XSKVIMRYKKLIKPTKGIFYLISIANLD

SEQ ID NO: 80424 - protein, 27 aa, Artificial Sequence
  Cyclic GFR-binding peptide
VMDYHYKLVVKENEDKYLMSIPSLETP

SEQ ID NO: 80425 - protein, 38 aa, Artificial Sequence; identical to SEQ ID NO: 3337
  Cyclic GFR-binding peptide
  MOD_RES (2)..(35)..(36): Xaa is C or S

SEQ ID NO: 80426 - protein, 30 aa, Artificial Sequence
  Cyclic GFR-binding peptide
  MOD_RES (27)..(28): Xaa is C or S
MPIKGYVKPKRGVFYLINIPSLAQPVXXPA

SEQ ID NO: 80427 - protein, 28 aa, Artificial Sequence
  Cyclic GFR-binding peptide
  MOD_RES (27)..(28): Xaa is C or S
DRYKKLVVNNAADFYLISIANLRAPVXX

SEQ ID NO: 80428 - protein, 26 aa, Artificial Sequence
  Cyclic GFR-binding peptide
GERYKKLTPVGMDDFYLVSIANLKTP

SEQ ID NO: 80429 - protein, 29 aa, Artificial Sequence
  Cyclic GFR-binding peptide
  MOD_RES (1)..(3): Xaa is C or S
XGXGEVVMEPIKGYVVKDYEDFYLMNIPS

SEQ ID NO: 80430 - protein, 32 aa, Artificial Sequence
  Cyclic GFR-binding peptide
  MOD_RES (1)..(1): Xaa is C or S
XSEVTMNEYKFKVVNKNEDLYLISIPEMKEPV

SEQ ID NO: 80431 - protein, 33 aa, Artificial Sequence
  Cyclic GFR-binding peptide
  MOD_RES (30)..(31): Xaa is C or S
VVMDYHYKLVVNNASDKYLISIPSLRTPVXXTP

SEQ ID NO: 80432 - protein, 37 aa, Artificial Sequence; identical to SEQ ID NO: 3348
  Cyclic GFR-binding peptide
  MOD_RES (1)..(33)..(34): Xaa is C or S

SEQ ID NO: 80433 - protein, 36 aa, Artificial Sequence
  Cyclic GFR-binding peptide
  MOD_RES (1)..(3)..(35)..(36): Xaa is C or S
XGXSEVVMDEYKFKVVNNASDLYLISIPELRTPVXX

SEQ ID NO: 80434 - protein, 31 aa, Artificial Sequence; identical to SEQ ID NO: 41687
  Cyclic GFR-binding peptide

SEQ ID NO: 80435 - protein, 34 aa, Artificial Sequence
  Cyclic GFR-binding peptide
  MOD_RES (29)..(30): Xaa is C or S
VMDRHKRLVVNNAADYYLISTASLRAPVXXSAPA

SEQ ID NO: 80436 - protein, 26 aa, Artificial Sequence
  Cyclic GFR-binding peptide
VVMDPIKGYVVNNASDFYLINIPSLR

SEQ ID NO: 80437 - protein, 33 aa, Artificial Sequence; identical to SEQ ID NO: 41692
  Cyclic GFR-binding peptide
  MOD_RES (27)..(28): Xaa is C or S

SEQ ID NO: 80438 - protein, 26 aa, Artificial Sequence
  Cyclic GFR-binding peptide
  MOD_RES (26)..(26): Xaa is C or S
RYKKLVVNNASDFYLISIANLRTPVX

SEQ ID NO: 80439 - protein, 27 aa, Artificial Sequence
  Cyclic GFR-binding peptide
VIMEYKFKVKPKRGVLYLISIPELAQP

SEQ ID NO: 80440 - protein, 32 aa, Artificial Sequence; identical to SEQ ID NO: 41694
  Cyclic GFR-binding peptide
  MOD_RES (29)..(30): Xaa is C or S

SEQ ID NO: 80441 - protein, 34 aa, Artificial Sequence; identical to SEQ ID NO: 3354
  Cyclic GFR-binding peptide
  MOD_RES (2)..(4): Xaa is C or S

SEQ ID NO: 80442 - protein, 36 aa, Artificial Sequence; identical to SEQ ID NO: 3355
  Cyclic GFR-binding peptide
  MOD_RES (1)..(33)..(34): Xaa is C or S

SEQ ID NO: 80443 - protein, 23 aa, Artificial Sequence
  Cyclic GFR-binding peptide
GPIKGYYTVVGKDFYLINIPSLK

SEQ ID NO: 80444 - protein, 27 aa, Artificial Sequence
  Cyclic GFR-binding peptide
SVAMGRHKRLYTVVGKDYYLISTASLK

SEQ ID NO: 80445 - protein, 37 aa, Artificial Sequence; identical to SEQ ID NO: 3362
  Cyclic GFR-binding peptide
  MOD_RES (2)..(4)..(36)..(37): Xaa is C or S

SEQ ID NO: 80446 - protein, 31 aa, Artificial Sequence
  Cyclic GFR-binding peptide
  MOD_RES (28)..(29): Xaa is C or S
MDEYKFKVVNNASDLYLISIPELRTPVXXTP

SEQ ID NO: 80447 - protein, 28 aa, Artificial Sequence
  Cyclic GFR-binding peptide
  MOD_RES (28)..(28): Xaa is C or S
MNRYKKLVVNKNEDFYLISIANMKEPVX

SEQ ID NO: 80448 - protein, 37 aa, Artificial Sequence
  Cyclic GFR-binding peptide
  MOD_RES (31)..(32): Xaa is C or S
EVTMNRYKKLVVNKNEDFYLISIANMKEPVXXPEPIG

SEQ ID NO: 80449 - protein, 31 aa, Artificial Sequence; identical to SEQ ID NO: 31646
  Cyclic GFR-binding peptide
  MOD_RES (29)..(30): Xaa is C or S

SEQ ID NO: 80450 - protein, 42 aa, Artificial Sequence; identical to SEQ ID NO: 3375
  Cyclic GFR-binding peptide
  MOD_RES (2)..(4)..(36)..(37): Xaa is C or S

SEQ ID NO: 80451 - protein, 38 aa, Artificial Sequence; identical to SEQ ID NO: 3376
  Cyclic GFR-binding peptide
  MOD_RES (2)..(34)..(35): Xaa is C or S

SEQ ID NO: 80452 - protein, 39 aa, Artificial Sequence; identical to SEQ ID NO: 3377
  Cyclic GFR-binding peptide
  MOD_RES (2)..(34)..(35): Xaa is C or S

SEQ ID NO: 80453 - protein, 35 aa, Artificial Sequence
  Cyclic GFR-binding peptide
  MOD_RES (1)..(3)..(34)..(35): Xaa is C or S
XKXSKVIMPIKGYIKPTKGIFYLINIPSLDQSVXX

SEQ ID NO: 80454 - protein, 39 aa, Artificial Sequence
  Cyclic GFR-binding peptide
  MOD_RES (2)..(4)..(35)..(36): Xaa is C or S
SXKXSKVIMPIKGYIKPTKGIFYLINIPSLDQSVXXPSA

SEQ ID NO: 80455 - protein, 28 aa, Artificial Sequence
  Cyclic GFR-binding peptide
  MOD_RES (26)..(27): Xaa is C or S
EYKFKVVKDYEDLYLMSIPELETPVXXA

SEQ ID NO: 80456 - protein, 32 aa, Artificial Sequence
  Cyclic GFR-binding peptide
  MOD_RES (1)..(3): Xaa is C or S
XAXSEVTMNEYKFKVVNKNEDLYLISIPEMKE

SEQ ID NO: 80457 - protein, 35 aa, Artificial Sequence; identical to SEQ ID NO: 3381
  Cyclic GFR-binding peptide
  MOD_RES (1)..(32)..(33): Xaa is C or S

SEQ ID NO: 80458 - protein, 32 aa, Artificial Sequence; identical to SEQ ID NO: 41717
  Cyclic GFR-binding peptide
  MOD_RES (1)..(3): Xaa is C or S

SEQ ID NO: 80459 - protein, 29 aa, Artificial Sequence
  Cyclic GFR-binding peptide
  MOD_RES (26)..(27): Xaa is C or S
EYKFKVVNNASDLYLISIPELRTPVXXTP

SEQ ID NO: 80460 - protein, 32 aa, Artificial Sequence
  Cyclic GFR-binding peptide
  MOD_RES (2)..(2): Xaa is C or S
AXSEVTMNRYKKLVVNKNEDFYLISIANMKEP

SEQ ID NO: 80461 - protein, 35 aa, Artificial Sequence; identical to SEQ ID NO: 31659
  Cyclic GFR-binding peptide
  MOD_RES (1)..(3)..(35): Xaa is C or S

SEQ ID NO: 80462 - protein, 28 aa, Artificial Sequence
  Cyclic GFR-binding peptide
SEVTMNRYKKLVVNKNEDFYLISIANMK

SEQ ID NO: 80463 - protein, 36 aa, Artificial Sequence
  Cyclic GFR-binding peptide
  MOD_RES (30)..(31): Xaa is C or S
KVIMPIKGYIKPTKGIFYLINIPSLDQSVXXPSASA

SEQ ID NO: 80464 - protein, 25 aa, Artificial Sequence
  Cyclic GFR-binding peptide
VAMGRHKRLYTVVGKDYYLISTASL

SEQ ID NO: 80465 - protein, 22 aa, Artificial Sequence
  Cyclic GFR-binding peptide
MDPIKGYVVNNAADFYLINIPS

SEQ ID NO: 80466 - protein, 36 aa, Artificial Sequence
  Cyclic GFR-binding peptide
  MOD_RES (30)..(31): Xaa is C or S
VVMNRHKRLIVNSSDDYYLVSTASLKTPAXXPKPVH

SEQ ID NO: 80467 - protein, 34 aa, Artificial Sequence; identical to SEQ ID NO: 31667
  Cyclic GFR-binding peptide
  MOD_RES (1)..(3)..(34): Xaa is C or S

SEQ ID NO: 80468 - protein, 35 aa, Artificial Sequence; identical to SEQ ID NO: 3392
  Cyclic GFR-binding peptide
  MOD_RES (1)..(3)..(35): Xaa is C or S

SEQ ID NO: 80469 - protein, 32 aa, Artificial Sequence; identical to SEQ ID NO: 3393
  Cyclic GFR-binding peptide
  MOD_RES (2)..(2): Xaa is C or S

SEQ ID NO: 80470 - protein, 34 aa, Artificial Sequence; identical to SEQ ID NO: 76676
  Cyclic GFR-binding peptide
  MOD_RES (29)..(30): Xaa is C or S

SEQ ID NO: 80471 - protein, 32 aa, Artificial Sequence
  Cyclic GFR-binding peptide
  MOD_RES (1)..(3): Xaa is C or S
XGXSEVVMDYHYKLVVNNASDKYLISIPSLRT

SEQ ID NO: 80472 - protein, 31 aa, Artificial Sequence; identical to SEQ ID NO: 41734
  Cyclic GFR-binding peptide
  MOD_RES (27)..(28): Xaa is C or S

SEQ ID NO: 80473 - protein, 36 aa, Artificial Sequence; identical to SEQ ID NO: 31675
  Cyclic GFR-binding peptide
  MOD_RES (31)..(32): Xaa is C or S

SEQ ID NO: 80474 - protein, 28 aa, Artificial Sequence
  Cyclic GFR-binding peptide
  MOD_RES (27)..(28): Xaa is C or S
DPIKGYVVNNASDFYLINIPSLRTPVXX

SEQ ID NO: 80475 - protein, 29 aa, Artificial Sequence
  Cyclic GFR-binding peptide
  MOD_RES (28)..(29): Xaa is C or S
MNRYKKLIVNSSDDFYLVSIANLQTPAXX

SEQ ID NO: 80476 - protein, 36 aa, Artificial Sequence; identical to SEQ ID NO: 31680
  Cyclic GFR-binding peptide
  MOD_RES (30)..(31): Xaa is C or S

SEQ ID NO: 80477 - protein, 35 aa, Artificial Sequence; identical to SEQ ID NO: 3403
  Cyclic GFR-binding peptide
  MOD_RES (1)..(33)..(34): Xaa is C or S

SEQ ID NO: 80478 - protein, 32 aa, Artificial Sequence; identical to SEQ ID NO: 31689
  Cyclic GFR-binding peptide
  MOD_RES (28)..(29): Xaa is C or S

SEQ ID NO: 80479 - protein, 36 aa, Artificial Sequence; identical to SEQ ID NO: 3410
  Cyclic GFR-binding peptide
  MOD_RES (30)..(31): Xaa is C or S

SEQ ID NO: 80480 - protein, 28 aa, Artificial Sequence
  Cyclic GFR-binding peptide
VMDYHYKLVVNNAADKYLISIPSLRAPV

SEQ ID NO: 80481 - protein, 27 aa, Artificial Sequence
  Cyclic GFR-binding peptide
MERYKKLVVKDYEDFYLMSIANLETPV

SEQ ID NO: 80482 - protein, 37 aa, Artificial Sequence; identical to SEQ ID NO: 3415
  Cyclic GFR-binding peptide
  MOD_RES (2)..(4)..(36)..(37): Xaa is C or S

SEQ ID NO: 80483 - protein, 40 aa, Artificial Sequence
  Cyclic GFR-binding peptide
  MOD_RES (2)..(34)..(35): Xaa is C or S
GXSRVVMNEYKFKIVNSSDDLYLVSIPELKTPAXXPKPVH

SEQ ID NO: 80484 - protein, 30 aa, Artificial Sequence
  Cyclic GFR-binding peptide
  MOD_RES (1)..(3): Xaa is C or S
XKXSKVIMPIKGYIKPTKGIFYLINIPSLD

SEQ ID NO: 80485 - protein, 34 aa, Artificial Sequence
  Cyclic GFR-binding peptide
  MOD_RES (28)..(29): Xaa is C or S
MDYHYKLVVNNASDKYLISIPSLRTPVXXTPPTS

SEQ ID NO: 80486 - protein, 37 aa, Artificial Sequence; identical to SEQ ID NO: 3419
  Cyclic GFR-binding peptide
  MOD_RES (1)..(32)..(33): Xaa is C or S

SEQ ID NO: 80487 - protein, 30 aa, Artificial Sequence; identical to SEQ ID NO: 3420
  Cyclic GFR-binding peptide
  MOD_RES (27)..(28): Xaa is C or S

SEQ ID NO: 80488 - protein, 30 aa, Artificial Sequence; identical to SEQ ID NO: 3422
  Cyclic GFR-binding peptide

SEQ ID NO: 80489 - protein, 32 aa, Artificial Sequence
  Cyclic GFR-binding peptide
  MOD_RES (29)..(30): Xaa is C or S
VIMPIKGYIKPTKGIFYLINIPSLDQSVXXPS

SEQ ID NO: 80490 - protein, 34 aa, Artificial Sequence; identical to SEQ ID NO: 3426
  Cyclic GFR-binding peptide
  MOD_RES (33)..(34): Xaa is C or S

SEQ ID NO: 80491 - protein, 31 aa, Artificial Sequence
  Cyclic GFR-binding peptide
  MOD_RES (2)..(4): Xaa is C or S
SXGXRDVVMGYHYKLIIQQKDNKYLMSIPSM

SEQ ID NO: 80492 - protein, 30 aa, Artificial Sequence; identical to SEQ ID NO: 3429
  Cyclic GFR-binding peptide
  MOD_RES (28)..(29): Xaa is C or S

SEQ ID NO: 80493 - protein, 34 aa, Artificial Sequence; identical to SEQ ID NO: 31704
  Cyclic GFR-binding peptide
  MOD_RES (1)..(3)..(34): Xaa is C or S

SEQ ID NO: 80494 - protein, 30 aa, Artificial Sequence
  Cyclic GFR-binding peptide
  MOD_RES (28)..(29): Xaa is C or S
IMYHYKLLLVRGNDKYLMSIPSTKVPAXXT

SEQ ID NO: 80495 - protein, 27 aa, Artificial Sequence
  Cyclic GFR-binding peptide
  MOD_RES (27)..(27): Xaa is C or S
NRHKRLIVNSSDDYYLVSTASLQTPAX

SEQ ID NO: 80496 - protein, 27 aa, Artificial Sequence
  Cyclic GFR-binding peptide
  MOD_RES (27)..(27): Xaa is C or S
MRHKRLVKPTRGVYYLISTASLDQPVX

SEQ ID NO: 80497 - protein, 29 aa, Artificial Sequence
  Cyclic GFR-binding peptide
  MOD_RES (26)..(27): Xaa is C or S
YHYKLVVNNASDKYLISIPSLRTPVXXTP

SEQ ID NO: 80498 - protein, 34 aa, Artificial Sequence; identical to SEQ ID NO: 41755
  Cyclic GFR-binding peptide
  MOD_RES (29)..(30): Xaa is C or S

SEQ ID NO: 80499 - protein, 28 aa, Artificial Sequence
  Cyclic GFR-binding peptide
  MOD_RES (2)..(2): Xaa is C or S
GXAKVVMNYHYKLIVNNSSDKYLVSIPS

SEQ ID NO: 80500 - protein, 28 aa, Artificial Sequence
  Cyclic GFR-binding peptide
SRVVMNRHKRLIVNSSDDYYLVSTASLK

SEQ ID NO: 80501 - protein, 32 aa, Artificial Sequence; identical to SEQ ID NO: 3443
  Cyclic GFR-binding peptide
  MOD_RES (28)..(29): Xaa is C or S

SEQ ID NO: 80502 - protein, 35 aa, Artificial Sequence; identical to SEQ ID NO: 3444
  Cyclic GFR-binding peptide
  MOD_RES (1)..(33)..(34): Xaa is C or S

SEQ ID NO: 80503 - protein, 32 aa, Artificial Sequence; identical to SEQ ID NO: 31717
  Cyclic GFR-binding peptide
  MOD_RES (29)..(30): Xaa is C or S

SEQ ID NO: 80504 - protein, 31 aa, Artificial Sequence; identical to SEQ ID NO: 3449
  Cyclic GFR-binding peptide
  MOD_RES (2)..(4): Xaa is C or S

SEQ ID NO: 80505 - protein, 29 aa, Artificial Sequence
  Cyclic GFR-binding peptide
SKVIMEYKFKIKPTKGILYLISIPELDQS

SEQ ID NO: 80506 - protein, 42 aa, Artificial Sequence
  Cyclic GFR-binding peptide
  MOD_RES (2)..(4)..(36)..(37): Xaa is C or S
HXGXSRVVMNEYKFKIVNSSDDLYLVSIPELKTPAXXPKPVH

SEQ ID NO: 80507 - protein, 31 aa, Artificial Sequence; identical to SEQ ID NO: 3453
  Cyclic GFR-binding peptide
  MOD_RES (2)..(2): Xaa is C or S

SEQ ID NO: 80508 - protein, 24 aa, Artificial Sequence
  Cyclic GFR-binding peptide
VMDPIKGYVVKENEDFYLMNIPSL

SEQ ID NO: 80509 - protein, 31 aa, Artificial Sequence; identical to SEQ ID NO: 31727
  Cyclic GFR-binding peptide
  MOD_RES (1)..(1): Xaa is C or S

SEQ ID NO: 80510 - protein, 22 aa, Artificial Sequence
  Cyclic GFR-binding peptide
MNYHYKLIVNNSSDKYLVSIPS

SEQ ID NO: 80511 - protein, 35 aa, Artificial Sequence
  Cyclic GFR-binding peptide
  MOD_RES (1)..(3)..(34)..(35): Xaa is C or S
XKXSKVVMPIKGYVKPTRGVFYLINIPSLDQPVXX

SEQ ID NO: 80512 - protein, 33 aa, Artificial Sequence; identical to SEQ ID NO: 31731
  Cyclic GFR-binding peptide
  MOD_RES (1)..(3): Xaa is C or S

SEQ ID NO: 80513 - protein, 37 aa, Artificial Sequence; identical to SEQ ID NO: 3460
  Cyclic GFR-binding peptide
  MOD_RES (2)..(34)..(35): Xaa is C or S

SEQ ID NO: 80514 - protein, 32 aa, Artificial Sequence; identical to SEQ ID NO: 31734
  Cyclic GFR-binding peptide
  MOD_RES (26)..(27): Xaa is C or S

SEQ ID NO: 80515 - protein, 31 aa, Artificial Sequence; identical to SEQ ID NO: 31735
  Cyclic GFR-binding peptide
  MOD_RES (28)..(29): Xaa is C or S

SEQ ID NO: 80516 - protein, 30 aa, Artificial Sequence; identical to SEQ ID NO: 3462
  Cyclic GFR-binding peptide
  MOD_RES (26)..(27): Xaa is C or S

SEQ ID NO: 80517 - protein, 30 aa, Artificial Sequence; identical to SEQ ID NO: 3463
  Cyclic GFR-binding peptide
  MOD_RES (2)..(4): Xaa is C or S

SEQ ID NO: 80518 - protein, 33 aa, Artificial Sequence
  Cyclic GFR-binding peptide
  MOD_RES (31)..(32): Xaa is C or S
EVTMNRYKKLVVNKNEDFYLISIANMKEPVXXP

SEQ ID NO: 80519 - protein, 35 aa, Artificial Sequence; identical to SEQ ID NO: 3465
  Cyclic GFR-binding peptide
  MOD_RES (1)..(33)..(34): Xaa is C or S

SEQ ID NO: 80520 - protein, 33 aa, Artificial Sequence; identical to SEQ ID NO: 3467
  Cyclic GFR-binding peptide
  MOD_RES (31)..(32): Xaa is C or S

SEQ ID NO: 80521 - protein, 25 aa, Artificial Sequence
  Cyclic GFR-binding peptide
EVVMDYHYKLVVNNASDKYLISIPS

SEQ ID NO: 80522 - protein, 31 aa, Artificial Sequence
  Cyclic GFR-binding peptide
  MOD_RES (1)..(1): Xaa is C or S
XSEVVMDEYKFKVVNNASDLYLISIPELRTP

SEQ ID NO: 80523 - protein, 28 aa, Artificial Sequence
  Cyclic GFR-binding peptide
  MOD_RES (1)..(1): Xaa is C or S
XESVAMGPIKGYYTVVGKDFYLINIPSL

SEQ ID NO: 80524 - protein, 33 aa, Artificial Sequence; identical to SEQ ID NO: 31743
  Cyclic GFR-binding peptide
  MOD_RES (27)..(28): Xaa is C or S

SEQ ID NO: 80525 - protein, 23 aa, Artificial Sequence
  Cyclic GFR-binding peptide
VIMRHKRLIKPTKGIYYLISTAS

SEQ ID NO: 80526 - protein, 32 aa, Artificial Sequence
  Cyclic GFR-binding peptide
  MOD_RES (27)..(28): Xaa is C or S
MYHYKLLLVRGNDKYLMSIPSTKVPAXXTSPV

SEQ ID NO: 80527 - protein, 24 aa, Artificial Sequence
  Cyclic GFR-binding peptide
VMEYKFKVKPTRGVLYLISIPELD

SEQ ID NO: 80528 - protein, 25 aa, Artificial Sequence
  Cyclic GFR-binding peptide
VMEPIKGYVVKDYEDFYLMNIPSLE

SEQ ID NO: 80529 - protein, 22 aa, Artificial Sequence
  Cyclic GFR-binding peptide
NYHYKLIVNNSSDKYLVSIPSL

SEQ ID NO: 80530 - protein, 25 aa, Artificial Sequence
  Cyclic GFR-binding peptide
VMGRYKKLIIQQKDNFYLMSIANMK

SEQ ID NO: 80531 - protein, 34 aa, Artificial Sequence; identical to SEQ ID NO: 3475
  Cyclic GFR-binding peptide
  MOD_RES (31)..(32): Xaa is C or S

SEQ ID NO: 80532 - protein, 29 aa, Artificial Sequence
  Cyclic GFR-binding peptide
  MOD_RES (1)..(1): Xaa is C or S
XSEVTMNPIKGYVVNKNEDFYLINIPSMK

SEQ ID NO: 80533 - protein, 33 aa, Artificial Sequence
  Cyclic GFR-binding peptide
  MOD_RES (2)..(4): Xaa is C or S
LXGXEEVIMEYKFKLLVRGNDLYLMSIPETKVP

SEQ ID NO: 80534 - protein, 26 aa, Artificial Sequence
  Cyclic GFR-binding peptide
  MOD_RES (1)..(1): Xaa is C or S
XSKVVMPIKGYVKPTRGVFYLINIPS

SEQ ID NO: 80535 - protein, 33 aa, Artificial Sequence; identical to SEQ ID NO: 31749
  Cyclic GFR-binding peptide
  MOD_RES (1)..(3): Xaa is C or S

SEQ ID NO: 80536 - protein, 33 aa, Artificial Sequence; identical to SEQ ID NO: 31751
  Cyclic GFR-binding peptide
  MOD_RES (32)..(32): Xaa is C or S

SEQ ID NO: 80537 - protein, 28 aa, Artificial Sequence
  Cyclic GFR-binding peptide
GEVVMERYKKLVVKDYEDFYLMSIANLE

SEQ ID NO: 80538 - protein, 38 aa, Artificial Sequence; identical to SEQ ID NO: 41800
  Cyclic GFR-binding peptide
  MOD_RES (1)..(3)..(34)..(35): Xaa is C or S

SEQ ID NO: 80539 - protein, 31 aa, Artificial Sequence; identical to SEQ ID NO: 31754
  Cyclic GFR-binding peptide
  MOD_RES (2)..(2): Xaa is C or S

SEQ ID NO: 80540 - protein, 37 aa, Artificial Sequence; identical to SEQ ID NO: 41801
  Cyclic GFR-binding peptide
  MOD_RES (2)..(4)..(36)..(37): Xaa is C or S

SEQ ID NO: 80541 - protein, 35 aa, Artificial Sequence; identical to SEQ ID NO: 14029
  Cyclic GFR-binding peptide
  MOD_RES (1)..(3)..(35): Xaa is C or S

SEQ ID NO: 80542 - protein, 30 aa, Artificial Sequence; identical to SEQ ID NO: 31756
  Cyclic GFR-binding peptide
  MOD_RES (2)..(4): Xaa is C or S

SEQ ID NO: 80543 - protein, 33 aa, Artificial Sequence; identical to SEQ ID NO: 3481
  Cyclic GFR-binding peptide
  MOD_RES (30)..(31): Xaa is C or S

SEQ ID NO: 80544 - protein, 29 aa, Artificial Sequence
  Cyclic GFR-binding peptide
  MOD_RES (29)..(29): Xaa is C or S
AMGPIKGYYTVVGKDFYLINIPSLKTPVX

SEQ ID NO: 80545 - protein, 34 aa, Artificial Sequence; identical to SEQ ID NO: 3482
  Cyclic GFR-binding peptide
  MOD_RES (29)..(30): Xaa is C or S

SEQ ID NO: 80546 - protein, 27 aa, Artificial Sequence
  Cyclic GFR-binding peptide
SVAMGRYKKLYTVVGKDFYLISIANLK

SEQ ID NO: 80547 - protein, 30 aa, Artificial Sequence; identical to SEQ ID NO: 3485
  Cyclic GFR-binding peptide
  MOD_RES (28)..(28): Xaa is C or S

SEQ ID NO: 80548 - protein, 38 aa, Artificial Sequence; identical to SEQ ID NO: 3486
  Cyclic GFR-binding peptide
  MOD_RES (1)..(32)..(33): Xaa is C or S

SEQ ID NO: 80549 - protein, 28 aa, Artificial Sequence
  Cyclic GFR-binding peptide
EEVIMYHYKLLLVRGNDKYLMSIPSTKV

SEQ ID NO: 80550 - protein, 30 aa, Artificial Sequence; identical to SEQ ID NO: 3488
  Cyclic GFR-binding peptide

SEQ ID NO: 80551 - protein, 28 aa, Artificial Sequence
  Cyclic GFR-binding peptide
VIMEYKFKVKPKRGVLYLISIPELAQPV

SEQ ID NO: 80552 - protein, 25 aa, Artificial Sequence
  Cyclic GFR-binding peptide
ERYKKLVVKDYEDFYLMSIANLETP

SEQ ID NO: 80553 - protein, 24 aa, Artificial Sequence
  Cyclic GFR-binding peptide
TMNRYKKLVVNKNEDFYLISIANM

SEQ ID NO: 80554 - protein, 33 aa, Artificial Sequence; identical to SEQ ID NO: 31774
  Cyclic GFR-binding peptide
  MOD_RES (2)..(4): Xaa is C or S

SEQ ID NO: 80555 - protein, 23 aa, Artificial Sequence
  Cyclic GFR-binding peptide
RYKKLVVKDYEDFYLMSIANLET

SEQ ID NO: 80556 - protein, 31 aa, Artificial Sequence; identical to SEQ ID NO: 31777
  Cyclic GFR-binding peptide
  MOD_RES (2)..(4): Xaa is C or S

SEQ ID NO: 80557 - protein, 30 aa, Artificial Sequence; identical to SEQ ID NO: 41823
  Cyclic GFR-binding peptide
  MOD_RES (30)..(30): Xaa is C or S

SEQ ID NO: 80558 - protein, 30 aa, Artificial Sequence; identical to SEQ ID NO: 3501
  Cyclic GFR-binding peptide
  MOD_RES (27)..(28): Xaa is C or S

SEQ ID NO: 80559 - protein, 36 aa, Artificial Sequence; identical to SEQ ID NO: 3502
  Cyclic GFR-binding peptide
  MOD_RES (2)..(4)..(35)..(36): Xaa is C or S

SEQ ID NO: 80560 - protein, 32 aa, Artificial Sequence
  Cyclic GFR-binding peptide
  MOD_RES (27)..(28): Xaa is C or S
DRHKRLVVNNASDYYLISTASLRTPVXXTPPT

SEQ ID NO: 80561 - protein, 28 aa, Artificial Sequence
  Cyclic GFR-binding peptide
  MOD_RES (1)..(1): Xaa is C or S
XRDVVMGEYKFKIIQQKDNLYLMSIPEM

SEQ ID NO: 80562 - protein, 24 aa, Artificial Sequence
  Cyclic GFR-binding peptide
MEPIKGYVVKDYEDFYLMNIPSLE

SEQ ID NO: 80563 - protein, 35 aa, Artificial Sequence; identical to SEQ ID NO: 3503
  Cyclic GFR-binding peptide
  MOD_RES (2)..(4)..(35): Xaa is C or S

SEQ ID NO: 80564 - protein, 27 aa, Artificial Sequence
  Cyclic GFR-binding peptide
  MOD_RES (26)..(26): Xaa is C or S
RYKKLIVNSSDDFYLVSIANLKTPAXT

SEQ ID NO: 80565 - protein, 28 aa, Artificial Sequence
  Cyclic GFR-binding peptide
  MOD_RES (2)..(2): Xaa is C or S
GXSRVVMNYHYKLIVNSSDDKYLVSIPS

SEQ ID NO: 80566 - protein, 34 aa, Artificial Sequence; identical to SEQ ID NO: 3511
  Cyclic GFR-binding peptide
  MOD_RES (28)..(29): Xaa is C or S

SEQ ID NO: 80567 - protein, 25 aa, Artificial Sequence
  Cyclic GFR-binding peptide
VMNRYKKLIVNSSDDFYLVSIANLQ

SEQ ID NO: 80568 - protein, 36 aa, Artificial Sequence; identical to SEQ ID NO: 3514
  Cyclic GFR-binding peptide
  MOD_RES (1)..(33)..(34): Xaa is C or S

SEQ ID NO: 80569 - protein, 39 aa, Artificial Sequence; identical to SEQ ID NO: 3515
  Cyclic GFR-binding peptide
  MOD_RES (1)..(33)..(34): Xaa is C or S

SEQ ID NO: 80570 - protein, 32 aa, Artificial Sequence
  Cyclic GFR-binding peptide
  MOD_RES (27)..(28): Xaa is C or S
NRHKRLVVNKNEDYYLISTASMKEPVXXPEPI

SEQ ID NO: 80571 - protein, 37 aa, Artificial Sequence; identical to SEQ ID NO: 3517
  Cyclic GFR-binding peptide
  MOD_RES (2)..(4)..(35)..(36): Xaa is C or S

SEQ ID NO: 80572 - protein, 40 aa, Artificial Sequence; identical to SEQ ID NO: 40352
  Cyclic GFR-binding peptide
  MOD_RES (1)..(3)..(35)..(36): Xaa is C or S

SEQ ID NO: 80573 - protein, 37 aa, Artificial Sequence; identical to SEQ ID NO: 40353
  Cyclic GFR-binding peptide
  MOD_RES (2)..(34): Xaa is C or S

SEQ ID NO: 80574 - protein, 29 aa, Artificial Sequence
  Cyclic GFR-binding peptide
  MOD_RES (1)..(1): Xaa is C or S
XARVVMNEYKFKIVNSSDDLYLVSIPELQ

SEQ ID NO: 80575 - protein, 35 aa, Artificial Sequence; identical to SEQ ID NO: 3519
  Cyclic GFR-binding peptide
  MOD_RES (1)..(3)..(34)..(35): Xaa is C or S

SEQ ID NO: 80576 - protein, 32 aa, Artificial Sequence; identical to SEQ ID NO: 40355
  Cyclic GFR-binding peptide
  MOD_RES (2)..(4): Xaa is C or S

SEQ ID NO: 80577 - protein, 38 aa, Artificial Sequence; identical to SEQ ID NO: 3522
  Cyclic GFR-binding peptide
  MOD_RES (1)..(33)..(34): Xaa is C or S

SEQ ID NO: 80578 - protein, 29 aa, Artificial Sequence
  Cyclic GFR-binding peptide
  MOD_RES (2)..(4): Xaa is C or S
SXKXSKVVMYHYKLVKPTRGVKYLISIPS

SEQ ID NO: 80579 - protein, 35 aa, Artificial Sequence
  Cyclic GFR-binding peptide
  MOD_RES (2)..(33)..(34): Xaa is C or S
GXEEVIMEYKFKLLVRGNDLYLMSIPETKVPAXXT

SEQ ID NO: 80580 - protein, 23 aa, Artificial Sequence
  Cyclic GFR-binding peptide
MDPIKGYVVKENEDFYLMNIPSL

SEQ ID NO: 80581 - protein, 29 aa, Artificial Sequence
  Cyclic GFR-binding peptide
  MOD_RES (2)..(4): Xaa is C or S
SXKXSRVIMRYKKLVKPKRGVFYLISIAN

SEQ ID NO: 80582 - protein, 29 aa, Artificial Sequence
  Cyclic GFR-binding peptide
  MOD_RES (1)..(3): Xaa is C or S
XGXARVVMNEYKFKIVNSSDDLYLVSIPE

SEQ ID NO: 80583 - protein, 30 aa, Artificial Sequence; identical to SEQ ID NO: 3529
  Cyclic GFR-binding peptide

SEQ ID NO: 80584 - protein, 23 aa, Artificial Sequence
  Cyclic GFR-binding peptide
NYHYKLIVNSSDDKYLVSIPSLK

SEQ ID NO: 80585 - protein, 39 aa, Artificial Sequence
  Cyclic GFR-binding peptide
  MOD_RES (2)..(4)..(36)..(37): Xaa is C or S
RXGXESVAMGRHKRLYTVVGKDYYLISTASLKTPVXXAK

SEQ ID NO: 80586 - protein, 37 aa, Artificial Sequence; identical to SEQ ID NO: 3532
  Cyclic GFR-binding peptide
  MOD_RES (1)..(3)..(35)..(36): Xaa is C or S

SEQ ID NO: 80587 - protein, 28 aa, Artificial Sequence
  Cyclic GFR-binding peptide
VMDRHKRLVVNNASDYYLISTASLRTPV

SEQ ID NO: 80588 - protein, 33 aa, Artificial Sequence; identical to SEQ ID NO: 3534
  Cyclic GFR-binding peptide
  MOD_RES (29)..(30): Xaa is C or S

SEQ ID NO: 80589 - protein, 39 aa, Artificial Sequence
  Cyclic GFR-binding peptide
  MOD_RES (1)..(33)..(34): Xaa is C or S
XSEVTMNYHYKLVVNKNEDKYLISIPSMKEPVXXPEPIG

SEQ ID NO: 80590 - protein, 40 aa, Artificial Sequence
  Cyclic GFR-binding peptide
  MOD_RES (2)..(34)..(35): Xaa is C or S
AXSEVTMNPIKGYVVNKNEDFYLINIPSMKEPVXXPEPIG

SEQ ID NO: 80591 - protein, 22 aa, Artificial Sequence
  Cyclic GFR-binding peptide
EEYKFKVVKDYEDLYLMSIPEL

SEQ ID NO: 80592 - protein, 27 aa, Artificial Sequence
  Cyclic GFR-binding peptide
VVMDRYKKLVVNNASDFYLISIANLRT

SEQ ID NO: 80593 - protein, 39 aa, Artificial Sequence; identical to SEQ ID NO: 40365
  Cyclic GFR-binding peptide
  MOD_RES (2)..(4)..(37)..(38): Xaa is C or S

SEQ ID NO: 80594 - protein, 25 aa, Artificial Sequence
  Cyclic GFR-binding peptide
MNRHKRLVVNKNEDYYLISTASMKE

SEQ ID NO: 80595 - protein, 38 aa, Artificial Sequence; identical to SEQ ID NO: 3535
  Cyclic GFR-binding peptide
  MOD_RES (2)..(35)..(36): Xaa is C or S

SEQ ID NO: 80596 - protein, 29 aa, Artificial Sequence
  Cyclic GFR-binding peptide
  MOD_RES (1)..(1): Xaa is C or S
XSRVVMNRYKKLIVNSSDDFYLVSIANLK

SEQ ID NO: 80597 - protein, 33 aa, Artificial Sequence; identical to SEQ ID NO: 40372
  Cyclic GFR-binding peptide
  MOD_RES (32)..(33): Xaa is C or S

SEQ ID NO: 80598 - protein, 31 aa, Artificial Sequence; identical to SEQ ID NO: 40374
  Cyclic GFR-binding peptide
  MOD_RES (30)..(31): Xaa is C or S

SEQ ID NO: 80599 - protein, 24 aa, Artificial Sequence
  Cyclic GFR-binding peptide
MNYHYKLVVNKNEDKYLISIPSMK

SEQ ID NO: 80600 - protein, 39 aa, Artificial Sequence; identical to SEQ ID NO: 40377
  Cyclic GFR-binding peptide
  MOD_RES (2)..(4)..(36)..(37): Xaa is C or S

SEQ ID NO: 80601 - protein, 33 aa, Artificial Sequence; identical to SEQ ID NO: 3540
  Cyclic GFR-binding peptide
  MOD_RES (29)..(30): Xaa is C or S

SEQ ID NO: 80602 - protein, 31 aa, Artificial Sequence
  Cyclic GFR-binding peptide
  MOD_RES (28)..(29): Xaa is C or S
MDRHKRLVVNNASDYYLISTASLRTPVXXTP

SEQ ID NO: 80603 - protein, 31 aa, Artificial Sequence; identical to SEQ ID NO: 75145
  Cyclic GFR-binding peptide
  MOD_RES (1)..(1): Xaa is C or S

SEQ ID NO: 80604 - protein, 35 aa, Artificial Sequence; identical to SEQ ID NO: 3544
  Cyclic GFR-binding peptide
  MOD_RES (2)..(4)..(35): Xaa is C or S

SEQ ID NO: 80605 - protein, 25 aa, Artificial Sequence
  Cyclic GFR-binding peptide
MDYHYKLVVNNASDKYLISIPSLRT

SEQ ID NO: 80606 - protein, 29 aa, Artificial Sequence
  Cyclic GFR-binding peptide
  MOD_RES (26)..(27): Xaa is C or S
RYKKLVKPTRGVFYLISIANLDQPVXXPS

SEQ ID NO: 80607 - protein, 31 aa, Artificial Sequence; identical to SEQ ID NO: 40387
  Cyclic GFR-binding peptide
  MOD_RES (2)..(4): Xaa is C or S

SEQ ID NO: 80608 - protein, 37 aa, Artificial Sequence; identical to SEQ ID NO: 3551
  Cyclic GFR-binding peptide
  MOD_RES (31)..(32): Xaa is C or S

SEQ ID NO: 80609 - protein, 32 aa, Artificial Sequence; identical to SEQ ID NO: 14095
  Cyclic GFR-binding peptide
  MOD_RES (27)..(28): Xaa is C or S

SEQ ID NO: 80610 - protein, 36 aa, Artificial Sequence
  Cyclic GFR-binding peptide
  MOD_RES (1)..(33)..(34): Xaa is C or S
XRDVVMGEYKFKIIQQKDNLYLMSIPEMKTPTXXPG

SEQ ID NO: 80611 - protein, 29 aa, Artificial Sequence
  Cyclic GFR-binding peptide
  MOD_RES (27)..(28): Xaa is C or S
NYHYKLIVNNSSDKYLVSIPSLKTPAXXA

SEQ ID NO: 80612 - protein, 36 aa, Artificial Sequence
  Cyclic GFR-binding peptide
  MOD_RES (32)..(33): Xaa is C or S
SEVTMNEYKFKVVNKNEDLYLISIPEMKEPVXXPEP

SEQ ID NO: 80613 - protein, 32 aa, Artificial Sequence; identical to SEQ ID NO: 3554
  Cyclic GFR-binding peptide
  MOD_RES (2)..(4): Xaa is C or S

SEQ ID NO: 80614 - protein, 27 aa, Artificial Sequence
  Cyclic GFR-binding peptide
  MOD_RES (1)..(1): Xaa is C or S
XSKVVMRYKKLVKPTRGVFYLISIANL

SEQ ID NO: 80615 - protein, 40 aa, Artificial Sequence
  Cyclic GFR-binding peptide
  MOD_RES (2)..(4)..(36)..(37): Xaa is C or S
RXAXSEVTMNPIKGYVVNKNEDFYLINIPSMKEPVXXPEP

SEQ ID NO: 80616 - protein, 28 aa, Artificial Sequence
  Cyclic GFR-binding peptide
VMDRYKKLVVKENEDFYLMSIANLETPV

SEQ ID NO: 80617 - protein, 41 aa, Artificial Sequence; identical to SEQ ID NO: 3563
  Cyclic GFR-binding peptide
  MOD_RES (1)..(3)..(35): Xaa is C or S

SEQ ID NO: 80618 - protein, 39 aa, Artificial Sequence; identical to SEQ ID NO: 40396
  Cyclic GFR-binding peptide
  MOD_RES (1)..(33)..(34): Xaa is C or S

SEQ ID NO: 80619 - protein, 26 aa, Artificial Sequence
  Cyclic GFR-binding peptide
NRYKKLIVNSSDDFYLVSIANLQTPA

SEQ ID NO: 80620 - protein, 27 aa, Artificial Sequence
  Cyclic GFR-binding peptide
MDPIKGYVVKENEDFYLMNIPSLETPV

SEQ ID NO: 80621 - protein, 30 aa, Artificial Sequence
  Cyclic GFR-binding peptide
  MOD_RES (2)..(2): Xaa is C or S
GXSEVVMDRHKRLVVNNASDYYLISTASLR

SEQ ID NO: 80622 - protein, 29 aa, Artificial Sequence
  Cyclic GFR-binding peptide
  MOD_RES (27)..(28): Xaa is C or S
ERHKRLVVKDYEDYYLMSTASLETPVXXA

SEQ ID NO: 80623 - protein, 37 aa, Artificial Sequence; identical to SEQ ID NO: 3570
  Cyclic GFR-binding peptide
  MOD_RES (2)..(4)..(35)..(36): Xaa is C or S

SEQ ID NO: 80624 - protein, 32 aa, Artificial Sequence; identical to SEQ ID NO: 14115
  Cyclic GFR-binding peptide
  MOD_RES (30)..(31): Xaa is C or S

SEQ ID NO: 80625 - protein, 30 aa, Artificial Sequence; identical to SEQ ID NO: 40410
  Cyclic GFR-binding peptide
  MOD_RES (28)..(29): Xaa is C or S

SEQ ID NO: 80626 - protein, 29 aa, Artificial Sequence
  Cyclic GFR-binding peptide
EVVMERHKRLVVKDYEDYYLMSTASLETP

SEQ ID NO: 80627 - protein, 32 aa, Artificial Sequence
  Cyclic GFR-binding peptide
  MOD_RES (1)..(32): Xaa is C or S
XEEVIMYHYKLLLVRGNDKYLMSIPSTKVPAX

SEQ ID NO: 80628 - protein, 35 aa, Artificial Sequence; identical to SEQ ID NO: 3581
  Cyclic GFR-binding peptide
  MOD_RES (30)..(31): Xaa is C or S

SEQ ID NO: 80629 - protein, 27 aa, Artificial Sequence
  Cyclic GFR-binding peptide
  MOD_RES (2)..(2): Xaa is C or S
KXSRVIMYHYKLVKPKRGVKYLISIPS

SEQ ID NO: 80630 - protein, 36 aa, Artificial Sequence; identical to SEQ ID NO: 14127
  Cyclic GFR-binding peptide
  MOD_RES (1)..(3)..(35)..(36): Xaa is C or S

SEQ ID NO: 80631 - protein, 22 aa, Artificial Sequence
  Cyclic GFR-binding peptide
DRYKKLVVNNASDFYLISIANL

SEQ ID NO: 80632 - protein, 27 aa, Artificial Sequence
  Cyclic GFR-binding peptide
SVAMGPIKGYYTVVGKDFYLINIPSLK

SEQ ID NO: 80633 - protein, 36 aa, Artificial Sequence
  Cyclic GFR-binding peptide
  MOD_RES (2)..(34)..(35): Xaa is C or S
GXRDVVMGYHYKLIIQQKDNKYLMSIPSMKTPTXXP

SEQ ID NO: 80634 - protein, 31 aa, Artificial Sequence; identical to SEQ ID NO: 31862
  Cyclic GFR-binding peptide
  MOD_RES (26)..(27): Xaa is C or S

SEQ ID NO: 80635 - protein, 30 aa, Artificial Sequence; identical to SEQ ID NO: 40432
  Cyclic GFR-binding peptide
  MOD_RES (30)..(30): Xaa is C or S

SEQ ID NO: 80636 - protein, 40 aa, Artificial Sequence; identical to SEQ ID NO: 40434
  Cyclic GFR-binding peptide
  MOD_RES (2)..(34)..(35): Xaa is C or S

SEQ ID NO: 80637 - protein, 28 aa, Artificial Sequence
  Cyclic GFR-binding peptide
  MOD_RES (26)..(27): Xaa is C or S
RYKKLVVKENEDFYLMSIANLETPVXXA

SEQ ID NO: 80638 - protein, 27 aa, Artificial Sequence
  Cyclic GFR-binding peptide
VMNPIKGYIVNNSSDFYLVNIPSLKTP

SEQ ID NO: 80639 - protein, 27 aa, Artificial Sequence
  Cyclic GFR-binding peptide
  MOD_RES (26)..(27): Xaa is C or S
YHYKLIVNNSSDKYLVSIPSLKTPAXX

SEQ ID NO: 80640 - protein, 42 aa, Artificial Sequence; identical to SEQ ID NO: 3596
  Cyclic GFR-binding peptide
  MOD_RES (2)..(4)..(37)..(38): Xaa is C or S

SEQ ID NO: 80641 - protein, 38 aa, Artificial Sequence; identical to SEQ ID NO: 31866
  Cyclic GFR-binding peptide
  MOD_RES (2)..(34)..(35): Xaa is C or S

SEQ ID NO: 80642 - protein, 32 aa, Artificial Sequence; identical to SEQ ID NO: 3598
  Cyclic GFR-binding peptide
  MOD_RES (28)..(29): Xaa is C or S

SEQ ID NO: 80643 - protein, 38 aa, Artificial Sequence
  Cyclic GFR-binding peptide
  MOD_RES (2)..(33)..(34): Xaa is C or S
GXEEVIMEYKFKLLVRGNDLYLMSIPETKVPAXXTSPV

SEQ ID NO: 80644 - protein, 36 aa, Artificial Sequence
  Cyclic GFR-binding peptide
  MOD_RES (31)..(32): Xaa is C or S
SKVVMPIKGYVKPTRGVFYLINIPSLDQPVXXPSAS

SEQ ID NO: 80645 - protein, 30 aa, Artificial Sequence; identical to SEQ ID NO: 3602
  Cyclic GFR-binding peptide
  MOD_RES (1)..(3): Xaa is C or S

SEQ ID NO: 80646 - protein, 40 aa, Artificial Sequence; identical to SEQ ID NO: 40444
  Cyclic GFR-binding peptide
  MOD_RES (1)..(3)..(35)..(36): Xaa is C or S

SEQ ID NO: 80647 - protein, 27 aa, Artificial Sequence
  Cyclic GFR-binding peptide
GEVVMDYHYKLVVKENEDKYLMSIPSL

SEQ ID NO: 80648 - protein, 32 aa, Artificial Sequence; identical to SEQ ID NO: 75185
  Cyclic GFR-binding peptide
  MOD_RES (32)..(32): Xaa is C or S

SEQ ID NO: 80649 - protein, 29 aa, Artificial Sequence
  Cyclic GFR-binding peptide
  MOD_RES (29)..(29): Xaa is C or S
VMNRHKRLIVNSSDDYYLVSTASLKTPAX

SEQ ID NO: 80650 - protein, 29 aa, Artificial Sequence
  Cyclic GFR-binding peptide
  MOD_RES (27)..(28): Xaa is C or S
DRYKKLVVNNASDFYLISIANLRTPVXXT

SEQ ID NO: 80651 - protein, 30 aa, Artificial Sequence; identical to SEQ ID NO: 31872
  Cyclic GFR-binding peptide
  MOD_RES (29)..(30): Xaa is C or S

SEQ ID NO: 80652 - protein, 28 aa, Artificial Sequence
  Cyclic GFR-binding peptide
  MOD_RES (28)..(28): Xaa is C or S
MNPIKGYIVNNSSDFYLVNIPSLKTPAX

SEQ ID NO: 80653 - protein, 41 aa, Artificial Sequence; identical to SEQ ID NO: 40456
  Cyclic GFR-binding peptide
  MOD_RES (2)..(4)..(36)..(37): Xaa is C or S

SEQ ID NO: 80654 - protein, 34 aa, Artificial Sequence
  Cyclic GFR-binding peptide
  MOD_RES (1)..(3): Xaa is C or S
XAXSEVTMNYHYKLVVNKNEDKYLISIPSMKEPV

SEQ ID NO: 80655 - protein, 33 aa, Artificial Sequence; identical to SEQ ID NO: 3608
  Cyclic GFR-binding peptide
  MOD_RES (31)..(31): Xaa is C or S

SEQ ID NO: 80656 - protein, 36 aa, Artificial Sequence
  Cyclic GFR-binding peptide
  MOD_RES (2)..(34)..(35): Xaa is C or S
AXSEVTMNYHYKLVVNKNEDKYLISIPSMKEPVXXP

SEQ ID NO: 80657 - protein, 38 aa, Artificial Sequence; identical to SEQ ID NO: 31877
  Cyclic GFR-binding peptide
  MOD_RES (32)..(33): Xaa is C or S

SEQ ID NO: 80658 - protein, 30 aa, Artificial Sequence; identical to SEQ ID NO: 3612
  Cyclic GFR-binding peptide
  MOD_RES (27)..(28): Xaa is C or S

SEQ ID NO: 80659 - protein, 32 aa, Artificial Sequence
  Cyclic GFR-binding peptide
  MOD_RES (31)..(32): Xaa is C or S
EVVMDRHKRLVVNNASDYYLISTASLRTPVXX

SEQ ID NO: 80660 - protein, 21 aa, Artificial Sequence
  Cyclic GFR-binding peptide
EPIKGYVVKDYEDFYLMNIPS

SEQ ID NO: 80661 - protein, 29 aa, Artificial Sequence
  Cyclic GFR-binding peptide
  MOD_RES (27)..(28): Xaa is C or S
NYHYKLVVNKNEDKYLISIPSMKEPVXXP

SEQ ID NO: 80662 - protein, 31 aa, Artificial Sequence; identical to SEQ ID NO: 31887
  Cyclic GFR-binding peptide
  MOD_RES (30)..(31): Xaa is C or S

SEQ ID NO: 80663 - protein, 34 aa, Artificial Sequence; identical to SEQ ID NO: 31888
  Cyclic GFR-binding peptide
  MOD_RES (1)..(3): Xaa is C or S

SEQ ID NO: 80664 - protein, 38 aa, Artificial Sequence; identical to SEQ ID NO: 40481
  Cyclic GFR-binding peptide
  MOD_RES (1)..(3)..(35)..(36): Xaa is C or S

SEQ ID NO: 80665 - protein, 39 aa, Artificial Sequence
  Cyclic GFR-binding peptide
  MOD_RES (2)..(34)..(35): Xaa is C or S
AXSEVTMNRHKRLVVNKNEDYYLISTASMKEPVXXPEPI

SEQ ID NO: 80666 - protein, 31 aa, Artificial Sequence; identical to SEQ ID NO: 31890
  Cyclic GFR-binding peptide
  MOD_RES (28)..(29): Xaa is C or S

SEQ ID NO: 80667 - protein, 25 aa, Artificial Sequence
  Cyclic GFR-binding peptide
SMGEPIKGYTPVGMDDFYLVNIPSL

SEQ ID NO: 80668 - protein, 31 aa, Artificial Sequence; identical to SEQ ID NO: 40488
  Cyclic GFR-binding peptide

SEQ ID NO: 80669 - protein, 26 aa, Artificial Sequence
  Cyclic GFR-binding peptide
VVMRHKRLVKPTRGVYYLISTASLDQ

SEQ ID NO: 80670 - protein, 33 aa, Artificial Sequence
  Cyclic GFR-binding peptide
  MOD_RES (31)..(32): Xaa is C or S
EEVIMYHYKLLLVRGNDKYLMSIPSTKVPAXXT

SEQ ID NO: 80671 - protein, 31 aa, Artificial Sequence; identical to SEQ ID NO: 3629
  Cyclic GFR-binding peptide
  MOD_RES (30)..(31): Xaa is C or S

SEQ ID NO: 80672 - protein, 33 aa, Artificial Sequence; identical to SEQ ID NO: 3631
  Cyclic GFR-binding peptide
  MOD_RES (2)..(33): Xaa is C or S

SEQ ID NO: 80673 - protein, 36 aa, Artificial Sequence
  Cyclic GFR-binding peptide
  MOD_RES (31)..(32): Xaa is C or S
EVTMNRYKKLVVNKNEDFYLISIANMKEPVXXPEPI

SEQ ID NO: 80674 - protein, 29 aa, Artificial Sequence
  Cyclic GFR-binding peptide
VVMNEYKFKIVNSSDDLYLVSIPELKTPA

SEQ ID NO: 80675 - protein, 33 aa, Artificial Sequence; identical to SEQ ID NO: 31901
  Cyclic GFR-binding peptide
  MOD_RES (27)..(28): Xaa is C or S

SEQ ID NO: 80676 - protein, 33 aa, Artificial Sequence; identical to SEQ ID NO: 40500
  Cyclic GFR-binding peptide
  MOD_RES (29)..(30): Xaa is C or S

SEQ ID NO: 80677 - protein, 30 aa, Artificial Sequence; identical to SEQ ID NO: 3633
  Cyclic GFR-binding peptide
  MOD_RES (2)..(4): Xaa is C or S

SEQ ID NO: 80678 - protein, 33 aa, Artificial Sequence; identical to SEQ ID NO: 3636
  Cyclic GFR-binding peptide
  MOD_RES (2)..(33): Xaa is C or S

SEQ ID NO: 80679 - protein, 33 aa, Artificial Sequence
  Cyclic GFR-binding peptide
  MOD_RES (27)..(28): Xaa is C or S
DEYKFKVVNNASDLYLISIPELRTPVXXTPPTS

SEQ ID NO: 80680 - protein, 29 aa, Artificial Sequence
  Cyclic GFR-binding peptide
  MOD_RES (29)..(29): Xaa is C or S
VMDRYKKLVVNNAADFYLISIANLRAPVX

SEQ ID NO: 80681 - protein, 33 aa, Artificial Sequence
  Cyclic GFR-binding peptide
  MOD_RES (32)..(33): Xaa is C or S
RDVVMGRHKRLIIQQKDNYYLMSTASMKTPTXX

SEQ ID NO: 80682 - protein, 31 aa, Artificial Sequence; identical to SEQ ID NO: 31911
  Cyclic GFR-binding peptide
  MOD_RES (29)..(30): Xaa is C or S

SEQ ID NO: 80683 - protein, 29 aa, Artificial Sequence
  Cyclic GFR-binding peptide
  MOD_RES (1)..(1): Xaa is C or S
XGEVVMDRHKRLVVKENEDYYLMSTASLE

SEQ ID NO: 80684 - protein, 24 aa, Artificial Sequence
  Cyclic GFR-binding peptide
EYHYKLVVKDYEDKYLMSIPSLET

SEQ ID NO: 80685 - protein, 29 aa, Artificial Sequence
  Cyclic GFR-binding peptide
SRVIMEYKFKVKPKRGVLYLISIPELAQP

SEQ ID NO: 80686 - protein, 40 aa, Artificial Sequence; identical to SEQ ID NO: 40510
  Cyclic GFR-binding peptide
  MOD_RES (1)..(3)..(34)..(35): Xaa is C or S

SEQ ID NO: 80687 - protein, 20 aa, Artificial Sequence
  Cyclic GFR-binding peptide
RHKRLVKPKRGVYYLISTAS

SEQ ID NO: 80688 - protein, 40 aa, Artificial Sequence; identical to SEQ ID NO: 3647
  Cyclic GFR-binding peptide
  MOD_RES (2)..(35)..(36): Xaa is C or S

SEQ ID NO: 80689 - protein, 26 aa, Artificial Sequence
  Cyclic GFR-binding peptide
  MOD_RES (26)..(26): Xaa is C or S
PIKGYVVKENEDFYLMNIPSLETPVX

SEQ ID NO: 80690 - protein, 36 aa, Artificial Sequence; identical to SEQ ID NO: 40515
  Cyclic GFR-binding peptide
  MOD_RES (1)..(33)..(34): Xaa is C or S

SEQ ID NO: 80691 - protein, 28 aa, Artificial Sequence
  Cyclic GFR-binding peptide
  MOD_RES (1)..(3): Xaa is C or S
XKXSKVIMEYKFKIKPTKGILYLISIPE

SEQ ID NO: 80692 - protein, 23 aa, Artificial Sequence
  Cyclic GFR-binding peptide
RHKRLYTVVGKDYYLISTASLKT

SEQ ID NO: 80693 - protein, 30 aa, Artificial Sequence; identical to SEQ ID NO: 3654
  Cyclic GFR-binding peptide

SEQ ID NO: 80694 - protein, 40 aa, Artificial Sequence; identical to SEQ ID NO: 75206
  Cyclic GFR-binding peptide
  MOD_RES (1)..(3)..(35)..(36): Xaa is C or S

SEQ ID NO: 80695 - protein, 26 aa, Artificial Sequence
  Cyclic GFR-binding peptide
DEYKFKVVNNASDLYLISIPELRTPV

SEQ ID NO: 80696 - protein, 34 aa, Artificial Sequence; identical to SEQ ID NO: 75207
  Cyclic GFR-binding peptide
  MOD_RES (30)..(31): Xaa is C or S

SEQ ID NO: 80697 - protein, 39 aa, Artificial Sequence; identical to SEQ ID NO: 3656
  Cyclic GFR-binding peptide
  MOD_RES (2)..(33)..(34): Xaa is C or S

SEQ ID NO: 80698 - protein, 22 aa, Artificial Sequence
  Cyclic GFR-binding peptide
EYKFKVVNKNEDLYLISIPEMK

SEQ ID NO: 80699 - protein, 36 aa, Artificial Sequence
  Cyclic GFR-binding peptide
  MOD_RES (2)..(4)..(35)..(36): Xaa is C or S
SXKXSKVIMPIKGYIKPTKGIFYLINIPSLDQSVXX

SEQ ID NO: 80700 - protein, 25 aa, Artificial Sequence
  Cyclic GFR-binding peptide
VIMPIKGYIKPTKGIFYLINIPSLD

SEQ ID NO: 80701 - protein, 33 aa, Artificial Sequence; identical to SEQ ID NO: 40522
  Cyclic GFR-binding peptide
  MOD_RES (27)..(28): Xaa is C or S

SEQ ID NO: 80702 - protein, 31 aa, Artificial Sequence; identical to SEQ ID NO: 3657
  Cyclic GFR-binding peptide
  MOD_RES (30)..(31): Xaa is C or S

SEQ ID NO: 80703 - protein, 27 aa, Artificial Sequence
  Cyclic GFR-binding peptide
AEVVMDRHKRLVVNNAADYYLISTASL

SEQ ID NO: 80704 - protein, 39 aa, Artificial Sequence; identical to SEQ ID NO: 31936
  Cyclic GFR-binding peptide
  MOD_RES (2)..(34)..(35): Xaa is C or S

SEQ ID NO: 80705 - protein, 29 aa, Artificial Sequence
  Cyclic GFR-binding peptide
  MOD_RES (2)..(2): Xaa is C or S
GXEAVSMGEPIKGYTPVGMDDFYLVNIPS

SEQ ID NO: 80706 - protein, 27 aa, Artificial Sequence
  Cyclic GFR-binding peptide
  MOD_RES (27)..(27): Xaa is C or S
DEYKFKVVKENEDLYLMSIPELETPVX

SEQ ID NO: 80707 - protein, 31 aa, Artificial Sequence
  Cyclic GFR-binding peptide
  MOD_RES (28)..(29): Xaa is C or S
MNPIKGYVVNKNEDFYLINIPSMKEPVXXPE

SEQ ID NO: 80708 - protein, 27 aa, Artificial Sequence
  Cyclic GFR-binding peptide
  MOD_RES (26)..(27): Xaa is C or S
YHYKLIIQQKDNKYLMSIPSMKTPTXX

SEQ ID NO: 80709 - protein, 32 aa, Artificial Sequence; identical to SEQ ID NO: 40527
  Cyclic GFR-binding peptide
  MOD_RES (2)..(4): Xaa is C or S

SEQ ID NO: 80710 - protein, 36 aa, Artificial Sequence; identical to SEQ ID NO: 3662
  Cyclic GFR-binding peptide
  MOD_RES (1)..(3)..(35)..(36): Xaa is C or S

SEQ ID NO: 80711 - protein, 28 aa, Artificial Sequence
  Cyclic GFR-binding peptide
  MOD_RES (26)..(27): Xaa is C or S
RHKRLIKPTKGIYYLISTASLDQSVXXP

SEQ ID NO: 80712 - protein, 33 aa, Artificial Sequence; identical to SEQ ID NO: 3664
  Cyclic GFR-binding peptide
  MOD_RES (1)..(3): Xaa is C or S

SEQ ID NO: 80713 - protein, 31 aa, Artificial Sequence; identical to SEQ ID NO: 31942
  Cyclic GFR-binding peptide
  MOD_RES (1)..(1): Xaa is C or S

SEQ ID NO: 80714 - protein, 27 aa, Artificial Sequence
  Cyclic GFR-binding peptide
  MOD_RES (27)..(27): Xaa is C or S
GRHKRLIIQQKDNYYLMSTASMKTPTX

SEQ ID NO: 80715 - protein, 26 aa, Artificial Sequence
  Cyclic GFR-binding peptide
VVMNRYKKLIVNSSDDFYLVSIANLQ

SEQ ID NO: 80716 - protein, 28 aa, Artificial Sequence
  Cyclic GFR-binding peptide
  MOD_RES (28)..(28): Xaa is C or S
MNPIKGYIVNSSDDFYLVNIPSLQTPAX

SEQ ID NO: 80717 - protein, 34 aa, Artificial Sequence; identical to SEQ ID NO: 31945
  Cyclic GFR-binding peptide
  MOD_RES (30)..(31): Xaa is C or S

SEQ ID NO: 80718 - protein, 36 aa, Artificial Sequence; identical to SEQ ID NO: 40537
  Cyclic GFR-binding peptide
  MOD_RES (2)..(34)..(35): Xaa is C or S

SEQ ID NO: 80719 - protein, 38 aa, Artificial Sequence; identical to SEQ ID NO: 40539
  Cyclic GFR-binding peptide
  MOD_RES (32)..(33): Xaa is C or S

SEQ ID NO: 80720 - protein, 24 aa, Artificial Sequence
  Cyclic GFR-binding peptide
EYKFKVKPKRGVLYLISIPELAQP

SEQ ID NO: 80721 - protein, 38 aa, Artificial Sequence; identical to SEQ ID NO: 3669
  Cyclic GFR-binding peptide
  MOD_RES (2)..(34)..(35): Xaa is C or S

SEQ ID NO: 80722 - protein, 37 aa, Artificial Sequence; identical to SEQ ID NO: 3670
  Cyclic GFR-binding peptide
  MOD_RES (31)..(32): Xaa is C or S

SEQ ID NO: 80723 - protein, 33 aa, Artificial Sequence; identical to SEQ ID NO: 3672
  Cyclic GFR-binding peptide
  MOD_RES (31)..(32): Xaa is C or S

SEQ ID NO: 80724 - protein, 38 aa, Artificial Sequence; identical to SEQ ID NO: 31955
  Cyclic GFR-binding peptide
  MOD_RES (2)..(33)..(34): Xaa is C or S

SEQ ID NO: 80725 - protein, 35 aa, Artificial Sequence; identical to SEQ ID NO: 3674
  Cyclic GFR-binding peptide
  MOD_RES (31)..(32): Xaa is C or S

SEQ ID NO: 80726 - protein, 24 aa, Artificial Sequence
  Cyclic GFR-binding peptide
RYKKLIVNSSDDFYLVSIANLKTP

SEQ ID NO: 80727 - protein, 26 aa, Artificial Sequence
  Cyclic GFR-binding peptide
MPIKGYVKPTRGVFYLINIPSLDQPV

SEQ ID NO: 80728 - protein, 36 aa, Artificial Sequence
  Cyclic GFR-binding peptide
  MOD_RES (1)..(3)..(35)..(36): Xaa is C or S
XGXRDVVMGRHKRLIIQQKDNYYLMSTASMKTPTXX

SEQ ID NO: 80729 - protein, 34 aa, Artificial Sequence
  Cyclic GFR-binding peptide
  MOD_RES (2)..(33)..(34): Xaa is C or S
KXSKVIMPIKGYIKPTKGIFYLINIPSLDQSVXX

SEQ ID NO: 80730 - protein, 29 aa, Artificial Sequence
  Cyclic GFR-binding peptide
  MOD_RES (27)..(28): Xaa is C or S
MPIKGYVKPTRGVFYLINIPSLDQPVXXP

SEQ ID NO: 80731 - protein, 21 aa, Artificial Sequence
  Cyclic GFR-binding peptide
RHKRLVVKDYEDYYLMSTASL

SEQ ID NO: 80732 - protein, 28 aa, Artificial Sequence
  Cyclic GFR-binding peptide
  MOD_RES (2)..(2): Xaa is C or S
KXSRVIMRHKRLVKPKRGVYYLISTASL

SEQ ID NO: 80733 - protein, 34 aa, Artificial Sequence; identical to SEQ ID NO: 3682
  Cyclic GFR-binding peptide
  MOD_RES (28)..(29): Xaa is C or S

SEQ ID NO: 80734 - protein, 34 aa, Artificial Sequence
  Cyclic GFR-binding peptide
  MOD_RES (32)..(33): Xaa is C or S
ESVAMGRHKRLYTVVGKDYYLISTASLKTPVXXA

SEQ ID NO: 80735 - protein, 35 aa, Artificial Sequence; identical to SEQ ID NO: 40544
  Cyclic GFR-binding peptide
  MOD_RES (30)..(31): Xaa is C or S

SEQ ID NO: 80736 - protein, 38 aa, Artificial Sequence; identical to SEQ ID NO: 3683
  Cyclic GFR-binding peptide
  MOD_RES (1)..(33)..(34): Xaa is C or S

SEQ ID NO: 80737 - protein, 30 aa, Artificial Sequence; identical to SEQ ID NO: 3684
  Cyclic GFR-binding peptide

SEQ ID NO: 80738 - protein, 37 aa, Artificial Sequence; identical to SEQ ID NO: 3686
  Cyclic GFR-binding peptide
  MOD_RES (2)..(4)..(35)..(36): Xaa is C or S

SEQ ID NO: 80739 - protein, 31 aa, Artificial Sequence; identical to SEQ ID NO: 40547
  Cyclic GFR-binding peptide

SEQ ID NO: 80740 - protein, 34 aa, Artificial Sequence
  Cyclic GFR-binding peptide
  MOD_RES (1)..(33)..(34): Xaa is C or S
XSEVVMDEYKFKVVNNASDLYLISIPELRTPVXX

SEQ ID NO: 80741 - protein, 37 aa, Artificial Sequence; identical to SEQ ID NO: 40550
  Cyclic GFR-binding peptide
  MOD_RES (31)..(32): Xaa is C or S

SEQ ID NO: 80742 - protein, 24 aa, Artificial Sequence
  Cyclic GFR-binding peptide
KVVMPIKGYVKPTRGVFYLINIPS

SEQ ID NO: 80743 - protein, 30 aa, Artificial Sequence
  Cyclic GFR-binding peptide
  MOD_RES (26)..(27): Xaa is C or S
RHKRLVVNNAADYYLISTASLRAPVXXSAP

SEQ ID NO: 80744 - protein, 37 aa, Artificial Sequence
  Cyclic GFR-binding peptide
  MOD_RES (31)..(32): Xaa is C or S
EVVMDYHYKLVVNNASDKYLISIPSLRTPVXXTPPTS

SEQ ID NO: 80745 - protein, 28 aa, Artificial Sequence
  Cyclic GFR-binding peptide
  MOD_RES (1)..(3): Xaa is C or S
XKXSRVIMRYKKLVKPKRGVFYLISIAN

SEQ ID NO: 80746 - protein, 25 aa, Artificial Sequence
  Cyclic GFR-binding peptide
VMERHKRLVVKDYEDYYLMSTASLE

SEQ ID NO: 80747 - protein, 30 aa, Artificial Sequence; identical to SEQ ID NO: 3693
  Cyclic GFR-binding peptide
  MOD_RES (28)..(29): Xaa is C or S

SEQ ID NO: 80748 - protein, 28 aa, Artificial Sequence
  Cyclic GFR-binding peptide
  MOD_RES (1)..(1): Xaa is C or S
XEAVSMGEPIKGYTPVGMDDFYLVNIPS

SEQ ID NO: 80749 - protein, 39 aa, Artificial Sequence; identical to SEQ ID NO: 3695
  Cyclic GFR-binding peptide
  MOD_RES (2)..(33)..(34): Xaa is C or S

SEQ ID NO: 80750 - protein, 30 aa, Artificial Sequence
  Cyclic GFR-binding peptide
  MOD_RES (26)..(27): Xaa is C or S
RYKKLVVNKNEDFYLISIANMKEPVXXPEP

SEQ ID NO: 80751 - protein, 27 aa, Artificial Sequence
  Cyclic GFR-binding peptide
VMEYHYKLVVKDYEDKYLMSIPSLETP

SEQ ID NO: 80752 - protein, 36 aa, Artificial Sequence; identical to SEQ ID NO: 3704
  Cyclic GFR-binding peptide
  MOD_RES (1)..(32)..(33): Xaa is C or S

SEQ ID NO: 80753 - protein, 28 aa, Artificial Sequence
  Cyclic GFR-binding peptide
  MOD_RES (1)..(1): Xaa is C or S
XESVAMGRYKKLYTVVGKDFYLISIANL

SEQ ID NO: 80754 - protein, 26 aa, Artificial Sequence
  Cyclic GFR-binding peptide
EVIMRYKKLLLVRGNDFYLMSIANTK

SEQ ID NO: 80755 - protein, 38 aa, Artificial Sequence; identical to SEQ ID NO: 40558
  Cyclic GFR-binding peptide
  MOD_RES (1)..(3)..(36)..(37): Xaa is C or S

SEQ ID NO: 80756 - protein, 31 aa, Artificial Sequence; identical to SEQ ID NO: 31977
  Cyclic GFR-binding peptide

SEQ ID NO: 80757 - protein, 38 aa, Artificial Sequence; identical to SEQ ID NO: 31978
  Cyclic GFR-binding peptide
  MOD_RES (2)..(34)..(35): Xaa is C or S

SEQ ID NO: 80758 - protein, 25 aa, Artificial Sequence
  Cyclic GFR-binding peptide
EEYKFKVVKDYEDLYLMSIPELETP

SEQ ID NO: 80759 - protein, 26 aa, Artificial Sequence
  Cyclic GFR-binding peptide
EEVIMRYKKLLLVRGNDFYLMSIANT

SEQ ID NO: 80760 - protein, 34 aa, Artificial Sequence; identical to SEQ ID NO: 3711
  Cyclic GFR-binding peptide
  MOD_RES (1)..(32)..(33): Xaa is C or S

SEQ ID NO: 80761 - protein, 37 aa, Artificial Sequence; identical to SEQ ID NO: 3714
  Cyclic GFR-binding peptide
  MOD_RES (2)..(4)..(36)..(37): Xaa is C or S

SEQ ID NO: 80762 - protein, 36 aa, Artificial Sequence; identical to SEQ ID NO: 3718
  Cyclic GFR-binding peptide
  MOD_RES (31)..(32): Xaa is C or S

SEQ ID NO: 80763 - protein, 37 aa, Artificial Sequence; identical to SEQ ID NO: 31989
  Cyclic GFR-binding peptide
  MOD_RES (32)..(33): Xaa is C or S

SEQ ID NO: 80764 - protein, 37 aa, Artificial Sequence; identical to SEQ ID NO: 3719
  Cyclic GFR-binding peptide
  MOD_RES (2)..(4)..(36)..(37): Xaa is C or S

SEQ ID NO: 80765 - protein, 34 aa, Artificial Sequence; identical to SEQ ID NO: 3720
  Cyclic GFR-binding peptide
  MOD_RES (29)..(30): Xaa is C or S

SEQ ID NO: 80766 - protein, 39 aa, Artificial Sequence
  Cyclic GFR-binding peptide
  MOD_RES (1)..(3)..(34)..(35): Xaa is C or S
XGXEEVIMRHKRLLLVRGNDYYLMSTASTKVPAXXTSPV

SEQ ID NO: 80767 - protein, 34 aa, Artificial Sequence; identical to SEQ ID NO: 3721
  Cyclic GFR-binding peptide
  MOD_RES (2)..(4): Xaa is C or S

SEQ ID NO: 80768 - protein, 32 aa, Artificial Sequence; identical to SEQ ID NO: 3723
  Cyclic GFR-binding peptide
  MOD_RES (32)..(32): Xaa is C or S

SEQ ID NO: 80769 - protein, 35 aa, Artificial Sequence; identical to SEQ ID NO: 3724
  Cyclic GFR-binding peptide
  MOD_RES (31)..(32): Xaa is C or S

SEQ ID NO: 80770 - protein, 25 aa, Artificial Sequence
  Cyclic GFR-binding peptide
GERYKKLTPVGMDDFYLVSIANLKT

SEQ ID NO: 80771 - protein, 27 aa, Artificial Sequence
  Cyclic GFR-binding peptide
VMGYHYKLIIQQKDNKYLMSIPSMKTP

SEQ ID NO: 80772 - protein, 34 aa, Artificial Sequence; identical to SEQ ID NO: 40577
  Cyclic GFR-binding peptide
  MOD_RES (31)..(32): Xaa is C or S

SEQ ID NO: 80773 - protein, 31 aa, Artificial Sequence; identical to SEQ ID NO: 31999
  Cyclic GFR-binding peptide

SEQ ID NO: 80774 - protein, 38 aa, Artificial Sequence; identical to SEQ ID NO: 32001
  Cyclic GFR-binding peptide
  MOD_RES (32)..(33): Xaa is C or S

SEQ ID NO: 80775 - protein, 28 aa, Artificial Sequence
  Cyclic GFR-binding peptide
EVIMRHKRLLLVRGNDYYLMSTASTKVP

SEQ ID NO: 80776 - protein, 24 aa, Artificial Sequence
  Cyclic GFR-binding peptide
RYKKLYTVVGKDFYLISIANLKTP

SEQ ID NO: 80777 - protein, 38 aa, Artificial Sequence; identical to SEQ ID NO: 32005
  Cyclic GFR-binding peptide
  MOD_RES (1)..(3)..(35)..(36): Xaa is C or S

SEQ ID NO: 80778 - protein, 24 aa, Artificial Sequence
  Cyclic GFR-binding peptide
VMRHKRLVKPTRGVYYLISTASLD

SEQ ID NO: 80779 - protein, 33 aa, Artificial Sequence; identical to SEQ ID NO: 40590
  Cyclic GFR-binding peptide
  MOD_RES (2)..(2): Xaa is C or S

SEQ ID NO: 80780 - protein, 33 aa, Artificial Sequence
  Cyclic GFR-binding peptide
  MOD_RES (29)..(30): Xaa is C or S
VMGEYKFKIIQQKDNLYLMSIPEMKTPTXXPGA

SEQ ID NO: 80781 - protein, 30 aa, Artificial Sequence; identical to SEQ ID NO: 3740
  Cyclic GFR-binding peptide
  MOD_RES (2)..(4): Xaa is C or S

SEQ ID NO: 80782 - protein, 34 aa, Artificial Sequence; identical to SEQ ID NO: 32011
  Cyclic GFR-binding peptide
  MOD_RES (2)..(4): Xaa is C or S

SEQ ID NO: 80783 - protein, 27 aa, Artificial Sequence
  Cyclic GFR-binding peptide
  MOD_RES (26)..(27): Xaa is C or S
RYKKLVVNNAADFYLISIANLRAPVXX

SEQ ID NO: 80784 - protein, 42 aa, Artificial Sequence; identical to SEQ ID NO: 32013
  Cyclic GFR-binding peptide
  MOD_RES (2)..(4)..(36)..(37): Xaa is C or S

SEQ ID NO: 80785 - protein, 29 aa, Artificial Sequence
  Cyclic GFR-binding peptide
  MOD_RES (2)..(2): Xaa is C or S
GXGEVVMDRHKRLVVKENEDYYLMSTASL

SEQ ID NO: 80786 - protein, 27 aa, Artificial Sequence
  Cyclic GFR-binding peptide
  MOD_RES (26)..(27): Xaa is C or S
YHYKLVVNNAADKYLISIPSLRAPVXX

SEQ ID NO: 80787 - protein, 33 aa, Artificial Sequence; identical to SEQ ID NO: 40598
  Cyclic GFR-binding peptide
  MOD_RES (1)..(33): Xaa is C or S

SEQ ID NO: 80788 - protein, 29 aa, Artificial Sequence
  Cyclic GFR-binding peptide
  MOD_RES (1)..(1): Xaa is C or S
XARVVMNPIKGYIVNSSDDFYLVNIPSLQ

SEQ ID NO: 80789 - protein, 28 aa, Artificial Sequence
  Cyclic GFR-binding peptide
  MOD_RES (28)..(28): Xaa is C or S
MNRYKKLIVNSSDDFYLVSIANLKTPAX

SEQ ID NO: 80790 - protein, 31 aa, Artificial Sequence; identical to SEQ ID NO: 3750
  Cyclic GFR-binding peptide
  MOD_RES (1)..(1): Xaa is C or S

SEQ ID NO: 80791 - protein, 33 aa, Artificial Sequence; identical to SEQ ID NO: 3751
  Cyclic GFR-binding peptide
  MOD_RES (1)..(3): Xaa is C or S

SEQ ID NO: 80792 - protein, 31 aa, Artificial Sequence; identical to SEQ ID NO: 3752
  Cyclic GFR-binding peptide
  MOD_RES (27)..(28): Xaa is C or S

SEQ ID NO: 80793 - protein, 39 aa, Artificial Sequence; identical to SEQ ID NO: 40606
  Cyclic GFR-binding peptide
  MOD_RES (1)..(3)..(35)..(36): Xaa is C or S

SEQ ID NO: 80794 - protein, 28 aa, Artificial Sequence
  Cyclic GFR-binding peptide
VVMNEYKFKIVNSSDDLYLVSIPELQTP

SEQ ID NO: 80795 - protein, 27 aa, Artificial Sequence
  Cyclic GFR-binding peptide
  MOD_RES (26)..(27): Xaa is C or S
RHKRLYTVVGKDYYLISTASLKTPVXX

SEQ ID NO: 80796 - protein, 30 aa, Artificial Sequence; identical to SEQ ID NO: 32029
  Cyclic GFR-binding peptide
  MOD_RES (1)..(1): Xaa is C or S

SEQ ID NO: 80797 - protein, 36 aa, Artificial Sequence; identical to SEQ ID NO: 32030
  Cyclic GFR-binding peptide
  MOD_RES (1)..(3)..(34)..(35): Xaa is C or S

SEQ ID NO: 80798 - protein, 27 aa, Artificial Sequence
  Cyclic GFR-binding peptide
VMERHKRLVVKDYEDYYLMSTASLETP

SEQ ID NO: 80799 - protein, 30 aa, Artificial Sequence; identical to SEQ ID NO: 32032
  Cyclic GFR-binding peptide

SEQ ID NO: 80800 - protein, 30 aa, Artificial Sequence; identical to SEQ ID NO: 75274
  Cyclic GFR-binding peptide
  MOD_RES (1)..(3): Xaa is C or S

SEQ ID NO: 80801 - protein, 38 aa, Artificial Sequence
  Cyclic GFR-binding peptide
  MOD_RES (1)..(33)..(34): Xaa is C or S
XSEVTMNRYKKLVVNKNEDFYLISIANMKEPVXXPEPI

SEQ ID NO: 80802 - protein, 29 aa, Artificial Sequence
  Cyclic GFR-binding peptide
AEVVMDRHKRLVVNNAADYYLISTASLRA

SEQ ID NO: 80803 - protein, 29 aa, Artificial Sequence
  Cyclic GFR-binding peptide
  MOD_RES (1)..(3): Xaa is C or S
XGXESVAMGRYKKLYTVVGKDFYLISIAN

SEQ ID NO: 80804 - protein, 40 aa, Artificial Sequence; identical to SEQ ID NO: 40627
  Cyclic GFR-binding peptide
  MOD_RES (2)..(4)..(36)..(37): Xaa is C or S

SEQ ID NO: 80805 - protein, 27 aa, Artificial Sequence
  Cyclic GFR-binding peptide
AKVVMNRYKKLIVNNSSDFYLVSIANL

SEQ ID NO: 80806 - protein, 29 aa, Artificial Sequence
  Cyclic GFR-binding peptide
  MOD_RES (29)..(29): Xaa is C or S
TMNEYKFKVVNKNEDLYLISIPEMKEPVX

SEQ ID NO: 80807 - protein, 28 aa, Artificial Sequence
  Cyclic GFR-binding peptide
SVAMGYHYKLYTVVGKDKYLISIPSLKT

SEQ ID NO: 80808 - protein, 32 aa, Artificial Sequence
  Cyclic GFR-binding peptide
  MOD_RES (31)..(32): Xaa is C or S
DVVMGYHYKLIIQQKDNKYLMSIPSMKTPTXX

SEQ ID NO: 80809 - protein, 21 aa, Artificial Sequence
  Cyclic GFR-binding peptide
RYKKLVVNKNEDFYLISIANM

SEQ ID NO: 80810 - protein, 40 aa, Artificial Sequence; identical to SEQ ID NO: 32046
  Cyclic GFR-binding peptide
  MOD_RES (1)..(3)..(36)..(37): Xaa is C or S

SEQ ID NO: 80811 - protein, 30 aa, Artificial Sequence
  Cyclic GFR-binding peptide
  MOD_RES (30)..(30): Xaa is C or S
VTMNRYKKLVVNKNEDFYLISIANMKEPVX

SEQ ID NO: 80812 - protein, 33 aa, Artificial Sequence; identical to SEQ ID NO: 3776
  Cyclic GFR-binding peptide
  MOD_RES (32)..(33): Xaa is C or S

SEQ ID NO: 80813 - protein, 28 aa, Artificial Sequence
  Cyclic GFR-binding peptide
VVMRYKKLVKPTRGVFYLISIANLDQPV

SEQ ID NO: 80814 - protein, 35 aa, Artificial Sequence; identical to SEQ ID NO: 3780
  Cyclic GFR-binding peptide
  MOD_RES (2)..(33)..(34): Xaa is C or S

SEQ ID NO: 80815 - protein, 38 aa, Artificial Sequence; identical to SEQ ID NO: 40641
  Cyclic GFR-binding peptide
  MOD_RES (32)..(33): Xaa is C or S

SEQ ID NO: 80816 - protein, 33 aa, Artificial Sequence; identical to SEQ ID NO: 3786
  Cyclic GFR-binding peptide
  MOD_RES (1)..(33): Xaa is C or S

SEQ ID NO: 80817 - protein, 30 aa, Artificial Sequence
  Cyclic GFR-binding peptide
  MOD_RES (1)..(1): Xaa is C or S
XSEVTMNRYKKLVVNKNEDFYLISIANMKE

SEQ ID NO: 80818 - protein, 29 aa, Artificial Sequence
  Cyclic GFR-binding peptide
  MOD_RES (1)..(3): Xaa is C or S
XGXSEVVMDEYKFKVVNNASDLYLISIPE

SEQ ID NO: 80819 - protein, 34 aa, Artificial Sequence; identical to SEQ ID NO: 3790
  Cyclic GFR-binding peptide
  MOD_RES (1)..(3): Xaa is C or S

SEQ ID NO: 80820 - protein, 28 aa, Artificial Sequence
  Cyclic GFR-binding peptide
VIMYHYKLVKPKRGVKYLISIPSLAQPV

SEQ ID NO: 80821 - protein, 35 aa, Artificial Sequence; identical to SEQ ID NO: 3792
  Cyclic GFR-binding peptide
  MOD_RES (2)..(34)..(35): Xaa is C or S

SEQ ID NO: 80822 - protein, 35 aa, Artificial Sequence; identical to SEQ ID NO: 40652
  Cyclic GFR-binding peptide
  MOD_RES (29)..(30): Xaa is C or S

SEQ ID NO: 80823 - protein, 33 aa, Artificial Sequence; identical to SEQ ID NO: 40653
  Cyclic GFR-binding peptide
  MOD_RES (2)..(4): Xaa is C or S

SEQ ID NO: 80824 - protein, 24 aa, Artificial Sequence
  Cyclic GFR-binding peptide
VVMEPIKGYVVKDYEDFYLMNIPS

SEQ ID NO: 80825 - protein, 30 aa, Artificial Sequence; identical to SEQ ID NO: 3793
  Cyclic GFR-binding peptide
  MOD_RES (2)..(4): Xaa is C or S

SEQ ID NO: 80826 - protein, 26 aa, Artificial Sequence
  Cyclic GFR-binding peptide
MNRYKKLVVNKNEDFYLISIANMKEP

SEQ ID NO: 80827 - protein, 21 aa, Artificial Sequence
  Cyclic GFR-binding peptide
DEYKFKVVNNAADLYLISIPE

SEQ ID NO: 80828 - protein, 28 aa, Artificial Sequence
  Cyclic GFR-binding peptide
DVVMGRHKRLIIQQKDNYYLMSTASMKT

SEQ ID NO: 80829 - protein, 24 aa, Artificial Sequence
  Cyclic GFR-binding peptide
YHYKLIVNSSDDKYLVSIPSLKTP

SEQ ID NO: 80830 - protein, 23 aa, Artificial Sequence
  Cyclic GFR-binding peptide
MDRHKRLVVNNAADYYLISTASL

SEQ ID NO: 80831 - protein, 40 aa, Artificial Sequence; identical to SEQ ID NO: 40661
  Cyclic GFR-binding peptide
  MOD_RES (1)..(3)..(35)..(36): Xaa is C or S

SEQ ID NO: 80832 - protein, 34 aa, Artificial Sequence; identical to SEQ ID NO: 3798
  Cyclic GFR-binding peptide
  MOD_RES (31)..(32): Xaa is C or S

SEQ ID NO: 80833 - protein, 40 aa, Artificial Sequence; identical to SEQ ID NO: 3799
  Cyclic GFR-binding peptide
  MOD_RES (2)..(4)..(36)..(37): Xaa is C or S

SEQ ID NO: 80834 - protein, 24 aa, Artificial Sequence
  Cyclic GFR-binding peptide
MDEYKFKVVNNASDLYLISIPELR

SEQ ID NO: 80835 - protein, 34 aa, Artificial Sequence; identical to SEQ ID NO: 3801
  Cyclic GFR-binding peptide
  MOD_RES (2)..(34): Xaa is C or S

SEQ ID NO: 80836 - protein, 29 aa, Artificial Sequence
  Cyclic GFR-binding peptide
VAMGPIKGYYTVVGKDFYLINIPSLKTPV

SEQ ID NO: 80837 - protein, 33 aa, Artificial Sequence
  Cyclic GFR-binding peptide
  MOD_RES (2)..(4): Xaa is C or S
RXGXAEVVMDRHKRLVVNNAADYYLISTASLRA

SEQ ID NO: 80838 - protein, 29 aa, Artificial Sequence
  Cyclic GFR-binding peptide
VAMGYHYKLYTVVGKDKYLISIPSLKTPV

SEQ ID NO: 80839 - protein, 38 aa, Artificial Sequence; identical to SEQ ID NO: 32074
  Cyclic GFR-binding peptide
  MOD_RES (2)..(34): Xaa is C or S

SEQ ID NO: 80840 - protein, 42 aa, Artificial Sequence; identical to SEQ ID NO: 3802
  Cyclic GFR-binding peptide
  MOD_RES (2)..(4)..(36)..(37): Xaa is C or S

SEQ ID NO: 80841 - protein, 25 aa, Artificial Sequence
  Cyclic GFR-binding peptide
VMGYHYKLIIQQKDNKYLMSIPSMK

SEQ ID NO: 80842 - protein, 33 aa, Artificial Sequence; identical to SEQ ID NO: 3804
  Cyclic GFR-binding peptide
  MOD_RES (1)..(32)..(33): Xaa is C or S

SEQ ID NO: 80843 - protein, 35 aa, Artificial Sequence; identical to SEQ ID NO: 32079
  Cyclic GFR-binding peptide
  MOD_RES (2)..(4): Xaa is C or S

SEQ ID NO: 80844 - protein, 35 aa, Artificial Sequence; identical to SEQ ID NO: 3806
  Cyclic GFR-binding peptide
  MOD_RES (31)..(32): Xaa is C or S

SEQ ID NO: 80845 - protein, 21 aa, Artificial Sequence
  Cyclic GFR-binding peptide
RYKKLIVNNSSDFYLVSIANL

SEQ ID NO: 80846 - protein, 33 aa, Artificial Sequence; identical to SEQ ID NO: 3813
  Cyclic GFR-binding peptide
  MOD_RES (31)..(32): Xaa is C or S

SEQ ID NO: 80847 - protein, 30 aa, Artificial Sequence
  Cyclic GFR-binding peptide
  MOD_RES (26)..(27): Xaa is C or S
YHYKLVVNKNEDKYLISIPSMKEPVXXPEP

SEQ ID NO: 80848 - protein, 33 aa, Artificial Sequence
  Cyclic GFR-binding peptide
  MOD_RES (27)..(28): Xaa is C or S
NRHKRLIVNSSDDYYLVSTASLKTPAXXPKPVH

SEQ ID NO: 80849 - protein, 31 aa, Artificial Sequence; identical to SEQ ID NO: 3820
  Cyclic GFR-binding peptide
  MOD_RES (28)..(29): Xaa is C or S

SEQ ID NO: 80850 - protein, 38 aa, Artificial Sequence
  Cyclic GFR-binding peptide
  MOD_RES (1)..(3)..(35)..(36): Xaa is C or S
XAXSEVTMNYHYKLVVNKNEDKYLISIPSMKEPVXXPE

SEQ ID NO: 80851 - protein, 25 aa, Artificial Sequence
  Cyclic GFR-binding peptide
MGEEYKFKTPVGMDDLYLVSIPELK

SEQ ID NO: 80852 - protein, 36 aa, Artificial Sequence; identical to SEQ ID NO: 3822
  Cyclic GFR-binding peptide
  MOD_RES (2)..(4): Xaa is C or S

SEQ ID NO: 80853 - protein, 38 aa, Artificial Sequence; identical to SEQ ID NO: 3825
  Cyclic GFR-binding peptide
  MOD_RES (2)..(33)..(34): Xaa is C or S

SEQ ID NO: 80854 - protein, 28 aa, Artificial Sequence
  Cyclic GFR-binding peptide
  MOD_RES (1)..(3): Xaa is C or S
XKXSRVIMYHYKLVKPKRGVKYLISIPS

SEQ ID NO: 80855 - protein, 30 aa, Artificial Sequence
  Cyclic GFR-binding peptide
  MOD_RES (27)..(28): Xaa is C or S
GYHYKLIIQQKDNKYLMSIPSMKTPTXXPG

SEQ ID NO: 80856 - protein, 31 aa, Artificial Sequence; identical to SEQ ID NO: 3829
  Cyclic GFR-binding peptide
  MOD_RES (26)..(27): Xaa is C or S

SEQ ID NO: 80857 - protein, 24 aa, Artificial Sequence
  Cyclic GFR-binding peptide
EEYKFKTPVGMDDLYLVSIPELKT

SEQ ID NO: 80858 - protein, 34 aa, Artificial Sequence; identical to SEQ ID NO: 3831
  Cyclic GFR-binding peptide
  MOD_RES (2)..(4): Xaa is C or S

SEQ ID NO: 80859 - protein, 34 aa, Artificial Sequence; identical to SEQ ID NO: 3836
  Cyclic GFR-binding peptide
  MOD_RES (1)..(33)..(34): Xaa is C or S

SEQ ID NO: 80860 - protein, 29 aa, Artificial Sequence
  Cyclic GFR-binding peptide
KVIMYHYKLIKPTKGIKYLISIPSLDQSV

SEQ ID NO: 80861 - protein, 29 aa, Artificial Sequence
  Cyclic GFR-binding peptide
  MOD_RES (2)..(4): Xaa is C or S
SXKXSKVIMRHKRLIKPTKGIYYLISTAS

SEQ ID NO: 80862 - protein, 35 aa, Artificial Sequence; identical to SEQ ID NO: 3841
  Cyclic GFR-binding peptide
  MOD_RES (2)..(34)..(35): Xaa is C or S

SEQ ID NO: 80863 - protein, 30 aa, Artificial Sequence; identical to SEQ ID NO: 40701
  Cyclic GFR-binding peptide
  MOD_RES (29)..(30): Xaa is C or S

SEQ ID NO: 80864 - protein, 30 aa, Artificial Sequence; identical to SEQ ID NO: 3843
  Cyclic GFR-binding peptide
  MOD_RES (2)..(2): Xaa is C or S

SEQ ID NO: 80865 - protein, 39 aa, Artificial Sequence; identical to SEQ ID NO: 40703
  Cyclic GFR-binding peptide
  MOD_RES (1)..(33)..(34): Xaa is C or S

SEQ ID NO: 80866 - protein, 32 aa, Artificial Sequence; identical to SEQ ID NO: 40706
  Cyclic GFR-binding peptide
  MOD_RES (27)..(28): Xaa is C or S

SEQ ID NO: 80867 - protein, 36 aa, Artificial Sequence; identical to SEQ ID NO: 32124
  Cyclic GFR-binding peptide
  MOD_RES (30)..(31): Xaa is C or S

SEQ ID NO: 80868 - protein, 33 aa, Artificial Sequence
  Cyclic GFR-binding peptide
  MOD_RES (28)..(29): Xaa is C or S
MGRHKRLIIQQKDNYYLMSTASMKTPTXXPGAS

SEQ ID NO: 80869 - protein, 29 aa, Artificial Sequence
  Cyclic GFR-binding peptide
  MOD_RES (29)..(29): Xaa is C or S
VMNYHYKLIVNNSSDKYLVSIPSLKTPAX

SEQ ID NO: 80870 - protein, 32 aa, Artificial Sequence; identical to SEQ ID NO: 3849
  Cyclic GFR-binding peptide
  MOD_RES (2)..(4): Xaa is C or S

SEQ ID NO: 80871 - protein, 32 aa, Artificial Sequence
  Cyclic GFR-binding peptide
  MOD_RES (31)..(32): Xaa is C or S
EVVMDEYKFKVVNNASDLYLISIPELRTPVXX

SEQ ID NO: 80872 - protein, 26 aa, Artificial Sequence
  Cyclic GFR-binding peptide
NRHKRLIVNSSDDYYLVSTASLQTPA

SEQ ID NO: 80873 - protein, 28 aa, Artificial Sequence
  Cyclic GFR-binding peptide
  MOD_RES (28)..(28): Xaa is C or S
IMPIKGYVKPKRGVFYLINIPSLAQPVX

SEQ ID NO: 80874 - protein, 41 aa, Artificial Sequence; identical to SEQ ID NO: 40711
  Cyclic GFR-binding peptide
  MOD_RES (2)..(4)..(36)..(37): Xaa is C or S

SEQ ID NO: 80875 - protein, 24 aa, Artificial Sequence
  Cyclic GFR-binding peptide
VIMEYKFKVKPKRGVLYLISIPEL

SEQ ID NO: 80876 - protein, 31 aa, Artificial Sequence
  Cyclic GFR-binding peptide
  MOD_RES (29)..(30): Xaa is C or S
VMGRHKRLIIQQKDNYYLMSTASMKTPTXXP

SEQ ID NO: 80877 - protein, 35 aa, Artificial Sequence; identical to SEQ ID NO: 40716
  Cyclic GFR-binding peptide
  MOD_RES (29)..(30): Xaa is C or S

SEQ ID NO: 80878 - protein, 26 aa, Artificial Sequence
  Cyclic GFR-binding peptide
VMDYHYKLVVKENEDKYLMSIPSLET

SEQ ID NO: 80879 - protein, 36 aa, Artificial Sequence; identical to SEQ ID NO: 3856
  Cyclic GFR-binding peptide
  MOD_RES (31)..(32): Xaa is C or S

SEQ ID NO: 80880 - protein, 38 aa, Artificial Sequence; identical to SEQ ID NO: 75313
  Cyclic GFR-binding peptide
  MOD_RES (1)..(3)..(35)..(36): Xaa is C or S

SEQ ID NO: 80881 - protein, 28 aa, Artificial Sequence
  Cyclic GFR-binding peptide
  MOD_RES (2)..(2): Xaa is C or S
GXAEVVMDRYKKLVVNNAADFYLISIAN

SEQ ID NO: 80882 - protein, 27 aa, Artificial Sequence
  Cyclic GFR-binding peptide
SMGEPIKGYTPVGMDDFYLVNIPSLKT

SEQ ID NO: 80883 - protein, 37 aa, Artificial Sequence
  Cyclic GFR-binding peptide
  MOD_RES (31)..(32): Xaa is C or S
EVVMDRHKRLVVNNASDYYLISTASLRTPVXXTPPTS

SEQ ID NO: 80884 - protein, 31 aa, Artificial Sequence; identical to SEQ ID NO: 3860
  Cyclic GFR-binding peptide
  MOD_RES (1)..(1): Xaa is C or S

SEQ ID NO: 80885 - protein, 25 aa, Artificial Sequence
  Cyclic GFR-binding peptide
VVMNYHYKLIVNNSSDKYLVSIPSL

SEQ ID NO: 80886 - protein, 36 aa, Artificial Sequence; identical to SEQ ID NO: 40728
  Cyclic GFR-binding peptide
  MOD_RES (1)..(33): Xaa is C or S

SEQ ID NO: 80887 - protein, 27 aa, Artificial Sequence
  Cyclic GFR-binding peptide
VIMYHYKLIKPTKGIKYLISIPSLDQS

SEQ ID NO: 80888 - protein, 27 aa, Artificial Sequence
  Cyclic GFR-binding peptide
RVVMNEYKFKIVNSSDDLYLVSIPELK

SEQ ID NO: 80889 - protein, 32 aa, Artificial Sequence
  Cyclic GFR-binding peptide
  MOD_RES (27)..(28): Xaa is C or S
MEYKFKLLVRGNDLYLMSIPETKVPAXXTSPV

SEQ ID NO: 80890 - protein, 37 aa, Artificial Sequence; identical to SEQ ID NO: 40733
  Cyclic GFR-binding peptide
  MOD_RES (31)..(32): Xaa is C or S

SEQ ID NO: 80891 - protein, 27 aa, Artificial Sequence
  Cyclic GFR-binding peptide
  MOD_RES (26)..(27): Xaa is C or S
RYKKLVKPKRGVFYLISIANLAQPVXX

SEQ ID NO: 80892 - protein, 31 aa, Artificial Sequence; identical to SEQ ID NO: 3868
  Cyclic GFR-binding peptide
  MOD_RES (29)..(30): Xaa is C or S

SEQ ID NO: 80893 - protein, 34 aa, Artificial Sequence; identical to SEQ ID NO: 3869
  Cyclic GFR-binding peptide
  MOD_RES (29)..(30): Xaa is C or S

SEQ ID NO: 80894 - protein, 30 aa, Artificial Sequence; identical to SEQ ID NO: 3873
  Cyclic GFR-binding peptide
  MOD_RES (30)..(30): Xaa is C or S

SEQ ID NO: 80895 - protein, 29 aa, Artificial Sequence
  Cyclic GFR-binding peptide
  MOD_RES (28)..(29): Xaa is C or S
MERYKKLVVKDYEDFYLMSIANLETPVXX

SEQ ID NO: 80896 - protein, 28 aa, Artificial Sequence
  Cyclic GFR-binding peptide
VVMDRHKRLVVNNAADYYLISTASLRAP

SEQ ID NO: 80897 - protein, 34 aa, Artificial Sequence; identical to SEQ ID NO: 75329
  Cyclic GFR-binding peptide
  MOD_RES (1)..(33)..(34): Xaa is C or S

SEQ ID NO: 80898 - protein, 26 aa, Artificial Sequence
  Cyclic GFR-binding peptide
VAMGPIKGYYTVVGKDFYLINIPSLK

SEQ ID NO: 80899 - protein, 22 aa, Artificial Sequence
  Cyclic GFR-binding peptide
IMPIKGYVKPKRGVFYLINIPS

SEQ ID NO: 80900 - protein, 31 aa, Artificial Sequence; identical to SEQ ID NO: 40745
  Cyclic GFR-binding peptide
  MOD_RES (30)..(31): Xaa is C or S

SEQ ID NO: 80901 - protein, 29 aa, Artificial Sequence
  Cyclic GFR-binding peptide
  MOD_RES (1)..(1): Xaa is C or S
XSKVVMYHYKLVKPTRGVKYLISIPSLDQ

SEQ ID NO: 80902 - protein, 22 aa, Artificial Sequence
  Cyclic GFR-binding peptide
MYHYKLVKPTRGVKYLISIPSL

SEQ ID NO: 80903 - protein, 41 aa, Artificial Sequence
  Cyclic GFR-binding peptide
  MOD_RES (2)..(4)..(36)..(37): Xaa is C or S
RXGXSEVVMDYHYKLVVNNASDKYLISIPSLRTPVXXTPPT

SEQ ID NO: 80904 - protein, 34 aa, Artificial Sequence; identical to SEQ ID NO: 3884
  Cyclic GFR-binding peptide
  MOD_RES (30)..(31): Xaa is C or S

SEQ ID NO: 80905 - protein, 42 aa, Artificial Sequence; identical to SEQ ID NO: 40749
  Cyclic GFR-binding peptide
  MOD_RES (2)..(4)..(36)..(37): Xaa is C or S

SEQ ID NO: 80906 - protein, 30 aa, Artificial Sequence; identical to SEQ ID NO: 3886
  Cyclic GFR-binding peptide
  MOD_RES (1)..(1): Xaa is C or S

SEQ ID NO: 80907 - protein, 31 aa, Artificial Sequence; identical to SEQ ID NO: 40752
  Cyclic GFR-binding peptide
  MOD_RES (28)..(29): Xaa is C or S

SEQ ID NO: 80908 - protein, 24 aa, Artificial Sequence
  Cyclic GFR-binding peptide
NRYKKLVVNKNEDFYLISIANMKE

SEQ ID NO: 80909 - protein, 30 aa, Artificial Sequence; identical to SEQ ID NO: 3889
  Cyclic GFR-binding peptide
  MOD_RES (29)..(30): Xaa is C or S

SEQ ID NO: 80910 - protein, 30 aa, Artificial Sequence; identical to SEQ ID NO: 3892
  Cyclic GFR-binding peptide
  MOD_RES (28)..(28): Xaa is C or S

SEQ ID NO: 80911 - protein, 31 aa, Artificial Sequence
  Cyclic GFR-binding peptide
  MOD_RES (30)..(31): Xaa is C or S
VVMGEYKFKIIQQKDNLYLMSIPEMKTPTXX

SEQ ID NO: 80912 - protein, 29 aa, Artificial Sequence
  Cyclic GFR-binding peptide
  MOD_RES (28)..(29): Xaa is C or S
MNPIKGYIVNSSDDFYLVNIPSLQTPAXX

SEQ ID NO: 80913 - protein, 26 aa, Artificial Sequence
  Cyclic GFR-binding peptide
MERHKRLVVKDYEDYYLMSTASLETP

SEQ ID NO: 80914 - protein, 24 aa, Artificial Sequence
  Cyclic GFR-binding peptide
VTMNRHKRLVVNKNEDYYLISTAS

SEQ ID NO: 80915 - protein, 26 aa, Artificial Sequence
  Cyclic GFR-binding peptide
VVMYHYKLVKPTRGVKYLISIPSLDQ

SEQ ID NO: 80916 - protein, 36 aa, Artificial Sequence
  Cyclic GFR-binding peptide
  MOD_RES (1)..(3)..(35)..(36): Xaa is C or S
XGXAEVVMDRHKRLVVNNAADYYLISTASLRAPVXX

SEQ ID NO: 80917 - protein, 36 aa, Artificial Sequence; identical to SEQ ID NO: 32190
  Cyclic GFR-binding peptide
  MOD_RES (30)..(30): Xaa is C or S

SEQ ID NO: 80918 - protein, 33 aa, Artificial Sequence; identical to SEQ ID NO: 3899
  Cyclic GFR-binding peptide
  MOD_RES (2)..(2): Xaa is C or S

SEQ ID NO: 80919 - protein, 39 aa, Artificial Sequence; identical to SEQ ID NO: 32191
  Cyclic GFR-binding peptide
  MOD_RES (1)..(33)..(34): Xaa is C or S

SEQ ID NO: 80920 - protein, 32 aa, Artificial Sequence
  Cyclic GFR-binding peptide
  MOD_RES (26)..(27): Xaa is C or S
RHKRLIVNSSDDYYLVSTASLKTPAXXPKPVH

SEQ ID NO: 80921 - protein, 33 aa, Artificial Sequence; identical to SEQ ID NO: 3901
  Cyclic GFR-binding peptide
  MOD_RES (29)..(30): Xaa is C or S

SEQ ID NO: 80922 - protein, 33 aa, Artificial Sequence
  Cyclic GFR-binding peptide
  MOD_RES (2)..(2): Xaa is C or S
GXRDVVMGYHYKLIIQQKDNKYLMSIPSMKTPT

SEQ ID NO: 80923 - protein, 34 aa, Artificial Sequence
  Cyclic GFR-binding peptide
  MOD_RES (1)..(33)..(34): Xaa is C or S
XAEVVMDRHKRLVVNNAADYYLISTASLRAPVXX

SEQ ID NO: 80924 - protein, 24 aa, Artificial Sequence
  Cyclic GFR-binding peptide
MGEPIKGYTPVGMDDFYLVNIPSL

SEQ ID NO: 80925 - protein, 29 aa, Artificial Sequence
  Cyclic GFR-binding peptide
EVVMEEYKFKVVKDYEDLYLMSIPELETP

SEQ ID NO: 80926 - protein, 29 aa, Artificial Sequence
  Cyclic GFR-binding peptide
SRVIMRHKRLVKPKRGVYYLISTASLAQP

SEQ ID NO: 80927 - protein, 30 aa, Artificial Sequence
  Cyclic GFR-binding peptide
  MOD_RES (26)..(27): Xaa is C or S
RHKRLVVNKNEDYYLISTASMKEPVXXPEP

SEQ ID NO: 80928 - protein, 30 aa, Artificial Sequence; identical to SEQ ID NO: 3904
  Cyclic GFR-binding peptide
  MOD_RES (1)..(3): Xaa is C or S

SEQ ID NO: 80929 - protein, 35 aa, Artificial Sequence; identical to SEQ ID NO: 3906
  Cyclic GFR-binding peptide
  MOD_RES (31)..(32): Xaa is C or S

SEQ ID NO: 80930 - protein, 24 aa, Artificial Sequence
  Cyclic GFR-binding peptide
NPIKGYIVNSSDDFYLVNIPSLQT

SEQ ID NO: 80931 - protein, 29 aa, Artificial Sequence
  Cyclic GFR-binding peptide
  MOD_RES (28)..(29): Xaa is C or S
MNYHYKLIVNSSDDKYLVSIPSLKTPAXX

SEQ ID NO: 80932 - protein, 35 aa, Artificial Sequence; identical to SEQ ID NO: 3908
  Cyclic GFR-binding peptide
  MOD_RES (30)..(31): Xaa is C or S

SEQ ID NO: 80933 - protein, 32 aa, Artificial Sequence; identical to SEQ ID NO: 3910
  Cyclic GFR-binding peptide
  MOD_RES (29)..(30): Xaa is C or S

SEQ ID NO: 80934 - protein, 30 aa, Artificial Sequence; identical to SEQ ID NO: 3911
  Cyclic GFR-binding peptide
  MOD_RES (1)..(3): Xaa is C or S

SEQ ID NO: 80935 - protein, 36 aa, Artificial Sequence
  Cyclic GFR-binding peptide
  MOD_RES (32)..(33): Xaa is C or S
RDVVMGYHYKLIIQQKDNKYLMSIPSMKTPTXXPGA

SEQ ID NO: 80936 - protein, 29 aa, Artificial Sequence
  Cyclic GFR-binding peptide
  MOD_RES (26)..(27): Xaa is C or S
YHYKLVKPTRGVKYLISIPSLDQPVXXPS

SEQ ID NO: 80937 - protein, 36 aa, Artificial Sequence; identical to SEQ ID NO: 14420
  Cyclic GFR-binding peptide
  MOD_RES (2)..(4)..(36): Xaa is C or S

SEQ ID NO: 80938 - protein, 37 aa, Artificial Sequence; identical to SEQ ID NO: 3913
  Cyclic GFR-binding peptide
  MOD_RES (2)..(33)..(34): Xaa is C or S

SEQ ID NO: 80939 - protein, 33 aa, Artificial Sequence; identical to SEQ ID NO: 3914
  Cyclic GFR-binding peptide
  MOD_RES (29)..(30): Xaa is C or S

SEQ ID NO: 80940 - protein, 29 aa, Artificial Sequence
  Cyclic GFR-binding peptide
  MOD_RES (1)..(1): Xaa is C or S
XSKVIMYHYKLIKPTKGIKYLISIPSLDQ

SEQ ID NO: 80941 - protein, 32 aa, Artificial Sequence; identical to SEQ ID NO: 32218
  Cyclic GFR-binding peptide
  MOD_RES (1)..(3): Xaa is C or S

SEQ ID NO: 80942 - protein, 30 aa, Artificial Sequence; identical to SEQ ID NO: 75355
  Cyclic GFR-binding peptide
  MOD_RES (29)..(30): Xaa is C or S

SEQ ID NO: 80943 - protein, 24 aa, Artificial Sequence
  Cyclic GFR-binding peptide
VVMEYHYKLVVKDYEDKYLMSIPS

SEQ ID NO: 80944 - protein, 26 aa, Artificial Sequence
  Cyclic GFR-binding peptide
MNPIKGYIVNSSDDFYLVNIPSLQTP

SEQ ID NO: 80945 - protein, 36 aa, Artificial Sequence; identical to SEQ ID NO: 3923
  Cyclic GFR-binding peptide
  MOD_RES (30)..(31): Xaa is C or S

SEQ ID NO: 80946 - protein, 29 aa, Artificial Sequence
  Cyclic GFR-binding peptide
RVVMNPIKGYIVNSSDDFYLVNIPSLQTP

SEQ ID NO: 80947 - protein, 27 aa, Artificial Sequence
  Cyclic GFR-binding peptide
  MOD_RES (26)..(27): Xaa is C or S
RYKKLIVNNSSDFYLVSIANLKTPAXX

SEQ ID NO: 80948 - protein, 35 aa, Artificial Sequence; identical to SEQ ID NO: 3928
  Cyclic GFR-binding peptide
  MOD_RES (1)..(33)..(34): Xaa is C or S

SEQ ID NO: 80949 - protein, 24 aa, Artificial Sequence
  Cyclic GFR-binding peptide
RYKKLVVNNAADFYLISIANLRAP

SEQ ID NO: 80950 - protein, 25 aa, Artificial Sequence
  Cyclic GFR-binding peptide
VMNPIKGYIVNSSDDFYLVNIPSLK

SEQ ID NO: 80951 - protein, 33 aa, Artificial Sequence; identical to SEQ ID NO: 3931
  Cyclic GFR-binding peptide
  MOD_RES (2)..(4): Xaa is C or S

SEQ ID NO: 80952 - protein, 37 aa, Artificial Sequence
  Cyclic GFR-binding peptide
  MOD_RES (1)..(3)..(35)..(36): Xaa is C or S
XAXSEVTMNEYKFKVVNKNEDLYLISIPEMKEPVXXP

SEQ ID NO: 80953 - protein, 25 aa, Artificial Sequence
  Cyclic GFR-binding peptide
VMNPIKGYIVNNSSDFYLVNIPSLK

SEQ ID NO: 80954 - protein, 38 aa, Artificial Sequence; identical to SEQ ID NO: 40808
  Cyclic GFR-binding peptide
  MOD_RES (2)..(4)..(36)..(37): Xaa is C or S

SEQ ID NO: 80955 - protein, 41 aa, Artificial Sequence; identical to SEQ ID NO: 3935
  Cyclic GFR-binding peptide
  MOD_RES (1)..(3)..(35)..(36): Xaa is C or S

SEQ ID NO: 80956 - protein, 30 aa, Artificial Sequence; identical to SEQ ID NO: 3936
  Cyclic GFR-binding peptide

SEQ ID NO: 80957 - protein, 27 aa, Artificial Sequence
  Cyclic GFR-binding peptide
VVMEEYKFKVVKDYEDLYLMSIPELET

SEQ ID NO: 80958 - protein, 29 aa, Artificial Sequence
  Cyclic GFR-binding peptide
VSMGERYKKLTPVGMDDFYLVSIANLKTP

SEQ ID NO: 80959 - protein, 34 aa, Artificial Sequence; identical to SEQ ID NO: 75369
  Cyclic GFR-binding peptide
  MOD_RES (28)..(29): Xaa is C or S

SEQ ID NO: 80960 - protein, 29 aa, Artificial Sequence
  Cyclic GFR-binding peptide
  MOD_RES (27)..(28): Xaa is C or S
DYHYKLVVKENEDKYLMSIPSLETPVXXA

SEQ ID NO: 80961 - protein, 26 aa, Artificial Sequence
  Cyclic GFR-binding peptide
IMYHYKLLLVRGNDKYLMSIPSTKVP

SEQ ID NO: 80962 - protein, 37 aa, Artificial Sequence; identical to SEQ ID NO: 40815
  Cyclic GFR-binding peptide
  MOD_RES (32)..(33): Xaa is C or S

SEQ ID NO: 80963 - protein, 33 aa, Artificial Sequence; identical to SEQ ID NO: 32250
  Cyclic GFR-binding peptide
  MOD_RES (30)..(31): Xaa is C or S

SEQ ID NO: 80964 - protein, 35 aa, Artificial Sequence; identical to SEQ ID NO: 40816
  Cyclic GFR-binding peptide
  MOD_RES (2)..(35): Xaa is C or S

SEQ ID NO: 80965 - protein, 43 aa, Artificial Sequence; identical to SEQ ID NO: 40817
  Cyclic GFR-binding peptide
  MOD_RES (2)..(4)..(37)..(38): Xaa is C or S

SEQ ID NO: 80966 - protein, 29 aa, Artificial Sequence
  Cyclic GFR-binding peptide
SRVVMNYHYKLIVNSSDDKYLVSIPSLKT

SEQ ID NO: 80967 - protein, 38 aa, Artificial Sequence; identical to SEQ ID NO: 32252
  Cyclic GFR-binding peptide
  MOD_RES (1)..(32)..(33): Xaa is C or S

SEQ ID NO: 80968 - protein, 32 aa, Artificial Sequence; identical to SEQ ID NO: 32253
  Cyclic GFR-binding peptide
  MOD_RES (2)..(4): Xaa is C or S

SEQ ID NO: 80969 - protein, 32 aa, Artificial Sequence; identical to SEQ ID NO: 32254
  Cyclic GFR-binding peptide
  MOD_RES (30)..(31): Xaa is C or S

SEQ ID NO: 80970 - protein, 23 aa, Artificial Sequence
  Cyclic GFR-binding peptide
DYHYKLVVNNASDKYLISIPSLR

SEQ ID NO: 80971 - protein, 20 aa, Artificial Sequence
  Cyclic GFR-binding peptide
YHYKLVKPKRGVKYLISIPS

SEQ ID NO: 80972 - protein, 34 aa, Artificial Sequence; identical to SEQ ID NO: 40820
  Cyclic GFR-binding peptide
  MOD_RES (28)..(28): Xaa is C or S

SEQ ID NO: 80973 - protein, 25 aa, Artificial Sequence
  Cyclic GFR-binding peptide
VIMRHKRLVKPKRGVYYLISTASLA

SEQ ID NO: 80974 - protein, 36 aa, Artificial Sequence; identical to SEQ ID NO: 75372
  Cyclic GFR-binding peptide
  MOD_RES (1)..(32)..(33): Xaa is C or S

SEQ ID NO: 80975 - protein, 31 aa, Artificial Sequence; identical to SEQ ID NO: 3950
  Cyclic GFR-binding peptide
  MOD_RES (30)..(31): Xaa is C or S

SEQ ID NO: 80976 - protein, 32 aa, Artificial Sequence; identical to SEQ ID NO: 3951
  Cyclic GFR-binding peptide
  MOD_RES (27)..(28): Xaa is C or S

SEQ ID NO: 80977 - protein, 29 aa, Artificial Sequence
  Cyclic GFR-binding peptide
  MOD_RES (1)..(1): Xaa is C or S
XARVVMNRYKKLIVNSSDDFYLVSIANLQ

SEQ ID NO: 80978 - protein, 26 aa, Artificial Sequence
  Cyclic GFR-binding peptide
AMGPIKGYYTVVGKDFYLINIPSLKT

SEQ ID NO: 80979 - protein, 30 aa, Artificial Sequence; identical to SEQ ID NO: 3955
  Cyclic GFR-binding peptide
  MOD_RES (29)..(30): Xaa is C or S

SEQ ID NO: 80980 - protein, 39 aa, Artificial Sequence; identical to SEQ ID NO: 3957
  Cyclic GFR-binding peptide
  MOD_RES (1)..(33)..(34): Xaa is C or S

SEQ ID NO: 80981 - protein, 35 aa, Artificial Sequence; identical to SEQ ID NO: 32263
  Cyclic GFR-binding peptide
  MOD_RES (30)..(31): Xaa is C or S

SEQ ID NO: 80982 - protein, 37 aa, Artificial Sequence; identical to SEQ ID NO: 14461
  Cyclic GFR-binding peptide
  MOD_RES (2)..(4)..(36)..(37): Xaa is C or S

SEQ ID NO: 80983 - protein, 30 aa, Artificial Sequence
  Cyclic GFR-binding peptide
  MOD_RES (2)..(2): Xaa is C or S
AXSEVTMNPIKGYVVNKNEDFYLINIPSMK

SEQ ID NO: 80984 - protein, 37 aa, Artificial Sequence
  Cyclic GFR-binding peptide
  MOD_RES (2)..(4)..(35)..(36): Xaa is C or S
LXGXEEVIMYHYKLLLVRGNDKYLMSIPSTKVPAXXT

SEQ ID NO: 80985 - protein, 32 aa, Artificial Sequence; identical to SEQ ID NO: 3963
  Cyclic GFR-binding peptide
  MOD_RES (30)..(31): Xaa is C or S

SEQ ID NO: 80986 - protein, 27 aa, Artificial Sequence
  Cyclic GFR-binding peptide
VVMNYHYKLIVNNSSDKYLVSIPSLKT

SEQ ID NO: 80987 - protein, 29 aa, Artificial Sequence
  Cyclic GFR-binding peptide
SEVVMDRYKKLVVNNASDFYLISIANLRT

SEQ ID NO: 80988 - protein, 40 aa, Artificial Sequence; identical to SEQ ID NO: 40833
  Cyclic GFR-binding peptide
  MOD_RES (2)..(4)..(36)..(37): Xaa is C or S

SEQ ID NO: 80989 - protein, 27 aa, Artificial Sequence
  Cyclic GFR-binding peptide
  MOD_RES (27)..(27): Xaa is C or S
DEYKFKVVNNASDLYLISIPELRTPVX

SEQ ID NO: 80990 - protein, 29 aa, Artificial Sequence
  Cyclic GFR-binding peptide
EEVIMEYKFKLLVRGNDLYLMSIPETKVP

SEQ ID NO: 80991 - protein, 28 aa, Artificial Sequence
  Cyclic GFR-binding peptide
DVVMGEYKFKIIQQKDNLYLMSIPEMKT

SEQ ID NO: 80992 - protein, 31 aa, Artificial Sequence; identical to SEQ ID NO: 32275
  Cyclic GFR-binding peptide
  MOD_RES (1)..(1): Xaa is C or S

SEQ ID NO: 80993 - protein, 32 aa, Artificial Sequence; identical to SEQ ID NO: 75389
  Cyclic GFR-binding peptide
  MOD_RES (1)..(1): Xaa is C or S

SEQ ID NO: 80994 - protein, 27 aa, Artificial Sequence
  Cyclic GFR-binding peptide
  MOD_RES (27)..(27): Xaa is C or S
NYHYKLIVNNSSDKYLVSIPSLKTPAX

SEQ ID NO: 80995 - protein, 33 aa, Artificial Sequence; identical to SEQ ID NO: 3971
  Cyclic GFR-binding peptide
  MOD_RES (31)..(32): Xaa is C or S

SEQ ID NO: 80996 - protein, 30 aa, Artificial Sequence
  Cyclic GFR-binding peptide
  MOD_RES (1)..(1): Xaa is C or S
XRDVVMGYHYKLIIQQKDNKYLMSIPSMKT

SEQ ID NO: 80997 - protein, 41 aa, Artificial Sequence
  Cyclic GFR-binding peptide
  MOD_RES (2)..(4)..(36)..(37): Xaa is C or S
RXAXSEVTMNPIKGYVVNKNEDFYLINIPSMKEPVXXPEPI

SEQ ID NO: 80998 - protein, 32 aa, Artificial Sequence; identical to SEQ ID NO: 32280
  Cyclic GFR-binding peptide
  MOD_RES (2)..(4): Xaa is C or S

SEQ ID NO: 80999 - protein, 27 aa, Artificial Sequence
  Cyclic GFR-binding peptide
MGRHKRLYTVVGKDYYLISTASLKTPV

SEQ ID NO: 81000 - protein, 30 aa, Artificial Sequence; identical to SEQ ID NO: 32283
  Cyclic GFR-binding peptide
  MOD_RES (27)..(28): Xaa is C or S

SEQ ID NO: 81001 - protein, 31 aa, Artificial Sequence; identical to SEQ ID NO: 3979
  Cyclic GFR-binding peptide
  MOD_RES (1)..(3): Xaa is C or S

SEQ ID NO: 81002 - protein, 28 aa, Artificial Sequence
  Cyclic GFR-binding peptide
  MOD_RES (1)..(1): Xaa is C or S
XSRVIMEYKFKVKPKRGVLYLISIPELA

SEQ ID NO: 81003 - protein, 30 aa, Artificial Sequence
  Cyclic GFR-binding peptide
  MOD_RES (30)..(30): Xaa is C or S
KVIMPIKGYIKPTKGIFYLINIPSLDQSVX

SEQ ID NO: 81004 - protein, 31 aa, Artificial Sequence; identical to SEQ ID NO: 32288
  Cyclic GFR-binding peptide
  MOD_RES (29)..(30): Xaa is C or S

SEQ ID NO: 81005 - protein, 26 aa, Artificial Sequence
  Cyclic GFR-binding peptide
SEVVMDRYKKLVVNNASDFYLISIAN

SEQ ID NO: 81006 - protein, 24 aa, Artificial Sequence
  Cyclic GFR-binding peptide
IMRYKKLLLVRGNDFYLMSIANTK

SEQ ID NO: 81007 - protein, 26 aa, Artificial Sequence
  Cyclic GFR-binding peptide
RDVVMGEYKFKIIQQKDNLYLMSIPE

SEQ ID NO: 81008 - protein, 36 aa, Artificial Sequence; identical to SEQ ID NO: 32291
  Cyclic GFR-binding peptide
  MOD_RES (1)..(33): Xaa is C or S

SEQ ID NO: 81009 - protein, 38 aa, Artificial Sequence; identical to SEQ ID NO: 32292
  Cyclic GFR-binding peptide
  MOD_RES (1)..(33)..(34): Xaa is C or S

SEQ ID NO: 81010 - protein, 26 aa, Artificial Sequence
  Cyclic GFR-binding peptide
MNEYKFKIVNNSSDLYLVSIPELKTP

SEQ ID NO: 81011 - protein, 28 aa, Artificial Sequence
  Cyclic GFR-binding peptide
VVMDYHYKLVVNNAADKYLISIPSLRAP

SEQ ID NO: 81012 - protein, 30 aa, Artificial Sequence; identical to SEQ ID NO: 3985
  Cyclic GFR-binding peptide

SEQ ID NO: 81013 - protein, 29 aa, Artificial Sequence
  Cyclic GFR-binding peptide
  MOD_RES (29)..(29): Xaa is C or S
VMNYHYKLIVNSSDDKYLVSIPSLKTPAX

SEQ ID NO: 81014 - protein, 32 aa, Artificial Sequence
  Cyclic GFR-binding peptide
  MOD_RES (2)..(4): Xaa is C or S
SXKXSKVVMPIKGYVKPTRGVFYLINIPSLDQ

SEQ ID NO: 81015 - protein, 35 aa, Artificial Sequence
  Cyclic GFR-binding peptide
  MOD_RES (30)..(31): Xaa is C or S
VAMGRHKRLYTVVGKDYYLISTASLKTPVXXAKSA

SEQ ID NO: 81016 - protein, 38 aa, Artificial Sequence; identical to SEQ ID NO: 3988
  Cyclic GFR-binding peptide
  MOD_RES (2)..(4)..(36): Xaa is C or S

SEQ ID NO: 81017 - protein, 34 aa, Artificial Sequence; identical to SEQ ID NO: 3991
  Cyclic GFR-binding peptide
  MOD_RES (2)..(33)..(34): Xaa is C or S

SEQ ID NO: 81018 - protein, 30 aa, Artificial Sequence; identical to SEQ ID NO: 3992
  Cyclic GFR-binding peptide
  MOD_RES (29)..(30): Xaa is C or S

SEQ ID NO: 81019 - protein, 34 aa, Artificial Sequence; identical to SEQ ID NO: 3994
  Cyclic GFR-binding peptide
  MOD_RES (2)..(34): Xaa is C or S

SEQ ID NO: 81020 - protein, 27 aa, Artificial Sequence
  Cyclic GFR-binding peptide
  MOD_RES (26)..(27): Xaa is C or S
RYKKLYTVVGKDFYLISIANLKTPVXX

SEQ ID NO: 81021 - protein, 37 aa, Artificial Sequence; identical to SEQ ID NO: 32308
  Cyclic GFR-binding peptide
  MOD_RES (2)..(4)..(36)..(37): Xaa is C or S

SEQ ID NO: 81022 - protein, 25 aa, Artificial Sequence
  Cyclic GFR-binding peptide
MRHKRLVKPKRGVYYLISTASLAQP

SEQ ID NO: 81023 - protein, 40 aa, Artificial Sequence; identical to SEQ ID NO: 3997
  Cyclic GFR-binding peptide
  MOD_RES (1)..(3)..(34)..(35): Xaa is C or S

SEQ ID NO: 81024 - protein, 34 aa, Artificial Sequence
  Cyclic GFR-binding peptide
  MOD_RES (2)..(34): Xaa is C or S
GXAEVVMDRHKRLVVNNAADYYLISTASLRAPVX

SEQ ID NO: 81025 - protein, 34 aa, Artificial Sequence; identical to SEQ ID NO: 3998
  Cyclic GFR-binding peptide
  MOD_RES (32)..(32): Xaa is C or S

SEQ ID NO: 81026 - protein, 29 aa, Artificial Sequence
  Cyclic GFR-binding peptide
VTMNRYKKLVVNKNEDFYLISIANMKEPV

SEQ ID NO: 81027 - protein, 27 aa, Artificial Sequence
  Cyclic GFR-binding peptide
  MOD_RES (27)..(27): Xaa is C or S
DYHYKLVVNNAADKYLISIPSLRAPVX

SEQ ID NO: 81028 - protein, 25 aa, Artificial Sequence
  Cyclic GFR-binding peptide
MGYHYKLYTVVGKDKYLISIPSLKT

SEQ ID NO: 81029 - protein, 33 aa, Artificial Sequence; identical to SEQ ID NO: 32318
  Cyclic GFR-binding peptide
  MOD_RES (2)..(4): Xaa is C or S

SEQ ID NO: 81030 - protein, 35 aa, Artificial Sequence; identical to SEQ ID NO: 4001
  Cyclic GFR-binding peptide
  MOD_RES (29)..(30): Xaa is C or S

SEQ ID NO: 81031 - protein, 25 aa, Artificial Sequence
  Cyclic GFR-binding peptide
RHKRLVKPKRGVYYLISTASLAQPV

SEQ ID NO: 81032 - protein, 28 aa, Artificial Sequence
  Cyclic GFR-binding peptide
  MOD_RES (28)..(28): Xaa is C or S
MDRHKRLVVKENEDYYLMSTASLETPVX

SEQ ID NO: 81033 - protein, 27 aa, Artificial Sequence
  Cyclic GFR-binding peptide
VVMDPIKGYVVNNASDFYLINIPSLRT

SEQ ID NO: 81034 - protein, 36 aa, Artificial Sequence; identical to SEQ ID NO: 4008
  Cyclic GFR-binding peptide
  MOD_RES (1)..(33)..(34): Xaa is C or S

SEQ ID NO: 81035 - protein, 33 aa, Artificial Sequence; identical to SEQ ID NO: 4010
  Cyclic GFR-binding peptide
  MOD_RES (2)..(4): Xaa is C or S

SEQ ID NO: 81036 - protein, 36 aa, Artificial Sequence
  Cyclic GFR-binding peptide
  MOD_RES (30)..(31): Xaa is C or S
VAMGRHKRLYTVVGKDYYLISTASLKTPVXXAKSAK

SEQ ID NO: 81037 - protein, 37 aa, Artificial Sequence; identical to SEQ ID NO: 40908
  Cyclic GFR-binding peptide
  MOD_RES (2)..(4)..(36)..(37): Xaa is C or S

SEQ ID NO: 81038 - protein, 35 aa, Artificial Sequence
  Cyclic GFR-binding peptide
  MOD_RES (30)..(31): Xaa is C or S
VVMDRHKRLVVNNAADYYLISTASLRAPVXXSAPA

SEQ ID NO: 81039 - protein, 29 aa, Artificial Sequence
  Cyclic GFR-binding peptide
  MOD_RES (28)..(29): Xaa is C or S
MNRHKRLIVNSSDDYYLVSTASLKTPAXX

SEQ ID NO: 81040 - protein, 33 aa, Artificial Sequence; identical to SEQ ID NO: 32333
  Cyclic GFR-binding peptide
  MOD_RES (28)..(29): Xaa is C or S

SEQ ID NO: 81041 - protein, 22 aa, Artificial Sequence
  Cyclic GFR-binding peptide
NRYKKLVVNKNEDFYLISIANM

SEQ ID NO: 81042 - protein, 39 aa, Artificial Sequence; identical to SEQ ID NO: 4022
  Cyclic GFR-binding peptide
  MOD_RES (1)..(3)..(35)..(36): Xaa is C or S

SEQ ID NO: 81043 - protein, 36 aa, Artificial Sequence; identical to SEQ ID NO: 75431
  Cyclic GFR-binding peptide
  MOD_RES (2)..(4)..(35)..(36): Xaa is C or S

SEQ ID NO: 81044 - protein, 41 aa, Artificial Sequence; identical to SEQ ID NO: 4026
  Cyclic GFR-binding peptide
  MOD_RES (1)..(3)..(35)..(36): Xaa is C or S

SEQ ID NO: 81045 - protein, 25 aa, Artificial Sequence
  Cyclic GFR-binding peptide
MEPIKGYVVKDYEDFYLMNIPSLET

SEQ ID NO: 81046 - protein, 40 aa, Artificial Sequence; identical to SEQ ID NO: 40928
  Cyclic GFR-binding peptide
  MOD_RES (1)..(3)..(35)..(36): Xaa is C or S

SEQ ID NO: 81047 - protein, 32 aa, Artificial Sequence; identical to SEQ ID NO: 4027
  Cyclic GFR-binding peptide
  MOD_RES (27)..(28): Xaa is C or S

SEQ ID NO: 81048 - protein, 21 aa, Artificial Sequence
  Cyclic GFR-binding peptide
MRHKRLVKPTRGVYYLISTAS

SEQ ID NO: 81049 - protein, 38 aa, Artificial Sequence; identical to SEQ ID NO: 4033
  Cyclic GFR-binding peptide
  MOD_RES (32)..(33): Xaa is C or S

SEQ ID NO: 81050 - protein, 31 aa, Artificial Sequence; identical to SEQ ID NO: 32342
  Cyclic GFR-binding peptide
  MOD_RES (1)..(1): Xaa is C or S

SEQ ID NO: 81051 - protein, 37 aa, Artificial Sequence; identical to SEQ ID NO: 32344
  Cyclic GFR-binding peptide
  MOD_RES (32)..(33): Xaa is C or S

SEQ ID NO: 81052 - protein, 28 aa, Artificial Sequence
  Cyclic GFR-binding peptide
  MOD_RES (26)..(27): Xaa is C or S
EYKFKIVNNSSDLYLVSIPELKTPAXXA

SEQ ID NO: 81053 - protein, 26 aa, Artificial Sequence
  Cyclic GFR-binding peptide
VMDEYKFKVVNNAADLYLISIPELRA

SEQ ID NO: 81054 - protein, 41 aa, Artificial Sequence
  Cyclic GFR-binding peptide
  MOD_RES (1)..(3)..(35)..(36): Xaa is C or S
XAXSEVTMNYHYKLVVNKNEDKYLISIPSMKEPVXXPEPIG

SEQ ID NO: 81055 - protein, 37 aa, Artificial Sequence; identical to SEQ ID NO: 40940
  Cyclic GFR-binding peptide
  MOD_RES (31)..(32): Xaa is C or S

SEQ ID NO: 81056 - protein, 27 aa, Artificial Sequence
  Cyclic GFR-binding peptide
VVMDYHYKLVVKENEDKYLMSIPSLET

SEQ ID NO: 81057 - protein, 29 aa, Artificial Sequence
  Cyclic GFR-binding peptide
  MOD_RES (1)..(1): Xaa is C or S
XGEVVMEEYKFKVVKDYEDLYLMSIPELE

SEQ ID NO: 81058 - protein, 20 aa, Artificial Sequence
  Cyclic GFR-binding peptide
YHYKLIVNSSDDKYLVSIPS

SEQ ID NO: 81059 - protein, 25 aa, Artificial Sequence
  Cyclic GFR-binding peptide
IMPIKGYLLVRGNDFYLMNIPSTKV

SEQ ID NO: 81060 - protein, 38 aa, Artificial Sequence; identical to SEQ ID NO: 75436
  Cyclic GFR-binding peptide
  MOD_RES (1)..(33)..(34): Xaa is C or S

SEQ ID NO: 81061 - protein, 28 aa, Artificial Sequence
  Cyclic GFR-binding peptide
VVMGRHKRLIIQQKDNYYLMSTASMKTP

SEQ ID NO: 81062 - protein, 31 aa, Artificial Sequence
  Cyclic GFR-binding peptide
  MOD_RES (2)..(2): Xaa is C or S
GXEEVIMEYKFKLLVRGNDLYLMSIPETKVP

SEQ ID NO: 81063 - protein, 29 aa, Artificial Sequence
  Cyclic GFR-binding peptide
SEVTMNPIKGYVVNKNEDFYLINIPSMKE

SEQ ID NO: 81064 - protein, 27 aa, Artificial Sequence
  Cyclic GFR-binding peptide
  MOD_RES (1)..(1): Xaa is C or S
XGEVVMDPIKGYVVKENEDFYLMNIPS

SEQ ID NO: 81065 - protein, 33 aa, Artificial Sequence; identical to SEQ ID NO: 4045
  Cyclic GFR-binding peptide
  MOD_RES (27)..(28): Xaa is C or S

SEQ ID NO: 81066 - protein, 21 aa, Artificial Sequence
  Cyclic GFR-binding peptide
GYHYKLYTVVGKDKYLISIPS

SEQ ID NO: 81067 - protein, 21 aa, Artificial Sequence
  Cyclic GFR-binding peptide
NPIKGYIVNNSSDFYLVNIPS

SEQ ID NO: 81068 - protein, 32 aa, Artificial Sequence; identical to SEQ ID NO: 32365
  Cyclic GFR-binding peptide
  MOD_RES (1)..(1): Xaa is C or S

SEQ ID NO: 81069 - protein, 27 aa, Artificial Sequence
  Cyclic GFR-binding peptide
MDRYKKLVVNNASDFYLISIANLRTPV

SEQ ID NO: 81070 - protein, 30 aa, Artificial Sequence; identical to SEQ ID NO: 4049
  Cyclic GFR-binding peptide
  MOD_RES (26)..(27): Xaa is C or S

SEQ ID NO: 81071 - protein, 37 aa, Artificial Sequence
  Cyclic GFR-binding peptide
  MOD_RES (31)..(32): Xaa is C or S
SKVIMPIKGYIKPTKGIFYLINIPSLDQSVXXPSASA

SEQ ID NO: 81072 - protein, 33 aa, Artificial Sequence
  Cyclic GFR-binding peptide
  MOD_RES (2)..(33): Xaa is C or S
KXSKVIMPIKGYIKPTKGIFYLINIPSLDQSVX

SEQ ID NO: 81073 - protein, 33 aa, Artificial Sequence; identical to SEQ ID NO: 4052
  Cyclic GFR-binding peptide
  MOD_RES (29)..(29): Xaa is C or S

SEQ ID NO: 81074 - protein, 23 aa, Artificial Sequence
  Cyclic GFR-binding peptide
VMNRHKRLIVNSSDDYYLVSTAS

SEQ ID NO: 81075 - protein, 32 aa, Artificial Sequence
  Cyclic GFR-binding peptide
  MOD_RES (27)..(28): Xaa is C or S
NRYKKLVVNKNEDFYLISIANMKEPVXXPEPI

SEQ ID NO: 81076 - protein, 24 aa, Artificial Sequence
  Cyclic GFR-binding peptide
VVMNRHKRLIVNSSDDYYLVSTAS

SEQ ID NO: 81077 - protein, 27 aa, Artificial Sequence
  Cyclic GFR-binding peptide
SMGERYKKLTPVGMDDFYLVSIANLKT

SEQ ID NO: 81078 - protein, 40 aa, Artificial Sequence; identical to SEQ ID NO: 4063
  Cyclic GFR-binding peptide
  MOD_RES (1)..(3)..(35)..(36): Xaa is C or S

SEQ ID NO: 81079 - protein, 40 aa, Artificial Sequence; identical to SEQ ID NO: 32374
  Cyclic GFR-binding peptide
  MOD_RES (2)..(34)..(35): Xaa is C or S

SEQ ID NO: 81080 - protein, 31 aa, Artificial Sequence; identical to SEQ ID NO: 4067
  Cyclic GFR-binding peptide
  MOD_RES (2)..(4): Xaa is C or S

SEQ ID NO: 81081 - protein, 34 aa, Artificial Sequence; identical to SEQ ID NO: 4068
  Cyclic GFR-binding peptide
  MOD_RES (1)..(3)..(34): Xaa is C or S

SEQ ID NO: 81082 - protein, 37 aa, Artificial Sequence; identical to SEQ ID NO: 40966
  Cyclic GFR-binding peptide
  MOD_RES (1)..(3)..(35): Xaa is C or S

SEQ ID NO: 81083 - protein, 34 aa, Artificial Sequence; identical to SEQ ID NO: 4070
  Cyclic GFR-binding peptide
  MOD_RES (1)..(3)..(34): Xaa is C or S

SEQ ID NO: 81084 - protein, 29 aa, Artificial Sequence
  Cyclic GFR-binding peptide
  MOD_RES (26)..(27): Xaa is C or S
EYKFKIIQQKDNLYLMSIPEMKTPTXXPG

SEQ ID NO: 81085 - protein, 35 aa, Artificial Sequence; identical to SEQ ID NO: 32379
  Cyclic GFR-binding peptide
  MOD_RES (30)..(31): Xaa is C or S

SEQ ID NO: 81086 - protein, 26 aa, Artificial Sequence
  Cyclic GFR-binding peptide
VAMGYHYKLYTVVGKDKYLISIPSLK

SEQ ID NO: 81087 - protein, 34 aa, Artificial Sequence
  Cyclic GFR-binding peptide
  MOD_RES (30)..(31): Xaa is C or S
KVVMPIKGYVKPTRGVFYLINIPSLDQPVXXPSA

SEQ ID NO: 81088 - protein, 24 aa, Artificial Sequence
  Cyclic GFR-binding peptide
RHKRLIVNSSDDYYLVSTASLKTP

SEQ ID NO: 81089 - protein, 28 aa, Artificial Sequence
  Cyclic GFR-binding peptide
VMNRHKRLIVNSSDDYYLVSTASLQTPA

SEQ ID NO: 81090 - protein, 34 aa, Artificial Sequence; identical to SEQ ID NO: 14579
  Cyclic GFR-binding peptide
  MOD_RES (29)..(30): Xaa is C or S

SEQ ID NO: 81091 - protein, 37 aa, Artificial Sequence
  Cyclic GFR-binding peptide
  MOD_RES (1)..(32)..(33): Xaa is C or S
XSKVVMPIKGYVKPTRGVFYLINIPSLDQPVXXPSAS

SEQ ID NO: 81092 - protein, 31 aa, Artificial Sequence; identical to SEQ ID NO: 32392
  Cyclic GFR-binding peptide
  MOD_RES (1)..(3): Xaa is C or S

SEQ ID NO: 81093 - protein, 30 aa, Artificial Sequence; identical to SEQ ID NO: 4085
  Cyclic GFR-binding peptide
  MOD_RES (1)..(1): Xaa is C or S

SEQ ID NO: 81094 - protein, 34 aa, Artificial Sequence; identical to SEQ ID NO: 32394
  Cyclic GFR-binding peptide
  MOD_RES (2)..(4): Xaa is C or S

SEQ ID NO: 81095 - protein, 26 aa, Artificial Sequence
  Cyclic GFR-binding peptide
ERYKKLVVKDYEDFYLMSIANLETPV

SEQ ID NO: 81096 - protein, 34 aa, Artificial Sequence; identical to SEQ ID NO: 40981
  Cyclic GFR-binding peptide
  MOD_RES (28)..(29): Xaa is C or S

SEQ ID NO: 81097 - protein, 36 aa, Artificial Sequence; identical to SEQ ID NO: 32400
  Cyclic GFR-binding peptide
  MOD_RES (2)..(4)..(36): Xaa is C or S

SEQ ID NO: 81098 - protein, 29 aa, Artificial Sequence
  Cyclic GFR-binding peptide
  MOD_RES (1)..(3): Xaa is C or S
XAXSEVTMNYHYKLVVNKNEDKYLISIPS

SEQ ID NO: 81099 - protein, 34 aa, Artificial Sequence
  Cyclic GFR-binding peptide
  MOD_RES (2)..(4): Xaa is C or S
SXGXRDVVMGRHKRLIIQQKDNYYLMSTASMKTP

SEQ ID NO: 81100 - protein, 20 aa, Artificial Sequence
  Cyclic GFR-binding peptide
RYKKLYTVVGKDFYLISIAN

SEQ ID NO: 81101 - protein, 20 aa, Artificial Sequence
  Cyclic GFR-binding peptide
RYKKLVKPKRGVFYLISIAN

SEQ ID NO: 81102 - protein, 23 aa, Artificial Sequence
  Cyclic GFR-binding peptide
MEYKFKVKPTRGVLYLISIPELD

SEQ ID NO: 81103 - protein, 30 aa, Artificial Sequence; identical to SEQ ID NO: 32406
  Cyclic GFR-binding peptide
  MOD_RES (30)..(30): Xaa is C or S

SEQ ID NO: 81104 - protein, 26 aa, Artificial Sequence
  Cyclic GFR-binding peptide
RVIMEYKFKVKPKRGVLYLISIPELA

SEQ ID NO: 81105 - protein, 33 aa, Artificial Sequence; identical to SEQ ID NO: 4097
  Cyclic GFR-binding peptide
  MOD_RES (1)..(3): Xaa is C or S

SEQ ID NO: 81106 - protein, 34 aa, Artificial Sequence; identical to SEQ ID NO: 4098
  Cyclic GFR-binding peptide
  MOD_RES (29)..(29): Xaa is C or S

SEQ ID NO: 81107 - protein, 30 aa, Artificial Sequence; identical to SEQ ID NO: 40988
  Cyclic GFR-binding peptide
  MOD_RES (28)..(29): Xaa is C or S

SEQ ID NO: 81108 - protein, 33 aa, Artificial Sequence
  Cyclic GFR-binding peptide
  MOD_RES (32)..(33): Xaa is C or S
SEVVMDYHYKLVVNNASDKYLISIPSLRTPVXX

SEQ ID NO: 81109 - protein, 36 aa, Artificial Sequence; identical to SEQ ID NO: 14597
  Cyclic GFR-binding peptide
  MOD_RES (30)..(31): Xaa is C or S

SEQ ID NO: 81110 - protein, 34 aa, Artificial Sequence; identical to SEQ ID NO: 40992
  Cyclic GFR-binding peptide
  MOD_RES (29)..(30): Xaa is C or S

SEQ ID NO: 81111 - protein, 23 aa, Artificial Sequence
  Cyclic GFR-binding peptide
PIKGYTPVGMDDFYLVNIPSLKT

SEQ ID NO: 81112 - protein, 30 aa, Artificial Sequence; identical to SEQ ID NO: 40997
  Cyclic GFR-binding peptide
  MOD_RES (2)..(4): Xaa is C or S

SEQ ID NO: 81113 - protein, 26 aa, Artificial Sequence
  Cyclic GFR-binding peptide
MEYKFKLLVRGNDLYLMSIPETKVPA

SEQ ID NO: 81114 - protein, 37 aa, Artificial Sequence; identical to SEQ ID NO: 41004
  Cyclic GFR-binding peptide
  MOD_RES (1)..(3)..(35)..(36): Xaa is C or S

SEQ ID NO: 81115 - protein, 33 aa, Artificial Sequence
  Cyclic GFR-binding peptide
  MOD_RES (1)..(33): Xaa is C or S
XAEVVMDRHKRLVVNNAADYYLISTASLRAPVX

SEQ ID NO: 81116 - protein, 31 aa, Artificial Sequence; identical to SEQ ID NO: 4109
  Cyclic GFR-binding peptide
  MOD_RES (1)..(3): Xaa is C or S

SEQ ID NO: 81117 - protein, 41 aa, Artificial Sequence; identical to SEQ ID NO: 41005
  Cyclic GFR-binding peptide
  MOD_RES (2)..(4)..(36)..(37): Xaa is C or S

SEQ ID NO: 81118 - protein, 30 aa, Artificial Sequence; identical to SEQ ID NO: 75470
  Cyclic GFR-binding peptide

SEQ ID NO: 81119 - protein, 27 aa, Artificial Sequence
  Cyclic GFR-binding peptide
VIMRHKRLLLVRGNDYYLMSTASTKVP

SEQ ID NO: 81120 - protein, 31 aa, Artificial Sequence; identical to SEQ ID NO: 4110
  Cyclic GFR-binding peptide
  MOD_RES (1)..(3): Xaa is C or S

SEQ ID NO: 81121 - protein, 31 aa, Artificial Sequence; identical to SEQ ID NO: 4112
  Cyclic GFR-binding peptide
  MOD_RES (2)..(2): Xaa is C or S

SEQ ID NO: 81122 - protein, 27 aa, Artificial Sequence
  Cyclic GFR-binding peptide
  MOD_RES (26)..(27): Xaa is C or S
PIKGYLLVRGNDFYLMNIPSTKVPAXX

SEQ ID NO: 81123 - protein, 37 aa, Artificial Sequence; identical to SEQ ID NO: 32421
  Cyclic GFR-binding peptide
  MOD_RES (1)..(32)..(33): Xaa is C or S

SEQ ID NO: 81124 - protein, 32 aa, Artificial Sequence; identical to SEQ ID NO: 4113
  Cyclic GFR-binding peptide
  MOD_RES (26)..(27): Xaa is C or S

SEQ ID NO: 81125 - protein, 27 aa, Artificial Sequence
  Cyclic GFR-binding peptide
VVMDRHKRLVVKENEDYYLMSTASLET

SEQ ID NO: 81126 - protein, 34 aa, Artificial Sequence; identical to SEQ ID NO: 41015
  Cyclic GFR-binding peptide
  MOD_RES (2)..(34): Xaa is C or S

SEQ ID NO: 81127 - protein, 31 aa, Artificial Sequence
  Cyclic GFR-binding peptide
  MOD_RES (30)..(31): Xaa is C or S
VAMGRHKRLYTVVGKDYYLISTASLKTPVXX

SEQ ID NO: 81128 - protein, 33 aa, Artificial Sequence
  Cyclic GFR-binding peptide
  MOD_RES (27)..(28): Xaa is C or S
GRHKRLYTVVGKDYYLISTASLKTPVXXAKSAK

SEQ ID NO: 81129 - protein, 39 aa, Artificial Sequence
  Cyclic GFR-binding peptide
  MOD_RES (1)..(33)..(34): Xaa is C or S
XRDVVMGYHYKLIIQQKDNKYLMSIPSMKTPTXXPGASG

SEQ ID NO: 81130 - protein, 31 aa, Artificial Sequence
  Cyclic GFR-binding peptide
  MOD_RES (31)..(31): Xaa is C or S
SVAMGRHKRLYTVVGKDYYLISTASLKTPVX

SEQ ID NO: 81131 - protein, 33 aa, Artificial Sequence
  Cyclic GFR-binding peptide
  MOD_RES (2)..(4): Xaa is C or S
RXAXSEVTMNRHKRLVVNKNEDYYLISTASMKE

SEQ ID NO: 81132 - protein, 28 aa, Artificial Sequence
  Cyclic GFR-binding peptide
  MOD_RES (27)..(28): Xaa is C or S
MRHKRLVKPKRGVYYLISTASLAQPVXX

SEQ ID NO: 81133 - protein, 31 aa, Artificial Sequence; identical to SEQ ID NO: 41028
  Cyclic GFR-binding peptide
  MOD_RES (2)..(2): Xaa is C or S

SEQ ID NO: 81134 - protein, 32 aa, Artificial Sequence; identical to SEQ ID NO: 41029
  Cyclic GFR-binding peptide
  MOD_RES (1)..(1): Xaa is C or S

SEQ ID NO: 81135 - protein, 24 aa, Artificial Sequence
  Cyclic GFR-binding peptide
NYHYKLIVNNSSDKYLVSIPSLKT

SEQ ID NO: 81136 - protein, 34 aa, Artificial Sequence; identical to SEQ ID NO: 41032
  Cyclic GFR-binding peptide
  MOD_RES (31)..(32): Xaa is C or S

SEQ ID NO: 81137 - protein, 24 aa, Artificial Sequence
  Cyclic GFR-binding peptide
VIMRYKKLLLVRGNDFYLMSIANT

SEQ ID NO: 81138 - protein, 38 aa, Artificial Sequence
  Cyclic GFR-binding peptide
  MOD_RES (32)..(33): Xaa is C or S
SRVVMNEYKFKIVNSSDDLYLVSIPELKTPAXXPKPVH

SEQ ID NO: 81139 - protein, 25 aa, Artificial Sequence
  Cyclic GFR-binding peptide
GEYKFKIIQQKDNLYLMSIPEMKTP

SEQ ID NO: 81140 - protein, 32 aa, Artificial Sequence; identical to SEQ ID NO: 4135
  Cyclic GFR-binding peptide
  MOD_RES (26)..(27): Xaa is C or S

SEQ ID NO: 81141 - protein, 27 aa, Artificial Sequence
  Cyclic GFR-binding peptide
ESVAMGPIKGYYTVVGKDFYLINIPSL

SEQ ID NO: 81142 - protein, 27 aa, Artificial Sequence
  Cyclic GFR-binding peptide
  MOD_RES (27)..(27): Xaa is C or S
NRYKKLIVNSSDDFYLVSIANLQTPAX

SEQ ID NO: 81143 - protein, 38 aa, Artificial Sequence; identical to SEQ ID NO: 41040
  Cyclic GFR-binding peptide
  MOD_RES (2)..(34)..(35): Xaa is C or S

SEQ ID NO: 81144 - protein, 25 aa, Artificial Sequence
  Cyclic GFR-binding peptide
MGRHKRLIIQQKDNYYLMSTASMKT

SEQ ID NO: 81145 - protein, 23 aa, Artificial Sequence
  Cyclic GFR-binding peptide
YHYKLYTVVGKDKYLISIPSLKT

SEQ ID NO: 81146 - protein, 41 aa, Artificial Sequence; identical to SEQ ID NO: 32448
  Cyclic GFR-binding peptide
  MOD_RES (1)..(3)..(35)..(36): Xaa is C or S

SEQ ID NO: 81147 - protein, 27 aa, Artificial Sequence
  Cyclic GFR-binding peptide
  MOD_RES (26)..(27): Xaa is C or S
RYKKLIIQQKDNFYLMSIANMKTPTXX

SEQ ID NO: 81148 - protein, 38 aa, Artificial Sequence; identical to SEQ ID NO: 4151
  Cyclic GFR-binding peptide
  MOD_RES (1)..(3)..(34)..(35): Xaa is C or S

SEQ ID NO: 81149 - protein, 31 aa, Artificial Sequence; identical to SEQ ID NO: 4158
  Cyclic GFR-binding peptide
  MOD_RES (1)..(1): Xaa is C or S

SEQ ID NO: 81150 - protein, 34 aa, Artificial Sequence; identical to SEQ ID NO: 41046
  Cyclic GFR-binding peptide
  MOD_RES (2)..(2): Xaa is C or S

SEQ ID NO: 81151 - protein, 30 aa, Artificial Sequence; identical to SEQ ID NO: 4160
  Cyclic GFR-binding peptide
  MOD_RES (27)..(28): Xaa is C or S

SEQ ID NO: 81152 - protein, 22 aa, Artificial Sequence
  Cyclic GFR-binding peptide
MDRHKRLVVKENEDYYLMSTAS

SEQ ID NO: 81153 - protein, 31 aa, Artificial Sequence; identical to SEQ ID NO: 32461
  Cyclic GFR-binding peptide
  MOD_RES (27)..(28): Xaa is C or S

SEQ ID NO: 81154 - protein, 22 aa, Artificial Sequence
  Cyclic GFR-binding peptide
MDRYKKLVVNNAADFYLISIAN

SEQ ID NO: 81155 - protein, 32 aa, Artificial Sequence; identical to SEQ ID NO: 4165
  Cyclic GFR-binding peptide
  MOD_RES (32)..(32): Xaa is C or S

SEQ ID NO: 81156 - protein, 29 aa, Artificial Sequence
  Cyclic GFR-binding peptide
  MOD_RES (26)..(27): Xaa is C or S
RYKKLTPVGMDDFYLVSIANLKTPVXXAK

SEQ ID NO: 81157 - protein, 38 aa, Artificial Sequence
  Cyclic GFR-binding peptide
  MOD_RES (2)..(34)..(35): Xaa is C or S
AXSEVTMNRYKKLVVNKNEDFYLISIANMKEPVXXPEP

SEQ ID NO: 81158 - protein, 30 aa, Artificial Sequence; identical to SEQ ID NO: 32465
  Cyclic GFR-binding peptide
  MOD_RES (1)..(3): Xaa is C or S

SEQ ID NO: 81159 - protein, 32 aa, Artificial Sequence; identical to SEQ ID NO: 4168
  Cyclic GFR-binding peptide
  MOD_RES (29)..(30): Xaa is C or S

SEQ ID NO: 81160 - protein, 31 aa, Artificial Sequence; identical to SEQ ID NO: 32467
  Cyclic GFR-binding peptide
  MOD_RES (29)..(29): Xaa is C or S

SEQ ID NO: 81161 - protein, 20 aa, Artificial Sequence
  Cyclic GFR-binding peptide
RYKKLIVNSSDDFYLVSIAN

SEQ ID NO: 81162 - protein, 31 aa, Artificial Sequence; identical to SEQ ID NO: 4170
  Cyclic GFR-binding peptide

SEQ ID NO: 81163 - protein, 30 aa, Artificial Sequence; identical to SEQ ID NO: 32470
  Cyclic GFR-binding peptide
  MOD_RES (30)..(30): Xaa is C or S

SEQ ID NO: 81164 - protein, 30 aa, Artificial Sequence; identical to SEQ ID NO: 32472
  Cyclic GFR-binding peptide
  MOD_RES (2)..(2): Xaa is C or S

SEQ ID NO: 81165 - protein, 34 aa, Artificial Sequence; identical to SEQ ID NO: 75502
  Cyclic GFR-binding peptide
  MOD_RES (30)..(31): Xaa is C or S

SEQ ID NO: 81166 - protein, 31 aa, Artificial Sequence; identical to SEQ ID NO: 41061
  Cyclic GFR-binding peptide
  MOD_RES (28)..(28): Xaa is C or S

SEQ ID NO: 81167 - protein, 31 aa, Artificial Sequence; identical to SEQ ID NO: 4172
  Cyclic GFR-binding peptide
  MOD_RES (1)..(3): Xaa is C or S

SEQ ID NO: 81168 - protein, 21 aa, Artificial Sequence
  Cyclic GFR-binding peptide
RHKRLVVNNAADYYLISTASL

SEQ ID NO: 81169 - protein, 28 aa, Artificial Sequence
  Cyclic GFR-binding peptide
EVVMDRHKRLVVKENEDYYLMSTASLET

SEQ ID NO: 81170 - protein, 28 aa, Artificial Sequence
  Cyclic GFR-binding peptide
VSMGERYKKLTPVGMDDFYLVSIANLKT

SEQ ID NO: 81171 - protein, 27 aa, Artificial Sequence
  Cyclic GFR-binding peptide
  MOD_RES (26)..(27): Xaa is C or S
YHYKLYTVVGKDKYLISIPSLKTPVXX

SEQ ID NO: 81172 - protein, 35 aa, Artificial Sequence
  Cyclic GFR-binding peptide
  MOD_RES (29)..(30): Xaa is C or S
VMDYHYKLVVNNASDKYLISIPSLRTPVXXTPPTS

SEQ ID NO: 81173 - protein, 36 aa, Artificial Sequence; identical to SEQ ID NO: 75505
  Cyclic GFR-binding peptide
  MOD_RES (1)..(3)..(34)..(35): Xaa is C or S

SEQ ID NO: 81174 - protein, 23 aa, Artificial Sequence
  Cyclic GFR-binding peptide
DPIKGYVVNNAADFYLINIPSLR

SEQ ID NO: 81175 - protein, 39 aa, Artificial Sequence; identical to SEQ ID NO: 4181
  Cyclic GFR-binding peptide
  MOD_RES (1)..(3)..(34)..(35): Xaa is C or S

SEQ ID NO: 81176 - protein, 31 aa, Artificial Sequence; identical to SEQ ID NO: 32478
  Cyclic GFR-binding peptide
  MOD_RES (27)..(28): Xaa is C or S

SEQ ID NO: 81177 - protein, 37 aa, Artificial Sequence; identical to SEQ ID NO: 4182
  Cyclic GFR-binding peptide
  MOD_RES (32)..(33): Xaa is C or S

SEQ ID NO: 81178 - protein, 37 aa, Artificial Sequence
  Cyclic GFR-binding peptide
  MOD_RES (31)..(32): Xaa is C or S
EVTMNEYKFKVVNKNEDLYLISIPEMKEPVXXPEPIG

SEQ ID NO: 81179 - protein, 24 aa, Artificial Sequence
  Cyclic GFR-binding peptide
NRYKKLIVNSSDDFYLVSIANLQT

SEQ ID NO: 81180 - protein, 31 aa, Artificial Sequence
  Cyclic GFR-binding peptide
  MOD_RES (26)..(27): Xaa is C or S
PIKGYIKPTKGIFYLINIPSLDQSVXXPSAS

SEQ ID NO: 81181 - protein, 39 aa, Artificial Sequence; identical to SEQ ID NO: 32479
  Cyclic GFR-binding peptide
  MOD_RES (1)..(34)..(35): Xaa is C or S

SEQ ID NO: 81182 - protein, 34 aa, Artificial Sequence
  Cyclic GFR-binding peptide
  MOD_RES (2)..(4): Xaa is C or S
RXAXSEVTMNYHYKLVVNKNEDKYLISIPSMKEP

SEQ ID NO: 81183 - protein, 29 aa, Artificial Sequence
  Cyclic GFR-binding peptide
  MOD_RES (1)..(1): Xaa is C or S
XGEVVMDRYKKLVVKENEDFYLMSIANLE

SEQ ID NO: 81184 - protein, 32 aa, Artificial Sequence
  Cyclic GFR-binding peptide
  MOD_RES (2)..(2): Xaa is C or S
GXRDVVMGRHKRLIIQQKDNYYLMSTASMKTP

SEQ ID NO: 81185 - protein, 30 aa, Artificial Sequence; identical to SEQ ID NO: 4187
  Cyclic GFR-binding peptide
  MOD_RES (1)..(3): Xaa is C or S

SEQ ID NO: 81186 - protein, 31 aa, Artificial Sequence; identical to SEQ ID NO: 32485
  Cyclic GFR-binding peptide
  MOD_RES (30)..(31): Xaa is C or S

SEQ ID NO: 81187 - protein, 34 aa, Artificial Sequence; identical to SEQ ID NO: 4189
  Cyclic GFR-binding peptide
  MOD_RES (29)..(30): Xaa is C or S

SEQ ID NO: 81188 - protein, 28 aa, Artificial Sequence
  Cyclic GFR-binding peptide
  MOD_RES (1)..(1): Xaa is C or S
XEEVIMRYKKLLLVRGNDFYLMSIANTK

SEQ ID NO: 81189 - protein, 38 aa, Artificial Sequence
  Cyclic GFR-binding peptide
  MOD_RES (2)..(34)..(35): Xaa is C or S
GXRDVVMGRHKRLIIQQKDNYYLMSTASMKTPTXXPGA

SEQ ID NO: 81190 - protein, 37 aa, Artificial Sequence; identical to SEQ ID NO: 32490
  Cyclic GFR-binding peptide
  MOD_RES (1)..(3)..(35)..(36): Xaa is C or S

SEQ ID NO: 81191 - protein, 29 aa, Artificial Sequence
  Cyclic GFR-binding peptide
  MOD_RES (26)..(27): Xaa is C or S
RYKKLIKPTKGIFYLISIANLDQSVXXPS

SEQ ID NO: 81192 - protein, 30 aa, Artificial Sequence
  Cyclic GFR-binding peptide
SEVTMNRHKRLVVNKNEDYYLISTASMKEP

SEQ ID NO: 81193 - protein, 40 aa, Artificial Sequence; identical to SEQ ID NO: 4195
  Cyclic GFR-binding peptide
  MOD_RES (2)..(34)..(35): Xaa is C or S

SEQ ID NO: 81194 - protein, 37 aa, Artificial Sequence
  Cyclic GFR-binding peptide
  MOD_RES (1)..(3)..(35)..(36): Xaa is C or S
XGXSEVVMDYHYKLVVNNASDKYLISIPSLRTPVXXT

SEQ ID NO: 81195 - protein, 23 aa, Artificial Sequence
  Cyclic GFR-binding peptide
VMDEYKFKVVNNASDLYLISIPE

SEQ ID NO: 81196 - protein, 37 aa, Artificial Sequence; identical to SEQ ID NO: 4197
  Cyclic GFR-binding peptide
  MOD_RES (1)..(3)..(34)..(35): Xaa is C or S

SEQ ID NO: 81197 - protein, 31 aa, Artificial Sequence
  Cyclic GFR-binding peptide
  MOD_RES (2)..(2): Xaa is C or S
GXSEVVMDYHYKLVVNNASDKYLISIPSLRT

SEQ ID NO: 81198 - protein, 36 aa, Artificial Sequence; identical to SEQ ID NO: 4199
  Cyclic GFR-binding peptide
  MOD_RES (2)..(33)..(34): Xaa is C or S

SEQ ID NO: 81199 - protein, 31 aa, Artificial Sequence; identical to SEQ ID NO: 4201
  Cyclic GFR-binding peptide
  MOD_RES (30)..(30): Xaa is C or S

SEQ ID NO: 81200 - protein, 38 aa, Artificial Sequence
  Cyclic GFR-binding peptide
  MOD_RES (2)..(34)..(35): Xaa is C or S
GXAEVVMDRHKRLVVNNAADYYLISTASLRAPVXXSAP

SEQ ID NO: 81201 - protein, 32 aa, Artificial Sequence; identical to SEQ ID NO: 4204
  Cyclic GFR-binding peptide
  MOD_RES (1)..(32): Xaa is C or S

SEQ ID NO: 81202 - protein, 28 aa, Artificial Sequence
  Cyclic GFR-binding peptide
  MOD_RES (1)..(3): Xaa is C or S
XKXSKVIMPIKGYIKPTKGIFYLINIPS

SEQ ID NO: 81203 - protein, 32 aa, Artificial Sequence
  Cyclic GFR-binding peptide
  MOD_RES (1)..(32): Xaa is C or S
XSRVIMPIKGYVKPKRGVFYLINIPSLAQPVX

SEQ ID NO: 81204 - protein, 38 aa, Artificial Sequence; identical to SEQ ID NO: 75519
  Cyclic GFR-binding peptide
  MOD_RES (1)..(32)..(33): Xaa is C or S

SEQ ID NO: 81205 - protein, 34 aa, Artificial Sequence; identical to SEQ ID NO: 4207
  Cyclic GFR-binding peptide
  MOD_RES (30)..(31): Xaa is C or S

SEQ ID NO: 81206 - protein, 33 aa, Artificial Sequence; identical to SEQ ID NO: 32504
  Cyclic GFR-binding peptide
  MOD_RES (2)..(4): Xaa is C or S

SEQ ID NO: 81207 - protein, 31 aa, Artificial Sequence; identical to SEQ ID NO: 32505
  Cyclic GFR-binding peptide
  MOD_RES (2)..(2): Xaa is C or S

SEQ ID NO: 81208 - protein, 32 aa, Artificial Sequence; identical to SEQ ID NO: 4212
  Cyclic GFR-binding peptide
  MOD_RES (31)..(32): Xaa is C or S

SEQ ID NO: 81209 - protein, 31 aa, Artificial Sequence; identical to SEQ ID NO: 4214
  Cyclic GFR-binding peptide
  MOD_RES (28)..(29): Xaa is C or S

SEQ ID NO: 81210 - protein, 27 aa, Artificial Sequence
  Cyclic GFR-binding peptide
  MOD_RES (27)..(27): Xaa is C or S
MEYKFKIKPTKGILYLISIPELDQSVX

SEQ ID NO: 81211 - protein, 36 aa, Artificial Sequence; identical to SEQ ID NO: 41104
  Cyclic GFR-binding peptide
  MOD_RES (1)..(3)..(35)..(36): Xaa is C or S

SEQ ID NO: 81212 - protein, 33 aa, Artificial Sequence; identical to SEQ ID NO: 4221
  Cyclic GFR-binding peptide
  MOD_RES (2)..(4): Xaa is C or S

SEQ ID NO: 81213 - protein, 34 aa, Artificial Sequence; identical to SEQ ID NO: 4225
  Cyclic GFR-binding peptide
  MOD_RES (2)..(33)..(34): Xaa is C or S

SEQ ID NO: 81214 - protein, 29 aa, Artificial Sequence
  Cyclic GFR-binding peptide
  MOD_RES (27)..(27): Xaa is C or S
NRHKRLIVNSSDDYYLVSTASLKTPAXTP

SEQ ID NO: 81215 - protein, 21 aa, Artificial Sequence
  Cyclic GFR-binding peptide
EYKFKIVNNSSDLYLVSIPEL

SEQ ID NO: 81216 - protein, 27 aa, Artificial Sequence
  Cyclic GFR-binding peptide
VIMEYKFKIKPTKGILYLISIPELDQS

SEQ ID NO: 81217 - protein, 30 aa, Artificial Sequence; identical to SEQ ID NO: 32525
  Cyclic GFR-binding peptide

SEQ ID NO: 81218 - protein, 28 aa, Artificial Sequence
  Cyclic GFR-binding peptide
  MOD_RES (27)..(28): Xaa is C or S
NRHKRLIVNSSDDYYLVSTASLKTPAXX

SEQ ID NO: 81219 - protein, 25 aa, Artificial Sequence
  Cyclic GFR-binding peptide
IMYHYKLVKPKRGVKYLISIPSLAQ

SEQ ID NO: 81220 - protein, 23 aa, Artificial Sequence
  Cyclic GFR-binding peptide
GRYKKLIIQQKDNFYLMSIANMK

SEQ ID NO: 81221 - protein, 36 aa, Artificial Sequence; identical to SEQ ID NO: 41116
  Cyclic GFR-binding peptide
  MOD_RES (30)..(31): Xaa is C or S

SEQ ID NO: 81222 - protein, 27 aa, Artificial Sequence
  Cyclic GFR-binding peptide
  MOD_RES (27)..(27): Xaa is C or S
EPIKGYTPVGMDDFYLVNIPSLKTPVX

SEQ ID NO: 81223 - protein, 29 aa, Artificial Sequence
  Cyclic GFR-binding peptide
  MOD_RES (29)..(29): Xaa is C or S
VMEPIKGYVVKDYEDFYLMNIPSLETPVX

SEQ ID NO: 81224 - protein, 32 aa, Artificial Sequence; identical to SEQ ID NO: 4233
  Cyclic GFR-binding peptide
  MOD_RES (28)..(28): Xaa is C or S

SEQ ID NO: 81225 - protein, 29 aa, Artificial Sequence
  Cyclic GFR-binding peptide
ARVVMNPIKGYIVNSSDDFYLVNIPSLQT

SEQ ID NO: 81226 - protein, 36 aa, Artificial Sequence
  Cyclic GFR-binding peptide
  MOD_RES (1)..(3)..(34)..(35): Xaa is C or S
XGXEEVIMYHYKLLLVRGNDKYLMSIPSTKVPAXXT

SEQ ID NO: 81227 - protein, 28 aa, Artificial Sequence
  Cyclic GFR-binding peptide
  MOD_RES (28)..(28): Xaa is C or S
MGYHYKLIIQQKDNKYLMSIPSMKTPTX

SEQ ID NO: 81228 - protein, 26 aa, Artificial Sequence
  Cyclic GFR-binding peptide
EVVMDEYKFKVVNNASDLYLISIPEL

SEQ ID NO: 81229 - protein, 34 aa, Artificial Sequence; identical to SEQ ID NO: 4239
  Cyclic GFR-binding peptide
  MOD_RES (1)..(33)..(34): Xaa is C or S

SEQ ID NO: 81230 - protein, 35 aa, Artificial Sequence
  Cyclic GFR-binding peptide
  MOD_RES (1)..(33)..(34): Xaa is C or S
XSEVTMNYHYKLVVNKNEDKYLISIPSMKEPVXXP

SEQ ID NO: 81231 - protein, 40 aa, Artificial Sequence; identical to SEQ ID NO: 41133
  Cyclic GFR-binding peptide
  MOD_RES (2)..(34): Xaa is C or S

SEQ ID NO: 81232 - protein, 37 aa, Artificial Sequence; identical to SEQ ID NO: 32535
  Cyclic GFR-binding peptide
  MOD_RES (32)..(33): Xaa is C or S

SEQ ID NO: 81233 - protein, 36 aa, Artificial Sequence; identical to SEQ ID NO: 41135
  Cyclic GFR-binding peptide
  MOD_RES (31)..(32): Xaa is C or S

SEQ ID NO: 81234 - protein, 35 aa, Artificial Sequence; identical to SEQ ID NO: 32536
  Cyclic GFR-binding peptide
  MOD_RES (2)..(4): Xaa is C or S

SEQ ID NO: 81235 - protein, 32 aa, Artificial Sequence; identical to SEQ ID NO: 32537
  Cyclic GFR-binding peptide
  MOD_RES (31)..(32): Xaa is C or S

SEQ ID NO: 81236 - protein, 23 aa, Artificial Sequence
  Cyclic GFR-binding peptide
NPIKGYIVNNSSDFYLVNIPSLK

SEQ ID NO: 81237 - protein, 36 aa, Artificial Sequence; identical to SEQ ID NO: 4241
  Cyclic GFR-binding peptide
  MOD_RES (1)..(3)..(35)..(36): Xaa is C or S

SEQ ID NO: 81238 - protein, 30 aa, Artificial Sequence; identical to SEQ ID NO: 4242
  Cyclic GFR-binding peptide

SEQ ID NO: 81239 - protein, 26 aa, Artificial Sequence
  Cyclic GFR-binding peptide
MNEYKFKIVNSSDDLYLVSIPELQTP

SEQ ID NO: 81240 - protein, 36 aa, Artificial Sequence; identical to SEQ ID NO: 4243
  Cyclic GFR-binding peptide
  MOD_RES (30)..(31): Xaa is C or S

SEQ ID NO: 81241 - protein, 24 aa, Artificial Sequence
  Cyclic GFR-binding peptide
RHKRLIVNSSDDYYLVSTASLQTP

SEQ ID NO: 81242 - protein, 33 aa, Artificial Sequence
  Cyclic GFR-binding peptide
  MOD_RES (2)..(33): Xaa is C or S
GXEEVIMYHYKLLLVRGNDKYLMSIPSTKVPAX

SEQ ID NO: 81243 - protein, 33 aa, Artificial Sequence; identical to SEQ ID NO: 4245
  Cyclic GFR-binding peptide
  MOD_RES (30)..(31): Xaa is C or S

SEQ ID NO: 81244 - protein, 40 aa, Artificial Sequence
  Cyclic GFR-binding peptide
  MOD_RES (2)..(34)..(35): Xaa is C or S
GXRDVVMGEYKFKIIQQKDNLYLMSIPEMKTPTXXPGASG

SEQ ID NO: 81245 - protein, 31 aa, Artificial Sequence
  Cyclic GFR-binding peptide
  MOD_RES (31)..(31): Xaa is C or S
SKVVMPIKGYVKPTRGVFYLINIPSLDQPVX

SEQ ID NO: 81246 - protein, 37 aa, Artificial Sequence; identical to SEQ ID NO: 4246
  Cyclic GFR-binding peptide
  MOD_RES (1)..(32)..(33): Xaa is C or S

SEQ ID NO: 81247 - protein, 37 aa, Artificial Sequence; identical to SEQ ID NO: 32545
  Cyclic GFR-binding peptide
  MOD_RES (1)..(3)..(35)..(36): Xaa is C or S

SEQ ID NO: 81248 - protein, 33 aa, Artificial Sequence; identical to SEQ ID NO: 32546
  Cyclic GFR-binding peptide
  MOD_RES (31)..(31): Xaa is C or S

SEQ ID NO: 81249 - protein, 27 aa, Artificial Sequence
  Cyclic GFR-binding peptide
  MOD_RES (1)..(1): Xaa is C or S
XSEVVMDRYKKLVVNNASDFYLISIAN

SEQ ID NO: 81250 - protein, 26 aa, Artificial Sequence
  Cyclic GFR-binding peptide
GEVVMEEYKFKVVKDYEDLYLMSIPE

SEQ ID NO: 81251 - protein, 34 aa, Artificial Sequence; identical to SEQ ID NO: 32548
  Cyclic GFR-binding peptide
  MOD_RES (2)..(4): Xaa is C or S

SEQ ID NO: 81252 - protein, 31 aa, Artificial Sequence; identical to SEQ ID NO: 32551
  Cyclic GFR-binding peptide
  MOD_RES (27)..(28): Xaa is C or S

SEQ ID NO: 81253 - protein, 22 aa, Artificial Sequence
  Cyclic GFR-binding peptide
MNYHYKLIVNSSDDKYLVSIPS

SEQ ID NO: 81254 - protein, 36 aa, Artificial Sequence; identical to SEQ ID NO: 41146
  Cyclic GFR-binding peptide
  MOD_RES (31)..(32): Xaa is C or S

SEQ ID NO: 81255 - protein, 23 aa, Artificial Sequence
  Cyclic GFR-binding peptide
MRHKRLVKPKRGVYYLISTASLA

SEQ ID NO: 81256 - protein, 32 aa, Artificial Sequence; identical to SEQ ID NO: 4262
  Cyclic GFR-binding peptide
  MOD_RES (31)..(32): Xaa is C or S

SEQ ID NO: 81257 - protein, 20 aa, Artificial Sequence
  Cyclic GFR-binding peptide
YHYKLYTVVGKDKYLISIPS

SEQ ID NO: 81258 - protein, 31 aa, Artificial Sequence; identical to SEQ ID NO: 32564
  Cyclic GFR-binding peptide
  MOD_RES (1)..(1): Xaa is C or S

SEQ ID NO: 81259 - protein, 33 aa, Artificial Sequence
  Cyclic GFR-binding peptide
  MOD_RES (28)..(29): Xaa is C or S
MDYHYKLVVNNASDKYLISIPSLRTPVXXTPPT

SEQ ID NO: 81260 - protein, 23 aa, Artificial Sequence
  Cyclic GFR-binding peptide
MGEPIKGYTPVGMDDFYLVNIPS

SEQ ID NO: 81261 - protein, 30 aa, Artificial Sequence
  Cyclic GFR-binding peptide
  MOD_RES (30)..(30): Xaa is C or S
VVMDRHKRLVVNNASDYYLISTASLRTPVX

SEQ ID NO: 81262 - protein, 32 aa, Artificial Sequence
  Cyclic GFR-binding peptide
  MOD_RES (1)..(3): Xaa is C or S
XKXSKVIMPIKGYIKPTKGIFYLINIPSLDQS

SEQ ID NO: 81263 - protein, 34 aa, Artificial Sequence
  Cyclic GFR-binding peptide
  MOD_RES (30)..(31): Xaa is C or S
EVIMEYKFKLLVRGNDLYLMSIPETKVPAXXTSP

SEQ ID NO: 81264 - protein, 40 aa, Artificial Sequence; identical to SEQ ID NO: 4270
  Cyclic GFR-binding peptide
  MOD_RES (1)..(3)..(34)..(35): Xaa is C or S

SEQ ID NO: 81265 - protein, 29 aa, Artificial Sequence
  Cyclic GFR-binding peptide
  MOD_RES (27)..(28): Xaa is C or S
MRHKRLVKPTRGVYYLISTASLDQPVXXP

SEQ ID NO: 81266 - protein, 28 aa, Artificial Sequence
  Cyclic GFR-binding peptide
VIMPIKGYIKPTKGIFYLINIPSLDQSV

SEQ ID NO: 81267 - protein, 24 aa, Artificial Sequence
  Cyclic GFR-binding peptide
VVMERYKKLVVKDYEDFYLMSIAN

SEQ ID NO: 81268 - protein, 22 aa, Artificial Sequence
  Cyclic GFR-binding peptide
EYKFKVKPTRGVLYLISIPELD

SEQ ID NO: 81269 - protein, 30 aa, Artificial Sequence; identical to SEQ ID NO: 4276
  Cyclic GFR-binding peptide
  MOD_RES (29)..(30): Xaa is C or S

SEQ ID NO: 81270 - protein, 30 aa, Artificial Sequence; identical to SEQ ID NO: 4277
  Cyclic GFR-binding peptide
  MOD_RES (26)..(27): Xaa is C or S

SEQ ID NO: 81271 - protein, 32 aa, Artificial Sequence; identical to SEQ ID NO: 4279
  Cyclic GFR-binding peptide
  MOD_RES (2)..(2): Xaa is C or S

SEQ ID NO: 81272 - protein, 33 aa, Artificial Sequence
  Cyclic GFR-binding peptide
  MOD_RES (29)..(30): Xaa is C or S
VIMYHYKLLLVRGNDKYLMSIPSTKVPAXXTSP

SEQ ID NO: 81273 - protein, 31 aa, Artificial Sequence
  Cyclic GFR-binding peptide
  MOD_RES (26)..(27): Xaa is C or S
RHKRLVVNKNEDYYLISTASMKEPVXXPEPI

SEQ ID NO: 81274 - protein, 23 aa, Artificial Sequence
  Cyclic GFR-binding peptide
VMEEYKFKVVKDYEDLYLMSIPE

SEQ ID NO: 81275 - protein, 27 aa, Artificial Sequence
  Cyclic GFR-binding peptide
  MOD_RES (26)..(26): Xaa is C or S
RHKRLIVNSSDDYYLVSTASLKTPAXT

SEQ ID NO: 81276 - protein, 23 aa, Artificial Sequence
  Cyclic GFR-binding peptide
VMNRYKKLIVNNSSDFYLVSIAN

SEQ ID NO: 81277 - protein, 38 aa, Artificial Sequence; identical to SEQ ID NO: 32586
  Cyclic GFR-binding peptide
  MOD_RES (2)..(4)..(36)..(37): Xaa is C or S

SEQ ID NO: 81278 - protein, 32 aa, Artificial Sequence
  Cyclic GFR-binding peptide
  MOD_RES (28)..(29): Xaa is C or S
IMEYKFKLLVRGNDLYLMSIPETKVPAXXTSP

SEQ ID NO: 81279 - protein, 37 aa, Artificial Sequence; identical to SEQ ID NO: 4288
  Cyclic GFR-binding peptide
  MOD_RES (31)..(32): Xaa is C or S

SEQ ID NO: 81280 - protein, 27 aa, Artificial Sequence
  Cyclic GFR-binding peptide
VVMGEYKFKIIQQKDNLYLMSIPEMKT

SEQ ID NO: 81281 - protein, 33 aa, Artificial Sequence; identical to SEQ ID NO: 32592
  Cyclic GFR-binding peptide
  MOD_RES (31)..(32): Xaa is C or S

SEQ ID NO: 81282 - protein, 30 aa, Artificial Sequence; identical to SEQ ID NO: 14804
  Cyclic GFR-binding peptide
  MOD_RES (2)..(4): Xaa is C or S

SEQ ID NO: 81283 - protein, 30 aa, Artificial Sequence
  Cyclic GFR-binding peptide
  MOD_RES (28)..(29): Xaa is C or S
IMPIKGYVKPKRGVFYLINIPSLAQPVXXP

SEQ ID NO: 81284 - protein, 34 aa, Artificial Sequence; identical to SEQ ID NO: 32596
  Cyclic GFR-binding peptide
  MOD_RES (29)..(29): Xaa is C or S

SEQ ID NO: 81285 - protein, 37 aa, Artificial Sequence; identical to SEQ ID NO: 4294
  Cyclic GFR-binding peptide
  MOD_RES (1)..(3)..(35)..(36): Xaa is C or S

SEQ ID NO: 81286 - protein, 31 aa, Artificial Sequence; identical to SEQ ID NO: 4296
  Cyclic GFR-binding peptide
  MOD_RES (2)..(2): Xaa is C or S

SEQ ID NO: 81287 - protein, 27 aa, Artificial Sequence
  Cyclic GFR-binding peptide
  MOD_RES (26)..(27): Xaa is C or S
YHYKLVKPKRGVKYLISIPSLAQPVXX

SEQ ID NO: 81288 - protein, 31 aa, Artificial Sequence; identical to SEQ ID NO: 4298
  Cyclic GFR-binding peptide
  MOD_RES (2)..(2): Xaa is C or S

SEQ ID NO: 81289 - protein, 23 aa, Artificial Sequence
  Cyclic GFR-binding peptide
VMYHYKLVKPTRGVKYLISIPSL

SEQ ID NO: 81290 - protein, 36 aa, Artificial Sequence; identical to SEQ ID NO: 32606
  Cyclic GFR-binding peptide
  MOD_RES (2)..(4)..(36): Xaa is C or S

SEQ ID NO: 81291 - protein, 32 aa, Artificial Sequence; identical to SEQ ID NO: 4303
  Cyclic GFR-binding peptide
  MOD_RES (27)..(27): Xaa is C or S

SEQ ID NO: 81292 - protein, 34 aa, Artificial Sequence; identical to SEQ ID NO: 4304
  Cyclic GFR-binding peptide
  MOD_RES (30)..(31): Xaa is C or S

SEQ ID NO: 81293 - protein, 35 aa, Artificial Sequence
  Cyclic GFR-binding peptide
  MOD_RES (2)..(4): Xaa is C or S
RXGXAEVVMDRHKRLVVNNAADYYLISTASLRAPV

SEQ ID NO: 81294 - protein, 23 aa, Artificial Sequence
  Cyclic GFR-binding peptide
DPIKGYVVKENEDFYLMNIPSLE

SEQ ID NO: 81295 - protein, 38 aa, Artificial Sequence; identical to SEQ ID NO: 32611
  Cyclic GFR-binding peptide
  MOD_RES (32)..(33): Xaa is C or S

SEQ ID NO: 81296 - protein, 30 aa, Artificial Sequence; identical to SEQ ID NO: 41207
  Cyclic GFR-binding peptide
  MOD_RES (28)..(29): Xaa is C or S

SEQ ID NO: 81297 - protein, 30 aa, Artificial Sequence; identical to SEQ ID NO: 4308
  Cyclic GFR-binding peptide
  MOD_RES (1)..(1): Xaa is C or S

SEQ ID NO: 81298 - protein, 38 aa, Artificial Sequence; identical to SEQ ID NO: 32615
  Cyclic GFR-binding peptide
  MOD_RES (2)..(34)..(35): Xaa is C or S

SEQ ID NO: 81299 - protein, 28 aa, Artificial Sequence
  Cyclic GFR-binding peptide
  MOD_RES (1)..(1): Xaa is C or S
XAKVVMNRYKKLIVNNSSDFYLVSIANL

SEQ ID NO: 81300 - protein, 31 aa, Artificial Sequence; identical to SEQ ID NO: 4317
  Cyclic GFR-binding peptide
  MOD_RES (27)..(28): Xaa is C or S

SEQ ID NO: 81301 - protein, 30 aa, Artificial Sequence
  Cyclic GFR-binding peptide
  MOD_RES (1)..(3): Xaa is C or S
XKXSKVVMPIKGYVKPTRGVFYLINIPSLD

SEQ ID NO: 81302 - protein, 21 aa, Artificial Sequence
  Cyclic GFR-binding peptide
EYKFKVVNKNEDLYLISIPEM

SEQ ID NO: 81303 - protein, 24 aa, Artificial Sequence
  Cyclic GFR-binding peptide
YHYKLVVKENEDKYLMSIPSLETP

SEQ ID NO: 81304 - protein, 32 aa, Artificial Sequence; identical to SEQ ID NO: 32624
  Cyclic GFR-binding peptide
  MOD_RES (28)..(29): Xaa is C or S

SEQ ID NO: 81305 - protein, 40 aa, Artificial Sequence
  Cyclic GFR-binding peptide
  MOD_RES (2)..(4)..(35)..(36): Xaa is C or S
LXGXEEVIMEYKFKLLVRGNDLYLMSIPETKVPAXXTSPV

SEQ ID NO: 81306 - protein, 29 aa, Artificial Sequence
  Cyclic GFR-binding peptide
  MOD_RES (1)..(1): Xaa is C or S
XSKVIMRHKRLIKPTKGIYYLISTASLDQ

SEQ ID NO: 81307 - protein, 30 aa, Artificial Sequence; identical to SEQ ID NO: 4323
  Cyclic GFR-binding peptide
  MOD_RES (26)..(27): Xaa is C or S

SEQ ID NO: 81308 - protein, 21 aa, Artificial Sequence
  Cyclic GFR-binding peptide
YHYKLVVNNAADKYLISIPSL

SEQ ID NO: 81309 - protein, 38 aa, Artificial Sequence
  Cyclic GFR-binding peptide
  MOD_RES (2)..(4)..(35)..(36): Xaa is C or S
SXKXSRVIMPIKGYVKPKRGVFYLINIPSLAQPVXXPA

SEQ ID NO: 81310 - protein, 37 aa, Artificial Sequence; identical to SEQ ID NO: 14834
  Cyclic GFR-binding peptide
  MOD_RES (2)..(34)..(35): Xaa is C or S

SEQ ID NO: 81311 - protein, 31 aa, Artificial Sequence; identical to SEQ ID NO: 41221
  Cyclic GFR-binding peptide
  MOD_RES (2)..(4): Xaa is C or S

SEQ ID NO: 81312 - protein, 24 aa, Artificial Sequence
  Cyclic GFR-binding peptide
MNRHKRLIVNSSDDYYLVSTASLK

SEQ ID NO: 81313 - protein, 35 aa, Artificial Sequence; identical to SEQ ID NO: 32632
  Cyclic GFR-binding peptide
  MOD_RES (29)..(30): Xaa is C or S

SEQ ID NO: 81314 - protein, 28 aa, Artificial Sequence
  Cyclic GFR-binding peptide
  MOD_RES (27)..(28): Xaa is C or S
GEYKFKIIQQKDNLYLMSIPEMKTPTXX

SEQ ID NO: 81315 - protein, 26 aa, Artificial Sequence
  Cyclic GFR-binding peptide
DYHYKLVVNNAADKYLISIPSLRAPV

SEQ ID NO: 81316 - protein, 31 aa, Artificial Sequence; identical to SEQ ID NO: 4334
  Cyclic GFR-binding peptide
  MOD_RES (1)..(3): Xaa is C or S

SEQ ID NO: 81317 - protein, 35 aa, Artificial Sequence
  Cyclic GFR-binding peptide
  MOD_RES (1)..(3)..(35): Xaa is C or S
XAXSEVTMNYHYKLVVNKNEDKYLISIPSMKEPVX

SEQ ID NO: 81318 - protein, 25 aa, Artificial Sequence
  Cyclic GFR-binding peptide
VIMRYKKLVKPKRGVFYLISIANLA

SEQ ID NO: 81319 - protein, 20 aa, Artificial Sequence
  Cyclic GFR-binding peptide
RHKRLIVNSSDDYYLVSTAS

SEQ ID NO: 81320 - protein, 28 aa, Artificial Sequence
  Cyclic GFR-binding peptide
ESVAMGYHYKLYTVVGKDKYLISIPSLK

SEQ ID NO: 81321 - protein, 32 aa, Artificial Sequence
  Cyclic GFR-binding peptide
  MOD_RES (2)..(2): Xaa is C or S
KXSKVIMPIKGYIKPTKGIFYLINIPSLDQSV

SEQ ID NO: 81322 - protein, 31 aa, Artificial Sequence
  Cyclic GFR-binding peptide
  MOD_RES (27)..(28): Xaa is C or S
GRHKRLIIQQKDNYYLMSTASMKTPTXXPGA

SEQ ID NO: 81323 - protein, 35 aa, Artificial Sequence; identical to SEQ ID NO: 4343
  Cyclic GFR-binding peptide
  MOD_RES (32)..(32): Xaa is C or S

SEQ ID NO: 81324 - protein, 36 aa, Artificial Sequence; identical to SEQ ID NO: 4344
  Cyclic GFR-binding peptide
  MOD_RES (2)..(4): Xaa is C or S

SEQ ID NO: 81325 - protein, 31 aa, Artificial Sequence; identical to SEQ ID NO: 4348
  Cyclic GFR-binding peptide
  MOD_RES (30)..(31): Xaa is C or S

SEQ ID NO: 81326 - protein, 32 aa, Artificial Sequence; identical to SEQ ID NO: 32652
  Cyclic GFR-binding peptide
  MOD_RES (32)..(32): Xaa is C or S

SEQ ID NO: 81327 - protein, 21 aa, Artificial Sequence
  Cyclic GFR-binding peptide
RHKRLVVNKNEDYYLISTASM

SEQ ID NO: 81328 - protein, 21 aa, Artificial Sequence
  Cyclic GFR-binding peptide
RHKRLIIQQKDNYYLMSTASM

SEQ ID NO: 81329 - protein, 36 aa, Artificial Sequence; identical to SEQ ID NO: 4354
  Cyclic GFR-binding peptide
  MOD_RES (31)..(32): Xaa is C or S

SEQ ID NO: 81330 - protein, 35 aa, Artificial Sequence
  Cyclic GFR-binding peptide
  MOD_RES (1)..(32)..(33): Xaa is C or S
XEEVIMYHYKLLLVRGNDKYLMSIPSTKVPAXXTS

SEQ ID NO: 81331 - protein, 34 aa, Artificial Sequence; identical to SEQ ID NO: 14860
  Cyclic GFR-binding peptide
  MOD_RES (31)..(32): Xaa is C or S

SEQ ID NO: 81332 - protein, 28 aa, Artificial Sequence
  Cyclic GFR-binding peptide
AEVVMDPIKGYVVNNAADFYLINIPSLR

SEQ ID NO: 81333 - protein, 29 aa, Artificial Sequence
  Cyclic GFR-binding peptide
  MOD_RES (1)..(1): Xaa is C or S
XGEVVMDEYKFKVVKENEDLYLMSIPELE

SEQ ID NO: 81334 - protein, 42 aa, Artificial Sequence; identical to SEQ ID NO: 4357
  Cyclic GFR-binding peptide
  MOD_RES (2)..(4)..(36)..(37): Xaa is C or S

SEQ ID NO: 81335 - protein, 32 aa, Artificial Sequence; identical to SEQ ID NO: 4359
  Cyclic GFR-binding peptide
  MOD_RES (2)..(4): Xaa is C or S

SEQ ID NO: 81336 - protein, 38 aa, Artificial Sequence; identical to SEQ ID NO: 4361
  Cyclic GFR-binding peptide
  MOD_RES (2)..(33)..(34): Xaa is C or S

SEQ ID NO: 81337 - protein, 33 aa, Artificial Sequence; identical to SEQ ID NO: 41246
  Cyclic GFR-binding peptide
  MOD_RES (28)..(29): Xaa is C or S

SEQ ID NO: 81338 - protein, 31 aa, Artificial Sequence; identical to SEQ ID NO: 4364
  Cyclic GFR-binding peptide
  MOD_RES (29)..(30): Xaa is C or S

SEQ ID NO: 81339 - protein, 35 aa, Artificial Sequence; identical to SEQ ID NO: 4366
  Cyclic GFR-binding peptide
  MOD_RES (31)..(31): Xaa is C or S

SEQ ID NO: 81340 - protein, 33 aa, Artificial Sequence
  Cyclic GFR-binding peptide
  MOD_RES (31)..(32): Xaa is C or S
EEVIMEYKFKLLVRGNDLYLMSIPETKVPAXXT

SEQ ID NO: 81341 - protein, 34 aa, Artificial Sequence; identical to SEQ ID NO: 4368
  Cyclic GFR-binding peptide
  MOD_RES (2)..(4): Xaa is C or S

SEQ ID NO: 81342 - protein, 24 aa, Artificial Sequence
  Cyclic GFR-binding peptide
VVMDYHYKLVVNNAADKYLISIPS

SEQ ID NO: 81343 - protein, 37 aa, Artificial Sequence
  Cyclic GFR-binding peptide
  MOD_RES (31)..(32): Xaa is C or S
RVVMNRYKKLIVNSSDDFYLVSIANLKTPAXXPKPVH

SEQ ID NO: 81344 - protein, 29 aa, Artificial Sequence
  Cyclic GFR-binding peptide
KVIMRYKKLIKPTKGIFYLISIANLDQSV

SEQ ID NO: 81345 - protein, 39 aa, Artificial Sequence; identical to SEQ ID NO: 4375
  Cyclic GFR-binding peptide
  MOD_RES (2)..(4)..(35)..(36): Xaa is C or S

SEQ ID NO: 81346 - protein, 28 aa, Artificial Sequence
  Cyclic GFR-binding peptide
MGEPIKGYTPVGMDDFYLVNIPSLKTPV

SEQ ID NO: 81347 - protein, 32 aa, Artificial Sequence; identical to SEQ ID NO: 4376
  Cyclic GFR-binding peptide
  MOD_RES (28)..(29): Xaa is C or S

SEQ ID NO: 81348 - protein, 27 aa, Artificial Sequence
  Cyclic GFR-binding peptide
  MOD_RES (1)..(1): Xaa is C or S
XGEVVMEPIKGYVVKDYEDFYLMNIPS

SEQ ID NO: 81349 - protein, 24 aa, Artificial Sequence
  Cyclic GFR-binding peptide
RHKRLYTVVGKDYYLISTASLKTP

SEQ ID NO: 81350 - protein, 29 aa, Artificial Sequence
  Cyclic GFR-binding peptide
  MOD_RES (26)..(27): Xaa is C or S
RHKRLVKPTRGVYYLISTASLDQPVXXPS

SEQ ID NO: 81351 - protein, 33 aa, Artificial Sequence; identical to SEQ ID NO: 4378
  Cyclic GFR-binding peptide
  MOD_RES (1)..(3): Xaa is C or S

SEQ ID NO: 81352 - protein, 37 aa, Artificial Sequence; identical to SEQ ID NO: 4381
  Cyclic GFR-binding peptide
  MOD_RES (1)..(3)..(35)..(36): Xaa is C or S

SEQ ID NO: 81353 - protein, 31 aa, Artificial Sequence; identical to SEQ ID NO: 4382
  Cyclic GFR-binding peptide
  MOD_RES (1)..(1): Xaa is C or S

SEQ ID NO: 81354 - protein, 29 aa, Artificial Sequence
  Cyclic GFR-binding peptide
VAMGRYKKLYTVVGKDFYLISIANLKTPV

SEQ ID NO: 81355 - protein, 30 aa, Artificial Sequence; identical to SEQ ID NO: 32676
  Cyclic GFR-binding peptide
  MOD_RES (28)..(29): Xaa is C or S

SEQ ID NO: 81356 - protein, 28 aa, Artificial Sequence
  Cyclic GFR-binding peptide
  MOD_RES (2)..(2): Xaa is C or S
KXSRVIMEYKFKVKPKRGVLYLISIPEL

SEQ ID NO: 81357 - protein, 21 aa, Artificial Sequence
  Cyclic GFR-binding peptide
MYHYKLLLVRGNDKYLMSIPS

SEQ ID NO: 81358 - protein, 37 aa, Artificial Sequence; identical to SEQ ID NO: 41277
  Cyclic GFR-binding peptide
  MOD_RES (1)..(3)..(35)..(36): Xaa is C or S

SEQ ID NO: 81359 - protein, 28 aa, Artificial Sequence
  Cyclic GFR-binding peptide
SEVTMNRHKRLVVNKNEDYYLISTASMK

SEQ ID NO: 81360 - protein, 32 aa, Artificial Sequence; identical to SEQ ID NO: 4385
  Cyclic GFR-binding peptide
  MOD_RES (1)..(1): Xaa is C or S

SEQ ID NO: 81361 - protein, 31 aa, Artificial Sequence; identical to SEQ ID NO: 14886
  Cyclic GFR-binding peptide
  MOD_RES (28)..(29): Xaa is C or S

SEQ ID NO: 81362 - protein, 25 aa, Artificial Sequence
  Cyclic GFR-binding peptide
MYHYKLVKPTRGVKYLISIPSLDQP

SEQ ID NO: 81363 - protein, 27 aa, Artificial Sequence
  Cyclic GFR-binding peptide
EVVMEYHYKLVVKDYEDKYLMSIPSLE

SEQ ID NO: 81364 - protein, 29 aa, Artificial Sequence
  Cyclic GFR-binding peptide
  MOD_RES (1)..(3): Xaa is C or S
XGXGEVVMDEYKFKVVKENEDLYLMSIPE

SEQ ID NO: 81365 - protein, 38 aa, Artificial Sequence; identical to SEQ ID NO: 41285
  Cyclic GFR-binding peptide
  MOD_RES (2)..(4)..(36)..(37): Xaa is C or S

SEQ ID NO: 81366 - protein, 29 aa, Artificial Sequence
  Cyclic GFR-binding peptide
VVMEYHYKLVVKDYEDKYLMSIPSLETPV

SEQ ID NO: 81367 - protein, 38 aa, Artificial Sequence; identical to SEQ ID NO: 32686
  Cyclic GFR-binding peptide
  MOD_RES (32)..(33): Xaa is C or S

SEQ ID NO: 81368 - protein, 34 aa, Artificial Sequence; identical to SEQ ID NO: 32687
  Cyclic GFR-binding peptide
  MOD_RES (2)..(4): Xaa is C or S

SEQ ID NO: 81369 - protein, 41 aa, Artificial Sequence; identical to SEQ ID NO: 32690
  Cyclic GFR-binding peptide
  MOD_RES (1)..(3)..(35)..(36): Xaa is C or S

SEQ ID NO: 81370 - protein, 31 aa, Artificial Sequence; identical to SEQ ID NO: 4396
  Cyclic GFR-binding peptide
  MOD_RES (31)..(31): Xaa is C or S

SEQ ID NO: 81371 - protein, 37 aa, Artificial Sequence; identical to SEQ ID NO: 4398
  Cyclic GFR-binding peptide
  MOD_RES (1)..(33)..(34): Xaa is C or S

SEQ ID NO: 81372 - protein, 37 aa, Artificial Sequence; identical to SEQ ID NO: 4400
  Cyclic GFR-binding peptide
  MOD_RES (32)..(33): Xaa is C or S

SEQ ID NO: 81373 - protein, 39 aa, Artificial Sequence; identical to SEQ ID NO: 4401
  Cyclic GFR-binding peptide
  MOD_RES (2)..(35)..(36): Xaa is C or S

SEQ ID NO: 81374 - protein, 37 aa, Artificial Sequence; identical to SEQ ID NO: 4404
  Cyclic GFR-binding peptide
  MOD_RES (31)..(32): Xaa is C or S

SEQ ID NO: 81375 - protein, 36 aa, Artificial Sequence; identical to SEQ ID NO: 4405
  Cyclic GFR-binding peptide
  MOD_RES (2)..(34)..(35): Xaa is C or S

SEQ ID NO: 81376 - protein, 36 aa, Artificial Sequence
  Cyclic GFR-binding peptide
  MOD_RES (2)..(34)..(35): Xaa is C or S
GXSEVVMDRHKRLVVNNASDYYLISTASLRTPVXXT

SEQ ID NO: 81377 - protein, 27 aa, Artificial Sequence
  Cyclic GFR-binding peptide
VMGRHKRLIIQQKDNYYLMSTASMKTP

SEQ ID NO: 81378 - protein, 37 aa, Artificial Sequence
  Cyclic GFR-binding peptide
  MOD_RES (2)..(34)..(35): Xaa is C or S
GXSEVVMDEYKFKVVNNASDLYLISIPELRTPVXXTP

SEQ ID NO: 81379 - protein, 34 aa, Artificial Sequence; identical to SEQ ID NO: 4410
  Cyclic GFR-binding peptide
  MOD_RES (29)..(30): Xaa is C or S

SEQ ID NO: 81380 - protein, 27 aa, Artificial Sequence
  Cyclic GFR-binding peptide
  MOD_RES (1)..(1): Xaa is C or S
XSRVIMEYKFKVKPKRGVLYLISIPEL

SEQ ID NO: 81381 - protein, 28 aa, Artificial Sequence
  Cyclic GFR-binding peptide
SRVVMNRYKKLIVNSSDDFYLVSIANLK

SEQ ID NO: 81382 - protein, 28 aa, Artificial Sequence
  Cyclic GFR-binding peptide
  MOD_RES (2)..(2): Xaa is C or S
KXSKVIMRYKKLIKPTKGIFYLISIANL

SEQ ID NO: 81383 - protein, 28 aa, Artificial Sequence
  Cyclic GFR-binding peptide
VTMNEYKFKVVNKNEDLYLISIPEMKEP

SEQ ID NO: 81384 - protein, 30 aa, Artificial Sequence; identical to SEQ ID NO: 32703
  Cyclic GFR-binding peptide
  MOD_RES (30)..(30): Xaa is C or S

SEQ ID NO: 81385 - protein, 34 aa, Artificial Sequence; identical to SEQ ID NO: 32705
  Cyclic GFR-binding peptide
  MOD_RES (1)..(3): Xaa is C or S

SEQ ID NO: 81386 - protein, 39 aa, Artificial Sequence
  Cyclic GFR-binding peptide
  MOD_RES (1)..(33)..(34): Xaa is C or S
XSEVVMDRHKRLVVNNASDYYLISTASLRTPVXXTPPTS

SEQ ID NO: 81387 - protein, 26 aa, Artificial Sequence
  Cyclic GFR-binding peptide
  MOD_RES (26)..(26): Xaa is C or S
RHKRLVKPKRGVYYLISTASLAQPVX

SEQ ID NO: 81388 - protein, 28 aa, Artificial Sequence
  Cyclic GFR-binding peptide
  MOD_RES (28)..(28): Xaa is C or S
MNRHKRLIVNSSDDYYLVSTASLKTPAX

SEQ ID NO: 81389 - protein, 35 aa, Artificial Sequence; identical to SEQ ID NO: 41303
  Cyclic GFR-binding peptide
  MOD_RES (31)..(32): Xaa is C or S

SEQ ID NO: 81390 - protein, 31 aa, Artificial Sequence; identical to SEQ ID NO: 32710
  Cyclic GFR-binding peptide
  MOD_RES (1)..(3): Xaa is C or S

SEQ ID NO: 81391 - protein, 36 aa, Artificial Sequence; identical to SEQ ID NO: 4423
  Cyclic GFR-binding peptide
  MOD_RES (1)..(32)..(33): Xaa is C or S

SEQ ID NO: 81392 - protein, 26 aa, Artificial Sequence
  Cyclic GFR-binding peptide
MGRYKKLIIQQKDNFYLMSIANMKTP

SEQ ID NO: 81393 - protein, 31 aa, Artificial Sequence; identical to SEQ ID NO: 41308
  Cyclic GFR-binding peptide
  MOD_RES (1)..(3): Xaa is C or S

SEQ ID NO: 81394 - protein, 31 aa, Artificial Sequence; identical to SEQ ID NO: 32716
  Cyclic GFR-binding peptide
  MOD_RES (2)..(2): Xaa is C or S

SEQ ID NO: 81395 - protein, 39 aa, Artificial Sequence
  Cyclic GFR-binding peptide
  MOD_RES (2)..(4)..(36)..(37): Xaa is C or S
RXAXSEVTMNRYKKLVVNKNEDFYLISIANMKEPVXXPE

SEQ ID NO: 81396 - protein, 37 aa, Artificial Sequence; identical to SEQ ID NO: 41314
  Cyclic GFR-binding peptide
  MOD_RES (32)..(33): Xaa is C or S

SEQ ID NO: 81397 - protein, 28 aa, Artificial Sequence
  Cyclic GFR-binding peptide
  MOD_RES (1)..(3): Xaa is C or S
XKXSKVVMRYKKLVKPTRGVFYLISIAN

SEQ ID NO: 81398 - protein, 35 aa, Artificial Sequence
  Cyclic GFR-binding peptide
  MOD_RES (1)..(32)..(33): Xaa is C or S
XEEVIMRHKRLLLVRGNDYYLMSTASTKVPAXXTS

SEQ ID NO: 81399 - protein, 22 aa, Artificial Sequence
  Cyclic GFR-binding peptide
RYKKLVVKENEDFYLMSIANLE

SEQ ID NO: 81400 - protein, 25 aa, Artificial Sequence
  Cyclic GFR-binding peptide
MNEYKFKVVNKNEDLYLISIPEMKE

SEQ ID NO: 81401 - protein, 32 aa, Artificial Sequence; identical to SEQ ID NO: 4434
  Cyclic GFR-binding peptide
  MOD_RES (32)..(32): Xaa is C or S

SEQ ID NO: 81402 - protein, 23 aa, Artificial Sequence
  Cyclic GFR-binding peptide
MGPIKGYYTVVGKDFYLINIPSL

SEQ ID NO: 81403 - protein, 29 aa, Artificial Sequence
  Cyclic GFR-binding peptide
  MOD_RES (1)..(1): Xaa is C or S
XGEVVMDPIKGYVVKENEDFYLMNIPSLE

SEQ ID NO: 81404 - protein, 27 aa, Artificial Sequence
  Cyclic GFR-binding peptide
  MOD_RES (26)..(27): Xaa is C or S
RHKRLVVKENEDYYLMSTASLETPVXX

SEQ ID NO: 81405 - protein, 29 aa, Artificial Sequence
  Cyclic GFR-binding peptide
  MOD_RES (28)..(29): Xaa is C or S
IMPIKGYVKPKRGVFYLINIPSLAQPVXX

SEQ ID NO: 81406 - protein, 37 aa, Artificial Sequence; identical to SEQ ID NO: 75637
  Cyclic GFR-binding peptide
  MOD_RES (1)..(3)..(34)..(35): Xaa is C or S

SEQ ID NO: 81407 - protein, 34 aa, Artificial Sequence; identical to SEQ ID NO: 41327
  Cyclic GFR-binding peptide
  MOD_RES (28)..(29): Xaa is C or S

SEQ ID NO: 81408 - protein, 31 aa, Artificial Sequence; identical to SEQ ID NO: 4441
  Cyclic GFR-binding peptide
  MOD_RES (2)..(4): Xaa is C or S

SEQ ID NO: 81409 - protein, 24 aa, Artificial Sequence
  Cyclic GFR-binding peptide
VMRYKKLVKPTRGVFYLISIANLD

SEQ ID NO: 81410 - protein, 27 aa, Artificial Sequence
  Cyclic GFR-binding peptide
  MOD_RES (1)..(1): Xaa is C or S
XGEVVMEEYKFKVVKDYEDLYLMSIPE

SEQ ID NO: 81411 - protein, 32 aa, Artificial Sequence; identical to SEQ ID NO: 4447
  Cyclic GFR-binding peptide
  MOD_RES (32)..(32): Xaa is C or S

SEQ ID NO: 81412 - protein, 28 aa, Artificial Sequence
  Cyclic GFR-binding peptide
  MOD_RES (27)..(28): Xaa is C or S
NRYKKLIVNSSDDFYLVSIANLKTPAXX

SEQ ID NO: 81413 - protein, 31 aa, Artificial Sequence
  Cyclic GFR-binding peptide
  MOD_RES (26)..(27): Xaa is C or S
PIKGYVKPTRGVFYLINIPSLDQPVXXPSAS

SEQ ID NO: 81414 - protein, 40 aa, Artificial Sequence
  Cyclic GFR-binding peptide
  MOD_RES (2)..(34)..(35): Xaa is C or S
AXSEVTMNRHKRLVVNKNEDYYLISTASMKEPVXXPEPIG

SEQ ID NO: 81415 - protein, 40 aa, Artificial Sequence; identical to SEQ ID NO: 4453
  Cyclic GFR-binding peptide
  MOD_RES (2)..(34)..(35): Xaa is C or S

SEQ ID NO: 81416 - protein, 25 aa, Artificial Sequence
  Cyclic GFR-binding peptide
VMEYHYKLVVKDYEDKYLMSIPSLE

SEQ ID NO: 81417 - protein, 39 aa, Artificial Sequence; identical to SEQ ID NO: 4455
  Cyclic GFR-binding peptide
  MOD_RES (2)..(4)..(36)..(37): Xaa is C or S

SEQ ID NO: 81418 - protein, 30 aa, Artificial Sequence; identical to SEQ ID NO: 32748
  Cyclic GFR-binding peptide

SEQ ID NO: 81419 - protein, 36 aa, Artificial Sequence
  Cyclic GFR-binding peptide
  MOD_RES (1)..(33)..(34): Xaa is C or S
XRDVVMGRHKRLIIQQKDNYYLMSTASMKTPTXXPG

SEQ ID NO: 81420 - protein, 31 aa, Artificial Sequence; identical to SEQ ID NO: 32751
  Cyclic GFR-binding peptide

SEQ ID NO: 81421 - protein, 32 aa, Artificial Sequence; identical to SEQ ID NO: 32752
  Cyclic GFR-binding peptide
  MOD_RES (2)..(4): Xaa is C or S

SEQ ID NO: 81422 - protein, 30 aa, Artificial Sequence; identical to SEQ ID NO: 32753
  Cyclic GFR-binding peptide
  MOD_RES (1)..(3): Xaa is C or S

SEQ ID NO: 81423 - protein, 30 aa, Artificial Sequence; identical to SEQ ID NO: 32754
  Cyclic GFR-binding peptide
  MOD_RES (1)..(1): Xaa is C or S

SEQ ID NO: 81424 - protein, 35 aa, Artificial Sequence; identical to SEQ ID NO: 32755
  Cyclic GFR-binding peptide
  MOD_RES (2)..(4): Xaa is C or S

SEQ ID NO: 81425 - protein, 28 aa, Artificial Sequence
  Cyclic GFR-binding peptide
GEVVMERHKRLVVKDYEDYYLMSTASLE

SEQ ID NO: 81426 - protein, 34 aa, Artificial Sequence; identical to SEQ ID NO: 4463
  Cyclic GFR-binding peptide
  MOD_RES (31)..(32): Xaa is C or S

SEQ ID NO: 81427 - protein, 34 aa, Artificial Sequence
  Cyclic GFR-binding peptide
  MOD_RES (28)..(29): Xaa is C or S
MNYHYKLVVNKNEDKYLISIPSMKEPVXXPEPIG

SEQ ID NO: 81428 - protein, 30 aa, Artificial Sequence; identical to SEQ ID NO: 75654
  Cyclic GFR-binding peptide
  MOD_RES (1)..(1): Xaa is C or S

SEQ ID NO: 81429 - protein, 20 aa, Artificial Sequence
  Cyclic GFR-binding peptide
EYKFKIVNSSDDLYLVSIPE

SEQ ID NO: 81430 - protein, 35 aa, Artificial Sequence; identical to SEQ ID NO: 4466
  Cyclic GFR-binding peptide
  MOD_RES (2)..(33)..(34): Xaa is C or S

SEQ ID NO: 81431 - protein, 29 aa, Artificial Sequence
  Cyclic GFR-binding peptide
  MOD_RES (1)..(1): Xaa is C or S
XSEVVMDPIKGYVVNNASDFYLINIPSLR

SEQ ID NO: 81432 - protein, 21 aa, Artificial Sequence
  Cyclic GFR-binding peptide
YHYKLVVNKNEDKYLISIPSM

SEQ ID NO: 81433 - protein, 33 aa, Artificial Sequence; identical to SEQ ID NO: 41366
  Cyclic GFR-binding peptide
  MOD_RES (30)..(31): Xaa is C or S

SEQ ID NO: 81434 - protein, 31 aa, Artificial Sequence; identical to SEQ ID NO: 4472
  Cyclic GFR-binding peptide
  MOD_RES (29)..(30): Xaa is C or S

SEQ ID NO: 81435 - protein, 30 aa, Artificial Sequence; identical to SEQ ID NO: 4474
  Cyclic GFR-binding peptide

SEQ ID NO: 81436 - protein, 25 aa, Artificial Sequence
  Cyclic GFR-binding peptide
MNEYKFKIVNSSDDLYLVSIPELKT

SEQ ID NO: 81437 - protein, 25 aa, Artificial Sequence
  Cyclic GFR-binding peptide
YHYKLVKPKRGVKYLISIPSLAQPV

SEQ ID NO: 81438 - protein, 20 aa, Artificial Sequence
  Cyclic GFR-binding peptide
RHKRLIKPTKGIYYLISTAS

SEQ ID NO: 81439 - protein, 32 aa, Artificial Sequence; identical to SEQ ID NO: 41381
  Cyclic GFR-binding peptide
  MOD_RES (27)..(28): Xaa is C or S

SEQ ID NO: 81440 - protein, 32 aa, Artificial Sequence; identical to SEQ ID NO: 75663
  Cyclic GFR-binding peptide
  MOD_RES (2)..(4): Xaa is C or S

SEQ ID NO: 81441 - protein, 25 aa, Artificial Sequence
  Cyclic GFR-binding peptide
KVVMEYKFKVKPTRGVLYLISIPEL

SEQ ID NO: 81442 - protein, 23 aa, Artificial Sequence
  Cyclic GFR-binding peptide
IMYHYKLLLVRGNDKYLMSIPST

SEQ ID NO: 81443 - protein, 33 aa, Artificial Sequence; identical to SEQ ID NO: 41385
  Cyclic GFR-binding peptide
  MOD_RES (29)..(30): Xaa is C or S

SEQ ID NO: 81444 - protein, 39 aa, Artificial Sequence; identical to SEQ ID NO: 4487
  Cyclic GFR-binding peptide
  MOD_RES (2)..(4)..(36)..(37): Xaa is C or S

SEQ ID NO: 81445 - protein, 39 aa, Artificial Sequence
  Cyclic GFR-binding peptide
  MOD_RES (2)..(4)..(36)..(37): Xaa is C or S
RXGXSEVVMDEYKFKVVNNASDLYLISIPELRTPVXXTP

SEQ ID NO: 81446 - protein, 37 aa, Artificial Sequence; identical to SEQ ID NO: 41394
  Cyclic GFR-binding peptide
  MOD_RES (2)..(4)..(36)..(37): Xaa is C or S

SEQ ID NO: 81447 - protein, 32 aa, Artificial Sequence
  Cyclic GFR-binding peptide
  MOD_RES (28)..(29): Xaa is C or S
MDRHKRLVVNNAADYYLISTASLRAPVXXSAP

SEQ ID NO: 81448 - protein, 33 aa, Artificial Sequence; identical to SEQ ID NO: 32788
  Cyclic GFR-binding peptide
  MOD_RES (32)..(33): Xaa is C or S

SEQ ID NO: 81449 - protein, 37 aa, Artificial Sequence; identical to SEQ ID NO: 4495
  Cyclic GFR-binding peptide
  MOD_RES (31)..(32): Xaa is C or S

SEQ ID NO: 81450 - protein, 32 aa, Artificial Sequence
  Cyclic GFR-binding peptide
  MOD_RES (26)..(27): Xaa is C or S
PIKGYVKPTRGVFYLINIPSLDQPVXXPSASA

SEQ ID NO: 81451 - protein, 36 aa, Artificial Sequence; identical to SEQ ID NO: 32792
  Cyclic GFR-binding peptide
  MOD_RES (31)..(32): Xaa is C or S

SEQ ID NO: 81452 - protein, 26 aa, Artificial Sequence
  Cyclic GFR-binding peptide
  MOD_RES (26)..(26): Xaa is C or S
PIKGYVVNKNEDFYLINIPSMKEPVX

SEQ ID NO: 81453 - protein, 31 aa, Artificial Sequence
  Cyclic GFR-binding peptide
RDVVMGEYKFKIIQQKDNLYLMSIPEMKTPT

SEQ ID NO: 81454 - protein, 36 aa, Artificial Sequence
  Cyclic GFR-binding peptide
  MOD_RES (2)..(34)..(35): Xaa is C or S
AXSEVTMNPIKGYVVNKNEDFYLINIPSMKEPVXXP

SEQ ID NO: 81455 - protein, 33 aa, Artificial Sequence
  Cyclic GFR-binding peptide
  MOD_RES (31)..(32): Xaa is C or S
DVVMGRHKRLIIQQKDNYYLMSTASMKTPTXXP

SEQ ID NO: 81456 - protein, 38 aa, Artificial Sequence
  Cyclic GFR-binding peptide
  MOD_RES (1)..(3)..(34)..(35): Xaa is C or S
XKXSKVVMPIKGYVKPTRGVFYLINIPSLDQPVXXPSA

SEQ ID NO: 81457 - protein, 33 aa, Artificial Sequence; identical to SEQ ID NO: 75678
  Cyclic GFR-binding peptide
  MOD_RES (28)..(29): Xaa is C or S

SEQ ID NO: 81458 - protein, 25 aa, Artificial Sequence
  Cyclic GFR-binding peptide
RHKRLVVNNAADYYLISTASLRAPV

SEQ ID NO: 81459 - protein, 29 aa, Artificial Sequence
  Cyclic GFR-binding peptide
  MOD_RES (1)..(1): Xaa is C or S
XRDVVMGEYKFKIIQQKDNLYLMSIPEMK

SEQ ID NO: 81460 - protein, 29 aa, Artificial Sequence
  Cyclic GFR-binding peptide
  MOD_RES (26)..(27): Xaa is C or S
PIKGYLLVRGNDFYLMNIPSTKVPAXXTS

SEQ ID NO: 81461 - protein, 36 aa, Artificial Sequence; identical to SEQ ID NO: 41409
  Cyclic GFR-binding peptide
  MOD_RES (1)..(3)..(35)..(36): Xaa is C or S

SEQ ID NO: 81462 - protein, 29 aa, Artificial Sequence
  Cyclic GFR-binding peptide
KVIMPIKGYIKPTKGIFYLINIPSLDQSV

SEQ ID NO: 81463 - protein, 34 aa, Artificial Sequence; identical to SEQ ID NO: 4506
  Cyclic GFR-binding peptide
  MOD_RES (1)..(33)..(34): Xaa is C or S

SEQ ID NO: 81464 - protein, 28 aa, Artificial Sequence
  Cyclic GFR-binding peptide
  MOD_RES (26)..(27): Xaa is C or S
EYKFKIVNSSDDLYLVSIPELQTPAXXP

SEQ ID NO: 81465 - protein, 26 aa, Artificial Sequence
  Cyclic GFR-binding peptide
EVIMEYKFKLLVRGNDLYLMSIPETK

SEQ ID NO: 81466 - protein, 34 aa, Artificial Sequence; identical to SEQ ID NO: 32804
  Cyclic GFR-binding peptide
  MOD_RES (28)..(29): Xaa is C or S

SEQ ID NO: 81467 - protein, 26 aa, Artificial Sequence
  Cyclic GFR-binding peptide
DPIKGYVVNNAADFYLINIPSLRAPV

SEQ ID NO: 81468 - protein, 37 aa, Artificial Sequence; identical to SEQ ID NO: 32805
  Cyclic GFR-binding peptide
  MOD_RES (1)..(33)..(34): Xaa is C or S

SEQ ID NO: 81469 - protein, 30 aa, Artificial Sequence; identical to SEQ ID NO: 4511
  Cyclic GFR-binding peptide
  MOD_RES (29)..(30): Xaa is C or S

SEQ ID NO: 81470 - protein, 28 aa, Artificial Sequence
  Cyclic GFR-binding peptide
EVIMYHYKLLLVRGNDKYLMSIPSTKVP

SEQ ID NO: 81471 - protein, 34 aa, Artificial Sequence; identical to SEQ ID NO: 4513
  Cyclic GFR-binding peptide
  MOD_RES (32)..(33): Xaa is C or S

SEQ ID NO: 81472 - protein, 34 aa, Artificial Sequence; identical to SEQ ID NO: 4514
  Cyclic GFR-binding peptide
  MOD_RES (1)..(3): Xaa is C or S

SEQ ID NO: 81473 - protein, 35 aa, Artificial Sequence
  Cyclic GFR-binding peptide
  MOD_RES (2)..(4): Xaa is C or S
RXAXSEVTMNPIKGYVVNKNEDFYLINIPSMKEPV

SEQ ID NO: 81474 - protein, 38 aa, Artificial Sequence; identical to SEQ ID NO: 4515
  Cyclic GFR-binding peptide
  MOD_RES (32)..(32): Xaa is C or S

SEQ ID NO: 81475 - protein, 29 aa, Artificial Sequence
  Cyclic GFR-binding peptide
  MOD_RES (29)..(29): Xaa is C or S
VVMEYKFKVKPTRGVLYLISIPELDQPVX

SEQ ID NO: 81476 - protein, 35 aa, Artificial Sequence; identical to SEQ ID NO: 32812
  Cyclic GFR-binding peptide
  MOD_RES (31)..(31): Xaa is C or S

SEQ ID NO: 81477 - protein, 37 aa, Artificial Sequence; identical to SEQ ID NO: 32813
  Cyclic GFR-binding peptide
  MOD_RES (2)..(34)..(35): Xaa is C or S

SEQ ID NO: 81478 - protein, 28 aa, Artificial Sequence
  Cyclic GFR-binding peptide
  MOD_RES (27)..(28): Xaa is C or S
MYHYKLIKPTKGIKYLISIPSLDQSVXX

SEQ ID NO: 81479 - protein, 31 aa, Artificial Sequence; identical to SEQ ID NO: 41426
  Cyclic GFR-binding peptide
  MOD_RES (29)..(30): Xaa is C or S

SEQ ID NO: 81480 - protein, 27 aa, Artificial Sequence
  Cyclic GFR-binding peptide
MEEYKFKVVKDYEDLYLMSIPELETPV

SEQ ID NO: 81481 - protein, 31 aa, Artificial Sequence; identical to SEQ ID NO: 32819
  Cyclic GFR-binding peptide
  MOD_RES (2)..(4): Xaa is C or S

SEQ ID NO: 81482 - protein, 36 aa, Artificial Sequence; identical to SEQ ID NO: 32820
  Cyclic GFR-binding peptide
  MOD_RES (30)..(31): Xaa is C or S

SEQ ID NO: 81483 - protein, 32 aa, Artificial Sequence; identical to SEQ ID NO: 32821
  Cyclic GFR-binding peptide
  MOD_RES (1)..(1): Xaa is C or S

SEQ ID NO: 81484 - protein, 40 aa, Artificial Sequence
  Cyclic GFR-binding peptide
  MOD_RES (2)..(34)..(35): Xaa is C or S
GXSEVVMDYHYKLVVNNASDKYLISIPSLRTPVXXTPPTS

SEQ ID NO: 81485 - protein, 32 aa, Artificial Sequence; identical to SEQ ID NO: 4518
  Cyclic GFR-binding peptide
  MOD_RES (28)..(29): Xaa is C or S

SEQ ID NO: 81486 - protein, 33 aa, Artificial Sequence; identical to SEQ ID NO: 4519
  Cyclic GFR-binding peptide
  MOD_RES (2)..(4): Xaa is C or S

SEQ ID NO: 81487 - protein, 35 aa, Artificial Sequence
  Cyclic GFR-binding peptide
  MOD_RES (2)..(4): Xaa is C or S
RXGXGEVVMEPIKGYVVKDYEDFYLMNIPSLETPV

SEQ ID NO: 81488 - protein, 32 aa, Artificial Sequence
  Cyclic GFR-binding peptide
  MOD_RES (26)..(27): Xaa is C or S
YHYKLIVNSSDDKYLVSIPSLKTPAXXPKPVH

SEQ ID NO: 81489 - protein, 27 aa, Artificial Sequence
  Cyclic GFR-binding peptide
  MOD_RES (26)..(27): Xaa is C or S
EYKFKVKPKRGVLYLISIPELAQPVXX

SEQ ID NO: 81490 - protein, 26 aa, Artificial Sequence
  Cyclic GFR-binding peptide
SKVVMPIKGYVKPTRGVFYLINIPSL

SEQ ID NO: 81491 - protein, 24 aa, Artificial Sequence
  Cyclic GFR-binding peptide
KVVMYHYKLVKPTRGVKYLISIPS

SEQ ID NO: 81492 - protein, 25 aa, Artificial Sequence
  Cyclic GFR-binding peptide
VVMPIKGYVKPTRGVFYLINIPSLD

SEQ ID NO: 81493 - protein, 32 aa, Artificial Sequence; identical to SEQ ID NO: 41433
  Cyclic GFR-binding peptide
  MOD_RES (1)..(32): Xaa is C or S

SEQ ID NO: 81494 - protein, 33 aa, Artificial Sequence; identical to SEQ ID NO: 4523
  Cyclic GFR-binding peptide
  MOD_RES (1)..(33): Xaa is C or S

SEQ ID NO: 81495 - protein, 37 aa, Artificial Sequence
  Cyclic GFR-binding peptide
  MOD_RES (2)..(4)..(35)..(36): Xaa is C or S
SXKXSKVVMPIKGYVKPTRGVFYLINIPSLDQPVXXP

SEQ ID NO: 81496 - protein, 28 aa, Artificial Sequence
  Cyclic GFR-binding peptide
  MOD_RES (26)..(27): Xaa is C or S
RYKKLYTVVGKDFYLISIANLKTPVXXA

SEQ ID NO: 81497 - protein, 37 aa, Artificial Sequence
  Cyclic GFR-binding peptide
  MOD_RES (1)..(32)..(33): Xaa is C or S
XEEVIMRHKRLLLVRGNDYYLMSTASTKVPAXXTSPV

SEQ ID NO: 81498 - protein, 28 aa, Artificial Sequence
  Cyclic GFR-binding peptide
KVVMRHKRLVKPTRGVYYLISTASLDQP

SEQ ID NO: 81499 - protein, 32 aa, Artificial Sequence
  Cyclic GFR-binding peptide
  MOD_RES (1)..(3): Xaa is C or S
XAXSEVTMNRHKRLVVNKNEDYYLISTASMKE

SEQ ID NO: 81500 - protein, 41 aa, Artificial Sequence; identical to SEQ ID NO: 4529
  Cyclic GFR-binding peptide
  MOD_RES (2)..(4)..(35)..(36): Xaa is C or S

SEQ ID NO: 81501 - protein, 28 aa, Artificial Sequence
  Cyclic GFR-binding peptide
  MOD_RES (26)..(27): Xaa is C or S
RHKRLVVKENEDYYLMSTASLETPVXXA

SEQ ID NO: 81502 - protein, 26 aa, Artificial Sequence
  Cyclic GFR-binding peptide
VAMGRYKKLYTVVGKDFYLISIANLK

SEQ ID NO: 81503 - protein, 30 aa, Artificial Sequence; identical to SEQ ID NO: 4538
  Cyclic GFR-binding peptide
  MOD_RES (30)..(30): Xaa is C or S

SEQ ID NO: 81504 - protein, 25 aa, Artificial Sequence
  Cyclic GFR-binding peptide
MEEYKFKVVKDYEDLYLMSIPELET

SEQ ID NO: 81505 - protein, 33 aa, Artificial Sequence
  Cyclic GFR-binding peptide
  MOD_RES (1)..(32)..(33): Xaa is C or S
XSKVVMPIKGYVKPTRGVFYLINIPSLDQPVXX

SEQ ID NO: 81506 - protein, 25 aa, Artificial Sequence
  Cyclic GFR-binding peptide
NRHKRLIVNSSDDYYLVSTASLKTP

SEQ ID NO: 81507 - protein, 23 aa, Artificial Sequence
  Cyclic GFR-binding peptide
NYHYKLVVNKNEDKYLISIPSMK

SEQ ID NO: 81508 - protein, 33 aa, Artificial Sequence; identical to SEQ ID NO: 4541
  Cyclic GFR-binding peptide
  MOD_RES (29)..(30): Xaa is C or S

SEQ ID NO: 81509 - protein, 28 aa, Artificial Sequence
  Cyclic GFR-binding peptide
TMNRYKKLVVNKNEDFYLISIANMKEPV

SEQ ID NO: 81510 - protein, 26 aa, Artificial Sequence
  Cyclic GFR-binding peptide
EVVMDRHKRLVVNNASDYYLISTASL

SEQ ID NO: 81511 - protein, 33 aa, Artificial Sequence; identical to SEQ ID NO: 4543
  Cyclic GFR-binding peptide
  MOD_RES (32)..(33): Xaa is C or S

SEQ ID NO: 81512 - protein, 33 aa, Artificial Sequence; identical to SEQ ID NO: 4546
  Cyclic GFR-binding peptide
  MOD_RES (2)..(4): Xaa is C or S

SEQ ID NO: 81513 - protein, 31 aa, Artificial Sequence; identical to SEQ ID NO: 4547
  Cyclic GFR-binding peptide
  MOD_RES (1)..(3): Xaa is C or S

SEQ ID NO: 81514 - protein, 33 aa, Artificial Sequence
  Cyclic GFR-binding peptide
  MOD_RES (1)..(3): Xaa is C or S
XGXEEVIMRHKRLLLVRGNDYYLMSTASTKVPA

SEQ ID NO: 81515 - protein, 38 aa, Artificial Sequence; identical to SEQ ID NO: 41452
  Cyclic GFR-binding peptide
  MOD_RES (32)..(33): Xaa is C or S

SEQ ID NO: 81516 - protein, 27 aa, Artificial Sequence
  Cyclic GFR-binding peptide
  MOD_RES (26)..(26): Xaa is C or S
EYKFKIVNSSDDLYLVSIPELKTPAXT

SEQ ID NO: 81517 - protein, 36 aa, Artificial Sequence; identical to SEQ ID NO: 32851
  Cyclic GFR-binding peptide
  MOD_RES (1)..(33)..(34): Xaa is C or S

SEQ ID NO: 81518 - protein, 28 aa, Artificial Sequence
  Cyclic GFR-binding peptide
  MOD_RES (28)..(28): Xaa is C or S
IMYHYKLLLVRGNDKYLMSIPSTKVPAX

SEQ ID NO: 81519 - protein, 32 aa, Artificial Sequence; identical to SEQ ID NO: 32852
  Cyclic GFR-binding peptide
  MOD_RES (1)..(1): Xaa is C or S

SEQ ID NO: 81520 - protein, 33 aa, Artificial Sequence; identical to SEQ ID NO: 4555
  Cyclic GFR-binding peptide
  MOD_RES (29)..(30): Xaa is C or S

SEQ ID NO: 81521 - protein, 32 aa, Artificial Sequence; identical to SEQ ID NO: 4558
  Cyclic GFR-binding peptide
  MOD_RES (28)..(29): Xaa is C or S

SEQ ID NO: 81522 - protein, 32 aa, Artificial Sequence
  Cyclic GFR-binding peptide
  MOD_RES (31)..(32): Xaa is C or S
DVVMGRHKRLIIQQKDNYYLMSTASMKTPTXX

SEQ ID NO: 81523 - protein, 34 aa, Artificial Sequence
  Cyclic GFR-binding peptide
  MOD_RES (1)..(3): Xaa is C or S
XGXSEVVMDRHKRLVVNNASDYYLISTASLRTPV

SEQ ID NO: 81524 - protein, 32 aa, Artificial Sequence; identical to SEQ ID NO: 32855
  Cyclic GFR-binding peptide
  MOD_RES (26)..(27): Xaa is C or S

SEQ ID NO: 81525 - protein, 39 aa, Artificial Sequence; identical to SEQ ID NO: 41464
  Cyclic GFR-binding peptide
  MOD_RES (2)..(4)..(36)..(37): Xaa is C or S

SEQ ID NO: 81526 - protein, 33 aa, Artificial Sequence; identical to SEQ ID NO: 4563
  Cyclic GFR-binding peptide
  MOD_RES (30)..(31): Xaa is C or S

SEQ ID NO: 81527 - protein, 26 aa, Artificial Sequence
  Cyclic GFR-binding peptide
VMDRHKRLVVKENEDYYLMSTASLET

SEQ ID NO: 81528 - protein, 28 aa, Artificial Sequence
  Cyclic GFR-binding peptide
  MOD_RES (2)..(2): Xaa is C or S
GXSRVVMNPIKGYIVNSSDDFYLVNIPS

SEQ ID NO: 81529 - protein, 33 aa, Artificial Sequence; identical to SEQ ID NO: 4568
  Cyclic GFR-binding peptide
  MOD_RES (29)..(30): Xaa is C or S

SEQ ID NO: 81530 - protein, 29 aa, Artificial Sequence
  Cyclic GFR-binding peptide
  MOD_RES (28)..(29): Xaa is C or S
MDRHKRLVVKENEDYYLMSTASLETPVXX

SEQ ID NO: 81531 - protein, 30 aa, Artificial Sequence; identical to SEQ ID NO: 32862
  Cyclic GFR-binding peptide
  MOD_RES (27)..(28): Xaa is C or S

SEQ ID NO: 81532 - protein, 31 aa, Artificial Sequence; identical to SEQ ID NO: 32866
  Cyclic GFR-binding peptide
  MOD_RES (28)..(29): Xaa is C or S

SEQ ID NO: 81533 - protein, 29 aa, Artificial Sequence
  Cyclic GFR-binding peptide
EVVMEYHYKLVVKDYEDKYLMSIPSLETP

SEQ ID NO: 81534 - protein, 34 aa, Artificial Sequence; identical to SEQ ID NO: 32868
  Cyclic GFR-binding peptide
  MOD_RES (1)..(3): Xaa is C or S

SEQ ID NO: 81535 - protein, 36 aa, Artificial Sequence; identical to SEQ ID NO: 32869
  Cyclic GFR-binding peptide
  MOD_RES (1)..(33)..(34): Xaa is C or S

SEQ ID NO: 81536 - protein, 33 aa, Artificial Sequence; identical to SEQ ID NO: 32872
  Cyclic GFR-binding peptide
  MOD_RES (2)..(33): Xaa is C or S

SEQ ID NO: 81537 - protein, 42 aa, Artificial Sequence; identical to SEQ ID NO: 41487
  Cyclic GFR-binding peptide
  MOD_RES (1)..(3)..(36)..(37): Xaa is C or S

SEQ ID NO: 81538 - protein, 35 aa, Artificial Sequence; identical to SEQ ID NO: 32873
  Cyclic GFR-binding peptide
  MOD_RES (31)..(32): Xaa is C or S

SEQ ID NO: 81539 - protein, 27 aa, Artificial Sequence
  Cyclic GFR-binding peptide
  MOD_RES (26)..(26): Xaa is C or S
YHYKLIVNSSDDKYLVSIPSLKTPAXT

SEQ ID NO: 81540 - protein, 40 aa, Artificial Sequence; identical to SEQ ID NO: 41490
  Cyclic GFR-binding peptide
  MOD_RES (2)..(34)..(35): Xaa is C or S

SEQ ID NO: 81541 - protein, 27 aa, Artificial Sequence
  Cyclic GFR-binding peptide
  MOD_RES (27)..(27): Xaa is C or S
ERYKKLVVKDYEDFYLMSIANLETPVX

SEQ ID NO: 81542 - protein, 21 aa, Artificial Sequence
  Cyclic GFR-binding peptide
YHYKLVVKDYEDKYLMSIPSL

SEQ ID NO: 81543 - protein, 23 aa, Artificial Sequence
  Cyclic GFR-binding peptide
IMPIKGYLLVRGNDFYLMNIPST

SEQ ID NO: 81544 - protein, 38 aa, Artificial Sequence; identical to SEQ ID NO: 4587
  Cyclic GFR-binding peptide
  MOD_RES (1)..(3)..(35): Xaa is C or S

SEQ ID NO: 81545 - protein, 39 aa, Artificial Sequence; identical to SEQ ID NO: 32883
  Cyclic GFR-binding peptide
  MOD_RES (1)..(33)..(34): Xaa is C or S

SEQ ID NO: 81546 - protein, 39 aa, Artificial Sequence; identical to SEQ ID NO: 32884
  Cyclic GFR-binding peptide
  MOD_RES (2)..(4)..(37)..(38): Xaa is C or S

SEQ ID NO: 81547 - protein, 26 aa, Artificial Sequence
  Cyclic GFR-binding peptide
VMPIKGYVKPTRGVFYLINIPSLDQP

SEQ ID NO: 81548 - protein, 35 aa, Artificial Sequence; identical to SEQ ID NO: 41495
  Cyclic GFR-binding peptide
  MOD_RES (30)..(31): Xaa is C or S

SEQ ID NO: 81549 - protein, 34 aa, Artificial Sequence; identical to SEQ ID NO: 4597
  Cyclic GFR-binding peptide
  MOD_RES (2)..(4): Xaa is C or S

SEQ ID NO: 81550 - protein, 24 aa, Artificial Sequence
  Cyclic GFR-binding peptide
VMEEYKFKVVKDYEDLYLMSIPEL

SEQ ID NO: 81551 - protein, 27 aa, Artificial Sequence
  Cyclic GFR-binding peptide
MGYHYKLIIQQKDNKYLMSIPSMKTPT

SEQ ID NO: 81552 - protein, 29 aa, Artificial Sequence
  Cyclic GFR-binding peptide
  MOD_RES (2)..(2): Xaa is C or S
GXSEVVMDYHYKLVVNNASDKYLISIPSL

SEQ ID NO: 81553 - protein, 30 aa, Artificial Sequence; identical to SEQ ID NO: 32895
  Cyclic GFR-binding peptide

SEQ ID NO: 81554 - protein, 35 aa, Artificial Sequence; identical to SEQ ID NO: 32897
  Cyclic GFR-binding peptide
  MOD_RES (29)..(30): Xaa is C or S

SEQ ID NO: 81555 - protein, 32 aa, Artificial Sequence; identical to SEQ ID NO: 15095
  Cyclic GFR-binding peptide
  MOD_RES (2)..(2): Xaa is C or S

SEQ ID NO: 81556 - protein, 30 aa, Artificial Sequence; identical to SEQ ID NO: 32898
  Cyclic GFR-binding peptide
  MOD_RES (26)..(27): Xaa is C or S

SEQ ID NO: 81557 - protein, 30 aa, Artificial Sequence; identical to SEQ ID NO: 4606
  Cyclic GFR-binding peptide

SEQ ID NO: 81558 - protein, 34 aa, Artificial Sequence
  Cyclic GFR-binding peptide
  MOD_RES (30)..(31): Xaa is C or S
VVMGEYKFKIIQQKDNLYLMSIPEMKTPTXXPGA

SEQ ID NO: 81559 - protein, 31 aa, Artificial Sequence; identical to SEQ ID NO: 32906
  Cyclic GFR-binding peptide
  MOD_RES (26)..(27): Xaa is C or S

SEQ ID NO: 81560 - protein, 21 aa, Artificial Sequence
  Cyclic GFR-binding peptide
YHYKLIVNNSSDKYLVSIPSL

SEQ ID NO: 81561 - protein, 23 aa, Artificial Sequence
  Cyclic GFR-binding peptide
TMNRHKRLVVNKNEDYYLISTAS

SEQ ID NO: 81562 - protein, 36 aa, Artificial Sequence; identical to SEQ ID NO: 4616
  Cyclic GFR-binding peptide
  MOD_RES (2)..(4)..(36): Xaa is C or S

SEQ ID NO: 81563 - protein, 24 aa, Artificial Sequence
  Cyclic GFR-binding peptide
YHYKLIVNSSDDKYLVSIPSLQTP

SEQ ID NO: 81564 - protein, 34 aa, Artificial Sequence; identical to SEQ ID NO: 4619
  Cyclic GFR-binding peptide
  MOD_RES (30)..(31): Xaa is C or S

SEQ ID NO: 81565 - protein, 35 aa, Artificial Sequence
  Cyclic GFR-binding peptide
  MOD_RES (29)..(30): Xaa is C or S
TMNPIKGYVVNKNEDFYLINIPSMKEPVXXPEPIG

SEQ ID NO: 81566 - protein, 31 aa, Artificial Sequence; identical to SEQ ID NO: 4620
  Cyclic GFR-binding peptide
  MOD_RES (29)..(30): Xaa is C or S

SEQ ID NO: 81567 - protein, 21 aa, Artificial Sequence
  Cyclic GFR-binding peptide
GPIKGYYTVVGKDFYLINIPS

SEQ ID NO: 81568 - protein, 33 aa, Artificial Sequence; identical to SEQ ID NO: 32916
  Cyclic GFR-binding peptide
  MOD_RES (28)..(29): Xaa is C or S

SEQ ID NO: 81569 - protein, 23 aa, Artificial Sequence
  Cyclic GFR-binding peptide
MNEYKFKVVNKNEDLYLISIPEM

SEQ ID NO: 81570 - protein, 26 aa, Artificial Sequence
  Cyclic GFR-binding peptide
  MOD_RES (26)..(26): Xaa is C or S
PIKGYVVKDYEDFYLMNIPSLETPVX

SEQ ID NO: 81571 - protein, 38 aa, Artificial Sequence; identical to SEQ ID NO: 4623
  Cyclic GFR-binding peptide
  MOD_RES (32)..(33): Xaa is C or S

SEQ ID NO: 81572 - protein, 38 aa, Artificial Sequence
  Cyclic GFR-binding peptide
  MOD_RES (2)..(34)..(35): Xaa is C or S
AXSEVTMNEYKFKVVNKNEDLYLISIPEMKEPVXXPEP

SEQ ID NO: 81573 - protein, 27 aa, Artificial Sequence
  Cyclic GFR-binding peptide
RVIMYHYKLVKPKRGVKYLISIPSLAQ

SEQ ID NO: 81574 - protein, 36 aa, Artificial Sequence; identical to SEQ ID NO: 4629
  Cyclic GFR-binding peptide
  MOD_RES (30)..(31): Xaa is C or S

SEQ ID NO: 81575 - protein, 24 aa, Artificial Sequence
  Cyclic GFR-binding peptide
NRYKKLIVNSSDDFYLVSIANLKT

SEQ ID NO: 81576 - protein, 27 aa, Artificial Sequence
  Cyclic GFR-binding peptide
  MOD_RES (26)..(27): Xaa is C or S
RHKRLIIQQKDNYYLMSTASMKTPTXX

SEQ ID NO: 81577 - protein, 24 aa, Artificial Sequence
  Cyclic GFR-binding peptide
RHKRLVVKENEDYYLMSTASLETP

SEQ ID NO: 81578 - protein, 28 aa, Artificial Sequence
  Cyclic GFR-binding peptide
VSMGEPIKGYTPVGMDDFYLVNIPSLKT

SEQ ID NO: 81579 - protein, 30 aa, Artificial Sequence
  Cyclic GFR-binding peptide
  MOD_RES (27)..(28): Xaa is C or S
NYHYKLVVNKNEDKYLISIPSMKEPVXXPE

SEQ ID NO: 81580 - protein, 28 aa, Artificial Sequence
  Cyclic GFR-binding peptide
AKVVMNPIKGYIVNNSSDFYLVNIPSLK

SEQ ID NO: 81581 - protein, 25 aa, Artificial Sequence
  Cyclic GFR-binding peptide
VMDRYKKLVVNNAADFYLISIANLR

SEQ ID NO: 81582 - protein, 28 aa, Artificial Sequence
  Cyclic GFR-binding peptide
EVTMNPIKGYVVNKNEDFYLINIPSMKE

SEQ ID NO: 81583 - protein, 34 aa, Artificial Sequence
  Cyclic GFR-binding peptide
  MOD_RES (29)..(30): Xaa is C or S
VIMPIKGYVKPKRGVFYLINIPSLAQPVXXPAAS

SEQ ID NO: 81584 - protein, 26 aa, Artificial Sequence
  Cyclic GFR-binding peptide
MNRHKRLVVNKNEDYYLISTASMKEP

SEQ ID NO: 81585 - protein, 32 aa, Artificial Sequence
  Cyclic GFR-binding peptide
  MOD_RES (1)..(1): Xaa is C or S
XAEVVMDRHKRLVVNNAADYYLISTASLRAPV

SEQ ID NO: 81586 - protein, 31 aa, Artificial Sequence; identical to SEQ ID NO: 32939
  Cyclic GFR-binding peptide
  MOD_RES (26)..(27): Xaa is C or S

SEQ ID NO: 81587 - protein, 38 aa, Artificial Sequence; identical to SEQ ID NO: 4642
  Cyclic GFR-binding peptide
  MOD_RES (2)..(33)..(34): Xaa is C or S

SEQ ID NO: 81588 - protein, 34 aa, Artificial Sequence; identical to SEQ ID NO: 41554
  Cyclic GFR-binding peptide
  MOD_RES (28)..(29): Xaa is C or S

SEQ ID NO: 81589 - protein, 36 aa, Artificial Sequence; identical to SEQ ID NO: 4649
  Cyclic GFR-binding peptide
  MOD_RES (1)..(3)..(35)..(36): Xaa is C or S

SEQ ID NO: 81590 - protein, 31 aa, Artificial Sequence; identical to SEQ ID NO: 4650
  Cyclic GFR-binding peptide
  MOD_RES (29)..(30): Xaa is C or S

SEQ ID NO: 81591 - protein, 28 aa, Artificial Sequence
  Cyclic GFR-binding peptide
VVMRHKRLVKPTRGVYYLISTASLDQPV

SEQ ID NO: 81592 - protein, 29 aa, Artificial Sequence
  Cyclic GFR-binding peptide
  MOD_RES (1)..(1): Xaa is C or S
XSEVVMDEYKFKVVNNASDLYLISIPELR

SEQ ID NO: 81593 - protein, 25 aa, Artificial Sequence
  Cyclic GFR-binding peptide
RVIMEYKFKVKPKRGVLYLISIPEL

SEQ ID NO: 81594 - protein, 22 aa, Artificial Sequence
  Cyclic GFR-binding peptide
MEYKFKVKPKRGVLYLISIPEL

SEQ ID NO: 81595 - protein, 33 aa, Artificial Sequence; identical to SEQ ID NO: 32951
  Cyclic GFR-binding peptide
  MOD_RES (1)..(33): Xaa is C or S

SEQ ID NO: 81596 - protein, 31 aa, Artificial Sequence; identical to SEQ ID NO: 4659
  Cyclic GFR-binding peptide
  MOD_RES (28)..(29): Xaa is C or S

SEQ ID NO: 81597 - protein, 31 aa, Artificial Sequence; identical to SEQ ID NO: 4662
  Cyclic GFR-binding peptide
  MOD_RES (31)..(31): Xaa is C or S

SEQ ID NO: 81598 - protein, 30 aa, Artificial Sequence; identical to SEQ ID NO: 32958
  Cyclic GFR-binding peptide
  MOD_RES (28)..(29): Xaa is C or S

SEQ ID NO: 81599 - protein, 27 aa, Artificial Sequence
  Cyclic GFR-binding peptide
  MOD_RES (2)..(2): Xaa is C or S
KXSKVVMYHYKLVKPTRGVKYLISIPS

SEQ ID NO: 81600 - protein, 31 aa, Artificial Sequence
  Cyclic GFR-binding peptide
  MOD_RES (27)..(28): Xaa is C or S
DRHKRLVVNNAADYYLISTASLRAPVXXSAP

SEQ ID NO: 81601 - protein, 31 aa, Artificial Sequence; identical to SEQ ID NO: 41560
  Cyclic GFR-binding peptide
  MOD_RES (29)..(30): Xaa is C or S

SEQ ID NO: 81602 - protein, 39 aa, Artificial Sequence; identical to SEQ ID NO: 4668
  Cyclic GFR-binding peptide
  MOD_RES (1)..(3)..(35)..(36): Xaa is C or S

SEQ ID NO: 81603 - protein, 34 aa, Artificial Sequence
  Cyclic GFR-binding peptide
  MOD_RES (28)..(29): Xaa is C or S
MNEYKFKIVNSSDDLYLVSIPELKTPAXXPKPVH

SEQ ID NO: 81604 - protein, 33 aa, Artificial Sequence; identical to SEQ ID NO: 4670
  Cyclic GFR-binding peptide
  MOD_RES (31)..(32): Xaa is C or S

SEQ ID NO: 81605 - protein, 33 aa, Artificial Sequence
  Cyclic GFR-binding peptide
  MOD_RES (32)..(33): Xaa is C or S
AEVVMDRHKRLVVNNAADYYLISTASLRAPVXX

SEQ ID NO: 81606 - protein, 29 aa, Artificial Sequence
  Cyclic GFR-binding peptide
SVAMGPIKGYYTVVGKDFYLINIPSLKTP

SEQ ID NO: 81607 - protein, 37 aa, Artificial Sequence; identical to SEQ ID NO: 4671
  Cyclic GFR-binding peptide
  MOD_RES (1)..(3)..(34)..(35): Xaa is C or S

SEQ ID NO: 81608 - protein, 31 aa, Artificial Sequence; identical to SEQ ID NO: 32973
  Cyclic GFR-binding peptide
  MOD_RES (1)..(1): Xaa is C or S

SEQ ID NO: 81609 - protein, 33 aa, Artificial Sequence; identical to SEQ ID NO: 4677
  Cyclic GFR-binding peptide
  MOD_RES (28)..(29): Xaa is C or S

SEQ ID NO: 81610 - protein, 32 aa, Artificial Sequence; identical to SEQ ID NO: 41577
  Cyclic GFR-binding peptide
  MOD_RES (29)..(30): Xaa is C or S

SEQ ID NO: 81611 - protein, 30 aa, Artificial Sequence; identical to SEQ ID NO: 41579
  Cyclic GFR-binding peptide

SEQ ID NO: 81612 - protein, 27 aa, Artificial Sequence
  Cyclic GFR-binding peptide
DVVMGRYKKLIIQQKDNFYLMSIANMK

SEQ ID NO: 81613 - protein, 23 aa, Artificial Sequence
  Cyclic GFR-binding peptide
PIKGYVKPTRGVFYLINIPSLDQ

SEQ ID NO: 81614 - protein, 32 aa, Artificial Sequence; identical to SEQ ID NO: 32978
  Cyclic GFR-binding peptide
  MOD_RES (26)..(27): Xaa is C or S

SEQ ID NO: 81615 - protein, 32 aa, Artificial Sequence
  Cyclic GFR-binding peptide
  MOD_RES (1)..(32): Xaa is C or S
XEEVIMEYKFKLLVRGNDLYLMSIPETKVPAX

SEQ ID NO: 81616 - protein, 37 aa, Artificial Sequence; identical to SEQ ID NO: 4686
  Cyclic GFR-binding peptide
  MOD_RES (31)..(32): Xaa is C or S

SEQ ID NO: 81617 - protein, 36 aa, Artificial Sequence; identical to SEQ ID NO: 4687
  Cyclic GFR-binding peptide
  MOD_RES (2)..(34)..(35): Xaa is C or S

SEQ ID NO: 81618 - protein, 39 aa, Artificial Sequence; identical to SEQ ID NO: 41586
  Cyclic GFR-binding peptide
  MOD_RES (2)..(33)..(34): Xaa is C or S

SEQ ID NO: 81619 - protein, 26 aa, Artificial Sequence
  Cyclic GFR-binding peptide
  MOD_RES (1)..(1): Xaa is C or S
XEEVIMRHKRLLLVRGNDYYLMSTAS

SEQ ID NO: 81620 - protein, 32 aa, Artificial Sequence; identical to SEQ ID NO: 32983
  Cyclic GFR-binding peptide
  MOD_RES (28)..(29): Xaa is C or S

SEQ ID NO: 81621 - protein, 40 aa, Artificial Sequence; identical to SEQ ID NO: 32984
  Cyclic GFR-binding peptide
  MOD_RES (2)..(4)..(36)..(37): Xaa is C or S

SEQ ID NO: 81622 - protein, 28 aa, Artificial Sequence
  Cyclic GFR-binding peptide
  MOD_RES (1)..(1): Xaa is C or S
XEAVSMGERHKRLTPVGMDDYYLVSTAS

SEQ ID NO: 81623 - protein, 26 aa, Artificial Sequence
  Cyclic GFR-binding peptide
NYHYKLIVNNSSDKYLVSIPSLKTPA

SEQ ID NO: 81624 - protein, 32 aa, Artificial Sequence; identical to SEQ ID NO: 41593
  Cyclic GFR-binding peptide
  MOD_RES (30)..(31): Xaa is C or S

SEQ ID NO: 81625 - protein, 31 aa, Artificial Sequence; identical to SEQ ID NO: 4692
  Cyclic GFR-binding peptide
  MOD_RES (29)..(30): Xaa is C or S

SEQ ID NO: 81626 - protein, 28 aa, Artificial Sequence
  Cyclic GFR-binding peptide
  MOD_RES (2)..(2): Xaa is C or S
GXEEVIMRYKKLLLVRGNDFYLMSIANT

SEQ ID NO: 81627 - protein, 32 aa, Artificial Sequence; identical to SEQ ID NO: 4696
  Cyclic GFR-binding peptide
  MOD_RES (2)..(4): Xaa is C or S

SEQ ID NO: 81628 - protein, 22 aa, Artificial Sequence
  Cyclic GFR-binding peptide
MGRHKRLYTVVGKDYYLISTAS

SEQ ID NO: 81629 - protein, 31 aa, Artificial Sequence
  Cyclic GFR-binding peptide
  MOD_RES (2)..(2): Xaa is C or S
GXEEVIMRHKRLLLVRGNDYYLMSTASTKVP

SEQ ID NO: 81630 - protein, 33 aa, Artificial Sequence; identical to SEQ ID NO: 32992
  Cyclic GFR-binding peptide
  MOD_RES (2)..(2): Xaa is C or S

SEQ ID NO: 81631 - protein, 33 aa, Artificial Sequence; identical to SEQ ID NO: 32995
  Cyclic GFR-binding peptide
  MOD_RES (27)..(28): Xaa is C or S

SEQ ID NO: 81632 - protein, 31 aa, Artificial Sequence
  Cyclic GFR-binding peptide
  MOD_RES (30)..(31): Xaa is C or S
VTMNRHKRLVVNKNEDYYLISTASMKEPVXX

SEQ ID NO: 81633 - protein, 33 aa, Artificial Sequence; identical to SEQ ID NO: 4698
  Cyclic GFR-binding peptide
  MOD_RES (31)..(32): Xaa is C or S

SEQ ID NO: 81634 - protein, 40 aa, Artificial Sequence; identical to SEQ ID NO: 4699
  Cyclic GFR-binding peptide
  MOD_RES (2)..(4)..(37)..(38): Xaa is C or S

SEQ ID NO: 81635 - protein, 37 aa, Artificial Sequence
  Cyclic GFR-binding peptide
  MOD_RES (2)..(4)..(36)..(37): Xaa is C or S
RXAXSEVTMNRYKKLVVNKNEDFYLISIANMKEPVXX

SEQ ID NO: 81636 - protein, 27 aa, Artificial Sequence
  Cyclic GFR-binding peptide
AMGRHKRLYTVVGKDYYLISTASLKTP

SEQ ID NO: 81637 - protein, 28 aa, Artificial Sequence
  Cyclic GFR-binding peptide
  MOD_RES (28)..(28): Xaa is C or S
MDRYKKLVVKENEDFYLMSIANLETPVX

SEQ ID NO: 81638 - protein, 24 aa, Artificial Sequence
  Cyclic GFR-binding peptide
VVMNPIKGYIVNNSSDFYLVNIPS

SEQ ID NO: 81639 - protein, 36 aa, Artificial Sequence
  Cyclic GFR-binding peptide
  MOD_RES (2)..(33)..(34): Xaa is C or S
KXSRVIMPIKGYVKPKRGVFYLINIPSLAQPVXXPA

SEQ ID NO: 81640 - protein, 30 aa, Artificial Sequence; identical to SEQ ID NO: 4705
  Cyclic GFR-binding peptide
  MOD_RES (28)..(29): Xaa is C or S

SEQ ID NO: 81641 - protein, 36 aa, Artificial Sequence; identical to SEQ ID NO: 41612
  Cyclic GFR-binding peptide
  MOD_RES (1)..(33)..(34): Xaa is C or S

SEQ ID NO: 81642 - protein, 27 aa, Artificial Sequence
  Cyclic GFR-binding peptide
VIMPIKGYVKPKRGVFYLINIPSLAQP

SEQ ID NO: 81643 - protein, 26 aa, Artificial Sequence
  Cyclic GFR-binding peptide
EVIMYHYKLLLVRGNDKYLMSIPSTK

SEQ ID NO: 81644 - protein, 30 aa, Artificial Sequence; identical to SEQ ID NO: 33006
  Cyclic GFR-binding peptide
  MOD_RES (28)..(29): Xaa is C or S

SEQ ID NO: 81645 - protein, 30 aa, Artificial Sequence
  Cyclic GFR-binding peptide
  MOD_RES (1)..(3): Xaa is C or S
XGXSEVVMDRHKRLVVNNASDYYLISTASL

SEQ ID NO: 81646 - protein, 34 aa, Artificial Sequence; identical to SEQ ID NO: 33007
  Cyclic GFR-binding peptide
  MOD_RES (2)..(34): Xaa is C or S

SEQ ID NO: 81647 - protein, 37 aa, Artificial Sequence; identical to SEQ ID NO: 4709
  Cyclic GFR-binding peptide
  MOD_RES (31)..(32): Xaa is C or S

SEQ ID NO: 81648 - protein, 29 aa, Artificial Sequence
  Cyclic GFR-binding peptide
  MOD_RES (28)..(29): Xaa is C or S
MGYHYKLIIQQKDNKYLMSIPSMKTPTXX

SEQ ID NO: 81649 - protein, 38 aa, Artificial Sequence; identical to SEQ ID NO: 41619
  Cyclic GFR-binding peptide
  MOD_RES (1)..(33)..(34): Xaa is C or S

SEQ ID NO: 81650 - protein, 22 aa, Artificial Sequence
  Cyclic GFR-binding peptide
MDEYKFKVVKENEDLYLMSIPE

SEQ ID NO: 81651 - protein, 29 aa, Artificial Sequence
  Cyclic GFR-binding peptide
  MOD_RES (26)..(27): Xaa is C or S
RHKRLVKPKRGVYYLISTASLAQPVXXPA

SEQ ID NO: 81652 - protein, 31 aa, Artificial Sequence
  Cyclic GFR-binding peptide
  MOD_RES (26)..(27): Xaa is C or S
YHYKLVVNKNEDKYLISIPSMKEPVXXPEPI

SEQ ID NO: 81653 - protein, 38 aa, Artificial Sequence; identical to SEQ ID NO: 4714
  Cyclic GFR-binding peptide
  MOD_RES (2)..(4)..(37)..(38): Xaa is C or S

SEQ ID NO: 81654 - protein, 34 aa, Artificial Sequence; identical to SEQ ID NO: 4717
  Cyclic GFR-binding peptide
  MOD_RES (32)..(33): Xaa is C or S

SEQ ID NO: 81655 - protein, 34 aa, Artificial Sequence
  Cyclic GFR-binding peptide
  MOD_RES (32)..(33): Xaa is C or S
SEVTMNPIKGYVVNKNEDFYLINIPSMKEPVXXP

SEQ ID NO: 81656 - protein, 37 aa, Artificial Sequence; identical to SEQ ID NO: 4721
  Cyclic GFR-binding peptide
  MOD_RES (32)..(33): Xaa is C or S

SEQ ID NO: 81657 - protein, 29 aa, Artificial Sequence
  Cyclic GFR-binding peptide
  MOD_RES (1)..(1): Xaa is C or S
XSKVIMPIKGYIKPTKGIFYLINIPSLDQ

SEQ ID NO: 81658 - protein, 31 aa, Artificial Sequence
  Cyclic GFR-binding peptide
  MOD_RES (28)..(29): Xaa is C or S
MGYHYKLIIQQKDNKYLMSIPSMKTPTXXPG

SEQ ID NO: 81659 - protein, 31 aa, Artificial Sequence; identical to SEQ ID NO: 4727
  Cyclic GFR-binding peptide
  MOD_RES (1)..(3): Xaa is C or S

SEQ ID NO: 81660 - protein, 22 aa, Artificial Sequence
  Cyclic GFR-binding peptide
MEYKFKLLVRGNDLYLMSIPET

SEQ ID NO: 81661 - protein, 31 aa, Artificial Sequence; identical to SEQ ID NO: 41632
  Cyclic GFR-binding peptide
  MOD_RES (30)..(30): Xaa is C or S

SEQ ID NO: 81662 - protein, 32 aa, Artificial Sequence; identical to SEQ ID NO: 4730
  Cyclic GFR-binding peptide
  MOD_RES (30)..(31): Xaa is C or S

SEQ ID NO: 81663 - protein, 32 aa, Artificial Sequence; identical to SEQ ID NO: 4731
  Cyclic GFR-binding peptide
  MOD_RES (2)..(2): Xaa is C or S

SEQ ID NO: 81664 - protein, 23 aa, Artificial Sequence
  Cyclic GFR-binding peptide
GEEYKFKTPVGMDDLYLVSIPEL

SEQ ID NO: 81665 - protein, 41 aa, Artificial Sequence; identical to SEQ ID NO: 33032
  Cyclic GFR-binding peptide
  MOD_RES (2)..(4)..(35)..(36): Xaa is C or S

SEQ ID NO: 81666 - protein, 40 aa, Artificial Sequence; identical to SEQ ID NO: 33033
  Cyclic GFR-binding peptide
  MOD_RES (1)..(3)..(35)..(36): Xaa is C or S

SEQ ID NO: 81667 - protein, 36 aa, Artificial Sequence; identical to SEQ ID NO: 41636
  Cyclic GFR-binding peptide
  MOD_RES (30)..(31): Xaa is C or S

SEQ ID NO: 81668 - protein, 28 aa, Artificial Sequence
  Cyclic GFR-binding peptide
DVVMGYHYKLIIQQKDNKYLMSIPSMKT

SEQ ID NO: 81669 - protein, 30 aa, Artificial Sequence; identical to SEQ ID NO: 4732
  Cyclic GFR-binding peptide
  MOD_RES (26)..(27): Xaa is C or S

SEQ ID NO: 81670 - protein, 31 aa, Artificial Sequence; identical to SEQ ID NO: 4735
  Cyclic GFR-binding peptide
  MOD_RES (29)..(30): Xaa is C or S

SEQ ID NO: 81671 - protein, 29 aa, Artificial Sequence
  Cyclic GFR-binding peptide
  MOD_RES (27)..(28): Xaa is C or S
GRHKRLIIQQKDNYYLMSTASMKTPTXXP

SEQ ID NO: 81672 - protein, 36 aa, Artificial Sequence; identical to SEQ ID NO: 33043
  Cyclic GFR-binding peptide
  MOD_RES (32)..(33): Xaa is C or S

SEQ ID NO: 81673 - protein, 32 aa, Artificial Sequence; identical to SEQ ID NO: 33045
  Cyclic GFR-binding peptide

SEQ ID NO: 81674 - protein, 31 aa, Artificial Sequence; identical to SEQ ID NO: 33046
  Cyclic GFR-binding peptide
  MOD_RES (30)..(31): Xaa is C or S

SEQ ID NO: 81675 - protein, 39 aa, Artificial Sequence
  Cyclic GFR-binding peptide
  MOD_RES (1)..(3)..(35)..(36): Xaa is C or S
XAXSEVTMNYHYKLVVNKNEDKYLISIPSMKEPVXXPEP

SEQ ID NO: 81676 - protein, 38 aa, Artificial Sequence
  Cyclic GFR-binding peptide
  MOD_RES (32)..(33): Xaa is C or S
RDVVMGYHYKLIIQQKDNKYLMSIPSMKTPTXXPGASG

SEQ ID NO: 81677 - protein, 33 aa, Artificial Sequence; identical to SEQ ID NO: 33049
  Cyclic GFR-binding peptide
  MOD_RES (2)..(2): Xaa is C or S

SEQ ID NO: 81678 - protein, 30 aa, Artificial Sequence; identical to SEQ ID NO: 41651
  Cyclic GFR-binding peptide
  MOD_RES (2)..(2): Xaa is C or S

SEQ ID NO: 81679 - protein, 27 aa, Artificial Sequence
  Cyclic GFR-binding peptide
AMGRYKKLYTVVGKDFYLISIANLKTP

SEQ ID NO: 81680 - protein, 22 aa, Artificial Sequence
  Cyclic GFR-binding peptide
ERHKRLTPVGMDDYYLVSTASL

SEQ ID NO: 81681 - protein, 26 aa, Artificial Sequence
  Cyclic GFR-binding peptide
MRYKKLIKPTKGIFYLISIANLDQSV

SEQ ID NO: 81682 - protein, 26 aa, Artificial Sequence
  Cyclic GFR-binding peptide
KVIMRHKRLIKPTKGIYYLISTASLD

SEQ ID NO: 81683 - protein, 32 aa, Artificial Sequence; identical to SEQ ID NO: 4748
  Cyclic GFR-binding peptide
  MOD_RES (30)..(31): Xaa is C or S

SEQ ID NO: 81684 - protein, 31 aa, Artificial Sequence; identical to SEQ ID NO: 33055
  Cyclic GFR-binding peptide
  MOD_RES (2)..(4): Xaa is C or S

SEQ ID NO: 81685 - protein, 27 aa, Artificial Sequence
  Cyclic GFR-binding peptide
MGRYKKLYTVVGKDFYLISIANLKTPV

SEQ ID NO: 81686 - protein, 23 aa, Artificial Sequence
  Cyclic GFR-binding peptide
IMYHYKLIKPTKGIKYLISIPSL

SEQ ID NO: 81687 - protein, 30 aa, Artificial Sequence
  Cyclic GFR-binding peptide
  MOD_RES (30)..(30): Xaa is C or S
VTMNYHYKLVVNKNEDKYLISIPSMKEPVX

SEQ ID NO: 81688 - protein, 35 aa, Artificial Sequence
  Cyclic GFR-binding peptide
  MOD_RES (32)..(33): Xaa is C or S
SEVVMDRHKRLVVNNASDYYLISTASLRTPVXXTP

SEQ ID NO: 81689 - protein, 31 aa, Artificial Sequence; identical to SEQ ID NO: 41657
  Cyclic GFR-binding peptide
  MOD_RES (27)..(28): Xaa is C or S

SEQ ID NO: 81690 - protein, 31 aa, Artificial Sequence; identical to SEQ ID NO: 4755
  Cyclic GFR-binding peptide
  MOD_RES (26)..(27): Xaa is C or S

SEQ ID NO: 81691 - protein, 28 aa, Artificial Sequence
  Cyclic GFR-binding peptide
VVMNEYKFKIVNSSDDLYLVSIPELKTP

SEQ ID NO: 81692 - protein, 24 aa, Artificial Sequence
  Cyclic GFR-binding peptide
MGYHYKLIIQQKDNKYLMSIPSMK

SEQ ID NO: 81693 - protein, 36 aa, Artificial Sequence; identical to SEQ ID NO: 4757
  Cyclic GFR-binding peptide
  MOD_RES (31)..(32): Xaa is C or S

SEQ ID NO: 81694 - protein, 33 aa, Artificial Sequence; identical to SEQ ID NO: 41659
  Cyclic GFR-binding peptide
  MOD_RES (28)..(29): Xaa is C or S

SEQ ID NO: 81695 - protein, 24 aa, Artificial Sequence
  Cyclic GFR-binding peptide
VVMPIKGYVKPTRGVFYLINIPSL

SEQ ID NO: 81696 - protein, 34 aa, Artificial Sequence; identical to SEQ ID NO: 33069
  Cyclic GFR-binding peptide
  MOD_RES (2)..(34): Xaa is C or S

SEQ ID NO: 81697 - protein, 29 aa, Artificial Sequence
  Cyclic GFR-binding peptide
VVMDRHKRLVVNNASDYYLISTASLRTPV

SEQ ID NO: 81698 - protein, 26 aa, Artificial Sequence
  Cyclic GFR-binding peptide
  MOD_RES (26)..(26): Xaa is C or S
PIKGYVVNNAADFYLINIPSLRAPVX

SEQ ID NO: 81699 - protein, 33 aa, Artificial Sequence
  Cyclic GFR-binding peptide
  MOD_RES (1)..(3): Xaa is C or S
XGXSEVVMDRHKRLVVNNASDYYLISTASLRTP

SEQ ID NO: 81700 - protein, 25 aa, Artificial Sequence
  Cyclic GFR-binding peptide
VMDRHKRLVVNNAADYYLISTASLR

SEQ ID NO: 81701 - protein, 23 aa, Artificial Sequence
  Cyclic GFR-binding peptide
MEEYKFKVVKDYEDLYLMSIPEL

SEQ ID NO: 81702 - protein, 23 aa, Artificial Sequence
  Cyclic GFR-binding peptide
DPIKGYVVNNASDFYLINIPSLR

SEQ ID NO: 81703 - protein, 34 aa, Artificial Sequence
  Cyclic GFR-binding peptide
  MOD_RES (30)..(31): Xaa is C or S
VVMGYHYKLIIQQKDNKYLMSIPSMKTPTXXPGA

SEQ ID NO: 81704 - protein, 40 aa, Artificial Sequence; identical to SEQ ID NO: 41664
  Cyclic GFR-binding peptide
  MOD_RES (2)..(34)..(35): Xaa is C or S

SEQ ID NO: 81705 - protein, 34 aa, Artificial Sequence; identical to SEQ ID NO: 41666
  Cyclic GFR-binding peptide
  MOD_RES (32)..(33): Xaa is C or S

SEQ ID NO: 81706 - protein, 37 aa, Artificial Sequence; identical to SEQ ID NO: 41667
  Cyclic GFR-binding peptide
  MOD_RES (32)..(32): Xaa is C or S

SEQ ID NO: 81707 - protein, 32 aa, Artificial Sequence; identical to SEQ ID NO: 75830
  Cyclic GFR-binding peptide
  MOD_RES (31)..(32): Xaa is C or S

SEQ ID NO: 81708 - protein, 36 aa, Artificial Sequence; identical to SEQ ID NO: 4762
  Cyclic GFR-binding peptide
  MOD_RES (1)..(33)..(34): Xaa is C or S

SEQ ID NO: 81709 - protein, 28 aa, Artificial Sequence
  Cyclic GFR-binding peptide
  MOD_RES (1)..(1): Xaa is C or S
XSKVIMYHYKLIKPTKGIKYLISIPSLD

SEQ ID NO: 81710 - protein, 28 aa, Artificial Sequence
  Cyclic GFR-binding peptide
RVVMNYHYKLIVNSSDDKYLVSIPSLQT

SEQ ID NO: 81711 - protein, 41 aa, Artificial Sequence
  Cyclic GFR-binding peptide
  MOD_RES (1)..(3)..(35)..(36): Xaa is C or S
XGXRDVVMGEYKFKIIQQKDNLYLMSIPEMKTPTXXPGASG

SEQ ID NO: 81712 - protein, 37 aa, Artificial Sequence; identical to SEQ ID NO: 33079
  Cyclic GFR-binding peptide
  MOD_RES (2)..(35)..(36): Xaa is C or S

SEQ ID NO: 81713 - protein, 25 aa, Artificial Sequence
  Cyclic GFR-binding peptide
PIKGYVVKENEDFYLMNIPSLETPV

SEQ ID NO: 81714 - protein, 28 aa, Artificial Sequence
  Cyclic GFR-binding peptide
VMNRYKKLIVNNSSDFYLVSIANLKTPA

SEQ ID NO: 81715 - protein, 35 aa, Artificial Sequence; identical to SEQ ID NO: 4767
  Cyclic GFR-binding peptide
  MOD_RES (31)..(31): Xaa is C or S

SEQ ID NO: 81716 - protein, 28 aa, Artificial Sequence
  Cyclic GFR-binding peptide
VMGEYKFKIIQQKDNLYLMSIPEMKTPT

SEQ ID NO: 81717 - protein, 35 aa, Artificial Sequence; identical to SEQ ID NO: 33084
  Cyclic GFR-binding peptide
  MOD_RES (32)..(33): Xaa is C or S

SEQ ID NO: 81718 - protein, 28 aa, Artificial Sequence
  Cyclic GFR-binding peptide
  MOD_RES (26)..(27): Xaa is C or S
YHYKLVVKENEDKYLMSIPSLETPVXXA

SEQ ID NO: 81719 - protein, 24 aa, Artificial Sequence
  Cyclic GFR-binding peptide
NRHKRLVVNKNEDYYLISTASMKE

SEQ ID NO: 81720 - protein, 28 aa, Artificial Sequence
  Cyclic GFR-binding peptide
KVVMNRYKKLIVNNSSDFYLVSIANLKT

SEQ ID NO: 81721 - protein, 37 aa, Artificial Sequence; identical to SEQ ID NO: 4772
  Cyclic GFR-binding peptide
  MOD_RES (2)..(4)..(36)..(37): Xaa is C or S

SEQ ID NO: 81722 - protein, 29 aa, Artificial Sequence
  Cyclic GFR-binding peptide
  MOD_RES (27)..(27): Xaa is C or S
NRYKKLIVNSSDDFYLVSIANLKTPAXTP

SEQ ID NO: 81723 - protein, 25 aa, Artificial Sequence
  Cyclic GFR-binding peptide
VMRYKKLVKPTRGVFYLISIANLDQ

SEQ ID NO: 81724 - protein, 36 aa, Artificial Sequence; identical to SEQ ID NO: 4775
  Cyclic GFR-binding peptide
  MOD_RES (2)..(34)..(35): Xaa is C or S

SEQ ID NO: 81725 - protein, 25 aa, Artificial Sequence
  Cyclic GFR-binding peptide
MGRYKKLIIQQKDNFYLMSIANMKT

SEQ ID NO: 81726 - protein, 36 aa, Artificial Sequence; identical to SEQ ID NO: 41685
  Cyclic GFR-binding peptide
  MOD_RES (30)..(31): Xaa is C or S

SEQ ID NO: 81727 - protein, 28 aa, Artificial Sequence
  Cyclic GFR-binding peptide
  MOD_RES (26)..(27): Xaa is C or S
EYKFKVVKENEDLYLMSIPELETPVXXA

SEQ ID NO: 81728 - protein, 27 aa, Artificial Sequence
  Cyclic GFR-binding peptide
  MOD_RES (1)..(1): Xaa is C or S
XEEVIMRHKRLLLVRGNDYYLMSTAST

SEQ ID NO: 81729 - protein, 31 aa, Artificial Sequence; identical to SEQ ID NO: 4777
  Cyclic GFR-binding peptide
  MOD_RES (1)..(3): Xaa is C or S

SEQ ID NO: 81730 - protein, 24 aa, Artificial Sequence
  Cyclic GFR-binding peptide
RYKKLVVNKNEDFYLISIANMKEP

SEQ ID NO: 81731 - protein, 27 aa, Artificial Sequence
  Cyclic GFR-binding peptide
  MOD_RES (26)..(27): Xaa is C or S
RHKRLVKPKRGVYYLISTASLAQPVXX

SEQ ID NO: 81732 - protein, 27 aa, Artificial Sequence
  Cyclic GFR-binding peptide
AMGYHYKLYTVVGKDKYLISIPSLKTP

SEQ ID NO: 81733 - protein, 27 aa, Artificial Sequence
  Cyclic GFR-binding peptide
  MOD_RES (27)..(27): Xaa is C or S
DPIKGYVVNNAADFYLINIPSLRAPVX

SEQ ID NO: 81734 - protein, 26 aa, Artificial Sequence
  Cyclic GFR-binding peptide
KVVMNEYKFKIVNNSSDLYLVSIPEL

SEQ ID NO: 81735 - protein, 29 aa, Artificial Sequence
  Cyclic GFR-binding peptide
  MOD_RES (28)..(29): Xaa is C or S
MGRYKKLYTVVGKDFYLISIANLKTPVXX

SEQ ID NO: 81736 - protein, 27 aa, Artificial Sequence
  Cyclic GFR-binding peptide
MDRHKRLVVNNASDYYLISTASLRTPV

SEQ ID NO: 81737 - protein, 29 aa, Artificial Sequence
  Cyclic GFR-binding peptide
  MOD_RES (27)..(28): Xaa is C or S
DYHYKLVVNNAADKYLISIPSLRAPVXXS

SEQ ID NO: 81738 - protein, 34 aa, Artificial Sequence
  Cyclic GFR-binding peptide
  MOD_RES (1)..(3): Xaa is C or S
XAXSEVTMNRYKKLVVNKNEDFYLISIANMKEPV

SEQ ID NO: 81739 - protein, 32 aa, Artificial Sequence; identical to SEQ ID NO: 4784
  Cyclic GFR-binding peptide
  MOD_RES (1)..(1): Xaa is C or S

SEQ ID NO: 81740 - protein, 34 aa, Artificial Sequence; identical to SEQ ID NO: 33104
  Cyclic GFR-binding peptide
  MOD_RES (1)..(33)..(34): Xaa is C or S

SEQ ID NO: 81741 - protein, 27 aa, Artificial Sequence
  Cyclic GFR-binding peptide
EAVSMGERHKRLTPVGMDDYYLVSTAS

SEQ ID NO: 81742 - protein, 35 aa, Artificial Sequence; identical to SEQ ID NO: 33106
  Cyclic GFR-binding peptide
  MOD_RES (2)..(33)..(34): Xaa is C or S

SEQ ID NO: 81743 - protein, 35 aa, Artificial Sequence; identical to SEQ ID NO: 4788
  Cyclic GFR-binding peptide
  MOD_RES (1)..(3)..(35): Xaa is C or S

SEQ ID NO: 81744 - protein, 24 aa, Artificial Sequence
  Cyclic GFR-binding peptide
MRYKKLVKPKRGVFYLISIANLAQ

SEQ ID NO: 81745 - protein, 31 aa, Artificial Sequence
  Cyclic GFR-binding peptide
  MOD_RES (1)..(1): Xaa is C or S
XSEVTMNRYKKLVVNKNEDFYLISIANMKEP

SEQ ID NO: 81746 - protein, 39 aa, Artificial Sequence; identical to SEQ ID NO: 4794
  Cyclic GFR-binding peptide
  MOD_RES (2)..(4)..(36): Xaa is C or S

SEQ ID NO: 81747 - protein, 35 aa, Artificial Sequence
  Cyclic GFR-binding peptide
  MOD_RES (32)..(33): Xaa is C or S
RDVVMGEYKFKIIQQKDNLYLMSIPEMKTPTXXPG

SEQ ID NO: 81748 - protein, 23 aa, Artificial Sequence
  Cyclic GFR-binding peptide
VMNYHYKLIVNNSSDKYLVSIPS

SEQ ID NO: 81749 - protein, 33 aa, Artificial Sequence; identical to SEQ ID NO: 4801
  Cyclic GFR-binding peptide
  MOD_RES (28)..(29): Xaa is C or S

SEQ ID NO: 81750 - protein, 41 aa, Artificial Sequence; identical to SEQ ID NO: 4803
  Cyclic GFR-binding peptide
  MOD_RES (2)..(35)..(36): Xaa is C or S

SEQ ID NO: 81751 - protein, 38 aa, Artificial Sequence
  Cyclic GFR-binding peptide
  MOD_RES (2)..(33)..(34): Xaa is C or S
KXSRVIMPIKGYVKPKRGVFYLINIPSLAQPVXXPAAS

SEQ ID NO: 81752 - protein, 23 aa, Artificial Sequence
  Cyclic GFR-binding peptide
VIMYHYKLLLVRGNDKYLMSIPS

SEQ ID NO: 81753 - protein, 29 aa, Artificial Sequence
  Cyclic GFR-binding peptide
  MOD_RES (29)..(29): Xaa is C or S
VMNEYKFKIVNNSSDLYLVSIPELKTPAX

SEQ ID NO: 81754 - protein, 27 aa, Artificial Sequence
  Cyclic GFR-binding peptide
RVVMNRHKRLIVNSSDDYYLVSTASLK

SEQ ID NO: 81755 - protein, 23 aa, Artificial Sequence
  Cyclic GFR-binding peptide
MRYKKLVKPKRGVFYLISIANLA

SEQ ID NO: 81756 - protein, 33 aa, Artificial Sequence
  Cyclic GFR-binding peptide
  MOD_RES (27)..(28): Xaa is C or S
NRYKKLVVNKNEDFYLISIANMKEPVXXPEPIG

SEQ ID NO: 81757 - protein, 30 aa, Artificial Sequence; identical to SEQ ID NO: 4810
  Cyclic GFR-binding peptide
  MOD_RES (26)..(27): Xaa is C or S

SEQ ID NO: 81758 - protein, 29 aa, Artificial Sequence
  Cyclic GFR-binding peptide
  MOD_RES (28)..(29): Xaa is C or S
MNPIKGYIVNNSSDFYLVNIPSLKTPAXX

SEQ ID NO: 81759 - protein, 37 aa, Artificial Sequence; identical to SEQ ID NO: 4815
  Cyclic GFR-binding peptide
  MOD_RES (2)..(4)..(36)..(37): Xaa is C or S

SEQ ID NO: 81760 - protein, 31 aa, Artificial Sequence; identical to SEQ ID NO: 33127
  Cyclic GFR-binding peptide
  MOD_RES (31)..(31): Xaa is C or S

SEQ ID NO: 81761 - protein, 33 aa, Artificial Sequence; identical to SEQ ID NO: 4816
  Cyclic GFR-binding peptide
  MOD_RES (29)..(30): Xaa is C or S

SEQ ID NO: 81762 - protein, 26 aa, Artificial Sequence
  Cyclic GFR-binding peptide
MGERYKKLTPVGMDDFYLVSIANLKT

SEQ ID NO: 81763 - protein, 29 aa, Artificial Sequence
  Cyclic GFR-binding peptide
  MOD_RES (27)..(28): Xaa is C or S
NRYKKLIVNSSDDFYLVSIANLQTPAXXP

SEQ ID NO: 81764 - protein, 34 aa, Artificial Sequence
  Cyclic GFR-binding peptide
  MOD_RES (32)..(33): Xaa is C or S
SEVTMNRHKRLVVNKNEDYYLISTASMKEPVXXP

SEQ ID NO: 81765 - protein, 30 aa, Artificial Sequence; identical to SEQ ID NO: 4821
  Cyclic GFR-binding peptide

SEQ ID NO: 81766 - protein, 33 aa, Artificial Sequence; identical to SEQ ID NO: 33134
  Cyclic GFR-binding peptide
  MOD_RES (31)..(32): Xaa is C or S

SEQ ID NO: 81767 - protein, 24 aa, Artificial Sequence
  Cyclic GFR-binding peptide
VMNRHKRLIVNSSDDYYLVSTASL

SEQ ID NO: 81768 - protein, 35 aa, Artificial Sequence
  Cyclic GFR-binding peptide
  MOD_RES (1)..(3)..(34)..(35): Xaa is C or S
XGXEEVIMRHKRLLLVRGNDYYLMSTASTKVPAXX

SEQ ID NO: 81769 - protein, 28 aa, Artificial Sequence
  Cyclic GFR-binding peptide
  MOD_RES (1)..(1): Xaa is C or S
XAEVVMDYHYKLVVNNAADKYLISIPSL

SEQ ID NO: 81770 - protein, 32 aa, Artificial Sequence; identical to SEQ ID NO: 4826
  Cyclic GFR-binding peptide
  MOD_RES (26)..(27): Xaa is C or S

SEQ ID NO: 81771 - protein, 34 aa, Artificial Sequence; identical to SEQ ID NO: 33143
  Cyclic GFR-binding peptide
  MOD_RES (31)..(32): Xaa is C or S

SEQ ID NO: 81772 - protein, 31 aa, Artificial Sequence
  Cyclic GFR-binding peptide
  MOD_RES (29)..(30): Xaa is C or S
VIMPIKGYIKPTKGIFYLINIPSLDQSVXXP

SEQ ID NO: 81773 - protein, 34 aa, Artificial Sequence; identical to SEQ ID NO: 4827
  Cyclic GFR-binding peptide
  MOD_RES (2)..(34): Xaa is C or S

SEQ ID NO: 81774 - protein, 28 aa, Artificial Sequence
  Cyclic GFR-binding peptide
  MOD_RES (1)..(1): Xaa is C or S
XARVVMNRYKKLIVNSSDDFYLVSIANL

SEQ ID NO: 81775 - protein, 31 aa, Artificial Sequence; identical to SEQ ID NO: 4829
  Cyclic GFR-binding peptide
  MOD_RES (1)..(1): Xaa is C or S

SEQ ID NO: 81776 - protein, 30 aa, Artificial Sequence; identical to SEQ ID NO: 41722
  Cyclic GFR-binding peptide
  MOD_RES (2)..(2): Xaa is C or S

SEQ ID NO: 81777 - protein, 26 aa, Artificial Sequence
  Cyclic GFR-binding peptide
MGYHYKLYTVVGKDKYLISIPSLKTP

SEQ ID NO: 81778 - protein, 37 aa, Artificial Sequence; identical to SEQ ID NO: 4834
  Cyclic GFR-binding peptide
  MOD_RES (31)..(31): Xaa is C or S

SEQ ID NO: 81779 - protein, 35 aa, Artificial Sequence; identical to SEQ ID NO: 4835
  Cyclic GFR-binding peptide
  MOD_RES (32)..(33): Xaa is C or S

SEQ ID NO: 81780 - protein, 32 aa, Artificial Sequence; identical to SEQ ID NO: 4836
  Cyclic GFR-binding peptide
  MOD_RES (31)..(32): Xaa is C or S

SEQ ID NO: 81781 - protein, 21 aa, Artificial Sequence
  Cyclic GFR-binding peptide
YHYKLIIQQKDNKYLMSIPSM

SEQ ID NO: 81782 - protein, 36 aa, Artificial Sequence; identical to SEQ ID NO: 4837
  Cyclic GFR-binding peptide
  MOD_RES (1)..(3)..(36): Xaa is C or S

SEQ ID NO: 81783 - protein, 33 aa, Artificial Sequence
  Cyclic GFR-binding peptide
  MOD_RES (28)..(29): Xaa is C or S
MGRHKRLYTVVGKDYYLISTASLKTPVXXAKSA

SEQ ID NO: 81784 - protein, 39 aa, Artificial Sequence; identical to SEQ ID NO: 15319
  Cyclic GFR-binding peptide
  MOD_RES (2)..(34)..(35): Xaa is C or S

SEQ ID NO: 81785 - protein, 26 aa, Artificial Sequence
  Cyclic GFR-binding peptide
SRVVMNYHYKLIVNSSDDKYLVSIPS

SEQ ID NO: 81786 - protein, 33 aa, Artificial Sequence; identical to SEQ ID NO: 4841
  Cyclic GFR-binding peptide
  MOD_RES (1)..(3): Xaa is C or S

SEQ ID NO: 81787 - protein, 31 aa, Artificial Sequence; identical to SEQ ID NO: 4844
  Cyclic GFR-binding peptide
  MOD_RES (30)..(31): Xaa is C or S

SEQ ID NO: 81788 - protein, 26 aa, Artificial Sequence
  Cyclic GFR-binding peptide
SKVVMYHYKLVKPTRGVKYLISIPSL

SEQ ID NO: 81789 - protein, 26 aa, Artificial Sequence
  Cyclic GFR-binding peptide
ARVVMNYHYKLIVNSSDDKYLVSIPS

SEQ ID NO: 81790 - protein, 31 aa, Artificial Sequence; identical to SEQ ID NO: 4849
  Cyclic GFR-binding peptide
  MOD_RES (26)..(27): Xaa is C or S

SEQ ID NO: 81791 - protein, 28 aa, Artificial Sequence
  Cyclic GFR-binding peptide
  MOD_RES (26)..(27): Xaa is C or S
YHYKLIKPTKGIKYLISIPSLDQSVXXP

SEQ ID NO: 81792 - protein, 31 aa, Artificial Sequence; identical to SEQ ID NO: 75883
  Cyclic GFR-binding peptide
  MOD_RES (1)..(1): Xaa is C or S

SEQ ID NO: 81793 - protein, 30 aa, Artificial Sequence; identical to SEQ ID NO: 33170
  Cyclic GFR-binding peptide
  MOD_RES (26)..(27): Xaa is C or S

SEQ ID NO: 81794 - protein, 39 aa, Artificial Sequence; identical to SEQ ID NO: 41741
  Cyclic GFR-binding peptide
  MOD_RES (1)..(33)..(34): Xaa is C or S

SEQ ID NO: 81795 - protein, 40 aa, Artificial Sequence; identical to SEQ ID NO: 4853
  Cyclic GFR-binding peptide
  MOD_RES (2)..(4)..(36): Xaa is C or S

SEQ ID NO: 81796 - protein, 40 aa, Artificial Sequence; identical to SEQ ID NO: 41744
  Cyclic GFR-binding peptide
  MOD_RES (2)..(4)..(37)..(38): Xaa is C or S

SEQ ID NO: 81797 - protein, 27 aa, Artificial Sequence
  Cyclic GFR-binding peptide
  MOD_RES (1)..(1): Xaa is C or S
XEEVIMYHYKLLLVRGNDKYLMSIPST

SEQ ID NO: 81798 - protein, 26 aa, Artificial Sequence
  Cyclic GFR-binding peptide
VMDRHKRLVVNNASDYYLISTASLRT

SEQ ID NO: 81799 - protein, 30 aa, Artificial Sequence; identical to SEQ ID NO: 4859
  Cyclic GFR-binding peptide
  MOD_RES (30)..(30): Xaa is C or S

SEQ ID NO: 81800 - protein, 37 aa, Artificial Sequence; identical to SEQ ID NO: 41747
  Cyclic GFR-binding peptide
  MOD_RES (32)..(33): Xaa is C or S

SEQ ID NO: 81801 - protein, 37 aa, Artificial Sequence; identical to SEQ ID NO: 33180
  Cyclic GFR-binding peptide
  MOD_RES (31)..(32): Xaa is C or S

SEQ ID NO: 81802 - protein, 26 aa, Artificial Sequence
  Cyclic GFR-binding peptide
  MOD_RES (1)..(1): Xaa is C or S
XSKVIMEYKFKIKPTKGILYLISIPE

SEQ ID NO: 81803 - protein, 27 aa, Artificial Sequence
  Cyclic GFR-binding peptide
  MOD_RES (26)..(27): Xaa is C or S
YHYKLVVKENEDKYLMSIPSLETPVXX

SEQ ID NO: 81804 - protein, 37 aa, Artificial Sequence
  Cyclic GFR-binding peptide
  MOD_RES (1)..(3)..(34)..(35): Xaa is C or S
XKXSKVIMPIKGYIKPTKGIFYLINIPSLDQSVXXPS

SEQ ID NO: 81805 - protein, 35 aa, Artificial Sequence
  Cyclic GFR-binding peptide
  MOD_RES (2)..(4): Xaa is C or S
RXGXESVAMGRHKRLYTVVGKDYYLISTASLKTPV

SEQ ID NO: 81806 - protein, 38 aa, Artificial Sequence; identical to SEQ ID NO: 4865
  Cyclic GFR-binding peptide
  MOD_RES (2)..(34)..(35): Xaa is C or S

SEQ ID NO: 81807 - protein, 32 aa, Artificial Sequence; identical to SEQ ID NO: 4866
  Cyclic GFR-binding peptide
  MOD_RES (1)..(1): Xaa is C or S

SEQ ID NO: 81808 - protein, 39 aa, Artificial Sequence; identical to SEQ ID NO: 33187
  Cyclic GFR-binding peptide
  MOD_RES (1)..(33)..(34): Xaa is C or S

SEQ ID NO: 81809 - protein, 24 aa, Artificial Sequence
  Cyclic GFR-binding peptide
IMRYKKLIKPTKGIFYLISIANLD

SEQ ID NO: 81810 - protein, 34 aa, Artificial Sequence; identical to SEQ ID NO: 41752
  Cyclic GFR-binding peptide
  MOD_RES (31)..(32): Xaa is C or S

SEQ ID NO: 81811 - protein, 27 aa, Artificial Sequence
  Cyclic GFR-binding peptide
VVMNYHYKLIVNSSDDKYLVSIPSLKT

SEQ ID NO: 81812 - protein, 25 aa, Artificial Sequence
  Cyclic GFR-binding peptide
VVMDPIKGYVVNNASDFYLINIPSL

SEQ ID NO: 81813 - protein, 38 aa, Artificial Sequence; identical to SEQ ID NO: 33195
  Cyclic GFR-binding peptide
  MOD_RES (1)..(3)..(35)..(36): Xaa is C or S

SEQ ID NO: 81814 - protein, 32 aa, Artificial Sequence; identical to SEQ ID NO: 4873
  Cyclic GFR-binding peptide
  MOD_RES (1)..(32): Xaa is C or S

SEQ ID NO: 81815 - protein, 32 aa, Artificial Sequence; identical to SEQ ID NO: 41761
  Cyclic GFR-binding peptide
  MOD_RES (28)..(29): Xaa is C or S

SEQ ID NO: 81816 - protein, 33 aa, Artificial Sequence
  Cyclic GFR-binding peptide
  MOD_RES (30)..(31): Xaa is C or S
EVIMEYKFKLLVRGNDLYLMSIPETKVPAXXTS

SEQ ID NO: 81817 - protein, 32 aa, Artificial Sequence; identical to SEQ ID NO: 41763
  Cyclic GFR-binding peptide
  MOD_RES (31)..(32): Xaa is C or S

SEQ ID NO: 81818 - protein, 34 aa, Artificial Sequence
  Cyclic GFR-binding peptide
  MOD_RES (30)..(31): Xaa is C or S
RVIMPIKGYVKPKRGVFYLINIPSLAQPVXXPAA

SEQ ID NO: 81819 - protein, 34 aa, Artificial Sequence; identical to SEQ ID NO: 4876
  Cyclic GFR-binding peptide
  MOD_RES (28)..(29): Xaa is C or S

SEQ ID NO: 81820 - protein, 30 aa, Artificial Sequence
  Cyclic GFR-binding peptide
  MOD_RES (28)..(29): Xaa is C or S
IMRHKRLLLVRGNDYYLMSTASTKVPAXXT

SEQ ID NO: 81821 - protein, 31 aa, Artificial Sequence; identical to SEQ ID NO: 41766
  Cyclic GFR-binding peptide
  MOD_RES (2)..(4): Xaa is C or S

SEQ ID NO: 81822 - protein, 36 aa, Artificial Sequence
  Cyclic GFR-binding peptide
  MOD_RES (30)..(31): Xaa is C or S
VVMGRHKRLIIQQKDNYYLMSTASMKTPTXXPGASG

SEQ ID NO: 81823 - protein, 33 aa, Artificial Sequence; identical to SEQ ID NO: 41770
  Cyclic GFR-binding peptide
  MOD_RES (31)..(31): Xaa is C or S

SEQ ID NO: 81824 - protein, 29 aa, Artificial Sequence
  Cyclic GFR-binding peptide
  MOD_RES (26)..(27): Xaa is C or S
PIKGYYTVVGKDFYLINIPSLKTPVXXAK

SEQ ID NO: 81825 - protein, 31 aa, Artificial Sequence
  Cyclic GFR-binding peptide
  MOD_RES (27)..(28): Xaa is C or S
DYHYKLVVNNASDKYLISIPSLRTPVXXTPP

SEQ ID NO: 81826 - protein, 39 aa, Artificial Sequence; identical to SEQ ID NO: 4881
  Cyclic GFR-binding peptide
  MOD_RES (1)..(33)..(34): Xaa is C or S

SEQ ID NO: 81827 - protein, 42 aa, Artificial Sequence; identical to SEQ ID NO: 41775
  Cyclic GFR-binding peptide
  MOD_RES (2)..(4)..(36)..(37): Xaa is C or S

SEQ ID NO: 81828 - protein, 39 aa, Artificial Sequence
  Cyclic GFR-binding peptide
  MOD_RES (1)..(33)..(34): Xaa is C or S
XSEVVMDEYKFKVVNNASDLYLISIPELRTPVXXTPPTS

SEQ ID NO: 81829 - protein, 29 aa, Artificial Sequence
  Cyclic GFR-binding peptide
  MOD_RES (2)..(2): Xaa is C or S
KXSRVIMRHKRLVKPKRGVYYLISTASLA

SEQ ID NO: 81830 - protein, 32 aa, Artificial Sequence
  Cyclic GFR-binding peptide
  MOD_RES (29)..(30): Xaa is C or S
VMDEYKFKVVNNASDLYLISIPELRTPVXXTP

SEQ ID NO: 81831 - protein, 33 aa, Artificial Sequence; identical to SEQ ID NO: 4886
  Cyclic GFR-binding peptide
  MOD_RES (30)..(31): Xaa is C or S

SEQ ID NO: 81832 - protein, 22 aa, Artificial Sequence
  Cyclic GFR-binding peptide
EYKFKVVKDYEDLYLMSIPELE

SEQ ID NO: 81833 - protein, 33 aa, Artificial Sequence; identical to SEQ ID NO: 15381
  Cyclic GFR-binding peptide
  MOD_RES (31)..(32): Xaa is C or S

SEQ ID NO: 81834 - protein, 34 aa, Artificial Sequence; identical to SEQ ID NO: 33212
  Cyclic GFR-binding peptide
  MOD_RES (2)..(4): Xaa is C or S

SEQ ID NO: 81835 - protein, 26 aa, Artificial Sequence
  Cyclic GFR-binding peptide
VVMDRHKRLVVNNASDYYLISTASLR

SEQ ID NO: 81836 - protein, 33 aa, Artificial Sequence; identical to SEQ ID NO: 41779
  Cyclic GFR-binding peptide
  MOD_RES (2)..(4): Xaa is C or S

SEQ ID NO: 81837 - protein, 29 aa, Artificial Sequence
  Cyclic GFR-binding peptide
  MOD_RES (2)..(4): Xaa is C or S
LXGXEEVIMRYKKLLLVRGNDFYLMSIAN

SEQ ID NO: 81838 - protein, 39 aa, Artificial Sequence; identical to SEQ ID NO: 33218
  Cyclic GFR-binding peptide
  MOD_RES (1)..(33)..(34): Xaa is C or S

SEQ ID NO: 81839 - protein, 30 aa, Artificial Sequence; identical to SEQ ID NO: 4902
  Cyclic GFR-binding peptide
  MOD_RES (2)..(4): Xaa is C or S

SEQ ID NO: 81840 - protein, 24 aa, Artificial Sequence
  Cyclic GFR-binding peptide
TMNPIKGYVVNKNEDFYLINIPSM

SEQ ID NO: 81841 - protein, 24 aa, Artificial Sequence
  Cyclic GFR-binding peptide
VIMYHYKLVKPKRGVKYLISIPSL

SEQ ID NO: 81842 - protein, 27 aa, Artificial Sequence
  Cyclic GFR-binding peptide
KVVMEYKFKVKPTRGVLYLISIPELDQ

SEQ ID NO: 81843 - protein, 41 aa, Artificial Sequence; identical to SEQ ID NO: 4905
  Cyclic GFR-binding peptide
  MOD_RES (2)..(4)..(36): Xaa is C or S

SEQ ID NO: 81844 - protein, 31 aa, Artificial Sequence; identical to SEQ ID NO: 4909
  Cyclic GFR-binding peptide
  MOD_RES (2)..(4): Xaa is C or S

SEQ ID NO: 81845 - protein, 34 aa, Artificial Sequence; identical to SEQ ID NO: 4910
  Cyclic GFR-binding peptide
  MOD_RES (32)..(33): Xaa is C or S

SEQ ID NO: 81846 - protein, 32 aa, Artificial Sequence
  Cyclic GFR-binding peptide
  MOD_RES (26)..(27): Xaa is C or S
EYKFKVVNNASDLYLISIPELRTPVXXTPPTS

SEQ ID NO: 81847 - protein, 26 aa, Artificial Sequence
  Cyclic GFR-binding peptide
VIMYHYKLVKPKRGVKYLISIPSLAQ

SEQ ID NO: 81848 - protein, 36 aa, Artificial Sequence; identical to SEQ ID NO: 4912
  Cyclic GFR-binding peptide
  MOD_RES (1)..(33)..(34): Xaa is C or S

SEQ ID NO: 81849 - protein, 30 aa, Artificial Sequence; identical to SEQ ID NO: 4914
  Cyclic GFR-binding peptide
  MOD_RES (2)..(2): Xaa is C or S

SEQ ID NO: 81850 - protein, 22 aa, Artificial Sequence
  Cyclic GFR-binding peptide
MNPIKGYVVNKNEDFYLINIPS

SEQ ID NO: 81851 - protein, 42 aa, Artificial Sequence; identical to SEQ ID NO: 33232
  Cyclic GFR-binding peptide
  MOD_RES (2)..(4)..(36)..(37): Xaa is C or S

SEQ ID NO: 81852 - protein, 31 aa, Artificial Sequence; identical to SEQ ID NO: 4918
  Cyclic GFR-binding peptide
  MOD_RES (28)..(29): Xaa is C or S

SEQ ID NO: 81853 - protein, 26 aa, Artificial Sequence
  Cyclic GFR-binding peptide
VMDYHYKLVVNNASDKYLISIPSLRT

SEQ ID NO: 81854 - protein, 29 aa, Artificial Sequence
  Cyclic GFR-binding peptide
  MOD_RES (1)..(1): Xaa is C or S
XAEVVMDYHYKLVVNNAADKYLISIPSLR

SEQ ID NO: 81855 - protein, 35 aa, Artificial Sequence
  Cyclic GFR-binding peptide
  MOD_RES (31)..(32): Xaa is C or S
EVTMNEYKFKVVNKNEDLYLISIPEMKEPVXXPEP

SEQ ID NO: 81856 - protein, 20 aa, Artificial Sequence
  Cyclic GFR-binding peptide
RHKRLYTVVGKDYYLISTAS

SEQ ID NO: 81857 - protein, 29 aa, Artificial Sequence
  Cyclic GFR-binding peptide
  MOD_RES (29)..(29): Xaa is C or S
AMGRYKKLYTVVGKDFYLISIANLKTPVX

SEQ ID NO: 81858 - protein, 34 aa, Artificial Sequence; identical to SEQ ID NO: 4926
  Cyclic GFR-binding peptide
  MOD_RES (1)..(3)..(34): Xaa is C or S

SEQ ID NO: 81859 - protein, 23 aa, Artificial Sequence
  Cyclic GFR-binding peptide
MGYHYKLIIQQKDNKYLMSIPSM

SEQ ID NO: 81860 - protein, 32 aa, Artificial Sequence; identical to SEQ ID NO: 4928
  Cyclic GFR-binding peptide
  MOD_RES (29)..(30): Xaa is C or S

SEQ ID NO: 81861 - protein, 32 aa, Artificial Sequence; identical to SEQ ID NO: 4930
  Cyclic GFR-binding peptide
  MOD_RES (1)..(1): Xaa is C or S

SEQ ID NO: 81862 - protein, 33 aa, Artificial Sequence; identical to SEQ ID NO: 33250
  Cyclic GFR-binding peptide
  MOD_RES (1)..(3): Xaa is C or S

SEQ ID NO: 81863 - protein, 29 aa, Artificial Sequence
  Cyclic GFR-binding peptide
  MOD_RES (27)..(28): Xaa is C or S
DPIKGYVVKENEDFYLMNIPSLETPVXXA

SEQ ID NO: 81864 - protein, 33 aa, Artificial Sequence; identical to SEQ ID NO: 4934
  Cyclic GFR-binding peptide
  MOD_RES (30)..(31): Xaa is C or S

SEQ ID NO: 81865 - protein, 23 aa, Artificial Sequence
  Cyclic GFR-binding peptide
PIKGYIVNNSSDFYLVNIPSLKT

SEQ ID NO: 81866 - protein, 38 aa, Artificial Sequence; identical to SEQ ID NO: 33253
  Cyclic GFR-binding peptide
  MOD_RES (32)..(33): Xaa is C or S

SEQ ID NO: 81867 - protein, 31 aa, Artificial Sequence; identical to SEQ ID NO: 4936
  Cyclic GFR-binding peptide
  MOD_RES (1)..(1): Xaa is C or S

SEQ ID NO: 81868 - protein, 32 aa, Artificial Sequence; identical to SEQ ID NO: 4941
  Cyclic GFR-binding peptide
  MOD_RES (27)..(28): Xaa is C or S

SEQ ID NO: 81869 - protein, 31 aa, Artificial Sequence; identical to SEQ ID NO: 41814
  Cyclic GFR-binding peptide
  MOD_RES (1)..(3): Xaa is C or S

SEQ ID NO: 81870 - protein, 30 aa, Artificial Sequence; identical to SEQ ID NO: 41815
  Cyclic GFR-binding peptide
  MOD_RES (28)..(29): Xaa is C or S

SEQ ID NO: 81871 - protein, 22 aa, Artificial Sequence
  Cyclic GFR-binding peptide
RYKKLIVNSSDDFYLVSIANLQ

SEQ ID NO: 81872 - protein, 36 aa, Artificial Sequence; identical to SEQ ID NO: 4946
  Cyclic GFR-binding peptide
  MOD_RES (2)..(33)..(34): Xaa is C or S

SEQ ID NO: 81873 - protein, 39 aa, Artificial Sequence; identical to SEQ ID NO: 41816
  Cyclic GFR-binding peptide
  MOD_RES (1)..(33): Xaa is C or S

SEQ ID NO: 81874 - protein, 33 aa, Artificial Sequence; identical to SEQ ID NO: 41820
  Cyclic GFR-binding peptide
  MOD_RES (30)..(30): Xaa is C or S

SEQ ID NO: 81875 - protein, 34 aa, Artificial Sequence
  Cyclic GFR-binding peptide
  MOD_RES (30)..(31): Xaa is C or S
EVIMYHYKLLLVRGNDKYLMSIPSTKVPAXXTSP

SEQ ID NO: 81876 - protein, 37 aa, Artificial Sequence; identical to SEQ ID NO: 4947
  Cyclic GFR-binding peptide
  MOD_RES (1)..(32)..(33): Xaa is C or S

SEQ ID NO: 81877 - protein, 25 aa, Artificial Sequence
  Cyclic GFR-binding peptide
VMERYKKLVVKDYEDFYLMSIANLE

SEQ ID NO: 81878 - protein, 33 aa, Artificial Sequence; identical to SEQ ID NO: 41825
  Cyclic GFR-binding peptide
  MOD_RES (31)..(32): Xaa is C or S

SEQ ID NO: 81879 - protein, 25 aa, Artificial Sequence
  Cyclic GFR-binding peptide
VMNYHYKLIVNSSDDKYLVSIPSLQ

SEQ ID NO: 81880 - protein, 29 aa, Artificial Sequence
  Cyclic GFR-binding peptide
  MOD_RES (26)..(27): Xaa is C or S
RHKRLVVNKNEDYYLISTASMKEPVXXPE

SEQ ID NO: 81881 - protein, 26 aa, Artificial Sequence
  Cyclic GFR-binding peptide
VVMNYHYKLIVNSSDDKYLVSIPSLQ

SEQ ID NO: 81882 - protein, 35 aa, Artificial Sequence; identical to SEQ ID NO: 4959
  Cyclic GFR-binding peptide
  MOD_RES (1)..(32)..(33): Xaa is C or S

SEQ ID NO: 81883 - protein, 40 aa, Artificial Sequence; identical to SEQ ID NO: 33268
  Cyclic GFR-binding peptide
  MOD_RES (2)..(4)..(36)..(37): Xaa is C or S

SEQ ID NO: 81884 - protein, 29 aa, Artificial Sequence
  Cyclic GFR-binding peptide
VTMNYHYKLVVNKNEDKYLISIPSMKEPV

SEQ ID NO: 81885 - protein, 25 aa, Artificial Sequence
  Cyclic GFR-binding peptide
VMNRHKRLIVNSSDDYYLVSTASLQ

SEQ ID NO: 81886 - protein, 36 aa, Artificial Sequence; identical to SEQ ID NO: 4961
  Cyclic GFR-binding peptide
  MOD_RES (32)..(33): Xaa is C or S

SEQ ID NO: 81887 - protein, 34 aa, Artificial Sequence; identical to SEQ ID NO: 33272
  Cyclic GFR-binding peptide
  MOD_RES (2)..(34): Xaa is C or S

SEQ ID NO: 81888 - protein, 41 aa, Artificial Sequence; identical to SEQ ID NO: 4962
  Cyclic GFR-binding peptide
  MOD_RES (1)..(3)..(35): Xaa is C or S

SEQ ID NO: 81889 - protein, 38 aa, Artificial Sequence; identical to SEQ ID NO: 4963
  Cyclic GFR-binding peptide
  MOD_RES (1)..(33)..(34): Xaa is C or S

SEQ ID NO: 81890 - protein, 23 aa, Artificial Sequence
  Cyclic GFR-binding peptide
EYKFKVKPTRGVLYLISIPELDQ

SEQ ID NO: 81891 - protein, 30 aa, Artificial Sequence; identical to SEQ ID NO: 33285
  Cyclic GFR-binding peptide
  MOD_RES (2)..(4): Xaa is C or S

SEQ ID NO: 81892 - protein, 32 aa, Artificial Sequence; identical to SEQ ID NO: 40342
  Cyclic GFR-binding peptide
  MOD_RES (2)..(2): Xaa is C or S

SEQ ID NO: 81893 - protein, 37 aa, Artificial Sequence; identical to SEQ ID NO: 33286
  Cyclic GFR-binding peptide
  MOD_RES (1)..(34)..(35): Xaa is C or S

SEQ ID NO: 81894 - protein, 31 aa, Artificial Sequence; identical to SEQ ID NO: 4969
  Cyclic GFR-binding peptide
  MOD_RES (1)..(1): Xaa is C or S

SEQ ID NO: 81895 - protein, 37 aa, Artificial Sequence; identical to SEQ ID NO: 4970
  Cyclic GFR-binding peptide
  MOD_RES (2)..(34)..(35): Xaa is C or S

SEQ ID NO: 81896 - protein, 25 aa, Artificial Sequence
  Cyclic GFR-binding peptide
IMRHKRLLLVRGNDYYLMSTASTKV

SEQ ID NO: 81897 - protein, 26 aa, Artificial Sequence
  Cyclic GFR-binding peptide
VMNEYKFKIVNNSSDLYLVSIPELKT

SEQ ID NO: 81898 - protein, 35 aa, Artificial Sequence; identical to SEQ ID NO: 40348
  Cyclic GFR-binding peptide
  MOD_RES (1)..(33)..(34): Xaa is C or S

SEQ ID NO: 81899 - protein, 32 aa, Artificial Sequence; identical to SEQ ID NO: 4977
  Cyclic GFR-binding peptide
  MOD_RES (28)..(29): Xaa is C or S

SEQ ID NO: 81900 - protein, 27 aa, Artificial Sequence
  Cyclic GFR-binding peptide
VIMRYKKLLLVRGNDFYLMSIANTKVP

SEQ ID NO: 81901 - protein, 22 aa, Artificial Sequence
  Cyclic GFR-binding peptide
MDRHKRLVVNNAADYYLISTAS

SEQ ID NO: 81902 - protein, 26 aa, Artificial Sequence
  Cyclic GFR-binding peptide
MYHYKLVKPKRGVKYLISIPSLAQPV

SEQ ID NO: 81903 - protein, 30 aa, Artificial Sequence; identical to SEQ ID NO: 4980
  Cyclic GFR-binding peptide
  MOD_RES (1)..(3): Xaa is C or S

SEQ ID NO: 81904 - protein, 28 aa, Artificial Sequence
  Cyclic GFR-binding peptide
  MOD_RES (27)..(28): Xaa is C or S
GYHYKLYTVVGKDKYLISIPSLKTPVXX

SEQ ID NO: 81905 - protein, 25 aa, Artificial Sequence
  Cyclic GFR-binding peptide
MERHKRLVVKDYEDYYLMSTASLET

SEQ ID NO: 81906 - protein, 26 aa, Artificial Sequence
  Cyclic GFR-binding peptide
GEVVMEYHYKLVVKDYEDKYLMSIPS

SEQ ID NO: 81907 - protein, 34 aa, Artificial Sequence; identical to SEQ ID NO: 4984
  Cyclic GFR-binding peptide
  MOD_RES (28)..(29): Xaa is C or S

SEQ ID NO: 81908 - protein, 27 aa, Artificial Sequence
  Cyclic GFR-binding peptide
  MOD_RES (2)..(2): Xaa is C or S
GXEEVIMPIKGYLLVRGNDFYLMNIPS

SEQ ID NO: 81909 - protein, 31 aa, Artificial Sequence
  Cyclic GFR-binding peptide
SEVTMNYHYKLVVNKNEDKYLISIPSMKEPV

SEQ ID NO: 81910 - protein, 30 aa, Artificial Sequence; identical to SEQ ID NO: 33301
  Cyclic GFR-binding peptide
  MOD_RES (1)..(3): Xaa is C or S

SEQ ID NO: 81911 - protein, 34 aa, Artificial Sequence
  Cyclic GFR-binding peptide
  MOD_RES (31)..(32): Xaa is C or S
EVTMNYHYKLVVNKNEDKYLISIPSMKEPVXXPE

SEQ ID NO: 81912 - protein, 33 aa, Artificial Sequence; identical to SEQ ID NO: 4987
  Cyclic GFR-binding peptide
  MOD_RES (1)..(3): Xaa is C or S

SEQ ID NO: 81913 - protein, 36 aa, Artificial Sequence; identical to SEQ ID NO: 33306
  Cyclic GFR-binding peptide
  MOD_RES (1)..(33)..(34): Xaa is C or S

SEQ ID NO: 81914 - protein, 29 aa, Artificial Sequence
  Cyclic GFR-binding peptide
  MOD_RES (1)..(3): Xaa is C or S
XKXSRVIMRHKRLVKPKRGVYYLISTASL

SEQ ID NO: 81915 - protein, 35 aa, Artificial Sequence; identical to SEQ ID NO: 4991
  Cyclic GFR-binding peptide
  MOD_RES (2)..(34)..(35): Xaa is C or S

SEQ ID NO: 81916 - protein, 36 aa, Artificial Sequence; identical to SEQ ID NO: 33310
  Cyclic GFR-binding peptide
  MOD_RES (31)..(32): Xaa is C or S

SEQ ID NO: 81917 - protein, 23 aa, Artificial Sequence
  Cyclic GFR-binding peptide
RHKRLVVNNASDYYLISTASLRT

SEQ ID NO: 81918 - protein, 27 aa, Artificial Sequence
  Cyclic GFR-binding peptide
  MOD_RES (26)..(27): Xaa is C or S
RYKKLVVKENEDFYLMSIANLETPVXX

SEQ ID NO: 81919 - protein, 21 aa, Artificial Sequence
  Cyclic GFR-binding peptide
PIKGYTPVGMDDFYLVNIPSL

SEQ ID NO: 81920 - protein, 31 aa, Artificial Sequence
  Cyclic GFR-binding peptide
  MOD_RES (27)..(28): Xaa is C or S
MYHYKLLLVRGNDKYLMSIPSTKVPAXXTSP

SEQ ID NO: 81921 - protein, 32 aa, Artificial Sequence; identical to SEQ ID NO: 40376
  Cyclic GFR-binding peptide
  MOD_RES (1)..(3): Xaa is C or S

SEQ ID NO: 81922 - protein, 38 aa, Artificial Sequence
  Cyclic GFR-binding peptide
  MOD_RES (1)..(3)..(35)..(36): Xaa is C or S
XGXRDVVMGYHYKLIIQQKDNKYLMSIPSMKTPTXXPG

SEQ ID NO: 81923 - protein, 27 aa, Artificial Sequence
  Cyclic GFR-binding peptide
EVVMEEYKFKVVKDYEDLYLMSIPELE

SEQ ID NO: 81924 - protein, 35 aa, Artificial Sequence; identical to SEQ ID NO: 33320
  Cyclic GFR-binding peptide
  MOD_RES (2)..(34)..(35): Xaa is C or S

SEQ ID NO: 81925 - protein, 29 aa, Artificial Sequence
  Cyclic GFR-binding peptide
  MOD_RES (1)..(3): Xaa is C or S
XGXESVAMGPIKGYYTVVGKDFYLINIPS

SEQ ID NO: 81926 - protein, 28 aa, Artificial Sequence
  Cyclic GFR-binding peptide
RVVMNEYKFKIVNSSDDLYLVSIPELKT

SEQ ID NO: 81927 - protein, 28 aa, Artificial Sequence
  Cyclic GFR-binding peptide
  MOD_RES (28)..(28): Xaa is C or S
GEEYKFKTPVGMDDLYLVSIPELKTPVX

SEQ ID NO: 81928 - protein, 39 aa, Artificial Sequence; identical to SEQ ID NO: 33324
  Cyclic GFR-binding peptide
  MOD_RES (1)..(3)..(35)..(36): Xaa is C or S

SEQ ID NO: 81929 - protein, 37 aa, Artificial Sequence; identical to SEQ ID NO: 75950
  Cyclic GFR-binding peptide
  MOD_RES (2)..(4)..(36)..(37): Xaa is C or S

SEQ ID NO: 81930 - protein, 32 aa, Artificial Sequence; identical to SEQ ID NO: 4999
  Cyclic GFR-binding peptide
  MOD_RES (29)..(30): Xaa is C or S

SEQ ID NO: 81931 - protein, 27 aa, Artificial Sequence
  Cyclic GFR-binding peptide
RVVMNPIKGYIVNSSDDFYLVNIPSLQ

SEQ ID NO: 81932 - protein, 21 aa, Artificial Sequence
  Cyclic GFR-binding peptide
EYKFKVVKDYEDLYLMSIPEL

SEQ ID NO: 81933 - protein, 23 aa, Artificial Sequence
  Cyclic GFR-binding peptide
VMDPIKGYVVNNAADFYLINIPS

SEQ ID NO: 81934 - protein, 31 aa, Artificial Sequence; identical to SEQ ID NO: 40390
  Cyclic GFR-binding peptide
  MOD_RES (1)..(1): Xaa is C or S

SEQ ID NO: 81935 - protein, 35 aa, Artificial Sequence; identical to SEQ ID NO: 33327
  Cyclic GFR-binding peptide
  MOD_RES (2)..(34)..(35): Xaa is C or S

SEQ ID NO: 81936 - protein, 35 aa, Artificial Sequence; identical to SEQ ID NO: 33328
  Cyclic GFR-binding peptide
  MOD_RES (2)..(34)..(35): Xaa is C or S

SEQ ID NO: 81937 - protein, 32 aa, Artificial Sequence; identical to SEQ ID NO: 5001
  Cyclic GFR-binding peptide
  MOD_RES (30)..(31): Xaa is C or S

SEQ ID NO: 81938 - protein, 42 aa, Artificial Sequence
  Cyclic GFR-binding peptide
  MOD_RES (2)..(4)..(36)..(37): Xaa is C or S
RXGXSEVVMDEYKFKVVNNASDLYLISIPELRTPVXXTPPTS

SEQ ID NO: 81939 - protein, 37 aa, Artificial Sequence; identical to SEQ ID NO: 15481
  Cyclic GFR-binding peptide
  MOD_RES (1)..(3)..(35)..(36): Xaa is C or S

SEQ ID NO: 81940 - protein, 33 aa, Artificial Sequence; identical to SEQ ID NO: 33330
  Cyclic GFR-binding peptide
  MOD_RES (28)..(29): Xaa is C or S

SEQ ID NO: 81941 - protein, 27 aa, Artificial Sequence
  Cyclic GFR-binding peptide
VSMGERYKKLTPVGMDDFYLVSIANLK

SEQ ID NO: 81942 - protein, 35 aa, Artificial Sequence; identical to SEQ ID NO: 5007
  Cyclic GFR-binding peptide
  MOD_RES (2)..(34)..(35): Xaa is C or S

SEQ ID NO: 81943 - protein, 37 aa, Artificial Sequence; identical to SEQ ID NO: 40400
  Cyclic GFR-binding peptide
  MOD_RES (2)..(4)..(36): Xaa is C or S

SEQ ID NO: 81944 - protein, 26 aa, Artificial Sequence
  Cyclic GFR-binding peptide
  MOD_RES (26)..(26): Xaa is C or S
RHKRLIIQQKDNYYLMSTASMKTPTX

SEQ ID NO: 81945 - protein, 35 aa, Artificial Sequence; identical to SEQ ID NO: 5008
  Cyclic GFR-binding peptide
  MOD_RES (2)..(4)..(35): Xaa is C or S

SEQ ID NO: 81946 - protein, 31 aa, Artificial Sequence; identical to SEQ ID NO: 33337
  Cyclic GFR-binding peptide
  MOD_RES (31)..(31): Xaa is C or S

SEQ ID NO: 81947 - protein, 33 aa, Artificial Sequence
  Cyclic GFR-binding peptide
  MOD_RES (32)..(33): Xaa is C or S
SEVTMNRYKKLVVNKNEDFYLISIANMKEPVXX

SEQ ID NO: 81948 - protein, 37 aa, Artificial Sequence; identical to SEQ ID NO: 40404
  Cyclic GFR-binding peptide
  MOD_RES (2)..(35)..(36): Xaa is C or S

SEQ ID NO: 81949 - protein, 26 aa, Artificial Sequence
  Cyclic GFR-binding peptide
IMPIKGYIKPTKGIFYLINIPSLDQS

SEQ ID NO: 81950 - protein, 29 aa, Artificial Sequence
  Cyclic GFR-binding peptide
  MOD_RES (26)..(27): Xaa is C or S
RYKKLIIQQKDNFYLMSIANMKTPTXXPG

SEQ ID NO: 81951 - protein, 22 aa, Artificial Sequence
  Cyclic GFR-binding peptide
ERYKKLTPVGMDDFYLVSIANL

SEQ ID NO: 81952 - protein, 30 aa, Artificial Sequence; identical to SEQ ID NO: 5015
  Cyclic GFR-binding peptide
  MOD_RES (27)..(28): Xaa is C or S

SEQ ID NO: 81953 - protein, 36 aa, Artificial Sequence; identical to SEQ ID NO: 40409
  Cyclic GFR-binding peptide
  MOD_RES (2)..(4)..(36): Xaa is C or S

SEQ ID NO: 81954 - protein, 35 aa, Artificial Sequence; identical to SEQ ID NO: 5017
  Cyclic GFR-binding peptide
  MOD_RES (30)..(31): Xaa is C or S

SEQ ID NO: 81955 - protein, 29 aa, Artificial Sequence
  Cyclic GFR-binding peptide
  MOD_RES (26)..(27): Xaa is C or S
RYKKLVVNKNEDFYLISIANMKEPVXXPE

SEQ ID NO: 81956 - protein, 24 aa, Artificial Sequence
  Cyclic GFR-binding peptide
RHKRLVKPKRGVYYLISTASLAQP

SEQ ID NO: 81957 - protein, 27 aa, Artificial Sequence
  Cyclic GFR-binding peptide
  MOD_RES (26)..(27): Xaa is C or S
PIKGYVVNKNEDFYLINIPSMKEPVXX

SEQ ID NO: 81958 - protein, 34 aa, Artificial Sequence; identical to SEQ ID NO: 33351
  Cyclic GFR-binding peptide
  MOD_RES (32)..(33): Xaa is C or S

SEQ ID NO: 81959 - protein, 29 aa, Artificial Sequence
  Cyclic GFR-binding peptide
  MOD_RES (28)..(29): Xaa is C or S
MDPIKGYVVKENEDFYLMNIPSLETPVXX

SEQ ID NO: 81960 - protein, 35 aa, Artificial Sequence; identical to SEQ ID NO: 5026
  Cyclic GFR-binding peptide
  MOD_RES (31)..(32): Xaa is C or S

SEQ ID NO: 81961 - protein, 37 aa, Artificial Sequence; identical to SEQ ID NO: 5028
  Cyclic GFR-binding peptide
  MOD_RES (32)..(33): Xaa is C or S

SEQ ID NO: 81962 - protein, 30 aa, Artificial Sequence
  Cyclic GFR-binding peptide
  MOD_RES (2)..(4): Xaa is C or S
SXKXSKVVMPIKGYVKPTRGVFYLINIPSL

SEQ ID NO: 81963 - protein, 26 aa, Artificial Sequence
  Cyclic GFR-binding peptide
NPIKGYIVNNSSDFYLVNIPSLKTPA

SEQ ID NO: 81964 - protein, 39 aa, Artificial Sequence; identical to SEQ ID NO: 40430
  Cyclic GFR-binding peptide
  MOD_RES (2)..(34): Xaa is C or S

SEQ ID NO: 81965 - protein, 30 aa, Artificial Sequence
  Cyclic GFR-binding peptide
  MOD_RES (28)..(29): Xaa is C or S
MDEYKFKVVNNASDLYLISIPELRTPVXXT

SEQ ID NO: 81966 - protein, 30 aa, Artificial Sequence
  Cyclic GFR-binding peptide
ESVAMGRHKRLYTVVGKDYYLISTASLKTP

SEQ ID NO: 81967 - protein, 37 aa, Artificial Sequence; identical to SEQ ID NO: 5034
  Cyclic GFR-binding peptide
  MOD_RES (1)..(34)..(35): Xaa is C or S

SEQ ID NO: 81968 - protein, 38 aa, Artificial Sequence
  Cyclic GFR-binding peptide
  MOD_RES (32)..(33): Xaa is C or S
SEVTMNPIKGYVVNKNEDFYLINIPSMKEPVXXPEPIG

SEQ ID NO: 81969 - protein, 34 aa, Artificial Sequence; identical to SEQ ID NO: 5035
  Cyclic GFR-binding peptide
  MOD_RES (29)..(30): Xaa is C or S

SEQ ID NO: 81970 - protein, 20 aa, Artificial Sequence
  Cyclic GFR-binding peptide
EYKFKVKPKRGVLYLISIPE

SEQ ID NO: 81971 - protein, 29 aa, Artificial Sequence
  Cyclic GFR-binding peptide
  MOD_RES (29)..(29): Xaa is C or S
MGEEYKFKTPVGMDDLYLVSIPELKTPVX

SEQ ID NO: 81972 - protein, 25 aa, Artificial Sequence
  Cyclic GFR-binding peptide
MDYHYKLVVNNAADKYLISIPSLRA

SEQ ID NO: 81973 - protein, 31 aa, Artificial Sequence; identical to SEQ ID NO: 40448
  Cyclic GFR-binding peptide
  MOD_RES (26)..(27): Xaa is C or S

SEQ ID NO: 81974 - protein, 24 aa, Artificial Sequence
  Cyclic GFR-binding peptide
MEYKFKVKPKRGVLYLISIPELAQ

SEQ ID NO: 81975 - protein, 41 aa, Artificial Sequence; identical to SEQ ID NO: 33371
  Cyclic GFR-binding peptide
  MOD_RES (1)..(3)..(35): Xaa is C or S

SEQ ID NO: 81976 - protein, 32 aa, Artificial Sequence; identical to SEQ ID NO: 5041
  Cyclic GFR-binding peptide
  MOD_RES (2)..(2): Xaa is C or S

SEQ ID NO: 81977 - protein, 27 aa, Artificial Sequence
  Cyclic GFR-binding peptide
VVMDRYKKLVVKENEDFYLMSIANLET

SEQ ID NO: 81978 - protein, 30 aa, Artificial Sequence; identical to SEQ ID NO: 40468
  Cyclic GFR-binding peptide
  MOD_RES (29)..(30): Xaa is C or S

SEQ ID NO: 81979 - protein, 36 aa, Artificial Sequence; identical to SEQ ID NO: 5046
  Cyclic GFR-binding peptide
  MOD_RES (1)..(32)..(33): Xaa is C or S

SEQ ID NO: 81980 - protein, 29 aa, Artificial Sequence
  Cyclic GFR-binding peptide
  MOD_RES (27)..(28): Xaa is C or S
MYHYKLVKPKRGVKYLISIPSLAQPVXXP

SEQ ID NO: 81981 - protein, 38 aa, Artificial Sequence; identical to SEQ ID NO: 40470
  Cyclic GFR-binding peptide
  MOD_RES (1)..(33)..(34): Xaa is C or S

SEQ ID NO: 81982 - protein, 21 aa, Artificial Sequence
  Cyclic GFR-binding peptide
DYHYKLVVNNASDKYLISIPS

SEQ ID NO: 81983 - protein, 35 aa, Artificial Sequence; identical to SEQ ID NO: 40472
  Cyclic GFR-binding peptide
  MOD_RES (31)..(32): Xaa is C or S

SEQ ID NO: 81984 - protein, 31 aa, Artificial Sequence; identical to SEQ ID NO: 40473
  Cyclic GFR-binding peptide
  MOD_RES (2)..(2): Xaa is C or S

SEQ ID NO: 81985 - protein, 39 aa, Artificial Sequence; identical to SEQ ID NO: 40475
  Cyclic GFR-binding peptide
  MOD_RES (33)..(34): Xaa is C or S

SEQ ID NO: 81986 - protein, 26 aa, Artificial Sequence
  Cyclic GFR-binding peptide
EVVMERHKRLVVKDYEDYYLMSTASL

SEQ ID NO: 81987 - protein, 41 aa, Artificial Sequence
  Cyclic GFR-binding peptide
  MOD_RES (1)..(3)..(35)..(36): Xaa is C or S
XAXSEVTMNRYKKLVVNKNEDFYLISIANMKEPVXXPEPIG

SEQ ID NO: 81988 - protein, 28 aa, Artificial Sequence
  Cyclic GFR-binding peptide
  MOD_RES (28)..(28): Xaa is C or S
MGPIKGYYTVVGKDFYLINIPSLKTPVX

SEQ ID NO: 81989 - protein, 34 aa, Artificial Sequence; identical to SEQ ID NO: 33382
  Cyclic GFR-binding peptide
  MOD_RES (32)..(33): Xaa is C or S

SEQ ID NO: 81990 - protein, 24 aa, Artificial Sequence
  Cyclic GFR-binding peptide
VMGEYKFKIIQQKDNLYLMSIPEM

SEQ ID NO: 81991 - protein, 40 aa, Artificial Sequence; identical to SEQ ID NO: 5056
  Cyclic GFR-binding peptide
  MOD_RES (2)..(34)..(35): Xaa is C or S

SEQ ID NO: 81992 - protein, 33 aa, Artificial Sequence; identical to SEQ ID NO: 5057
  Cyclic GFR-binding peptide
  MOD_RES (1)..(3): Xaa is C or S

SEQ ID NO: 81993 - protein, 33 aa, Artificial Sequence; identical to SEQ ID NO: 33384
  Cyclic GFR-binding peptide
  MOD_RES (30)..(31): Xaa is C or S

SEQ ID NO: 81994 - protein, 37 aa, Artificial Sequence; identical to SEQ ID NO: 33387
  Cyclic GFR-binding peptide
  MOD_RES (1)..(3)..(35)..(36): Xaa is C or S

SEQ ID NO: 81995 - protein, 31 aa, Artificial Sequence; identical to SEQ ID NO: 75999
  Cyclic GFR-binding peptide
  MOD_RES (29)..(30): Xaa is C or S

SEQ ID NO: 81996 - protein, 34 aa, Artificial Sequence; identical to SEQ ID NO: 5059
  Cyclic GFR-binding peptide
  MOD_RES (28)..(29): Xaa is C or S

SEQ ID NO: 81997 - protein, 26 aa, Artificial Sequence
  Cyclic GFR-binding peptide
DVVMGRYKKLIIQQKDNFYLMSIANM

SEQ ID NO: 81998 - protein, 35 aa, Artificial Sequence
  Cyclic GFR-binding peptide
  MOD_RES (31)..(32): Xaa is C or S
SRVIMPIKGYVKPKRGVFYLINIPSLAQPVXXPAA

SEQ ID NO: 81999 - protein, 31 aa, Artificial Sequence; identical to SEQ ID NO: 33390
  Cyclic GFR-binding peptide
  MOD_RES (29)..(30): Xaa is C or S

SEQ ID NO: 82000 - protein, 29 aa, Artificial Sequence
  Cyclic GFR-binding peptide
  MOD_RES (2)..(4): Xaa is C or S
SXKXSRVIMYHYKLVKPKRGVKYLISIPS

SEQ ID NO: 82001 - protein, 29 aa, Artificial Sequence
  Cyclic GFR-binding peptide
  MOD_RES (29)..(29): Xaa is C or S
VIMEYKFKIKPTKGILYLISIPELDQSVX

SEQ ID NO: 82002 - protein, 29 aa, Artificial Sequence
  Cyclic GFR-binding peptide
  MOD_RES (26)..(27): Xaa is C or S
RHKRLVVNNAADYYLISTASLRAPVXXSA

SEQ ID NO: 82003 - protein, 27 aa, Artificial Sequence
  Cyclic GFR-binding peptide
MDPIKGYVVNNAADFYLINIPSLRAPV

SEQ ID NO: 82004 - protein, 26 aa, Artificial Sequence
  Cyclic GFR-binding peptide
VVMNRYKKLIVNSSDDFYLVSIANLK

SEQ ID NO: 82005 - protein, 35 aa, Artificial Sequence; identical to SEQ ID NO: 5073
  Cyclic GFR-binding peptide
  MOD_RES (1)..(3)..(35): Xaa is C or S

SEQ ID NO: 82006 - protein, 39 aa, Artificial Sequence
  Cyclic GFR-binding peptide
  MOD_RES (1)..(3)..(35)..(36): Xaa is C or S
XAXSEVTMNEYKFKVVNKNEDLYLISIPEMKEPVXXPEP

SEQ ID NO: 82007 - protein, 33 aa, Artificial Sequence; identical to SEQ ID NO: 5075
  Cyclic GFR-binding peptide
  MOD_RES (31)..(32): Xaa is C or S

SEQ ID NO: 82008 - protein, 39 aa, Artificial Sequence; identical to SEQ ID NO: 33405
  Cyclic GFR-binding peptide
  MOD_RES (1)..(3)..(34)..(35): Xaa is C or S

SEQ ID NO: 82009 - protein, 36 aa, Artificial Sequence; identical to SEQ ID NO: 5077
  Cyclic GFR-binding peptide
  MOD_RES (1)..(3)..(35): Xaa is C or S

SEQ ID NO: 82010 - protein, 36 aa, Artificial Sequence; identical to SEQ ID NO: 40504
  Cyclic GFR-binding peptide
  MOD_RES (32)..(33): Xaa is C or S

SEQ ID NO: 82011 - protein, 32 aa, Artificial Sequence; identical to SEQ ID NO: 5078
  Cyclic GFR-binding peptide
  MOD_RES (31)..(32): Xaa is C or S

SEQ ID NO: 82012 - protein, 27 aa, Artificial Sequence
  Cyclic GFR-binding peptide
SEVTMNRHKRLVVNKNEDYYLISTASM

SEQ ID NO: 82013 - protein, 32 aa, Artificial Sequence; identical to SEQ ID NO: 33410
  Cyclic GFR-binding peptide
  MOD_RES (27)..(28): Xaa is C or S

SEQ ID NO: 82014 - protein, 25 aa, Artificial Sequence
  Cyclic GFR-binding peptide
DRYKKLVVKENEDFYLMSIANLETP

SEQ ID NO: 82015 - protein, 20 aa, Artificial Sequence
  Cyclic GFR-binding peptide
RYKKLIKPTKGIFYLISIAN

SEQ ID NO: 82016 - protein, 36 aa, Artificial Sequence; identical to SEQ ID NO: 33413
  Cyclic GFR-binding peptide
  MOD_RES (1)..(33)..(34): Xaa is C or S

SEQ ID NO: 82017 - protein, 29 aa, Artificial Sequence
  Cyclic GFR-binding peptide
  MOD_RES (2)..(2): Xaa is C or S
GXGEVVMEPIKGYVVKDYEDFYLMNIPSL

SEQ ID NO: 82018 - protein, 35 aa, Artificial Sequence; identical to SEQ ID NO: 5091
  Cyclic GFR-binding peptide
  MOD_RES (2)..(4): Xaa is C or S

SEQ ID NO: 82019 - protein, 20 aa, Artificial Sequence
  Cyclic GFR-binding peptide
RHKRLVVKENEDYYLMSTAS

SEQ ID NO: 82020 - protein, 38 aa, Artificial Sequence; identical to SEQ ID NO: 5093
  Cyclic GFR-binding peptide
  MOD_RES (2)..(4)..(35)..(36): Xaa is C or S

SEQ ID NO: 82021 - protein, 38 aa, Artificial Sequence
  Cyclic GFR-binding peptide
  MOD_RES (1)..(33)..(34): Xaa is C or S
XAEVVMDRHKRLVVNNAADYYLISTASLRAPVXXSAPA

SEQ ID NO: 82022 - protein, 36 aa, Artificial Sequence; identical to SEQ ID NO: 5094
  Cyclic GFR-binding peptide
  MOD_RES (31)..(32): Xaa is C or S

SEQ ID NO: 82023 - protein, 32 aa, Artificial Sequence; identical to SEQ ID NO: 5095
  Cyclic GFR-binding peptide
  MOD_RES (27)..(28): Xaa is C or S

SEQ ID NO: 82024 - protein, 22 aa, Artificial Sequence
  Cyclic GFR-binding peptide
MRYKKLIKPTKGIFYLISIANL

SEQ ID NO: 82025 - protein, 30 aa, Artificial Sequence; identical to SEQ ID NO: 5099
  Cyclic GFR-binding peptide
  MOD_RES (26)..(27): Xaa is C or S

SEQ ID NO: 82026 - protein, 26 aa, Artificial Sequence
  Cyclic GFR-binding peptide
VIMEYKFKLLVRGNDLYLMSIPETKV

SEQ ID NO: 82027 - protein, 32 aa, Artificial Sequence
  Cyclic GFR-binding peptide
  MOD_RES (1)..(3): Xaa is C or S
XGXESVAMGRHKRLYTVVGKDYYLISTASLKT

SEQ ID NO: 82028 - protein, 33 aa, Artificial Sequence; identical to SEQ ID NO: 5101
  Cyclic GFR-binding peptide
  MOD_RES (32)..(33): Xaa is C or S

SEQ ID NO: 82029 - protein, 38 aa, Artificial Sequence; identical to SEQ ID NO: 5102
  Cyclic GFR-binding peptide
  MOD_RES (2)..(34)..(35): Xaa is C or S

SEQ ID NO: 82030 - protein, 30 aa, Artificial Sequence
  Cyclic GFR-binding peptide
  MOD_RES (2)..(4): Xaa is C or S
LXGXEEVIMRHKRLLLVRGNDYYLMSTAST

SEQ ID NO: 82031 - protein, 32 aa, Artificial Sequence; identical to SEQ ID NO: 33426
  Cyclic GFR-binding peptide
  MOD_RES (1)..(1): Xaa is C or S

SEQ ID NO: 82032 - protein, 39 aa, Artificial Sequence; identical to SEQ ID NO: 5104
  Cyclic GFR-binding peptide
  MOD_RES (2)..(4)..(36)..(37): Xaa is C or S

SEQ ID NO: 82033 - protein, 38 aa, Artificial Sequence; identical to SEQ ID NO: 5105
  Cyclic GFR-binding peptide
  MOD_RES (1)..(33)..(34): Xaa is C or S

SEQ ID NO: 82034 - protein, 28 aa, Artificial Sequence
  Cyclic GFR-binding peptide
VMNRYKKLIVNSSDDFYLVSIANLQTPA

SEQ ID NO: 82035 - protein, 25 aa, Artificial Sequence
  Cyclic GFR-binding peptide
YHYKLYTVVGKDKYLISIPSLKTPV

SEQ ID NO: 82036 - protein, 35 aa, Artificial Sequence; identical to SEQ ID NO: 40529
  Cyclic GFR-binding peptide
  MOD_RES (1)..(3)..(35): Xaa is C or S

SEQ ID NO: 82037 - protein, 32 aa, Artificial Sequence; identical to SEQ ID NO: 5109
  Cyclic GFR-binding peptide
  MOD_RES (2)..(2): Xaa is C or S

SEQ ID NO: 82038 - protein, 25 aa, Artificial Sequence
  Cyclic GFR-binding peptide
EVVMERHKRLVVKDYEDYYLMSTAS

SEQ ID NO: 82039 - protein, 30 aa, Artificial Sequence
  Cyclic GFR-binding peptide
  MOD_RES (2)..(2): Xaa is C or S
GXRDVVMGEYKFKIIQQKDNLYLMSIPEMK

SEQ ID NO: 82040 - protein, 38 aa, Artificial Sequence; identical to SEQ ID NO: 5112
  Cyclic GFR-binding peptide
  MOD_RES (2)..(33)..(34): Xaa is C or S

SEQ ID NO: 82041 - protein, 32 aa, Artificial Sequence; identical to SEQ ID NO: 5113
  Cyclic GFR-binding peptide
  MOD_RES (28)..(29): Xaa is C or S

SEQ ID NO: 82042 - protein, 34 aa, Artificial Sequence; identical to SEQ ID NO: 33438
  Cyclic GFR-binding peptide
  MOD_RES (33)..(34): Xaa is C or S

SEQ ID NO: 82043 - protein, 29 aa, Artificial Sequence
  Cyclic GFR-binding peptide
  MOD_RES (2)..(4): Xaa is C or S
SXKXSRVIMEYKFKVKPKRGVLYLISIPE

SEQ ID NO: 82044 - protein, 25 aa, Artificial Sequence
  Cyclic GFR-binding peptide
GRYKKLYTVVGKDFYLISIANLKTP

SEQ ID NO: 82045 - protein, 30 aa, Artificial Sequence; identical to SEQ ID NO: 15596
  Cyclic GFR-binding peptide

SEQ ID NO: 82046 - protein, 34 aa, Artificial Sequence
  Cyclic GFR-binding peptide
  MOD_RES (2)..(33)..(34): Xaa is C or S
GXEEVIMYHYKLLLVRGNDKYLMSIPSTKVPAXX

SEQ ID NO: 82047 - protein, 33 aa, Artificial Sequence
  Cyclic GFR-binding peptide
  MOD_RES (29)..(30): Xaa is C or S
VIMPIKGYIKPTKGIFYLINIPSLDQSVXXPSA

SEQ ID NO: 82048 - protein, 22 aa, Artificial Sequence
  Cyclic GFR-binding peptide
NRYKKLIVNSSDDFYLVSIANL

SEQ ID NO: 82049 - protein, 28 aa, Artificial Sequence
  Cyclic GFR-binding peptide
  MOD_RES (26)..(27): Xaa is C or S
EYKFKIKPTKGILYLISIPELDQSVXXP

SEQ ID NO: 82050 - protein, 29 aa, Artificial Sequence
  Cyclic GFR-binding peptide
EEVIMYHYKLLLVRGNDKYLMSIPSTKVP

SEQ ID NO: 82051 - protein, 22 aa, Artificial Sequence
  Cyclic GFR-binding peptide
MPIKGYVKPTRGVFYLINIPSL

SEQ ID NO: 82052 - protein, 22 aa, Artificial Sequence
  Cyclic GFR-binding peptide
PIKGYVVKDYEDFYLMNIPSLE

SEQ ID NO: 82053 - protein, 40 aa, Artificial Sequence; identical to SEQ ID NO: 40548
  Cyclic GFR-binding peptide
  MOD_RES (1)..(3)..(35)..(36): Xaa is C or S

SEQ ID NO: 82054 - protein, 33 aa, Artificial Sequence; identical to SEQ ID NO: 5125
  Cyclic GFR-binding peptide
  MOD_RES (1)..(33): Xaa is C or S

SEQ ID NO: 82055 - protein, 30 aa, Artificial Sequence; identical to SEQ ID NO: 5126
  Cyclic GFR-binding peptide

SEQ ID NO: 82056 - protein, 27 aa, Artificial Sequence
  Cyclic GFR-binding peptide
VVMNRYKKLIVNNSSDFYLVSIANLKT

SEQ ID NO: 82057 - protein, 32 aa, Artificial Sequence; identical to SEQ ID NO: 40552
  Cyclic GFR-binding peptide
  MOD_RES (29)..(29): Xaa is C or S

SEQ ID NO: 82058 - protein, 32 aa, Artificial Sequence; identical to SEQ ID NO: 5132
  Cyclic GFR-binding peptide
  MOD_RES (2)..(4): Xaa is C or S

SEQ ID NO: 82059 - protein, 30 aa, Artificial Sequence; identical to SEQ ID NO: 33455
  Cyclic GFR-binding peptide
  MOD_RES (1)..(1): Xaa is C or S

SEQ ID NO: 82060 - protein, 28 aa, Artificial Sequence
  Cyclic GFR-binding peptide
VVMNEYKFKIVNNSSDLYLVSIPELKTP

SEQ ID NO: 82061 - protein, 38 aa, Artificial Sequence
  Cyclic GFR-binding peptide
  MOD_RES (2)..(4)..(36)..(37): Xaa is C or S
RXGXSEVVMDRHKRLVVNNASDYYLISTASLRTPVXXT

SEQ ID NO: 82062 - protein, 32 aa, Artificial Sequence; identical to SEQ ID NO: 33461
  Cyclic GFR-binding peptide
  MOD_RES (2)..(4): Xaa is C or S

SEQ ID NO: 82063 - protein, 32 aa, Artificial Sequence
  Cyclic GFR-binding peptide
  MOD_RES (32)..(32): Xaa is C or S
RDVVMGRHKRLIIQQKDNYYLMSTASMKTPTX

SEQ ID NO: 82064 - protein, 35 aa, Artificial Sequence; identical to SEQ ID NO: 33463
  Cyclic GFR-binding peptide
  MOD_RES (31)..(32): Xaa is C or S

SEQ ID NO: 82065 - protein, 27 aa, Artificial Sequence
  Cyclic GFR-binding peptide
  MOD_RES (1)..(1): Xaa is C or S
XSKVVMRHKRLVKPTRGVYYLISTASL

SEQ ID NO: 82066 - protein, 25 aa, Artificial Sequence
  Cyclic GFR-binding peptide
KVVMNYHYKLIVNNSSDKYLVSIPS

SEQ ID NO: 82067 - protein, 29 aa, Artificial Sequence
  Cyclic GFR-binding peptide
  MOD_RES (2)..(2): Xaa is C or S
GXRDVVMGYHYKLIIQQKDNKYLMSIPSM

SEQ ID NO: 82068 - protein, 34 aa, Artificial Sequence
  Cyclic GFR-binding peptide
  MOD_RES (1)..(3)..(34): Xaa is C or S
XKXSKVIMPIKGYIKPTKGIFYLINIPSLDQSVX

SEQ ID NO: 82069 - protein, 30 aa, Artificial Sequence; identical to SEQ ID NO: 40561
  Cyclic GFR-binding peptide
  MOD_RES (26)..(27): Xaa is C or S

SEQ ID NO: 82070 - protein, 31 aa, Artificial Sequence; identical to SEQ ID NO: 5147
  Cyclic GFR-binding peptide
  MOD_RES (26)..(27): Xaa is C or S

SEQ ID NO: 82071 - protein, 32 aa, Artificial Sequence; identical to SEQ ID NO: 5149
  Cyclic GFR-binding peptide
  MOD_RES (27)..(28): Xaa is C or S

SEQ ID NO: 82072 - protein, 37 aa, Artificial Sequence
  Cyclic GFR-binding peptide
  MOD_RES (1)..(32)..(33): Xaa is C or S
XEEVIMYHYKLLLVRGNDKYLMSIPSTKVPAXXTSPV

SEQ ID NO: 82073 - protein, 31 aa, Artificial Sequence; identical to SEQ ID NO: 33470
  Cyclic GFR-binding peptide
  MOD_RES (2)..(2): Xaa is C or S

SEQ ID NO: 82074 - protein, 33 aa, Artificial Sequence; identical to SEQ ID NO: 33473
  Cyclic GFR-binding peptide
  MOD_RES (27)..(28): Xaa is C or S

SEQ ID NO: 82075 - protein, 31 aa, Artificial Sequence; identical to SEQ ID NO: 33474
  Cyclic GFR-binding peptide

SEQ ID NO: 82076 - protein, 36 aa, Artificial Sequence; identical to SEQ ID NO: 40568
  Cyclic GFR-binding peptide
  MOD_RES (32)..(33): Xaa is C or S

SEQ ID NO: 82077 - protein, 37 aa, Artificial Sequence
  Cyclic GFR-binding peptide
  MOD_RES (1)..(3)..(35)..(36): Xaa is C or S
XGXRDVVMGEYKFKIIQQKDNLYLMSIPEMKTPTXXP

SEQ ID NO: 82078 - protein, 25 aa, Artificial Sequence
  Cyclic GFR-binding peptide
YHYKLIVNNSSDKYLVSIPSLKTPA

SEQ ID NO: 82079 - protein, 25 aa, Artificial Sequence
  Cyclic GFR-binding peptide
TMNEYKFKVVNKNEDLYLISIPEMK

SEQ ID NO: 82080 - protein, 31 aa, Artificial Sequence; identical to SEQ ID NO: 40575
  Cyclic GFR-binding peptide
  MOD_RES (27)..(28): Xaa is C or S

SEQ ID NO: 82081 - protein, 26 aa, Artificial Sequence
  Cyclic GFR-binding peptide
MGRHKRLIIQQKDNYYLMSTASMKTP

SEQ ID NO: 82082 - protein, 38 aa, Artificial Sequence; identical to SEQ ID NO: 5161
  Cyclic GFR-binding peptide
  MOD_RES (1)..(3)..(35)..(36): Xaa is C or S

SEQ ID NO: 82083 - protein, 33 aa, Artificial Sequence; identical to SEQ ID NO: 5162
  Cyclic GFR-binding peptide
  MOD_RES (27)..(28): Xaa is C or S

SEQ ID NO: 82084 - protein, 40 aa, Artificial Sequence; identical to SEQ ID NO: 33483
  Cyclic GFR-binding peptide
  MOD_RES (2)..(34)..(35): Xaa is C or S

SEQ ID NO: 82085 - protein, 26 aa, Artificial Sequence
  Cyclic GFR-binding peptide
IMRYKKLIKPTKGIFYLISIANLDQS

SEQ ID NO: 82086 - protein, 39 aa, Artificial Sequence; identical to SEQ ID NO: 5167
  Cyclic GFR-binding peptide
  MOD_RES (2)..(4)..(36): Xaa is C or S

SEQ ID NO: 82087 - protein, 29 aa, Artificial Sequence
  Cyclic GFR-binding peptide
  MOD_RES (26)..(27): Xaa is C or S
YHYKLVVNNAADKYLISIPSLRAPVXXSA

SEQ ID NO: 82088 - protein, 29 aa, Artificial Sequence
  Cyclic GFR-binding peptide
  MOD_RES (1)..(1): Xaa is C or S
XSEVTMNRHKRLVVNKNEDYYLISTASMK

SEQ ID NO: 82089 - protein, 24 aa, Artificial Sequence
  Cyclic GFR-binding peptide
MDRYKKLVVNNAADFYLISIANLR

SEQ ID NO: 82090 - protein, 39 aa, Artificial Sequence; identical to SEQ ID NO: 40579
  Cyclic GFR-binding peptide
  MOD_RES (1)..(3)..(35)..(36): Xaa is C or S

SEQ ID NO: 82091 - protein, 26 aa, Artificial Sequence
  Cyclic GFR-binding peptide
MEPIKGYVVKDYEDFYLMNIPSLETP

SEQ ID NO: 82092 - protein, 28 aa, Artificial Sequence
  Cyclic GFR-binding peptide
  MOD_RES (2)..(2): Xaa is C or S
GXARVVMNRHKRLIVNSSDDYYLVSTAS

SEQ ID NO: 82093 - protein, 37 aa, Artificial Sequence; identical to SEQ ID NO: 33490
  Cyclic GFR-binding peptide
  MOD_RES (2)..(34)..(35): Xaa is C or S

SEQ ID NO: 82094 - protein, 34 aa, Artificial Sequence; identical to SEQ ID NO: 40582
  Cyclic GFR-binding peptide
  MOD_RES (32)..(33): Xaa is C or S

SEQ ID NO: 82095 - protein, 21 aa, Artificial Sequence
  Cyclic GFR-binding peptide
RHKRLVVNNASDYYLISTASL

SEQ ID NO: 82096 - protein, 26 aa, Artificial Sequence
  Cyclic GFR-binding peptide
  MOD_RES (26)..(26): Xaa is C or S
YHYKLVVNNAADKYLISIPSLRAPVX

SEQ ID NO: 82097 - protein, 39 aa, Artificial Sequence; identical to SEQ ID NO: 5173
  Cyclic GFR-binding peptide
  MOD_RES (1)..(3)..(35)..(36): Xaa is C or S

SEQ ID NO: 82098 - protein, 32 aa, Artificial Sequence; identical to SEQ ID NO: 40588
  Cyclic GFR-binding peptide
  MOD_RES (28)..(29): Xaa is C or S

SEQ ID NO: 82099 - protein, 27 aa, Artificial Sequence
  Cyclic GFR-binding peptide
IMRHKRLVKPKRGVYYLISTASLAQPV

SEQ ID NO: 82100 - protein, 34 aa, Artificial Sequence; identical to SEQ ID NO: 5176
  Cyclic GFR-binding peptide
  MOD_RES (32)..(33): Xaa is C or S

SEQ ID NO: 82101 - protein, 33 aa, Artificial Sequence; identical to SEQ ID NO: 5178
  Cyclic GFR-binding peptide
  MOD_RES (31)..(32): Xaa is C or S

SEQ ID NO: 82102 - protein, 31 aa, Artificial Sequence; identical to SEQ ID NO: 5181
  Cyclic GFR-binding peptide
  MOD_RES (2)..(4): Xaa is C or S

SEQ ID NO: 82103 - protein, 29 aa, Artificial Sequence
  Cyclic GFR-binding peptide
  MOD_RES (2)..(4): Xaa is C or S
SXKXSKVIMPIKGYIKPTKGIFYLINIPS

SEQ ID NO: 82104 - protein, 41 aa, Artificial Sequence; identical to SEQ ID NO: 5182
  Cyclic GFR-binding peptide
  MOD_RES (1)..(3)..(35)..(36): Xaa is C or S

SEQ ID NO: 82105 - protein, 27 aa, Artificial Sequence
  Cyclic GFR-binding peptide
MNRYKKLIVNNSSDFYLVSIANLKTPA

SEQ ID NO: 82106 - protein, 32 aa, Artificial Sequence; identical to SEQ ID NO: 5184
  Cyclic GFR-binding peptide
  MOD_RES (2)..(4): Xaa is C or S

SEQ ID NO: 82107 - protein, 35 aa, Artificial Sequence; identical to SEQ ID NO: 5187
  Cyclic GFR-binding peptide
  MOD_RES (32)..(33): Xaa is C or S

SEQ ID NO: 82108 - protein, 35 aa, Artificial Sequence
  Cyclic GFR-binding peptide
  MOD_RES (1)..(33)..(34): Xaa is C or S
XSEVTMNPIKGYVVNKNEDFYLINIPSMKEPVXXP

SEQ ID NO: 82109 - protein, 33 aa, Artificial Sequence
  Cyclic GFR-binding peptide
  MOD_RES (1)..(3): Xaa is C or S
XGXRDVVMGRHKRLIIQQKDNYYLMSTASMKTP

SEQ ID NO: 82110 - protein, 26 aa, Artificial Sequence
  Cyclic GFR-binding peptide
MYHYKLVKPTRGVKYLISIPSLDQPV

SEQ ID NO: 82111 - protein, 35 aa, Artificial Sequence; identical to SEQ ID NO: 5189
  Cyclic GFR-binding peptide
  MOD_RES (31)..(32): Xaa is C or S

SEQ ID NO: 82112 - protein, 35 aa, Artificial Sequence; identical to SEQ ID NO: 40603
  Cyclic GFR-binding peptide
  MOD_RES (33)..(34): Xaa is C or S

SEQ ID NO: 82113 - protein, 20 aa, Artificial Sequence
  Cyclic GFR-binding peptide
PIKGYVVKENEDFYLMNIPS

SEQ ID NO: 82114 - protein, 24 aa, Artificial Sequence
  Cyclic GFR-binding peptide
VVMNPIKGYIVNSSDDFYLVNIPS

SEQ ID NO: 82115 - protein, 29 aa, Artificial Sequence
  Cyclic GFR-binding peptide
  MOD_RES (29)..(29): Xaa is C or S
VIMPIKGYVKPKRGVFYLINIPSLAQPVX

SEQ ID NO: 82116 - protein, 38 aa, Artificial Sequence
  Cyclic GFR-binding peptide
  MOD_RES (2)..(33)..(34): Xaa is C or S
KXSKVVMPIKGYVKPTRGVFYLINIPSLDQPVXXPSAS

SEQ ID NO: 82117 - protein, 25 aa, Artificial Sequence
  Cyclic GFR-binding peptide
VTMNRHKRLVVNKNEDYYLISTASM

SEQ ID NO: 82118 - protein, 37 aa, Artificial Sequence; identical to SEQ ID NO: 33510
  Cyclic GFR-binding peptide
  MOD_RES (31)..(32): Xaa is C or S

SEQ ID NO: 82119 - protein, 39 aa, Artificial Sequence
  Cyclic GFR-binding peptide
  MOD_RES (2)..(4)..(35)..(36): Xaa is C or S
SXKXSKVVMPIKGYVKPTRGVFYLINIPSLDQPVXXPSA

SEQ ID NO: 82120 - protein, 24 aa, Artificial Sequence
  Cyclic GFR-binding peptide
VIMYHYKLIKPTKGIKYLISIPSL

SEQ ID NO: 82121 - protein, 29 aa, Artificial Sequence
  Cyclic GFR-binding peptide
  MOD_RES (2)..(2): Xaa is C or S
GXEEVIMRYKKLLLVRGNDFYLMSIANTK

SEQ ID NO: 82122 - protein, 30 aa, Artificial Sequence; identical to SEQ ID NO: 5194
  Cyclic GFR-binding peptide
  MOD_RES (27)..(27): Xaa is C or S

SEQ ID NO: 82123 - protein, 26 aa, Artificial Sequence
  Cyclic GFR-binding peptide
DRHKRLVVNNAADYYLISTASLRAPV

SEQ ID NO: 82124 - protein, 27 aa, Artificial Sequence
  Cyclic GFR-binding peptide
  MOD_RES (26)..(27): Xaa is C or S
YHYKLVVNKNEDKYLISIPSMKEPVXX

SEQ ID NO: 82125 - protein, 35 aa, Artificial Sequence; identical to SEQ ID NO: 40618
  Cyclic GFR-binding peptide
  MOD_RES (1)..(3)..(34)..(35): Xaa is C or S

SEQ ID NO: 82126 - protein, 35 aa, Artificial Sequence; identical to SEQ ID NO: 5197
  Cyclic GFR-binding peptide
  MOD_RES (33)..(34): Xaa is C or S

SEQ ID NO: 82127 - protein, 35 aa, Artificial Sequence; identical to SEQ ID NO: 15666
  Cyclic GFR-binding peptide
  MOD_RES (29)..(30): Xaa is C or S

SEQ ID NO: 82128 - protein, 33 aa, Artificial Sequence; identical to SEQ ID NO: 5199
  Cyclic GFR-binding peptide
  MOD_RES (1)..(33): Xaa is C or S

SEQ ID NO: 82129 - protein, 29 aa, Artificial Sequence
  Cyclic GFR-binding peptide
  MOD_RES (26)..(27): Xaa is C or S
PIKGYVKPKRGVFYLINIPSLAQPVXXPA

SEQ ID NO: 82130 - protein, 29 aa, Artificial Sequence
  Cyclic GFR-binding peptide
  MOD_RES (28)..(29): Xaa is C or S
MDPIKGYVVNNASDFYLINIPSLRTPVXX

SEQ ID NO: 82131 - protein, 27 aa, Artificial Sequence
  Cyclic GFR-binding peptide
SMGERHKRLTPVGMDDYYLVSTASLKT

SEQ ID NO: 82132 - protein, 26 aa, Artificial Sequence
  Cyclic GFR-binding peptide
  MOD_RES (26)..(26): Xaa is C or S
EYKFKVVNKNEDLYLISIPEMKEPVX

SEQ ID NO: 82133 - protein, 31 aa, Artificial Sequence; identical to SEQ ID NO: 33520
  Cyclic GFR-binding peptide
  MOD_RES (27)..(27): Xaa is C or S

SEQ ID NO: 82134 - protein, 27 aa, Artificial Sequence
  Cyclic GFR-binding peptide
  MOD_RES (26)..(27): Xaa is C or S
EYKFKIVNNSSDLYLVSIPELKTPAXX

SEQ ID NO: 82135 - protein, 33 aa, Artificial Sequence
  Cyclic GFR-binding peptide
  MOD_RES (32)..(33): Xaa is C or S
SEVVMDEYKFKVVNNASDLYLISIPELRTPVXX

SEQ ID NO: 82136 - protein, 25 aa, Artificial Sequence
  Cyclic GFR-binding peptide
NPIKGYIVNSSDDFYLVNIPSLKTP

SEQ ID NO: 82137 - protein, 37 aa, Artificial Sequence
  Cyclic GFR-binding peptide
  MOD_RES (2)..(33)..(34): Xaa is C or S
KXSRVIMPIKGYVKPKRGVFYLINIPSLAQPVXXPAA

SEQ ID NO: 82138 - protein, 31 aa, Artificial Sequence
  Cyclic GFR-binding peptide
  MOD_RES (26)..(27): Xaa is C or S
RHKRLVVNNAADYYLISTASLRAPVXXSAPA

SEQ ID NO: 82139 - protein, 29 aa, Artificial Sequence
  Cyclic GFR-binding peptide
  MOD_RES (2)..(2): Xaa is C or S
GXEEVIMYHYKLLLVRGNDKYLMSIPSTK

SEQ ID NO: 82140 - protein, 35 aa, Artificial Sequence; identical to SEQ ID NO: 33526
  Cyclic GFR-binding peptide
  MOD_RES (31)..(32): Xaa is C or S

SEQ ID NO: 82141 - protein, 35 aa, Artificial Sequence; identical to SEQ ID NO: 33527
  Cyclic GFR-binding peptide
  MOD_RES (30)..(31): Xaa is C or S

SEQ ID NO: 82142 - protein, 38 aa, Artificial Sequence; identical to SEQ ID NO: 40638
  Cyclic GFR-binding peptide
  MOD_RES (1)..(3)..(35)..(36): Xaa is C or S

SEQ ID NO: 82143 - protein, 30 aa, Artificial Sequence
  Cyclic GFR-binding peptide
RDVVMGRHKRLIIQQKDNYYLMSTASMKTP

SEQ ID NO: 82144 - protein, 25 aa, Artificial Sequence
  Cyclic GFR-binding peptide
MGEYKFKIIQQKDNLYLMSIPEMKT

SEQ ID NO: 82145 - protein, 34 aa, Artificial Sequence
  Cyclic GFR-binding peptide
  MOD_RES (1)..(3)..(34): Xaa is C or S
XGXEEVIMRHKRLLLVRGNDYYLMSTASTKVPAX

SEQ ID NO: 82146 - protein, 31 aa, Artificial Sequence
  Cyclic GFR-binding peptide
ESVAMGRHKRLYTVVGKDYYLISTASLKTPV

SEQ ID NO: 82147 - protein, 21 aa, Artificial Sequence
  Cyclic GFR-binding peptide
EYHYKLVVKDYEDKYLMSIPS

SEQ ID NO: 82148 - protein, 28 aa, Artificial Sequence
  Cyclic GFR-binding peptide
  MOD_RES (2)..(2): Xaa is C or S
KXSKVVMRHKRLVKPTRGVYYLISTASL

SEQ ID NO: 82149 - protein, 39 aa, Artificial Sequence
  Cyclic GFR-binding peptide
  MOD_RES (2)..(4)..(36)..(37): Xaa is C or S
RXAXSEVTMNYHYKLVVNKNEDKYLISIPSMKEPVXXPE

SEQ ID NO: 82150 - protein, 24 aa, Artificial Sequence
  Cyclic GFR-binding peptide
MNPIKGYIVNSSDDFYLVNIPSLQ

SEQ ID NO: 82151 - protein, 33 aa, Artificial Sequence; identical to SEQ ID NO: 5218
  Cyclic GFR-binding peptide
  MOD_RES (30)..(31): Xaa is C or S

SEQ ID NO: 82152 - protein, 40 aa, Artificial Sequence; identical to SEQ ID NO: 5220
  Cyclic GFR-binding peptide
  MOD_RES (1)..(3)..(35)..(36): Xaa is C or S

SEQ ID NO: 82153 - protein, 21 aa, Artificial Sequence
  Cyclic GFR-binding peptide
RHKRLTPVGMDDYYLVSTASL

SEQ ID NO: 82154 - protein, 32 aa, Artificial Sequence; identical to SEQ ID NO: 40657
  Cyclic GFR-binding peptide
  MOD_RES (2)..(4): Xaa is C or S

SEQ ID NO: 82155 - protein, 39 aa, Artificial Sequence; identical to SEQ ID NO: 33540
  Cyclic GFR-binding peptide
  MOD_RES (2)..(4)..(36)..(37): Xaa is C or S

SEQ ID NO: 82156 - protein, 32 aa, Artificial Sequence
  Cyclic GFR-binding peptide
  MOD_RES (30)..(31): Xaa is C or S
VVMGYHYKLIIQQKDNKYLMSIPSMKTPTXXP

SEQ ID NO: 82157 - protein, 42 aa, Artificial Sequence; identical to SEQ ID NO: 15700
  Cyclic GFR-binding peptide
  MOD_RES (2)..(4)..(36)..(37): Xaa is C or S

SEQ ID NO: 82158 - protein, 32 aa, Artificial Sequence; identical to SEQ ID NO: 5225
  Cyclic GFR-binding peptide
  MOD_RES (29)..(30): Xaa is C or S

SEQ ID NO: 82159 - protein, 31 aa, Artificial Sequence; identical to SEQ ID NO: 40663
  Cyclic GFR-binding peptide
  MOD_RES (28)..(29): Xaa is C or S

SEQ ID NO: 82160 - protein, 33 aa, Artificial Sequence; identical to SEQ ID NO: 33542
  Cyclic GFR-binding peptide
  MOD_RES (2)..(2): Xaa is C or S

SEQ ID NO: 82161 - protein, 37 aa, Artificial Sequence; identical to SEQ ID NO: 33544
  Cyclic GFR-binding peptide
  MOD_RES (2)..(4)..(36)..(37): Xaa is C or S

SEQ ID NO: 82162 - protein, 37 aa, Artificial Sequence; identical to SEQ ID NO: 5230
  Cyclic GFR-binding peptide
  MOD_RES (2)..(4)..(35)..(36): Xaa is C or S

SEQ ID NO: 82163 - protein, 32 aa, Artificial Sequence; identical to SEQ ID NO: 33548
  Cyclic GFR-binding peptide
  MOD_RES (1)..(3): Xaa is C or S

SEQ ID NO: 82164 - protein, 28 aa, Artificial Sequence
  Cyclic GFR-binding peptide
EVIMPIKGYLLVRGNDFYLMNIPSTKVP

SEQ ID NO: 82165 - protein, 26 aa, Artificial Sequence
  Cyclic GFR-binding peptide
  MOD_RES (26)..(26): Xaa is C or S
PIKGYVKPKRGVFYLINIPSLAQPVX

SEQ ID NO: 82166 - protein, 28 aa, Artificial Sequence
  Cyclic GFR-binding peptide
  MOD_RES (2)..(2): Xaa is C or S
GXAKVVMNEYKFKIVNNSSDLYLVSIPE

SEQ ID NO: 82167 - protein, 30 aa, Artificial Sequence; identical to SEQ ID NO: 5234
  Cyclic GFR-binding peptide
  MOD_RES (1)..(1): Xaa is C or S

SEQ ID NO: 82168 - protein, 30 aa, Artificial Sequence; identical to SEQ ID NO: 5237
  Cyclic GFR-binding peptide
  MOD_RES (29)..(30): Xaa is C or S

SEQ ID NO: 82169 - protein, 30 aa, Artificial Sequence; identical to SEQ ID NO: 5238
  Cyclic GFR-binding peptide

SEQ ID NO: 82170 - protein, 36 aa, Artificial Sequence; identical to SEQ ID NO: 40684
  Cyclic GFR-binding peptide
  MOD_RES (1)..(33)..(34): Xaa is C or S

SEQ ID NO: 82171 - protein, 22 aa, Artificial Sequence
  Cyclic GFR-binding peptide
DRYKKLVVKENEDFYLMSIANL

SEQ ID NO: 82172 - protein, 23 aa, Artificial Sequence
  Cyclic GFR-binding peptide
YHYKLVVNNASDKYLISIPSLRT

SEQ ID NO: 82173 - protein, 29 aa, Artificial Sequence
  Cyclic GFR-binding peptide
  MOD_RES (29)..(29): Xaa is C or S
VMGRYKKLIIQQKDNFYLMSIANMKTPTX

SEQ ID NO: 82174 - protein, 38 aa, Artificial Sequence
  Cyclic GFR-binding peptide
  MOD_RES (32)..(33): Xaa is C or S
RDVVMGEYKFKIIQQKDNLYLMSIPEMKTPTXXPGASG

SEQ ID NO: 82175 - protein, 23 aa, Artificial Sequence
  Cyclic GFR-binding peptide
VVMPIKGYVKPTRGVFYLINIPS

SEQ ID NO: 82176 - protein, 32 aa, Artificial Sequence; identical to SEQ ID NO: 5243
  Cyclic GFR-binding peptide
  MOD_RES (29)..(30): Xaa is C or S

SEQ ID NO: 82177 - protein, 22 aa, Artificial Sequence
  Cyclic GFR-binding peptide
PIKGYVVNKNEDFYLINIPSMK

SEQ ID NO: 82178 - protein, 34 aa, Artificial Sequence; identical to SEQ ID NO: 33556
  Cyclic GFR-binding peptide
  MOD_RES (2)..(33)..(34): Xaa is C or S

SEQ ID NO: 82179 - protein, 32 aa, Artificial Sequence; identical to SEQ ID NO: 40690
  Cyclic GFR-binding peptide
  MOD_RES (31)..(32): Xaa is C or S

SEQ ID NO: 82180 - protein, 29 aa, Artificial Sequence
  Cyclic GFR-binding peptide
  MOD_RES (27)..(28): Xaa is C or S
NPIKGYIVNNSSDFYLVNIPSLKTPAXXA

SEQ ID NO: 82181 - protein, 30 aa, Artificial Sequence; identical to SEQ ID NO: 5246
  Cyclic GFR-binding peptide
  MOD_RES (29)..(30): Xaa is C or S

SEQ ID NO: 82182 - protein, 28 aa, Artificial Sequence
  Cyclic GFR-binding peptide
VIMPIKGYLLVRGNDFYLMNIPSTKVPA

SEQ ID NO: 82183 - protein, 30 aa, Artificial Sequence; identical to SEQ ID NO: 40696
  Cyclic GFR-binding peptide
  MOD_RES (29)..(30): Xaa is C or S

SEQ ID NO: 82184 - protein, 29 aa, Artificial Sequence
  Cyclic GFR-binding peptide
EVVMDRYKKLVVKENEDFYLMSIANLETP

SEQ ID NO: 82185 - protein, 32 aa, Artificial Sequence; identical to SEQ ID NO: 33567
  Cyclic GFR-binding peptide
  MOD_RES (28)..(29): Xaa is C or S

SEQ ID NO: 82186 - protein, 35 aa, Artificial Sequence; identical to SEQ ID NO: 33568
  Cyclic GFR-binding peptide
  MOD_RES (2)..(4)..(35): Xaa is C or S

SEQ ID NO: 82187 - protein, 34 aa, Artificial Sequence
  Cyclic GFR-binding peptide
  MOD_RES (2)..(4): Xaa is C or S
LXGXEEVIMPIKGYLLVRGNDFYLMNIPSTKVPA

SEQ ID NO: 82188 - protein, 38 aa, Artificial Sequence; identical to SEQ ID NO: 5256
  Cyclic GFR-binding peptide
  MOD_RES (2)..(4)..(37)..(38): Xaa is C or S

SEQ ID NO: 82189 - protein, 33 aa, Artificial Sequence; identical to SEQ ID NO: 33572
  Cyclic GFR-binding peptide
  MOD_RES (27)..(28): Xaa is C or S

SEQ ID NO: 82190 - protein, 31 aa, Artificial Sequence
  Cyclic GFR-binding peptide
  MOD_RES (26)..(27): Xaa is C or S
RHKRLLLVRGNDYYLMSTASTKVPAXXTSPV

SEQ ID NO: 82191 - protein, 26 aa, Artificial Sequence
  Cyclic GFR-binding peptide
VMEEYKFKVVKDYEDLYLMSIPELET

SEQ ID NO: 82192 - protein, 33 aa, Artificial Sequence; identical to SEQ ID NO: 33574
  Cyclic GFR-binding peptide
  MOD_RES (2)..(4): Xaa is C or S

SEQ ID NO: 82193 - protein, 34 aa, Artificial Sequence; identical to SEQ ID NO: 5260
  Cyclic GFR-binding peptide
  MOD_RES (1)..(32)..(33): Xaa is C or S

SEQ ID NO: 82194 - protein, 30 aa, Artificial Sequence
  Cyclic GFR-binding peptide
  MOD_RES (29)..(30): Xaa is C or S
VIMRHKRLLLVRGNDYYLMSTASTKVPAXX

SEQ ID NO: 82195 - protein, 40 aa, Artificial Sequence; identical to SEQ ID NO: 33580
  Cyclic GFR-binding peptide
  MOD_RES (2)..(35)..(36): Xaa is C or S

SEQ ID NO: 82196 - protein, 24 aa, Artificial Sequence
  Cyclic GFR-binding peptide
PIKGYVKPKRGVFYLINIPSLAQP

SEQ ID NO: 82197 - protein, 30 aa, Artificial Sequence; identical to SEQ ID NO: 5265
  Cyclic GFR-binding peptide
  MOD_RES (28)..(29): Xaa is C or S

SEQ ID NO: 82198 - protein, 23 aa, Artificial Sequence
  Cyclic GFR-binding peptide
YHYKLIVNNSSDKYLVSIPSLKT

SEQ ID NO: 82199 - protein, 33 aa, Artificial Sequence
  Cyclic GFR-binding peptide
  MOD_RES (27)..(28): Xaa is C or S
GYHYKLIIQQKDNKYLMSIPSMKTPTXXPGASG

SEQ ID NO: 82200 - protein, 34 aa, Artificial Sequence; identical to SEQ ID NO: 33583
  Cyclic GFR-binding peptide
  MOD_RES (29)..(30): Xaa is C or S

SEQ ID NO: 82201 - protein, 24 aa, Artificial Sequence
  Cyclic GFR-binding peptide
MNRYKKLIVNNSSDFYLVSIANLK

SEQ ID NO: 82202 - protein, 33 aa, Artificial Sequence; identical to SEQ ID NO: 5273
  Cyclic GFR-binding peptide
  MOD_RES (1)..(33): Xaa is C or S

SEQ ID NO: 82203 - protein, 29 aa, Artificial Sequence
  Cyclic GFR-binding peptide
  MOD_RES (2)..(2): Xaa is C or S
GXGEVVMERYKKLVVKDYEDFYLMSIANL

SEQ ID NO: 82204 - protein, 30 aa, Artificial Sequence; identical to SEQ ID NO: 5277
  Cyclic GFR-binding peptide
  MOD_RES (1)..(1): Xaa is C or S

SEQ ID NO: 82205 - protein, 25 aa, Artificial Sequence
  Cyclic GFR-binding peptide
IMEYKFKIKPTKGILYLISIPELDQ

SEQ ID NO: 82206 - protein, 35 aa, Artificial Sequence; identical to SEQ ID NO: 40722
  Cyclic GFR-binding peptide
  MOD_RES (2)..(34)..(35): Xaa is C or S

SEQ ID NO: 82207 - protein, 26 aa, Artificial Sequence
  Cyclic GFR-binding peptide
VVMNPIKGYIVNSSDDFYLVNIPSLK

SEQ ID NO: 82208 - protein, 31 aa, Artificial Sequence
  Cyclic GFR-binding peptide
  MOD_RES (29)..(30): Xaa is C or S
VMDYHYKLVVNNASDKYLISIPSLRTPVXXT

SEQ ID NO: 82209 - protein, 27 aa, Artificial Sequence
  Cyclic GFR-binding peptide
  MOD_RES (26)..(27): Xaa is C or S
EYKFKIIQQKDNLYLMSIPEMKTPTXX

SEQ ID NO: 82210 - protein, 25 aa, Artificial Sequence
  Cyclic GFR-binding peptide
EPIKGYTPVGMDDFYLVNIPSLKTP

SEQ ID NO: 82211 - protein, 30 aa, Artificial Sequence
  Cyclic GFR-binding peptide
  MOD_RES (28)..(29): Xaa is C or S
MGYHYKLIIQQKDNKYLMSIPSMKTPTXXP

SEQ ID NO: 82212 - protein, 30 aa, Artificial Sequence; identical to SEQ ID NO: 33595
  Cyclic GFR-binding peptide
  MOD_RES (1)..(3): Xaa is C or S

SEQ ID NO: 82213 - protein, 34 aa, Artificial Sequence; identical to SEQ ID NO: 5291
  Cyclic GFR-binding peptide
  MOD_RES (2)..(34): Xaa is C or S

SEQ ID NO: 82214 - protein, 33 aa, Artificial Sequence; identical to SEQ ID NO: 5292
  Cyclic GFR-binding peptide
  MOD_RES (1)..(32)..(33): Xaa is C or S

SEQ ID NO: 82215 - protein, 27 aa, Artificial Sequence
  Cyclic GFR-binding peptide
ARVVMNEYKFKIVNSSDDLYLVSIPEL

SEQ ID NO: 82216 - protein, 36 aa, Artificial Sequence; identical to SEQ ID NO: 40738
  Cyclic GFR-binding peptide
  MOD_RES (2)..(4)..(36): Xaa is C or S

SEQ ID NO: 82217 - protein, 36 aa, Artificial Sequence; identical to SEQ ID NO: 5299
  Cyclic GFR-binding peptide
  MOD_RES (32)..(33): Xaa is C or S

SEQ ID NO: 82218 - protein, 39 aa, Artificial Sequence; identical to SEQ ID NO: 33606
  Cyclic GFR-binding peptide
  MOD_RES (2)..(34)..(35): Xaa is C or S

SEQ ID NO: 82219 - protein, 30 aa, Artificial Sequence
  Cyclic GFR-binding peptide
EEVIMEYKFKLLVRGNDLYLMSIPETKVPA

SEQ ID NO: 82220 - protein, 31 aa, Artificial Sequence; identical to SEQ ID NO: 33608
  Cyclic GFR-binding peptide
  MOD_RES (2)..(2): Xaa is C or S

SEQ ID NO: 82221 - protein, 32 aa, Artificial Sequence
  Cyclic GFR-binding peptide
  MOD_RES (32)..(32): Xaa is C or S
SEVTMNRHKRLVVNKNEDYYLISTASMKEPVX

SEQ ID NO: 82222 - protein, 34 aa, Artificial Sequence; identical to SEQ ID NO: 33613
  Cyclic GFR-binding peptide
  MOD_RES (31)..(32): Xaa is C or S

SEQ ID NO: 82223 - protein, 28 aa, Artificial Sequence
  Cyclic GFR-binding peptide
TMNRHKRLVVNKNEDYYLISTASMKEPV

SEQ ID NO: 82224 - protein, 33 aa, Artificial Sequence
  Cyclic GFR-binding peptide
  MOD_RES (2)..(4): Xaa is C or S
RXAXSEVTMNRYKKLVVNKNEDFYLISIANMKE

SEQ ID NO: 82225 - protein, 25 aa, Artificial Sequence
  Cyclic GFR-binding peptide
YHYKLVVNNAADKYLISIPSLRAPV

SEQ ID NO: 82226 - protein, 34 aa, Artificial Sequence; identical to SEQ ID NO: 40747
  Cyclic GFR-binding peptide
  MOD_RES (29)..(30): Xaa is C or S

SEQ ID NO: 82227 - protein, 33 aa, Artificial Sequence
  Cyclic GFR-binding peptide
  MOD_RES (28)..(29): Xaa is C or S
MGEYKFKIIQQKDNLYLMSIPEMKTPTXXPGAS

SEQ ID NO: 82228 - protein, 22 aa, Artificial Sequence
  Cyclic GFR-binding peptide
EEYKFKTPVGMDDLYLVSIPEL

SEQ ID NO: 82229 - protein, 35 aa, Artificial Sequence
  Cyclic GFR-binding peptide
  MOD_RES (31)..(32): Xaa is C or S
EEVIMEYKFKLLVRGNDLYLMSIPETKVPAXXTSP

SEQ ID NO: 82230 - protein, 29 aa, Artificial Sequence
  Cyclic GFR-binding peptide
SEVVMDRHKRLVVNNASDYYLISTASLRT

SEQ ID NO: 82231 - protein, 24 aa, Artificial Sequence
  Cyclic GFR-binding peptide
VTMNYHYKLVVNKNEDKYLISIPS

SEQ ID NO: 82232 - protein, 27 aa, Artificial Sequence
  Cyclic GFR-binding peptide
VVMDRHKRLVVNNASDYYLISTASLRT

SEQ ID NO: 82233 - protein, 35 aa, Artificial Sequence; identical to SEQ ID NO: 33622
  Cyclic GFR-binding peptide
  MOD_RES (30)..(31): Xaa is C or S

SEQ ID NO: 82234 - protein, 31 aa, Artificial Sequence; identical to SEQ ID NO: 5312
  Cyclic GFR-binding peptide
  MOD_RES (31)..(31): Xaa is C or S

SEQ ID NO: 82235 - protein, 38 aa, Artificial Sequence; identical to SEQ ID NO: 40757
  Cyclic GFR-binding peptide
  MOD_RES (2)..(34)..(35): Xaa is C or S

SEQ ID NO: 82236 - protein, 27 aa, Artificial Sequence
  Cyclic GFR-binding peptide
EEVIMPIKGYLLVRGNDFYLMNIPSTK

SEQ ID NO: 82237 - protein, 36 aa, Artificial Sequence; identical to SEQ ID NO: 5317
  Cyclic GFR-binding peptide
  MOD_RES (1)..(33): Xaa is C or S

SEQ ID NO: 82238 - protein, 28 aa, Artificial Sequence
  Cyclic GFR-binding peptide
  MOD_RES (1)..(1): Xaa is C or S
XEEVIMYHYKLLLVRGNDKYLMSIPSTK

SEQ ID NO: 82239 - protein, 24 aa, Artificial Sequence
  Cyclic GFR-binding peptide
IMYHYKLVKPKRGVKYLISIPSLA

SEQ ID NO: 82240 - protein, 31 aa, Artificial Sequence
  Cyclic GFR-binding peptide
  MOD_RES (2)..(2): Xaa is C or S
GXESVAMGRHKRLYTVVGKDYYLISTASLKT

SEQ ID NO: 82241 - protein, 25 aa, Artificial Sequence
  Cyclic GFR-binding peptide
PIKGYVVNNAADFYLINIPSLRAPV

SEQ ID NO: 82242 - protein, 40 aa, Artificial Sequence; identical to SEQ ID NO: 40770
  Cyclic GFR-binding peptide
  MOD_RES (2)..(34)..(35): Xaa is C or S

SEQ ID NO: 82243 - protein, 31 aa, Artificial Sequence; identical to SEQ ID NO: 33634
  Cyclic GFR-binding peptide
  MOD_RES (2)..(4): Xaa is C or S

SEQ ID NO: 82244 - protein, 25 aa, Artificial Sequence
  Cyclic GFR-binding peptide
MNEYKFKIVNSSDDLYLVSIPELQT

SEQ ID NO: 82245 - protein, 34 aa, Artificial Sequence; identical to SEQ ID NO: 5324
  Cyclic GFR-binding peptide
  MOD_RES (28)..(29): Xaa is C or S

SEQ ID NO: 82246 - protein, 32 aa, Artificial Sequence; identical to SEQ ID NO: 5328
  Cyclic GFR-binding peptide
  MOD_RES (1)..(3): Xaa is C or S

SEQ ID NO: 82247 - protein, 28 aa, Artificial Sequence
  Cyclic GFR-binding peptide
  MOD_RES (2)..(2): Xaa is C or S
GXGEVVMDYHYKLVVKENEDKYLMSIPS

SEQ ID NO: 82248 - protein, 34 aa, Artificial Sequence; identical to SEQ ID NO: 5333
  Cyclic GFR-binding peptide
  MOD_RES (2)..(34): Xaa is C or S

SEQ ID NO: 82249 - protein, 29 aa, Artificial Sequence
  Cyclic GFR-binding peptide
  MOD_RES (29)..(29): Xaa is C or S
VMERHKRLVVKDYEDYYLMSTASLETPVX

SEQ ID NO: 82250 - protein, 36 aa, Artificial Sequence; identical to SEQ ID NO: 33642
  Cyclic GFR-binding peptide
  MOD_RES (31)..(32): Xaa is C or S

SEQ ID NO: 82251 - protein, 28 aa, Artificial Sequence
  Cyclic GFR-binding peptide
  MOD_RES (28)..(28): Xaa is C or S
MDPIKGYVVKENEDFYLMNIPSLETPVX

SEQ ID NO: 82252 - protein, 36 aa, Artificial Sequence; identical to SEQ ID NO: 5336
  Cyclic GFR-binding peptide
  MOD_RES (2)..(4)..(35)..(36): Xaa is C or S

SEQ ID NO: 82253 - protein, 38 aa, Artificial Sequence; identical to SEQ ID NO: 33644
  Cyclic GFR-binding peptide
  MOD_RES (1)..(33)..(34): Xaa is C or S

SEQ ID NO: 82254 - protein, 28 aa, Artificial Sequence
  Cyclic GFR-binding peptide
VMDEYKFKVVNNAADLYLISIPELRAPV

SEQ ID NO: 82255 - protein, 27 aa, Artificial Sequence
  Cyclic GFR-binding peptide
EVVMDYHYKLVVNNASDKYLISIPSLR

SEQ ID NO: 82256 - protein, 34 aa, Artificial Sequence; identical to SEQ ID NO: 5339
  Cyclic GFR-binding peptide
  MOD_RES (30)..(31): Xaa is C or S

SEQ ID NO: 82257 - protein, 30 aa, Artificial Sequence; identical to SEQ ID NO: 33648
  Cyclic GFR-binding peptide
  MOD_RES (2)..(4): Xaa is C or S

SEQ ID NO: 82258 - protein, 37 aa, Artificial Sequence; identical to SEQ ID NO: 40788
  Cyclic GFR-binding peptide
  MOD_RES (33)..(34): Xaa is C or S

SEQ ID NO: 82259 - protein, 33 aa, Artificial Sequence
  Cyclic GFR-binding peptide
  MOD_RES (31)..(32): Xaa is C or S
SRVIMPIKGYVKPKRGVFYLINIPSLAQPVXXP

SEQ ID NO: 82260 - protein, 35 aa, Artificial Sequence; identical to SEQ ID NO: 40789
  Cyclic GFR-binding peptide
  MOD_RES (30)..(31): Xaa is C or S

SEQ ID NO: 82261 - protein, 32 aa, Artificial Sequence; identical to SEQ ID NO: 5345
  Cyclic GFR-binding peptide
  MOD_RES (1)..(3): Xaa is C or S

SEQ ID NO: 82262 - protein, 30 aa, Artificial Sequence; identical to SEQ ID NO: 5346
  Cyclic GFR-binding peptide
  MOD_RES (30)..(30): Xaa is C or S

SEQ ID NO: 82263 - protein, 34 aa, Artificial Sequence; identical to SEQ ID NO: 5347
  Cyclic GFR-binding peptide
  MOD_RES (1)..(3): Xaa is C or S

SEQ ID NO: 82264 - protein, 23 aa, Artificial Sequence
  Cyclic GFR-binding peptide
EYKFKTPVGMDDLYLVSIPELKT

SEQ ID NO: 82265 - protein, 34 aa, Artificial Sequence; identical to SEQ ID NO: 33658
  Cyclic GFR-binding peptide
  MOD_RES (1)..(3): Xaa is C or S

SEQ ID NO: 82266 - protein, 33 aa, Artificial Sequence; identical to SEQ ID NO: 5356
  Cyclic GFR-binding peptide
  MOD_RES (29)..(30): Xaa is C or S

SEQ ID NO: 82267 - protein, 29 aa, Artificial Sequence
  Cyclic GFR-binding peptide
  MOD_RES (26)..(27): Xaa is C or S
EYKFKVVKENEDLYLMSIPELETPVXXAK

SEQ ID NO: 82268 - protein, 30 aa, Artificial Sequence; identical to SEQ ID NO: 40802
  Cyclic GFR-binding peptide

SEQ ID NO: 82269 - protein, 30 aa, Artificial Sequence; identical to SEQ ID NO: 40804
  Cyclic GFR-binding peptide
  MOD_RES (2)..(4): Xaa is C or S

SEQ ID NO: 82270 - protein, 31 aa, Artificial Sequence; identical to SEQ ID NO: 33664
  Cyclic GFR-binding peptide
  MOD_RES (29)..(30): Xaa is C or S

SEQ ID NO: 82271 - protein, 37 aa, Artificial Sequence; identical to SEQ ID NO: 40805
  Cyclic GFR-binding peptide
  MOD_RES (1)..(34)..(35): Xaa is C or S

SEQ ID NO: 82272 - protein, 29 aa, Artificial Sequence
  Cyclic GFR-binding peptide
EAVSMGERHKRLTPVGMDDYYLVSTASLK

SEQ ID NO: 82273 - protein, 33 aa, Artificial Sequence; identical to SEQ ID NO: 5359
  Cyclic GFR-binding peptide
  MOD_RES (2)..(4): Xaa is C or S

SEQ ID NO: 82274 - protein, 37 aa, Artificial Sequence
  Cyclic GFR-binding peptide
  MOD_RES (1)..(33)..(34): Xaa is C or S
XSEVTMNEYKFKVVNKNEDLYLISIPEMKEPVXXPEP

SEQ ID NO: 82275 - protein, 30 aa, Artificial Sequence
  Cyclic GFR-binding peptide
  MOD_RES (29)..(30): Xaa is C or S
TMNRHKRLVVNKNEDYYLISTASMKEPVXX

SEQ ID NO: 82276 - protein, 26 aa, Artificial Sequence
  Cyclic GFR-binding peptide
  MOD_RES (26)..(26): Xaa is C or S
YHYKLIVNNSSDKYLVSIPSLKTPAX

SEQ ID NO: 82277 - protein, 31 aa, Artificial Sequence; identical to SEQ ID NO: 5363
  Cyclic GFR-binding peptide
  MOD_RES (1)..(3): Xaa is C or S

SEQ ID NO: 82278 - protein, 33 aa, Artificial Sequence; identical to SEQ ID NO: 5364
  Cyclic GFR-binding peptide
  MOD_RES (28)..(29): Xaa is C or S

SEQ ID NO: 82279 - protein, 42 aa, Artificial Sequence
  Cyclic GFR-binding peptide
  MOD_RES (2)..(4)..(36)..(37): Xaa is C or S
RXAXSEVTMNPIKGYVVNKNEDFYLINIPSMKEPVXXPEPIG

SEQ ID NO: 82280 - protein, 37 aa, Artificial Sequence; identical to SEQ ID NO: 5366
  Cyclic GFR-binding peptide
  MOD_RES (1)..(33)..(34): Xaa is C or S

SEQ ID NO: 82281 - protein, 32 aa, Artificial Sequence; identical to SEQ ID NO: 33675
  Cyclic GFR-binding peptide
  MOD_RES (2)..(4): Xaa is C or S

SEQ ID NO: 82282 - protein, 26 aa, Artificial Sequence
  Cyclic GFR-binding peptide
MNRHKRLIVNSSDDYYLVSTASLKTP

SEQ ID NO: 82283 - protein, 28 aa, Artificial Sequence
  Cyclic GFR-binding peptide
SEVVMDRHKRLVVNNASDYYLISTASLR

SEQ ID NO: 82284 - protein, 32 aa, Artificial Sequence; identical to SEQ ID NO: 5368
  Cyclic GFR-binding peptide
  MOD_RES (1)..(3): Xaa is C or S

SEQ ID NO: 82285 - protein, 30 aa, Artificial Sequence; identical to SEQ ID NO: 5370
  Cyclic GFR-binding peptide
  MOD_RES (2)..(2): Xaa is C or S

SEQ ID NO: 82286 - protein, 36 aa, Artificial Sequence; identical to SEQ ID NO: 33679
  Cyclic GFR-binding peptide
  MOD_RES (1)..(33)..(34): Xaa is C or S

SEQ ID NO: 82287 - protein, 30 aa, Artificial Sequence; identical to SEQ ID NO: 5371
  Cyclic GFR-binding peptide
  MOD_RES (26)..(27): Xaa is C or S

SEQ ID NO: 82288 - protein, 22 aa, Artificial Sequence
  Cyclic GFR-binding peptide
RHKRLIVNSSDDYYLVSTASLQ

SEQ ID NO: 82289 - protein, 35 aa, Artificial Sequence; identical to SEQ ID NO: 5375
  Cyclic GFR-binding peptide
  MOD_RES (2)..(4): Xaa is C or S

SEQ ID NO: 82290 - protein, 34 aa, Artificial Sequence; identical to SEQ ID NO: 5376
  Cyclic GFR-binding peptide
  MOD_RES (32)..(32): Xaa is C or S

SEQ ID NO: 82291 - protein, 33 aa, Artificial Sequence; identical to SEQ ID NO: 33686
  Cyclic GFR-binding peptide
  MOD_RES (1)..(33): Xaa is C or S

SEQ ID NO: 82292 - protein, 32 aa, Artificial Sequence; identical to SEQ ID NO: 5380
  Cyclic GFR-binding peptide
  MOD_RES (31)..(32): Xaa is C or S

SEQ ID NO: 82293 - protein, 24 aa, Artificial Sequence
  Cyclic GFR-binding peptide
VVMGRYKKLIIQQKDNFYLMSIAN

SEQ ID NO: 82294 - protein, 32 aa, Artificial Sequence; identical to SEQ ID NO: 33688
  Cyclic GFR-binding peptide
  MOD_RES (30)..(31): Xaa is C or S

SEQ ID NO: 82295 - protein, 35 aa, Artificial Sequence; identical to SEQ ID NO: 5382
  Cyclic GFR-binding peptide
  MOD_RES (32)..(32): Xaa is C or S

SEQ ID NO: 82296 - protein, 31 aa, Artificial Sequence; identical to SEQ ID NO: 5384
  Cyclic GFR-binding peptide
  MOD_RES (26)..(27): Xaa is C or S

SEQ ID NO: 82297 - protein, 31 aa, Artificial Sequence; identical to SEQ ID NO: 5387
  Cyclic GFR-binding peptide
  MOD_RES (28)..(29): Xaa is C or S

SEQ ID NO: 82298 - protein, 39 aa, Artificial Sequence; identical to SEQ ID NO: 5389
  Cyclic GFR-binding peptide
  MOD_RES (1)..(3)..(36)..(37): Xaa is C or S

SEQ ID NO: 82299 - protein, 38 aa, Artificial Sequence; identical to SEQ ID NO: 33695
  Cyclic GFR-binding peptide
  MOD_RES (2)..(35)..(36): Xaa is C or S

SEQ ID NO: 82300 - protein, 30 aa, Artificial Sequence
  Cyclic GFR-binding peptide
EVTMNRHKRLVVNKNEDYYLISTASMKEPV

SEQ ID NO: 82301 - protein, 35 aa, Artificial Sequence; identical to SEQ ID NO: 40836
  Cyclic GFR-binding peptide
  MOD_RES (2)..(34)..(35): Xaa is C or S

SEQ ID NO: 82302 - protein, 38 aa, Artificial Sequence
  Cyclic GFR-binding peptide
  MOD_RES (1)..(3)..(34)..(35): Xaa is C or S
XGXEEVIMEYKFKLLVRGNDLYLMSIPETKVPAXXTSP

SEQ ID NO: 82303 - protein, 31 aa, Artificial Sequence; identical to SEQ ID NO: 33701
  Cyclic GFR-binding peptide
  MOD_RES (31)..(31): Xaa is C or S

SEQ ID NO: 82304 - protein, 23 aa, Artificial Sequence
  Cyclic GFR-binding peptide
GRHKRLYTVVGKDYYLISTASLK

SEQ ID NO: 82305 - protein, 22 aa, Artificial Sequence
  Cyclic GFR-binding peptide
NEYKFKIVNSSDDLYLVSIPEL

SEQ ID NO: 82306 - protein, 24 aa, Artificial Sequence
  Cyclic GFR-binding peptide
PIKGYIVNSSDDFYLVNIPSLQTP

SEQ ID NO: 82307 - protein, 29 aa, Artificial Sequence
  Cyclic GFR-binding peptide
  MOD_RES (1)..(3): Xaa is C or S
XKXSKVVMEYKFKVKPTRGVLYLISIPEL

SEQ ID NO: 82308 - protein, 33 aa, Artificial Sequence; identical to SEQ ID NO: 33707
  Cyclic GFR-binding peptide
  MOD_RES (1)..(3): Xaa is C or S

SEQ ID NO: 82309 - protein, 31 aa, Artificial Sequence; identical to SEQ ID NO: 40855
  Cyclic GFR-binding peptide
  MOD_RES (27)..(28): Xaa is C or S

SEQ ID NO: 82310 - protein, 32 aa, Artificial Sequence; identical to SEQ ID NO: 5403
  Cyclic GFR-binding peptide
  MOD_RES (32)..(32): Xaa is C or S

SEQ ID NO: 82311 - protein, 21 aa, Artificial Sequence
  Cyclic GFR-binding peptide
PIKGYVVNNASDFYLINIPSL

SEQ ID NO: 82312 - protein, 24 aa, Artificial Sequence
  Cyclic GFR-binding peptide
VTMNPIKGYVVNKNEDFYLINIPS

SEQ ID NO: 82313 - protein, 24 aa, Artificial Sequence
  Cyclic GFR-binding peptide
VVMNYHYKLIVNSSDDKYLVSIPS

SEQ ID NO: 82314 - protein, 35 aa, Artificial Sequence; identical to SEQ ID NO: 5410
  Cyclic GFR-binding peptide
  MOD_RES (2)..(4): Xaa is C or S

SEQ ID NO: 82315 - protein, 21 aa, Artificial Sequence
  Cyclic GFR-binding peptide
MEYKFKVKPTRGVLYLISIPE

SEQ ID NO: 82316 - protein, 29 aa, Artificial Sequence
  Cyclic GFR-binding peptide
GEVVMERHKRLVVKDYEDYYLMSTASLET

SEQ ID NO: 82317 - protein, 34 aa, Artificial Sequence; identical to SEQ ID NO: 40862
  Cyclic GFR-binding peptide
  MOD_RES (2)..(34): Xaa is C or S

SEQ ID NO: 82318 - protein, 29 aa, Artificial Sequence
  Cyclic GFR-binding peptide
  MOD_RES (28)..(28): Xaa is C or S
MNYHYKLIVNSSDDKYLVSIPSLKTPAXT

SEQ ID NO: 82319 - protein, 24 aa, Artificial Sequence
  Cyclic GFR-binding peptide
VVMDEYKFKVVNNAADLYLISIPE

SEQ ID NO: 82320 - protein, 25 aa, Artificial Sequence
  Cyclic GFR-binding peptide
VIMRYKKLIKPTKGIFYLISIANLD

SEQ ID NO: 82321 - protein, 28 aa, Artificial Sequence
  Cyclic GFR-binding peptide
VVMDPIKGYVVNNAADFYLINIPSLRAP

SEQ ID NO: 82322 - protein, 28 aa, Artificial Sequence
  Cyclic GFR-binding peptide
  MOD_RES (2)..(2): Xaa is C or S
GXSEVVMDEYKFKVVNNASDLYLISIPE

SEQ ID NO: 82323 - protein, 30 aa, Artificial Sequence; identical to SEQ ID NO: 40872
  Cyclic GFR-binding peptide

SEQ ID NO: 82324 - protein, 26 aa, Artificial Sequence
  Cyclic GFR-binding peptide
VMRYKKLVKPTRGVFYLISIANLDQP

SEQ ID NO: 82325 - protein, 25 aa, Artificial Sequence
  Cyclic GFR-binding peptide
EEVIMEYKFKLLVRGNDLYLMSIPE

SEQ ID NO: 82326 - protein, 39 aa, Artificial Sequence; identical to SEQ ID NO: 33731
  Cyclic GFR-binding peptide
  MOD_RES (2)..(4)..(36)..(37): Xaa is C or S

SEQ ID NO: 82327 - protein, 32 aa, Artificial Sequence
  Cyclic GFR-binding peptide
  MOD_RES (2)..(2): Xaa is C or S
GXEEVIMYHYKLLLVRGNDKYLMSIPSTKVPA

SEQ ID NO: 82328 - protein, 37 aa, Artificial Sequence
  Cyclic GFR-binding peptide
  MOD_RES (1)..(3)..(35)..(36): Xaa is C or S
XGXRDVVMGYHYKLIIQQKDNKYLMSIPSMKTPTXXP

SEQ ID NO: 82329 - protein, 28 aa, Artificial Sequence
  Cyclic GFR-binding peptide
  MOD_RES (26)..(27): Xaa is C or S
RYKKLIVNNSSDFYLVSIANLKTPAXXA

SEQ ID NO: 82330 - protein, 34 aa, Artificial Sequence; identical to SEQ ID NO: 33736
  Cyclic GFR-binding peptide
  MOD_RES (1)..(3): Xaa is C or S

SEQ ID NO: 82331 - protein, 30 aa, Artificial Sequence
  Cyclic GFR-binding peptide
  MOD_RES (26)..(27): Xaa is C or S
EYKFKVVNKNEDLYLISIPEMKEPVXXPEP

SEQ ID NO: 82332 - protein, 29 aa, Artificial Sequence
  Cyclic GFR-binding peptide
  MOD_RES (29)..(29): Xaa is C or S
VMNRYKKLIVNSSDDFYLVSIANLKTPAX

SEQ ID NO: 82333 - protein, 33 aa, Artificial Sequence; identical to SEQ ID NO: 5432
  Cyclic GFR-binding peptide
  MOD_RES (1)..(33): Xaa is C or S

SEQ ID NO: 82334 - protein, 33 aa, Artificial Sequence; identical to SEQ ID NO: 33742
  Cyclic GFR-binding peptide
  MOD_RES (1)..(3): Xaa is C or S

SEQ ID NO: 82335 - protein, 28 aa, Artificial Sequence
  Cyclic GFR-binding peptide
  MOD_RES (26)..(27): Xaa is C or S
RYKKLVKPTRGVFYLISIANLDQPVXXP

SEQ ID NO: 82336 - protein, 34 aa, Artificial Sequence; identical to SEQ ID NO: 5435
  Cyclic GFR-binding peptide
  MOD_RES (2)..(4): Xaa is C or S

SEQ ID NO: 82337 - protein, 31 aa, Artificial Sequence; identical to SEQ ID NO: 33747
  Cyclic GFR-binding peptide
  MOD_RES (26)..(27): Xaa is C or S

SEQ ID NO: 82338 - protein, 27 aa, Artificial Sequence
  Cyclic GFR-binding peptide
ARVVMNYHYKLIVNSSDDKYLVSIPSL

SEQ ID NO: 82339 - protein, 33 aa, Artificial Sequence; identical to SEQ ID NO: 33749
  Cyclic GFR-binding peptide
  MOD_RES (2)..(4): Xaa is C or S

SEQ ID NO: 82340 - protein, 34 aa, Artificial Sequence; identical to SEQ ID NO: 33750
  Cyclic GFR-binding peptide
  MOD_RES (29)..(30): Xaa is C or S

SEQ ID NO: 82341 - protein, 28 aa, Artificial Sequence
  Cyclic GFR-binding peptide
  MOD_RES (1)..(1): Xaa is C or S
XSEVTMNEYKFKVVNKNEDLYLISIPEM

SEQ ID NO: 82342 - protein, 32 aa, Artificial Sequence; identical to SEQ ID NO: 5437
  Cyclic GFR-binding peptide
  MOD_RES (29)..(30): Xaa is C or S

SEQ ID NO: 82343 - protein, 27 aa, Artificial Sequence
  Cyclic GFR-binding peptide
EVVMDEYKFKVVNNASDLYLISIPELR

SEQ ID NO: 82344 - protein, 36 aa, Artificial Sequence; identical to SEQ ID NO: 33752
  Cyclic GFR-binding peptide
  MOD_RES (32)..(33): Xaa is C or S

SEQ ID NO: 82345 - protein, 32 aa, Artificial Sequence
  Cyclic GFR-binding peptide
  MOD_RES (30)..(31): Xaa is C or S
VVMDRHKRLVVNNAADYYLISTASLRAPVXXS

SEQ ID NO: 82346 - protein, 22 aa, Artificial Sequence
  Cyclic GFR-binding peptide
EYKFKIVNSSDDLYLVSIPELK

SEQ ID NO: 82347 - protein, 31 aa, Artificial Sequence
  Cyclic GFR-binding peptide
RDVVMGYHYKLIIQQKDNKYLMSIPSMKTPT

SEQ ID NO: 82348 - protein, 32 aa, Artificial Sequence; identical to SEQ ID NO: 33756
  Cyclic GFR-binding peptide
  MOD_RES (32)..(32): Xaa is C or S

SEQ ID NO: 82349 - protein, 37 aa, Artificial Sequence; identical to SEQ ID NO: 5441
  Cyclic GFR-binding peptide
  MOD_RES (1)..(3)..(35)..(36): Xaa is C or S

SEQ ID NO: 82350 - protein, 21 aa, Artificial Sequence
  Cyclic GFR-binding peptide
YHYKLVVNNASDKYLISIPSL

SEQ ID NO: 82351 - protein, 33 aa, Artificial Sequence; identical to SEQ ID NO: 5442
  Cyclic GFR-binding peptide
  MOD_RES (30)..(31): Xaa is C or S

SEQ ID NO: 82352 - protein, 30 aa, Artificial Sequence; identical to SEQ ID NO: 5443
  Cyclic GFR-binding peptide
  MOD_RES (1)..(3): Xaa is C or S

SEQ ID NO: 82353 - protein, 33 aa, Artificial Sequence
  Cyclic GFR-binding peptide
  MOD_RES (1)..(3): Xaa is C or S
XKXSKVIMPIKGYIKPTKGIFYLINIPSLDQSV

SEQ ID NO: 82354 - protein, 32 aa, Artificial Sequence; identical to SEQ ID NO: 5447
  Cyclic GFR-binding peptide
  MOD_RES (31)..(32): Xaa is C or S

SEQ ID NO: 82355 - protein, 38 aa, Artificial Sequence; identical to SEQ ID NO: 33763
  Cyclic GFR-binding peptide
  MOD_RES (1)..(33)..(34): Xaa is C or S

SEQ ID NO: 82356 - protein, 27 aa, Artificial Sequence
  Cyclic GFR-binding peptide
SRVVMNYHYKLIVNSSDDKYLVSIPSL

SEQ ID NO: 82357 - protein, 25 aa, Artificial Sequence
  Cyclic GFR-binding peptide
SVAMGRYKKLYTVVGKDFYLISIAN

SEQ ID NO: 82358 - protein, 31 aa, Artificial Sequence; identical to SEQ ID NO: 40901
  Cyclic GFR-binding peptide
  MOD_RES (28)..(29): Xaa is C or S

SEQ ID NO: 82359 - protein, 35 aa, Artificial Sequence; identical to SEQ ID NO: 40905
  Cyclic GFR-binding peptide
  MOD_RES (29)..(30): Xaa is C or S

SEQ ID NO: 82360 - protein, 31 aa, Artificial Sequence
  Cyclic GFR-binding peptide
  MOD_RES (26)..(27): Xaa is C or S
RHKRLIIQQKDNYYLMSTASMKTPTXXPGAS

SEQ ID NO: 82361 - protein, 37 aa, Artificial Sequence; identical to SEQ ID NO: 76220
  Cyclic GFR-binding peptide
  MOD_RES (2)..(4)..(35)..(36): Xaa is C or S

SEQ ID NO: 82362 - protein, 29 aa, Artificial Sequence
  Cyclic GFR-binding peptide
  MOD_RES (1)..(3): Xaa is C or S
XAXSEVTMNRYKKLVVNKNEDFYLISIAN

SEQ ID NO: 82363 - protein, 26 aa, Artificial Sequence
  Cyclic GFR-binding peptide
IMYHYKLVKPKRGVKYLISIPSLAQP

SEQ ID NO: 82364 - protein, 37 aa, Artificial Sequence
  Cyclic GFR-binding peptide
  MOD_RES (31)..(32): Xaa is C or S
EVVMDRHKRLVVNNAADYYLISTASLRAPVXXSAPAA

SEQ ID NO: 82365 - protein, 25 aa, Artificial Sequence
  Cyclic GFR-binding peptide
DRHKRLVVNNAADYYLISTASLRAP

SEQ ID NO: 82366 - protein, 32 aa, Artificial Sequence
  Cyclic GFR-binding peptide
  MOD_RES (26)..(27): Xaa is C or S
PIKGYIKPTKGIFYLINIPSLDQSVXXPSASA

SEQ ID NO: 82367 - protein, 28 aa, Artificial Sequence
  Cyclic GFR-binding peptide
GEVVMDPIKGYVVKENEDFYLMNIPSLE

SEQ ID NO: 82368 - protein, 31 aa, Artificial Sequence; identical to SEQ ID NO: 5461
  Cyclic GFR-binding peptide
  MOD_RES (28)..(29): Xaa is C or S

SEQ ID NO: 82369 - protein, 38 aa, Artificial Sequence
  Cyclic GFR-binding peptide
  MOD_RES (2)..(33)..(34): Xaa is C or S
GXEEVIMRHKRLLLVRGNDYYLMSTASTKVPAXXTSPV

SEQ ID NO: 82370 - protein, 29 aa, Artificial Sequence
  Cyclic GFR-binding peptide
  MOD_RES (26)..(27): Xaa is C or S
PIKGYVVNNAADFYLINIPSLRAPVXXSA

SEQ ID NO: 82371 - protein, 27 aa, Artificial Sequence
  Cyclic GFR-binding peptide
  MOD_RES (26)..(27): Xaa is C or S
RHKRLVVNKNEDYYLISTASMKEPVXX

SEQ ID NO: 82372 - protein, 30 aa, Artificial Sequence; identical to SEQ ID NO: 40930
  Cyclic GFR-binding peptide
  MOD_RES (27)..(28): Xaa is C or S

SEQ ID NO: 82373 - protein, 33 aa, Artificial Sequence
  Cyclic GFR-binding peptide
  MOD_RES (28)..(29): Xaa is C or S
MNEYKFKVVNKNEDLYLISIPEMKEPVXXPEPI

SEQ ID NO: 82374 - protein, 36 aa, Artificial Sequence
  Cyclic GFR-binding peptide
  MOD_RES (30)..(31): Xaa is C or S
VTMNYHYKLVVNKNEDKYLISIPSMKEPVXXPEPIG

SEQ ID NO: 82375 - protein, 31 aa, Artificial Sequence; identical to SEQ ID NO: 40935
  Cyclic GFR-binding peptide
  MOD_RES (30)..(31): Xaa is C or S

SEQ ID NO: 82376 - protein, 28 aa, Artificial Sequence
  Cyclic GFR-binding peptide
  MOD_RES (2)..(2): Xaa is C or S
GXSEVVMDPIKGYVVNNASDFYLINIPS

SEQ ID NO: 82377 - protein, 28 aa, Artificial Sequence
  Cyclic GFR-binding peptide
  MOD_RES (2)..(2): Xaa is C or S
KXSKVVMEYKFKVKPTRGVLYLISIPEL

SEQ ID NO: 82378 - protein, 23 aa, Artificial Sequence
  Cyclic GFR-binding peptide
DRHKRLVVKENEDYYLMSTASLE

SEQ ID NO: 82379 - protein, 33 aa, Artificial Sequence; identical to SEQ ID NO: 33783
  Cyclic GFR-binding peptide
  MOD_RES (30)..(31): Xaa is C or S

SEQ ID NO: 82380 - protein, 32 aa, Artificial Sequence
  Cyclic GFR-binding peptide
  MOD_RES (30)..(31): Xaa is C or S
EVIMEYKFKLLVRGNDLYLMSIPETKVPAXXT

SEQ ID NO: 82381 - protein, 26 aa, Artificial Sequence
  Cyclic GFR-binding peptide
SVAMGRYKKLYTVVGKDFYLISIANL

SEQ ID NO: 82382 - protein, 25 aa, Artificial Sequence
  Cyclic GFR-binding peptide
PIKGYIVNNSSDFYLVNIPSLKTPA

SEQ ID NO: 82383 - protein, 33 aa, Artificial Sequence; identical to SEQ ID NO: 33788
  Cyclic GFR-binding peptide
  MOD_RES (2)..(4): Xaa is C or S

SEQ ID NO: 82384 - protein, 24 aa, Artificial Sequence
  Cyclic GFR-binding peptide
EVIMRYKKLLLVRGNDFYLMSIAN

SEQ ID NO: 82385 - protein, 33 aa, Artificial Sequence
  Cyclic GFR-binding peptide
  MOD_RES (2)..(4): Xaa is C or S
RXAXSEVTMNEYKFKVVNKNEDLYLISIPEMKE

SEQ ID NO: 82386 - protein, 24 aa, Artificial Sequence
  Cyclic GFR-binding peptide
EYKFKLLVRGNDLYLMSIPETKVP

SEQ ID NO: 82387 - protein, 26 aa, Artificial Sequence
  Cyclic GFR-binding peptide
VMDRYKKLVVKENEDFYLMSIANLET

SEQ ID NO: 82388 - protein, 37 aa, Artificial Sequence; identical to SEQ ID NO: 33794
  Cyclic GFR-binding peptide
  MOD_RES (1)..(3)..(35)..(36): Xaa is C or S

SEQ ID NO: 82389 - protein, 32 aa, Artificial Sequence; identical to SEQ ID NO: 40949
  Cyclic GFR-binding peptide
  MOD_RES (27)..(28): Xaa is C or S

SEQ ID NO: 82390 - protein, 23 aa, Artificial Sequence
  Cyclic GFR-binding peptide
GRHKRLIIQQKDNYYLMSTASMK

SEQ ID NO: 82391 - protein, 27 aa, Artificial Sequence
  Cyclic GFR-binding peptide
VMNRYKKLIVNNSSDFYLVSIANLKTP

SEQ ID NO: 82392 - protein, 22 aa, Artificial Sequence
  Cyclic GFR-binding peptide
IMYHYKLVKPKRGVKYLISIPS

SEQ ID NO: 82393 - protein, 41 aa, Artificial Sequence; identical to SEQ ID NO: 33805
  Cyclic GFR-binding peptide
  MOD_RES (1)..(3)..(36)..(37): Xaa is C or S

SEQ ID NO: 82394 - protein, 32 aa, Artificial Sequence
  Cyclic GFR-binding peptide
  MOD_RES (1)..(1): Xaa is C or S
XSEVVMDRHKRLVVNNASDYYLISTASLRTPV

SEQ ID NO: 82395 - protein, 33 aa, Artificial Sequence; identical to SEQ ID NO: 5489
  Cyclic GFR-binding peptide
  MOD_RES (1)..(3): Xaa is C or S

SEQ ID NO: 82396 - protein, 28 aa, Artificial Sequence
  Cyclic GFR-binding peptide
  MOD_RES (26)..(27): Xaa is C or S
YHYKLIVNNSSDKYLVSIPSLKTPAXXA

SEQ ID NO: 82397 - protein, 27 aa, Artificial Sequence
  Cyclic GFR-binding peptide
EVIMRHKRLLLVRGNDYYLMSTASTKV

SEQ ID NO: 82398 - protein, 34 aa, Artificial Sequence; identical to SEQ ID NO: 5503
  Cyclic GFR-binding peptide
  MOD_RES (1)..(33)..(34): Xaa is C or S

SEQ ID NO: 82399 - protein, 29 aa, Artificial Sequence
  Cyclic GFR-binding peptide
  MOD_RES (2)..(2): Xaa is C or S
KXSKVIMYHYKLIKPTKGIKYLISIPSLD

SEQ ID NO: 82400 - protein, 27 aa, Artificial Sequence
  Cyclic GFR-binding peptide
RVIMEYKFKVKPKRGVLYLISIPELAQ

SEQ ID NO: 82401 - protein, 26 aa, Artificial Sequence
  Cyclic GFR-binding peptide
  MOD_RES (26)..(26): Xaa is C or S
RYKKLVVNNAADFYLISIANLRAPVX

SEQ ID NO: 82402 - protein, 34 aa, Artificial Sequence; identical to SEQ ID NO: 76251
  Cyclic GFR-binding peptide
  MOD_RES (2)..(33)..(34): Xaa is C or S

SEQ ID NO: 82403 - protein, 27 aa, Artificial Sequence
  Cyclic GFR-binding peptide
VVMNPIKGYIVNNSSDFYLVNIPSLKT

SEQ ID NO: 82404 - protein, 33 aa, Artificial Sequence; identical to SEQ ID NO: 76253
  Cyclic GFR-binding peptide
  MOD_RES (32)..(33): Xaa is C or S

SEQ ID NO: 82405 - protein, 29 aa, Artificial Sequence
  Cyclic GFR-binding peptide
  MOD_RES (27)..(28): Xaa is C or S
MYHYKLVKPTRGVKYLISIPSLDQPVXXP

SEQ ID NO: 82406 - protein, 33 aa, Artificial Sequence; identical to SEQ ID NO: 5509
  Cyclic GFR-binding peptide
  MOD_RES (28)..(29): Xaa is C or S

SEQ ID NO: 82407 - protein, 31 aa, Artificial Sequence; identical to SEQ ID NO: 5510
  Cyclic GFR-binding peptide
  MOD_RES (30)..(31): Xaa is C or S

SEQ ID NO: 82408 - protein, 35 aa, Artificial Sequence
  Cyclic GFR-binding peptide
  MOD_RES (2)..(34)..(35): Xaa is C or S
GXESVAMGRHKRLYTVVGKDYYLISTASLKTPVXX

SEQ ID NO: 82409 - protein, 38 aa, Artificial Sequence; identical to SEQ ID NO: 5513
  Cyclic GFR-binding peptide
  MOD_RES (2)..(33)..(34): Xaa is C or S

SEQ ID NO: 82410 - protein, 36 aa, Artificial Sequence; identical to SEQ ID NO: 76257
  Cyclic GFR-binding peptide
  MOD_RES (32)..(33): Xaa is C or S

SEQ ID NO: 82411 - protein, 31 aa, Artificial Sequence
  Cyclic GFR-binding peptide
  MOD_RES (26)..(27): Xaa is C or S
YHYKLLLVRGNDKYLMSIPSTKVPAXXTSPV

SEQ ID NO: 82412 - protein, 32 aa, Artificial Sequence; identical to SEQ ID NO: 40978
  Cyclic GFR-binding peptide
  MOD_RES (1)..(3): Xaa is C or S

SEQ ID NO: 82413 - protein, 25 aa, Artificial Sequence
  Cyclic GFR-binding peptide
SRVIMRYKKLVKPKRGVFYLISIAN

SEQ ID NO: 82414 - protein, 40 aa, Artificial Sequence; identical to SEQ ID NO: 33835
  Cyclic GFR-binding peptide
  MOD_RES (2)..(34)..(35): Xaa is C or S

SEQ ID NO: 82415 - protein, 32 aa, Artificial Sequence; identical to SEQ ID NO: 33837
  Cyclic GFR-binding peptide
  MOD_RES (2)..(4): Xaa is C or S

SEQ ID NO: 82416 - protein, 29 aa, Artificial Sequence
  Cyclic GFR-binding peptide
  MOD_RES (28)..(29): Xaa is C or S
GEEYKFKTPVGMDDLYLVSIPELKTPVXX

SEQ ID NO: 82417 - protein, 31 aa, Artificial Sequence; identical to SEQ ID NO: 33840
  Cyclic GFR-binding peptide

SEQ ID NO: 82418 - protein, 37 aa, Artificial Sequence; identical to SEQ ID NO: 5524
  Cyclic GFR-binding peptide
  MOD_RES (2)..(33)..(34): Xaa is C or S

SEQ ID NO: 82419 - protein, 34 aa, Artificial Sequence; identical to SEQ ID NO: 5526
  Cyclic GFR-binding peptide
  MOD_RES (31)..(32): Xaa is C or S

SEQ ID NO: 82420 - protein, 37 aa, Artificial Sequence; identical to SEQ ID NO: 5527
  Cyclic GFR-binding peptide
  MOD_RES (31)..(32): Xaa is C or S

SEQ ID NO: 82421 - protein, 34 aa, Artificial Sequence
  Cyclic GFR-binding peptide
  MOD_RES (2)..(4): Xaa is C or S
SXGXRDVVMGEYKFKIIQQKDNLYLMSIPEMKTP

SEQ ID NO: 82422 - protein, 29 aa, Artificial Sequence
  Cyclic GFR-binding peptide
  MOD_RES (28)..(29): Xaa is C or S
MEEYKFKVVKDYEDLYLMSIPELETPVXX

SEQ ID NO: 82423 - protein, 26 aa, Artificial Sequence
  Cyclic GFR-binding peptide
MEYKFKIKPTKGILYLISIPELDQSV

SEQ ID NO: 82424 - protein, 32 aa, Artificial Sequence; identical to SEQ ID NO: 40985
  Cyclic GFR-binding peptide
  MOD_RES (32)..(32): Xaa is C or S

SEQ ID NO: 82425 - protein, 23 aa, Artificial Sequence
  Cyclic GFR-binding peptide
NEYKFKIVNSSDDLYLVSIPELQ

SEQ ID NO: 82426 - protein, 30 aa, Artificial Sequence; identical to SEQ ID NO: 5529
  Cyclic GFR-binding peptide
  MOD_RES (1)..(1): Xaa is C or S

SEQ ID NO: 82427 - protein, 29 aa, Artificial Sequence
  Cyclic GFR-binding peptide
  MOD_RES (2)..(2): Xaa is C or S
GXEEVIMPIKGYLLVRGNDFYLMNIPSTK

SEQ ID NO: 82428 - protein, 34 aa, Artificial Sequence
  Cyclic GFR-binding peptide
  MOD_RES (31)..(32): Xaa is C or S
EEVIMYHYKLLLVRGNDKYLMSIPSTKVPAXXTS

SEQ ID NO: 82429 - protein, 29 aa, Artificial Sequence
  Cyclic GFR-binding peptide
  MOD_RES (26)..(27): Xaa is C or S
YHYKLVKPKRGVKYLISIPSLAQPVXXPA

SEQ ID NO: 82430 - protein, 36 aa, Artificial Sequence
  Cyclic GFR-binding peptide
  MOD_RES (2)..(4)..(36): Xaa is C or S
RXGXSEVVMDRHKRLVVNNASDYYLISTASLRTPVX

SEQ ID NO: 82431 - protein, 32 aa, Artificial Sequence; identical to SEQ ID NO: 5534
  Cyclic GFR-binding peptide
  MOD_RES (1)..(32): Xaa is C or S

SEQ ID NO: 82432 - protein, 38 aa, Artificial Sequence
  Cyclic GFR-binding peptide
  MOD_RES (1)..(3)..(35)..(36): Xaa is C or S
XGXRDVVMGEYKFKIIQQKDNLYLMSIPEMKTPTXXPG

SEQ ID NO: 82433 - protein, 37 aa, Artificial Sequence
  Cyclic GFR-binding peptide
  MOD_RES (1)..(33)..(34): Xaa is C or S
XSEVTMNRHKRLVVNKNEDYYLISTASMKEPVXXPEP

SEQ ID NO: 82434 - protein, 34 aa, Artificial Sequence; identical to SEQ ID NO: 33858
  Cyclic GFR-binding peptide
  MOD_RES (1)..(33)..(34): Xaa is C or S

SEQ ID NO: 82435 - protein, 33 aa, Artificial Sequence; identical to SEQ ID NO: 5539
  Cyclic GFR-binding peptide
  MOD_RES (29)..(30): Xaa is C or S

SEQ ID NO: 82436 - protein, 35 aa, Artificial Sequence; identical to SEQ ID NO: 41006
  Cyclic GFR-binding peptide
  MOD_RES (2)..(34): Xaa is C or S

SEQ ID NO: 82437 - protein, 24 aa, Artificial Sequence
  Cyclic GFR-binding peptide
VIMPIKGYLLVRGNDFYLMNIPST

SEQ ID NO: 82438 - protein, 23 aa, Artificial Sequence
  Cyclic GFR-binding peptide
VVMRHKRLVKPTRGVYYLISTAS

SEQ ID NO: 82439 - protein, 36 aa, Artificial Sequence
  Cyclic GFR-binding peptide
  MOD_RES (1)..(33)..(34): Xaa is C or S
XSEVTMNRHKRLVVNKNEDYYLISTASMKEPVXXPE

SEQ ID NO: 82440 - protein, 32 aa, Artificial Sequence
  Cyclic GFR-binding peptide
  MOD_RES (30)..(31): Xaa is C or S
VTMNEYKFKVVNKNEDLYLISIPEMKEPVXXP

SEQ ID NO: 82441 - protein, 23 aa, Artificial Sequence
  Cyclic GFR-binding peptide
VMDRHKRLVVKENEDYYLMSTAS

SEQ ID NO: 82442 - protein, 31 aa, Artificial Sequence; identical to SEQ ID NO: 5545
  Cyclic GFR-binding peptide
  MOD_RES (1)..(1): Xaa is C or S

SEQ ID NO: 82443 - protein, 30 aa, Artificial Sequence; identical to SEQ ID NO: 33867
  Cyclic GFR-binding peptide
  MOD_RES (2)..(2): Xaa is C or S

SEQ ID NO: 82444 - protein, 41 aa, Artificial Sequence; identical to SEQ ID NO: 5546
  Cyclic GFR-binding peptide
  MOD_RES (2)..(4)..(35)..(36): Xaa is C or S

SEQ ID NO: 82445 - protein, 28 aa, Artificial Sequence
  Cyclic GFR-binding peptide
SKVVMYHYKLVKPTRGVKYLISIPSLDQ

SEQ ID NO: 82446 - protein, 24 aa, Artificial Sequence
  Cyclic GFR-binding peptide
IMPIKGYIKPTKGIFYLINIPSLD

SEQ ID NO: 82447 - protein, 31 aa, Artificial Sequence; identical to SEQ ID NO: 5548
  Cyclic GFR-binding peptide
  MOD_RES (29)..(30): Xaa is C or S

SEQ ID NO: 82448 - protein, 22 aa, Artificial Sequence
  Cyclic GFR-binding peptide
MGEYKFKIIQQKDNLYLMSIPE

SEQ ID NO: 82449 - protein, 25 aa, Artificial Sequence
  Cyclic GFR-binding peptide
RHKRLYTVVGKDYYLISTASLKTPV

SEQ ID NO: 82450 - protein, 29 aa, Artificial Sequence
  Cyclic GFR-binding peptide
GEVVMDPIKGYVVKENEDFYLMNIPSLET

SEQ ID NO: 82451 - protein, 23 aa, Artificial Sequence
  Cyclic GFR-binding peptide
PIKGYVVNNASDFYLINIPSLRT

SEQ ID NO: 82452 - protein, 39 aa, Artificial Sequence; identical to SEQ ID NO: 5551
  Cyclic GFR-binding peptide
  MOD_RES (2)..(4)..(35)..(36): Xaa is C or S

SEQ ID NO: 82453 - protein, 25 aa, Artificial Sequence
  Cyclic GFR-binding peptide
DEYKFKVVKENEDLYLMSIPELETP

SEQ ID NO: 82454 - protein, 32 aa, Artificial Sequence; identical to SEQ ID NO: 41025
  Cyclic GFR-binding peptide
  MOD_RES (29)..(30): Xaa is C or S

SEQ ID NO: 82455 - protein, 31 aa, Artificial Sequence; identical to SEQ ID NO: 33883
  Cyclic GFR-binding peptide
  MOD_RES (1)..(3): Xaa is C or S

SEQ ID NO: 82456 - protein, 30 aa, Artificial Sequence; identical to SEQ ID NO: 41027
  Cyclic GFR-binding peptide
  MOD_RES (27)..(28): Xaa is C or S

SEQ ID NO: 82457 - protein, 21 aa, Artificial Sequence
  Cyclic GFR-binding peptide
GRHKRLYTVVGKDYYLISTAS

SEQ ID NO: 82458 - protein, 37 aa, Artificial Sequence; identical to SEQ ID NO: 33885
  Cyclic GFR-binding peptide
  MOD_RES (31)..(32): Xaa is C or S

SEQ ID NO: 82459 - protein, 37 aa, Artificial Sequence
  Cyclic GFR-binding peptide
  MOD_RES (2)..(4)..(36)..(37): Xaa is C or S
SXGXRDVVMGYHYKLIIQQKDNKYLMSIPSMKTPTXX

SEQ ID NO: 82460 - protein, 34 aa, Artificial Sequence
  Cyclic GFR-binding peptide
  MOD_RES (30)..(31): Xaa is C or S
VVMDRHKRLVVNNAADYYLISTASLRAPVXXSAP

SEQ ID NO: 82461 - protein, 35 aa, Artificial Sequence
  Cyclic GFR-binding peptide
  MOD_RES (29)..(30): Xaa is C or S
VMDRHKRLVVNNASDYYLISTASLRTPVXXTPPTS

SEQ ID NO: 82462 - protein, 40 aa, Artificial Sequence; identical to SEQ ID NO: 33889
  Cyclic GFR-binding peptide
  MOD_RES (1)..(3)..(34)..(35): Xaa is C or S

SEQ ID NO: 82463 - protein, 30 aa, Artificial Sequence; identical to SEQ ID NO: 41041
  Cyclic GFR-binding peptide

SEQ ID NO: 82464 - protein, 25 aa, Artificial Sequence
  Cyclic GFR-binding peptide
VVMNEYKFKIVNNSSDLYLVSIPEL

SEQ ID NO: 82465 - protein, 29 aa, Artificial Sequence
  Cyclic GFR-binding peptide
  MOD_RES (26)..(27): Xaa is C or S
RYKKLIVNSSDDFYLVSIANLKTPAXXPK

SEQ ID NO: 82466 - protein, 40 aa, Artificial Sequence; identical to SEQ ID NO: 5566
  Cyclic GFR-binding peptide
  MOD_RES (1)..(3)..(35)..(36): Xaa is C or S

SEQ ID NO: 82467 - protein, 30 aa, Artificial Sequence; identical to SEQ ID NO: 33896
  Cyclic GFR-binding peptide
  MOD_RES (29)..(30): Xaa is C or S

SEQ ID NO: 82468 - protein, 29 aa, Artificial Sequence
  Cyclic GFR-binding peptide
  MOD_RES (1)..(3): Xaa is C or S
XGXSEVVMDRYKKLVVNNASDFYLISIAN

SEQ ID NO: 82469 - protein, 39 aa, Artificial Sequence; identical to SEQ ID NO: 5568
  Cyclic GFR-binding peptide
  MOD_RES (1)..(34)..(35): Xaa is C or S

SEQ ID NO: 82470 - protein, 36 aa, Artificial Sequence
  Cyclic GFR-binding peptide
  MOD_RES (30)..(31): Xaa is C or S
VVMNRYKKLIVNSSDDFYLVSIANLKTPAXXPKPVH

SEQ ID NO: 82471 - protein, 35 aa, Artificial Sequence; identical to SEQ ID NO: 33897
  Cyclic GFR-binding peptide
  MOD_RES (2)..(34): Xaa is C or S

SEQ ID NO: 82472 - protein, 32 aa, Artificial Sequence; identical to SEQ ID NO: 33899
  Cyclic GFR-binding peptide
  MOD_RES (27)..(28): Xaa is C or S

SEQ ID NO: 82473 - protein, 32 aa, Artificial Sequence; identical to SEQ ID NO: 41044
  Cyclic GFR-binding peptide
  MOD_RES (32)..(32): Xaa is C or S

SEQ ID NO: 82474 - protein, 32 aa, Artificial Sequence; identical to SEQ ID NO: 5570
  Cyclic GFR-binding peptide
  MOD_RES (2)..(4): Xaa is C or S

SEQ ID NO: 82475 - protein, 38 aa, Artificial Sequence; identical to SEQ ID NO: 41045
  Cyclic GFR-binding peptide
  MOD_RES (32)..(33): Xaa is C or S

SEQ ID NO: 82476 - protein, 34 aa, Artificial Sequence; identical to SEQ ID NO: 5572
  Cyclic GFR-binding peptide
  MOD_RES (31)..(32): Xaa is C or S

SEQ ID NO: 82477 - protein, 39 aa, Artificial Sequence; identical to SEQ ID NO: 5573
  Cyclic GFR-binding peptide
  MOD_RES (2)..(34)..(35): Xaa is C or S

SEQ ID NO: 82478 - protein, 30 aa, Artificial Sequence; identical to SEQ ID NO: 5574
  Cyclic GFR-binding peptide
  MOD_RES (2)..(4): Xaa is C or S

SEQ ID NO: 82479 - protein, 31 aa, Artificial Sequence; identical to SEQ ID NO: 5575
  Cyclic GFR-binding peptide
  MOD_RES (2)..(2): Xaa is C or S

SEQ ID NO: 82480 - protein, 29 aa, Artificial Sequence
  Cyclic GFR-binding peptide
  MOD_RES (28)..(29): Xaa is C or S
MGPIKGYYTVVGKDFYLINIPSLKTPVXX

SEQ ID NO: 82481 - protein, 36 aa, Artificial Sequence
  Cyclic GFR-binding peptide
  MOD_RES (2)..(4)..(35)..(36): Xaa is C or S
LXGXEEVIMYHYKLLLVRGNDKYLMSIPSTKVPAXX

SEQ ID NO: 82482 - protein, 26 aa, Artificial Sequence
  Cyclic GFR-binding peptide
  MOD_RES (26)..(26): Xaa is C or S
YHYKLVKPKRGVKYLISIPSLAQPVX

SEQ ID NO: 82483 - protein, 21 aa, Artificial Sequence
  Cyclic GFR-binding peptide
RHKRLVKPTRGVYYLISTASL

SEQ ID NO: 82484 - protein, 39 aa, Artificial Sequence
  Cyclic GFR-binding peptide
  MOD_RES (1)..(3)..(34)..(35): Xaa is C or S
XGXEEVIMEYKFKLLVRGNDLYLMSIPETKVPAXXTSPV

SEQ ID NO: 82485 - protein, 31 aa, Artificial Sequence; identical to SEQ ID NO: 5580
  Cyclic GFR-binding peptide
  MOD_RES (1)..(3): Xaa is C or S

SEQ ID NO: 82486 - protein, 31 aa, Artificial Sequence; identical to SEQ ID NO: 33909
  Cyclic GFR-binding peptide
  MOD_RES (31)..(31): Xaa is C or S

SEQ ID NO: 82487 - protein, 36 aa, Artificial Sequence; identical to SEQ ID NO: 41058
  Cyclic GFR-binding peptide
  MOD_RES (31)..(32): Xaa is C or S

SEQ ID NO: 82488 - protein, 31 aa, Artificial Sequence; identical to SEQ ID NO: 33911
  Cyclic GFR-binding peptide
  MOD_RES (2)..(2): Xaa is C or S

SEQ ID NO: 82489 - protein, 28 aa, Artificial Sequence
  Cyclic GFR-binding peptide
VVMDYHYKLVVNNASDKYLISIPSLRTP

SEQ ID NO: 82490 - protein, 31 aa, Artificial Sequence; identical to SEQ ID NO: 33913
  Cyclic GFR-binding peptide
  MOD_RES (2)..(4): Xaa is C or S

SEQ ID NO: 82491 - protein, 36 aa, Artificial Sequence; identical to SEQ ID NO: 5585
  Cyclic GFR-binding peptide
  MOD_RES (31)..(32): Xaa is C or S

SEQ ID NO: 82492 - protein, 30 aa, Artificial Sequence; identical to SEQ ID NO: 5586
  Cyclic GFR-binding peptide
  MOD_RES (1)..(1): Xaa is C or S

SEQ ID NO: 82493 - protein, 23 aa, Artificial Sequence
  Cyclic GFR-binding peptide
DRHKRLVVNNASDYYLISTASLR

SEQ ID NO: 82494 - protein, 39 aa, Artificial Sequence
  Cyclic GFR-binding peptide
  MOD_RES (2)..(4)..(36)..(37): Xaa is C or S
RXAXSEVTMNEYKFKVVNKNEDLYLISIPEMKEPVXXPE

SEQ ID NO: 82495 - protein, 33 aa, Artificial Sequence; identical to SEQ ID NO: 33915
  Cyclic GFR-binding peptide
  MOD_RES (31)..(32): Xaa is C or S

SEQ ID NO: 82496 - protein, 24 aa, Artificial Sequence
  Cyclic GFR-binding peptide
IMRHKRLIKPTKGIYYLISTASLD

SEQ ID NO: 82497 - protein, 25 aa, Artificial Sequence
  Cyclic GFR-binding peptide
VSMGEEYKFKTPVGMDDLYLVSIPE

SEQ ID NO: 82498 - protein, 34 aa, Artificial Sequence; identical to SEQ ID NO: 5589
  Cyclic GFR-binding peptide
  MOD_RES (30)..(31): Xaa is C or S

SEQ ID NO: 82499 - protein, 42 aa, Artificial Sequence; identical to SEQ ID NO: 41062
  Cyclic GFR-binding peptide
  MOD_RES (2)..(4)..(36): Xaa is C or S

SEQ ID NO: 82500 - protein, 33 aa, Artificial Sequence; identical to SEQ ID NO: 41063
  Cyclic GFR-binding peptide
  MOD_RES (1)..(32)..(33): Xaa is C or S

SEQ ID NO: 82501 - protein, 26 aa, Artificial Sequence
  Cyclic GFR-binding peptide
MNRHKRLIVNSSDDYYLVSTASLQTP

SEQ ID NO: 82502 - protein, 30 aa, Artificial Sequence; identical to SEQ ID NO: 33918
  Cyclic GFR-binding peptide
  MOD_RES (2)..(4): Xaa is C or S

SEQ ID NO: 82503 - protein, 33 aa, Artificial Sequence; identical to SEQ ID NO: 5591
  Cyclic GFR-binding peptide
  MOD_RES (1)..(3): Xaa is C or S

SEQ ID NO: 82504 - protein, 29 aa, Artificial Sequence
  Cyclic GFR-binding peptide
  MOD_RES (29)..(29): Xaa is C or S
VMGRHKRLIIQQKDNYYLMSTASMKTPTX

SEQ ID NO: 82505 - protein, 35 aa, Artificial Sequence; identical to SEQ ID NO: 33926
  Cyclic GFR-binding peptide
  MOD_RES (1)..(3)..(35): Xaa is C or S

SEQ ID NO: 82506 - protein, 34 aa, Artificial Sequence; identical to SEQ ID NO: 5594
  Cyclic GFR-binding peptide
  MOD_RES (28)..(29): Xaa is C or S

SEQ ID NO: 82507 - protein, 35 aa, Artificial Sequence
  Cyclic GFR-binding peptide
  MOD_RES (32)..(33): Xaa is C or S
SEVTMNRYKKLVVNKNEDFYLISIANMKEPVXXPE

SEQ ID NO: 82508 - protein, 32 aa, Artificial Sequence; identical to SEQ ID NO: 5595
  Cyclic GFR-binding peptide
  MOD_RES (29)..(29): Xaa is C or S

SEQ ID NO: 82509 - protein, 29 aa, Artificial Sequence
  Cyclic GFR-binding peptide
EVTMNRYKKLVVNKNEDFYLISIANMKEP

SEQ ID NO: 82510 - protein, 30 aa, Artificial Sequence
  Cyclic GFR-binding peptide
  MOD_RES (27)..(28): Xaa is C or S
NPIKGYVVNKNEDFYLINIPSMKEPVXXPE

SEQ ID NO: 82511 - protein, 30 aa, Artificial Sequence; identical to SEQ ID NO: 33929
  Cyclic GFR-binding peptide

SEQ ID NO: 82512 - protein, 41 aa, Artificial Sequence; identical to SEQ ID NO: 5599
  Cyclic GFR-binding peptide
  MOD_RES (2)..(4)..(36)..(37): Xaa is C or S

SEQ ID NO: 82513 - protein, 31 aa, Artificial Sequence
  Cyclic GFR-binding peptide
  MOD_RES (27)..(28): Xaa is C or S
GEYKFKIIQQKDNLYLMSIPEMKTPTXXPGA

SEQ ID NO: 82514 - protein, 35 aa, Artificial Sequence; identical to SEQ ID NO: 5601
  Cyclic GFR-binding peptide
  MOD_RES (29)..(30): Xaa is C or S

SEQ ID NO: 82515 - protein, 27 aa, Artificial Sequence
  Cyclic GFR-binding peptide
MDRHKRLVVKENEDYYLMSTASLETPV

SEQ ID NO: 82516 - protein, 26 aa, Artificial Sequence
  Cyclic GFR-binding peptide
EVVMEEYKFKVVKDYEDLYLMSIPEL

SEQ ID NO: 82517 - protein, 25 aa, Artificial Sequence
  Cyclic GFR-binding peptide
MYHYKLVKPKRGVKYLISIPSLAQP

SEQ ID NO: 82518 - protein, 29 aa, Artificial Sequence
  Cyclic GFR-binding peptide
  MOD_RES (26)..(27): Xaa is C or S
YHYKLIVNSSDDKYLVSIPSLQTPAXXPK

SEQ ID NO: 82519 - protein, 26 aa, Artificial Sequence
  Cyclic GFR-binding peptide
  MOD_RES (1)..(1): Xaa is C or S
XEEVIMPIKGYLLVRGNDFYLMNIPS

SEQ ID NO: 82520 - protein, 34 aa, Artificial Sequence
  Cyclic GFR-binding peptide
  MOD_RES (32)..(33): Xaa is C or S
SEVVMDRHKRLVVNNASDYYLISTASLRTPVXXT

SEQ ID NO: 82521 - protein, 30 aa, Artificial Sequence; identical to SEQ ID NO: 5610
  Cyclic GFR-binding peptide
  MOD_RES (28)..(29): Xaa is C or S

SEQ ID NO: 82522 - protein, 36 aa, Artificial Sequence; identical to SEQ ID NO: 5611
  Cyclic GFR-binding peptide
  MOD_RES (1)..(3)..(35)..(36): Xaa is C or S

SEQ ID NO: 82523 - protein, 27 aa, Artificial Sequence
  Cyclic GFR-binding peptide
VVMDPIKGYVVKENEDFYLMNIPSLET

SEQ ID NO: 82524 - protein, 26 aa, Artificial Sequence
  Cyclic GFR-binding peptide
SKVVMRHKRLVKPTRGVYYLISTASL

SEQ ID NO: 82525 - protein, 28 aa, Artificial Sequence
  Cyclic GFR-binding peptide
  MOD_RES (2)..(2): Xaa is C or S
GXARVVMNRYKKLIVNSSDDFYLVSIAN

SEQ ID NO: 82526 - protein, 32 aa, Artificial Sequence; identical to SEQ ID NO: 5617
  Cyclic GFR-binding peptide
  MOD_RES (30)..(31): Xaa is C or S

SEQ ID NO: 82527 - protein, 31 aa, Artificial Sequence; identical to SEQ ID NO: 5619
  Cyclic GFR-binding peptide
  MOD_RES (31)..(31): Xaa is C or S

SEQ ID NO: 82528 - protein, 30 aa, Artificial Sequence; identical to SEQ ID NO: 5621
  Cyclic GFR-binding peptide

SEQ ID NO: 82529 - protein, 27 aa, Artificial Sequence
  Cyclic GFR-binding peptide
SRVVMNEYKFKIVNSSDDLYLVSIPEL

SEQ ID NO: 82530 - protein, 26 aa, Artificial Sequence
  Cyclic GFR-binding peptide
  MOD_RES (26)..(26): Xaa is C or S
YHYKLIIQQKDNKYLMSIPSMKTPTX

SEQ ID NO: 82531 - protein, 37 aa, Artificial Sequence; identical to SEQ ID NO: 5622
  Cyclic GFR-binding peptide
  MOD_RES (1)..(3)..(35): Xaa is C or S

SEQ ID NO: 82532 - protein, 23 aa, Artificial Sequence
  Cyclic GFR-binding peptide
AMGYHYKLYTVVGKDKYLISIPS

SEQ ID NO: 82533 - protein, 32 aa, Artificial Sequence; identical to SEQ ID NO: 5625
  Cyclic GFR-binding peptide
  MOD_RES (28)..(29): Xaa is C or S

SEQ ID NO: 82534 - protein, 31 aa, Artificial Sequence; identical to SEQ ID NO: 5626
  Cyclic GFR-binding peptide
  MOD_RES (30)..(31): Xaa is C or S

SEQ ID NO: 82535 - protein, 24 aa, Artificial Sequence
  Cyclic GFR-binding peptide
YHYKLVKPKRGVKYLISIPSLAQP

SEQ ID NO: 82536 - protein, 33 aa, Artificial Sequence; identical to SEQ ID NO: 5630
  Cyclic GFR-binding peptide
  MOD_RES (28)..(29): Xaa is C or S

SEQ ID NO: 82537 - protein, 26 aa, Artificial Sequence
  Cyclic GFR-binding peptide
VVMEYHYKLVVKDYEDKYLMSIPSLE

SEQ ID NO: 82538 - protein, 24 aa, Artificial Sequence
  Cyclic GFR-binding peptide
RHKRLVVNKNEDYYLISTASMKEP

SEQ ID NO: 82539 - protein, 37 aa, Artificial Sequence; identical to SEQ ID NO: 5637
  Cyclic GFR-binding peptide
  MOD_RES (2)..(34)..(35): Xaa is C or S

SEQ ID NO: 82540 - protein, 29 aa, Artificial Sequence
  Cyclic GFR-binding peptide
  MOD_RES (26)..(27): Xaa is C or S
YHYKLIVNSSDDKYLVSIPSLKTPAXXPK

SEQ ID NO: 82541 - protein, 27 aa, Artificial Sequence
  Cyclic GFR-binding peptide
  MOD_RES (1)..(1): Xaa is C or S
XSKVIMRYKKLIKPTKGIFYLISIANL

SEQ ID NO: 82542 - protein, 41 aa, Artificial Sequence; identical to SEQ ID NO: 41110
  Cyclic GFR-binding peptide
  MOD_RES (2)..(4)..(36)..(37): Xaa is C or S

SEQ ID NO: 82543 - protein, 33 aa, Artificial Sequence
  Cyclic GFR-binding peptide
  MOD_RES (30)..(31): Xaa is C or S
VVMDEYKFKVVNNASDLYLISIPELRTPVXXTP

SEQ ID NO: 82544 - protein, 30 aa, Artificial Sequence; identical to SEQ ID NO: 41112
  Cyclic GFR-binding peptide
  MOD_RES (1)..(1): Xaa is C or S

SEQ ID NO: 82545 - protein, 35 aa, Artificial Sequence
  Cyclic GFR-binding peptide
  MOD_RES (2)..(34)..(35): Xaa is C or S
GXAEVVMDRHKRLVVNNAADYYLISTASLRAPVXX

SEQ ID NO: 82546 - protein, 29 aa, Artificial Sequence
  Cyclic GFR-binding peptide
  MOD_RES (26)..(27): Xaa is C or S
YHYKLVVKENEDKYLMSIPSLETPVXXAK

SEQ ID NO: 82547 - protein, 31 aa, Artificial Sequence
  Cyclic GFR-binding peptide
  MOD_RES (26)..(27): Xaa is C or S
YHYKLIIQQKDNKYLMSIPSMKTPTXXPGAS

SEQ ID NO: 82548 - protein, 30 aa, Artificial Sequence; identical to SEQ ID NO: 76333
  Cyclic GFR-binding peptide

SEQ ID NO: 82549 - protein, 22 aa, Artificial Sequence
  Cyclic GFR-binding peptide
VMYHYKLVKPTRGVKYLISIPS

SEQ ID NO: 82550 - protein, 40 aa, Artificial Sequence
  Cyclic GFR-binding peptide
  MOD_RES (2)..(4)..(35)..(36): Xaa is C or S
LXGXEEVIMYHYKLLLVRGNDKYLMSIPSTKVPAXXTSPV

SEQ ID NO: 82551 - protein, 38 aa, Artificial Sequence; identical to SEQ ID NO: 33982
  Cyclic GFR-binding peptide
  MOD_RES (2)..(34)..(35): Xaa is C or S

SEQ ID NO: 82552 - protein, 33 aa, Artificial Sequence; identical to SEQ ID NO: 5654
  Cyclic GFR-binding peptide
  MOD_RES (27)..(28): Xaa is C or S

SEQ ID NO: 82553 - protein, 41 aa, Artificial Sequence; identical to SEQ ID NO: 5656
  Cyclic GFR-binding peptide
  MOD_RES (2)..(4)..(35)..(36): Xaa is C or S

SEQ ID NO: 82554 - protein, 24 aa, Artificial Sequence
  Cyclic GFR-binding peptide
EYKFKVVNKNEDLYLISIPEMKEP

SEQ ID NO: 82555 - protein, 27 aa, Artificial Sequence
  Cyclic GFR-binding peptide
EAVSMGERYKKLTPVGMDDFYLVSIAN

SEQ ID NO: 82556 - protein, 35 aa, Artificial Sequence; identical to SEQ ID NO: 41136
  Cyclic GFR-binding peptide
  MOD_RES (1)..(3): Xaa is C or S

SEQ ID NO: 82557 - protein, 27 aa, Artificial Sequence
  Cyclic GFR-binding peptide
MNPIKGYIVNSSDDFYLVNIPSLKTPA

SEQ ID NO: 82558 - protein, 28 aa, Artificial Sequence
  Cyclic GFR-binding peptide
  MOD_RES (26)..(27): Xaa is C or S
YHYKLVKPTRGVKYLISIPSLDQPVXXP

SEQ ID NO: 82559 - protein, 25 aa, Artificial Sequence
  Cyclic GFR-binding peptide
MERYKKLVVKDYEDFYLMSIANLET

SEQ ID NO: 82560 - protein, 23 aa, Artificial Sequence
  Cyclic GFR-binding peptide
VMDRYKKLVVKENEDFYLMSIAN

SEQ ID NO: 82561 - protein, 27 aa, Artificial Sequence
  Cyclic GFR-binding peptide
  MOD_RES (1)..(1): Xaa is C or S
XESVAMGRHKRLYTVVGKDYYLISTAS

SEQ ID NO: 82562 - protein, 24 aa, Artificial Sequence
  Cyclic GFR-binding peptide
YHYKLVVNNAADKYLISIPSLRAP

SEQ ID NO: 82563 - protein, 36 aa, Artificial Sequence
  Cyclic GFR-binding peptide
  MOD_RES (2)..(4)..(36): Xaa is C or S
RXGXAEVVMDRHKRLVVNNAADYYLISTASLRAPVX

SEQ ID NO: 82564 - protein, 30 aa, Artificial Sequence
  Cyclic GFR-binding peptide
  MOD_RES (1)..(3): Xaa is C or S
XAXSEVTMNPIKGYVVNKNEDFYLINIPSM

SEQ ID NO: 82565 - protein, 26 aa, Artificial Sequence
  Cyclic GFR-binding peptide
GEPIKGYTPVGMDDFYLVNIPSLKTP

SEQ ID NO: 82566 - protein, 33 aa, Artificial Sequence
  Cyclic GFR-binding peptide
  MOD_RES (30)..(31): Xaa is C or S
VTMNRHKRLVVNKNEDYYLISTASMKEPVXXPE

SEQ ID NO: 82567 - protein, 37 aa, Artificial Sequence; identical to SEQ ID NO: 34000
  Cyclic GFR-binding peptide
  MOD_RES (31)..(32): Xaa is C or S

SEQ ID NO: 82568 - protein, 26 aa, Artificial Sequence
  Cyclic GFR-binding peptide
DRHKRLVVNNASDYYLISTASLRTPV

SEQ ID NO: 82569 - protein, 33 aa, Artificial Sequence
  Cyclic GFR-binding peptide
  MOD_RES (2)..(4): Xaa is C or S
RXAXSEVTMNYHYKLVVNKNEDKYLISIPSMKE

SEQ ID NO: 82570 - protein, 37 aa, Artificial Sequence; identical to SEQ ID NO: 5676
  Cyclic GFR-binding peptide
  MOD_RES (1)..(33)..(34): Xaa is C or S

SEQ ID NO: 82571 - protein, 32 aa, Artificial Sequence; identical to SEQ ID NO: 41154
  Cyclic GFR-binding peptide
  MOD_RES (26)..(27): Xaa is C or S

SEQ ID NO: 82572 - protein, 37 aa, Artificial Sequence; identical to SEQ ID NO: 34007
  Cyclic GFR-binding peptide
  MOD_RES (2)..(4)..(37): Xaa is C or S

SEQ ID NO: 82573 - protein, 36 aa, Artificial Sequence; identical to SEQ ID NO: 5677
  Cyclic GFR-binding peptide
  MOD_RES (1)..(3)..(35)..(36): Xaa is C or S

SEQ ID NO: 82574 - protein, 29 aa, Artificial Sequence
  Cyclic GFR-binding peptide
  MOD_RES (1)..(1): Xaa is C or S
XSEVTMNEYKFKVVNKNEDLYLISIPEMK

SEQ ID NO: 82575 - protein, 35 aa, Artificial Sequence
  Cyclic GFR-binding peptide
  MOD_RES (1)..(33)..(34): Xaa is C or S
XSEVTMNRYKKLVVNKNEDFYLISIANMKEPVXXP

SEQ ID NO: 82576 - protein, 23 aa, Artificial Sequence
  Cyclic GFR-binding peptide
MDRYKKLVVNNAADFYLISIANL

SEQ ID NO: 82577 - protein, 27 aa, Artificial Sequence
  Cyclic GFR-binding peptide
  MOD_RES (1)..(1): Xaa is C or S
XGEVVMDRYKKLVVKENEDFYLMSIAN

SEQ ID NO: 82578 - protein, 38 aa, Artificial Sequence
  Cyclic GFR-binding peptide
  MOD_RES (2)..(34)..(35): Xaa is C or S
AXSEVTMNPIKGYVVNKNEDFYLINIPSMKEPVXXPEP

SEQ ID NO: 82579 - protein, 30 aa, Artificial Sequence; identical to SEQ ID NO: 34017
  Cyclic GFR-binding peptide
  MOD_RES (27)..(28): Xaa is C or S

SEQ ID NO: 82580 - protein, 36 aa, Artificial Sequence; identical to SEQ ID NO: 34020
  Cyclic GFR-binding peptide
  MOD_RES (32)..(33): Xaa is C or S

SEQ ID NO: 82581 - protein, 33 aa, Artificial Sequence; identical to SEQ ID NO: 41162
  Cyclic GFR-binding peptide
  MOD_RES (32)..(33): Xaa is C or S

SEQ ID NO: 82582 - protein, 28 aa, Artificial Sequence
  Cyclic GFR-binding peptide
  MOD_RES (27)..(28): Xaa is C or S
NYHYKLIVNSSDDKYLVSIPSLQTPAXX

SEQ ID NO: 82583 - protein, 25 aa, Artificial Sequence
  Cyclic GFR-binding peptide
SKVIMRHKRLIKPTKGIYYLISTAS

SEQ ID NO: 82584 - protein, 30 aa, Artificial Sequence; identical to SEQ ID NO: 16134
  Cyclic GFR-binding peptide
  MOD_RES (2)..(2): Xaa is C or S

SEQ ID NO: 82585 - protein, 33 aa, Artificial Sequence; identical to SEQ ID NO: 5696
  Cyclic GFR-binding peptide
  MOD_RES (28)..(29): Xaa is C or S

SEQ ID NO: 82586 - protein, 30 aa, Artificial Sequence; identical to SEQ ID NO: 34029
  Cyclic GFR-binding peptide

SEQ ID NO: 82587 - protein, 27 aa, Artificial Sequence
  Cyclic GFR-binding peptide
  MOD_RES (27)..(27): Xaa is C or S
MEYKFKLLVRGNDLYLMSIPETKVPAX

SEQ ID NO: 82588 - protein, 31 aa, Artificial Sequence; identical to SEQ ID NO: 34033
  Cyclic GFR-binding peptide
  MOD_RES (26)..(27): Xaa is C or S

SEQ ID NO: 82589 - protein, 24 aa, Artificial Sequence
  Cyclic GFR-binding peptide
GPIKGYYTVVGKDFYLINIPSLKT

SEQ ID NO: 82590 - protein, 31 aa, Artificial Sequence
  Cyclic GFR-binding peptide
  MOD_RES (2)..(4): Xaa is C or S
SXKXSKVIMPIKGYIKPTKGIFYLINIPSLD

SEQ ID NO: 82591 - protein, 34 aa, Artificial Sequence; identical to SEQ ID NO: 41175
  Cyclic GFR-binding peptide
  MOD_RES (1)..(3): Xaa is C or S

SEQ ID NO: 82592 - protein, 26 aa, Artificial Sequence
  Cyclic GFR-binding peptide
  MOD_RES (26)..(26): Xaa is C or S
RYKKLIVNNSSDFYLVSIANLKTPAX

SEQ ID NO: 82593 - protein, 28 aa, Artificial Sequence
  Cyclic GFR-binding peptide
  MOD_RES (27)..(28): Xaa is C or S
MEYKFKVKPKRGVLYLISIPELAQPVXX

SEQ ID NO: 82594 - protein, 23 aa, Artificial Sequence
  Cyclic GFR-binding peptide
MDRYKKLVVNNASDFYLISIANL

SEQ ID NO: 82595 - protein, 41 aa, Artificial Sequence; identical to SEQ ID NO: 5704
  Cyclic GFR-binding peptide
  MOD_RES (1)..(3)..(35)..(36): Xaa is C or S

SEQ ID NO: 82596 - protein, 28 aa, Artificial Sequence
  Cyclic GFR-binding peptide
  MOD_RES (27)..(28): Xaa is C or S
EYHYKLVVKDYEDKYLMSIPSLETPVXX

SEQ ID NO: 82597 - protein, 24 aa, Artificial Sequence
  Cyclic GFR-binding peptide
VTMNRYKKLVVNKNEDFYLISIAN

SEQ ID NO: 82598 - protein, 30 aa, Artificial Sequence; identical to SEQ ID NO: 5706
  Cyclic GFR-binding peptide
  MOD_RES (29)..(30): Xaa is C or S

SEQ ID NO: 82599 - protein, 31 aa, Artificial Sequence; identical to SEQ ID NO: 5707
  Cyclic GFR-binding peptide
  MOD_RES (26)..(27): Xaa is C or S

SEQ ID NO: 82600 - protein, 39 aa, Artificial Sequence; identical to SEQ ID NO: 5708
  Cyclic GFR-binding peptide
  MOD_RES (2)..(4)..(35)..(36): Xaa is C or S

SEQ ID NO: 82601 - protein, 38 aa, Artificial Sequence; identical to SEQ ID NO: 5710
  Cyclic GFR-binding peptide
  MOD_RES (2)..(4)..(36)..(37): Xaa is C or S

SEQ ID NO: 82602 - protein, 29 aa, Artificial Sequence
  Cyclic GFR-binding peptide
  MOD_RES (27)..(28): Xaa is C or S
GRHKRLYTVVGKDYYLISTASLKTPVXXA

SEQ ID NO: 82603 - protein, 28 aa, Artificial Sequence
  Cyclic GFR-binding peptide
  MOD_RES (1)..(1): Xaa is C or S
XGEVVMDRHKRLVVKENEDYYLMSTASL

SEQ ID NO: 82604 - protein, 33 aa, Artificial Sequence; identical to SEQ ID NO: 5712
  Cyclic GFR-binding peptide
  MOD_RES (2)..(2): Xaa is C or S

SEQ ID NO: 82605 - protein, 31 aa, Artificial Sequence; identical to SEQ ID NO: 34048
  Cyclic GFR-binding peptide
  MOD_RES (1)..(3): Xaa is C or S

SEQ ID NO: 82606 - protein, 29 aa, Artificial Sequence
  Cyclic GFR-binding peptide
  MOD_RES (26)..(27): Xaa is C or S
PIKGYVVKENEDFYLMNIPSLETPVXXAK

SEQ ID NO: 82607 - protein, 29 aa, Artificial Sequence
  Cyclic GFR-binding peptide
  MOD_RES (29)..(29): Xaa is C or S
VMDRHKRLVVNNAADYYLISTASLRAPVX

SEQ ID NO: 82608 - protein, 31 aa, Artificial Sequence; identical to SEQ ID NO: 5715
  Cyclic GFR-binding peptide
  MOD_RES (1)..(3): Xaa is C or S

SEQ ID NO: 82609 - protein, 32 aa, Artificial Sequence; identical to SEQ ID NO: 5716
  Cyclic GFR-binding peptide
  MOD_RES (27)..(28): Xaa is C or S

SEQ ID NO: 82610 - protein, 21 aa, Artificial Sequence
  Cyclic GFR-binding peptide
RYKKLVVKDYEDFYLMSIANL

SEQ ID NO: 82611 - protein, 39 aa, Artificial Sequence; identical to SEQ ID NO: 34052
  Cyclic GFR-binding peptide
  MOD_RES (2)..(4)..(36)..(37): Xaa is C or S

SEQ ID NO: 82612 - protein, 37 aa, Artificial Sequence
  Cyclic GFR-binding peptide
  MOD_RES (31)..(32): Xaa is C or S
EVVMDEYKFKVVNNASDLYLISIPELRTPVXXTPPTS

SEQ ID NO: 82613 - protein, 35 aa, Artificial Sequence; identical to SEQ ID NO: 5721
  Cyclic GFR-binding peptide
  MOD_RES (2)..(4): Xaa is C or S

SEQ ID NO: 82614 - protein, 28 aa, Artificial Sequence
  Cyclic GFR-binding peptide
  MOD_RES (2)..(2): Xaa is C or S
GXARVVMNEYKFKIVNSSDDLYLVSIPE

SEQ ID NO: 82615 - protein, 42 aa, Artificial Sequence; identical to SEQ ID NO: 5722
  Cyclic GFR-binding peptide
  MOD_RES (2)..(4)..(36)..(37): Xaa is C or S

SEQ ID NO: 82616 - protein, 33 aa, Artificial Sequence; identical to SEQ ID NO: 41197
  Cyclic GFR-binding peptide
  MOD_RES (2)..(2): Xaa is C or S

SEQ ID NO: 82617 - protein, 38 aa, Artificial Sequence
  Cyclic GFR-binding peptide
  MOD_RES (32)..(33): Xaa is C or S
SEVVMDRHKRLVVNNASDYYLISTASLRTPVXXTPPTS

SEQ ID NO: 82618 - protein, 31 aa, Artificial Sequence; identical to SEQ ID NO: 5723
  Cyclic GFR-binding peptide
  MOD_RES (31)..(31): Xaa is C or S

SEQ ID NO: 82619 - protein, 34 aa, Artificial Sequence; identical to SEQ ID NO: 5724
  Cyclic GFR-binding peptide
  MOD_RES (29)..(30): Xaa is C or S

SEQ ID NO: 82620 - protein, 30 aa, Artificial Sequence; identical to SEQ ID NO: 41206
  Cyclic GFR-binding peptide
  MOD_RES (26)..(27): Xaa is C or S

SEQ ID NO: 82621 - protein, 35 aa, Artificial Sequence; identical to SEQ ID NO: 5728
  Cyclic GFR-binding peptide
  MOD_RES (31)..(32): Xaa is C or S

SEQ ID NO: 82622 - protein, 37 aa, Artificial Sequence; identical to SEQ ID NO: 5729
  Cyclic GFR-binding peptide
  MOD_RES (1)..(3)..(35)..(36): Xaa is C or S

SEQ ID NO: 82623 - protein, 37 aa, Artificial Sequence; identical to SEQ ID NO: 34062
  Cyclic GFR-binding peptide
  MOD_RES (32)..(33): Xaa is C or S

SEQ ID NO: 82624 - protein, 26 aa, Artificial Sequence
  Cyclic GFR-binding peptide
SEVTMNRHKRLVVNKNEDYYLISTAS

SEQ ID NO: 82625 - protein, 29 aa, Artificial Sequence
  Cyclic GFR-binding peptide
  MOD_RES (1)..(1): Xaa is C or S
XGEVVMERHKRLVVKDYEDYYLMSTASLE

SEQ ID NO: 82626 - protein, 32 aa, Artificial Sequence
  Cyclic GFR-binding peptide
  MOD_RES (1)..(1): Xaa is C or S
XSEVVMDEYKFKVVNNASDLYLISIPELRTPV

SEQ ID NO: 82627 - protein, 34 aa, Artificial Sequence; identical to SEQ ID NO: 34068
  Cyclic GFR-binding peptide
  MOD_RES (28)..(29): Xaa is C or S

SEQ ID NO: 82628 - protein, 40 aa, Artificial Sequence
  Cyclic GFR-binding peptide
  MOD_RES (1)..(3)..(35)..(36): Xaa is C or S
XGXSEVVMDRHKRLVVNNASDYYLISTASLRTPVXXTPPT

SEQ ID NO: 82629 - protein, 28 aa, Artificial Sequence
  Cyclic GFR-binding peptide
  MOD_RES (1)..(1): Xaa is C or S
XEEVIMRHKRLLLVRGNDYYLMSTASTK

SEQ ID NO: 82630 - protein, 27 aa, Artificial Sequence
  Cyclic GFR-binding peptide
MGEEYKFKTPVGMDDLYLVSIPELKTP

SEQ ID NO: 82631 - protein, 29 aa, Artificial Sequence
  Cyclic GFR-binding peptide
  MOD_RES (1)..(3): Xaa is C or S
XGXSRVVMNPIKGYIVNSSDDFYLVNIPS

SEQ ID NO: 82632 - protein, 25 aa, Artificial Sequence
  Cyclic GFR-binding peptide
KVVMNEYKFKIVNNSSDLYLVSIPE

SEQ ID NO: 82633 - protein, 28 aa, Artificial Sequence
  Cyclic GFR-binding peptide
  MOD_RES (27)..(28): Xaa is C or S
MPIKGYIKPTKGIFYLINIPSLDQSVXX

SEQ ID NO: 82634 - protein, 35 aa, Artificial Sequence
  Cyclic GFR-binding peptide
  MOD_RES (2)..(33)..(34): Xaa is C or S
GXEEVIMRHKRLLLVRGNDYYLMSTASTKVPAXXT

SEQ ID NO: 82635 - protein, 24 aa, Artificial Sequence
  Cyclic GFR-binding peptide
EYKFKIVNSSDDLYLVSIPELKTP

SEQ ID NO: 82636 - protein, 30 aa, Artificial Sequence; identical to SEQ ID NO: 5740
  Cyclic GFR-binding peptide

SEQ ID NO: 82637 - protein, 31 aa, Artificial Sequence; identical to SEQ ID NO: 5741
  Cyclic GFR-binding peptide
  MOD_RES (27)..(28): Xaa is C or S

SEQ ID NO: 82638 - protein, 36 aa, Artificial Sequence; identical to SEQ ID NO: 41217
  Cyclic GFR-binding peptide
  MOD_RES (30)..(31): Xaa is C or S

SEQ ID NO: 82639 - protein, 28 aa, Artificial Sequence
  Cyclic GFR-binding peptide
  MOD_RES (27)..(28): Xaa is C or S
EPIKGYVVKDYEDFYLMNIPSLETPVXX

SEQ ID NO: 82640 - protein, 24 aa, Artificial Sequence
  Cyclic GFR-binding peptide
VVMRYKKLVKPTRGVFYLISIANL

SEQ ID NO: 82641 - protein, 31 aa, Artificial Sequence
  Cyclic GFR-binding peptide
  MOD_RES (31)..(31): Xaa is C or S
DVVMGEYKFKIIQQKDNLYLMSIPEMKTPTX

SEQ ID NO: 82642 - protein, 40 aa, Artificial Sequence; identical to SEQ ID NO: 76399
  Cyclic GFR-binding peptide
  MOD_RES (2)..(34)..(35): Xaa is C or S

SEQ ID NO: 82643 - protein, 34 aa, Artificial Sequence; identical to SEQ ID NO: 34079
  Cyclic GFR-binding peptide
  MOD_RES (1)..(33)..(34): Xaa is C or S

SEQ ID NO: 82644 - protein, 30 aa, Artificial Sequence
  Cyclic GFR-binding peptide
  MOD_RES (30)..(30): Xaa is C or S
EVIMYHYKLLLVRGNDKYLMSIPSTKVPAX

SEQ ID NO: 82645 - protein, 30 aa, Artificial Sequence; identical to SEQ ID NO: 34083
  Cyclic GFR-binding peptide
  MOD_RES (26)..(27): Xaa is C or S

SEQ ID NO: 82646 - protein, 32 aa, Artificial Sequence; identical to SEQ ID NO: 5751
  Cyclic GFR-binding peptide
  MOD_RES (1)..(3): Xaa is C or S

SEQ ID NO: 82647 - protein, 42 aa, Artificial Sequence; identical to SEQ ID NO: 34086
  Cyclic GFR-binding peptide
  MOD_RES (2)..(4)..(36)..(37): Xaa is C or S

SEQ ID NO: 82648 - protein, 36 aa, Artificial Sequence
  Cyclic GFR-binding peptide
  MOD_RES (30)..(31): Xaa is C or S
VTMNPIKGYVVNKNEDFYLINIPSMKEPVXXPEPIG

SEQ ID NO: 82649 - protein, 23 aa, Artificial Sequence
  Cyclic GFR-binding peptide
MNYHYKLIVNSSDDKYLVSIPSL

SEQ ID NO: 82650 - protein, 29 aa, Artificial Sequence
  Cyclic GFR-binding peptide
SRVIMYHYKLVKPKRGVKYLISIPSLAQP

SEQ ID NO: 82651 - protein, 28 aa, Artificial Sequence
  Cyclic GFR-binding peptide
  MOD_RES (2)..(2): Xaa is C or S
GXEEVIMPIKGYLLVRGNDFYLMNIPST

SEQ ID NO: 82652 - protein, 32 aa, Artificial Sequence
  Cyclic GFR-binding peptide
  MOD_RES (2)..(2): Xaa is C or S
KXSKVVMPIKGYVKPTRGVFYLINIPSLDQPV

SEQ ID NO: 82653 - protein, 29 aa, Artificial Sequence
  Cyclic GFR-binding peptide
  MOD_RES (26)..(27): Xaa is C or S
RHKRLYTVVGKDYYLISTASLKTPVXXAK

SEQ ID NO: 82654 - protein, 34 aa, Artificial Sequence
  Cyclic GFR-binding peptide
  MOD_RES (28)..(29): Xaa is C or S
IMEYKFKLLVRGNDLYLMSIPETKVPAXXTSPVR

SEQ ID NO: 82655 - protein, 31 aa, Artificial Sequence; identical to SEQ ID NO: 34095
  Cyclic GFR-binding peptide
  MOD_RES (30)..(31): Xaa is C or S

SEQ ID NO: 82656 - protein, 37 aa, Artificial Sequence; identical to SEQ ID NO: 5762
  Cyclic GFR-binding peptide
  MOD_RES (2)..(33)..(34): Xaa is C or S

SEQ ID NO: 82657 - protein, 27 aa, Artificial Sequence
  Cyclic GFR-binding peptide
  MOD_RES (26)..(27): Xaa is C or S
PIKGYVKPKRGVFYLINIPSLAQPVXX

SEQ ID NO: 82658 - protein, 24 aa, Artificial Sequence
  Cyclic GFR-binding peptide
GYHYKLIIQQKDNKYLMSIPSMKT

SEQ ID NO: 82659 - protein, 31 aa, Artificial Sequence
  Cyclic GFR-binding peptide
  MOD_RES (29)..(30): Xaa is C or S
VVMPIKGYVKPTRGVFYLINIPSLDQPVXXP

SEQ ID NO: 82660 - protein, 27 aa, Artificial Sequence
  Cyclic GFR-binding peptide
EVVMDRYKKLVVKENEDFYLMSIANLE

SEQ ID NO: 82661 - protein, 30 aa, Artificial Sequence
  Cyclic GFR-binding peptide
EEVIMRHKRLLLVRGNDYYLMSTASTKVPA

SEQ ID NO: 82662 - protein, 31 aa, Artificial Sequence; identical to SEQ ID NO: 5769
  Cyclic GFR-binding peptide
  MOD_RES (2)..(2): Xaa is C or S

SEQ ID NO: 82663 - protein, 30 aa, Artificial Sequence
  Cyclic GFR-binding peptide
  MOD_RES (26)..(27): Xaa is C or S
YHYKLIIQQKDNKYLMSIPSMKTPTXXPGA

SEQ ID NO: 82664 - protein, 32 aa, Artificial Sequence
  Cyclic GFR-binding peptide
  MOD_RES (27)..(28): Xaa is C or S
MRHKRLLLVRGNDYYLMSTASTKVPAXXTSPV

SEQ ID NO: 82665 - protein, 29 aa, Artificial Sequence
  Cyclic GFR-binding peptide
EAVSMGEPIKGYTPVGMDDFYLVNIPSLK

SEQ ID NO: 82666 - protein, 33 aa, Artificial Sequence; identical to SEQ ID NO: 41265
  Cyclic GFR-binding peptide
  MOD_RES (27)..(28): Xaa is C or S

SEQ ID NO: 82667 - protein, 32 aa, Artificial Sequence; identical to SEQ ID NO: 5776
  Cyclic GFR-binding peptide
  MOD_RES (31)..(31): Xaa is C or S

SEQ ID NO: 82668 - protein, 24 aa, Artificial Sequence
  Cyclic GFR-binding peptide
RHKRLLLVRGNDYYLMSTASTKVP

SEQ ID NO: 82669 - protein, 31 aa, Artificial Sequence
  Cyclic GFR-binding peptide
  MOD_RES (28)..(29): Xaa is C or S
MGRHKRLYTVVGKDYYLISTASLKTPVXXAK

SEQ ID NO: 82670 - protein, 27 aa, Artificial Sequence
  Cyclic GFR-binding peptide
RVVMNPIKGYIVNSSDDFYLVNIPSLK

SEQ ID NO: 82671 - protein, 31 aa, Artificial Sequence; identical to SEQ ID NO: 5777
  Cyclic GFR-binding peptide
  MOD_RES (30)..(30): Xaa is C or S

SEQ ID NO: 82672 - protein, 28 aa, Artificial Sequence
  Cyclic GFR-binding peptide
  MOD_RES (2)..(2): Xaa is C or S
GXAKVVMNPIKGYIVNNSSDFYLVNIPS

SEQ ID NO: 82673 - protein, 24 aa, Artificial Sequence
  Cyclic GFR-binding peptide
VMNPIKGYIVNSSDDFYLVNIPSL

SEQ ID NO: 82674 - protein, 24 aa, Artificial Sequence
  Cyclic GFR-binding peptide
KVIMRYKKLIKPTKGIFYLISIAN

SEQ ID NO: 82675 - protein, 21 aa, Artificial Sequence
  Cyclic GFR-binding peptide
MRYKKLVKPTRGVFYLISIAN

SEQ ID NO: 82676 - protein, 37 aa, Artificial Sequence
  Cyclic GFR-binding peptide
  MOD_RES (31)..(32): Xaa is C or S
DVVMGRHKRLIIQQKDNYYLMSTASMKTPTXXPGASG

SEQ ID NO: 82677 - protein, 31 aa, Artificial Sequence; identical to SEQ ID NO: 5784
  Cyclic GFR-binding peptide
  MOD_RES (30)..(31): Xaa is C or S

SEQ ID NO: 82678 - protein, 25 aa, Artificial Sequence
  Cyclic GFR-binding peptide
VIMPIKGYVKPKRGVFYLINIPSLA

SEQ ID NO: 82679 - protein, 22 aa, Artificial Sequence
  Cyclic GFR-binding peptide
YHYKLIVNSSDDKYLVSIPSLQ

SEQ ID NO: 82680 - protein, 34 aa, Artificial Sequence; identical to SEQ ID NO: 34126
  Cyclic GFR-binding peptide
  MOD_RES (2)..(2): Xaa is C or S

SEQ ID NO: 82681 - protein, 37 aa, Artificial Sequence; identical to SEQ ID NO: 5791
  Cyclic GFR-binding peptide
  MOD_RES (33)..(34): Xaa is C or S

SEQ ID NO: 82682 - protein, 39 aa, Artificial Sequence; identical to SEQ ID NO: 5793
  Cyclic GFR-binding peptide
  MOD_RES (2)..(4)..(36)..(37): Xaa is C or S

SEQ ID NO: 82683 - protein, 28 aa, Artificial Sequence
  Cyclic GFR-binding peptide
  MOD_RES (1)..(1): Xaa is C or S
XAEVVMDPIKGYVVNNAADFYLINIPSL

SEQ ID NO: 82684 - protein, 34 aa, Artificial Sequence
  Cyclic GFR-binding peptide
  MOD_RES (1)..(3): Xaa is C or S
XGXRDVVMGEYKFKIIQQKDNLYLMSIPEMKTPT

SEQ ID NO: 82685 - protein, 31 aa, Artificial Sequence
  Cyclic GFR-binding peptide
  MOD_RES (29)..(30): Xaa is C or S
VIMRHKRLLLVRGNDYYLMSTASTKVPAXXT

SEQ ID NO: 82686 - protein, 35 aa, Artificial Sequence; identical to SEQ ID NO: 34132
  Cyclic GFR-binding peptide
  MOD_RES (31)..(32): Xaa is C or S

SEQ ID NO: 82687 - protein, 23 aa, Artificial Sequence
  Cyclic GFR-binding peptide
VIMYHYKLVKPKRGVKYLISIPS

SEQ ID NO: 82688 - protein, 25 aa, Artificial Sequence
  Cyclic GFR-binding peptide
VMNRYKKLIVNNSSDFYLVSIANLK

SEQ ID NO: 82689 - protein, 31 aa, Artificial Sequence; identical to SEQ ID NO: 5804
  Cyclic GFR-binding peptide
  MOD_RES (1)..(1): Xaa is C or S

SEQ ID NO: 82690 - protein, 37 aa, Artificial Sequence; identical to SEQ ID NO: 5805
  Cyclic GFR-binding peptide
  MOD_RES (32)..(33): Xaa is C or S

SEQ ID NO: 82691 - protein, 39 aa, Artificial Sequence; identical to SEQ ID NO: 76426
  Cyclic GFR-binding peptide
  MOD_RES (2)..(33)..(34): Xaa is C or S

SEQ ID NO: 82692 - protein, 26 aa, Artificial Sequence
  Cyclic GFR-binding peptide
VMNYHYKLIVNSSDDKYLVSIPSLKT

SEQ ID NO: 82693 - protein, 27 aa, Artificial Sequence
  Cyclic GFR-binding peptide
  MOD_RES (27)..(27): Xaa is C or S
MPIKGYVKPTRGVFYLINIPSLDQPVX

SEQ ID NO: 82694 - protein, 24 aa, Artificial Sequence
  Cyclic GFR-binding peptide
VMNYHYKLIVNNSSDKYLVSIPSL

SEQ ID NO: 82695 - protein, 22 aa, Artificial Sequence
  Cyclic GFR-binding peptide
MGRYKKLYTVVGKDFYLISIAN

SEQ ID NO: 82696 - protein, 34 aa, Artificial Sequence; identical to SEQ ID NO: 34144
  Cyclic GFR-binding peptide
  MOD_RES (31)..(32): Xaa is C or S

SEQ ID NO: 82697 - protein, 31 aa, Artificial Sequence; identical to SEQ ID NO: 41307
  Cyclic GFR-binding peptide
  MOD_RES (31)..(31): Xaa is C or S

SEQ ID NO: 82698 - protein, 31 aa, Artificial Sequence; identical to SEQ ID NO: 34151
  Cyclic GFR-binding peptide
  MOD_RES (30)..(31): Xaa is C or S

SEQ ID NO: 82699 - protein, 27 aa, Artificial Sequence
  Cyclic GFR-binding peptide
  MOD_RES (27)..(27): Xaa is C or S
NEYKFKIVNSSDDLYLVSIPELQTPAX

SEQ ID NO: 82700 - protein, 30 aa, Artificial Sequence; identical to SEQ ID NO: 5822
  Cyclic GFR-binding peptide
  MOD_RES (26)..(27): Xaa is C or S

SEQ ID NO: 82701 - protein, 34 aa, Artificial Sequence; identical to SEQ ID NO: 5828
  Cyclic GFR-binding peptide
  MOD_RES (29)..(30): Xaa is C or S

SEQ ID NO: 82702 - protein, 30 aa, Artificial Sequence; identical to SEQ ID NO: 5829
  Cyclic GFR-binding peptide

SEQ ID NO: 82703 - protein, 32 aa, Artificial Sequence; identical to SEQ ID NO: 41312
  Cyclic GFR-binding peptide
  MOD_RES (26)..(27): Xaa is C or S

SEQ ID NO: 82704 - protein, 30 aa, Artificial Sequence; identical to SEQ ID NO: 34160
  Cyclic GFR-binding peptide

SEQ ID NO: 82705 - protein, 29 aa, Artificial Sequence
  Cyclic GFR-binding peptide
  MOD_RES (26)..(27): Xaa is C or S
PIKGYIVNSSDDFYLVNIPSLQTPAXXPK

SEQ ID NO: 82706 - protein, 30 aa, Artificial Sequence; identical to SEQ ID NO: 41316
  Cyclic GFR-binding peptide
  MOD_RES (2)..(2): Xaa is C or S

SEQ ID NO: 82707 - protein, 35 aa, Artificial Sequence; identical to SEQ ID NO: 76436
  Cyclic GFR-binding peptide
  MOD_RES (29)..(30): Xaa is C or S

SEQ ID NO: 82708 - protein, 23 aa, Artificial Sequence
  Cyclic GFR-binding peptide
RYKKLTPVGMDDFYLVSIANLKT

SEQ ID NO: 82709 - protein, 29 aa, Artificial Sequence
  Cyclic GFR-binding peptide
  MOD_RES (27)..(28): Xaa is C or S
EEYKFKVVKDYEDLYLMSIPELETPVXXA

SEQ ID NO: 82710 - protein, 28 aa, Artificial Sequence
  Cyclic GFR-binding peptide
EVVMDPIKGYVVKENEDFYLMNIPSLET

SEQ ID NO: 82711 - protein, 25 aa, Artificial Sequence
  Cyclic GFR-binding peptide
VMDPIKGYVVNNAADFYLINIPSLR

SEQ ID NO: 82712 - protein, 38 aa, Artificial Sequence; identical to SEQ ID NO: 5834
  Cyclic GFR-binding peptide
  MOD_RES (32)..(33): Xaa is C or S

SEQ ID NO: 82713 - protein, 29 aa, Artificial Sequence
  Cyclic GFR-binding peptide
  MOD_RES (29)..(29): Xaa is C or S
VMDEYKFKVVNNASDLYLISIPELRTPVX

SEQ ID NO: 82714 - protein, 28 aa, Artificial Sequence
  Cyclic GFR-binding peptide
SKVVMEYKFKVKPTRGVLYLISIPELDQ

SEQ ID NO: 82715 - protein, 31 aa, Artificial Sequence; identical to SEQ ID NO: 5837
  Cyclic GFR-binding peptide

SEQ ID NO: 82716 - protein, 28 aa, Artificial Sequence
  Cyclic GFR-binding peptide
VMNEYKFKIVNSSDDLYLVSIPELKTPA

SEQ ID NO: 82717 - protein, 29 aa, Artificial Sequence
  Cyclic GFR-binding peptide
  MOD_RES (2)..(4): Xaa is C or S
LXGXEEVIMEYKFKLLVRGNDLYLMSIPE

SEQ ID NO: 82718 - protein, 28 aa, Artificial Sequence
  Cyclic GFR-binding peptide
  MOD_RES (1)..(3): Xaa is C or S
XKXSKVVMYHYKLVKPTRGVKYLISIPS

SEQ ID NO: 82719 - protein, 31 aa, Artificial Sequence; identical to SEQ ID NO: 34177
  Cyclic GFR-binding peptide
  MOD_RES (1)..(3): Xaa is C or S

SEQ ID NO: 82720 - protein, 40 aa, Artificial Sequence; identical to SEQ ID NO: 41330
  Cyclic GFR-binding peptide
  MOD_RES (2)..(4)..(36)..(37): Xaa is C or S

SEQ ID NO: 82721 - protein, 31 aa, Artificial Sequence; identical to SEQ ID NO: 76450
  Cyclic GFR-binding peptide
  MOD_RES (27)..(28): Xaa is C or S

SEQ ID NO: 82722 - protein, 23 aa, Artificial Sequence
  Cyclic GFR-binding peptide
MDRHKRLVVKENEDYYLMSTASL

SEQ ID NO: 82723 - protein, 26 aa, Artificial Sequence
  Cyclic GFR-binding peptide
ARVVMNEYKFKIVNSSDDLYLVSIPE

SEQ ID NO: 82724 - protein, 34 aa, Artificial Sequence
  Cyclic GFR-binding peptide
  MOD_RES (2)..(4): Xaa is C or S
LXGXEEVIMRHKRLLLVRGNDYYLMSTASTKVPA

SEQ ID NO: 82725 - protein, 34 aa, Artificial Sequence; identical to SEQ ID NO: 5845
  Cyclic GFR-binding peptide
  MOD_RES (32)..(33): Xaa is C or S

SEQ ID NO: 82726 - protein, 38 aa, Artificial Sequence; identical to SEQ ID NO: 5848
  Cyclic GFR-binding peptide
  MOD_RES (2)..(4)..(36)..(37): Xaa is C or S

SEQ ID NO: 82727 - protein, 30 aa, Artificial Sequence; identical to SEQ ID NO: 34185
  Cyclic GFR-binding peptide
  MOD_RES (28)..(28): Xaa is C or S

SEQ ID NO: 82728 - protein, 23 aa, Artificial Sequence
  Cyclic GFR-binding peptide
VMGEYKFKIIQQKDNLYLMSIPE

SEQ ID NO: 82729 - protein, 20 aa, Artificial Sequence
  Cyclic GFR-binding peptide
PIKGYIVNSSDDFYLVNIPS

SEQ ID NO: 82730 - protein, 30 aa, Artificial Sequence; identical to SEQ ID NO: 41338
  Cyclic GFR-binding peptide
  MOD_RES (26)..(27): Xaa is C or S

SEQ ID NO: 82731 - protein, 34 aa, Artificial Sequence; identical to SEQ ID NO: 41342
  Cyclic GFR-binding peptide
  MOD_RES (28)..(29): Xaa is C or S

SEQ ID NO: 82732 - protein, 32 aa, Artificial Sequence; identical to SEQ ID NO: 5853
  Cyclic GFR-binding peptide
  MOD_RES (1)..(3): Xaa is C or S

SEQ ID NO: 82733 - protein, 25 aa, Artificial Sequence
  Cyclic GFR-binding peptide
YHYKLVVKENEDKYLMSIPSLETPV

SEQ ID NO: 82734 - protein, 30 aa, Artificial Sequence
  Cyclic GFR-binding peptide
SEVTMNRYKKLVVNKNEDFYLISIANMKEP

SEQ ID NO: 82735 - protein, 36 aa, Artificial Sequence; identical to SEQ ID NO: 5855
  Cyclic GFR-binding peptide
  MOD_RES (31)..(31): Xaa is C or S

SEQ ID NO: 82736 - protein, 28 aa, Artificial Sequence
  Cyclic GFR-binding peptide
  MOD_RES (28)..(28): Xaa is C or S
IMRHKRLVKPKRGVYYLISTASLAQPVX

SEQ ID NO: 82737 - protein, 41 aa, Artificial Sequence; identical to SEQ ID NO: 34191
  Cyclic GFR-binding peptide
  MOD_RES (1)..(3)..(35)..(36): Xaa is C or S

SEQ ID NO: 82738 - protein, 25 aa, Artificial Sequence
  Cyclic GFR-binding peptide
DRYKKLVVNNASDFYLISIANLRTP

SEQ ID NO: 82739 - protein, 30 aa, Artificial Sequence
  Cyclic GFR-binding peptide
  MOD_RES (27)..(28): Xaa is C or S
DEYKFKVVNNASDLYLISIPELRTPVXXTP

SEQ ID NO: 82740 - protein, 28 aa, Artificial Sequence
  Cyclic GFR-binding peptide
  MOD_RES (1)..(3): Xaa is C or S
XGXEEVIMPIKGYLLVRGNDFYLMNIPS

SEQ ID NO: 82741 - protein, 31 aa, Artificial Sequence; identical to SEQ ID NO: 41351
  Cyclic GFR-binding peptide
  MOD_RES (2)..(2): Xaa is C or S

SEQ ID NO: 82742 - protein, 39 aa, Artificial Sequence; identical to SEQ ID NO: 5857
  Cyclic GFR-binding peptide
  MOD_RES (1)..(33): Xaa is C or S

SEQ ID NO: 82743 - protein, 39 aa, Artificial Sequence; identical to SEQ ID NO: 5858
  Cyclic GFR-binding peptide
  MOD_RES (2)..(4)..(36)..(37): Xaa is C or S

SEQ ID NO: 82744 - protein, 37 aa, Artificial Sequence
  Cyclic GFR-binding peptide
  MOD_RES (2)..(34)..(35): Xaa is C or S
GXRDVVMGYHYKLIIQQKDNKYLMSIPSMKTPTXXPG

SEQ ID NO: 82745 - protein, 31 aa, Artificial Sequence; identical to SEQ ID NO: 41354
  Cyclic GFR-binding peptide
  MOD_RES (2)..(2): Xaa is C or S

SEQ ID NO: 82746 - protein, 26 aa, Artificial Sequence
  Cyclic GFR-binding peptide
SRVVMNEYKFKIVNSSDDLYLVSIPE

SEQ ID NO: 82747 - protein, 29 aa, Artificial Sequence
  Cyclic GFR-binding peptide
AVSMGEEYKFKTPVGMDDLYLVSIPELKT

SEQ ID NO: 82748 - protein, 36 aa, Artificial Sequence; identical to SEQ ID NO: 5864
  Cyclic GFR-binding peptide
  MOD_RES (2)..(33)..(34): Xaa is C or S

SEQ ID NO: 82749 - protein, 32 aa, Artificial Sequence; identical to SEQ ID NO: 34200
  Cyclic GFR-binding peptide
  MOD_RES (27)..(28): Xaa is C or S

SEQ ID NO: 82750 - protein, 39 aa, Artificial Sequence; identical to SEQ ID NO: 41364
  Cyclic GFR-binding peptide
  MOD_RES (1)..(3)..(35)..(36): Xaa is C or S

SEQ ID NO: 82751 - protein, 34 aa, Artificial Sequence; identical to SEQ ID NO: 41365
  Cyclic GFR-binding peptide
  MOD_RES (2)..(33)..(34): Xaa is C or S

SEQ ID NO: 82752 - protein, 26 aa, Artificial Sequence
  Cyclic GFR-binding peptide
TMNRHKRLVVNKNEDYYLISTASMKE

SEQ ID NO: 82753 - protein, 31 aa, Artificial Sequence; identical to SEQ ID NO: 41369
  Cyclic GFR-binding peptide
  MOD_RES (1)..(1): Xaa is C or S

SEQ ID NO: 82754 - protein, 29 aa, Artificial Sequence
  Cyclic GFR-binding peptide
KVIMRHKRLIKPTKGIYYLISTASLDQSV

SEQ ID NO: 82755 - protein, 26 aa, Artificial Sequence
  Cyclic GFR-binding peptide
SKVIMEYKFKIKPTKGILYLISIPEL

SEQ ID NO: 82756 - protein, 32 aa, Artificial Sequence; identical to SEQ ID NO: 34211
  Cyclic GFR-binding peptide
  MOD_RES (30)..(31): Xaa is C or S

SEQ ID NO: 82757 - protein, 29 aa, Artificial Sequence
  Cyclic GFR-binding peptide
  MOD_RES (28)..(29): Xaa is C or S
MNPIKGYIVNSSDDFYLVNIPSLKTPAXX

SEQ ID NO: 82758 - protein, 28 aa, Artificial Sequence
  Cyclic GFR-binding peptide
  MOD_RES (27)..(28): Xaa is C or S
MEYKFKVKPTRGVLYLISIPELDQPVXX

SEQ ID NO: 82759 - protein, 27 aa, Artificial Sequence
  Cyclic GFR-binding peptide
IMRYKKLVKPKRGVFYLISIANLAQPV

SEQ ID NO: 82760 - protein, 35 aa, Artificial Sequence
  Cyclic GFR-binding peptide
  MOD_RES (29)..(30): Xaa is C or S
VMDRHKRLVVNNAADYYLISTASLRAPVXXSAPAA

SEQ ID NO: 82761 - protein, 35 aa, Artificial Sequence; identical to SEQ ID NO: 5883
  Cyclic GFR-binding peptide
  MOD_RES (2)..(34)..(35): Xaa is C or S

SEQ ID NO: 82762 - protein, 31 aa, Artificial Sequence; identical to SEQ ID NO: 41384
  Cyclic GFR-binding peptide
  MOD_RES (26)..(27): Xaa is C or S

SEQ ID NO: 82763 - protein, 37 aa, Artificial Sequence; identical to SEQ ID NO: 41388
  Cyclic GFR-binding peptide
  MOD_RES (2)..(34)..(35): Xaa is C or S

SEQ ID NO: 82764 - protein, 33 aa, Artificial Sequence
  Cyclic GFR-binding peptide
  MOD_RES (27)..(28): Xaa is C or S
NYHYKLIVNSSDDKYLVSIPSLKTPAXXPKPVH

SEQ ID NO: 82765 - protein, 35 aa, Artificial Sequence; identical to SEQ ID NO: 34222
  Cyclic GFR-binding peptide
  MOD_RES (1)..(3)..(34)..(35): Xaa is C or S

SEQ ID NO: 82766 - protein, 35 aa, Artificial Sequence; identical to SEQ ID NO: 41395
  Cyclic GFR-binding peptide
  MOD_RES (29)..(30): Xaa is C or S

SEQ ID NO: 82767 - protein, 30 aa, Artificial Sequence
  Cyclic GFR-binding peptide
  MOD_RES (1)..(1): Xaa is C or S
XEEVIMRHKRLLLVRGNDYYLMSTASTKVP

SEQ ID NO: 82768 - protein, 35 aa, Artificial Sequence
  Cyclic GFR-binding peptide
  MOD_RES (32)..(33): Xaa is C or S
ESVAMGRHKRLYTVVGKDYYLISTASLKTPVXXAK

SEQ ID NO: 82769 - protein, 25 aa, Artificial Sequence
  Cyclic GFR-binding peptide
GERHKRLTPVGMDDYYLVSTASLKT

SEQ ID NO: 82770 - protein, 25 aa, Artificial Sequence
  Cyclic GFR-binding peptide
EYKFKVVKENEDLYLMSIPELETPV

SEQ ID NO: 82771 - protein, 31 aa, Artificial Sequence; identical to SEQ ID NO: 34231
  Cyclic GFR-binding peptide
  MOD_RES (1)..(3): Xaa is C or S

SEQ ID NO: 82772 - protein, 40 aa, Artificial Sequence; identical to SEQ ID NO: 5897
  Cyclic GFR-binding peptide
  MOD_RES (2)..(34)..(35): Xaa is C or S

SEQ ID NO: 82773 - protein, 27 aa, Artificial Sequence
  Cyclic GFR-binding peptide
  MOD_RES (27)..(27): Xaa is C or S
GYHYKLIIQQKDNKYLMSIPSMKTPTX

SEQ ID NO: 82774 - protein, 37 aa, Artificial Sequence; identical to SEQ ID NO: 5898
  Cyclic GFR-binding peptide
  MOD_RES (1)..(33)..(34): Xaa is C or S

SEQ ID NO: 82775 - protein, 39 aa, Artificial Sequence; identical to SEQ ID NO: 5899
  Cyclic GFR-binding peptide
  MOD_RES (1)..(33): Xaa is C or S

SEQ ID NO: 82776 - protein, 32 aa, Artificial Sequence
  Cyclic GFR-binding peptide
  MOD_RES (32)..(32): Xaa is C or S
SEVVMDYHYKLVVNNASDKYLISIPSLRTPVX

SEQ ID NO: 82777 - protein, 36 aa, Artificial Sequence
  Cyclic GFR-binding peptide
  MOD_RES (1)..(32)..(33): Xaa is C or S
XSKVIMPIKGYIKPTKGIFYLINIPSLDQSVXXPSA

SEQ ID NO: 82778 - protein, 30 aa, Artificial Sequence; identical to SEQ ID NO: 5902
  Cyclic GFR-binding peptide
  MOD_RES (29)..(30): Xaa is C or S

SEQ ID NO: 82779 - protein, 28 aa, Artificial Sequence
  Cyclic GFR-binding peptide
  MOD_RES (27)..(28): Xaa is C or S
MYHYKLLLVRGNDKYLMSIPSTKVPAXX

SEQ ID NO: 82780 - protein, 27 aa, Artificial Sequence
  Cyclic GFR-binding peptide
  MOD_RES (27)..(27): Xaa is C or S
DRHKRLVVKENEDYYLMSTASLETPVX

SEQ ID NO: 82781 - protein, 28 aa, Artificial Sequence
  Cyclic GFR-binding peptide
VIMRHKRLIKPTKGIYYLISTASLDQSV

SEQ ID NO: 82782 - protein, 31 aa, Artificial Sequence; identical to SEQ ID NO: 34242
  Cyclic GFR-binding peptide
  MOD_RES (27)..(28): Xaa is C or S

SEQ ID NO: 82783 - protein, 32 aa, Artificial Sequence
  Cyclic GFR-binding peptide
  MOD_RES (2)..(4): Xaa is C or S
LXGXEEVIMYHYKLLLVRGNDKYLMSIPSTKV

SEQ ID NO: 82784 - protein, 29 aa, Artificial Sequence
  Cyclic GFR-binding peptide
  MOD_RES (1)..(3): Xaa is C or S
XGXSRVVMNRHKRLIVNSSDDYYLVSTAS

SEQ ID NO: 82785 - protein, 23 aa, Artificial Sequence
  Cyclic GFR-binding peptide
TMNPIKGYVVNKNEDFYLINIPS

SEQ ID NO: 82786 - protein, 41 aa, Artificial Sequence; identical to SEQ ID NO: 5910
  Cyclic GFR-binding peptide
  MOD_RES (2)..(4)..(35)..(36): Xaa is C or S

SEQ ID NO: 82787 - protein, 33 aa, Artificial Sequence; identical to SEQ ID NO: 5911
  Cyclic GFR-binding peptide
  MOD_RES (28)..(29): Xaa is C or S

SEQ ID NO: 82788 - protein, 35 aa, Artificial Sequence; identical to SEQ ID NO: 5913
  Cyclic GFR-binding peptide
  MOD_RES (2)..(34)..(35): Xaa is C or S

SEQ ID NO: 82789 - protein, 33 aa, Artificial Sequence
  Cyclic GFR-binding peptide
  MOD_RES (31)..(32): Xaa is C or S
EEVIMRHKRLLLVRGNDYYLMSTASTKVPAXXT

SEQ ID NO: 82790 - protein, 32 aa, Artificial Sequence; identical to SEQ ID NO: 76503
  Cyclic GFR-binding peptide
  MOD_RES (2)..(2): Xaa is C or S

SEQ ID NO: 82791 - protein, 30 aa, Artificial Sequence; identical to SEQ ID NO: 5915
  Cyclic GFR-binding peptide
  MOD_RES (28)..(29): Xaa is C or S

SEQ ID NO: 82792 - protein, 27 aa, Artificial Sequence
  Cyclic GFR-binding peptide
  MOD_RES (2)..(2): Xaa is C or S
KXSRVIMPIKGYVKPKRGVFYLINIPS

SEQ ID NO: 82793 - protein, 30 aa, Artificial Sequence; identical to SEQ ID NO: 41423
  Cyclic GFR-binding peptide
  MOD_RES (1)..(1): Xaa is C or S

SEQ ID NO: 82794 - protein, 30 aa, Artificial Sequence; identical to SEQ ID NO: 5919
  Cyclic GFR-binding peptide
  MOD_RES (26)..(27): Xaa is C or S

SEQ ID NO: 82795 - protein, 23 aa, Artificial Sequence
  Cyclic GFR-binding peptide
MRYKKLVKPTRGVFYLISIANLD

SEQ ID NO: 82796 - protein, 26 aa, Artificial Sequence
  Cyclic GFR-binding peptide
GEVVMDRYKKLVVKENEDFYLMSIAN

SEQ ID NO: 82797 - protein, 29 aa, Artificial Sequence
  Cyclic GFR-binding peptide
  MOD_RES (29)..(29): Xaa is C or S
VMERYKKLVVKDYEDFYLMSIANLETPVX

SEQ ID NO: 82798 - protein, 33 aa, Artificial Sequence; identical to SEQ ID NO: 41432
  Cyclic GFR-binding peptide
  MOD_RES (28)..(29): Xaa is C or S

SEQ ID NO: 82799 - protein, 34 aa, Artificial Sequence
  Cyclic GFR-binding peptide
  MOD_RES (28)..(29): Xaa is C or S
MGYHYKLIIQQKDNKYLMSIPSMKTPTXXPGASG

SEQ ID NO: 82800 - protein, 34 aa, Artificial Sequence; identical to SEQ ID NO: 5928
  Cyclic GFR-binding peptide
  MOD_RES (2)..(4): Xaa is C or S

SEQ ID NO: 82801 - protein, 30 aa, Artificial Sequence; identical to SEQ ID NO: 5932
  Cyclic GFR-binding peptide
  MOD_RES (30)..(30): Xaa is C or S

SEQ ID NO: 82802 - protein, 24 aa, Artificial Sequence
  Cyclic GFR-binding peptide
EYKFKVVNNAADLYLISIPELRAP

SEQ ID NO: 82803 - protein, 33 aa, Artificial Sequence; identical to SEQ ID NO: 41435
  Cyclic GFR-binding peptide
  MOD_RES (30)..(31): Xaa is C or S

SEQ ID NO: 82804 - protein, 38 aa, Artificial Sequence; identical to SEQ ID NO: 34268
  Cyclic GFR-binding peptide
  MOD_RES (1)..(33): Xaa is C or S

SEQ ID NO: 82805 - protein, 31 aa, Artificial Sequence; identical to SEQ ID NO: 5936
  Cyclic GFR-binding peptide

SEQ ID NO: 82806 - protein, 26 aa, Artificial Sequence
  Cyclic GFR-binding peptide
EVVMEYHYKLVVKDYEDKYLMSIPSL

SEQ ID NO: 82807 - protein, 31 aa, Artificial Sequence; identical to SEQ ID NO: 34273
  Cyclic GFR-binding peptide
  MOD_RES (28)..(29): Xaa is C or S

SEQ ID NO: 82808 - protein, 21 aa, Artificial Sequence
  Cyclic GFR-binding peptide
NPIKGYVVNKNEDFYLINIPS

SEQ ID NO: 82809 - protein, 22 aa, Artificial Sequence
  Cyclic GFR-binding peptide
EYKFKIVNSSDDLYLVSIPELQ

SEQ ID NO: 82810 - protein, 28 aa, Artificial Sequence
  Cyclic GFR-binding peptide
  MOD_RES (27)..(28): Xaa is C or S
NPIKGYIVNSSDDFYLVNIPSLQTPAXX

SEQ ID NO: 82811 - protein, 34 aa, Artificial Sequence; identical to SEQ ID NO: 34280
  Cyclic GFR-binding peptide
  MOD_RES (1)..(33)..(34): Xaa is C or S

SEQ ID NO: 82812 - protein, 33 aa, Artificial Sequence; identical to SEQ ID NO: 41448
  Cyclic GFR-binding peptide
  MOD_RES (32)..(32): Xaa is C or S

SEQ ID NO: 82813 - protein, 31 aa, Artificial Sequence
  Cyclic GFR-binding peptide
  MOD_RES (2)..(4): Xaa is C or S
SXGXRDVVMGRHKRLIIQQKDNYYLMSTASM

SEQ ID NO: 82814 - protein, 36 aa, Artificial Sequence; identical to SEQ ID NO: 5942
  Cyclic GFR-binding peptide
  MOD_RES (2)..(33)..(34): Xaa is C or S

SEQ ID NO: 82815 - protein, 33 aa, Artificial Sequence; identical to SEQ ID NO: 5943
  Cyclic GFR-binding peptide
  MOD_RES (27)..(28): Xaa is C or S

SEQ ID NO: 82816 - protein, 29 aa, Artificial Sequence
  Cyclic GFR-binding peptide
EEVIMRHKRLLLVRGNDYYLMSTASTKVP

SEQ ID NO: 82817 - protein, 39 aa, Artificial Sequence; identical to SEQ ID NO: 5945
  Cyclic GFR-binding peptide
  MOD_RES (2)..(4)..(35)..(36): Xaa is C or S

SEQ ID NO: 82818 - protein, 22 aa, Artificial Sequence
  Cyclic GFR-binding peptide
DRHKRLVVNNAADYYLISTASL

SEQ ID NO: 82819 - protein, 28 aa, Artificial Sequence
  Cyclic GFR-binding peptide
  MOD_RES (1)..(3): Xaa is C or S
XKXSKVIMRHKRLIKPTKGIYYLISTAS

SEQ ID NO: 82820 - protein, 30 aa, Artificial Sequence; identical to SEQ ID NO: 5950
  Cyclic GFR-binding peptide

SEQ ID NO: 82821 - protein, 39 aa, Artificial Sequence
  Cyclic GFR-binding peptide
  MOD_RES (2)..(34)..(35): Xaa is C or S
AXSEVTMNRYKKLVVNKNEDFYLISIANMKEPVXXPEPI

SEQ ID NO: 82822 - protein, 25 aa, Artificial Sequence
  Cyclic GFR-binding peptide
NEYKFKIVNNSSDLYLVSIPELKTP

SEQ ID NO: 82823 - protein, 28 aa, Artificial Sequence
  Cyclic GFR-binding peptide
TMNPIKGYVVNKNEDFYLINIPSMKEPV

SEQ ID NO: 82824 - protein, 27 aa, Artificial Sequence
  Cyclic GFR-binding peptide
MNPIKGYIVNSSDDFYLVNIPSLQTPA

SEQ ID NO: 82825 - protein, 27 aa, Artificial Sequence
  Cyclic GFR-binding peptide
VMDRYKKLVVNNAADFYLISIANLRAP

SEQ ID NO: 82826 - protein, 32 aa, Artificial Sequence; identical to SEQ ID NO: 16391
  Cyclic GFR-binding peptide
  MOD_RES (26)..(27): Xaa is C or S

SEQ ID NO: 82827 - protein, 37 aa, Artificial Sequence; identical to SEQ ID NO: 41473
  Cyclic GFR-binding peptide
  MOD_RES (2)..(34)..(35): Xaa is C or S

SEQ ID NO: 82828 - protein, 28 aa, Artificial Sequence
  Cyclic GFR-binding peptide
  MOD_RES (27)..(28): Xaa is C or S
EEYKFKTPVGMDDLYLVSIPELKTPVXX

SEQ ID NO: 82829 - protein, 27 aa, Artificial Sequence
  Cyclic GFR-binding peptide
  MOD_RES (1)..(1): Xaa is C or S
XGEVVMDYHYKLVVKENEDKYLMSIPS

SEQ ID NO: 82830 - protein, 29 aa, Artificial Sequence
  Cyclic GFR-binding peptide
  MOD_RES (26)..(27): Xaa is C or S
EYKFKIVNSSDDLYLVSIPELKTPAXXPK

SEQ ID NO: 82831 - protein, 24 aa, Artificial Sequence
  Cyclic GFR-binding peptide
RYKKLVVKENEDFYLMSIANLETP

SEQ ID NO: 82832 - protein, 33 aa, Artificial Sequence; identical to SEQ ID NO: 5966
  Cyclic GFR-binding peptide
  MOD_RES (31)..(31): Xaa is C or S

SEQ ID NO: 82833 - protein, 29 aa, Artificial Sequence
  Cyclic GFR-binding peptide
RVIMRYKKLVKPKRGVFYLISIANLAQPV

SEQ ID NO: 82834 - protein, 41 aa, Artificial Sequence; identical to SEQ ID NO: 34311
  Cyclic GFR-binding peptide
  MOD_RES (1)..(3)..(35)..(36): Xaa is C or S

SEQ ID NO: 82835 - protein, 35 aa, Artificial Sequence; identical to SEQ ID NO: 34313
  Cyclic GFR-binding peptide
  MOD_RES (2)..(34)..(35): Xaa is C or S

SEQ ID NO: 82836 - protein, 31 aa, Artificial Sequence
  Cyclic GFR-binding peptide
  MOD_RES (29)..(30): Xaa is C or S
VMGYHYKLIIQQKDNKYLMSIPSMKTPTXXP

SEQ ID NO: 82837 - protein, 37 aa, Artificial Sequence; identical to SEQ ID NO: 5973
  Cyclic GFR-binding peptide
  MOD_RES (1)..(3)..(36)..(37): Xaa is C or S

SEQ ID NO: 82838 - protein, 28 aa, Artificial Sequence
  Cyclic GFR-binding peptide
  MOD_RES (1)..(1): Xaa is C or S
XARVVMNPIKGYIVNSSDDFYLVNIPSL

SEQ ID NO: 82839 - protein, 37 aa, Artificial Sequence; identical to SEQ ID NO: 34318
  Cyclic GFR-binding peptide
  MOD_RES (2)..(4)..(36)..(37): Xaa is C or S

SEQ ID NO: 82840 - protein, 26 aa, Artificial Sequence
  Cyclic GFR-binding peptide
  MOD_RES (26)..(26): Xaa is C or S
RYKKLVVKENEDFYLMSIANLETPVX

SEQ ID NO: 82841 - protein, 27 aa, Artificial Sequence
  Cyclic GFR-binding peptide
VMERYKKLVVKDYEDFYLMSIANLETP

SEQ ID NO: 82842 - protein, 25 aa, Artificial Sequence
  Cyclic GFR-binding peptide
SKVVMPIKGYVKPTRGVFYLINIPS

SEQ ID NO: 82843 - protein, 33 aa, Artificial Sequence; identical to SEQ ID NO: 5977
  Cyclic GFR-binding peptide
  MOD_RES (30)..(31): Xaa is C or S

SEQ ID NO: 82844 - protein, 38 aa, Artificial Sequence
  Cyclic GFR-binding peptide
  MOD_RES (1)..(33)..(34): Xaa is C or S
XSEVVMDYHYKLVVNNASDKYLISIPSLRTPVXXTPPT

SEQ ID NO: 82845 - protein, 28 aa, Artificial Sequence
  Cyclic GFR-binding peptide
  MOD_RES (28)..(28): Xaa is C or S
MNPIKGYIVNSSDDFYLVNIPSLKTPAX

SEQ ID NO: 82846 - protein, 36 aa, Artificial Sequence; identical to SEQ ID NO: 16410
  Cyclic GFR-binding peptide
  MOD_RES (1)..(33)..(34): Xaa is C or S

SEQ ID NO: 82847 - protein, 41 aa, Artificial Sequence; identical to SEQ ID NO: 5979
  Cyclic GFR-binding peptide
  MOD_RES (2)..(4)..(36)..(37): Xaa is C or S

SEQ ID NO: 82848 - protein, 35 aa, Artificial Sequence; identical to SEQ ID NO: 5980
  Cyclic GFR-binding peptide
  MOD_RES (29)..(30): Xaa is C or S

SEQ ID NO: 82849 - protein, 34 aa, Artificial Sequence; identical to SEQ ID NO: 5981
  Cyclic GFR-binding peptide
  MOD_RES (28)..(29): Xaa is C or S

SEQ ID NO: 82850 - protein, 32 aa, Artificial Sequence; identical to SEQ ID NO: 5982
  Cyclic GFR-binding peptide
  MOD_RES (27)..(28): Xaa is C or S

SEQ ID NO: 82851 - protein, 29 aa, Artificial Sequence
  Cyclic GFR-binding peptide
  MOD_RES (28)..(29): Xaa is C or S
IMRHKRLVKPKRGVYYLISTASLAQPVXX

SEQ ID NO: 82852 - protein, 33 aa, Artificial Sequence
  Cyclic GFR-binding peptide
  MOD_RES (2)..(33): Xaa is C or S
KXSKVVMPIKGYVKPTRGVFYLINIPSLDQPVX

SEQ ID NO: 82853 - protein, 30 aa, Artificial Sequence; identical to SEQ ID NO: 5988
  Cyclic GFR-binding peptide
  MOD_RES (27)..(28): Xaa is C or S

SEQ ID NO: 82854 - protein, 36 aa, Artificial Sequence
  Cyclic GFR-binding peptide
  MOD_RES (1)..(33)..(34): Xaa is C or S
XSEVVMDYHYKLVVNNASDKYLISIPSLRTPVXXTP

SEQ ID NO: 82855 - protein, 41 aa, Artificial Sequence
  Cyclic GFR-binding peptide
  MOD_RES (2)..(4)..(35)..(36): Xaa is C or S
SXKXSKVVMPIKGYVKPTRGVFYLINIPSLDQPVXXPSASA

SEQ ID NO: 82856 - protein, 30 aa, Artificial Sequence
  Cyclic GFR-binding peptide
  MOD_RES (28)..(29): Xaa is C or S
MNEYKFKVVNKNEDLYLISIPEMKEPVXXP

SEQ ID NO: 82857 - protein, 35 aa, Artificial Sequence
  Cyclic GFR-binding peptide
  MOD_RES (30)..(31): Xaa is C or S
EVIMRHKRLLLVRGNDYYLMSTASTKVPAXXTSPV

SEQ ID NO: 82858 - protein, 35 aa, Artificial Sequence; identical to SEQ ID NO: 5991
  Cyclic GFR-binding peptide
  MOD_RES (29)..(29): Xaa is C or S

SEQ ID NO: 82859 - protein, 24 aa, Artificial Sequence
  Cyclic GFR-binding peptide
VMDPIKGYVVNNAADFYLINIPSL

SEQ ID NO: 82860 - protein, 36 aa, Artificial Sequence; identical to SEQ ID NO: 34339
  Cyclic GFR-binding peptide
  MOD_RES (32)..(33): Xaa is C or S

SEQ ID NO: 82861 - protein, 37 aa, Artificial Sequence; identical to SEQ ID NO: 41500
  Cyclic GFR-binding peptide
  MOD_RES (1)..(33)..(34): Xaa is C or S

SEQ ID NO: 82862 - protein, 34 aa, Artificial Sequence
  Cyclic GFR-binding peptide
  MOD_RES (31)..(32): Xaa is C or S
EEVIMEYKFKLLVRGNDLYLMSIPETKVPAXXTS

SEQ ID NO: 82863 - protein, 27 aa, Artificial Sequence
  Cyclic GFR-binding peptide
  MOD_RES (27)..(27): Xaa is C or S
MYHYKLVKPTRGVKYLISIPSLDQPVX

SEQ ID NO: 82864 - protein, 32 aa, Artificial Sequence
  Cyclic GFR-binding peptide
  MOD_RES (2)..(4): Xaa is C or S
LXGXEEVIMEYKFKLLVRGNDLYLMSIPETKV

SEQ ID NO: 82865 - protein, 35 aa, Artificial Sequence; identical to SEQ ID NO: 5999
  Cyclic GFR-binding peptide
  MOD_RES (2)..(34): Xaa is C or S

SEQ ID NO: 82866 - protein, 30 aa, Artificial Sequence
  Cyclic GFR-binding peptide
SEVVMDEYKFKVVNNASDLYLISIPELRTP

SEQ ID NO: 82867 - protein, 33 aa, Artificial Sequence
  Cyclic GFR-binding peptide
  MOD_RES (1)..(3): Xaa is C or S
XAXSEVTMNYHYKLVVNKNEDKYLISIPSMKEP

SEQ ID NO: 82868 - protein, 21 aa, Artificial Sequence
  Cyclic GFR-binding peptide
RYKKLVVNNAADFYLISIANL

SEQ ID NO: 82869 - protein, 31 aa, Artificial Sequence
  Cyclic GFR-binding peptide
  MOD_RES (30)..(31): Xaa is C or S
KVVMPIKGYVKPTRGVFYLINIPSLDQPVXX

SEQ ID NO: 82870 - protein, 28 aa, Artificial Sequence
  Cyclic GFR-binding peptide
  MOD_RES (28)..(28): Xaa is C or S
MDPIKGYVVNNASDFYLINIPSLRTPVX

SEQ ID NO: 82871 - protein, 33 aa, Artificial Sequence
  Cyclic GFR-binding peptide
  MOD_RES (27)..(28): Xaa is C or S
MPIKGYVKPTRGVFYLINIPSLDQPVXXPSASA

SEQ ID NO: 82872 - protein, 40 aa, Artificial Sequence
  Cyclic GFR-binding peptide
  MOD_RES (1)..(3)..(35)..(36): Xaa is C or S
XGXESVAMGRHKRLYTVVGKDYYLISTASLKTPVXXAKSA

SEQ ID NO: 82873 - protein, 38 aa, Artificial Sequence
  Cyclic GFR-binding peptide
  MOD_RES (2)..(33)..(34): Xaa is C or S
KXSKVIMPIKGYIKPTKGIFYLINIPSLDQSVXXPSAS

SEQ ID NO: 82874 - protein, 27 aa, Artificial Sequence
  Cyclic GFR-binding peptide
  MOD_RES (27)..(27): Xaa is C or S
MRYKKLLLVRGNDFYLMSIANTKVPAX

SEQ ID NO: 82875 - protein, 22 aa, Artificial Sequence
  Cyclic GFR-binding peptide
RYKKLIVNSSDDFYLVSIANLK

SEQ ID NO: 82876 - protein, 33 aa, Artificial Sequence; identical to SEQ ID NO: 6009
  Cyclic GFR-binding peptide
  MOD_RES (28)..(29): Xaa is C or S

SEQ ID NO: 82877 - protein, 33 aa, Artificial Sequence
  Cyclic GFR-binding peptide
  MOD_RES (28)..(29): Xaa is C or S
IMPIKGYVKPKRGVFYLINIPSLAQPVXXPAAS

SEQ ID NO: 82878 - protein, 23 aa, Artificial Sequence
  Cyclic GFR-binding peptide
MGRHKRLYTVVGKDYYLISTASL

SEQ ID NO: 82879 - protein, 29 aa, Artificial Sequence
  Cyclic GFR-binding peptide
  MOD_RES (26)..(27): Xaa is C or S
YHYKLYTVVGKDKYLISIPSLKTPVXXAK

SEQ ID NO: 82880 - protein, 39 aa, Artificial Sequence; identical to SEQ ID NO: 34359
  Cyclic GFR-binding peptide
  MOD_RES (1)..(3)..(35)..(36): Xaa is C or S

SEQ ID NO: 82881 - protein, 28 aa, Artificial Sequence
  Cyclic GFR-binding peptide
  MOD_RES (26)..(27): Xaa is C or S
EYKFKVKPTRGVLYLISIPELDQPVXXP

SEQ ID NO: 82882 - protein, 26 aa, Artificial Sequence
  Cyclic GFR-binding peptide
EVTMNEYKFKVVNKNEDLYLISIPEM

SEQ ID NO: 82883 - protein, 31 aa, Artificial Sequence; identical to SEQ ID NO: 6012
  Cyclic GFR-binding peptide
  MOD_RES (26)..(27): Xaa is C or S

SEQ ID NO: 82884 - protein, 32 aa, Artificial Sequence
  Cyclic GFR-binding peptide
  MOD_RES (31)..(32): Xaa is C or S
DVVMGEYKFKIIQQKDNLYLMSIPEMKTPTXX

SEQ ID NO: 82885 - protein, 31 aa, Artificial Sequence; identical to SEQ ID NO: 6013
  Cyclic GFR-binding peptide
  MOD_RES (2)..(4): Xaa is C or S

SEQ ID NO: 82886 - protein, 26 aa, Artificial Sequence
  Cyclic GFR-binding peptide
NEYKFKIVNSSDDLYLVSIPELQTPA

SEQ ID NO: 82887 - protein, 35 aa, Artificial Sequence; identical to SEQ ID NO: 34367
  Cyclic GFR-binding peptide
  MOD_RES (29)..(30): Xaa is C or S

SEQ ID NO: 82888 - protein, 34 aa, Artificial Sequence; identical to SEQ ID NO: 34368
  Cyclic GFR-binding peptide
  MOD_RES (2)..(4): Xaa is C or S

SEQ ID NO: 82889 - protein, 21 aa, Artificial Sequence
  Cyclic GFR-binding peptide
RYKKLVKPTRGVFYLISIANL

SEQ ID NO: 82890 - protein, 38 aa, Artificial Sequence; identical to SEQ ID NO: 16449
  Cyclic GFR-binding peptide
  MOD_RES (1)..(33)..(34): Xaa is C or S

SEQ ID NO: 82891 - protein, 42 aa, Artificial Sequence; identical to SEQ ID NO: 6018
  Cyclic GFR-binding peptide
  MOD_RES (2)..(4)..(37)..(38): Xaa is C or S

SEQ ID NO: 82892 - protein, 28 aa, Artificial Sequence
  Cyclic GFR-binding peptide
  MOD_RES (2)..(2): Xaa is C or S
GXAKVVMNRYKKLIVNNSSDFYLVSIAN

SEQ ID NO: 82893 - protein, 33 aa, Artificial Sequence; identical to SEQ ID NO: 34374
  Cyclic GFR-binding peptide
  MOD_RES (30)..(31): Xaa is C or S

SEQ ID NO: 82894 - protein, 32 aa, Artificial Sequence; identical to SEQ ID NO: 6021
  Cyclic GFR-binding peptide
  MOD_RES (1)..(3): Xaa is C or S

SEQ ID NO: 82895 - protein, 30 aa, Artificial Sequence; identical to SEQ ID NO: 41525
  Cyclic GFR-binding peptide
  MOD_RES (28)..(29): Xaa is C or S

SEQ ID NO: 82896 - protein, 33 aa, Artificial Sequence; identical to SEQ ID NO: 16452
  Cyclic GFR-binding peptide
  MOD_RES (2)..(4): Xaa is C or S

SEQ ID NO: 82897 - protein, 33 aa, Artificial Sequence; identical to SEQ ID NO: 41526
  Cyclic GFR-binding peptide
  MOD_RES (1)..(3): Xaa is C or S

SEQ ID NO: 82898 - protein, 37 aa, Artificial Sequence
  Cyclic GFR-binding peptide
  MOD_RES (1)..(33)..(34): Xaa is C or S
XSEVVMDYHYKLVVNNASDKYLISIPSLRTPVXXTPP

SEQ ID NO: 82899 - protein, 24 aa, Artificial Sequence
  Cyclic GFR-binding peptide
RYKKLLLVRGNDFYLMSIANTKVP

SEQ ID NO: 82900 - protein, 24 aa, Artificial Sequence
  Cyclic GFR-binding peptide
MNPIKGYIVNSSDDFYLVNIPSLK

SEQ ID NO: 82901 - protein, 38 aa, Artificial Sequence; identical to SEQ ID NO: 6025
  Cyclic GFR-binding peptide
  MOD_RES (1)..(3)..(35): Xaa is C or S

SEQ ID NO: 82902 - protein, 33 aa, Artificial Sequence; identical to SEQ ID NO: 41531
  Cyclic GFR-binding peptide
  MOD_RES (32)..(33): Xaa is C or S

SEQ ID NO: 82903 - protein, 28 aa, Artificial Sequence
  Cyclic GFR-binding peptide
  MOD_RES (26)..(27): Xaa is C or S
RYKKLIKPTKGIFYLISIANLDQSVXXP

SEQ ID NO: 82904 - protein, 34 aa, Artificial Sequence; identical to SEQ ID NO: 6029
  Cyclic GFR-binding peptide
  MOD_RES (31)..(32): Xaa is C or S

SEQ ID NO: 82905 - protein, 33 aa, Artificial Sequence; identical to SEQ ID NO: 6030
  Cyclic GFR-binding peptide
  MOD_RES (29)..(30): Xaa is C or S

SEQ ID NO: 82906 - protein, 30 aa, Artificial Sequence
  Cyclic GFR-binding peptide
  MOD_RES (30)..(30): Xaa is C or S
VTMNPIKGYVVNKNEDFYLINIPSMKEPVX

SEQ ID NO: 82907 - protein, 33 aa, Artificial Sequence
  Cyclic GFR-binding peptide
  MOD_RES (1)..(33): Xaa is C or S
XSEVVMDRHKRLVVNNASDYYLISTASLRTPVX

SEQ ID NO: 82908 - protein, 32 aa, Artificial Sequence
  Cyclic GFR-binding peptide
  MOD_RES (30)..(31): Xaa is C or S
VVMDYHYKLVVNNASDKYLISIPSLRTPVXXT

SEQ ID NO: 82909 - protein, 27 aa, Artificial Sequence
  Cyclic GFR-binding peptide
VMDEYKFKVVKENEDLYLMSIPELETP

SEQ ID NO: 82910 - protein, 39 aa, Artificial Sequence; identical to SEQ ID NO: 34389
  Cyclic GFR-binding peptide
  MOD_RES (2)..(4)..(36): Xaa is C or S

SEQ ID NO: 82911 - protein, 23 aa, Artificial Sequence
  Cyclic GFR-binding peptide
YHYKLVKPTRGVKYLISIPSLDQ

SEQ ID NO: 82912 - protein, 39 aa, Artificial Sequence; identical to SEQ ID NO: 6038
  Cyclic GFR-binding peptide
  MOD_RES (1)..(34)..(35): Xaa is C or S

SEQ ID NO: 82913 - protein, 32 aa, Artificial Sequence; identical to SEQ ID NO: 6039
  Cyclic GFR-binding peptide
  MOD_RES (2)..(2): Xaa is C or S

SEQ ID NO: 82914 - protein, 36 aa, Artificial Sequence; identical to SEQ ID NO: 41539
  Cyclic GFR-binding peptide
  MOD_RES (2)..(35)..(36): Xaa is C or S

SEQ ID NO: 82915 - protein, 27 aa, Artificial Sequence
  Cyclic GFR-binding peptide
VMDEYKFKVVNNASDLYLISIPELRTP

SEQ ID NO: 82916 - protein, 26 aa, Artificial Sequence
  Cyclic GFR-binding peptide
AVSMGEEYKFKTPVGMDDLYLVSIPE

SEQ ID NO: 82917 - protein, 34 aa, Artificial Sequence; identical to SEQ ID NO: 6045
  Cyclic GFR-binding peptide
  MOD_RES (1)..(3): Xaa is C or S

SEQ ID NO: 82918 - protein, 29 aa, Artificial Sequence
  Cyclic GFR-binding peptide
  MOD_RES (26)..(27): Xaa is C or S
RHKRLIVNSSDDYYLVSTASLKTPAXXPK

SEQ ID NO: 82919 - protein, 31 aa, Artificial Sequence
  Cyclic GFR-binding peptide
  MOD_RES (26)..(27): Xaa is C or S
EYKFKIIQQKDNLYLMSIPEMKTPTXXPGAS

SEQ ID NO: 82920 - protein, 28 aa, Artificial Sequence
  Cyclic GFR-binding peptide
  MOD_RES (26)..(27): Xaa is C or S
RHKRLVKPTRGVYYLISTASLDQPVXXP

SEQ ID NO: 82921 - protein, 28 aa, Artificial Sequence
  Cyclic GFR-binding peptide
  MOD_RES (1)..(1): Xaa is C or S
XEAVSMGERYKKLTPVGMDDFYLVSIAN

SEQ ID NO: 82922 - protein, 37 aa, Artificial Sequence; identical to SEQ ID NO: 34402
  Cyclic GFR-binding peptide
  MOD_RES (1)..(3)..(35)..(36): Xaa is C or S

SEQ ID NO: 82923 - protein, 24 aa, Artificial Sequence
  Cyclic GFR-binding peptide
MPIKGYIKPTKGIFYLINIPSLDQ

SEQ ID NO: 82924 - protein, 21 aa, Artificial Sequence
  Cyclic GFR-binding peptide
PIKGYIVNNSSDFYLVNIPSL

SEQ ID NO: 82925 - protein, 31 aa, Artificial Sequence; identical to SEQ ID NO: 6057
  Cyclic GFR-binding peptide
  MOD_RES (29)..(30): Xaa is C or S

SEQ ID NO: 82926 - protein, 34 aa, Artificial Sequence
  Cyclic GFR-binding peptide
  MOD_RES (29)..(30): Xaa is C or S
VIMYHYKLLLVRGNDKYLMSIPSTKVPAXXTSPV

SEQ ID NO: 82927 - protein, 30 aa, Artificial Sequence
  Cyclic GFR-binding peptide
  MOD_RES (1)..(3): Xaa is C or S
XAXSEVTMNRHKRLVVNKNEDYYLISTASM

SEQ ID NO: 82928 - protein, 28 aa, Artificial Sequence
  Cyclic GFR-binding peptide
  MOD_RES (27)..(28): Xaa is C or S
ERYKKLTPVGMDDFYLVSIANLKTPVXX

SEQ ID NO: 82929 - protein, 30 aa, Artificial Sequence
  Cyclic GFR-binding peptide
  MOD_RES (2)..(4): Xaa is C or S
RXGXSEVVMDYHYKLVVNNASDKYLISIPS

SEQ ID NO: 82930 - protein, 33 aa, Artificial Sequence; identical to SEQ ID NO: 6068
  Cyclic GFR-binding peptide
  MOD_RES (32)..(33): Xaa is C or S

SEQ ID NO: 82931 - protein, 39 aa, Artificial Sequence; identical to SEQ ID NO: 6069
  Cyclic GFR-binding peptide
  MOD_RES (1)..(3)..(35)..(36): Xaa is C or S

SEQ ID NO: 82932 - protein, 33 aa, Artificial Sequence; identical to SEQ ID NO: 34415
  Cyclic GFR-binding peptide
  MOD_RES (2)..(2): Xaa is C or S

SEQ ID NO: 82933 - protein, 25 aa, Artificial Sequence
  Cyclic GFR-binding peptide
MPIKGYVKPKRGVFYLINIPSLAQP

SEQ ID NO: 82934 - protein, 34 aa, Artificial Sequence; identical to SEQ ID NO: 6071
  Cyclic GFR-binding peptide
  MOD_RES (2)..(4): Xaa is C or S

SEQ ID NO: 82935 - protein, 24 aa, Artificial Sequence
  Cyclic GFR-binding peptide
IMRHKRLLLVRGNDYYLMSTASTK

SEQ ID NO: 82936 - protein, 28 aa, Artificial Sequence
  Cyclic GFR-binding peptide
KVIMEYKFKIKPTKGILYLISIPELDQS

SEQ ID NO: 82937 - protein, 31 aa, Artificial Sequence; identical to SEQ ID NO: 34423
  Cyclic GFR-binding peptide
  MOD_RES (26)..(27): Xaa is C or S

SEQ ID NO: 82938 - protein, 33 aa, Artificial Sequence; identical to SEQ ID NO: 41558
  Cyclic GFR-binding peptide
  MOD_RES (2)..(2): Xaa is C or S

SEQ ID NO: 82939 - protein, 22 aa, Artificial Sequence
  Cyclic GFR-binding peptide
MEYKFKIKPTKGILYLISIPEL

SEQ ID NO: 82940 - protein, 31 aa, Artificial Sequence; identical to SEQ ID NO: 34427
  Cyclic GFR-binding peptide
  MOD_RES (28)..(29): Xaa is C or S

SEQ ID NO: 82941 - protein, 35 aa, Artificial Sequence; identical to SEQ ID NO: 76601
  Cyclic GFR-binding peptide
  MOD_RES (30)..(31): Xaa is C or S

SEQ ID NO: 82942 - protein, 35 aa, Artificial Sequence; identical to SEQ ID NO: 41563
  Cyclic GFR-binding peptide
  MOD_RES (32)..(33): Xaa is C or S

SEQ ID NO: 82943 - protein, 31 aa, Artificial Sequence; identical to SEQ ID NO: 34432
  Cyclic GFR-binding peptide
  MOD_RES (2)..(2): Xaa is C or S

SEQ ID NO: 82944 - protein, 32 aa, Artificial Sequence; identical to SEQ ID NO: 41566
  Cyclic GFR-binding peptide
  MOD_RES (1)..(3): Xaa is C or S

SEQ ID NO: 82945 - protein, 34 aa, Artificial Sequence
  Cyclic GFR-binding peptide
  MOD_RES (1)..(33)..(34): Xaa is C or S
XSEVVMDRHKRLVVNNASDYYLISTASLRTPVXX

SEQ ID NO: 82946 - protein, 30 aa, Artificial Sequence
  Cyclic GFR-binding peptide
  MOD_RES (1)..(1): Xaa is C or S
XSRVIMPIKGYVKPKRGVFYLINIPSLAQP

SEQ ID NO: 82947 - protein, 29 aa, Artificial Sequence
  Cyclic GFR-binding peptide
  MOD_RES (1)..(3): Xaa is C or S
XKXSRVIMEYKFKVKPKRGVLYLISIPEL

SEQ ID NO: 82948 - protein, 39 aa, Artificial Sequence; identical to SEQ ID NO: 6085
  Cyclic GFR-binding peptide
  MOD_RES (2)..(34): Xaa is C or S

SEQ ID NO: 82949 - protein, 35 aa, Artificial Sequence; identical to SEQ ID NO: 34437
  Cyclic GFR-binding peptide
  MOD_RES (29)..(30): Xaa is C or S

SEQ ID NO: 82950 - protein, 23 aa, Artificial Sequence
  Cyclic GFR-binding peptide
ERYKKLVVKDYEDFYLMSIANLE

SEQ ID NO: 82951 - protein, 29 aa, Artificial Sequence
  Cyclic GFR-binding peptide
EVVMDRHKRLVVNNASDYYLISTASLRTP

SEQ ID NO: 82952 - protein, 30 aa, Artificial Sequence
  Cyclic GFR-binding peptide
EEVIMYHYKLLLVRGNDKYLMSIPSTKVPA

SEQ ID NO: 82953 - protein, 36 aa, Artificial Sequence
  Cyclic GFR-binding peptide
  MOD_RES (1)..(33)..(34): Xaa is C or S
XSEVTMNEYKFKVVNKNEDLYLISIPEMKEPVXXPE

SEQ ID NO: 82954 - protein, 31 aa, Artificial Sequence
  Cyclic GFR-binding peptide
  MOD_RES (29)..(30): Xaa is C or S
AMGRHKRLYTVVGKDYYLISTASLKTPVXXA

SEQ ID NO: 82955 - protein, 34 aa, Artificial Sequence; identical to SEQ ID NO: 34442
  Cyclic GFR-binding peptide
  MOD_RES (30)..(31): Xaa is C or S

SEQ ID NO: 82956 - protein, 31 aa, Artificial Sequence
  Cyclic GFR-binding peptide
  MOD_RES (2)..(4): Xaa is C or S
RXAXSEVTMNRYKKLVVNKNEDFYLISIANM

SEQ ID NO: 82957 - protein, 36 aa, Artificial Sequence; identical to SEQ ID NO: 6089
  Cyclic GFR-binding peptide
  MOD_RES (32)..(33): Xaa is C or S

SEQ ID NO: 82958 - protein, 34 aa, Artificial Sequence; identical to SEQ ID NO: 41582
  Cyclic GFR-binding peptide
  MOD_RES (2)..(4): Xaa is C or S

SEQ ID NO: 82959 - protein, 28 aa, Artificial Sequence
  Cyclic GFR-binding peptide
VMNPIKGYIVNNSSDFYLVNIPSLKTPA

SEQ ID NO: 82960 - protein, 39 aa, Artificial Sequence; identical to SEQ ID NO: 34446
  Cyclic GFR-binding peptide
  MOD_RES (1)..(3)..(35)..(36): Xaa is C or S

SEQ ID NO: 82961 - protein, 24 aa, Artificial Sequence
  Cyclic GFR-binding peptide
NRHKRLIVNSSDDYYLVSTASLQT

SEQ ID NO: 82962 - protein, 38 aa, Artificial Sequence; identical to SEQ ID NO: 34450
  Cyclic GFR-binding peptide
  MOD_RES (1)..(3)..(35)..(36): Xaa is C or S

SEQ ID NO: 82963 - protein, 36 aa, Artificial Sequence; identical to SEQ ID NO: 6093
  Cyclic GFR-binding peptide
  MOD_RES (2)..(34)..(35): Xaa is C or S

SEQ ID NO: 82964 - protein, 24 aa, Artificial Sequence
  Cyclic GFR-binding peptide
MYHYKLIKPTKGIKYLISIPSLDQ

SEQ ID NO: 82965 - protein, 32 aa, Artificial Sequence
  Cyclic GFR-binding peptide
  MOD_RES (27)..(28): Xaa is C or S
DEYKFKVVNNASDLYLISIPELRTPVXXTPPT

SEQ ID NO: 82966 - protein, 35 aa, Artificial Sequence; identical to SEQ ID NO: 41588
  Cyclic GFR-binding peptide
  MOD_RES (1)..(3)..(35): Xaa is C or S

SEQ ID NO: 82967 - protein, 29 aa, Artificial Sequence
  Cyclic GFR-binding peptide
  MOD_RES (28)..(29): Xaa is C or S
MDPIKGYVVNNAADFYLINIPSLRAPVXX

SEQ ID NO: 82968 - protein, 37 aa, Artificial Sequence
  Cyclic GFR-binding peptide
  MOD_RES (1)..(3)..(34)..(35): Xaa is C or S
XGXEEVIMYHYKLLLVRGNDKYLMSIPSTKVPAXXTS

SEQ ID NO: 82969 - protein, 29 aa, Artificial Sequence
  Cyclic GFR-binding peptide
VVMNEYKFKIVNNSSDLYLVSIPELKTPA

SEQ ID NO: 82970 - protein, 40 aa, Artificial Sequence; identical to SEQ ID NO: 34456
  Cyclic GFR-binding peptide
  MOD_RES (2)..(34)..(35): Xaa is C or S

SEQ ID NO: 82971 - protein, 27 aa, Artificial Sequence
  Cyclic GFR-binding peptide
  MOD_RES (26)..(27): Xaa is C or S
RHKRLVVNNAADYYLISTASLRAPVXX

SEQ ID NO: 82972 - protein, 30 aa, Artificial Sequence; identical to SEQ ID NO: 41597
  Cyclic GFR-binding peptide
  MOD_RES (26)..(27): Xaa is C or S

SEQ ID NO: 82973 - protein, 36 aa, Artificial Sequence; identical to SEQ ID NO: 34459
  Cyclic GFR-binding peptide
  MOD_RES (2)..(34)..(35): Xaa is C or S

SEQ ID NO: 82974 - protein, 33 aa, Artificial Sequence; identical to SEQ ID NO: 6102
  Cyclic GFR-binding peptide
  MOD_RES (31)..(32): Xaa is C or S

SEQ ID NO: 82975 - protein, 28 aa, Artificial Sequence
  Cyclic GFR-binding peptide
  MOD_RES (2)..(2): Xaa is C or S
GXSEVVMDRYKKLVVNNASDFYLISIAN

SEQ ID NO: 82976 - protein, 27 aa, Artificial Sequence
  Cyclic GFR-binding peptide
  MOD_RES (2)..(2): Xaa is C or S
GXEEVIMYHYKLLLVRGNDKYLMSIPS

SEQ ID NO: 82977 - protein, 37 aa, Artificial Sequence; identical to SEQ ID NO: 6103
  Cyclic GFR-binding peptide
  MOD_RES (31)..(32): Xaa is C or S

SEQ ID NO: 82978 - protein, 40 aa, Artificial Sequence
  Cyclic GFR-binding peptide
  MOD_RES (1)..(3)..(35)..(36): Xaa is C or S
XAXSEVTMNRHKRLVVNKNEDYYLISTASMKEPVXXPEPI

SEQ ID NO: 82979 - protein, 36 aa, Artificial Sequence; identical to SEQ ID NO: 41601
  Cyclic GFR-binding peptide
  MOD_RES (1)..(33)..(34): Xaa is C or S

SEQ ID NO: 82980 - protein, 29 aa, Artificial Sequence
  Cyclic GFR-binding peptide
  MOD_RES (29)..(29): Xaa is C or S
VMDEYKFKVVKENEDLYLMSIPELETPVX

SEQ ID NO: 82981 - protein, 25 aa, Artificial Sequence
  Cyclic GFR-binding peptide
VMEYKFKVKPTRGVLYLISIPELDQ

SEQ ID NO: 82982 - protein, 22 aa, Artificial Sequence
  Cyclic GFR-binding peptide
PIKGYVKPTRGVFYLINIPSLD

SEQ ID NO: 82983 - protein, 26 aa, Artificial Sequence
  Cyclic GFR-binding peptide
MNRYKKLIVNSSDDFYLVSIANLKTP

SEQ ID NO: 82984 - protein, 29 aa, Artificial Sequence
  Cyclic GFR-binding peptide
  MOD_RES (1)..(1): Xaa is C or S
XSRVVMNPIKGYIVNSSDDFYLVNIPSLK

SEQ ID NO: 82985 - protein, 35 aa, Artificial Sequence; identical to SEQ ID NO: 34471
  Cyclic GFR-binding peptide
  MOD_RES (2)..(35): Xaa is C or S

SEQ ID NO: 82986 - protein, 21 aa, Artificial Sequence
  Cyclic GFR-binding peptide
NYHYKLVVNKNEDKYLISIPS

SEQ ID NO: 82987 - protein, 33 aa, Artificial Sequence
  Cyclic GFR-binding peptide
  MOD_RES (1)..(33): Xaa is C or S
XSEVVMDEYKFKVVNNASDLYLISIPELRTPVX

SEQ ID NO: 82988 - protein, 36 aa, Artificial Sequence; identical to SEQ ID NO: 6119
  Cyclic GFR-binding peptide
  MOD_RES (32)..(33): Xaa is C or S

SEQ ID NO: 82989 - protein, 25 aa, Artificial Sequence
  Cyclic GFR-binding peptide
VVMDYHYKLVVKENEDKYLMSIPSL

SEQ ID NO: 82990 - protein, 27 aa, Artificial Sequence
  Cyclic GFR-binding peptide
  MOD_RES (2)..(2): Xaa is C or S
GXEEVIMRYKKLLLVRGNDFYLMSIAN

SEQ ID NO: 82991 - protein, 37 aa, Artificial Sequence; identical to SEQ ID NO: 41617
  Cyclic GFR-binding peptide
  MOD_RES (31)..(31): Xaa is C or S

SEQ ID NO: 82992 - protein, 33 aa, Artificial Sequence; identical to SEQ ID NO: 6122
  Cyclic GFR-binding peptide
  MOD_RES (2)..(2): Xaa is C or S

SEQ ID NO: 82993 - protein, 27 aa, Artificial Sequence
  Cyclic GFR-binding peptide
  MOD_RES (1)..(1): Xaa is C or S
XRDVVMGRYKKLIIQQKDNFYLMSIAN

SEQ ID NO: 82994 - protein, 30 aa, Artificial Sequence; identical to SEQ ID NO: 6124
  Cyclic GFR-binding peptide
  MOD_RES (26)..(27): Xaa is C or S

SEQ ID NO: 82995 - protein, 40 aa, Artificial Sequence; identical to SEQ ID NO: 6125
  Cyclic GFR-binding peptide
  MOD_RES (2)..(34)..(35): Xaa is C or S

SEQ ID NO: 82996 - protein, 40 aa, Artificial Sequence; identical to SEQ ID NO: 6126
  Cyclic GFR-binding peptide
  MOD_RES (2)..(34): Xaa is C or S

SEQ ID NO: 82997 - protein, 36 aa, Artificial Sequence; identical to SEQ ID NO: 34484
  Cyclic GFR-binding peptide
  MOD_RES (2)..(34)..(35): Xaa is C or S

SEQ ID NO: 82998 - protein, 33 aa, Artificial Sequence; identical to SEQ ID NO: 6133
  Cyclic GFR-binding peptide
  MOD_RES (27)..(28): Xaa is C or S

SEQ ID NO: 82999 - protein, 35 aa, Artificial Sequence; identical to SEQ ID NO: 41627
  Cyclic GFR-binding peptide
  MOD_RES (2)..(34)..(35): Xaa is C or S

SEQ ID NO: 83000 - protein, 27 aa, Artificial Sequence
  Cyclic GFR-binding peptide
VMNRYKKLIVNSSDDFYLVSIANLQTP

SEQ ID NO: 83001 - protein, 32 aa, Artificial Sequence; identical to SEQ ID NO: 41630
  Cyclic GFR-binding peptide
  MOD_RES (28)..(28): Xaa is C or S

SEQ ID NO: 83002 - protein, 29 aa, Artificial Sequence
  Cyclic GFR-binding peptide
  MOD_RES (26)..(27): Xaa is C or S
PIKGYIVNNSSDFYLVNIPSLKTPAXXAK

SEQ ID NO: 83003 - protein, 24 aa, Artificial Sequence
  Cyclic GFR-binding peptide
VVMRHKRLVKPTRGVYYLISTASL

SEQ ID NO: 83004 - protein, 32 aa, Artificial Sequence; identical to SEQ ID NO: 6142
  Cyclic GFR-binding peptide
  MOD_RES (2)..(2): Xaa is C or S

SEQ ID NO: 83005 - protein, 27 aa, Artificial Sequence
  Cyclic GFR-binding peptide
VMNRHKRLIVNSSDDYYLVSTASLQTP

SEQ ID NO: 83006 - protein, 39 aa, Artificial Sequence
  Cyclic GFR-binding peptide
  MOD_RES (2)..(34)..(35): Xaa is C or S
AXSEVTMNPIKGYVVNKNEDFYLINIPSMKEPVXXPEPI

SEQ ID NO: 83007 - protein, 37 aa, Artificial Sequence; identical to SEQ ID NO: 16543
  Cyclic GFR-binding peptide
  MOD_RES (1)..(33)..(34): Xaa is C or S

SEQ ID NO: 83008 - protein, 26 aa, Artificial Sequence
  Cyclic GFR-binding peptide
IMRHKRLIKPTKGIYYLISTASLDQS

SEQ ID NO: 83009 - protein, 31 aa, Artificial Sequence; identical to SEQ ID NO: 6149
  Cyclic GFR-binding peptide

SEQ ID NO: 83010 - protein, 29 aa, Artificial Sequence
  Cyclic GFR-binding peptide
EVIMRYKKLLLVRGNDFYLMSIANTKVPA

SEQ ID NO: 83011 - protein, 31 aa, Artificial Sequence; identical to SEQ ID NO: 41640
  Cyclic GFR-binding peptide
  MOD_RES (28)..(29): Xaa is C or S

SEQ ID NO: 83012 - protein, 28 aa, Artificial Sequence
  Cyclic GFR-binding peptide
EVIMRYKKLLLVRGNDFYLMSIANTKVP

SEQ ID NO: 83013 - protein, 27 aa, Artificial Sequence
  Cyclic GFR-binding peptide
GEVVMEYHYKLVVKDYEDKYLMSIPSL

SEQ ID NO: 83014 - protein, 35 aa, Artificial Sequence; identical to SEQ ID NO: 6152
  Cyclic GFR-binding peptide
  MOD_RES (29)..(30): Xaa is C or S

SEQ ID NO: 83015 - protein, 33 aa, Artificial Sequence
  Cyclic GFR-binding peptide
  MOD_RES (1)..(3): Xaa is C or S
XGXEEVIMEYKFKLLVRGNDLYLMSIPETKVPA

SEQ ID NO: 83016 - protein, 23 aa, Artificial Sequence
  Cyclic GFR-binding peptide
EYKFKIIQQKDNLYLMSIPEMKT

SEQ ID NO: 83017 - protein, 33 aa, Artificial Sequence; identical to SEQ ID NO: 34504
  Cyclic GFR-binding peptide
  MOD_RES (32)..(33): Xaa is C or S

SEQ ID NO: 83018 - protein, 33 aa, Artificial Sequence
  Cyclic GFR-binding peptide
  MOD_RES (1)..(3): Xaa is C or S
XKXSRVIMPIKGYVKPKRGVFYLINIPSLAQPV

SEQ ID NO: 83019 - protein, 37 aa, Artificial Sequence
  Cyclic GFR-binding peptide
  MOD_RES (1)..(3)..(35)..(36): Xaa is C or S
XAXSEVTMNRYKKLVVNKNEDFYLISIANMKEPVXXP

SEQ ID NO: 83020 - protein, 34 aa, Artificial Sequence
  Cyclic GFR-binding peptide
  MOD_RES (2)..(33)..(34): Xaa is C or S
KXSKVVMPIKGYVKPTRGVFYLINIPSLDQPVXX

SEQ ID NO: 83021 - protein, 27 aa, Artificial Sequence
  Cyclic GFR-binding peptide
AVSMGEEYKFKTPVGMDDLYLVSIPEL

SEQ ID NO: 83022 - protein, 28 aa, Artificial Sequence
  Cyclic GFR-binding peptide
SVAMGRHKRLYTVVGKDYYLISTASLKT

SEQ ID NO: 83023 - protein, 26 aa, Artificial Sequence
  Cyclic GFR-binding peptide
  MOD_RES (1)..(1): Xaa is C or S
XSKVVMEYKFKVKPTRGVLYLISIPE

SEQ ID NO: 83024 - protein, 31 aa, Artificial Sequence
  Cyclic GFR-binding peptide
  MOD_RES (2)..(4): Xaa is C or S
RXGXAEVVMDRHKRLVVNNAADYYLISTASL

SEQ ID NO: 83025 - protein, 32 aa, Artificial Sequence; identical to SEQ ID NO: 6161
  Cyclic GFR-binding peptide
  MOD_RES (27)..(28): Xaa is C or S

SEQ ID NO: 83026 - protein, 40 aa, Artificial Sequence; identical to SEQ ID NO: 34522
  Cyclic GFR-binding peptide
  MOD_RES (2)..(34): Xaa is C or S

SEQ ID NO: 83027 - protein, 31 aa, Artificial Sequence
  Cyclic GFR-binding peptide
  MOD_RES (1)..(3): Xaa is C or S
XGXRDVVMGRHKRLIIQQKDNYYLMSTASMK

SEQ ID NO: 83028 - protein, 30 aa, Artificial Sequence
  Cyclic GFR-binding peptide
  MOD_RES (2)..(4): Xaa is C or S
SXKXSRVIMPIKGYVKPKRGVFYLINIPSL

SEQ ID NO: 83029 - protein, 31 aa, Artificial Sequence; identical to SEQ ID NO: 6168
  Cyclic GFR-binding peptide
  MOD_RES (1)..(3): Xaa is C or S

SEQ ID NO: 83030 - protein, 32 aa, Artificial Sequence; identical to SEQ ID NO: 41669
  Cyclic GFR-binding peptide
  MOD_RES (29)..(30): Xaa is C or S

SEQ ID NO: 83031 - protein, 38 aa, Artificial Sequence; identical to SEQ ID NO: 6170
  Cyclic GFR-binding peptide
  MOD_RES (1)..(3)..(35)..(36): Xaa is C or S

SEQ ID NO: 83032 - protein, 30 aa, Artificial Sequence; identical to SEQ ID NO: 34534
  Cyclic GFR-binding peptide
  MOD_RES (1)..(1): Xaa is C or S

SEQ ID NO: 83033 - protein, 30 aa, Artificial Sequence; identical to SEQ ID NO: 6172
  Cyclic GFR-binding peptide
  MOD_RES (2)..(4): Xaa is C or S

SEQ ID NO: 83034 - protein, 25 aa, Artificial Sequence
  Cyclic GFR-binding peptide
AMGYHYKLYTVVGKDKYLISIPSLK

SEQ ID NO: 83035 - protein, 30 aa, Artificial Sequence
  Cyclic GFR-binding peptide
EVVMDRHKRLVVNNAADYYLISTASLRAPV

SEQ ID NO: 83036 - protein, 38 aa, Artificial Sequence
  Cyclic GFR-binding peptide
  MOD_RES (32)..(33): Xaa is C or S
ESVAMGRHKRLYTVVGKDYYLISTASLKTPVXXAKSAK

SEQ ID NO: 83037 - protein, 33 aa, Artificial Sequence; identical to SEQ ID NO: 16574
  Cyclic GFR-binding peptide
  MOD_RES (27)..(28): Xaa is C or S

SEQ ID NO: 83038 - protein, 24 aa, Artificial Sequence
  Cyclic GFR-binding peptide
VVMNRYKKLIVNSSDDFYLVSIAN

SEQ ID NO: 83039 - protein, 22 aa, Artificial Sequence
  Cyclic GFR-binding peptide
MDEYKFKVVNNASDLYLISIPE

SEQ ID NO: 83040 - protein, 30 aa, Artificial Sequence
  Cyclic GFR-binding peptide
  MOD_RES (29)..(30): Xaa is C or S
TMNRYKKLVVNKNEDFYLISIANMKEPVXX

SEQ ID NO: 83041 - protein, 34 aa, Artificial Sequence; identical to SEQ ID NO: 41691
  Cyclic GFR-binding peptide
  MOD_RES (28)..(29): Xaa is C or S

SEQ ID NO: 83042 - protein, 39 aa, Artificial Sequence
  Cyclic GFR-binding peptide
  MOD_RES (2)..(33)..(34): Xaa is C or S
GXEEVIMYHYKLLLVRGNDKYLMSIPSTKVPAXXTSPVR

SEQ ID NO: 83043 - protein, 36 aa, Artificial Sequence
  Cyclic GFR-binding peptide
  MOD_RES (30)..(31): Xaa is C or S
VVMNYHYKLIVNSSDDKYLVSIPSLKTPAXXPKPVH

SEQ ID NO: 83044 - protein, 30 aa, Artificial Sequence; identical to SEQ ID NO: 34552
  Cyclic GFR-binding peptide
  MOD_RES (30)..(30): Xaa is C or S

SEQ ID NO: 83045 - protein, 36 aa, Artificial Sequence; identical to SEQ ID NO: 6185
  Cyclic GFR-binding peptide
  MOD_RES (31)..(32): Xaa is C or S

SEQ ID NO: 83046 - protein, 30 aa, Artificial Sequence; identical to SEQ ID NO: 34554
  Cyclic GFR-binding peptide
  MOD_RES (26)..(27): Xaa is C or S

SEQ ID NO: 83047 - protein, 25 aa, Artificial Sequence
  Cyclic GFR-binding peptide
VVMDRHKRLVVNNASDYYLISTASL

SEQ ID NO: 83048 - protein, 38 aa, Artificial Sequence; identical to SEQ ID NO: 6186
  Cyclic GFR-binding peptide
  MOD_RES (2)..(34)..(35): Xaa is C or S

SEQ ID NO: 83049 - protein, 34 aa, Artificial Sequence
  Cyclic GFR-binding peptide
  MOD_RES (30)..(31): Xaa is C or S
VVMDYHYKLVVNNASDKYLISIPSLRTPVXXTPP

SEQ ID NO: 83050 - protein, 39 aa, Artificial Sequence
  Cyclic GFR-binding peptide
  MOD_RES (1)..(3)..(35)..(36): Xaa is C or S
XGXESVAMGRHKRLYTVVGKDYYLISTASLKTPVXXAKS

SEQ ID NO: 83051 - protein, 30 aa, Artificial Sequence; identical to SEQ ID NO: 41696
  Cyclic GFR-binding peptide

SEQ ID NO: 83052 - protein, 30 aa, Artificial Sequence; identical to SEQ ID NO: 6193
  Cyclic GFR-binding peptide
  MOD_RES (2)..(4): Xaa is C or S

SEQ ID NO: 83053 - protein, 30 aa, Artificial Sequence; identical to SEQ ID NO: 16598
  Cyclic GFR-binding peptide
  MOD_RES (27)..(28): Xaa is C or S

SEQ ID NO: 83054 - protein, 31 aa, Artificial Sequence; identical to SEQ ID NO: 34562
  Cyclic GFR-binding peptide
  MOD_RES (2)..(2): Xaa is C or S

SEQ ID NO: 83055 - protein, 26 aa, Artificial Sequence
  Cyclic GFR-binding peptide
VMRHKRLVKPTRGVYYLISTASLDQP

SEQ ID NO: 83056 - protein, 26 aa, Artificial Sequence
  Cyclic GFR-binding peptide
VIMEYKFKIKPTKGILYLISIPELDQ

SEQ ID NO: 83057 - protein, 31 aa, Artificial Sequence; identical to SEQ ID NO: 34566
  Cyclic GFR-binding peptide
  MOD_RES (1)..(3): Xaa is C or S

SEQ ID NO: 83058 - protein, 24 aa, Artificial Sequence
  Cyclic GFR-binding peptide
KVVMRYKKLVKPTRGVFYLISIAN

SEQ ID NO: 83059 - protein, 34 aa, Artificial Sequence
  Cyclic GFR-binding peptide
  MOD_RES (29)..(30): Xaa is C or S
TMNYHYKLVVNKNEDKYLISIPSMKEPVXXPEPI

SEQ ID NO: 83060 - protein, 26 aa, Artificial Sequence
  Cyclic GFR-binding peptide
GYHYKLIIQQKDNKYLMSIPSMKTPT

SEQ ID NO: 83061 - protein, 33 aa, Artificial Sequence; identical to SEQ ID NO: 6206
  Cyclic GFR-binding peptide
  MOD_RES (27)..(27): Xaa is C or S

SEQ ID NO: 83062 - protein, 26 aa, Artificial Sequence
  Cyclic GFR-binding peptide
  MOD_RES (26)..(26): Xaa is C or S
YHYKLVVNKNEDKYLISIPSMKEPVX

SEQ ID NO: 83063 - protein, 25 aa, Artificial Sequence
  Cyclic GFR-binding peptide
PIKGYVVNKNEDFYLINIPSMKEPV

SEQ ID NO: 83064 - protein, 31 aa, Artificial Sequence; identical to SEQ ID NO: 41711
  Cyclic GFR-binding peptide
  MOD_RES (1)..(3): Xaa is C or S

SEQ ID NO: 83065 - protein, 28 aa, Artificial Sequence
  Cyclic GFR-binding peptide
VMDRYKKLVVNNASDFYLISIANLRTPV

SEQ ID NO: 83066 - protein, 27 aa, Artificial Sequence
  Cyclic GFR-binding peptide
VMDRHKRLVVNNAADYYLISTASLRAP

SEQ ID NO: 83067 - protein, 34 aa, Artificial Sequence; identical to SEQ ID NO: 41716
  Cyclic GFR-binding peptide
  MOD_RES (28)..(29): Xaa is C or S

SEQ ID NO: 83068 - protein, 32 aa, Artificial Sequence; identical to SEQ ID NO: 34576
  Cyclic GFR-binding peptide
  MOD_RES (30)..(31): Xaa is C or S

SEQ ID NO: 83069 - protein, 36 aa, Artificial Sequence
  Cyclic GFR-binding peptide
  MOD_RES (32)..(33): Xaa is C or S
SEVVMDYHYKLVVNNASDKYLISIPSLRTPVXXTPP

SEQ ID NO: 83070 - protein, 28 aa, Artificial Sequence
  Cyclic GFR-binding peptide
  MOD_RES (27)..(28): Xaa is C or S
NRHKRLVVNKNEDYYLISTASMKEPVXX

SEQ ID NO: 83071 - protein, 31 aa, Artificial Sequence; identical to SEQ ID NO: 6221
  Cyclic GFR-binding peptide
  MOD_RES (31)..(31): Xaa is C or S

SEQ ID NO: 83072 - protein, 36 aa, Artificial Sequence; identical to SEQ ID NO: 41719
  Cyclic GFR-binding peptide
  MOD_RES (1)..(33)..(34): Xaa is C or S

SEQ ID NO: 83073 - protein, 38 aa, Artificial Sequence; identical to SEQ ID NO: 34583
  Cyclic GFR-binding peptide
  MOD_RES (2)..(4)..(36)..(37): Xaa is C or S

SEQ ID NO: 83074 - protein, 22 aa, Artificial Sequence
  Cyclic GFR-binding peptide
MNPIKGYIVNNSSDFYLVNIPS

SEQ ID NO: 83075 - protein, 34 aa, Artificial Sequence
  Cyclic GFR-binding peptide
  MOD_RES (1)..(3)..(34): Xaa is C or S
XGXEEVIMEYKFKLLVRGNDLYLMSIPETKVPAX

SEQ ID NO: 83076 - protein, 34 aa, Artificial Sequence; identical to SEQ ID NO: 6228
  Cyclic GFR-binding peptide
  MOD_RES (30)..(31): Xaa is C or S

SEQ ID NO: 83077 - protein, 37 aa, Artificial Sequence; identical to SEQ ID NO: 34586
  Cyclic GFR-binding peptide
  MOD_RES (2)..(4)..(35)..(36): Xaa is C or S

SEQ ID NO: 83078 - protein, 38 aa, Artificial Sequence; identical to SEQ ID NO: 41728
  Cyclic GFR-binding peptide
  MOD_RES (2)..(4)..(36)..(37): Xaa is C or S

SEQ ID NO: 83079 - protein, 33 aa, Artificial Sequence
  Cyclic GFR-binding peptide
  MOD_RES (1)..(3): Xaa is C or S
XAXSEVTMNEYKFKVVNKNEDLYLISIPEMKEP

SEQ ID NO: 83080 - protein, 27 aa, Artificial Sequence
  Cyclic GFR-binding peptide
  MOD_RES (26)..(27): Xaa is C or S
EYKFKVVNNAADLYLISIPELRAPVXX

SEQ ID NO: 83081 - protein, 25 aa, Artificial Sequence
  Cyclic GFR-binding peptide
SMGERYKKLTPVGMDDFYLVSIANL

SEQ ID NO: 83082 - protein, 37 aa, Artificial Sequence; identical to SEQ ID NO: 6233
  Cyclic GFR-binding peptide
  MOD_RES (2)..(34): Xaa is C or S

SEQ ID NO: 83083 - protein, 27 aa, Artificial Sequence
  Cyclic GFR-binding peptide
  MOD_RES (1)..(1): Xaa is C or S
XRDVVMGYHYKLIIQQKDNKYLMSIPS

SEQ ID NO: 83084 - protein, 26 aa, Artificial Sequence
  Cyclic GFR-binding peptide
VTMNEYKFKVVNKNEDLYLISIPEMK

SEQ ID NO: 83085 - protein, 29 aa, Artificial Sequence
  Cyclic GFR-binding peptide
  MOD_RES (2)..(4): Xaa is C or S
LXGXEEVIMYHYKLLLVRGNDKYLMSIPS

SEQ ID NO: 83086 - protein, 33 aa, Artificial Sequence; identical to SEQ ID NO: 6238
  Cyclic GFR-binding peptide
  MOD_RES (27)..(28): Xaa is C or S

SEQ ID NO: 83087 - protein, 33 aa, Artificial Sequence; identical to SEQ ID NO: 34599
  Cyclic GFR-binding peptide
  MOD_RES (27)..(28): Xaa is C or S

SEQ ID NO: 83088 - protein, 37 aa, Artificial Sequence; identical to SEQ ID NO: 6242
  Cyclic GFR-binding peptide
  MOD_RES (2)..(35)..(36): Xaa is C or S

SEQ ID NO: 83089 - protein, 29 aa, Artificial Sequence
  Cyclic GFR-binding peptide
SKVVMPIKGYVKPTRGVFYLINIPSLDQP

SEQ ID NO: 83090 - protein, 33 aa, Artificial Sequence; identical to SEQ ID NO: 6243
  Cyclic GFR-binding peptide
  MOD_RES (30)..(30): Xaa is C or S

SEQ ID NO: 83091 - protein, 42 aa, Artificial Sequence
  Cyclic GFR-binding peptide
  MOD_RES (2)..(4)..(36)..(37): Xaa is C or S
RXGXSEVVMDYHYKLVVNNASDKYLISIPSLRTPVXXTPPTS

SEQ ID NO: 83092 - protein, 36 aa, Artificial Sequence
  Cyclic GFR-binding peptide
  MOD_RES (2)..(4)..(36): Xaa is C or S
RXAXSEVTMNRHKRLVVNKNEDYYLISTASMKEPVX

SEQ ID NO: 83093 - protein, 36 aa, Artificial Sequence
  Cyclic GFR-binding peptide
  MOD_RES (30)..(31): Xaa is C or S
VTMNRYKKLVVNKNEDFYLISIANMKEPVXXPEPIG

SEQ ID NO: 83094 - protein, 30 aa, Artificial Sequence; identical to SEQ ID NO: 76687
  Cyclic GFR-binding peptide
  MOD_RES (2)..(2): Xaa is C or S

SEQ ID NO: 83095 - protein, 20 aa, Artificial Sequence
  Cyclic GFR-binding peptide
YHYKLVVKENEDKYLMSIPS

SEQ ID NO: 83096 - protein, 31 aa, Artificial Sequence; identical to SEQ ID NO: 6248
  Cyclic GFR-binding peptide
  MOD_RES (26)..(27): Xaa is C or S

SEQ ID NO: 83097 - protein, 26 aa, Artificial Sequence
  Cyclic GFR-binding peptide
MNRYKKLIVNSSDDFYLVSIANLQTP

SEQ ID NO: 83098 - protein, 33 aa, Artificial Sequence; identical to SEQ ID NO: 6251
  Cyclic GFR-binding peptide
  MOD_RES (28)..(29): Xaa is C or S

SEQ ID NO: 83099 - protein, 24 aa, Artificial Sequence
  Cyclic GFR-binding peptide
EVIMYHYKLLLVRGNDKYLMSIPS

SEQ ID NO: 83100 - protein, 35 aa, Artificial Sequence
  Cyclic GFR-binding peptide
  MOD_RES (1)..(3)..(35): Xaa is C or S
XGXSEVVMDRHKRLVVNNASDYYLISTASLRTPVX

SEQ ID NO: 83101 - protein, 24 aa, Artificial Sequence
  Cyclic GFR-binding peptide
RHKRLVVNNAADYYLISTASLRAP

SEQ ID NO: 83102 - protein, 33 aa, Artificial Sequence; identical to SEQ ID NO: 34610
  Cyclic GFR-binding peptide
  MOD_RES (31)..(32): Xaa is C or S

SEQ ID NO: 83103 - protein, 30 aa, Artificial Sequence; identical to SEQ ID NO: 6261
  Cyclic GFR-binding peptide
  MOD_RES (27)..(28): Xaa is C or S

SEQ ID NO: 83104 - protein, 39 aa, Artificial Sequence
  Cyclic GFR-binding peptide
  MOD_RES (2)..(34)..(35): Xaa is C or S
GXRDVVMGYHYKLIIQQKDNKYLMSIPSMKTPTXXPGAS

SEQ ID NO: 83105 - protein, 26 aa, Artificial Sequence
  Cyclic GFR-binding peptide
TMNRYKKLVVNKNEDFYLISIANMKE

SEQ ID NO: 83106 - protein, 33 aa, Artificial Sequence; identical to SEQ ID NO: 6262
  Cyclic GFR-binding peptide
  MOD_RES (2)..(4): Xaa is C or S

SEQ ID NO: 83107 - protein, 38 aa, Artificial Sequence; identical to SEQ ID NO: 6263
  Cyclic GFR-binding peptide
  MOD_RES (1)..(3)..(35)..(36): Xaa is C or S

SEQ ID NO: 83108 - protein, 31 aa, Artificial Sequence
  Cyclic GFR-binding peptide
  MOD_RES (27)..(28): Xaa is C or S
MPIKGYVKPKRGVFYLINIPSLAQPVXXPAA

SEQ ID NO: 83109 - protein, 38 aa, Artificial Sequence; identical to SEQ ID NO: 6268
  Cyclic GFR-binding peptide
  MOD_RES (32)..(32): Xaa is C or S

SEQ ID NO: 83110 - protein, 30 aa, Artificial Sequence
  Cyclic GFR-binding peptide
  MOD_RES (29)..(30): Xaa is C or S
VMGEYKFKIIQQKDNLYLMSIPEMKTPTXX

SEQ ID NO: 83111 - protein, 24 aa, Artificial Sequence
  Cyclic GFR-binding peptide
GYHYKLYTVVGKDKYLISIPSLKT

SEQ ID NO: 83112 - protein, 29 aa, Artificial Sequence
  Cyclic GFR-binding peptide
VTMNPIKGYVVNKNEDFYLINIPSMKEPV

SEQ ID NO: 83113 - protein, 32 aa, Artificial Sequence; identical to SEQ ID NO: 6271
  Cyclic GFR-binding peptide
  MOD_RES (27)..(28): Xaa is C or S

SEQ ID NO: 83114 - protein, 40 aa, Artificial Sequence
  Cyclic GFR-binding peptide
  MOD_RES (1)..(3)..(35)..(36): Xaa is C or S
XAXSEVTMNPIKGYVVNKNEDFYLINIPSMKEPVXXPEPI

SEQ ID NO: 83115 - protein, 31 aa, Artificial Sequence; identical to SEQ ID NO: 41750
  Cyclic GFR-binding peptide
  MOD_RES (26)..(27): Xaa is C or S

SEQ ID NO: 83116 - protein, 32 aa, Artificial Sequence; identical to SEQ ID NO: 6272
  Cyclic GFR-binding peptide
  MOD_RES (1)..(3): Xaa is C or S

SEQ ID NO: 83117 - protein, 30 aa, Artificial Sequence; identical to SEQ ID NO: 6274
  Cyclic GFR-binding peptide
  MOD_RES (2)..(2): Xaa is C or S

SEQ ID NO: 83118 - protein, 27 aa, Artificial Sequence
  Cyclic GFR-binding peptide
EVVMDRHKRLVVNNASDYYLISTASLR

SEQ ID NO: 83119 - protein, 26 aa, Artificial Sequence
  Cyclic GFR-binding peptide
  MOD_RES (26)..(26): Xaa is C or S
RHKRLVVNNAADYYLISTASLRAPVX

SEQ ID NO: 83120 - protein, 31 aa, Artificial Sequence; identical to SEQ ID NO: 41758
  Cyclic GFR-binding peptide
  MOD_RES (29)..(30): Xaa is C or S

SEQ ID NO: 83121 - protein, 27 aa, Artificial Sequence
  Cyclic GFR-binding peptide
  MOD_RES (1)..(1): Xaa is C or S
XSEVVMDPIKGYVVNNASDFYLINIPS

SEQ ID NO: 83122 - protein, 30 aa, Artificial Sequence
  Cyclic GFR-binding peptide
  MOD_RES (26)..(27): Xaa is C or S
EYKFKIIQQKDNLYLMSIPEMKTPTXXPGA

SEQ ID NO: 83123 - protein, 40 aa, Artificial Sequence; identical to SEQ ID NO: 6282
  Cyclic GFR-binding peptide
  MOD_RES (2)..(34)..(35): Xaa is C or S

SEQ ID NO: 83124 - protein, 33 aa, Artificial Sequence; identical to SEQ ID NO: 34633
  Cyclic GFR-binding peptide
  MOD_RES (2)..(4): Xaa is C or S

SEQ ID NO: 83125 - protein, 24 aa, Artificial Sequence
  Cyclic GFR-binding peptide
YHYKLVVNKNEDKYLISIPSMKEP

SEQ ID NO: 83126 - protein, 26 aa, Artificial Sequence
  Cyclic GFR-binding peptide
SKVIMYHYKLIKPTKGIKYLISIPSL

SEQ ID NO: 83127 - protein, 25 aa, Artificial Sequence
  Cyclic GFR-binding peptide
RYKKLYTVVGKDFYLISIANLKTPV

SEQ ID NO: 83128 - protein, 29 aa, Artificial Sequence
  Cyclic GFR-binding peptide
  MOD_RES (1)..(3): Xaa is C or S
XGXGEVVMDRYKKLVVKENEDFYLMSIAN

SEQ ID NO: 83129 - protein, 30 aa, Artificial Sequence
  Cyclic GFR-binding peptide
  MOD_RES (27)..(28): Xaa is C or S
MRHKRLLLVRGNDYYLMSTASTKVPAXXTS

SEQ ID NO: 83130 - protein, 41 aa, Artificial Sequence; identical to SEQ ID NO: 34638
  Cyclic GFR-binding peptide
  MOD_RES (2)..(35)..(36): Xaa is C or S

SEQ ID NO: 83131 - protein, 30 aa, Artificial Sequence; identical to SEQ ID NO: 41764
  Cyclic GFR-binding peptide

SEQ ID NO: 83132 - protein, 32 aa, Artificial Sequence
  Cyclic GFR-binding peptide
  MOD_RES (28)..(29): Xaa is C or S
MGEYKFKIIQQKDNLYLMSIPEMKTPTXXPGA

SEQ ID NO: 83133 - protein, 32 aa, Artificial Sequence
  Cyclic GFR-binding peptide
  MOD_RES (2)..(2): Xaa is C or S
AXSEVTMNYHYKLVVNKNEDKYLISIPSMKEP

SEQ ID NO: 83134 - protein, 35 aa, Artificial Sequence
  Cyclic GFR-binding peptide
  MOD_RES (32)..(33): Xaa is C or S
RDVVMGYHYKLIIQQKDNKYLMSIPSMKTPTXXPG

SEQ ID NO: 83135 - protein, 28 aa, Artificial Sequence
  Cyclic GFR-binding peptide
  MOD_RES (1)..(1): Xaa is C or S
XEEVIMPIKGYLLVRGNDFYLMNIPSTK

SEQ ID NO: 83136 - protein, 40 aa, Artificial Sequence; identical to SEQ ID NO: 34639
  Cyclic GFR-binding peptide
  MOD_RES (2)..(4)..(37)..(38): Xaa is C or S

SEQ ID NO: 83137 - protein, 42 aa, Artificial Sequence; identical to SEQ ID NO: 6291
  Cyclic GFR-binding peptide
  MOD_RES (2)..(4)..(36)..(37): Xaa is C or S

SEQ ID NO: 83138 - protein, 23 aa, Artificial Sequence
  Cyclic GFR-binding peptide
VIMYHYKLIKPTKGIKYLISIPS

SEQ ID NO: 83139 - protein, 35 aa, Artificial Sequence; identical to SEQ ID NO: 34642
  Cyclic GFR-binding peptide
  MOD_RES (30)..(31): Xaa is C or S

SEQ ID NO: 83140 - protein, 31 aa, Artificial Sequence
  Cyclic GFR-binding peptide
  MOD_RES (1)..(3): Xaa is C or S
XGXSEVVMDRHKRLVVNNASDYYLISTASLR

SEQ ID NO: 83141 - protein, 28 aa, Artificial Sequence
  Cyclic GFR-binding peptide
VMDRHKRLVVKENEDYYLMSTASLETPV

SEQ ID NO: 83142 - protein, 29 aa, Artificial Sequence
  Cyclic GFR-binding peptide
  MOD_RES (2)..(2): Xaa is C or S
KXSKVVMEYKFKVKPTRGVLYLISIPELD

SEQ ID NO: 83143 - protein, 37 aa, Artificial Sequence; identical to SEQ ID NO: 34649
  Cyclic GFR-binding peptide
  MOD_RES (31)..(32): Xaa is C or S

SEQ ID NO: 83144 - protein, 30 aa, Artificial Sequence; identical to SEQ ID NO: 6298
  Cyclic GFR-binding peptide

SEQ ID NO: 83145 - protein, 22 aa, Artificial Sequence
  Cyclic GFR-binding peptide
MNRHKRLVVNKNEDYYLISTAS

SEQ ID NO: 83146 - protein, 37 aa, Artificial Sequence; identical to SEQ ID NO: 6301
  Cyclic GFR-binding peptide
  MOD_RES (2)..(33)..(34): Xaa is C or S

SEQ ID NO: 83147 - protein, 41 aa, Artificial Sequence; identical to SEQ ID NO: 34653
  Cyclic GFR-binding peptide
  MOD_RES (1)..(3)..(35)..(36): Xaa is C or S

SEQ ID NO: 83148 - protein, 31 aa, Artificial Sequence; identical to SEQ ID NO: 34654
  Cyclic GFR-binding peptide
  MOD_RES (2)..(2): Xaa is C or S

SEQ ID NO: 83149 - protein, 28 aa, Artificial Sequence
  Cyclic GFR-binding peptide
  MOD_RES (26)..(27): Xaa is C or S
RYKKLIVNSSDDFYLVSIANLQTPAXXP

SEQ ID NO: 83150 - protein, 35 aa, Artificial Sequence; identical to SEQ ID NO: 6304
  Cyclic GFR-binding peptide
  MOD_RES (30)..(31): Xaa is C or S

SEQ ID NO: 83151 - protein, 33 aa, Artificial Sequence; identical to SEQ ID NO: 41780
  Cyclic GFR-binding peptide
  MOD_RES (30)..(31): Xaa is C or S

SEQ ID NO: 83152 - protein, 38 aa, Artificial Sequence; identical to SEQ ID NO: 6306
  Cyclic GFR-binding peptide
  MOD_RES (1)..(33): Xaa is C or S

SEQ ID NO: 83153 - protein, 31 aa, Artificial Sequence; identical to SEQ ID NO: 41783
  Cyclic GFR-binding peptide
  MOD_RES (2)..(4): Xaa is C or S

SEQ ID NO: 83154 - protein, 28 aa, Artificial Sequence
  Cyclic GFR-binding peptide
  MOD_RES (28)..(28): Xaa is C or S
MDPIKGYVVNNAADFYLINIPSLRAPVX

SEQ ID NO: 83155 - protein, 40 aa, Artificial Sequence; identical to SEQ ID NO: 34659
  Cyclic GFR-binding peptide
  MOD_RES (2)..(4)..(36)..(37): Xaa is C or S

SEQ ID NO: 83156 - protein, 27 aa, Artificial Sequence
  Cyclic GFR-binding peptide
EVVMDPIKGYVVNNAADFYLINIPSLR

SEQ ID NO: 83157 - protein, 32 aa, Artificial Sequence; identical to SEQ ID NO: 6311
  Cyclic GFR-binding peptide
  MOD_RES (28)..(29): Xaa is C or S

SEQ ID NO: 83158 - protein, 34 aa, Artificial Sequence; identical to SEQ ID NO: 6313
  Cyclic GFR-binding peptide
  MOD_RES (31)..(32): Xaa is C or S

SEQ ID NO: 83159 - protein, 32 aa, Artificial Sequence; identical to SEQ ID NO: 41788
  Cyclic GFR-binding peptide
  MOD_RES (29)..(30): Xaa is C or S

SEQ ID NO: 83160 - protein, 33 aa, Artificial Sequence; identical to SEQ ID NO: 34667
  Cyclic GFR-binding peptide
  MOD_RES (28)..(28): Xaa is C or S

SEQ ID NO: 83161 - protein, 24 aa, Artificial Sequence
  Cyclic GFR-binding peptide
MEYHYKLVVKDYEDKYLMSIPSLE

SEQ ID NO: 83162 - protein, 32 aa, Artificial Sequence
  Cyclic GFR-binding peptide
  MOD_RES (31)..(32): Xaa is C or S
EVVMDYHYKLVVNNASDKYLISIPSLRTPVXX

SEQ ID NO: 83163 - protein, 33 aa, Artificial Sequence; identical to SEQ ID NO: 76724
  Cyclic GFR-binding peptide
  MOD_RES (1)..(32)..(33): Xaa is C or S

SEQ ID NO: 83164 - protein, 26 aa, Artificial Sequence
  Cyclic GFR-binding peptide
SEVVMDRHKRLVVNNASDYYLISTAS

SEQ ID NO: 83165 - protein, 26 aa, Artificial Sequence
  Cyclic GFR-binding peptide
VVMNPIKGYIVNSSDDFYLVNIPSLQ

SEQ ID NO: 83166 - protein, 31 aa, Artificial Sequence
  Cyclic GFR-binding peptide
  MOD_RES (26)..(27): Xaa is C or S
RYKKLVVNKNEDFYLISIANMKEPVXXPEPI

SEQ ID NO: 83167 - protein, 29 aa, Artificial Sequence
  Cyclic GFR-binding peptide
EVVMDRYKKLVVNNAADFYLISIANLRAP

SEQ ID NO: 83168 - protein, 32 aa, Artificial Sequence
  Cyclic GFR-binding peptide
  MOD_RES (31)..(32): Xaa is C or S
EVTMNRYKKLVVNKNEDFYLISIANMKEPVXX

SEQ ID NO: 83169 - protein, 26 aa, Artificial Sequence
  Cyclic GFR-binding peptide
DRHKRLVVKENEDYYLMSTASLETPV

SEQ ID NO: 83170 - protein, 28 aa, Artificial Sequence
  Cyclic GFR-binding peptide
  MOD_RES (27)..(28): Xaa is C or S
MRYKKLVKPKRGVFYLISIANLAQPVXX

SEQ ID NO: 83171 - protein, 40 aa, Artificial Sequence; identical to SEQ ID NO: 6328
  Cyclic GFR-binding peptide
  MOD_RES (2)..(4)..(36)..(37): Xaa is C or S

SEQ ID NO: 83172 - protein, 36 aa, Artificial Sequence
  Cyclic GFR-binding peptide
  MOD_RES (30)..(31): Xaa is C or S
VVMDRHKRLVVNNASDYYLISTASLRTPVXXTPPTS

SEQ ID NO: 83173 - protein, 30 aa, Artificial Sequence
  Cyclic GFR-binding peptide
  MOD_RES (2)..(2): Xaa is C or S
AXSEVTMNYHYKLVVNKNEDKYLISIPSMK

SEQ ID NO: 83174 - protein, 31 aa, Artificial Sequence; identical to SEQ ID NO: 6329
  Cyclic GFR-binding peptide
  MOD_RES (1)..(3): Xaa is C or S

SEQ ID NO: 83175 - protein, 33 aa, Artificial Sequence; identical to SEQ ID NO: 6330
  Cyclic GFR-binding peptide
  MOD_RES (30)..(31): Xaa is C or S

SEQ ID NO: 83176 - protein, 22 aa, Artificial Sequence
  Cyclic GFR-binding peptide
MDRYKKLVVKENEDFYLMSIAN

SEQ ID NO: 83177 - protein, 38 aa, Artificial Sequence; identical to SEQ ID NO: 6333
  Cyclic GFR-binding peptide
  MOD_RES (2)..(34)..(35): Xaa is C or S

SEQ ID NO: 83178 - protein, 33 aa, Artificial Sequence; identical to SEQ ID NO: 34689
  Cyclic GFR-binding peptide
  MOD_RES (29)..(30): Xaa is C or S

SEQ ID NO: 83179 - protein, 26 aa, Artificial Sequence
  Cyclic GFR-binding peptide
  MOD_RES (1)..(1): Xaa is C or S
XEEVIMRYKKLLLVRGNDFYLMSIAN

SEQ ID NO: 83180 - protein, 23 aa, Artificial Sequence
  Cyclic GFR-binding peptide
YHYKLIIQQKDNKYLMSIPSMKT

SEQ ID NO: 83181 - protein, 29 aa, Artificial Sequence
  Cyclic GFR-binding peptide
  MOD_RES (27)..(28): Xaa is C or S
ERYKKLVVKDYEDFYLMSIANLETPVXXA

SEQ ID NO: 83182 - protein, 32 aa, Artificial Sequence; identical to SEQ ID NO: 6341
  Cyclic GFR-binding peptide
  MOD_RES (27)..(28): Xaa is C or S

SEQ ID NO: 83183 - protein, 30 aa, Artificial Sequence; identical to SEQ ID NO: 6342
  Cyclic GFR-binding peptide
  MOD_RES (26)..(27): Xaa is C or S

SEQ ID NO: 83184 - protein, 31 aa, Artificial Sequence
  Cyclic GFR-binding peptide
  MOD_RES (31)..(31): Xaa is C or S
EVVMDYHYKLVVNNASDKYLISIPSLRTPVX

SEQ ID NO: 83185 - protein, 31 aa, Artificial Sequence
  Cyclic GFR-binding peptide
  MOD_RES (1)..(1): Xaa is C or S
XSKVVMPIKGYVKPTRGVFYLINIPSLDQPV

SEQ ID NO: 83186 - protein, 32 aa, Artificial Sequence
  Cyclic GFR-binding peptide
  MOD_RES (1)..(32): Xaa is C or S
XSKVVMPIKGYVKPTRGVFYLINIPSLDQPVX

SEQ ID NO: 83187 - protein, 39 aa, Artificial Sequence; identical to SEQ ID NO: 6344
  Cyclic GFR-binding peptide
  MOD_RES (2)..(4)..(36)..(37): Xaa is C or S

SEQ ID NO: 83188 - protein, 40 aa, Artificial Sequence; identical to SEQ ID NO: 34703
  Cyclic GFR-binding peptide
  MOD_RES (2)..(4)..(35)..(36): Xaa is C or S

SEQ ID NO: 83189 - protein, 25 aa, Artificial Sequence
  Cyclic GFR-binding peptide
RHKRLVVKENEDYYLMSTASLETPV

SEQ ID NO: 83190 - protein, 28 aa, Artificial Sequence
  Cyclic GFR-binding peptide
VVMDRYKKLVVNNAADFYLISIANLRAP

SEQ ID NO: 83191 - protein, 31 aa, Artificial Sequence; identical to SEQ ID NO: 6353
  Cyclic GFR-binding peptide
  MOD_RES (27)..(28): Xaa is C or S

SEQ ID NO: 83192 - protein, 29 aa, Artificial Sequence
  Cyclic GFR-binding peptide
RVVMNPIKGYIVNSSDDFYLVNIPSLKTP

SEQ ID NO: 83193 - protein, 25 aa, Artificial Sequence
  Cyclic GFR-binding peptide
MNRYKKLVVNKNEDFYLISIANMKE

SEQ ID NO: 83194 - protein, 38 aa, Artificial Sequence; identical to SEQ ID NO: 749
  Cyclic GFR-binding peptide
  MOD_RES (32)..(33): Xaa is C or S

SEQ ID NO: 83195 - protein, 35 aa, Artificial Sequence; identical to SEQ ID NO: 750
  Cyclic GFR-binding peptide
  MOD_RES (2)..(4): Xaa is C or S

SEQ ID NO: 83196 - protein, 21 aa, Artificial Sequence
  Cyclic GFR-binding peptide
GRHKRLIIQQKDNYYLMSTAS

SEQ ID NO: 83197 - protein, 26 aa, Artificial Sequence
  Cyclic GFR-binding peptide
SEVTMNYHYKLVVNKNEDKYLISIPS

SEQ ID NO: 83198 - protein, 28 aa, Artificial Sequence
  Cyclic GFR-binding peptide
ESVAMGRHKRLYTVVGKDYYLISTASLK

SEQ ID NO: 83199 - protein, 36 aa, Artificial Sequence
  Cyclic GFR-binding peptide
  MOD_RES (1)..(3)..(35)..(36): Xaa is C or S
XAXSEVTMNYHYKLVVNKNEDKYLISIPSMKEPVXX

SEQ ID NO: 83200 - protein, 27 aa, Artificial Sequence
  Cyclic GFR-binding peptide
VVMEYKFKVKPTRGVLYLISIPELDQP

SEQ ID NO: 83201 - protein, 30 aa, Artificial Sequence; identical to SEQ ID NO: 40338
  Cyclic GFR-binding peptide
  MOD_RES (26)..(27): Xaa is C or S

SEQ ID NO: 83202 - protein, 32 aa, Artificial Sequence; identical to SEQ ID NO: 75125
  Cyclic GFR-binding peptide
  MOD_RES (2)..(4): Xaa is C or S

SEQ ID NO: 83203 - protein, 24 aa, Artificial Sequence
  Cyclic GFR-binding peptide
MRYKKLIKPTKGIFYLISIANLDQ

SEQ ID NO: 83204 - protein, 29 aa, Artificial Sequence
  Cyclic GFR-binding peptide
  MOD_RES (1)..(1): Xaa is C or S
XSKVVMRYKKLVKPTRGVFYLISIANLDQ

SEQ ID NO: 83205 - protein, 30 aa, Artificial Sequence; identical to SEQ ID NO: 757
  Cyclic GFR-binding peptide
  MOD_RES (1)..(1): Xaa is C or S

SEQ ID NO: 83206 - protein, 26 aa, Artificial Sequence
  Cyclic GFR-binding peptide
  MOD_RES (26)..(26): Xaa is C or S
RHKRLVVNNASDYYLISTASLRTPVX

SEQ ID NO: 83207 - protein, 31 aa, Artificial Sequence
  Cyclic GFR-binding peptide
  MOD_RES (31)..(31): Xaa is C or S
EVTMNRYKKLVVNKNEDFYLISIANMKEPVX

SEQ ID NO: 83208 - protein, 38 aa, Artificial Sequence
  Cyclic GFR-binding peptide
  MOD_RES (1)..(3)..(34)..(35): Xaa is C or S
XGXEEVIMRHKRLLLVRGNDYYLMSTASTKVPAXXTSP

SEQ ID NO: 83209 - protein, 38 aa, Artificial Sequence; identical to SEQ ID NO: 759
  Cyclic GFR-binding peptide
  MOD_RES (32)..(32): Xaa is C or S

SEQ ID NO: 83210 - protein, 33 aa, Artificial Sequence; identical to SEQ ID NO: 760
  Cyclic GFR-binding peptide
  MOD_RES (2)..(2): Xaa is C or S

SEQ ID NO: 83211 - protein, 30 aa, Artificial Sequence
  Cyclic GFR-binding peptide
  MOD_RES (1)..(1): Xaa is C or S
XRDVVMGRHKRLIIQQKDNYYLMSTASMKT

SEQ ID NO: 83212 - protein, 34 aa, Artificial Sequence
  Cyclic GFR-binding peptide
  MOD_RES (1)..(3): Xaa is C or S
XAXSEVTMNEYKFKVVNKNEDLYLISIPEMKEPV

SEQ ID NO: 83213 - protein, 27 aa, Artificial Sequence
  Cyclic GFR-binding peptide
KVIMPIKGYIKPTKGIFYLINIPSLDQ

SEQ ID NO: 83214 - protein, 40 aa, Artificial Sequence
  Cyclic GFR-binding peptide
  MOD_RES (1)..(3)..(34)..(35): Xaa is C or S
XKXSKVIMPIKGYIKPTKGIFYLINIPSLDQSVXXPSASA

SEQ ID NO: 83215 - protein, 25 aa, Artificial Sequence
  Cyclic GFR-binding peptide
RYKKLVVNNASDFYLISIANLRTPV

SEQ ID NO: 83216 - protein, 27 aa, Artificial Sequence
  Cyclic GFR-binding peptide
  MOD_RES (26)..(27): Xaa is C or S
PIKGYIVNNSSDFYLVNIPSLKTPAXX

SEQ ID NO: 83217 - protein, 34 aa, Artificial Sequence; identical to SEQ ID NO: 40351
  Cyclic GFR-binding peptide
  MOD_RES (30)..(31): Xaa is C or S

SEQ ID NO: 83218 - protein, 28 aa, Artificial Sequence
  Cyclic GFR-binding peptide
  MOD_RES (26)..(27): Xaa is C or S
EYKFKTPVGMDDLYLVSIPELKTPVXXA

SEQ ID NO: 83219 - protein, 28 aa, Artificial Sequence
  Cyclic GFR-binding peptide
  MOD_RES (28)..(28): Xaa is C or S
MNRYKKLIVNSSDDFYLVSIANLQTPAX

SEQ ID NO: 83220 - protein, 32 aa, Artificial Sequence; identical to SEQ ID NO: 28872
  Cyclic GFR-binding peptide
  MOD_RES (2)..(2): Xaa is C or S

SEQ ID NO: 83221 - protein, 37 aa, Artificial Sequence
  Cyclic GFR-binding peptide
  MOD_RES (2)..(4)..(36)..(37): Xaa is C or S
RXAXSEVTMNYHYKLVVNKNEDKYLISIPSMKEPVXX

SEQ ID NO: 83222 - protein, 32 aa, Artificial Sequence; identical to SEQ ID NO: 28874
  Cyclic GFR-binding peptide
  MOD_RES (30)..(31): Xaa is C or S

SEQ ID NO: 83223 - protein, 39 aa, Artificial Sequence
  Cyclic GFR-binding peptide
  MOD_RES (1)..(3)..(34)..(35): Xaa is C or S
XKXSKVVMPIKGYVKPTRGVFYLINIPSLDQPVXXPSAS

SEQ ID NO: 83224 - protein, 35 aa, Artificial Sequence; identical to SEQ ID NO: 40358
  Cyclic GFR-binding peptide
  MOD_RES (32)..(33): Xaa is C or S

SEQ ID NO: 83225 - protein, 28 aa, Artificial Sequence
  Cyclic GFR-binding peptide
KVVMEYKFKVKPTRGVLYLISIPELDQP

SEQ ID NO: 83226 - protein, 34 aa, Artificial Sequence
  Cyclic GFR-binding peptide
  MOD_RES (2)..(4): Xaa is C or S
RXAXSEVTMNRYKKLVVNKNEDFYLISIANMKEP

SEQ ID NO: 83227 - protein, 32 aa, Artificial Sequence
  Cyclic GFR-binding peptide
  MOD_RES (2)..(4): Xaa is C or S
RXAXSEVTMNPIKGYVVNKNEDFYLINIPSMK

SEQ ID NO: 83228 - protein, 24 aa, Artificial Sequence
  Cyclic GFR-binding peptide
VMDEYKFKVVKENEDLYLMSIPEL

SEQ ID NO: 83229 - protein, 38 aa, Artificial Sequence; identical to SEQ ID NO: 773
  Cyclic GFR-binding peptide
  MOD_RES (32)..(33): Xaa is C or S

SEQ ID NO: 83230 - protein, 33 aa, Artificial Sequence; identical to SEQ ID NO: 28878
  Cyclic GFR-binding peptide
  MOD_RES (31)..(32): Xaa is C or S

SEQ ID NO: 83231 - protein, 29 aa, Artificial Sequence
  Cyclic GFR-binding peptide
EVIMPIKGYLLVRGNDFYLMNIPSTKVPA

SEQ ID NO: 83232 - protein, 34 aa, Artificial Sequence; identical to SEQ ID NO: 40361
  Cyclic GFR-binding peptide
  MOD_RES (30)..(31): Xaa is C or S

SEQ ID NO: 83233 - protein, 22 aa, Artificial Sequence
  Cyclic GFR-binding peptide
MRYKKLVKPKRGVFYLISIANL

SEQ ID NO: 83234 - protein, 34 aa, Artificial Sequence; identical to SEQ ID NO: 776
  Cyclic GFR-binding peptide
  MOD_RES (1)..(3): Xaa is C or S

SEQ ID NO: 83235 - protein, 34 aa, Artificial Sequence
  Cyclic GFR-binding peptide
  MOD_RES (32)..(33): Xaa is C or S
AEVVMDRHKRLVVNNAADYYLISTASLRAPVXXS

SEQ ID NO: 83236 - protein, 29 aa, Artificial Sequence
  Cyclic GFR-binding peptide
  MOD_RES (28)..(29): Xaa is C or S
MNRYKKLIVNNSSDFYLVSIANLKTPAXX

SEQ ID NO: 83237 - protein, 32 aa, Artificial Sequence; identical to SEQ ID NO: 28889
  Cyclic GFR-binding peptide
  MOD_RES (2)..(2): Xaa is C or S

SEQ ID NO: 83238 - protein, 27 aa, Artificial Sequence
  Cyclic GFR-binding peptide
MDPIKGYVVNNASDFYLINIPSLRTPV

SEQ ID NO: 83239 - protein, 40 aa, Artificial Sequence; identical to SEQ ID NO: 28891
  Cyclic GFR-binding peptide
  MOD_RES (2)..(4)..(36)..(37): Xaa is C or S

SEQ ID NO: 83240 - protein, 35 aa, Artificial Sequence; identical to SEQ ID NO: 28892
  Cyclic GFR-binding peptide
  MOD_RES (29)..(30): Xaa is C or S

SEQ ID NO: 83241 - protein, 27 aa, Artificial Sequence
  Cyclic GFR-binding peptide
  MOD_RES (26)..(27): Xaa is C or S
PIKGYYTVVGKDFYLINIPSLKTPVXX

SEQ ID NO: 83242 - protein, 27 aa, Artificial Sequence
  Cyclic GFR-binding peptide
  MOD_RES (26)..(27): Xaa is C or S
RHKRLTPVGMDDYYLVSTASLKTPVXX

SEQ ID NO: 83243 - protein, 29 aa, Artificial Sequence
  Cyclic GFR-binding peptide
  MOD_RES (27)..(28): Xaa is C or S
GYHYKLIIQQKDNKYLMSIPSMKTPTXXP

SEQ ID NO: 83244 - protein, 27 aa, Artificial Sequence
  Cyclic GFR-binding peptide
  MOD_RES (27)..(27): Xaa is C or S
DRYKKLVVNNASDFYLISIANLRTPVX

SEQ ID NO: 83245 - protein, 28 aa, Artificial Sequence
  Cyclic GFR-binding peptide
  MOD_RES (27)..(28): Xaa is C or S
DPIKGYVVKENEDFYLMNIPSLETPVXX

SEQ ID NO: 83246 - protein, 34 aa, Artificial Sequence; identical to SEQ ID NO: 791
  Cyclic GFR-binding peptide
  MOD_RES (32)..(33): Xaa is C or S

SEQ ID NO: 83247 - protein, 28 aa, Artificial Sequence
  Cyclic GFR-binding peptide
  MOD_RES (27)..(28): Xaa is C or S
MRHKRLVKPTRGVYYLISTASLDQPVXX

SEQ ID NO: 83248 - protein, 33 aa, Artificial Sequence; identical to SEQ ID NO: 793
  Cyclic GFR-binding peptide
  MOD_RES (2)..(4): Xaa is C or S

SEQ ID NO: 83249 - protein, 30 aa, Artificial Sequence; identical to SEQ ID NO: 795
  Cyclic GFR-binding peptide

SEQ ID NO: 83250 - protein, 32 aa, Artificial Sequence; identical to SEQ ID NO: 797
  Cyclic GFR-binding peptide
  MOD_RES (32)..(32): Xaa is C or S

SEQ ID NO: 83251 - protein, 31 aa, Artificial Sequence; identical to SEQ ID NO: 40394
  Cyclic GFR-binding peptide
  MOD_RES (28)..(29): Xaa is C or S

SEQ ID NO: 83252 - protein, 35 aa, Artificial Sequence; identical to SEQ ID NO: 801
  Cyclic GFR-binding peptide
  MOD_RES (2)..(35): Xaa is C or S

SEQ ID NO: 83253 - protein, 30 aa, Artificial Sequence; identical to SEQ ID NO: 808
  Cyclic GFR-binding peptide
  MOD_RES (2)..(2): Xaa is C or S

SEQ ID NO: 83254 - protein, 30 aa, Artificial Sequence; identical to SEQ ID NO: 40405
  Cyclic GFR-binding peptide
  MOD_RES (2)..(2): Xaa is C or S

SEQ ID NO: 83255 - protein, 34 aa, Artificial Sequence
  Cyclic GFR-binding peptide
  MOD_RES (28)..(29): Xaa is C or S
MNPIKGYVVNKNEDFYLINIPSMKEPVXXPEPIG

SEQ ID NO: 83256 - protein, 41 aa, Artificial Sequence
  Cyclic GFR-binding peptide
  MOD_RES (1)..(3)..(35)..(36): Xaa is C or S
XGXSRVVMNRYKKLIVNSSDDFYLVSIANLKTPAXXPKPVH

SEQ ID NO: 83257 - protein, 30 aa, Artificial Sequence
  Cyclic GFR-binding peptide
  MOD_RES (2)..(4): Xaa is C or S
RXAXSEVTMNRYKKLVVNKNEDFYLISIAN

SEQ ID NO: 83258 - protein, 41 aa, Artificial Sequence; identical to SEQ ID NO: 75163
  Cyclic GFR-binding peptide
  MOD_RES (1)..(3)..(35)..(36): Xaa is C or S

SEQ ID NO: 83259 - protein, 35 aa, Artificial Sequence
  Cyclic GFR-binding peptide
  MOD_RES (30)..(31): Xaa is C or S
VVMGYHYKLIIQQKDNKYLMSIPSMKTPTXXPGAS

SEQ ID NO: 83260 - protein, 40 aa, Artificial Sequence
  Cyclic GFR-binding peptide
  MOD_RES (1)..(3)..(35)..(36): Xaa is C or S
XAXSEVTMNYHYKLVVNKNEDKYLISIPSMKEPVXXPEPI

SEQ ID NO: 83261 - protein, 23 aa, Artificial Sequence
  Cyclic GFR-binding peptide
MDRHKRLVVNNASDYYLISTASL

SEQ ID NO: 83262 - protein, 30 aa, Artificial Sequence; identical to SEQ ID NO: 28914
  Cyclic GFR-binding peptide

SEQ ID NO: 83263 - protein, 29 aa, Artificial Sequence
  Cyclic GFR-binding peptide
  MOD_RES (1)..(3): Xaa is C or S
XGXSEVVMDPIKGYVVNNASDFYLINIPS

SEQ ID NO: 83264 - protein, 31 aa, Artificial Sequence; identical to SEQ ID NO: 40414
  Cyclic GFR-binding peptide
  MOD_RES (27)..(28): Xaa is C or S

SEQ ID NO: 83265 - protein, 25 aa, Artificial Sequence
  Cyclic GFR-binding peptide
NRYKKLIVNNSSDFYLVSIANLKTP

SEQ ID NO: 83266 - protein, 32 aa, Artificial Sequence; identical to SEQ ID NO: 817
  Cyclic GFR-binding peptide
  MOD_RES (31)..(32): Xaa is C or S

SEQ ID NO: 83267 - protein, 28 aa, Artificial Sequence
  Cyclic GFR-binding peptide
VVMGEYKFKIIQQKDNLYLMSIPEMKTP

SEQ ID NO: 83268 - protein, 40 aa, Artificial Sequence; identical to SEQ ID NO: 40416
  Cyclic GFR-binding peptide
  MOD_RES (2)..(34)..(35): Xaa is C or S

SEQ ID NO: 83269 - protein, 38 aa, Artificial Sequence; identical to SEQ ID NO: 40424
  Cyclic GFR-binding peptide
  MOD_RES (1)..(3)..(35)..(36): Xaa is C or S

SEQ ID NO: 83270 - protein, 26 aa, Artificial Sequence
  Cyclic GFR-binding peptide
VMNRHKRLIVNSSDDYYLVSTASLQT

SEQ ID NO: 83271 - protein, 37 aa, Artificial Sequence; identical to SEQ ID NO: 28933
  Cyclic GFR-binding peptide
  MOD_RES (1)..(33)..(34): Xaa is C or S

SEQ ID NO: 83272 - protein, 33 aa, Artificial Sequence
  Cyclic GFR-binding peptide
  MOD_RES (2)..(4): Xaa is C or S
RXGXSEVVMDYHYKLVVNNASDKYLISIPSLRT

SEQ ID NO: 83273 - protein, 20 aa, Artificial Sequence
  Cyclic GFR-binding peptide
EYKFKVVKENEDLYLMSIPE

SEQ ID NO: 83274 - protein, 28 aa, Artificial Sequence
  Cyclic GFR-binding peptide
  MOD_RES (28)..(28): Xaa is C or S
MNRHKRLVVNKNEDYYLISTASMKEPVX

SEQ ID NO: 83275 - protein, 33 aa, Artificial Sequence; identical to SEQ ID NO: 826
  Cyclic GFR-binding peptide
  MOD_RES (1)..(3): Xaa is C or S

SEQ ID NO: 83276 - protein, 42 aa, Artificial Sequence; identical to SEQ ID NO: 28936
  Cyclic GFR-binding peptide
  MOD_RES (2)..(4)..(36)..(37): Xaa is C or S

SEQ ID NO: 83277 - protein, 24 aa, Artificial Sequence
  Cyclic GFR-binding peptide
NEYKFKVVNKNEDLYLISIPEMKE

SEQ ID NO: 83278 - protein, 28 aa, Artificial Sequence
  Cyclic GFR-binding peptide
MGEEYKFKTPVGMDDLYLVSIPELKTPV

SEQ ID NO: 83279 - protein, 24 aa, Artificial Sequence
  Cyclic GFR-binding peptide
EYKFKIKPTKGILYLISIPELDQS

SEQ ID NO: 83280 - protein, 37 aa, Artificial Sequence
  Cyclic GFR-binding peptide
  MOD_RES (2)..(33)..(34): Xaa is C or S
KXSKVIMPIKGYIKPTKGIFYLINIPSLDQSVXXPSA

SEQ ID NO: 83281 - protein, 25 aa, Artificial Sequence
  Cyclic GFR-binding peptide
IMRYKKLIKPTKGIFYLISIANLDQ

SEQ ID NO: 83282 - protein, 30 aa, Artificial Sequence; identical to SEQ ID NO: 40445
  Cyclic GFR-binding peptide
  MOD_RES (2)..(2): Xaa is C or S

SEQ ID NO: 83283 - protein, 25 aa, Artificial Sequence
  Cyclic GFR-binding peptide
YHYKLVVNKNEDKYLISIPSMKEPV

SEQ ID NO: 83284 - protein, 27 aa, Artificial Sequence
  Cyclic GFR-binding peptide
AMGPIKGYYTVVGKDFYLINIPSLKTP

SEQ ID NO: 83285 - protein, 22 aa, Artificial Sequence
  Cyclic GFR-binding peptide
NEYKFKVVNKNEDLYLISIPEM

SEQ ID NO: 83286 - protein, 35 aa, Artificial Sequence; identical to SEQ ID NO: 40464
  Cyclic GFR-binding peptide
  MOD_RES (31)..(32): Xaa is C or S

SEQ ID NO: 83287 - protein, 35 aa, Artificial Sequence
  Cyclic GFR-binding peptide
  MOD_RES (29)..(30): Xaa is C or S
VMGRHKRLIIQQKDNYYLMSTASMKTPTXXPGASG

SEQ ID NO: 83288 - protein, 30 aa, Artificial Sequence; identical to SEQ ID NO: 842
  Cyclic GFR-binding peptide
  MOD_RES (2)..(2): Xaa is C or S

SEQ ID NO: 83289 - protein, 37 aa, Artificial Sequence; identical to SEQ ID NO: 28947
  Cyclic GFR-binding peptide
  MOD_RES (1)..(33)..(34): Xaa is C or S

SEQ ID NO: 83290 - protein, 32 aa, Artificial Sequence
  Cyclic GFR-binding peptide
  MOD_RES (31)..(32): Xaa is C or S
EEVIMEYKFKLLVRGNDLYLMSIPETKVPAXX

SEQ ID NO: 83291 - protein, 25 aa, Artificial Sequence
  Cyclic GFR-binding peptide
EVVMEPIKGYVVKDYEDFYLMNIPS

SEQ ID NO: 83292 - protein, 28 aa, Artificial Sequence
  Cyclic GFR-binding peptide
VVMDYHYKLVVKENEDKYLMSIPSLETP

SEQ ID NO: 83293 - protein, 33 aa, Artificial Sequence; identical to SEQ ID NO: 847
  Cyclic GFR-binding peptide
  MOD_RES (2)..(33): Xaa is C or S

SEQ ID NO: 83294 - protein, 38 aa, Artificial Sequence; identical to SEQ ID NO: 848
  Cyclic GFR-binding peptide
  MOD_RES (1)..(3)..(35)..(36): Xaa is C or S

SEQ ID NO: 83295 - protein, 35 aa, Artificial Sequence; identical to SEQ ID NO: 28953
  Cyclic GFR-binding peptide
  MOD_RES (1)..(32)..(33): Xaa is C or S

SEQ ID NO: 83296 - protein, 32 aa, Artificial Sequence
  Cyclic GFR-binding peptide
  MOD_RES (28)..(29): Xaa is C or S
MNPIKGYVVNKNEDFYLINIPSMKEPVXXPEP

SEQ ID NO: 83297 - protein, 27 aa, Artificial Sequence
  Cyclic GFR-binding peptide
RVVMNRHKRLIVNSSDDYYLVSTASLQ

SEQ ID NO: 83298 - protein, 27 aa, Artificial Sequence
  Cyclic GFR-binding peptide
SEVTMNEYKFKVVNKNEDLYLISIPEM

SEQ ID NO: 83299 - protein, 27 aa, Artificial Sequence
  Cyclic GFR-binding peptide
GEVVMERYKKLVVKDYEDFYLMSIANL

SEQ ID NO: 83300 - protein, 27 aa, Artificial Sequence
  Cyclic GFR-binding peptide
  MOD_RES (2)..(2): Xaa is C or S
KXSKVIMRYKKLIKPTKGIFYLISIAN

SEQ ID NO: 83301 - protein, 27 aa, Artificial Sequence
  Cyclic GFR-binding peptide
  MOD_RES (1)..(1): Xaa is C or S
XSKVIMEYKFKIKPTKGILYLISIPEL

SEQ ID NO: 83302 - protein, 22 aa, Artificial Sequence
  Cyclic GFR-binding peptide
MGRHKRLIIQQKDNYYLMSTAS

SEQ ID NO: 83303 - protein, 22 aa, Artificial Sequence
  Cyclic GFR-binding peptide
EYKFKLLVRGNDLYLMSIPETK

SEQ ID NO: 83304 - protein, 41 aa, Artificial Sequence; identical to SEQ ID NO: 28961
  Cyclic GFR-binding peptide
  MOD_RES (2)..(4)..(36)..(37): Xaa is C or S

SEQ ID NO: 83305 - protein, 33 aa, Artificial Sequence
  Cyclic GFR-binding peptide
  MOD_RES (28)..(29): Xaa is C or S
MDRHKRLVVNNAADYYLISTASLRAPVXXSAPA

SEQ ID NO: 83306 - protein, 32 aa, Artificial Sequence; identical to SEQ ID NO: 859
  Cyclic GFR-binding peptide
  MOD_RES (2)..(2): Xaa is C or S

SEQ ID NO: 83307 - protein, 31 aa, Artificial Sequence; identical to SEQ ID NO: 860
  Cyclic GFR-binding peptide
  MOD_RES (2)..(4): Xaa is C or S

SEQ ID NO: 83308 - protein, 27 aa, Artificial Sequence
  Cyclic GFR-binding peptide
SEVVMDRHKRLVVNNASDYYLISTASL

SEQ ID NO: 83309 - protein, 35 aa, Artificial Sequence
  Cyclic GFR-binding peptide
  MOD_RES (2)..(34)..(35): Xaa is C or S
AXSEVTMNPIKGYVVNKNEDFYLINIPSMKEPVXX

SEQ ID NO: 83310 - protein, 29 aa, Artificial Sequence
  Cyclic GFR-binding peptide
VSMGERHKRLTPVGMDDYYLVSTASLKTP

SEQ ID NO: 83311 - protein, 37 aa, Artificial Sequence; identical to SEQ ID NO: 40495
  Cyclic GFR-binding peptide
  MOD_RES (31)..(32): Xaa is C or S

SEQ ID NO: 83312 - protein, 29 aa, Artificial Sequence
  Cyclic GFR-binding peptide
ESVAMGYHYKLYTVVGKDKYLISIPSLKT

SEQ ID NO: 83313 - protein, 30 aa, Artificial Sequence; identical to SEQ ID NO: 867
  Cyclic GFR-binding peptide
  MOD_RES (30)..(30): Xaa is C or S

SEQ ID NO: 83314 - protein, 33 aa, Artificial Sequence; identical to SEQ ID NO: 869
  Cyclic GFR-binding peptide
  MOD_RES (2)..(2): Xaa is C or S

SEQ ID NO: 83315 - protein, 24 aa, Artificial Sequence
  Cyclic GFR-binding peptide
PIKGYVVKDYEDFYLMNIPSLETP

SEQ ID NO: 83316 - protein, 26 aa, Artificial Sequence
  Cyclic GFR-binding peptide
MNPIKGYVVNKNEDFYLINIPSMKEP

SEQ ID NO: 83317 - protein, 38 aa, Artificial Sequence; identical to SEQ ID NO: 40513
  Cyclic GFR-binding peptide
  MOD_RES (2)..(34)..(35): Xaa is C or S

SEQ ID NO: 83318 - protein, 28 aa, Artificial Sequence
  Cyclic GFR-binding peptide
  MOD_RES (26)..(27): Xaa is C or S
YHYKLVKPKRGVKYLISIPSLAQPVXXP

SEQ ID NO: 83319 - protein, 30 aa, Artificial Sequence
  Cyclic GFR-binding peptide
  MOD_RES (1)..(3): Xaa is C or S
XGXEEVIMYHYKLLLVRGNDKYLMSIPSTK

SEQ ID NO: 83320 - protein, 31 aa, Artificial Sequence; identical to SEQ ID NO: 40517
  Cyclic GFR-binding peptide
  MOD_RES (27)..(27): Xaa is C or S

SEQ ID NO: 83321 - protein, 30 aa, Artificial Sequence
  Cyclic GFR-binding peptide
  MOD_RES (29)..(30): Xaa is C or S
VMDRHKRLVVNNASDYYLISTASLRTPVXX

SEQ ID NO: 83322 - protein, 29 aa, Artificial Sequence
  Cyclic GFR-binding peptide
SMGEPIKGYTPVGMDDFYLVNIPSLKTPV

SEQ ID NO: 83323 - protein, 28 aa, Artificial Sequence
  Cyclic GFR-binding peptide
  MOD_RES (26)..(27): Xaa is C or S
RYKKLIVNSSDDFYLVSIANLKTPAXXP

SEQ ID NO: 83324 - protein, 28 aa, Artificial Sequence
  Cyclic GFR-binding peptide
ARVVMNPIKGYIVNSSDDFYLVNIPSLQ

SEQ ID NO: 83325 - protein, 38 aa, Artificial Sequence; identical to SEQ ID NO: 28983
  Cyclic GFR-binding peptide
  MOD_RES (32)..(33): Xaa is C or S

SEQ ID NO: 83326 - protein, 30 aa, Artificial Sequence; identical to SEQ ID NO: 75208
  Cyclic GFR-binding peptide
  MOD_RES (2)..(4): Xaa is C or S

SEQ ID NO: 83327 - protein, 36 aa, Artificial Sequence; identical to SEQ ID NO: 28986
  Cyclic GFR-binding peptide
  MOD_RES (30)..(31): Xaa is C or S

SEQ ID NO: 83328 - protein, 36 aa, Artificial Sequence; identical to SEQ ID NO: 888
  Cyclic GFR-binding peptide
  MOD_RES (1)..(3)..(34)..(35): Xaa is C or S

SEQ ID NO: 83329 - protein, 29 aa, Artificial Sequence
  Cyclic GFR-binding peptide
  MOD_RES (29)..(29): Xaa is C or S
VVMPIKGYVKPTRGVFYLINIPSLDQPVX

SEQ ID NO: 83330 - protein, 39 aa, Artificial Sequence
  Cyclic GFR-binding peptide
  MOD_RES (1)..(3)..(35)..(36): Xaa is C or S
XGXAEVVMDRHKRLVVNNAADYYLISTASLRAPVXXSAP

SEQ ID NO: 83331 - protein, 27 aa, Artificial Sequence
  Cyclic GFR-binding peptide
  MOD_RES (1)..(1): Xaa is C or S
XAKVVMNRYKKLIVNNSSDFYLVSIAN

SEQ ID NO: 83332 - protein, 29 aa, Artificial Sequence
  Cyclic GFR-binding peptide
VVMGRHKRLIIQQKDNYYLMSTASMKTPT

SEQ ID NO: 83333 - protein, 38 aa, Artificial Sequence; identical to SEQ ID NO: 28993
  Cyclic GFR-binding peptide
  MOD_RES (1)..(3)..(35)..(36): Xaa is C or S

SEQ ID NO: 83334 - protein, 33 aa, Artificial Sequence; identical to SEQ ID NO: 75213
  Cyclic GFR-binding peptide
  MOD_RES (28)..(29): Xaa is C or S

SEQ ID NO: 83335 - protein, 35 aa, Artificial Sequence; identical to SEQ ID NO: 897
  Cyclic GFR-binding peptide
  MOD_RES (1)..(32)..(33): Xaa is C or S

SEQ ID NO: 83336 - protein, 27 aa, Artificial Sequence
  Cyclic GFR-binding peptide
VVMNRYKKLIVNSSDDFYLVSIANLQT

SEQ ID NO: 83337 - protein, 38 aa, Artificial Sequence
  Cyclic GFR-binding peptide
  MOD_RES (2)..(4)..(36)..(37): Xaa is C or S
SXGXRDVVMGYHYKLIIQQKDNKYLMSIPSMKTPTXXP

SEQ ID NO: 83338 - protein, 31 aa, Artificial Sequence; identical to SEQ ID NO: 901
  Cyclic GFR-binding peptide
  MOD_RES (26)..(27): Xaa is C or S

SEQ ID NO: 83339 - protein, 36 aa, Artificial Sequence; identical to SEQ ID NO: 40531
  Cyclic GFR-binding peptide
  MOD_RES (30)..(31): Xaa is C or S

SEQ ID NO: 83340 - protein, 25 aa, Artificial Sequence
  Cyclic GFR-binding peptide
VTMNPIKGYVVNKNEDFYLINIPSM

SEQ ID NO: 83341 - protein, 32 aa, Artificial Sequence; identical to SEQ ID NO: 904
  Cyclic GFR-binding peptide
  MOD_RES (2)..(2): Xaa is C or S

SEQ ID NO: 83342 - protein, 30 aa, Artificial Sequence
  Cyclic GFR-binding peptide
  MOD_RES (1)..(1): Xaa is C or S
XSEVTMNYHYKLVVNKNEDKYLISIPSMKE

SEQ ID NO: 83343 - protein, 35 aa, Artificial Sequence; identical to SEQ ID NO: 29005
  Cyclic GFR-binding peptide
  MOD_RES (1)..(3)..(35): Xaa is C or S

SEQ ID NO: 83344 - protein, 30 aa, Artificial Sequence; identical to SEQ ID NO: 909
  Cyclic GFR-binding peptide

SEQ ID NO: 83345 - protein, 33 aa, Artificial Sequence
  Cyclic GFR-binding peptide
  MOD_RES (30)..(31): Xaa is C or S
VVMGYHYKLIIQQKDNKYLMSIPSMKTPTXXPG

SEQ ID NO: 83346 - protein, 41 aa, Artificial Sequence; identical to SEQ ID NO: 910
  Cyclic GFR-binding peptide
  MOD_RES (1)..(3)..(35)..(36): Xaa is C or S

SEQ ID NO: 83347 - protein, 23 aa, Artificial Sequence
  Cyclic GFR-binding peptide
VIMPIKGYIKPTKGIFYLINIPS

SEQ ID NO: 83348 - protein, 27 aa, Artificial Sequence
  Cyclic GFR-binding peptide
  MOD_RES (27)..(27): Xaa is C or S
DRHKRLVVNNASDYYLISTASLRTPVX

SEQ ID NO: 83349 - protein, 38 aa, Artificial Sequence; identical to SEQ ID NO: 911
  Cyclic GFR-binding peptide
  MOD_RES (2)..(4)..(36)..(37): Xaa is C or S

SEQ ID NO: 83350 - protein, 22 aa, Artificial Sequence
  Cyclic GFR-binding peptide
MRHKRLVKPKRGVYYLISTASL

SEQ ID NO: 83351 - protein, 25 aa, Artificial Sequence
  Cyclic GFR-binding peptide
RVIMYHYKLVKPKRGVKYLISIPSL

SEQ ID NO: 83352 - protein, 31 aa, Artificial Sequence
  Cyclic GFR-binding peptide
  MOD_RES (31)..(31): Xaa is C or S
EVVMDEYKFKVVNNASDLYLISIPELRTPVX

SEQ ID NO: 83353 - protein, 31 aa, Artificial Sequence; identical to SEQ ID NO: 40553
  Cyclic GFR-binding peptide
  MOD_RES (31)..(31): Xaa is C or S

SEQ ID NO: 83354 - protein, 36 aa, Artificial Sequence; identical to SEQ ID NO: 916
  Cyclic GFR-binding peptide
  MOD_RES (2)..(34)..(35): Xaa is C or S

SEQ ID NO: 83355 - protein, 23 aa, Artificial Sequence
  Cyclic GFR-binding peptide
MDRYKKLVVKENEDFYLMSIANL

SEQ ID NO: 83356 - protein, 41 aa, Artificial Sequence; identical to SEQ ID NO: 40555
  Cyclic GFR-binding peptide
  MOD_RES (2)..(35)..(36): Xaa is C or S

SEQ ID NO: 83357 - protein, 28 aa, Artificial Sequence
  Cyclic GFR-binding peptide
EAVSMGERHKRLTPVGMDDYYLVSTASL

SEQ ID NO: 83358 - protein, 29 aa, Artificial Sequence
  Cyclic GFR-binding peptide
KVVMRYKKLVKPTRGVFYLISIANLDQPV

SEQ ID NO: 83359 - protein, 25 aa, Artificial Sequence
  Cyclic GFR-binding peptide
SKVIMYHYKLIKPTKGIKYLISIPS

SEQ ID NO: 83360 - protein, 30 aa, Artificial Sequence; identical to SEQ ID NO: 11499
  Cyclic GFR-binding peptide
  MOD_RES (1)..(1): Xaa is C or S

SEQ ID NO: 83361 - protein, 35 aa, Artificial Sequence; identical to SEQ ID NO: 29022
  Cyclic GFR-binding peptide
  MOD_RES (29)..(30): Xaa is C or S

SEQ ID NO: 83362 - protein, 34 aa, Artificial Sequence; identical to SEQ ID NO: 926
  Cyclic GFR-binding peptide
  MOD_RES (31)..(32): Xaa is C or S

SEQ ID NO: 83363 - protein, 38 aa, Artificial Sequence; identical to SEQ ID NO: 927
  Cyclic GFR-binding peptide
  MOD_RES (2)..(4)..(36)..(37): Xaa is C or S

SEQ ID NO: 83364 - protein, 30 aa, Artificial Sequence
  Cyclic GFR-binding peptide
  MOD_RES (30)..(30): Xaa is C or S
RVIMPIKGYVKPKRGVFYLINIPSLAQPVX

SEQ ID NO: 83365 - protein, 22 aa, Artificial Sequence
  Cyclic GFR-binding peptide
IMEYKFKLLVRGNDLYLMSIPE

SEQ ID NO: 83366 - protein, 25 aa, Artificial Sequence
  Cyclic GFR-binding peptide
RYKKLVVNKNEDFYLISIANMKEPV

SEQ ID NO: 83367 - protein, 30 aa, Artificial Sequence
  Cyclic GFR-binding peptide
  MOD_RES (2)..(4): Xaa is C or S
RXAXSEVTMNPIKGYVVNKNEDFYLINIPS

SEQ ID NO: 83368 - protein, 39 aa, Artificial Sequence; identical to SEQ ID NO: 933
  Cyclic GFR-binding peptide
  MOD_RES (1)..(3)..(35)..(36): Xaa is C or S

SEQ ID NO: 83369 - protein, 40 aa, Artificial Sequence; identical to SEQ ID NO: 11508
  Cyclic GFR-binding peptide
  MOD_RES (2)..(34)..(35): Xaa is C or S

SEQ ID NO: 83370 - protein, 25 aa, Artificial Sequence
  Cyclic GFR-binding peptide
EYKFKVVKDYEDLYLMSIPELETPV

SEQ ID NO: 83371 - protein, 26 aa, Artificial Sequence
  Cyclic GFR-binding peptide
EVVMDPIKGYVVNNAADFYLINIPSL

SEQ ID NO: 83372 - protein, 37 aa, Artificial Sequence; identical to SEQ ID NO: 29035
  Cyclic GFR-binding peptide
  MOD_RES (2)..(4)..(36)..(37): Xaa is C or S

SEQ ID NO: 83373 - protein, 32 aa, Artificial Sequence; identical to SEQ ID NO: 937
  Cyclic GFR-binding peptide
  MOD_RES (29)..(30): Xaa is C or S

SEQ ID NO: 83374 - protein, 36 aa, Artificial Sequence; identical to SEQ ID NO: 938
  Cyclic GFR-binding peptide
  MOD_RES (1)..(32)..(33): Xaa is C or S

SEQ ID NO: 83375 - protein, 33 aa, Artificial Sequence; identical to SEQ ID NO: 29040
  Cyclic GFR-binding peptide
  MOD_RES (1)..(3): Xaa is C or S

SEQ ID NO: 83376 - protein, 27 aa, Artificial Sequence
  Cyclic GFR-binding peptide
  MOD_RES (26)..(27): Xaa is C or S
YHYKLLLVRGNDKYLMSIPSTKVPAXX

SEQ ID NO: 83377 - protein, 40 aa, Artificial Sequence; identical to SEQ ID NO: 941
  Cyclic GFR-binding peptide
  MOD_RES (2)..(4)..(36)..(37): Xaa is C or S

SEQ ID NO: 83378 - protein, 33 aa, Artificial Sequence
  Cyclic GFR-binding peptide
  MOD_RES (1)..(3): Xaa is C or S
XGXRDVVMGYHYKLIIQQKDNKYLMSIPSMKTP

SEQ ID NO: 83379 - protein, 35 aa, Artificial Sequence
  Cyclic GFR-binding peptide
  MOD_RES (29)..(30): Xaa is C or S
VMNEYKFKIVNSSDDLYLVSIPELKTPAXXPKPVH

SEQ ID NO: 83380 - protein, 28 aa, Artificial Sequence
  Cyclic GFR-binding peptide
  MOD_RES (27)..(28): Xaa is C or S
GPIKGYYTVVGKDFYLINIPSLKTPVXX

SEQ ID NO: 83381 - protein, 41 aa, Artificial Sequence; identical to SEQ ID NO: 29047
  Cyclic GFR-binding peptide
  MOD_RES (2)..(4)..(36)..(37): Xaa is C or S

SEQ ID NO: 83382 - protein, 25 aa, Artificial Sequence
  Cyclic GFR-binding peptide
PIKGYIVNSSDDFYLVNIPSLKTPA

SEQ ID NO: 83383 - protein, 34 aa, Artificial Sequence; identical to SEQ ID NO: 946
  Cyclic GFR-binding peptide
  MOD_RES (29)..(30): Xaa is C or S

SEQ ID NO: 83384 - protein, 37 aa, Artificial Sequence; identical to SEQ ID NO: 40576
  Cyclic GFR-binding peptide
  MOD_RES (1)..(3)..(35)..(36): Xaa is C or S

SEQ ID NO: 83385 - protein, 30 aa, Artificial Sequence; identical to SEQ ID NO: 75240
  Cyclic GFR-binding peptide
  MOD_RES (30)..(30): Xaa is C or S

SEQ ID NO: 83386 - protein, 28 aa, Artificial Sequence
  Cyclic GFR-binding peptide
  MOD_RES (26)..(27): Xaa is C or S
YHYKLIVNSSDDKYLVSIPSLKTPAXXP

SEQ ID NO: 83387 - protein, 34 aa, Artificial Sequence
  Cyclic GFR-binding peptide
  MOD_RES (28)..(29): Xaa is C or S
MNRYKKLIVNSSDDFYLVSIANLKTPAXXPKPVH

SEQ ID NO: 83388 - protein, 21 aa, Artificial Sequence
  Cyclic GFR-binding peptide
GRYKKLIIQQKDNFYLMSIAN

SEQ ID NO: 83389 - protein, 37 aa, Artificial Sequence; identical to SEQ ID NO: 953
  Cyclic GFR-binding peptide
  MOD_RES (2)..(4)..(36)..(37): Xaa is C or S

SEQ ID NO: 83390 - protein, 26 aa, Artificial Sequence
  Cyclic GFR-binding peptide
  MOD_RES (26)..(26): Xaa is C or S
RHKRLVVKENEDYYLMSTASLETPVX

SEQ ID NO: 83391 - protein, 33 aa, Artificial Sequence; identical to SEQ ID NO: 29061
  Cyclic GFR-binding peptide
  MOD_RES (31)..(32): Xaa is C or S

SEQ ID NO: 83392 - protein, 23 aa, Artificial Sequence
  Cyclic GFR-binding peptide
NRYKKLIVNSSDDFYLVSIANLK

SEQ ID NO: 83393 - protein, 30 aa, Artificial Sequence; identical to SEQ ID NO: 29066
  Cyclic GFR-binding peptide
  MOD_RES (2)..(4): Xaa is C or S

SEQ ID NO: 83394 - protein, 30 aa, Artificial Sequence; identical to SEQ ID NO: 40589
  Cyclic GFR-binding peptide
  MOD_RES (1)..(3): Xaa is C or S

SEQ ID NO: 83395 - protein, 27 aa, Artificial Sequence
  Cyclic GFR-binding peptide
VMYHYKLVKPTRGVKYLISIPSLDQPV

SEQ ID NO: 83396 - protein, 39 aa, Artificial Sequence
  Cyclic GFR-binding peptide
  MOD_RES (1)..(3)..(35)..(36): Xaa is C or S
XGXRDVVMGYHYKLIIQQKDNKYLMSIPSMKTPTXXPGA

SEQ ID NO: 83397 - protein, 29 aa, Artificial Sequence
  Cyclic GFR-binding peptide
  MOD_RES (1)..(1): Xaa is C or S
XEEVIMRYKKLLLVRGNDFYLMSIANTKV

SEQ ID NO: 83398 - protein, 33 aa, Artificial Sequence; identical to SEQ ID NO: 40592
  Cyclic GFR-binding peptide
  MOD_RES (2)..(2): Xaa is C or S

SEQ ID NO: 83399 - protein, 36 aa, Artificial Sequence; identical to SEQ ID NO: 972
  Cyclic GFR-binding peptide
  MOD_RES (33)..(34): Xaa is C or S

SEQ ID NO: 83400 - protein, 34 aa, Artificial Sequence; identical to SEQ ID NO: 973
  Cyclic GFR-binding peptide
  MOD_RES (29)..(30): Xaa is C or S

SEQ ID NO: 83401 - protein, 33 aa, Artificial Sequence
  Cyclic GFR-binding peptide
  MOD_RES (29)..(30): Xaa is C or S
TMNEYKFKVVNKNEDLYLISIPEMKEPVXXPEP

SEQ ID NO: 83402 - protein, 32 aa, Artificial Sequence; identical to SEQ ID NO: 29071
  Cyclic GFR-binding peptide
  MOD_RES (27)..(28): Xaa is C or S

SEQ ID NO: 83403 - protein, 35 aa, Artificial Sequence; identical to SEQ ID NO: 977
  Cyclic GFR-binding peptide
  MOD_RES (31)..(32): Xaa is C or S

SEQ ID NO: 83404 - protein, 30 aa, Artificial Sequence; identical to SEQ ID NO: 40610
  Cyclic GFR-binding peptide
  MOD_RES (28)..(29): Xaa is C or S

SEQ ID NO: 83405 - protein, 31 aa, Artificial Sequence
  Cyclic GFR-binding peptide
  MOD_RES (28)..(29): Xaa is C or S
IMPIKGYIKPTKGIFYLINIPSLDQSVXXPS

SEQ ID NO: 83406 - protein, 27 aa, Artificial Sequence
  Cyclic GFR-binding peptide
  MOD_RES (26)..(27): Xaa is C or S
EYKFKVVNKNEDLYLISIPEMKEPVXX

SEQ ID NO: 83407 - protein, 34 aa, Artificial Sequence
  Cyclic GFR-binding peptide
  MOD_RES (2)..(4): Xaa is C or S
RXAXSEVTMNPIKGYVVNKNEDFYLINIPSMKEP

SEQ ID NO: 83408 - protein, 29 aa, Artificial Sequence
  Cyclic GFR-binding peptide
  MOD_RES (26)..(27): Xaa is C or S
RYKKLYTVVGKDFYLISIANLKTPVXXAK

SEQ ID NO: 83409 - protein, 31 aa, Artificial Sequence; identical to SEQ ID NO: 986
  Cyclic GFR-binding peptide
  MOD_RES (31)..(31): Xaa is C or S

SEQ ID NO: 83410 - protein, 31 aa, Artificial Sequence; identical to SEQ ID NO: 988
  Cyclic GFR-binding peptide
  MOD_RES (27)..(28): Xaa is C or S

SEQ ID NO: 83411 - protein, 33 aa, Artificial Sequence
  Cyclic GFR-binding peptide
  MOD_RES (31)..(32): Xaa is C or S
EVVMDYHYKLVVNNASDKYLISIPSLRTPVXXT

SEQ ID NO: 83412 - protein, 20 aa, Artificial Sequence
  Cyclic GFR-binding peptide
EYKFKVVNKNEDLYLISIPE

SEQ ID NO: 83413 - protein, 35 aa, Artificial Sequence; identical to SEQ ID NO: 40617
  Cyclic GFR-binding peptide
  MOD_RES (32)..(33): Xaa is C or S

SEQ ID NO: 83414 - protein, 39 aa, Artificial Sequence
  Cyclic GFR-binding peptide
  MOD_RES (2)..(4)..(36)..(37): Xaa is C or S
RXGXSEVVMDRHKRLVVNNASDYYLISTASLRTPVXXTP

SEQ ID NO: 83415 - protein, 28 aa, Artificial Sequence
  Cyclic GFR-binding peptide
  MOD_RES (27)..(28): Xaa is C or S
MRHKRLIKPTKGIYYLISTASLDQSVXX

SEQ ID NO: 83416 - protein, 35 aa, Artificial Sequence
  Cyclic GFR-binding peptide
  MOD_RES (29)..(30): Xaa is C or S
TMNRYKKLVVNKNEDFYLISIANMKEPVXXPEPIG

SEQ ID NO: 83417 - protein, 33 aa, Artificial Sequence; identical to SEQ ID NO: 40623
  Cyclic GFR-binding peptide
  MOD_RES (32)..(33): Xaa is C or S

SEQ ID NO: 83418 - protein, 35 aa, Artificial Sequence; identical to SEQ ID NO: 40624
  Cyclic GFR-binding peptide
  MOD_RES (1)..(3)..(35): Xaa is C or S

SEQ ID NO: 83419 - protein, 29 aa, Artificial Sequence
  Cyclic GFR-binding peptide
  MOD_RES (26)..(27): Xaa is C or S
PIKGYTPVGMDDFYLVNIPSLKTPVXXAK

SEQ ID NO: 83420 - protein, 34 aa, Artificial Sequence; identical to SEQ ID NO: 994
  Cyclic GFR-binding peptide
  MOD_RES (1)..(3): Xaa is C or S

SEQ ID NO: 83421 - protein, 24 aa, Artificial Sequence
  Cyclic GFR-binding peptide
IMEYKFKIKPTKGILYLISIPELD

SEQ ID NO: 83422 - protein, 21 aa, Artificial Sequence
  Cyclic GFR-binding peptide
DPIKGYVVNNASDFYLINIPS

SEQ ID NO: 83423 - protein, 41 aa, Artificial Sequence; identical to SEQ ID NO: 40630
  Cyclic GFR-binding peptide
  MOD_RES (1)..(3)..(35)..(36): Xaa is C or S

SEQ ID NO: 83424 - protein, 28 aa, Artificial Sequence
  Cyclic GFR-binding peptide
  MOD_RES (28)..(28): Xaa is C or S
IMRYKKLVKPKRGVFYLISIANLAQPVX

SEQ ID NO: 83425 - protein, 32 aa, Artificial Sequence; identical to SEQ ID NO: 40631
  Cyclic GFR-binding peptide
  MOD_RES (2)..(2): Xaa is C or S

SEQ ID NO: 83426 - protein, 34 aa, Artificial Sequence; identical to SEQ ID NO: 29092
  Cyclic GFR-binding peptide
  MOD_RES (28)..(29): Xaa is C or S

SEQ ID NO: 83427 - protein, 20 aa, Artificial Sequence
  Cyclic GFR-binding peptide
EYKFKVVNNAADLYLISIPE

SEQ ID NO: 83428 - protein, 22 aa, Artificial Sequence
  Cyclic GFR-binding peptide
MGYHYKLIIQQKDNKYLMSIPS

SEQ ID NO: 83429 - protein, 31 aa, Artificial Sequence; identical to SEQ ID NO: 29095
  Cyclic GFR-binding peptide
  MOD_RES (27)..(28): Xaa is C or S

SEQ ID NO: 83430 - protein, 27 aa, Artificial Sequence
  Cyclic GFR-binding peptide
VVMERHKRLVVKDYEDYYLMSTASLET

SEQ ID NO: 83431 - protein, 33 aa, Artificial Sequence; identical to SEQ ID NO: 29097
  Cyclic GFR-binding peptide
  MOD_RES (28)..(29): Xaa is C or S

SEQ ID NO: 83432 - protein, 34 aa, Artificial Sequence; identical to SEQ ID NO: 1008
  Cyclic GFR-binding peptide
  MOD_RES (30)..(31): Xaa is C or S

SEQ ID NO: 83433 - protein, 41 aa, Artificial Sequence; identical to SEQ ID NO: 40645
  Cyclic GFR-binding peptide
  MOD_RES (2)..(4)..(36)..(37): Xaa is C or S

SEQ ID NO: 83434 - protein, 22 aa, Artificial Sequence
  Cyclic GFR-binding peptide
GPIKGYYTVVGKDFYLINIPSL

SEQ ID NO: 83435 - protein, 29 aa, Artificial Sequence
  Cyclic GFR-binding peptide
GEVVMEEYKFKVVKDYEDLYLMSIPELET

SEQ ID NO: 83436 - protein, 25 aa, Artificial Sequence
  Cyclic GFR-binding peptide
MRHKRLLLVRGNDYYLMSTASTKVP

SEQ ID NO: 83437 - protein, 32 aa, Artificial Sequence
  Cyclic GFR-binding peptide
  MOD_RES (30)..(31): Xaa is C or S
VTMNYHYKLVVNKNEDKYLISIPSMKEPVXXP

SEQ ID NO: 83438 - protein, 35 aa, Artificial Sequence; identical to SEQ ID NO: 1021
  Cyclic GFR-binding peptide
  MOD_RES (31)..(32): Xaa is C or S

SEQ ID NO: 83439 - protein, 23 aa, Artificial Sequence
  Cyclic GFR-binding peptide
MEYKFKVKPKRGVLYLISIPELA

SEQ ID NO: 83440 - protein, 37 aa, Artificial Sequence
  Cyclic GFR-binding peptide
  MOD_RES (2)..(34)..(35): Xaa is C or S
AXSEVTMNYHYKLVVNKNEDKYLISIPSMKEPVXXPE

SEQ ID NO: 83441 - protein, 30 aa, Artificial Sequence; identical to SEQ ID NO: 29112
  Cyclic GFR-binding peptide
  MOD_RES (1)..(3): Xaa is C or S

SEQ ID NO: 83442 - protein, 33 aa, Artificial Sequence; identical to SEQ ID NO: 29113
  Cyclic GFR-binding peptide
  MOD_RES (2)..(2): Xaa is C or S

SEQ ID NO: 83443 - protein, 33 aa, Artificial Sequence; identical to SEQ ID NO: 40667
  Cyclic GFR-binding peptide
  MOD_RES (1)..(33): Xaa is C or S

SEQ ID NO: 83444 - protein, 34 aa, Artificial Sequence; identical to SEQ ID NO: 40676
  Cyclic GFR-binding peptide
  MOD_RES (29)..(30): Xaa is C or S

SEQ ID NO: 83445 - protein, 27 aa, Artificial Sequence
  Cyclic GFR-binding peptide
EEVIMEYKFKLLVRGNDLYLMSIPETK

SEQ ID NO: 83446 - protein, 27 aa, Artificial Sequence
  Cyclic GFR-binding peptide
SEVTMNRYKKLVVNKNEDFYLISIANM

SEQ ID NO: 83447 - protein, 30 aa, Artificial Sequence
  Cyclic GFR-binding peptide
  MOD_RES (26)..(27): Xaa is C or S
RHKRLIIQQKDNYYLMSTASMKTPTXXPGA

SEQ ID NO: 83448 - protein, 28 aa, Artificial Sequence
  Cyclic GFR-binding peptide
SMGERYKKLTPVGMDDFYLVSIANLKTP

SEQ ID NO: 83449 - protein, 30 aa, Artificial Sequence; identical to SEQ ID NO: 29127
  Cyclic GFR-binding peptide

SEQ ID NO: 83450 - protein, 23 aa, Artificial Sequence
  Cyclic GFR-binding peptide
MGEEYKFKTPVGMDDLYLVSIPE

SEQ ID NO: 83451 - protein, 34 aa, Artificial Sequence; identical to SEQ ID NO: 1039
  Cyclic GFR-binding peptide
  MOD_RES (1)..(32)..(33): Xaa is C or S

SEQ ID NO: 83452 - protein, 25 aa, Artificial Sequence
  Cyclic GFR-binding peptide
MRYKKLLLVRGNDFYLMSIANTKVP

SEQ ID NO: 83453 - protein, 41 aa, Artificial Sequence; identical to SEQ ID NO: 11624
  Cyclic GFR-binding peptide
  MOD_RES (2)..(4)..(36)..(37): Xaa is C or S

SEQ ID NO: 83454 - protein, 20 aa, Artificial Sequence
  Cyclic GFR-binding peptide
YHYKLVKPTRGVKYLISIPS

SEQ ID NO: 83455 - protein, 38 aa, Artificial Sequence; identical to SEQ ID NO: 40692
  Cyclic GFR-binding peptide
  MOD_RES (2)..(4)..(36)..(37): Xaa is C or S

SEQ ID NO: 83456 - protein, 34 aa, Artificial Sequence; identical to SEQ ID NO: 1046
  Cyclic GFR-binding peptide
  MOD_RES (2)..(4): Xaa is C or S

SEQ ID NO: 83457 - protein, 27 aa, Artificial Sequence
  Cyclic GFR-binding peptide
  MOD_RES (27)..(27): Xaa is C or S
NEYKFKIVNSSDDLYLVSIPELKTPAX

SEQ ID NO: 83458 - protein, 29 aa, Artificial Sequence
  Cyclic GFR-binding peptide
  MOD_RES (2)..(2): Xaa is C or S
KXSKVVMRHKRLVKPTRGVYYLISTASLD

SEQ ID NO: 83459 - protein, 30 aa, Artificial Sequence; identical to SEQ ID NO: 1049
  Cyclic GFR-binding peptide
  MOD_RES (26)..(26): Xaa is C or S

SEQ ID NO: 83460 - protein, 35 aa, Artificial Sequence; identical to SEQ ID NO: 29136
  Cyclic GFR-binding peptide
  MOD_RES (1)..(3)..(35): Xaa is C or S

SEQ ID NO: 83461 - protein, 24 aa, Artificial Sequence
  Cyclic GFR-binding peptide
VMDRHKRLVVNNAADYYLISTASL

SEQ ID NO: 83462 - protein, 32 aa, Artificial Sequence; identical to SEQ ID NO: 1052
  Cyclic GFR-binding peptide
  MOD_RES (29)..(29): Xaa is C or S

SEQ ID NO: 83463 - protein, 25 aa, Artificial Sequence
  Cyclic GFR-binding peptide
VMDRYKKLVVKENEDFYLMSIANLE

SEQ ID NO: 83464 - protein, 37 aa, Artificial Sequence; identical to SEQ ID NO: 29143
  Cyclic GFR-binding peptide
  MOD_RES (32)..(33): Xaa is C or S

SEQ ID NO: 83465 - protein, 35 aa, Artificial Sequence; identical to SEQ ID NO: 1056
  Cyclic GFR-binding peptide
  MOD_RES (29)..(30): Xaa is C or S

SEQ ID NO: 83466 - protein, 32 aa, Artificial Sequence; identical to SEQ ID NO: 1060
  Cyclic GFR-binding peptide
  MOD_RES (1)..(3): Xaa is C or S

SEQ ID NO: 83467 - protein, 25 aa, Artificial Sequence
  Cyclic GFR-binding peptide
EEVIMPIKGYLLVRGNDFYLMNIPS

SEQ ID NO: 83468 - protein, 32 aa, Artificial Sequence
  Cyclic GFR-binding peptide
  MOD_RES (2)..(4): Xaa is C or S
RXGXSEVVMDRHKRLVVNNASDYYLISTASLR

SEQ ID NO: 83469 - protein, 27 aa, Artificial Sequence
  Cyclic GFR-binding peptide
  MOD_RES (1)..(1): Xaa is C or S
XESVAMGPIKGYYTVVGKDFYLINIPS

SEQ ID NO: 83470 - protein, 37 aa, Artificial Sequence
  Cyclic GFR-binding peptide
  MOD_RES (32)..(33): Xaa is C or S
SEVVMDRHKRLVVNNASDYYLISTASLRTPVXXTPPT

SEQ ID NO: 83471 - protein, 25 aa, Artificial Sequence
  Cyclic GFR-binding peptide
NEYKFKVVNKNEDLYLISIPEMKEP

SEQ ID NO: 83472 - protein, 28 aa, Artificial Sequence
  Cyclic GFR-binding peptide
SEVVMDRYKKLVVNNASDFYLISIANLR

SEQ ID NO: 83473 - protein, 29 aa, Artificial Sequence
  Cyclic GFR-binding peptide
VSMGEEYKFKTPVGMDDLYLVSIPELKTP

SEQ ID NO: 83474 - protein, 27 aa, Artificial Sequence
  Cyclic GFR-binding peptide
EVVMDPIKGYVVNNASDFYLINIPSLR

SEQ ID NO: 83475 - protein, 23 aa, Artificial Sequence
  Cyclic GFR-binding peptide
VIMRYKKLLLVRGNDFYLMSIAN

SEQ ID NO: 83476 - protein, 24 aa, Artificial Sequence
  Cyclic GFR-binding peptide
MRHKRLIKPTKGIYYLISTASLDQ

SEQ ID NO: 83477 - protein, 30 aa, Artificial Sequence; identical to SEQ ID NO: 29160
  Cyclic GFR-binding peptide
  MOD_RES (27)..(28): Xaa is C or S

SEQ ID NO: 83478 - protein, 31 aa, Artificial Sequence; identical to SEQ ID NO: 40726
  Cyclic GFR-binding peptide
  MOD_RES (29)..(30): Xaa is C or S

SEQ ID NO: 83479 - protein, 29 aa, Artificial Sequence
  Cyclic GFR-binding peptide
  MOD_RES (26)..(27): Xaa is C or S
RYKKLIVNNSSDFYLVSIANLKTPAXXAK

SEQ ID NO: 83480 - protein, 32 aa, Artificial Sequence
  Cyclic GFR-binding peptide
  MOD_RES (2)..(4): Xaa is C or S
RXAXSEVTMNRYKKLVVNKNEDFYLISIANMK

SEQ ID NO: 83481 - protein, 34 aa, Artificial Sequence
  Cyclic GFR-binding peptide
  MOD_RES (29)..(30): Xaa is C or S
TMNPIKGYVVNKNEDFYLINIPSMKEPVXXPEPI

SEQ ID NO: 83482 - protein, 34 aa, Artificial Sequence; identical to SEQ ID NO: 11652
  Cyclic GFR-binding peptide
  MOD_RES (1)..(3): Xaa is C or S

SEQ ID NO: 83483 - protein, 30 aa, Artificial Sequence
  Cyclic GFR-binding peptide
  MOD_RES (1)..(1): Xaa is C or S
XAEVVMDRHKRLVVNNAADYYLISTASLRA

SEQ ID NO: 83484 - protein, 30 aa, Artificial Sequence; identical to SEQ ID NO: 1078
  Cyclic GFR-binding peptide
  MOD_RES (1)..(3): Xaa is C or S

SEQ ID NO: 83485 - protein, 29 aa, Artificial Sequence
  Cyclic GFR-binding peptide
  MOD_RES (1)..(3): Xaa is C or S
XGXESVAMGRHKRLYTVVGKDYYLISTAS

SEQ ID NO: 83486 - protein, 35 aa, Artificial Sequence
  Cyclic GFR-binding peptide
  MOD_RES (2)..(4): Xaa is C or S
RXAXSEVTMNEYKFKVVNKNEDLYLISIPEMKEPV

SEQ ID NO: 83487 - protein, 31 aa, Artificial Sequence; identical to SEQ ID NO: 40737
  Cyclic GFR-binding peptide
  MOD_RES (2)..(2): Xaa is C or S

SEQ ID NO: 83488 - protein, 38 aa, Artificial Sequence; identical to SEQ ID NO: 29165
  Cyclic GFR-binding peptide
  MOD_RES (1)..(3)..(35)..(36): Xaa is C or S

SEQ ID NO: 83489 - protein, 37 aa, Artificial Sequence
  Cyclic GFR-binding peptide
  MOD_RES (2)..(4)..(35)..(36): Xaa is C or S
LXGXEEVIMEYKFKLLVRGNDLYLMSIPETKVPAXXT

SEQ ID NO: 83490 - protein, 27 aa, Artificial Sequence
  Cyclic GFR-binding peptide
  MOD_RES (1)..(1): Xaa is C or S
XSKVIMYHYKLIKPTKGIKYLISIPSL

SEQ ID NO: 83491 - protein, 28 aa, Artificial Sequence
  Cyclic GFR-binding peptide
  MOD_RES (1)..(1): Xaa is C or S
XSKVVMRHKRLVKPTRGVYYLISTASLD

SEQ ID NO: 83492 - protein, 35 aa, Artificial Sequence
  Cyclic GFR-binding peptide
  MOD_RES (2)..(4): Xaa is C or S
SXGXRDVVMGRHKRLIIQQKDNYYLMSTASMKTPT

SEQ ID NO: 83493 - protein, 28 aa, Artificial Sequence
  Cyclic GFR-binding peptide
  MOD_RES (27)..(28): Xaa is C or S
MRYKKLIKPTKGIFYLISIANLDQSVXX

SEQ ID NO: 83494 - protein, 30 aa, Artificial Sequence; identical to SEQ ID NO: 1087
  Cyclic GFR-binding peptide

SEQ ID NO: 83495 - protein, 33 aa, Artificial Sequence; identical to SEQ ID NO: 29171
  Cyclic GFR-binding peptide
  MOD_RES (29)..(30): Xaa is C or S

SEQ ID NO: 83496 - protein, 31 aa, Artificial Sequence
  Cyclic GFR-binding peptide
  MOD_RES (30)..(31): Xaa is C or S
EVIMRHKRLLLVRGNDYYLMSTASTKVPAXX

SEQ ID NO: 83497 - protein, 34 aa, Artificial Sequence; identical to SEQ ID NO: 40742
  Cyclic GFR-binding peptide
  MOD_RES (29)..(30): Xaa is C or S

SEQ ID NO: 83498 - protein, 21 aa, Artificial Sequence
  Cyclic GFR-binding peptide
RYKKLLLVRGNDFYLMSIANT

SEQ ID NO: 83499 - protein, 23 aa, Artificial Sequence
  Cyclic GFR-binding peptide
AMGRHKRLYTVVGKDYYLISTAS

SEQ ID NO: 83500 - protein, 28 aa, Artificial Sequence
  Cyclic GFR-binding peptide
EVVMERYKKLVVKDYEDFYLMSIANLET

SEQ ID NO: 83501 - protein, 21 aa, Artificial Sequence
  Cyclic GFR-binding peptide
MEYKFKIKPTKGILYLISIPE

SEQ ID NO: 83502 - protein, 32 aa, Artificial Sequence
  Cyclic GFR-binding peptide
  MOD_RES (2)..(2): Xaa is C or S
GXSEVVMDRHKRLVVNNASDYYLISTASLRTP

SEQ ID NO: 83503 - protein, 38 aa, Artificial Sequence; identical to SEQ ID NO: 29178
  Cyclic GFR-binding peptide
  MOD_RES (1)..(3)..(35)..(36): Xaa is C or S

SEQ ID NO: 83504 - protein, 29 aa, Artificial Sequence
  Cyclic GFR-binding peptide
  MOD_RES (1)..(1): Xaa is C or S
XGEVVMDYHYKLVVKENEDKYLMSIPSLE

SEQ ID NO: 83505 - protein, 41 aa, Artificial Sequence
  Cyclic GFR-binding peptide
  MOD_RES (2)..(4)..(36)..(37): Xaa is C or S
SXGXRDVVMGRHKRLIIQQKDNYYLMSTASMKTPTXXPGAS

SEQ ID NO: 83506 - protein, 29 aa, Artificial Sequence
  Cyclic GFR-binding peptide
  MOD_RES (2)..(2): Xaa is C or S
GXAEVVMDYHYKLVVNNAADKYLISIPSL

SEQ ID NO: 83507 - protein, 27 aa, Artificial Sequence
  Cyclic GFR-binding peptide
  MOD_RES (2)..(2): Xaa is C or S
KXSKVIMRHKRLIKPTKGIYYLISTAS

SEQ ID NO: 83508 - protein, 36 aa, Artificial Sequence; identical to SEQ ID NO: 29185
  Cyclic GFR-binding peptide
  MOD_RES (1)..(32)..(33): Xaa is C or S

SEQ ID NO: 83509 - protein, 31 aa, Artificial Sequence; identical to SEQ ID NO: 29187
  Cyclic GFR-binding peptide
  MOD_RES (30)..(31): Xaa is C or S

SEQ ID NO: 83510 - protein, 32 aa, Artificial Sequence; identical to SEQ ID NO: 11674
  Cyclic GFR-binding peptide
  MOD_RES (31)..(32): Xaa is C or S

SEQ ID NO: 83511 - protein, 20 aa, Artificial Sequence
  Cyclic GFR-binding peptide
RHKRLVVNNASDYYLISTAS

SEQ ID NO: 83512 - protein, 37 aa, Artificial Sequence; identical to SEQ ID NO: 40756
  Cyclic GFR-binding peptide
  MOD_RES (2)..(4)..(37): Xaa is C or S

SEQ ID NO: 83513 - protein, 35 aa, Artificial Sequence; identical to SEQ ID NO: 29190
  Cyclic GFR-binding peptide
  MOD_RES (30)..(31): Xaa is C or S

SEQ ID NO: 83514 - protein, 26 aa, Artificial Sequence
  Cyclic GFR-binding peptide
  MOD_RES (1)..(1): Xaa is C or S
XSKVVMRYKKLVKPTRGVFYLISIAN

SEQ ID NO: 83515 - protein, 41 aa, Artificial Sequence; identical to SEQ ID NO: 1105
  Cyclic GFR-binding peptide
  MOD_RES (2)..(4)..(36)..(37): Xaa is C or S

SEQ ID NO: 83516 - protein, 35 aa, Artificial Sequence; identical to SEQ ID NO: 29193
  Cyclic GFR-binding peptide
  MOD_RES (31)..(32): Xaa is C or S

SEQ ID NO: 83517 - protein, 35 aa, Artificial Sequence; identical to SEQ ID NO: 1107
  Cyclic GFR-binding peptide
  MOD_RES (2)..(34)..(35): Xaa is C or S

SEQ ID NO: 83518 - protein, 35 aa, Artificial Sequence; identical to SEQ ID NO: 1108
  Cyclic GFR-binding peptide
  MOD_RES (32)..(33): Xaa is C or S

SEQ ID NO: 83519 - protein, 34 aa, Artificial Sequence; identical to SEQ ID NO: 11684
  Cyclic GFR-binding peptide
  MOD_RES (28)..(29): Xaa is C or S

SEQ ID NO: 83520 - protein, 40 aa, Artificial Sequence
  Cyclic GFR-binding peptide
  MOD_RES (2)..(4)..(36)..(37): Xaa is C or S
RXAXSEVTMNEYKFKVVNKNEDLYLISIPEMKEPVXXPEP

SEQ ID NO: 83521 - protein, 24 aa, Artificial Sequence
  Cyclic GFR-binding peptide
MRHKRLLLVRGNDYYLMSTASTKV

SEQ ID NO: 83522 - protein, 31 aa, Artificial Sequence
  Cyclic GFR-binding peptide
  MOD_RES (1)..(3): Xaa is C or S
XAXSEVTMNPIKGYVVNKNEDFYLINIPSMK

SEQ ID NO: 83523 - protein, 33 aa, Artificial Sequence
  Cyclic GFR-binding peptide
  MOD_RES (2)..(33): Xaa is C or S
GXEEVIMEYKFKLLVRGNDLYLMSIPETKVPAX

SEQ ID NO: 83524 - protein, 34 aa, Artificial Sequence
  Cyclic GFR-binding peptide
  MOD_RES (30)..(31): Xaa is C or S
VTMNYHYKLVVNKNEDKYLISIPSMKEPVXXPEP

SEQ ID NO: 83525 - protein, 24 aa, Artificial Sequence
  Cyclic GFR-binding peptide
PIKGYIVNSSDDFYLVNIPSLKTP

SEQ ID NO: 83526 - protein, 30 aa, Artificial Sequence; identical to SEQ ID NO: 40772
  Cyclic GFR-binding peptide
  MOD_RES (29)..(30): Xaa is C or S

SEQ ID NO: 83527 - protein, 35 aa, Artificial Sequence
  Cyclic GFR-binding peptide
  MOD_RES (1)..(33)..(34): Xaa is C or S
XSEVTMNRHKRLVVNKNEDYYLISTASMKEPVXXP

SEQ ID NO: 83528 - protein, 27 aa, Artificial Sequence
  Cyclic GFR-binding peptide
GEEYKFKTPVGMDDLYLVSIPELKTPV

SEQ ID NO: 83529 - protein, 34 aa, Artificial Sequence; identical to SEQ ID NO: 40781
  Cyclic GFR-binding peptide
  MOD_RES (2)..(4): Xaa is C or S

SEQ ID NO: 83530 - protein, 34 aa, Artificial Sequence; identical to SEQ ID NO: 1122
  Cyclic GFR-binding peptide
  MOD_RES (2)..(4): Xaa is C or S

SEQ ID NO: 83531 - protein, 32 aa, Artificial Sequence
  Cyclic GFR-binding peptide
  MOD_RES (2)..(4): Xaa is C or S
SXKXSRVIMPIKGYVKPKRGVFYLINIPSLAQ

SEQ ID NO: 83532 - protein, 34 aa, Artificial Sequence; identical to SEQ ID NO: 29210
  Cyclic GFR-binding peptide
  MOD_RES (29)..(30): Xaa is C or S

SEQ ID NO: 83533 - protein, 37 aa, Artificial Sequence; identical to SEQ ID NO: 29211
  Cyclic GFR-binding peptide
  MOD_RES (2)..(34): Xaa is C or S

SEQ ID NO: 83534 - protein, 38 aa, Artificial Sequence; identical to SEQ ID NO: 1126
  Cyclic GFR-binding peptide
  MOD_RES (1)..(3)..(35)..(36): Xaa is C or S

SEQ ID NO: 83535 - protein, 38 aa, Artificial Sequence
  Cyclic GFR-binding peptide
  MOD_RES (2)..(4)..(35)..(36): Xaa is C or S
LXGXEEVIMYHYKLLLVRGNDKYLMSIPSTKVPAXXTS

SEQ ID NO: 83536 - protein, 29 aa, Artificial Sequence
  Cyclic GFR-binding peptide
  MOD_RES (27)..(28): Xaa is C or S
NRHKRLVVNKNEDYYLISTASMKEPVXXP

SEQ ID NO: 83537 - protein, 41 aa, Artificial Sequence
  Cyclic GFR-binding peptide
  MOD_RES (2)..(4)..(35)..(36): Xaa is C or S
SXKXSKVIMPIKGYIKPTKGIFYLINIPSLDQSVXXPSASA

SEQ ID NO: 83538 - protein, 27 aa, Artificial Sequence
  Cyclic GFR-binding peptide
  MOD_RES (26)..(27): Xaa is C or S
EYKFKVVNNASDLYLISIPELRTPVXX

SEQ ID NO: 83539 - protein, 30 aa, Artificial Sequence; identical to SEQ ID NO: 29219
  Cyclic GFR-binding peptide
  MOD_RES (2)..(2): Xaa is C or S

SEQ ID NO: 83540 - protein, 26 aa, Artificial Sequence
  Cyclic GFR-binding peptide
EVVMDPIKGYVVNNASDFYLINIPSL

SEQ ID NO: 83541 - protein, 30 aa, Artificial Sequence; identical to SEQ ID NO: 29220
  Cyclic GFR-binding peptide
  MOD_RES (27)..(28): Xaa is C or S

SEQ ID NO: 83542 - protein, 21 aa, Artificial Sequence
  Cyclic GFR-binding peptide
EYKFKTPVGMDDLYLVSIPEL

SEQ ID NO: 83543 - protein, 33 aa, Artificial Sequence; identical to SEQ ID NO: 1130
  Cyclic GFR-binding peptide
  MOD_RES (27)..(28): Xaa is C or S

SEQ ID NO: 83544 - protein, 30 aa, Artificial Sequence; identical to SEQ ID NO: 1131
  Cyclic GFR-binding peptide
  MOD_RES (30)..(30): Xaa is C or S

SEQ ID NO: 83545 - protein, 36 aa, Artificial Sequence
  Cyclic GFR-binding peptide
  MOD_RES (32)..(33): Xaa is C or S
AEVVMDRHKRLVVNNAADYYLISTASLRAPVXXSAP

SEQ ID NO: 83546 - protein, 27 aa, Artificial Sequence
  Cyclic GFR-binding peptide
RVVMNEYKFKIVNSSDDLYLVSIPELQ

SEQ ID NO: 83547 - protein, 27 aa, Artificial Sequence
  Cyclic GFR-binding peptide
  MOD_RES (1)..(1): Xaa is C or S
XARVVMNRHKRLIVNSSDDYYLVSTAS

SEQ ID NO: 83548 - protein, 38 aa, Artificial Sequence
  Cyclic GFR-binding peptide
  MOD_RES (1)..(32)..(33): Xaa is C or S
XEEVIMYHYKLLLVRGNDKYLMSIPSTKVPAXXTSPVR

SEQ ID NO: 83549 - protein, 29 aa, Artificial Sequence
  Cyclic GFR-binding peptide
  MOD_RES (2)..(2): Xaa is C or S
AXSEVTMNYHYKLVVNKNEDKYLISIPSM

SEQ ID NO: 83550 - protein, 39 aa, Artificial Sequence; identical to SEQ ID NO: 29235
  Cyclic GFR-binding peptide
  MOD_RES (2)..(4)..(36)..(37): Xaa is C or S

SEQ ID NO: 83551 - protein, 31 aa, Artificial Sequence
  Cyclic GFR-binding peptide
  MOD_RES (2)..(2): Xaa is C or S
AXSEVTMNRYKKLVVNKNEDFYLISIANMKE

SEQ ID NO: 83552 - protein, 32 aa, Artificial Sequence; identical to SEQ ID NO: 40811
  Cyclic GFR-binding peptide
  MOD_RES (30)..(31): Xaa is C or S

SEQ ID NO: 83553 - protein, 36 aa, Artificial Sequence; identical to SEQ ID NO: 1148
  Cyclic GFR-binding peptide
  MOD_RES (30)..(31): Xaa is C or S

SEQ ID NO: 83554 - protein, 21 aa, Artificial Sequence
  Cyclic GFR-binding peptide
PIKGYIKPTKGIFYLINIPSL

SEQ ID NO: 83555 - protein, 23 aa, Artificial Sequence
  Cyclic GFR-binding peptide
NPIKGYVVNKNEDFYLINIPSMK

SEQ ID NO: 83556 - protein, 32 aa, Artificial Sequence
  Cyclic GFR-binding peptide
  MOD_RES (27)..(28): Xaa is C or S
GEYKFKIIQQKDNLYLMSIPEMKTPTXXPGAS

SEQ ID NO: 83557 - protein, 40 aa, Artificial Sequence
  Cyclic GFR-binding peptide
  MOD_RES (1)..(3)..(35)..(36): Xaa is C or S
XGXSEVVMDEYKFKVVNNASDLYLISIPELRTPVXXTPPT

SEQ ID NO: 83558 - protein, 31 aa, Artificial Sequence; identical to SEQ ID NO: 1149
  Cyclic GFR-binding peptide
  MOD_RES (1)..(1): Xaa is C or S

SEQ ID NO: 83559 - protein, 26 aa, Artificial Sequence
  Cyclic GFR-binding peptide
EVTMNYHYKLVVNKNEDKYLISIPSM

SEQ ID NO: 83560 - protein, 29 aa, Artificial Sequence
  Cyclic GFR-binding peptide
  MOD_RES (26)..(27): Xaa is C or S
EYKFKVKPKRGVLYLISIPELAQPVXXPA

SEQ ID NO: 83561 - protein, 38 aa, Artificial Sequence
  Cyclic GFR-binding peptide
  MOD_RES (1)..(32)..(33): Xaa is C or S
XSKVIMPIKGYIKPTKGIFYLINIPSLDQSVXXPSASA

SEQ ID NO: 83562 - protein, 33 aa, Artificial Sequence
  Cyclic GFR-binding peptide
  MOD_RES (30)..(31): Xaa is C or S
VAMGRHKRLYTVVGKDYYLISTASLKTPVXXAK

SEQ ID NO: 83563 - protein, 38 aa, Artificial Sequence; identical to SEQ ID NO: 29251
  Cyclic GFR-binding peptide
  MOD_RES (2)..(34)..(35): Xaa is C or S

SEQ ID NO: 83564 - protein, 33 aa, Artificial Sequence; identical to SEQ ID NO: 1160
  Cyclic GFR-binding peptide
  MOD_RES (27)..(28): Xaa is C or S

SEQ ID NO: 83565 - protein, 25 aa, Artificial Sequence
  Cyclic GFR-binding peptide
MDEYKFKVVNNAADLYLISIPELRA

SEQ ID NO: 83566 - protein, 30 aa, Artificial Sequence; identical to SEQ ID NO: 1162
  Cyclic GFR-binding peptide
  MOD_RES (2)..(4): Xaa is C or S

SEQ ID NO: 83567 - protein, 32 aa, Artificial Sequence
  Cyclic GFR-binding peptide
  MOD_RES (1)..(1): Xaa is C or S
XRDVVMGYHYKLIIQQKDNKYLMSIPSMKTPT

SEQ ID NO: 83568 - protein, 28 aa, Artificial Sequence
  Cyclic GFR-binding peptide
AVSMGEEYKFKTPVGMDDLYLVSIPELK

SEQ ID NO: 83569 - protein, 32 aa, Artificial Sequence
  Cyclic GFR-binding peptide
  MOD_RES (27)..(28): Xaa is C or S
GYHYKLIIQQKDNKYLMSIPSMKTPTXXPGAS

SEQ ID NO: 83570 - protein, 31 aa, Artificial Sequence
  Cyclic GFR-binding peptide
  MOD_RES (26)..(27): Xaa is C or S
EYKFKLLVRGNDLYLMSIPETKVPAXXTSPV

SEQ ID NO: 83571 - protein, 28 aa, Artificial Sequence
  Cyclic GFR-binding peptide
EVIMEYKFKLLVRGNDLYLMSIPETKVP

SEQ ID NO: 83572 - protein, 40 aa, Artificial Sequence
  Cyclic GFR-binding peptide
  MOD_RES (1)..(3)..(34)..(35): Xaa is C or S
XGXEEVIMRHKRLLLVRGNDYYLMSTASTKVPAXXTSPVR

SEQ ID NO: 83573 - protein, 33 aa, Artificial Sequence; identical to SEQ ID NO: 29258
  Cyclic GFR-binding peptide
  MOD_RES (27)..(27): Xaa is C or S

SEQ ID NO: 83574 - protein, 30 aa, Artificial Sequence; identical to SEQ ID NO: 29260
  Cyclic GFR-binding peptide
  MOD_RES (29)..(30): Xaa is C or S

SEQ ID NO: 83575 - protein, 32 aa, Artificial Sequence; identical to SEQ ID NO: 1165
  Cyclic GFR-binding peptide
  MOD_RES (1)..(3): Xaa is C or S

SEQ ID NO: 83576 - protein, 36 aa, Artificial Sequence
  Cyclic GFR-binding peptide
  MOD_RES (1)..(33)..(34): Xaa is C or S
XRDVVMGYHYKLIIQQKDNKYLMSIPSMKTPTXXPG

SEQ ID NO: 83577 - protein, 35 aa, Artificial Sequence; identical to SEQ ID NO: 29263
  Cyclic GFR-binding peptide
  MOD_RES (32)..(33): Xaa is C or S

SEQ ID NO: 83578 - protein, 28 aa, Artificial Sequence
  Cyclic GFR-binding peptide
  MOD_RES (28)..(28): Xaa is C or S
MEPIKGYVVKDYEDFYLMNIPSLETPVX

SEQ ID NO: 83579 - protein, 32 aa, Artificial Sequence; identical to SEQ ID NO: 40835
  Cyclic GFR-binding peptide
  MOD_RES (26)..(27): Xaa is C or S

SEQ ID NO: 83580 - protein, 29 aa, Artificial Sequence
  Cyclic GFR-binding peptide
  MOD_RES (1)..(1): Xaa is C or S
XEAVSMGERYKKLTPVGMDDFYLVSIANL

SEQ ID NO: 83581 - protein, 30 aa, Artificial Sequence; identical to SEQ ID NO: 75383
  Cyclic GFR-binding peptide
  MOD_RES (1)..(3): Xaa is C or S

SEQ ID NO: 83582 - protein, 30 aa, Artificial Sequence; identical to SEQ ID NO: 40838
  Cyclic GFR-binding peptide
  MOD_RES (2)..(4): Xaa is C or S

SEQ ID NO: 83583 - protein, 40 aa, Artificial Sequence; identical to SEQ ID NO: 40842
  Cyclic GFR-binding peptide
  MOD_RES (2)..(35)..(36): Xaa is C or S

SEQ ID NO: 83584 - protein, 28 aa, Artificial Sequence
  Cyclic GFR-binding peptide
  MOD_RES (26)..(27): Xaa is C or S
RHKRLVVNNASDYYLISTASLRTPVXXT

SEQ ID NO: 83585 - protein, 23 aa, Artificial Sequence
  Cyclic GFR-binding peptide
VMDRYKKLVVNNAADFYLISIAN

SEQ ID NO: 83586 - protein, 32 aa, Artificial Sequence
  Cyclic GFR-binding peptide
  MOD_RES (27)..(28): Xaa is C or S
GRHKRLYTVVGKDYYLISTASLKTPVXXAKSA

SEQ ID NO: 83587 - protein, 23 aa, Artificial Sequence
  Cyclic GFR-binding peptide
GYHYKLIIQQKDNKYLMSIPSMK

SEQ ID NO: 83588 - protein, 36 aa, Artificial Sequence; identical to SEQ ID NO: 1182
  Cyclic GFR-binding peptide
  MOD_RES (32)..(33): Xaa is C or S

SEQ ID NO: 83589 - protein, 33 aa, Artificial Sequence; identical to SEQ ID NO: 40848
  Cyclic GFR-binding peptide
  MOD_RES (30)..(31): Xaa is C or S

SEQ ID NO: 83590 - protein, 29 aa, Artificial Sequence
  Cyclic GFR-binding peptide
  MOD_RES (26)..(27): Xaa is C or S
EYKFKIVNSSDDLYLVSIPELQTPAXXPK

SEQ ID NO: 83591 - protein, 31 aa, Artificial Sequence; identical to SEQ ID NO: 1185
  Cyclic GFR-binding peptide
  MOD_RES (1)..(1): Xaa is C or S

SEQ ID NO: 83592 - protein, 29 aa, Artificial Sequence
  Cyclic GFR-binding peptide
  MOD_RES (26)..(27): Xaa is C or S
YHYKLVVKDYEDKYLMSIPSLETPVXXAK

SEQ ID NO: 83593 - protein, 31 aa, Artificial Sequence; identical to SEQ ID NO: 40853
  Cyclic GFR-binding peptide
  MOD_RES (30)..(31): Xaa is C or S

SEQ ID NO: 83594 - protein, 23 aa, Artificial Sequence
  Cyclic GFR-binding peptide
MGRYKKLYTVVGKDFYLISIANL

SEQ ID NO: 83595 - protein, 24 aa, Artificial Sequence
  Cyclic GFR-binding peptide
VAMGYHYKLYTVVGKDKYLISIPS

SEQ ID NO: 83596 - protein, 26 aa, Artificial Sequence
  Cyclic GFR-binding peptide
DRYKKLVVNNASDFYLISIANLRTPV

SEQ ID NO: 83597 - protein, 27 aa, Artificial Sequence
  Cyclic GFR-binding peptide
VMRHKRLVKPTRGVYYLISTASLDQPV

SEQ ID NO: 83598 - protein, 29 aa, Artificial Sequence
  Cyclic GFR-binding peptide
  MOD_RES (27)..(28): Xaa is C or S
NEYKFKIVNSSDDLYLVSIPELQTPAXXP

SEQ ID NO: 83599 - protein, 30 aa, Artificial Sequence; identical to SEQ ID NO: 1192
  Cyclic GFR-binding peptide
  MOD_RES (1)..(1): Xaa is C or S

SEQ ID NO: 83600 - protein, 41 aa, Artificial Sequence; identical to SEQ ID NO: 29288
  Cyclic GFR-binding peptide
  MOD_RES (2)..(4)..(36)..(37): Xaa is C or S

SEQ ID NO: 83601 - protein, 38 aa, Artificial Sequence; identical to SEQ ID NO: 29289
  Cyclic GFR-binding peptide
  MOD_RES (1)..(3)..(36)..(37): Xaa is C or S

SEQ ID NO: 83602 - protein, 29 aa, Artificial Sequence
  Cyclic GFR-binding peptide
  MOD_RES (28)..(29): Xaa is C or S
GERYKKLTPVGMDDFYLVSIANLKTPVXX

SEQ ID NO: 83603 - protein, 33 aa, Artificial Sequence; identical to SEQ ID NO: 40859
  Cyclic GFR-binding peptide
  MOD_RES (31)..(32): Xaa is C or S

SEQ ID NO: 83604 - protein, 29 aa, Artificial Sequence
  Cyclic GFR-binding peptide
  MOD_RES (29)..(29): Xaa is C or S
VMNPIKGYIVNSSDDFYLVNIPSLKTPAX

SEQ ID NO: 83605 - protein, 29 aa, Artificial Sequence
  Cyclic GFR-binding peptide
EAVSMGERYKKLTPVGMDDFYLVSIANLK

SEQ ID NO: 83606 - protein, 27 aa, Artificial Sequence
  Cyclic GFR-binding peptide
VTMNYHYKLVVNKNEDKYLISIPSMKE

SEQ ID NO: 83607 - protein, 40 aa, Artificial Sequence; identical to SEQ ID NO: 29293
  Cyclic GFR-binding peptide
  MOD_RES (2)..(4)..(36)..(37): Xaa is C or S

SEQ ID NO: 83608 - protein, 27 aa, Artificial Sequence
  Cyclic GFR-binding peptide
  MOD_RES (1)..(1): Xaa is C or S
XSKVVMYHYKLVKPTRGVKYLISIPSL

SEQ ID NO: 83609 - protein, 37 aa, Artificial Sequence; identical to SEQ ID NO: 1197
  Cyclic GFR-binding peptide
  MOD_RES (1)..(3)..(35)..(36): Xaa is C or S

SEQ ID NO: 83610 - protein, 26 aa, Artificial Sequence
  Cyclic GFR-binding peptide
SMGERYKKLTPVGMDDFYLVSIANLK

SEQ ID NO: 83611 - protein, 35 aa, Artificial Sequence; identical to SEQ ID NO: 1203
  Cyclic GFR-binding peptide
  MOD_RES (2)..(4)..(35): Xaa is C or S

SEQ ID NO: 83612 - protein, 36 aa, Artificial Sequence; identical to SEQ ID NO: 1204
  Cyclic GFR-binding peptide
  MOD_RES (2)..(34): Xaa is C or S

SEQ ID NO: 83613 - protein, 28 aa, Artificial Sequence
  Cyclic GFR-binding peptide
EEVIMRYKKLLLVRGNDFYLMSIANTKV

SEQ ID NO: 83614 - protein, 29 aa, Artificial Sequence
  Cyclic GFR-binding peptide
  MOD_RES (28)..(29): Xaa is C or S
MDRYKKLVVNNAADFYLISIANLRAPVXX

SEQ ID NO: 83615 - protein, 32 aa, Artificial Sequence
  Cyclic GFR-binding peptide
  MOD_RES (32)..(32): Xaa is C or S
SEVTMNRYKKLVVNKNEDFYLISIANMKEPVX

SEQ ID NO: 83616 - protein, 33 aa, Artificial Sequence
  Cyclic GFR-binding peptide
  MOD_RES (1)..(32)..(33): Xaa is C or S
XSKVIMPIKGYIKPTKGIFYLINIPSLDQSVXX

SEQ ID NO: 83617 - protein, 25 aa, Artificial Sequence
  Cyclic GFR-binding peptide
EYKFKIVNNSSDLYLVSIPELKTPA

SEQ ID NO: 83618 - protein, 23 aa, Artificial Sequence
  Cyclic GFR-binding peptide
GEYKFKIIQQKDNLYLMSIPEMK

SEQ ID NO: 83619 - protein, 32 aa, Artificial Sequence
  Cyclic GFR-binding peptide
  MOD_RES (31)..(32): Xaa is C or S
SKVVMPIKGYVKPTRGVFYLINIPSLDQPVXX

SEQ ID NO: 83620 - protein, 29 aa, Artificial Sequence
  Cyclic GFR-binding peptide
  MOD_RES (2)..(2): Xaa is C or S
GXEAVSMGERHKRLTPVGMDDYYLVSTAS

SEQ ID NO: 83621 - protein, 30 aa, Artificial Sequence; identical to SEQ ID NO: 75406
  Cyclic GFR-binding peptide
  MOD_RES (1)..(1): Xaa is C or S

SEQ ID NO: 83622 - protein, 31 aa, Artificial Sequence; identical to SEQ ID NO: 1210
  Cyclic GFR-binding peptide
  MOD_RES (27)..(28): Xaa is C or S

SEQ ID NO: 83623 - protein, 36 aa, Artificial Sequence; identical to SEQ ID NO: 29309
  Cyclic GFR-binding peptide
  MOD_RES (2)..(4)..(36): Xaa is C or S

SEQ ID NO: 83624 - protein, 27 aa, Artificial Sequence
  Cyclic GFR-binding peptide
  MOD_RES (26)..(27): Xaa is C or S
PIKGYIVNSSDDFYLVNIPSLQTPAXX

SEQ ID NO: 83625 - protein, 26 aa, Artificial Sequence
  Cyclic GFR-binding peptide
MDYHYKLVVNNAADKYLISIPSLRAP

SEQ ID NO: 83626 - protein, 30 aa, Artificial Sequence; identical to SEQ ID NO: 1215
  Cyclic GFR-binding peptide
  MOD_RES (26)..(26): Xaa is C or S

SEQ ID NO: 83627 - protein, 30 aa, Artificial Sequence; identical to SEQ ID NO: 29314
  Cyclic GFR-binding peptide

SEQ ID NO: 83628 - protein, 32 aa, Artificial Sequence; identical to SEQ ID NO: 29316
  Cyclic GFR-binding peptide
  MOD_RES (2)..(4): Xaa is C or S

SEQ ID NO: 83629 - protein, 27 aa, Artificial Sequence
  Cyclic GFR-binding peptide
  MOD_RES (26)..(26): Xaa is C or S
PIKGYIVNSSDDFYLVNIPSLKTPAXT

SEQ ID NO: 83630 - protein, 32 aa, Artificial Sequence; identical to SEQ ID NO: 29317
  Cyclic GFR-binding peptide
  MOD_RES (1)..(3): Xaa is C or S

SEQ ID NO: 83631 - protein, 25 aa, Artificial Sequence
  Cyclic GFR-binding peptide
IMPIKGYVKPKRGVFYLINIPSLAQ

SEQ ID NO: 83632 - protein, 36 aa, Artificial Sequence
  Cyclic GFR-binding peptide
  MOD_RES (2)..(34)..(35): Xaa is C or S
AXSEVTMNEYKFKVVNKNEDLYLISIPEMKEPVXXP

SEQ ID NO: 83633 - protein, 34 aa, Artificial Sequence
  Cyclic GFR-binding peptide
  MOD_RES (30)..(31): Xaa is C or S
VTMNRHKRLVVNKNEDYYLISTASMKEPVXXPEP

SEQ ID NO: 83634 - protein, 34 aa, Artificial Sequence; identical to SEQ ID NO: 1217
  Cyclic GFR-binding peptide
  MOD_RES (31)..(32): Xaa is C or S

SEQ ID NO: 83635 - protein, 26 aa, Artificial Sequence
  Cyclic GFR-binding peptide
MDRHKRLVVNNAADYYLISTASLRAP

SEQ ID NO: 83636 - protein, 30 aa, Artificial Sequence
  Cyclic GFR-binding peptide
  MOD_RES (2)..(4): Xaa is C or S
RXGXESVAMGRHKRLYTVVGKDYYLISTAS

SEQ ID NO: 83637 - protein, 33 aa, Artificial Sequence; identical to SEQ ID NO: 1224
  Cyclic GFR-binding peptide
  MOD_RES (31)..(32): Xaa is C or S

SEQ ID NO: 83638 - protein, 33 aa, Artificial Sequence; identical to SEQ ID NO: 1226
  Cyclic GFR-binding peptide
  MOD_RES (30)..(31): Xaa is C or S

SEQ ID NO: 83639 - protein, 30 aa, Artificial Sequence; identical to SEQ ID NO: 1230
  Cyclic GFR-binding peptide
  MOD_RES (1)..(3): Xaa is C or S

SEQ ID NO: 83640 - protein, 33 aa, Artificial Sequence; identical to SEQ ID NO: 29328
  Cyclic GFR-binding peptide
  MOD_RES (32)..(33): Xaa is C or S

SEQ ID NO: 83641 - protein, 27 aa, Artificial Sequence
  Cyclic GFR-binding peptide
KVVMNPIKGYIVNNSSDFYLVNIPSLK

SEQ ID NO: 83642 - protein, 34 aa, Artificial Sequence; identical to SEQ ID NO: 1232
  Cyclic GFR-binding peptide
  MOD_RES (29)..(30): Xaa is C or S

SEQ ID NO: 83643 - protein, 35 aa, Artificial Sequence
  Cyclic GFR-binding peptide
  MOD_RES (29)..(30): Xaa is C or S
VMGYHYKLIIQQKDNKYLMSIPSMKTPTXXPGASG

SEQ ID NO: 83644 - protein, 38 aa, Artificial Sequence
  Cyclic GFR-binding peptide
  MOD_RES (2)..(4)..(36)..(37): Xaa is C or S
RXGXAEVVMDRHKRLVVNNAADYYLISTASLRAPVXXS

SEQ ID NO: 83645 - protein, 28 aa, Artificial Sequence
  Cyclic GFR-binding peptide
  MOD_RES (26)..(27): Xaa is C or S
YHYKLVVNNAADKYLISIPSLRAPVXXS

SEQ ID NO: 83646 - protein, 40 aa, Artificial Sequence; identical to SEQ ID NO: 40894
  Cyclic GFR-binding peptide
  MOD_RES (1)..(3)..(35)..(36): Xaa is C or S

SEQ ID NO: 83647 - protein, 31 aa, Artificial Sequence
  Cyclic GFR-binding peptide
  MOD_RES (29)..(30): Xaa is C or S
VIMYHYKLLLVRGNDKYLMSIPSTKVPAXXT

SEQ ID NO: 83648 - protein, 34 aa, Artificial Sequence; identical to SEQ ID NO: 29332
  Cyclic GFR-binding peptide
  MOD_RES (29)..(30): Xaa is C or S

SEQ ID NO: 83649 - protein, 25 aa, Artificial Sequence
  Cyclic GFR-binding peptide
EVVMDRYKKLVVNNASDFYLISIAN

SEQ ID NO: 83650 - protein, 25 aa, Artificial Sequence
  Cyclic GFR-binding peptide
VIMPIKGYLLVRGNDFYLMNIPSTK

SEQ ID NO: 83651 - protein, 34 aa, Artificial Sequence; identical to SEQ ID NO: 29337
  Cyclic GFR-binding peptide
  MOD_RES (31)..(32): Xaa is C or S

SEQ ID NO: 83652 - protein, 37 aa, Artificial Sequence; identical to SEQ ID NO: 1238
  Cyclic GFR-binding peptide
  MOD_RES (32)..(33): Xaa is C or S

SEQ ID NO: 83653 - protein, 28 aa, Artificial Sequence
  Cyclic GFR-binding peptide
AVSMGEPIKGYTPVGMDDFYLVNIPSLK

SEQ ID NO: 83654 - protein, 37 aa, Artificial Sequence
  Cyclic GFR-binding peptide
  MOD_RES (31)..(32): Xaa is C or S
EVTMNPIKGYVVNKNEDFYLINIPSMKEPVXXPEPIG

SEQ ID NO: 83655 - protein, 28 aa, Artificial Sequence
  Cyclic GFR-binding peptide
  MOD_RES (1)..(1): Xaa is C or S
XSRVVMNPIKGYIVNSSDDFYLVNIPSL

SEQ ID NO: 83656 - protein, 37 aa, Artificial Sequence; identical to SEQ ID NO: 1243
  Cyclic GFR-binding peptide
  MOD_RES (31)..(32): Xaa is C or S

SEQ ID NO: 83657 - protein, 37 aa, Artificial Sequence; identical to SEQ ID NO: 29344
  Cyclic GFR-binding peptide
  MOD_RES (1)..(33)..(34): Xaa is C or S

SEQ ID NO: 83658 - protein, 29 aa, Artificial Sequence
  Cyclic GFR-binding peptide
  MOD_RES (27)..(28): Xaa is C or S
GRYKKLYTVVGKDFYLISIANLKTPVXXA

SEQ ID NO: 83659 - protein, 33 aa, Artificial Sequence
  Cyclic GFR-binding peptide
  MOD_RES (1)..(32)..(33): Xaa is C or S
XEEVIMEYKFKLLVRGNDLYLMSIPETKVPAXX

SEQ ID NO: 83660 - protein, 39 aa, Artificial Sequence; identical to SEQ ID NO: 1248
  Cyclic GFR-binding peptide
  MOD_RES (2)..(34)..(35): Xaa is C or S

SEQ ID NO: 83661 - protein, 35 aa, Artificial Sequence; identical to SEQ ID NO: 40916
  Cyclic GFR-binding peptide
  MOD_RES (30)..(31): Xaa is C or S

SEQ ID NO: 83662 - protein, 35 aa, Artificial Sequence; identical to SEQ ID NO: 40918
  Cyclic GFR-binding peptide
  MOD_RES (2)..(34)..(35): Xaa is C or S

SEQ ID NO: 83663 - protein, 28 aa, Artificial Sequence
  Cyclic GFR-binding peptide
SRVVMNYHYKLIVNSSDDKYLVSIPSLK

SEQ ID NO: 83664 - protein, 35 aa, Artificial Sequence; identical to SEQ ID NO: 29353
  Cyclic GFR-binding peptide
  MOD_RES (31)..(32): Xaa is C or S

SEQ ID NO: 83665 - protein, 24 aa, Artificial Sequence
  Cyclic GFR-binding peptide
MNEYKFKIVNNSSDLYLVSIPELK

SEQ ID NO: 83666 - protein, 32 aa, Artificial Sequence; identical to SEQ ID NO: 40931
  Cyclic GFR-binding peptide
  MOD_RES (30)..(31): Xaa is C or S

SEQ ID NO: 83667 - protein, 26 aa, Artificial Sequence
  Cyclic GFR-binding peptide
VMNEYKFKIVNSSDDLYLVSIPELQT

SEQ ID NO: 83668 - protein, 29 aa, Artificial Sequence
  Cyclic GFR-binding peptide
RVIMYHYKLVKPKRGVKYLISIPSLAQPV

SEQ ID NO: 83669 - protein, 24 aa, Artificial Sequence
  Cyclic GFR-binding peptide
PIKGYYTVVGKDFYLINIPSLKTP

SEQ ID NO: 83670 - protein, 28 aa, Artificial Sequence
  Cyclic GFR-binding peptide
  MOD_RES (27)..(28): Xaa is C or S
MRYKKLVKPTRGVFYLISIANLDQPVXX

SEQ ID NO: 83671 - protein, 37 aa, Artificial Sequence; identical to SEQ ID NO: 1264
  Cyclic GFR-binding peptide
  MOD_RES (32)..(33): Xaa is C or S

SEQ ID NO: 83672 - protein, 28 aa, Artificial Sequence
  Cyclic GFR-binding peptide
  MOD_RES (1)..(1): Xaa is C or S
XGEVVMDEYKFKVVKENEDLYLMSIPEL

SEQ ID NO: 83673 - protein, 26 aa, Artificial Sequence
  Cyclic GFR-binding peptide
  MOD_RES (26)..(26): Xaa is C or S
RHKRLVVNKNEDYYLISTASMKEPVX

SEQ ID NO: 83674 - protein, 32 aa, Artificial Sequence
  Cyclic GFR-binding peptide
  MOD_RES (29)..(30): Xaa is C or S
VIMRHKRLLLVRGNDYYLMSTASTKVPAXXTS

SEQ ID NO: 83675 - protein, 36 aa, Artificial Sequence; identical to SEQ ID NO: 40945
  Cyclic GFR-binding peptide
  MOD_RES (1)..(3)..(35)..(36): Xaa is C or S

SEQ ID NO: 83676 - protein, 34 aa, Artificial Sequence; identical to SEQ ID NO: 29367
  Cyclic GFR-binding peptide
  MOD_RES (2)..(4): Xaa is C or S

SEQ ID NO: 83677 - protein, 21 aa, Artificial Sequence
  Cyclic GFR-binding peptide
EYKFKVVNNASDLYLISIPEL

SEQ ID NO: 83678 - protein, 28 aa, Artificial Sequence
  Cyclic GFR-binding peptide
ARVVMNEYKFKIVNSSDDLYLVSIPELQ

SEQ ID NO: 83679 - protein, 38 aa, Artificial Sequence
  Cyclic GFR-binding peptide
  MOD_RES (32)..(33): Xaa is C or S
SEVTMNRHKRLVVNKNEDYYLISTASMKEPVXXPEPIG

SEQ ID NO: 83680 - protein, 39 aa, Artificial Sequence
  Cyclic GFR-binding peptide
  MOD_RES (2)..(4)..(35)..(36): Xaa is C or S
LXGXEEVIMRHKRLLLVRGNDYYLMSTASTKVPAXXTSP

SEQ ID NO: 83681 - protein, 32 aa, Artificial Sequence
  Cyclic GFR-binding peptide
  MOD_RES (29)..(30): Xaa is C or S
VIMYHYKLLLVRGNDKYLMSIPSTKVPAXXTS

SEQ ID NO: 83682 - protein, 31 aa, Artificial Sequence; identical to SEQ ID NO: 1271
  Cyclic GFR-binding peptide
  MOD_RES (31)..(31): Xaa is C or S

SEQ ID NO: 83683 - protein, 31 aa, Artificial Sequence; identical to SEQ ID NO: 40953
  Cyclic GFR-binding peptide
  MOD_RES (29)..(29): Xaa is C or S

SEQ ID NO: 83684 - protein, 22 aa, Artificial Sequence
  Cyclic GFR-binding peptide
MRYKKLLLVRGNDFYLMSIANT

SEQ ID NO: 83685 - protein, 29 aa, Artificial Sequence
  Cyclic GFR-binding peptide
  MOD_RES (2)..(2): Xaa is C or S
GXSRVVMNEYKFKIVNSSDDLYLVSIPEL

SEQ ID NO: 83686 - protein, 38 aa, Artificial Sequence
  Cyclic GFR-binding peptide
  MOD_RES (2)..(34)..(35): Xaa is C or S
AXSEVTMNYHYKLVVNKNEDKYLISIPSMKEPVXXPEP

SEQ ID NO: 83687 - protein, 30 aa, Artificial Sequence
  Cyclic GFR-binding peptide
  MOD_RES (1)..(1): Xaa is C or S
XSEVVMDEYKFKVVNNASDLYLISIPELRT

SEQ ID NO: 83688 - protein, 35 aa, Artificial Sequence; identical to SEQ ID NO: 1276
  Cyclic GFR-binding peptide
  MOD_RES (30)..(31): Xaa is C or S

SEQ ID NO: 83689 - protein, 27 aa, Artificial Sequence
  Cyclic GFR-binding peptide
MDEYKFKVVNNAADLYLISIPELRAPV

SEQ ID NO: 83690 - protein, 34 aa, Artificial Sequence; identical to SEQ ID NO: 1282
  Cyclic GFR-binding peptide
  MOD_RES (29)..(30): Xaa is C or S

SEQ ID NO: 83691 - protein, 35 aa, Artificial Sequence; identical to SEQ ID NO: 29377
  Cyclic GFR-binding peptide
  MOD_RES (2)..(4): Xaa is C or S

SEQ ID NO: 83692 - protein, 40 aa, Artificial Sequence; identical to SEQ ID NO: 29379
  Cyclic GFR-binding peptide
  MOD_RES (1)..(3)..(35)..(36): Xaa is C or S

SEQ ID NO: 83693 - protein, 33 aa, Artificial Sequence
  Cyclic GFR-binding peptide
  MOD_RES (27)..(28): Xaa is C or S
MPIKGYIKPTKGIFYLINIPSLDQSVXXPSASA

SEQ ID NO: 83694 - protein, 27 aa, Artificial Sequence
  Cyclic GFR-binding peptide
MGEPIKGYTPVGMDDFYLVNIPSLKTP

SEQ ID NO: 83695 - protein, 31 aa, Artificial Sequence; identical to SEQ ID NO: 1293
  Cyclic GFR-binding peptide
  MOD_RES (26)..(27): Xaa is C or S

SEQ ID NO: 83696 - protein, 30 aa, Artificial Sequence
  Cyclic GFR-binding peptide
SEVTMNPIKGYVVNKNEDFYLINIPSMKEP

SEQ ID NO: 83697 - protein, 25 aa, Artificial Sequence
  Cyclic GFR-binding peptide
EYKFKIIQQKDNLYLMSIPEMKTPT

SEQ ID NO: 83698 - protein, 33 aa, Artificial Sequence
  Cyclic GFR-binding peptide
  MOD_RES (27)..(28): Xaa is C or S
MPIKGYVKPKRGVFYLINIPSLAQPVXXPAASA

SEQ ID NO: 83699 - protein, 29 aa, Artificial Sequence
  Cyclic GFR-binding peptide
  MOD_RES (28)..(29): Xaa is C or S
MNRHKRLIVNSSDDYYLVSTASLQTPAXX

SEQ ID NO: 83700 - protein, 32 aa, Artificial Sequence; identical to SEQ ID NO: 1300
  Cyclic GFR-binding peptide
  MOD_RES (29)..(30): Xaa is C or S

SEQ ID NO: 83701 - protein, 24 aa, Artificial Sequence
  Cyclic GFR-binding peptide
RHKRLTPVGMDDYYLVSTASLKTP

SEQ ID NO: 83702 - protein, 34 aa, Artificial Sequence; identical to SEQ ID NO: 29385
  Cyclic GFR-binding peptide
  MOD_RES (28)..(29): Xaa is C or S

SEQ ID NO: 83703 - protein, 39 aa, Artificial Sequence
  Cyclic GFR-binding peptide
  MOD_RES (2)..(4)..(35)..(36): Xaa is C or S
SXKXSRVIMPIKGYVKPKRGVFYLINIPSLAQPVXXPAA

SEQ ID NO: 83704 - protein, 29 aa, Artificial Sequence
  Cyclic GFR-binding peptide
  MOD_RES (27)..(28): Xaa is C or S
NYHYKLIVNSSDDKYLVSIPSLQTPAXXP

SEQ ID NO: 83705 - protein, 36 aa, Artificial Sequence; identical to SEQ ID NO: 1308
  Cyclic GFR-binding peptide
  MOD_RES (1)..(3)..(35): Xaa is C or S

SEQ ID NO: 83706 - protein, 28 aa, Artificial Sequence
  Cyclic GFR-binding peptide
EVVMDPIKGYVVNNAADFYLINIPSLRA

SEQ ID NO: 83707 - protein, 40 aa, Artificial Sequence; identical to SEQ ID NO: 1310
  Cyclic GFR-binding peptide
  MOD_RES (2)..(34): Xaa is C or S

SEQ ID NO: 83708 - protein, 34 aa, Artificial Sequence
  Cyclic GFR-binding peptide
  MOD_RES (29)..(30): Xaa is C or S
VIMPIKGYIKPTKGIFYLINIPSLDQSVXXPSAS

SEQ ID NO: 83709 - protein, 30 aa, Artificial Sequence; identical to SEQ ID NO: 1314
  Cyclic GFR-binding peptide
  MOD_RES (1)..(3): Xaa is C or S

SEQ ID NO: 83710 - protein, 30 aa, Artificial Sequence; identical to SEQ ID NO: 1315
  Cyclic GFR-binding peptide
  MOD_RES (1)..(3): Xaa is C or S

SEQ ID NO: 83711 - protein, 37 aa, Artificial Sequence
  Cyclic GFR-binding peptide
  MOD_RES (1)..(33)..(34): Xaa is C or S
XESVAMGRHKRLYTVVGKDYYLISTASLKTPVXXAKS

SEQ ID NO: 83712 - protein, 28 aa, Artificial Sequence
  Cyclic GFR-binding peptide
  MOD_RES (28)..(28): Xaa is C or S
MGYHYKLYTVVGKDKYLISIPSLKTPVX

SEQ ID NO: 83713 - protein, 35 aa, Artificial Sequence; identical to SEQ ID NO: 29394
  Cyclic GFR-binding peptide
  MOD_RES (32)..(33): Xaa is C or S

SEQ ID NO: 83714 - protein, 30 aa, Artificial Sequence
  Cyclic GFR-binding peptide
  MOD_RES (2)..(4): Xaa is C or S
LXGXEEVIMYHYKLLLVRGNDKYLMSIPST

SEQ ID NO: 83715 - protein, 33 aa, Artificial Sequence; identical to SEQ ID NO: 40975
  Cyclic GFR-binding peptide
  MOD_RES (1)..(3): Xaa is C or S

SEQ ID NO: 83716 - protein, 22 aa, Artificial Sequence
  Cyclic GFR-binding peptide
MPIKGYLLVRGNDFYLMNIPST

SEQ ID NO: 83717 - protein, 27 aa, Artificial Sequence
  Cyclic GFR-binding peptide
EEVIMRHKRLLLVRGNDYYLMSTASTK

SEQ ID NO: 83718 - protein, 38 aa, Artificial Sequence; identical to SEQ ID NO: 29399
  Cyclic GFR-binding peptide
  MOD_RES (2)..(4)..(36)..(37): Xaa is C or S

SEQ ID NO: 83719 - protein, 36 aa, Artificial Sequence
  Cyclic GFR-binding peptide
  MOD_RES (2)..(34)..(35): Xaa is C or S
GXRDVVMGEYKFKIIQQKDNLYLMSIPEMKTPTXXP

SEQ ID NO: 83720 - protein, 36 aa, Artificial Sequence; identical to SEQ ID NO: 1319
  Cyclic GFR-binding peptide
  MOD_RES (32)..(33): Xaa is C or S

SEQ ID NO: 83721 - protein, 32 aa, Artificial Sequence; identical to SEQ ID NO: 29402
  Cyclic GFR-binding peptide
  MOD_RES (28)..(29): Xaa is C or S

SEQ ID NO: 83722 - protein, 27 aa, Artificial Sequence
  Cyclic GFR-binding peptide
MNEYKFKIVNNSSDLYLVSIPELKTPA

SEQ ID NO: 83723 - protein, 28 aa, Artificial Sequence
  Cyclic GFR-binding peptide
MGERHKRLTPVGMDDYYLVSTASLKTPV

SEQ ID NO: 83724 - protein, 33 aa, Artificial Sequence
  Cyclic GFR-binding peptide
  MOD_RES (30)..(31): Xaa is C or S
VVMGRHKRLIIQQKDNYYLMSTASMKTPTXXPG

SEQ ID NO: 83725 - protein, 42 aa, Artificial Sequence; identical to SEQ ID NO: 40983
  Cyclic GFR-binding peptide
  MOD_RES (2)..(4)..(36)..(37): Xaa is C or S

SEQ ID NO: 83726 - protein, 41 aa, Artificial Sequence; identical to SEQ ID NO: 29407
  Cyclic GFR-binding peptide
  MOD_RES (2)..(4)..(37)..(38): Xaa is C or S

SEQ ID NO: 83727 - protein, 24 aa, Artificial Sequence
  Cyclic GFR-binding peptide
MERYKKLVVKDYEDFYLMSIANLE

SEQ ID NO: 83728 - protein, 33 aa, Artificial Sequence; identical to SEQ ID NO: 1328
  Cyclic GFR-binding peptide
  MOD_RES (32)..(33): Xaa is C or S

SEQ ID NO: 83729 - protein, 34 aa, Artificial Sequence
  Cyclic GFR-binding peptide
  MOD_RES (2)..(34): Xaa is C or S
AXSEVTMNYHYKLVVNKNEDKYLISIPSMKEPVX

SEQ ID NO: 83730 - protein, 26 aa, Artificial Sequence
  Cyclic GFR-binding peptide
VVMDRYKKLVVNNASDFYLISIANLR

SEQ ID NO: 83731 - protein, 28 aa, Artificial Sequence
  Cyclic GFR-binding peptide
VVMNPIKGYIVNNSSDFYLVNIPSLKTP

SEQ ID NO: 83732 - protein, 29 aa, Artificial Sequence
  Cyclic GFR-binding peptide
VVMGYHYKLIIQQKDNKYLMSIPSMKTPT

SEQ ID NO: 83733 - protein, 34 aa, Artificial Sequence; identical to SEQ ID NO: 1330
  Cyclic GFR-binding peptide
  MOD_RES (2)..(33)..(34): Xaa is C or S

SEQ ID NO: 83734 - protein, 25 aa, Artificial Sequence
  Cyclic GFR-binding peptide
KVIMPIKGYIKPTKGIFYLINIPSL

SEQ ID NO: 83735 - protein, 28 aa, Artificial Sequence
  Cyclic GFR-binding peptide
  MOD_RES (1)..(1): Xaa is C or S
XGEVVMDRYKKLVVKENEDFYLMSIANL

SEQ ID NO: 83736 - protein, 26 aa, Artificial Sequence
  Cyclic GFR-binding peptide
EVVMDPIKGYVVKENEDFYLMNIPSL

SEQ ID NO: 83737 - protein, 21 aa, Artificial Sequence
  Cyclic GFR-binding peptide
MYHYKLIKPTKGIKYLISIPS

SEQ ID NO: 83738 - protein, 31 aa, Artificial Sequence
  Cyclic GFR-binding peptide
  MOD_RES (31)..(31): Xaa is C or S
EVVMDRHKRLVVNNASDYYLISTASLRTPVX

SEQ ID NO: 83739 - protein, 28 aa, Artificial Sequence
  Cyclic GFR-binding peptide
VSMGERHKRLTPVGMDDYYLVSTASLKT

SEQ ID NO: 83740 - protein, 32 aa, Artificial Sequence
  Cyclic GFR-binding peptide
  MOD_RES (2)..(4): Xaa is C or S
RXGXESVAMGRHKRLYTVVGKDYYLISTASLK

SEQ ID NO: 83741 - protein, 25 aa, Artificial Sequence
  Cyclic GFR-binding peptide
PIKGYVKPKRGVFYLINIPSLAQPV

SEQ ID NO: 83742 - protein, 22 aa, Artificial Sequence
  Cyclic GFR-binding peptide
MNRYKKLVVNKNEDFYLISIAN

SEQ ID NO: 83743 - protein, 32 aa, Artificial Sequence
  Cyclic GFR-binding peptide
  MOD_RES (28)..(29): Xaa is C or S
IMPIKGYVKPKRGVFYLINIPSLAQPVXXPAA

SEQ ID NO: 83744 - protein, 30 aa, Artificial Sequence
  Cyclic GFR-binding peptide
  MOD_RES (2)..(4): Xaa is C or S
RXGXSEVVMDEYKFKVVNNASDLYLISIPE

SEQ ID NO: 83745 - protein, 34 aa, Artificial Sequence; identical to SEQ ID NO: 1343
  Cyclic GFR-binding peptide
  MOD_RES (30)..(31): Xaa is C or S

SEQ ID NO: 83746 - protein, 30 aa, Artificial Sequence; identical to SEQ ID NO: 1344
  Cyclic GFR-binding peptide

SEQ ID NO: 83747 - protein, 25 aa, Artificial Sequence
  Cyclic GFR-binding peptide
RYKKLVVKENEDFYLMSIANLETPV

SEQ ID NO: 83748 - protein, 23 aa, Artificial Sequence
  Cyclic GFR-binding peptide
MYHYKLVKPKRGVKYLISIPSLA

SEQ ID NO: 83749 - protein, 30 aa, Artificial Sequence; identical to SEQ ID NO: 1349
  Cyclic GFR-binding peptide
  MOD_RES (29)..(30): Xaa is C or S

SEQ ID NO: 83750 - protein, 35 aa, Artificial Sequence; identical to SEQ ID NO: 41016
  Cyclic GFR-binding peptide
  MOD_RES (31)..(32): Xaa is C or S

SEQ ID NO: 83751 - protein, 31 aa, Artificial Sequence; identical to SEQ ID NO: 11922
  Cyclic GFR-binding peptide
  MOD_RES (29)..(30): Xaa is C or S

SEQ ID NO: 83752 - protein, 29 aa, Artificial Sequence
  Cyclic GFR-binding peptide
  MOD_RES (27)..(28): Xaa is C or S
DRYKKLVVNNAADFYLISIANLRAPVXXS

SEQ ID NO: 83753 - protein, 32 aa, Artificial Sequence; identical to SEQ ID NO: 41022
  Cyclic GFR-binding peptide
  MOD_RES (26)..(27): Xaa is C or S

SEQ ID NO: 83754 - protein, 27 aa, Artificial Sequence
  Cyclic GFR-binding peptide
VIMPIKGYIKPTKGIFYLINIPSLDQS

SEQ ID NO: 83755 - protein, 39 aa, Artificial Sequence; identical to SEQ ID NO: 41024
  Cyclic GFR-binding peptide
  MOD_RES (2)..(34)..(35): Xaa is C or S

SEQ ID NO: 83756 - protein, 26 aa, Artificial Sequence
  Cyclic GFR-binding peptide
NEYKFKIVNSSDDLYLVSIPELKTPA

SEQ ID NO: 83757 - protein, 26 aa, Artificial Sequence
  Cyclic GFR-binding peptide
VVMPIKGYVKPTRGVFYLINIPSLDQ

SEQ ID NO: 83758 - protein, 25 aa, Artificial Sequence
  Cyclic GFR-binding peptide
EVVMDRYKKLVVKENEDFYLMSIAN

SEQ ID NO: 83759 - protein, 34 aa, Artificial Sequence; identical to SEQ ID NO: 1363
  Cyclic GFR-binding peptide
  MOD_RES (30)..(31): Xaa is C or S

SEQ ID NO: 83760 - protein, 33 aa, Artificial Sequence; identical to SEQ ID NO: 1365
  Cyclic GFR-binding peptide
  MOD_RES (32)..(33): Xaa is C or S

SEQ ID NO: 83761 - protein, 28 aa, Artificial Sequence
  Cyclic GFR-binding peptide
  MOD_RES (26)..(26): Xaa is C or S
PIKGYIVNSSDDFYLVNIPSLKTPAXTP

SEQ ID NO: 83762 - protein, 31 aa, Artificial Sequence
  Cyclic GFR-binding peptide
  MOD_RES (29)..(30): Xaa is C or S
VIMPIKGYVKPKRGVFYLINIPSLAQPVXXP

SEQ ID NO: 83763 - protein, 30 aa, Artificial Sequence; identical to SEQ ID NO: 29450
  Cyclic GFR-binding peptide
  MOD_RES (1)..(1): Xaa is C or S

SEQ ID NO: 83764 - protein, 29 aa, Artificial Sequence
  Cyclic GFR-binding peptide
  MOD_RES (27)..(28): Xaa is C or S
MYHYKLLLVRGNDKYLMSIPSTKVPAXXT

SEQ ID NO: 83765 - protein, 39 aa, Artificial Sequence; identical to SEQ ID NO: 1370
  Cyclic GFR-binding peptide
  MOD_RES (1)..(3)..(35): Xaa is C or S

SEQ ID NO: 83766 - protein, 40 aa, Artificial Sequence; identical to SEQ ID NO: 29454
  Cyclic GFR-binding peptide
  MOD_RES (1)..(3)..(34)..(35): Xaa is C or S

SEQ ID NO: 83767 - protein, 38 aa, Artificial Sequence
  Cyclic GFR-binding peptide
  MOD_RES (32)..(33): Xaa is C or S
RDVVMGRHKRLIIQQKDNYYLMSTASMKTPTXXPGASG

SEQ ID NO: 83768 - protein, 28 aa, Artificial Sequence
  Cyclic GFR-binding peptide
  MOD_RES (1)..(1): Xaa is C or S
XGEVVMEEYKFKVVKDYEDLYLMSIPEL

SEQ ID NO: 83769 - protein, 32 aa, Artificial Sequence; identical to SEQ ID NO: 29459
  Cyclic GFR-binding peptide
  MOD_RES (2)..(2): Xaa is C or S

SEQ ID NO: 83770 - protein, 35 aa, Artificial Sequence; identical to SEQ ID NO: 29460
  Cyclic GFR-binding peptide
  MOD_RES (1)..(3)..(35): Xaa is C or S

SEQ ID NO: 83771 - protein, 28 aa, Artificial Sequence
  Cyclic GFR-binding peptide
  MOD_RES (27)..(27): Xaa is C or S
NRHKRLIVNSSDDYYLVSTASLKTPAXT

SEQ ID NO: 83772 - protein, 32 aa, Artificial Sequence; identical to SEQ ID NO: 29461
  Cyclic GFR-binding peptide
  MOD_RES (2)..(4): Xaa is C or S

SEQ ID NO: 83773 - protein, 27 aa, Artificial Sequence
  Cyclic GFR-binding peptide
VVMDRHKRLVVNNAADYYLISTASLRA

SEQ ID NO: 83774 - protein, 30 aa, Artificial Sequence; identical to SEQ ID NO: 29464
  Cyclic GFR-binding peptide
  MOD_RES (30)..(30): Xaa is C or S

SEQ ID NO: 83775 - protein, 32 aa, Artificial Sequence; identical to SEQ ID NO: 1380
  Cyclic GFR-binding peptide
  MOD_RES (27)..(28): Xaa is C or S

SEQ ID NO: 83776 - protein, 29 aa, Artificial Sequence
  Cyclic GFR-binding peptide
  MOD_RES (26)..(27): Xaa is C or S
EYKFKVVNNAADLYLISIPELRAPVXXSA

SEQ ID NO: 83777 - protein, 32 aa, Artificial Sequence; identical to SEQ ID NO: 29467
  Cyclic GFR-binding peptide
  MOD_RES (1)..(3): Xaa is C or S

SEQ ID NO: 83778 - protein, 20 aa, Artificial Sequence
  Cyclic GFR-binding peptide
RYKKLVVNKNEDFYLISIAN

SEQ ID NO: 83779 - protein, 39 aa, Artificial Sequence
  Cyclic GFR-binding peptide
  MOD_RES (2)..(4)..(36)..(37): Xaa is C or S
RXAXSEVTMNRHKRLVVNKNEDYYLISTASMKEPVXXPE

SEQ ID NO: 83780 - protein, 28 aa, Artificial Sequence
  Cyclic GFR-binding peptide
  MOD_RES (28)..(28): Xaa is C or S
MNYHYKLVVNKNEDKYLISIPSMKEPVX

SEQ ID NO: 83781 - protein, 36 aa, Artificial Sequence; identical to SEQ ID NO: 29471
  Cyclic GFR-binding peptide
  MOD_RES (31)..(32): Xaa is C or S

SEQ ID NO: 83782 - protein, 28 aa, Artificial Sequence
  Cyclic GFR-binding peptide
VIMEYKFKIKPTKGILYLISIPELDQSV

SEQ ID NO: 83783 - protein, 31 aa, Artificial Sequence; identical to SEQ ID NO: 1394
  Cyclic GFR-binding peptide
  MOD_RES (1)..(1): Xaa is C or S

SEQ ID NO: 83784 - protein, 28 aa, Artificial Sequence
  Cyclic GFR-binding peptide
  MOD_RES (26)..(27): Xaa is C or S
RYKKLVKPKRGVFYLISIANLAQPVXXP

SEQ ID NO: 83785 - protein, 29 aa, Artificial Sequence
  Cyclic GFR-binding peptide
  MOD_RES (27)..(28): Xaa is C or S
EYHYKLVVKDYEDKYLMSIPSLETPVXXA

SEQ ID NO: 83786 - protein, 33 aa, Artificial Sequence; identical to SEQ ID NO: 41065
  Cyclic GFR-binding peptide
  MOD_RES (30)..(31): Xaa is C or S

SEQ ID NO: 83787 - protein, 29 aa, Artificial Sequence
  Cyclic GFR-binding peptide
  MOD_RES (1)..(1): Xaa is C or S
XGEVVMEYHYKLVVKDYEDKYLMSIPSLE

SEQ ID NO: 83788 - protein, 34 aa, Artificial Sequence; identical to SEQ ID NO: 1399
  Cyclic GFR-binding peptide
  MOD_RES (30)..(31): Xaa is C or S

SEQ ID NO: 83789 - protein, 28 aa, Artificial Sequence
  Cyclic GFR-binding peptide
SKVIMYHYKLIKPTKGIKYLISIPSLDQ

SEQ ID NO: 83790 - protein, 38 aa, Artificial Sequence
  Cyclic GFR-binding peptide
  MOD_RES (2)..(4)..(35)..(36): Xaa is C or S
SXKXSKVIMPIKGYIKPTKGIFYLINIPSLDQSVXXPS

SEQ ID NO: 83791 - protein, 36 aa, Artificial Sequence; identical to SEQ ID NO: 1401
  Cyclic GFR-binding peptide
  MOD_RES (1)..(3)..(34)..(35): Xaa is C or S

SEQ ID NO: 83792 - protein, 28 aa, Artificial Sequence
  Cyclic GFR-binding peptide
  MOD_RES (28)..(28): Xaa is C or S
MGRHKRLYTVVGKDYYLISTASLKTPVX

SEQ ID NO: 83793 - protein, 41 aa, Artificial Sequence; identical to SEQ ID NO: 41069
  Cyclic GFR-binding peptide
  MOD_RES (2)..(4)..(37)..(38): Xaa is C or S

SEQ ID NO: 83794 - protein, 36 aa, Artificial Sequence
  Cyclic GFR-binding peptide
  MOD_RES (2)..(4)..(35)..(36): Xaa is C or S
LXGXEEVIMRHKRLLLVRGNDYYLMSTASTKVPAXX

SEQ ID NO: 83795 - protein, 25 aa, Artificial Sequence
  Cyclic GFR-binding peptide
EVIMPIKGYLLVRGNDFYLMNIPST

SEQ ID NO: 83796 - protein, 41 aa, Artificial Sequence; identical to SEQ ID NO: 41076
  Cyclic GFR-binding peptide
  MOD_RES (2)..(4)..(36)..(37): Xaa is C or S

SEQ ID NO: 83797 - protein, 37 aa, Artificial Sequence; identical to SEQ ID NO: 1408
  Cyclic GFR-binding peptide
  MOD_RES (1)..(33)..(34): Xaa is C or S

SEQ ID NO: 83798 - protein, 37 aa, Artificial Sequence; identical to SEQ ID NO: 1409
  Cyclic GFR-binding peptide
  MOD_RES (2)..(35)..(36): Xaa is C or S

SEQ ID NO: 83799 - protein, 35 aa, Artificial Sequence; identical to SEQ ID NO: 29495
  Cyclic GFR-binding peptide
  MOD_RES (31)..(32): Xaa is C or S

SEQ ID NO: 83800 - protein, 29 aa, Artificial Sequence
  Cyclic GFR-binding peptide
  MOD_RES (2)..(4): Xaa is C or S
SXKXSKVVMEYKFKVKPTRGVLYLISIPE

SEQ ID NO: 83801 - protein, 34 aa, Artificial Sequence
  Cyclic GFR-binding peptide
  MOD_RES (32)..(33): Xaa is C or S
SEVTMNYHYKLVVNKNEDKYLISIPSMKEPVXXP

SEQ ID NO: 83802 - protein, 35 aa, Artificial Sequence; identical to SEQ ID NO: 41085
  Cyclic GFR-binding peptide
  MOD_RES (31)..(32): Xaa is C or S

SEQ ID NO: 83803 - protein, 30 aa, Artificial Sequence; identical to SEQ ID NO: 41087
  Cyclic GFR-binding peptide
  MOD_RES (1)..(1): Xaa is C or S

SEQ ID NO: 83804 - protein, 39 aa, Artificial Sequence
  Cyclic GFR-binding peptide
  MOD_RES (1)..(33)..(34): Xaa is C or S
XSEVTMNPIKGYVVNKNEDFYLINIPSMKEPVXXPEPIG

SEQ ID NO: 83805 - protein, 27 aa, Artificial Sequence
  Cyclic GFR-binding peptide
  MOD_RES (27)..(27): Xaa is C or S
NYHYKLIVNSSDDKYLVSIPSLKTPAX

SEQ ID NO: 83806 - protein, 27 aa, Artificial Sequence
  Cyclic GFR-binding peptide
SRVIMRYKKLVKPKRGVFYLISIANLA

SEQ ID NO: 83807 - protein, 40 aa, Artificial Sequence
  Cyclic GFR-binding peptide
  MOD_RES (1)..(3)..(35)..(36): Xaa is C or S
XGXAEVVMDRHKRLVVNNAADYYLISTASLRAPVXXSAPA

SEQ ID NO: 83808 - protein, 34 aa, Artificial Sequence
  Cyclic GFR-binding peptide
  MOD_RES (2)..(34): Xaa is C or S
GXRDVVMGYHYKLIIQQKDNKYLMSIPSMKTPTX

SEQ ID NO: 83809 - protein, 33 aa, Artificial Sequence; identical to SEQ ID NO: 1417
  Cyclic GFR-binding peptide
  MOD_RES (31)..(32): Xaa is C or S

SEQ ID NO: 83810 - protein, 29 aa, Artificial Sequence
  Cyclic GFR-binding peptide
  MOD_RES (29)..(29): Xaa is C or S
VMNRYKKLIVNSSDDFYLVSIANLQTPAX

SEQ ID NO: 83811 - protein, 29 aa, Artificial Sequence
  Cyclic GFR-binding peptide
  MOD_RES (2)..(2): Xaa is C or S
KXSKVIMEYKFKIKPTKGILYLISIPELD

SEQ ID NO: 83812 - protein, 29 aa, Artificial Sequence
  Cyclic GFR-binding peptide
  MOD_RES (27)..(28): Xaa is C or S
MPIKGYVKPKRGVFYLINIPSLAQPVXXP

SEQ ID NO: 83813 - protein, 31 aa, Artificial Sequence; identical to SEQ ID NO: 1421
  Cyclic GFR-binding peptide
  MOD_RES (1)..(3): Xaa is C or S

SEQ ID NO: 83814 - protein, 32 aa, Artificial Sequence
  Cyclic GFR-binding peptide
  MOD_RES (26)..(27): Xaa is C or S
RHKRLVVNKNEDYYLISTASMKEPVXXPEPIG

SEQ ID NO: 83815 - protein, 32 aa, Artificial Sequence
  Cyclic GFR-binding peptide
  MOD_RES (31)..(32): Xaa is C or S
SVAMGRHKRLYTVVGKDYYLISTASLKTPVXX

SEQ ID NO: 83816 - protein, 29 aa, Artificial Sequence
  Cyclic GFR-binding peptide
  MOD_RES (28)..(29): Xaa is C or S
MNYHYKLIVNSSDDKYLVSIPSLQTPAXX

SEQ ID NO: 83817 - protein, 35 aa, Artificial Sequence; identical to SEQ ID NO: 75524
  Cyclic GFR-binding peptide
  MOD_RES (31)..(32): Xaa is C or S

SEQ ID NO: 83818 - protein, 34 aa, Artificial Sequence; identical to SEQ ID NO: 41099
  Cyclic GFR-binding peptide
  MOD_RES (33)..(34): Xaa is C or S

SEQ ID NO: 83819 - protein, 35 aa, Artificial Sequence; identical to SEQ ID NO: 41102
  Cyclic GFR-binding peptide
  MOD_RES (1)..(33)..(34): Xaa is C or S

SEQ ID NO: 83820 - protein, 31 aa, Artificial Sequence
  Cyclic GFR-binding peptide
  MOD_RES (28)..(29): Xaa is C or S
IMPIKGYVKPKRGVFYLINIPSLAQPVXXPA

SEQ ID NO: 83821 - protein, 39 aa, Artificial Sequence; identical to SEQ ID NO: 29517
  Cyclic GFR-binding peptide
  MOD_RES (2)..(4)..(36)..(37): Xaa is C or S

SEQ ID NO: 83822 - protein, 29 aa, Artificial Sequence
  Cyclic GFR-binding peptide
  MOD_RES (27)..(28): Xaa is C or S
NPIKGYIVNSSDDFYLVNIPSLKTPAXXP

SEQ ID NO: 83823 - protein, 35 aa, Artificial Sequence
  Cyclic GFR-binding peptide
  MOD_RES (1)..(33)..(34): Xaa is C or S
XRDVVMGEYKFKIIQQKDNLYLMSIPEMKTPTXXP

SEQ ID NO: 83824 - protein, 33 aa, Artificial Sequence; identical to SEQ ID NO: 75525
  Cyclic GFR-binding peptide
  MOD_RES (2)..(33): Xaa is C or S

SEQ ID NO: 83825 - protein, 41 aa, Artificial Sequence; identical to SEQ ID NO: 1427
  Cyclic GFR-binding peptide
  MOD_RES (1)..(3)..(35)..(36): Xaa is C or S

SEQ ID NO: 83826 - protein, 39 aa, Artificial Sequence
  Cyclic GFR-binding peptide
  MOD_RES (2)..(34)..(35): Xaa is C or S
AXSEVTMNEYKFKVVNKNEDLYLISIPEMKEPVXXPEPI

SEQ ID NO: 83827 - protein, 24 aa, Artificial Sequence
  Cyclic GFR-binding peptide
PIKGYVVNNAADFYLINIPSLRAP

SEQ ID NO: 83828 - protein, 37 aa, Artificial Sequence; identical to SEQ ID NO: 1431
  Cyclic GFR-binding peptide
  MOD_RES (1)..(33)..(34): Xaa is C or S

SEQ ID NO: 83829 - protein, 33 aa, Artificial Sequence; identical to SEQ ID NO: 1433
  Cyclic GFR-binding peptide
  MOD_RES (1)..(3): Xaa is C or S

SEQ ID NO: 83830 - protein, 34 aa, Artificial Sequence; identical to SEQ ID NO: 29522
  Cyclic GFR-binding peptide
  MOD_RES (31)..(32): Xaa is C or S

SEQ ID NO: 83831 - protein, 32 aa, Artificial Sequence; identical to SEQ ID NO: 41118
  Cyclic GFR-binding peptide
  MOD_RES (31)..(32): Xaa is C or S

SEQ ID NO: 83832 - protein, 34 aa, Artificial Sequence
  Cyclic GFR-binding peptide
  MOD_RES (31)..(32): Xaa is C or S
EEVIMRHKRLLLVRGNDYYLMSTASTKVPAXXTS

SEQ ID NO: 83833 - protein, 34 aa, Artificial Sequence; identical to SEQ ID NO: 1437
  Cyclic GFR-binding peptide
  MOD_RES (2)..(4): Xaa is C or S

SEQ ID NO: 83834 - protein, 26 aa, Artificial Sequence
  Cyclic GFR-binding peptide
VVMNPIKGYIVNNSSDFYLVNIPSLK

SEQ ID NO: 83835 - protein, 27 aa, Artificial Sequence
  Cyclic GFR-binding peptide
GEVVMEPIKGYVVKDYEDFYLMNIPSL

SEQ ID NO: 83836 - protein, 32 aa, Artificial Sequence; identical to SEQ ID NO: 41126
  Cyclic GFR-binding peptide

SEQ ID NO: 83837 - protein, 29 aa, Artificial Sequence
  Cyclic GFR-binding peptide
EVVMDPIKGYVVNNAADFYLINIPSLRAP

SEQ ID NO: 83838 - protein, 26 aa, Artificial Sequence
  Cyclic GFR-binding peptide
VMERHKRLVVKDYEDYYLMSTASLET

SEQ ID NO: 83839 - protein, 32 aa, Artificial Sequence
  Cyclic GFR-binding peptide
  MOD_RES (2)..(2): Xaa is C or S
KXSRVIMPIKGYVKPKRGVFYLINIPSLAQPV

SEQ ID NO: 83840 - protein, 35 aa, Artificial Sequence; identical to SEQ ID NO: 41131
  Cyclic GFR-binding peptide
  MOD_RES (2)..(34)..(35): Xaa is C or S

SEQ ID NO: 83841 - protein, 32 aa, Artificial Sequence
  Cyclic GFR-binding peptide
  MOD_RES (31)..(32): Xaa is C or S
EEVIMYHYKLLLVRGNDKYLMSIPSTKVPAXX

SEQ ID NO: 83842 - protein, 35 aa, Artificial Sequence; identical to SEQ ID NO: 1444
  Cyclic GFR-binding peptide
  MOD_RES (2)..(4): Xaa is C or S

SEQ ID NO: 83843 - protein, 35 aa, Artificial Sequence
  Cyclic GFR-binding peptide
  MOD_RES (30)..(31): Xaa is C or S
VVMGRHKRLIIQQKDNYYLMSTASMKTPTXXPGAS

SEQ ID NO: 83844 - protein, 33 aa, Artificial Sequence; identical to SEQ ID NO: 1447
  Cyclic GFR-binding peptide
  MOD_RES (32)..(33): Xaa is C or S

SEQ ID NO: 83845 - protein, 35 aa, Artificial Sequence; identical to SEQ ID NO: 1450
  Cyclic GFR-binding peptide
  MOD_RES (32)..(33): Xaa is C or S

SEQ ID NO: 83846 - protein, 32 aa, Artificial Sequence; identical to SEQ ID NO: 1452
  Cyclic GFR-binding peptide
  MOD_RES (26)..(27): Xaa is C or S

SEQ ID NO: 83847 - protein, 29 aa, Artificial Sequence
  Cyclic GFR-binding peptide
  MOD_RES (2)..(2): Xaa is C or S
GXGEVVMEYHYKLVVKDYEDKYLMSIPSL

SEQ ID NO: 83848 - protein, 36 aa, Artificial Sequence; identical to SEQ ID NO: 1457
  Cyclic GFR-binding peptide
  MOD_RES (32)..(33): Xaa is C or S

SEQ ID NO: 83849 - protein, 31 aa, Artificial Sequence; identical to SEQ ID NO: 12021
  Cyclic GFR-binding peptide
  MOD_RES (30)..(31): Xaa is C or S

SEQ ID NO: 83850 - protein, 33 aa, Artificial Sequence
  Cyclic GFR-binding peptide
  MOD_RES (29)..(30): Xaa is C or S
TMNYHYKLVVNKNEDKYLISIPSMKEPVXXPEP

SEQ ID NO: 83851 - protein, 30 aa, Artificial Sequence
  Cyclic GFR-binding peptide
  MOD_RES (27)..(28): Xaa is C or S
GRHKRLIIQQKDNYYLMSTASMKTPTXXPG

SEQ ID NO: 83852 - protein, 34 aa, Artificial Sequence; identical to SEQ ID NO: 1461
  Cyclic GFR-binding peptide
  MOD_RES (31)..(32): Xaa is C or S

SEQ ID NO: 83853 - protein, 25 aa, Artificial Sequence
  Cyclic GFR-binding peptide
VMPIKGYVKPTRGVFYLINIPSLDQ

SEQ ID NO: 83854 - protein, 39 aa, Artificial Sequence; identical to SEQ ID NO: 1464
  Cyclic GFR-binding peptide
  MOD_RES (1)..(33)..(34): Xaa is C or S

SEQ ID NO: 83855 - protein, 24 aa, Artificial Sequence
  Cyclic GFR-binding peptide
EYKFKIVNSSDDLYLVSIPELQTP

SEQ ID NO: 83856 - protein, 27 aa, Artificial Sequence
  Cyclic GFR-binding peptide
  MOD_RES (1)..(1): Xaa is C or S
XSEVVMDYHYKLVVNNASDKYLISIPS

SEQ ID NO: 83857 - protein, 37 aa, Artificial Sequence; identical to SEQ ID NO: 41147
  Cyclic GFR-binding peptide
  MOD_RES (1)..(3)..(35)..(36): Xaa is C or S

SEQ ID NO: 83858 - protein, 34 aa, Artificial Sequence; identical to SEQ ID NO: 1467
  Cyclic GFR-binding peptide
  MOD_RES (2)..(34): Xaa is C or S

SEQ ID NO: 83859 - protein, 37 aa, Artificial Sequence; identical to SEQ ID NO: 1468
  Cyclic GFR-binding peptide
  MOD_RES (33)..(34): Xaa is C or S

SEQ ID NO: 83860 - protein, 34 aa, Artificial Sequence; identical to SEQ ID NO: 1470
  Cyclic GFR-binding peptide
  MOD_RES (1)..(33)..(34): Xaa is C or S

SEQ ID NO: 83861 - protein, 32 aa, Artificial Sequence; identical to SEQ ID NO: 29555
  Cyclic GFR-binding peptide
  MOD_RES (31)..(32): Xaa is C or S

SEQ ID NO: 83862 - protein, 36 aa, Artificial Sequence; identical to SEQ ID NO: 1472
  Cyclic GFR-binding peptide
  MOD_RES (2)..(33)..(34): Xaa is C or S

SEQ ID NO: 83863 - protein, 35 aa, Artificial Sequence; identical to SEQ ID NO: 41152
  Cyclic GFR-binding peptide
  MOD_RES (30)..(31): Xaa is C or S

SEQ ID NO: 83864 - protein, 23 aa, Artificial Sequence
  Cyclic GFR-binding peptide
NRYKKLVVNKNEDFYLISIANMK

SEQ ID NO: 83865 - protein, 27 aa, Artificial Sequence
  Cyclic GFR-binding peptide
  MOD_RES (26)..(27): Xaa is C or S
PIKGYVVKDYEDFYLMNIPSLETPVXX

SEQ ID NO: 83866 - protein, 36 aa, Artificial Sequence; identical to SEQ ID NO: 1476
  Cyclic GFR-binding peptide
  MOD_RES (1)..(33): Xaa is C or S

SEQ ID NO: 83867 - protein, 31 aa, Artificial Sequence; identical to SEQ ID NO: 1477
  Cyclic GFR-binding peptide
  MOD_RES (27)..(27): Xaa is C or S

SEQ ID NO: 83868 - protein, 33 aa, Artificial Sequence; identical to SEQ ID NO: 41157
  Cyclic GFR-binding peptide
  MOD_RES (2)..(4): Xaa is C or S

SEQ ID NO: 83869 - protein, 29 aa, Artificial Sequence
  Cyclic GFR-binding peptide
  MOD_RES (1)..(3): Xaa is C or S
XKXSKVVMRHKRLVKPTRGVYYLISTASL

SEQ ID NO: 83870 - protein, 32 aa, Artificial Sequence; identical to SEQ ID NO: 1479
  Cyclic GFR-binding peptide
  MOD_RES (29)..(30): Xaa is C or S

SEQ ID NO: 83871 - protein, 28 aa, Artificial Sequence
  Cyclic GFR-binding peptide
VVMDRYKKLVVNNASDFYLISIANLRTP

SEQ ID NO: 83872 - protein, 41 aa, Artificial Sequence
  Cyclic GFR-binding peptide
  MOD_RES (2)..(4)..(36)..(37): Xaa is C or S
RXAXSEVTMNYHYKLVVNKNEDKYLISIPSMKEPVXXPEPI

SEQ ID NO: 83873 - protein, 32 aa, Artificial Sequence
  Cyclic GFR-binding peptide
  MOD_RES (26)..(27): Xaa is C or S
EYKFKLLVRGNDLYLMSIPETKVPAXXTSPVR

SEQ ID NO: 83874 - protein, 33 aa, Artificial Sequence; identical to SEQ ID NO: 29565
  Cyclic GFR-binding peptide
  MOD_RES (32)..(33): Xaa is C or S

SEQ ID NO: 83875 - protein, 24 aa, Artificial Sequence
  Cyclic GFR-binding peptide
VMGYHYKLIIQQKDNKYLMSIPSM

SEQ ID NO: 83876 - protein, 22 aa, Artificial Sequence
  Cyclic GFR-binding peptide
GRYKKLYTVVGKDFYLISIANL

SEQ ID NO: 83877 - protein, 35 aa, Artificial Sequence; identical to SEQ ID NO: 1483
  Cyclic GFR-binding peptide
  MOD_RES (32)..(33): Xaa is C or S

SEQ ID NO: 83878 - protein, 35 aa, Artificial Sequence
  Cyclic GFR-binding peptide
  MOD_RES (2)..(4)..(35): Xaa is C or S
SXKXSRVIMPIKGYVKPKRGVFYLINIPSLAQPVX

SEQ ID NO: 83879 - protein, 26 aa, Artificial Sequence
  Cyclic GFR-binding peptide
GEVVMERHKRLVVKDYEDYYLMSTAS

SEQ ID NO: 83880 - protein, 27 aa, Artificial Sequence
  Cyclic GFR-binding peptide
TMNEYKFKVVNKNEDLYLISIPEMKEP

SEQ ID NO: 83881 - protein, 36 aa, Artificial Sequence; identical to SEQ ID NO: 41164
  Cyclic GFR-binding peptide
  MOD_RES (2)..(4)..(36): Xaa is C or S

SEQ ID NO: 83882 - protein, 28 aa, Artificial Sequence
  Cyclic GFR-binding peptide
  MOD_RES (28)..(28): Xaa is C or S
MDEYKFKVVNNASDLYLISIPELRTPVX

SEQ ID NO: 83883 - protein, 29 aa, Artificial Sequence
  Cyclic GFR-binding peptide
  MOD_RES (1)..(3): Xaa is C or S
XAXSEVTMNEYKFKVVNKNEDLYLISIPE

SEQ ID NO: 83884 - protein, 34 aa, Artificial Sequence; identical to SEQ ID NO: 1492
  Cyclic GFR-binding peptide
  MOD_RES (1)..(3)..(34): Xaa is C or S

SEQ ID NO: 83885 - protein, 36 aa, Artificial Sequence; identical to SEQ ID NO: 41169
  Cyclic GFR-binding peptide
  MOD_RES (2)..(4)..(36): Xaa is C or S

SEQ ID NO: 83886 - protein, 27 aa, Artificial Sequence
  Cyclic GFR-binding peptide
  MOD_RES (27)..(27): Xaa is C or S
DRHKRLVVNNAADYYLISTASLRAPVX

SEQ ID NO: 83887 - protein, 29 aa, Artificial Sequence
  Cyclic GFR-binding peptide
  MOD_RES (1)..(1): Xaa is C or S
XESVAMGRHKRLYTVVGKDYYLISTASLK

SEQ ID NO: 83888 - protein, 23 aa, Artificial Sequence
  Cyclic GFR-binding peptide
MNEYKFKIVNNSSDLYLVSIPEL

SEQ ID NO: 83889 - protein, 39 aa, Artificial Sequence
  Cyclic GFR-binding peptide
  MOD_RES (2)..(4)..(36)..(37): Xaa is C or S
SXGXRDVVMGEYKFKIIQQKDNLYLMSIPEMKTPTXXPG

SEQ ID NO: 83890 - protein, 29 aa, Artificial Sequence
  Cyclic GFR-binding peptide
  MOD_RES (26)..(27): Xaa is C or S
EYKFKVVNKNEDLYLISIPEMKEPVXXPE

SEQ ID NO: 83891 - protein, 32 aa, Artificial Sequence; identical to SEQ ID NO: 12060
  Cyclic GFR-binding peptide
  MOD_RES (28)..(29): Xaa is C or S

SEQ ID NO: 83892 - protein, 33 aa, Artificial Sequence; identical to SEQ ID NO: 1496
  Cyclic GFR-binding peptide
  MOD_RES (32)..(33): Xaa is C or S

SEQ ID NO: 83893 - protein, 31 aa, Artificial Sequence
  Cyclic GFR-binding peptide
  MOD_RES (26)..(27): Xaa is C or S
PIKGYVKPKRGVFYLINIPSLAQPVXXPAAS

SEQ ID NO: 83894 - protein, 42 aa, Artificial Sequence; identical to SEQ ID NO: 29577
  Cyclic GFR-binding peptide
  MOD_RES (1)..(3)..(36)..(37): Xaa is C or S

SEQ ID NO: 83895 - protein, 34 aa, Artificial Sequence; identical to SEQ ID NO: 1500
  Cyclic GFR-binding peptide
  MOD_RES (2)..(4): Xaa is C or S

SEQ ID NO: 83896 - protein, 40 aa, Artificial Sequence; identical to SEQ ID NO: 41177
  Cyclic GFR-binding peptide
  MOD_RES (2)..(34)..(35): Xaa is C or S

SEQ ID NO: 83897 - protein, 36 aa, Artificial Sequence; identical to SEQ ID NO: 1501
  Cyclic GFR-binding peptide
  MOD_RES (1)..(3)..(34)..(35): Xaa is C or S

SEQ ID NO: 83898 - protein, 29 aa, Artificial Sequence
  Cyclic GFR-binding peptide
DVVMGRYKKLIIQQKDNFYLMSIANMKTP

SEQ ID NO: 83899 - protein, 30 aa, Artificial Sequence; identical to SEQ ID NO: 1503
  Cyclic GFR-binding peptide
  MOD_RES (30)..(30): Xaa is C or S

SEQ ID NO: 83900 - protein, 31 aa, Artificial Sequence
  Cyclic GFR-binding peptide
  MOD_RES (1)..(3): Xaa is C or S
XGXRDVVMGEYKFKIIQQKDNLYLMSIPEMK

SEQ ID NO: 83901 - protein, 32 aa, Artificial Sequence
  Cyclic GFR-binding peptide
  MOD_RES (1)..(3): Xaa is C or S
XKXSRVIMPIKGYVKPKRGVFYLINIPSLAQP

SEQ ID NO: 83902 - protein, 33 aa, Artificial Sequence; identical to SEQ ID NO: 1505
  Cyclic GFR-binding peptide
  MOD_RES (31)..(32): Xaa is C or S

SEQ ID NO: 83903 - protein, 34 aa, Artificial Sequence; identical to SEQ ID NO: 1506
  Cyclic GFR-binding peptide
  MOD_RES (28)..(29): Xaa is C or S

SEQ ID NO: 83904 - protein, 34 aa, Artificial Sequence; identical to SEQ ID NO: 29588
  Cyclic GFR-binding peptide
  MOD_RES (28)..(29): Xaa is C or S

SEQ ID NO: 83905 - protein, 35 aa, Artificial Sequence
  Cyclic GFR-binding peptide
  MOD_RES (1)..(3)..(35): Xaa is C or S
XGXRDVVMGRHKRLIIQQKDNYYLMSTASMKTPTX

SEQ ID NO: 83906 - protein, 32 aa, Artificial Sequence; identical to SEQ ID NO: 1507
  Cyclic GFR-binding peptide
  MOD_RES (1)..(32): Xaa is C or S

SEQ ID NO: 83907 - protein, 32 aa, Artificial Sequence; identical to SEQ ID NO: 1508
  Cyclic GFR-binding peptide
  MOD_RES (31)..(32): Xaa is C or S

SEQ ID NO: 83908 - protein, 30 aa, Artificial Sequence
  Cyclic GFR-binding peptide
  MOD_RES (27)..(28): Xaa is C or S
NRHKRLVVNKNEDYYLISTASMKEPVXXPE

SEQ ID NO: 83909 - protein, 22 aa, Artificial Sequence
  Cyclic GFR-binding peptide
MNEYKFKIVNNSSDLYLVSIPE

SEQ ID NO: 83910 - protein, 34 aa, Artificial Sequence; identical to SEQ ID NO: 29596
  Cyclic GFR-binding peptide
  MOD_RES (2)..(34): Xaa is C or S

SEQ ID NO: 83911 - protein, 31 aa, Artificial Sequence; identical to SEQ ID NO: 29598
  Cyclic GFR-binding peptide
  MOD_RES (26)..(27): Xaa is C or S

SEQ ID NO: 83912 - protein, 35 aa, Artificial Sequence; identical to SEQ ID NO: 1514
  Cyclic GFR-binding peptide
  MOD_RES (29)..(30): Xaa is C or S

SEQ ID NO: 83913 - protein, 33 aa, Artificial Sequence; identical to SEQ ID NO: 1515
  Cyclic GFR-binding peptide
  MOD_RES (30)..(31): Xaa is C or S

SEQ ID NO: 83914 - protein, 29 aa, Artificial Sequence
  Cyclic GFR-binding peptide
  MOD_RES (2)..(2): Xaa is C or S
KXSRVIMPIKGYVKPKRGVFYLINIPSLA

SEQ ID NO: 83915 - protein, 22 aa, Artificial Sequence
  Cyclic GFR-binding peptide
YHYKLYTVVGKDKYLISIPSLK

SEQ ID NO: 83916 - protein, 34 aa, Artificial Sequence; identical to SEQ ID NO: 1518
  Cyclic GFR-binding peptide
  MOD_RES (29)..(30): Xaa is C or S

SEQ ID NO: 83917 - protein, 31 aa, Artificial Sequence; identical to SEQ ID NO: 29602
  Cyclic GFR-binding peptide
  MOD_RES (27)..(28): Xaa is C or S

SEQ ID NO: 83918 - protein, 28 aa, Artificial Sequence
  Cyclic GFR-binding peptide
  MOD_RES (27)..(28): Xaa is C or S
MPIKGYLLVRGNDFYLMNIPSTKVPAXX

SEQ ID NO: 83919 - protein, 25 aa, Artificial Sequence
  Cyclic GFR-binding peptide
VVMNEYKFKIVNSSDDLYLVSIPEL

SEQ ID NO: 83920 - protein, 35 aa, Artificial Sequence; identical to SEQ ID NO: 41191
  Cyclic GFR-binding peptide
  MOD_RES (2)..(34)..(35): Xaa is C or S

SEQ ID NO: 83921 - protein, 33 aa, Artificial Sequence
  Cyclic GFR-binding peptide
  MOD_RES (2)..(2): Xaa is C or S
AXSEVTMNEYKFKVVNKNEDLYLISIPEMKEPV

SEQ ID NO: 83922 - protein, 36 aa, Artificial Sequence
  Cyclic GFR-binding peptide
  MOD_RES (1)..(33)..(34): Xaa is C or S
XSEVTMNRYKKLVVNKNEDFYLISIANMKEPVXXPE

SEQ ID NO: 83923 - protein, 30 aa, Artificial Sequence
  Cyclic GFR-binding peptide
  MOD_RES (29)..(30): Xaa is C or S
TMNPIKGYVVNKNEDFYLINIPSMKEPVXX

SEQ ID NO: 83924 - protein, 30 aa, Artificial Sequence; identical to SEQ ID NO: 41193
  Cyclic GFR-binding peptide
  MOD_RES (1)..(3): Xaa is C or S

SEQ ID NO: 83925 - protein, 37 aa, Artificial Sequence; identical to SEQ ID NO: 29607
  Cyclic GFR-binding peptide
  MOD_RES (1)..(33)..(34): Xaa is C or S

SEQ ID NO: 83926 - protein, 32 aa, Artificial Sequence; identical to SEQ ID NO: 41205
  Cyclic GFR-binding peptide
  MOD_RES (2)..(4): Xaa is C or S

SEQ ID NO: 83927 - protein, 30 aa, Artificial Sequence
  Cyclic GFR-binding peptide
  MOD_RES (2)..(2): Xaa is C or S
GXRDVVMGRHKRLIIQQKDNYYLMSTASMK

SEQ ID NO: 83928 - protein, 32 aa, Artificial Sequence
  Cyclic GFR-binding peptide
  MOD_RES (26)..(27): Xaa is C or S
YHYKLVVNNASDKYLISIPSLRTPVXXTPPTS

SEQ ID NO: 83929 - protein, 28 aa, Artificial Sequence
  Cyclic GFR-binding peptide
  MOD_RES (1)..(1): Xaa is C or S
XGEVVMERYKKLVVKDYEDFYLMSIANL

SEQ ID NO: 83930 - protein, 28 aa, Artificial Sequence
  Cyclic GFR-binding peptide
  MOD_RES (1)..(1): Xaa is C or S
XRDVVMGYHYKLIIQQKDNKYLMSIPSM

SEQ ID NO: 83931 - protein, 30 aa, Artificial Sequence
  Cyclic GFR-binding peptide
  MOD_RES (26)..(27): Xaa is C or S
RHKRLLLVRGNDYYLMSTASTKVPAXXTSP

SEQ ID NO: 83932 - protein, 28 aa, Artificial Sequence
  Cyclic GFR-binding peptide
AMGYHYKLYTVVGKDKYLISIPSLKTPV

SEQ ID NO: 83933 - protein, 38 aa, Artificial Sequence; identical to SEQ ID NO: 41214
  Cyclic GFR-binding peptide
  MOD_RES (2)..(34)..(35): Xaa is C or S

SEQ ID NO: 83934 - protein, 24 aa, Artificial Sequence
  Cyclic GFR-binding peptide
VVMDYHYKLVVKENEDKYLMSIPS

SEQ ID NO: 83935 - protein, 22 aa, Artificial Sequence
  Cyclic GFR-binding peptide
DEYKFKVVKENEDLYLMSIPEL

SEQ ID NO: 83936 - protein, 32 aa, Artificial Sequence; identical to SEQ ID NO: 1538
  Cyclic GFR-binding peptide
  MOD_RES (2)..(4): Xaa is C or S

SEQ ID NO: 83937 - protein, 30 aa, Artificial Sequence; identical to SEQ ID NO: 1541
  Cyclic GFR-binding peptide
  MOD_RES (1)..(1): Xaa is C or S

SEQ ID NO: 83938 - protein, 40 aa, Artificial Sequence; identical to SEQ ID NO: 41219
  Cyclic GFR-binding peptide
  MOD_RES (2)..(4)..(35)..(36): Xaa is C or S

SEQ ID NO: 83939 - protein, 32 aa, Artificial Sequence
  Cyclic GFR-binding peptide
  MOD_RES (29)..(30): Xaa is C or S
VIMPIKGYVKPKRGVFYLINIPSLAQPVXXPA

SEQ ID NO: 83940 - protein, 38 aa, Artificial Sequence; identical to SEQ ID NO: 1542
  Cyclic GFR-binding peptide
  MOD_RES (2)..(4)..(36)..(37): Xaa is C or S

SEQ ID NO: 83941 - protein, 29 aa, Artificial Sequence
  Cyclic GFR-binding peptide
  MOD_RES (27)..(28): Xaa is C or S
DRHKRLVVKENEDYYLMSTASLETPVXXA

SEQ ID NO: 83942 - protein, 33 aa, Artificial Sequence; identical to SEQ ID NO: 41228
  Cyclic GFR-binding peptide
  MOD_RES (2)..(4): Xaa is C or S

SEQ ID NO: 83943 - protein, 29 aa, Artificial Sequence
  Cyclic GFR-binding peptide
  MOD_RES (1)..(3): Xaa is C or S
XGXGEVVMDYHYKLVVKENEDKYLMSIPS

SEQ ID NO: 83944 - protein, 28 aa, Artificial Sequence
  Cyclic GFR-binding peptide
  MOD_RES (1)..(3): Xaa is C or S
XKXSRVIMEYKFKVKPKRGVLYLISIPE

SEQ ID NO: 83945 - protein, 33 aa, Artificial Sequence; identical to SEQ ID NO: 1554
  Cyclic GFR-binding peptide
  MOD_RES (28)..(29): Xaa is C or S

SEQ ID NO: 83946 - protein, 30 aa, Artificial Sequence
  Cyclic GFR-binding peptide
  MOD_RES (2)..(2): Xaa is C or S
KXSRVIMPIKGYVKPKRGVFYLINIPSLAQ

SEQ ID NO: 83947 - protein, 27 aa, Artificial Sequence
  Cyclic GFR-binding peptide
  MOD_RES (1)..(1): Xaa is C or S
XSKVIMRHKRLIKPTKGIYYLISTASL

SEQ ID NO: 83948 - protein, 30 aa, Artificial Sequence
  Cyclic GFR-binding peptide
  MOD_RES (28)..(29): Xaa is C or S
MDYHYKLVVNNASDKYLISIPSLRTPVXXT

SEQ ID NO: 83949 - protein, 35 aa, Artificial Sequence; identical to SEQ ID NO: 29638
  Cyclic GFR-binding peptide
  MOD_RES (30)..(31): Xaa is C or S

SEQ ID NO: 83950 - protein, 29 aa, Artificial Sequence
  Cyclic GFR-binding peptide
  MOD_RES (2)..(2): Xaa is C or S
GXRDVVMGRYKKLIIQQKDNFYLMSIANM

SEQ ID NO: 83951 - protein, 29 aa, Artificial Sequence
  Cyclic GFR-binding peptide
  MOD_RES (2)..(2): Xaa is C or S
GXSRVVMNRYKKLIVNSSDDFYLVSIANL

SEQ ID NO: 83952 - protein, 24 aa, Artificial Sequence
  Cyclic GFR-binding peptide
VVMDEYKFKVVNNASDLYLISIPE

SEQ ID NO: 83953 - protein, 27 aa, Artificial Sequence
  Cyclic GFR-binding peptide
SEVTMNPIKGYVVNKNEDFYLINIPSM

SEQ ID NO: 83954 - protein, 32 aa, Artificial Sequence
  Cyclic GFR-binding peptide
  MOD_RES (29)..(30): Xaa is C or S
TMNYHYKLVVNKNEDKYLISIPSMKEPVXXPE

SEQ ID NO: 83955 - protein, 28 aa, Artificial Sequence
  Cyclic GFR-binding peptide
VIMEYKFKLLVRGNDLYLMSIPETKVPA

SEQ ID NO: 83956 - protein, 29 aa, Artificial Sequence
  Cyclic GFR-binding peptide
  MOD_RES (26)..(27): Xaa is C or S
PIKGYIVNSSDDFYLVNIPSLKTPAXXPK

SEQ ID NO: 83957 - protein, 33 aa, Artificial Sequence; identical to SEQ ID NO: 29642
  Cyclic GFR-binding peptide
  MOD_RES (30)..(31): Xaa is C or S

SEQ ID NO: 83958 - protein, 31 aa, Artificial Sequence; identical to SEQ ID NO: 29643
  Cyclic GFR-binding peptide
  MOD_RES (31)..(31): Xaa is C or S

SEQ ID NO: 83959 - protein, 30 aa, Artificial Sequence; identical to SEQ ID NO: 1559
  Cyclic GFR-binding peptide
  MOD_RES (29)..(30): Xaa is C or S

SEQ ID NO: 83960 - protein, 30 aa, Artificial Sequence; identical to SEQ ID NO: 29647
  Cyclic GFR-binding peptide
  MOD_RES (29)..(30): Xaa is C or S

SEQ ID NO: 83961 - protein, 35 aa, Artificial Sequence
  Cyclic GFR-binding peptide
  MOD_RES (29)..(30): Xaa is C or S
VMNYHYKLIVNSSDDKYLVSIPSLKTPAXXPKPVH

SEQ ID NO: 83962 - protein, 34 aa, Artificial Sequence; identical to SEQ ID NO: 1562
  Cyclic GFR-binding peptide
  MOD_RES (1)..(32)..(33): Xaa is C or S

SEQ ID NO: 83963 - protein, 25 aa, Artificial Sequence
  Cyclic GFR-binding peptide
EYKFKVVNNAADLYLISIPELRAPV

SEQ ID NO: 83964 - protein, 33 aa, Artificial Sequence; identical to SEQ ID NO: 1563
  Cyclic GFR-binding peptide
  MOD_RES (27)..(27): Xaa is C or S

SEQ ID NO: 83965 - protein, 29 aa, Artificial Sequence
  Cyclic GFR-binding peptide
  MOD_RES (28)..(29): Xaa is C or S
MNEYKFKVVNKNEDLYLISIPEMKEPVXX

SEQ ID NO: 83966 - protein, 34 aa, Artificial Sequence; identical to SEQ ID NO: 1564
  Cyclic GFR-binding peptide
  MOD_RES (32)..(33): Xaa is C or S

SEQ ID NO: 83967 - protein, 25 aa, Artificial Sequence
  Cyclic GFR-binding peptide
EEVIMYHYKLLLVRGNDKYLMSIPS

SEQ ID NO: 83968 - protein, 35 aa, Artificial Sequence; identical to SEQ ID NO: 41254
  Cyclic GFR-binding peptide
  MOD_RES (31)..(31): Xaa is C or S

SEQ ID NO: 83969 - protein, 33 aa, Artificial Sequence
  Cyclic GFR-binding peptide
  MOD_RES (31)..(32): Xaa is C or S
EVVMDRHKRLVVNNASDYYLISTASLRTPVXXT

SEQ ID NO: 83970 - protein, 33 aa, Artificial Sequence; identical to SEQ ID NO: 1566
  Cyclic GFR-binding peptide
  MOD_RES (2)..(2): Xaa is C or S

SEQ ID NO: 83971 - protein, 33 aa, Artificial Sequence
  Cyclic GFR-binding peptide
  MOD_RES (32)..(33): Xaa is C or S
ESVAMGRHKRLYTVVGKDYYLISTASLKTPVXX

SEQ ID NO: 83972 - protein, 31 aa, Artificial Sequence
  Cyclic GFR-binding peptide
  MOD_RES (28)..(29): Xaa is C or S
IMEYKFKLLVRGNDLYLMSIPETKVPAXXTS

SEQ ID NO: 83973 - protein, 27 aa, Artificial Sequence
  Cyclic GFR-binding peptide
  MOD_RES (26)..(27): Xaa is C or S
EYKFKVVKENEDLYLMSIPELETPVXX

SEQ ID NO: 83974 - protein, 33 aa, Artificial Sequence; identical to SEQ ID NO: 29656
  Cyclic GFR-binding peptide
  MOD_RES (32)..(33): Xaa is C or S

SEQ ID NO: 83975 - protein, 39 aa, Artificial Sequence; identical to SEQ ID NO: 29657
  Cyclic GFR-binding peptide
  MOD_RES (1)..(3)..(34)..(35): Xaa is C or S

SEQ ID NO: 83976 - protein, 31 aa, Artificial Sequence; identical to SEQ ID NO: 41260
  Cyclic GFR-binding peptide
  MOD_RES (30)..(31): Xaa is C or S

SEQ ID NO: 83977 - protein, 35 aa, Artificial Sequence
  Cyclic GFR-binding peptide
  MOD_RES (2)..(4): Xaa is C or S
HXGXARVVMNPIKGYIVNSSDDFYLVNIPSLQTPA

SEQ ID NO: 83978 - protein, 34 aa, Artificial Sequence
  Cyclic GFR-binding peptide
  MOD_RES (31)..(32): Xaa is C or S
EVTMNEYKFKVVNKNEDLYLISIPEMKEPVXXPE

SEQ ID NO: 83979 - protein, 32 aa, Artificial Sequence
  Cyclic GFR-binding peptide
  MOD_RES (2)..(4): Xaa is C or S
RXGXAEVVMDRHKRLVVNNAADYYLISTASLR

SEQ ID NO: 83980 - protein, 35 aa, Artificial Sequence; identical to SEQ ID NO: 41264
  Cyclic GFR-binding peptide
  MOD_RES (1)..(33)..(34): Xaa is C or S

SEQ ID NO: 83981 - protein, 37 aa, Artificial Sequence; identical to SEQ ID NO: 1571
  Cyclic GFR-binding peptide
  MOD_RES (2)..(33)..(34): Xaa is C or S

SEQ ID NO: 83982 - protein, 27 aa, Artificial Sequence
  Cyclic GFR-binding peptide
IMPIKGYVKPKRGVFYLINIPSLAQPV

SEQ ID NO: 83983 - protein, 29 aa, Artificial Sequence
  Cyclic GFR-binding peptide
  MOD_RES (26)..(27): Xaa is C or S
RYKKLIVNSSDDFYLVSIANLQTPAXXPK

SEQ ID NO: 83984 - protein, 29 aa, Artificial Sequence
  Cyclic GFR-binding peptide
  MOD_RES (2)..(2): Xaa is C or S
KXSKVIMRYKKLIKPTKGIFYLISIANLD

SEQ ID NO: 83985 - protein, 25 aa, Artificial Sequence
  Cyclic GFR-binding peptide
MPIKGYLLVRGNDFYLMNIPSTKVP

SEQ ID NO: 83986 - protein, 25 aa, Artificial Sequence
  Cyclic GFR-binding peptide
SRVIMRHKRLVKPKRGVYYLISTAS

SEQ ID NO: 83987 - protein, 37 aa, Artificial Sequence; identical to SEQ ID NO: 29665
  Cyclic GFR-binding peptide
  MOD_RES (31)..(32): Xaa is C or S

SEQ ID NO: 83988 - protein, 40 aa, Artificial Sequence; identical to SEQ ID NO: 41275
  Cyclic GFR-binding peptide
  MOD_RES (1)..(3)..(35)..(36): Xaa is C or S

SEQ ID NO: 83989 - protein, 30 aa, Artificial Sequence
  Cyclic GFR-binding peptide
  MOD_RES (27)..(28): Xaa is C or S
NRYKKLVVNKNEDFYLISIANMKEPVXXPE

SEQ ID NO: 83990 - protein, 32 aa, Artificial Sequence; identical to SEQ ID NO: 1577
  Cyclic GFR-binding peptide
  MOD_RES (30)..(31): Xaa is C or S

SEQ ID NO: 83991 - protein, 30 aa, Artificial Sequence
  Cyclic GFR-binding peptide
  MOD_RES (1)..(3): Xaa is C or S
XAXSEVTMNEYKFKVVNKNEDLYLISIPEM

SEQ ID NO: 83992 - protein, 38 aa, Artificial Sequence; identical to SEQ ID NO: 41279
  Cyclic GFR-binding peptide
  MOD_RES (32)..(33): Xaa is C or S

SEQ ID NO: 83993 - protein, 36 aa, Artificial Sequence; identical to SEQ ID NO: 1578
  Cyclic GFR-binding peptide
  MOD_RES (1)..(3)..(35)..(36): Xaa is C or S

SEQ ID NO: 83994 - protein, 36 aa, Artificial Sequence; identical to SEQ ID NO: 41281
  Cyclic GFR-binding peptide
  MOD_RES (2)..(4)..(36): Xaa is C or S

SEQ ID NO: 83995 - protein, 28 aa, Artificial Sequence
  Cyclic GFR-binding peptide
  MOD_RES (27)..(27): Xaa is C or S
NPIKGYIVNSSDDFYLVNIPSLKTPAXT

SEQ ID NO: 83996 - protein, 34 aa, Artificial Sequence; identical to SEQ ID NO: 1580
  Cyclic GFR-binding peptide
  MOD_RES (1)..(3): Xaa is C or S

SEQ ID NO: 83997 - protein, 36 aa, Artificial Sequence; identical to SEQ ID NO: 1581
  Cyclic GFR-binding peptide
  MOD_RES (1)..(3)..(35): Xaa is C or S

SEQ ID NO: 83998 - protein, 38 aa, Artificial Sequence; identical to SEQ ID NO: 29671
  Cyclic GFR-binding peptide
  MOD_RES (2)..(4)..(36): Xaa is C or S

SEQ ID NO: 83999 - protein, 38 aa, Artificial Sequence
  Cyclic GFR-binding peptide
  MOD_RES (1)..(32)..(33): Xaa is C or S
XEEVIMEYKFKLLVRGNDLYLMSIPETKVPAXXTSPVR

SEQ ID NO: 84000 - protein, 23 aa, Artificial Sequence
  Cyclic GFR-binding peptide
MNRHKRLIVNSSDDYYLVSTASL

SEQ ID NO: 84001 - protein, 33 aa, Artificial Sequence
  Cyclic GFR-binding peptide
  MOD_RES (2)..(2): Xaa is C or S
GXESVAMGRHKRLYTVVGKDYYLISTASLKTPV

SEQ ID NO: 84002 - protein, 24 aa, Artificial Sequence
  Cyclic GFR-binding peptide
NPIKGYIVNNSSDFYLVNIPSLKT

SEQ ID NO: 84003 - protein, 33 aa, Artificial Sequence; identical to SEQ ID NO: 1588
  Cyclic GFR-binding peptide
  MOD_RES (2)..(4): Xaa is C or S

SEQ ID NO: 84004 - protein, 30 aa, Artificial Sequence; identical to SEQ ID NO: 1589
  Cyclic GFR-binding peptide
  MOD_RES (28)..(29): Xaa is C or S

SEQ ID NO: 84005 - protein, 25 aa, Artificial Sequence
  Cyclic GFR-binding peptide
KVIMEYKFKIKPTKGILYLISIPEL

SEQ ID NO: 84006 - protein, 22 aa, Artificial Sequence
  Cyclic GFR-binding peptide
MDEYKFKVVNNAADLYLISIPE

SEQ ID NO: 84007 - protein, 31 aa, Artificial Sequence; identical to SEQ ID NO: 1590
  Cyclic GFR-binding peptide
  MOD_RES (26)..(27): Xaa is C or S

SEQ ID NO: 84008 - protein, 24 aa, Artificial Sequence
  Cyclic GFR-binding peptide
VMDYHYKLVVKENEDKYLMSIPSL

SEQ ID NO: 84009 - protein, 30 aa, Artificial Sequence; identical to SEQ ID NO: 1593
  Cyclic GFR-binding peptide
  MOD_RES (2)..(4): Xaa is C or S

SEQ ID NO: 84010 - protein, 35 aa, Artificial Sequence; identical to SEQ ID NO: 41297
  Cyclic GFR-binding peptide
  MOD_RES (32)..(33): Xaa is C or S

SEQ ID NO: 84011 - protein, 37 aa, Artificial Sequence
  Cyclic GFR-binding peptide
  MOD_RES (2)..(33)..(34): Xaa is C or S
GXEEVIMEYKFKLLVRGNDLYLMSIPETKVPAXXTSP

SEQ ID NO: 84012 - protein, 22 aa, Artificial Sequence
  Cyclic GFR-binding peptide
GRHKRLYTVVGKDYYLISTASL

SEQ ID NO: 84013 - protein, 35 aa, Artificial Sequence; identical to SEQ ID NO: 29690
  Cyclic GFR-binding peptide
  MOD_RES (32)..(33): Xaa is C or S

SEQ ID NO: 84014 - protein, 27 aa, Artificial Sequence
  Cyclic GFR-binding peptide
VTMNRYKKLVVNKNEDFYLISIANMKE

SEQ ID NO: 84015 - protein, 26 aa, Artificial Sequence
  Cyclic GFR-binding peptide
VSMGEEYKFKTPVGMDDLYLVSIPEL

SEQ ID NO: 84016 - protein, 29 aa, Artificial Sequence
  Cyclic GFR-binding peptide
  MOD_RES (26)..(27): Xaa is C or S
PIKGYIKPTKGIFYLINIPSLDQSVXXPS

SEQ ID NO: 84017 - protein, 30 aa, Artificial Sequence
  Cyclic GFR-binding peptide
  MOD_RES (28)..(29): Xaa is C or S
MNYHYKLVVNKNEDKYLISIPSMKEPVXXP

SEQ ID NO: 84018 - protein, 35 aa, Artificial Sequence; identical to SEQ ID NO: 29698
  Cyclic GFR-binding peptide
  MOD_RES (30)..(30): Xaa is C or S

SEQ ID NO: 84019 - protein, 30 aa, Artificial Sequence; identical to SEQ ID NO: 1604
  Cyclic GFR-binding peptide

SEQ ID NO: 84020 - protein, 33 aa, Artificial Sequence; identical to SEQ ID NO: 29700
  Cyclic GFR-binding peptide
  MOD_RES (29)..(30): Xaa is C or S

SEQ ID NO: 84021 - protein, 24 aa, Artificial Sequence
  Cyclic GFR-binding peptide
RYKKLIKPTKGIFYLISIANLDQS

SEQ ID NO: 84022 - protein, 26 aa, Artificial Sequence
  Cyclic GFR-binding peptide
RVVMNRYKKLIVNSSDDFYLVSIANL

SEQ ID NO: 84023 - protein, 31 aa, Artificial Sequence
  Cyclic GFR-binding peptide
  MOD_RES (1)..(1): Xaa is C or S
XEEVIMEYKFKLLVRGNDLYLMSIPETKVPA

SEQ ID NO: 84024 - protein, 33 aa, Artificial Sequence; identical to SEQ ID NO: 29704
  Cyclic GFR-binding peptide
  MOD_RES (1)..(3): Xaa is C or S

SEQ ID NO: 84025 - protein, 31 aa, Artificial Sequence; identical to SEQ ID NO: 1613
  Cyclic GFR-binding peptide
  MOD_RES (29)..(30): Xaa is C or S

SEQ ID NO: 84026 - protein, 36 aa, Artificial Sequence; identical to SEQ ID NO: 41311
  Cyclic GFR-binding peptide
  MOD_RES (32)..(33): Xaa is C or S

SEQ ID NO: 84027 - protein, 25 aa, Artificial Sequence
  Cyclic GFR-binding peptide
YHYKLVVKDYEDKYLMSIPSLETPV

SEQ ID NO: 84028 - protein, 31 aa, Artificial Sequence; identical to SEQ ID NO: 1619
  Cyclic GFR-binding peptide
  MOD_RES (31)..(31): Xaa is C or S

SEQ ID NO: 84029 - protein, 34 aa, Artificial Sequence; identical to SEQ ID NO: 29713
  Cyclic GFR-binding peptide
  MOD_RES (1)..(33): Xaa is C or S

SEQ ID NO: 84030 - protein, 35 aa, Artificial Sequence
  Cyclic GFR-binding peptide
  MOD_RES (31)..(32): Xaa is C or S
SKVIMPIKGYIKPTKGIFYLINIPSLDQSVXXPSA

SEQ ID NO: 84031 - protein, 20 aa, Artificial Sequence
  Cyclic GFR-binding peptide
EYKFKVVKDYEDLYLMSIPE

SEQ ID NO: 84032 - protein, 31 aa, Artificial Sequence; identical to SEQ ID NO: 75631
  Cyclic GFR-binding peptide
  MOD_RES (26)..(27): Xaa is C or S

SEQ ID NO: 84033 - protein, 28 aa, Artificial Sequence
  Cyclic GFR-binding peptide
DVVMGRYKKLIIQQKDNFYLMSIANMKT

SEQ ID NO: 84034 - protein, 32 aa, Artificial Sequence
  Cyclic GFR-binding peptide
  MOD_RES (30)..(31): Xaa is C or S
VTMNRHKRLVVNKNEDYYLISTASMKEPVXXP

SEQ ID NO: 84035 - protein, 33 aa, Artificial Sequence
  Cyclic GFR-binding peptide
  MOD_RES (27)..(28): Xaa is C or S
NEYKFKVVNKNEDLYLISIPEMKEPVXXPEPIG

SEQ ID NO: 84036 - protein, 31 aa, Artificial Sequence; identical to SEQ ID NO: 41326
  Cyclic GFR-binding peptide
  MOD_RES (28)..(29): Xaa is C or S

SEQ ID NO: 84037 - protein, 29 aa, Artificial Sequence
  Cyclic GFR-binding peptide
  MOD_RES (1)..(3): Xaa is C or S
XGXGEVVMEEYKFKVVKDYEDLYLMSIPE

SEQ ID NO: 84038 - protein, 23 aa, Artificial Sequence
  Cyclic GFR-binding peptide
VMNPIKGYIVNSSDDFYLVNIPS

SEQ ID NO: 84039 - protein, 32 aa, Artificial Sequence
  Cyclic GFR-binding peptide
  MOD_RES (32)..(32): Xaa is C or S
SEVTMNPIKGYVVNKNEDFYLINIPSMKEPVX

SEQ ID NO: 84040 - protein, 24 aa, Artificial Sequence
  Cyclic GFR-binding peptide
VAMGRHKRLYTVVGKDYYLISTAS

SEQ ID NO: 84041 - protein, 39 aa, Artificial Sequence; identical to SEQ ID NO: 29726
  Cyclic GFR-binding peptide
  MOD_RES (2)..(34)..(35): Xaa is C or S

SEQ ID NO: 84042 - protein, 33 aa, Artificial Sequence; identical to SEQ ID NO: 41333
  Cyclic GFR-binding peptide
  MOD_RES (2)..(4): Xaa is C or S

SEQ ID NO: 84043 - protein, 24 aa, Artificial Sequence
  Cyclic GFR-binding peptide
EYKFKVVNNASDLYLISIPELRTP

SEQ ID NO: 84044 - protein, 31 aa, Artificial Sequence; identical to SEQ ID NO: 1629
  Cyclic GFR-binding peptide
  MOD_RES (1)..(3): Xaa is C or S

SEQ ID NO: 84045 - protein, 24 aa, Artificial Sequence
  Cyclic GFR-binding peptide
YHYKLLLVRGNDKYLMSIPSTKVP

SEQ ID NO: 84046 - protein, 40 aa, Artificial Sequence; identical to SEQ ID NO: 29732
  Cyclic GFR-binding peptide
  MOD_RES (2)..(4)..(36)..(37): Xaa is C or S

SEQ ID NO: 84047 - protein, 38 aa, Artificial Sequence; identical to SEQ ID NO: 41335
  Cyclic GFR-binding peptide
  MOD_RES (1)..(33)..(34): Xaa is C or S

SEQ ID NO: 84048 - protein, 28 aa, Artificial Sequence
  Cyclic GFR-binding peptide
VVMNRHKRLIVNSSDDYYLVSTASLQTP

SEQ ID NO: 84049 - protein, 27 aa, Artificial Sequence
  Cyclic GFR-binding peptide
  MOD_RES (27)..(27): Xaa is C or S
MYHYKLVKPKRGVKYLISIPSLAQPVX

SEQ ID NO: 84050 - protein, 31 aa, Artificial Sequence
  Cyclic GFR-binding peptide
  MOD_RES (2)..(2): Xaa is C or S
GXAEVVMDRHKRLVVNNAADYYLISTASLRA

SEQ ID NO: 84051 - protein, 29 aa, Artificial Sequence
  Cyclic GFR-binding peptide
  MOD_RES (27)..(28): Xaa is C or S
EEYKFKTPVGMDDLYLVSIPELKTPVXXA

SEQ ID NO: 84052 - protein, 36 aa, Artificial Sequence; identical to SEQ ID NO: 41339
  Cyclic GFR-binding peptide
  MOD_RES (1)..(3)..(35)..(36): Xaa is C or S

SEQ ID NO: 84053 - protein, 23 aa, Artificial Sequence
  Cyclic GFR-binding peptide
VVMEYKFKVKPTRGVLYLISIPE

SEQ ID NO: 84054 - protein, 36 aa, Artificial Sequence; identical to SEQ ID NO: 29742
  Cyclic GFR-binding peptide
  MOD_RES (1)..(3)..(35)..(36): Xaa is C or S

SEQ ID NO: 84055 - protein, 40 aa, Artificial Sequence; identical to SEQ ID NO: 1641
  Cyclic GFR-binding peptide
  MOD_RES (2)..(4)..(35)..(36): Xaa is C or S

SEQ ID NO: 84056 - protein, 35 aa, Artificial Sequence; identical to SEQ ID NO: 41347
  Cyclic GFR-binding peptide
  MOD_RES (29)..(30): Xaa is C or S

SEQ ID NO: 84057 - protein, 32 aa, Artificial Sequence; identical to SEQ ID NO: 29747
  Cyclic GFR-binding peptide
  MOD_RES (29)..(30): Xaa is C or S

SEQ ID NO: 84058 - protein, 26 aa, Artificial Sequence
  Cyclic GFR-binding peptide
VSMGEPIKGYTPVGMDDFYLVNIPSL

SEQ ID NO: 84059 - protein, 25 aa, Artificial Sequence
  Cyclic GFR-binding peptide
EVIMEYKFKLLVRGNDLYLMSIPET

SEQ ID NO: 84060 - protein, 38 aa, Artificial Sequence; identical to SEQ ID NO: 1648
  Cyclic GFR-binding peptide
  MOD_RES (2)..(34)..(35): Xaa is C or S

SEQ ID NO: 84061 - protein, 41 aa, Artificial Sequence; identical to SEQ ID NO: 1650
  Cyclic GFR-binding peptide
  MOD_RES (1)..(3)..(35)..(36): Xaa is C or S

SEQ ID NO: 84062 - protein, 24 aa, Artificial Sequence
  Cyclic GFR-binding peptide
GRYKKLIIQQKDNFYLMSIANMKT

SEQ ID NO: 84063 - protein, 37 aa, Artificial Sequence; identical to SEQ ID NO: 1652
  Cyclic GFR-binding peptide
  MOD_RES (1)..(33)..(34): Xaa is C or S

SEQ ID NO: 84064 - protein, 36 aa, Artificial Sequence
  Cyclic GFR-binding peptide
  MOD_RES (2)..(4)..(36): Xaa is C or S
RXGXSEVVMDYHYKLVVNNASDKYLISIPSLRTPVX

SEQ ID NO: 84065 - protein, 35 aa, Artificial Sequence; identical to SEQ ID NO: 1653
  Cyclic GFR-binding peptide
  MOD_RES (1)..(3)..(34)..(35): Xaa is C or S

SEQ ID NO: 84066 - protein, 38 aa, Artificial Sequence; identical to SEQ ID NO: 1655
  Cyclic GFR-binding peptide
  MOD_RES (2)..(34)..(35): Xaa is C or S

SEQ ID NO: 84067 - protein, 38 aa, Artificial Sequence; identical to SEQ ID NO: 1658
  Cyclic GFR-binding peptide
  MOD_RES (32)..(33): Xaa is C or S

SEQ ID NO: 84068 - protein, 22 aa, Artificial Sequence
  Cyclic GFR-binding peptide
RHKRLVVNNAADYYLISTASLR

SEQ ID NO: 84069 - protein, 28 aa, Artificial Sequence
  Cyclic GFR-binding peptide
  MOD_RES (27)..(28): Xaa is C or S
NPIKGYIVNNSSDFYLVNIPSLKTPAXX

SEQ ID NO: 84070 - protein, 21 aa, Artificial Sequence
  Cyclic GFR-binding peptide
EYKFKIIQQKDNLYLMSIPEM

SEQ ID NO: 84071 - protein, 33 aa, Artificial Sequence
  Cyclic GFR-binding peptide
  MOD_RES (2)..(2): Xaa is C or S
AXSEVTMNRYKKLVVNKNEDFYLISIANMKEPV

SEQ ID NO: 84072 - protein, 24 aa, Artificial Sequence
  Cyclic GFR-binding peptide
MPIKGYLLVRGNDFYLMNIPSTKV

SEQ ID NO: 84073 - protein, 38 aa, Artificial Sequence; identical to SEQ ID NO: 1665
  Cyclic GFR-binding peptide
  MOD_RES (2)..(4)..(35)..(36): Xaa is C or S

SEQ ID NO: 84074 - protein, 27 aa, Artificial Sequence
  Cyclic GFR-binding peptide
IMRYKKLLLVRGNDFYLMSIANTKVPA

SEQ ID NO: 84075 - protein, 27 aa, Artificial Sequence
  Cyclic GFR-binding peptide
VAMGPIKGYYTVVGKDFYLINIPSLKT

SEQ ID NO: 84076 - protein, 22 aa, Artificial Sequence
  Cyclic GFR-binding peptide
DYHYKLVVKENEDKYLMSIPSL

SEQ ID NO: 84077 - protein, 30 aa, Artificial Sequence; identical to SEQ ID NO: 29767
  Cyclic GFR-binding peptide
  MOD_RES (2)..(2): Xaa is C or S

SEQ ID NO: 84078 - protein, 31 aa, Artificial Sequence; identical to SEQ ID NO: 41386
  Cyclic GFR-binding peptide
  MOD_RES (26)..(27): Xaa is C or S

SEQ ID NO: 84079 - protein, 33 aa, Artificial Sequence; identical to SEQ ID NO: 41387
  Cyclic GFR-binding peptide
  MOD_RES (28)..(29): Xaa is C or S

SEQ ID NO: 84080 - protein, 26 aa, Artificial Sequence
  Cyclic GFR-binding peptide
VVMEEYKFKVVKDYEDLYLMSIPELE

SEQ ID NO: 84081 - protein, 41 aa, Artificial Sequence; identical to SEQ ID NO: 1671
  Cyclic GFR-binding peptide
  MOD_RES (1)..(3)..(35): Xaa is C or S

SEQ ID NO: 84082 - protein, 33 aa, Artificial Sequence
  Cyclic GFR-binding peptide
  MOD_RES (30)..(31): Xaa is C or S
VTMNRYKKLVVNKNEDFYLISIANMKEPVXXPE

SEQ ID NO: 84083 - protein, 41 aa, Artificial Sequence; identical to SEQ ID NO: 1674
  Cyclic GFR-binding peptide
  MOD_RES (1)..(3)..(35)..(36): Xaa is C or S

SEQ ID NO: 84084 - protein, 27 aa, Artificial Sequence
  Cyclic GFR-binding peptide
  MOD_RES (2)..(2): Xaa is C or S
KXSKVIMEYKFKIKPTKGILYLISIPE

SEQ ID NO: 84085 - protein, 38 aa, Artificial Sequence; identical to SEQ ID NO: 29778
  Cyclic GFR-binding peptide
  MOD_RES (1)..(3)..(35): Xaa is C or S

SEQ ID NO: 84086 - protein, 41 aa, Artificial Sequence; identical to SEQ ID NO: 1681
  Cyclic GFR-binding peptide
  MOD_RES (2)..(4)..(36): Xaa is C or S

SEQ ID NO: 84087 - protein, 21 aa, Artificial Sequence
  Cyclic GFR-binding peptide
YHYKLLLVRGNDKYLMSIPST

SEQ ID NO: 84088 - protein, 24 aa, Artificial Sequence
  Cyclic GFR-binding peptide
MNRHKRLIVNSSDDYYLVSTASLQ

SEQ ID NO: 84089 - protein, 25 aa, Artificial Sequence
  Cyclic GFR-binding peptide
MNYHYKLIVNNSSDKYLVSIPSLKT

SEQ ID NO: 84090 - protein, 35 aa, Artificial Sequence; identical to SEQ ID NO: 1684
  Cyclic GFR-binding peptide
  MOD_RES (31)..(32): Xaa is C or S

SEQ ID NO: 84091 - protein, 31 aa, Artificial Sequence
  Cyclic GFR-binding peptide
SEVTMNEYKFKVVNKNEDLYLISIPEMKEPV

SEQ ID NO: 84092 - protein, 24 aa, Artificial Sequence
  Cyclic GFR-binding peptide
PIKGYVVNKNEDFYLINIPSMKEP

SEQ ID NO: 84093 - protein, 27 aa, Artificial Sequence
  Cyclic GFR-binding peptide
VVMNEYKFKIVNSSDDLYLVSIPELKT

SEQ ID NO: 84094 - protein, 24 aa, Artificial Sequence
  Cyclic GFR-binding peptide
VMDYHYKLVVNNAADKYLISIPSL

SEQ ID NO: 84095 - protein, 38 aa, Artificial Sequence
  Cyclic GFR-binding peptide
  MOD_RES (2)..(4)..(36)..(37): Xaa is C or S
RXGXSEVVMDEYKFKVVNNASDLYLISIPELRTPVXXT

SEQ ID NO: 84096 - protein, 32 aa, Artificial Sequence; identical to SEQ ID NO: 1698
  Cyclic GFR-binding peptide
  MOD_RES (31)..(32): Xaa is C or S

SEQ ID NO: 84097 - protein, 28 aa, Artificial Sequence
  Cyclic GFR-binding peptide
RVIMEYKFKVKPKRGVLYLISIPELAQP

SEQ ID NO: 84098 - protein, 26 aa, Artificial Sequence
  Cyclic GFR-binding peptide
VVMDYHYKLVVKENEDKYLMSIPSLE

SEQ ID NO: 84099 - protein, 25 aa, Artificial Sequence
  Cyclic GFR-binding peptide
AMGPIKGYYTVVGKDFYLINIPSLK

SEQ ID NO: 84100 - protein, 29 aa, Artificial Sequence
  Cyclic GFR-binding peptide
  MOD_RES (26)..(27): Xaa is C or S
RYKKLVVKENEDFYLMSIANLETPVXXAK

SEQ ID NO: 84101 - protein, 32 aa, Artificial Sequence
  Cyclic GFR-binding peptide
  MOD_RES (26)..(27): Xaa is C or S
YHYKLLLVRGNDKYLMSIPSTKVPAXXTSPVR

SEQ ID NO: 84102 - protein, 37 aa, Artificial Sequence
  Cyclic GFR-binding peptide
  MOD_RES (2)..(4)..(36)..(37): Xaa is C or S
RXGXSEVVMDEYKFKVVNNASDLYLISIPELRTPVXX

SEQ ID NO: 84103 - protein, 31 aa, Artificial Sequence
  Cyclic GFR-binding peptide
AEVVMDRHKRLVVNNAADYYLISTASLRAPV

SEQ ID NO: 84104 - protein, 33 aa, Artificial Sequence; identical to SEQ ID NO: 41430
  Cyclic GFR-binding peptide
  MOD_RES (29)..(29): Xaa is C or S

SEQ ID NO: 84105 - protein, 27 aa, Artificial Sequence
  Cyclic GFR-binding peptide
  MOD_RES (26)..(27): Xaa is C or S
RYKKLLLVRGNDFYLMSIANTKVPAXX

SEQ ID NO: 84106 - protein, 30 aa, Artificial Sequence; identical to SEQ ID NO: 1711
  Cyclic GFR-binding peptide

SEQ ID NO: 84107 - protein, 26 aa, Artificial Sequence
  Cyclic GFR-binding peptide
MDYHYKLVVKENEDKYLMSIPSLETP

SEQ ID NO: 84108 - protein, 35 aa, Artificial Sequence
  Cyclic GFR-binding peptide
  MOD_RES (31)..(32): Xaa is C or S
EVTMNYHYKLVVNKNEDKYLISIPSMKEPVXXPEP

SEQ ID NO: 84109 - protein, 23 aa, Artificial Sequence
  Cyclic GFR-binding peptide
RYKKLVKPTRGVFYLISIANLDQ

SEQ ID NO: 84110 - protein, 28 aa, Artificial Sequence
  Cyclic GFR-binding peptide
ARVVMNRYKKLIVNSSDDFYLVSIANLQ

SEQ ID NO: 84111 - protein, 34 aa, Artificial Sequence; identical to SEQ ID NO: 1715
  Cyclic GFR-binding peptide
  MOD_RES (30)..(31): Xaa is C or S

SEQ ID NO: 84112 - protein, 36 aa, Artificial Sequence; identical to SEQ ID NO: 1717
  Cyclic GFR-binding peptide
  MOD_RES (1)..(32)..(33): Xaa is C or S

SEQ ID NO: 84113 - protein, 29 aa, Artificial Sequence
  Cyclic GFR-binding peptide
  MOD_RES (26)..(27): Xaa is C or S
RYKKLVVNNAADFYLISIANLRAPVXXSA

SEQ ID NO: 84114 - protein, 30 aa, Artificial Sequence; identical to SEQ ID NO: 29824
  Cyclic GFR-binding peptide
  MOD_RES (26)..(27): Xaa is C or S

SEQ ID NO: 84115 - protein, 24 aa, Artificial Sequence
  Cyclic GFR-binding peptide
VMDRHKRLVVKENEDYYLMSTASL

SEQ ID NO: 84116 - protein, 27 aa, Artificial Sequence
  Cyclic GFR-binding peptide
SKVIMRYKKLIKPTKGIFYLISIANLD

SEQ ID NO: 84117 - protein, 20 aa, Artificial Sequence
  Cyclic GFR-binding peptide
RHKRLTPVGMDDYYLVSTAS

SEQ ID NO: 84118 - protein, 31 aa, Artificial Sequence
  Cyclic GFR-binding peptide
  MOD_RES (28)..(29): Xaa is C or S
MDRHKRLVVNNAADYYLISTASLRAPVXXSA

SEQ ID NO: 84119 - protein, 33 aa, Artificial Sequence
  Cyclic GFR-binding peptide
  MOD_RES (2)..(4): Xaa is C or S
SXGXRDVVMGRHKRLIIQQKDNYYLMSTASMKT

SEQ ID NO: 84120 - protein, 36 aa, Artificial Sequence; identical to SEQ ID NO: 75696
  Cyclic GFR-binding peptide
  MOD_RES (2)..(34)..(35): Xaa is C or S

SEQ ID NO: 84121 - protein, 31 aa, Artificial Sequence
  Cyclic GFR-binding peptide
  MOD_RES (30)..(31): Xaa is C or S
EVIMYHYKLLLVRGNDKYLMSIPSTKVPAXX

SEQ ID NO: 84122 - protein, 36 aa, Artificial Sequence; identical to SEQ ID NO: 29836
  Cyclic GFR-binding peptide
  MOD_RES (33)..(34): Xaa is C or S

SEQ ID NO: 84123 - protein, 27 aa, Artificial Sequence
  Cyclic GFR-binding peptide
  MOD_RES (1)..(1): Xaa is C or S
XRDVVMGRHKRLIIQQKDNYYLMSTAS

SEQ ID NO: 84124 - protein, 22 aa, Artificial Sequence
  Cyclic GFR-binding peptide
YHYKLIVNSSDDKYLVSIPSLK

SEQ ID NO: 84125 - protein, 33 aa, Artificial Sequence; identical to SEQ ID NO: 1732
  Cyclic GFR-binding peptide
  MOD_RES (1)..(32)..(33): Xaa is C or S

SEQ ID NO: 84126 - protein, 34 aa, Artificial Sequence
  Cyclic GFR-binding peptide
  MOD_RES (31)..(32): Xaa is C or S
EVTMNRHKRLVVNKNEDYYLISTASMKEPVXXPE

SEQ ID NO: 84127 - protein, 36 aa, Artificial Sequence; identical to SEQ ID NO: 41453
  Cyclic GFR-binding peptide
  MOD_RES (2)..(34)..(35): Xaa is C or S

SEQ ID NO: 84128 - protein, 35 aa, Artificial Sequence; identical to SEQ ID NO: 41457
  Cyclic GFR-binding peptide
  MOD_RES (31)..(32): Xaa is C or S

SEQ ID NO: 84129 - protein, 25 aa, Artificial Sequence
  Cyclic GFR-binding peptide
YHYKLIKPTKGIKYLISIPSLDQSV

SEQ ID NO: 84130 - protein, 31 aa, Artificial Sequence
  Cyclic GFR-binding peptide
  MOD_RES (2)..(4): Xaa is C or S
SXGXRDVVMGEYKFKIIQQKDNLYLMSIPEM

SEQ ID NO: 84131 - protein, 39 aa, Artificial Sequence; identical to SEQ ID NO: 1740
  Cyclic GFR-binding peptide
  MOD_RES (2)..(34)..(35): Xaa is C or S

SEQ ID NO: 84132 - protein, 37 aa, Artificial Sequence; identical to SEQ ID NO: 1741
  Cyclic GFR-binding peptide
  MOD_RES (2)..(34)..(35): Xaa is C or S

SEQ ID NO: 84133 - protein, 21 aa, Artificial Sequence
  Cyclic GFR-binding peptide
RYKKLVVNNASDFYLISIANL

SEQ ID NO: 84134 - protein, 24 aa, Artificial Sequence
  Cyclic GFR-binding peptide
VMPIKGYVKPTRGVFYLINIPSLD

SEQ ID NO: 84135 - protein, 31 aa, Artificial Sequence
  Cyclic GFR-binding peptide
  MOD_RES (2)..(2): Xaa is C or S
AXSEVTMNEYKFKVVNKNEDLYLISIPEMKE

SEQ ID NO: 84136 - protein, 26 aa, Artificial Sequence
  Cyclic GFR-binding peptide
EVTMNRHKRLVVNKNEDYYLISTASM

SEQ ID NO: 84137 - protein, 32 aa, Artificial Sequence
  Cyclic GFR-binding peptide
  MOD_RES (28)..(29): Xaa is C or S
MGYHYKLIIQQKDNKYLMSIPSMKTPTXXPGA

SEQ ID NO: 84138 - protein, 32 aa, Artificial Sequence
  Cyclic GFR-binding peptide
  MOD_RES (1)..(3): Xaa is C or S
XAXSEVTMNRYKKLVVNKNEDFYLISIANMKE

SEQ ID NO: 84139 - protein, 30 aa, Artificial Sequence
  Cyclic GFR-binding peptide
  MOD_RES (1)..(3): Xaa is C or S
XGXESVAMGRHKRLYTVVGKDYYLISTASL

SEQ ID NO: 84140 - protein, 36 aa, Artificial Sequence; identical to SEQ ID NO: 41465
  Cyclic GFR-binding peptide
  MOD_RES (2)..(34)..(35): Xaa is C or S

SEQ ID NO: 84141 - protein, 36 aa, Artificial Sequence; identical to SEQ ID NO: 1747
  Cyclic GFR-binding peptide
  MOD_RES (2)..(4)..(36): Xaa is C or S

SEQ ID NO: 84142 - protein, 29 aa, Artificial Sequence
  Cyclic GFR-binding peptide
VVMDEYKFKVVNNASDLYLISIPELRTPV

SEQ ID NO: 84143 - protein, 34 aa, Artificial Sequence; identical to SEQ ID NO: 41468
  Cyclic GFR-binding peptide
  MOD_RES (31)..(32): Xaa is C or S

SEQ ID NO: 84144 - protein, 39 aa, Artificial Sequence; identical to SEQ ID NO: 1748
  Cyclic GFR-binding peptide
  MOD_RES (1)..(3)..(35)..(36): Xaa is C or S

SEQ ID NO: 84145 - protein, 22 aa, Artificial Sequence
  Cyclic GFR-binding peptide
EYKFKTPVGMDDLYLVSIPELK

SEQ ID NO: 84146 - protein, 30 aa, Artificial Sequence; identical to SEQ ID NO: 41471
  Cyclic GFR-binding peptide
  MOD_RES (27)..(27): Xaa is C or S

SEQ ID NO: 84147 - protein, 27 aa, Artificial Sequence
  Cyclic GFR-binding peptide
EVVMDRHKRLVVNNAADYYLISTASLR

SEQ ID NO: 84148 - protein, 27 aa, Artificial Sequence
  Cyclic GFR-binding peptide
VVMNYHYKLIVNSSDDKYLVSIPSLQT

SEQ ID NO: 84149 - protein, 24 aa, Artificial Sequence
  Cyclic GFR-binding peptide
DYHYKLVVKENEDKYLMSIPSLET

SEQ ID NO: 84150 - protein, 34 aa, Artificial Sequence; identical to SEQ ID NO: 1752
  Cyclic GFR-binding peptide
  MOD_RES (2)..(2): Xaa is C or S

SEQ ID NO: 84151 - protein, 30 aa, Artificial Sequence; identical to SEQ ID NO: 1753
  Cyclic GFR-binding peptide
  MOD_RES (26)..(27): Xaa is C or S

SEQ ID NO: 84152 - protein, 29 aa, Artificial Sequence
  Cyclic GFR-binding peptide
  MOD_RES (28)..(29): Xaa is C or S
MDRHKRLVVNNASDYYLISTASLRTPVXX

SEQ ID NO: 84153 - protein, 31 aa, Artificial Sequence; identical to SEQ ID NO: 1756
  Cyclic GFR-binding peptide
  MOD_RES (30)..(31): Xaa is C or S

SEQ ID NO: 84154 - protein, 30 aa, Artificial Sequence
  Cyclic GFR-binding peptide
  MOD_RES (2)..(2): Xaa is C or S
AXSEVTMNEYKFKVVNKNEDLYLISIPEMK

SEQ ID NO: 84155 - protein, 28 aa, Artificial Sequence
  Cyclic GFR-binding peptide
GEVVMDYHYKLVVKENEDKYLMSIPSLE

SEQ ID NO: 84156 - protein, 40 aa, Artificial Sequence
  Cyclic GFR-binding peptide
  MOD_RES (2)..(4)..(36)..(37): Xaa is C or S
RXGXSEVVMDRHKRLVVNNASDYYLISTASLRTPVXXTPP

SEQ ID NO: 84157 - protein, 25 aa, Artificial Sequence
  Cyclic GFR-binding peptide
GRYKKLIIQQKDNFYLMSIANMKTP

SEQ ID NO: 84158 - protein, 24 aa, Artificial Sequence
  Cyclic GFR-binding peptide
KVIMYHYKLIKPTKGIKYLISIPS

SEQ ID NO: 84159 - protein, 27 aa, Artificial Sequence
  Cyclic GFR-binding peptide
  MOD_RES (1)..(1): Xaa is C or S
XAKVVMNEYKFKIVNNSSDLYLVSIPE

SEQ ID NO: 84160 - protein, 27 aa, Artificial Sequence
  Cyclic GFR-binding peptide
  MOD_RES (26)..(27): Xaa is C or S
RYKKLIKPTKGIFYLISIANLDQSVXX

SEQ ID NO: 84161 - protein, 30 aa, Artificial Sequence
  Cyclic GFR-binding peptide
  MOD_RES (29)..(30): Xaa is C or S
VMDYHYKLVVNNASDKYLISIPSLRTPVXX

SEQ ID NO: 84162 - protein, 30 aa, Artificial Sequence; identical to SEQ ID NO: 29874
  Cyclic GFR-binding peptide
  MOD_RES (27)..(28): Xaa is C or S

SEQ ID NO: 84163 - protein, 39 aa, Artificial Sequence; identical to SEQ ID NO: 41488
  Cyclic GFR-binding peptide
  MOD_RES (1)..(3)..(35)..(36): Xaa is C or S

SEQ ID NO: 84164 - protein, 35 aa, Artificial Sequence; identical to SEQ ID NO: 1767
  Cyclic GFR-binding peptide
  MOD_RES (1)..(32)..(33): Xaa is C or S

SEQ ID NO: 84165 - protein, 34 aa, Artificial Sequence; identical to SEQ ID NO: 1768
  Cyclic GFR-binding peptide
  MOD_RES (32)..(33): Xaa is C or S

SEQ ID NO: 84166 - protein, 40 aa, Artificial Sequence
  Cyclic GFR-binding peptide
  MOD_RES (2)..(4)..(35)..(36): Xaa is C or S
SXKXSKVVMPIKGYVKPTRGVFYLINIPSLDQPVXXPSAS

SEQ ID NO: 84167 - protein, 36 aa, Artificial Sequence; identical to SEQ ID NO: 29881
  Cyclic GFR-binding peptide
  MOD_RES (32)..(33): Xaa is C or S

SEQ ID NO: 84168 - protein, 33 aa, Artificial Sequence
  Cyclic GFR-binding peptide
  MOD_RES (29)..(30): Xaa is C or S
TMNRHKRLVVNKNEDYYLISTASMKEPVXXPEP

SEQ ID NO: 84169 - protein, 32 aa, Artificial Sequence; identical to SEQ ID NO: 29882
  Cyclic GFR-binding peptide
  MOD_RES (31)..(32): Xaa is C or S

SEQ ID NO: 84170 - protein, 32 aa, Artificial Sequence; identical to SEQ ID NO: 1771
  Cyclic GFR-binding peptide
  MOD_RES (2)..(2): Xaa is C or S

SEQ ID NO: 84171 - protein, 37 aa, Artificial Sequence; identical to SEQ ID NO: 1777
  Cyclic GFR-binding peptide
  MOD_RES (32)..(32): Xaa is C or S

SEQ ID NO: 84172 - protein, 36 aa, Artificial Sequence; identical to SEQ ID NO: 29887
  Cyclic GFR-binding peptide
  MOD_RES (31)..(32): Xaa is C or S

SEQ ID NO: 84173 - protein, 32 aa, Artificial Sequence
  Cyclic GFR-binding peptide
  MOD_RES (1)..(3): Xaa is C or S
XGXRDVVMGRHKRLIIQQKDNYYLMSTASMKT

SEQ ID NO: 84174 - protein, 27 aa, Artificial Sequence
  Cyclic GFR-binding peptide
KVIMEYKFKIKPTKGILYLISIPELDQ

SEQ ID NO: 84175 - protein, 34 aa, Artificial Sequence; identical to SEQ ID NO: 41499
  Cyclic GFR-binding peptide
  MOD_RES (1)..(33)..(34): Xaa is C or S

SEQ ID NO: 84176 - protein, 28 aa, Artificial Sequence
  Cyclic GFR-binding peptide
  MOD_RES (27)..(28): Xaa is C or S
DRYKKLVVKENEDFYLMSIANLETPVXX

SEQ ID NO: 84177 - protein, 34 aa, Artificial Sequence; identical to SEQ ID NO: 1782
  Cyclic GFR-binding peptide
  MOD_RES (30)..(31): Xaa is C or S

SEQ ID NO: 84178 - protein, 31 aa, Artificial Sequence; identical to SEQ ID NO: 1785
  Cyclic GFR-binding peptide
  MOD_RES (28)..(29): Xaa is C or S

SEQ ID NO: 84179 - protein, 27 aa, Artificial Sequence
  Cyclic GFR-binding peptide
  MOD_RES (1)..(1): Xaa is C or S
XSRVVMNRHKRLIVNSSDDYYLVSTAS

SEQ ID NO: 84180 - protein, 29 aa, Artificial Sequence
  Cyclic GFR-binding peptide
SKVVMRHKRLVKPTRGVYYLISTASLDQP

SEQ ID NO: 84181 - protein, 24 aa, Artificial Sequence
  Cyclic GFR-binding peptide
VVMDRYKKLVVKENEDFYLMSIAN

SEQ ID NO: 84182 - protein, 27 aa, Artificial Sequence
  Cyclic GFR-binding peptide
  MOD_RES (26)..(27): Xaa is C or S
RHKRLVKPTRGVYYLISTASLDQPVXX

SEQ ID NO: 84183 - protein, 25 aa, Artificial Sequence
  Cyclic GFR-binding peptide
VVMDRHKRLVVNNAADYYLISTASL

SEQ ID NO: 84184 - protein, 40 aa, Artificial Sequence; identical to SEQ ID NO: 41511
  Cyclic GFR-binding peptide
  MOD_RES (2)..(4)..(36)..(37): Xaa is C or S

SEQ ID NO: 84185 - protein, 28 aa, Artificial Sequence
  Cyclic GFR-binding peptide
VMDPIKGYVVNNASDFYLINIPSLRTPV

SEQ ID NO: 84186 - protein, 31 aa, Artificial Sequence; identical to SEQ ID NO: 1801
  Cyclic GFR-binding peptide
  MOD_RES (26)..(27): Xaa is C or S

SEQ ID NO: 84187 - protein, 32 aa, Artificial Sequence
  Cyclic GFR-binding peptide
  MOD_RES (32)..(32): Xaa is C or S
SEVTMNEYKFKVVNKNEDLYLISIPEMKEPVX

SEQ ID NO: 84188 - protein, 24 aa, Artificial Sequence
  Cyclic GFR-binding peptide
MDPIKGYVVKENEDFYLMNIPSLE

SEQ ID NO: 84189 - protein, 32 aa, Artificial Sequence; identical to SEQ ID NO: 29909
  Cyclic GFR-binding peptide
  MOD_RES (27)..(28): Xaa is C or S

SEQ ID NO: 84190 - protein, 26 aa, Artificial Sequence
  Cyclic GFR-binding peptide
VMEYHYKLVVKDYEDKYLMSIPSLET

SEQ ID NO: 84191 - protein, 26 aa, Artificial Sequence
  Cyclic GFR-binding peptide
ESVAMGPIKGYYTVVGKDFYLINIPS

SEQ ID NO: 84192 - protein, 26 aa, Artificial Sequence
  Cyclic GFR-binding peptide
MGPIKGYYTVVGKDFYLINIPSLKTP

SEQ ID NO: 84193 - protein, 34 aa, Artificial Sequence
  Cyclic GFR-binding peptide
  MOD_RES (28)..(29): Xaa is C or S
MGRHKRLYTVVGKDYYLISTASLKTPVXXAKSAK

SEQ ID NO: 84194 - protein, 28 aa, Artificial Sequence
  Cyclic GFR-binding peptide
  MOD_RES (2)..(2): Xaa is C or S
GXARVVMNPIKGYIVNSSDDFYLVNIPS

SEQ ID NO: 84195 - protein, 42 aa, Artificial Sequence; identical to SEQ ID NO: 29916
  Cyclic GFR-binding peptide
  MOD_RES (2)..(4)..(37)..(38): Xaa is C or S

SEQ ID NO: 84196 - protein, 35 aa, Artificial Sequence; identical to SEQ ID NO: 29917
  Cyclic GFR-binding peptide
  MOD_RES (2)..(4): Xaa is C or S

SEQ ID NO: 84197 - protein, 28 aa, Artificial Sequence
  Cyclic GFR-binding peptide
  MOD_RES (1)..(1): Xaa is C or S
XSKVVMEYKFKVKPTRGVLYLISIPELD

SEQ ID NO: 84198 - protein, 28 aa, Artificial Sequence
  Cyclic GFR-binding peptide
RDVVMGEYKFKIIQQKDNLYLMSIPEMK

SEQ ID NO: 84199 - protein, 42 aa, Artificial Sequence; identical to SEQ ID NO: 1807
  Cyclic GFR-binding peptide
  MOD_RES (2)..(4)..(36)..(37): Xaa is C or S

SEQ ID NO: 84200 - protein, 29 aa, Artificial Sequence
  Cyclic GFR-binding peptide
  MOD_RES (1)..(3): Xaa is C or S
XGXARVVMNRHKRLIVNSSDDYYLVSTAS

SEQ ID NO: 84201 - protein, 33 aa, Artificial Sequence
  Cyclic GFR-binding peptide
  MOD_RES (2)..(2): Xaa is C or S
GXAEVVMDRHKRLVVNNAADYYLISTASLRAPV

SEQ ID NO: 84202 - protein, 33 aa, Artificial Sequence
  Cyclic GFR-binding peptide
  MOD_RES (2)..(4): Xaa is C or S
SXKXSKVIMPIKGYIKPTKGIFYLINIPSLDQS

SEQ ID NO: 84203 - protein, 32 aa, Artificial Sequence
  Cyclic GFR-binding peptide
  MOD_RES (29)..(30): Xaa is C or S
VIMEYKFKLLVRGNDLYLMSIPETKVPAXXTS

SEQ ID NO: 84204 - protein, 37 aa, Artificial Sequence; identical to SEQ ID NO: 1816
  Cyclic GFR-binding peptide
  MOD_RES (2)..(33)..(34): Xaa is C or S

SEQ ID NO: 84205 - protein, 25 aa, Artificial Sequence
  Cyclic GFR-binding peptide
NPIKGYIVNNSSDFYLVNIPSLKTP

SEQ ID NO: 84206 - protein, 28 aa, Artificial Sequence
  Cyclic GFR-binding peptide
  MOD_RES (26)..(27): Xaa is C or S
YHYKLIVNSSDDKYLVSIPSLQTPAXXP

SEQ ID NO: 84207 - protein, 33 aa, Artificial Sequence; identical to SEQ ID NO: 1820
  Cyclic GFR-binding peptide
  MOD_RES (28)..(29): Xaa is C or S

SEQ ID NO: 84208 - protein, 34 aa, Artificial Sequence; identical to SEQ ID NO: 29928
  Cyclic GFR-binding peptide
  MOD_RES (1)..(32)..(33): Xaa is C or S

SEQ ID NO: 84209 - protein, 29 aa, Artificial Sequence
  Cyclic GFR-binding peptide
  MOD_RES (28)..(29): Xaa is C or S
IMRYKKLLLVRGNDFYLMSIANTKVPAXX

SEQ ID NO: 84210 - protein, 31 aa, Artificial Sequence; identical to SEQ ID NO: 1823
  Cyclic GFR-binding peptide
  MOD_RES (27)..(28): Xaa is C or S

SEQ ID NO: 84211 - protein, 28 aa, Artificial Sequence
  Cyclic GFR-binding peptide
  MOD_RES (27)..(28): Xaa is C or S
ERYKKLVVKDYEDFYLMSIANLETPVXX

SEQ ID NO: 84212 - protein, 32 aa, Artificial Sequence; identical to SEQ ID NO: 75751
  Cyclic GFR-binding peptide
  MOD_RES (1)..(32): Xaa is C or S

SEQ ID NO: 84213 - protein, 31 aa, Artificial Sequence
  Cyclic GFR-binding peptide
  MOD_RES (2)..(4): Xaa is C or S
RXAXSEVTMNEYKFKVVNKNEDLYLISIPEM

SEQ ID NO: 84214 - protein, 32 aa, Artificial Sequence
  Cyclic GFR-binding peptide
  MOD_RES (2)..(2): Xaa is C or S
GXRDVVMGYHYKLIIQQKDNKYLMSIPSMKTP

SEQ ID NO: 84215 - protein, 34 aa, Artificial Sequence
  Cyclic GFR-binding peptide
  MOD_RES (29)..(30): Xaa is C or S
VMDYHYKLVVNNASDKYLISIPSLRTPVXXTPPT

SEQ ID NO: 84216 - protein, 26 aa, Artificial Sequence
  Cyclic GFR-binding peptide
VVMNRHKRLIVNSSDDYYLVSTASLQ

SEQ ID NO: 84217 - protein, 29 aa, Artificial Sequence
  Cyclic GFR-binding peptide
  MOD_RES (29)..(29): Xaa is C or S
VIMRYKKLLLVRGNDFYLMSIANTKVPAX

SEQ ID NO: 84218 - protein, 27 aa, Artificial Sequence
  Cyclic GFR-binding peptide
  MOD_RES (26)..(27): Xaa is C or S
RYKKLVVNKNEDFYLISIANMKEPVXX

SEQ ID NO: 84219 - protein, 28 aa, Artificial Sequence
  Cyclic GFR-binding peptide
  MOD_RES (2)..(2): Xaa is C or S
GXAEVVMDYHYKLVVNNAADKYLISIPS

SEQ ID NO: 84220 - protein, 30 aa, Artificial Sequence; identical to SEQ ID NO: 1831
  Cyclic GFR-binding peptide
  MOD_RES (2)..(2): Xaa is C or S

SEQ ID NO: 84221 - protein, 35 aa, Artificial Sequence; identical to SEQ ID NO: 29939
  Cyclic GFR-binding peptide
  MOD_RES (32)..(33): Xaa is C or S

SEQ ID NO: 84222 - protein, 27 aa, Artificial Sequence
  Cyclic GFR-binding peptide
RVVMNYHYKLIVNSSDDKYLVSIPSLQ

SEQ ID NO: 84223 - protein, 33 aa, Artificial Sequence; identical to SEQ ID NO: 1834
  Cyclic GFR-binding peptide
  MOD_RES (32)..(33): Xaa is C or S

SEQ ID NO: 84224 - protein, 37 aa, Artificial Sequence
  Cyclic GFR-binding peptide
  MOD_RES (1)..(3)..(35)..(36): Xaa is C or S
XAXSEVTMNYHYKLVVNKNEDKYLISIPSMKEPVXXP

SEQ ID NO: 84225 - protein, 33 aa, Artificial Sequence
  Cyclic GFR-binding peptide
  MOD_RES (1)..(32)..(33): Xaa is C or S
XEEVIMRHKRLLLVRGNDYYLMSTASTKVPAXX

SEQ ID NO: 84226 - protein, 20 aa, Artificial Sequence
  Cyclic GFR-binding peptide
PIKGYVKPKRGVFYLINIPS

SEQ ID NO: 84227 - protein, 22 aa, Artificial Sequence
  Cyclic GFR-binding peptide
YHYKLVKPTRGVKYLISIPSLD

SEQ ID NO: 84228 - protein, 28 aa, Artificial Sequence
  Cyclic GFR-binding peptide
AMGRHKRLYTVVGKDYYLISTASLKTPV

SEQ ID NO: 84229 - protein, 26 aa, Artificial Sequence
  Cyclic GFR-binding peptide
VVMDRHKRLVVKENEDYYLMSTASLE

SEQ ID NO: 84230 - protein, 31 aa, Artificial Sequence; identical to SEQ ID NO: 41550
  Cyclic GFR-binding peptide
  MOD_RES (31)..(31): Xaa is C or S

SEQ ID NO: 84231 - protein, 26 aa, Artificial Sequence
  Cyclic GFR-binding peptide
VMNYHYKLIVNSSDDKYLVSIPSLQT

SEQ ID NO: 84232 - protein, 36 aa, Artificial Sequence
  Cyclic GFR-binding peptide
  MOD_RES (2)..(4)..(36): Xaa is C or S
RXAXSEVTMNEYKFKVVNKNEDLYLISIPEMKEPVX

SEQ ID NO: 84233 - protein, 28 aa, Artificial Sequence
  Cyclic GFR-binding peptide
SKVIMPIKGYIKPTKGIFYLINIPSLDQ

SEQ ID NO: 84234 - protein, 35 aa, Artificial Sequence; identical to SEQ ID NO: 1842
  Cyclic GFR-binding peptide
  MOD_RES (32)..(33): Xaa is C or S

SEQ ID NO: 84235 - protein, 35 aa, Artificial Sequence; identical to SEQ ID NO: 75764
  Cyclic GFR-binding peptide
  MOD_RES (2)..(4)..(35): Xaa is C or S

SEQ ID NO: 84236 - protein, 40 aa, Artificial Sequence; identical to SEQ ID NO: 1843
  Cyclic GFR-binding peptide
  MOD_RES (2)..(34)..(35): Xaa is C or S

SEQ ID NO: 84237 - protein, 28 aa, Artificial Sequence
  Cyclic GFR-binding peptide
  MOD_RES (27)..(28): Xaa is C or S
GRYKKLIIQQKDNFYLMSIANMKTPTXX

SEQ ID NO: 84238 - protein, 32 aa, Artificial Sequence; identical to SEQ ID NO: 1845
  Cyclic GFR-binding peptide
  MOD_RES (29)..(30): Xaa is C or S

SEQ ID NO: 84239 - protein, 32 aa, Artificial Sequence; identical to SEQ ID NO: 1846
  Cyclic GFR-binding peptide
  MOD_RES (26)..(27): Xaa is C or S

SEQ ID NO: 84240 - protein, 35 aa, Artificial Sequence; identical to SEQ ID NO: 1847
  Cyclic GFR-binding peptide
  MOD_RES (29)..(30): Xaa is C or S

SEQ ID NO: 84241 - protein, 42 aa, Artificial Sequence; identical to SEQ ID NO: 29960
  Cyclic GFR-binding peptide
  MOD_RES (2)..(4)..(36)..(37): Xaa is C or S

SEQ ID NO: 84242 - protein, 36 aa, Artificial Sequence; identical to SEQ ID NO: 1848
  Cyclic GFR-binding peptide
  MOD_RES (30)..(31): Xaa is C or S

SEQ ID NO: 84243 - protein, 36 aa, Artificial Sequence; identical to SEQ ID NO: 1849
  Cyclic GFR-binding peptide
  MOD_RES (2)..(34)..(35): Xaa is C or S

SEQ ID NO: 84244 - protein, 36 aa, Artificial Sequence
  Cyclic GFR-binding peptide
  MOD_RES (2)..(4)..(35)..(36): Xaa is C or S
LXGXEEVIMEYKFKLLVRGNDLYLMSIPETKVPAXX

SEQ ID NO: 84245 - protein, 31 aa, Artificial Sequence
  Cyclic GFR-binding peptide
  MOD_RES (28)..(29): Xaa is C or S
MNRHKRLVVNKNEDYYLISTASMKEPVXXPE

SEQ ID NO: 84246 - protein, 39 aa, Artificial Sequence; identical to SEQ ID NO: 1851
  Cyclic GFR-binding peptide
  MOD_RES (1)..(33)..(34): Xaa is C or S

SEQ ID NO: 84247 - protein, 31 aa, Artificial Sequence; identical to SEQ ID NO: 1852
  Cyclic GFR-binding peptide
  MOD_RES (31)..(31): Xaa is C or S

SEQ ID NO: 84248 - protein, 35 aa, Artificial Sequence
  Cyclic GFR-binding peptide
  MOD_RES (29)..(30): Xaa is C or S
VMNRHKRLIVNSSDDYYLVSTASLKTPAXXPKPVH

SEQ ID NO: 84249 - protein, 35 aa, Artificial Sequence
  Cyclic GFR-binding peptide
  MOD_RES (2)..(34)..(35): Xaa is C or S
GXSEVVMDYHYKLVVNNASDKYLISIPSLRTPVXX

SEQ ID NO: 84250 - protein, 31 aa, Artificial Sequence; identical to SEQ ID NO: 29973
  Cyclic GFR-binding peptide
  MOD_RES (27)..(28): Xaa is C or S

SEQ ID NO: 84251 - protein, 35 aa, Artificial Sequence
  Cyclic GFR-binding peptide
  MOD_RES (31)..(32): Xaa is C or S
EEVIMYHYKLLLVRGNDKYLMSIPSTKVPAXXTSP

SEQ ID NO: 84252 - protein, 38 aa, Artificial Sequence; identical to SEQ ID NO: 41575
  Cyclic GFR-binding peptide
  MOD_RES (2)..(4)..(37)..(38): Xaa is C or S

SEQ ID NO: 84253 - protein, 29 aa, Artificial Sequence
  Cyclic GFR-binding peptide
  MOD_RES (28)..(29): Xaa is C or S
IMRYKKLIKPTKGIFYLISIANLDQSVXX

SEQ ID NO: 84254 - protein, 26 aa, Artificial Sequence
  Cyclic GFR-binding peptide
IMYHYKLIKPTKGIKYLISIPSLDQS

SEQ ID NO: 84255 - protein, 34 aa, Artificial Sequence; identical to SEQ ID NO: 41590
  Cyclic GFR-binding peptide
  MOD_RES (28)..(29): Xaa is C or S

SEQ ID NO: 84256 - protein, 31 aa, Artificial Sequence; identical to SEQ ID NO: 1877
  Cyclic GFR-binding peptide
  MOD_RES (2)..(2): Xaa is C or S

SEQ ID NO: 84257 - protein, 38 aa, Artificial Sequence; identical to SEQ ID NO: 1878
  Cyclic GFR-binding peptide
  MOD_RES (1)..(32)..(33): Xaa is C or S

SEQ ID NO: 84258 - protein, 32 aa, Artificial Sequence
  Cyclic GFR-binding peptide
  MOD_RES (31)..(32): Xaa is C or S
EEVIMRHKRLLLVRGNDYYLMSTASTKVPAXX

SEQ ID NO: 84259 - protein, 24 aa, Artificial Sequence
  Cyclic GFR-binding peptide
DPIKGYVVNNASDFYLINIPSLRT

SEQ ID NO: 84260 - protein, 26 aa, Artificial Sequence
  Cyclic GFR-binding peptide
VVMDYHYKLVVNNASDKYLISIPSLR

SEQ ID NO: 84261 - protein, 35 aa, Artificial Sequence
  Cyclic GFR-binding peptide
  MOD_RES (31)..(32): Xaa is C or S
EVTMNPIKGYVVNKNEDFYLINIPSMKEPVXXPEP

SEQ ID NO: 84262 - protein, 30 aa, Artificial Sequence
  Cyclic GFR-binding peptide
  MOD_RES (1)..(1): Xaa is C or S
XSEVVMDRHKRLVVNNASDYYLISTASLRT

SEQ ID NO: 84263 - protein, 36 aa, Artificial Sequence
  Cyclic GFR-binding peptide
  MOD_RES (2)..(4)..(36): Xaa is C or S
SXGXRDVVMGRHKRLIIQQKDNYYLMSTASMKTPTX

SEQ ID NO: 84264 - protein, 24 aa, Artificial Sequence
  Cyclic GFR-binding peptide
RHKRLIIQQKDNYYLMSTASMKTP

SEQ ID NO: 84265 - protein, 31 aa, Artificial Sequence; identical to SEQ ID NO: 30000
  Cyclic GFR-binding peptide
  MOD_RES (1)..(1): Xaa is C or S

SEQ ID NO: 84266 - protein, 32 aa, Artificial Sequence; identical to SEQ ID NO: 1882
  Cyclic GFR-binding peptide
  MOD_RES (27)..(28): Xaa is C or S

SEQ ID NO: 84267 - protein, 40 aa, Artificial Sequence; identical to SEQ ID NO: 30003
  Cyclic GFR-binding peptide
  MOD_RES (1)..(34)..(35): Xaa is C or S

SEQ ID NO: 84268 - protein, 22 aa, Artificial Sequence
  Cyclic GFR-binding peptide
NYHYKLVVNKNEDKYLISIPSM

SEQ ID NO: 84269 - protein, 28 aa, Artificial Sequence
  Cyclic GFR-binding peptide
  MOD_RES (1)..(1): Xaa is C or S
XSKVIMRHKRLIKPTKGIYYLISTASLD

SEQ ID NO: 84270 - protein, 37 aa, Artificial Sequence; identical to SEQ ID NO: 1884
  Cyclic GFR-binding peptide
  MOD_RES (31)..(31): Xaa is C or S

SEQ ID NO: 84271 - protein, 31 aa, Artificial Sequence
  Cyclic GFR-binding peptide
  MOD_RES (30)..(31): Xaa is C or S
VVMDYHYKLVVNNASDKYLISIPSLRTPVXX

SEQ ID NO: 84272 - protein, 20 aa, Artificial Sequence
  Cyclic GFR-binding peptide
YHYKLIIQQKDNKYLMSIPS

SEQ ID NO: 84273 - protein, 39 aa, Artificial Sequence; identical to SEQ ID NO: 30005
  Cyclic GFR-binding peptide
  MOD_RES (2)..(4)..(36)..(37): Xaa is C or S

SEQ ID NO: 84274 - protein, 29 aa, Artificial Sequence
  Cyclic GFR-binding peptide
EVVMERYKKLVVKDYEDFYLMSIANLETP

SEQ ID NO: 84275 - protein, 33 aa, Artificial Sequence; identical to SEQ ID NO: 1887
  Cyclic GFR-binding peptide
  MOD_RES (29)..(30): Xaa is C or S

SEQ ID NO: 84276 - protein, 30 aa, Artificial Sequence; identical to SEQ ID NO: 30007
  Cyclic GFR-binding peptide

SEQ ID NO: 84277 - protein, 37 aa, Artificial Sequence; identical to SEQ ID NO: 1889
  Cyclic GFR-binding peptide
  MOD_RES (1)..(3)..(35)..(36): Xaa is C or S

SEQ ID NO: 84278 - protein, 32 aa, Artificial Sequence; identical to SEQ ID NO: 75797
  Cyclic GFR-binding peptide
  MOD_RES (2)..(2): Xaa is C or S

SEQ ID NO: 84279 - protein, 32 aa, Artificial Sequence
  Cyclic GFR-binding peptide
  MOD_RES (29)..(30): Xaa is C or S
TMNRHKRLVVNKNEDYYLISTASMKEPVXXPE

SEQ ID NO: 84280 - protein, 31 aa, Artificial Sequence; identical to SEQ ID NO: 30013
  Cyclic GFR-binding peptide
  MOD_RES (2)..(2): Xaa is C or S

SEQ ID NO: 84281 - protein, 26 aa, Artificial Sequence
  Cyclic GFR-binding peptide
IMEYKFKVKPKRGVLYLISIPELAQP

SEQ ID NO: 84282 - protein, 22 aa, Artificial Sequence
  Cyclic GFR-binding peptide
NYHYKLIVNSSDDKYLVSIPSL

SEQ ID NO: 84283 - protein, 28 aa, Artificial Sequence
  Cyclic GFR-binding peptide
VMDPIKGYVVKENEDFYLMNIPSLETPV

SEQ ID NO: 84284 - protein, 36 aa, Artificial Sequence
  Cyclic GFR-binding peptide
  MOD_RES (30)..(31): Xaa is C or S
EVIMEYKFKLLVRGNDLYLMSIPETKVPAXXTSPVR

SEQ ID NO: 84285 - protein, 30 aa, Artificial Sequence; identical to SEQ ID NO: 41615
  Cyclic GFR-binding peptide

SEQ ID NO: 84286 - protein, 28 aa, Artificial Sequence
  Cyclic GFR-binding peptide
  MOD_RES (1)..(1): Xaa is C or S
XEAVSMGEEYKFKTPVGMDDLYLVSIPE

SEQ ID NO: 84287 - protein, 29 aa, Artificial Sequence
  Cyclic GFR-binding peptide
  MOD_RES (2)..(2): Xaa is C or S
KXSKVVMRYKKLVKPTRGVFYLISIANLD

SEQ ID NO: 84288 - protein, 21 aa, Artificial Sequence
  Cyclic GFR-binding peptide
EYKFKLLVRGNDLYLMSIPET

SEQ ID NO: 84289 - protein, 31 aa, Artificial Sequence; identical to SEQ ID NO: 30024
  Cyclic GFR-binding peptide
  MOD_RES (30)..(31): Xaa is C or S

SEQ ID NO: 84290 - protein, 28 aa, Artificial Sequence
  Cyclic GFR-binding peptide
  MOD_RES (27)..(28): Xaa is C or S
GRHKRLYTVVGKDYYLISTASLKTPVXX

SEQ ID NO: 84291 - protein, 31 aa, Artificial Sequence; identical to SEQ ID NO: 1903
  Cyclic GFR-binding peptide
  MOD_RES (29)..(30): Xaa is C or S

SEQ ID NO: 84292 - protein, 28 aa, Artificial Sequence
  Cyclic GFR-binding peptide
  MOD_RES (2)..(2): Xaa is C or S
GXESVAMGYHYKLYTVVGKDKYLISIPS

SEQ ID NO: 84293 - protein, 35 aa, Artificial Sequence; identical to SEQ ID NO: 41626
  Cyclic GFR-binding peptide
  MOD_RES (29)..(30): Xaa is C or S

SEQ ID NO: 84294 - protein, 34 aa, Artificial Sequence; identical to SEQ ID NO: 1906
  Cyclic GFR-binding peptide
  MOD_RES (31)..(32): Xaa is C or S

SEQ ID NO: 84295 - protein, 33 aa, Artificial Sequence; identical to SEQ ID NO: 41631
  Cyclic GFR-binding peptide
  MOD_RES (1)..(1): Xaa is C or S

SEQ ID NO: 84296 - protein, 37 aa, Artificial Sequence; identical to SEQ ID NO: 30034
  Cyclic GFR-binding peptide
  MOD_RES (1)..(33)..(34): Xaa is C or S

SEQ ID NO: 84297 - protein, 34 aa, Artificial Sequence; identical to SEQ ID NO: 1908
  Cyclic GFR-binding peptide
  MOD_RES (32)..(32): Xaa is C or S

SEQ ID NO: 84298 - protein, 32 aa, Artificial Sequence; identical to SEQ ID NO: 30036
  Cyclic GFR-binding peptide
  MOD_RES (28)..(29): Xaa is C or S

SEQ ID NO: 84299 - protein, 33 aa, Artificial Sequence; identical to SEQ ID NO: 1911
  Cyclic GFR-binding peptide
  MOD_RES (28)..(28): Xaa is C or S

SEQ ID NO: 84300 - protein, 28 aa, Artificial Sequence
  Cyclic GFR-binding peptide
  MOD_RES (28)..(28): Xaa is C or S
MNYHYKLIVNNSSDKYLVSIPSLKTPAX

SEQ ID NO: 84301 - protein, 29 aa, Artificial Sequence
  Cyclic GFR-binding peptide
  MOD_RES (26)..(27): Xaa is C or S
RYKKLLLVRGNDFYLMSIANTKVPAXXTS

SEQ ID NO: 84302 - protein, 32 aa, Artificial Sequence; identical to SEQ ID NO: 1913
  Cyclic GFR-binding peptide
  MOD_RES (1)..(1): Xaa is C or S

SEQ ID NO: 84303 - protein, 28 aa, Artificial Sequence
  Cyclic GFR-binding peptide
  MOD_RES (1)..(1): Xaa is C or S
XAEVVMDRYKKLVVNNAADFYLISIANL

SEQ ID NO: 84304 - protein, 31 aa, Artificial Sequence
  Cyclic GFR-binding peptide
  MOD_RES (30)..(31): Xaa is C or S
VVMDRHKRLVVNNASDYYLISTASLRTPVXX

SEQ ID NO: 84305 - protein, 25 aa, Artificial Sequence
  Cyclic GFR-binding peptide
EVVMDRYKKLVVNNAADFYLISIAN

SEQ ID NO: 84306 - protein, 29 aa, Artificial Sequence
  Cyclic GFR-binding peptide
  MOD_RES (29)..(29): Xaa is C or S
VMDPIKGYVVNNAADFYLINIPSLRAPVX

SEQ ID NO: 84307 - protein, 30 aa, Artificial Sequence; identical to SEQ ID NO: 1916
  Cyclic GFR-binding peptide
  MOD_RES (29)..(30): Xaa is C or S

SEQ ID NO: 84308 - protein, 30 aa, Artificial Sequence
  Cyclic GFR-binding peptide
  MOD_RES (29)..(30): Xaa is C or S
VMDEYKFKVVNNASDLYLISIPELRTPVXX

SEQ ID NO: 84309 - protein, 32 aa, Artificial Sequence; identical to SEQ ID NO: 1918
  Cyclic GFR-binding peptide
  MOD_RES (1)..(3): Xaa is C or S

SEQ ID NO: 84310 - protein, 23 aa, Artificial Sequence
  Cyclic GFR-binding peptide
NRHKRLVVNKNEDYYLISTASMK

SEQ ID NO: 84311 - protein, 29 aa, Artificial Sequence
  Cyclic GFR-binding peptide
  MOD_RES (28)..(29): Xaa is C or S
IMYHYKLVKPKRGVKYLISIPSLAQPVXX

SEQ ID NO: 84312 - protein, 27 aa, Artificial Sequence
  Cyclic GFR-binding peptide
KVVMRHKRLVKPTRGVYYLISTASLDQ

SEQ ID NO: 84313 - protein, 30 aa, Artificial Sequence; identical to SEQ ID NO: 1923
  Cyclic GFR-binding peptide
  MOD_RES (29)..(30): Xaa is C or S

SEQ ID NO: 84314 - protein, 25 aa, Artificial Sequence
  Cyclic GFR-binding peptide
VVMDPIKGYVVKENEDFYLMNIPSL

SEQ ID NO: 84315 - protein, 33 aa, Artificial Sequence
  Cyclic GFR-binding peptide
  MOD_RES (28)..(29): Xaa is C or S
VMPIKGYVKPTRGVFYLINIPSLDQPVXXPSAS

SEQ ID NO: 84316 - protein, 37 aa, Artificial Sequence; identical to SEQ ID NO: 1925
  Cyclic GFR-binding peptide
  MOD_RES (2)..(34)..(35): Xaa is C or S

SEQ ID NO: 84317 - protein, 23 aa, Artificial Sequence
  Cyclic GFR-binding peptide
NRHKRLIVNSSDDYYLVSTASLK

SEQ ID NO: 84318 - protein, 36 aa, Artificial Sequence; identical to SEQ ID NO: 1927
  Cyclic GFR-binding peptide
  MOD_RES (30)..(31): Xaa is C or S

SEQ ID NO: 84319 - protein, 30 aa, Artificial Sequence; identical to SEQ ID NO: 1928
  Cyclic GFR-binding peptide
  MOD_RES (29)..(30): Xaa is C or S

SEQ ID NO: 84320 - protein, 30 aa, Artificial Sequence; identical to SEQ ID NO: 1929
  Cyclic GFR-binding peptide
  MOD_RES (29)..(30): Xaa is C or S

SEQ ID NO: 84321 - protein, 29 aa, Artificial Sequence
  Cyclic GFR-binding peptide
  MOD_RES (26)..(27): Xaa is C or S
YHYKLIVNNSSDKYLVSIPSLKTPAXXAK

SEQ ID NO: 84322 - protein, 23 aa, Artificial Sequence
  Cyclic GFR-binding peptide
RYKKLIIQQKDNFYLMSIANMKT

SEQ ID NO: 84323 - protein, 31 aa, Artificial Sequence; identical to SEQ ID NO: 1933
  Cyclic GFR-binding peptide
  MOD_RES (2)..(4): Xaa is C or S

SEQ ID NO: 84324 - protein, 27 aa, Artificial Sequence
  Cyclic GFR-binding peptide
MNEYKFKVVNKNEDLYLISIPEMKEPV

SEQ ID NO: 84325 - protein, 30 aa, Artificial Sequence; identical to SEQ ID NO: 30065
  Cyclic GFR-binding peptide
  MOD_RES (26)..(26): Xaa is C or S

SEQ ID NO: 84326 - protein, 29 aa, Artificial Sequence
  Cyclic GFR-binding peptide
  MOD_RES (27)..(28): Xaa is C or S
NRYKKLVVNKNEDFYLISIANMKEPVXXP

SEQ ID NO: 84327 - protein, 34 aa, Artificial Sequence; identical to SEQ ID NO: 41650
  Cyclic GFR-binding peptide
  MOD_RES (2)..(34): Xaa is C or S

SEQ ID NO: 84328 - protein, 38 aa, Artificial Sequence; identical to SEQ ID NO: 1936
  Cyclic GFR-binding peptide
  MOD_RES (2)..(33)..(34): Xaa is C or S

SEQ ID NO: 84329 - protein, 27 aa, Artificial Sequence
  Cyclic GFR-binding peptide
  MOD_RES (2)..(2): Xaa is C or S
KXSKVVMRYKKLVKPTRGVFYLISIAN

SEQ ID NO: 84330 - protein, 24 aa, Artificial Sequence
  Cyclic GFR-binding peptide
MDYHYKLVVKENEDKYLMSIPSLE

SEQ ID NO: 84331 - protein, 28 aa, Artificial Sequence
  Cyclic GFR-binding peptide
VIMRHKRLLLVRGNDYYLMSTASTKVPA

SEQ ID NO: 84332 - protein, 37 aa, Artificial Sequence; identical to SEQ ID NO: 41660
  Cyclic GFR-binding peptide
  MOD_RES (1)..(33)..(34): Xaa is C or S

SEQ ID NO: 84333 - protein, 33 aa, Artificial Sequence; identical to SEQ ID NO: 41665
  Cyclic GFR-binding peptide
  MOD_RES (1)..(3): Xaa is C or S

SEQ ID NO: 84334 - protein, 34 aa, Artificial Sequence; identical to SEQ ID NO: 41668
  Cyclic GFR-binding peptide
  MOD_RES (1)..(3): Xaa is C or S

SEQ ID NO: 84335 - protein, 32 aa, Artificial Sequence; identical to SEQ ID NO: 30084
  Cyclic GFR-binding peptide
  MOD_RES (29)..(30): Xaa is C or S

SEQ ID NO: 84336 - protein, 37 aa, Artificial Sequence
  Cyclic GFR-binding peptide
  MOD_RES (1)..(3)..(35)..(36): Xaa is C or S
XGXESVAMGRHKRLYTVVGKDYYLISTASLKTPVXXA

SEQ ID NO: 84337 - protein, 33 aa, Artificial Sequence; identical to SEQ ID NO: 1945
  Cyclic GFR-binding peptide
  MOD_RES (1)..(3): Xaa is C or S

SEQ ID NO: 84338 - protein, 35 aa, Artificial Sequence
  Cyclic GFR-binding peptide
  MOD_RES (2)..(34)..(35): Xaa is C or S
AXSEVTMNRHKRLVVNKNEDYYLISTASMKEPVXX

SEQ ID NO: 84339 - protein, 31 aa, Artificial Sequence; identical to SEQ ID NO: 1946
  Cyclic GFR-binding peptide
  MOD_RES (2)..(2): Xaa is C or S

SEQ ID NO: 84340 - protein, 28 aa, Artificial Sequence
  Cyclic GFR-binding peptide
VVMDRYKKLVVKENEDFYLMSIANLETP

SEQ ID NO: 84341 - protein, 34 aa, Artificial Sequence; identical to SEQ ID NO: 1950
  Cyclic GFR-binding peptide
  MOD_RES (2)..(4): Xaa is C or S

SEQ ID NO: 84342 - protein, 29 aa, Artificial Sequence
  Cyclic GFR-binding peptide
  MOD_RES (2)..(4): Xaa is C or S
LXGXEEVIMRHKRLLLVRGNDYYLMSTAS

SEQ ID NO: 84343 - protein, 31 aa, Artificial Sequence; identical to SEQ ID NO: 1951
  Cyclic GFR-binding peptide
  MOD_RES (31)..(31): Xaa is C or S

SEQ ID NO: 84344 - protein, 33 aa, Artificial Sequence; identical to SEQ ID NO: 1953
  Cyclic GFR-binding peptide
  MOD_RES (27)..(28): Xaa is C or S

SEQ ID NO: 84345 - protein, 32 aa, Artificial Sequence; identical to SEQ ID NO: 41676
  Cyclic GFR-binding peptide
  MOD_RES (29)..(30): Xaa is C or S

SEQ ID NO: 84346 - protein, 27 aa, Artificial Sequence
  Cyclic GFR-binding peptide
GEVVMEEYKFKVVKDYEDLYLMSIPEL

SEQ ID NO: 84347 - protein, 30 aa, Artificial Sequence; identical to SEQ ID NO: 41677
  Cyclic GFR-binding peptide
  MOD_RES (2)..(2): Xaa is C or S

SEQ ID NO: 84348 - protein, 29 aa, Artificial Sequence
  Cyclic GFR-binding peptide
  MOD_RES (1)..(1): Xaa is C or S
XAEVVMDRYKKLVVNNAADFYLISIANLR

SEQ ID NO: 84349 - protein, 29 aa, Artificial Sequence
  Cyclic GFR-binding peptide
  MOD_RES (27)..(28): Xaa is C or S
GEYKFKIIQQKDNLYLMSIPEMKTPTXXP

SEQ ID NO: 84350 - protein, 28 aa, Artificial Sequence
  Cyclic GFR-binding peptide
VIMPIKGYVKPKRGVFYLINIPSLAQPV

SEQ ID NO: 84351 - protein, 31 aa, Artificial Sequence; identical to SEQ ID NO: 1954
  Cyclic GFR-binding peptide
  MOD_RES (27)..(27): Xaa is C or S

SEQ ID NO: 84352 - protein, 35 aa, Artificial Sequence
  Cyclic GFR-binding peptide
  MOD_RES (2)..(4): Xaa is C or S
RXGXSEVVMDYHYKLVVNNASDKYLISIPSLRTPV

SEQ ID NO: 84353 - protein, 33 aa, Artificial Sequence; identical to SEQ ID NO: 30099
  Cyclic GFR-binding peptide
  MOD_RES (2)..(2): Xaa is C or S

SEQ ID NO: 84354 - protein, 25 aa, Artificial Sequence
  Cyclic GFR-binding peptide
MDRYKKLVVKENEDFYLMSIANLET

SEQ ID NO: 84355 - protein, 32 aa, Artificial Sequence; identical to SEQ ID NO: 1962
  Cyclic GFR-binding peptide
  MOD_RES (26)..(27): Xaa is C or S

SEQ ID NO: 84356 - protein, 38 aa, Artificial Sequence; identical to SEQ ID NO: 1965
  Cyclic GFR-binding peptide
  MOD_RES (2)..(34)..(35): Xaa is C or S

SEQ ID NO: 84357 - protein, 33 aa, Artificial Sequence; identical to SEQ ID NO: 1966
  Cyclic GFR-binding peptide
  MOD_RES (29)..(30): Xaa is C or S

SEQ ID NO: 84358 - protein, 30 aa, Artificial Sequence; identical to SEQ ID NO: 30105
  Cyclic GFR-binding peptide
  MOD_RES (28)..(29): Xaa is C or S

SEQ ID NO: 84359 - protein, 28 aa, Artificial Sequence
  Cyclic GFR-binding peptide
  MOD_RES (2)..(2): Xaa is C or S
KXSKVIMYHYKLIKPTKGIKYLISIPSL

SEQ ID NO: 84360 - protein, 29 aa, Artificial Sequence
  Cyclic GFR-binding peptide
  MOD_RES (27)..(28): Xaa is C or S
NRYKKLIVNNSSDFYLVSIANLKTPAXXA

SEQ ID NO: 84361 - protein, 25 aa, Artificial Sequence
  Cyclic GFR-binding peptide
DPIKGYVVNNASDFYLINIPSLRTP

SEQ ID NO: 84362 - protein, 25 aa, Artificial Sequence
  Cyclic GFR-binding peptide
SKVIMPIKGYIKPTKGIFYLINIPS

SEQ ID NO: 84363 - protein, 33 aa, Artificial Sequence
  Cyclic GFR-binding peptide
  MOD_RES (30)..(31): Xaa is C or S
KVVMPIKGYVKPTRGVFYLINIPSLDQPVXXPS

SEQ ID NO: 84364 - protein, 34 aa, Artificial Sequence; identical to SEQ ID NO: 1979
  Cyclic GFR-binding peptide
  MOD_RES (1)..(3)..(34): Xaa is C or S

SEQ ID NO: 84365 - protein, 31 aa, Artificial Sequence; identical to SEQ ID NO: 41698
  Cyclic GFR-binding peptide
  MOD_RES (1)..(1): Xaa is C or S

SEQ ID NO: 84366 - protein, 29 aa, Artificial Sequence
  Cyclic GFR-binding peptide
  MOD_RES (1)..(3): Xaa is C or S
XGXARVVMNRYKKLIVNSSDDFYLVSIAN

SEQ ID NO: 84367 - protein, 25 aa, Artificial Sequence
  Cyclic GFR-binding peptide
EYKFKIVNSSDDLYLVSIPELQTPA

SEQ ID NO: 84368 - protein, 37 aa, Artificial Sequence; identical to SEQ ID NO: 1981
  Cyclic GFR-binding peptide
  MOD_RES (2)..(34)..(35): Xaa is C or S

SEQ ID NO: 84369 - protein, 35 aa, Artificial Sequence
  Cyclic GFR-binding peptide
  MOD_RES (31)..(32): Xaa is C or S
EVVMDYHYKLVVNNASDKYLISIPSLRTPVXXTPP

SEQ ID NO: 84370 - protein, 36 aa, Artificial Sequence; identical to SEQ ID NO: 41702
  Cyclic GFR-binding peptide
  MOD_RES (1)..(32)..(33): Xaa is C or S

SEQ ID NO: 84371 - protein, 36 aa, Artificial Sequence
  Cyclic GFR-binding peptide
  MOD_RES (32)..(33): Xaa is C or S
ESVAMGRHKRLYTVVGKDYYLISTASLKTPVXXAKS

SEQ ID NO: 84372 - protein, 35 aa, Artificial Sequence; identical to SEQ ID NO: 41703
  Cyclic GFR-binding peptide
  MOD_RES (1)..(33)..(34): Xaa is C or S

SEQ ID NO: 84373 - protein, 34 aa, Artificial Sequence; identical to SEQ ID NO: 30122
  Cyclic GFR-binding peptide
  MOD_RES (30)..(31): Xaa is C or S

SEQ ID NO: 84374 - protein, 29 aa, Artificial Sequence
  Cyclic GFR-binding peptide
GEVVMERYKKLVVKDYEDFYLMSIANLET

SEQ ID NO: 84375 - protein, 33 aa, Artificial Sequence
  Cyclic GFR-binding peptide
  MOD_RES (1)..(32)..(33): Xaa is C or S
XEEVIMYHYKLLLVRGNDKYLMSIPSTKVPAXX

SEQ ID NO: 84376 - protein, 30 aa, Artificial Sequence; identical to SEQ ID NO: 1985
  Cyclic GFR-binding peptide
  MOD_RES (1)..(1): Xaa is C or S

SEQ ID NO: 84377 - protein, 31 aa, Artificial Sequence; identical to SEQ ID NO: 41705
  Cyclic GFR-binding peptide
  MOD_RES (31)..(31): Xaa is C or S

SEQ ID NO: 84378 - protein, 30 aa, Artificial Sequence; identical to SEQ ID NO: 41706
  Cyclic GFR-binding peptide
  MOD_RES (28)..(29): Xaa is C or S

SEQ ID NO: 84379 - protein, 33 aa, Artificial Sequence; identical to SEQ ID NO: 41708
  Cyclic GFR-binding peptide
  MOD_RES (1)..(33): Xaa is C or S

SEQ ID NO: 84380 - protein, 37 aa, Artificial Sequence; identical to SEQ ID NO: 30133
  Cyclic GFR-binding peptide
  MOD_RES (2)..(33)..(34): Xaa is C or S

SEQ ID NO: 84381 - protein, 28 aa, Artificial Sequence
  Cyclic GFR-binding peptide
  MOD_RES (1)..(1): Xaa is C or S
XAKVVMNYHYKLIVNNSSDKYLVSIPSL

SEQ ID NO: 84382 - protein, 22 aa, Artificial Sequence
  Cyclic GFR-binding peptide
YHYKLVVKDYEDKYLMSIPSLE

SEQ ID NO: 84383 - protein, 28 aa, Artificial Sequence
  Cyclic GFR-binding peptide
VSMGEEYKFKTPVGMDDLYLVSIPELKT

SEQ ID NO: 84384 - protein, 27 aa, Artificial Sequence
  Cyclic GFR-binding peptide
IMRYKKLIKPTKGIFYLISIANLDQSV

SEQ ID NO: 84385 - protein, 38 aa, Artificial Sequence; identical to SEQ ID NO: 1997
  Cyclic GFR-binding peptide
  MOD_RES (2)..(4)..(35)..(36): Xaa is C or S

SEQ ID NO: 84386 - protein, 34 aa, Artificial Sequence; identical to SEQ ID NO: 30139
  Cyclic GFR-binding peptide
  MOD_RES (1)..(33)..(34): Xaa is C or S

SEQ ID NO: 84387 - protein, 26 aa, Artificial Sequence
  Cyclic GFR-binding peptide
VVMGEYKFKIIQQKDNLYLMSIPEMK

SEQ ID NO: 84388 - protein, 32 aa, Artificial Sequence
  Cyclic GFR-binding peptide
  MOD_RES (32)..(32): Xaa is C or S
AEVVMDRHKRLVVNNAADYYLISTASLRAPVX

SEQ ID NO: 84389 - protein, 32 aa, Artificial Sequence; identical to SEQ ID NO: 30141
  Cyclic GFR-binding peptide
  MOD_RES (27)..(28): Xaa is C or S

SEQ ID NO: 84390 - protein, 29 aa, Artificial Sequence
  Cyclic GFR-binding peptide
  MOD_RES (1)..(3): Xaa is C or S
XGXRDVVMGEYKFKIIQQKDNLYLMSIPE

SEQ ID NO: 84391 - protein, 33 aa, Artificial Sequence; identical to SEQ ID NO: 12548
  Cyclic GFR-binding peptide
  MOD_RES (29)..(30): Xaa is C or S

SEQ ID NO: 84392 - protein, 25 aa, Artificial Sequence
  Cyclic GFR-binding peptide
RVIMRHKRLVKPKRGVYYLISTASL

SEQ ID NO: 84393 - protein, 34 aa, Artificial Sequence; identical to SEQ ID NO: 2001
  Cyclic GFR-binding peptide
  MOD_RES (2)..(34): Xaa is C or S

SEQ ID NO: 84394 - protein, 35 aa, Artificial Sequence
  Cyclic GFR-binding peptide
  MOD_RES (2)..(4): Xaa is C or S
HXGXAKVVMNPIKGYIVNNSSDFYLVNIPSLKTPA

SEQ ID NO: 84395 - protein, 34 aa, Artificial Sequence; identical to SEQ ID NO: 30150
  Cyclic GFR-binding peptide
  MOD_RES (2)..(34): Xaa is C or S

SEQ ID NO: 84396 - protein, 31 aa, Artificial Sequence; identical to SEQ ID NO: 30151
  Cyclic GFR-binding peptide
  MOD_RES (26)..(27): Xaa is C or S

SEQ ID NO: 84397 - protein, 20 aa, Artificial Sequence
  Cyclic GFR-binding peptide
RYKKLVVKENEDFYLMSIAN

SEQ ID NO: 84398 - protein, 28 aa, Artificial Sequence
  Cyclic GFR-binding peptide
  MOD_RES (26)..(27): Xaa is C or S
RYKKLTPVGMDDFYLVSIANLKTPVXXA

SEQ ID NO: 84399 - protein, 34 aa, Artificial Sequence
  Cyclic GFR-binding peptide
  MOD_RES (31)..(32): Xaa is C or S
EVVMDRHKRLVVNNASDYYLISTASLRTPVXXTP

SEQ ID NO: 84400 - protein, 35 aa, Artificial Sequence; identical to SEQ ID NO: 41730
  Cyclic GFR-binding peptide
  MOD_RES (30)..(31): Xaa is C or S

SEQ ID NO: 84401 - protein, 24 aa, Artificial Sequence
  Cyclic GFR-binding peptide
RHKRLVKPTRGVYYLISTASLDQP

SEQ ID NO: 84402 - protein, 36 aa, Artificial Sequence; identical to SEQ ID NO: 2013
  Cyclic GFR-binding peptide
  MOD_RES (1)..(3)..(35)..(36): Xaa is C or S

SEQ ID NO: 84403 - protein, 31 aa, Artificial Sequence; identical to SEQ ID NO: 30161
  Cyclic GFR-binding peptide
  MOD_RES (2)..(2): Xaa is C or S

SEQ ID NO: 84404 - protein, 31 aa, Artificial Sequence
  Cyclic GFR-binding peptide
  MOD_RES (27)..(28): Xaa is C or S
DRHKRLVVNNASDYYLISTASLRTPVXXTPP

SEQ ID NO: 84405 - protein, 27 aa, Artificial Sequence
  Cyclic GFR-binding peptide
VVMYHYKLVKPTRGVKYLISIPSLDQP

SEQ ID NO: 84406 - protein, 27 aa, Artificial Sequence
  Cyclic GFR-binding peptide
VVMRHKRLVKPTRGVYYLISTASLDQP

SEQ ID NO: 84407 - protein, 31 aa, Artificial Sequence; identical to SEQ ID NO: 75878
  Cyclic GFR-binding peptide
  MOD_RES (26)..(27): Xaa is C or S

SEQ ID NO: 84408 - protein, 25 aa, Artificial Sequence
  Cyclic GFR-binding peptide
DRYKKLVVNNAADFYLISIANLRAP

SEQ ID NO: 84409 - protein, 31 aa, Artificial Sequence; identical to SEQ ID NO: 2019
  Cyclic GFR-binding peptide

SEQ ID NO: 84410 - protein, 23 aa, Artificial Sequence
  Cyclic GFR-binding peptide
IMEYKFKVKPKRGVLYLISIPEL

SEQ ID NO: 84411 - protein, 32 aa, Artificial Sequence; identical to SEQ ID NO: 30167
  Cyclic GFR-binding peptide
  MOD_RES (26)..(27): Xaa is C or S

SEQ ID NO: 84412 - protein, 31 aa, Artificial Sequence; identical to SEQ ID NO: 2020
  Cyclic GFR-binding peptide
  MOD_RES (2)..(4): Xaa is C or S

SEQ ID NO: 84413 - protein, 30 aa, Artificial Sequence; identical to SEQ ID NO: 30170
  Cyclic GFR-binding peptide
  MOD_RES (30)..(30): Xaa is C or S

SEQ ID NO: 84414 - protein, 34 aa, Artificial Sequence; identical to SEQ ID NO: 30172
  Cyclic GFR-binding peptide
  MOD_RES (1)..(3): Xaa is C or S

SEQ ID NO: 84415 - protein, 27 aa, Artificial Sequence
  Cyclic GFR-binding peptide
  MOD_RES (26)..(27): Xaa is C or S
PIKGYVVNNAADFYLINIPSLRAPVXX

SEQ ID NO: 84416 - protein, 37 aa, Artificial Sequence; identical to SEQ ID NO: 2021
  Cyclic GFR-binding peptide
  MOD_RES (1)..(3)..(35)..(36): Xaa is C or S

SEQ ID NO: 84417 - protein, 34 aa, Artificial Sequence; identical to SEQ ID NO: 30175
  Cyclic GFR-binding peptide
  MOD_RES (1)..(3): Xaa is C or S

SEQ ID NO: 84418 - protein, 32 aa, Artificial Sequence; identical to SEQ ID NO: 30183
  Cyclic GFR-binding peptide
  MOD_RES (31)..(32): Xaa is C or S

SEQ ID NO: 84419 - protein, 30 aa, Artificial Sequence; identical to SEQ ID NO: 41745
  Cyclic GFR-binding peptide
  MOD_RES (1)..(3): Xaa is C or S

SEQ ID NO: 84420 - protein, 40 aa, Artificial Sequence; identical to SEQ ID NO: 2029
  Cyclic GFR-binding peptide
  MOD_RES (2)..(4)..(36)..(37): Xaa is C or S

SEQ ID NO: 84421 - protein, 28 aa, Artificial Sequence
  Cyclic GFR-binding peptide
  MOD_RES (2)..(2): Xaa is C or S
GXEEVIMYHYKLLLVRGNDKYLMSIPST

SEQ ID NO: 84422 - protein, 27 aa, Artificial Sequence
  Cyclic GFR-binding peptide
MDRYKKLVVKENEDFYLMSIANLETPV

SEQ ID NO: 84423 - protein, 33 aa, Artificial Sequence; identical to SEQ ID NO: 2031
  Cyclic GFR-binding peptide
  MOD_RES (2)..(33): Xaa is C or S

SEQ ID NO: 84424 - protein, 24 aa, Artificial Sequence
  Cyclic GFR-binding peptide
VMDEYKFKVVNNAADLYLISIPEL

SEQ ID NO: 84425 - protein, 31 aa, Artificial Sequence; identical to SEQ ID NO: 30190
  Cyclic GFR-binding peptide
  MOD_RES (28)..(29): Xaa is C or S

SEQ ID NO: 84426 - protein, 24 aa, Artificial Sequence
  Cyclic GFR-binding peptide
MDEYKFKVVNNAADLYLISIPELR

SEQ ID NO: 84427 - protein, 37 aa, Artificial Sequence
  Cyclic GFR-binding peptide
  MOD_RES (32)..(33): Xaa is C or S
ESVAMGRHKRLYTVVGKDYYLISTASLKTPVXXAKSA

SEQ ID NO: 84428 - protein, 31 aa, Artificial Sequence
  Cyclic GFR-binding peptide
SEVTMNPIKGYVVNKNEDFYLINIPSMKEPV

SEQ ID NO: 84429 - protein, 33 aa, Artificial Sequence; identical to SEQ ID NO: 2038
  Cyclic GFR-binding peptide
  MOD_RES (27)..(28): Xaa is C or S

SEQ ID NO: 84430 - protein, 36 aa, Artificial Sequence
  Cyclic GFR-binding peptide
  MOD_RES (1)..(3)..(35)..(36): Xaa is C or S
XGXRDVVMGEYKFKIIQQKDNLYLMSIPEMKTPTXX

SEQ ID NO: 84431 - protein, 31 aa, Artificial Sequence; identical to SEQ ID NO: 41749
  Cyclic GFR-binding peptide
  MOD_RES (1)..(3): Xaa is C or S

SEQ ID NO: 84432 - protein, 34 aa, Artificial Sequence
  Cyclic GFR-binding peptide
  MOD_RES (30)..(31): Xaa is C or S
VTMNRYKKLVVNKNEDFYLISIANMKEPVXXPEP

SEQ ID NO: 84433 - protein, 25 aa, Artificial Sequence
  Cyclic GFR-binding peptide
SKVIMEYKFKIKPTKGILYLISIPE

SEQ ID NO: 84434 - protein, 25 aa, Artificial Sequence
  Cyclic GFR-binding peptide
EVVMEYHYKLVVKDYEDKYLMSIPS

SEQ ID NO: 84435 - protein, 24 aa, Artificial Sequence
  Cyclic GFR-binding peptide
NYHYKLVVNKNEDKYLISIPSMKE

SEQ ID NO: 84436 - protein, 33 aa, Artificial Sequence
  Cyclic GFR-binding peptide
  MOD_RES (1)..(33): Xaa is C or S
XSEVTMNRYKKLVVNKNEDFYLISIANMKEPVX

SEQ ID NO: 84437 - protein, 30 aa, Artificial Sequence; identical to SEQ ID NO: 2047
  Cyclic GFR-binding peptide
  MOD_RES (30)..(30): Xaa is C or S

SEQ ID NO: 84438 - protein, 28 aa, Artificial Sequence
  Cyclic GFR-binding peptide
  MOD_RES (26)..(27): Xaa is C or S
PIKGYVKPTRGVFYLINIPSLDQPVXXP

SEQ ID NO: 84439 - protein, 31 aa, Artificial Sequence; identical to SEQ ID NO: 30210
  Cyclic GFR-binding peptide
  MOD_RES (27)..(28): Xaa is C or S

SEQ ID NO: 84440 - protein, 24 aa, Artificial Sequence
  Cyclic GFR-binding peptide
EYKFKVVKENEDLYLMSIPELETP

SEQ ID NO: 84441 - protein, 34 aa, Artificial Sequence; identical to SEQ ID NO: 30213
  Cyclic GFR-binding peptide
  MOD_RES (1)..(34): Xaa is C or S

SEQ ID NO: 84442 - protein, 31 aa, Artificial Sequence; identical to SEQ ID NO: 2052
  Cyclic GFR-binding peptide
  MOD_RES (28)..(29): Xaa is C or S

SEQ ID NO: 84443 - protein, 41 aa, Artificial Sequence; identical to SEQ ID NO: 2053
  Cyclic GFR-binding peptide
  MOD_RES (2)..(4)..(35)..(36): Xaa is C or S

SEQ ID NO: 84444 - protein, 25 aa, Artificial Sequence
  Cyclic GFR-binding peptide
EEVIMRHKRLLLVRGNDYYLMSTAS

SEQ ID NO: 84445 - protein, 32 aa, Artificial Sequence; identical to SEQ ID NO: 30217
  Cyclic GFR-binding peptide
  MOD_RES (1)..(3): Xaa is C or S

SEQ ID NO: 84446 - protein, 25 aa, Artificial Sequence
  Cyclic GFR-binding peptide
VAMGPIKGYYTVVGKDFYLINIPSL

SEQ ID NO: 84447 - protein, 34 aa, Artificial Sequence
  Cyclic GFR-binding peptide
  MOD_RES (1)..(33)..(34): Xaa is C or S
XSEVTMNRYKKLVVNKNEDFYLISIANMKEPVXX

SEQ ID NO: 84448 - protein, 36 aa, Artificial Sequence; identical to SEQ ID NO: 2057
  Cyclic GFR-binding peptide
  MOD_RES (2)..(35)..(36): Xaa is C or S

SEQ ID NO: 84449 - protein, 32 aa, Artificial Sequence; identical to SEQ ID NO: 2059
  Cyclic GFR-binding peptide
  MOD_RES (29)..(30): Xaa is C or S

SEQ ID NO: 84450 - protein, 22 aa, Artificial Sequence
  Cyclic GFR-binding peptide
IMEYKFKIKPTKGILYLISIPE

SEQ ID NO: 84451 - protein, 39 aa, Artificial Sequence; identical to SEQ ID NO: 2062
  Cyclic GFR-binding peptide
  MOD_RES (1)..(33)..(34): Xaa is C or S

SEQ ID NO: 84452 - protein, 33 aa, Artificial Sequence; identical to SEQ ID NO: 2066
  Cyclic GFR-binding peptide
  MOD_RES (32)..(33): Xaa is C or S

SEQ ID NO: 84453 - protein, 36 aa, Artificial Sequence
  Cyclic GFR-binding peptide
  MOD_RES (1)..(3)..(35)..(36): Xaa is C or S
XGXESVAMGRHKRLYTVVGKDYYLISTASLKTPVXX

SEQ ID NO: 84454 - protein, 28 aa, Artificial Sequence
  Cyclic GFR-binding peptide
SKVVMRHKRLVKPTRGVYYLISTASLDQ

SEQ ID NO: 84455 - protein, 31 aa, Artificial Sequence; identical to SEQ ID NO: 2071
  Cyclic GFR-binding peptide
  MOD_RES (1)..(1): Xaa is C or S

SEQ ID NO: 84456 - protein, 31 aa, Artificial Sequence; identical to SEQ ID NO: 41785
  Cyclic GFR-binding peptide
  MOD_RES (27)..(28): Xaa is C or S

SEQ ID NO: 84457 - protein, 32 aa, Artificial Sequence; identical to SEQ ID NO: 41786
  Cyclic GFR-binding peptide
  MOD_RES (2)..(4): Xaa is C or S

SEQ ID NO: 84458 - protein, 25 aa, Artificial Sequence
  Cyclic GFR-binding peptide
YHYKLLLVRGNDKYLMSIPSTKVPA

SEQ ID NO: 84459 - protein, 25 aa, Artificial Sequence
  Cyclic GFR-binding peptide
NYHYKLVVNKNEDKYLISIPSMKEP

SEQ ID NO: 84460 - protein, 28 aa, Artificial Sequence
  Cyclic GFR-binding peptide
  MOD_RES (1)..(1): Xaa is C or S
XARVVMNYHYKLIVNSSDDKYLVSIPSL

SEQ ID NO: 84461 - protein, 25 aa, Artificial Sequence
  Cyclic GFR-binding peptide
EYKFKVVNKNEDLYLISIPEMKEPV

SEQ ID NO: 84462 - protein, 22 aa, Artificial Sequence
  Cyclic GFR-binding peptide
IMRYKKLVKPKRGVFYLISIAN

SEQ ID NO: 84463 - protein, 36 aa, Artificial Sequence; identical to SEQ ID NO: 2079
  Cyclic GFR-binding peptide
  MOD_RES (1)..(3)..(34)..(35): Xaa is C or S

SEQ ID NO: 84464 - protein, 30 aa, Artificial Sequence; identical to SEQ ID NO: 41789
  Cyclic GFR-binding peptide

SEQ ID NO: 84465 - protein, 32 aa, Artificial Sequence; identical to SEQ ID NO: 2081
  Cyclic GFR-binding peptide
  MOD_RES (30)..(30): Xaa is C or S

SEQ ID NO: 84466 - protein, 22 aa, Artificial Sequence
  Cyclic GFR-binding peptide
MRHKRLLLVRGNDYYLMSTAST

SEQ ID NO: 84467 - protein, 36 aa, Artificial Sequence; identical to SEQ ID NO: 30235
  Cyclic GFR-binding peptide
  MOD_RES (2)..(4)..(36): Xaa is C or S

SEQ ID NO: 84468 - protein, 34 aa, Artificial Sequence; identical to SEQ ID NO: 2083
  Cyclic GFR-binding peptide
  MOD_RES (2)..(33)..(34): Xaa is C or S

SEQ ID NO: 84469 - protein, 26 aa, Artificial Sequence
  Cyclic GFR-binding peptide
TMNPIKGYVVNKNEDFYLINIPSMKE

SEQ ID NO: 84470 - protein, 33 aa, Artificial Sequence
  Cyclic GFR-binding peptide
  MOD_RES (32)..(33): Xaa is C or S
SEVVMDRHKRLVVNNASDYYLISTASLRTPVXX

SEQ ID NO: 84471 - protein, 30 aa, Artificial Sequence; identical to SEQ ID NO: 2092
  Cyclic GFR-binding peptide
  MOD_RES (28)..(29): Xaa is C or S

SEQ ID NO: 84472 - protein, 30 aa, Artificial Sequence
  Cyclic GFR-binding peptide
  MOD_RES (26)..(27): Xaa is C or S
PIKGYVKPTRGVFYLINIPSLDQPVXXPSA

SEQ ID NO: 84473 - protein, 33 aa, Artificial Sequence; identical to SEQ ID NO: 2094
  Cyclic GFR-binding peptide
  MOD_RES (29)..(30): Xaa is C or S

SEQ ID NO: 84474 - protein, 25 aa, Artificial Sequence
  Cyclic GFR-binding peptide
VMDRYKKLVVNNASDFYLISIANLR

SEQ ID NO: 84475 - protein, 33 aa, Artificial Sequence; identical to SEQ ID NO: 2095
  Cyclic GFR-binding peptide
  MOD_RES (2)..(4): Xaa is C or S

SEQ ID NO: 84476 - protein, 31 aa, Artificial Sequence
  Cyclic GFR-binding peptide
  MOD_RES (30)..(31): Xaa is C or S
VTMNEYKFKVVNKNEDLYLISIPEMKEPVXX

SEQ ID NO: 84477 - protein, 32 aa, Artificial Sequence; identical to SEQ ID NO: 30251
  Cyclic GFR-binding peptide
  MOD_RES (2)..(2): Xaa is C or S

SEQ ID NO: 84478 - protein, 34 aa, Artificial Sequence; identical to SEQ ID NO: 41805
  Cyclic GFR-binding peptide
  MOD_RES (2)..(34): Xaa is C or S

SEQ ID NO: 84479 - protein, 28 aa, Artificial Sequence
  Cyclic GFR-binding peptide
AVSMGERYKKLTPVGMDDFYLVSIANLK

SEQ ID NO: 84480 - protein, 33 aa, Artificial Sequence; identical to SEQ ID NO: 75925
  Cyclic GFR-binding peptide
  MOD_RES (30)..(31): Xaa is C or S

SEQ ID NO: 84481 - protein, 30 aa, Artificial Sequence; identical to SEQ ID NO: 41813
  Cyclic GFR-binding peptide

SEQ ID NO: 84482 - protein, 26 aa, Artificial Sequence
  Cyclic GFR-binding peptide
MNEYKFKIVNSSDDLYLVSIPELKTP

SEQ ID NO: 84483 - protein, 29 aa, Artificial Sequence
  Cyclic GFR-binding peptide
  MOD_RES (27)..(28): Xaa is C or S
DRHKRLVVNNAADYYLISTASLRAPVXXS

SEQ ID NO: 84484 - protein, 30 aa, Artificial Sequence; identical to SEQ ID NO: 2104
  Cyclic GFR-binding peptide
  MOD_RES (27)..(28): Xaa is C or S

SEQ ID NO: 84485 - protein, 29 aa, Artificial Sequence
  Cyclic GFR-binding peptide
  MOD_RES (26)..(27): Xaa is C or S
EYKFKIVNNSSDLYLVSIPELKTPAXXAK

SEQ ID NO: 84486 - protein, 30 aa, Artificial Sequence; identical to SEQ ID NO: 30261
  Cyclic GFR-binding peptide
  MOD_RES (1)..(1): Xaa is C or S

SEQ ID NO: 84487 - protein, 30 aa, Artificial Sequence; identical to SEQ ID NO: 2107
  Cyclic GFR-binding peptide

SEQ ID NO: 84488 - protein, 20 aa, Artificial Sequence
  Cyclic GFR-binding peptide
EYKFKIVNNSSDLYLVSIPE

SEQ ID NO: 84489 - protein, 32 aa, Artificial Sequence; identical to SEQ ID NO: 41824
  Cyclic GFR-binding peptide
  MOD_RES (1)..(3): Xaa is C or S

SEQ ID NO: 84490 - protein, 28 aa, Artificial Sequence
  Cyclic GFR-binding peptide
  MOD_RES (28)..(28): Xaa is C or S
VMRYKKLVKPTRGVFYLISIANLDQPVX

SEQ ID NO: 84491 - protein, 35 aa, Artificial Sequence; identical to SEQ ID NO: 2110
  Cyclic GFR-binding peptide
  MOD_RES (2)..(4): Xaa is C or S

SEQ ID NO: 84492 - protein, 42 aa, Artificial Sequence; identical to SEQ ID NO: 2114
  Cyclic GFR-binding peptide
  MOD_RES (2)..(4)..(36)..(37): Xaa is C or S

SEQ ID NO: 84493 - protein, 33 aa, Artificial Sequence; identical to SEQ ID NO: 30274
  Cyclic GFR-binding peptide
  MOD_RES (1)..(33): Xaa is C or S

SEQ ID NO: 84494 - protein, 20 aa, Artificial Sequence
  Cyclic GFR-binding peptide
RHKRLLLVRGNDYYLMSTAS

SEQ ID NO: 84495 - protein, 29 aa, Artificial Sequence
  Cyclic GFR-binding peptide
  MOD_RES (1)..(3): Xaa is C or S
XGXEEVIMRHKRLLLVRGNDYYLMSTAST

SEQ ID NO: 84496 - protein, 33 aa, Artificial Sequence
  Cyclic GFR-binding peptide
  MOD_RES (30)..(31): Xaa is C or S
VTMNYHYKLVVNKNEDKYLISIPSMKEPVXXPE

SEQ ID NO: 84497 - protein, 41 aa, Artificial Sequence
  Cyclic GFR-binding peptide
  MOD_RES (1)..(3)..(35)..(36): Xaa is C or S
XGXSRVVMNYHYKLIVNSSDDKYLVSIPSLKTPAXXPKPVH

SEQ ID NO: 84498 - protein, 32 aa, Artificial Sequence; identical to SEQ ID NO: 2117
  Cyclic GFR-binding peptide
  MOD_RES (28)..(29): Xaa is C or S

SEQ ID NO: 84499 - protein, 32 aa, Artificial Sequence; identical to SEQ ID NO: 2118
  Cyclic GFR-binding peptide
  MOD_RES (26)..(27): Xaa is C or S

SEQ ID NO: 84500 - protein, 37 aa, Artificial Sequence; identical to SEQ ID NO: 40339
  Cyclic GFR-binding peptide
  MOD_RES (32)..(33): Xaa is C or S

SEQ ID NO: 84501 - protein, 30 aa, Artificial Sequence; identical to SEQ ID NO: 2119
  Cyclic GFR-binding peptide
  MOD_RES (2)..(4): Xaa is C or S

SEQ ID NO: 84502 - protein, 41 aa, Artificial Sequence; identical to SEQ ID NO: 2121
  Cyclic GFR-binding peptide
  MOD_RES (2)..(35)..(36): Xaa is C or S

SEQ ID NO: 84503 - protein, 32 aa, Artificial Sequence; identical to SEQ ID NO: 2124
  Cyclic GFR-binding peptide
  MOD_RES (1)..(1): Xaa is C or S

SEQ ID NO: 84504 - protein, 39 aa, Artificial Sequence; identical to SEQ ID NO: 30281
  Cyclic GFR-binding peptide
  MOD_RES (2)..(35)..(36): Xaa is C or S

SEQ ID NO: 84505 - protein, 31 aa, Artificial Sequence; identical to SEQ ID NO: 30282
  Cyclic GFR-binding peptide
  MOD_RES (29)..(30): Xaa is C or S

SEQ ID NO: 84506 - protein, 34 aa, Artificial Sequence; identical to SEQ ID NO: 2125
  Cyclic GFR-binding peptide
  MOD_RES (28)..(29): Xaa is C or S

SEQ ID NO: 84507 - protein, 33 aa, Artificial Sequence; identical to SEQ ID NO: 2126
  Cyclic GFR-binding peptide
  MOD_RES (2)..(33): Xaa is C or S

SEQ ID NO: 84508 - protein, 31 aa, Artificial Sequence; identical to SEQ ID NO: 2127
  Cyclic GFR-binding peptide
  MOD_RES (2)..(2): Xaa is C or S

SEQ ID NO: 84509 - protein, 35 aa, Artificial Sequence; identical to SEQ ID NO: 30287
  Cyclic GFR-binding peptide
  MOD_RES (31)..(32): Xaa is C or S

SEQ ID NO: 84510 - protein, 32 aa, Artificial Sequence; identical to SEQ ID NO: 2129
  Cyclic GFR-binding peptide
  MOD_RES (27)..(28): Xaa is C or S

SEQ ID NO: 84511 - protein, 38 aa, Artificial Sequence; identical to SEQ ID NO: 75938
  Cyclic GFR-binding peptide
  MOD_RES (32)..(33): Xaa is C or S

SEQ ID NO: 84512 - protein, 29 aa, Artificial Sequence
  Cyclic GFR-binding peptide
  MOD_RES (26)..(26): Xaa is C or S
RHKRLIVNSSDDYYLVSTASLKTPAXTPK

SEQ ID NO: 84513 - protein, 30 aa, Artificial Sequence; identical to SEQ ID NO: 30289
  Cyclic GFR-binding peptide
  MOD_RES (1)..(1): Xaa is C or S

SEQ ID NO: 84514 - protein, 31 aa, Artificial Sequence; identical to SEQ ID NO: 30290
  Cyclic GFR-binding peptide
  MOD_RES (30)..(31): Xaa is C or S

SEQ ID NO: 84515 - protein, 38 aa, Artificial Sequence; identical to SEQ ID NO: 30292
  Cyclic GFR-binding peptide
  MOD_RES (32)..(32): Xaa is C or S

SEQ ID NO: 84516 - protein, 27 aa, Artificial Sequence
  Cyclic GFR-binding peptide
SEVVMDRYKKLVVNNASDFYLISIANL

SEQ ID NO: 84517 - protein, 35 aa, Artificial Sequence; identical to SEQ ID NO: 2139
  Cyclic GFR-binding peptide
  MOD_RES (29)..(29): Xaa is C or S

SEQ ID NO: 84518 - protein, 37 aa, Artificial Sequence; identical to SEQ ID NO: 2142
  Cyclic GFR-binding peptide
  MOD_RES (1)..(33)..(34): Xaa is C or S

SEQ ID NO: 84519 - protein, 34 aa, Artificial Sequence
  Cyclic GFR-binding peptide
  MOD_RES (29)..(30): Xaa is C or S
VMDRHKRLVVNNASDYYLISTASLRTPVXXTPPT

SEQ ID NO: 84520 - protein, 25 aa, Artificial Sequence
  Cyclic GFR-binding peptide
IMYHYKLLLVRGNDKYLMSIPSTKV

SEQ ID NO: 84521 - protein, 26 aa, Artificial Sequence
  Cyclic GFR-binding peptide
KVIMRYKKLIKPTKGIFYLISIANLD

SEQ ID NO: 84522 - protein, 29 aa, Artificial Sequence
  Cyclic GFR-binding peptide
  MOD_RES (27)..(28): Xaa is C or S
MYHYKLIKPTKGIKYLISIPSLDQSVXXP

SEQ ID NO: 84523 - protein, 36 aa, Artificial Sequence
  Cyclic GFR-binding peptide
  MOD_RES (31)..(32): Xaa is C or S
EVVMDRHKRLVVNNAADYYLISTASLRAPVXXSAPA

SEQ ID NO: 84524 - protein, 28 aa, Artificial Sequence
  Cyclic GFR-binding peptide
  MOD_RES (28)..(28): Xaa is C or S
MDRHKRLVVNNAADYYLISTASLRAPVX

SEQ ID NO: 84525 - protein, 33 aa, Artificial Sequence; identical to SEQ ID NO: 2149
  Cyclic GFR-binding peptide
  MOD_RES (2)..(33): Xaa is C or S

SEQ ID NO: 84526 - protein, 26 aa, Artificial Sequence
  Cyclic GFR-binding peptide
VMDYHYKLVVNNAADKYLISIPSLRA

SEQ ID NO: 84527 - protein, 21 aa, Artificial Sequence
  Cyclic GFR-binding peptide
EYKFKIKPTKGILYLISIPEL

SEQ ID NO: 84528 - protein, 29 aa, Artificial Sequence
  Cyclic GFR-binding peptide
SEVTMNRHKRLVVNKNEDYYLISTASMKE

SEQ ID NO: 84529 - protein, 42 aa, Artificial Sequence; identical to SEQ ID NO: 40370
  Cyclic GFR-binding peptide
  MOD_RES (2)..(4)..(37)..(38): Xaa is C or S

SEQ ID NO: 84530 - protein, 37 aa, Artificial Sequence
  Cyclic GFR-binding peptide
  MOD_RES (2)..(34)..(35): Xaa is C or S
GXSEVVMDYHYKLVVNNASDKYLISIPSLRTPVXXTP

SEQ ID NO: 84531 - protein, 30 aa, Artificial Sequence
  Cyclic GFR-binding peptide
  MOD_RES (30)..(30): Xaa is C or S
VVMDYHYKLVVNNASDKYLISIPSLRTPVX

SEQ ID NO: 84532 - protein, 26 aa, Artificial Sequence
  Cyclic GFR-binding peptide
VVMDRYKKLVVKENEDFYLMSIANLE

SEQ ID NO: 84533 - protein, 30 aa, Artificial Sequence
  Cyclic GFR-binding peptide
SEVTMNYHYKLVVNKNEDKYLISIPSMKEP

SEQ ID NO: 84534 - protein, 33 aa, Artificial Sequence; identical to SEQ ID NO: 2159
  Cyclic GFR-binding peptide
  MOD_RES (29)..(30): Xaa is C or S

SEQ ID NO: 84535 - protein, 22 aa, Artificial Sequence
  Cyclic GFR-binding peptide
DEYKFKVVNNAADLYLISIPEL

SEQ ID NO: 84536 - protein, 27 aa, Artificial Sequence
  Cyclic GFR-binding peptide
  MOD_RES (1)..(1): Xaa is C or S
XSRVVMNYHYKLIVNSSDDKYLVSIPS

SEQ ID NO: 84537 - protein, 28 aa, Artificial Sequence
  Cyclic GFR-binding peptide
SKVIMEYKFKIKPTKGILYLISIPELDQ

SEQ ID NO: 84538 - protein, 25 aa, Artificial Sequence
  Cyclic GFR-binding peptide
RYKKLIIQQKDNFYLMSIANMKTPT

SEQ ID NO: 84539 - protein, 30 aa, Artificial Sequence; identical to SEQ ID NO: 2169
  Cyclic GFR-binding peptide
  MOD_RES (2)..(4): Xaa is C or S

SEQ ID NO: 84540 - protein, 28 aa, Artificial Sequence
  Cyclic GFR-binding peptide
  MOD_RES (27)..(28): Xaa is C or S
NRYKKLIVNNSSDFYLVSIANLKTPAXX

SEQ ID NO: 84541 - protein, 31 aa, Artificial Sequence; identical to SEQ ID NO: 2171
  Cyclic GFR-binding peptide
  MOD_RES (31)..(31): Xaa is C or S

SEQ ID NO: 84542 - protein, 36 aa, Artificial Sequence; identical to SEQ ID NO: 2172
  Cyclic GFR-binding peptide
  MOD_RES (1)..(3)..(34)..(35): Xaa is C or S

SEQ ID NO: 84543 - protein, 28 aa, Artificial Sequence
  Cyclic GFR-binding peptide
  MOD_RES (2)..(2): Xaa is C or S
AXSEVTMNPIKGYVVNKNEDFYLINIPS

SEQ ID NO: 84544 - protein, 26 aa, Artificial Sequence
  Cyclic GFR-binding peptide
DPIKGYVVNNASDFYLINIPSLRTPV

SEQ ID NO: 84545 - protein, 34 aa, Artificial Sequence; identical to SEQ ID NO: 2174
  Cyclic GFR-binding peptide
  MOD_RES (1)..(34): Xaa is C or S

SEQ ID NO: 84546 - protein, 37 aa, Artificial Sequence
  Cyclic GFR-binding peptide
  MOD_RES (31)..(32): Xaa is C or S
EVTMNYHYKLVVNKNEDKYLISIPSMKEPVXXPEPIG

SEQ ID NO: 84547 - protein, 37 aa, Artificial Sequence; identical to SEQ ID NO: 2178
  Cyclic GFR-binding peptide
  MOD_RES (31)..(32): Xaa is C or S

SEQ ID NO: 84548 - protein, 36 aa, Artificial Sequence
  Cyclic GFR-binding peptide
  MOD_RES (2)..(4)..(36): Xaa is C or S
SXGXRDVVMGEYKFKIIQQKDNLYLMSIPEMKTPTX

SEQ ID NO: 84549 - protein, 29 aa, Artificial Sequence
  Cyclic GFR-binding peptide
KVVMNRYKKLIVNNSSDFYLVSIANLKTP

SEQ ID NO: 84550 - protein, 30 aa, Artificial Sequence; identical to SEQ ID NO: 2183
  Cyclic GFR-binding peptide
  MOD_RES (27)..(28): Xaa is C or S

SEQ ID NO: 84551 - protein, 31 aa, Artificial Sequence; identical to SEQ ID NO: 2184
  Cyclic GFR-binding peptide
  MOD_RES (2)..(2): Xaa is C or S

SEQ ID NO: 84552 - protein, 34 aa, Artificial Sequence; identical to SEQ ID NO: 2187
  Cyclic GFR-binding peptide
  MOD_RES (2)..(2): Xaa is C or S

SEQ ID NO: 84553 - protein, 42 aa, Artificial Sequence; identical to SEQ ID NO: 2188
  Cyclic GFR-binding peptide
  MOD_RES (2)..(4)..(36): Xaa is C or S

SEQ ID NO: 84554 - protein, 30 aa, Artificial Sequence
  Cyclic GFR-binding peptide
  MOD_RES (29)..(30): Xaa is C or S
VVMPIKGYVKPTRGVFYLINIPSLDQPVXX

SEQ ID NO: 84555 - protein, 40 aa, Artificial Sequence; identical to SEQ ID NO: 75961
  Cyclic GFR-binding peptide
  MOD_RES (2)..(4)..(36)..(37): Xaa is C or S

SEQ ID NO: 84556 - protein, 33 aa, Artificial Sequence; identical to SEQ ID NO: 2189
  Cyclic GFR-binding peptide
  MOD_RES (1)..(1): Xaa is C or S

SEQ ID NO: 84557 - protein, 37 aa, Artificial Sequence; identical to SEQ ID NO: 30342
  Cyclic GFR-binding peptide
  MOD_RES (1)..(3)..(34)..(35): Xaa is C or S

SEQ ID NO: 84558 - protein, 22 aa, Artificial Sequence
  Cyclic GFR-binding peptide
MDRHKRLVVNNASDYYLISTAS

SEQ ID NO: 84559 - protein, 30 aa, Artificial Sequence; identical to SEQ ID NO: 2190
  Cyclic GFR-binding peptide
  MOD_RES (28)..(29): Xaa is C or S

SEQ ID NO: 84560 - protein, 23 aa, Artificial Sequence
  Cyclic GFR-binding peptide
VIMEYKFKVKPKRGVLYLISIPE

SEQ ID NO: 84561 - protein, 33 aa, Artificial Sequence; identical to SEQ ID NO: 40408
  Cyclic GFR-binding peptide
  MOD_RES (30)..(31): Xaa is C or S

SEQ ID NO: 84562 - protein, 40 aa, Artificial Sequence; identical to SEQ ID NO: 30348
  Cyclic GFR-binding peptide
  MOD_RES (2)..(4)..(36): Xaa is C or S

SEQ ID NO: 84563 - protein, 31 aa, Artificial Sequence; identical to SEQ ID NO: 40413
  Cyclic GFR-binding peptide
  MOD_RES (28)..(29): Xaa is C or S

SEQ ID NO: 84564 - protein, 40 aa, Artificial Sequence
  Cyclic GFR-binding peptide
  MOD_RES (1)..(3)..(35)..(36): Xaa is C or S
XGXRDVVMGEYKFKIIQQKDNLYLMSIPEMKTPTXXPGAS

SEQ ID NO: 84565 - protein, 36 aa, Artificial Sequence; identical to SEQ ID NO: 2197
  Cyclic GFR-binding peptide
  MOD_RES (30)..(31): Xaa is C or S

SEQ ID NO: 84566 - protein, 29 aa, Artificial Sequence
  Cyclic GFR-binding peptide
VVMNEYKFKIVNSSDDLYLVSIPELQTPA

SEQ ID NO: 84567 - protein, 26 aa, Artificial Sequence
  Cyclic GFR-binding peptide
EVVMDYHYKLVVNNASDKYLISIPSL

SEQ ID NO: 84568 - protein, 25 aa, Artificial Sequence
  Cyclic GFR-binding peptide
SKVVMEYKFKVKPTRGVLYLISIPE

SEQ ID NO: 84569 - protein, 23 aa, Artificial Sequence
  Cyclic GFR-binding peptide
MRYKKLIKPTKGIFYLISIANLD

SEQ ID NO: 84570 - protein, 26 aa, Artificial Sequence
  Cyclic GFR-binding peptide
VMNEYKFKIVNSSDDLYLVSIPELKT

SEQ ID NO: 84571 - protein, 35 aa, Artificial Sequence; identical to SEQ ID NO: 2204
  Cyclic GFR-binding peptide
  MOD_RES (2)..(4): Xaa is C or S

SEQ ID NO: 84572 - protein, 39 aa, Artificial Sequence; identical to SEQ ID NO: 2205
  Cyclic GFR-binding peptide
  MOD_RES (1)..(33)..(34): Xaa is C or S

SEQ ID NO: 84573 - protein, 40 aa, Artificial Sequence
  Cyclic GFR-binding peptide
  MOD_RES (2)..(34)..(35): Xaa is C or S
GXRDVVMGRHKRLIIQQKDNYYLMSTASMKTPTXXPGASG

SEQ ID NO: 84574 - protein, 37 aa, Artificial Sequence
  Cyclic GFR-binding peptide
  MOD_RES (1)..(33)..(34): Xaa is C or S
XSEVTMNRYKKLVVNKNEDFYLISIANMKEPVXXPEP

SEQ ID NO: 84575 - protein, 35 aa, Artificial Sequence
  Cyclic GFR-binding peptide
  MOD_RES (2)..(4)..(35): Xaa is C or S
LXGXEEVIMRHKRLLLVRGNDYYLMSTASTKVPAX

SEQ ID NO: 84576 - protein, 39 aa, Artificial Sequence; identical to SEQ ID NO: 2210
  Cyclic GFR-binding peptide
  MOD_RES (2)..(33)..(34): Xaa is C or S

SEQ ID NO: 84577 - protein, 32 aa, Artificial Sequence; identical to SEQ ID NO: 2212
  Cyclic GFR-binding peptide
  MOD_RES (1)..(3): Xaa is C or S

SEQ ID NO: 84578 - protein, 30 aa, Artificial Sequence; identical to SEQ ID NO: 2214
  Cyclic GFR-binding peptide
  MOD_RES (28)..(29): Xaa is C or S

SEQ ID NO: 84579 - protein, 36 aa, Artificial Sequence; identical to SEQ ID NO: 75980
  Cyclic GFR-binding peptide
  MOD_RES (30)..(31): Xaa is C or S

SEQ ID NO: 84580 - protein, 23 aa, Artificial Sequence
  Cyclic GFR-binding peptide
VIMRYKKLIKPTKGIFYLISIAN

SEQ ID NO: 84581 - protein, 36 aa, Artificial Sequence; identical to SEQ ID NO: 40435
  Cyclic GFR-binding peptide
  MOD_RES (30)..(31): Xaa is C or S

SEQ ID NO: 84582 - protein, 24 aa, Artificial Sequence
  Cyclic GFR-binding peptide
VMNEYKFKIVNSSDDLYLVSIPEL

SEQ ID NO: 84583 - protein, 31 aa, Artificial Sequence
  Cyclic GFR-binding peptide
  MOD_RES (26)..(27): Xaa is C or S
YHYKLVVNNASDKYLISIPSLRTPVXXTPPT

SEQ ID NO: 84584 - protein, 24 aa, Artificial Sequence
  Cyclic GFR-binding peptide
VMNEYKFKIVNNSSDLYLVSIPEL

SEQ ID NO: 84585 - protein, 25 aa, Artificial Sequence
  Cyclic GFR-binding peptide
EVTMNEYKFKVVNKNEDLYLISIPE

SEQ ID NO: 84586 - protein, 30 aa, Artificial Sequence; identical to SEQ ID NO: 30372
  Cyclic GFR-binding peptide
  MOD_RES (2)..(4): Xaa is C or S

SEQ ID NO: 84587 - protein, 28 aa, Artificial Sequence
  Cyclic GFR-binding peptide
  MOD_RES (2)..(2): Xaa is C or S
GXSRVVMNRHKRLIVNSSDDYYLVSTAS

SEQ ID NO: 84588 - protein, 29 aa, Artificial Sequence
  Cyclic GFR-binding peptide
  MOD_RES (27)..(28): Xaa is C or S
NRHKRLIVNSSDDYYLVSTASLKTPAXXP

SEQ ID NO: 84589 - protein, 40 aa, Artificial Sequence; identical to SEQ ID NO: 2224
  Cyclic GFR-binding peptide
  MOD_RES (2)..(4)..(36)..(37): Xaa is C or S

SEQ ID NO: 84590 - protein, 28 aa, Artificial Sequence
  Cyclic GFR-binding peptide
GEVVMDEYKFKVVKENEDLYLMSIPELE

SEQ ID NO: 84591 - protein, 31 aa, Artificial Sequence
  Cyclic GFR-binding peptide
  MOD_RES (2)..(4): Xaa is C or S
SXKXSRVIMPIKGYVKPKRGVFYLINIPSLA

SEQ ID NO: 84592 - protein, 23 aa, Artificial Sequence
  Cyclic GFR-binding peptide
EPIKGYTPVGMDDFYLVNIPSLK

SEQ ID NO: 84593 - protein, 37 aa, Artificial Sequence; identical to SEQ ID NO: 40451
  Cyclic GFR-binding peptide
  MOD_RES (32)..(33): Xaa is C or S

SEQ ID NO: 84594 - protein, 28 aa, Artificial Sequence
  Cyclic GFR-binding peptide
VVMNYHYKLIVNSSDDKYLVSIPSLQTP

SEQ ID NO: 84595 - protein, 28 aa, Artificial Sequence
  Cyclic GFR-binding peptide
  MOD_RES (28)..(28): Xaa is C or S
MERHKRLVVKDYEDYYLMSTASLETPVX

SEQ ID NO: 84596 - protein, 29 aa, Artificial Sequence
  Cyclic GFR-binding peptide
  MOD_RES (1)..(3): Xaa is C or S
XGXESVAMGYHYKLYTVVGKDKYLISIPS

SEQ ID NO: 84597 - protein, 41 aa, Artificial Sequence
  Cyclic GFR-binding peptide
  MOD_RES (1)..(3)..(35)..(36): Xaa is C or S
XGXRDVVMGYHYKLIIQQKDNKYLMSIPSMKTPTXXPGASG

SEQ ID NO: 84598 - protein, 25 aa, Artificial Sequence
  Cyclic GFR-binding peptide
RYKKLVVNNAADFYLISIANLRAPV

SEQ ID NO: 84599 - protein, 25 aa, Artificial Sequence
  Cyclic GFR-binding peptide
GEEYKFKTPVGMDDLYLVSIPELKT

SEQ ID NO: 84600 - protein, 35 aa, Artificial Sequence; identical to SEQ ID NO: 2234
  Cyclic GFR-binding peptide
  MOD_RES (1)..(3)..(34)..(35): Xaa is C or S

SEQ ID NO: 84601 - protein, 34 aa, Artificial Sequence
  Cyclic GFR-binding peptide
  MOD_RES (31)..(32): Xaa is C or S
SVAMGRHKRLYTVVGKDYYLISTASLKTPVXXAK

SEQ ID NO: 84602 - protein, 32 aa, Artificial Sequence; identical to SEQ ID NO: 40469
  Cyclic GFR-binding peptide
  MOD_RES (2)..(2): Xaa is C or S

SEQ ID NO: 84603 - protein, 34 aa, Artificial Sequence
  Cyclic GFR-binding peptide
  MOD_RES (29)..(30): Xaa is C or S
VMGEYKFKIIQQKDNLYLMSIPEMKTPTXXPGAS

SEQ ID NO: 84604 - protein, 36 aa, Artificial Sequence; identical to SEQ ID NO: 2243
  Cyclic GFR-binding peptide
  MOD_RES (30)..(31): Xaa is C or S

SEQ ID NO: 84605 - protein, 30 aa, Artificial Sequence; identical to SEQ ID NO: 2244
  Cyclic GFR-binding peptide
  MOD_RES (29)..(29): Xaa is C or S

SEQ ID NO: 84606 - protein, 35 aa, Artificial Sequence
  Cyclic GFR-binding peptide
  MOD_RES (1)..(33)..(34): Xaa is C or S
XRDVVMGRHKRLIIQQKDNYYLMSTASMKTPTXXP

SEQ ID NO: 84607 - protein, 31 aa, Artificial Sequence; identical to SEQ ID NO: 40476
  Cyclic GFR-binding peptide

SEQ ID NO: 84608 - protein, 34 aa, Artificial Sequence; identical to SEQ ID NO: 30393
  Cyclic GFR-binding peptide
  MOD_RES (31)..(32): Xaa is C or S

SEQ ID NO: 84609 - protein, 26 aa, Artificial Sequence
  Cyclic GFR-binding peptide
SMGERHKRLTPVGMDDYYLVSTASLK

SEQ ID NO: 84610 - protein, 31 aa, Artificial Sequence
  Cyclic GFR-binding peptide
  MOD_RES (2)..(4): Xaa is C or S
LXGXEEVIMEYKFKLLVRGNDLYLMSIPETK

SEQ ID NO: 84611 - protein, 34 aa, Artificial Sequence; identical to SEQ ID NO: 2247
  Cyclic GFR-binding peptide
  MOD_RES (1)..(32)..(33): Xaa is C or S

SEQ ID NO: 84612 - protein, 40 aa, Artificial Sequence
  Cyclic GFR-binding peptide
  MOD_RES (1)..(3)..(35)..(36): Xaa is C or S
XGXRDVVMGYHYKLIIQQKDNKYLMSIPSMKTPTXXPGAS

SEQ ID NO: 84613 - protein, 32 aa, Artificial Sequence; identical to SEQ ID NO: 40477
  Cyclic GFR-binding peptide
  MOD_RES (28)..(29): Xaa is C or S

SEQ ID NO: 84614 - protein, 39 aa, Artificial Sequence; identical to SEQ ID NO: 30395
  Cyclic GFR-binding peptide
  MOD_RES (1)..(33)..(34): Xaa is C or S

SEQ ID NO: 84615 - protein, 36 aa, Artificial Sequence; identical to SEQ ID NO: 30397
  Cyclic GFR-binding peptide
  MOD_RES (2)..(4): Xaa is C or S

SEQ ID NO: 84616 - protein, 33 aa, Artificial Sequence; identical to SEQ ID NO: 2251
  Cyclic GFR-binding peptide
  MOD_RES (31)..(32): Xaa is C or S

SEQ ID NO: 84617 - protein, 32 aa, Artificial Sequence; identical to SEQ ID NO: 40480
  Cyclic GFR-binding peptide
  MOD_RES (30)..(31): Xaa is C or S

SEQ ID NO: 84618 - protein, 29 aa, Artificial Sequence
  Cyclic GFR-binding peptide
  MOD_RES (1)..(3): Xaa is C or S
XGXAKVVMNEYKFKIVNNSSDLYLVSIPE

SEQ ID NO: 84619 - protein, 36 aa, Artificial Sequence
  Cyclic GFR-binding peptide
  MOD_RES (2)..(34)..(35): Xaa is C or S
GXRDVVMGRHKRLIIQQKDNYYLMSTASMKTPTXXP

SEQ ID NO: 84620 - protein, 34 aa, Artificial Sequence; identical to SEQ ID NO: 40483
  Cyclic GFR-binding peptide
  MOD_RES (30)..(31): Xaa is C or S

SEQ ID NO: 84621 - protein, 35 aa, Artificial Sequence; identical to SEQ ID NO: 40486
  Cyclic GFR-binding peptide
  MOD_RES (2)..(34)..(35): Xaa is C or S

SEQ ID NO: 84622 - protein, 31 aa, Artificial Sequence; identical to SEQ ID NO: 76002
  Cyclic GFR-binding peptide
  MOD_RES (30)..(31): Xaa is C or S

SEQ ID NO: 84623 - protein, 23 aa, Artificial Sequence
  Cyclic GFR-binding peptide
RHKRLLLVRGNDYYLMSTASTKV

SEQ ID NO: 84624 - protein, 37 aa, Artificial Sequence; identical to SEQ ID NO: 2259
  Cyclic GFR-binding peptide
  MOD_RES (2)..(4)..(36)..(37): Xaa is C or S

SEQ ID NO: 84625 - protein, 32 aa, Artificial Sequence
  Cyclic GFR-binding peptide
  MOD_RES (1)..(3): Xaa is C or S
XGXRDVVMGYHYKLIIQQKDNKYLMSIPSMKT

SEQ ID NO: 84626 - protein, 32 aa, Artificial Sequence; identical to SEQ ID NO: 2263
  Cyclic GFR-binding peptide
  MOD_RES (2)..(4): Xaa is C or S

SEQ ID NO: 84627 - protein, 22 aa, Artificial Sequence
  Cyclic GFR-binding peptide
RHKRLVVNKNEDYYLISTASMK

SEQ ID NO: 84628 - protein, 32 aa, Artificial Sequence; identical to SEQ ID NO: 2264
  Cyclic GFR-binding peptide
  MOD_RES (30)..(30): Xaa is C or S

SEQ ID NO: 84629 - protein, 28 aa, Artificial Sequence
  Cyclic GFR-binding peptide
ESVAMGRYKKLYTVVGKDFYLISIANLK

SEQ ID NO: 84630 - protein, 34 aa, Artificial Sequence; identical to SEQ ID NO: 76010
  Cyclic GFR-binding peptide
  MOD_RES (29)..(30): Xaa is C or S

SEQ ID NO: 84631 - protein, 22 aa, Artificial Sequence
  Cyclic GFR-binding peptide
MDPIKGYVVKENEDFYLMNIPS

SEQ ID NO: 84632 - protein, 35 aa, Artificial Sequence; identical to SEQ ID NO: 40505
  Cyclic GFR-binding peptide
  MOD_RES (1)..(32)..(33): Xaa is C or S

SEQ ID NO: 84633 - protein, 32 aa, Artificial Sequence; identical to SEQ ID NO: 30422
  Cyclic GFR-binding peptide
  MOD_RES (30)..(31): Xaa is C or S

SEQ ID NO: 84634 - protein, 39 aa, Artificial Sequence; identical to SEQ ID NO: 30425
  Cyclic GFR-binding peptide
  MOD_RES (2)..(34)..(35): Xaa is C or S

SEQ ID NO: 84635 - protein, 37 aa, Artificial Sequence; identical to SEQ ID NO: 2273
  Cyclic GFR-binding peptide
  MOD_RES (1)..(33)..(34): Xaa is C or S

SEQ ID NO: 84636 - protein, 28 aa, Artificial Sequence
  Cyclic GFR-binding peptide
  MOD_RES (26)..(27): Xaa is C or S
YHYKLYTVVGKDKYLISIPSLKTPVXXA

SEQ ID NO: 84637 - protein, 26 aa, Artificial Sequence
  Cyclic GFR-binding peptide
EVVMDYHYKLVVKENEDKYLMSIPSL

SEQ ID NO: 84638 - protein, 28 aa, Artificial Sequence
  Cyclic GFR-binding peptide
  MOD_RES (27)..(28): Xaa is C or S
ERHKRLTPVGMDDYYLVSTASLKTPVXX

SEQ ID NO: 84639 - protein, 27 aa, Artificial Sequence
  Cyclic GFR-binding peptide
EVVMDEYKFKVVNNAADLYLISIPELR

SEQ ID NO: 84640 - protein, 25 aa, Artificial Sequence
  Cyclic GFR-binding peptide
RYKKLIVNNSSDFYLVSIANLKTPA

SEQ ID NO: 84641 - protein, 25 aa, Artificial Sequence
  Cyclic GFR-binding peptide
VIMRYKKLLLVRGNDFYLMSIANTK

SEQ ID NO: 84642 - protein, 30 aa, Artificial Sequence
  Cyclic GFR-binding peptide
  MOD_RES (30)..(30): Xaa is C or S
EVIMRHKRLLLVRGNDYYLMSTASTKVPAX

SEQ ID NO: 84643 - protein, 40 aa, Artificial Sequence
  Cyclic GFR-binding peptide
  MOD_RES (1)..(3)..(35)..(36): Xaa is C or S
XAXSEVTMNRYKKLVVNKNEDFYLISIANMKEPVXXPEPI

SEQ ID NO: 84644 - protein, 33 aa, Artificial Sequence
  Cyclic GFR-binding peptide
  MOD_RES (2)..(2): Xaa is C or S
AXSEVTMNRHKRLVVNKNEDYYLISTASMKEPV

SEQ ID NO: 84645 - protein, 33 aa, Artificial Sequence; identical to SEQ ID NO: 30436
  Cyclic GFR-binding peptide
  MOD_RES (33)..(33): Xaa is C or S

SEQ ID NO: 84646 - protein, 24 aa, Artificial Sequence
  Cyclic GFR-binding peptide
VVMDRHKRLVVKENEDYYLMSTAS

SEQ ID NO: 84647 - protein, 27 aa, Artificial Sequence
  Cyclic GFR-binding peptide
  MOD_RES (1)..(1): Xaa is C or S
XSRVVMNRYKKLIVNSSDDFYLVSIAN

SEQ ID NO: 84648 - protein, 28 aa, Artificial Sequence
  Cyclic GFR-binding peptide
  MOD_RES (28)..(28): Xaa is C or S
MEYHYKLVVKDYEDKYLMSIPSLETPVX

SEQ ID NO: 84649 - protein, 31 aa, Artificial Sequence
  Cyclic GFR-binding peptide
  MOD_RES (2)..(4): Xaa is C or S
LXGXEEVIMYHYKLLLVRGNDKYLMSIPSTK

SEQ ID NO: 84650 - protein, 33 aa, Artificial Sequence; identical to SEQ ID NO: 40526
  Cyclic GFR-binding peptide
  MOD_RES (32)..(33): Xaa is C or S

SEQ ID NO: 84651 - protein, 36 aa, Artificial Sequence; identical to SEQ ID NO: 2296
  Cyclic GFR-binding peptide
  MOD_RES (31)..(32): Xaa is C or S

SEQ ID NO: 84652 - protein, 33 aa, Artificial Sequence; identical to SEQ ID NO: 40538
  Cyclic GFR-binding peptide
  MOD_RES (28)..(29): Xaa is C or S

SEQ ID NO: 84653 - protein, 25 aa, Artificial Sequence
  Cyclic GFR-binding peptide
SKVVMRYKKLVKPTRGVFYLISIAN

SEQ ID NO: 84654 - protein, 37 aa, Artificial Sequence
  Cyclic GFR-binding peptide
  MOD_RES (1)..(33)..(34): Xaa is C or S
XSEVTMNYHYKLVVNKNEDKYLISIPSMKEPVXXPEP

SEQ ID NO: 84655 - protein, 39 aa, Artificial Sequence
  Cyclic GFR-binding peptide
  MOD_RES (2)..(34)..(35): Xaa is C or S
GXSEVVMDYHYKLVVNNASDKYLISIPSLRTPVXXTPPT

SEQ ID NO: 84656 - protein, 32 aa, Artificial Sequence
  Cyclic GFR-binding peptide
  MOD_RES (1)..(3): Xaa is C or S
XGXRDVVMGEYKFKIIQQKDNLYLMSIPEMKT

SEQ ID NO: 84657 - protein, 30 aa, Artificial Sequence; identical to SEQ ID NO: 2311
  Cyclic GFR-binding peptide
  MOD_RES (1)..(1): Xaa is C or S

SEQ ID NO: 84658 - protein, 42 aa, Artificial Sequence; identical to SEQ ID NO: 30454
  Cyclic GFR-binding peptide
  MOD_RES (2)..(4)..(36)..(37): Xaa is C or S

SEQ ID NO: 84659 - protein, 25 aa, Artificial Sequence
  Cyclic GFR-binding peptide
GRHKRLIIQQKDNYYLMSTASMKTP

SEQ ID NO: 84660 - protein, 22 aa, Artificial Sequence
  Cyclic GFR-binding peptide
MRHKRLIKPTKGIYYLISTASL

SEQ ID NO: 84661 - protein, 27 aa, Artificial Sequence
  Cyclic GFR-binding peptide
EVIMYHYKLLLVRGNDKYLMSIPSTKV

SEQ ID NO: 84662 - protein, 34 aa, Artificial Sequence; identical to SEQ ID NO: 2319
  Cyclic GFR-binding peptide
  MOD_RES (29)..(30): Xaa is C or S

SEQ ID NO: 84663 - protein, 27 aa, Artificial Sequence
  Cyclic GFR-binding peptide
MNRHKRLIVNSSDDYYLVSTASLKTPA

SEQ ID NO: 84664 - protein, 36 aa, Artificial Sequence
  Cyclic GFR-binding peptide
  MOD_RES (2)..(4)..(35)..(36): Xaa is C or S
SXKXSRVIMPIKGYVKPKRGVFYLINIPSLAQPVXX

SEQ ID NO: 84665 - protein, 36 aa, Artificial Sequence
  Cyclic GFR-binding peptide
  MOD_RES (2)..(34)..(35): Xaa is C or S
AXSEVTMNRHKRLVVNKNEDYYLISTASMKEPVXXP

SEQ ID NO: 84666 - protein, 41 aa, Artificial Sequence; identical to SEQ ID NO: 2326
  Cyclic GFR-binding peptide
  MOD_RES (2)..(4)..(36)..(37): Xaa is C or S

SEQ ID NO: 84667 - protein, 34 aa, Artificial Sequence; identical to SEQ ID NO: 76049
  Cyclic GFR-binding peptide
  MOD_RES (31)..(32): Xaa is C or S

SEQ ID NO: 84668 - protein, 40 aa, Artificial Sequence
  Cyclic GFR-binding peptide
  MOD_RES (2)..(4)..(36)..(37): Xaa is C or S
SXGXRDVVMGEYKFKIIQQKDNLYLMSIPEMKTPTXXPGA

SEQ ID NO: 84669 - protein, 28 aa, Artificial Sequence
  Cyclic GFR-binding peptide
  MOD_RES (27)..(28): Xaa is C or S
MRHKRLLLVRGNDYYLMSTASTKVPAXX

SEQ ID NO: 84670 - protein, 36 aa, Artificial Sequence; identical to SEQ ID NO: 40559
  Cyclic GFR-binding peptide
  MOD_RES (2)..(34)..(35): Xaa is C or S

SEQ ID NO: 84671 - protein, 35 aa, Artificial Sequence
  Cyclic GFR-binding peptide
  MOD_RES (31)..(32): Xaa is C or S
EVTMNRHKRLVVNKNEDYYLISTASMKEPVXXPEP

SEQ ID NO: 84672 - protein, 30 aa, Artificial Sequence; identical to SEQ ID NO: 30469
  Cyclic GFR-binding peptide
  MOD_RES (2)..(2): Xaa is C or S

SEQ ID NO: 84673 - protein, 28 aa, Artificial Sequence
  Cyclic GFR-binding peptide
  MOD_RES (1)..(1): Xaa is C or S
XGEVVMERHKRLVVKDYEDYYLMSTASL

SEQ ID NO: 84674 - protein, 29 aa, Artificial Sequence
  Cyclic GFR-binding peptide
ESVAMGPIKGYYTVVGKDFYLINIPSLKT

SEQ ID NO: 84675 - protein, 31 aa, Artificial Sequence
  Cyclic GFR-binding peptide
  MOD_RES (1)..(1): Xaa is C or S
XEEVIMRHKRLLLVRGNDYYLMSTASTKVPA

SEQ ID NO: 84676 - protein, 33 aa, Artificial Sequence; identical to SEQ ID NO: 30474
  Cyclic GFR-binding peptide
  MOD_RES (27)..(28): Xaa is C or S

SEQ ID NO: 84677 - protein, 28 aa, Artificial Sequence
  Cyclic GFR-binding peptide
  MOD_RES (1)..(1): Xaa is C or S
XAEVVMDRHKRLVVNNAADYYLISTASL

SEQ ID NO: 84678 - protein, 27 aa, Artificial Sequence
  Cyclic GFR-binding peptide
  MOD_RES (1)..(1): Xaa is C or S
XARVVMNEYKFKIVNSSDDLYLVSIPE

SEQ ID NO: 84679 - protein, 27 aa, Artificial Sequence
  Cyclic GFR-binding peptide
VVMNRHKRLIVNSSDDYYLVSTASLQT

SEQ ID NO: 84680 - protein, 31 aa, Artificial Sequence; identical to SEQ ID NO: 2335
  Cyclic GFR-binding peptide

SEQ ID NO: 84681 - protein, 34 aa, Artificial Sequence; identical to SEQ ID NO: 30480
  Cyclic GFR-binding peptide
  MOD_RES (2)..(34): Xaa is C or S

SEQ ID NO: 84682 - protein, 36 aa, Artificial Sequence; identical to SEQ ID NO: 40571
  Cyclic GFR-binding peptide
  MOD_RES (1)..(3)..(35)..(36): Xaa is C or S

SEQ ID NO: 84683 - protein, 32 aa, Artificial Sequence; identical to SEQ ID NO: 30483
  Cyclic GFR-binding peptide
  MOD_RES (30)..(31): Xaa is C or S

SEQ ID NO: 84684 - protein, 30 aa, Artificial Sequence; identical to SEQ ID NO: 30484
  Cyclic GFR-binding peptide
  MOD_RES (2)..(4): Xaa is C or S

SEQ ID NO: 84685 - protein, 35 aa, Artificial Sequence; identical to SEQ ID NO: 2342
  Cyclic GFR-binding peptide
  MOD_RES (30)..(31): Xaa is C or S

SEQ ID NO: 84686 - protein, 23 aa, Artificial Sequence
  Cyclic GFR-binding peptide
TMNEYKFKVVNKNEDLYLISIPE

SEQ ID NO: 84687 - protein, 30 aa, Artificial Sequence; identical to SEQ ID NO: 2343
  Cyclic GFR-binding peptide

SEQ ID NO: 84688 - protein, 27 aa, Artificial Sequence
  Cyclic GFR-binding peptide
VTMNRHKRLVVNKNEDYYLISTASMKE

SEQ ID NO: 84689 - protein, 41 aa, Artificial Sequence
  Cyclic GFR-binding peptide
  MOD_RES (2)..(4)..(36)..(37): Xaa is C or S
RXGXESVAMGRHKRLYTVVGKDYYLISTASLKTPVXXAKSA

SEQ ID NO: 84690 - protein, 27 aa, Artificial Sequence
  Cyclic GFR-binding peptide
GEVVMERHKRLVVKDYEDYYLMSTASL

SEQ ID NO: 84691 - protein, 30 aa, Artificial Sequence
  Cyclic GFR-binding peptide
  MOD_RES (30)..(30): Xaa is C or S
VTMNRHKRLVVNKNEDYYLISTASMKEPVX

SEQ ID NO: 84692 - protein, 40 aa, Artificial Sequence; identical to SEQ ID NO: 40578
  Cyclic GFR-binding peptide
  MOD_RES (2)..(4)..(36): Xaa is C or S

SEQ ID NO: 84693 - protein, 31 aa, Artificial Sequence; identical to SEQ ID NO: 2345
  Cyclic GFR-binding peptide

SEQ ID NO: 84694 - protein, 24 aa, Artificial Sequence
  Cyclic GFR-binding peptide
VMDEYKFKVVNNASDLYLISIPEL

SEQ ID NO: 84695 - protein, 29 aa, Artificial Sequence
  Cyclic GFR-binding peptide
RVIMRHKRLVKPKRGVYYLISTASLAQPV

SEQ ID NO: 84696 - protein, 22 aa, Artificial Sequence
  Cyclic GFR-binding peptide
RYKKLVVKDYEDFYLMSIANLE

SEQ ID NO: 84697 - protein, 32 aa, Artificial Sequence; identical to SEQ ID NO: 30501
  Cyclic GFR-binding peptide
  MOD_RES (31)..(32): Xaa is C or S

SEQ ID NO: 84698 - protein, 35 aa, Artificial Sequence; identical to SEQ ID NO: 2354
  Cyclic GFR-binding peptide
  MOD_RES (29)..(30): Xaa is C or S

SEQ ID NO: 84699 - protein, 39 aa, Artificial Sequence; identical to SEQ ID NO: 40593
  Cyclic GFR-binding peptide
  MOD_RES (1)..(3)..(35)..(36): Xaa is C or S

SEQ ID NO: 84700 - protein, 35 aa, Artificial Sequence; identical to SEQ ID NO: 30505
  Cyclic GFR-binding peptide
  MOD_RES (1)..(33)..(34): Xaa is C or S

SEQ ID NO: 84701 - protein, 31 aa, Artificial Sequence; identical to SEQ ID NO: 2357
  Cyclic GFR-binding peptide
  MOD_RES (30)..(31): Xaa is C or S

SEQ ID NO: 84702 - protein, 25 aa, Artificial Sequence
  Cyclic GFR-binding peptide
YHYKLIIQQKDNKYLMSIPSMKTPT

SEQ ID NO: 84703 - protein, 24 aa, Artificial Sequence
  Cyclic GFR-binding peptide
MEYKFKVKPTRGVLYLISIPELDQ

SEQ ID NO: 84704 - protein, 33 aa, Artificial Sequence; identical to SEQ ID NO: 40595
  Cyclic GFR-binding peptide
  MOD_RES (2)..(2): Xaa is C or S

SEQ ID NO: 84705 - protein, 29 aa, Artificial Sequence
  Cyclic GFR-binding peptide
  MOD_RES (1)..(3): Xaa is C or S
XGXRDVVMGYHYKLIIQQKDNKYLMSIPS

SEQ ID NO: 84706 - protein, 31 aa, Artificial Sequence; identical to SEQ ID NO: 2360
  Cyclic GFR-binding peptide
  MOD_RES (2)..(4): Xaa is C or S

SEQ ID NO: 84707 - protein, 20 aa, Artificial Sequence
  Cyclic GFR-binding peptide
PIKGYVVKDYEDFYLMNIPS

SEQ ID NO: 84708 - protein, 36 aa, Artificial Sequence; identical to SEQ ID NO: 76069
  Cyclic GFR-binding peptide
  MOD_RES (31)..(32): Xaa is C or S

SEQ ID NO: 84709 - protein, 26 aa, Artificial Sequence
  Cyclic GFR-binding peptide
  MOD_RES (26)..(26): Xaa is C or S
RHKRLYTVVGKDYYLISTASLKTPVX

SEQ ID NO: 84710 - protein, 39 aa, Artificial Sequence
  Cyclic GFR-binding peptide
  MOD_RES (1)..(3)..(35)..(36): Xaa is C or S
XGXRDVVMGRHKRLIIQQKDNYYLMSTASMKTPTXXPGA

SEQ ID NO: 84711 - protein, 28 aa, Artificial Sequence
  Cyclic GFR-binding peptide
  MOD_RES (26)..(27): Xaa is C or S
PIKGYLLVRGNDFYLMNIPSTKVPAXXT

SEQ ID NO: 84712 - protein, 39 aa, Artificial Sequence
  Cyclic GFR-binding peptide
  MOD_RES (2)..(34)..(35): Xaa is C or S
AXSEVTMNYHYKLVVNKNEDKYLISIPSMKEPVXXPEPI

SEQ ID NO: 84713 - protein, 22 aa, Artificial Sequence
  Cyclic GFR-binding peptide
DYHYKLVVNNAADKYLISIPSL

SEQ ID NO: 84714 - protein, 32 aa, Artificial Sequence; identical to SEQ ID NO: 30517
  Cyclic GFR-binding peptide
  MOD_RES (27)..(28): Xaa is C or S

SEQ ID NO: 84715 - protein, 33 aa, Artificial Sequence; identical to SEQ ID NO: 30519
  Cyclic GFR-binding peptide
  MOD_RES (30)..(31): Xaa is C or S

SEQ ID NO: 84716 - protein, 29 aa, Artificial Sequence
  Cyclic GFR-binding peptide
  MOD_RES (27)..(28): Xaa is C or S
MEYKFKIKPTKGILYLISIPELDQSVXXP

SEQ ID NO: 84717 - protein, 27 aa, Artificial Sequence
  Cyclic GFR-binding peptide
ESVAMGYHYKLYTVVGKDKYLISIPSL

SEQ ID NO: 84718 - protein, 32 aa, Artificial Sequence
  Cyclic GFR-binding peptide
  MOD_RES (29)..(30): Xaa is C or S
TMNEYKFKVVNKNEDLYLISIPEMKEPVXXPE

SEQ ID NO: 84719 - protein, 28 aa, Artificial Sequence
  Cyclic GFR-binding peptide
EVVMDYHYKLVVNNAADKYLISIPSLRA

SEQ ID NO: 84720 - protein, 22 aa, Artificial Sequence
  Cyclic GFR-binding peptide
RYKKLVKPTRGVFYLISIANLD

SEQ ID NO: 84721 - protein, 31 aa, Artificial Sequence; identical to SEQ ID NO: 30527
  Cyclic GFR-binding peptide
  MOD_RES (29)..(30): Xaa is C or S

SEQ ID NO: 84722 - protein, 30 aa, Artificial Sequence; identical to SEQ ID NO: 2373
  Cyclic GFR-binding peptide
  MOD_RES (30)..(30): Xaa is C or S

SEQ ID NO: 84723 - protein, 33 aa, Artificial Sequence
  Cyclic GFR-binding peptide
  MOD_RES (31)..(32): Xaa is C or S
DVVMGYHYKLIIQQKDNKYLMSIPSMKTPTXXP

SEQ ID NO: 84724 - protein, 24 aa, Artificial Sequence
  Cyclic GFR-binding peptide
VAMGRYKKLYTVVGKDFYLISIAN

SEQ ID NO: 84725 - protein, 34 aa, Artificial Sequence; identical to SEQ ID NO: 2376
  Cyclic GFR-binding peptide
  MOD_RES (1)..(33): Xaa is C or S

SEQ ID NO: 84726 - protein, 35 aa, Artificial Sequence
  Cyclic GFR-binding peptide
  MOD_RES (30)..(31): Xaa is C or S
VTMNYHYKLVVNKNEDKYLISIPSMKEPVXXPEPI

SEQ ID NO: 84727 - protein, 29 aa, Artificial Sequence
  Cyclic GFR-binding peptide
VVMNPIKGYIVNNSSDFYLVNIPSLKTPA

SEQ ID NO: 84728 - protein, 28 aa, Artificial Sequence
  Cyclic GFR-binding peptide
  MOD_RES (1)..(3): Xaa is C or S
XGXEEVIMEYKFKLLVRGNDLYLMSIPE

SEQ ID NO: 84729 - protein, 24 aa, Artificial Sequence
  Cyclic GFR-binding peptide
SMGEEYKFKTPVGMDDLYLVSIPE

SEQ ID NO: 84730 - protein, 29 aa, Artificial Sequence
  Cyclic GFR-binding peptide
VVMGRYKKLIIQQKDNFYLMSIANMKTPT

SEQ ID NO: 84731 - protein, 26 aa, Artificial Sequence
  Cyclic GFR-binding peptide
EPIKGYTPVGMDDFYLVNIPSLKTPV

SEQ ID NO: 84732 - protein, 23 aa, Artificial Sequence
  Cyclic GFR-binding peptide
VMPIKGYVKPTRGVFYLINIPSL

SEQ ID NO: 84733 - protein, 29 aa, Artificial Sequence
  Cyclic GFR-binding peptide
  MOD_RES (28)..(29): Xaa is C or S
MNEYKFKIVNNSSDLYLVSIPELKTPAXX

SEQ ID NO: 84734 - protein, 38 aa, Artificial Sequence; identical to SEQ ID NO: 30537
  Cyclic GFR-binding peptide
  MOD_RES (2)..(33)..(34): Xaa is C or S

SEQ ID NO: 84735 - protein, 40 aa, Artificial Sequence; identical to SEQ ID NO: 2381
  Cyclic GFR-binding peptide
  MOD_RES (1)..(3)..(36)..(37): Xaa is C or S

SEQ ID NO: 84736 - protein, 24 aa, Artificial Sequence
  Cyclic GFR-binding peptide
VIMRHKRLIKPTKGIYYLISTASL

SEQ ID NO: 84737 - protein, 33 aa, Artificial Sequence
  Cyclic GFR-binding peptide
  MOD_RES (29)..(30): Xaa is C or S
VIMEYKFKLLVRGNDLYLMSIPETKVPAXXTSP

SEQ ID NO: 84738 - protein, 33 aa, Artificial Sequence; identical to SEQ ID NO: 2384
  Cyclic GFR-binding peptide
  MOD_RES (32)..(33): Xaa is C or S

SEQ ID NO: 84739 - protein, 29 aa, Artificial Sequence
  Cyclic GFR-binding peptide
RVVMNRYKKLIVNSSDDFYLVSIANLKTP

SEQ ID NO: 84740 - protein, 33 aa, Artificial Sequence; identical to SEQ ID NO: 30544
  Cyclic GFR-binding peptide
  MOD_RES (2)..(4): Xaa is C or S

SEQ ID NO: 84741 - protein, 34 aa, Artificial Sequence
  Cyclic GFR-binding peptide
  MOD_RES (28)..(29): Xaa is C or S
MDEYKFKVVNNASDLYLISIPELRTPVXXTPPTS

SEQ ID NO: 84742 - protein, 23 aa, Artificial Sequence
  Cyclic GFR-binding peptide
MYHYKLIKPTKGIKYLISIPSLD

SEQ ID NO: 84743 - protein, 23 aa, Artificial Sequence
  Cyclic GFR-binding peptide
VIMPIKGYLLVRGNDFYLMNIPS

SEQ ID NO: 84744 - protein, 38 aa, Artificial Sequence
  Cyclic GFR-binding peptide
  MOD_RES (1)..(3)..(34)..(35): Xaa is C or S
XGXEEVIMYHYKLLLVRGNDKYLMSIPSTKVPAXXTSP

SEQ ID NO: 84745 - protein, 27 aa, Artificial Sequence
  Cyclic GFR-binding peptide
  MOD_RES (1)..(1): Xaa is C or S
XSEVTMNPIKGYVVNKNEDFYLINIPS

SEQ ID NO: 84746 - protein, 33 aa, Artificial Sequence; identical to SEQ ID NO: 76087
  Cyclic GFR-binding peptide
  MOD_RES (1)..(3): Xaa is C or S

SEQ ID NO: 84747 - protein, 21 aa, Artificial Sequence
  Cyclic GFR-binding peptide
RYKKLTPVGMDDFYLVSIANL

SEQ ID NO: 84748 - protein, 36 aa, Artificial Sequence
  Cyclic GFR-binding peptide
  MOD_RES (2)..(4): Xaa is C or S
RXGXEAVSMGEPIKGYTPVGMDDFYLVNIPSLKTPV

SEQ ID NO: 84749 - protein, 34 aa, Artificial Sequence; identical to SEQ ID NO: 2399
  Cyclic GFR-binding peptide
  MOD_RES (31)..(32): Xaa is C or S

SEQ ID NO: 84750 - protein, 31 aa, Artificial Sequence; identical to SEQ ID NO: 30555
  Cyclic GFR-binding peptide
  MOD_RES (2)..(4): Xaa is C or S

SEQ ID NO: 84751 - protein, 33 aa, Artificial Sequence; identical to SEQ ID NO: 2401
  Cyclic GFR-binding peptide
  MOD_RES (29)..(30): Xaa is C or S

SEQ ID NO: 84752 - protein, 35 aa, Artificial Sequence; identical to SEQ ID NO: 30557
  Cyclic GFR-binding peptide
  MOD_RES (30)..(31): Xaa is C or S

SEQ ID NO: 84753 - protein, 39 aa, Artificial Sequence; identical to SEQ ID NO: 2403
  Cyclic GFR-binding peptide
  MOD_RES (2)..(34)..(35): Xaa is C or S

SEQ ID NO: 84754 - protein, 31 aa, Artificial Sequence; identical to SEQ ID NO: 2407
  Cyclic GFR-binding peptide
  MOD_RES (2)..(2): Xaa is C or S

SEQ ID NO: 84755 - protein, 35 aa, Artificial Sequence; identical to SEQ ID NO: 40660
  Cyclic GFR-binding peptide
  MOD_RES (31)..(32): Xaa is C or S

SEQ ID NO: 84756 - protein, 36 aa, Artificial Sequence
  Cyclic GFR-binding peptide
  MOD_RES (2)..(33)..(34): Xaa is C or S
KXSKVIMPIKGYIKPTKGIFYLINIPSLDQSVXXPS

SEQ ID NO: 84757 - protein, 27 aa, Artificial Sequence
  Cyclic GFR-binding peptide
KVVMNYHYKLIVNNSSDKYLVSIPSLK

SEQ ID NO: 84758 - protein, 37 aa, Artificial Sequence
  Cyclic GFR-binding peptide
  MOD_RES (1)..(33)..(34): Xaa is C or S
XRDVVMGYHYKLIIQQKDNKYLMSIPSMKTPTXXPGA

SEQ ID NO: 84759 - protein, 28 aa, Artificial Sequence
  Cyclic GFR-binding peptide
  MOD_RES (27)..(28): Xaa is C or S
DEYKFKVVNNAADLYLISIPELRAPVXX

SEQ ID NO: 84760 - protein, 34 aa, Artificial Sequence; identical to SEQ ID NO: 30567
  Cyclic GFR-binding peptide
  MOD_RES (32)..(33): Xaa is C or S

SEQ ID NO: 84761 - protein, 33 aa, Artificial Sequence; identical to SEQ ID NO: 2410
  Cyclic GFR-binding peptide
  MOD_RES (2)..(2): Xaa is C or S

SEQ ID NO: 84762 - protein, 39 aa, Artificial Sequence; identical to SEQ ID NO: 30575
  Cyclic GFR-binding peptide
  MOD_RES (1)..(3)..(35)..(36): Xaa is C or S

SEQ ID NO: 84763 - protein, 25 aa, Artificial Sequence
  Cyclic GFR-binding peptide
SKVVMRHKRLVKPTRGVYYLISTAS

SEQ ID NO: 84764 - protein, 26 aa, Artificial Sequence
  Cyclic GFR-binding peptide
SEVTMNPIKGYVVNKNEDFYLINIPS

SEQ ID NO: 84765 - protein, 34 aa, Artificial Sequence; identical to SEQ ID NO: 2416
  Cyclic GFR-binding peptide
  MOD_RES (2)..(4): Xaa is C or S

SEQ ID NO: 84766 - protein, 33 aa, Artificial Sequence
  Cyclic GFR-binding peptide
  MOD_RES (28)..(29): Xaa is C or S
IMEYKFKLLVRGNDLYLMSIPETKVPAXXTSPV

SEQ ID NO: 84767 - protein, 33 aa, Artificial Sequence; identical to SEQ ID NO: 40671
  Cyclic GFR-binding peptide
  MOD_RES (28)..(29): Xaa is C or S

SEQ ID NO: 84768 - protein, 39 aa, Artificial Sequence; identical to SEQ ID NO: 2417
  Cyclic GFR-binding peptide
  MOD_RES (1)..(3)..(35)..(36): Xaa is C or S

SEQ ID NO: 84769 - protein, 39 aa, Artificial Sequence; identical to SEQ ID NO: 40673
  Cyclic GFR-binding peptide
  MOD_RES (1)..(3)..(36)..(37): Xaa is C or S

SEQ ID NO: 84770 - protein, 35 aa, Artificial Sequence; identical to SEQ ID NO: 40674
  Cyclic GFR-binding peptide
  MOD_RES (29)..(30): Xaa is C or S

SEQ ID NO: 84771 - protein, 34 aa, Artificial Sequence; identical to SEQ ID NO: 40675
  Cyclic GFR-binding peptide
  MOD_RES (32)..(33): Xaa is C or S

SEQ ID NO: 84772 - protein, 35 aa, Artificial Sequence; identical to SEQ ID NO: 2419
  Cyclic GFR-binding peptide
  MOD_RES (31)..(32): Xaa is C or S

SEQ ID NO: 84773 - protein, 29 aa, Artificial Sequence
  Cyclic GFR-binding peptide
  MOD_RES (27)..(28): Xaa is C or S
GPIKGYYTVVGKDFYLINIPSLKTPVXXA

SEQ ID NO: 84774 - protein, 27 aa, Artificial Sequence
  Cyclic GFR-binding peptide
  MOD_RES (26)..(27): Xaa is C or S
YHYKLVVNNASDKYLISIPSLRTPVXX

SEQ ID NO: 84775 - protein, 32 aa, Artificial Sequence
  Cyclic GFR-binding peptide
  MOD_RES (1)..(1): Xaa is C or S
XSEVVMDYHYKLVVNNASDKYLISIPSLRTPV

SEQ ID NO: 84776 - protein, 34 aa, Artificial Sequence; identical to SEQ ID NO: 2424
  Cyclic GFR-binding peptide
  MOD_RES (31)..(31): Xaa is C or S

SEQ ID NO: 84777 - protein, 39 aa, Artificial Sequence; identical to SEQ ID NO: 40680
  Cyclic GFR-binding peptide
  MOD_RES (1)..(3)..(35)..(36): Xaa is C or S

SEQ ID NO: 84778 - protein, 35 aa, Artificial Sequence; identical to SEQ ID NO: 2426
  Cyclic GFR-binding peptide
  MOD_RES (2)..(34): Xaa is C or S

SEQ ID NO: 84779 - protein, 37 aa, Artificial Sequence; identical to SEQ ID NO: 2427
  Cyclic GFR-binding peptide
  MOD_RES (1)..(33): Xaa is C or S

SEQ ID NO: 84780 - protein, 24 aa, Artificial Sequence
  Cyclic GFR-binding peptide
TMNRHKRLVVNKNEDYYLISTASM

SEQ ID NO: 84781 - protein, 22 aa, Artificial Sequence
  Cyclic GFR-binding peptide
MNEYKFKVVNKNEDLYLISIPE

SEQ ID NO: 84782 - protein, 29 aa, Artificial Sequence
  Cyclic GFR-binding peptide
KVVMYHYKLVKPTRGVKYLISIPSLDQPV

SEQ ID NO: 84783 - protein, 30 aa, Artificial Sequence
  Cyclic GFR-binding peptide
  MOD_RES (28)..(29): Xaa is C or S
MGRHKRLIIQQKDNYYLMSTASMKTPTXXP

SEQ ID NO: 84784 - protein, 26 aa, Artificial Sequence
  Cyclic GFR-binding peptide
IMPIKGYLLVRGNDFYLMNIPSTKVP

SEQ ID NO: 84785 - protein, 32 aa, Artificial Sequence; identical to SEQ ID NO: 12967
  Cyclic GFR-binding peptide
  MOD_RES (1)..(1): Xaa is C or S

SEQ ID NO: 84786 - protein, 26 aa, Artificial Sequence
  Cyclic GFR-binding peptide
VMGEYKFKIIQQKDNLYLMSIPEMKT

SEQ ID NO: 84787 - protein, 34 aa, Artificial Sequence; identical to SEQ ID NO: 30590
  Cyclic GFR-binding peptide
  MOD_RES (29)..(30): Xaa is C or S

SEQ ID NO: 84788 - protein, 30 aa, Artificial Sequence
  Cyclic GFR-binding peptide
  MOD_RES (1)..(3): Xaa is C or S
XGXRDVVMGYHYKLIIQQKDNKYLMSIPSM

SEQ ID NO: 84789 - protein, 29 aa, Artificial Sequence
  Cyclic GFR-binding peptide
  MOD_RES (28)..(29): Xaa is C or S
MDRYKKLVVKENEDFYLMSIANLETPVXX

SEQ ID NO: 84790 - protein, 39 aa, Artificial Sequence; identical to SEQ ID NO: 2432
  Cyclic GFR-binding peptide
  MOD_RES (1)..(3)..(35)..(36): Xaa is C or S

SEQ ID NO: 84791 - protein, 42 aa, Artificial Sequence
  Cyclic GFR-binding peptide
  MOD_RES (2)..(4)..(36)..(37): Xaa is C or S
HXGXSRVVMNYHYKLIVNSSDDKYLVSIPSLKTPAXXPKPVH

SEQ ID NO: 84792 - protein, 30 aa, Artificial Sequence; identical to SEQ ID NO: 2434
  Cyclic GFR-binding peptide

SEQ ID NO: 84793 - protein, 35 aa, Artificial Sequence; identical to SEQ ID NO: 2435
  Cyclic GFR-binding peptide
  MOD_RES (29)..(30): Xaa is C or S

SEQ ID NO: 84794 - protein, 30 aa, Artificial Sequence; identical to SEQ ID NO: 40694
  Cyclic GFR-binding peptide
  MOD_RES (1)..(3): Xaa is C or S

SEQ ID NO: 84795 - protein, 27 aa, Artificial Sequence
  Cyclic GFR-binding peptide
  MOD_RES (26)..(27): Xaa is C or S
PIKGYVVKENEDFYLMNIPSLETPVXX

SEQ ID NO: 84796 - protein, 35 aa, Artificial Sequence
  Cyclic GFR-binding peptide
  MOD_RES (30)..(31): Xaa is C or S
RVIMPIKGYVKPKRGVFYLINIPSLAQPVXXPAAS

SEQ ID NO: 84797 - protein, 35 aa, Artificial Sequence
  Cyclic GFR-binding peptide
  MOD_RES (32)..(33): Xaa is C or S
AEVVMDRHKRLVVNNAADYYLISTASLRAPVXXSA

SEQ ID NO: 84798 - protein, 29 aa, Artificial Sequence
  Cyclic GFR-binding peptide
  MOD_RES (1)..(1): Xaa is C or S
XSEVTMNRYKKLVVNKNEDFYLISIANMK

SEQ ID NO: 84799 - protein, 28 aa, Artificial Sequence
  Cyclic GFR-binding peptide
  MOD_RES (1)..(1): Xaa is C or S
XSEVTMNPIKGYVVNKNEDFYLINIPSM

SEQ ID NO: 84800 - protein, 34 aa, Artificial Sequence
  Cyclic GFR-binding peptide
  MOD_RES (29)..(30): Xaa is C or S
AMGRHKRLYTVVGKDYYLISTASLKTPVXXAKSA

SEQ ID NO: 84801 - protein, 31 aa, Artificial Sequence; identical to SEQ ID NO: 40705
  Cyclic GFR-binding peptide
  MOD_RES (28)..(29): Xaa is C or S

SEQ ID NO: 84802 - protein, 36 aa, Artificial Sequence
  Cyclic GFR-binding peptide
  MOD_RES (31)..(32): Xaa is C or S
DVVMGEYKFKIIQQKDNLYLMSIPEMKTPTXXPGAS

SEQ ID NO: 84803 - protein, 23 aa, Artificial Sequence
  Cyclic GFR-binding peptide
PIKGYLLVRGNDFYLMNIPSTKV

SEQ ID NO: 84804 - protein, 40 aa, Artificial Sequence; identical to SEQ ID NO: 30610
  Cyclic GFR-binding peptide
  MOD_RES (1)..(3)..(35): Xaa is C or S

SEQ ID NO: 84805 - protein, 40 aa, Artificial Sequence; identical to SEQ ID NO: 2443
  Cyclic GFR-binding peptide
  MOD_RES (2)..(4)..(35)..(36): Xaa is C or S

SEQ ID NO: 84806 - protein, 40 aa, Artificial Sequence; identical to SEQ ID NO: 2444
  Cyclic GFR-binding peptide
  MOD_RES (1)..(3)..(35)..(36): Xaa is C or S

SEQ ID NO: 84807 - protein, 35 aa, Artificial Sequence
  Cyclic GFR-binding peptide
  MOD_RES (31)..(32): Xaa is C or S
EEVIMRHKRLLLVRGNDYYLMSTASTKVPAXXTSP

SEQ ID NO: 84808 - protein, 32 aa, Artificial Sequence; identical to SEQ ID NO: 30617
  Cyclic GFR-binding peptide
  MOD_RES (28)..(29): Xaa is C or S

SEQ ID NO: 84809 - protein, 38 aa, Artificial Sequence; identical to SEQ ID NO: 2445
  Cyclic GFR-binding peptide
  MOD_RES (1)..(3)..(34)..(35): Xaa is C or S

SEQ ID NO: 84810 - protein, 28 aa, Artificial Sequence
  Cyclic GFR-binding peptide
  MOD_RES (27)..(28): Xaa is C or S
DYHYKLVVNNASDKYLISIPSLRTPVXX

SEQ ID NO: 84811 - protein, 29 aa, Artificial Sequence
  Cyclic GFR-binding peptide
VVMERYKKLVVKDYEDFYLMSIANLETPV

SEQ ID NO: 84812 - protein, 32 aa, Artificial Sequence; identical to SEQ ID NO: 2448
  Cyclic GFR-binding peptide
  MOD_RES (28)..(29): Xaa is C or S

SEQ ID NO: 84813 - protein, 28 aa, Artificial Sequence
  Cyclic GFR-binding peptide
  MOD_RES (2)..(2): Xaa is C or S
GXGEVVMEEYKFKVVKDYEDLYLMSIPE

SEQ ID NO: 84814 - protein, 33 aa, Artificial Sequence; identical to SEQ ID NO: 40720
  Cyclic GFR-binding peptide
  MOD_RES (1)..(3): Xaa is C or S

SEQ ID NO: 84815 - protein, 27 aa, Artificial Sequence
  Cyclic GFR-binding peptide
EVTMNRYKKLVVNKNEDFYLISIANMK

SEQ ID NO: 84816 - protein, 33 aa, Artificial Sequence
  Cyclic GFR-binding peptide
  MOD_RES (1)..(3): Xaa is C or S
XAXSEVTMNRYKKLVVNKNEDFYLISIANMKEP

SEQ ID NO: 84817 - protein, 37 aa, Artificial Sequence; identical to SEQ ID NO: 2452
  Cyclic GFR-binding peptide
  MOD_RES (2)..(4)..(35)..(36): Xaa is C or S

SEQ ID NO: 84818 - protein, 33 aa, Artificial Sequence; identical to SEQ ID NO: 2455
  Cyclic GFR-binding peptide
  MOD_RES (28)..(29): Xaa is C or S

SEQ ID NO: 84819 - protein, 35 aa, Artificial Sequence; identical to SEQ ID NO: 30638
  Cyclic GFR-binding peptide
  MOD_RES (2)..(34)..(35): Xaa is C or S

SEQ ID NO: 84820 - protein, 41 aa, Artificial Sequence; identical to SEQ ID NO: 40729
  Cyclic GFR-binding peptide
  MOD_RES (2)..(4)..(35)..(36): Xaa is C or S

SEQ ID NO: 84821 - protein, 25 aa, Artificial Sequence
  Cyclic GFR-binding peptide
RHKRLTPVGMDDYYLVSTASLKTPV

SEQ ID NO: 84822 - protein, 32 aa, Artificial Sequence; identical to SEQ ID NO: 2459
  Cyclic GFR-binding peptide
  MOD_RES (1)..(1): Xaa is C or S

SEQ ID NO: 84823 - protein, 40 aa, Artificial Sequence; identical to SEQ ID NO: 2462
  Cyclic GFR-binding peptide
  MOD_RES (2)..(34)..(35): Xaa is C or S

SEQ ID NO: 84824 - protein, 32 aa, Artificial Sequence; identical to SEQ ID NO: 40734
  Cyclic GFR-binding peptide
  MOD_RES (31)..(32): Xaa is C or S

SEQ ID NO: 84825 - protein, 37 aa, Artificial Sequence
  Cyclic GFR-binding peptide
  MOD_RES (32)..(33): Xaa is C or S
SEVVMDEYKFKVVNNASDLYLISIPELRTPVXXTPPT

SEQ ID NO: 84826 - protein, 29 aa, Artificial Sequence
  Cyclic GFR-binding peptide
EVIMEYKFKLLVRGNDLYLMSIPETKVPA

SEQ ID NO: 84827 - protein, 26 aa, Artificial Sequence
  Cyclic GFR-binding peptide
SRVIMRYKKLVKPKRGVFYLISIANL

SEQ ID NO: 84828 - protein, 35 aa, Artificial Sequence; identical to SEQ ID NO: 30644
  Cyclic GFR-binding peptide
  MOD_RES (2)..(33)..(34): Xaa is C or S

SEQ ID NO: 84829 - protein, 31 aa, Artificial Sequence; identical to SEQ ID NO: 30647
  Cyclic GFR-binding peptide
  MOD_RES (29)..(30): Xaa is C or S

SEQ ID NO: 84830 - protein, 32 aa, Artificial Sequence; identical to SEQ ID NO: 30650
  Cyclic GFR-binding peptide
  MOD_RES (1)..(1): Xaa is C or S

SEQ ID NO: 84831 - protein, 32 aa, Artificial Sequence; identical to SEQ ID NO: 30651
  Cyclic GFR-binding peptide
  MOD_RES (1)..(3): Xaa is C or S

SEQ ID NO: 84832 - protein, 36 aa, Artificial Sequence; identical to SEQ ID NO: 2468
  Cyclic GFR-binding peptide
  MOD_RES (1)..(3)..(34)..(35): Xaa is C or S

SEQ ID NO: 84833 - protein, 25 aa, Artificial Sequence
  Cyclic GFR-binding peptide
VVMEYKFKVKPTRGVLYLISIPELD

SEQ ID NO: 84834 - protein, 26 aa, Artificial Sequence
  Cyclic GFR-binding peptide
DRYKKLVVNNAADFYLISIANLRAPV

SEQ ID NO: 84835 - protein, 32 aa, Artificial Sequence; identical to SEQ ID NO: 2473
  Cyclic GFR-binding peptide
  MOD_RES (28)..(29): Xaa is C or S

SEQ ID NO: 84836 - protein, 21 aa, Artificial Sequence
  Cyclic GFR-binding peptide
MEYKFKVKPKRGVLYLISIPE

SEQ ID NO: 84837 - protein, 35 aa, Artificial Sequence
  Cyclic GFR-binding peptide
  MOD_RES (1)..(3)..(35): Xaa is C or S
XGXRDVVMGEYKFKIIQQKDNLYLMSIPEMKTPTX

SEQ ID NO: 84838 - protein, 29 aa, Artificial Sequence
  Cyclic GFR-binding peptide
  MOD_RES (29)..(29): Xaa is C or S
VMDYHYKLVVNNASDKYLISIPSLRTPVX

SEQ ID NO: 84839 - protein, 43 aa, Artificial Sequence; identical to SEQ ID NO: 2476
  Cyclic GFR-binding peptide
  MOD_RES (2)..(4)..(37)..(38): Xaa is C or S

SEQ ID NO: 84840 - protein, 25 aa, Artificial Sequence
  Cyclic GFR-binding peptide
EVVMEEYKFKVVKDYEDLYLMSIPE

SEQ ID NO: 84841 - protein, 34 aa, Artificial Sequence
  Cyclic GFR-binding peptide
  MOD_RES (30)..(31): Xaa is C or S
VVMDEYKFKVVNNASDLYLISIPELRTPVXXTPP

SEQ ID NO: 84842 - protein, 34 aa, Artificial Sequence; identical to SEQ ID NO: 30668
  Cyclic GFR-binding peptide
  MOD_RES (31)..(32): Xaa is C or S

SEQ ID NO: 84843 - protein, 21 aa, Artificial Sequence
  Cyclic GFR-binding peptide
DRHKRLVVNNASDYYLISTAS

SEQ ID NO: 84844 - protein, 38 aa, Artificial Sequence; identical to SEQ ID NO: 30669
  Cyclic GFR-binding peptide
  MOD_RES (2)..(34)..(35): Xaa is C or S

SEQ ID NO: 84845 - protein, 34 aa, Artificial Sequence; identical to SEQ ID NO: 76152
  Cyclic GFR-binding peptide
  MOD_RES (2)..(4): Xaa is C or S

SEQ ID NO: 84846 - protein, 34 aa, Artificial Sequence
  Cyclic GFR-binding peptide
  MOD_RES (31)..(32): Xaa is C or S
EVVMDRHKRLVVNNAADYYLISTASLRAPVXXSA

SEQ ID NO: 84847 - protein, 31 aa, Artificial Sequence
  Cyclic GFR-binding peptide
  MOD_RES (26)..(27): Xaa is C or S
RHKRLYTVVGKDYYLISTASLKTPVXXAKSA

SEQ ID NO: 84848 - protein, 39 aa, Artificial Sequence; identical to SEQ ID NO: 30670
  Cyclic GFR-binding peptide
  MOD_RES (1)..(33)..(34): Xaa is C or S

SEQ ID NO: 84849 - protein, 31 aa, Artificial Sequence; identical to SEQ ID NO: 2482
  Cyclic GFR-binding peptide
  MOD_RES (26)..(27): Xaa is C or S

SEQ ID NO: 84850 - protein, 30 aa, Artificial Sequence; identical to SEQ ID NO: 2484
  Cyclic GFR-binding peptide
  MOD_RES (2)..(4): Xaa is C or S

SEQ ID NO: 84851 - protein, 30 aa, Artificial Sequence; identical to SEQ ID NO: 2485
  Cyclic GFR-binding peptide
  MOD_RES (30)..(30): Xaa is C or S

SEQ ID NO: 84852 - protein, 26 aa, Artificial Sequence
  Cyclic GFR-binding peptide
VIMEYKFKVKPKRGVLYLISIPELAQ

SEQ ID NO: 84853 - protein, 30 aa, Artificial Sequence
  Cyclic GFR-binding peptide
  MOD_RES (1)..(1): Xaa is C or S
XSKVVMPIKGYVKPTRGVFYLINIPSLDQP

SEQ ID NO: 84854 - protein, 35 aa, Artificial Sequence; identical to SEQ ID NO: 2489
  Cyclic GFR-binding peptide
  MOD_RES (2)..(33)..(34): Xaa is C or S

SEQ ID NO: 84855 - protein, 29 aa, Artificial Sequence
  Cyclic GFR-binding peptide
  MOD_RES (2)..(2): Xaa is C or S
GXARVVMNPIKGYIVNSSDDFYLVNIPSL

SEQ ID NO: 84856 - protein, 32 aa, Artificial Sequence
  Cyclic GFR-binding peptide
  MOD_RES (26)..(27): Xaa is C or S
EYKFKIVNSSDDLYLVSIPELKTPAXXPKPVH

SEQ ID NO: 84857 - protein, 37 aa, Artificial Sequence; identical to SEQ ID NO: 30679
  Cyclic GFR-binding peptide
  MOD_RES (31)..(32): Xaa is C or S

SEQ ID NO: 84858 - protein, 24 aa, Artificial Sequence
  Cyclic GFR-binding peptide
VVMERHKRLVVKDYEDYYLMSTAS

SEQ ID NO: 84859 - protein, 30 aa, Artificial Sequence; identical to SEQ ID NO: 2493
  Cyclic GFR-binding peptide
  MOD_RES (27)..(28): Xaa is C or S

SEQ ID NO: 84860 - protein, 30 aa, Artificial Sequence; identical to SEQ ID NO: 2497
  Cyclic GFR-binding peptide
  MOD_RES (2)..(4): Xaa is C or S

SEQ ID NO: 84861 - protein, 29 aa, Artificial Sequence
  Cyclic GFR-binding peptide
  MOD_RES (27)..(28): Xaa is C or S
DPIKGYVVNNAADFYLINIPSLRAPVXXS

SEQ ID NO: 84862 - protein, 38 aa, Artificial Sequence; identical to SEQ ID NO: 2498
  Cyclic GFR-binding peptide
  MOD_RES (1)..(3)..(35)..(36): Xaa is C or S

SEQ ID NO: 84863 - protein, 36 aa, Artificial Sequence; identical to SEQ ID NO: 30688
  Cyclic GFR-binding peptide
  MOD_RES (32)..(33): Xaa is C or S

SEQ ID NO: 84864 - protein, 33 aa, Artificial Sequence; identical to SEQ ID NO: 40782
  Cyclic GFR-binding peptide
  MOD_RES (1)..(33): Xaa is C or S

SEQ ID NO: 84865 - protein, 37 aa, Artificial Sequence; identical to SEQ ID NO: 30691
  Cyclic GFR-binding peptide
  MOD_RES (2)..(4)..(36)..(37): Xaa is C or S

SEQ ID NO: 84866 - protein, 30 aa, Artificial Sequence; identical to SEQ ID NO: 2501
  Cyclic GFR-binding peptide
  MOD_RES (28)..(29): Xaa is C or S

SEQ ID NO: 84867 - protein, 30 aa, Artificial Sequence; identical to SEQ ID NO: 40784
  Cyclic GFR-binding peptide
  MOD_RES (1)..(1): Xaa is C or S

SEQ ID NO: 84868 - protein, 36 aa, Artificial Sequence; identical to SEQ ID NO: 40786
  Cyclic GFR-binding peptide
  MOD_RES (2)..(34)..(35): Xaa is C or S

SEQ ID NO: 84869 - protein, 31 aa, Artificial Sequence; identical to SEQ ID NO: 2502
  Cyclic GFR-binding peptide
  MOD_RES (29)..(29): Xaa is C or S

SEQ ID NO: 84870 - protein, 33 aa, Artificial Sequence
  Cyclic GFR-binding peptide
  MOD_RES (31)..(32): Xaa is C or S
SKVVMPIKGYVKPTRGVFYLINIPSLDQPVXXP

SEQ ID NO: 84871 - protein, 32 aa, Artificial Sequence
  Cyclic GFR-binding peptide
  MOD_RES (30)..(31): Xaa is C or S
VAMGRHKRLYTVVGKDYYLISTASLKTPVXXA

SEQ ID NO: 84872 - protein, 34 aa, Artificial Sequence; identical to SEQ ID NO: 40787
  Cyclic GFR-binding peptide
  MOD_RES (29)..(30): Xaa is C or S

SEQ ID NO: 84873 - protein, 26 aa, Artificial Sequence
  Cyclic GFR-binding peptide
GEVVMDYHYKLVVKENEDKYLMSIPS

SEQ ID NO: 84874 - protein, 27 aa, Artificial Sequence
  Cyclic GFR-binding peptide
MNRHKRLIVNSSDDYYLVSTASLQTPA

SEQ ID NO: 84875 - protein, 28 aa, Artificial Sequence
  Cyclic GFR-binding peptide
VVMEEYKFKVVKDYEDLYLMSIPELETP

SEQ ID NO: 84876 - protein, 26 aa, Artificial Sequence
  Cyclic GFR-binding peptide
  MOD_RES (1)..(1): Xaa is C or S
XSKVIMRYKKLIKPTKGIFYLISIAN

SEQ ID NO: 84877 - protein, 34 aa, Artificial Sequence; identical to SEQ ID NO: 40792
  Cyclic GFR-binding peptide
  MOD_RES (30)..(31): Xaa is C or S

SEQ ID NO: 84878 - protein, 24 aa, Artificial Sequence
  Cyclic GFR-binding peptide
RYKKLIVNNSSDFYLVSIANLKTP

SEQ ID NO: 84879 - protein, 31 aa, Artificial Sequence; identical to SEQ ID NO: 2512
  Cyclic GFR-binding peptide
  MOD_RES (30)..(31): Xaa is C or S

SEQ ID NO: 84880 - protein, 25 aa, Artificial Sequence
  Cyclic GFR-binding peptide
RYKKLIVNSSDDFYLVSIANLQTPA

SEQ ID NO: 84881 - protein, 24 aa, Artificial Sequence
  Cyclic GFR-binding peptide
KVIMRHKRLIKPTKGIYYLISTAS

SEQ ID NO: 84882 - protein, 35 aa, Artificial Sequence; identical to SEQ ID NO: 40798
  Cyclic GFR-binding peptide
  MOD_RES (29)..(29): Xaa is C or S

SEQ ID NO: 84883 - protein, 37 aa, Artificial Sequence
  Cyclic GFR-binding peptide
  MOD_RES (1)..(32)..(33): Xaa is C or S
XSRVIMPIKGYVKPKRGVFYLINIPSLAQPVXXPAAS

SEQ ID NO: 84884 - protein, 28 aa, Artificial Sequence
  Cyclic GFR-binding peptide
KVVMPIKGYVKPTRGVFYLINIPSLDQP

SEQ ID NO: 84885 - protein, 29 aa, Artificial Sequence
  Cyclic GFR-binding peptide
  MOD_RES (1)..(3): Xaa is C or S
XKXSRVIMPIKGYVKPKRGVFYLINIPSL

SEQ ID NO: 84886 - protein, 39 aa, Artificial Sequence
  Cyclic GFR-binding peptide
  MOD_RES (2)..(34)..(35): Xaa is C or S
GXESVAMGRHKRLYTVVGKDYYLISTASLKTPVXXAKSA

SEQ ID NO: 84887 - protein, 32 aa, Artificial Sequence
  Cyclic GFR-binding peptide
  MOD_RES (28)..(29): Xaa is C or S
MGRHKRLYTVVGKDYYLISTASLKTPVXXAKS

SEQ ID NO: 84888 - protein, 39 aa, Artificial Sequence; identical to SEQ ID NO: 2523
  Cyclic GFR-binding peptide
  MOD_RES (1)..(33)..(34): Xaa is C or S

SEQ ID NO: 84889 - protein, 40 aa, Artificial Sequence; identical to SEQ ID NO: 30716
  Cyclic GFR-binding peptide
  MOD_RES (2)..(34)..(35): Xaa is C or S

SEQ ID NO: 84890 - protein, 38 aa, Artificial Sequence
  Cyclic GFR-binding peptide
  MOD_RES (2)..(34)..(35): Xaa is C or S
GXSEVVMDYHYKLVVNNASDKYLISIPSLRTPVXXTPP

SEQ ID NO: 84891 - protein, 39 aa, Artificial Sequence; identical to SEQ ID NO: 2529
  Cyclic GFR-binding peptide
  MOD_RES (2)..(33)..(34): Xaa is C or S

SEQ ID NO: 84892 - protein, 23 aa, Artificial Sequence
  Cyclic GFR-binding peptide
VVMYHYKLVKPTRGVKYLISIPS

SEQ ID NO: 84893 - protein, 29 aa, Artificial Sequence
  Cyclic GFR-binding peptide
  MOD_RES (26)..(27): Xaa is C or S
YHYKLVVNKNEDKYLISIPSMKEPVXXPE

SEQ ID NO: 84894 - protein, 39 aa, Artificial Sequence; identical to SEQ ID NO: 30721
  Cyclic GFR-binding peptide
  MOD_RES (1)..(3)..(35)..(36): Xaa is C or S

SEQ ID NO: 84895 - protein, 28 aa, Artificial Sequence
  Cyclic GFR-binding peptide
SMGERHKRLTPVGMDDYYLVSTASLKTP

SEQ ID NO: 84896 - protein, 34 aa, Artificial Sequence
  Cyclic GFR-binding peptide
  MOD_RES (2)..(33)..(34): Xaa is C or S
GXEEVIMRHKRLLLVRGNDYYLMSTASTKVPAXX

SEQ ID NO: 84897 - protein, 21 aa, Artificial Sequence
  Cyclic GFR-binding peptide
RYKKLIVNSSDDFYLVSIANL

SEQ ID NO: 84898 - protein, 33 aa, Artificial Sequence; identical to SEQ ID NO: 2537
  Cyclic GFR-binding peptide
  MOD_RES (1)..(33): Xaa is C or S

SEQ ID NO: 84899 - protein, 35 aa, Artificial Sequence; identical to SEQ ID NO: 2538
  Cyclic GFR-binding peptide
  MOD_RES (2)..(4): Xaa is C or S

SEQ ID NO: 84900 - protein, 25 aa, Artificial Sequence
  Cyclic GFR-binding peptide
EYKFKVKPKRGVLYLISIPELAQPV

SEQ ID NO: 84901 - protein, 33 aa, Artificial Sequence; identical to SEQ ID NO: 13094
  Cyclic GFR-binding peptide
  MOD_RES (32)..(33): Xaa is C or S

SEQ ID NO: 84902 - protein, 33 aa, Artificial Sequence; identical to SEQ ID NO: 2545
  Cyclic GFR-binding peptide
  MOD_RES (31)..(32): Xaa is C or S

SEQ ID NO: 84903 - protein, 32 aa, Artificial Sequence; identical to SEQ ID NO: 2548
  Cyclic GFR-binding peptide
  MOD_RES (2)..(4): Xaa is C or S

SEQ ID NO: 84904 - protein, 31 aa, Artificial Sequence; identical to SEQ ID NO: 30733
  Cyclic GFR-binding peptide
  MOD_RES (27)..(28): Xaa is C or S

SEQ ID NO: 84905 - protein, 28 aa, Artificial Sequence
  Cyclic GFR-binding peptide
AEVVMDRHKRLVVNNAADYYLISTASLR

SEQ ID NO: 84906 - protein, 36 aa, Artificial Sequence
  Cyclic GFR-binding peptide
  MOD_RES (1)..(3)..(35)..(36): Xaa is C or S
XAXSEVTMNRHKRLVVNKNEDYYLISTASMKEPVXX

SEQ ID NO: 84907 - protein, 32 aa, Artificial Sequence
  Cyclic GFR-binding peptide
  MOD_RES (28)..(29): Xaa is C or S
IMRHKRLLLVRGNDYYLMSTASTKVPAXXTSP

SEQ ID NO: 84908 - protein, 35 aa, Artificial Sequence; identical to SEQ ID NO: 2553
  Cyclic GFR-binding peptide
  MOD_RES (2)..(34)..(35): Xaa is C or S

SEQ ID NO: 84909 - protein, 35 aa, Artificial Sequence
  Cyclic GFR-binding peptide
  MOD_RES (31)..(32): Xaa is C or S
EVVMDRHKRLVVNNASDYYLISTASLRTPVXXTPP

SEQ ID NO: 84910 - protein, 27 aa, Artificial Sequence
  Cyclic GFR-binding peptide
MDRYKKLVVNNAADFYLISIANLRAPV

SEQ ID NO: 84911 - protein, 30 aa, Artificial Sequence; identical to SEQ ID NO: 2554
  Cyclic GFR-binding peptide

SEQ ID NO: 84912 - protein, 29 aa, Artificial Sequence
  Cyclic GFR-binding peptide
SMGEEYKFKTPVGMDDLYLVSIPELKTPV

SEQ ID NO: 84913 - protein, 26 aa, Artificial Sequence
  Cyclic GFR-binding peptide
EVVMDEYKFKVVNNAADLYLISIPEL

SEQ ID NO: 84914 - protein, 30 aa, Artificial Sequence; identical to SEQ ID NO: 40840
  Cyclic GFR-binding peptide
  MOD_RES (1)..(3): Xaa is C or S

SEQ ID NO: 84915 - protein, 25 aa, Artificial Sequence
  Cyclic GFR-binding peptide
MEYKFKVKPTRGVLYLISIPELDQP

SEQ ID NO: 84916 - protein, 32 aa, Artificial Sequence; identical to SEQ ID NO: 30749
  Cyclic GFR-binding peptide
  MOD_RES (1)..(3): Xaa is C or S

SEQ ID NO: 84917 - protein, 25 aa, Artificial Sequence
  Cyclic GFR-binding peptide
VVMGRHKRLIIQQKDNYYLMSTASM

SEQ ID NO: 84918 - protein, 32 aa, Artificial Sequence; identical to SEQ ID NO: 2561
  Cyclic GFR-binding peptide
  MOD_RES (1)..(1): Xaa is C or S

SEQ ID NO: 84919 - protein, 30 aa, Artificial Sequence; identical to SEQ ID NO: 2563
  Cyclic GFR-binding peptide
  MOD_RES (2)..(4): Xaa is C or S

SEQ ID NO: 84920 - protein, 34 aa, Artificial Sequence; identical to SEQ ID NO: 30752
  Cyclic GFR-binding peptide
  MOD_RES (31)..(32): Xaa is C or S

SEQ ID NO: 84921 - protein, 38 aa, Artificial Sequence; identical to SEQ ID NO: 2564
  Cyclic GFR-binding peptide
  MOD_RES (32)..(33): Xaa is C or S

SEQ ID NO: 84922 - protein, 28 aa, Artificial Sequence
  Cyclic GFR-binding peptide
AVSMGERHKRLTPVGMDDYYLVSTASLK

SEQ ID NO: 84923 - protein, 25 aa, Artificial Sequence
  Cyclic GFR-binding peptide
DRHKRLVVNNASDYYLISTASLRTP

SEQ ID NO: 84924 - protein, 34 aa, Artificial Sequence; identical to SEQ ID NO: 2569
  Cyclic GFR-binding peptide
  MOD_RES (1)..(33)..(34): Xaa is C or S

SEQ ID NO: 84925 - protein, 39 aa, Artificial Sequence; identical to SEQ ID NO: 2570
  Cyclic GFR-binding peptide
  MOD_RES (2)..(4)..(36)..(37): Xaa is C or S

SEQ ID NO: 84926 - protein, 30 aa, Artificial Sequence
  Cyclic GFR-binding peptide
  MOD_RES (2)..(4): Xaa is C or S
RXGXAEVVMDRHKRLVVNNAADYYLISTAS

SEQ ID NO: 84927 - protein, 22 aa, Artificial Sequence
  Cyclic GFR-binding peptide
RYKKLLLVRGNDFYLMSIANTK

SEQ ID NO: 84928 - protein, 40 aa, Artificial Sequence; identical to SEQ ID NO: 2572
  Cyclic GFR-binding peptide
  MOD_RES (1)..(3)..(34)..(35): Xaa is C or S

SEQ ID NO: 84929 - protein, 41 aa, Artificial Sequence; identical to SEQ ID NO: 2573
  Cyclic GFR-binding peptide
  MOD_RES (1)..(3)..(36)..(37): Xaa is C or S

SEQ ID NO: 84930 - protein, 32 aa, Artificial Sequence
  Cyclic GFR-binding peptide
  MOD_RES (28)..(29): Xaa is C or S
IMYHYKLLLVRGNDKYLMSIPSTKVPAXXTSP

SEQ ID NO: 84931 - protein, 33 aa, Artificial Sequence; identical to SEQ ID NO: 2574
  Cyclic GFR-binding peptide
  MOD_RES (30)..(30): Xaa is C or S

SEQ ID NO: 84932 - protein, 30 aa, Artificial Sequence; identical to SEQ ID NO: 2575
  Cyclic GFR-binding peptide
  MOD_RES (28)..(29): Xaa is C or S

SEQ ID NO: 84933 - protein, 33 aa, Artificial Sequence
  Cyclic GFR-binding peptide
  MOD_RES (2)..(33): Xaa is C or S
GXEEVIMRHKRLLLVRGNDYYLMSTASTKVPAX

SEQ ID NO: 84934 - protein, 29 aa, Artificial Sequence
  Cyclic GFR-binding peptide
  MOD_RES (26)..(27): Xaa is C or S
YHYKLIIQQKDNKYLMSIPSMKTPTXXPG

SEQ ID NO: 84935 - protein, 32 aa, Artificial Sequence
  Cyclic GFR-binding peptide
  MOD_RES (26)..(27): Xaa is C or S
RHKRLYTVVGKDYYLISTASLKTPVXXAKSAK

SEQ ID NO: 84936 - protein, 34 aa, Artificial Sequence
  Cyclic GFR-binding peptide
  MOD_RES (28)..(29): Xaa is C or S
VMPIKGYVKPTRGVFYLINIPSLDQPVXXPSASA

SEQ ID NO: 84937 - protein, 34 aa, Artificial Sequence; identical to SEQ ID NO: 40865
  Cyclic GFR-binding peptide
  MOD_RES (1)..(33)..(34): Xaa is C or S

SEQ ID NO: 84938 - protein, 25 aa, Artificial Sequence
  Cyclic GFR-binding peptide
EVTMNRHKRLVVNKNEDYYLISTAS

SEQ ID NO: 84939 - protein, 37 aa, Artificial Sequence
  Cyclic GFR-binding peptide
  MOD_RES (2)..(33)..(34): Xaa is C or S
GXEEVIMRHKRLLLVRGNDYYLMSTASTKVPAXXTSP

SEQ ID NO: 84940 - protein, 34 aa, Artificial Sequence; identical to SEQ ID NO: 40866
  Cyclic GFR-binding peptide
  MOD_RES (30)..(31): Xaa is C or S

SEQ ID NO: 84941 - protein, 36 aa, Artificial Sequence; identical to SEQ ID NO: 30767
  Cyclic GFR-binding peptide
  MOD_RES (32)..(33): Xaa is C or S

SEQ ID NO: 84942 - protein, 32 aa, Artificial Sequence; identical to SEQ ID NO: 2578
  Cyclic GFR-binding peptide
  MOD_RES (2)..(2): Xaa is C or S

SEQ ID NO: 84943 - protein, 35 aa, Artificial Sequence; identical to SEQ ID NO: 2583
  Cyclic GFR-binding peptide
  MOD_RES (30)..(31): Xaa is C or S

SEQ ID NO: 84944 - protein, 26 aa, Artificial Sequence
  Cyclic GFR-binding peptide
GERHKRLTPVGMDDYYLVSTASLKTP

SEQ ID NO: 84945 - protein, 37 aa, Artificial Sequence; identical to SEQ ID NO: 30774
  Cyclic GFR-binding peptide
  MOD_RES (1)..(3)..(34)..(35): Xaa is C or S

SEQ ID NO: 84946 - protein, 38 aa, Artificial Sequence; identical to SEQ ID NO: 2587
  Cyclic GFR-binding peptide
  MOD_RES (1)..(3)..(36)..(37): Xaa is C or S

SEQ ID NO: 84947 - protein, 33 aa, Artificial Sequence; identical to SEQ ID NO: 30775
  Cyclic GFR-binding peptide
  MOD_RES (2)..(4): Xaa is C or S

SEQ ID NO: 84948 - protein, 35 aa, Artificial Sequence
  Cyclic GFR-binding peptide
  MOD_RES (1)..(33)..(34): Xaa is C or S
XSEVTMNEYKFKVVNKNEDLYLISIPEMKEPVXXP

SEQ ID NO: 84949 - protein, 28 aa, Artificial Sequence
  Cyclic GFR-binding peptide
VMGYHYKLIIQQKDNKYLMSIPSMKTPT

SEQ ID NO: 84950 - protein, 25 aa, Artificial Sequence
  Cyclic GFR-binding peptide
VMRHKRLVKPTRGVYYLISTASLDQ

SEQ ID NO: 84951 - protein, 25 aa, Artificial Sequence
  Cyclic GFR-binding peptide
VVMDRYKKLVVNNASDFYLISIANL

SEQ ID NO: 84952 - protein, 31 aa, Artificial Sequence; identical to SEQ ID NO: 2595
  Cyclic GFR-binding peptide
  MOD_RES (2)..(4): Xaa is C or S

SEQ ID NO: 84953 - protein, 32 aa, Artificial Sequence; identical to SEQ ID NO: 30782
  Cyclic GFR-binding peptide
  MOD_RES (27)..(28): Xaa is C or S

SEQ ID NO: 84954 - protein, 38 aa, Artificial Sequence; identical to SEQ ID NO: 30787
  Cyclic GFR-binding peptide
  MOD_RES (2)..(4)..(36)..(37): Xaa is C or S

SEQ ID NO: 84955 - protein, 30 aa, Artificial Sequence; identical to SEQ ID NO: 2599
  Cyclic GFR-binding peptide
  MOD_RES (2)..(2): Xaa is C or S

SEQ ID NO: 84956 - protein, 30 aa, Artificial Sequence; identical to SEQ ID NO: 2602
  Cyclic GFR-binding peptide
  MOD_RES (27)..(27): Xaa is C or S

SEQ ID NO: 84957 - protein, 32 aa, Artificial Sequence
  Cyclic GFR-binding peptide
  MOD_RES (28)..(29): Xaa is C or S
MNRHKRLVVNKNEDYYLISTASMKEPVXXPEP

SEQ ID NO: 84958 - protein, 34 aa, Artificial Sequence; identical to SEQ ID NO: 40889
  Cyclic GFR-binding peptide
  MOD_RES (1)..(3): Xaa is C or S

SEQ ID NO: 84959 - protein, 25 aa, Artificial Sequence
  Cyclic GFR-binding peptide
KVVMYHYKLVKPTRGVKYLISIPSL

SEQ ID NO: 84960 - protein, 32 aa, Artificial Sequence
  Cyclic GFR-binding peptide
  MOD_RES (28)..(29): Xaa is C or S
MNYHYKLVVNKNEDKYLISIPSMKEPVXXPEP

SEQ ID NO: 84961 - protein, 34 aa, Artificial Sequence; identical to SEQ ID NO: 2606
  Cyclic GFR-binding peptide
  MOD_RES (31)..(32): Xaa is C or S

SEQ ID NO: 84962 - protein, 34 aa, Artificial Sequence; identical to SEQ ID NO: 2609
  Cyclic GFR-binding peptide
  MOD_RES (30)..(31): Xaa is C or S

SEQ ID NO: 84963 - protein, 31 aa, Artificial Sequence; identical to SEQ ID NO: 40899
  Cyclic GFR-binding peptide
  MOD_RES (2)..(2): Xaa is C or S

SEQ ID NO: 84964 - protein, 27 aa, Artificial Sequence
  Cyclic GFR-binding peptide
VVMGYHYKLIIQQKDNKYLMSIPSMKT

SEQ ID NO: 84965 - protein, 39 aa, Artificial Sequence; identical to SEQ ID NO: 2616
  Cyclic GFR-binding peptide
  MOD_RES (2)..(4)..(36)..(37): Xaa is C or S

SEQ ID NO: 84966 - protein, 36 aa, Artificial Sequence; identical to SEQ ID NO: 30812
  Cyclic GFR-binding peptide
  MOD_RES (31)..(32): Xaa is C or S

SEQ ID NO: 84967 - protein, 29 aa, Artificial Sequence
  Cyclic GFR-binding peptide
  MOD_RES (27)..(28): Xaa is C or S
MRYKKLIKPTKGIFYLISIANLDQSVXXP

SEQ ID NO: 84968 - protein, 23 aa, Artificial Sequence
  Cyclic GFR-binding peptide
VMDPIKGYVVKENEDFYLMNIPS

SEQ ID NO: 84969 - protein, 35 aa, Artificial Sequence; identical to SEQ ID NO: 2620
  Cyclic GFR-binding peptide
  MOD_RES (2)..(35): Xaa is C or S

SEQ ID NO: 84970 - protein, 33 aa, Artificial Sequence; identical to SEQ ID NO: 2623
  Cyclic GFR-binding peptide
  MOD_RES (27)..(28): Xaa is C or S

SEQ ID NO: 84971 - protein, 31 aa, Artificial Sequence
  Cyclic GFR-binding peptide
  MOD_RES (30)..(31): Xaa is C or S
RVIMPIKGYVKPKRGVFYLINIPSLAQPVXX

SEQ ID NO: 84972 - protein, 31 aa, Artificial Sequence; identical to SEQ ID NO: 2625
  Cyclic GFR-binding peptide
  MOD_RES (2)..(2): Xaa is C or S

SEQ ID NO: 84973 - protein, 29 aa, Artificial Sequence
  Cyclic GFR-binding peptide
  MOD_RES (28)..(28): Xaa is C or S
MNRHKRLIVNSSDDYYLVSTASLKTPAXT

SEQ ID NO: 84974 - protein, 21 aa, Artificial Sequence
  Cyclic GFR-binding peptide
YHYKLYTVVGKDKYLISIPSL

SEQ ID NO: 84975 - protein, 35 aa, Artificial Sequence; identical to SEQ ID NO: 30820
  Cyclic GFR-binding peptide
  MOD_RES (29)..(29): Xaa is C or S

SEQ ID NO: 84976 - protein, 25 aa, Artificial Sequence
  Cyclic GFR-binding peptide
PIKGYYTVVGKDFYLINIPSLKTPV

SEQ ID NO: 84977 - protein, 38 aa, Artificial Sequence; identical to SEQ ID NO: 40921
  Cyclic GFR-binding peptide
  MOD_RES (1)..(3)..(35)..(36): Xaa is C or S

SEQ ID NO: 84978 - protein, 31 aa, Artificial Sequence; identical to SEQ ID NO: 2630
  Cyclic GFR-binding peptide
  MOD_RES (2)..(2): Xaa is C or S

SEQ ID NO: 84979 - protein, 32 aa, Artificial Sequence
  Cyclic GFR-binding peptide
  MOD_RES (28)..(29): Xaa is C or S
MDEYKFKVVNNASDLYLISIPELRTPVXXTPP

SEQ ID NO: 84980 - protein, 31 aa, Artificial Sequence; identical to SEQ ID NO: 40923
  Cyclic GFR-binding peptide
  MOD_RES (2)..(2): Xaa is C or S

SEQ ID NO: 84981 - protein, 37 aa, Artificial Sequence
  Cyclic GFR-binding peptide
  MOD_RES (1)..(32)..(33): Xaa is C or S
XSKVIMPIKGYIKPTKGIFYLINIPSLDQSVXXPSAS

SEQ ID NO: 84982 - protein, 29 aa, Artificial Sequence
  Cyclic GFR-binding peptide
  MOD_RES (2)..(2): Xaa is C or S
GXGEVVMEEYKFKVVKDYEDLYLMSIPEL

SEQ ID NO: 84983 - protein, 24 aa, Artificial Sequence
  Cyclic GFR-binding peptide
IMEYKFKLLVRGNDLYLMSIPETK

SEQ ID NO: 84984 - protein, 32 aa, Artificial Sequence; identical to SEQ ID NO: 2632
  Cyclic GFR-binding peptide
  MOD_RES (27)..(28): Xaa is C or S

SEQ ID NO: 84985 - protein, 39 aa, Artificial Sequence; identical to SEQ ID NO: 2635
  Cyclic GFR-binding peptide
  MOD_RES (33)..(34): Xaa is C or S

SEQ ID NO: 84986 - protein, 20 aa, Artificial Sequence
  Cyclic GFR-binding peptide
PIKGYVVNNAADFYLINIPS

SEQ ID NO: 84987 - protein, 35 aa, Artificial Sequence; identical to SEQ ID NO: 2638
  Cyclic GFR-binding peptide
  MOD_RES (2)..(34)..(35): Xaa is C or S

SEQ ID NO: 84988 - protein, 30 aa, Artificial Sequence; identical to SEQ ID NO: 76230
  Cyclic GFR-binding peptide
  MOD_RES (28)..(29): Xaa is C or S

SEQ ID NO: 84989 - protein, 29 aa, Artificial Sequence
  Cyclic GFR-binding peptide
  MOD_RES (29)..(29): Xaa is C or S
VIMRHKRLVKPKRGVYYLISTASLAQPVX

SEQ ID NO: 84990 - protein, 30 aa, Artificial Sequence; identical to SEQ ID NO: 76231
  Cyclic GFR-binding peptide
  MOD_RES (2)..(4): Xaa is C or S

SEQ ID NO: 84991 - protein, 30 aa, Artificial Sequence; identical to SEQ ID NO: 30842
  Cyclic GFR-binding peptide
  MOD_RES (27)..(28): Xaa is C or S

SEQ ID NO: 84992 - protein, 28 aa, Artificial Sequence
  Cyclic GFR-binding peptide
  MOD_RES (28)..(28): Xaa is C or S
IMYHYKLIKPTKGIKYLISIPSLDQSVX

SEQ ID NO: 84993 - protein, 34 aa, Artificial Sequence; identical to SEQ ID NO: 2645
  Cyclic GFR-binding peptide
  MOD_RES (1)..(33)..(34): Xaa is C or S

SEQ ID NO: 84994 - protein, 23 aa, Artificial Sequence
  Cyclic GFR-binding peptide
NPIKGYIVNSSDDFYLVNIPSLK

SEQ ID NO: 84995 - protein, 36 aa, Artificial Sequence; identical to SEQ ID NO: 2647
  Cyclic GFR-binding peptide
  MOD_RES (2)..(4)..(35)..(36): Xaa is C or S

SEQ ID NO: 84996 - protein, 26 aa, Artificial Sequence
  Cyclic GFR-binding peptide
EVVMDYHYKLVVNNAADKYLISIPSL

SEQ ID NO: 84997 - protein, 27 aa, Artificial Sequence
  Cyclic GFR-binding peptide
  MOD_RES (26)..(27): Xaa is C or S
EYKFKLLVRGNDLYLMSIPETKVPAXX

SEQ ID NO: 84998 - protein, 26 aa, Artificial Sequence
  Cyclic GFR-binding peptide
  MOD_RES (26)..(26): Xaa is C or S
RYKKLVKPTRGVFYLISIANLDQPVX

SEQ ID NO: 84999 - protein, 29 aa, Artificial Sequence
  Cyclic GFR-binding peptide
  MOD_RES (26)..(27): Xaa is C or S
RYKKLVKPKRGVFYLISIANLAQPVXXPA

SEQ ID NO: 85000 - protein, 33 aa, Artificial Sequence
  Cyclic GFR-binding peptide
  MOD_RES (31)..(32): Xaa is C or S
EVVMDEYKFKVVNNASDLYLISIPELRTPVXXT

SEQ ID NO: 85001 - protein, 26 aa, Artificial Sequence
  Cyclic GFR-binding peptide
AMGRYKKLYTVVGKDFYLISIANLKT

SEQ ID NO: 85002 - protein, 22 aa, Artificial Sequence
  Cyclic GFR-binding peptide
YHYKLLLVRGNDKYLMSIPSTK

SEQ ID NO: 85003 - protein, 37 aa, Artificial Sequence; identical to SEQ ID NO: 40956
  Cyclic GFR-binding peptide
  MOD_RES (31)..(32): Xaa is C or S

SEQ ID NO: 85004 - protein, 28 aa, Artificial Sequence
  Cyclic GFR-binding peptide
  MOD_RES (27)..(28): Xaa is C or S
ERHKRLVVKDYEDYYLMSTASLETPVXX

SEQ ID NO: 85005 - protein, 40 aa, Artificial Sequence
  Cyclic GFR-binding peptide
  MOD_RES (1)..(3)..(34)..(35): Xaa is C or S
XGXEEVIMYHYKLLLVRGNDKYLMSIPSTKVPAXXTSPVR

SEQ ID NO: 85006 - protein, 35 aa, Artificial Sequence; identical to SEQ ID NO: 40959
  Cyclic GFR-binding peptide
  MOD_RES (32)..(33): Xaa is C or S

SEQ ID NO: 85007 - protein, 36 aa, Artificial Sequence; identical to SEQ ID NO: 40960
  Cyclic GFR-binding peptide
  MOD_RES (1)..(33)..(34): Xaa is C or S

SEQ ID NO: 85008 - protein, 39 aa, Artificial Sequence; identical to SEQ ID NO: 2659
  Cyclic GFR-binding peptide
  MOD_RES (1)..(3)..(35): Xaa is C or S

SEQ ID NO: 85009 - protein, 37 aa, Artificial Sequence; identical to SEQ ID NO: 76243
  Cyclic GFR-binding peptide
  MOD_RES (2)..(33)..(34): Xaa is C or S

SEQ ID NO: 85010 - protein, 29 aa, Artificial Sequence
  Cyclic GFR-binding peptide
SKVVMYHYKLVKPTRGVKYLISIPSLDQP

SEQ ID NO: 85011 - protein, 31 aa, Artificial Sequence; identical to SEQ ID NO: 2669
  Cyclic GFR-binding peptide
  MOD_RES (26)..(27): Xaa is C or S

SEQ ID NO: 85012 - protein, 23 aa, Artificial Sequence
  Cyclic GFR-binding peptide
RHKRLVVKENEDYYLMSTASLET

SEQ ID NO: 85013 - protein, 33 aa, Artificial Sequence
  Cyclic GFR-binding peptide
  MOD_RES (27)..(28): Xaa is C or S
MEYKFKLLVRGNDLYLMSIPETKVPAXXTSPVR

SEQ ID NO: 85014 - protein, 35 aa, Artificial Sequence; identical to SEQ ID NO: 2672
  Cyclic GFR-binding peptide
  MOD_RES (32)..(33): Xaa is C or S

SEQ ID NO: 85015 - protein, 32 aa, Artificial Sequence
  Cyclic GFR-binding peptide
  MOD_RES (26)..(27): Xaa is C or S
PIKGYVVNKNEDFYLINIPSMKEPVXXPEPIG

SEQ ID NO: 85016 - protein, 24 aa, Artificial Sequence
  Cyclic GFR-binding peptide
IMPIKGYVKPKRGVFYLINIPSLA

SEQ ID NO: 85017 - protein, 31 aa, Artificial Sequence; identical to SEQ ID NO: 2675
  Cyclic GFR-binding peptide
  MOD_RES (30)..(31): Xaa is C or S

SEQ ID NO: 85018 - protein, 31 aa, Artificial Sequence; identical to SEQ ID NO: 40970
  Cyclic GFR-binding peptide
  MOD_RES (26)..(27): Xaa is C or S

SEQ ID NO: 85019 - protein, 31 aa, Artificial Sequence; identical to SEQ ID NO: 76254
  Cyclic GFR-binding peptide
  MOD_RES (29)..(30): Xaa is C or S

SEQ ID NO: 85020 - protein, 26 aa, Artificial Sequence
  Cyclic GFR-binding peptide
  MOD_RES (26)..(26): Xaa is C or S
PIKGYLLVRGNDFYLMNIPSTKVPAX

SEQ ID NO: 85021 - protein, 39 aa, Artificial Sequence; identical to SEQ ID NO: 2679
  Cyclic GFR-binding peptide
  MOD_RES (1)..(3)..(34)..(35): Xaa is C or S

SEQ ID NO: 85022 - protein, 28 aa, Artificial Sequence
  Cyclic GFR-binding peptide
  MOD_RES (2)..(2): Xaa is C or S
KXSKVVMYHYKLVKPTRGVKYLISIPSL

SEQ ID NO: 85023 - protein, 27 aa, Artificial Sequence
  Cyclic GFR-binding peptide
  MOD_RES (1)..(1): Xaa is C or S
XSEVTMNYHYKLVVNKNEDKYLISIPS

SEQ ID NO: 85024 - protein, 25 aa, Artificial Sequence
  Cyclic GFR-binding peptide
DVVMGRYKKLIIQQKDNFYLMSIAN

SEQ ID NO: 85025 - protein, 32 aa, Artificial Sequence; identical to SEQ ID NO: 2685
  Cyclic GFR-binding peptide
  MOD_RES (28)..(29): Xaa is C or S

SEQ ID NO: 85026 - protein, 24 aa, Artificial Sequence
  Cyclic GFR-binding peptide
MGERYKKLTPVGMDDFYLVSIANL

SEQ ID NO: 85027 - protein, 20 aa, Artificial Sequence
  Cyclic GFR-binding peptide
YHYKLVVNKNEDKYLISIPS

SEQ ID NO: 85028 - protein, 24 aa, Artificial Sequence
  Cyclic GFR-binding peptide
MDRHKRLVVNNASDYYLISTASLR

SEQ ID NO: 85029 - protein, 28 aa, Artificial Sequence
  Cyclic GFR-binding peptide
  MOD_RES (1)..(1): Xaa is C or S
XSRVVMNYHYKLIVNSSDDKYLVSIPSL

SEQ ID NO: 85030 - protein, 29 aa, Artificial Sequence
  Cyclic GFR-binding peptide
ARVVMNYHYKLIVNSSDDKYLVSIPSLQT

SEQ ID NO: 85031 - protein, 27 aa, Artificial Sequence
  Cyclic GFR-binding peptide
EAVSMGEEYKFKTPVGMDDLYLVSIPE

SEQ ID NO: 85032 - protein, 41 aa, Artificial Sequence; identical to SEQ ID NO: 2695
  Cyclic GFR-binding peptide
  MOD_RES (1)..(3)..(35)..(36): Xaa is C or S

SEQ ID NO: 85033 - protein, 36 aa, Artificial Sequence; identical to SEQ ID NO: 2697
  Cyclic GFR-binding peptide
  MOD_RES (30)..(30): Xaa is C or S

SEQ ID NO: 85034 - protein, 31 aa, Artificial Sequence; identical to SEQ ID NO: 2699
  Cyclic GFR-binding peptide
  MOD_RES (27)..(28): Xaa is C or S

SEQ ID NO: 85035 - protein, 32 aa, Artificial Sequence; identical to SEQ ID NO: 40989
  Cyclic GFR-binding peptide
  MOD_RES (1)..(3): Xaa is C or S

SEQ ID NO: 85036 - protein, 37 aa, Artificial Sequence; identical to SEQ ID NO: 2701
  Cyclic GFR-binding peptide
  MOD_RES (2)..(4)..(36): Xaa is C or S

SEQ ID NO: 85037 - protein, 24 aa, Artificial Sequence
  Cyclic GFR-binding peptide
VVMNRYKKLIVNNSSDFYLVSIAN

SEQ ID NO: 85038 - protein, 34 aa, Artificial Sequence
  Cyclic GFR-binding peptide
  MOD_RES (1)..(32)..(33): Xaa is C or S
XEEVIMEYKFKLLVRGNDLYLMSIPETKVPAXXT

SEQ ID NO: 85039 - protein, 28 aa, Artificial Sequence
  Cyclic GFR-binding peptide
VVMDEYKFKVVNNAADLYLISIPELRAP

SEQ ID NO: 85040 - protein, 26 aa, Artificial Sequence
  Cyclic GFR-binding peptide
MDEYKFKVVNNASDLYLISIPELRTP

SEQ ID NO: 85041 - protein, 32 aa, Artificial Sequence; identical to SEQ ID NO: 30911
  Cyclic GFR-binding peptide
  MOD_RES (26)..(27): Xaa is C or S

SEQ ID NO: 85042 - protein, 33 aa, Artificial Sequence; identical to SEQ ID NO: 30912
  Cyclic GFR-binding peptide
  MOD_RES (2)..(4): Xaa is C or S

SEQ ID NO: 85043 - protein, 31 aa, Artificial Sequence; identical to SEQ ID NO: 40999
  Cyclic GFR-binding peptide
  MOD_RES (29)..(30): Xaa is C or S

SEQ ID NO: 85044 - protein, 37 aa, Artificial Sequence; identical to SEQ ID NO: 41000
  Cyclic GFR-binding peptide
  MOD_RES (2)..(4)..(36)..(37): Xaa is C or S

SEQ ID NO: 85045 - protein, 34 aa, Artificial Sequence; identical to SEQ ID NO: 2709
  Cyclic GFR-binding peptide
  MOD_RES (1)..(32)..(33): Xaa is C or S

SEQ ID NO: 85046 - protein, 33 aa, Artificial Sequence; identical to SEQ ID NO: 76269
  Cyclic GFR-binding peptide
  MOD_RES (1)..(33): Xaa is C or S

SEQ ID NO: 85047 - protein, 38 aa, Artificial Sequence; identical to SEQ ID NO: 2711
  Cyclic GFR-binding peptide
  MOD_RES (2)..(33)..(34): Xaa is C or S

SEQ ID NO: 85048 - protein, 23 aa, Artificial Sequence
  Cyclic GFR-binding peptide
RHKRLVVKDYEDYYLMSTASLET

SEQ ID NO: 85049 - protein, 28 aa, Artificial Sequence
  Cyclic GFR-binding peptide
  MOD_RES (2)..(2): Xaa is C or S
GXGEVVMERYKKLVVKDYEDFYLMSIAN

SEQ ID NO: 85050 - protein, 38 aa, Artificial Sequence
  Cyclic GFR-binding peptide
  MOD_RES (1)..(32)..(33): Xaa is C or S
XEEVIMRHKRLLLVRGNDYYLMSTASTKVPAXXTSPVR

SEQ ID NO: 85051 - protein, 28 aa, Artificial Sequence
  Cyclic GFR-binding peptide
VVMDRHKRLVVKENEDYYLMSTASLETP

SEQ ID NO: 85052 - protein, 32 aa, Artificial Sequence
  Cyclic GFR-binding peptide
  MOD_RES (28)..(29): Xaa is C or S
IMPIKGYIKPTKGIFYLINIPSLDQSVXXPSA

SEQ ID NO: 85053 - protein, 39 aa, Artificial Sequence; identical to SEQ ID NO: 76272
  Cyclic GFR-binding peptide
  MOD_RES (2)..(4)..(36)..(37): Xaa is C or S

SEQ ID NO: 85054 - protein, 26 aa, Artificial Sequence
  Cyclic GFR-binding peptide
VVMRYKKLVKPTRGVFYLISIANLDQ

SEQ ID NO: 85055 - protein, 21 aa, Artificial Sequence
  Cyclic GFR-binding peptide
MYHYKLVKPKRGVKYLISIPS

SEQ ID NO: 85056 - protein, 28 aa, Artificial Sequence
  Cyclic GFR-binding peptide
  MOD_RES (27)..(28): Xaa is C or S
DYHYKLVVNNAADKYLISIPSLRAPVXX

SEQ ID NO: 85057 - protein, 34 aa, Artificial Sequence; identical to SEQ ID NO: 41019
  Cyclic GFR-binding peptide
  MOD_RES (1)..(33)..(34): Xaa is C or S

SEQ ID NO: 85058 - protein, 33 aa, Artificial Sequence
  Cyclic GFR-binding peptide
  MOD_RES (29)..(30): Xaa is C or S
VIMRHKRLLLVRGNDYYLMSTASTKVPAXXTSP

SEQ ID NO: 85059 - protein, 25 aa, Artificial Sequence
  Cyclic GFR-binding peptide
RVIMRYKKLVKPKRGVFYLISIANL

SEQ ID NO: 85060 - protein, 31 aa, Artificial Sequence
  Cyclic GFR-binding peptide
  MOD_RES (27)..(28): Xaa is C or S
MRHKRLLLVRGNDYYLMSTASTKVPAXXTSP

SEQ ID NO: 85061 - protein, 40 aa, Artificial Sequence
  Cyclic GFR-binding peptide
  MOD_RES (2)..(4)..(36)..(37): Xaa is C or S
RXAXSEVTMNRHKRLVVNKNEDYYLISTASMKEPVXXPEP

SEQ ID NO: 85062 - protein, 30 aa, Artificial Sequence; identical to SEQ ID NO: 2724
  Cyclic GFR-binding peptide
  MOD_RES (1)..(3): Xaa is C or S

SEQ ID NO: 85063 - protein, 28 aa, Artificial Sequence
  Cyclic GFR-binding peptide
  MOD_RES (27)..(28): Xaa is C or S
NRYKKLVVNKNEDFYLISIANMKEPVXX

SEQ ID NO: 85064 - protein, 34 aa, Artificial Sequence; identical to SEQ ID NO: 2727
  Cyclic GFR-binding peptide
  MOD_RES (2)..(34): Xaa is C or S

SEQ ID NO: 85065 - protein, 30 aa, Artificial Sequence; identical to SEQ ID NO: 2728
  Cyclic GFR-binding peptide
  MOD_RES (30)..(30): Xaa is C or S

SEQ ID NO: 85066 - protein, 31 aa, Artificial Sequence; identical to SEQ ID NO: 30935
  Cyclic GFR-binding peptide

SEQ ID NO: 85067 - protein, 29 aa, Artificial Sequence
  Cyclic GFR-binding peptide
  MOD_RES (2)..(2): Xaa is C or S
GXSRVVMNRHKRLIVNSSDDYYLVSTASL

SEQ ID NO: 85068 - protein, 29 aa, Artificial Sequence
  Cyclic GFR-binding peptide
  MOD_RES (28)..(29): Xaa is C or S
VMYHYKLVKPTRGVKYLISIPSLDQPVXX

SEQ ID NO: 85069 - protein, 30 aa, Artificial Sequence; identical to SEQ ID NO: 30938
  Cyclic GFR-binding peptide
  MOD_RES (1)..(3): Xaa is C or S

SEQ ID NO: 85070 - protein, 35 aa, Artificial Sequence; identical to SEQ ID NO: 41036
  Cyclic GFR-binding peptide
  MOD_RES (31)..(32): Xaa is C or S

SEQ ID NO: 85071 - protein, 33 aa, Artificial Sequence; identical to SEQ ID NO: 30944
  Cyclic GFR-binding peptide
  MOD_RES (30)..(31): Xaa is C or S

SEQ ID NO: 85072 - protein, 23 aa, Artificial Sequence
  Cyclic GFR-binding peptide
MDEYKFKVVNNAADLYLISIPEL

SEQ ID NO: 85073 - protein, 33 aa, Artificial Sequence; identical to SEQ ID NO: 2743
  Cyclic GFR-binding peptide
  MOD_RES (27)..(28): Xaa is C or S

SEQ ID NO: 85074 - protein, 38 aa, Artificial Sequence
  Cyclic GFR-binding peptide
  MOD_RES (1)..(3)..(35)..(36): Xaa is C or S
XGXAEVVMDRHKRLVVNNAADYYLISTASLRAPVXXSA

SEQ ID NO: 85075 - protein, 28 aa, Artificial Sequence
  Cyclic GFR-binding peptide
  MOD_RES (2)..(2): Xaa is C or S
AXSEVTMNRHKRLVVNKNEDYYLISTAS

SEQ ID NO: 85076 - protein, 28 aa, Artificial Sequence
  Cyclic GFR-binding peptide
  MOD_RES (28)..(28): Xaa is C or S
IMEYKFKVKPKRGVLYLISIPELAQPVX

SEQ ID NO: 85077 - protein, 42 aa, Artificial Sequence
  Cyclic GFR-binding peptide
  MOD_RES (2)..(4)..(36)..(37): Xaa is C or S
SXGXRDVVMGEYKFKIIQQKDNLYLMSIPEMKTPTXXPGASG

SEQ ID NO: 85078 - protein, 26 aa, Artificial Sequence
  Cyclic GFR-binding peptide
KVVMNRYKKLIVNNSSDFYLVSIANL

SEQ ID NO: 85079 - protein, 32 aa, Artificial Sequence
  Cyclic GFR-binding peptide
  MOD_RES (2)..(2): Xaa is C or S
GXRDVVMGEYKFKIIQQKDNLYLMSIPEMKTP

SEQ ID NO: 85080 - protein, 37 aa, Artificial Sequence; identical to SEQ ID NO: 2755
  Cyclic GFR-binding peptide
  MOD_RES (2)..(4)..(36)..(37): Xaa is C or S

SEQ ID NO: 85081 - protein, 36 aa, Artificial Sequence; identical to SEQ ID NO: 41047
  Cyclic GFR-binding peptide
  MOD_RES (30)..(31): Xaa is C or S

SEQ ID NO: 85082 - protein, 35 aa, Artificial Sequence; identical to SEQ ID NO: 30962
  Cyclic GFR-binding peptide
  MOD_RES (1)..(32)..(33): Xaa is C or S

SEQ ID NO: 85083 - protein, 34 aa, Artificial Sequence; identical to SEQ ID NO: 2757
  Cyclic GFR-binding peptide
  MOD_RES (28)..(29): Xaa is C or S

SEQ ID NO: 85084 - protein, 38 aa, Artificial Sequence; identical to SEQ ID NO: 2760
  Cyclic GFR-binding peptide
  MOD_RES (2)..(4)..(36)..(37): Xaa is C or S

SEQ ID NO: 85085 - protein, 35 aa, Artificial Sequence; identical to SEQ ID NO: 2761
  Cyclic GFR-binding peptide
  MOD_RES (29)..(30): Xaa is C or S

SEQ ID NO: 85086 - protein, 27 aa, Artificial Sequence
  Cyclic GFR-binding peptide
TMNYHYKLVVNKNEDKYLISIPSMKEP

SEQ ID NO: 85087 - protein, 26 aa, Artificial Sequence
  Cyclic GFR-binding peptide
  MOD_RES (26)..(26): Xaa is C or S
RHKRLLLVRGNDYYLMSTASTKVPAX

SEQ ID NO: 85088 - protein, 32 aa, Artificial Sequence
  Cyclic GFR-binding peptide
  MOD_RES (30)..(31): Xaa is C or S
KVIMPIKGYIKPTKGIFYLINIPSLDQSVXXP

SEQ ID NO: 85089 - protein, 37 aa, Artificial Sequence; identical to SEQ ID NO: 41054
  Cyclic GFR-binding peptide
  MOD_RES (31)..(32): Xaa is C or S

SEQ ID NO: 85090 - protein, 34 aa, Artificial Sequence
  Cyclic GFR-binding peptide
  MOD_RES (29)..(30): Xaa is C or S
VMDEYKFKVVNNASDLYLISIPELRTPVXXTPPT

SEQ ID NO: 85091 - protein, 26 aa, Artificial Sequence
  Cyclic GFR-binding peptide
VVMEPIKGYVVKDYEDFYLMNIPSLE

SEQ ID NO: 85092 - protein, 36 aa, Artificial Sequence; identical to SEQ ID NO: 2764
  Cyclic GFR-binding peptide
  MOD_RES (31)..(32): Xaa is C or S

SEQ ID NO: 85093 - protein, 32 aa, Artificial Sequence; identical to SEQ ID NO: 2766
  Cyclic GFR-binding peptide
  MOD_RES (29)..(30): Xaa is C or S

SEQ ID NO: 85094 - protein, 26 aa, Artificial Sequence
  Cyclic GFR-binding peptide
VMDPIKGYVVNNAADFYLINIPSLRA

SEQ ID NO: 85095 - protein, 34 aa, Artificial Sequence
  Cyclic GFR-binding peptide
  MOD_RES (2)..(34): Xaa is C or S
AXSEVTMNRYKKLVVNKNEDFYLISIANMKEPVX

SEQ ID NO: 85096 - protein, 28 aa, Artificial Sequence
  Cyclic GFR-binding peptide
  MOD_RES (27)..(28): Xaa is C or S
DEYKFKVVNNASDLYLISIPELRTPVXX

SEQ ID NO: 85097 - protein, 27 aa, Artificial Sequence
  Cyclic GFR-binding peptide
RVVMNYHYKLIVNSSDDKYLVSIPSLK

SEQ ID NO: 85098 - protein, 39 aa, Artificial Sequence; identical to SEQ ID NO: 2777
  Cyclic GFR-binding peptide
  MOD_RES (1)..(3)..(34)..(35): Xaa is C or S

SEQ ID NO: 85099 - protein, 35 aa, Artificial Sequence
  Cyclic GFR-binding peptide
  MOD_RES (30)..(31): Xaa is C or S
VVMDEYKFKVVNNASDLYLISIPELRTPVXXTPPT

SEQ ID NO: 85100 - protein, 28 aa, Artificial Sequence
  Cyclic GFR-binding peptide
VTMNYHYKLVVNKNEDKYLISIPSMKEP

SEQ ID NO: 85101 - protein, 39 aa, Artificial Sequence; identical to SEQ ID NO: 2780
  Cyclic GFR-binding peptide
  MOD_RES (2)..(33)..(34): Xaa is C or S

SEQ ID NO: 85102 - protein, 30 aa, Artificial Sequence
  Cyclic GFR-binding peptide
  MOD_RES (1)..(3): Xaa is C or S
XGXRDVVMGEYKFKIIQQKDNLYLMSIPEM

SEQ ID NO: 85103 - protein, 35 aa, Artificial Sequence
  Cyclic GFR-binding peptide
  MOD_RES (2)..(4): Xaa is C or S
RXGXAEVVMDPIKGYVVNNAADFYLINIPSLRAPV

SEQ ID NO: 85104 - protein, 28 aa, Artificial Sequence
  Cyclic GFR-binding peptide
ARVVMNYHYKLIVNSSDDKYLVSIPSLQ

SEQ ID NO: 85105 - protein, 22 aa, Artificial Sequence
  Cyclic GFR-binding peptide
MNRYKKLIVNNSSDFYLVSIAN

SEQ ID NO: 85106 - protein, 28 aa, Artificial Sequence
  Cyclic GFR-binding peptide
  MOD_RES (27)..(28): Xaa is C or S
GRHKRLIIQQKDNYYLMSTASMKTPTXX

SEQ ID NO: 85107 - protein, 24 aa, Artificial Sequence
  Cyclic GFR-binding peptide
RVIMPIKGYVKPKRGVFYLINIPS

SEQ ID NO: 85108 - protein, 38 aa, Artificial Sequence; identical to SEQ ID NO: 30997
  Cyclic GFR-binding peptide
  MOD_RES (32)..(33): Xaa is C or S

SEQ ID NO: 85109 - protein, 38 aa, Artificial Sequence
  Cyclic GFR-binding peptide
  MOD_RES (2)..(4)..(35)..(36): Xaa is C or S
LXGXEEVIMRHKRLLLVRGNDYYLMSTASTKVPAXXTS

SEQ ID NO: 85110 - protein, 36 aa, Artificial Sequence
  Cyclic GFR-binding peptide
  MOD_RES (31)..(32): Xaa is C or S
DVVMGYHYKLIIQQKDNKYLMSIPSMKTPTXXPGAS

SEQ ID NO: 85111 - protein, 27 aa, Artificial Sequence
  Cyclic GFR-binding peptide
VVMDYHYKLVVNNAADKYLISIPSLRA

SEQ ID NO: 85112 - protein, 32 aa, Artificial Sequence; identical to SEQ ID NO: 2797
  Cyclic GFR-binding peptide
  MOD_RES (30)..(31): Xaa is C or S

SEQ ID NO: 85113 - protein, 23 aa, Artificial Sequence
  Cyclic GFR-binding peptide
MEYKFKIKPTKGILYLISIPELD

SEQ ID NO: 85114 - protein, 39 aa, Artificial Sequence; identical to SEQ ID NO: 31006
  Cyclic GFR-binding peptide
  MOD_RES (1)..(3)..(35)..(36): Xaa is C or S

SEQ ID NO: 85115 - protein, 37 aa, Artificial Sequence; identical to SEQ ID NO: 2798
  Cyclic GFR-binding peptide
  MOD_RES (1)..(3)..(35): Xaa is C or S

SEQ ID NO: 85116 - protein, 31 aa, Artificial Sequence; identical to SEQ ID NO: 2804
  Cyclic GFR-binding peptide
  MOD_RES (28)..(29): Xaa is C or S

SEQ ID NO: 85117 - protein, 24 aa, Artificial Sequence
  Cyclic GFR-binding peptide
VVMEEYKFKVVKDYEDLYLMSIPE

SEQ ID NO: 85118 - protein, 27 aa, Artificial Sequence
  Cyclic GFR-binding peptide
  MOD_RES (26)..(27): Xaa is C or S
PIKGYIVNSSDDFYLVNIPSLKTPAXX

SEQ ID NO: 85119 - protein, 35 aa, Artificial Sequence; identical to SEQ ID NO: 41094
  Cyclic GFR-binding peptide
  MOD_RES (1)..(33)..(34): Xaa is C or S

SEQ ID NO: 85120 - protein, 37 aa, Artificial Sequence; identical to SEQ ID NO: 31016
  Cyclic GFR-binding peptide
  MOD_RES (1)..(3)..(35)..(36): Xaa is C or S

SEQ ID NO: 85121 - protein, 25 aa, Artificial Sequence
  Cyclic GFR-binding peptide
EVTMNRYKKLVVNKNEDFYLISIAN

SEQ ID NO: 85122 - protein, 28 aa, Artificial Sequence
  Cyclic GFR-binding peptide
  MOD_RES (2)..(2): Xaa is C or S
AXSEVTMNEYKFKVVNKNEDLYLISIPE

SEQ ID NO: 85123 - protein, 37 aa, Artificial Sequence; identical to SEQ ID NO: 2810
  Cyclic GFR-binding peptide
  MOD_RES (31)..(32): Xaa is C or S

SEQ ID NO: 85124 - protein, 32 aa, Artificial Sequence; identical to SEQ ID NO: 2814
  Cyclic GFR-binding peptide
  MOD_RES (2)..(2): Xaa is C or S

SEQ ID NO: 85125 - protein, 37 aa, Artificial Sequence; identical to SEQ ID NO: 31022
  Cyclic GFR-binding peptide
  MOD_RES (31)..(32): Xaa is C or S

SEQ ID NO: 85126 - protein, 31 aa, Artificial Sequence
  Cyclic GFR-binding peptide
  MOD_RES (2)..(2): Xaa is C or S
AXSEVTMNYHYKLVVNKNEDKYLISIPSMKE

SEQ ID NO: 85127 - protein, 36 aa, Artificial Sequence; identical to SEQ ID NO: 2816
  Cyclic GFR-binding peptide
  MOD_RES (31)..(32): Xaa is C or S

SEQ ID NO: 85128 - protein, 38 aa, Artificial Sequence; identical to SEQ ID NO: 2817
  Cyclic GFR-binding peptide
  MOD_RES (32)..(33): Xaa is C or S

SEQ ID NO: 85129 - protein, 38 aa, Artificial Sequence; identical to SEQ ID NO: 2818
  Cyclic GFR-binding peptide
  MOD_RES (32)..(33): Xaa is C or S

SEQ ID NO: 85130 - protein, 30 aa, Artificial Sequence; identical to SEQ ID NO: 41101
  Cyclic GFR-binding peptide
  MOD_RES (29)..(30): Xaa is C or S

SEQ ID NO: 85131 - protein, 23 aa, Artificial Sequence
  Cyclic GFR-binding peptide
IMEYKFKIKPTKGILYLISIPEL

SEQ ID NO: 85132 - protein, 31 aa, Artificial Sequence; identical to SEQ ID NO: 31030
  Cyclic GFR-binding peptide

SEQ ID NO: 85133 - protein, 25 aa, Artificial Sequence
  Cyclic GFR-binding peptide
AMGRYKKLYTVVGKDFYLISIANLK

SEQ ID NO: 85134 - protein, 27 aa, Artificial Sequence
  Cyclic GFR-binding peptide
  MOD_RES (26)..(27): Xaa is C or S
YHYKLVVKDYEDKYLMSIPSLETPVXX

SEQ ID NO: 85135 - protein, 38 aa, Artificial Sequence; identical to SEQ ID NO: 31034
  Cyclic GFR-binding peptide
  MOD_RES (2)..(4)..(36)..(37): Xaa is C or S

SEQ ID NO: 85136 - protein, 30 aa, Artificial Sequence; identical to SEQ ID NO: 2825
  Cyclic GFR-binding peptide
  MOD_RES (30)..(30): Xaa is C or S

SEQ ID NO: 85137 - protein, 40 aa, Artificial Sequence; identical to SEQ ID NO: 41106
  Cyclic GFR-binding peptide
  MOD_RES (2)..(4)..(36)..(37): Xaa is C or S

SEQ ID NO: 85138 - protein, 31 aa, Artificial Sequence; identical to SEQ ID NO: 13374
  Cyclic GFR-binding peptide
  MOD_RES (27)..(28): Xaa is C or S

SEQ ID NO: 85139 - protein, 39 aa, Artificial Sequence; identical to SEQ ID NO: 2828
  Cyclic GFR-binding peptide
  MOD_RES (1)..(3)..(34)..(35): Xaa is C or S

SEQ ID NO: 85140 - protein, 36 aa, Artificial Sequence; identical to SEQ ID NO: 31043
  Cyclic GFR-binding peptide
  MOD_RES (30)..(31): Xaa is C or S

SEQ ID NO: 85141 - protein, 22 aa, Artificial Sequence
  Cyclic GFR-binding peptide
PIKGYVVNNAADFYLINIPSLR

SEQ ID NO: 85142 - protein, 25 aa, Artificial Sequence
  Cyclic GFR-binding peptide
NYHYKLIVNSSDDKYLVSIPSLQTP

SEQ ID NO: 85143 - protein, 28 aa, Artificial Sequence
  Cyclic GFR-binding peptide
  MOD_RES (28)..(28): Xaa is C or S
MDEYKFKVVKENEDLYLMSIPELETPVX

SEQ ID NO: 85144 - protein, 27 aa, Artificial Sequence
  Cyclic GFR-binding peptide
EEVIMYHYKLLLVRGNDKYLMSIPSTK

SEQ ID NO: 85145 - protein, 28 aa, Artificial Sequence
  Cyclic GFR-binding peptide
  MOD_RES (28)..(28): Xaa is C or S
MGRHKRLIIQQKDNYYLMSTASMKTPTX

SEQ ID NO: 85146 - protein, 32 aa, Artificial Sequence; identical to SEQ ID NO: 2835
  Cyclic GFR-binding peptide
  MOD_RES (28)..(28): Xaa is C or S

SEQ ID NO: 85147 - protein, 37 aa, Artificial Sequence; identical to SEQ ID NO: 31050
  Cyclic GFR-binding peptide
  MOD_RES (32)..(33): Xaa is C or S

SEQ ID NO: 85148 - protein, 25 aa, Artificial Sequence
  Cyclic GFR-binding peptide
VVMGEYKFKIIQQKDNLYLMSIPEM

SEQ ID NO: 85149 - protein, 32 aa, Artificial Sequence; identical to SEQ ID NO: 76339
  Cyclic GFR-binding peptide
  MOD_RES (29)..(30): Xaa is C or S

SEQ ID NO: 85150 - protein, 23 aa, Artificial Sequence
  Cyclic GFR-binding peptide
NEYKFKIVNNSSDLYLVSIPELK

SEQ ID NO: 85151 - protein, 35 aa, Artificial Sequence; identical to SEQ ID NO: 2838
  Cyclic GFR-binding peptide
  MOD_RES (2)..(4): Xaa is C or S

SEQ ID NO: 85152 - protein, 33 aa, Artificial Sequence
  Cyclic GFR-binding peptide
  MOD_RES (27)..(28): Xaa is C or S
MYHYKLLLVRGNDKYLMSIPSTKVPAXXTSPVR

SEQ ID NO: 85153 - protein, 29 aa, Artificial Sequence
  Cyclic GFR-binding peptide
  MOD_RES (29)..(29): Xaa is C or S
TMNYHYKLVVNKNEDKYLISIPSMKEPVX

SEQ ID NO: 85154 - protein, 33 aa, Artificial Sequence
  Cyclic GFR-binding peptide
  MOD_RES (28)..(29): Xaa is C or S
MDRHKRLVVNNASDYYLISTASLRTPVXXTPPT

SEQ ID NO: 85155 - protein, 34 aa, Artificial Sequence; identical to SEQ ID NO: 2840
  Cyclic GFR-binding peptide
  MOD_RES (2)..(4): Xaa is C or S

SEQ ID NO: 85156 - protein, 26 aa, Artificial Sequence
  Cyclic GFR-binding peptide
VMEYKFKVKPTRGVLYLISIPELDQP

SEQ ID NO: 85157 - protein, 25 aa, Artificial Sequence
  Cyclic GFR-binding peptide
SKVVMYHYKLVKPTRGVKYLISIPS

SEQ ID NO: 85158 - protein, 31 aa, Artificial Sequence; identical to SEQ ID NO: 41129
  Cyclic GFR-binding peptide
  MOD_RES (27)..(28): Xaa is C or S

SEQ ID NO: 85159 - protein, 25 aa, Artificial Sequence
  Cyclic GFR-binding peptide
IMRHKRLVKPKRGVYYLISTASLAQ

SEQ ID NO: 85160 - protein, 34 aa, Artificial Sequence
  Cyclic GFR-binding peptide
  MOD_RES (2)..(34): Xaa is C or S
AXSEVTMNEYKFKVVNKNEDLYLISIPEMKEPVX

SEQ ID NO: 85161 - protein, 26 aa, Artificial Sequence
  Cyclic GFR-binding peptide
VIMYHYKLLLVRGNDKYLMSIPSTKV

SEQ ID NO: 85162 - protein, 30 aa, Artificial Sequence
  Cyclic GFR-binding peptide
SEVTMNEYKFKVVNKNEDLYLISIPEMKEP

SEQ ID NO: 85163 - protein, 33 aa, Artificial Sequence; identical to SEQ ID NO: 2851
  Cyclic GFR-binding peptide
  MOD_RES (31)..(32): Xaa is C or S

SEQ ID NO: 85164 - protein, 36 aa, Artificial Sequence
  Cyclic GFR-binding peptide
  MOD_RES (30)..(31): Xaa is C or S
VVMDRHKRLVVNNAADYYLISTASLRAPVXXSAPAA

SEQ ID NO: 85165 - protein, 41 aa, Artificial Sequence; identical to SEQ ID NO: 41141
  Cyclic GFR-binding peptide
  MOD_RES (1)..(3)..(35)..(36): Xaa is C or S

SEQ ID NO: 85166 - protein, 31 aa, Artificial Sequence; identical to SEQ ID NO: 2855
  Cyclic GFR-binding peptide
  MOD_RES (1)..(3): Xaa is C or S

SEQ ID NO: 85167 - protein, 23 aa, Artificial Sequence
  Cyclic GFR-binding peptide
GERYKKLTPVGMDDFYLVSIANL

SEQ ID NO: 85168 - protein, 36 aa, Artificial Sequence; identical to SEQ ID NO: 31073
  Cyclic GFR-binding peptide
  MOD_RES (2)..(4)..(35)..(36): Xaa is C or S

SEQ ID NO: 85169 - protein, 31 aa, Artificial Sequence; identical to SEQ ID NO: 2863
  Cyclic GFR-binding peptide
  MOD_RES (28)..(29): Xaa is C or S

SEQ ID NO: 85170 - protein, 33 aa, Artificial Sequence; identical to SEQ ID NO: 31077
  Cyclic GFR-binding peptide
  MOD_RES (27)..(28): Xaa is C or S

SEQ ID NO: 85171 - protein, 30 aa, Artificial Sequence; identical to SEQ ID NO: 2866
  Cyclic GFR-binding peptide
  MOD_RES (27)..(28): Xaa is C or S

SEQ ID NO: 85172 - protein, 34 aa, Artificial Sequence; identical to SEQ ID NO: 2867
  Cyclic GFR-binding peptide
  MOD_RES (1)..(34): Xaa is C or S

SEQ ID NO: 85173 - protein, 26 aa, Artificial Sequence
  Cyclic GFR-binding peptide
MNRYKKLIVNNSSDFYLVSIANLKTP

SEQ ID NO: 85174 - protein, 30 aa, Artificial Sequence
  Cyclic GFR-binding peptide
  MOD_RES (1)..(3): Xaa is C or S
XGXRDVVMGRHKRLIIQQKDNYYLMSTASM

SEQ ID NO: 85175 - protein, 35 aa, Artificial Sequence; identical to SEQ ID NO: 2874
  Cyclic GFR-binding peptide
  MOD_RES (1)..(3)..(35): Xaa is C or S

SEQ ID NO: 85176 - protein, 35 aa, Artificial Sequence; identical to SEQ ID NO: 31086
  Cyclic GFR-binding peptide
  MOD_RES (2)..(4)..(35): Xaa is C or S

SEQ ID NO: 85177 - protein, 29 aa, Artificial Sequence
  Cyclic GFR-binding peptide
  MOD_RES (2)..(2): Xaa is C or S
GXRDVVMGEYKFKIIQQKDNLYLMSIPEM

SEQ ID NO: 85178 - protein, 24 aa, Artificial Sequence
  Cyclic GFR-binding peptide
VIMEYKFKIKPTKGILYLISIPEL

SEQ ID NO: 85179 - protein, 28 aa, Artificial Sequence
  Cyclic GFR-binding peptide
EVVMDRYKKLVVNNASDFYLISIANLRT

SEQ ID NO: 85180 - protein, 29 aa, Artificial Sequence
  Cyclic GFR-binding peptide
SKVVMEYKFKVKPTRGVLYLISIPELDQP

SEQ ID NO: 85181 - protein, 21 aa, Artificial Sequence
  Cyclic GFR-binding peptide
GRYKKLYTVVGKDFYLISIAN

SEQ ID NO: 85182 - protein, 22 aa, Artificial Sequence
  Cyclic GFR-binding peptide
MGPIKGYYTVVGKDFYLINIPS

SEQ ID NO: 85183 - protein, 23 aa, Artificial Sequence
  Cyclic GFR-binding peptide
VMNRYKKLIVNSSDDFYLVSIAN

SEQ ID NO: 85184 - protein, 41 aa, Artificial Sequence; identical to SEQ ID NO: 31099
  Cyclic GFR-binding peptide
  MOD_RES (2)..(4)..(35)..(36): Xaa is C or S

SEQ ID NO: 85185 - protein, 24 aa, Artificial Sequence
  Cyclic GFR-binding peptide
TMNEYKFKVVNKNEDLYLISIPEM

SEQ ID NO: 85186 - protein, 38 aa, Artificial Sequence
  Cyclic GFR-binding peptide
  MOD_RES (2)..(4)..(36)..(37): Xaa is C or S
RXAXSEVTMNRHKRLVVNKNEDYYLISTASMKEPVXXP

SEQ ID NO: 85187 - protein, 29 aa, Artificial Sequence
  Cyclic GFR-binding peptide
GEVVMEPIKGYVVKDYEDFYLMNIPSLET

SEQ ID NO: 85188 - protein, 31 aa, Artificial Sequence; identical to SEQ ID NO: 31101
  Cyclic GFR-binding peptide
  MOD_RES (30)..(31): Xaa is C or S

SEQ ID NO: 85189 - protein, 30 aa, Artificial Sequence
  Cyclic GFR-binding peptide
  MOD_RES (2)..(4): Xaa is C or S
RXGXSEVVMDRHKRLVVNNASDYYLISTAS

SEQ ID NO: 85190 - protein, 31 aa, Artificial Sequence; identical to SEQ ID NO: 41170
  Cyclic GFR-binding peptide
  MOD_RES (31)..(31): Xaa is C or S

SEQ ID NO: 85191 - protein, 35 aa, Artificial Sequence
  Cyclic GFR-binding peptide
  MOD_RES (30)..(31): Xaa is C or S
VTMNRYKKLVVNKNEDFYLISIANMKEPVXXPEPI

SEQ ID NO: 85192 - protein, 40 aa, Artificial Sequence; identical to SEQ ID NO: 41178
  Cyclic GFR-binding peptide
  MOD_RES (2)..(34)..(35): Xaa is C or S

SEQ ID NO: 85193 - protein, 35 aa, Artificial Sequence; identical to SEQ ID NO: 2901
  Cyclic GFR-binding peptide
  MOD_RES (1)..(32)..(33): Xaa is C or S

SEQ ID NO: 85194 - protein, 33 aa, Artificial Sequence; identical to SEQ ID NO: 2902
  Cyclic GFR-binding peptide
  MOD_RES (29)..(29): Xaa is C or S

SEQ ID NO: 85195 - protein, 36 aa, Artificial Sequence; identical to SEQ ID NO: 2903
  Cyclic GFR-binding peptide
  MOD_RES (1)..(3)..(34)..(35): Xaa is C or S

SEQ ID NO: 85196 - protein, 39 aa, Artificial Sequence; identical to SEQ ID NO: 31110
  Cyclic GFR-binding peptide
  MOD_RES (2)..(4)..(36)..(37): Xaa is C or S

SEQ ID NO: 85197 - protein, 23 aa, Artificial Sequence
  Cyclic GFR-binding peptide
VMDPIKGYVVNNASDFYLINIPS

SEQ ID NO: 85198 - protein, 29 aa, Artificial Sequence
  Cyclic GFR-binding peptide
EVVMDPIKGYVVKENEDFYLMNIPSLETP

SEQ ID NO: 85199 - protein, 33 aa, Artificial Sequence; identical to SEQ ID NO: 2905
  Cyclic GFR-binding peptide
  MOD_RES (2)..(2): Xaa is C or S

SEQ ID NO: 85200 - protein, 33 aa, Artificial Sequence
  Cyclic GFR-binding peptide
  MOD_RES (29)..(30): Xaa is C or S
VVMPIKGYVKPTRGVFYLINIPSLDQPVXXPSA

SEQ ID NO: 85201 - protein, 32 aa, Artificial Sequence; identical to SEQ ID NO: 31113
  Cyclic GFR-binding peptide
  MOD_RES (2)..(2): Xaa is C or S

SEQ ID NO: 85202 - protein, 30 aa, Artificial Sequence
  Cyclic GFR-binding peptide
  MOD_RES (2)..(2): Xaa is C or S
AXSEVTMNRYKKLVVNKNEDFYLISIANMK

SEQ ID NO: 85203 - protein, 30 aa, Artificial Sequence; identical to SEQ ID NO: 2908
  Cyclic GFR-binding peptide
  MOD_RES (28)..(29): Xaa is C or S

SEQ ID NO: 85204 - protein, 28 aa, Artificial Sequence
  Cyclic GFR-binding peptide
  MOD_RES (2)..(2): Xaa is C or S
KXSKVVMPIKGYVKPTRGVFYLINIPSL

SEQ ID NO: 85205 - protein, 26 aa, Artificial Sequence
  Cyclic GFR-binding peptide
KVVMPIKGYVKPTRGVFYLINIPSLD

SEQ ID NO: 85206 - protein, 24 aa, Artificial Sequence
  Cyclic GFR-binding peptide
MGRYKKLYTVVGKDFYLISIANLK

SEQ ID NO: 85207 - protein, 29 aa, Artificial Sequence
  Cyclic GFR-binding peptide
  MOD_RES (27)..(28): Xaa is C or S
DRYKKLVVKENEDFYLMSIANLETPVXXA

SEQ ID NO: 85208 - protein, 27 aa, Artificial Sequence
  Cyclic GFR-binding peptide
  MOD_RES (27)..(27): Xaa is C or S
NEYKFKVVNKNEDLYLISIPEMKEPVX

SEQ ID NO: 85209 - protein, 34 aa, Artificial Sequence; identical to SEQ ID NO: 41202
  Cyclic GFR-binding peptide
  MOD_RES (31)..(32): Xaa is C or S

SEQ ID NO: 85210 - protein, 40 aa, Artificial Sequence; identical to SEQ ID NO: 31127
  Cyclic GFR-binding peptide
  MOD_RES (1)..(3)..(35)..(36): Xaa is C or S

SEQ ID NO: 85211 - protein, 29 aa, Artificial Sequence
  Cyclic GFR-binding peptide
  MOD_RES (29)..(29): Xaa is C or S
VMEYHYKLVVKDYEDKYLMSIPSLETPVX

SEQ ID NO: 85212 - protein, 35 aa, Artificial Sequence; identical to SEQ ID NO: 2922
  Cyclic GFR-binding peptide
  MOD_RES (2)..(33)..(34): Xaa is C or S

SEQ ID NO: 85213 - protein, 41 aa, Artificial Sequence; identical to SEQ ID NO: 41210
  Cyclic GFR-binding peptide
  MOD_RES (1)..(3)..(35)..(36): Xaa is C or S

SEQ ID NO: 85214 - protein, 31 aa, Artificial Sequence; identical to SEQ ID NO: 2923
  Cyclic GFR-binding peptide

SEQ ID NO: 85215 - protein, 36 aa, Artificial Sequence; identical to SEQ ID NO: 2925
  Cyclic GFR-binding peptide
  MOD_RES (2)..(4)..(36): Xaa is C or S

SEQ ID NO: 85216 - protein, 34 aa, Artificial Sequence; identical to SEQ ID NO: 2926
  Cyclic GFR-binding peptide
  MOD_RES (1)..(3): Xaa is C or S

SEQ ID NO: 85217 - protein, 25 aa, Artificial Sequence
  Cyclic GFR-binding peptide
MNRYKKLIVNSSDDFYLVSIANLKT

SEQ ID NO: 85218 - protein, 35 aa, Artificial Sequence; identical to SEQ ID NO: 2929
  Cyclic GFR-binding peptide
  MOD_RES (2)..(33)..(34): Xaa is C or S

SEQ ID NO: 85219 - protein, 32 aa, Artificial Sequence
  Cyclic GFR-binding peptide
  MOD_RES (30)..(31): Xaa is C or S
VVMDEYKFKVVNNASDLYLISIPELRTPVXXT

SEQ ID NO: 85220 - protein, 35 aa, Artificial Sequence; identical to SEQ ID NO: 31144
  Cyclic GFR-binding peptide
  MOD_RES (31)..(32): Xaa is C or S

SEQ ID NO: 85221 - protein, 37 aa, Artificial Sequence; identical to SEQ ID NO: 31145
  Cyclic GFR-binding peptide
  MOD_RES (1)..(33): Xaa is C or S

SEQ ID NO: 85222 - protein, 37 aa, Artificial Sequence; identical to SEQ ID NO: 31147
  Cyclic GFR-binding peptide
  MOD_RES (1)..(3)..(35)..(36): Xaa is C or S

SEQ ID NO: 85223 - protein, 30 aa, Artificial Sequence; identical to SEQ ID NO: 2934
  Cyclic GFR-binding peptide
  MOD_RES (1)..(3): Xaa is C or S

SEQ ID NO: 85224 - protein, 31 aa, Artificial Sequence; identical to SEQ ID NO: 31150
  Cyclic GFR-binding peptide
  MOD_RES (30)..(30): Xaa is C or S

SEQ ID NO: 85225 - protein, 33 aa, Artificial Sequence; identical to SEQ ID NO: 31151
  Cyclic GFR-binding peptide
  MOD_RES (31)..(32): Xaa is C or S

SEQ ID NO: 85226 - protein, 25 aa, Artificial Sequence
  Cyclic GFR-binding peptide
EVTMNYHYKLVVNKNEDKYLISIPS

SEQ ID NO: 85227 - protein, 31 aa, Artificial Sequence; identical to SEQ ID NO: 2940
  Cyclic GFR-binding peptide
  MOD_RES (27)..(28): Xaa is C or S

SEQ ID NO: 85228 - protein, 32 aa, Artificial Sequence; identical to SEQ ID NO: 2942
  Cyclic GFR-binding peptide
  MOD_RES (1)..(1): Xaa is C or S

SEQ ID NO: 85229 - protein, 27 aa, Artificial Sequence
  Cyclic GFR-binding peptide
  MOD_RES (27)..(27): Xaa is C or S
NYHYKLVVNKNEDKYLISIPSMKEPVX

SEQ ID NO: 85230 - protein, 33 aa, Artificial Sequence; identical to SEQ ID NO: 2943
  Cyclic GFR-binding peptide
  MOD_RES (2)..(4): Xaa is C or S

SEQ ID NO: 85231 - protein, 35 aa, Artificial Sequence; identical to SEQ ID NO: 2945
  Cyclic GFR-binding peptide
  MOD_RES (2)..(34)..(35): Xaa is C or S

SEQ ID NO: 85232 - protein, 20 aa, Artificial Sequence
  Cyclic GFR-binding peptide
PIKGYYTVVGKDFYLINIPS

SEQ ID NO: 85233 - protein, 35 aa, Artificial Sequence
  Cyclic GFR-binding peptide
  MOD_RES (2)..(4)..(35): Xaa is C or S
SXKXSKVIMPIKGYIKPTKGIFYLINIPSLDQSVX

SEQ ID NO: 85234 - protein, 31 aa, Artificial Sequence; identical to SEQ ID NO: 2948
  Cyclic GFR-binding peptide
  MOD_RES (28)..(29): Xaa is C or S

SEQ ID NO: 85235 - protein, 31 aa, Artificial Sequence; identical to SEQ ID NO: 31162
  Cyclic GFR-binding peptide
  MOD_RES (29)..(30): Xaa is C or S

SEQ ID NO: 85236 - protein, 35 aa, Artificial Sequence; identical to SEQ ID NO: 2949
  Cyclic GFR-binding peptide
  MOD_RES (30)..(31): Xaa is C or S

SEQ ID NO: 85237 - protein, 33 aa, Artificial Sequence; identical to SEQ ID NO: 41231
  Cyclic GFR-binding peptide
  MOD_RES (27)..(28): Xaa is C or S

SEQ ID NO: 85238 - protein, 28 aa, Artificial Sequence
  Cyclic GFR-binding peptide
  MOD_RES (2)..(2): Xaa is C or S
GXSRVVMNRYKKLIVNSSDDFYLVSIAN

SEQ ID NO: 85239 - protein, 36 aa, Artificial Sequence; identical to SEQ ID NO: 41232
  Cyclic GFR-binding peptide
  MOD_RES (1)..(3)..(36): Xaa is C or S

SEQ ID NO: 85240 - protein, 31 aa, Artificial Sequence; identical to SEQ ID NO: 41233
  Cyclic GFR-binding peptide
  MOD_RES (31)..(31): Xaa is C or S

SEQ ID NO: 85241 - protein, 30 aa, Artificial Sequence; identical to SEQ ID NO: 41234
  Cyclic GFR-binding peptide

SEQ ID NO: 85242 - protein, 40 aa, Artificial Sequence; identical to SEQ ID NO: 31165
  Cyclic GFR-binding peptide
  MOD_RES (1)..(3)..(35)..(36): Xaa is C or S

SEQ ID NO: 85243 - protein, 35 aa, Artificial Sequence; identical to SEQ ID NO: 2952
  Cyclic GFR-binding peptide
  MOD_RES (32)..(33): Xaa is C or S

SEQ ID NO: 85244 - protein, 26 aa, Artificial Sequence
  Cyclic GFR-binding peptide
ESVAMGYHYKLYTVVGKDKYLISIPS

SEQ ID NO: 85245 - protein, 29 aa, Artificial Sequence
  Cyclic GFR-binding peptide
  MOD_RES (1)..(1): Xaa is C or S
XSKVIMRYKKLIKPTKGIFYLISIANLDQ

SEQ ID NO: 85246 - protein, 36 aa, Artificial Sequence; identical to SEQ ID NO: 2956
  Cyclic GFR-binding peptide
  MOD_RES (32)..(33): Xaa is C or S

SEQ ID NO: 85247 - protein, 35 aa, Artificial Sequence; identical to SEQ ID NO: 31173
  Cyclic GFR-binding peptide
  MOD_RES (29)..(30): Xaa is C or S

SEQ ID NO: 85248 - protein, 34 aa, Artificial Sequence; identical to SEQ ID NO: 31174
  Cyclic GFR-binding peptide
  MOD_RES (30)..(31): Xaa is C or S

SEQ ID NO: 85249 - protein, 37 aa, Artificial Sequence
  Cyclic GFR-binding peptide
  MOD_RES (1)..(3)..(35)..(36): Xaa is C or S
XAXSEVTMNRHKRLVVNKNEDYYLISTASMKEPVXXP

SEQ ID NO: 85250 - protein, 31 aa, Artificial Sequence; identical to SEQ ID NO: 2958
  Cyclic GFR-binding peptide
  MOD_RES (2)..(4): Xaa is C or S

SEQ ID NO: 85251 - protein, 32 aa, Artificial Sequence; identical to SEQ ID NO: 31177
  Cyclic GFR-binding peptide
  MOD_RES (2)..(4): Xaa is C or S

SEQ ID NO: 85252 - protein, 31 aa, Artificial Sequence
  Cyclic GFR-binding peptide
  MOD_RES (2)..(2): Xaa is C or S
GXEEVIMYHYKLLLVRGNDKYLMSIPSTKVP

SEQ ID NO: 85253 - protein, 31 aa, Artificial Sequence; identical to SEQ ID NO: 31179
  Cyclic GFR-binding peptide
  MOD_RES (28)..(29): Xaa is C or S

SEQ ID NO: 85254 - protein, 30 aa, Artificial Sequence
  Cyclic GFR-binding peptide
  MOD_RES (28)..(29): Xaa is C or S
MDRHKRLVVNNASDYYLISTASLRTPVXXT

SEQ ID NO: 85255 - protein, 42 aa, Artificial Sequence; identical to SEQ ID NO: 31180
  Cyclic GFR-binding peptide
  MOD_RES (2)..(4)..(36)..(37): Xaa is C or S

SEQ ID NO: 85256 - protein, 25 aa, Artificial Sequence
  Cyclic GFR-binding peptide
SRVIMPIKGYVKPKRGVFYLINIPS

SEQ ID NO: 85257 - protein, 35 aa, Artificial Sequence
  Cyclic GFR-binding peptide
  MOD_RES (29)..(30): Xaa is C or S
AMGRHKRLYTVVGKDYYLISTASLKTPVXXAKSAK

SEQ ID NO: 85258 - protein, 33 aa, Artificial Sequence
  Cyclic GFR-binding peptide
  MOD_RES (2)..(2): Xaa is C or S
GXSEVVMDYHYKLVVNNASDKYLISIPSLRTPV

SEQ ID NO: 85259 - protein, 32 aa, Artificial Sequence; identical to SEQ ID NO: 31183
  Cyclic GFR-binding peptide
  MOD_RES (1)..(1): Xaa is C or S

SEQ ID NO: 85260 - protein, 35 aa, Artificial Sequence
  Cyclic GFR-binding peptide
  MOD_RES (29)..(30): Xaa is C or S
VMGEYKFKIIQQKDNLYLMSIPEMKTPTXXPGASG

SEQ ID NO: 85261 - protein, 29 aa, Artificial Sequence
  Cyclic GFR-binding peptide
  MOD_RES (29)..(29): Xaa is C or S
VIMEYKFKVKPKRGVLYLISIPELAQPVX

SEQ ID NO: 85262 - protein, 32 aa, Artificial Sequence; identical to SEQ ID NO: 2967
  Cyclic GFR-binding peptide
  MOD_RES (2)..(4): Xaa is C or S

SEQ ID NO: 85263 - protein, 25 aa, Artificial Sequence
  Cyclic GFR-binding peptide
VVMDEYKFKVVKENEDLYLMSIPEL

SEQ ID NO: 85264 - protein, 27 aa, Artificial Sequence
  Cyclic GFR-binding peptide
  MOD_RES (27)..(27): Xaa is C or S
DRYKKLVVNNAADFYLISIANLRAPVX

SEQ ID NO: 85265 - protein, 37 aa, Artificial Sequence
  Cyclic GFR-binding peptide
  MOD_RES (2)..(4)..(36)..(37): Xaa is C or S
RXGXESVAMGRHKRLYTVVGKDYYLISTASLKTPVXX

SEQ ID NO: 85266 - protein, 31 aa, Artificial Sequence; identical to SEQ ID NO: 76414
  Cyclic GFR-binding peptide
  MOD_RES (2)..(4): Xaa is C or S

SEQ ID NO: 85267 - protein, 34 aa, Artificial Sequence
  Cyclic GFR-binding peptide
  MOD_RES (28)..(29): Xaa is C or S
MNRHKRLVVNKNEDYYLISTASMKEPVXXPEPIG

SEQ ID NO: 85268 - protein, 39 aa, Artificial Sequence; identical to SEQ ID NO: 31199
  Cyclic GFR-binding peptide
  MOD_RES (2)..(33)..(34): Xaa is C or S

SEQ ID NO: 85269 - protein, 34 aa, Artificial Sequence; identical to SEQ ID NO: 2977
  Cyclic GFR-binding peptide
  MOD_RES (2)..(33)..(34): Xaa is C or S

SEQ ID NO: 85270 - protein, 34 aa, Artificial Sequence; identical to SEQ ID NO: 31204
  Cyclic GFR-binding peptide
  MOD_RES (31)..(32): Xaa is C or S

SEQ ID NO: 85271 - protein, 33 aa, Artificial Sequence; identical to SEQ ID NO: 41276
  Cyclic GFR-binding peptide
  MOD_RES (1)..(33): Xaa is C or S

SEQ ID NO: 85272 - protein, 32 aa, Artificial Sequence; identical to SEQ ID NO: 2984
  Cyclic GFR-binding peptide
  MOD_RES (30)..(31): Xaa is C or S

SEQ ID NO: 85273 - protein, 33 aa, Artificial Sequence; identical to SEQ ID NO: 31214
  Cyclic GFR-binding peptide
  MOD_RES (27)..(28): Xaa is C or S

SEQ ID NO: 85274 - protein, 26 aa, Artificial Sequence
  Cyclic GFR-binding peptide
VVMDEYKFKVVNNAADLYLISIPELR

SEQ ID NO: 85275 - protein, 33 aa, Artificial Sequence; identical to SEQ ID NO: 2985
  Cyclic GFR-binding peptide
  MOD_RES (2)..(4): Xaa is C or S

SEQ ID NO: 85276 - protein, 26 aa, Artificial Sequence
  Cyclic GFR-binding peptide
  MOD_RES (1)..(1): Xaa is C or S
XSRVIMRHKRLVKPKRGVYYLISTAS

SEQ ID NO: 85277 - protein, 35 aa, Artificial Sequence
  Cyclic GFR-binding peptide
  MOD_RES (1)..(3)..(35): Xaa is C or S
XAXSEVTMNRYKKLVVNKNEDFYLISIANMKEPVX

SEQ ID NO: 85278 - protein, 28 aa, Artificial Sequence
  Cyclic GFR-binding peptide
SEVVMDPIKGYVVNNASDFYLINIPSLR

SEQ ID NO: 85279 - protein, 36 aa, Artificial Sequence; identical to SEQ ID NO: 31219
  Cyclic GFR-binding peptide
  MOD_RES (1)..(3)..(35)..(36): Xaa is C or S

SEQ ID NO: 85280 - protein, 27 aa, Artificial Sequence
  Cyclic GFR-binding peptide
VVMDRYKKLVVNNAADFYLISIANLRA

SEQ ID NO: 85281 - protein, 22 aa, Artificial Sequence
  Cyclic GFR-binding peptide
PIKGYTPVGMDDFYLVNIPSLK

SEQ ID NO: 85282 - protein, 22 aa, Artificial Sequence
  Cyclic GFR-binding peptide
MNRHKRLIVNSSDDYYLVSTAS

SEQ ID NO: 85283 - protein, 31 aa, Artificial Sequence; identical to SEQ ID NO: 2996
  Cyclic GFR-binding peptide
  MOD_RES (31)..(31): Xaa is C or S

SEQ ID NO: 85284 - protein, 24 aa, Artificial Sequence
  Cyclic GFR-binding peptide
DPIKGYVVNNAADFYLINIPSLRA

SEQ ID NO: 85285 - protein, 36 aa, Artificial Sequence; identical to SEQ ID NO: 2998
  Cyclic GFR-binding peptide
  MOD_RES (1)..(3)..(34)..(35): Xaa is C or S

SEQ ID NO: 85286 - protein, 22 aa, Artificial Sequence
  Cyclic GFR-binding peptide
RYKKLYTVVGKDFYLISIANLK

SEQ ID NO: 85287 - protein, 27 aa, Artificial Sequence
  Cyclic GFR-binding peptide
  MOD_RES (1)..(1): Xaa is C or S
XSKVVMEYKFKVKPTRGVLYLISIPEL

SEQ ID NO: 85288 - protein, 39 aa, Artificial Sequence
  Cyclic GFR-binding peptide
  MOD_RES (1)..(33)..(34): Xaa is C or S
XSRVVMNYHYKLIVNSSDDKYLVSIPSLKTPAXXPKPVH

SEQ ID NO: 85289 - protein, 39 aa, Artificial Sequence
  Cyclic GFR-binding peptide
  MOD_RES (1)..(3)..(34)..(35): Xaa is C or S
XKXSKVIMPIKGYIKPTKGIFYLINIPSLDQSVXXPSAS

SEQ ID NO: 85290 - protein, 34 aa, Artificial Sequence
  Cyclic GFR-binding peptide
  MOD_RES (1)..(3): Xaa is C or S
XGXESVAMGRHKRLYTVVGKDYYLISTASLKTPV

SEQ ID NO: 85291 - protein, 38 aa, Artificial Sequence
  Cyclic GFR-binding peptide
  MOD_RES (32)..(33): Xaa is C or S
SEVTMNEYKFKVVNKNEDLYLISIPEMKEPVXXPEPIG

SEQ ID NO: 85292 - protein, 36 aa, Artificial Sequence
  Cyclic GFR-binding peptide
  MOD_RES (2)..(34)..(35): Xaa is C or S
GXESVAMGRHKRLYTVVGKDYYLISTASLKTPVXXA

SEQ ID NO: 85293 - protein, 33 aa, Artificial Sequence; identical to SEQ ID NO: 31237
  Cyclic GFR-binding peptide
  MOD_RES (30)..(31): Xaa is C or S

SEQ ID NO: 85294 - protein, 34 aa, Artificial Sequence; identical to SEQ ID NO: 41300
  Cyclic GFR-binding peptide
  MOD_RES (1)..(3): Xaa is C or S

SEQ ID NO: 85295 - protein, 30 aa, Artificial Sequence
  Cyclic GFR-binding peptide
  MOD_RES (27)..(28): Xaa is C or S
MYHYKLLLVRGNDKYLMSIPSTKVPAXXTS

SEQ ID NO: 85296 - protein, 28 aa, Artificial Sequence
  Cyclic GFR-binding peptide
  MOD_RES (28)..(28): Xaa is C or S
MDRYKKLVVNNASDFYLISIANLRTPVX

SEQ ID NO: 85297 - protein, 30 aa, Artificial Sequence; identical to SEQ ID NO: 31243
  Cyclic GFR-binding peptide
  MOD_RES (27)..(28): Xaa is C or S

SEQ ID NO: 85298 - protein, 31 aa, Artificial Sequence
  Cyclic GFR-binding peptide
  MOD_RES (30)..(31): Xaa is C or S
VTMNPIKGYVVNKNEDFYLINIPSMKEPVXX

SEQ ID NO: 85299 - protein, 36 aa, Artificial Sequence
  Cyclic GFR-binding peptide
  MOD_RES (1)..(3)..(34)..(35): Xaa is C or S
XKXSKVIMPIKGYIKPTKGIFYLINIPSLDQSVXXP

SEQ ID NO: 85300 - protein, 34 aa, Artificial Sequence; identical to SEQ ID NO: 3006
  Cyclic GFR-binding peptide
  MOD_RES (31)..(32): Xaa is C or S

SEQ ID NO: 85301 - protein, 36 aa, Artificial Sequence; identical to SEQ ID NO: 3008
  Cyclic GFR-binding peptide
  MOD_RES (30)..(31): Xaa is C or S

SEQ ID NO: 85302 - protein, 32 aa, Artificial Sequence; identical to SEQ ID NO: 3011
  Cyclic GFR-binding peptide
  MOD_RES (2)..(2): Xaa is C or S

SEQ ID NO: 85303 - protein, 26 aa, Artificial Sequence
  Cyclic GFR-binding peptide
SEVTMNRYKKLVVNKNEDFYLISIAN

SEQ ID NO: 85304 - protein, 31 aa, Artificial Sequence; identical to SEQ ID NO: 3016
  Cyclic GFR-binding peptide
  MOD_RES (29)..(30): Xaa is C or S

SEQ ID NO: 85305 - protein, 28 aa, Artificial Sequence
  Cyclic GFR-binding peptide
  MOD_RES (27)..(28): Xaa is C or S
NPIKGYVVNKNEDFYLINIPSMKEPVXX

SEQ ID NO: 85306 - protein, 28 aa, Artificial Sequence
  Cyclic GFR-binding peptide
VVMERHKRLVVKDYEDYYLMSTASLETP

SEQ ID NO: 85307 - protein, 25 aa, Artificial Sequence
  Cyclic GFR-binding peptide
RYKKLVKPKRGVFYLISIANLAQPV

SEQ ID NO: 85308 - protein, 36 aa, Artificial Sequence; identical to SEQ ID NO: 31253
  Cyclic GFR-binding peptide
  MOD_RES (31)..(32): Xaa is C or S

SEQ ID NO: 85309 - protein, 31 aa, Artificial Sequence; identical to SEQ ID NO: 76433
  Cyclic GFR-binding peptide
  MOD_RES (2)..(2): Xaa is C or S

SEQ ID NO: 85310 - protein, 31 aa, Artificial Sequence
  Cyclic GFR-binding peptide
SEVTMNRYKKLVVNKNEDFYLISIANMKEPV

SEQ ID NO: 85311 - protein, 33 aa, Artificial Sequence; identical to SEQ ID NO: 31256
  Cyclic GFR-binding peptide
  MOD_RES (28)..(29): Xaa is C or S

SEQ ID NO: 85312 - protein, 33 aa, Artificial Sequence; identical to SEQ ID NO: 3025
  Cyclic GFR-binding peptide
  MOD_RES (1)..(3): Xaa is C or S

SEQ ID NO: 85313 - protein, 26 aa, Artificial Sequence
  Cyclic GFR-binding peptide
GEVVMERYKKLVVKDYEDFYLMSIAN

SEQ ID NO: 85314 - protein, 31 aa, Artificial Sequence; identical to SEQ ID NO: 31259
  Cyclic GFR-binding peptide
  MOD_RES (26)..(27): Xaa is C or S

SEQ ID NO: 85315 - protein, 34 aa, Artificial Sequence; identical to SEQ ID NO: 31260
  Cyclic GFR-binding peptide
  MOD_RES (2)..(34): Xaa is C or S

SEQ ID NO: 85316 - protein, 29 aa, Artificial Sequence
  Cyclic GFR-binding peptide
  MOD_RES (26)..(27): Xaa is C or S
RHKRLVVNNASDYYLISTASLRTPVXXTP

SEQ ID NO: 85317 - protein, 25 aa, Artificial Sequence
  Cyclic GFR-binding peptide
MGEPIKGYTPVGMDDFYLVNIPSLK

SEQ ID NO: 85318 - protein, 30 aa, Artificial Sequence; identical to SEQ ID NO: 3031
  Cyclic GFR-binding peptide
  MOD_RES (1)..(3): Xaa is C or S

SEQ ID NO: 85319 - protein, 36 aa, Artificial Sequence
  Cyclic GFR-binding peptide
  MOD_RES (2)..(34)..(35): Xaa is C or S
GXAEVVMDRHKRLVVNNAADYYLISTASLRAPVXXS

SEQ ID NO: 85320 - protein, 36 aa, Artificial Sequence; identical to SEQ ID NO: 31267
  Cyclic GFR-binding peptide
  MOD_RES (32)..(33): Xaa is C or S

SEQ ID NO: 85321 - protein, 36 aa, Artificial Sequence; identical to SEQ ID NO: 3032
  Cyclic GFR-binding peptide
  MOD_RES (2)..(4)..(36): Xaa is C or S

SEQ ID NO: 85322 - protein, 39 aa, Artificial Sequence
  Cyclic GFR-binding peptide
  MOD_RES (1)..(33)..(34): Xaa is C or S
XSRVVMNRYKKLIVNSSDDFYLVSIANLKTPAXXPKPVH

SEQ ID NO: 85323 - protein, 30 aa, Artificial Sequence
  Cyclic GFR-binding peptide
AEVVMDRHKRLVVNNAADYYLISTASLRAP

SEQ ID NO: 85324 - protein, 25 aa, Artificial Sequence
  Cyclic GFR-binding peptide
RYKKLIKPTKGIFYLISIANLDQSV

SEQ ID NO: 85325 - protein, 34 aa, Artificial Sequence; identical to SEQ ID NO: 41322
  Cyclic GFR-binding peptide
  MOD_RES (32)..(33): Xaa is C or S

SEQ ID NO: 85326 - protein, 26 aa, Artificial Sequence
  Cyclic GFR-binding peptide
VMNYHYKLIVNNSSDKYLVSIPSLKT

SEQ ID NO: 85327 - protein, 33 aa, Artificial Sequence; identical to SEQ ID NO: 3037
  Cyclic GFR-binding peptide
  MOD_RES (32)..(33): Xaa is C or S

SEQ ID NO: 85328 - protein, 23 aa, Artificial Sequence
  Cyclic GFR-binding peptide
IMRHKRLLLVRGNDYYLMSTAST

SEQ ID NO: 85329 - protein, 21 aa, Artificial Sequence
  Cyclic GFR-binding peptide
DEYKFKVVKENEDLYLMSIPE

SEQ ID NO: 85330 - protein, 24 aa, Artificial Sequence
  Cyclic GFR-binding peptide
SMGERHKRLTPVGMDDYYLVSTAS

SEQ ID NO: 85331 - protein, 23 aa, Artificial Sequence
  Cyclic GFR-binding peptide
VMNPIKGYIVNNSSDFYLVNIPS

SEQ ID NO: 85332 - protein, 28 aa, Artificial Sequence
  Cyclic GFR-binding peptide
  MOD_RES (26)..(27): Xaa is C or S
EYKFKIVNSSDDLYLVSIPELKTPAXXP

SEQ ID NO: 85333 - protein, 28 aa, Artificial Sequence
  Cyclic GFR-binding peptide
  MOD_RES (28)..(28): Xaa is C or S
GERHKRLTPVGMDDYYLVSTASLKTPVX

SEQ ID NO: 85334 - protein, 36 aa, Artificial Sequence
  Cyclic GFR-binding peptide
  MOD_RES (2)..(34)..(35): Xaa is C or S
AXSEVTMNRYKKLVVNKNEDFYLISIANMKEPVXXP

SEQ ID NO: 85335 - protein, 24 aa, Artificial Sequence
  Cyclic GFR-binding peptide
MRYKKLLLVRGNDFYLMSIANTKV

SEQ ID NO: 85336 - protein, 28 aa, Artificial Sequence
  Cyclic GFR-binding peptide
  MOD_RES (2)..(2): Xaa is C or S
GXSRVVMNEYKFKIVNSSDDLYLVSIPE

SEQ ID NO: 85337 - protein, 23 aa, Artificial Sequence
  Cyclic GFR-binding peptide
NYHYKLIVNNSSDKYLVSIPSLK

SEQ ID NO: 85338 - protein, 29 aa, Artificial Sequence
  Cyclic GFR-binding peptide
  MOD_RES (26)..(27): Xaa is C or S
EYKFKTPVGMDDLYLVSIPELKTPVXXAK

SEQ ID NO: 85339 - protein, 25 aa, Artificial Sequence
  Cyclic GFR-binding peptide
NEYKFKIVNSSDDLYLVSIPELQTP

SEQ ID NO: 85340 - protein, 25 aa, Artificial Sequence
  Cyclic GFR-binding peptide
MNRYKKLIVNSSDDFYLVSIANLQT

SEQ ID NO: 85341 - protein, 23 aa, Artificial Sequence
  Cyclic GFR-binding peptide
VIMRHKRLVKPKRGVYYLISTAS

SEQ ID NO: 85342 - protein, 33 aa, Artificial Sequence; identical to SEQ ID NO: 3054
  Cyclic GFR-binding peptide
  MOD_RES (2)..(2): Xaa is C or S

SEQ ID NO: 85343 - protein, 38 aa, Artificial Sequence; identical to SEQ ID NO: 3055
  Cyclic GFR-binding peptide
  MOD_RES (1)..(3)..(35)..(36): Xaa is C or S

SEQ ID NO: 85344 - protein, 32 aa, Artificial Sequence; identical to SEQ ID NO: 3056
  Cyclic GFR-binding peptide
  MOD_RES (29)..(30): Xaa is C or S

SEQ ID NO: 85345 - protein, 38 aa, Artificial Sequence; identical to SEQ ID NO: 3057
  Cyclic GFR-binding peptide
  MOD_RES (1)..(3)..(34)..(35): Xaa is C or S

SEQ ID NO: 85346 - protein, 35 aa, Artificial Sequence
  Cyclic GFR-binding peptide
  MOD_RES (2)..(4): Xaa is C or S
HXGXSRVVMNPIKGYIVNSSDDFYLVNIPSLKTPA

SEQ ID NO: 85347 - protein, 33 aa, Artificial Sequence
  Cyclic GFR-binding peptide
  MOD_RES (32)..(33): Xaa is C or S
SEVTMNYHYKLVVNKNEDKYLISIPSMKEPVXX

SEQ ID NO: 85348 - protein, 31 aa, Artificial Sequence; identical to SEQ ID NO: 41346
  Cyclic GFR-binding peptide
  MOD_RES (26)..(27): Xaa is C or S

SEQ ID NO: 85349 - protein, 26 aa, Artificial Sequence
  Cyclic GFR-binding peptide
VMNRHKRLIVNSSDDYYLVSTASLKT

SEQ ID NO: 85350 - protein, 23 aa, Artificial Sequence
  Cyclic GFR-binding peptide
ERHKRLVVKDYEDYYLMSTASLE

SEQ ID NO: 85351 - protein, 38 aa, Artificial Sequence; identical to SEQ ID NO: 41350
  Cyclic GFR-binding peptide
  MOD_RES (1)..(33): Xaa is C or S

SEQ ID NO: 85352 - protein, 27 aa, Artificial Sequence
  Cyclic GFR-binding peptide
EVVMDYHYKLVVNNAADKYLISIPSLR

SEQ ID NO: 85353 - protein, 34 aa, Artificial Sequence
  Cyclic GFR-binding peptide
  MOD_RES (2)..(33)..(34): Xaa is C or S
GXEEVIMEYKFKLLVRGNDLYLMSIPETKVPAXX

SEQ ID NO: 85354 - protein, 38 aa, Artificial Sequence; identical to SEQ ID NO: 76464
  Cyclic GFR-binding peptide
  MOD_RES (1)..(3)..(34)..(35): Xaa is C or S

SEQ ID NO: 85355 - protein, 32 aa, Artificial Sequence
  Cyclic GFR-binding peptide
  MOD_RES (26)..(27): Xaa is C or S
RYKKLIVNSSDDFYLVSIANLKTPAXXPKPVH

SEQ ID NO: 85356 - protein, 42 aa, Artificial Sequence; identical to SEQ ID NO: 3064
  Cyclic GFR-binding peptide
  MOD_RES (2)..(4)..(36)..(37): Xaa is C or S

SEQ ID NO: 85357 - protein, 32 aa, Artificial Sequence
  Cyclic GFR-binding peptide
  MOD_RES (1)..(3): Xaa is C or S
XAXSEVTMNYHYKLVVNKNEDKYLISIPSMKE

SEQ ID NO: 85358 - protein, 37 aa, Artificial Sequence; identical to SEQ ID NO: 3066
  Cyclic GFR-binding peptide
  MOD_RES (32)..(33): Xaa is C or S

SEQ ID NO: 85359 - protein, 34 aa, Artificial Sequence; identical to SEQ ID NO: 3067
  Cyclic GFR-binding peptide
  MOD_RES (1)..(3): Xaa is C or S

SEQ ID NO: 85360 - protein, 34 aa, Artificial Sequence; identical to SEQ ID NO: 41359
  Cyclic GFR-binding peptide
  MOD_RES (29)..(30): Xaa is C or S

SEQ ID NO: 85361 - protein, 36 aa, Artificial Sequence; identical to SEQ ID NO: 31306
  Cyclic GFR-binding peptide
  MOD_RES (30)..(31): Xaa is C or S

SEQ ID NO: 85362 - protein, 38 aa, Artificial Sequence; identical to SEQ ID NO: 31308
  Cyclic GFR-binding peptide
  MOD_RES (2)..(4)..(37)..(38): Xaa is C or S

SEQ ID NO: 85363 - protein, 42 aa, Artificial Sequence; identical to SEQ ID NO: 3070
  Cyclic GFR-binding peptide
  MOD_RES (2)..(4)..(36)..(37): Xaa is C or S

SEQ ID NO: 85364 - protein, 34 aa, Artificial Sequence; identical to SEQ ID NO: 3071
  Cyclic GFR-binding peptide
  MOD_RES (29)..(30): Xaa is C or S

SEQ ID NO: 85365 - protein, 32 aa, Artificial Sequence; identical to SEQ ID NO: 31314
  Cyclic GFR-binding peptide
  MOD_RES (26)..(27): Xaa is C or S

SEQ ID NO: 85366 - protein, 25 aa, Artificial Sequence
  Cyclic GFR-binding peptide
VMNRYKKLIVNSSDDFYLVSIANLK

SEQ ID NO: 85367 - protein, 30 aa, Artificial Sequence; identical to SEQ ID NO: 31319
  Cyclic GFR-binding peptide
  MOD_RES (30)..(30): Xaa is C or S

SEQ ID NO: 85368 - protein, 27 aa, Artificial Sequence
  Cyclic GFR-binding peptide
GERYKKLTPVGMDDFYLVSIANLKTPV

SEQ ID NO: 85369 - protein, 36 aa, Artificial Sequence
  Cyclic GFR-binding peptide
  MOD_RES (32)..(33): Xaa is C or S
SEVTMNPIKGYVVNKNEDFYLINIPSMKEPVXXPEP

SEQ ID NO: 85370 - protein, 35 aa, Artificial Sequence; identical to SEQ ID NO: 41371
  Cyclic GFR-binding peptide
  MOD_RES (32)..(33): Xaa is C or S

SEQ ID NO: 85371 - protein, 35 aa, Artificial Sequence
  Cyclic GFR-binding peptide
  MOD_RES (2)..(4): Xaa is C or S
RXAXSEVTMNRHKRLVVNKNEDYYLISTASMKEPV

SEQ ID NO: 85372 - protein, 29 aa, Artificial Sequence
  Cyclic GFR-binding peptide
  MOD_RES (28)..(29): Xaa is C or S
IMEYKFKIKPTKGILYLISIPELDQSVXX

SEQ ID NO: 85373 - protein, 37 aa, Artificial Sequence; identical to SEQ ID NO: 76478
  Cyclic GFR-binding peptide
  MOD_RES (1)..(32)..(33): Xaa is C or S

SEQ ID NO: 85374 - protein, 36 aa, Artificial Sequence; identical to SEQ ID NO: 3080
  Cyclic GFR-binding peptide
  MOD_RES (31)..(32): Xaa is C or S

SEQ ID NO: 85375 - protein, 27 aa, Artificial Sequence
  Cyclic GFR-binding peptide
  MOD_RES (1)..(1): Xaa is C or S
XARVVMNRYKKLIVNSSDDFYLVSIAN

SEQ ID NO: 85376 - protein, 32 aa, Artificial Sequence; identical to SEQ ID NO: 31326
  Cyclic GFR-binding peptide
  MOD_RES (1)..(1): Xaa is C or S

SEQ ID NO: 85377 - protein, 31 aa, Artificial Sequence; identical to SEQ ID NO: 3082
  Cyclic GFR-binding peptide
  MOD_RES (28)..(29): Xaa is C or S

SEQ ID NO: 85378 - protein, 33 aa, Artificial Sequence; identical to SEQ ID NO: 3085
  Cyclic GFR-binding peptide
  MOD_RES (1)..(3): Xaa is C or S

SEQ ID NO: 85379 - protein, 40 aa, Artificial Sequence
  Cyclic GFR-binding peptide
  MOD_RES (1)..(3)..(34)..(35): Xaa is C or S
XKXSKVVMPIKGYVKPTRGVFYLINIPSLDQPVXXPSASA

SEQ ID NO: 85380 - protein, 34 aa, Artificial Sequence; identical to SEQ ID NO: 3086
  Cyclic GFR-binding peptide
  MOD_RES (1)..(33)..(34): Xaa is C or S

SEQ ID NO: 85381 - protein, 35 aa, Artificial Sequence; identical to SEQ ID NO: 3087
  Cyclic GFR-binding peptide
  MOD_RES (29)..(30): Xaa is C or S

SEQ ID NO: 85382 - protein, 20 aa, Artificial Sequence
  Cyclic GFR-binding peptide
PIKGYVVNKNEDFYLINIPS

SEQ ID NO: 85383 - protein, 37 aa, Artificial Sequence; identical to SEQ ID NO: 31334
  Cyclic GFR-binding peptide
  MOD_RES (32)..(33): Xaa is C or S

SEQ ID NO: 85384 - protein, 30 aa, Artificial Sequence; identical to SEQ ID NO: 31336
  Cyclic GFR-binding peptide

SEQ ID NO: 85385 - protein, 22 aa, Artificial Sequence
  Cyclic GFR-binding peptide
MPIKGYVKPKRGVFYLINIPSL

SEQ ID NO: 85386 - protein, 34 aa, Artificial Sequence; identical to SEQ ID NO: 3091
  Cyclic GFR-binding peptide
  MOD_RES (32)..(33): Xaa is C or S

SEQ ID NO: 85387 - protein, 36 aa, Artificial Sequence
  Cyclic GFR-binding peptide
  MOD_RES (32)..(33): Xaa is C or S
SEVTMNYHYKLVVNKNEDKYLISIPSMKEPVXXPEP

SEQ ID NO: 85388 - protein, 30 aa, Artificial Sequence; identical to SEQ ID NO: 41397
  Cyclic GFR-binding peptide
  MOD_RES (28)..(29): Xaa is C or S

SEQ ID NO: 85389 - protein, 30 aa, Artificial Sequence
  Cyclic GFR-binding peptide
  MOD_RES (30)..(30): Xaa is C or S
KVVMPIKGYVKPTRGVFYLINIPSLDQPVX

SEQ ID NO: 85390 - protein, 32 aa, Artificial Sequence
  Cyclic GFR-binding peptide
  MOD_RES (28)..(29): Xaa is C or S
MGRHKRLIIQQKDNYYLMSTASMKTPTXXPGA

SEQ ID NO: 85391 - protein, 40 aa, Artificial Sequence; identical to SEQ ID NO: 3094
  Cyclic GFR-binding peptide
  MOD_RES (2)..(35)..(36): Xaa is C or S

SEQ ID NO: 85392 - protein, 24 aa, Artificial Sequence
  Cyclic GFR-binding peptide
VMEPIKGYVVKDYEDFYLMNIPSL

SEQ ID NO: 85393 - protein, 27 aa, Artificial Sequence
  Cyclic GFR-binding peptide
  MOD_RES (27)..(27): Xaa is C or S
DPIKGYVVNNASDFYLINIPSLRTPVX

SEQ ID NO: 85394 - protein, 34 aa, Artificial Sequence; identical to SEQ ID NO: 31349
  Cyclic GFR-binding peptide
  MOD_RES (29)..(30): Xaa is C or S

SEQ ID NO: 85395 - protein, 30 aa, Artificial Sequence; identical to SEQ ID NO: 13637
  Cyclic GFR-binding peptide
  MOD_RES (30)..(30): Xaa is C or S

SEQ ID NO: 85396 - protein, 31 aa, Artificial Sequence; identical to SEQ ID NO: 76495
  Cyclic GFR-binding peptide
  MOD_RES (28)..(29): Xaa is C or S

SEQ ID NO: 85397 - protein, 34 aa, Artificial Sequence; identical to SEQ ID NO: 3097
  Cyclic GFR-binding peptide
  MOD_RES (2)..(33)..(34): Xaa is C or S

SEQ ID NO: 85398 - protein, 27 aa, Artificial Sequence
  Cyclic GFR-binding peptide
SEVVMDPIKGYVVNNASDFYLINIPSL

SEQ ID NO: 85399 - protein, 37 aa, Artificial Sequence; identical to SEQ ID NO: 3098
  Cyclic GFR-binding peptide
  MOD_RES (32)..(32): Xaa is C or S

SEQ ID NO: 85400 - protein, 34 aa, Artificial Sequence
  Cyclic GFR-binding peptide
  MOD_RES (2)..(4): Xaa is C or S
SXKXSKVVMPIKGYVKPTRGVFYLINIPSLDQPV

SEQ ID NO: 85401 - protein, 32 aa, Artificial Sequence; identical to SEQ ID NO: 31355
  Cyclic GFR-binding peptide
  MOD_RES (29)..(30): Xaa is C or S

SEQ ID NO: 85402 - protein, 28 aa, Artificial Sequence
  Cyclic GFR-binding peptide
VIMYHYKLIKPTKGIKYLISIPSLDQSV

SEQ ID NO: 85403 - protein, 31 aa, Artificial Sequence; identical to SEQ ID NO: 31358
  Cyclic GFR-binding peptide
  MOD_RES (1)..(3): Xaa is C or S

SEQ ID NO: 85404 - protein, 37 aa, Artificial Sequence; identical to SEQ ID NO: 41414
  Cyclic GFR-binding peptide
  MOD_RES (1)..(3)..(35)..(36): Xaa is C or S

SEQ ID NO: 85405 - protein, 28 aa, Artificial Sequence
  Cyclic GFR-binding peptide
  MOD_RES (1)..(1): Xaa is C or S
XSKVVMYHYKLVKPTRGVKYLISIPSLD

SEQ ID NO: 85406 - protein, 25 aa, Artificial Sequence
  Cyclic GFR-binding peptide
VVMNPIKGYIVNNSSDFYLVNIPSL

SEQ ID NO: 85407 - protein, 30 aa, Artificial Sequence; identical to SEQ ID NO: 41417
  Cyclic GFR-binding peptide
  MOD_RES (26)..(27): Xaa is C or S

SEQ ID NO: 85408 - protein, 30 aa, Artificial Sequence; identical to SEQ ID NO: 76501
  Cyclic GFR-binding peptide
  MOD_RES (27)..(28): Xaa is C or S

SEQ ID NO: 85409 - protein, 30 aa, Artificial Sequence; identical to SEQ ID NO: 41418
  Cyclic GFR-binding peptide
  MOD_RES (30)..(30): Xaa is C or S

SEQ ID NO: 85410 - protein, 30 aa, Artificial Sequence; identical to SEQ ID NO: 41421
  Cyclic GFR-binding peptide

SEQ ID NO: 85411 - protein, 35 aa, Artificial Sequence
  Cyclic GFR-binding peptide
  MOD_RES (30)..(31): Xaa is C or S
KVVMPIKGYVKPTRGVFYLINIPSLDQPVXXPSAS

SEQ ID NO: 85412 - protein, 24 aa, Artificial Sequence
  Cyclic GFR-binding peptide
MNYHYKLIVNSSDDKYLVSIPSLQ

SEQ ID NO: 85413 - protein, 28 aa, Artificial Sequence
  Cyclic GFR-binding peptide
VMDYHYKLVVNNASDKYLISIPSLRTPV

SEQ ID NO: 85414 - protein, 27 aa, Artificial Sequence
  Cyclic GFR-binding peptide
VVMNEYKFKIVNNSSDLYLVSIPELKT

SEQ ID NO: 85415 - protein, 36 aa, Artificial Sequence; identical to SEQ ID NO: 31367
  Cyclic GFR-binding peptide
  MOD_RES (2)..(4)..(36): Xaa is C or S

SEQ ID NO: 85416 - protein, 30 aa, Artificial Sequence
  Cyclic GFR-binding peptide
  MOD_RES (29)..(30): Xaa is C or S
VMGYHYKLIIQQKDNKYLMSIPSMKTPTXX

SEQ ID NO: 85417 - protein, 30 aa, Artificial Sequence; identical to SEQ ID NO: 31373
  Cyclic GFR-binding peptide
  MOD_RES (28)..(29): Xaa is C or S

SEQ ID NO: 85418 - protein, 42 aa, Artificial Sequence
  Cyclic GFR-binding peptide
  MOD_RES (2)..(4)..(36)..(37): Xaa is C or S
RXAXSEVTMNRHKRLVVNKNEDYYLISTASMKEPVXXPEPIG

SEQ ID NO: 85419 - protein, 30 aa, Artificial Sequence
  Cyclic GFR-binding peptide
SVAMGRHKRLYTVVGKDYYLISTASLKTPV

SEQ ID NO: 85420 - protein, 29 aa, Artificial Sequence
  Cyclic GFR-binding peptide
  MOD_RES (27)..(28): Xaa is C or S
MEYKFKLLVRGNDLYLMSIPETKVPAXXT

SEQ ID NO: 85421 - protein, 32 aa, Artificial Sequence; identical to SEQ ID NO: 3122
  Cyclic GFR-binding peptide
  MOD_RES (31)..(32): Xaa is C or S

SEQ ID NO: 85422 - protein, 34 aa, Artificial Sequence; identical to SEQ ID NO: 41434
  Cyclic GFR-binding peptide
  MOD_RES (32)..(32): Xaa is C or S

SEQ ID NO: 85423 - protein, 33 aa, Artificial Sequence; identical to SEQ ID NO: 3124
  Cyclic GFR-binding peptide
  MOD_RES (1)..(32)..(33): Xaa is C or S

SEQ ID NO: 85424 - protein, 20 aa, Artificial Sequence
  Cyclic GFR-binding peptide
RYKKLIVNNSSDFYLVSIAN

SEQ ID NO: 85425 - protein, 32 aa, Artificial Sequence; identical to SEQ ID NO: 31384
  Cyclic GFR-binding peptide
  MOD_RES (2)..(2): Xaa is C or S

SEQ ID NO: 85426 - protein, 24 aa, Artificial Sequence
  Cyclic GFR-binding peptide
GRHKRLIIQQKDNYYLMSTASMKT

SEQ ID NO: 85427 - protein, 27 aa, Artificial Sequence
  Cyclic GFR-binding peptide
MNYHYKLIVNSSDDKYLVSIPSLQTPA

SEQ ID NO: 85428 - protein, 30 aa, Artificial Sequence; identical to SEQ ID NO: 3130
  Cyclic GFR-binding peptide
  MOD_RES (27)..(28): Xaa is C or S

SEQ ID NO: 85429 - protein, 32 aa, Artificial Sequence
  Cyclic GFR-binding peptide
  MOD_RES (2)..(4): Xaa is C or S
RXGXSEVVMDEYKFKVVNNASDLYLISIPELR

SEQ ID NO: 85430 - protein, 25 aa, Artificial Sequence
  Cyclic GFR-binding peptide
MYHYKLIKPTKGIKYLISIPSLDQS

SEQ ID NO: 85431 - protein, 27 aa, Artificial Sequence
  Cyclic GFR-binding peptide
VVMEYHYKLVVKDYEDKYLMSIPSLET

SEQ ID NO: 85432 - protein, 23 aa, Artificial Sequence
  Cyclic GFR-binding peptide
MNRYKKLIVNNSSDFYLVSIANL

SEQ ID NO: 85433 - protein, 30 aa, Artificial Sequence; identical to SEQ ID NO: 3138
  Cyclic GFR-binding peptide
  MOD_RES (1)..(3): Xaa is C or S

SEQ ID NO: 85434 - protein, 23 aa, Artificial Sequence
  Cyclic GFR-binding peptide
MNRYKKLVVNKNEDFYLISIANM

SEQ ID NO: 85435 - protein, 27 aa, Artificial Sequence
  Cyclic GFR-binding peptide
  MOD_RES (1)..(1): Xaa is C or S
XARVVMNYHYKLIVNSSDDKYLVSIPS

SEQ ID NO: 85436 - protein, 34 aa, Artificial Sequence
  Cyclic GFR-binding peptide
  MOD_RES (29)..(30): Xaa is C or S
TMNRYKKLVVNKNEDFYLISIANMKEPVXXPEPI

SEQ ID NO: 85437 - protein, 31 aa, Artificial Sequence
  Cyclic GFR-binding peptide
  MOD_RES (1)..(1): Xaa is C or S
XESVAMGRHKRLYTVVGKDYYLISTASLKTP

SEQ ID NO: 85438 - protein, 33 aa, Artificial Sequence; identical to SEQ ID NO: 3140
  Cyclic GFR-binding peptide
  MOD_RES (32)..(33): Xaa is C or S

SEQ ID NO: 85439 - protein, 32 aa, Artificial Sequence
  Cyclic GFR-binding peptide
  MOD_RES (2)..(2): Xaa is C or S
GXSEVVMDEYKFKVVNNASDLYLISIPELRTP

SEQ ID NO: 85440 - protein, 33 aa, Artificial Sequence; identical to SEQ ID NO: 31399
  Cyclic GFR-binding peptide
  MOD_RES (29)..(30): Xaa is C or S

SEQ ID NO: 85441 - protein, 34 aa, Artificial Sequence; identical to SEQ ID NO: 3145
  Cyclic GFR-binding peptide
  MOD_RES (28)..(28): Xaa is C or S

SEQ ID NO: 85442 - protein, 28 aa, Artificial Sequence
  Cyclic GFR-binding peptide
EVVMDRHKRLVVNNAADYYLISTASLRA

SEQ ID NO: 85443 - protein, 31 aa, Artificial Sequence; identical to SEQ ID NO: 3146
  Cyclic GFR-binding peptide
  MOD_RES (2)..(4): Xaa is C or S

SEQ ID NO: 85444 - protein, 20 aa, Artificial Sequence
  Cyclic GFR-binding peptide
RYKKLIIQQKDNFYLMSIAN

SEQ ID NO: 85445 - protein, 34 aa, Artificial Sequence
  Cyclic GFR-binding peptide
  MOD_RES (31)..(32): Xaa is C or S
SRVIMPIKGYVKPKRGVFYLINIPSLAQPVXXPA

SEQ ID NO: 85446 - protein, 34 aa, Artificial Sequence; identical to SEQ ID NO: 3148
  Cyclic GFR-binding peptide
  MOD_RES (31)..(32): Xaa is C or S

SEQ ID NO: 85447 - protein, 33 aa, Artificial Sequence
  Cyclic GFR-binding peptide
  MOD_RES (2)..(4): Xaa is C or S
SXGXRDVVMGEYKFKIIQQKDNLYLMSIPEMKT

SEQ ID NO: 85448 - protein, 35 aa, Artificial Sequence; identical to SEQ ID NO: 41459
  Cyclic GFR-binding peptide
  MOD_RES (1)..(33)..(34): Xaa is C or S

SEQ ID NO: 85449 - protein, 28 aa, Artificial Sequence
  Cyclic GFR-binding peptide
  MOD_RES (28)..(28): Xaa is C or S
MNYHYKLIVNSSDDKYLVSIPSLKTPAX

SEQ ID NO: 85450 - protein, 41 aa, Artificial Sequence; identical to SEQ ID NO: 3155
  Cyclic GFR-binding peptide
  MOD_RES (1)..(3)..(35)..(36): Xaa is C or S

SEQ ID NO: 85451 - protein, 34 aa, Artificial Sequence; identical to SEQ ID NO: 3156
  Cyclic GFR-binding peptide
  MOD_RES (2)..(4): Xaa is C or S

SEQ ID NO: 85452 - protein, 34 aa, Artificial Sequence; identical to SEQ ID NO: 41463
  Cyclic GFR-binding peptide
  MOD_RES (1)..(33)..(34): Xaa is C or S

SEQ ID NO: 85453 - protein, 30 aa, Artificial Sequence
  Cyclic GFR-binding peptide
  MOD_RES (28)..(29): Xaa is C or S
MNRHKRLVVNKNEDYYLISTASMKEPVXXP

SEQ ID NO: 85454 - protein, 35 aa, Artificial Sequence
  Cyclic GFR-binding peptide
  MOD_RES (32)..(33): Xaa is C or S
SEVTMNYHYKLVVNKNEDKYLISIPSMKEPVXXPE

SEQ ID NO: 85455 - protein, 38 aa, Artificial Sequence; identical to SEQ ID NO: 3157
  Cyclic GFR-binding peptide
  MOD_RES (2)..(4)..(36): Xaa is C or S

SEQ ID NO: 85456 - protein, 28 aa, Artificial Sequence
  Cyclic GFR-binding peptide
SRVVMNEYKFKIVNSSDDLYLVSIPELK

SEQ ID NO: 85457 - protein, 28 aa, Artificial Sequence
  Cyclic GFR-binding peptide
SRVIMYHYKLVKPKRGVKYLISIPSLAQ

SEQ ID NO: 85458 - protein, 26 aa, Artificial Sequence
  Cyclic GFR-binding peptide
NYHYKLIVNSSDDKYLVSIPSLKTPA

SEQ ID NO: 85459 - protein, 34 aa, Artificial Sequence
  Cyclic GFR-binding peptide
  MOD_RES (32)..(33): Xaa is C or S
SEVTMNRYKKLVVNKNEDFYLISIANMKEPVXXP

SEQ ID NO: 85460 - protein, 26 aa, Artificial Sequence
  Cyclic GFR-binding peptide
  MOD_RES (26)..(26): Xaa is C or S
RHKRLVVKDYEDYYLMSTASLETPVX

SEQ ID NO: 85461 - protein, 25 aa, Artificial Sequence
  Cyclic GFR-binding peptide
RVVMNPIKGYIVNSSDDFYLVNIPS

SEQ ID NO: 85462 - protein, 29 aa, Artificial Sequence
  Cyclic GFR-binding peptide
SRVIMPIKGYVKPKRGVFYLINIPSLAQP

SEQ ID NO: 85463 - protein, 32 aa, Artificial Sequence; identical to SEQ ID NO: 31423
  Cyclic GFR-binding peptide
  MOD_RES (2)..(2): Xaa is C or S

SEQ ID NO: 85464 - protein, 32 aa, Artificial Sequence
  Cyclic GFR-binding peptide
  MOD_RES (1)..(3): Xaa is C or S
XGXEEVIMEYKFKLLVRGNDLYLMSIPETKVP

SEQ ID NO: 85465 - protein, 25 aa, Artificial Sequence
  Cyclic GFR-binding peptide
VMDPIKGYVVKENEDFYLMNIPSLE

SEQ ID NO: 85466 - protein, 25 aa, Artificial Sequence
  Cyclic GFR-binding peptide
RHKRLVKPTRGVYYLISTASLDQPV

SEQ ID NO: 85467 - protein, 34 aa, Artificial Sequence; identical to SEQ ID NO: 3171
  Cyclic GFR-binding peptide
  MOD_RES (28)..(29): Xaa is C or S

SEQ ID NO: 85468 - protein, 36 aa, Artificial Sequence
  Cyclic GFR-binding peptide
  MOD_RES (1)..(3)..(34)..(35): Xaa is C or S
XKXSKVVMPIKGYVKPTRGVFYLINIPSLDQPVXXP

SEQ ID NO: 85469 - protein, 39 aa, Artificial Sequence; identical to SEQ ID NO: 41485
  Cyclic GFR-binding peptide
  MOD_RES (2)..(4)..(36)..(37): Xaa is C or S

SEQ ID NO: 85470 - protein, 33 aa, Artificial Sequence; identical to SEQ ID NO: 3175
  Cyclic GFR-binding peptide
  MOD_RES (27)..(28): Xaa is C or S

SEQ ID NO: 85471 - protein, 34 aa, Artificial Sequence
  Cyclic GFR-binding peptide
  MOD_RES (2)..(4): Xaa is C or S
RXGXSEVVMDYHYKLVVNNASDKYLISIPSLRTP

SEQ ID NO: 85472 - protein, 24 aa, Artificial Sequence
  Cyclic GFR-binding peptide
NEYKFKIVNSSDDLYLVSIPELQT

SEQ ID NO: 85473 - protein, 29 aa, Artificial Sequence
  Cyclic GFR-binding peptide
  MOD_RES (28)..(29): Xaa is C or S
MDYHYKLVVNNASDKYLISIPSLRTPVXX

SEQ ID NO: 85474 - protein, 38 aa, Artificial Sequence; identical to SEQ ID NO: 3176
  Cyclic GFR-binding peptide
  MOD_RES (2)..(34): Xaa is C or S

SEQ ID NO: 85475 - protein, 32 aa, Artificial Sequence; identical to SEQ ID NO: 31436
  Cyclic GFR-binding peptide
  MOD_RES (29)..(30): Xaa is C or S

SEQ ID NO: 85476 - protein, 26 aa, Artificial Sequence
  Cyclic GFR-binding peptide
VMGRHKRLIIQQKDNYYLMSTASMKT

SEQ ID NO: 85477 - protein, 26 aa, Artificial Sequence
  Cyclic GFR-binding peptide
ERHKRLVVKDYEDYYLMSTASLETPV

SEQ ID NO: 85478 - protein, 29 aa, Artificial Sequence
  Cyclic GFR-binding peptide
  MOD_RES (1)..(1): Xaa is C or S
XSRVVMNEYKFKIVNSSDDLYLVSIPELK

SEQ ID NO: 85479 - protein, 29 aa, Artificial Sequence
  Cyclic GFR-binding peptide
  MOD_RES (2)..(4): Xaa is C or S
SXKXSKVIMRYKKLIKPTKGIFYLISIAN

SEQ ID NO: 85480 - protein, 23 aa, Artificial Sequence
  Cyclic GFR-binding peptide
MEYHYKLVVKDYEDKYLMSIPSL

SEQ ID NO: 85481 - protein, 21 aa, Artificial Sequence
  Cyclic GFR-binding peptide
NEYKFKIVNSSDDLYLVSIPE

SEQ ID NO: 85482 - protein, 28 aa, Artificial Sequence
  Cyclic GFR-binding peptide
  MOD_RES (1)..(1): Xaa is C or S
XAKVVMNPIKGYIVNNSSDFYLVNIPSL

SEQ ID NO: 85483 - protein, 32 aa, Artificial Sequence; identical to SEQ ID NO: 3183
  Cyclic GFR-binding peptide
  MOD_RES (30)..(31): Xaa is C or S

SEQ ID NO: 85484 - protein, 36 aa, Artificial Sequence; identical to SEQ ID NO: 3184
  Cyclic GFR-binding peptide
  MOD_RES (1)..(3)..(34)..(35): Xaa is C or S

SEQ ID NO: 85485 - protein, 39 aa, Artificial Sequence; identical to SEQ ID NO: 76549
  Cyclic GFR-binding peptide
  MOD_RES (2)..(34)..(35): Xaa is C or S

SEQ ID NO: 85486 - protein, 27 aa, Artificial Sequence
  Cyclic GFR-binding peptide
IMEYKFKIKPTKGILYLISIPELDQSV

SEQ ID NO: 85487 - protein, 29 aa, Artificial Sequence
  Cyclic GFR-binding peptide
  MOD_RES (1)..(1): Xaa is C or S
XESVAMGRYKKLYTVVGKDFYLISIANLK

SEQ ID NO: 85488 - protein, 26 aa, Artificial Sequence
  Cyclic GFR-binding peptide
MNYHYKLVVNKNEDKYLISIPSMKEP

SEQ ID NO: 85489 - protein, 29 aa, Artificial Sequence
  Cyclic GFR-binding peptide
  MOD_RES (26)..(27): Xaa is C or S
PIKGYVVNKNEDFYLINIPSMKEPVXXPE

SEQ ID NO: 85490 - protein, 34 aa, Artificial Sequence; identical to SEQ ID NO: 31455
  Cyclic GFR-binding peptide
  MOD_RES (29)..(30): Xaa is C or S

SEQ ID NO: 85491 - protein, 27 aa, Artificial Sequence
  Cyclic GFR-binding peptide
MGRHKRLIIQQKDNYYLMSTASMKTPT

SEQ ID NO: 85492 - protein, 29 aa, Artificial Sequence
  Cyclic GFR-binding peptide
  MOD_RES (1)..(1): Xaa is C or S
XESVAMGYHYKLYTVVGKDKYLISIPSLK

SEQ ID NO: 85493 - protein, 36 aa, Artificial Sequence
  Cyclic GFR-binding peptide
  MOD_RES (1)..(3)..(34)..(35): Xaa is C or S
XGXEEVIMEYKFKLLVRGNDLYLMSIPETKVPAXXT

SEQ ID NO: 85494 - protein, 28 aa, Artificial Sequence
  Cyclic GFR-binding peptide
  MOD_RES (2)..(2): Xaa is C or S
GXSEVVMDYHYKLVVNNASDKYLISIPS

SEQ ID NO: 85495 - protein, 38 aa, Artificial Sequence; identical to SEQ ID NO: 3198
  Cyclic GFR-binding peptide
  MOD_RES (2)..(4)..(35)..(36): Xaa is C or S

SEQ ID NO: 85496 - protein, 41 aa, Artificial Sequence; identical to SEQ ID NO: 31467
  Cyclic GFR-binding peptide
  MOD_RES (2)..(4)..(36): Xaa is C or S

SEQ ID NO: 85497 - protein, 35 aa, Artificial Sequence; identical to SEQ ID NO: 76562
  Cyclic GFR-binding peptide
  MOD_RES (1)..(33)..(34): Xaa is C or S

SEQ ID NO: 85498 - protein, 30 aa, Artificial Sequence
  Cyclic GFR-binding peptide
  MOD_RES (27)..(28): Xaa is C or S
MEYKFKLLVRGNDLYLMSIPETKVPAXXTS

SEQ ID NO: 85499 - protein, 26 aa, Artificial Sequence
  Cyclic GFR-binding peptide
  MOD_RES (1)..(1): Xaa is C or S
XSRVIMYHYKLVKPKRGVKYLISIPS

SEQ ID NO: 85500 - protein, 34 aa, Artificial Sequence
  Cyclic GFR-binding peptide
  MOD_RES (29)..(30): Xaa is C or S
VMGRHKRLIIQQKDNYYLMSTASMKTPTXXPGAS

SEQ ID NO: 85501 - protein, 31 aa, Artificial Sequence; identical to SEQ ID NO: 3203
  Cyclic GFR-binding peptide
  MOD_RES (28)..(28): Xaa is C or S

SEQ ID NO: 85502 - protein, 32 aa, Artificial Sequence
  Cyclic GFR-binding peptide
  MOD_RES (30)..(31): Xaa is C or S
VVMDRHKRLVVNNASDYYLISTASLRTPVXXT

SEQ ID NO: 85503 - protein, 29 aa, Artificial Sequence
  Cyclic GFR-binding peptide
  MOD_RES (2)..(2): Xaa is C or S
GXESVAMGRYKKLYTVVGKDFYLISIANL

SEQ ID NO: 85504 - protein, 28 aa, Artificial Sequence
  Cyclic GFR-binding peptide
RDVVMGYHYKLIIQQKDNKYLMSIPSMK

SEQ ID NO: 85505 - protein, 35 aa, Artificial Sequence
  Cyclic GFR-binding peptide
  MOD_RES (2)..(4)..(35): Xaa is C or S
LXGXEEVIMYHYKLLLVRGNDKYLMSIPSTKVPAX

SEQ ID NO: 85506 - protein, 31 aa, Artificial Sequence; identical to SEQ ID NO: 31476
  Cyclic GFR-binding peptide
  MOD_RES (1)..(3): Xaa is C or S

SEQ ID NO: 85507 - protein, 31 aa, Artificial Sequence
  Cyclic GFR-binding peptide
  MOD_RES (28)..(29): Xaa is C or S
MNYHYKLVVNKNEDKYLISIPSMKEPVXXPE

SEQ ID NO: 85508 - protein, 34 aa, Artificial Sequence
  Cyclic GFR-binding peptide
  MOD_RES (1)..(33)..(34): Xaa is C or S
XSEVTMNRHKRLVVNKNEDYYLISTASMKEPVXX

SEQ ID NO: 85509 - protein, 30 aa, Artificial Sequence; identical to SEQ ID NO: 3213
  Cyclic GFR-binding peptide
  MOD_RES (1)..(1): Xaa is C or S

SEQ ID NO: 85510 - protein, 38 aa, Artificial Sequence; identical to SEQ ID NO: 3214
  Cyclic GFR-binding peptide
  MOD_RES (1)..(3)..(34)..(35): Xaa is C or S

SEQ ID NO: 85511 - protein, 41 aa, Artificial Sequence; identical to SEQ ID NO: 3215
  Cyclic GFR-binding peptide
  MOD_RES (2)..(4)..(35)..(36): Xaa is C or S

SEQ ID NO: 85512 - protein, 30 aa, Artificial Sequence; identical to SEQ ID NO: 3216
  Cyclic GFR-binding peptide
  MOD_RES (1)..(3): Xaa is C or S

SEQ ID NO: 85513 - protein, 29 aa, Artificial Sequence
  Cyclic GFR-binding peptide
GEVVMEYHYKLVVKDYEDKYLMSIPSLET

SEQ ID NO: 85514 - protein, 31 aa, Artificial Sequence
  Cyclic GFR-binding peptide
  MOD_RES (1)..(1): Xaa is C or S
XEEVIMYHYKLLLVRGNDKYLMSIPSTKVPA

SEQ ID NO: 85515 - protein, 22 aa, Artificial Sequence
  Cyclic GFR-binding peptide
IMRYKKLLLVRGNDFYLMSIAN

SEQ ID NO: 85516 - protein, 39 aa, Artificial Sequence; identical to SEQ ID NO: 31485
  Cyclic GFR-binding peptide
  MOD_RES (1)..(3)..(36)..(37): Xaa is C or S

SEQ ID NO: 85517 - protein, 31 aa, Artificial Sequence; identical to SEQ ID NO: 31486
  Cyclic GFR-binding peptide
  MOD_RES (26)..(27): Xaa is C or S

SEQ ID NO: 85518 - protein, 25 aa, Artificial Sequence
  Cyclic GFR-binding peptide
DPIKGYVVNNAADFYLINIPSLRAP

SEQ ID NO: 85519 - protein, 28 aa, Artificial Sequence
  Cyclic GFR-binding peptide
  MOD_RES (28)..(28): Xaa is C or S
VMEYKFKVKPTRGVLYLISIPELDQPVX

SEQ ID NO: 85520 - protein, 32 aa, Artificial Sequence; identical to SEQ ID NO: 31489
  Cyclic GFR-binding peptide
  MOD_RES (2)..(4): Xaa is C or S

SEQ ID NO: 85521 - protein, 30 aa, Artificial Sequence; identical to SEQ ID NO: 31490
  Cyclic GFR-binding peptide
  MOD_RES (28)..(29): Xaa is C or S

SEQ ID NO: 85522 - protein, 42 aa, Artificial Sequence; identical to SEQ ID NO: 41535
  Cyclic GFR-binding peptide
  MOD_RES (2)..(4)..(36)..(37): Xaa is C or S

SEQ ID NO: 85523 - protein, 26 aa, Artificial Sequence
  Cyclic GFR-binding peptide
NEYKFKVVNKNEDLYLISIPEMKEPV

SEQ ID NO: 85524 - protein, 36 aa, Artificial Sequence; identical to SEQ ID NO: 3224
  Cyclic GFR-binding peptide
  MOD_RES (1)..(32)..(33): Xaa is C or S

SEQ ID NO: 85525 - protein, 42 aa, Artificial Sequence; identical to SEQ ID NO: 3225
  Cyclic GFR-binding peptide
  MOD_RES (1)..(3)..(36)..(37): Xaa is C or S

SEQ ID NO: 85526 - protein, 35 aa, Artificial Sequence; identical to SEQ ID NO: 41538
  Cyclic GFR-binding peptide
  MOD_RES (1)..(3)..(35): Xaa is C or S

SEQ ID NO: 85527 - protein, 29 aa, Artificial Sequence
  Cyclic GFR-binding peptide
  MOD_RES (1)..(3): Xaa is C or S
XGXGEVVMDRHKRLVVKENEDYYLMSTAS

SEQ ID NO: 85528 - protein, 21 aa, Artificial Sequence
  Cyclic GFR-binding peptide
DYHYKLVVKENEDKYLMSIPS

SEQ ID NO: 85529 - protein, 26 aa, Artificial Sequence
  Cyclic GFR-binding peptide
VMEPIKGYVVKDYEDFYLMNIPSLET

SEQ ID NO: 85530 - protein, 30 aa, Artificial Sequence; identical to SEQ ID NO: 31497
  Cyclic GFR-binding peptide
  MOD_RES (2)..(2): Xaa is C or S

SEQ ID NO: 85531 - protein, 27 aa, Artificial Sequence
  Cyclic GFR-binding peptide
  MOD_RES (26)..(27): Xaa is C or S
EYKFKVVKDYEDLYLMSIPELETPVXX

SEQ ID NO: 85532 - protein, 31 aa, Artificial Sequence
  Cyclic GFR-binding peptide
  MOD_RES (2)..(4): Xaa is C or S
LXGXEEVIMRHKRLLLVRGNDYYLMSTASTK

SEQ ID NO: 85533 - protein, 38 aa, Artificial Sequence
  Cyclic GFR-binding peptide
  MOD_RES (1)..(3)..(35)..(36): Xaa is C or S
XAXSEVTMNRYKKLVVNKNEDFYLISIANMKEPVXXPE

SEQ ID NO: 85534 - protein, 33 aa, Artificial Sequence; identical to SEQ ID NO: 3233
  Cyclic GFR-binding peptide
  MOD_RES (1)..(3): Xaa is C or S

SEQ ID NO: 85535 - protein, 31 aa, Artificial Sequence
  Cyclic GFR-binding peptide
  MOD_RES (27)..(28): Xaa is C or S
NPIKGYVVNKNEDFYLINIPSMKEPVXXPEP

SEQ ID NO: 85536 - protein, 32 aa, Artificial Sequence; identical to SEQ ID NO: 41547
  Cyclic GFR-binding peptide
  MOD_RES (1)..(1): Xaa is C or S

SEQ ID NO: 85537 - protein, 33 aa, Artificial Sequence; identical to SEQ ID NO: 41548
  Cyclic GFR-binding peptide
  MOD_RES (2)..(2): Xaa is C or S

SEQ ID NO: 85538 - protein, 27 aa, Artificial Sequence
  Cyclic GFR-binding peptide
MDEYKFKVVKENEDLYLMSIPELETPV

SEQ ID NO: 85539 - protein, 26 aa, Artificial Sequence
  Cyclic GFR-binding peptide
MERYKKLVVKDYEDFYLMSIANLETP

SEQ ID NO: 85540 - protein, 28 aa, Artificial Sequence
  Cyclic GFR-binding peptide
VIMRYKKLVKPKRGVFYLISIANLAQPV

SEQ ID NO: 85541 - protein, 34 aa, Artificial Sequence; identical to SEQ ID NO: 31515
  Cyclic GFR-binding peptide
  MOD_RES (29)..(30): Xaa is C or S

SEQ ID NO: 85542 - protein, 36 aa, Artificial Sequence; identical to SEQ ID NO: 31516
  Cyclic GFR-binding peptide
  MOD_RES (1)..(3)..(36): Xaa is C or S

SEQ ID NO: 85543 - protein, 29 aa, Artificial Sequence
  Cyclic GFR-binding peptide
  MOD_RES (28)..(29): Xaa is C or S
MNRYKKLVVNKNEDFYLISIANMKEPVXX

SEQ ID NO: 85544 - protein, 29 aa, Artificial Sequence
  Cyclic GFR-binding peptide
  MOD_RES (29)..(29): Xaa is C or S
VMDYHYKLVVNNAADKYLISIPSLRAPVX

SEQ ID NO: 85545 - protein, 36 aa, Artificial Sequence
  Cyclic GFR-binding peptide
  MOD_RES (2)..(4)..(36): Xaa is C or S
RXAXSEVTMNRYKKLVVNKNEDFYLISIANMKEPVX

SEQ ID NO: 85546 - protein, 36 aa, Artificial Sequence
  Cyclic GFR-binding peptide
  MOD_RES (30)..(31): Xaa is C or S
VVMDYHYKLVVNNASDKYLISIPSLRTPVXXTPPTS

SEQ ID NO: 85547 - protein, 30 aa, Artificial Sequence; identical to SEQ ID NO: 3250
  Cyclic GFR-binding peptide
  MOD_RES (1)..(3): Xaa is C or S

SEQ ID NO: 85548 - protein, 24 aa, Artificial Sequence
  Cyclic GFR-binding peptide
RYKKLVVNNASDFYLISIANLRTP

SEQ ID NO: 85549 - protein, 34 aa, Artificial Sequence; identical to SEQ ID NO: 31522
  Cyclic GFR-binding peptide
  MOD_RES (28)..(29): Xaa is C or S

SEQ ID NO: 85550 - protein, 28 aa, Artificial Sequence
  Cyclic GFR-binding peptide
  MOD_RES (2)..(2): Xaa is C or S
AXSEVTMNRYKKLVVNKNEDFYLISIAN

SEQ ID NO: 85551 - protein, 23 aa, Artificial Sequence
  Cyclic GFR-binding peptide
NRYKKLIVNNSSDFYLVSIANLK

SEQ ID NO: 85552 - protein, 29 aa, Artificial Sequence
  Cyclic GFR-binding peptide
SEVVMDYHYKLVVNNASDKYLISIPSLRT

SEQ ID NO: 85553 - protein, 36 aa, Artificial Sequence; identical to SEQ ID NO: 31524
  Cyclic GFR-binding peptide
  MOD_RES (31)..(32): Xaa is C or S

SEQ ID NO: 85554 - protein, 31 aa, Artificial Sequence; identical to SEQ ID NO: 3254
  Cyclic GFR-binding peptide
  MOD_RES (1)..(3): Xaa is C or S

SEQ ID NO: 85555 - protein, 32 aa, Artificial Sequence
  Cyclic GFR-binding peptide
  MOD_RES (32)..(32): Xaa is C or S
RDVVMGYHYKLIIQQKDNKYLMSIPSMKTPTX

SEQ ID NO: 85556 - protein, 29 aa, Artificial Sequence
  Cyclic GFR-binding peptide
  MOD_RES (27)..(28): Xaa is C or S
GYHYKLYTVVGKDKYLISIPSLKTPVXXA

SEQ ID NO: 85557 - protein, 33 aa, Artificial Sequence; identical to SEQ ID NO: 3255
  Cyclic GFR-binding peptide
  MOD_RES (1)..(3): Xaa is C or S

SEQ ID NO: 85558 - protein, 34 aa, Artificial Sequence; identical to SEQ ID NO: 3257
  Cyclic GFR-binding peptide
  MOD_RES (2)..(34): Xaa is C or S

SEQ ID NO: 85559 - protein, 32 aa, Artificial Sequence
  Cyclic GFR-binding peptide
  MOD_RES (32)..(32): Xaa is C or S
SEVTMNYHYKLVVNKNEDKYLISIPSMKEPVX

SEQ ID NO: 85560 - protein, 29 aa, Artificial Sequence
  Cyclic GFR-binding peptide
  MOD_RES (29)..(29): Xaa is C or S
VMDYHYKLVVKENEDKYLMSIPSLETPVX

SEQ ID NO: 85561 - protein, 33 aa, Artificial Sequence; identical to SEQ ID NO: 41581
  Cyclic GFR-binding peptide
  MOD_RES (2)..(4): Xaa is C or S

SEQ ID NO: 85562 - protein, 37 aa, Artificial Sequence
  Cyclic GFR-binding peptide
  MOD_RES (31)..(32): Xaa is C or S
EVTMNRHKRLVVNKNEDYYLISTASMKEPVXXPEPIG

SEQ ID NO: 85563 - protein, 22 aa, Artificial Sequence
  Cyclic GFR-binding peptide
MEEYKFKVVKDYEDLYLMSIPE

SEQ ID NO: 85564 - protein, 26 aa, Artificial Sequence
  Cyclic GFR-binding peptide
TMNYHYKLVVNKNEDKYLISIPSMKE

SEQ ID NO: 85565 - protein, 35 aa, Artificial Sequence
  Cyclic GFR-binding peptide
  MOD_RES (1)..(3)..(35): Xaa is C or S
XGXRDVVMGYHYKLIIQQKDNKYLMSIPSMKTPTX

SEQ ID NO: 85566 - protein, 39 aa, Artificial Sequence
  Cyclic GFR-binding peptide
  MOD_RES (1)..(3)..(35)..(36): Xaa is C or S
XAXSEVTMNRYKKLVVNKNEDFYLISIANMKEPVXXPEP

SEQ ID NO: 85567 - protein, 33 aa, Artificial Sequence; identical to SEQ ID NO: 3272
  Cyclic GFR-binding peptide
  MOD_RES (1)..(32)..(33): Xaa is C or S

SEQ ID NO: 85568 - protein, 28 aa, Artificial Sequence
  Cyclic GFR-binding peptide
  MOD_RES (2)..(2): Xaa is C or S
KXSKVIMPIKGYIKPTKGIFYLINIPSL

SEQ ID NO: 85569 - protein, 34 aa, Artificial Sequence
  Cyclic GFR-binding peptide
  MOD_RES (1)..(33)..(34): Xaa is C or S
XSEVTMNEYKFKVVNKNEDLYLISIPEMKEPVXX

SEQ ID NO: 85570 - protein, 29 aa, Artificial Sequence
  Cyclic GFR-binding peptide
  MOD_RES (26)..(27): Xaa is C or S
RHKRLTPVGMDDYYLVSTASLKTPVXXAK

SEQ ID NO: 85571 - protein, 33 aa, Artificial Sequence
  Cyclic GFR-binding peptide
  MOD_RES (31)..(32): Xaa is C or S
DVVMGEYKFKIIQQKDNLYLMSIPEMKTPTXXP

SEQ ID NO: 85572 - protein, 23 aa, Artificial Sequence
  Cyclic GFR-binding peptide
MDEYKFKVVKENEDLYLMSIPEL

SEQ ID NO: 85573 - protein, 31 aa, Artificial Sequence; identical to SEQ ID NO: 41607
  Cyclic GFR-binding peptide
  MOD_RES (2)..(4): Xaa is C or S

SEQ ID NO: 85574 - protein, 27 aa, Artificial Sequence
  Cyclic GFR-binding peptide
IMEYKFKLLVRGNDLYLMSIPETKVPA

SEQ ID NO: 85575 - protein, 33 aa, Artificial Sequence
  Cyclic GFR-binding peptide
  MOD_RES (27)..(28): Xaa is C or S
GRHKRLIIQQKDNYYLMSTASMKTPTXXPGASG

SEQ ID NO: 85576 - protein, 32 aa, Artificial Sequence; identical to SEQ ID NO: 3280
  Cyclic GFR-binding peptide
  MOD_RES (2)..(4): Xaa is C or S

SEQ ID NO: 85577 - protein, 32 aa, Artificial Sequence; identical to SEQ ID NO: 3282
  Cyclic GFR-binding peptide
  MOD_RES (27)..(28): Xaa is C or S

SEQ ID NO: 85578 - protein, 26 aa, Artificial Sequence
  Cyclic GFR-binding peptide
MGEYKFKIIQQKDNLYLMSIPEMKTP

SEQ ID NO: 85579 - protein, 28 aa, Artificial Sequence
  Cyclic GFR-binding peptide
  MOD_RES (27)..(28): Xaa is C or S
NRHKRLIVNSSDDYYLVSTASLQTPAXX

SEQ ID NO: 85580 - protein, 30 aa, Artificial Sequence; identical to SEQ ID NO: 41620
  Cyclic GFR-binding peptide
  MOD_RES (29)..(30): Xaa is C or S

SEQ ID NO: 85581 - protein, 24 aa, Artificial Sequence
  Cyclic GFR-binding peptide
MNPIKGYVVNKNEDFYLINIPSMK

SEQ ID NO: 85582 - protein, 22 aa, Artificial Sequence
  Cyclic GFR-binding peptide
YHYKLVVKENEDKYLMSIPSLE

SEQ ID NO: 85583 - protein, 35 aa, Artificial Sequence; identical to SEQ ID NO: 3299
  Cyclic GFR-binding peptide
  MOD_RES (32)..(33): Xaa is C or S

SEQ ID NO: 85584 - protein, 29 aa, Artificial Sequence
  Cyclic GFR-binding peptide
VVMDPIKGYVVKENEDFYLMNIPSLETPV

SEQ ID NO: 85585 - protein, 31 aa, Artificial Sequence; identical to SEQ ID NO: 31571
  Cyclic GFR-binding peptide
  MOD_RES (27)..(28): Xaa is C or S

SEQ ID NO: 85586 - protein, 30 aa, Artificial Sequence; identical to SEQ ID NO: 3303
  Cyclic GFR-binding peptide
  MOD_RES (2)..(2): Xaa is C or S

SEQ ID NO: 85587 - protein, 40 aa, Artificial Sequence
  Cyclic GFR-binding peptide
  MOD_RES (1)..(3)..(35)..(36): Xaa is C or S
XGXRDVVMGRHKRLIIQQKDNYYLMSTASMKTPTXXPGAS

SEQ ID NO: 85588 - protein, 31 aa, Artificial Sequence; identical to SEQ ID NO: 3308
  Cyclic GFR-binding peptide
  MOD_RES (28)..(29): Xaa is C or S

SEQ ID NO: 85589 - protein, 32 aa, Artificial Sequence
  Cyclic GFR-binding peptide
  MOD_RES (30)..(31): Xaa is C or S
VTMNRYKKLVVNKNEDFYLISIANMKEPVXXP

SEQ ID NO: 85590 - protein, 34 aa, Artificial Sequence; identical to SEQ ID NO: 41641
  Cyclic GFR-binding peptide
  MOD_RES (1)..(34): Xaa is C or S

SEQ ID NO: 85591 - protein, 33 aa, Artificial Sequence
  Cyclic GFR-binding peptide
  MOD_RES (1)..(33): Xaa is C or S
XSEVTMNRHKRLVVNKNEDYYLISTASMKEPVX

SEQ ID NO: 85592 - protein, 24 aa, Artificial Sequence
  Cyclic GFR-binding peptide
GEPIKGYTPVGMDDFYLVNIPSLK

SEQ ID NO: 85593 - protein, 36 aa, Artificial Sequence; identical to SEQ ID NO: 31584
  Cyclic GFR-binding peptide
  MOD_RES (32)..(33): Xaa is C or S

SEQ ID NO: 85594 - protein, 26 aa, Artificial Sequence
  Cyclic GFR-binding peptide
GRHKRLIIQQKDNYYLMSTASMKTPT

SEQ ID NO: 85595 - protein, 38 aa, Artificial Sequence; identical to SEQ ID NO: 31586
  Cyclic GFR-binding peptide
  MOD_RES (2)..(4)..(35)..(36): Xaa is C or S

SEQ ID NO: 85596 - protein, 29 aa, Artificial Sequence
  Cyclic GFR-binding peptide
  MOD_RES (27)..(28): Xaa is C or S
DRHKRLVVNNASDYYLISTASLRTPVXXT

SEQ ID NO: 85597 - protein, 39 aa, Artificial Sequence; identical to SEQ ID NO: 41645
  Cyclic GFR-binding peptide
  MOD_RES (1)..(33)..(34): Xaa is C or S

SEQ ID NO: 85598 - protein, 30 aa, Artificial Sequence; identical to SEQ ID NO: 31588
  Cyclic GFR-binding peptide
  MOD_RES (29)..(29): Xaa is C or S

SEQ ID NO: 85599 - protein, 29 aa, Artificial Sequence
  Cyclic GFR-binding peptide
SVAMGRYKKLYTVVGKDFYLISIANLKTP

SEQ ID NO: 85600 - protein, 26 aa, Artificial Sequence
  Cyclic GFR-binding peptide
DYHYKLVVNNASDKYLISIPSLRTPV

SEQ ID NO: 85601 - protein, 39 aa, Artificial Sequence; identical to SEQ ID NO: 31590
  Cyclic GFR-binding peptide
  MOD_RES (1)..(3)..(35): Xaa is C or S

SEQ ID NO: 85602 - protein, 21 aa, Artificial Sequence
  Cyclic GFR-binding peptide
EEYKFKTPVGMDDLYLVSIPE

SEQ ID NO: 85603 - protein, 40 aa, Artificial Sequence; identical to SEQ ID NO: 3316
  Cyclic GFR-binding peptide
  MOD_RES (2)..(4)..(36)..(37): Xaa is C or S

SEQ ID NO: 85604 - protein, 33 aa, Artificial Sequence
  Cyclic GFR-binding peptide
  MOD_RES (1)..(33): Xaa is C or S
XSEVTMNEYKFKVVNKNEDLYLISIPEMKEPVX

SEQ ID NO: 85605 - protein, 25 aa, Artificial Sequence
  Cyclic GFR-binding peptide
YHYKLVVNNASDKYLISIPSLRTPV

SEQ ID NO: 85606 - protein, 38 aa, Artificial Sequence; identical to SEQ ID NO: 3319
  Cyclic GFR-binding peptide
  MOD_RES (1)..(3)..(34)..(35): Xaa is C or S

SEQ ID NO: 85607 - protein, 29 aa, Artificial Sequence
  Cyclic GFR-binding peptide
  MOD_RES (26)..(27): Xaa is C or S
EYKFKLLVRGNDLYLMSIPETKVPAXXTS

SEQ ID NO: 85608 - protein, 24 aa, Artificial Sequence
  Cyclic GFR-binding peptide
YHYKLVVKDYEDKYLMSIPSLETP

SEQ ID NO: 85609 - protein, 39 aa, Artificial Sequence; identical to SEQ ID NO: 3322
  Cyclic GFR-binding peptide
  MOD_RES (2)..(34): Xaa is C or S

SEQ ID NO: 85610 - protein, 31 aa, Artificial Sequence; identical to SEQ ID NO: 31604
  Cyclic GFR-binding peptide
  MOD_RES (2)..(2): Xaa is C or S

SEQ ID NO: 85611 - protein, 38 aa, Artificial Sequence; identical to SEQ ID NO: 3324
  Cyclic GFR-binding peptide
  MOD_RES (2)..(4)..(36)..(37): Xaa is C or S

SEQ ID NO: 85612 - protein, 29 aa, Artificial Sequence
  Cyclic GFR-binding peptide
  MOD_RES (1)..(3): Xaa is C or S
XKXSKVVMRYKKLVKPTRGVFYLISIANL

SEQ ID NO: 85613 - protein, 40 aa, Artificial Sequence; identical to SEQ ID NO: 3331
  Cyclic GFR-binding peptide
  MOD_RES (1)..(3)..(34)..(35): Xaa is C or S

SEQ ID NO: 85614 - protein, 38 aa, Artificial Sequence; identical to SEQ ID NO: 3333
  Cyclic GFR-binding peptide
  MOD_RES (1)..(32)..(33): Xaa is C or S

SEQ ID NO: 85615 - protein, 27 aa, Artificial Sequence
  Cyclic GFR-binding peptide
  MOD_RES (26)..(27): Xaa is C or S
RYKKLVVNNASDFYLISIANLRTPVXX

SEQ ID NO: 85616 - protein, 31 aa, Artificial Sequence; identical to SEQ ID NO: 31613
  Cyclic GFR-binding peptide
  MOD_RES (1)..(3): Xaa is C or S

SEQ ID NO: 85617 - protein, 35 aa, Artificial Sequence; identical to SEQ ID NO: 3335
  Cyclic GFR-binding peptide
  MOD_RES (29)..(30): Xaa is C or S

SEQ ID NO: 85618 - protein, 39 aa, Artificial Sequence; identical to SEQ ID NO: 3336
  Cyclic GFR-binding peptide
  MOD_RES (1)..(3)..(34)..(35): Xaa is C or S

SEQ ID NO: 85619 - protein, 30 aa, Artificial Sequence; identical to SEQ ID NO: 31619
  Cyclic GFR-binding peptide

SEQ ID NO: 85620 - protein, 31 aa, Artificial Sequence; identical to SEQ ID NO: 3340
  Cyclic GFR-binding peptide
  MOD_RES (29)..(30): Xaa is C or S

SEQ ID NO: 85621 - protein, 27 aa, Artificial Sequence
  Cyclic GFR-binding peptide
MNYHYKLIVNSSDDKYLVSIPSLKTPA

SEQ ID NO: 85622 - protein, 29 aa, Artificial Sequence
  Cyclic GFR-binding peptide
  MOD_RES (28)..(29): Xaa is C or S
IMEYKFKLLVRGNDLYLMSIPETKVPAXX

SEQ ID NO: 85623 - protein, 33 aa, Artificial Sequence; identical to SEQ ID NO: 3342
  Cyclic GFR-binding peptide
  MOD_RES (30)..(30): Xaa is C or S

SEQ ID NO: 85624 - protein, 29 aa, Artificial Sequence
  Cyclic GFR-binding peptide
  MOD_RES (27)..(28): Xaa is C or S
MRHKRLVKPKRGVYYLISTASLAQPVXXP

SEQ ID NO: 85625 - protein, 29 aa, Artificial Sequence
  Cyclic GFR-binding peptide
  MOD_RES (1)..(3): Xaa is C or S
XGXGEVVMERHKRLVVKDYEDYYLMSTAS

SEQ ID NO: 85626 - protein, 39 aa, Artificial Sequence; identical to SEQ ID NO: 41684
  Cyclic GFR-binding peptide
  MOD_RES (1)..(33)..(34): Xaa is C or S

SEQ ID NO: 85627 - protein, 38 aa, Artificial Sequence; identical to SEQ ID NO: 3346
  Cyclic GFR-binding peptide
  MOD_RES (1)..(3)..(34)..(35): Xaa is C or S

SEQ ID NO: 85628 - protein, 29 aa, Artificial Sequence
  Cyclic GFR-binding peptide
  MOD_RES (1)..(1): Xaa is C or S
XSRVIMEYKFKVKPKRGVLYLISIPELAQ

SEQ ID NO: 85629 - protein, 27 aa, Artificial Sequence
  Cyclic GFR-binding peptide
VMDYHYKLVVNNAADKYLISIPSLRAP

SEQ ID NO: 85630 - protein, 25 aa, Artificial Sequence
  Cyclic GFR-binding peptide
AMGRHKRLYTVVGKDYYLISTASLK

SEQ ID NO: 85631 - protein, 21 aa, Artificial Sequence
  Cyclic GFR-binding peptide
PIKGYVVNKNEDFYLINIPSM

SEQ ID NO: 85632 - protein, 29 aa, Artificial Sequence
  Cyclic GFR-binding peptide
SVAMGRHKRLYTVVGKDYYLISTASLKTP

SEQ ID NO: 85633 - protein, 37 aa, Artificial Sequence; identical to SEQ ID NO: 3349
  Cyclic GFR-binding peptide
  MOD_RES (1)..(33): Xaa is C or S

SEQ ID NO: 85634 - protein, 31 aa, Artificial Sequence; identical to SEQ ID NO: 3350
  Cyclic GFR-binding peptide
  MOD_RES (2)..(4): Xaa is C or S

SEQ ID NO: 85635 - protein, 32 aa, Artificial Sequence; identical to SEQ ID NO: 3351
  Cyclic GFR-binding peptide
  MOD_RES (28)..(29): Xaa is C or S

SEQ ID NO: 85636 - protein, 24 aa, Artificial Sequence
  Cyclic GFR-binding peptide
NYHYKLIVNSSDDKYLVSIPSLQT

SEQ ID NO: 85637 - protein, 28 aa, Artificial Sequence
  Cyclic GFR-binding peptide
SRVIMEYKFKVKPKRGVLYLISIPELAQ

SEQ ID NO: 85638 - protein, 24 aa, Artificial Sequence
  Cyclic GFR-binding peptide
PIKGYVVKENEDFYLMNIPSLETP

SEQ ID NO: 85639 - protein, 32 aa, Artificial Sequence; identical to SEQ ID NO: 76657
  Cyclic GFR-binding peptide
  MOD_RES (26)..(27): Xaa is C or S

SEQ ID NO: 85640 - protein, 30 aa, Artificial Sequence; identical to SEQ ID NO: 31633
  Cyclic GFR-binding peptide
  MOD_RES (1)..(3): Xaa is C or S

SEQ ID NO: 85641 - protein, 24 aa, Artificial Sequence
  Cyclic GFR-binding peptide
MDRHKRLVVKENEDYYLMSTASLE

SEQ ID NO: 85642 - protein, 28 aa, Artificial Sequence
  Cyclic GFR-binding peptide
  MOD_RES (27)..(27): Xaa is C or S
NRYKKLIVNSSDDFYLVSIANLKTPAXT

SEQ ID NO: 85643 - protein, 35 aa, Artificial Sequence; identical to SEQ ID NO: 3363
  Cyclic GFR-binding peptide
  MOD_RES (1)..(32)..(33): Xaa is C or S

SEQ ID NO: 85644 - protein, 37 aa, Artificial Sequence; identical to SEQ ID NO: 3366
  Cyclic GFR-binding peptide
  MOD_RES (1)..(32)..(33): Xaa is C or S

SEQ ID NO: 85645 - protein, 30 aa, Artificial Sequence
  Cyclic GFR-binding peptide
  MOD_RES (30)..(30): Xaa is C or S
VVMDRHKRLVVNNAADYYLISTASLRAPVX

SEQ ID NO: 85646 - protein, 37 aa, Artificial Sequence; identical to SEQ ID NO: 3370
  Cyclic GFR-binding peptide
  MOD_RES (1)..(33)..(34): Xaa is C or S

SEQ ID NO: 85647 - protein, 26 aa, Artificial Sequence
  Cyclic GFR-binding peptide
VSMGERHKRLTPVGMDDYYLVSTASL

SEQ ID NO: 85648 - protein, 28 aa, Artificial Sequence
  Cyclic GFR-binding peptide
VMDYHYKLVVKENEDKYLMSIPSLETPV

SEQ ID NO: 85649 - protein, 31 aa, Artificial Sequence; identical to SEQ ID NO: 3373
  Cyclic GFR-binding peptide
  MOD_RES (29)..(30): Xaa is C or S

SEQ ID NO: 85650 - protein, 31 aa, Artificial Sequence; identical to SEQ ID NO: 31652
  Cyclic GFR-binding peptide
  MOD_RES (31)..(31): Xaa is C or S

SEQ ID NO: 85651 - protein, 22 aa, Artificial Sequence
  Cyclic GFR-binding peptide
VMPIKGYVKPTRGVFYLINIPS

SEQ ID NO: 85652 - protein, 40 aa, Artificial Sequence; identical to SEQ ID NO: 41712
  Cyclic GFR-binding peptide
  MOD_RES (2)..(4)..(36)..(37): Xaa is C or S

SEQ ID NO: 85653 - protein, 34 aa, Artificial Sequence
  Cyclic GFR-binding peptide
  MOD_RES (28)..(29): Xaa is C or S
IMRHKRLLLVRGNDYYLMSTASTKVPAXXTSPVR

SEQ ID NO: 85654 - protein, 30 aa, Artificial Sequence; identical to SEQ ID NO: 31654
  Cyclic GFR-binding peptide
  MOD_RES (30)..(30): Xaa is C or S

SEQ ID NO: 85655 - protein, 38 aa, Artificial Sequence; identical to SEQ ID NO: 3379
  Cyclic GFR-binding peptide
  MOD_RES (1)..(3)..(34)..(35): Xaa is C or S

SEQ ID NO: 85656 - protein, 33 aa, Artificial Sequence; identical to SEQ ID NO: 31655
  Cyclic GFR-binding peptide
  MOD_RES (32)..(33): Xaa is C or S

SEQ ID NO: 85657 - protein, 27 aa, Artificial Sequence
  Cyclic GFR-binding peptide
MNRYKKLVVNKNEDFYLISIANMKEPV

SEQ ID NO: 85658 - protein, 21 aa, Artificial Sequence
  Cyclic GFR-binding peptide
NYHYKLIVNSSDDKYLVSIPS

SEQ ID NO: 85659 - protein, 27 aa, Artificial Sequence
  Cyclic GFR-binding peptide
VIMRYKKLVKPKRGVFYLISIANLAQP

SEQ ID NO: 85660 - protein, 26 aa, Artificial Sequence
  Cyclic GFR-binding peptide
EVIMPIKGYLLVRGNDFYLMNIPSTK

SEQ ID NO: 85661 - protein, 36 aa, Artificial Sequence
  Cyclic GFR-binding peptide
  MOD_RES (31)..(32): Xaa is C or S
DVVMGRHKRLIIQQKDNYYLMSTASMKTPTXXPGAS

SEQ ID NO: 85662 - protein, 32 aa, Artificial Sequence; identical to SEQ ID NO: 3383
  Cyclic GFR-binding peptide
  MOD_RES (29)..(30): Xaa is C or S

SEQ ID NO: 85663 - protein, 35 aa, Artificial Sequence; identical to SEQ ID NO: 3386
  Cyclic GFR-binding peptide
  MOD_RES (29)..(30): Xaa is C or S

SEQ ID NO: 85664 - protein, 31 aa, Artificial Sequence; identical to SEQ ID NO: 31663
  Cyclic GFR-binding peptide
  MOD_RES (1)..(1): Xaa is C or S

SEQ ID NO: 85665 - protein, 33 aa, Artificial Sequence; identical to SEQ ID NO: 41723
  Cyclic GFR-binding peptide
  MOD_RES (2)..(4): Xaa is C or S

SEQ ID NO: 85666 - protein, 32 aa, Artificial Sequence; identical to SEQ ID NO: 31665
  Cyclic GFR-binding peptide
  MOD_RES (31)..(32): Xaa is C or S

SEQ ID NO: 85667 - protein, 28 aa, Artificial Sequence
  Cyclic GFR-binding peptide
  MOD_RES (2)..(2): Xaa is C or S
GXGEVVMDPIKGYVVKENEDFYLMNIPS

SEQ ID NO: 85668 - protein, 24 aa, Artificial Sequence
  Cyclic GFR-binding peptide
VVMNYHYKLIVNNSSDKYLVSIPS

SEQ ID NO: 85669 - protein, 25 aa, Artificial Sequence
  Cyclic GFR-binding peptide
PIKGYVVKDYEDFYLMNIPSLETPV

SEQ ID NO: 85670 - protein, 29 aa, Artificial Sequence
  Cyclic GFR-binding peptide
  MOD_RES (2)..(2): Xaa is C or S
GXEAVSMGERYKKLTPVGMDDFYLVSIAN

SEQ ID NO: 85671 - protein, 34 aa, Artificial Sequence; identical to SEQ ID NO: 3391
  Cyclic GFR-binding peptide
  MOD_RES (29)..(30): Xaa is C or S

SEQ ID NO: 85672 - protein, 23 aa, Artificial Sequence
  Cyclic GFR-binding peptide
MNPIKGYIVNSSDDFYLVNIPSL

SEQ ID NO: 85673 - protein, 37 aa, Artificial Sequence; identical to SEQ ID NO: 31671
  Cyclic GFR-binding peptide
  MOD_RES (1)..(33)..(34): Xaa is C or S

SEQ ID NO: 85674 - protein, 29 aa, Artificial Sequence
  Cyclic GFR-binding peptide
  MOD_RES (1)..(3): Xaa is C or S
XGXARVVMNYHYKLIVNSSDDKYLVSIPS

SEQ ID NO: 85675 - protein, 34 aa, Artificial Sequence; identical to SEQ ID NO: 31673
  Cyclic GFR-binding peptide
  MOD_RES (2)..(34): Xaa is C or S

SEQ ID NO: 85676 - protein, 31 aa, Artificial Sequence
  Cyclic GFR-binding peptide
  MOD_RES (2)..(4): Xaa is C or S
RXAXSEVTMNRHKRLVVNKNEDYYLISTASM

SEQ ID NO: 85677 - protein, 33 aa, Artificial Sequence; identical to SEQ ID NO: 41731
  Cyclic GFR-binding peptide
  MOD_RES (1)..(3): Xaa is C or S

SEQ ID NO: 85678 - protein, 31 aa, Artificial Sequence; identical to SEQ ID NO: 3397
  Cyclic GFR-binding peptide
  MOD_RES (30)..(30): Xaa is C or S

SEQ ID NO: 85679 - protein, 36 aa, Artificial Sequence; identical to SEQ ID NO: 31676
  Cyclic GFR-binding peptide
  MOD_RES (1)..(3)..(35)..(36): Xaa is C or S

SEQ ID NO: 85680 - protein, 32 aa, Artificial Sequence; identical to SEQ ID NO: 3400
  Cyclic GFR-binding peptide
  MOD_RES (26)..(27): Xaa is C or S

SEQ ID NO: 85681 - protein, 28 aa, Artificial Sequence
  Cyclic GFR-binding peptide
  MOD_RES (2)..(2): Xaa is C or S
GXAEVVMDEYKFKVVNNAADLYLISIPE

SEQ ID NO: 85682 - protein, 36 aa, Artificial Sequence; identical to SEQ ID NO: 31682
  Cyclic GFR-binding peptide
  MOD_RES (1)..(33)..(34): Xaa is C or S

SEQ ID NO: 85683 - protein, 32 aa, Artificial Sequence; identical to SEQ ID NO: 31684
  Cyclic GFR-binding peptide
  MOD_RES (26)..(27): Xaa is C or S

SEQ ID NO: 85684 - protein, 33 aa, Artificial Sequence; identical to SEQ ID NO: 3404
  Cyclic GFR-binding peptide
  MOD_RES (31)..(32): Xaa is C or S

SEQ ID NO: 85685 - protein, 31 aa, Artificial Sequence
  Cyclic GFR-binding peptide
  MOD_RES (26)..(27): Xaa is C or S
EYKFKVVNNASDLYLISIPELRTPVXXTPPT

SEQ ID NO: 85686 - protein, 24 aa, Artificial Sequence
  Cyclic GFR-binding peptide
MNYHYKLIVNSSDDKYLVSIPSLK

SEQ ID NO: 85687 - protein, 30 aa, Artificial Sequence
  Cyclic GFR-binding peptide
  MOD_RES (28)..(29): Xaa is C or S
MGRHKRLYTVVGKDYYLISTASLKTPVXXA

SEQ ID NO: 85688 - protein, 42 aa, Artificial Sequence; identical to SEQ ID NO: 3408
  Cyclic GFR-binding peptide
  MOD_RES (2)..(4)..(36)..(37): Xaa is C or S

SEQ ID NO: 85689 - protein, 36 aa, Artificial Sequence; identical to SEQ ID NO: 31688
  Cyclic GFR-binding peptide
  MOD_RES (1)..(3)..(35)..(36): Xaa is C or S

SEQ ID NO: 85690 - protein, 33 aa, Artificial Sequence; identical to SEQ ID NO: 3411
  Cyclic GFR-binding peptide
  MOD_RES (28)..(29): Xaa is C or S

SEQ ID NO: 85691 - protein, 40 aa, Artificial Sequence; identical to SEQ ID NO: 3412
  Cyclic GFR-binding peptide
  MOD_RES (2)..(34)..(35): Xaa is C or S

SEQ ID NO: 85692 - protein, 29 aa, Artificial Sequence
  Cyclic GFR-binding peptide
VVMDRHKRLVVNNAADYYLISTASLRAPV

SEQ ID NO: 85693 - protein, 35 aa, Artificial Sequence; identical to SEQ ID NO: 3417
  Cyclic GFR-binding peptide
  MOD_RES (31)..(32): Xaa is C or S

SEQ ID NO: 85694 - protein, 37 aa, Artificial Sequence
  Cyclic GFR-binding peptide
  MOD_RES (32)..(33): Xaa is C or S
RDVVMGYHYKLIIQQKDNKYLMSIPSMKTPTXXPGAS

SEQ ID NO: 85695 - protein, 29 aa, Artificial Sequence
  Cyclic GFR-binding peptide
VVMDPIKGYVVNNASDFYLINIPSLRTPV

SEQ ID NO: 85696 - protein, 25 aa, Artificial Sequence
  Cyclic GFR-binding peptide
VMGEYKFKIIQQKDNLYLMSIPEMK

SEQ ID NO: 85697 - protein, 41 aa, Artificial Sequence; identical to SEQ ID NO: 31700
  Cyclic GFR-binding peptide
  MOD_RES (1)..(3)..(35)..(36): Xaa is C or S

SEQ ID NO: 85698 - protein, 27 aa, Artificial Sequence
  Cyclic GFR-binding peptide
EVIMRYKKLLLVRGNDFYLMSIANTKV

SEQ ID NO: 85699 - protein, 34 aa, Artificial Sequence
  Cyclic GFR-binding peptide
  MOD_RES (2)..(4): Xaa is C or S
RXGXESVAMGRHKRLYTVVGKDYYLISTASLKTP

SEQ ID NO: 85700 - protein, 32 aa, Artificial Sequence; identical to SEQ ID NO: 3427
  Cyclic GFR-binding peptide
  MOD_RES (27)..(28): Xaa is C or S

SEQ ID NO: 85701 - protein, 35 aa, Artificial Sequence; identical to SEQ ID NO: 3431
  Cyclic GFR-binding peptide
  MOD_RES (32)..(33): Xaa is C or S

SEQ ID NO: 85702 - protein, 23 aa, Artificial Sequence
  Cyclic GFR-binding peptide
MPIKGYIKPTKGIFYLINIPSLD

SEQ ID NO: 85703 - protein, 37 aa, Artificial Sequence; identical to SEQ ID NO: 41748
  Cyclic GFR-binding peptide
  MOD_RES (31)..(32): Xaa is C or S

SEQ ID NO: 85704 - protein, 40 aa, Artificial Sequence
  Cyclic GFR-binding peptide
  MOD_RES (2)..(34)..(35): Xaa is C or S
GXSEVVMDEYKFKVVNNASDLYLISIPELRTPVXXTPPTS

SEQ ID NO: 85705 - protein, 31 aa, Artificial Sequence; identical to SEQ ID NO: 31705
  Cyclic GFR-binding peptide
  MOD_RES (2)..(2): Xaa is C or S

SEQ ID NO: 85706 - protein, 29 aa, Artificial Sequence
  Cyclic GFR-binding peptide
  MOD_RES (26)..(27): Xaa is C or S
RHKRLIKPTKGIYYLISTASLDQSVXXPS

SEQ ID NO: 85707 - protein, 28 aa, Artificial Sequence
  Cyclic GFR-binding peptide
SKVIMRHKRLIKPTKGIYYLISTASLDQ

SEQ ID NO: 85708 - protein, 34 aa, Artificial Sequence
  Cyclic GFR-binding peptide
  MOD_RES (1)..(3): Xaa is C or S
XGXAEVVMDRHKRLVVNNAADYYLISTASLRAPV

SEQ ID NO: 85709 - protein, 28 aa, Artificial Sequence
  Cyclic GFR-binding peptide
  MOD_RES (26)..(27): Xaa is C or S
YHYKLVVKDYEDKYLMSIPSLETPVXXA

SEQ ID NO: 85710 - protein, 26 aa, Artificial Sequence
  Cyclic GFR-binding peptide
AVSMGEPIKGYTPVGMDDFYLVNIPS

SEQ ID NO: 85711 - protein, 33 aa, Artificial Sequence; identical to SEQ ID NO: 41753
  Cyclic GFR-binding peptide
  MOD_RES (29)..(30): Xaa is C or S

SEQ ID NO: 85712 - protein, 37 aa, Artificial Sequence; identical to SEQ ID NO: 41754
  Cyclic GFR-binding peptide
  MOD_RES (32)..(33): Xaa is C or S

SEQ ID NO: 85713 - protein, 34 aa, Artificial Sequence; identical to SEQ ID NO: 41757
  Cyclic GFR-binding peptide
  MOD_RES (30)..(31): Xaa is C or S

SEQ ID NO: 85714 - protein, 30 aa, Artificial Sequence; identical to SEQ ID NO: 3441
  Cyclic GFR-binding peptide
  MOD_RES (1)..(1): Xaa is C or S

SEQ ID NO: 85715 - protein, 21 aa, Artificial Sequence
  Cyclic GFR-binding peptide
RYKKLIIQQKDNFYLMSIANM

SEQ ID NO: 85716 - protein, 28 aa, Artificial Sequence
  Cyclic GFR-binding peptide
  MOD_RES (28)..(28): Xaa is C or S
IMEYKFKLLVRGNDLYLMSIPETKVPAX

SEQ ID NO: 85717 - protein, 30 aa, Artificial Sequence; identical to SEQ ID NO: 3445
  Cyclic GFR-binding peptide
  MOD_RES (28)..(29): Xaa is C or S

SEQ ID NO: 85718 - protein, 37 aa, Artificial Sequence; identical to SEQ ID NO: 3446
  Cyclic GFR-binding peptide
  MOD_RES (2)..(34): Xaa is C or S

SEQ ID NO: 85719 - protein, 25 aa, Artificial Sequence
  Cyclic GFR-binding peptide
VVMRHKRLVKPTRGVYYLISTASLD

SEQ ID NO: 85720 - protein, 28 aa, Artificial Sequence
  Cyclic GFR-binding peptide
  MOD_RES (1)..(1): Xaa is C or S
XAEVVMDEYKFKVVNNAADLYLISIPEL

SEQ ID NO: 85721 - protein, 38 aa, Artificial Sequence; identical to SEQ ID NO: 41769
  Cyclic GFR-binding peptide
  MOD_RES (1)..(34)..(35): Xaa is C or S

SEQ ID NO: 85722 - protein, 38 aa, Artificial Sequence; identical to SEQ ID NO: 3450
  Cyclic GFR-binding peptide
  MOD_RES (1)..(32)..(33): Xaa is C or S

SEQ ID NO: 85723 - protein, 33 aa, Artificial Sequence; identical to SEQ ID NO: 31719
  Cyclic GFR-binding peptide
  MOD_RES (32)..(33): Xaa is C or S

SEQ ID NO: 85724 - protein, 30 aa, Artificial Sequence; identical to SEQ ID NO: 3451
  Cyclic GFR-binding peptide

SEQ ID NO: 85725 - protein, 41 aa, Artificial Sequence
  Cyclic GFR-binding peptide
  MOD_RES (2)..(4)..(35)..(36): Xaa is C or S
LXGXEEVIMEYKFKLLVRGNDLYLMSIPETKVPAXXTSPVR

SEQ ID NO: 85726 - protein, 34 aa, Artificial Sequence; identical to SEQ ID NO: 3452
  Cyclic GFR-binding peptide
  MOD_RES (32)..(33): Xaa is C or S

SEQ ID NO: 85727 - protein, 35 aa, Artificial Sequence; identical to SEQ ID NO: 41774
  Cyclic GFR-binding peptide
  MOD_RES (1)..(3)..(35): Xaa is C or S

SEQ ID NO: 85728 - protein, 27 aa, Artificial Sequence
  Cyclic GFR-binding peptide
  MOD_RES (1)..(1): Xaa is C or S
XEEVIMRYKKLLLVRGNDFYLMSIANT

SEQ ID NO: 85729 - protein, 36 aa, Artificial Sequence; identical to SEQ ID NO: 3454
  Cyclic GFR-binding peptide
  MOD_RES (31)..(32): Xaa is C or S

SEQ ID NO: 85730 - protein, 23 aa, Artificial Sequence
  Cyclic GFR-binding peptide
DRYKKLVVNNASDFYLISIANLR

SEQ ID NO: 85731 - protein, 33 aa, Artificial Sequence; identical to SEQ ID NO: 41777
  Cyclic GFR-binding peptide
  MOD_RES (27)..(28): Xaa is C or S

SEQ ID NO: 85732 - protein, 25 aa, Artificial Sequence
  Cyclic GFR-binding peptide
VVMDYHYKLVVNNASDKYLISIPSL

SEQ ID NO: 85733 - protein, 29 aa, Artificial Sequence
  Cyclic GFR-binding peptide
  MOD_RES (27)..(28): Xaa is C or S
NPIKGYVVNKNEDFYLINIPSMKEPVXXP

SEQ ID NO: 85734 - protein, 24 aa, Artificial Sequence
  Cyclic GFR-binding peptide
VVMDRYKKLVVNNAADFYLISIAN

SEQ ID NO: 85735 - protein, 31 aa, Artificial Sequence; identical to SEQ ID NO: 14004
  Cyclic GFR-binding peptide
  MOD_RES (1)..(3): Xaa is C or S

SEQ ID NO: 85736 - protein, 40 aa, Artificial Sequence
  Cyclic GFR-binding peptide
  MOD_RES (2)..(34)..(35): Xaa is C or S
GXSRVVMNRHKRLIVNSSDDYYLVSTASLKTPAXXPKPVH

SEQ ID NO: 85737 - protein, 21 aa, Artificial Sequence
  Cyclic GFR-binding peptide
MRYKKLVKPKRGVFYLISIAN

SEQ ID NO: 85738 - protein, 27 aa, Artificial Sequence
  Cyclic GFR-binding peptide
SEVTMNYHYKLVVNKNEDKYLISIPSM

SEQ ID NO: 85739 - protein, 42 aa, Artificial Sequence; identical to SEQ ID NO: 41778
  Cyclic GFR-binding peptide
  MOD_RES (2)..(4)..(36)..(37): Xaa is C or S

SEQ ID NO: 85740 - protein, 24 aa, Artificial Sequence
  Cyclic GFR-binding peptide
EVIMRHKRLLLVRGNDYYLMSTAS

SEQ ID NO: 85741 - protein, 38 aa, Artificial Sequence; identical to SEQ ID NO: 3461
  Cyclic GFR-binding peptide
  MOD_RES (1)..(3)..(35): Xaa is C or S

SEQ ID NO: 85742 - protein, 35 aa, Artificial Sequence
  Cyclic GFR-binding peptide
  MOD_RES (31)..(32): Xaa is C or S
EVVMDRHKRLVVNNAADYYLISTASLRAPVXXSAP

SEQ ID NO: 85743 - protein, 26 aa, Artificial Sequence
  Cyclic GFR-binding peptide
EVVMDRHKRLVVNNAADYYLISTASL

SEQ ID NO: 85744 - protein, 26 aa, Artificial Sequence
  Cyclic GFR-binding peptide
EVTMNPIKGYVVNKNEDFYLINIPSM

SEQ ID NO: 85745 - protein, 27 aa, Artificial Sequence
  Cyclic GFR-binding peptide
MDYHYKLVVNNASDKYLISIPSLRTPV

SEQ ID NO: 85746 - protein, 31 aa, Artificial Sequence; identical to SEQ ID NO: 3469
  Cyclic GFR-binding peptide
  MOD_RES (1)..(1): Xaa is C or S

SEQ ID NO: 85747 - protein, 27 aa, Artificial Sequence
  Cyclic GFR-binding peptide
VVMNPIKGYIVNSSDDFYLVNIPSLKT

SEQ ID NO: 85748 - protein, 23 aa, Artificial Sequence
  Cyclic GFR-binding peptide
MDPIKGYVVNNASDFYLINIPSL

SEQ ID NO: 85749 - protein, 41 aa, Artificial Sequence; identical to SEQ ID NO: 3470
  Cyclic GFR-binding peptide
  MOD_RES (2)..(4)..(35)..(36): Xaa is C or S

SEQ ID NO: 85750 - protein, 24 aa, Artificial Sequence
  Cyclic GFR-binding peptide
EYKFKVVKDYEDLYLMSIPELETP

SEQ ID NO: 85751 - protein, 38 aa, Artificial Sequence; identical to SEQ ID NO: 3471
  Cyclic GFR-binding peptide
  MOD_RES (33)..(34): Xaa is C or S

SEQ ID NO: 85752 - protein, 37 aa, Artificial Sequence; identical to SEQ ID NO: 31746
  Cyclic GFR-binding peptide
  MOD_RES (2)..(4)..(35)..(36): Xaa is C or S

SEQ ID NO: 85753 - protein, 34 aa, Artificial Sequence; identical to SEQ ID NO: 3474
  Cyclic GFR-binding peptide
  MOD_RES (28)..(29): Xaa is C or S

SEQ ID NO: 85754 - protein, 36 aa, Artificial Sequence; identical to SEQ ID NO: 31748
  Cyclic GFR-binding peptide
  MOD_RES (32)..(33): Xaa is C or S

SEQ ID NO: 85755 - protein, 21 aa, Artificial Sequence
  Cyclic GFR-binding peptide
PIKGYLLVRGNDFYLMNIPST

SEQ ID NO: 85756 - protein, 24 aa, Artificial Sequence
  Cyclic GFR-binding peptide
RYKKLIVNSSDDFYLVSIANLQTP

SEQ ID NO: 85757 - protein, 38 aa, Artificial Sequence
  Cyclic GFR-binding peptide
  MOD_RES (1)..(3)..(34)..(35): Xaa is C or S
XKXSRVIMPIKGYVKPKRGVFYLINIPSLAQPVXXPAA

SEQ ID NO: 85758 - protein, 31 aa, Artificial Sequence; identical to SEQ ID NO: 3479
  Cyclic GFR-binding peptide
  MOD_RES (27)..(28): Xaa is C or S

SEQ ID NO: 85759 - protein, 32 aa, Artificial Sequence; identical to SEQ ID NO: 31755
  Cyclic GFR-binding peptide
  MOD_RES (1)..(32): Xaa is C or S

SEQ ID NO: 85760 - protein, 29 aa, Artificial Sequence
  Cyclic GFR-binding peptide
  MOD_RES (27)..(28): Xaa is C or S
MRYKKLLLVRGNDFYLMSIANTKVPAXXT

SEQ ID NO: 85761 - protein, 32 aa, Artificial Sequence
  Cyclic GFR-binding peptide
  MOD_RES (30)..(31): Xaa is C or S
VVMGEYKFKIIQQKDNLYLMSIPEMKTPTXXP

SEQ ID NO: 85762 - protein, 33 aa, Artificial Sequence; identical to SEQ ID NO: 31758
  Cyclic GFR-binding peptide
  MOD_RES (2)..(33): Xaa is C or S

SEQ ID NO: 85763 - protein, 25 aa, Artificial Sequence
  Cyclic GFR-binding peptide
EYKFKVVNNASDLYLISIPELRTPV

SEQ ID NO: 85764 - protein, 31 aa, Artificial Sequence; identical to SEQ ID NO: 3484
  Cyclic GFR-binding peptide
  MOD_RES (2)..(4): Xaa is C or S

SEQ ID NO: 85765 - protein, 25 aa, Artificial Sequence
  Cyclic GFR-binding peptide
KVVMNPIKGYIVNNSSDFYLVNIPS

SEQ ID NO: 85766 - protein, 40 aa, Artificial Sequence
  Cyclic GFR-binding peptide
  MOD_RES (2)..(34)..(35): Xaa is C or S
GXSEVVMDRHKRLVVNNASDYYLISTASLRTPVXXTPPTS

SEQ ID NO: 85767 - protein, 31 aa, Artificial Sequence; identical to SEQ ID NO: 31762
  Cyclic GFR-binding peptide
  MOD_RES (2)..(4): Xaa is C or S

SEQ ID NO: 85768 - protein, 25 aa, Artificial Sequence
  Cyclic GFR-binding peptide
VMDPIKGYVVNNASDFYLINIPSLR

SEQ ID NO: 85769 - protein, 29 aa, Artificial Sequence
  Cyclic GFR-binding peptide
  MOD_RES (2)..(2): Xaa is C or S
GXRDVVMGRHKRLIIQQKDNYYLMSTASM

SEQ ID NO: 85770 - protein, 30 aa, Artificial Sequence; identical to SEQ ID NO: 31763
  Cyclic GFR-binding peptide
  MOD_RES (27)..(28): Xaa is C or S

SEQ ID NO: 85771 - protein, 30 aa, Artificial Sequence; identical to SEQ ID NO: 3487
  Cyclic GFR-binding peptide
  MOD_RES (1)..(1): Xaa is C or S

SEQ ID NO: 85772 - protein, 33 aa, Artificial Sequence; identical to SEQ ID NO: 41812
  Cyclic GFR-binding peptide
  MOD_RES (29)..(30): Xaa is C or S

SEQ ID NO: 85773 - protein, 22 aa, Artificial Sequence
  Cyclic GFR-binding peptide
EYKFKVVKENEDLYLMSIPELE

SEQ ID NO: 85774 - protein, 25 aa, Artificial Sequence
  Cyclic GFR-binding peptide
MEYKFKIKPTKGILYLISIPELDQS

SEQ ID NO: 85775 - protein, 24 aa, Artificial Sequence
  Cyclic GFR-binding peptide
MGRHKRLIIQQKDNYYLMSTASMK

SEQ ID NO: 85776 - protein, 30 aa, Artificial Sequence; identical to SEQ ID NO: 3492
  Cyclic GFR-binding peptide
  MOD_RES (2)..(4): Xaa is C or S

SEQ ID NO: 85777 - protein, 32 aa, Artificial Sequence; identical to SEQ ID NO: 3494
  Cyclic GFR-binding peptide
  MOD_RES (1)..(32): Xaa is C or S

SEQ ID NO: 85778 - protein, 28 aa, Artificial Sequence
  Cyclic GFR-binding peptide
  MOD_RES (28)..(28): Xaa is C or S
MDYHYKLVVNNAADKYLISIPSLRAPVX

SEQ ID NO: 85779 - protein, 30 aa, Artificial Sequence; identical to SEQ ID NO: 31773
  Cyclic GFR-binding peptide

SEQ ID NO: 85780 - protein, 31 aa, Artificial Sequence; identical to SEQ ID NO: 3495
  Cyclic GFR-binding peptide
  MOD_RES (1)..(1): Xaa is C or S

SEQ ID NO: 85781 - protein, 30 aa, Artificial Sequence; identical to SEQ ID NO: 3497
  Cyclic GFR-binding peptide
  MOD_RES (26)..(27): Xaa is C or S

SEQ ID NO: 85782 - protein, 25 aa, Artificial Sequence
  Cyclic GFR-binding peptide
MDPIKGYVVNNASDFYLINIPSLRT

SEQ ID NO: 85783 - protein, 23 aa, Artificial Sequence
  Cyclic GFR-binding peptide
MGERHKRLTPVGMDDYYLVSTAS

SEQ ID NO: 85784 - protein, 29 aa, Artificial Sequence
  Cyclic GFR-binding peptide
  MOD_RES (26)..(27): Xaa is C or S
YHYKLLLVRGNDKYLMSIPSTKVPAXXTS

SEQ ID NO: 85785 - protein, 31 aa, Artificial Sequence
  Cyclic GFR-binding peptide
  MOD_RES (2)..(2): Xaa is C or S
KXSKVVMPIKGYVKPTRGVFYLINIPSLDQP

SEQ ID NO: 85786 - protein, 40 aa, Artificial Sequence; identical to SEQ ID NO: 3504
  Cyclic GFR-binding peptide
  MOD_RES (1)..(3)..(34)..(35): Xaa is C or S

SEQ ID NO: 85787 - protein, 34 aa, Artificial Sequence; identical to SEQ ID NO: 3505
  Cyclic GFR-binding peptide
  MOD_RES (30)..(31): Xaa is C or S

SEQ ID NO: 85788 - protein, 30 aa, Artificial Sequence; identical to SEQ ID NO: 3507
  Cyclic GFR-binding peptide
  MOD_RES (2)..(2): Xaa is C or S

SEQ ID NO: 85789 - protein, 39 aa, Artificial Sequence; identical to SEQ ID NO: 40337
  Cyclic GFR-binding peptide
  MOD_RES (1)..(33)..(34): Xaa is C or S

SEQ ID NO: 85790 - protein, 27 aa, Artificial Sequence
  Cyclic GFR-binding peptide
VMNEYKFKIVNSSDDLYLVSIPELQTP

SEQ ID NO: 85791 - protein, 33 aa, Artificial Sequence
  Cyclic GFR-binding peptide
  MOD_RES (28)..(29): Xaa is C or S
MNYHYKLVVNKNEDKYLISIPSMKEPVXXPEPI

SEQ ID NO: 85792 - protein, 34 aa, Artificial Sequence; identical to SEQ ID NO: 31792
  Cyclic GFR-binding peptide
  MOD_RES (2)..(4): Xaa is C or S

SEQ ID NO: 85793 - protein, 31 aa, Artificial Sequence
  Cyclic GFR-binding peptide
  MOD_RES (27)..(28): Xaa is C or S
NRYKKLVVNKNEDFYLISIANMKEPVXXPEP

SEQ ID NO: 85794 - protein, 31 aa, Artificial Sequence; identical to SEQ ID NO: 31793
  Cyclic GFR-binding peptide
  MOD_RES (1)..(3): Xaa is C or S

SEQ ID NO: 85795 - protein, 31 aa, Artificial Sequence; identical to SEQ ID NO: 3518
  Cyclic GFR-binding peptide
  MOD_RES (30)..(31): Xaa is C or S

SEQ ID NO: 85796 - protein, 32 aa, Artificial Sequence; identical to SEQ ID NO: 31796
  Cyclic GFR-binding peptide
  MOD_RES (29)..(30): Xaa is C or S

SEQ ID NO: 85797 - protein, 30 aa, Artificial Sequence
  Cyclic GFR-binding peptide
  MOD_RES (2)..(4): Xaa is C or S
SXGXRDVVMGEYKFKIIQQKDNLYLMSIPE

SEQ ID NO: 85798 - protein, 29 aa, Artificial Sequence
  Cyclic GFR-binding peptide
  MOD_RES (27)..(28): Xaa is C or S
MRHKRLLLVRGNDYYLMSTASTKVPAXXT

SEQ ID NO: 85799 - protein, 24 aa, Artificial Sequence
  Cyclic GFR-binding peptide
EEYKFKVVKDYEDLYLMSIPELET

SEQ ID NO: 85800 - protein, 34 aa, Artificial Sequence
  Cyclic GFR-binding peptide
  MOD_RES (1)..(3): Xaa is C or S
XAXSEVTMNPIKGYVVNKNEDFYLINIPSMKEPV

SEQ ID NO: 85801 - protein, 30 aa, Artificial Sequence; identical to SEQ ID NO: 3520
  Cyclic GFR-binding peptide
  MOD_RES (2)..(2): Xaa is C or S

SEQ ID NO: 85802 - protein, 36 aa, Artificial Sequence; identical to SEQ ID NO: 3521
  Cyclic GFR-binding peptide
  MOD_RES (2)..(4)..(36): Xaa is C or S

SEQ ID NO: 85803 - protein, 29 aa, Artificial Sequence
  Cyclic GFR-binding peptide
  MOD_RES (2)..(2): Xaa is C or S
GXSRVVMNYHYKLIVNSSDDKYLVSIPSL

SEQ ID NO: 85804 - protein, 30 aa, Artificial Sequence
  Cyclic GFR-binding peptide
  MOD_RES (2)..(2): Xaa is C or S
AXSEVTMNRHKRLVVNKNEDYYLISTASMK

SEQ ID NO: 85805 - protein, 29 aa, Artificial Sequence
  Cyclic GFR-binding peptide
SVAMGYHYKLYTVVGKDKYLISIPSLKTP

SEQ ID NO: 85806 - protein, 25 aa, Artificial Sequence
  Cyclic GFR-binding peptide
MNYHYKLIVNSSDDKYLVSIPSLKT

SEQ ID NO: 85807 - protein, 38 aa, Artificial Sequence
  Cyclic GFR-binding peptide
  MOD_RES (32)..(33): Xaa is C or S
SEVVMDYHYKLVVNNASDKYLISIPSLRTPVXXTPPTS

SEQ ID NO: 85808 - protein, 28 aa, Artificial Sequence
  Cyclic GFR-binding peptide
KVIMPIKGYIKPTKGIFYLINIPSLDQS

SEQ ID NO: 85809 - protein, 35 aa, Artificial Sequence
  Cyclic GFR-binding peptide
  MOD_RES (30)..(31): Xaa is C or S
VVMDYHYKLVVNNASDKYLISIPSLRTPVXXTPPT

SEQ ID NO: 85810 - protein, 23 aa, Artificial Sequence
  Cyclic GFR-binding peptide
EYKFKLLVRGNDLYLMSIPETKV

SEQ ID NO: 85811 - protein, 32 aa, Artificial Sequence
  Cyclic GFR-binding peptide
  MOD_RES (27)..(28): Xaa is C or S
MPIKGYVKPKRGVFYLINIPSLAQPVXXPAAS

SEQ ID NO: 85812 - protein, 30 aa, Artificial Sequence; identical to SEQ ID NO: 40371
  Cyclic GFR-binding peptide

SEQ ID NO: 85813 - protein, 30 aa, Artificial Sequence; identical to SEQ ID NO: 31818
  Cyclic GFR-binding peptide
  MOD_RES (28)..(29): Xaa is C or S

SEQ ID NO: 85814 - protein, 30 aa, Artificial Sequence
  Cyclic GFR-binding peptide
  MOD_RES (1)..(1): Xaa is C or S
XSKVIMPIKGYIKPTKGIFYLINIPSLDQS

SEQ ID NO: 85815 - protein, 28 aa, Artificial Sequence
  Cyclic GFR-binding peptide
  MOD_RES (26)..(26): Xaa is C or S
RYKKLIVNSSDDFYLVSIANLKTPAXTP

SEQ ID NO: 85816 - protein, 35 aa, Artificial Sequence; identical to SEQ ID NO: 40375
  Cyclic GFR-binding peptide
  MOD_RES (1)..(3)..(35): Xaa is C or S

SEQ ID NO: 85817 - protein, 31 aa, Artificial Sequence; identical to SEQ ID NO: 3539
  Cyclic GFR-binding peptide
  MOD_RES (31)..(31): Xaa is C or S

SEQ ID NO: 85818 - protein, 35 aa, Artificial Sequence; identical to SEQ ID NO: 40378
  Cyclic GFR-binding peptide
  MOD_RES (1)..(34)..(35): Xaa is C or S

SEQ ID NO: 85819 - protein, 38 aa, Artificial Sequence; identical to SEQ ID NO: 3541
  Cyclic GFR-binding peptide
  MOD_RES (1)..(33): Xaa is C or S

SEQ ID NO: 85820 - protein, 31 aa, Artificial Sequence; identical to SEQ ID NO: 3542
  Cyclic GFR-binding peptide
  MOD_RES (28)..(29): Xaa is C or S

SEQ ID NO: 85821 - protein, 30 aa, Artificial Sequence; identical to SEQ ID NO: 31825
  Cyclic GFR-binding peptide
  MOD_RES (29)..(30): Xaa is C or S

SEQ ID NO: 85822 - protein, 27 aa, Artificial Sequence
  Cyclic GFR-binding peptide
SRVIMRHKRLVKPKRGVYYLISTASLA

SEQ ID NO: 85823 - protein, 38 aa, Artificial Sequence; identical to SEQ ID NO: 40381
  Cyclic GFR-binding peptide
  MOD_RES (2)..(33)..(34): Xaa is C or S

SEQ ID NO: 85824 - protein, 35 aa, Artificial Sequence; identical to SEQ ID NO: 31827
  Cyclic GFR-binding peptide
  MOD_RES (1)..(3)..(35): Xaa is C or S

SEQ ID NO: 85825 - protein, 23 aa, Artificial Sequence
  Cyclic GFR-binding peptide
IMEYKFKLLVRGNDLYLMSIPET

SEQ ID NO: 85826 - protein, 30 aa, Artificial Sequence; identical to SEQ ID NO: 31829
  Cyclic GFR-binding peptide
  MOD_RES (26)..(27): Xaa is C or S

SEQ ID NO: 85827 - protein, 34 aa, Artificial Sequence; identical to SEQ ID NO: 31830
  Cyclic GFR-binding peptide
  MOD_RES (1)..(33)..(34): Xaa is C or S

SEQ ID NO: 85828 - protein, 30 aa, Artificial Sequence
  Cyclic GFR-binding peptide
  MOD_RES (28)..(29): Xaa is C or S
MNPIKGYVVNKNEDFYLINIPSMKEPVXXP

SEQ ID NO: 85829 - protein, 31 aa, Artificial Sequence; identical to SEQ ID NO: 31832
  Cyclic GFR-binding peptide
  MOD_RES (29)..(30): Xaa is C or S

SEQ ID NO: 85830 - protein, 32 aa, Artificial Sequence; identical to SEQ ID NO: 14091
  Cyclic GFR-binding peptide
  MOD_RES (29)..(30): Xaa is C or S

SEQ ID NO: 85831 - protein, 29 aa, Artificial Sequence
  Cyclic GFR-binding peptide
  MOD_RES (1)..(1): Xaa is C or S
XEEVIMPIKGYLLVRGNDFYLMNIPSTKV

SEQ ID NO: 85832 - protein, 21 aa, Artificial Sequence
  Cyclic GFR-binding peptide
RHKRLIKPTKGIYYLISTASL

SEQ ID NO: 85833 - protein, 35 aa, Artificial Sequence; identical to SEQ ID NO: 3549
  Cyclic GFR-binding peptide
  MOD_RES (1)..(3)..(35): Xaa is C or S

SEQ ID NO: 85834 - protein, 23 aa, Artificial Sequence
  Cyclic GFR-binding peptide
RHKRLVVNNAADYYLISTASLRA

SEQ ID NO: 85835 - protein, 25 aa, Artificial Sequence
  Cyclic GFR-binding peptide
VVMGRYKKLIIQQKDNFYLMSIANM

SEQ ID NO: 85836 - protein, 26 aa, Artificial Sequence
  Cyclic GFR-binding peptide
VVMERHKRLVVKDYEDYYLMSTASLE

SEQ ID NO: 85837 - protein, 41 aa, Artificial Sequence; identical to SEQ ID NO: 3561
  Cyclic GFR-binding peptide
  MOD_RES (2)..(4)..(36)..(37): Xaa is C or S

SEQ ID NO: 85838 - protein, 29 aa, Artificial Sequence
  Cyclic GFR-binding peptide
  MOD_RES (29)..(29): Xaa is C or S
VVMYHYKLVKPTRGVKYLISIPSLDQPVX

SEQ ID NO: 85839 - protein, 30 aa, Artificial Sequence; identical to SEQ ID NO: 31842
  Cyclic GFR-binding peptide
  MOD_RES (1)..(3): Xaa is C or S

SEQ ID NO: 85840 - protein, 26 aa, Artificial Sequence
  Cyclic GFR-binding peptide
  MOD_RES (1)..(1): Xaa is C or S
XSKVVMYHYKLVKPTRGVKYLISIPS

SEQ ID NO: 85841 - protein, 29 aa, Artificial Sequence
  Cyclic GFR-binding peptide
SEVTMNEYKFKVVNKNEDLYLISIPEMKE

SEQ ID NO: 85842 - protein, 27 aa, Artificial Sequence
  Cyclic GFR-binding peptide
  MOD_RES (2)..(2): Xaa is C or S
KXSKVIMYHYKLIKPTKGIKYLISIPS

SEQ ID NO: 85843 - protein, 24 aa, Artificial Sequence
  Cyclic GFR-binding peptide
VIMRYKKLVKPKRGVFYLISIANL

SEQ ID NO: 85844 - protein, 33 aa, Artificial Sequence; identical to SEQ ID NO: 14110
  Cyclic GFR-binding peptide
  MOD_RES (1)..(33): Xaa is C or S

SEQ ID NO: 85845 - protein, 31 aa, Artificial Sequence; identical to SEQ ID NO: 3574
  Cyclic GFR-binding peptide
  MOD_RES (2)..(2): Xaa is C or S

SEQ ID NO: 85846 - protein, 27 aa, Artificial Sequence
  Cyclic GFR-binding peptide
KVVMRYKKLVKPTRGVFYLISIANLDQ

SEQ ID NO: 85847 - protein, 32 aa, Artificial Sequence; identical to SEQ ID NO: 3576
  Cyclic GFR-binding peptide
  MOD_RES (2)..(4): Xaa is C or S

SEQ ID NO: 85848 - protein, 34 aa, Artificial Sequence; identical to SEQ ID NO: 3579
  Cyclic GFR-binding peptide
  MOD_RES (1)..(3)..(34): Xaa is C or S

SEQ ID NO: 85849 - protein, 34 aa, Artificial Sequence; identical to SEQ ID NO: 31852
  Cyclic GFR-binding peptide
  MOD_RES (2)..(4): Xaa is C or S

SEQ ID NO: 85850 - protein, 24 aa, Artificial Sequence
  Cyclic GFR-binding peptide
MNRHKRLVVNKNEDYYLISTASMK

SEQ ID NO: 85851 - protein, 28 aa, Artificial Sequence
  Cyclic GFR-binding peptide
  MOD_RES (26)..(27): Xaa is C or S
EYKFKLLVRGNDLYLMSIPETKVPAXXT

SEQ ID NO: 85852 - protein, 32 aa, Artificial Sequence; identical to SEQ ID NO: 3586
  Cyclic GFR-binding peptide
  MOD_RES (26)..(27): Xaa is C or S

SEQ ID NO: 85853 - protein, 26 aa, Artificial Sequence
  Cyclic GFR-binding peptide
MDPIKGYVVKENEDFYLMNIPSLETP

SEQ ID NO: 85854 - protein, 25 aa, Artificial Sequence
  Cyclic GFR-binding peptide
MNYHYKLVVNKNEDKYLISIPSMKE

SEQ ID NO: 85855 - protein, 27 aa, Artificial Sequence
  Cyclic GFR-binding peptide
  MOD_RES (26)..(27): Xaa is C or S
RHKRLIVNSSDDYYLVSTASLQTPAXX

SEQ ID NO: 85856 - protein, 34 aa, Artificial Sequence; identical to SEQ ID NO: 40418
  Cyclic GFR-binding peptide
  MOD_RES (28)..(29): Xaa is C or S

SEQ ID NO: 85857 - protein, 29 aa, Artificial Sequence
  Cyclic GFR-binding peptide
  MOD_RES (1)..(3): Xaa is C or S
XGXEEVIMYHYKLLLVRGNDKYLMSIPST

SEQ ID NO: 85858 - protein, 35 aa, Artificial Sequence; identical to SEQ ID NO: 75174
  Cyclic GFR-binding peptide
  MOD_RES (2)..(34)..(35): Xaa is C or S

SEQ ID NO: 85859 - protein, 36 aa, Artificial Sequence; identical to SEQ ID NO: 40422
  Cyclic GFR-binding peptide
  MOD_RES (31)..(32): Xaa is C or S

SEQ ID NO: 85860 - protein, 28 aa, Artificial Sequence
  Cyclic GFR-binding peptide
  MOD_RES (26)..(27): Xaa is C or S
PIKGYVVNNASDFYLINIPSLRTPVXXT

SEQ ID NO: 85861 - protein, 29 aa, Artificial Sequence
  Cyclic GFR-binding peptide
  MOD_RES (28)..(28): Xaa is C or S
MNEYKFKIVNSSDDLYLVSIPELKTPAXT

SEQ ID NO: 85862 - protein, 25 aa, Artificial Sequence
  Cyclic GFR-binding peptide
MDRHKRLVVNNASDYYLISTASLRT

SEQ ID NO: 85863 - protein, 28 aa, Artificial Sequence
  Cyclic GFR-binding peptide
  MOD_RES (27)..(28): Xaa is C or S
NPIKGYIVNSSDDFYLVNIPSLKTPAXX

SEQ ID NO: 85864 - protein, 29 aa, Artificial Sequence
  Cyclic GFR-binding peptide
GEVVMDYHYKLVVKENEDKYLMSIPSLET

SEQ ID NO: 85865 - protein, 31 aa, Artificial Sequence; identical to SEQ ID NO: 3594
  Cyclic GFR-binding peptide
  MOD_RES (28)..(29): Xaa is C or S

SEQ ID NO: 85866 - protein, 27 aa, Artificial Sequence
  Cyclic GFR-binding peptide
VMNPIKGYIVNSSDDFYLVNIPSLKTP

SEQ ID NO: 85867 - protein, 31 aa, Artificial Sequence
  Cyclic GFR-binding peptide
  MOD_RES (28)..(29): Xaa is C or S
MDYHYKLVVNNASDKYLISIPSLRTPVXXTP

SEQ ID NO: 85868 - protein, 29 aa, Artificial Sequence
  Cyclic GFR-binding peptide
  MOD_RES (27)..(28): Xaa is C or S
ERYKKLTPVGMDDFYLVSIANLKTPVXXA

SEQ ID NO: 85869 - protein, 31 aa, Artificial Sequence; identical to SEQ ID NO: 14148
  Cyclic GFR-binding peptide
  MOD_RES (31)..(31): Xaa is C or S

SEQ ID NO: 85870 - protein, 37 aa, Artificial Sequence; identical to SEQ ID NO: 3601
  Cyclic GFR-binding peptide
  MOD_RES (2)..(4)..(36): Xaa is C or S

SEQ ID NO: 85871 - protein, 25 aa, Artificial Sequence
  Cyclic GFR-binding peptide
VVMEPIKGYVVKDYEDFYLMNIPSL

SEQ ID NO: 85872 - protein, 24 aa, Artificial Sequence
  Cyclic GFR-binding peptide
VVMDPIKGYVVNNAADFYLINIPS

SEQ ID NO: 85873 - protein, 34 aa, Artificial Sequence
  Cyclic GFR-binding peptide
  MOD_RES (28)..(29): Xaa is C or S
MNRYKKLVVNKNEDFYLISIANMKEPVXXPEPIG

SEQ ID NO: 85874 - protein, 36 aa, Artificial Sequence
  Cyclic GFR-binding peptide
  MOD_RES (31)..(32): Xaa is C or S
EVVMDRHKRLVVNNASDYYLISTASLRTPVXXTPPT

SEQ ID NO: 85875 - protein, 28 aa, Artificial Sequence
  Cyclic GFR-binding peptide
  MOD_RES (26)..(27): Xaa is C or S
PIKGYVKPKRGVFYLINIPSLAQPVXXP

SEQ ID NO: 85876 - protein, 31 aa, Artificial Sequence; identical to SEQ ID NO: 3606
  Cyclic GFR-binding peptide
  MOD_RES (29)..(30): Xaa is C or S

SEQ ID NO: 85877 - protein, 20 aa, Artificial Sequence
  Cyclic GFR-binding peptide
PIKGYVVNNASDFYLINIPS

SEQ ID NO: 85878 - protein, 37 aa, Artificial Sequence
  Cyclic GFR-binding peptide
  MOD_RES (31)..(32): Xaa is C or S
SRVIMPIKGYVKPKRGVFYLINIPSLAQPVXXPAASA

SEQ ID NO: 85879 - protein, 29 aa, Artificial Sequence
  Cyclic GFR-binding peptide
  MOD_RES (29)..(29): Xaa is C or S
VIMPIKGYLLVRGNDFYLMNIPSTKVPAX

SEQ ID NO: 85880 - protein, 26 aa, Artificial Sequence
  Cyclic GFR-binding peptide
MYHYKLLLVRGNDKYLMSIPSTKVPA

SEQ ID NO: 85881 - protein, 29 aa, Artificial Sequence
  Cyclic GFR-binding peptide
  MOD_RES (27)..(27): Xaa is C or S
NPIKGYIVNSSDDFYLVNIPSLKTPAXTP

SEQ ID NO: 85882 - protein, 34 aa, Artificial Sequence; identical to SEQ ID NO: 40459
  Cyclic GFR-binding peptide
  MOD_RES (31)..(32): Xaa is C or S

SEQ ID NO: 85883 - protein, 26 aa, Artificial Sequence
  Cyclic GFR-binding peptide
AEVVMDYHYKLVVNNAADKYLISIPS

SEQ ID NO: 85884 - protein, 32 aa, Artificial Sequence; identical to SEQ ID NO: 3609
  Cyclic GFR-binding peptide
  MOD_RES (28)..(29): Xaa is C or S

SEQ ID NO: 85885 - protein, 22 aa, Artificial Sequence
  Cyclic GFR-binding peptide
VMRYKKLVKPTRGVFYLISIAN

SEQ ID NO: 85886 - protein, 27 aa, Artificial Sequence
  Cyclic GFR-binding peptide
  MOD_RES (27)..(27): Xaa is C or S
GYHYKLYTVVGKDKYLISIPSLKTPVX

SEQ ID NO: 85887 - protein, 24 aa, Artificial Sequence
  Cyclic GFR-binding peptide
MPIKGYVKPKRGVFYLINIPSLAQ

SEQ ID NO: 85888 - protein, 35 aa, Artificial Sequence; identical to SEQ ID NO: 3617
  Cyclic GFR-binding peptide
  MOD_RES (1)..(3)..(34)..(35): Xaa is C or S

SEQ ID NO: 85889 - protein, 31 aa, Artificial Sequence; identical to SEQ ID NO: 31882
  Cyclic GFR-binding peptide
  MOD_RES (1)..(1): Xaa is C or S

SEQ ID NO: 85890 - protein, 41 aa, Artificial Sequence
  Cyclic GFR-binding peptide
  MOD_RES (2)..(4)..(35)..(36): Xaa is C or S
LXGXEEVIMRHKRLLLVRGNDYYLMSTASTKVPAXXTSPVR

SEQ ID NO: 85891 - protein, 34 aa, Artificial Sequence; identical to SEQ ID NO: 31884
  Cyclic GFR-binding peptide
  MOD_RES (32)..(33): Xaa is C or S

SEQ ID NO: 85892 - protein, 39 aa, Artificial Sequence; identical to SEQ ID NO: 31885
  Cyclic GFR-binding peptide
  MOD_RES (1)..(33)..(34): Xaa is C or S

SEQ ID NO: 85893 - protein, 23 aa, Artificial Sequence
  Cyclic GFR-binding peptide
VMGYHYKLIIQQKDNKYLMSIPS

SEQ ID NO: 85894 - protein, 40 aa, Artificial Sequence
  Cyclic GFR-binding peptide
  MOD_RES (2)..(4)..(36)..(37): Xaa is C or S
SXGXRDVVMGRHKRLIIQQKDNYYLMSTASMKTPTXXPGA

SEQ ID NO: 85895 - protein, 30 aa, Artificial Sequence
  Cyclic GFR-binding peptide
  MOD_RES (2)..(2): Xaa is C or S
GXESVAMGRHKRLYTVVGKDYYLISTASLK

SEQ ID NO: 85896 - protein, 35 aa, Artificial Sequence
  Cyclic GFR-binding peptide
  MOD_RES (31)..(32): Xaa is C or S
DVVMGRHKRLIIQQKDNYYLMSTASMKTPTXXPGA

SEQ ID NO: 85897 - protein, 31 aa, Artificial Sequence; identical to SEQ ID NO: 3624
  Cyclic GFR-binding peptide
  MOD_RES (28)..(29): Xaa is C or S

SEQ ID NO: 85898 - protein, 35 aa, Artificial Sequence; identical to SEQ ID NO: 31895
  Cyclic GFR-binding peptide
  MOD_RES (31)..(32): Xaa is C or S

SEQ ID NO: 85899 - protein, 30 aa, Artificial Sequence; identical to SEQ ID NO: 31897
  Cyclic GFR-binding peptide

SEQ ID NO: 85900 - protein, 31 aa, Artificial Sequence
  Cyclic GFR-binding peptide
  MOD_RES (2)..(2): Xaa is C or S
AXSEVTMNPIKGYVVNKNEDFYLINIPSMKE

SEQ ID NO: 85901 - protein, 38 aa, Artificial Sequence; identical to SEQ ID NO: 40490
  Cyclic GFR-binding peptide
  MOD_RES (2)..(4)..(36)..(37): Xaa is C or S

SEQ ID NO: 85902 - protein, 33 aa, Artificial Sequence; identical to SEQ ID NO: 40497
  Cyclic GFR-binding peptide
  MOD_RES (29)..(30): Xaa is C or S

SEQ ID NO: 85903 - protein, 33 aa, Artificial Sequence; identical to SEQ ID NO: 3634
  Cyclic GFR-binding peptide
  MOD_RES (28)..(29): Xaa is C or S

SEQ ID NO: 85904 - protein, 28 aa, Artificial Sequence
  Cyclic GFR-binding peptide
EVVMERHKRLVVKDYEDYYLMSTASLET

SEQ ID NO: 85905 - protein, 35 aa, Artificial Sequence; identical to SEQ ID NO: 40502
  Cyclic GFR-binding peptide
  MOD_RES (1)..(3)..(35): Xaa is C or S

SEQ ID NO: 85906 - protein, 33 aa, Artificial Sequence; identical to SEQ ID NO: 31908
  Cyclic GFR-binding peptide
  MOD_RES (31)..(32): Xaa is C or S

SEQ ID NO: 85907 - protein, 36 aa, Artificial Sequence; identical to SEQ ID NO: 3638
  Cyclic GFR-binding peptide
  MOD_RES (2)..(33)..(34): Xaa is C or S

SEQ ID NO: 85908 - protein, 40 aa, Artificial Sequence; identical to SEQ ID NO: 3640
  Cyclic GFR-binding peptide
  MOD_RES (2)..(34): Xaa is C or S

SEQ ID NO: 85909 - protein, 36 aa, Artificial Sequence; identical to SEQ ID NO: 40507
  Cyclic GFR-binding peptide
  MOD_RES (31)..(31): Xaa is C or S

SEQ ID NO: 85910 - protein, 35 aa, Artificial Sequence; identical to SEQ ID NO: 40508
  Cyclic GFR-binding peptide
  MOD_RES (30)..(31): Xaa is C or S

SEQ ID NO: 85911 - protein, 39 aa, Artificial Sequence; identical to SEQ ID NO: 40509
  Cyclic GFR-binding peptide
  MOD_RES (1)..(33)..(34): Xaa is C or S

SEQ ID NO: 85912 - protein, 40 aa, Artificial Sequence; identical to SEQ ID NO: 3646
  Cyclic GFR-binding peptide
  MOD_RES (2)..(4)..(36)..(37): Xaa is C or S

SEQ ID NO: 85913 - protein, 32 aa, Artificial Sequence; identical to SEQ ID NO: 3648
  Cyclic GFR-binding peptide
  MOD_RES (31)..(32): Xaa is C or S

SEQ ID NO: 85914 - protein, 27 aa, Artificial Sequence
  Cyclic GFR-binding peptide
  MOD_RES (27)..(27): Xaa is C or S
ERHKRLVVKDYEDYYLMSTASLETPVX

SEQ ID NO: 85915 - protein, 29 aa, Artificial Sequence
  Cyclic GFR-binding peptide
EVTMNYHYKLVVNKNEDKYLISIPSMKEP

SEQ ID NO: 85916 - protein, 36 aa, Artificial Sequence; identical to SEQ ID NO: 40516
  Cyclic GFR-binding peptide
  MOD_RES (2)..(33)..(34): Xaa is C or S

SEQ ID NO: 85917 - protein, 36 aa, Artificial Sequence; identical to SEQ ID NO: 3651
  Cyclic GFR-binding peptide
  MOD_RES (1)..(34)..(35): Xaa is C or S

SEQ ID NO: 85918 - protein, 28 aa, Artificial Sequence
  Cyclic GFR-binding peptide
  MOD_RES (28)..(28): Xaa is C or S
MGRYKKLIIQQKDNFYLMSIANMKTPTX

SEQ ID NO: 85919 - protein, 32 aa, Artificial Sequence; identical to SEQ ID NO: 3652
  Cyclic GFR-binding peptide
  MOD_RES (2)..(4): Xaa is C or S

SEQ ID NO: 85920 - protein, 32 aa, Artificial Sequence; identical to SEQ ID NO: 3653
  Cyclic GFR-binding peptide
  MOD_RES (1)..(1): Xaa is C or S

SEQ ID NO: 85921 - protein, 33 aa, Artificial Sequence
  Cyclic GFR-binding peptide
  MOD_RES (1)..(3): Xaa is C or S
XGXESVAMGRHKRLYTVVGKDYYLISTASLKTP

SEQ ID NO: 85922 - protein, 28 aa, Artificial Sequence
  Cyclic GFR-binding peptide
VTMNRYKKLVVNKNEDFYLISIANMKEP

SEQ ID NO: 85923 - protein, 23 aa, Artificial Sequence
  Cyclic GFR-binding peptide
RYKKLVKPKRGVFYLISIANLAQ

SEQ ID NO: 85924 - protein, 38 aa, Artificial Sequence; identical to SEQ ID NO: 3659
  Cyclic GFR-binding peptide
  MOD_RES (1)..(3)..(35)..(36): Xaa is C or S

SEQ ID NO: 85925 - protein, 25 aa, Artificial Sequence
  Cyclic GFR-binding peptide
VVMDRYKKLVVNNAADFYLISIANL

SEQ ID NO: 85926 - protein, 27 aa, Artificial Sequence
  Cyclic GFR-binding peptide
  MOD_RES (26)..(27): Xaa is C or S
EYKFKIVNSSDDLYLVSIPELKTPAXX

SEQ ID NO: 85927 - protein, 33 aa, Artificial Sequence; identical to SEQ ID NO: 31933
  Cyclic GFR-binding peptide
  MOD_RES (28)..(29): Xaa is C or S

SEQ ID NO: 85928 - protein, 32 aa, Artificial Sequence; identical to SEQ ID NO: 75216
  Cyclic GFR-binding peptide
  MOD_RES (27)..(28): Xaa is C or S

SEQ ID NO: 85929 - protein, 32 aa, Artificial Sequence; identical to SEQ ID NO: 31940
  Cyclic GFR-binding peptide
  MOD_RES (31)..(32): Xaa is C or S

SEQ ID NO: 85930 - protein, 32 aa, Artificial Sequence; identical to SEQ ID NO: 3665
  Cyclic GFR-binding peptide
  MOD_RES (1)..(3): Xaa is C or S

SEQ ID NO: 85931 - protein, 22 aa, Artificial Sequence
  Cyclic GFR-binding peptide
RHKRLIIQQKDNYYLMSTASMK

SEQ ID NO: 85932 - protein, 33 aa, Artificial Sequence
  Cyclic GFR-binding peptide
  MOD_RES (1)..(3): Xaa is C or S
XGXRDVVMGEYKFKIIQQKDNLYLMSIPEMKTP

SEQ ID NO: 85933 - protein, 34 aa, Artificial Sequence; identical to SEQ ID NO: 3667
  Cyclic GFR-binding peptide
  MOD_RES (2)..(34): Xaa is C or S

SEQ ID NO: 85934 - protein, 37 aa, Artificial Sequence; identical to SEQ ID NO: 31951
  Cyclic GFR-binding peptide
  MOD_RES (1)..(33)..(34): Xaa is C or S

SEQ ID NO: 85935 - protein, 33 aa, Artificial Sequence
  Cyclic GFR-binding peptide
  MOD_RES (28)..(29): Xaa is C or S
MNRHKRLVVNKNEDYYLISTASMKEPVXXPEPI

SEQ ID NO: 85936 - protein, 25 aa, Artificial Sequence
  Cyclic GFR-binding peptide
MNRHKRLIVNSSDDYYLVSTASLKT

SEQ ID NO: 85937 - protein, 26 aa, Artificial Sequence
  Cyclic GFR-binding peptide
NEYKFKIVNNSSDLYLVSIPELKTPA

SEQ ID NO: 85938 - protein, 33 aa, Artificial Sequence
  Cyclic GFR-binding peptide
  MOD_RES (2)..(4): Xaa is C or S
RXGXESVAMGRHKRLYTVVGKDYYLISTASLKT

SEQ ID NO: 85939 - protein, 35 aa, Artificial Sequence
  Cyclic GFR-binding peptide
  MOD_RES (1)..(3)..(35): Xaa is C or S
XAXSEVTMNRHKRLVVNKNEDYYLISTASMKEPVX

SEQ ID NO: 85940 - protein, 31 aa, Artificial Sequence; identical to SEQ ID NO: 40545
  Cyclic GFR-binding peptide

SEQ ID NO: 85941 - protein, 24 aa, Artificial Sequence
  Cyclic GFR-binding peptide
GERHKRLTPVGMDDYYLVSTASLK

SEQ ID NO: 85942 - protein, 27 aa, Artificial Sequence
  Cyclic GFR-binding peptide
  MOD_RES (27)..(27): Xaa is C or S
DYHYKLVVKENEDKYLMSIPSLETPVX

SEQ ID NO: 85943 - protein, 34 aa, Artificial Sequence; identical to SEQ ID NO: 40551
  Cyclic GFR-binding peptide
  MOD_RES (1)..(32)..(33): Xaa is C or S

SEQ ID NO: 85944 - protein, 33 aa, Artificial Sequence; identical to SEQ ID NO: 3688
  Cyclic GFR-binding peptide
  MOD_RES (28)..(29): Xaa is C or S

SEQ ID NO: 85945 - protein, 34 aa, Artificial Sequence
  Cyclic GFR-binding peptide
  MOD_RES (2)..(4): Xaa is C or S
RXAXSEVTMNEYKFKVVNKNEDLYLISIPEMKEP

SEQ ID NO: 85946 - protein, 22 aa, Artificial Sequence
  Cyclic GFR-binding peptide
EYHYKLVVKDYEDKYLMSIPSL

SEQ ID NO: 85947 - protein, 36 aa, Artificial Sequence; identical to SEQ ID NO: 31967
  Cyclic GFR-binding peptide
  MOD_RES (1)..(33)..(34): Xaa is C or S

SEQ ID NO: 85948 - protein, 36 aa, Artificial Sequence; identical to SEQ ID NO: 3694
  Cyclic GFR-binding peptide
  MOD_RES (32)..(33): Xaa is C or S

SEQ ID NO: 85949 - protein, 30 aa, Artificial Sequence; identical to SEQ ID NO: 31971
  Cyclic GFR-binding peptide
  MOD_RES (2)..(4): Xaa is C or S

SEQ ID NO: 85950 - protein, 33 aa, Artificial Sequence; identical to SEQ ID NO: 40556
  Cyclic GFR-binding peptide
  MOD_RES (27)..(28): Xaa is C or S

SEQ ID NO: 85951 - protein, 36 aa, Artificial Sequence; identical to SEQ ID NO: 3701
  Cyclic GFR-binding peptide
  MOD_RES (2)..(34)..(35): Xaa is C or S

SEQ ID NO: 85952 - protein, 33 aa, Artificial Sequence; identical to SEQ ID NO: 75228
  Cyclic GFR-binding peptide
  MOD_RES (29)..(30): Xaa is C or S

SEQ ID NO: 85953 - protein, 33 aa, Artificial Sequence
  Cyclic GFR-binding peptide
  MOD_RES (28)..(29): Xaa is C or S
MGYHYKLIIQQKDNKYLMSIPSMKTPTXXPGAS

SEQ ID NO: 85954 - protein, 32 aa, Artificial Sequence; identical to SEQ ID NO: 31979
  Cyclic GFR-binding peptide
  MOD_RES (28)..(28): Xaa is C or S

SEQ ID NO: 85955 - protein, 23 aa, Artificial Sequence
  Cyclic GFR-binding peptide
DEYKFKVVNNASDLYLISIPELR

SEQ ID NO: 85956 - protein, 32 aa, Artificial Sequence; identical to SEQ ID NO: 75229
  Cyclic GFR-binding peptide
  MOD_RES (1)..(3): Xaa is C or S

SEQ ID NO: 85957 - protein, 22 aa, Artificial Sequence
  Cyclic GFR-binding peptide
RHKRLVKPKRGVYYLISTASLA

SEQ ID NO: 85958 - protein, 31 aa, Artificial Sequence; identical to SEQ ID NO: 3706
  Cyclic GFR-binding peptide
  MOD_RES (29)..(29): Xaa is C or S

SEQ ID NO: 85959 - protein, 27 aa, Artificial Sequence
  Cyclic GFR-binding peptide
EEVIMRYKKLLLVRGNDFYLMSIANTK

SEQ ID NO: 85960 - protein, 34 aa, Artificial Sequence; identical to SEQ ID NO: 40562
  Cyclic GFR-binding peptide
  MOD_RES (31)..(32): Xaa is C or S

SEQ ID NO: 85961 - protein, 35 aa, Artificial Sequence
  Cyclic GFR-binding peptide
  MOD_RES (2)..(34)..(35): Xaa is C or S
AXSEVTMNRYKKLVVNKNEDFYLISIANMKEPVXX

SEQ ID NO: 85962 - protein, 27 aa, Artificial Sequence
  Cyclic GFR-binding peptide
MGEYKFKIIQQKDNLYLMSIPEMKTPT

SEQ ID NO: 85963 - protein, 22 aa, Artificial Sequence
  Cyclic GFR-binding peptide
EYKFKVVNNASDLYLISIPELR

SEQ ID NO: 85964 - protein, 32 aa, Artificial Sequence; identical to SEQ ID NO: 31980
  Cyclic GFR-binding peptide
  MOD_RES (1)..(3): Xaa is C or S

SEQ ID NO: 85965 - protein, 31 aa, Artificial Sequence; identical to SEQ ID NO: 31982
  Cyclic GFR-binding peptide
  MOD_RES (31)..(31): Xaa is C or S

SEQ ID NO: 85966 - protein, 38 aa, Artificial Sequence
  Cyclic GFR-binding peptide
  MOD_RES (1)..(3)..(35)..(36): Xaa is C or S
XAXSEVTMNPIKGYVVNKNEDFYLINIPSMKEPVXXPE

SEQ ID NO: 85967 - protein, 32 aa, Artificial Sequence; identical to SEQ ID NO: 40567
  Cyclic GFR-binding peptide
  MOD_RES (31)..(32): Xaa is C or S

SEQ ID NO: 85968 - protein, 25 aa, Artificial Sequence
  Cyclic GFR-binding peptide
VVMNRHKRLIVNSSDDYYLVSTASL

SEQ ID NO: 85969 - protein, 25 aa, Artificial Sequence
  Cyclic GFR-binding peptide
VMGRHKRLIIQQKDNYYLMSTASMK

SEQ ID NO: 85970 - protein, 30 aa, Artificial Sequence; identical to SEQ ID NO: 3716
  Cyclic GFR-binding peptide
  MOD_RES (28)..(29): Xaa is C or S

SEQ ID NO: 85971 - protein, 40 aa, Artificial Sequence
  Cyclic GFR-binding peptide
  MOD_RES (1)..(3)..(35)..(36): Xaa is C or S
XGXSEVVMDYHYKLVVNNASDKYLISIPSLRTPVXXTPPT

SEQ ID NO: 85972 - protein, 39 aa, Artificial Sequence
  Cyclic GFR-binding peptide
  MOD_RES (1)..(33)..(34): Xaa is C or S
XSRVVMNEYKFKIVNSSDDLYLVSIPELKTPAXXPKPVH

SEQ ID NO: 85973 - protein, 22 aa, Artificial Sequence
  Cyclic GFR-binding peptide
MEYKFKVKPTRGVLYLISIPEL

SEQ ID NO: 85974 - protein, 29 aa, Artificial Sequence
  Cyclic GFR-binding peptide
  MOD_RES (2)..(2): Xaa is C or S
AXSEVTMNEYKFKVVNKNEDLYLISIPEM

SEQ ID NO: 85975 - protein, 30 aa, Artificial Sequence
  Cyclic GFR-binding peptide
  MOD_RES (1)..(1): Xaa is C or S
XSEVVMDYHYKLVVNNASDKYLISIPSLRT

SEQ ID NO: 85976 - protein, 40 aa, Artificial Sequence; identical to SEQ ID NO: 3726
  Cyclic GFR-binding peptide
  MOD_RES (1)..(3)..(35)..(36): Xaa is C or S

SEQ ID NO: 85977 - protein, 36 aa, Artificial Sequence; identical to SEQ ID NO: 75246
  Cyclic GFR-binding peptide
  MOD_RES (31)..(32): Xaa is C or S

SEQ ID NO: 85978 - protein, 26 aa, Artificial Sequence
  Cyclic GFR-binding peptide
RDVVMGRYKKLIIQQKDNFYLMSIAN

SEQ ID NO: 85979 - protein, 36 aa, Artificial Sequence; identical to SEQ ID NO: 32000
  Cyclic GFR-binding peptide
  MOD_RES (2)..(34)..(35): Xaa is C or S

SEQ ID NO: 85980 - protein, 35 aa, Artificial Sequence
  Cyclic GFR-binding peptide
  MOD_RES (1)..(32)..(33): Xaa is C or S
XEEVIMEYKFKLLVRGNDLYLMSIPETKVPAXXTS

SEQ ID NO: 85981 - protein, 32 aa, Artificial Sequence; identical to SEQ ID NO: 75250
  Cyclic GFR-binding peptide
  MOD_RES (1)..(3): Xaa is C or S

SEQ ID NO: 85982 - protein, 38 aa, Artificial Sequence; identical to SEQ ID NO: 40583
  Cyclic GFR-binding peptide
  MOD_RES (2)..(4)..(36)..(37): Xaa is C or S

SEQ ID NO: 85983 - protein, 34 aa, Artificial Sequence; identical to SEQ ID NO: 3729
  Cyclic GFR-binding peptide
  MOD_RES (30)..(30): Xaa is C or S

SEQ ID NO: 85984 - protein, 27 aa, Artificial Sequence
  Cyclic GFR-binding peptide
AKVVMNEYKFKIVNNSSDLYLVSIPEL

SEQ ID NO: 85985 - protein, 26 aa, Artificial Sequence
  Cyclic GFR-binding peptide
MDRYKKLVVNNASDFYLISIANLRTP

SEQ ID NO: 85986 - protein, 38 aa, Artificial Sequence
  Cyclic GFR-binding peptide
  MOD_RES (2)..(4)..(35)..(36): Xaa is C or S
LXGXEEVIMEYKFKLLVRGNDLYLMSIPETKVPAXXTS

SEQ ID NO: 85987 - protein, 27 aa, Artificial Sequence
  Cyclic GFR-binding peptide
  MOD_RES (1)..(1): Xaa is C or S
XAKVVMNYHYKLIVNNSSDKYLVSIPS

SEQ ID NO: 85988 - protein, 32 aa, Artificial Sequence; identical to SEQ ID NO: 40591
  Cyclic GFR-binding peptide
  MOD_RES (30)..(31): Xaa is C or S

SEQ ID NO: 85989 - protein, 32 aa, Artificial Sequence; identical to SEQ ID NO: 3737
  Cyclic GFR-binding peptide
  MOD_RES (26)..(26): Xaa is C or S

SEQ ID NO: 85990 - protein, 35 aa, Artificial Sequence; identical to SEQ ID NO: 40594
  Cyclic GFR-binding peptide
  MOD_RES (29)..(30): Xaa is C or S

SEQ ID NO: 85991 - protein, 33 aa, Artificial Sequence
  Cyclic GFR-binding peptide
  MOD_RES (31)..(32): Xaa is C or S
EVTMNPIKGYVVNKNEDFYLINIPSMKEPVXXP

SEQ ID NO: 85992 - protein, 33 aa, Artificial Sequence
  Cyclic GFR-binding peptide
  MOD_RES (28)..(29): Xaa is C or S
MDEYKFKVVNNASDLYLISIPELRTPVXXTPPT

SEQ ID NO: 85993 - protein, 30 aa, Artificial Sequence
  Cyclic GFR-binding peptide
  MOD_RES (2)..(4): Xaa is C or S
RXAXSEVTMNEYKFKVVNKNEDLYLISIPE

SEQ ID NO: 85994 - protein, 24 aa, Artificial Sequence
  Cyclic GFR-binding peptide
VMYHYKLVKPTRGVKYLISIPSLD

SEQ ID NO: 85995 - protein, 29 aa, Artificial Sequence
  Cyclic GFR-binding peptide
  MOD_RES (27)..(28): Xaa is C or S
ERHKRLTPVGMDDYYLVSTASLKTPVXXA

SEQ ID NO: 85996 - protein, 28 aa, Artificial Sequence
  Cyclic GFR-binding peptide
  MOD_RES (2)..(2): Xaa is C or S
GXEEVIMRHKRLLLVRGNDYYLMSTAST

SEQ ID NO: 85997 - protein, 31 aa, Artificial Sequence; identical to SEQ ID NO: 3748
  Cyclic GFR-binding peptide
  MOD_RES (27)..(28): Xaa is C or S

SEQ ID NO: 85998 - protein, 35 aa, Artificial Sequence; identical to SEQ ID NO: 32019
  Cyclic GFR-binding peptide
  MOD_RES (31)..(32): Xaa is C or S

SEQ ID NO: 85999 - protein, 24 aa, Artificial Sequence
  Cyclic GFR-binding peptide
RHKRLVVKDYEDYYLMSTASLETP

SEQ ID NO: 86000 - protein, 33 aa, Artificial Sequence; identical to SEQ ID NO: 32021
  Cyclic GFR-binding peptide
  MOD_RES (1)..(3): Xaa is C or S

SEQ ID NO: 86001 - protein, 26 aa, Artificial Sequence
  Cyclic GFR-binding peptide
ERYKKLTPVGMDDFYLVSIANLKTPV

SEQ ID NO: 86002 - protein, 26 aa, Artificial Sequence
  Cyclic GFR-binding peptide
  MOD_RES (26)..(26): Xaa is C or S
EYKFKLLVRGNDLYLMSIPETKVPAX

SEQ ID NO: 86003 - protein, 31 aa, Artificial Sequence; identical to SEQ ID NO: 3754
  Cyclic GFR-binding peptide
  MOD_RES (29)..(29): Xaa is C or S

SEQ ID NO: 86004 - protein, 37 aa, Artificial Sequence
  Cyclic GFR-binding peptide
  MOD_RES (1)..(3)..(35)..(36): Xaa is C or S
XGXRDVVMGRHKRLIIQQKDNYYLMSTASMKTPTXXP

SEQ ID NO: 86005 - protein, 24 aa, Artificial Sequence
  Cyclic GFR-binding peptide
VVMDRHKRLVVNNASDYYLISTAS

SEQ ID NO: 86006 - protein, 35 aa, Artificial Sequence; identical to SEQ ID NO: 14269
  Cyclic GFR-binding peptide
  MOD_RES (2)..(4): Xaa is C or S

SEQ ID NO: 86007 - protein, 28 aa, Artificial Sequence
  Cyclic GFR-binding peptide
GEVVMDRHKRLVVKENEDYYLMSTASLE

SEQ ID NO: 86008 - protein, 29 aa, Artificial Sequence
  Cyclic GFR-binding peptide
  MOD_RES (27)..(28): Xaa is C or S
NEYKFKIVNNSSDLYLVSIPELKTPAXXA

SEQ ID NO: 86009 - protein, 27 aa, Artificial Sequence
  Cyclic GFR-binding peptide
  MOD_RES (1)..(1): Xaa is C or S
XEEVIMEYKFKLLVRGNDLYLMSIPET

SEQ ID NO: 86010 - protein, 20 aa, Artificial Sequence
  Cyclic GFR-binding peptide
EYKFKLLVRGNDLYLMSIPE

SEQ ID NO: 86011 - protein, 29 aa, Artificial Sequence
  Cyclic GFR-binding peptide
VVMERHKRLVVKDYEDYYLMSTASLETPV

SEQ ID NO: 86012 - protein, 22 aa, Artificial Sequence
  Cyclic GFR-binding peptide
EYKFKIVNNSSDLYLVSIPELK

SEQ ID NO: 86013 - protein, 40 aa, Artificial Sequence; identical to SEQ ID NO: 3760
  Cyclic GFR-binding peptide
  MOD_RES (2)..(34)..(35): Xaa is C or S

SEQ ID NO: 86014 - protein, 39 aa, Artificial Sequence; identical to SEQ ID NO: 3763
  Cyclic GFR-binding peptide
  MOD_RES (1)..(3)..(36)..(37): Xaa is C or S

SEQ ID NO: 86015 - protein, 24 aa, Artificial Sequence
  Cyclic GFR-binding peptide
IMEYKFKVKPKRGVLYLISIPELA

SEQ ID NO: 86016 - protein, 39 aa, Artificial Sequence; identical to SEQ ID NO: 3764
  Cyclic GFR-binding peptide
  MOD_RES (2)..(4)..(35)..(36): Xaa is C or S

SEQ ID NO: 86017 - protein, 37 aa, Artificial Sequence; identical to SEQ ID NO: 3765
  Cyclic GFR-binding peptide
  MOD_RES (2)..(34)..(35): Xaa is C or S

SEQ ID NO: 86018 - protein, 40 aa, Artificial Sequence; identical to SEQ ID NO: 32034
  Cyclic GFR-binding peptide
  MOD_RES (1)..(3)..(34)..(35): Xaa is C or S

SEQ ID NO: 86019 - protein, 27 aa, Artificial Sequence
  Cyclic GFR-binding peptide
RVIMPIKGYVKPKRGVFYLINIPSLAQ

SEQ ID NO: 86020 - protein, 35 aa, Artificial Sequence
  Cyclic GFR-binding peptide
  MOD_RES (2)..(33)..(34): Xaa is C or S
KXSRVIMPIKGYVKPKRGVFYLINIPSLAQPVXXP

SEQ ID NO: 86021 - protein, 29 aa, Artificial Sequence
  Cyclic GFR-binding peptide
  MOD_RES (27)..(28): Xaa is C or S
GRYKKLIIQQKDNFYLMSIANMKTPTXXP

SEQ ID NO: 86022 - protein, 33 aa, Artificial Sequence; identical to SEQ ID NO: 3766
  Cyclic GFR-binding peptide
  MOD_RES (28)..(29): Xaa is C or S

SEQ ID NO: 86023 - protein, 34 aa, Artificial Sequence; identical to SEQ ID NO: 32037
  Cyclic GFR-binding peptide
  MOD_RES (2)..(4): Xaa is C or S

SEQ ID NO: 86024 - protein, 30 aa, Artificial Sequence; identical to SEQ ID NO: 32039
  Cyclic GFR-binding peptide

SEQ ID NO: 86025 - protein, 29 aa, Artificial Sequence
  Cyclic GFR-binding peptide
SEVVMDPIKGYVVNNASDFYLINIPSLRT

SEQ ID NO: 86026 - protein, 30 aa, Artificial Sequence; identical to SEQ ID NO: 32040
  Cyclic GFR-binding peptide
  MOD_RES (29)..(30): Xaa is C or S

SEQ ID NO: 86027 - protein, 30 aa, Artificial Sequence; identical to SEQ ID NO: 32041
  Cyclic GFR-binding peptide
  MOD_RES (28)..(29): Xaa is C or S

SEQ ID NO: 86028 - protein, 39 aa, Artificial Sequence
  Cyclic GFR-binding peptide
  MOD_RES (2)..(34)..(35): Xaa is C or S
GXAEVVMDRHKRLVVNNAADYYLISTASLRAPVXXSAPA

SEQ ID NO: 86029 - protein, 27 aa, Artificial Sequence
  Cyclic GFR-binding peptide
VVMDEYKFKVVNNAADLYLISIPELRA

SEQ ID NO: 86030 - protein, 32 aa, Artificial Sequence; identical to SEQ ID NO: 40633
  Cyclic GFR-binding peptide
  MOD_RES (31)..(32): Xaa is C or S

SEQ ID NO: 86031 - protein, 28 aa, Artificial Sequence
  Cyclic GFR-binding peptide
VAMGPIKGYYTVVGKDFYLINIPSLKTP

SEQ ID NO: 86032 - protein, 29 aa, Artificial Sequence
  Cyclic GFR-binding peptide
  MOD_RES (1)..(3): Xaa is C or S
XGXRDVVMGRYKKLIIQQKDNFYLMSIAN

SEQ ID NO: 86033 - protein, 38 aa, Artificial Sequence; identical to SEQ ID NO: 32047
  Cyclic GFR-binding peptide
  MOD_RES (1)..(3)..(35)..(36): Xaa is C or S

SEQ ID NO: 86034 - protein, 39 aa, Artificial Sequence
  Cyclic GFR-binding peptide
  MOD_RES (2)..(33)..(34): Xaa is C or S
GXEEVIMRHKRLLLVRGNDYYLMSTASTKVPAXXTSPVR

SEQ ID NO: 86035 - protein, 29 aa, Artificial Sequence
  Cyclic GFR-binding peptide
SEVTMNRYKKLVVNKNEDFYLISIANMKE

SEQ ID NO: 86036 - protein, 27 aa, Artificial Sequence
  Cyclic GFR-binding peptide
SKVVMRYKKLVKPTRGVFYLISIANLD

SEQ ID NO: 86037 - protein, 41 aa, Artificial Sequence; identical to SEQ ID NO: 3785
  Cyclic GFR-binding peptide
  MOD_RES (2)..(4)..(36)..(37): Xaa is C or S

SEQ ID NO: 86038 - protein, 25 aa, Artificial Sequence
  Cyclic GFR-binding peptide
EEYKFKTPVGMDDLYLVSIPELKTP

SEQ ID NO: 86039 - protein, 29 aa, Artificial Sequence
  Cyclic GFR-binding peptide
  MOD_RES (1)..(3): Xaa is C or S
XKXSRVIMYHYKLVKPKRGVKYLISIPSL

SEQ ID NO: 86040 - protein, 38 aa, Artificial Sequence; identical to SEQ ID NO: 3789
  Cyclic GFR-binding peptide
  MOD_RES (1)..(3)..(34)..(35): Xaa is C or S

SEQ ID NO: 86041 - protein, 35 aa, Artificial Sequence; identical to SEQ ID NO: 40651
  Cyclic GFR-binding peptide
  MOD_RES (2)..(33)..(34): Xaa is C or S

SEQ ID NO: 86042 - protein, 34 aa, Artificial Sequence; identical to SEQ ID NO: 40654
  Cyclic GFR-binding peptide
  MOD_RES (1)..(33)..(34): Xaa is C or S

SEQ ID NO: 86043 - protein, 29 aa, Artificial Sequence
  Cyclic GFR-binding peptide
  MOD_RES (29)..(29): Xaa is C or S
VMDEYKFKVVNNAADLYLISIPELRAPVX

SEQ ID NO: 86044 - protein, 25 aa, Artificial Sequence
  Cyclic GFR-binding peptide
IMRYKKLVKPKRGVFYLISIANLAQ

SEQ ID NO: 86045 - protein, 22 aa, Artificial Sequence
  Cyclic GFR-binding peptide
YHYKLIIQQKDNKYLMSIPSMK

SEQ ID NO: 86046 - protein, 23 aa, Artificial Sequence
  Cyclic GFR-binding peptide
MDYHYKLVVNNAADKYLISIPSL

SEQ ID NO: 86047 - protein, 33 aa, Artificial Sequence; identical to SEQ ID NO: 40658
  Cyclic GFR-binding peptide
  MOD_RES (27)..(28): Xaa is C or S

SEQ ID NO: 86048 - protein, 29 aa, Artificial Sequence
  Cyclic GFR-binding peptide
DVVMGYHYKLIIQQKDNKYLMSIPSMKTP

SEQ ID NO: 86049 - protein, 35 aa, Artificial Sequence; identical to SEQ ID NO: 40659
  Cyclic GFR-binding peptide
  MOD_RES (32)..(33): Xaa is C or S

SEQ ID NO: 86050 - protein, 29 aa, Artificial Sequence
  Cyclic GFR-binding peptide
  MOD_RES (1)..(1): Xaa is C or S
XSKVIMEYKFKIKPTKGILYLISIPELDQ

SEQ ID NO: 86051 - protein, 28 aa, Artificial Sequence
  Cyclic GFR-binding peptide
  MOD_RES (2)..(2): Xaa is C or S
KXSKVIMRHKRLIKPTKGIYYLISTASL

SEQ ID NO: 86052 - protein, 31 aa, Artificial Sequence
  Cyclic GFR-binding peptide
  MOD_RES (30)..(31): Xaa is C or S
VTMNYHYKLVVNKNEDKYLISIPSMKEPVXX

SEQ ID NO: 86053 - protein, 33 aa, Artificial Sequence; identical to SEQ ID NO: 40664
  Cyclic GFR-binding peptide
  MOD_RES (33)..(33): Xaa is C or S

SEQ ID NO: 86054 - protein, 35 aa, Artificial Sequence; identical to SEQ ID NO: 32069
  Cyclic GFR-binding peptide
  MOD_RES (2)..(33)..(34): Xaa is C or S

SEQ ID NO: 86055 - protein, 25 aa, Artificial Sequence
  Cyclic GFR-binding peptide
VMDEYKFKVVNNAADLYLISIPELR

SEQ ID NO: 86056 - protein, 40 aa, Artificial Sequence
  Cyclic GFR-binding peptide
  MOD_RES (1)..(3)..(35)..(36): Xaa is C or S
XAXSEVTMNEYKFKVVNKNEDLYLISIPEMKEPVXXPEPI

SEQ ID NO: 86057 - protein, 29 aa, Artificial Sequence
  Cyclic GFR-binding peptide
  MOD_RES (28)..(29): Xaa is C or S
MGRYKKLIIQQKDNFYLMSIANMKTPTXX

SEQ ID NO: 86058 - protein, 34 aa, Artificial Sequence; identical to SEQ ID NO: 75290
  Cyclic GFR-binding peptide
  MOD_RES (28)..(29): Xaa is C or S

SEQ ID NO: 86059 - protein, 38 aa, Artificial Sequence
  Cyclic GFR-binding peptide
  MOD_RES (1)..(33)..(34): Xaa is C or S
XRDVVMGRHKRLIIQQKDNYYLMSTASMKTPTXXPGAS

SEQ ID NO: 86060 - protein, 28 aa, Artificial Sequence
  Cyclic GFR-binding peptide
EVTMNYHYKLVVNKNEDKYLISIPSMKE

SEQ ID NO: 86061 - protein, 41 aa, Artificial Sequence; identical to SEQ ID NO: 32077
  Cyclic GFR-binding peptide
  MOD_RES (2)..(4)..(36)..(37): Xaa is C or S

SEQ ID NO: 86062 - protein, 35 aa, Artificial Sequence; identical to SEQ ID NO: 3805
  Cyclic GFR-binding peptide
  MOD_RES (1)..(3)..(34)..(35): Xaa is C or S

SEQ ID NO: 86063 - protein, 30 aa, Artificial Sequence
  Cyclic GFR-binding peptide
  MOD_RES (26)..(27): Xaa is C or S
RHKRLYTVVGKDYYLISTASLKTPVXXAKS

SEQ ID NO: 86064 - protein, 32 aa, Artificial Sequence; identical to SEQ ID NO: 40670
  Cyclic GFR-binding peptide
  MOD_RES (30)..(31): Xaa is C or S

SEQ ID NO: 86065 - protein, 31 aa, Artificial Sequence
  Cyclic GFR-binding peptide
  MOD_RES (1)..(3): Xaa is C or S
XGXAEVVMDRHKRLVVNNAADYYLISTASLR

SEQ ID NO: 86066 - protein, 23 aa, Artificial Sequence
  Cyclic GFR-binding peptide
VMNEYKFKIVNNSSDLYLVSIPE

SEQ ID NO: 86067 - protein, 28 aa, Artificial Sequence
  Cyclic GFR-binding peptide
RDVVMGRHKRLIIQQKDNYYLMSTASMK

SEQ ID NO: 86068 - protein, 23 aa, Artificial Sequence
  Cyclic GFR-binding peptide
YHYKLVKPKRGVKYLISIPSLAQ

SEQ ID NO: 86069 - protein, 32 aa, Artificial Sequence
  Cyclic GFR-binding peptide
  MOD_RES (26)..(27): Xaa is C or S
EYKFKIIQQKDNLYLMSIPEMKTPTXXPGASG

SEQ ID NO: 86070 - protein, 32 aa, Artificial Sequence; identical to SEQ ID NO: 32085
  Cyclic GFR-binding peptide
  MOD_RES (31)..(32): Xaa is C or S

SEQ ID NO: 86071 - protein, 28 aa, Artificial Sequence
  Cyclic GFR-binding peptide
  MOD_RES (26)..(26): Xaa is C or S
YHYKLIVNSSDDKYLVSIPSLKTPAXTP

SEQ ID NO: 86072 - protein, 34 aa, Artificial Sequence; identical to SEQ ID NO: 75295
  Cyclic GFR-binding peptide
  MOD_RES (31)..(32): Xaa is C or S

SEQ ID NO: 86073 - protein, 26 aa, Artificial Sequence
  Cyclic GFR-binding peptide
VTMNPIKGYVVNKNEDFYLINIPSMK

SEQ ID NO: 86074 - protein, 24 aa, Artificial Sequence
  Cyclic GFR-binding peptide
MNEYKFKIVNSSDDLYLVSIPELK

SEQ ID NO: 86075 - protein, 33 aa, Artificial Sequence; identical to SEQ ID NO: 40681
  Cyclic GFR-binding peptide
  MOD_RES (28)..(28): Xaa is C or S

SEQ ID NO: 86076 - protein, 33 aa, Artificial Sequence
  Cyclic GFR-binding peptide
  MOD_RES (27)..(28): Xaa is C or S
NRYKKLIVNSSDDFYLVSIANLKTPAXXPKPVH

SEQ ID NO: 86077 - protein, 34 aa, Artificial Sequence; identical to SEQ ID NO: 40683
  Cyclic GFR-binding peptide
  MOD_RES (2)..(4): Xaa is C or S

SEQ ID NO: 86078 - protein, 29 aa, Artificial Sequence
  Cyclic GFR-binding peptide
  MOD_RES (1)..(1): Xaa is C or S
XSKVVMPIKGYVKPTRGVFYLINIPSLDQ

SEQ ID NO: 86079 - protein, 34 aa, Artificial Sequence; identical to SEQ ID NO: 3819
  Cyclic GFR-binding peptide
  MOD_RES (2)..(4): Xaa is C or S

SEQ ID NO: 86080 - protein, 36 aa, Artificial Sequence
  Cyclic GFR-binding peptide
  MOD_RES (2)..(33)..(34): Xaa is C or S
GXEEVIMEYKFKLLVRGNDLYLMSIPETKVPAXXTS

SEQ ID NO: 86081 - protein, 28 aa, Artificial Sequence
  Cyclic GFR-binding peptide
SKVVMPIKGYVKPTRGVFYLINIPSLDQ

SEQ ID NO: 86082 - protein, 33 aa, Artificial Sequence; identical to SEQ ID NO: 32095
  Cyclic GFR-binding peptide
  MOD_RES (28)..(29): Xaa is C or S

SEQ ID NO: 86083 - protein, 36 aa, Artificial Sequence; identical to SEQ ID NO: 3823
  Cyclic GFR-binding peptide
  MOD_RES (30)..(31): Xaa is C or S

SEQ ID NO: 86084 - protein, 37 aa, Artificial Sequence
  Cyclic GFR-binding peptide
  MOD_RES (31)..(32): Xaa is C or S
SKVVMPIKGYVKPTRGVFYLINIPSLDQPVXXPSASA

SEQ ID NO: 86085 - protein, 34 aa, Artificial Sequence; identical to SEQ ID NO: 32098
  Cyclic GFR-binding peptide
  MOD_RES (31)..(32): Xaa is C or S

SEQ ID NO: 86086 - protein, 38 aa, Artificial Sequence; identical to SEQ ID NO: 32099
  Cyclic GFR-binding peptide
  MOD_RES (2)..(4)..(35)..(36): Xaa is C or S

SEQ ID NO: 86087 - protein, 25 aa, Artificial Sequence
  Cyclic GFR-binding peptide
VVMERYKKLVVKDYEDFYLMSIANL

SEQ ID NO: 86088 - protein, 28 aa, Artificial Sequence
  Cyclic GFR-binding peptide
VIMRHKRLVKPKRGVYYLISTASLAQPV

SEQ ID NO: 86089 - protein, 25 aa, Artificial Sequence
  Cyclic GFR-binding peptide
RHKRLIVNSSDDYYLVSTASLKTPA

SEQ ID NO: 86090 - protein, 25 aa, Artificial Sequence
  Cyclic GFR-binding peptide
KVVMRYKKLVKPTRGVFYLISIANL

SEQ ID NO: 86091 - protein, 32 aa, Artificial Sequence
  Cyclic GFR-binding peptide
  MOD_RES (1)..(3): Xaa is C or S
XKXSKVVMPIKGYVKPTRGVFYLINIPSLDQP

SEQ ID NO: 86092 - protein, 32 aa, Artificial Sequence; identical to SEQ ID NO: 40697
  Cyclic GFR-binding peptide
  MOD_RES (2)..(2): Xaa is C or S

SEQ ID NO: 86093 - protein, 29 aa, Artificial Sequence
  Cyclic GFR-binding peptide
  MOD_RES (1)..(3): Xaa is C or S
XGXAKVVMNRYKKLIVNNSSDFYLVSIAN

SEQ ID NO: 86094 - protein, 35 aa, Artificial Sequence; identical to SEQ ID NO: 3834
  Cyclic GFR-binding peptide
  MOD_RES (2)..(4): Xaa is C or S

SEQ ID NO: 86095 - protein, 39 aa, Artificial Sequence
  Cyclic GFR-binding peptide
  MOD_RES (1)..(3)..(35)..(36): Xaa is C or S
XGXSEVVMDYHYKLVVNNASDKYLISIPSLRTPVXXTPP

SEQ ID NO: 86096 - protein, 43 aa, Artificial Sequence; identical to SEQ ID NO: 32110
  Cyclic GFR-binding peptide
  MOD_RES (2)..(4)..(37)..(38): Xaa is C or S

SEQ ID NO: 86097 - protein, 32 aa, Artificial Sequence; identical to SEQ ID NO: 32114
  Cyclic GFR-binding peptide
  MOD_RES (30)..(31): Xaa is C or S

SEQ ID NO: 86098 - protein, 33 aa, Artificial Sequence; identical to SEQ ID NO: 3842
  Cyclic GFR-binding peptide
  MOD_RES (1)..(32)..(33): Xaa is C or S

SEQ ID NO: 86099 - protein, 29 aa, Artificial Sequence
  Cyclic GFR-binding peptide
  MOD_RES (27)..(28): Xaa is C or S
MPIKGYIKPTKGIFYLINIPSLDQSVXXP

SEQ ID NO: 86100 - protein, 26 aa, Artificial Sequence
  Cyclic GFR-binding peptide
  MOD_RES (26)..(26): Xaa is C or S
EYKFKTPVGMDDLYLVSIPELKTPVX

SEQ ID NO: 86101 - protein, 38 aa, Artificial Sequence; identical to SEQ ID NO: 3844
  Cyclic GFR-binding peptide
  MOD_RES (1)..(3)..(36)..(37): Xaa is C or S

SEQ ID NO: 86102 - protein, 26 aa, Artificial Sequence
  Cyclic GFR-binding peptide
  MOD_RES (26)..(26): Xaa is C or S
EYKFKVKPTRGVLYLISIPELDQPVX

SEQ ID NO: 86103 - protein, 36 aa, Artificial Sequence; identical to SEQ ID NO: 3845
  Cyclic GFR-binding peptide
  MOD_RES (32)..(33): Xaa is C or S

SEQ ID NO: 86104 - protein, 39 aa, Artificial Sequence; identical to SEQ ID NO: 3846
  Cyclic GFR-binding peptide
  MOD_RES (2)..(34)..(35): Xaa is C or S

SEQ ID NO: 86105 - protein, 28 aa, Artificial Sequence
  Cyclic GFR-binding peptide
  MOD_RES (1)..(1): Xaa is C or S
XSRVIMYHYKLVKPKRGVKYLISIPSLA

SEQ ID NO: 86106 - protein, 32 aa, Artificial Sequence; identical to SEQ ID NO: 40708
  Cyclic GFR-binding peptide
  MOD_RES (1)..(3): Xaa is C or S

SEQ ID NO: 86107 - protein, 26 aa, Artificial Sequence
  Cyclic GFR-binding peptide
ESVAMGRHKRLYTVVGKDYYLISTAS

SEQ ID NO: 86108 - protein, 32 aa, Artificial Sequence; identical to SEQ ID NO: 32129
  Cyclic GFR-binding peptide
  MOD_RES (2)..(4): Xaa is C or S

SEQ ID NO: 86109 - protein, 30 aa, Artificial Sequence
  Cyclic GFR-binding peptide
  MOD_RES (2)..(4): Xaa is C or S
SXGXRDVVMGYHYKLIIQQKDNKYLMSIPS

SEQ ID NO: 86110 - protein, 23 aa, Artificial Sequence
  Cyclic GFR-binding peptide
ERYKKLTPVGMDDFYLVSIANLK

SEQ ID NO: 86111 - protein, 34 aa, Artificial Sequence; identical to SEQ ID NO: 32134
  Cyclic GFR-binding peptide
  MOD_RES (28)..(29): Xaa is C or S

SEQ ID NO: 86112 - protein, 40 aa, Artificial Sequence; identical to SEQ ID NO: 32135
  Cyclic GFR-binding peptide
  MOD_RES (1)..(3)..(35)..(36): Xaa is C or S

SEQ ID NO: 86113 - protein, 32 aa, Artificial Sequence; identical to SEQ ID NO: 32136
  Cyclic GFR-binding peptide
  MOD_RES (27)..(28): Xaa is C or S

SEQ ID NO: 86114 - protein, 35 aa, Artificial Sequence
  Cyclic GFR-binding peptide
  MOD_RES (2)..(4)..(35): Xaa is C or S
LXGXEEVIMEYKFKLLVRGNDLYLMSIPETKVPAX

SEQ ID NO: 86115 - protein, 30 aa, Artificial Sequence
  Cyclic GFR-binding peptide
  MOD_RES (2)..(4): Xaa is C or S
SXKXSKVIMPIKGYIKPTKGIFYLINIPSL

SEQ ID NO: 86116 - protein, 34 aa, Artificial Sequence; identical to SEQ ID NO: 32139
  Cyclic GFR-binding peptide
  MOD_RES (29)..(30): Xaa is C or S

SEQ ID NO: 86117 - protein, 29 aa, Artificial Sequence
  Cyclic GFR-binding peptide
  MOD_RES (2)..(4): Xaa is C or S
SXKXSKVVMPIKGYVKPTRGVFYLINIPS

SEQ ID NO: 86118 - protein, 28 aa, Artificial Sequence
  Cyclic GFR-binding peptide
AEVVMDRYKKLVVNNAADFYLISIANLR

SEQ ID NO: 86119 - protein, 28 aa, Artificial Sequence
  Cyclic GFR-binding peptide
VMDPIKGYVVNNAADFYLINIPSLRAPV

SEQ ID NO: 86120 - protein, 35 aa, Artificial Sequence; identical to SEQ ID NO: 3862
  Cyclic GFR-binding peptide
  MOD_RES (29)..(30): Xaa is C or S

SEQ ID NO: 86121 - protein, 33 aa, Artificial Sequence; identical to SEQ ID NO: 3863
  Cyclic GFR-binding peptide
  MOD_RES (31)..(32): Xaa is C or S

SEQ ID NO: 86122 - protein, 31 aa, Artificial Sequence; identical to SEQ ID NO: 3865
  Cyclic GFR-binding peptide
  MOD_RES (28)..(29): Xaa is C or S

SEQ ID NO: 86123 - protein, 29 aa, Artificial Sequence
  Cyclic GFR-binding peptide
  MOD_RES (26)..(27): Xaa is C or S
EYKFKIKPTKGILYLISIPELDQSVXXPS

SEQ ID NO: 86124 - protein, 27 aa, Artificial Sequence
  Cyclic GFR-binding peptide
VVMGRYKKLIIQQKDNFYLMSIANMKT

SEQ ID NO: 86125 - protein, 36 aa, Artificial Sequence
  Cyclic GFR-binding peptide
  MOD_RES (1)..(3)..(35)..(36): Xaa is C or S
XAXSEVTMNEYKFKVVNKNEDLYLISIPEMKEPVXX

SEQ ID NO: 86126 - protein, 27 aa, Artificial Sequence
  Cyclic GFR-binding peptide
VIMRHKRLIKPTKGIYYLISTASLDQS

SEQ ID NO: 86127 - protein, 35 aa, Artificial Sequence; identical to SEQ ID NO: 32157
  Cyclic GFR-binding peptide
  MOD_RES (31)..(32): Xaa is C or S

SEQ ID NO: 86128 - protein, 26 aa, Artificial Sequence
  Cyclic GFR-binding peptide
GEVVMDEYKFKVVKENEDLYLMSIPE

SEQ ID NO: 86129 - protein, 31 aa, Artificial Sequence; identical to SEQ ID NO: 32161
  Cyclic GFR-binding peptide
  MOD_RES (31)..(31): Xaa is C or S

SEQ ID NO: 86130 - protein, 26 aa, Artificial Sequence
  Cyclic GFR-binding peptide
SVAMGPIKGYYTVVGKDFYLINIPSL

SEQ ID NO: 86131 - protein, 31 aa, Artificial Sequence
  Cyclic GFR-binding peptide
  MOD_RES (31)..(31): Xaa is C or S
EEVIMEYKFKLLVRGNDLYLMSIPETKVPAX

SEQ ID NO: 86132 - protein, 33 aa, Artificial Sequence; identical to SEQ ID NO: 32163
  Cyclic GFR-binding peptide
  MOD_RES (32)..(33): Xaa is C or S

SEQ ID NO: 86133 - protein, 37 aa, Artificial Sequence; identical to SEQ ID NO: 32164
  Cyclic GFR-binding peptide
  MOD_RES (32)..(33): Xaa is C or S

SEQ ID NO: 86134 - protein, 25 aa, Artificial Sequence
  Cyclic GFR-binding peptide
EYHYKLVVKDYEDKYLMSIPSLETP

SEQ ID NO: 86135 - protein, 34 aa, Artificial Sequence; identical to SEQ ID NO: 3880
  Cyclic GFR-binding peptide
  MOD_RES (1)..(3)..(34): Xaa is C or S

SEQ ID NO: 86136 - protein, 30 aa, Artificial Sequence; identical to SEQ ID NO: 32169
  Cyclic GFR-binding peptide
  MOD_RES (2)..(4): Xaa is C or S

SEQ ID NO: 86137 - protein, 32 aa, Artificial Sequence; identical to SEQ ID NO: 3881
  Cyclic GFR-binding peptide
  MOD_RES (30)..(31): Xaa is C or S

SEQ ID NO: 86138 - protein, 37 aa, Artificial Sequence; identical to SEQ ID NO: 32172
  Cyclic GFR-binding peptide
  MOD_RES (2)..(4)..(36)..(37): Xaa is C or S

SEQ ID NO: 86139 - protein, 38 aa, Artificial Sequence; identical to SEQ ID NO: 32174
  Cyclic GFR-binding peptide
  MOD_RES (32)..(33): Xaa is C or S

SEQ ID NO: 86140 - protein, 30 aa, Artificial Sequence; identical to SEQ ID NO: 40746
  Cyclic GFR-binding peptide
  MOD_RES (2)..(2): Xaa is C or S

SEQ ID NO: 86141 - protein, 24 aa, Artificial Sequence
  Cyclic GFR-binding peptide
VMDYHYKLVVNNASDKYLISIPSL

SEQ ID NO: 86142 - protein, 22 aa, Artificial Sequence
  Cyclic GFR-binding peptide
EPIKGYTPVGMDDFYLVNIPSL

SEQ ID NO: 86143 - protein, 37 aa, Artificial Sequence; identical to SEQ ID NO: 40751
  Cyclic GFR-binding peptide
  MOD_RES (31)..(32): Xaa is C or S

SEQ ID NO: 86144 - protein, 35 aa, Artificial Sequence; identical to SEQ ID NO: 3885
  Cyclic GFR-binding peptide
  MOD_RES (1)..(33)..(34): Xaa is C or S

SEQ ID NO: 86145 - protein, 34 aa, Artificial Sequence
  Cyclic GFR-binding peptide
  MOD_RES (32)..(33): Xaa is C or S
RDVVMGYHYKLIIQQKDNKYLMSIPSMKTPTXXP

SEQ ID NO: 86146 - protein, 29 aa, Artificial Sequence
  Cyclic GFR-binding peptide
  MOD_RES (1)..(3): Xaa is C or S
XGXAEVVMDRYKKLVVNNAADFYLISIAN

SEQ ID NO: 86147 - protein, 34 aa, Artificial Sequence; identical to SEQ ID NO: 3893
  Cyclic GFR-binding peptide
  MOD_RES (2)..(4): Xaa is C or S

SEQ ID NO: 86148 - protein, 31 aa, Artificial Sequence; identical to SEQ ID NO: 3894
  Cyclic GFR-binding peptide
  MOD_RES (2)..(4): Xaa is C or S

SEQ ID NO: 86149 - protein, 39 aa, Artificial Sequence; identical to SEQ ID NO: 75340
  Cyclic GFR-binding peptide
  MOD_RES (2)..(4)..(35)..(36): Xaa is C or S

SEQ ID NO: 86150 - protein, 21 aa, Artificial Sequence
  Cyclic GFR-binding peptide
YHYKLIKPTKGIKYLISIPSL

SEQ ID NO: 86151 - protein, 28 aa, Artificial Sequence
  Cyclic GFR-binding peptide
  MOD_RES (28)..(28): Xaa is C or S
IMPIKGYIKPTKGIFYLINIPSLDQSVX

SEQ ID NO: 86152 - protein, 31 aa, Artificial Sequence; identical to SEQ ID NO: 32194
  Cyclic GFR-binding peptide
  MOD_RES (2)..(4): Xaa is C or S

SEQ ID NO: 86153 - protein, 31 aa, Artificial Sequence; identical to SEQ ID NO: 40761
  Cyclic GFR-binding peptide
  MOD_RES (1)..(1): Xaa is C or S

SEQ ID NO: 86154 - protein, 38 aa, Artificial Sequence; identical to SEQ ID NO: 32196
  Cyclic GFR-binding peptide
  MOD_RES (2)..(34)..(35): Xaa is C or S

SEQ ID NO: 86155 - protein, 32 aa, Artificial Sequence
  Cyclic GFR-binding peptide
  MOD_RES (30)..(31): Xaa is C or S
EVIMYHYKLLLVRGNDKYLMSIPSTKVPAXXT

SEQ ID NO: 86156 - protein, 32 aa, Artificial Sequence; identical to SEQ ID NO: 32198
  Cyclic GFR-binding peptide
  MOD_RES (31)..(32): Xaa is C or S

SEQ ID NO: 86157 - protein, 28 aa, Artificial Sequence
  Cyclic GFR-binding peptide
  MOD_RES (28)..(28): Xaa is C or S
GEPIKGYTPVGMDDFYLVNIPSLKTPVX

SEQ ID NO: 86158 - protein, 26 aa, Artificial Sequence
  Cyclic GFR-binding peptide
IMRHKRLLLVRGNDYYLMSTASTKVP

SEQ ID NO: 86159 - protein, 24 aa, Artificial Sequence
  Cyclic GFR-binding peptide
PIKGYTPVGMDDFYLVNIPSLKTP

SEQ ID NO: 86160 - protein, 35 aa, Artificial Sequence
  Cyclic GFR-binding peptide
  MOD_RES (1)..(33)..(34): Xaa is C or S
XSEVVMDYHYKLVVNNASDKYLISIPSLRTPVXXT

SEQ ID NO: 86161 - protein, 39 aa, Artificial Sequence; identical to SEQ ID NO: 40778
  Cyclic GFR-binding peptide
  MOD_RES (2)..(4)..(36)..(37): Xaa is C or S

SEQ ID NO: 86162 - protein, 37 aa, Artificial Sequence; identical to SEQ ID NO: 40779
  Cyclic GFR-binding peptide
  MOD_RES (2)..(4)..(35)..(36): Xaa is C or S

SEQ ID NO: 86163 - protein, 28 aa, Artificial Sequence
  Cyclic GFR-binding peptide
  MOD_RES (2)..(2): Xaa is C or S
GXRDVVMGRYKKLIIQQKDNFYLMSIAN

SEQ ID NO: 86164 - protein, 38 aa, Artificial Sequence; identical to SEQ ID NO: 14418
  Cyclic GFR-binding peptide
  MOD_RES (1)..(3)..(35)..(36): Xaa is C or S

SEQ ID NO: 86165 - protein, 29 aa, Artificial Sequence
  Cyclic GFR-binding peptide
  MOD_RES (29)..(29): Xaa is C or S
TMNRHKRLVVNKNEDYYLISTASMKEPVX

SEQ ID NO: 86166 - protein, 26 aa, Artificial Sequence
  Cyclic GFR-binding peptide
VVMDRHKRLVVNNAADYYLISTASLR

SEQ ID NO: 86167 - protein, 30 aa, Artificial Sequence; identical to SEQ ID NO: 32211
  Cyclic GFR-binding peptide
  MOD_RES (26)..(27): Xaa is C or S

SEQ ID NO: 86168 - protein, 27 aa, Artificial Sequence
  Cyclic GFR-binding peptide
EVVMDPIKGYVVKENEDFYLMNIPSLE

SEQ ID NO: 86169 - protein, 31 aa, Artificial Sequence; identical to SEQ ID NO: 3915
  Cyclic GFR-binding peptide
  MOD_RES (1)..(1): Xaa is C or S

SEQ ID NO: 86170 - protein, 28 aa, Artificial Sequence
  Cyclic GFR-binding peptide
  MOD_RES (27)..(27): Xaa is C or S
NYHYKLIVNSSDDKYLVSIPSLKTPAXT

SEQ ID NO: 86171 - protein, 40 aa, Artificial Sequence; identical to SEQ ID NO: 32217
  Cyclic GFR-binding peptide
  MOD_RES (2)..(4)..(35)..(36): Xaa is C or S

SEQ ID NO: 86172 - protein, 30 aa, Artificial Sequence
  Cyclic GFR-binding peptide
  MOD_RES (2)..(4): Xaa is C or S
LXGXEEVIMEYKFKLLVRGNDLYLMSIPET

SEQ ID NO: 86173 - protein, 35 aa, Artificial Sequence; identical to SEQ ID NO: 3919
  Cyclic GFR-binding peptide
  MOD_RES (29)..(30): Xaa is C or S

SEQ ID NO: 86174 - protein, 32 aa, Artificial Sequence; identical to SEQ ID NO: 3920
  Cyclic GFR-binding peptide
  MOD_RES (2)..(4): Xaa is C or S

SEQ ID NO: 86175 - protein, 21 aa, Artificial Sequence
  Cyclic GFR-binding peptide
EYKFKIVNSSDDLYLVSIPEL

SEQ ID NO: 86176 - protein, 32 aa, Artificial Sequence
  Cyclic GFR-binding peptide
  MOD_RES (2)..(4): Xaa is C or S
SXGXRDVVMGYHYKLIIQQKDNKYLMSIPSMK

SEQ ID NO: 86177 - protein, 39 aa, Artificial Sequence
  Cyclic GFR-binding peptide
  MOD_RES (1)..(3)..(34)..(35): Xaa is C or S
XKXSRVIMPIKGYVKPKRGVFYLINIPSLAQPVXXPAAS

SEQ ID NO: 86178 - protein, 38 aa, Artificial Sequence; identical to SEQ ID NO: 40793
  Cyclic GFR-binding peptide
  MOD_RES (1)..(33)..(34): Xaa is C or S

SEQ ID NO: 86179 - protein, 36 aa, Artificial Sequence; identical to SEQ ID NO: 75359
  Cyclic GFR-binding peptide
  MOD_RES (1)..(33)..(34): Xaa is C or S

SEQ ID NO: 86180 - protein, 29 aa, Artificial Sequence
  Cyclic GFR-binding peptide
EVVMDEYKFKVVNNAADLYLISIPELRAP

SEQ ID NO: 86181 - protein, 32 aa, Artificial Sequence; identical to SEQ ID NO: 3929
  Cyclic GFR-binding peptide

SEQ ID NO: 86182 - protein, 30 aa, Artificial Sequence
  Cyclic GFR-binding peptide
  MOD_RES (26)..(27): Xaa is C or S
YHYKLVVNNASDKYLISIPSLRTPVXXTPP

SEQ ID NO: 86183 - protein, 28 aa, Artificial Sequence
  Cyclic GFR-binding peptide
EVVMDEYKFKVVNNAADLYLISIPELRA

SEQ ID NO: 86184 - protein, 41 aa, Artificial Sequence
  Cyclic GFR-binding peptide
  MOD_RES (2)..(4)..(36)..(37): Xaa is C or S
RXAXSEVTMNRYKKLVVNKNEDFYLISIANMKEPVXXPEPI

SEQ ID NO: 86185 - protein, 29 aa, Artificial Sequence
  Cyclic GFR-binding peptide
  MOD_RES (2)..(2): Xaa is C or S
GXAEVVMDRYKKLVVNNAADFYLISIANL

SEQ ID NO: 86186 - protein, 32 aa, Artificial Sequence
  Cyclic GFR-binding peptide
  MOD_RES (30)..(31): Xaa is C or S
KVVMPIKGYVKPTRGVFYLINIPSLDQPVXXP

SEQ ID NO: 86187 - protein, 34 aa, Artificial Sequence; identical to SEQ ID NO: 3939
  Cyclic GFR-binding peptide
  MOD_RES (30)..(31): Xaa is C or S

SEQ ID NO: 86188 - protein, 36 aa, Artificial Sequence; identical to SEQ ID NO: 32241
  Cyclic GFR-binding peptide
  MOD_RES (30)..(31): Xaa is C or S

SEQ ID NO: 86189 - protein, 29 aa, Artificial Sequence
  Cyclic GFR-binding peptide
  MOD_RES (1)..(3): Xaa is C or S
XKXSKVIMPIKGYIKPTKGIFYLINIPSL

SEQ ID NO: 86190 - protein, 27 aa, Artificial Sequence
  Cyclic GFR-binding peptide
  MOD_RES (1)..(1): Xaa is C or S
XGEVVMDEYKFKVVKENEDLYLMSIPE

SEQ ID NO: 86191 - protein, 41 aa, Artificial Sequence; identical to SEQ ID NO: 32245
  Cyclic GFR-binding peptide
  MOD_RES (2)..(4)..(35)..(36): Xaa is C or S

SEQ ID NO: 86192 - protein, 34 aa, Artificial Sequence; identical to SEQ ID NO: 32246
  Cyclic GFR-binding peptide
  MOD_RES (32)..(33): Xaa is C or S

SEQ ID NO: 86193 - protein, 35 aa, Artificial Sequence; identical to SEQ ID NO: 32248
  Cyclic GFR-binding peptide
  MOD_RES (30)..(31): Xaa is C or S

SEQ ID NO: 86194 - protein, 37 aa, Artificial Sequence; identical to SEQ ID NO: 3944
  Cyclic GFR-binding peptide
  MOD_RES (2)..(34)..(35): Xaa is C or S

SEQ ID NO: 86195 - protein, 27 aa, Artificial Sequence
  Cyclic GFR-binding peptide
EVIMEYKFKLLVRGNDLYLMSIPETKV

SEQ ID NO: 86196 - protein, 31 aa, Artificial Sequence; identical to SEQ ID NO: 75371
  Cyclic GFR-binding peptide
  MOD_RES (28)..(29): Xaa is C or S

SEQ ID NO: 86197 - protein, 39 aa, Artificial Sequence
  Cyclic GFR-binding peptide
  MOD_RES (2)..(34)..(35): Xaa is C or S
GXRDVVMGEYKFKIIQQKDNLYLMSIPEMKTPTXXPGAS

SEQ ID NO: 86198 - protein, 36 aa, Artificial Sequence; identical to SEQ ID NO: 40819
  Cyclic GFR-binding peptide
  MOD_RES (1)..(34)..(35): Xaa is C or S

SEQ ID NO: 86199 - protein, 40 aa, Artificial Sequence; identical to SEQ ID NO: 32257
  Cyclic GFR-binding peptide
  MOD_RES (2)..(4)..(36)..(37): Xaa is C or S

SEQ ID NO: 86200 - protein, 30 aa, Artificial Sequence; identical to SEQ ID NO: 3949
  Cyclic GFR-binding peptide
  MOD_RES (2)..(2): Xaa is C or S

SEQ ID NO: 86201 - protein, 28 aa, Artificial Sequence
  Cyclic GFR-binding peptide
EVVMEEYKFKVVKDYEDLYLMSIPELET

SEQ ID NO: 86202 - protein, 32 aa, Artificial Sequence; identical to SEQ ID NO: 3952
  Cyclic GFR-binding peptide
  MOD_RES (1)..(3): Xaa is C or S

SEQ ID NO: 86203 - protein, 32 aa, Artificial Sequence
  Cyclic GFR-binding peptide
  MOD_RES (2)..(4): Xaa is C or S
RXAXSEVTMNEYKFKVVNKNEDLYLISIPEMK

SEQ ID NO: 86204 - protein, 34 aa, Artificial Sequence; identical to SEQ ID NO: 3954
  Cyclic GFR-binding peptide
  MOD_RES (30)..(31): Xaa is C or S

SEQ ID NO: 86205 - protein, 28 aa, Artificial Sequence
  Cyclic GFR-binding peptide
VVMDRHKRLVVNNASDYYLISTASLRTP

SEQ ID NO: 86206 - protein, 26 aa, Artificial Sequence
  Cyclic GFR-binding peptide
  MOD_RES (1)..(1): Xaa is C or S
XSKVIMRHKRLIKPTKGIYYLISTAS

SEQ ID NO: 86207 - protein, 34 aa, Artificial Sequence; identical to SEQ ID NO: 40824
  Cyclic GFR-binding peptide
  MOD_RES (2)..(34): Xaa is C or S

SEQ ID NO: 86208 - protein, 35 aa, Artificial Sequence
  Cyclic GFR-binding peptide
  MOD_RES (1)..(3)..(35): Xaa is C or S
XGXSEVVMDEYKFKVVNNASDLYLISIPELRTPVX

SEQ ID NO: 86209 - protein, 26 aa, Artificial Sequence
  Cyclic GFR-binding peptide
VMNPIKGYIVNSSDDFYLVNIPSLQT

SEQ ID NO: 86210 - protein, 41 aa, Artificial Sequence; identical to SEQ ID NO: 3960
  Cyclic GFR-binding peptide
  MOD_RES (1)..(3)..(35)..(36): Xaa is C or S

SEQ ID NO: 86211 - protein, 25 aa, Artificial Sequence
  Cyclic GFR-binding peptide
NRYKKLIVNSSDDFYLVSIANLQTP

SEQ ID NO: 86212 - protein, 36 aa, Artificial Sequence; identical to SEQ ID NO: 40829
  Cyclic GFR-binding peptide
  MOD_RES (1)..(33)..(34): Xaa is C or S

SEQ ID NO: 86213 - protein, 30 aa, Artificial Sequence; identical to SEQ ID NO: 32267
  Cyclic GFR-binding peptide
  MOD_RES (27)..(28): Xaa is C or S

SEQ ID NO: 86214 - protein, 21 aa, Artificial Sequence
  Cyclic GFR-binding peptide
RYKKLVKPKRGVFYLISIANL

SEQ ID NO: 86215 - protein, 29 aa, Artificial Sequence
  Cyclic GFR-binding peptide
  MOD_RES (1)..(1): Xaa is C or S
XGEVVMEPIKGYVVKDYEDFYLMNIPSLE

SEQ ID NO: 86216 - protein, 26 aa, Artificial Sequence
  Cyclic GFR-binding peptide
VVMDYHYKLVVNNAADKYLISIPSLR

SEQ ID NO: 86217 - protein, 22 aa, Artificial Sequence
  Cyclic GFR-binding peptide
MYHYKLVKPKRGVKYLISIPSL

SEQ ID NO: 86218 - protein, 37 aa, Artificial Sequence; identical to SEQ ID NO: 3968
  Cyclic GFR-binding peptide
  MOD_RES (2)..(34): Xaa is C or S

SEQ ID NO: 86219 - protein, 26 aa, Artificial Sequence
  Cyclic GFR-binding peptide
  MOD_RES (26)..(26): Xaa is C or S
PIKGYVVNNASDFYLINIPSLRTPVX

SEQ ID NO: 86220 - protein, 33 aa, Artificial Sequence
  Cyclic GFR-binding peptide
  MOD_RES (27)..(28): Xaa is C or S
DYHYKLVVNNASDKYLISIPSLRTPVXXTPPTS

SEQ ID NO: 86221 - protein, 37 aa, Artificial Sequence; identical to SEQ ID NO: 3969
  Cyclic GFR-binding peptide
  MOD_RES (1)..(3)..(35)..(36): Xaa is C or S

SEQ ID NO: 86222 - protein, 33 aa, Artificial Sequence; identical to SEQ ID NO: 32278
  Cyclic GFR-binding peptide
  MOD_RES (1)..(3): Xaa is C or S

SEQ ID NO: 86223 - protein, 28 aa, Artificial Sequence
  Cyclic GFR-binding peptide
  MOD_RES (1)..(1): Xaa is C or S
XESVAMGRHKRLYTVVGKDYYLISTASL

SEQ ID NO: 86224 - protein, 42 aa, Artificial Sequence; identical to SEQ ID NO: 3974
  Cyclic GFR-binding peptide
  MOD_RES (2)..(4)..(36): Xaa is C or S

SEQ ID NO: 86225 - protein, 27 aa, Artificial Sequence
  Cyclic GFR-binding peptide
  MOD_RES (1)..(1): Xaa is C or S
XESVAMGYHYKLYTVVGKDKYLISIPS

SEQ ID NO: 86226 - protein, 31 aa, Artificial Sequence; identical to SEQ ID NO: 32282
  Cyclic GFR-binding peptide
  MOD_RES (29)..(30): Xaa is C or S

SEQ ID NO: 86227 - protein, 33 aa, Artificial Sequence
  Cyclic GFR-binding peptide
  MOD_RES (2)..(2): Xaa is C or S
AXSEVTMNYHYKLVVNKNEDKYLISIPSMKEPV

SEQ ID NO: 86228 - protein, 35 aa, Artificial Sequence; identical to SEQ ID NO: 3978
  Cyclic GFR-binding peptide
  MOD_RES (32)..(33): Xaa is C or S

SEQ ID NO: 86229 - protein, 37 aa, Artificial Sequence
  Cyclic GFR-binding peptide
  MOD_RES (2)..(4)..(35)..(36): Xaa is C or S
SXKXSKVIMPIKGYIKPTKGIFYLINIPSLDQSVXXP

SEQ ID NO: 86230 - protein, 36 aa, Artificial Sequence; identical to SEQ ID NO: 32286
  Cyclic GFR-binding peptide
  MOD_RES (31)..(32): Xaa is C or S

SEQ ID NO: 86231 - protein, 38 aa, Artificial Sequence; identical to SEQ ID NO: 40867
  Cyclic GFR-binding peptide
  MOD_RES (32)..(33): Xaa is C or S

SEQ ID NO: 86232 - protein, 34 aa, Artificial Sequence
  Cyclic GFR-binding peptide
  MOD_RES (29)..(30): Xaa is C or S
VVMPIKGYVKPTRGVFYLINIPSLDQPVXXPSAS

SEQ ID NO: 86233 - protein, 38 aa, Artificial Sequence; identical to SEQ ID NO: 3981
  Cyclic GFR-binding peptide
  MOD_RES (2)..(4)..(36)..(37): Xaa is C or S

SEQ ID NO: 86234 - protein, 27 aa, Artificial Sequence
  Cyclic GFR-binding peptide
  MOD_RES (1)..(1): Xaa is C or S
XSEVVMDRHKRLVVNNASDYYLISTAS

SEQ ID NO: 86235 - protein, 29 aa, Artificial Sequence
  Cyclic GFR-binding peptide
  MOD_RES (26)..(27): Xaa is C or S
PIKGYVVKDYEDFYLMNIPSLETPVXXAK

SEQ ID NO: 86236 - protein, 34 aa, Artificial Sequence; identical to SEQ ID NO: 40870
  Cyclic GFR-binding peptide
  MOD_RES (32)..(33): Xaa is C or S

SEQ ID NO: 86237 - protein, 30 aa, Artificial Sequence; identical to SEQ ID NO: 40871
  Cyclic GFR-binding peptide
  MOD_RES (26)..(27): Xaa is C or S

SEQ ID NO: 86238 - protein, 30 aa, Artificial Sequence
  Cyclic GFR-binding peptide
SEVVMDRHKRLVVNNASDYYLISTASLRTP

SEQ ID NO: 86239 - protein, 31 aa, Artificial Sequence; identical to SEQ ID NO: 3983
  Cyclic GFR-binding peptide
  MOD_RES (1)..(1): Xaa is C or S

SEQ ID NO: 86240 - protein, 27 aa, Artificial Sequence
  Cyclic GFR-binding peptide
  MOD_RES (27)..(27): Xaa is C or S
NEYKFKIVNNSSDLYLVSIPELKTPAX

SEQ ID NO: 86241 - protein, 36 aa, Artificial Sequence; identical to SEQ ID NO: 3987
  Cyclic GFR-binding peptide
  MOD_RES (32)..(33): Xaa is C or S

SEQ ID NO: 86242 - protein, 38 aa, Artificial Sequence; identical to SEQ ID NO: 32299
  Cyclic GFR-binding peptide
  MOD_RES (1)..(3)..(35)..(36): Xaa is C or S

SEQ ID NO: 86243 - protein, 26 aa, Artificial Sequence
  Cyclic GFR-binding peptide
VTMNRYKKLVVNKNEDFYLISIANMK

SEQ ID NO: 86244 - protein, 21 aa, Artificial Sequence
  Cyclic GFR-binding peptide
NRYKKLIVNNSSDFYLVSIAN

SEQ ID NO: 86245 - protein, 35 aa, Artificial Sequence; identical to SEQ ID NO: 3990
  Cyclic GFR-binding peptide
  MOD_RES (2)..(4): Xaa is C or S

SEQ ID NO: 86246 - protein, 34 aa, Artificial Sequence; identical to SEQ ID NO: 3993
  Cyclic GFR-binding peptide
  MOD_RES (32)..(33): Xaa is C or S

SEQ ID NO: 86247 - protein, 31 aa, Artificial Sequence
  Cyclic GFR-binding peptide
  MOD_RES (29)..(30): Xaa is C or S
TMNRYKKLVVNKNEDFYLISIANMKEPVXXP

SEQ ID NO: 86248 - protein, 26 aa, Artificial Sequence
  Cyclic GFR-binding peptide
MGRYKKLYTVVGKDFYLISIANLKTP

SEQ ID NO: 86249 - protein, 30 aa, Artificial Sequence; identical to SEQ ID NO: 40882
  Cyclic GFR-binding peptide

SEQ ID NO: 86250 - protein, 34 aa, Artificial Sequence
  Cyclic GFR-binding peptide
  MOD_RES (32)..(33): Xaa is C or S
SEVTMNEYKFKVVNKNEDLYLISIPEMKEPVXXP

SEQ ID NO: 86251 - protein, 38 aa, Artificial Sequence; identical to SEQ ID NO: 32312
  Cyclic GFR-binding peptide
  MOD_RES (2)..(4)..(36)..(37): Xaa is C or S

SEQ ID NO: 86252 - protein, 28 aa, Artificial Sequence
  Cyclic GFR-binding peptide
RVVMNPIKGYIVNSSDDFYLVNIPSLQT

SEQ ID NO: 86253 - protein, 39 aa, Artificial Sequence; identical to SEQ ID NO: 32319
  Cyclic GFR-binding peptide
  MOD_RES (1)..(3)..(35)..(36): Xaa is C or S

SEQ ID NO: 86254 - protein, 25 aa, Artificial Sequence
  Cyclic GFR-binding peptide
MGRHKRLYTVVGKDYYLISTASLKT

SEQ ID NO: 86255 - protein, 34 aa, Artificial Sequence; identical to SEQ ID NO: 4004
  Cyclic GFR-binding peptide
  MOD_RES (31)..(32): Xaa is C or S

SEQ ID NO: 86256 - protein, 23 aa, Artificial Sequence
  Cyclic GFR-binding peptide
DRYKKLVVNNAADFYLISIANLR

SEQ ID NO: 86257 - protein, 36 aa, Artificial Sequence; identical to SEQ ID NO: 4005
  Cyclic GFR-binding peptide
  MOD_RES (2)..(34): Xaa is C or S

SEQ ID NO: 86258 - protein, 27 aa, Artificial Sequence
  Cyclic GFR-binding peptide
  MOD_RES (26)..(27): Xaa is C or S
RHKRLVVKDYEDYYLMSTASLETPVXX

SEQ ID NO: 86259 - protein, 30 aa, Artificial Sequence; identical to SEQ ID NO: 4009
  Cyclic GFR-binding peptide
  MOD_RES (26)..(27): Xaa is C or S

SEQ ID NO: 86260 - protein, 28 aa, Artificial Sequence
  Cyclic GFR-binding peptide
  MOD_RES (2)..(2): Xaa is C or S
GXRDVVMGEYKFKIIQQKDNLYLMSIPE

SEQ ID NO: 86261 - protein, 32 aa, Artificial Sequence
  Cyclic GFR-binding peptide
  MOD_RES (2)..(4): Xaa is C or S
RXAXSEVTMNYHYKLVVNKNEDKYLISIPSMK

SEQ ID NO: 86262 - protein, 41 aa, Artificial Sequence
  Cyclic GFR-binding peptide
  MOD_RES (2)..(4)..(36)..(37): Xaa is C or S
RXGXSEVVMDEYKFKVVNNASDLYLISIPELRTPVXXTPPT

SEQ ID NO: 86263 - protein, 23 aa, Artificial Sequence
  Cyclic GFR-binding peptide
VMERYKKLVVKDYEDFYLMSIAN

SEQ ID NO: 86264 - protein, 24 aa, Artificial Sequence
  Cyclic GFR-binding peptide
GEYKFKIIQQKDNLYLMSIPEMKT

SEQ ID NO: 86265 - protein, 29 aa, Artificial Sequence
  Cyclic GFR-binding peptide
  MOD_RES (1)..(3): Xaa is C or S
XAXSEVTMNRHKRLVVNKNEDYYLISTAS

SEQ ID NO: 86266 - protein, 38 aa, Artificial Sequence; identical to SEQ ID NO: 4014
  Cyclic GFR-binding peptide
  MOD_RES (1)..(33)..(34): Xaa is C or S

SEQ ID NO: 86267 - protein, 28 aa, Artificial Sequence
  Cyclic GFR-binding peptide
KVIMRYKKLIKPTKGIFYLISIANLDQS

SEQ ID NO: 86268 - protein, 24 aa, Artificial Sequence
  Cyclic GFR-binding peptide
MEYKFKIKPTKGILYLISIPELDQ

SEQ ID NO: 86269 - protein, 36 aa, Artificial Sequence
  Cyclic GFR-binding peptide
  MOD_RES (30)..(31): Xaa is C or S
VTMNEYKFKVVNKNEDLYLISIPEMKEPVXXPEPIG

SEQ ID NO: 86270 - protein, 33 aa, Artificial Sequence
  Cyclic GFR-binding peptide
  MOD_RES (31)..(32): Xaa is C or S
SKVIMPIKGYIKPTKGIFYLINIPSLDQSVXXP

SEQ ID NO: 86271 - protein, 37 aa, Artificial Sequence; identical to SEQ ID NO: 40909
  Cyclic GFR-binding peptide
  MOD_RES (2)..(34)..(35): Xaa is C or S

SEQ ID NO: 86272 - protein, 34 aa, Artificial Sequence; identical to SEQ ID NO: 4020
  Cyclic GFR-binding peptide
  MOD_RES (30)..(30): Xaa is C or S

SEQ ID NO: 86273 - protein, 24 aa, Artificial Sequence
  Cyclic GFR-binding peptide
RHKRLVVNNASDYYLISTASLRTP

SEQ ID NO: 86274 - protein, 36 aa, Artificial Sequence; identical to SEQ ID NO: 4021
  Cyclic GFR-binding peptide
  MOD_RES (2)..(33)..(34): Xaa is C or S

SEQ ID NO: 86275 - protein, 36 aa, Artificial Sequence; identical to SEQ ID NO: 40914
  Cyclic GFR-binding peptide
  MOD_RES (32)..(33): Xaa is C or S

SEQ ID NO: 86276 - protein, 28 aa, Artificial Sequence
  Cyclic GFR-binding peptide
  MOD_RES (26)..(27): Xaa is C or S
PIKGYVVNNAADFYLINIPSLRAPVXXS

SEQ ID NO: 86277 - protein, 36 aa, Artificial Sequence; identical to SEQ ID NO: 4023
  Cyclic GFR-binding peptide
  MOD_RES (30)..(31): Xaa is C or S

SEQ ID NO: 86278 - protein, 20 aa, Artificial Sequence
  Cyclic GFR-binding peptide
PIKGYVKPTRGVFYLINIPS

SEQ ID NO: 86279 - protein, 29 aa, Artificial Sequence
  Cyclic GFR-binding peptide
EVTMNRHKRLVVNKNEDYYLISTASMKEP

SEQ ID NO: 86280 - protein, 26 aa, Artificial Sequence
  Cyclic GFR-binding peptide
VVMEYKFKVKPTRGVLYLISIPELDQ

SEQ ID NO: 86281 - protein, 25 aa, Artificial Sequence
  Cyclic GFR-binding peptide
KVVMPIKGYVKPTRGVFYLINIPSL

SEQ ID NO: 86282 - protein, 22 aa, Artificial Sequence
  Cyclic GFR-binding peptide
RHKRLTPVGMDDYYLVSTASLK

SEQ ID NO: 86283 - protein, 26 aa, Artificial Sequence
  Cyclic GFR-binding peptide
AVSMGERYKKLTPVGMDDFYLVSIAN

SEQ ID NO: 86284 - protein, 26 aa, Artificial Sequence
  Cyclic GFR-binding peptide
  MOD_RES (26)..(26): Xaa is C or S
RHKRLIVNSSDDYYLVSTASLKTPAX

SEQ ID NO: 86285 - protein, 33 aa, Artificial Sequence; identical to SEQ ID NO: 40932
  Cyclic GFR-binding peptide
  MOD_RES (31)..(32): Xaa is C or S

SEQ ID NO: 86286 - protein, 35 aa, Artificial Sequence; identical to SEQ ID NO: 4032
  Cyclic GFR-binding peptide
  MOD_RES (31)..(32): Xaa is C or S

SEQ ID NO: 86287 - protein, 36 aa, Artificial Sequence; identical to SEQ ID NO: 40933
  Cyclic GFR-binding peptide
  MOD_RES (30)..(31): Xaa is C or S

SEQ ID NO: 86288 - protein, 36 aa, Artificial Sequence; identical to SEQ ID NO: 32340
  Cyclic GFR-binding peptide
  MOD_RES (31)..(32): Xaa is C or S

SEQ ID NO: 86289 - protein, 38 aa, Artificial Sequence; identical to SEQ ID NO: 32343
  Cyclic GFR-binding peptide
  MOD_RES (1)..(33)..(34): Xaa is C or S

SEQ ID NO: 86290 - protein, 40 aa, Artificial Sequence
  Cyclic GFR-binding peptide
  MOD_RES (2)..(4)..(36)..(37): Xaa is C or S
RXAXSEVTMNRYKKLVVNKNEDFYLISIANMKEPVXXPEP

SEQ ID NO: 86291 - protein, 27 aa, Artificial Sequence
  Cyclic GFR-binding peptide
  MOD_RES (27)..(27): Xaa is C or S
NPIKGYIVNSSDDFYLVNIPSLQTPAX

SEQ ID NO: 86292 - protein, 29 aa, Artificial Sequence
  Cyclic GFR-binding peptide
DVVMGEYKFKIIQQKDNLYLMSIPEMKTP

SEQ ID NO: 86293 - protein, 32 aa, Artificial Sequence
  Cyclic GFR-binding peptide
  MOD_RES (27)..(28): Xaa is C or S
GRHKRLIIQQKDNYYLMSTASMKTPTXXPGAS

SEQ ID NO: 86294 - protein, 27 aa, Artificial Sequence
  Cyclic GFR-binding peptide
KVVMNEYKFKIVNNSSDLYLVSIPELK

SEQ ID NO: 86295 - protein, 41 aa, Artificial Sequence; identical to SEQ ID NO: 32350
  Cyclic GFR-binding peptide
  MOD_RES (2)..(4)..(36)..(37): Xaa is C or S

SEQ ID NO: 86296 - protein, 28 aa, Artificial Sequence
  Cyclic GFR-binding peptide
VTMNPIKGYVVNKNEDFYLINIPSMKEP

SEQ ID NO: 86297 - protein, 30 aa, Artificial Sequence
  Cyclic GFR-binding peptide
  MOD_RES (1)..(1): Xaa is C or S
XSEVTMNPIKGYVVNKNEDFYLINIPSMKE

SEQ ID NO: 86298 - protein, 33 aa, Artificial Sequence; identical to SEQ ID NO: 40942
  Cyclic GFR-binding peptide
  MOD_RES (30)..(31): Xaa is C or S

SEQ ID NO: 86299 - protein, 36 aa, Artificial Sequence; identical to SEQ ID NO: 4038
  Cyclic GFR-binding peptide
  MOD_RES (30)..(31): Xaa is C or S

SEQ ID NO: 86300 - protein, 31 aa, Artificial Sequence; identical to SEQ ID NO: 4039
  Cyclic GFR-binding peptide
  MOD_RES (27)..(28): Xaa is C or S

SEQ ID NO: 86301 - protein, 28 aa, Artificial Sequence
  Cyclic GFR-binding peptide
  MOD_RES (28)..(28): Xaa is C or S
MDYHYKLVVKENEDKYLMSIPSLETPVX

SEQ ID NO: 86302 - protein, 34 aa, Artificial Sequence; identical to SEQ ID NO: 4044
  Cyclic GFR-binding peptide
  MOD_RES (29)..(29): Xaa is C or S

SEQ ID NO: 86303 - protein, 32 aa, Artificial Sequence; identical to SEQ ID NO: 32360
  Cyclic GFR-binding peptide
  MOD_RES (28)..(29): Xaa is C or S

SEQ ID NO: 86304 - protein, 32 aa, Artificial Sequence; identical to SEQ ID NO: 32362
  Cyclic GFR-binding peptide
  MOD_RES (2)..(2): Xaa is C or S

SEQ ID NO: 86305 - protein, 21 aa, Artificial Sequence
  Cyclic GFR-binding peptide
ERYKKLTPVGMDDFYLVSIAN

SEQ ID NO: 86306 - protein, 27 aa, Artificial Sequence
  Cyclic GFR-binding peptide
MGERHKRLTPVGMDDYYLVSTASLKTP

SEQ ID NO: 86307 - protein, 38 aa, Artificial Sequence
  Cyclic GFR-binding peptide
  MOD_RES (1)..(33)..(34): Xaa is C or S
XRDVVMGEYKFKIIQQKDNLYLMSIPEMKTPTXXPGAS

SEQ ID NO: 86308 - protein, 35 aa, Artificial Sequence
  Cyclic GFR-binding peptide
  MOD_RES (1)..(32)..(33): Xaa is C or S
XSKVIMPIKGYIKPTKGIFYLINIPSLDQSVXXPS

SEQ ID NO: 86309 - protein, 26 aa, Artificial Sequence
  Cyclic GFR-binding peptide
NYHYKLVVNKNEDKYLISIPSMKEPV

SEQ ID NO: 86310 - protein, 28 aa, Artificial Sequence
  Cyclic GFR-binding peptide
VMNYHYKLIVNSSDDKYLVSIPSLQTPA

SEQ ID NO: 86311 - protein, 33 aa, Artificial Sequence; identical to SEQ ID NO: 4060
  Cyclic GFR-binding peptide
  MOD_RES (29)..(29): Xaa is C or S

SEQ ID NO: 86312 - protein, 36 aa, Artificial Sequence; identical to SEQ ID NO: 40965
  Cyclic GFR-binding peptide
  MOD_RES (2)..(4)..(36): Xaa is C or S

SEQ ID NO: 86313 - protein, 35 aa, Artificial Sequence
  Cyclic GFR-binding peptide
  MOD_RES (32)..(33): Xaa is C or S
RDVVMGRHKRLIIQQKDNYYLMSTASMKTPTXXPG

SEQ ID NO: 86314 - protein, 27 aa, Artificial Sequence
  Cyclic GFR-binding peptide
  MOD_RES (27)..(27): Xaa is C or S
DEYKFKVVNNAADLYLISIPELRAPVX

SEQ ID NO: 86315 - protein, 31 aa, Artificial Sequence; identical to SEQ ID NO: 4066
  Cyclic GFR-binding peptide
  MOD_RES (28)..(29): Xaa is C or S

SEQ ID NO: 86316 - protein, 31 aa, Artificial Sequence
  Cyclic GFR-binding peptide
  MOD_RES (27)..(28): Xaa is C or S
NRHKRLVVNKNEDYYLISTASMKEPVXXPEP

SEQ ID NO: 86317 - protein, 38 aa, Artificial Sequence; identical to SEQ ID NO: 4069
  Cyclic GFR-binding peptide
  MOD_RES (2)..(4)..(36)..(37): Xaa is C or S

SEQ ID NO: 86318 - protein, 21 aa, Artificial Sequence
  Cyclic GFR-binding peptide
YHYKLVKPKRGVKYLISIPSL

SEQ ID NO: 86319 - protein, 28 aa, Artificial Sequence
  Cyclic GFR-binding peptide
  MOD_RES (26)..(26): Xaa is C or S
RHKRLIVNSSDDYYLVSTASLKTPAXTP

SEQ ID NO: 86320 - protein, 25 aa, Artificial Sequence
  Cyclic GFR-binding peptide
VIMYHYKLLLVRGNDKYLMSIPSTK

SEQ ID NO: 86321 - protein, 27 aa, Artificial Sequence
  Cyclic GFR-binding peptide
  MOD_RES (27)..(27): Xaa is C or S
MYHYKLLLVRGNDKYLMSIPSTKVPAX

SEQ ID NO: 86322 - protein, 39 aa, Artificial Sequence; identical to SEQ ID NO: 4074
  Cyclic GFR-binding peptide
  MOD_RES (2)..(34)..(35): Xaa is C or S

SEQ ID NO: 86323 - protein, 22 aa, Artificial Sequence
  Cyclic GFR-binding peptide
MDYHYKLVVKENEDKYLMSIPS

SEQ ID NO: 86324 - protein, 36 aa, Artificial Sequence; identical to SEQ ID NO: 4076
  Cyclic GFR-binding peptide
  MOD_RES (2)..(4)..(35)..(36): Xaa is C or S

SEQ ID NO: 86325 - protein, 29 aa, Artificial Sequence
  Cyclic GFR-binding peptide
  MOD_RES (27)..(28): Xaa is C or S
NEYKFKVVNKNEDLYLISIPEMKEPVXXP

SEQ ID NO: 86326 - protein, 22 aa, Artificial Sequence
  Cyclic GFR-binding peptide
PIKGYYTVVGKDFYLINIPSLK

SEQ ID NO: 86327 - protein, 39 aa, Artificial Sequence; identical to SEQ ID NO: 4077
  Cyclic GFR-binding peptide
  MOD_RES (1)..(3)..(35): Xaa is C or S

SEQ ID NO: 86328 - protein, 23 aa, Artificial Sequence
  Cyclic GFR-binding peptide
VMNYHYKLIVNSSDDKYLVSIPS

SEQ ID NO: 86329 - protein, 29 aa, Artificial Sequence
  Cyclic GFR-binding peptide
  MOD_RES (27)..(28): Xaa is C or S
DEYKFKVVKENEDLYLMSIPELETPVXXA

SEQ ID NO: 86330 - protein, 34 aa, Artificial Sequence; identical to SEQ ID NO: 4079
  Cyclic GFR-binding peptide
  MOD_RES (31)..(32): Xaa is C or S

SEQ ID NO: 86331 - protein, 35 aa, Artificial Sequence; identical to SEQ ID NO: 32395
  Cyclic GFR-binding peptide
  MOD_RES (2)..(34)..(35): Xaa is C or S

SEQ ID NO: 86332 - protein, 40 aa, Artificial Sequence; identical to SEQ ID NO: 4086
  Cyclic GFR-binding peptide
  MOD_RES (1)..(3)..(35): Xaa is C or S

SEQ ID NO: 86333 - protein, 23 aa, Artificial Sequence
  Cyclic GFR-binding peptide
VMDRYKKLVVNNASDFYLISIAN

SEQ ID NO: 86334 - protein, 31 aa, Artificial Sequence; identical to SEQ ID NO: 4091
  Cyclic GFR-binding peptide
  MOD_RES (27)..(28): Xaa is C or S

SEQ ID NO: 86335 - protein, 32 aa, Artificial Sequence; identical to SEQ ID NO: 40984
  Cyclic GFR-binding peptide
  MOD_RES (26)..(27): Xaa is C or S

SEQ ID NO: 86336 - protein, 25 aa, Artificial Sequence
  Cyclic GFR-binding peptide
EYKFKVKPTRGVLYLISIPELDQPV

SEQ ID NO: 86337 - protein, 33 aa, Artificial Sequence; identical to SEQ ID NO: 4092
  Cyclic GFR-binding peptide
  MOD_RES (1)..(33): Xaa is C or S

SEQ ID NO: 86338 - protein, 31 aa, Artificial Sequence; identical to SEQ ID NO: 4099
  Cyclic GFR-binding peptide
  MOD_RES (1)..(1): Xaa is C or S

SEQ ID NO: 86339 - protein, 41 aa, Artificial Sequence
  Cyclic GFR-binding peptide
  MOD_RES (1)..(3)..(35)..(36): Xaa is C or S
XAXSEVTMNPIKGYVVNKNEDFYLINIPSMKEPVXXPEPIG

SEQ ID NO: 86340 - protein, 26 aa, Artificial Sequence
  Cyclic GFR-binding peptide
VMDRYKKLVVNNAADFYLISIANLRA

SEQ ID NO: 86341 - protein, 29 aa, Artificial Sequence
  Cyclic GFR-binding peptide
  MOD_RES (28)..(29): Xaa is C or S
MDEYKFKVVKENEDLYLMSIPELETPVXX

SEQ ID NO: 86342 - protein, 25 aa, Artificial Sequence
  Cyclic GFR-binding peptide
NRYKKLVVNKNEDFYLISIANMKEP

SEQ ID NO: 86343 - protein, 38 aa, Artificial Sequence; identical to SEQ ID NO: 40991
  Cyclic GFR-binding peptide
  MOD_RES (33)..(34): Xaa is C or S

SEQ ID NO: 86344 - protein, 30 aa, Artificial Sequence; identical to SEQ ID NO: 14596
  Cyclic GFR-binding peptide
  MOD_RES (26)..(27): Xaa is C or S

SEQ ID NO: 86345 - protein, 29 aa, Artificial Sequence
  Cyclic GFR-binding peptide
  MOD_RES (28)..(29): Xaa is C or S
IMPIKGYIKPTKGIFYLINIPSLDQSVXX

SEQ ID NO: 86346 - protein, 35 aa, Artificial Sequence; identical to SEQ ID NO: 32415
  Cyclic GFR-binding peptide
  MOD_RES (29)..(30): Xaa is C or S

SEQ ID NO: 86347 - protein, 33 aa, Artificial Sequence; identical to SEQ ID NO: 4104
  Cyclic GFR-binding peptide
  MOD_RES (1)..(3): Xaa is C or S

SEQ ID NO: 86348 - protein, 29 aa, Artificial Sequence
  Cyclic GFR-binding peptide
  MOD_RES (1)..(1): Xaa is C or S
XGEVVMERYKKLVVKDYEDFYLMSIANLE

SEQ ID NO: 86349 - protein, 33 aa, Artificial Sequence
  Cyclic GFR-binding peptide
  MOD_RES (1)..(33): Xaa is C or S
XRDVVMGRHKRLIIQQKDNYYLMSTASMKTPTX

SEQ ID NO: 86350 - protein, 32 aa, Artificial Sequence; identical to SEQ ID NO: 4107
  Cyclic GFR-binding peptide
  MOD_RES (1)..(1): Xaa is C or S

SEQ ID NO: 86351 - protein, 37 aa, Artificial Sequence
  Cyclic GFR-binding peptide
  MOD_RES (2)..(34)..(35): Xaa is C or S
GXESVAMGRHKRLYTVVGKDYYLISTASLKTPVXXAK

SEQ ID NO: 86352 - protein, 32 aa, Artificial Sequence; identical to SEQ ID NO: 41001
  Cyclic GFR-binding peptide
  MOD_RES (28)..(29): Xaa is C or S

SEQ ID NO: 86353 - protein, 27 aa, Artificial Sequence
  Cyclic GFR-binding peptide
VIMYHYKLLLVRGNDKYLMSIPSTKVP

SEQ ID NO: 86354 - protein, 38 aa, Artificial Sequence
  Cyclic GFR-binding peptide
  MOD_RES (1)..(32)..(33): Xaa is C or S
XSRVIMPIKGYVKPKRGVFYLINIPSLAQPVXXPAASA

SEQ ID NO: 86355 - protein, 33 aa, Artificial Sequence; identical to SEQ ID NO: 41008
  Cyclic GFR-binding peptide
  MOD_RES (2)..(2): Xaa is C or S

SEQ ID NO: 86356 - protein, 41 aa, Artificial Sequence
  Cyclic GFR-binding peptide
  MOD_RES (1)..(3)..(35)..(36): Xaa is C or S
XGXRDVVMGRHKRLIIQQKDNYYLMSTASMKTPTXXPGASG

SEQ ID NO: 86357 - protein, 26 aa, Artificial Sequence
  Cyclic GFR-binding peptide
GRYKKLIIQQKDNFYLMSIANMKTPT

SEQ ID NO: 86358 - protein, 23 aa, Artificial Sequence
  Cyclic GFR-binding peptide
IMRYKKLIKPTKGIFYLISIANL

SEQ ID NO: 86359 - protein, 35 aa, Artificial Sequence; identical to SEQ ID NO: 4119
  Cyclic GFR-binding peptide
  MOD_RES (32)..(33): Xaa is C or S

SEQ ID NO: 86360 - protein, 39 aa, Artificial Sequence
  Cyclic GFR-binding peptide
  MOD_RES (2)..(4)..(36)..(37): Xaa is C or S
SXGXRDVVMGRHKRLIIQQKDNYYLMSTASMKTPTXXPG

SEQ ID NO: 86361 - protein, 31 aa, Artificial Sequence; identical to SEQ ID NO: 4121
  Cyclic GFR-binding peptide
  MOD_RES (1)..(1): Xaa is C or S

SEQ ID NO: 86362 - protein, 23 aa, Artificial Sequence
  Cyclic GFR-binding peptide
VMEYKFKVKPTRGVLYLISIPEL

SEQ ID NO: 86363 - protein, 27 aa, Artificial Sequence
  Cyclic GFR-binding peptide
MERHKRLVVKDYEDYYLMSTASLETPV

SEQ ID NO: 86364 - protein, 30 aa, Artificial Sequence
  Cyclic GFR-binding peptide
  MOD_RES (1)..(1): Xaa is C or S
XSEVTMNEYKFKVVNKNEDLYLISIPEMKE

SEQ ID NO: 86365 - protein, 29 aa, Artificial Sequence
  Cyclic GFR-binding peptide
  MOD_RES (1)..(1): Xaa is C or S
XSRVVMNRHKRLIVNSSDDYYLVSTASLK

SEQ ID NO: 86366 - protein, 25 aa, Artificial Sequence
  Cyclic GFR-binding peptide
MGYHYKLIIQQKDNKYLMSIPSMKT

SEQ ID NO: 86367 - protein, 41 aa, Artificial Sequence
  Cyclic GFR-binding peptide
  MOD_RES (1)..(3)..(35)..(36): Xaa is C or S
XGXSRVVMNRHKRLIVNSSDDYYLVSTASLKTPAXXPKPVH

SEQ ID NO: 86368 - protein, 29 aa, Artificial Sequence
  Cyclic GFR-binding peptide
  MOD_RES (29)..(29): Xaa is C or S
VMGYHYKLIIQQKDNKYLMSIPSMKTPTX

SEQ ID NO: 86369 - protein, 33 aa, Artificial Sequence; identical to SEQ ID NO: 32429
  Cyclic GFR-binding peptide
  MOD_RES (28)..(29): Xaa is C or S

SEQ ID NO: 86370 - protein, 41 aa, Artificial Sequence; identical to SEQ ID NO: 4127
  Cyclic GFR-binding peptide
  MOD_RES (2)..(4)..(36)..(37): Xaa is C or S

SEQ ID NO: 86371 - protein, 21 aa, Artificial Sequence
  Cyclic GFR-binding peptide
MRHKRLIKPTKGIYYLISTAS

SEQ ID NO: 86372 - protein, 33 aa, Artificial Sequence; identical to SEQ ID NO: 4129
  Cyclic GFR-binding peptide
  MOD_RES (2)..(2): Xaa is C or S

SEQ ID NO: 86373 - protein, 35 aa, Artificial Sequence; identical to SEQ ID NO: 41031
  Cyclic GFR-binding peptide
  MOD_RES (31)..(32): Xaa is C or S

SEQ ID NO: 86374 - protein, 38 aa, Artificial Sequence; identical to SEQ ID NO: 4131
  Cyclic GFR-binding peptide
  MOD_RES (1)..(3)..(34)..(35): Xaa is C or S

SEQ ID NO: 86375 - protein, 22 aa, Artificial Sequence
  Cyclic GFR-binding peptide
GERHKRLTPVGMDDYYLVSTAS

SEQ ID NO: 86376 - protein, 41 aa, Artificial Sequence; identical to SEQ ID NO: 41035
  Cyclic GFR-binding peptide
  MOD_RES (1)..(3)..(35)..(36): Xaa is C or S

SEQ ID NO: 86377 - protein, 38 aa, Artificial Sequence; identical to SEQ ID NO: 75485
  Cyclic GFR-binding peptide
  MOD_RES (2)..(33)..(34): Xaa is C or S

SEQ ID NO: 86378 - protein, 34 aa, Artificial Sequence
  Cyclic GFR-binding peptide
  MOD_RES (1)..(33)..(34): Xaa is C or S
XRDVVMGRHKRLIIQQKDNYYLMSTASMKTPTXX

SEQ ID NO: 86379 - protein, 29 aa, Artificial Sequence
  Cyclic GFR-binding peptide
AVSMGEPIKGYTPVGMDDFYLVNIPSLKT

SEQ ID NO: 86380 - protein, 34 aa, Artificial Sequence; identical to SEQ ID NO: 32440
  Cyclic GFR-binding peptide
  MOD_RES (31)..(32): Xaa is C or S

SEQ ID NO: 86381 - protein, 40 aa, Artificial Sequence; identical to SEQ ID NO: 4138
  Cyclic GFR-binding peptide
  MOD_RES (1)..(3)..(35)..(36): Xaa is C or S

SEQ ID NO: 86382 - protein, 33 aa, Artificial Sequence; identical to SEQ ID NO: 32442
  Cyclic GFR-binding peptide
  MOD_RES (2)..(33): Xaa is C or S

SEQ ID NO: 86383 - protein, 37 aa, Artificial Sequence; identical to SEQ ID NO: 32443
  Cyclic GFR-binding peptide
  MOD_RES (33)..(34): Xaa is C or S

SEQ ID NO: 86384 - protein, 33 aa, Artificial Sequence; identical to SEQ ID NO: 32444
  Cyclic GFR-binding peptide
  MOD_RES (1)..(33): Xaa is C or S

SEQ ID NO: 86385 - protein, 31 aa, Artificial Sequence; identical to SEQ ID NO: 4141
  Cyclic GFR-binding peptide
  MOD_RES (27)..(28): Xaa is C or S

SEQ ID NO: 86386 - protein, 31 aa, Artificial Sequence
  Cyclic GFR-binding peptide
  MOD_RES (31)..(31): Xaa is C or S
EVTMNEYKFKVVNKNEDLYLISIPEMKEPVX

SEQ ID NO: 86387 - protein, 36 aa, Artificial Sequence; identical to SEQ ID NO: 4143
  Cyclic GFR-binding peptide
  MOD_RES (1)..(33)..(34): Xaa is C or S

SEQ ID NO: 86388 - protein, 32 aa, Artificial Sequence; identical to SEQ ID NO: 4144
  Cyclic GFR-binding peptide
  MOD_RES (30)..(31): Xaa is C or S

SEQ ID NO: 86389 - protein, 31 aa, Artificial Sequence
  Cyclic GFR-binding peptide
  MOD_RES (29)..(30): Xaa is C or S
VMGEYKFKIIQQKDNLYLMSIPEMKTPTXXP

SEQ ID NO: 86390 - protein, 32 aa, Artificial Sequence; identical to SEQ ID NO: 4145
  Cyclic GFR-binding peptide
  MOD_RES (28)..(29): Xaa is C or S

SEQ ID NO: 86391 - protein, 32 aa, Artificial Sequence; identical to SEQ ID NO: 4147
  Cyclic GFR-binding peptide
  MOD_RES (1)..(3): Xaa is C or S

SEQ ID NO: 86392 - protein, 34 aa, Artificial Sequence; identical to SEQ ID NO: 4148
  Cyclic GFR-binding peptide
  MOD_RES (29)..(30): Xaa is C or S

SEQ ID NO: 86393 - protein, 37 aa, Artificial Sequence; identical to SEQ ID NO: 4152
  Cyclic GFR-binding peptide
  MOD_RES (32)..(32): Xaa is C or S

SEQ ID NO: 86394 - protein, 37 aa, Artificial Sequence; identical to SEQ ID NO: 4154
  Cyclic GFR-binding peptide
  MOD_RES (2)..(33)..(34): Xaa is C or S

SEQ ID NO: 86395 - protein, 23 aa, Artificial Sequence
  Cyclic GFR-binding peptide
YHYKLIVNSSDDKYLVSIPSLKT

SEQ ID NO: 86396 - protein, 37 aa, Artificial Sequence; identical to SEQ ID NO: 4156
  Cyclic GFR-binding peptide
  MOD_RES (1)..(3)..(35): Xaa is C or S

SEQ ID NO: 86397 - protein, 39 aa, Artificial Sequence; identical to SEQ ID NO: 4157
  Cyclic GFR-binding peptide
  MOD_RES (1)..(3)..(34)..(35): Xaa is C or S

SEQ ID NO: 86398 - protein, 33 aa, Artificial Sequence; identical to SEQ ID NO: 32458
  Cyclic GFR-binding peptide
  MOD_RES (30)..(31): Xaa is C or S

SEQ ID NO: 86399 - protein, 28 aa, Artificial Sequence
  Cyclic GFR-binding peptide
  MOD_RES (26)..(27): Xaa is C or S
PIKGYIVNSSDDFYLVNIPSLKTPAXXP

SEQ ID NO: 86400 - protein, 29 aa, Artificial Sequence
  Cyclic GFR-binding peptide
  MOD_RES (1)..(3): Xaa is C or S
XAXSEVTMNPIKGYVVNKNEDFYLINIPS

SEQ ID NO: 86401 - protein, 29 aa, Artificial Sequence
  Cyclic GFR-binding peptide
  MOD_RES (2)..(2): Xaa is C or S
AXSEVTMNRYKKLVVNKNEDFYLISIANM

SEQ ID NO: 86402 - protein, 29 aa, Artificial Sequence
  Cyclic GFR-binding peptide
  MOD_RES (28)..(29): Xaa is C or S
VMPIKGYVKPTRGVFYLINIPSLDQPVXX

SEQ ID NO: 86403 - protein, 27 aa, Artificial Sequence
  Cyclic GFR-binding peptide
EVVMEPIKGYVVKDYEDFYLMNIPSLE

SEQ ID NO: 86404 - protein, 34 aa, Artificial Sequence; identical to SEQ ID NO: 4162
  Cyclic GFR-binding peptide
  MOD_RES (29)..(30): Xaa is C or S

SEQ ID NO: 86405 - protein, 33 aa, Artificial Sequence; identical to SEQ ID NO: 41057
  Cyclic GFR-binding peptide
  MOD_RES (28)..(29): Xaa is C or S

SEQ ID NO: 86406 - protein, 32 aa, Artificial Sequence
  Cyclic GFR-binding peptide
  MOD_RES (1)..(1): Xaa is C or S
XRDVVMGEYKFKIIQQKDNLYLMSIPEMKTPT

SEQ ID NO: 86407 - protein, 31 aa, Artificial Sequence; identical to SEQ ID NO: 4171
  Cyclic GFR-binding peptide
  MOD_RES (27)..(28): Xaa is C or S

SEQ ID NO: 86408 - protein, 31 aa, Artificial Sequence; identical to SEQ ID NO: 32473
  Cyclic GFR-binding peptide
  MOD_RES (26)..(26): Xaa is C or S

SEQ ID NO: 86409 - protein, 24 aa, Artificial Sequence
  Cyclic GFR-binding peptide
VMERHKRLVVKDYEDYYLMSTASL

SEQ ID NO: 86410 - protein, 36 aa, Artificial Sequence
  Cyclic GFR-binding peptide
  MOD_RES (31)..(32): Xaa is C or S
EVVMDYHYKLVVNNASDKYLISIPSLRTPVXXTPPT

SEQ ID NO: 86411 - protein, 34 aa, Artificial Sequence
  Cyclic GFR-binding peptide
  MOD_RES (31)..(32): Xaa is C or S
EVTMNPIKGYVVNKNEDFYLINIPSMKEPVXXPE

SEQ ID NO: 86412 - protein, 34 aa, Artificial Sequence; identical to SEQ ID NO: 32477
  Cyclic GFR-binding peptide
  MOD_RES (2)..(33)..(34): Xaa is C or S

SEQ ID NO: 86413 - protein, 33 aa, Artificial Sequence; identical to SEQ ID NO: 41066
  Cyclic GFR-binding peptide
  MOD_RES (1)..(3): Xaa is C or S

SEQ ID NO: 86414 - protein, 30 aa, Artificial Sequence; identical to SEQ ID NO: 4184
  Cyclic GFR-binding peptide
  MOD_RES (1)..(3): Xaa is C or S

SEQ ID NO: 86415 - protein, 35 aa, Artificial Sequence
  Cyclic GFR-binding peptide
  MOD_RES (1)..(3)..(35): Xaa is C or S
XGXESVAMGRHKRLYTVVGKDYYLISTASLKTPVX

SEQ ID NO: 86416 - protein, 32 aa, Artificial Sequence; identical to SEQ ID NO: 4185
  Cyclic GFR-binding peptide
  MOD_RES (1)..(3): Xaa is C or S

SEQ ID NO: 86417 - protein, 36 aa, Artificial Sequence; identical to SEQ ID NO: 32484
  Cyclic GFR-binding peptide
  MOD_RES (1)..(33)..(34): Xaa is C or S

SEQ ID NO: 86418 - protein, 25 aa, Artificial Sequence
  Cyclic GFR-binding peptide
MGERHKRLTPVGMDDYYLVSTASLK

SEQ ID NO: 86419 - protein, 25 aa, Artificial Sequence
  Cyclic GFR-binding peptide
IMPIKGYIKPTKGIFYLINIPSLDQ

SEQ ID NO: 86420 - protein, 25 aa, Artificial Sequence
  Cyclic GFR-binding peptide
NYHYKLIVNNSSDKYLVSIPSLKTP

SEQ ID NO: 86421 - protein, 35 aa, Artificial Sequence; identical to SEQ ID NO: 32488
  Cyclic GFR-binding peptide
  MOD_RES (30)..(31): Xaa is C or S

SEQ ID NO: 86422 - protein, 29 aa, Artificial Sequence
  Cyclic GFR-binding peptide
  MOD_RES (27)..(28): Xaa is C or S
NRHKRLIVNSSDDYYLVSTASLQTPAXXP

SEQ ID NO: 86423 - protein, 31 aa, Artificial Sequence; identical to SEQ ID NO: 41081
  Cyclic GFR-binding peptide
  MOD_RES (1)..(1): Xaa is C or S

SEQ ID NO: 86424 - protein, 36 aa, Artificial Sequence; identical to SEQ ID NO: 4193
  Cyclic GFR-binding peptide
  MOD_RES (1)..(33): Xaa is C or S

SEQ ID NO: 86425 - protein, 38 aa, Artificial Sequence; identical to SEQ ID NO: 41082
  Cyclic GFR-binding peptide
  MOD_RES (1)..(33)..(34): Xaa is C or S

SEQ ID NO: 86426 - protein, 30 aa, Artificial Sequence
  Cyclic GFR-binding peptide
  MOD_RES (27)..(28): Xaa is C or S
GEYKFKIIQQKDNLYLMSIPEMKTPTXXPG

SEQ ID NO: 86427 - protein, 32 aa, Artificial Sequence
  Cyclic GFR-binding peptide
  MOD_RES (2)..(4): Xaa is C or S
RXGXSEVVMDYHYKLVVNNASDKYLISIPSLR

SEQ ID NO: 86428 - protein, 30 aa, Artificial Sequence; identical to SEQ ID NO: 4203
  Cyclic GFR-binding peptide
  MOD_RES (2)..(4): Xaa is C or S

SEQ ID NO: 86429 - protein, 31 aa, Artificial Sequence; identical to SEQ ID NO: 4205
  Cyclic GFR-binding peptide
  MOD_RES (27)..(28): Xaa is C or S

SEQ ID NO: 86430 - protein, 35 aa, Artificial Sequence; identical to SEQ ID NO: 41088
  Cyclic GFR-binding peptide
  MOD_RES (1)..(33)..(34): Xaa is C or S

SEQ ID NO: 86431 - protein, 29 aa, Artificial Sequence
  Cyclic GFR-binding peptide
  MOD_RES (29)..(29): Xaa is C or S
MGEPIKGYTPVGMDDFYLVNIPSLKTPVX

SEQ ID NO: 86432 - protein, 27 aa, Artificial Sequence
  Cyclic GFR-binding peptide
  MOD_RES (26)..(27): Xaa is C or S
PIKGYTPVGMDDFYLVNIPSLKTPVXX

SEQ ID NO: 86433 - protein, 31 aa, Artificial Sequence; identical to SEQ ID NO: 41092
  Cyclic GFR-binding peptide
  MOD_RES (1)..(1): Xaa is C or S

SEQ ID NO: 86434 - protein, 27 aa, Artificial Sequence
  Cyclic GFR-binding peptide
  MOD_RES (27)..(27): Xaa is C or S
ERHKRLTPVGMDDYYLVSTASLKTPVX

SEQ ID NO: 86435 - protein, 27 aa, Artificial Sequence
  Cyclic GFR-binding peptide
MEYHYKLVVKDYEDKYLMSIPSLETPV

SEQ ID NO: 86436 - protein, 32 aa, Artificial Sequence; identical to SEQ ID NO: 4210
  Cyclic GFR-binding peptide
  MOD_RES (2)..(4): Xaa is C or S

SEQ ID NO: 86437 - protein, 24 aa, Artificial Sequence
  Cyclic GFR-binding peptide
VMEYHYKLVVKDYEDKYLMSIPSL

SEQ ID NO: 86438 - protein, 30 aa, Artificial Sequence
  Cyclic GFR-binding peptide
  MOD_RES (29)..(30): Xaa is C or S
VIMEYKFKLLVRGNDLYLMSIPETKVPAXX

SEQ ID NO: 86439 - protein, 38 aa, Artificial Sequence; identical to SEQ ID NO: 4215
  Cyclic GFR-binding peptide
  MOD_RES (1)..(33)..(34): Xaa is C or S

SEQ ID NO: 86440 - protein, 28 aa, Artificial Sequence
  Cyclic GFR-binding peptide
  MOD_RES (1)..(1): Xaa is C or S
XGEVVMDYHYKLVVKENEDKYLMSIPSL

SEQ ID NO: 86441 - protein, 42 aa, Artificial Sequence
  Cyclic GFR-binding peptide
  MOD_RES (2)..(4)..(36)..(37): Xaa is C or S
RXAXSEVTMNEYKFKVVNKNEDLYLISIPEMKEPVXXPEPIG

SEQ ID NO: 86442 - protein, 31 aa, Artificial Sequence; identical to SEQ ID NO: 4217
  Cyclic GFR-binding peptide
  MOD_RES (2)..(4): Xaa is C or S

SEQ ID NO: 86443 - protein, 31 aa, Artificial Sequence; identical to SEQ ID NO: 4218
  Cyclic GFR-binding peptide
  MOD_RES (1)..(1): Xaa is C or S

SEQ ID NO: 86444 - protein, 40 aa, Artificial Sequence; identical to SEQ ID NO: 41103
  Cyclic GFR-binding peptide
  MOD_RES (2)..(4)..(36)..(37): Xaa is C or S

SEQ ID NO: 86445 - protein, 24 aa, Artificial Sequence
  Cyclic GFR-binding peptide
MRHKRLVKPKRGVYYLISTASLAQ

SEQ ID NO: 86446 - protein, 33 aa, Artificial Sequence; identical to SEQ ID NO: 32516
  Cyclic GFR-binding peptide
  MOD_RES (29)..(30): Xaa is C or S

SEQ ID NO: 86447 - protein, 31 aa, Artificial Sequence; identical to SEQ ID NO: 41105
  Cyclic GFR-binding peptide
  MOD_RES (2)..(4): Xaa is C or S

SEQ ID NO: 86448 - protein, 34 aa, Artificial Sequence; identical to SEQ ID NO: 32517
  Cyclic GFR-binding peptide
  MOD_RES (28)..(28): Xaa is C or S

SEQ ID NO: 86449 - protein, 32 aa, Artificial Sequence; identical to SEQ ID NO: 41108
  Cyclic GFR-binding peptide
  MOD_RES (29)..(30): Xaa is C or S

SEQ ID NO: 86450 - protein, 28 aa, Artificial Sequence
  Cyclic GFR-binding peptide
  MOD_RES (27)..(28): Xaa is C or S
MPIKGYVKPKRGVFYLINIPSLAQPVXX

SEQ ID NO: 86451 - protein, 36 aa, Artificial Sequence
  Cyclic GFR-binding peptide
  MOD_RES (2)..(4)..(35)..(36): Xaa is C or S
SXKXSKVVMPIKGYVKPTRGVFYLINIPSLDQPVXX

SEQ ID NO: 86452 - protein, 31 aa, Artificial Sequence; identical to SEQ ID NO: 4223
  Cyclic GFR-binding peptide
  MOD_RES (26)..(26): Xaa is C or S

SEQ ID NO: 86453 - protein, 39 aa, Artificial Sequence; identical to SEQ ID NO: 4224
  Cyclic GFR-binding peptide
  MOD_RES (1)..(33)..(34): Xaa is C or S

SEQ ID NO: 86454 - protein, 36 aa, Artificial Sequence
  Cyclic GFR-binding peptide
  MOD_RES (2)..(4)..(36): Xaa is C or S
RXGXESVAMGRHKRLYTVVGKDYYLISTASLKTPVX

SEQ ID NO: 86455 - protein, 23 aa, Artificial Sequence
  Cyclic GFR-binding peptide
TMNYHYKLVVNKNEDKYLISIPS

SEQ ID NO: 86456 - protein, 37 aa, Artificial Sequence
  Cyclic GFR-binding peptide
  MOD_RES (31)..(32): Xaa is C or S
EEVIMRHKRLLLVRGNDYYLMSTASTKVPAXXTSPVR

SEQ ID NO: 86457 - protein, 24 aa, Artificial Sequence
  Cyclic GFR-binding peptide
GEEYKFKTPVGMDDLYLVSIPELK

SEQ ID NO: 86458 - protein, 33 aa, Artificial Sequence; identical to SEQ ID NO: 32528
  Cyclic GFR-binding peptide
  MOD_RES (30)..(31): Xaa is C or S

SEQ ID NO: 86459 - protein, 30 aa, Artificial Sequence
  Cyclic GFR-binding peptide
  MOD_RES (26)..(27): Xaa is C or S
EYKFKVVNNASDLYLISIPELRTPVXXTPP

SEQ ID NO: 86460 - protein, 38 aa, Artificial Sequence
  Cyclic GFR-binding peptide
  MOD_RES (1)..(33)..(34): Xaa is C or S
XSEVTMNPIKGYVVNKNEDFYLINIPSMKEPVXXPEPI

SEQ ID NO: 86461 - protein, 28 aa, Artificial Sequence
  Cyclic GFR-binding peptide
RVVMNRYKKLIVNSSDDFYLVSIANLQT

SEQ ID NO: 86462 - protein, 38 aa, Artificial Sequence; identical to SEQ ID NO: 4238
  Cyclic GFR-binding peptide
  MOD_RES (2)..(4)..(35)..(36): Xaa is C or S

SEQ ID NO: 86463 - protein, 27 aa, Artificial Sequence
  Cyclic GFR-binding peptide
IMPIKGYLLVRGNDFYLMNIPSTKVPA

SEQ ID NO: 86464 - protein, 36 aa, Artificial Sequence; identical to SEQ ID NO: 41132
  Cyclic GFR-binding peptide
  MOD_RES (31)..(32): Xaa is C or S

SEQ ID NO: 86465 - protein, 31 aa, Artificial Sequence; identical to SEQ ID NO: 75534
  Cyclic GFR-binding peptide
  MOD_RES (31)..(31): Xaa is C or S

SEQ ID NO: 86466 - protein, 29 aa, Artificial Sequence
  Cyclic GFR-binding peptide
  MOD_RES (29)..(29): Xaa is C or S
VIMPIKGYIKPTKGIFYLINIPSLDQSVX

SEQ ID NO: 86467 - protein, 26 aa, Artificial Sequence
  Cyclic GFR-binding peptide
VVMNEYKFKIVNSSDDLYLVSIPELK

SEQ ID NO: 86468 - protein, 28 aa, Artificial Sequence
  Cyclic GFR-binding peptide
  MOD_RES (1)..(3): Xaa is C or S
XKXSKVVMPIKGYVKPTRGVFYLINIPS

SEQ ID NO: 86469 - protein, 27 aa, Artificial Sequence
  Cyclic GFR-binding peptide
ESVAMGRYKKLYTVVGKDFYLISIANL

SEQ ID NO: 86470 - protein, 32 aa, Artificial Sequence
  Cyclic GFR-binding peptide
  MOD_RES (1)..(1): Xaa is C or S
XRDVVMGRHKRLIIQQKDNYYLMSTASMKTPT

SEQ ID NO: 86471 - protein, 37 aa, Artificial Sequence; identical to SEQ ID NO: 32543
  Cyclic GFR-binding peptide
  MOD_RES (31)..(32): Xaa is C or S

SEQ ID NO: 86472 - protein, 30 aa, Artificial Sequence
  Cyclic GFR-binding peptide
  MOD_RES (29)..(30): Xaa is C or S
VMDRHKRLVVNNAADYYLISTASLRAPVXX

SEQ ID NO: 86473 - protein, 25 aa, Artificial Sequence
  Cyclic GFR-binding peptide
MRYKKLVKPKRGVFYLISIANLAQP

SEQ ID NO: 86474 - protein, 39 aa, Artificial Sequence; identical to SEQ ID NO: 4253
  Cyclic GFR-binding peptide
  MOD_RES (1)..(3)..(35)..(36): Xaa is C or S

SEQ ID NO: 86475 - protein, 24 aa, Artificial Sequence
  Cyclic GFR-binding peptide
VMERYKKLVVKDYEDFYLMSIANL

SEQ ID NO: 86476 - protein, 25 aa, Artificial Sequence
  Cyclic GFR-binding peptide
MNPIKGYIVNSSDDFYLVNIPSLQT

SEQ ID NO: 86477 - protein, 35 aa, Artificial Sequence; identical to SEQ ID NO: 4257
  Cyclic GFR-binding peptide
  MOD_RES (30)..(30): Xaa is C or S

SEQ ID NO: 86478 - protein, 34 aa, Artificial Sequence; identical to SEQ ID NO: 32555
  Cyclic GFR-binding peptide
  MOD_RES (1)..(3): Xaa is C or S

SEQ ID NO: 86479 - protein, 24 aa, Artificial Sequence
  Cyclic GFR-binding peptide
YHYKLIVNNSSDKYLVSIPSLKTP

SEQ ID NO: 86480 - protein, 25 aa, Artificial Sequence
  Cyclic GFR-binding peptide
MDRYKKLVVNNAADFYLISIANLRA

SEQ ID NO: 86481 - protein, 28 aa, Artificial Sequence
  Cyclic GFR-binding peptide
  MOD_RES (27)..(28): Xaa is C or S
EPIKGYTPVGMDDFYLVNIPSLKTPVXX

SEQ ID NO: 86482 - protein, 26 aa, Artificial Sequence
  Cyclic GFR-binding peptide
VIMPIKGYLLVRGNDFYLMNIPSTKV

SEQ ID NO: 86483 - protein, 33 aa, Artificial Sequence; identical to SEQ ID NO: 32558
  Cyclic GFR-binding peptide
  MOD_RES (32)..(33): Xaa is C or S

SEQ ID NO: 86484 - protein, 23 aa, Artificial Sequence
  Cyclic GFR-binding peptide
AMGPIKGYYTVVGKDFYLINIPS

SEQ ID NO: 86485 - protein, 33 aa, Artificial Sequence; identical to SEQ ID NO: 4261
  Cyclic GFR-binding peptide
  MOD_RES (31)..(32): Xaa is C or S

SEQ ID NO: 86486 - protein, 34 aa, Artificial Sequence
  Cyclic GFR-binding peptide
  MOD_RES (1)..(33)..(34): Xaa is C or S
XSEVTMNYHYKLVVNKNEDKYLISIPSMKEPVXX

SEQ ID NO: 86487 - protein, 35 aa, Artificial Sequence; identical to SEQ ID NO: 4265
  Cyclic GFR-binding peptide
  MOD_RES (1)..(3): Xaa is C or S

SEQ ID NO: 86488 - protein, 34 aa, Artificial Sequence; identical to SEQ ID NO: 4266
  Cyclic GFR-binding peptide
  MOD_RES (1)..(3): Xaa is C or S

SEQ ID NO: 86489 - protein, 41 aa, Artificial Sequence
  Cyclic GFR-binding peptide
  MOD_RES (2)..(4)..(36)..(37): Xaa is C or S
RXGXAEVVMDRHKRLVVNNAADYYLISTASLRAPVXXSAPA

SEQ ID NO: 86490 - protein, 26 aa, Artificial Sequence
  Cyclic GFR-binding peptide
DEYKFKVVNNAADLYLISIPELRAPV

SEQ ID NO: 86491 - protein, 31 aa, Artificial Sequence
  Cyclic GFR-binding peptide
  MOD_RES (31)..(31): Xaa is C or S
EEVIMRHKRLLLVRGNDYYLMSTASTKVPAX

SEQ ID NO: 86492 - protein, 28 aa, Artificial Sequence
  Cyclic GFR-binding peptide
VVMEYKFKVKPTRGVLYLISIPELDQPV

SEQ ID NO: 86493 - protein, 28 aa, Artificial Sequence
  Cyclic GFR-binding peptide
  MOD_RES (27)..(28): Xaa is C or S
MEYKFKIKPTKGILYLISIPELDQSVXX

SEQ ID NO: 86494 - protein, 39 aa, Artificial Sequence; identical to SEQ ID NO: 4273
  Cyclic GFR-binding peptide
  MOD_RES (2)..(34)..(35): Xaa is C or S

SEQ ID NO: 86495 - protein, 33 aa, Artificial Sequence
  Cyclic GFR-binding peptide
  MOD_RES (32)..(33): Xaa is C or S
SEVTMNPIKGYVVNKNEDFYLINIPSMKEPVXX

SEQ ID NO: 86496 - protein, 24 aa, Artificial Sequence
  Cyclic GFR-binding peptide
VMDRHKRLVVNNASDYYLISTASL

SEQ ID NO: 86497 - protein, 25 aa, Artificial Sequence
  Cyclic GFR-binding peptide
EVVMDRHKRLVVKENEDYYLMSTAS

SEQ ID NO: 86498 - protein, 32 aa, Artificial Sequence; identical to SEQ ID NO: 41168
  Cyclic GFR-binding peptide
  MOD_RES (30)..(31): Xaa is C or S

SEQ ID NO: 86499 - protein, 37 aa, Artificial Sequence
  Cyclic GFR-binding peptide
  MOD_RES (2)..(34)..(35): Xaa is C or S
AXSEVTMNEYKFKVVNKNEDLYLISIPEMKEPVXXPE

SEQ ID NO: 86500 - protein, 35 aa, Artificial Sequence; identical to SEQ ID NO: 32579
  Cyclic GFR-binding peptide
  MOD_RES (2)..(4)..(35): Xaa is C or S

SEQ ID NO: 86501 - protein, 33 aa, Artificial Sequence; identical to SEQ ID NO: 41171
  Cyclic GFR-binding peptide
  MOD_RES (29)..(30): Xaa is C or S

SEQ ID NO: 86502 - protein, 30 aa, Artificial Sequence
  Cyclic GFR-binding peptide
  MOD_RES (30)..(30): Xaa is C or S
VTMNEYKFKVVNKNEDLYLISIPEMKEPVX

SEQ ID NO: 86503 - protein, 33 aa, Artificial Sequence
  Cyclic GFR-binding peptide
  MOD_RES (29)..(30): Xaa is C or S
VMGRHKRLIIQQKDNYYLMSTASMKTPTXXPGA

SEQ ID NO: 86504 - protein, 30 aa, Artificial Sequence; identical to SEQ ID NO: 32583
  Cyclic GFR-binding peptide
  MOD_RES (2)..(2): Xaa is C or S

SEQ ID NO: 86505 - protein, 35 aa, Artificial Sequence
  Cyclic GFR-binding peptide
  MOD_RES (30)..(31): Xaa is C or S
VVMDRHKRLVVNNASDYYLISTASLRTPVXXTPPT

SEQ ID NO: 86506 - protein, 29 aa, Artificial Sequence
  Cyclic GFR-binding peptide
  MOD_RES (28)..(29): Xaa is C or S
MDEYKFKVVNNAADLYLISIPELRAPVXX

SEQ ID NO: 86507 - protein, 28 aa, Artificial Sequence
  Cyclic GFR-binding peptide
EVTMNEYKFKVVNKNEDLYLISIPEMKE

SEQ ID NO: 86508 - protein, 32 aa, Artificial Sequence; identical to SEQ ID NO: 4285
  Cyclic GFR-binding peptide
  MOD_RES (30)..(31): Xaa is C or S

SEQ ID NO: 86509 - protein, 33 aa, Artificial Sequence; identical to SEQ ID NO: 4286
  Cyclic GFR-binding peptide
  MOD_RES (29)..(30): Xaa is C or S

SEQ ID NO: 86510 - protein, 39 aa, Artificial Sequence; identical to SEQ ID NO: 32591
  Cyclic GFR-binding peptide
  MOD_RES (2)..(33)..(34): Xaa is C or S

SEQ ID NO: 86511 - protein, 33 aa, Artificial Sequence
  Cyclic GFR-binding peptide
  MOD_RES (27)..(28): Xaa is C or S
DRHKRLVVNNAADYYLISTASLRAPVXXSAPAA

SEQ ID NO: 86512 - protein, 34 aa, Artificial Sequence
  Cyclic GFR-binding peptide
  MOD_RES (1)..(32)..(33): Xaa is C or S
XSRVIMPIKGYVKPKRGVFYLINIPSLAQPVXXP

SEQ ID NO: 86513 - protein, 32 aa, Artificial Sequence
  Cyclic GFR-binding peptide
  MOD_RES (27)..(28): Xaa is C or S
NPIKGYVVNKNEDFYLINIPSMKEPVXXPEPI

SEQ ID NO: 86514 - protein, 25 aa, Artificial Sequence
  Cyclic GFR-binding peptide
VIMYHYKLVKPKRGVKYLISIPSLA

SEQ ID NO: 86515 - protein, 33 aa, Artificial Sequence; identical to SEQ ID NO: 4292
  Cyclic GFR-binding peptide
  MOD_RES (31)..(32): Xaa is C or S

SEQ ID NO: 86516 - protein, 41 aa, Artificial Sequence
  Cyclic GFR-binding peptide
  MOD_RES (1)..(3)..(35)..(36): Xaa is C or S
XGXSEVVMDEYKFKVVNNASDLYLISIPELRTPVXXTPPTS

SEQ ID NO: 86517 - protein, 22 aa, Artificial Sequence
  Cyclic GFR-binding peptide
NRHKRLVVNKNEDYYLISTASM

SEQ ID NO: 86518 - protein, 34 aa, Artificial Sequence; identical to SEQ ID NO: 4295
  Cyclic GFR-binding peptide
  MOD_RES (1)..(3): Xaa is C or S

SEQ ID NO: 86519 - protein, 24 aa, Artificial Sequence
  Cyclic GFR-binding peptide
MGPIKGYYTVVGKDFYLINIPSLK

SEQ ID NO: 86520 - protein, 33 aa, Artificial Sequence; identical to SEQ ID NO: 75570
  Cyclic GFR-binding peptide
  MOD_RES (2)..(4): Xaa is C or S

SEQ ID NO: 86521 - protein, 31 aa, Artificial Sequence; identical to SEQ ID NO: 32602
  Cyclic GFR-binding peptide
  MOD_RES (27)..(28): Xaa is C or S

SEQ ID NO: 86522 - protein, 30 aa, Artificial Sequence; identical to SEQ ID NO: 32604
  Cyclic GFR-binding peptide

SEQ ID NO: 86523 - protein, 27 aa, Artificial Sequence
  Cyclic GFR-binding peptide
VVMDEYKFKVVNNASDLYLISIPELRT

SEQ ID NO: 86524 - protein, 29 aa, Artificial Sequence
  Cyclic GFR-binding peptide
  MOD_RES (28)..(29): Xaa is C or S
GEPIKGYTPVGMDDFYLVNIPSLKTPVXX

SEQ ID NO: 86525 - protein, 26 aa, Artificial Sequence
  Cyclic GFR-binding peptide
EVVMDRHKRLVVKENEDYYLMSTASL

SEQ ID NO: 86526 - protein, 38 aa, Artificial Sequence
  Cyclic GFR-binding peptide
  MOD_RES (1)..(33)..(34): Xaa is C or S
XSEVTMNEYKFKVVNKNEDLYLISIPEMKEPVXXPEPI

SEQ ID NO: 86527 - protein, 32 aa, Artificial Sequence; identical to SEQ ID NO: 41198
  Cyclic GFR-binding peptide
  MOD_RES (26)..(27): Xaa is C or S

SEQ ID NO: 86528 - protein, 34 aa, Artificial Sequence; identical to SEQ ID NO: 4306
  Cyclic GFR-binding peptide
  MOD_RES (31)..(32): Xaa is C or S

SEQ ID NO: 86529 - protein, 28 aa, Artificial Sequence
  Cyclic GFR-binding peptide
  MOD_RES (27)..(28): Xaa is C or S
EEYKFKVVKDYEDLYLMSIPELETPVXX

SEQ ID NO: 86530 - protein, 29 aa, Artificial Sequence
  Cyclic GFR-binding peptide
  MOD_RES (27)..(28): Xaa is C or S
MPIKGYLLVRGNDFYLMNIPSTKVPAXXT

SEQ ID NO: 86531 - protein, 27 aa, Artificial Sequence
  Cyclic GFR-binding peptide
DVVMGYHYKLIIQQKDNKYLMSIPSMK

SEQ ID NO: 86532 - protein, 23 aa, Artificial Sequence
  Cyclic GFR-binding peptide
RYKKLLLVRGNDFYLMSIANTKV

SEQ ID NO: 86533 - protein, 38 aa, Artificial Sequence; identical to SEQ ID NO: 4307
  Cyclic GFR-binding peptide
  MOD_RES (1)..(3)..(35)..(36): Xaa is C or S

SEQ ID NO: 86534 - protein, 23 aa, Artificial Sequence
  Cyclic GFR-binding peptide
VIMPIKGYVKPKRGVFYLINIPS

SEQ ID NO: 86535 - protein, 38 aa, Artificial Sequence; identical to SEQ ID NO: 4316
  Cyclic GFR-binding peptide
  MOD_RES (32)..(33): Xaa is C or S

SEQ ID NO: 86536 - protein, 28 aa, Artificial Sequence
  Cyclic GFR-binding peptide
  MOD_RES (1)..(1): Xaa is C or S
XRDVVMGRYKKLIIQQKDNFYLMSIANM

SEQ ID NO: 86537 - protein, 28 aa, Artificial Sequence
  Cyclic GFR-binding peptide
  MOD_RES (28)..(28): Xaa is C or S
VMPIKGYVKPTRGVFYLINIPSLDQPVX

SEQ ID NO: 86538 - protein, 33 aa, Artificial Sequence; identical to SEQ ID NO: 4318
  Cyclic GFR-binding peptide
  MOD_RES (27)..(28): Xaa is C or S

SEQ ID NO: 86539 - protein, 33 aa, Artificial Sequence; identical to SEQ ID NO: 32620
  Cyclic GFR-binding peptide
  MOD_RES (2)..(2): Xaa is C or S

SEQ ID NO: 86540 - protein, 31 aa, Artificial Sequence; identical to SEQ ID NO: 4320
  Cyclic GFR-binding peptide
  MOD_RES (29)..(30): Xaa is C or S

SEQ ID NO: 86541 - protein, 34 aa, Artificial Sequence
  Cyclic GFR-binding peptide
  MOD_RES (28)..(29): Xaa is C or S
MDRHKRLVVNNAADYYLISTASLRAPVXXSAPAA

SEQ ID NO: 86542 - protein, 36 aa, Artificial Sequence
  Cyclic GFR-binding peptide
  MOD_RES (1)..(33)..(34): Xaa is C or S
XSEVVMDRHKRLVVNNASDYYLISTASLRTPVXXTP

SEQ ID NO: 86543 - protein, 21 aa, Artificial Sequence
  Cyclic GFR-binding peptide
RYKKLIKPTKGIFYLISIANL

SEQ ID NO: 86544 - protein, 28 aa, Artificial Sequence
  Cyclic GFR-binding peptide
VVMEPIKGYVVKDYEDFYLMNIPSLETP

SEQ ID NO: 86545 - protein, 33 aa, Artificial Sequence; identical to SEQ ID NO: 4326
  Cyclic GFR-binding peptide
  MOD_RES (1)..(3): Xaa is C or S

SEQ ID NO: 86546 - protein, 41 aa, Artificial Sequence; identical to SEQ ID NO: 4327
  Cyclic GFR-binding peptide
  MOD_RES (1)..(3)..(35)..(36): Xaa is C or S

SEQ ID NO: 86547 - protein, 26 aa, Artificial Sequence
  Cyclic GFR-binding peptide
  MOD_RES (26)..(26): Xaa is C or S
YHYKLIVNSSDDKYLVSIPSLKTPAX

SEQ ID NO: 86548 - protein, 30 aa, Artificial Sequence
  Cyclic GFR-binding peptide
  MOD_RES (1)..(3): Xaa is C or S
XAXSEVTMNYHYKLVVNKNEDKYLISIPSM

SEQ ID NO: 86549 - protein, 40 aa, Artificial Sequence; identical to SEQ ID NO: 4330
  Cyclic GFR-binding peptide
  MOD_RES (2)..(4)..(35)..(36): Xaa is C or S

SEQ ID NO: 86550 - protein, 30 aa, Artificial Sequence; identical to SEQ ID NO: 4331
  Cyclic GFR-binding peptide
  MOD_RES (29)..(30): Xaa is C or S

SEQ ID NO: 86551 - protein, 29 aa, Artificial Sequence
  Cyclic GFR-binding peptide
  MOD_RES (1)..(3): Xaa is C or S
XKXSKVVMYHYKLVKPTRGVKYLISIPSL

SEQ ID NO: 86552 - protein, 26 aa, Artificial Sequence
  Cyclic GFR-binding peptide
RVVMNEYKFKIVNSSDDLYLVSIPEL

SEQ ID NO: 86553 - protein, 33 aa, Artificial Sequence; identical to SEQ ID NO: 4333
  Cyclic GFR-binding peptide
  MOD_RES (2)..(4): Xaa is C or S

SEQ ID NO: 86554 - protein, 41 aa, Artificial Sequence
  Cyclic GFR-binding peptide
  MOD_RES (1)..(3)..(35)..(36): Xaa is C or S
XAXSEVTMNRHKRLVVNKNEDYYLISTASMKEPVXXPEPIG

SEQ ID NO: 86555 - protein, 29 aa, Artificial Sequence
  Cyclic GFR-binding peptide
ESVAMGRYKKLYTVVGKDFYLISIANLKT

SEQ ID NO: 86556 - protein, 27 aa, Artificial Sequence
  Cyclic GFR-binding peptide
  MOD_RES (1)..(1): Xaa is C or S
XSEVTMNRHKRLVVNKNEDYYLISTAS

SEQ ID NO: 86557 - protein, 27 aa, Artificial Sequence
  Cyclic GFR-binding peptide
  MOD_RES (26)..(27): Xaa is C or S
PIKGYIKPTKGIFYLINIPSLDQSVXX

SEQ ID NO: 86558 - protein, 28 aa, Artificial Sequence
  Cyclic GFR-binding peptide
SKVVMRYKKLVKPTRGVFYLISIANLDQ

SEQ ID NO: 86559 - protein, 38 aa, Artificial Sequence; identical to SEQ ID NO: 4349
  Cyclic GFR-binding peptide
  MOD_RES (1)..(33)..(34): Xaa is C or S

SEQ ID NO: 86560 - protein, 26 aa, Artificial Sequence
  Cyclic GFR-binding peptide
  MOD_RES (26)..(26): Xaa is C or S
RYKKLLLVRGNDFYLMSIANTKVPAX

SEQ ID NO: 86561 - protein, 31 aa, Artificial Sequence; identical to SEQ ID NO: 32650
  Cyclic GFR-binding peptide
  MOD_RES (2)..(4): Xaa is C or S

SEQ ID NO: 86562 - protein, 34 aa, Artificial Sequence; identical to SEQ ID NO: 32651
  Cyclic GFR-binding peptide
  MOD_RES (1)..(3): Xaa is C or S

SEQ ID NO: 86563 - protein, 30 aa, Artificial Sequence; identical to SEQ ID NO: 4351
  Cyclic GFR-binding peptide

SEQ ID NO: 86564 - protein, 30 aa, Artificial Sequence; identical to SEQ ID NO: 4352
  Cyclic GFR-binding peptide
  MOD_RES (2)..(2): Xaa is C or S

SEQ ID NO: 86565 - protein, 32 aa, Artificial Sequence; identical to SEQ ID NO: 41240
  Cyclic GFR-binding peptide
  MOD_RES (30)..(31): Xaa is C or S

SEQ ID NO: 86566 - protein, 33 aa, Artificial Sequence; identical to SEQ ID NO: 4353
  Cyclic GFR-binding peptide
  MOD_RES (2)..(4): Xaa is C or S

SEQ ID NO: 86567 - protein, 35 aa, Artificial Sequence
  Cyclic GFR-binding peptide
  MOD_RES (32)..(33): Xaa is C or S
SEVTMNPIKGYVVNKNEDFYLINIPSMKEPVXXPE

SEQ ID NO: 86568 - protein, 30 aa, Artificial Sequence; identical to SEQ ID NO: 32654
  Cyclic GFR-binding peptide

SEQ ID NO: 86569 - protein, 40 aa, Artificial Sequence
  Cyclic GFR-binding peptide
  MOD_RES (2)..(34)..(35): Xaa is C or S
AXSEVTMNYHYKLVVNKNEDKYLISIPSMKEPVXXPEPIG

SEQ ID NO: 86570 - protein, 29 aa, Artificial Sequence
  Cyclic GFR-binding peptide
RVVMNRYKKLIVNSSDDFYLVSIANLQTP

SEQ ID NO: 86571 - protein, 27 aa, Artificial Sequence
  Cyclic GFR-binding peptide
  MOD_RES (27)..(27): Xaa is C or S
NRHKRLIVNSSDDYYLVSTASLKTPAX

SEQ ID NO: 86572 - protein, 30 aa, Artificial Sequence
  Cyclic GFR-binding peptide
  MOD_RES (27)..(28): Xaa is C or S
GRHKRLYTVVGKDYYLISTASLKTPVXXAK

SEQ ID NO: 86573 - protein, 31 aa, Artificial Sequence; identical to SEQ ID NO: 4363
  Cyclic GFR-binding peptide
  MOD_RES (28)..(29): Xaa is C or S

SEQ ID NO: 86574 - protein, 30 aa, Artificial Sequence
  Cyclic GFR-binding peptide
  MOD_RES (26)..(27): Xaa is C or S
RHKRLVVNNASDYYLISTASLRTPVXXTPP

SEQ ID NO: 86575 - protein, 33 aa, Artificial Sequence; identical to SEQ ID NO: 75600
  Cyclic GFR-binding peptide
  MOD_RES (2)..(4): Xaa is C or S

SEQ ID NO: 86576 - protein, 36 aa, Artificial Sequence; identical to SEQ ID NO: 41252
  Cyclic GFR-binding peptide
  MOD_RES (1)..(33)..(34): Xaa is C or S

SEQ ID NO: 86577 - protein, 33 aa, Artificial Sequence; identical to SEQ ID NO: 4370
  Cyclic GFR-binding peptide
  MOD_RES (1)..(3): Xaa is C or S

SEQ ID NO: 86578 - protein, 28 aa, Artificial Sequence
  Cyclic GFR-binding peptide
VMEPIKGYVVKDYEDFYLMNIPSLETPV

SEQ ID NO: 86579 - protein, 24 aa, Artificial Sequence
  Cyclic GFR-binding peptide
VVMDYHYKLVVNNASDKYLISIPS

SEQ ID NO: 86580 - protein, 36 aa, Artificial Sequence
  Cyclic GFR-binding peptide
  MOD_RES (31)..(32): Xaa is C or S
SKVIMPIKGYIKPTKGIFYLINIPSLDQSVXXPSAS

SEQ ID NO: 86581 - protein, 22 aa, Artificial Sequence
  Cyclic GFR-binding peptide
VMRHKRLVKPTRGVYYLISTAS

SEQ ID NO: 86582 - protein, 34 aa, Artificial Sequence
  Cyclic GFR-binding peptide
  MOD_RES (2)..(34): Xaa is C or S
GXSEVVMDRHKRLVVNNASDYYLISTASLRTPVX

SEQ ID NO: 86583 - protein, 29 aa, Artificial Sequence
  Cyclic GFR-binding peptide
  MOD_RES (29)..(29): Xaa is C or S
TMNRYKKLVVNKNEDFYLISIANMKEPVX

SEQ ID NO: 86584 - protein, 31 aa, Artificial Sequence; identical to SEQ ID NO: 41274
  Cyclic GFR-binding peptide
  MOD_RES (1)..(3): Xaa is C or S

SEQ ID NO: 86585 - protein, 28 aa, Artificial Sequence
  Cyclic GFR-binding peptide
VMGRHKRLIIQQKDNYYLMSTASMKTPT

SEQ ID NO: 86586 - protein, 33 aa, Artificial Sequence
  Cyclic GFR-binding peptide
  MOD_RES (31)..(32): Xaa is C or S
SVAMGRHKRLYTVVGKDYYLISTASLKTPVXXA

SEQ ID NO: 86587 - protein, 25 aa, Artificial Sequence
  Cyclic GFR-binding peptide
NRHKRLVVNKNEDYYLISTASMKEP

SEQ ID NO: 86588 - protein, 27 aa, Artificial Sequence
  Cyclic GFR-binding peptide
SKVVMPIKGYVKPTRGVFYLINIPSLD

SEQ ID NO: 86589 - protein, 31 aa, Artificial Sequence; identical to SEQ ID NO: 4389
  Cyclic GFR-binding peptide
  MOD_RES (29)..(30): Xaa is C or S

SEQ ID NO: 86590 - protein, 29 aa, Artificial Sequence
  Cyclic GFR-binding peptide
  MOD_RES (1)..(3): Xaa is C or S
XGXSRVVMNEYKFKIVNSSDDLYLVSIPE

SEQ ID NO: 86591 - protein, 24 aa, Artificial Sequence
  Cyclic GFR-binding peptide
MNEYKFKVVNKNEDLYLISIPEMK

SEQ ID NO: 86592 - protein, 22 aa, Artificial Sequence
  Cyclic GFR-binding peptide
MYHYKLLLVRGNDKYLMSIPST

SEQ ID NO: 86593 - protein, 32 aa, Artificial Sequence
  Cyclic GFR-binding peptide
  MOD_RES (29)..(30): Xaa is C or S
TMNRYKKLVVNKNEDFYLISIANMKEPVXXPE

SEQ ID NO: 86594 - protein, 37 aa, Artificial Sequence
  Cyclic GFR-binding peptide
  MOD_RES (2)..(4)..(35)..(36): Xaa is C or S
LXGXEEVIMRHKRLLLVRGNDYYLMSTASTKVPAXXT

SEQ ID NO: 86595 - protein, 29 aa, Artificial Sequence
  Cyclic GFR-binding peptide
  MOD_RES (1)..(1): Xaa is C or S
XAKVVMNPIKGYIVNNSSDFYLVNIPSLK

SEQ ID NO: 86596 - protein, 30 aa, Artificial Sequence; identical to SEQ ID NO: 4391
  Cyclic GFR-binding peptide
  MOD_RES (30)..(30): Xaa is C or S

SEQ ID NO: 86597 - protein, 30 aa, Artificial Sequence; identical to SEQ ID NO: 41289
  Cyclic GFR-binding peptide
  MOD_RES (27)..(28): Xaa is C or S

SEQ ID NO: 86598 - protein, 33 aa, Artificial Sequence; identical to SEQ ID NO: 4395
  Cyclic GFR-binding peptide
  MOD_RES (1)..(3): Xaa is C or S

SEQ ID NO: 86599 - protein, 31 aa, Artificial Sequence
  Cyclic GFR-binding peptide
  MOD_RES (28)..(29): Xaa is C or S
MNEYKFKVVNKNEDLYLISIPEMKEPVXXPE

SEQ ID NO: 86600 - protein, 31 aa, Artificial Sequence
  Cyclic GFR-binding peptide
  MOD_RES (29)..(30): Xaa is C or S
VMDRHKRLVVNNAADYYLISTASLRAPVXXS

SEQ ID NO: 86601 - protein, 29 aa, Artificial Sequence
  Cyclic GFR-binding peptide
  MOD_RES (2)..(2): Xaa is C or S
GXARVVMNEYKFKIVNSSDDLYLVSIPEL

SEQ ID NO: 86602 - protein, 33 aa, Artificial Sequence; identical to SEQ ID NO: 4402
  Cyclic GFR-binding peptide
  MOD_RES (1)..(32)..(33): Xaa is C or S

SEQ ID NO: 86603 - protein, 30 aa, Artificial Sequence; identical to SEQ ID NO: 75614
  Cyclic GFR-binding peptide
  MOD_RES (28)..(29): Xaa is C or S

SEQ ID NO: 86604 - protein, 28 aa, Artificial Sequence
  Cyclic GFR-binding peptide
VVMNRYKKLIVNSSDDFYLVSIANLQTP

SEQ ID NO: 86605 - protein, 28 aa, Artificial Sequence
  Cyclic GFR-binding peptide
ESVAMGPIKGYYTVVGKDFYLINIPSLK

SEQ ID NO: 86606 - protein, 39 aa, Artificial Sequence
  Cyclic GFR-binding peptide
  MOD_RES (2)..(33)..(34): Xaa is C or S
KXSRVIMPIKGYVKPKRGVFYLINIPSLAQPVXXPAASA

SEQ ID NO: 86607 - protein, 35 aa, Artificial Sequence; identical to SEQ ID NO: 4411
  Cyclic GFR-binding peptide
  MOD_RES (1)..(3)..(34)..(35): Xaa is C or S

SEQ ID NO: 86608 - protein, 22 aa, Artificial Sequence
  Cyclic GFR-binding peptide
RYKKLIIQQKDNFYLMSIANMK

SEQ ID NO: 86609 - protein, 36 aa, Artificial Sequence
  Cyclic GFR-binding peptide
  MOD_RES (1)..(3)..(35)..(36): Xaa is C or S
XGXRDVVMGYHYKLIIQQKDNKYLMSIPSMKTPTXX

SEQ ID NO: 86610 - protein, 38 aa, Artificial Sequence; identical to SEQ ID NO: 32704
  Cyclic GFR-binding peptide
  MOD_RES (1)..(33)..(34): Xaa is C or S

SEQ ID NO: 86611 - protein, 23 aa, Artificial Sequence
  Cyclic GFR-binding peptide
ERHKRLTPVGMDDYYLVSTASLK

SEQ ID NO: 86612 - protein, 24 aa, Artificial Sequence
  Cyclic GFR-binding peptide
SMGERYKKLTPVGMDDFYLVSIAN

SEQ ID NO: 86613 - protein, 38 aa, Artificial Sequence; identical to SEQ ID NO: 4425
  Cyclic GFR-binding peptide
  MOD_RES (2)..(4)..(36)..(37): Xaa is C or S

SEQ ID NO: 86614 - protein, 35 aa, Artificial Sequence; identical to SEQ ID NO: 32717
  Cyclic GFR-binding peptide
  MOD_RES (2)..(4): Xaa is C or S

SEQ ID NO: 86615 - protein, 32 aa, Artificial Sequence
  Cyclic GFR-binding peptide
  MOD_RES (2)..(2): Xaa is C or S
GXEEVIMRHKRLLLVRGNDYYLMSTASTKVPA

SEQ ID NO: 86616 - protein, 32 aa, Artificial Sequence
  Cyclic GFR-binding peptide
  MOD_RES (29)..(30): Xaa is C or S
VMDRHKRLVVNNASDYYLISTASLRTPVXXTP

SEQ ID NO: 86617 - protein, 28 aa, Artificial Sequence
  Cyclic GFR-binding peptide
  MOD_RES (26)..(27): Xaa is C or S
EYKFKVVNKNEDLYLISIPEMKEPVXXP

SEQ ID NO: 86618 - protein, 29 aa, Artificial Sequence
  Cyclic GFR-binding peptide
  MOD_RES (1)..(3): Xaa is C or S
XKXSRVIMRYKKLVKPKRGVFYLISIANL

SEQ ID NO: 86619 - protein, 25 aa, Artificial Sequence
  Cyclic GFR-binding peptide
NRYKKLIVNSSDDFYLVSIANLKTP

SEQ ID NO: 86620 - protein, 38 aa, Artificial Sequence
  Cyclic GFR-binding peptide
  MOD_RES (2)..(4)..(36)..(37): Xaa is C or S
SXGXRDVVMGRHKRLIIQQKDNYYLMSTASMKTPTXXP

SEQ ID NO: 86621 - protein, 29 aa, Artificial Sequence
  Cyclic GFR-binding peptide
  MOD_RES (28)..(29): Xaa is C or S
IMPIKGYLLVRGNDFYLMNIPSTKVPAXX

SEQ ID NO: 86622 - protein, 34 aa, Artificial Sequence
  Cyclic GFR-binding peptide
  MOD_RES (2)..(4): Xaa is C or S
RXGXSEVVMDEYKFKVVNNASDLYLISIPELRTP

SEQ ID NO: 86623 - protein, 35 aa, Artificial Sequence
  Cyclic GFR-binding peptide
  MOD_RES (29)..(30): Xaa is C or S
VIMPIKGYIKPTKGIFYLINIPSLDQSVXXPSASA

SEQ ID NO: 86624 - protein, 28 aa, Artificial Sequence
  Cyclic GFR-binding peptide
  MOD_RES (26)..(27): Xaa is C or S
YHYKLVVNKNEDKYLISIPSMKEPVXXP

SEQ ID NO: 86625 - protein, 38 aa, Artificial Sequence; identical to SEQ ID NO: 32726
  Cyclic GFR-binding peptide
  MOD_RES (1)..(33)..(34): Xaa is C or S

SEQ ID NO: 86626 - protein, 32 aa, Artificial Sequence; identical to SEQ ID NO: 41325
  Cyclic GFR-binding peptide
  MOD_RES (1)..(1): Xaa is C or S

SEQ ID NO: 86627 - protein, 31 aa, Artificial Sequence; identical to SEQ ID NO: 32727
  Cyclic GFR-binding peptide
  MOD_RES (28)..(29): Xaa is C or S

SEQ ID NO: 86628 - protein, 28 aa, Artificial Sequence
  Cyclic GFR-binding peptide
  MOD_RES (28)..(28): Xaa is C or S
MDEYKFKVVNNAADLYLISIPELRAPVX

SEQ ID NO: 86629 - protein, 28 aa, Artificial Sequence
  Cyclic GFR-binding peptide
VMNEYKFKIVNNSSDLYLVSIPELKTPA

SEQ ID NO: 86630 - protein, 29 aa, Artificial Sequence
  Cyclic GFR-binding peptide
  MOD_RES (1)..(1): Xaa is C or S
XSRVIMRHKRLVKPKRGVYYLISTASLAQ

SEQ ID NO: 86631 - protein, 24 aa, Artificial Sequence
  Cyclic GFR-binding peptide
NRHKRLIVNSSDDYYLVSTASLKT

SEQ ID NO: 86632 - protein, 30 aa, Artificial Sequence; identical to SEQ ID NO: 4444
  Cyclic GFR-binding peptide

SEQ ID NO: 86633 - protein, 34 aa, Artificial Sequence; identical to SEQ ID NO: 32736
  Cyclic GFR-binding peptide
  MOD_RES (28)..(29): Xaa is C or S

SEQ ID NO: 86634 - protein, 29 aa, Artificial Sequence
  Cyclic GFR-binding peptide
  MOD_RES (27)..(28): Xaa is C or S
EPIKGYVVKDYEDFYLMNIPSLETPVXXA

SEQ ID NO: 86635 - protein, 36 aa, Artificial Sequence; identical to SEQ ID NO: 32742
  Cyclic GFR-binding peptide
  MOD_RES (1)..(3)..(35): Xaa is C or S

SEQ ID NO: 86636 - protein, 36 aa, Artificial Sequence; identical to SEQ ID NO: 4452
  Cyclic GFR-binding peptide
  MOD_RES (1)..(3)..(36): Xaa is C or S

SEQ ID NO: 86637 - protein, 26 aa, Artificial Sequence
  Cyclic GFR-binding peptide
RVVMNRHKRLIVNSSDDYYLVSTASL

SEQ ID NO: 86638 - protein, 27 aa, Artificial Sequence
  Cyclic GFR-binding peptide
MGYHYKLYTVVGKDKYLISIPSLKTPV

SEQ ID NO: 86639 - protein, 36 aa, Artificial Sequence; identical to SEQ ID NO: 4457
  Cyclic GFR-binding peptide
  MOD_RES (30)..(31): Xaa is C or S

SEQ ID NO: 86640 - protein, 34 aa, Artificial Sequence; identical to SEQ ID NO: 41344
  Cyclic GFR-binding peptide
  MOD_RES (32)..(33): Xaa is C or S

SEQ ID NO: 86641 - protein, 30 aa, Artificial Sequence; identical to SEQ ID NO: 32756
  Cyclic GFR-binding peptide
  MOD_RES (28)..(29): Xaa is C or S

SEQ ID NO: 86642 - protein, 34 aa, Artificial Sequence
  Cyclic GFR-binding peptide
  MOD_RES (31)..(32): Xaa is C or S
EVTMNRYKKLVVNKNEDFYLISIANMKEPVXXPE

SEQ ID NO: 86643 - protein, 41 aa, Artificial Sequence; identical to SEQ ID NO: 32757
  Cyclic GFR-binding peptide
  MOD_RES (2)..(4)..(36)..(37): Xaa is C or S

SEQ ID NO: 86644 - protein, 26 aa, Artificial Sequence
  Cyclic GFR-binding peptide
EVVMDEYKFKVVKENEDLYLMSIPEL

SEQ ID NO: 86645 - protein, 26 aa, Artificial Sequence
  Cyclic GFR-binding peptide
GYHYKLYTVVGKDKYLISIPSLKTPV

SEQ ID NO: 86646 - protein, 29 aa, Artificial Sequence
  Cyclic GFR-binding peptide
  MOD_RES (2)..(2): Xaa is C or S
GXAKVVMNPIKGYIVNNSSDFYLVNIPSL

SEQ ID NO: 86647 - protein, 29 aa, Artificial Sequence
  Cyclic GFR-binding peptide
  MOD_RES (1)..(1): Xaa is C or S
XEEVIMYHYKLLLVRGNDKYLMSIPSTKV

SEQ ID NO: 86648 - protein, 31 aa, Artificial Sequence; identical to SEQ ID NO: 4464
  Cyclic GFR-binding peptide
  MOD_RES (30)..(31): Xaa is C or S

SEQ ID NO: 86649 - protein, 32 aa, Artificial Sequence
  Cyclic GFR-binding peptide
  MOD_RES (30)..(31): Xaa is C or S
RVIMPIKGYVKPKRGVFYLINIPSLAQPVXXP

SEQ ID NO: 86650 - protein, 36 aa, Artificial Sequence; identical to SEQ ID NO: 32767
  Cyclic GFR-binding peptide
  MOD_RES (2)..(33)..(34): Xaa is C or S

SEQ ID NO: 86651 - protein, 33 aa, Artificial Sequence; identical to SEQ ID NO: 32768
  Cyclic GFR-binding peptide
  MOD_RES (29)..(30): Xaa is C or S

SEQ ID NO: 86652 - protein, 27 aa, Artificial Sequence
  Cyclic GFR-binding peptide
KVVMYHYKLVKPTRGVKYLISIPSLDQ

SEQ ID NO: 86653 - protein, 31 aa, Artificial Sequence; identical to SEQ ID NO: 4469
  Cyclic GFR-binding peptide
  MOD_RES (29)..(30): Xaa is C or S

SEQ ID NO: 86654 - protein, 39 aa, Artificial Sequence; identical to SEQ ID NO: 41367
  Cyclic GFR-binding peptide
  MOD_RES (2)..(35)..(36): Xaa is C or S

SEQ ID NO: 86655 - protein, 25 aa, Artificial Sequence
  Cyclic GFR-binding peptide
VVMNYHYKLIVNSSDDKYLVSIPSL

SEQ ID NO: 86656 - protein, 37 aa, Artificial Sequence
  Cyclic GFR-binding peptide
  MOD_RES (2)..(34)..(35): Xaa is C or S
GXAEVVMDRHKRLVVNNAADYYLISTASLRAPVXXSA

SEQ ID NO: 86657 - protein, 29 aa, Artificial Sequence
  Cyclic GFR-binding peptide
  MOD_RES (2)..(2): Xaa is C or S
GXARVVMNRYKKLIVNSSDDFYLVSIANL

SEQ ID NO: 86658 - protein, 24 aa, Artificial Sequence
  Cyclic GFR-binding peptide
VMGRYKKLIIQQKDNFYLMSIANM

SEQ ID NO: 86659 - protein, 41 aa, Artificial Sequence; identical to SEQ ID NO: 4476
  Cyclic GFR-binding peptide
  MOD_RES (1)..(3)..(35)..(36): Xaa is C or S

SEQ ID NO: 86660 - protein, 24 aa, Artificial Sequence
  Cyclic GFR-binding peptide
DRHKRLVVNNASDYYLISTASLRT

SEQ ID NO: 86661 - protein, 36 aa, Artificial Sequence; identical to SEQ ID NO: 4478
  Cyclic GFR-binding peptide
  MOD_RES (31)..(32): Xaa is C or S

SEQ ID NO: 86662 - protein, 40 aa, Artificial Sequence; identical to SEQ ID NO: 4480
  Cyclic GFR-binding peptide
  MOD_RES (2)..(4)..(36)..(37): Xaa is C or S

SEQ ID NO: 86663 - protein, 28 aa, Artificial Sequence
  Cyclic GFR-binding peptide
SRVIMRHKRLVKPKRGVYYLISTASLAQ

SEQ ID NO: 86664 - protein, 32 aa, Artificial Sequence; identical to SEQ ID NO: 32779
  Cyclic GFR-binding peptide
  MOD_RES (30)..(31): Xaa is C or S

SEQ ID NO: 86665 - protein, 30 aa, Artificial Sequence; identical to SEQ ID NO: 41380
  Cyclic GFR-binding peptide
  MOD_RES (26)..(27): Xaa is C or S

SEQ ID NO: 86666 - protein, 31 aa, Artificial Sequence; identical to SEQ ID NO: 75665
  Cyclic GFR-binding peptide
  MOD_RES (2)..(2): Xaa is C or S

SEQ ID NO: 86667 - protein, 25 aa, Artificial Sequence
  Cyclic GFR-binding peptide
MNPIKGYIVNNSSDFYLVNIPSLKT

SEQ ID NO: 86668 - protein, 29 aa, Artificial Sequence
  Cyclic GFR-binding peptide
  MOD_RES (27)..(28): Xaa is C or S
MRHKRLIKPTKGIYYLISTASLDQSVXXP

SEQ ID NO: 86669 - protein, 25 aa, Artificial Sequence
  Cyclic GFR-binding peptide
RYKKLIVNSSDDFYLVSIANLKTPA

SEQ ID NO: 86670 - protein, 35 aa, Artificial Sequence; identical to SEQ ID NO: 4490
  Cyclic GFR-binding peptide
  MOD_RES (30)..(31): Xaa is C or S

SEQ ID NO: 86671 - protein, 34 aa, Artificial Sequence; identical to SEQ ID NO: 4493
  Cyclic GFR-binding peptide
  MOD_RES (32)..(33): Xaa is C or S

SEQ ID NO: 86672 - protein, 38 aa, Artificial Sequence; identical to SEQ ID NO: 41391
  Cyclic GFR-binding peptide
  MOD_RES (1)..(33)..(34): Xaa is C or S

SEQ ID NO: 86673 - protein, 34 aa, Artificial Sequence; identical to SEQ ID NO: 41392
  Cyclic GFR-binding peptide
  MOD_RES (1)..(3): Xaa is C or S

SEQ ID NO: 86674 - protein, 25 aa, Artificial Sequence
  Cyclic GFR-binding peptide
SVAMGYHYKLYTVVGKDKYLISIPS

SEQ ID NO: 86675 - protein, 22 aa, Artificial Sequence
  Cyclic GFR-binding peptide
MPIKGYIKPTKGIFYLINIPSL

SEQ ID NO: 86676 - protein, 38 aa, Artificial Sequence; identical to SEQ ID NO: 32791
  Cyclic GFR-binding peptide
  MOD_RES (32)..(33): Xaa is C or S

SEQ ID NO: 86677 - protein, 24 aa, Artificial Sequence
  Cyclic GFR-binding peptide
RYKKLVVKDYEDFYLMSIANLETP

SEQ ID NO: 86678 - protein, 29 aa, Artificial Sequence
  Cyclic GFR-binding peptide
  MOD_RES (1)..(1): Xaa is C or S
XAKVVMNEYKFKIVNNSSDLYLVSIPELK

SEQ ID NO: 86679 - protein, 32 aa, Artificial Sequence; identical to SEQ ID NO: 4497
  Cyclic GFR-binding peptide

SEQ ID NO: 86680 - protein, 22 aa, Artificial Sequence
  Cyclic GFR-binding peptide
GRYKKLIIQQKDNFYLMSIANM

SEQ ID NO: 86681 - protein, 31 aa, Artificial Sequence; identical to SEQ ID NO: 4498
  Cyclic GFR-binding peptide
  MOD_RES (31)..(31): Xaa is C or S

SEQ ID NO: 86682 - protein, 41 aa, Artificial Sequence; identical to SEQ ID NO: 41402
  Cyclic GFR-binding peptide
  MOD_RES (1)..(3)..(35)..(36): Xaa is C or S

SEQ ID NO: 86683 - protein, 26 aa, Artificial Sequence
  Cyclic GFR-binding peptide
MDRHKRLVVNNASDYYLISTASLRTP

SEQ ID NO: 86684 - protein, 37 aa, Artificial Sequence; identical to SEQ ID NO: 4499
  Cyclic GFR-binding peptide
  MOD_RES (1)..(3)..(34)..(35): Xaa is C or S

SEQ ID NO: 86685 - protein, 30 aa, Artificial Sequence
  Cyclic GFR-binding peptide
  MOD_RES (28)..(29): Xaa is C or S
IMEYKFKLLVRGNDLYLMSIPETKVPAXXT

SEQ ID NO: 86686 - protein, 29 aa, Artificial Sequence
  Cyclic GFR-binding peptide
VTMNEYKFKVVNKNEDLYLISIPEMKEPV

SEQ ID NO: 86687 - protein, 27 aa, Artificial Sequence
  Cyclic GFR-binding peptide
  MOD_RES (26)..(27): Xaa is C or S
YHYKLIVNSSDDKYLVSIPSLKTPAXX

SEQ ID NO: 86688 - protein, 25 aa, Artificial Sequence
  Cyclic GFR-binding peptide
MGERYKKLTPVGMDDFYLVSIANLK

SEQ ID NO: 86689 - protein, 33 aa, Artificial Sequence; identical to SEQ ID NO: 4503
  Cyclic GFR-binding peptide
  MOD_RES (28)..(29): Xaa is C or S

SEQ ID NO: 86690 - protein, 30 aa, Artificial Sequence; identical to SEQ ID NO: 4504
  Cyclic GFR-binding peptide
  MOD_RES (1)..(3): Xaa is C or S

SEQ ID NO: 86691 - protein, 26 aa, Artificial Sequence
  Cyclic GFR-binding peptide
VVMNEYKFKIVNSSDDLYLVSIPELQ

SEQ ID NO: 86692 - protein, 34 aa, Artificial Sequence
  Cyclic GFR-binding peptide
  MOD_RES (2)..(34): Xaa is C or S
GXRDVVMGEYKFKIIQQKDNLYLMSIPEMKTPTX

SEQ ID NO: 86693 - protein, 29 aa, Artificial Sequence
  Cyclic GFR-binding peptide
EVTMNPIKGYVVNKNEDFYLINIPSMKEP

SEQ ID NO: 86694 - protein, 30 aa, Artificial Sequence
  Cyclic GFR-binding peptide
EVVMDYHYKLVVNNASDKYLISIPSLRTPV

SEQ ID NO: 86695 - protein, 23 aa, Artificial Sequence
  Cyclic GFR-binding peptide
MEYKFKLLVRGNDLYLMSIPETK

SEQ ID NO: 86696 - protein, 31 aa, Artificial Sequence
  Cyclic GFR-binding peptide
  MOD_RES (1)..(3): Xaa is C or S
XKXSRVIMPIKGYVKPKRGVFYLINIPSLAQ

SEQ ID NO: 86697 - protein, 22 aa, Artificial Sequence
  Cyclic GFR-binding peptide
GRHKRLIIQQKDNYYLMSTASM

SEQ ID NO: 86698 - protein, 27 aa, Artificial Sequence
  Cyclic GFR-binding peptide
  MOD_RES (1)..(1): Xaa is C or S
XSRVVMNEYKFKIVNSSDDLYLVSIPE

SEQ ID NO: 86699 - protein, 42 aa, Artificial Sequence; identical to SEQ ID NO: 41429
  Cyclic GFR-binding peptide
  MOD_RES (2)..(4)..(36)..(37): Xaa is C or S

SEQ ID NO: 86700 - protein, 30 aa, Artificial Sequence; identical to SEQ ID NO: 4517
  Cyclic GFR-binding peptide
  MOD_RES (28)..(29): Xaa is C or S

SEQ ID NO: 86701 - protein, 29 aa, Artificial Sequence
  Cyclic GFR-binding peptide
SKVVMRYKKLVKPTRGVFYLISIANLDQP

SEQ ID NO: 86702 - protein, 26 aa, Artificial Sequence
  Cyclic GFR-binding peptide
DVVMGYHYKLIIQQKDNKYLMSIPSM

SEQ ID NO: 86703 - protein, 29 aa, Artificial Sequence
  Cyclic GFR-binding peptide
KVVMRHKRLVKPTRGVYYLISTASLDQPV

SEQ ID NO: 86704 - protein, 30 aa, Artificial Sequence
  Cyclic GFR-binding peptide
  MOD_RES (28)..(29): Xaa is C or S
MDRHKRLVVNNAADYYLISTASLRAPVXXS

SEQ ID NO: 86705 - protein, 23 aa, Artificial Sequence
  Cyclic GFR-binding peptide
VMDYHYKLVVNNASDKYLISIPS

SEQ ID NO: 86706 - protein, 39 aa, Artificial Sequence; identical to SEQ ID NO: 4528
  Cyclic GFR-binding peptide
  MOD_RES (2)..(33)..(34): Xaa is C or S

SEQ ID NO: 86707 - protein, 32 aa, Artificial Sequence; identical to SEQ ID NO: 32835
  Cyclic GFR-binding peptide
  MOD_RES (27)..(28): Xaa is C or S

SEQ ID NO: 86708 - protein, 42 aa, Artificial Sequence
  Cyclic GFR-binding peptide
  MOD_RES (2)..(4)..(36)..(37): Xaa is C or S
SXGXRDVVMGYHYKLIIQQKDNKYLMSIPSMKTPTXXPGASG

SEQ ID NO: 86709 - protein, 32 aa, Artificial Sequence
  Cyclic GFR-binding peptide
  MOD_RES (2)..(2): Xaa is C or S
AXSEVTMNEYKFKVVNKNEDLYLISIPEMKEP

SEQ ID NO: 86710 - protein, 36 aa, Artificial Sequence; identical to SEQ ID NO: 4533
  Cyclic GFR-binding peptide
  MOD_RES (1)..(33)..(34): Xaa is C or S

SEQ ID NO: 86711 - protein, 38 aa, Artificial Sequence; identical to SEQ ID NO: 32839
  Cyclic GFR-binding peptide
  MOD_RES (1)..(33)..(34): Xaa is C or S

SEQ ID NO: 86712 - protein, 36 aa, Artificial Sequence; identical to SEQ ID NO: 4536
  Cyclic GFR-binding peptide
  MOD_RES (31)..(32): Xaa is C or S

SEQ ID NO: 86713 - protein, 32 aa, Artificial Sequence; identical to SEQ ID NO: 41447
  Cyclic GFR-binding peptide
  MOD_RES (27)..(28): Xaa is C or S

SEQ ID NO: 86714 - protein, 32 aa, Artificial Sequence; identical to SEQ ID NO: 32843
  Cyclic GFR-binding peptide
  MOD_RES (32)..(32): Xaa is C or S

SEQ ID NO: 86715 - protein, 22 aa, Artificial Sequence
  Cyclic GFR-binding peptide
MDPIKGYVVNNASDFYLINIPS

SEQ ID NO: 86716 - protein, 26 aa, Artificial Sequence
  Cyclic GFR-binding peptide
ERHKRLTPVGMDDYYLVSTASLKTPV

SEQ ID NO: 86717 - protein, 26 aa, Artificial Sequence
  Cyclic GFR-binding peptide
  MOD_RES (26)..(26): Xaa is C or S
PIKGYIVNSSDDFYLVNIPSLQTPAX

SEQ ID NO: 86718 - protein, 32 aa, Artificial Sequence; identical to SEQ ID NO: 4545
  Cyclic GFR-binding peptide
  MOD_RES (26)..(27): Xaa is C or S

SEQ ID NO: 86719 - protein, 25 aa, Artificial Sequence
  Cyclic GFR-binding peptide
VMNEYKFKIVNSSDDLYLVSIPELQ

SEQ ID NO: 86720 - protein, 27 aa, Artificial Sequence
  Cyclic GFR-binding peptide
RVVMNRYKKLIVNSSDDFYLVSIANLQ

SEQ ID NO: 86721 - protein, 34 aa, Artificial Sequence; identical to SEQ ID NO: 4550
  Cyclic GFR-binding peptide
  MOD_RES (2)..(33)..(34): Xaa is C or S

SEQ ID NO: 86722 - protein, 31 aa, Artificial Sequence; identical to SEQ ID NO: 41455
  Cyclic GFR-binding peptide
  MOD_RES (31)..(31): Xaa is C or S

SEQ ID NO: 86723 - protein, 30 aa, Artificial Sequence; identical to SEQ ID NO: 4556
  Cyclic GFR-binding peptide
  MOD_RES (28)..(29): Xaa is C or S

SEQ ID NO: 86724 - protein, 33 aa, Artificial Sequence; identical to SEQ ID NO: 41460
  Cyclic GFR-binding peptide
  MOD_RES (32)..(33): Xaa is C or S

SEQ ID NO: 86725 - protein, 37 aa, Artificial Sequence
  Cyclic GFR-binding peptide
  MOD_RES (2)..(34)..(35): Xaa is C or S
AXSEVTMNRYKKLVVNKNEDFYLISIANMKEPVXXPE

SEQ ID NO: 86726 - protein, 34 aa, Artificial Sequence
  Cyclic GFR-binding peptide
  MOD_RES (28)..(29): Xaa is C or S
MGRHKRLIIQQKDNYYLMSTASMKTPTXXPGASG

SEQ ID NO: 86727 - protein, 34 aa, Artificial Sequence; identical to SEQ ID NO: 4561
  Cyclic GFR-binding peptide
  MOD_RES (29)..(29): Xaa is C or S

SEQ ID NO: 86728 - protein, 36 aa, Artificial Sequence; identical to SEQ ID NO: 32857
  Cyclic GFR-binding peptide
  MOD_RES (1)..(33)..(34): Xaa is C or S

SEQ ID NO: 86729 - protein, 21 aa, Artificial Sequence
  Cyclic GFR-binding peptide
ERYKKLVVKDYEDFYLMSIAN

SEQ ID NO: 86730 - protein, 36 aa, Artificial Sequence; identical to SEQ ID NO: 32860
  Cyclic GFR-binding peptide
  MOD_RES (30)..(31): Xaa is C or S

SEQ ID NO: 86731 - protein, 36 aa, Artificial Sequence; identical to SEQ ID NO: 41476
  Cyclic GFR-binding peptide
  MOD_RES (1)..(3)..(35)..(36): Xaa is C or S

SEQ ID NO: 86732 - protein, 36 aa, Artificial Sequence; identical to SEQ ID NO: 41477
  Cyclic GFR-binding peptide
  MOD_RES (2)..(4)..(36): Xaa is C or S

SEQ ID NO: 86733 - protein, 35 aa, Artificial Sequence; identical to SEQ ID NO: 4571
  Cyclic GFR-binding peptide
  MOD_RES (1)..(33)..(34): Xaa is C or S

SEQ ID NO: 86734 - protein, 23 aa, Artificial Sequence
  Cyclic GFR-binding peptide
VMDRHKRLVVNNASDYYLISTAS

SEQ ID NO: 86735 - protein, 33 aa, Artificial Sequence
  Cyclic GFR-binding peptide
  MOD_RES (1)..(3): Xaa is C or S
XAXSEVTMNRHKRLVVNKNEDYYLISTASMKEP

SEQ ID NO: 86736 - protein, 25 aa, Artificial Sequence
  Cyclic GFR-binding peptide
MDEYKFKVVNNASDLYLISIPELRT

SEQ ID NO: 86737 - protein, 32 aa, Artificial Sequence; identical to SEQ ID NO: 32865
  Cyclic GFR-binding peptide
  MOD_RES (2)..(2): Xaa is C or S

SEQ ID NO: 86738 - protein, 36 aa, Artificial Sequence
  Cyclic GFR-binding peptide
  MOD_RES (1)..(33)..(34): Xaa is C or S
XSEVTMNYHYKLVVNKNEDKYLISIPSMKEPVXXPE

SEQ ID NO: 86739 - protein, 31 aa, Artificial Sequence; identical to SEQ ID NO: 32870
  Cyclic GFR-binding peptide
  MOD_RES (28)..(28): Xaa is C or S

SEQ ID NO: 86740 - protein, 30 aa, Artificial Sequence
  Cyclic GFR-binding peptide
  MOD_RES (1)..(1): Xaa is C or S
XSEVTMNRHKRLVVNKNEDYYLISTASMKE

SEQ ID NO: 86741 - protein, 33 aa, Artificial Sequence; identical to SEQ ID NO: 32871
  Cyclic GFR-binding peptide
  MOD_RES (1)..(32)..(33): Xaa is C or S

SEQ ID NO: 86742 - protein, 21 aa, Artificial Sequence
  Cyclic GFR-binding peptide
MPIKGYVKPKRGVFYLINIPS

SEQ ID NO: 86743 - protein, 33 aa, Artificial Sequence; identical to SEQ ID NO: 32874
  Cyclic GFR-binding peptide
  MOD_RES (2)..(4): Xaa is C or S

SEQ ID NO: 86744 - protein, 21 aa, Artificial Sequence
  Cyclic GFR-binding peptide
RYKKLVVKENEDFYLMSIANL

SEQ ID NO: 86745 - protein, 24 aa, Artificial Sequence
  Cyclic GFR-binding peptide
IMYHYKLLLVRGNDKYLMSIPSTK

SEQ ID NO: 86746 - protein, 30 aa, Artificial Sequence; identical to SEQ ID NO: 4578
  Cyclic GFR-binding peptide
  MOD_RES (28)..(29): Xaa is C or S

SEQ ID NO: 86747 - protein, 31 aa, Artificial Sequence; identical to SEQ ID NO: 4579
  Cyclic GFR-binding peptide

SEQ ID NO: 86748 - protein, 28 aa, Artificial Sequence
  Cyclic GFR-binding peptide
  MOD_RES (26)..(27): Xaa is C or S
RYKKLVVKDYEDFYLMSIANLETPVXXA

SEQ ID NO: 86749 - protein, 35 aa, Artificial Sequence; identical to SEQ ID NO: 4582
  Cyclic GFR-binding peptide
  MOD_RES (30)..(31): Xaa is C or S

SEQ ID NO: 86750 - protein, 33 aa, Artificial Sequence; identical to SEQ ID NO: 4584
  Cyclic GFR-binding peptide
  MOD_RES (2)..(33): Xaa is C or S

SEQ ID NO: 86751 - protein, 29 aa, Artificial Sequence
  Cyclic GFR-binding peptide
  MOD_RES (26)..(27): Xaa is C or S
RYKKLVVNNASDFYLISIANLRTPVXXTP

SEQ ID NO: 86752 - protein, 23 aa, Artificial Sequence
  Cyclic GFR-binding peptide
MERHKRLVVKDYEDYYLMSTASL

SEQ ID NO: 86753 - protein, 33 aa, Artificial Sequence; identical to SEQ ID NO: 4590
  Cyclic GFR-binding peptide
  MOD_RES (32)..(33): Xaa is C or S

SEQ ID NO: 86754 - protein, 31 aa, Artificial Sequence
  Cyclic GFR-binding peptide
  MOD_RES (1)..(3): Xaa is C or S
XAXSEVTMNEYKFKVVNKNEDLYLISIPEMK

SEQ ID NO: 86755 - protein, 29 aa, Artificial Sequence
  Cyclic GFR-binding peptide
  MOD_RES (29)..(29): Xaa is C or S
VVMRHKRLVKPTRGVYYLISTASLDQPVX

SEQ ID NO: 86756 - protein, 37 aa, Artificial Sequence; identical to SEQ ID NO: 4595
  Cyclic GFR-binding peptide
  MOD_RES (2)..(34)..(35): Xaa is C or S

SEQ ID NO: 86757 - protein, 36 aa, Artificial Sequence; identical to SEQ ID NO: 4596
  Cyclic GFR-binding peptide
  MOD_RES (2)..(34)..(35): Xaa is C or S

SEQ ID NO: 86758 - protein, 26 aa, Artificial Sequence
  Cyclic GFR-binding peptide
VVMGRHKRLIIQQKDNYYLMSTASMK

SEQ ID NO: 86759 - protein, 27 aa, Artificial Sequence
  Cyclic GFR-binding peptide
MNEYKFKIVNSSDDLYLVSIPELKTPA

SEQ ID NO: 86760 - protein, 35 aa, Artificial Sequence; identical to SEQ ID NO: 15092
  Cyclic GFR-binding peptide
  MOD_RES (2)..(34)..(35): Xaa is C or S

SEQ ID NO: 86761 - protein, 34 aa, Artificial Sequence
  Cyclic GFR-binding peptide
  MOD_RES (1)..(3): Xaa is C or S
XAXSEVTMNRHKRLVVNKNEDYYLISTASMKEPV

SEQ ID NO: 86762 - protein, 25 aa, Artificial Sequence
  Cyclic GFR-binding peptide
EYKFKLLVRGNDLYLMSIPETKVPA

SEQ ID NO: 86763 - protein, 30 aa, Artificial Sequence; identical to SEQ ID NO: 32896
  Cyclic GFR-binding peptide
  MOD_RES (1)..(1): Xaa is C or S

SEQ ID NO: 86764 - protein, 38 aa, Artificial Sequence; identical to SEQ ID NO: 4600
  Cyclic GFR-binding peptide
  MOD_RES (1)..(32)..(33): Xaa is C or S

SEQ ID NO: 86765 - protein, 30 aa, Artificial Sequence; identical to SEQ ID NO: 4601
  Cyclic GFR-binding peptide

SEQ ID NO: 86766 - protein, 31 aa, Artificial Sequence; identical to SEQ ID NO: 4603
  Cyclic GFR-binding peptide
  MOD_RES (29)..(30): Xaa is C or S

SEQ ID NO: 86767 - protein, 38 aa, Artificial Sequence; identical to SEQ ID NO: 41504
  Cyclic GFR-binding peptide
  MOD_RES (1)..(3)..(35)..(36): Xaa is C or S

SEQ ID NO: 86768 - protein, 31 aa, Artificial Sequence; identical to SEQ ID NO: 41506
  Cyclic GFR-binding peptide

SEQ ID NO: 86769 - protein, 31 aa, Artificial Sequence; identical to SEQ ID NO: 4608
  Cyclic GFR-binding peptide
  MOD_RES (26)..(27): Xaa is C or S

SEQ ID NO: 86770 - protein, 32 aa, Artificial Sequence; identical to SEQ ID NO: 32907
  Cyclic GFR-binding peptide
  MOD_RES (27)..(28): Xaa is C or S

SEQ ID NO: 86771 - protein, 33 aa, Artificial Sequence; identical to SEQ ID NO: 41507
  Cyclic GFR-binding peptide
  MOD_RES (30)..(31): Xaa is C or S

SEQ ID NO: 86772 - protein, 36 aa, Artificial Sequence; identical to SEQ ID NO: 4611
  Cyclic GFR-binding peptide
  MOD_RES (2)..(4)..(35)..(36): Xaa is C or S

SEQ ID NO: 86773 - protein, 32 aa, Artificial Sequence; identical to SEQ ID NO: 41508
  Cyclic GFR-binding peptide
  MOD_RES (2)..(4): Xaa is C or S

SEQ ID NO: 86774 - protein, 28 aa, Artificial Sequence
  Cyclic GFR-binding peptide
  MOD_RES (2)..(2): Xaa is C or S
GXESVAMGRYKKLYTVVGKDFYLISIAN

SEQ ID NO: 86775 - protein, 30 aa, Artificial Sequence; identical to SEQ ID NO: 4613
  Cyclic GFR-binding peptide
  MOD_RES (2)..(2): Xaa is C or S

SEQ ID NO: 86776 - protein, 36 aa, Artificial Sequence; identical to SEQ ID NO: 4615
  Cyclic GFR-binding peptide
  MOD_RES (32)..(33): Xaa is C or S

SEQ ID NO: 86777 - protein, 37 aa, Artificial Sequence; identical to SEQ ID NO: 32917
  Cyclic GFR-binding peptide
  MOD_RES (2)..(34)..(35): Xaa is C or S

SEQ ID NO: 86778 - protein, 26 aa, Artificial Sequence
  Cyclic GFR-binding peptide
NRYKKLIVNSSDDFYLVSIANLKTPA

SEQ ID NO: 86779 - protein, 30 aa, Artificial Sequence; identical to SEQ ID NO: 4624
  Cyclic GFR-binding peptide
  MOD_RES (30)..(30): Xaa is C or S

SEQ ID NO: 86780 - protein, 30 aa, Artificial Sequence; identical to SEQ ID NO: 32919
  Cyclic GFR-binding peptide
  MOD_RES (30)..(30): Xaa is C or S

SEQ ID NO: 86781 - protein, 32 aa, Artificial Sequence; identical to SEQ ID NO: 4628
  Cyclic GFR-binding peptide
  MOD_RES (26)..(26): Xaa is C or S

SEQ ID NO: 86782 - protein, 35 aa, Artificial Sequence; identical to SEQ ID NO: 75741
  Cyclic GFR-binding peptide
  MOD_RES (2)..(33)..(34): Xaa is C or S

SEQ ID NO: 86783 - protein, 29 aa, Artificial Sequence
  Cyclic GFR-binding peptide
VAMGRHKRLYTVVGKDYYLISTASLKTPV

SEQ ID NO: 86784 - protein, 29 aa, Artificial Sequence
  Cyclic GFR-binding peptide
RDVVMGYHYKLIIQQKDNKYLMSIPSMKT

SEQ ID NO: 86785 - protein, 30 aa, Artificial Sequence; identical to SEQ ID NO: 32926
  Cyclic GFR-binding peptide
  MOD_RES (29)..(30): Xaa is C or S

SEQ ID NO: 86786 - protein, 30 aa, Artificial Sequence; identical to SEQ ID NO: 41528
  Cyclic GFR-binding peptide
  MOD_RES (1)..(1): Xaa is C or S

SEQ ID NO: 86787 - protein, 33 aa, Artificial Sequence; identical to SEQ ID NO: 4632
  Cyclic GFR-binding peptide
  MOD_RES (2)..(4): Xaa is C or S

SEQ ID NO: 86788 - protein, 37 aa, Artificial Sequence
  Cyclic GFR-binding peptide
  MOD_RES (2)..(4)..(36)..(37): Xaa is C or S
RXAXSEVTMNRHKRLVVNKNEDYYLISTASMKEPVXX

SEQ ID NO: 86789 - protein, 38 aa, Artificial Sequence; identical to SEQ ID NO: 4634
  Cyclic GFR-binding peptide
  MOD_RES (2)..(4)..(35)..(36): Xaa is C or S

SEQ ID NO: 86790 - protein, 36 aa, Artificial Sequence; identical to SEQ ID NO: 41532
  Cyclic GFR-binding peptide
  MOD_RES (32)..(33): Xaa is C or S

SEQ ID NO: 86791 - protein, 32 aa, Artificial Sequence; identical to SEQ ID NO: 32930
  Cyclic GFR-binding peptide
  MOD_RES (1)..(3): Xaa is C or S

SEQ ID NO: 86792 - protein, 23 aa, Artificial Sequence
  Cyclic GFR-binding peptide
DRHKRLVVNNAADYYLISTASLR

SEQ ID NO: 86793 - protein, 31 aa, Artificial Sequence
  Cyclic GFR-binding peptide
  MOD_RES (27)..(28): Xaa is C or S
DEYKFKVVNNASDLYLISIPELRTPVXXTPP

SEQ ID NO: 86794 - protein, 27 aa, Artificial Sequence
  Cyclic GFR-binding peptide
VIMEYKFKLLVRGNDLYLMSIPETKVP

SEQ ID NO: 86795 - protein, 33 aa, Artificial Sequence; identical to SEQ ID NO: 4636
  Cyclic GFR-binding peptide
  MOD_RES (29)..(30): Xaa is C or S

SEQ ID NO: 86796 - protein, 34 aa, Artificial Sequence; identical to SEQ ID NO: 4637
  Cyclic GFR-binding peptide
  MOD_RES (2)..(4): Xaa is C or S

SEQ ID NO: 86797 - protein, 31 aa, Artificial Sequence
  Cyclic GFR-binding peptide
  MOD_RES (2)..(2): Xaa is C or S
AXSEVTMNRHKRLVVNKNEDYYLISTASMKE

SEQ ID NO: 86798 - protein, 25 aa, Artificial Sequence
  Cyclic GFR-binding peptide
TMNYHYKLVVNKNEDKYLISIPSMK

SEQ ID NO: 86799 - protein, 36 aa, Artificial Sequence
  Cyclic GFR-binding peptide
  MOD_RES (31)..(32): Xaa is C or S
SRVIMPIKGYVKPKRGVFYLINIPSLAQPVXXPAAS

SEQ ID NO: 86800 - protein, 30 aa, Artificial Sequence; identical to SEQ ID NO: 41540
  Cyclic GFR-binding peptide
  MOD_RES (2)..(2): Xaa is C or S

SEQ ID NO: 86801 - protein, 27 aa, Artificial Sequence
  Cyclic GFR-binding peptide
VMGEYKFKIIQQKDNLYLMSIPEMKTP

SEQ ID NO: 86802 - protein, 31 aa, Artificial Sequence; identical to SEQ ID NO: 15137
  Cyclic GFR-binding peptide
  MOD_RES (26)..(27): Xaa is C or S

SEQ ID NO: 86803 - protein, 38 aa, Artificial Sequence
  Cyclic GFR-binding peptide
  MOD_RES (32)..(33): Xaa is C or S
SRVVMNRYKKLIVNSSDDFYLVSIANLKTPAXXPKPVH

SEQ ID NO: 86804 - protein, 25 aa, Artificial Sequence
  Cyclic GFR-binding peptide
VSMGERYKKLTPVGMDDFYLVSIAN

SEQ ID NO: 86805 - protein, 31 aa, Artificial Sequence; identical to SEQ ID NO: 4640
  Cyclic GFR-binding peptide
  MOD_RES (27)..(28): Xaa is C or S

SEQ ID NO: 86806 - protein, 30 aa, Artificial Sequence
  Cyclic GFR-binding peptide
RDVVMGEYKFKIIQQKDNLYLMSIPEMKTP

SEQ ID NO: 86807 - protein, 27 aa, Artificial Sequence
  Cyclic GFR-binding peptide
ARVVMNRHKRLIVNSSDDYYLVSTASL

SEQ ID NO: 86808 - protein, 34 aa, Artificial Sequence; identical to SEQ ID NO: 4644
  Cyclic GFR-binding peptide
  MOD_RES (31)..(32): Xaa is C or S

SEQ ID NO: 86809 - protein, 26 aa, Artificial Sequence
  Cyclic GFR-binding peptide
KVIMYHYKLIKPTKGIKYLISIPSLD

SEQ ID NO: 86810 - protein, 39 aa, Artificial Sequence; identical to SEQ ID NO: 15143
  Cyclic GFR-binding peptide
  MOD_RES (1)..(3)..(35)..(36): Xaa is C or S

SEQ ID NO: 86811 - protein, 30 aa, Artificial Sequence; identical to SEQ ID NO: 41552
  Cyclic GFR-binding peptide
  MOD_RES (28)..(29): Xaa is C or S

SEQ ID NO: 86812 - protein, 24 aa, Artificial Sequence
  Cyclic GFR-binding peptide
MYHYKLVKPTRGVKYLISIPSLDQ

SEQ ID NO: 86813 - protein, 25 aa, Artificial Sequence
  Cyclic GFR-binding peptide
VMEEYKFKVVKDYEDLYLMSIPELE

SEQ ID NO: 86814 - protein, 33 aa, Artificial Sequence
  Cyclic GFR-binding peptide
  MOD_RES (29)..(30): Xaa is C or S
VMGYHYKLIIQQKDNKYLMSIPSMKTPTXXPGA

SEQ ID NO: 86815 - protein, 39 aa, Artificial Sequence; identical to SEQ ID NO: 41556
  Cyclic GFR-binding peptide
  MOD_RES (2)..(34)..(35): Xaa is C or S

SEQ ID NO: 86816 - protein, 33 aa, Artificial Sequence; identical to SEQ ID NO: 4654
  Cyclic GFR-binding peptide
  MOD_RES (28)..(29): Xaa is C or S

SEQ ID NO: 86817 - protein, 27 aa, Artificial Sequence
  Cyclic GFR-binding peptide
  MOD_RES (27)..(27): Xaa is C or S
GRYKKLIIQQKDNFYLMSIANMKTPTX

SEQ ID NO: 86818 - protein, 29 aa, Artificial Sequence
  Cyclic GFR-binding peptide
SEVVMDEYKFKVVNNASDLYLISIPELRT

SEQ ID NO: 86819 - protein, 35 aa, Artificial Sequence; identical to SEQ ID NO: 4656
  Cyclic GFR-binding peptide
  MOD_RES (2)..(34)..(35): Xaa is C or S

SEQ ID NO: 86820 - protein, 32 aa, Artificial Sequence; identical to SEQ ID NO: 4657
  Cyclic GFR-binding peptide
  MOD_RES (30)..(31): Xaa is C or S

SEQ ID NO: 86821 - protein, 27 aa, Artificial Sequence
  Cyclic GFR-binding peptide
SRVVMNRHKRLIVNSSDDYYLVSTASL

SEQ ID NO: 86822 - protein, 39 aa, Artificial Sequence; identical to SEQ ID NO: 4660
  Cyclic GFR-binding peptide
  MOD_RES (2)..(4)..(36)..(37): Xaa is C or S

SEQ ID NO: 86823 - protein, 31 aa, Artificial Sequence; identical to SEQ ID NO: 4665
  Cyclic GFR-binding peptide
  MOD_RES (2)..(2): Xaa is C or S

SEQ ID NO: 86824 - protein, 27 aa, Artificial Sequence
  Cyclic GFR-binding peptide
  MOD_RES (1)..(1): Xaa is C or S
XGEVVMDRHKRLVVKENEDYYLMSTAS

SEQ ID NO: 86825 - protein, 23 aa, Artificial Sequence
  Cyclic GFR-binding peptide
MYHYKLVKPTRGVKYLISIPSLD

SEQ ID NO: 86826 - protein, 31 aa, Artificial Sequence; identical to SEQ ID NO: 32963
  Cyclic GFR-binding peptide
  MOD_RES (27)..(28): Xaa is C or S

SEQ ID NO: 86827 - protein, 23 aa, Artificial Sequence
  Cyclic GFR-binding peptide
MNEYKFKIVNSSDDLYLVSIPEL

SEQ ID NO: 86828 - protein, 27 aa, Artificial Sequence
  Cyclic GFR-binding peptide
SRVIMEYKFKVKPKRGVLYLISIPELA

SEQ ID NO: 86829 - protein, 33 aa, Artificial Sequence; identical to SEQ ID NO: 41567
  Cyclic GFR-binding peptide
  MOD_RES (32)..(33): Xaa is C or S

SEQ ID NO: 86830 - protein, 27 aa, Artificial Sequence
  Cyclic GFR-binding peptide
  MOD_RES (26)..(27): Xaa is C or S
RYKKLVVKDYEDFYLMSIANLETPVXX

SEQ ID NO: 86831 - protein, 35 aa, Artificial Sequence; identical to SEQ ID NO: 32969
  Cyclic GFR-binding peptide
  MOD_RES (30)..(31): Xaa is C or S

SEQ ID NO: 86832 - protein, 31 aa, Artificial Sequence; identical to SEQ ID NO: 41570
  Cyclic GFR-binding peptide
  MOD_RES (2)..(2): Xaa is C or S

SEQ ID NO: 86833 - protein, 33 aa, Artificial Sequence; identical to SEQ ID NO: 32971
  Cyclic GFR-binding peptide
  MOD_RES (29)..(30): Xaa is C or S

SEQ ID NO: 86834 - protein, 35 aa, Artificial Sequence; identical to SEQ ID NO: 32972
  Cyclic GFR-binding peptide
  MOD_RES (30)..(31): Xaa is C or S

SEQ ID NO: 86835 - protein, 36 aa, Artificial Sequence; identical to SEQ ID NO: 32975
  Cyclic GFR-binding peptide
  MOD_RES (2)..(34): Xaa is C or S

SEQ ID NO: 86836 - protein, 27 aa, Artificial Sequence
  Cyclic GFR-binding peptide
SRVIMYHYKLVKPKRGVKYLISIPSLA

SEQ ID NO: 86837 - protein, 30 aa, Artificial Sequence
  Cyclic GFR-binding peptide
  MOD_RES (2)..(4): Xaa is C or S
RXAXSEVTMNYHYKLVVNKNEDKYLISIPS

SEQ ID NO: 86838 - protein, 30 aa, Artificial Sequence; identical to SEQ ID NO: 41578
  Cyclic GFR-binding peptide
  MOD_RES (1)..(1): Xaa is C or S

SEQ ID NO: 86839 - protein, 21 aa, Artificial Sequence
  Cyclic GFR-binding peptide
MEYKFKLLVRGNDLYLMSIPE

SEQ ID NO: 86840 - protein, 37 aa, Artificial Sequence; identical to SEQ ID NO: 4681
  Cyclic GFR-binding peptide
  MOD_RES (1)..(32)..(33): Xaa is C or S

SEQ ID NO: 86841 - protein, 22 aa, Artificial Sequence
  Cyclic GFR-binding peptide
YHYKLVKPKRGVKYLISIPSLA

SEQ ID NO: 86842 - protein, 42 aa, Artificial Sequence; identical to SEQ ID NO: 75779
  Cyclic GFR-binding peptide
  MOD_RES (2)..(4)..(36)..(37): Xaa is C or S

SEQ ID NO: 86843 - protein, 39 aa, Artificial Sequence; identical to SEQ ID NO: 32981
  Cyclic GFR-binding peptide
  MOD_RES (1)..(33): Xaa is C or S

SEQ ID NO: 86844 - protein, 36 aa, Artificial Sequence
  Cyclic GFR-binding peptide
  MOD_RES (30)..(31): Xaa is C or S
VVMGYHYKLIIQQKDNKYLMSIPSMKTPTXXPGASG

SEQ ID NO: 86845 - protein, 34 aa, Artificial Sequence
  Cyclic GFR-binding peptide
  MOD_RES (32)..(33): Xaa is C or S
SEVVMDYHYKLVVNNASDKYLISIPSLRTPVXXT

SEQ ID NO: 86846 - protein, 31 aa, Artificial Sequence
  Cyclic GFR-binding peptide
  MOD_RES (2)..(4): Xaa is C or S
RXGXESVAMGRHKRLYTVVGKDYYLISTASL

SEQ ID NO: 86847 - protein, 29 aa, Artificial Sequence
  Cyclic GFR-binding peptide
  MOD_RES (2)..(2): Xaa is C or S
GXGEVVMDPIKGYVVKENEDFYLMNIPSL

SEQ ID NO: 86848 - protein, 26 aa, Artificial Sequence
  Cyclic GFR-binding peptide
IMRYKKLLLVRGNDFYLMSIANTKVP

SEQ ID NO: 86849 - protein, 31 aa, Artificial Sequence; identical to SEQ ID NO: 41587
  Cyclic GFR-binding peptide
  MOD_RES (31)..(31): Xaa is C or S

SEQ ID NO: 86850 - protein, 33 aa, Artificial Sequence; identical to SEQ ID NO: 41591
  Cyclic GFR-binding peptide
  MOD_RES (2)..(4): Xaa is C or S

SEQ ID NO: 86851 - protein, 30 aa, Artificial Sequence; identical to SEQ ID NO: 41592
  Cyclic GFR-binding peptide
  MOD_RES (27)..(28): Xaa is C or S

SEQ ID NO: 86852 - protein, 34 aa, Artificial Sequence; identical to SEQ ID NO: 41595
  Cyclic GFR-binding peptide
  MOD_RES (31)..(32): Xaa is C or S

SEQ ID NO: 86853 - protein, 30 aa, Artificial Sequence; identical to SEQ ID NO: 41596
  Cyclic GFR-binding peptide
  MOD_RES (1)..(1): Xaa is C or S

SEQ ID NO: 86854 - protein, 27 aa, Artificial Sequence
  Cyclic GFR-binding peptide
SKVIMRHKRLIKPTKGIYYLISTASLD

SEQ ID NO: 86855 - protein, 34 aa, Artificial Sequence; identical to SEQ ID NO: 4695
  Cyclic GFR-binding peptide
  MOD_RES (1)..(33): Xaa is C or S

SEQ ID NO: 86856 - protein, 28 aa, Artificial Sequence
  Cyclic GFR-binding peptide
VAMGRYKKLYTVVGKDFYLISIANLKTP

SEQ ID NO: 86857 - protein, 32 aa, Artificial Sequence
  Cyclic GFR-binding peptide
  MOD_RES (1)..(3): Xaa is C or S
XGXEEVIMYHYKLLLVRGNDKYLMSIPSTKVP

SEQ ID NO: 86858 - protein, 32 aa, Artificial Sequence; identical to SEQ ID NO: 32993
  Cyclic GFR-binding peptide
  MOD_RES (27)..(27): Xaa is C or S

SEQ ID NO: 86859 - protein, 32 aa, Artificial Sequence; identical to SEQ ID NO: 32994
  Cyclic GFR-binding peptide
  MOD_RES (32)..(32): Xaa is C or S

SEQ ID NO: 86860 - protein, 33 aa, Artificial Sequence; identical to SEQ ID NO: 4697
  Cyclic GFR-binding peptide
  MOD_RES (32)..(32): Xaa is C or S

SEQ ID NO: 86861 - protein, 31 aa, Artificial Sequence
  Cyclic GFR-binding peptide
SEVVMDRHKRLVVNNASDYYLISTASLRTPV

SEQ ID NO: 86862 - protein, 29 aa, Artificial Sequence
  Cyclic GFR-binding peptide
  MOD_RES (1)..(1): Xaa is C or S
XSEVTMNYHYKLVVNKNEDKYLISIPSMK

SEQ ID NO: 86863 - protein, 33 aa, Artificial Sequence
  Cyclic GFR-binding peptide
  MOD_RES (1)..(3): Xaa is C or S
XAXSEVTMNPIKGYVVNKNEDFYLINIPSMKEP

SEQ ID NO: 86864 - protein, 36 aa, Artificial Sequence; identical to SEQ ID NO: 4703
  Cyclic GFR-binding peptide
  MOD_RES (32)..(32): Xaa is C or S

SEQ ID NO: 86865 - protein, 26 aa, Artificial Sequence
  Cyclic GFR-binding peptide
GEVVMEPIKGYVVKDYEDFYLMNIPS

SEQ ID NO: 86866 - protein, 29 aa, Artificial Sequence
  Cyclic GFR-binding peptide
  MOD_RES (2)..(2): Xaa is C or S
GXSEVVMDRYKKLVVNNASDFYLISIANL

SEQ ID NO: 86867 - protein, 28 aa, Artificial Sequence
  Cyclic GFR-binding peptide
  MOD_RES (1)..(3): Xaa is C or S
XGXEEVIMYHYKLLLVRGNDKYLMSIPS

SEQ ID NO: 86868 - protein, 28 aa, Artificial Sequence
  Cyclic GFR-binding peptide
VMGRYKKLIIQQKDNFYLMSIANMKTPT

SEQ ID NO: 86869 - protein, 30 aa, Artificial Sequence; identical to SEQ ID NO: 33008
  Cyclic GFR-binding peptide
  MOD_RES (27)..(28): Xaa is C or S

SEQ ID NO: 86870 - protein, 29 aa, Artificial Sequence
  Cyclic GFR-binding peptide
DVVMGRHKRLIIQQKDNYYLMSTASMKTP

SEQ ID NO: 86871 - protein, 28 aa, Artificial Sequence
  Cyclic GFR-binding peptide
RVIMRHKRLVKPKRGVYYLISTASLAQP

SEQ ID NO: 86872 - protein, 27 aa, Artificial Sequence
  Cyclic GFR-binding peptide
VMDPIKGYVVNNASDFYLINIPSLRTP

SEQ ID NO: 86873 - protein, 27 aa, Artificial Sequence
  Cyclic GFR-binding peptide
VVMERYKKLVVKDYEDFYLMSIANLET

SEQ ID NO: 86874 - protein, 29 aa, Artificial Sequence
  Cyclic GFR-binding peptide
  MOD_RES (2)..(2): Xaa is C or S
GXAEVVMDEYKFKVVNNAADLYLISIPEL

SEQ ID NO: 86875 - protein, 34 aa, Artificial Sequence
  Cyclic GFR-binding peptide
  MOD_RES (28)..(29): Xaa is C or S
IMYHYKLLLVRGNDKYLMSIPSTKVPAXXTSPVR

SEQ ID NO: 86876 - protein, 35 aa, Artificial Sequence; identical to SEQ ID NO: 4711
  Cyclic GFR-binding peptide
  MOD_RES (1)..(3)..(35): Xaa is C or S

SEQ ID NO: 86877 - protein, 36 aa, Artificial Sequence; identical to SEQ ID NO: 33017
  Cyclic GFR-binding peptide
  MOD_RES (2)..(4)..(36): Xaa is C or S

SEQ ID NO: 86878 - protein, 30 aa, Artificial Sequence; identical to SEQ ID NO: 4719
  Cyclic GFR-binding peptide
  MOD_RES (29)..(30): Xaa is C or S

SEQ ID NO: 86879 - protein, 29 aa, Artificial Sequence
  Cyclic GFR-binding peptide
  MOD_RES (27)..(28): Xaa is C or S
DEYKFKVVNNAADLYLISIPELRAPVXXS

SEQ ID NO: 86880 - protein, 32 aa, Artificial Sequence; identical to SEQ ID NO: 15211
  Cyclic GFR-binding peptide
  MOD_RES (1)..(3): Xaa is C or S

SEQ ID NO: 86881 - protein, 41 aa, Artificial Sequence; identical to SEQ ID NO: 41624
  Cyclic GFR-binding peptide
  MOD_RES (2)..(4)..(36)..(37): Xaa is C or S

SEQ ID NO: 86882 - protein, 25 aa, Artificial Sequence
  Cyclic GFR-binding peptide
PIKGYVVNNASDFYLINIPSLRTPV

SEQ ID NO: 86883 - protein, 39 aa, Artificial Sequence; identical to SEQ ID NO: 33023
  Cyclic GFR-binding peptide
  MOD_RES (1)..(3)..(35)..(36): Xaa is C or S

SEQ ID NO: 86884 - protein, 33 aa, Artificial Sequence; identical to SEQ ID NO: 4724
  Cyclic GFR-binding peptide
  MOD_RES (1)..(3): Xaa is C or S

SEQ ID NO: 86885 - protein, 23 aa, Artificial Sequence
  Cyclic GFR-binding peptide
YHYKLVVKDYEDKYLMSIPSLET

SEQ ID NO: 86886 - protein, 28 aa, Artificial Sequence
  Cyclic GFR-binding peptide
  MOD_RES (28)..(28): Xaa is C or S
MNEYKFKIVNSSDDLYLVSIPELQTPAX

SEQ ID NO: 86887 - protein, 31 aa, Artificial Sequence; identical to SEQ ID NO: 4728
  Cyclic GFR-binding peptide
  MOD_RES (2)..(2): Xaa is C or S

SEQ ID NO: 86888 - protein, 30 aa, Artificial Sequence; identical to SEQ ID NO: 4729
  Cyclic GFR-binding peptide
  MOD_RES (2)..(4): Xaa is C or S

SEQ ID NO: 86889 - protein, 27 aa, Artificial Sequence
  Cyclic GFR-binding peptide
VMDPIKGYVVKENEDFYLMNIPSLETP

SEQ ID NO: 86890 - protein, 31 aa, Artificial Sequence; identical to SEQ ID NO: 41637
  Cyclic GFR-binding peptide
  MOD_RES (27)..(28): Xaa is C or S

SEQ ID NO: 86891 - protein, 34 aa, Artificial Sequence; identical to SEQ ID NO: 33036
  Cyclic GFR-binding peptide
  MOD_RES (31)..(32): Xaa is C or S

SEQ ID NO: 86892 - protein, 42 aa, Artificial Sequence; identical to SEQ ID NO: 4733
  Cyclic GFR-binding peptide
  MOD_RES (2)..(4)..(36)..(37): Xaa is C or S

SEQ ID NO: 86893 - protein, 23 aa, Artificial Sequence
  Cyclic GFR-binding peptide
YHYKLVVNNAADKYLISIPSLRA

SEQ ID NO: 86894 - protein, 23 aa, Artificial Sequence
  Cyclic GFR-binding peptide
MPIKGYVKPTRGVFYLINIPSLD

SEQ ID NO: 86895 - protein, 25 aa, Artificial Sequence
  Cyclic GFR-binding peptide
EYKFKIKPTKGILYLISIPELDQSV

SEQ ID NO: 86896 - protein, 34 aa, Artificial Sequence; identical to SEQ ID NO: 41644
  Cyclic GFR-binding peptide
  MOD_RES (29)..(30): Xaa is C or S

SEQ ID NO: 86897 - protein, 28 aa, Artificial Sequence
  Cyclic GFR-binding peptide
AEVVMDEYKFKVVNNAADLYLISIPELR

SEQ ID NO: 86898 - protein, 38 aa, Artificial Sequence; identical to SEQ ID NO: 41648
  Cyclic GFR-binding peptide
  MOD_RES (32)..(33): Xaa is C or S

SEQ ID NO: 86899 - protein, 33 aa, Artificial Sequence; identical to SEQ ID NO: 4741
  Cyclic GFR-binding peptide
  MOD_RES (2)..(4): Xaa is C or S

SEQ ID NO: 86900 - protein, 22 aa, Artificial Sequence
  Cyclic GFR-binding peptide
DRHKRLVVNNASDYYLISTASL

SEQ ID NO: 86901 - protein, 33 aa, Artificial Sequence; identical to SEQ ID NO: 41649
  Cyclic GFR-binding peptide
  MOD_RES (2)..(2): Xaa is C or S

SEQ ID NO: 86902 - protein, 40 aa, Artificial Sequence; identical to SEQ ID NO: 15231
  Cyclic GFR-binding peptide
  MOD_RES (2)..(4)..(36)..(37): Xaa is C or S

SEQ ID NO: 86903 - protein, 29 aa, Artificial Sequence
  Cyclic GFR-binding peptide
VVMNYHYKLIVNSSDDKYLVSIPSLQTPA

SEQ ID NO: 86904 - protein, 36 aa, Artificial Sequence; identical to SEQ ID NO: 4749
  Cyclic GFR-binding peptide
  MOD_RES (31)..(32): Xaa is C or S

SEQ ID NO: 86905 - protein, 40 aa, Artificial Sequence; identical to SEQ ID NO: 4750
  Cyclic GFR-binding peptide
  MOD_RES (1)..(34)..(35): Xaa is C or S

SEQ ID NO: 86906 - protein, 20 aa, Artificial Sequence
  Cyclic GFR-binding peptide
YHYKLIVNNSSDKYLVSIPS

SEQ ID NO: 86907 - protein, 27 aa, Artificial Sequence
  Cyclic GFR-binding peptide
  MOD_RES (1)..(1): Xaa is C or S
XAEVVMDPIKGYVVNNAADFYLINIPS

SEQ ID NO: 86908 - protein, 35 aa, Artificial Sequence; identical to SEQ ID NO: 33062
  Cyclic GFR-binding peptide
  MOD_RES (1)..(33): Xaa is C or S

SEQ ID NO: 86909 - protein, 24 aa, Artificial Sequence
  Cyclic GFR-binding peptide
VMNYHYKLIVNSSDDKYLVSIPSL

SEQ ID NO: 86910 - protein, 25 aa, Artificial Sequence
  Cyclic GFR-binding peptide
MGRYKKLYTVVGKDFYLISIANLKT

SEQ ID NO: 86911 - protein, 39 aa, Artificial Sequence
  Cyclic GFR-binding peptide
  MOD_RES (2)..(33)..(34): Xaa is C or S
GXEEVIMEYKFKLLVRGNDLYLMSIPETKVPAXXTSPVR

SEQ ID NO: 86912 - protein, 28 aa, Artificial Sequence
  Cyclic GFR-binding peptide
EVVMEYHYKLVVKDYEDKYLMSIPSLET

SEQ ID NO: 86913 - protein, 38 aa, Artificial Sequence
  Cyclic GFR-binding peptide
  MOD_RES (1)..(33)..(34): Xaa is C or S
XSEVTMNRHKRLVVNKNEDYYLISTASMKEPVXXPEPI

SEQ ID NO: 86914 - protein, 36 aa, Artificial Sequence; identical to SEQ ID NO: 75827
  Cyclic GFR-binding peptide
  MOD_RES (2)..(4)..(36): Xaa is C or S

SEQ ID NO: 86915 - protein, 36 aa, Artificial Sequence
  Cyclic GFR-binding peptide
  MOD_RES (30)..(31): Xaa is C or S
KVVMPIKGYVKPTRGVFYLINIPSLDQPVXXPSASA

SEQ ID NO: 86916 - protein, 31 aa, Artificial Sequence
  Cyclic GFR-binding peptide
  MOD_RES (2)..(4): Xaa is C or S
RXGXSEVVMDEYKFKVVNNASDLYLISIPEL

SEQ ID NO: 86917 - protein, 27 aa, Artificial Sequence
  Cyclic GFR-binding peptide
  MOD_RES (27)..(27): Xaa is C or S
NRYKKLIVNSSDDFYLVSIANLKTPAX

SEQ ID NO: 86918 - protein, 34 aa, Artificial Sequence; identical to SEQ ID NO: 15249
  Cyclic GFR-binding peptide
  MOD_RES (1)..(33)..(34): Xaa is C or S

SEQ ID NO: 86919 - protein, 31 aa, Artificial Sequence; identical to SEQ ID NO: 41670
  Cyclic GFR-binding peptide
  MOD_RES (26)..(27): Xaa is C or S

SEQ ID NO: 86920 - protein, 23 aa, Artificial Sequence
  Cyclic GFR-binding peptide
NEYKFKIVNSSDDLYLVSIPELK

SEQ ID NO: 86921 - protein, 29 aa, Artificial Sequence
  Cyclic GFR-binding peptide
VVMDEYKFKVVKENEDLYLMSIPELETPV

SEQ ID NO: 86922 - protein, 26 aa, Artificial Sequence
  Cyclic GFR-binding peptide
MNPIKGYIVNNSSDFYLVNIPSLKTP

SEQ ID NO: 86923 - protein, 30 aa, Artificial Sequence
  Cyclic GFR-binding peptide
EVVMDEYKFKVVNNASDLYLISIPELRTPV

SEQ ID NO: 86924 - protein, 35 aa, Artificial Sequence; identical to SEQ ID NO: 41673
  Cyclic GFR-binding peptide
  MOD_RES (29)..(30): Xaa is C or S

SEQ ID NO: 86925 - protein, 38 aa, Artificial Sequence
  Cyclic GFR-binding peptide
  MOD_RES (2)..(4)..(36)..(37): Xaa is C or S
RXAXSEVTMNEYKFKVVNKNEDLYLISIPEMKEPVXXP

SEQ ID NO: 86926 - protein, 31 aa, Artificial Sequence; identical to SEQ ID NO: 4769
  Cyclic GFR-binding peptide
  MOD_RES (31)..(31): Xaa is C or S

SEQ ID NO: 86927 - protein, 33 aa, Artificial Sequence; identical to SEQ ID NO: 41682
  Cyclic GFR-binding peptide
  MOD_RES (29)..(30): Xaa is C or S

SEQ ID NO: 86928 - protein, 35 aa, Artificial Sequence; identical to SEQ ID NO: 4778
  Cyclic GFR-binding peptide
  MOD_RES (30)..(31): Xaa is C or S

SEQ ID NO: 86929 - protein, 32 aa, Artificial Sequence
  Cyclic GFR-binding peptide
  MOD_RES (26)..(27): Xaa is C or S
YHYKLIIQQKDNKYLMSIPSMKTPTXXPGASG

SEQ ID NO: 86930 - protein, 29 aa, Artificial Sequence
  Cyclic GFR-binding peptide
  MOD_RES (2)..(2): Xaa is C or S
KXSKVVMYHYKLVKPTRGVKYLISIPSLD

SEQ ID NO: 86931 - protein, 38 aa, Artificial Sequence; identical to SEQ ID NO: 33097
  Cyclic GFR-binding peptide
  MOD_RES (1)..(34)..(35): Xaa is C or S

SEQ ID NO: 86932 - protein, 38 aa, Artificial Sequence; identical to SEQ ID NO: 4783
  Cyclic GFR-binding peptide
  MOD_RES (32)..(33): Xaa is C or S

SEQ ID NO: 86933 - protein, 37 aa, Artificial Sequence; identical to SEQ ID NO: 4786
  Cyclic GFR-binding peptide
  MOD_RES (31)..(32): Xaa is C or S

SEQ ID NO: 86934 - protein, 26 aa, Artificial Sequence
  Cyclic GFR-binding peptide
GEVVMDPIKGYVVKENEDFYLMNIPS

SEQ ID NO: 86935 - protein, 31 aa, Artificial Sequence
  Cyclic GFR-binding peptide
  MOD_RES (1)..(3): Xaa is C or S
XGXRDVVMGYHYKLIIQQKDNKYLMSIPSMK

SEQ ID NO: 86936 - protein, 20 aa, Artificial Sequence
  Cyclic GFR-binding peptide
YHYKLVVKDYEDKYLMSIPS

SEQ ID NO: 86937 - protein, 26 aa, Artificial Sequence
  Cyclic GFR-binding peptide
MEEYKFKVVKDYEDLYLMSIPELETP

SEQ ID NO: 86938 - protein, 26 aa, Artificial Sequence
  Cyclic GFR-binding peptide
  MOD_RES (26)..(26): Xaa is C or S
RYKKLTPVGMDDFYLVSIANLKTPVX

SEQ ID NO: 86939 - protein, 20 aa, Artificial Sequence
  Cyclic GFR-binding peptide
EYKFKIIQQKDNLYLMSIPE

SEQ ID NO: 86940 - protein, 36 aa, Artificial Sequence; identical to SEQ ID NO: 4805
  Cyclic GFR-binding peptide
  MOD_RES (1)..(32)..(33): Xaa is C or S

SEQ ID NO: 86941 - protein, 32 aa, Artificial Sequence; identical to SEQ ID NO: 41700
  Cyclic GFR-binding peptide
  MOD_RES (31)..(32): Xaa is C or S

SEQ ID NO: 86942 - protein, 38 aa, Artificial Sequence
  Cyclic GFR-binding peptide
  MOD_RES (2)..(34)..(35): Xaa is C or S
GXSEVVMDEYKFKVVNNASDLYLISIPELRTPVXXTPP

SEQ ID NO: 86943 - protein, 34 aa, Artificial Sequence
  Cyclic GFR-binding peptide
  MOD_RES (30)..(31): Xaa is C or S
VVMGRHKRLIIQQKDNYYLMSTASMKTPTXXPGA

SEQ ID NO: 86944 - protein, 29 aa, Artificial Sequence
  Cyclic GFR-binding peptide
VVMNRHKRLIVNSSDDYYLVSTASLQTPA

SEQ ID NO: 86945 - protein, 31 aa, Artificial Sequence; identical to SEQ ID NO: 4809
  Cyclic GFR-binding peptide

SEQ ID NO: 86946 - protein, 35 aa, Artificial Sequence; identical to SEQ ID NO: 75852
  Cyclic GFR-binding peptide
  MOD_RES (1)..(3)..(35): Xaa is C or S

SEQ ID NO: 86947 - protein, 25 aa, Artificial Sequence
  Cyclic GFR-binding peptide
VMDYHYKLVVNNAADKYLISIPSLR

SEQ ID NO: 86948 - protein, 27 aa, Artificial Sequence
  Cyclic GFR-binding peptide
VVMNRHKRLIVNSSDDYYLVSTASLKT

SEQ ID NO: 86949 - protein, 29 aa, Artificial Sequence
  Cyclic GFR-binding peptide
EVTMNEYKFKVVNKNEDLYLISIPEMKEP

SEQ ID NO: 86950 - protein, 24 aa, Artificial Sequence
  Cyclic GFR-binding peptide
SMGEPIKGYTPVGMDDFYLVNIPS

SEQ ID NO: 86951 - protein, 35 aa, Artificial Sequence
  Cyclic GFR-binding peptide
  MOD_RES (2)..(34)..(35): Xaa is C or S
AXSEVTMNEYKFKVVNKNEDLYLISIPEMKEPVXX

SEQ ID NO: 86952 - protein, 40 aa, Artificial Sequence; identical to SEQ ID NO: 75856
  Cyclic GFR-binding peptide
  MOD_RES (1)..(3)..(34)..(35): Xaa is C or S

SEQ ID NO: 86953 - protein, 28 aa, Artificial Sequence
  Cyclic GFR-binding peptide
VIMYHYKLLLVRGNDKYLMSIPSTKVPA

SEQ ID NO: 86954 - protein, 34 aa, Artificial Sequence; identical to SEQ ID NO: 33129
  Cyclic GFR-binding peptide
  MOD_RES (30)..(31): Xaa is C or S

SEQ ID NO: 86955 - protein, 32 aa, Artificial Sequence
  Cyclic GFR-binding peptide
  MOD_RES (32)..(32): Xaa is C or S
RDVVMGEYKFKIIQQKDNLYLMSIPEMKTPTX

SEQ ID NO: 86956 - protein, 33 aa, Artificial Sequence; identical to SEQ ID NO: 4819
  Cyclic GFR-binding peptide
  MOD_RES (30)..(31): Xaa is C or S

SEQ ID NO: 86957 - protein, 25 aa, Artificial Sequence
  Cyclic GFR-binding peptide
VVMDEYKFKVVNNAADLYLISIPEL

SEQ ID NO: 86958 - protein, 39 aa, Artificial Sequence; identical to SEQ ID NO: 33136
  Cyclic GFR-binding peptide
  MOD_RES (1)..(3)..(35)..(36): Xaa is C or S

SEQ ID NO: 86959 - protein, 35 aa, Artificial Sequence; identical to SEQ ID NO: 4825
  Cyclic GFR-binding peptide
  MOD_RES (1)..(32)..(33): Xaa is C or S

SEQ ID NO: 86960 - protein, 36 aa, Artificial Sequence; identical to SEQ ID NO: 33142
  Cyclic GFR-binding peptide
  MOD_RES (2)..(34)..(35): Xaa is C or S

SEQ ID NO: 86961 - protein, 35 aa, Artificial Sequence; identical to SEQ ID NO: 4830
  Cyclic GFR-binding peptide
  MOD_RES (1)..(3): Xaa is C or S

SEQ ID NO: 86962 - protein, 32 aa, Artificial Sequence; identical to SEQ ID NO: 33146
  Cyclic GFR-binding peptide
  MOD_RES (1)..(3): Xaa is C or S

SEQ ID NO: 86963 - protein, 31 aa, Artificial Sequence; identical to SEQ ID NO: 33148
  Cyclic GFR-binding peptide
  MOD_RES (31)..(31): Xaa is C or S

SEQ ID NO: 86964 - protein, 30 aa, Artificial Sequence; identical to SEQ ID NO: 4833
  Cyclic GFR-binding peptide
  MOD_RES (29)..(30): Xaa is C or S

SEQ ID NO: 86965 - protein, 27 aa, Artificial Sequence
  Cyclic GFR-binding peptide
SEVVMDYHYKLVVNNASDKYLISIPSL

SEQ ID NO: 86966 - protein, 24 aa, Artificial Sequence
  Cyclic GFR-binding peptide
AMGRYKKLYTVVGKDFYLISIANL

SEQ ID NO: 86967 - protein, 28 aa, Artificial Sequence
  Cyclic GFR-binding peptide
AKVVMNEYKFKIVNNSSDLYLVSIPELK

SEQ ID NO: 86968 - protein, 25 aa, Artificial Sequence
  Cyclic GFR-binding peptide
VIMEYKFKVKPKRGVLYLISIPELA

SEQ ID NO: 86969 - protein, 26 aa, Artificial Sequence
  Cyclic GFR-binding peptide
KVVMEYKFKVKPTRGVLYLISIPELD

SEQ ID NO: 86970 - protein, 25 aa, Artificial Sequence
  Cyclic GFR-binding peptide
SVAMGPIKGYYTVVGKDFYLINIPS

SEQ ID NO: 86971 - protein, 30 aa, Artificial Sequence; identical to SEQ ID NO: 33156
  Cyclic GFR-binding peptide
  MOD_RES (27)..(28): Xaa is C or S

SEQ ID NO: 86972 - protein, 30 aa, Artificial Sequence
  Cyclic GFR-binding peptide
  MOD_RES (27)..(28): Xaa is C or S
NEYKFKVVNKNEDLYLISIPEMKEPVXXPE

SEQ ID NO: 86973 - protein, 41 aa, Artificial Sequence; identical to SEQ ID NO: 4843
  Cyclic GFR-binding peptide
  MOD_RES (2)..(4)..(36)..(37): Xaa is C or S

SEQ ID NO: 86974 - protein, 32 aa, Artificial Sequence; identical to SEQ ID NO: 33165
  Cyclic GFR-binding peptide
  MOD_RES (29)..(30): Xaa is C or S

SEQ ID NO: 86975 - protein, 39 aa, Artificial Sequence; identical to SEQ ID NO: 33167
  Cyclic GFR-binding peptide
  MOD_RES (2)..(4)..(36)..(37): Xaa is C or S

SEQ ID NO: 86976 - protein, 32 aa, Artificial Sequence
  Cyclic GFR-binding peptide
  MOD_RES (2)..(4): Xaa is C or S
SXGXRDVVMGEYKFKIIQQKDNLYLMSIPEMK

SEQ ID NO: 86977 - protein, 34 aa, Artificial Sequence
  Cyclic GFR-binding peptide
  MOD_RES (1)..(32)..(33): Xaa is C or S
XSKVIMPIKGYIKPTKGIFYLINIPSLDQSVXXP

SEQ ID NO: 86978 - protein, 37 aa, Artificial Sequence; identical to SEQ ID NO: 4850
  Cyclic GFR-binding peptide
  MOD_RES (2)..(34)..(35): Xaa is C or S

SEQ ID NO: 86979 - protein, 34 aa, Artificial Sequence; identical to SEQ ID NO: 4851
  Cyclic GFR-binding peptide
  MOD_RES (33)..(34): Xaa is C or S

SEQ ID NO: 86980 - protein, 38 aa, Artificial Sequence
  Cyclic GFR-binding peptide
  MOD_RES (32)..(33): Xaa is C or S
SEVTMNYHYKLVVNKNEDKYLISIPSMKEPVXXPEPIG

SEQ ID NO: 86981 - protein, 29 aa, Artificial Sequence
  Cyclic GFR-binding peptide
  MOD_RES (28)..(29): Xaa is C or S
MNEYKFKIVNSSDDLYLVSIPELKTPAXX

SEQ ID NO: 86982 - protein, 21 aa, Artificial Sequence
  Cyclic GFR-binding peptide
MPIKGYVKPTRGVFYLINIPS

SEQ ID NO: 86983 - protein, 33 aa, Artificial Sequence
  Cyclic GFR-binding peptide
  MOD_RES (1)..(33): Xaa is C or S
XSEVTMNYHYKLVVNKNEDKYLISIPSMKEPVX

SEQ ID NO: 86984 - protein, 30 aa, Artificial Sequence; identical to SEQ ID NO: 4855
  Cyclic GFR-binding peptide
  MOD_RES (26)..(27): Xaa is C or S

SEQ ID NO: 86985 - protein, 22 aa, Artificial Sequence
  Cyclic GFR-binding peptide
EYKFKVVNNAADLYLISIPELR

SEQ ID NO: 86986 - protein, 37 aa, Artificial Sequence; identical to SEQ ID NO: 4858
  Cyclic GFR-binding peptide
  MOD_RES (32)..(33): Xaa is C or S

SEQ ID NO: 86987 - protein, 25 aa, Artificial Sequence
  Cyclic GFR-binding peptide
EYKFKTPVGMDDLYLVSIPELKTPV

SEQ ID NO: 86988 - protein, 26 aa, Artificial Sequence
  Cyclic GFR-binding peptide
VVMDEYKFKVVKENEDLYLMSIPELE

SEQ ID NO: 86989 - protein, 24 aa, Artificial Sequence
  Cyclic GFR-binding peptide
YHYKLVVNNASDKYLISIPSLRTP

SEQ ID NO: 86990 - protein, 32 aa, Artificial Sequence; identical to SEQ ID NO: 4861
  Cyclic GFR-binding peptide
  MOD_RES (2)..(2): Xaa is C or S

SEQ ID NO: 86991 - protein, 32 aa, Artificial Sequence; identical to SEQ ID NO: 75887
  Cyclic GFR-binding peptide
  MOD_RES (30)..(31): Xaa is C or S

SEQ ID NO: 86992 - protein, 33 aa, Artificial Sequence; identical to SEQ ID NO: 4862
  Cyclic GFR-binding peptide
  MOD_RES (30)..(31): Xaa is C or S

SEQ ID NO: 86993 - protein, 40 aa, Artificial Sequence
  Cyclic GFR-binding peptide
  MOD_RES (2)..(34)..(35): Xaa is C or S
GXESVAMGRHKRLYTVVGKDYYLISTASLKTPVXXAKSAK

SEQ ID NO: 86994 - protein, 27 aa, Artificial Sequence
  Cyclic GFR-binding peptide
  MOD_RES (26)..(27): Xaa is C or S
RYKKLIVNSSDDFYLVSIANLQTPAXX

SEQ ID NO: 86995 - protein, 31 aa, Artificial Sequence
  Cyclic GFR-binding peptide
SEVTMNRHKRLVVNKNEDYYLISTASMKEPV

SEQ ID NO: 86996 - protein, 36 aa, Artificial Sequence
  Cyclic GFR-binding peptide
  MOD_RES (32)..(33): Xaa is C or S
SEVTMNRYKKLVVNKNEDFYLISIANMKEPVXXPEP

SEQ ID NO: 86997 - protein, 31 aa, Artificial Sequence; identical to SEQ ID NO: 4868
  Cyclic GFR-binding peptide
  MOD_RES (30)..(31): Xaa is C or S

SEQ ID NO: 86998 - protein, 34 aa, Artificial Sequence; identical to SEQ ID NO: 33192
  Cyclic GFR-binding peptide
  MOD_RES (28)..(29): Xaa is C or S

SEQ ID NO: 86999 - protein, 33 aa, Artificial Sequence; identical to SEQ ID NO: 41760
  Cyclic GFR-binding peptide
  MOD_RES (32)..(33): Xaa is C or S

SEQ ID NO: 87000 - protein, 29 aa, Artificial Sequence
  Cyclic GFR-binding peptide
  MOD_RES (29)..(29): Xaa is C or S
VMNRYKKLIVNNSSDFYLVSIANLKTPAX

SEQ ID NO: 87001 - protein, 29 aa, Artificial Sequence
  Cyclic GFR-binding peptide
  MOD_RES (27)..(28): Xaa is C or S
MRYKKLVKPTRGVFYLISIANLDQPVXXP

SEQ ID NO: 87002 - protein, 30 aa, Artificial Sequence; identical to SEQ ID NO: 4877
  Cyclic GFR-binding peptide
  MOD_RES (30)..(30): Xaa is C or S

SEQ ID NO: 87003 - protein, 34 aa, Artificial Sequence; identical to SEQ ID NO: 4879
  Cyclic GFR-binding peptide
  MOD_RES (28)..(29): Xaa is C or S

SEQ ID NO: 87004 - protein, 26 aa, Artificial Sequence
  Cyclic GFR-binding peptide
RDVVMGRHKRLIIQQKDNYYLMSTAS

SEQ ID NO: 87005 - protein, 25 aa, Artificial Sequence
  Cyclic GFR-binding peptide
TMNRHKRLVVNKNEDYYLISTASMK

SEQ ID NO: 87006 - protein, 31 aa, Artificial Sequence
  Cyclic GFR-binding peptide
  MOD_RES (2)..(4): Xaa is C or S
RXAXSEVTMNPIKGYVVNKNEDFYLINIPSM

SEQ ID NO: 87007 - protein, 36 aa, Artificial Sequence; identical to SEQ ID NO: 4882
  Cyclic GFR-binding peptide
  MOD_RES (2)..(4)..(35)..(36): Xaa is C or S

SEQ ID NO: 87008 - protein, 36 aa, Artificial Sequence; identical to SEQ ID NO: 33206
  Cyclic GFR-binding peptide
  MOD_RES (2)..(4)..(36): Xaa is C or S

SEQ ID NO: 87009 - protein, 39 aa, Artificial Sequence
  Cyclic GFR-binding peptide
  MOD_RES (1)..(33)..(34): Xaa is C or S
XSRVVMNRHKRLIVNSSDDYYLVSTASLKTPAXXPKPVH

SEQ ID NO: 87010 - protein, 30 aa, Artificial Sequence; identical to SEQ ID NO: 4883
  Cyclic GFR-binding peptide
  MOD_RES (30)..(30): Xaa is C or S

SEQ ID NO: 87011 - protein, 21 aa, Artificial Sequence
  Cyclic GFR-binding peptide
MRYKKLIKPTKGIFYLISIAN

SEQ ID NO: 87012 - protein, 30 aa, Artificial Sequence; identical to SEQ ID NO: 4887
  Cyclic GFR-binding peptide

SEQ ID NO: 87013 - protein, 21 aa, Artificial Sequence
  Cyclic GFR-binding peptide
DYHYKLVVNNAADKYLISIPS

SEQ ID NO: 87014 - protein, 22 aa, Artificial Sequence
  Cyclic GFR-binding peptide
RYKKLVVNNASDFYLISIANLR

SEQ ID NO: 87015 - protein, 30 aa, Artificial Sequence
  Cyclic GFR-binding peptide
  MOD_RES (1)..(3): Xaa is C or S
XKXSRVIMPIKGYVKPKRGVFYLINIPSLA

SEQ ID NO: 87016 - protein, 36 aa, Artificial Sequence; identical to SEQ ID NO: 4893
  Cyclic GFR-binding peptide
  MOD_RES (2)..(34)..(35): Xaa is C or S

SEQ ID NO: 87017 - protein, 36 aa, Artificial Sequence; identical to SEQ ID NO: 4895
  Cyclic GFR-binding peptide
  MOD_RES (1)..(33)..(34): Xaa is C or S

SEQ ID NO: 87018 - protein, 35 aa, Artificial Sequence; identical to SEQ ID NO: 41781
  Cyclic GFR-binding peptide
  MOD_RES (1)..(33): Xaa is C or S

SEQ ID NO: 87019 - protein, 28 aa, Artificial Sequence
  Cyclic GFR-binding peptide
  MOD_RES (2)..(2): Xaa is C or S
GXGEVVMDRHKRLVVKENEDYYLMSTAS

SEQ ID NO: 87020 - protein, 35 aa, Artificial Sequence; identical to SEQ ID NO: 4898
  Cyclic GFR-binding peptide
  MOD_RES (1)..(3)..(35): Xaa is C or S

SEQ ID NO: 87021 - protein, 34 aa, Artificial Sequence; identical to SEQ ID NO: 4899
  Cyclic GFR-binding peptide
  MOD_RES (2)..(34): Xaa is C or S

SEQ ID NO: 87022 - protein, 30 aa, Artificial Sequence; identical to SEQ ID NO: 41782
  Cyclic GFR-binding peptide
  MOD_RES (30)..(30): Xaa is C or S

SEQ ID NO: 87023 - protein, 35 aa, Artificial Sequence; identical to SEQ ID NO: 4901
  Cyclic GFR-binding peptide
  MOD_RES (2)..(4): Xaa is C or S

SEQ ID NO: 87024 - protein, 36 aa, Artificial Sequence; identical to SEQ ID NO: 33220
  Cyclic GFR-binding peptide
  MOD_RES (1)..(3)..(35)..(36): Xaa is C or S

SEQ ID NO: 87025 - protein, 27 aa, Artificial Sequence
  Cyclic GFR-binding peptide
  MOD_RES (1)..(1): Xaa is C or S
XSRVIMRYKKLVKPKRGVFYLISIANL

SEQ ID NO: 87026 - protein, 36 aa, Artificial Sequence
  Cyclic GFR-binding peptide
  MOD_RES (2)..(4)..(36): Xaa is C or S
RXAXSEVTMNPIKGYVVNKNEDFYLINIPSMKEPVX

SEQ ID NO: 87027 - protein, 39 aa, Artificial Sequence; identical to SEQ ID NO: 33225
  Cyclic GFR-binding peptide
  MOD_RES (2)..(34)..(35): Xaa is C or S

SEQ ID NO: 87028 - protein, 22 aa, Artificial Sequence
  Cyclic GFR-binding peptide
GERYKKLTPVGMDDFYLVSIAN

SEQ ID NO: 87029 - protein, 30 aa, Artificial Sequence; identical to SEQ ID NO: 4908
  Cyclic GFR-binding peptide
  MOD_RES (28)..(28): Xaa is C or S

SEQ ID NO: 87030 - protein, 37 aa, Artificial Sequence; identical to SEQ ID NO: 33229
  Cyclic GFR-binding peptide
  MOD_RES (2)..(34)..(35): Xaa is C or S

SEQ ID NO: 87031 - protein, 26 aa, Artificial Sequence
  Cyclic GFR-binding peptide
DVVMGEYKFKIIQQKDNLYLMSIPEM

SEQ ID NO: 87032 - protein, 39 aa, Artificial Sequence
  Cyclic GFR-binding peptide
  MOD_RES (1)..(3)..(35)..(36): Xaa is C or S
XGXRDVVMGEYKFKIIQQKDNLYLMSIPEMKTPTXXPGA

SEQ ID NO: 87033 - protein, 32 aa, Artificial Sequence; identical to SEQ ID NO: 4913
  Cyclic GFR-binding peptide
  MOD_RES (28)..(29): Xaa is C or S

SEQ ID NO: 87034 - protein, 34 aa, Artificial Sequence; identical to SEQ ID NO: 41792
  Cyclic GFR-binding peptide
  MOD_RES (28)..(29): Xaa is C or S

SEQ ID NO: 87035 - protein, 38 aa, Artificial Sequence; identical to SEQ ID NO: 75914
  Cyclic GFR-binding peptide
  MOD_RES (2)..(4)..(36)..(37): Xaa is C or S

SEQ ID NO: 87036 - protein, 27 aa, Artificial Sequence
  Cyclic GFR-binding peptide
  MOD_RES (1)..(1): Xaa is C or S
XRDVVMGEYKFKIIQQKDNLYLMSIPE

SEQ ID NO: 87037 - protein, 37 aa, Artificial Sequence; identical to SEQ ID NO: 4917
  Cyclic GFR-binding peptide
  MOD_RES (1)..(32)..(33): Xaa is C or S

SEQ ID NO: 87038 - protein, 32 aa, Artificial Sequence; identical to SEQ ID NO: 4919
  Cyclic GFR-binding peptide
  MOD_RES (31)..(32): Xaa is C or S

SEQ ID NO: 87039 - protein, 33 aa, Artificial Sequence; identical to SEQ ID NO: 33235
  Cyclic GFR-binding peptide
  MOD_RES (1)..(3): Xaa is C or S

SEQ ID NO: 87040 - protein, 31 aa, Artificial Sequence; identical to SEQ ID NO: 41797
  Cyclic GFR-binding peptide
  MOD_RES (2)..(2): Xaa is C or S

SEQ ID NO: 87041 - protein, 32 aa, Artificial Sequence; identical to SEQ ID NO: 4920
  Cyclic GFR-binding peptide
  MOD_RES (1)..(3): Xaa is C or S

SEQ ID NO: 87042 - protein, 32 aa, Artificial Sequence; identical to SEQ ID NO: 33238
  Cyclic GFR-binding peptide
  MOD_RES (30)..(31): Xaa is C or S

SEQ ID NO: 87043 - protein, 35 aa, Artificial Sequence; identical to SEQ ID NO: 4922
  Cyclic GFR-binding peptide
  MOD_RES (2)..(34)..(35): Xaa is C or S

SEQ ID NO: 87044 - protein, 32 aa, Artificial Sequence; identical to SEQ ID NO: 33243
  Cyclic GFR-binding peptide
  MOD_RES (1)..(3): Xaa is C or S

SEQ ID NO: 87045 - protein, 31 aa, Artificial Sequence
  Cyclic GFR-binding peptide
  MOD_RES (1)..(3): Xaa is C or S
XGXSEVVMDYHYKLVVNNASDKYLISIPSLR

SEQ ID NO: 87046 - protein, 24 aa, Artificial Sequence
  Cyclic GFR-binding peptide
DRYKKLVVNNAADFYLISIANLRA

SEQ ID NO: 87047 - protein, 35 aa, Artificial Sequence; identical to SEQ ID NO: 4924
  Cyclic GFR-binding peptide
  MOD_RES (30)..(30): Xaa is C or S

SEQ ID NO: 87048 - protein, 34 aa, Artificial Sequence; identical to SEQ ID NO: 4925
  Cyclic GFR-binding peptide
  MOD_RES (28)..(29): Xaa is C or S

SEQ ID NO: 87049 - protein, 38 aa, Artificial Sequence; identical to SEQ ID NO: 4927
  Cyclic GFR-binding peptide
  MOD_RES (1)..(34)..(35): Xaa is C or S

SEQ ID NO: 87050 - protein, 29 aa, Artificial Sequence
  Cyclic GFR-binding peptide
  MOD_RES (1)..(1): Xaa is C or S
XEAVSMGEPIKGYTPVGMDDFYLVNIPSL

SEQ ID NO: 87051 - protein, 24 aa, Artificial Sequence
  Cyclic GFR-binding peptide
VVMGEYKFKIIQQKDNLYLMSIPE

SEQ ID NO: 87052 - protein, 22 aa, Artificial Sequence
  Cyclic GFR-binding peptide
MERYKKLVVKDYEDFYLMSIAN

SEQ ID NO: 87053 - protein, 40 aa, Artificial Sequence
  Cyclic GFR-binding peptide
  MOD_RES (2)..(4)..(35)..(36): Xaa is C or S
SXKXSRVIMPIKGYVKPKRGVFYLINIPSLAQPVXXPAAS

SEQ ID NO: 87054 - protein, 23 aa, Artificial Sequence
  Cyclic GFR-binding peptide
EYKFKVVNNAADLYLISIPELRA

SEQ ID NO: 87055 - protein, 30 aa, Artificial Sequence; identical to SEQ ID NO: 33256
  Cyclic GFR-binding peptide
  MOD_RES (2)..(4): Xaa is C or S

SEQ ID NO: 87056 - protein, 29 aa, Artificial Sequence
  Cyclic GFR-binding peptide
  MOD_RES (1)..(3): Xaa is C or S
XGXGEVVMEYHYKLVVKDYEDKYLMSIPS

SEQ ID NO: 87057 - protein, 38 aa, Artificial Sequence; identical to SEQ ID NO: 4940
  Cyclic GFR-binding peptide
  MOD_RES (1)..(32)..(33): Xaa is C or S

SEQ ID NO: 87058 - protein, 26 aa, Artificial Sequence
  Cyclic GFR-binding peptide
VIMRHKRLVKPKRGVYYLISTASLAQ

SEQ ID NO: 87059 - protein, 32 aa, Artificial Sequence; identical to SEQ ID NO: 41817
  Cyclic GFR-binding peptide
  MOD_RES (32)..(32): Xaa is C or S

SEQ ID NO: 87060 - protein, 23 aa, Artificial Sequence
  Cyclic GFR-binding peptide
NEYKFKVVNKNEDLYLISIPEMK

SEQ ID NO: 87061 - protein, 31 aa, Artificial Sequence; identical to SEQ ID NO: 4950
  Cyclic GFR-binding peptide
  MOD_RES (2)..(4): Xaa is C or S

SEQ ID NO: 87062 - protein, 28 aa, Artificial Sequence
  Cyclic GFR-binding peptide
SEVVMDYHYKLVVNNASDKYLISIPSLR

SEQ ID NO: 87063 - protein, 37 aa, Artificial Sequence; identical to SEQ ID NO: 41826
  Cyclic GFR-binding peptide
  MOD_RES (1)..(3)..(36)..(37): Xaa is C or S

SEQ ID NO: 87064 - protein, 24 aa, Artificial Sequence
  Cyclic GFR-binding peptide
VIMRHKRLVKPKRGVYYLISTASL

SEQ ID NO: 87065 - protein, 37 aa, Artificial Sequence
  Cyclic GFR-binding peptide
  MOD_RES (1)..(3)..(34)..(35): Xaa is C or S
XKXSKVVMPIKGYVKPTRGVFYLINIPSLDQPVXXPS

SEQ ID NO: 87066 - protein, 36 aa, Artificial Sequence
  Cyclic GFR-binding peptide
  MOD_RES (31)..(32): Xaa is C or S
SVAMGRHKRLYTVVGKDYYLISTASLKTPVXXAKSA

SEQ ID NO: 87067 - protein, 38 aa, Artificial Sequence; identical to SEQ ID NO: 4958
  Cyclic GFR-binding peptide
  MOD_RES (1)..(3)..(35)..(36): Xaa is C or S

SEQ ID NO: 87068 - protein, 33 aa, Artificial Sequence; identical to SEQ ID NO: 33273
  Cyclic GFR-binding peptide
  MOD_RES (31)..(32): Xaa is C or S

SEQ ID NO: 87069 - protein, 32 aa, Artificial Sequence; identical to SEQ ID NO: 33275
  Cyclic GFR-binding peptide
  MOD_RES (30)..(31): Xaa is C or S

SEQ ID NO: 87070 - protein, 26 aa, Artificial Sequence
  Cyclic GFR-binding peptide
VVMDRYKKLVVNNAADFYLISIANLR

SEQ ID NO: 87071 - protein, 22 aa, Artificial Sequence
  Cyclic GFR-binding peptide
MDYHYKLVVNNAADKYLISIPS

SEQ ID NO: 87072 - protein, 33 aa, Artificial Sequence; identical to SEQ ID NO: 4964
  Cyclic GFR-binding peptide
  MOD_RES (28)..(29): Xaa is C or S

SEQ ID NO: 87073 - protein, 26 aa, Artificial Sequence
  Cyclic GFR-binding peptide
  MOD_RES (26)..(26): Xaa is C or S
RHKRLVKPTRGVYYLISTASLDQPVX

SEQ ID NO: 87074 - protein, 36 aa, Artificial Sequence; identical to SEQ ID NO: 4966
  Cyclic GFR-binding peptide
  MOD_RES (33)..(34): Xaa is C or S

SEQ ID NO: 87075 - protein, 27 aa, Artificial Sequence
  Cyclic GFR-binding peptide
VVMEPIKGYVVKDYEDFYLMNIPSLET

SEQ ID NO: 87076 - protein, 28 aa, Artificial Sequence
  Cyclic GFR-binding peptide
  MOD_RES (1)..(3): Xaa is C or S
XKXSRVIMPIKGYVKPKRGVFYLINIPS

SEQ ID NO: 87077 - protein, 25 aa, Artificial Sequence
  Cyclic GFR-binding peptide
PIKGYTPVGMDDFYLVNIPSLKTPV

SEQ ID NO: 87078 - protein, 31 aa, Artificial Sequence; identical to SEQ ID NO: 4971
  Cyclic GFR-binding peptide
  MOD_RES (1)..(1): Xaa is C or S

SEQ ID NO: 87079 - protein, 24 aa, Artificial Sequence
  Cyclic GFR-binding peptide
VVMDRHKRLVVNNAADYYLISTAS

SEQ ID NO: 87080 - protein, 29 aa, Artificial Sequence
  Cyclic GFR-binding peptide
VVMDPIKGYVVNNAADFYLINIPSLRAPV

SEQ ID NO: 87081 - protein, 21 aa, Artificial Sequence
  Cyclic GFR-binding peptide
YHYKLIVNSSDDKYLVSIPSL

SEQ ID NO: 87082 - protein, 26 aa, Artificial Sequence
  Cyclic GFR-binding peptide
RVVMNYHYKLIVNSSDDKYLVSIPSL

SEQ ID NO: 87083 - protein, 26 aa, Artificial Sequence
  Cyclic GFR-binding peptide
  MOD_RES (26)..(26): Xaa is C or S
RYKKLIKPTKGIFYLISIANLDQSVX

SEQ ID NO: 87084 - protein, 23 aa, Artificial Sequence
  Cyclic GFR-binding peptide
MGRHKRLIIQQKDNYYLMSTASM

SEQ ID NO: 87085 - protein, 30 aa, Artificial Sequence; identical to SEQ ID NO: 40349
  Cyclic GFR-binding peptide

SEQ ID NO: 87086 - protein, 36 aa, Artificial Sequence
  Cyclic GFR-binding peptide
  MOD_RES (32)..(33): Xaa is C or S
SEVTMNRHKRLVVNKNEDYYLISTASMKEPVXXPEP

SEQ ID NO: 87087 - protein, 26 aa, Artificial Sequence
  Cyclic GFR-binding peptide
VTMNRHKRLVVNKNEDYYLISTASMK

SEQ ID NO: 87088 - protein, 36 aa, Artificial Sequence; identical to SEQ ID NO: 40362
  Cyclic GFR-binding peptide
  MOD_RES (31)..(32): Xaa is C or S

SEQ ID NO: 87089 - protein, 34 aa, Artificial Sequence
  Cyclic GFR-binding peptide
  MOD_RES (1)..(3): Xaa is C or S
XGXSEVVMDYHYKLVVNNASDKYLISIPSLRTPV

SEQ ID NO: 87090 - protein, 27 aa, Artificial Sequence
  Cyclic GFR-binding peptide
TMNPIKGYVVNKNEDFYLINIPSMKEP

SEQ ID NO: 87091 - protein, 29 aa, Artificial Sequence
  Cyclic GFR-binding peptide
  MOD_RES (26)..(27): Xaa is C or S
EYKFKVVKDYEDLYLMSIPELETPVXXAK

SEQ ID NO: 87092 - protein, 32 aa, Artificial Sequence; identical to SEQ ID NO: 40364
  Cyclic GFR-binding peptide
  MOD_RES (29)..(30): Xaa is C or S

SEQ ID NO: 87093 - protein, 28 aa, Artificial Sequence
  Cyclic GFR-binding peptide
VMNRHKRLIVNSSDDYYLVSTASLKTPA

SEQ ID NO: 87094 - protein, 27 aa, Artificial Sequence
  Cyclic GFR-binding peptide
IMPIKGYIKPTKGIFYLINIPSLDQSV

SEQ ID NO: 87095 - protein, 29 aa, Artificial Sequence
  Cyclic GFR-binding peptide
  MOD_RES (29)..(29): Xaa is C or S
VMDRHKRLVVNNASDYYLISTASLRTPVX

SEQ ID NO: 87096 - protein, 30 aa, Artificial Sequence; identical to SEQ ID NO: 4993
  Cyclic GFR-binding peptide
  MOD_RES (2)..(2): Xaa is C or S

SEQ ID NO: 87097 - protein, 36 aa, Artificial Sequence; identical to SEQ ID NO: 40368
  Cyclic GFR-binding peptide
  MOD_RES (2)..(34)..(35): Xaa is C or S

SEQ ID NO: 87098 - protein, 37 aa, Artificial Sequence; identical to SEQ ID NO: 4995
  Cyclic GFR-binding peptide
  MOD_RES (31)..(32): Xaa is C or S

SEQ ID NO: 87099 - protein, 34 aa, Artificial Sequence; identical to SEQ ID NO: 33315
  Cyclic GFR-binding peptide
  MOD_RES (2)..(4): Xaa is C or S

SEQ ID NO: 87100 - protein, 23 aa, Artificial Sequence
  Cyclic GFR-binding peptide
MRHKRLLLVRGNDYYLMSTASTK

SEQ ID NO: 87101 - protein, 36 aa, Artificial Sequence; identical to SEQ ID NO: 33316
  Cyclic GFR-binding peptide
  MOD_RES (2)..(34)..(35): Xaa is C or S

SEQ ID NO: 87102 - protein, 29 aa, Artificial Sequence
  Cyclic GFR-binding peptide
  MOD_RES (28)..(29): Xaa is C or S
MNEYKFKIVNSSDDLYLVSIPELQTPAXX

SEQ ID NO: 87103 - protein, 21 aa, Artificial Sequence
  Cyclic GFR-binding peptide
PIKGYIVNSSDDFYLVNIPSL

SEQ ID NO: 87104 - protein, 26 aa, Artificial Sequence
  Cyclic GFR-binding peptide
SKVVMRYKKLVKPTRGVFYLISIANL

SEQ ID NO: 87105 - protein, 30 aa, Artificial Sequence; identical to SEQ ID NO: 5002
  Cyclic GFR-binding peptide
  MOD_RES (2)..(2): Xaa is C or S

SEQ ID NO: 87106 - protein, 36 aa, Artificial Sequence
  Cyclic GFR-binding peptide
  MOD_RES (1)..(32)..(33): Xaa is C or S
XSKVVMPIKGYVKPTRGVFYLINIPSLDQPVXXPSA

SEQ ID NO: 87107 - protein, 30 aa, Artificial Sequence
  Cyclic GFR-binding peptide
  MOD_RES (1)..(3): Xaa is C or S
XGXEEVIMRHKRLLLVRGNDYYLMSTASTK

SEQ ID NO: 87108 - protein, 28 aa, Artificial Sequence
  Cyclic GFR-binding peptide
SEVTMNYHYKLVVNKNEDKYLISIPSMK

SEQ ID NO: 87109 - protein, 25 aa, Artificial Sequence
  Cyclic GFR-binding peptide
MEYHYKLVVKDYEDKYLMSIPSLET

SEQ ID NO: 87110 - protein, 32 aa, Artificial Sequence; identical to SEQ ID NO: 5006
  Cyclic GFR-binding peptide
  MOD_RES (2)..(4): Xaa is C or S

SEQ ID NO: 87111 - protein, 36 aa, Artificial Sequence
  Cyclic GFR-binding peptide
  MOD_RES (1)..(3)..(35)..(36): Xaa is C or S
XAXSEVTMNRYKKLVVNKNEDFYLISIANMKEPVXX

SEQ ID NO: 87112 - protein, 34 aa, Artificial Sequence; identical to SEQ ID NO: 40397
  Cyclic GFR-binding peptide
  MOD_RES (32)..(33): Xaa is C or S

SEQ ID NO: 87113 - protein, 22 aa, Artificial Sequence
  Cyclic GFR-binding peptide
EYKFKIIQQKDNLYLMSIPEMK

SEQ ID NO: 87114 - protein, 24 aa, Artificial Sequence
  Cyclic GFR-binding peptide
EPIKGYTPVGMDDFYLVNIPSLKT

SEQ ID NO: 87115 - protein, 33 aa, Artificial Sequence
  Cyclic GFR-binding peptide
  MOD_RES (30)..(31): Xaa is C or S
RVIMPIKGYVKPKRGVFYLINIPSLAQPVXXPA

SEQ ID NO: 87116 - protein, 31 aa, Artificial Sequence; identical to SEQ ID NO: 40402
  Cyclic GFR-binding peptide
  MOD_RES (1)..(3): Xaa is C or S

SEQ ID NO: 87117 - protein, 36 aa, Artificial Sequence; identical to SEQ ID NO: 33336
  Cyclic GFR-binding peptide
  MOD_RES (31)..(32): Xaa is C or S

SEQ ID NO: 87118 - protein, 37 aa, Artificial Sequence
  Cyclic GFR-binding peptide
  MOD_RES (31)..(32): Xaa is C or S
RVVMNYHYKLIVNSSDDKYLVSIPSLKTPAXXPKPVH

SEQ ID NO: 87119 - protein, 34 aa, Artificial Sequence
  Cyclic GFR-binding peptide
  MOD_RES (1)..(3): Xaa is C or S
XGXSEVVMDEYKFKVVNNASDLYLISIPELRTPV

SEQ ID NO: 87120 - protein, 39 aa, Artificial Sequence; identical to SEQ ID NO: 40403
  Cyclic GFR-binding peptide
  MOD_RES (2)..(4)..(36)..(37): Xaa is C or S

SEQ ID NO: 87121 - protein, 33 aa, Artificial Sequence; identical to SEQ ID NO: 33338
  Cyclic GFR-binding peptide
  MOD_RES (27)..(28): Xaa is C or S

SEQ ID NO: 87122 - protein, 35 aa, Artificial Sequence; identical to SEQ ID NO: 33339
  Cyclic GFR-binding peptide
  MOD_RES (1)..(3)..(35): Xaa is C or S

SEQ ID NO: 87123 - protein, 25 aa, Artificial Sequence
  Cyclic GFR-binding peptide
EYKFKIVNSSDDLYLVSIPELKTPA

SEQ ID NO: 87124 - protein, 27 aa, Artificial Sequence
  Cyclic GFR-binding peptide
SRVIMPIKGYVKPKRGVFYLINIPSLA

SEQ ID NO: 87125 - protein, 36 aa, Artificial Sequence; identical to SEQ ID NO: 33343
  Cyclic GFR-binding peptide
  MOD_RES (30)..(31): Xaa is C or S

SEQ ID NO: 87126 - protein, 36 aa, Artificial Sequence; identical to SEQ ID NO: 33345
  Cyclic GFR-binding peptide
  MOD_RES (2)..(4)..(36): Xaa is C or S

SEQ ID NO: 87127 - protein, 29 aa, Artificial Sequence
  Cyclic GFR-binding peptide
  MOD_RES (1)..(3): Xaa is C or S
XGXAKVVMNYHYKLIVNNSSDKYLVSIPS

SEQ ID NO: 87128 - protein, 34 aa, Artificial Sequence; identical to SEQ ID NO: 5020
  Cyclic GFR-binding peptide
  MOD_RES (1)..(3)..(34): Xaa is C or S

SEQ ID NO: 87129 - protein, 29 aa, Artificial Sequence
  Cyclic GFR-binding peptide
  MOD_RES (27)..(28): Xaa is C or S
MEYKFKVKPTRGVLYLISIPELDQPVXXP

SEQ ID NO: 87130 - protein, 30 aa, Artificial Sequence
  Cyclic GFR-binding peptide
EVTMNRYKKLVVNKNEDFYLISIANMKEPV

SEQ ID NO: 87131 - protein, 32 aa, Artificial Sequence
  Cyclic GFR-binding peptide
  MOD_RES (2)..(4): Xaa is C or S
LXGXEEVIMRHKRLLLVRGNDYYLMSTASTKV

SEQ ID NO: 87132 - protein, 30 aa, Artificial Sequence
  Cyclic GFR-binding peptide
  MOD_RES (1)..(3): Xaa is C or S
XGXSEVVMDYHYKLVVNNASDKYLISIPSL

SEQ ID NO: 87133 - protein, 36 aa, Artificial Sequence; identical to SEQ ID NO: 5023
  Cyclic GFR-binding peptide
  MOD_RES (2)..(33)..(34): Xaa is C or S

SEQ ID NO: 87134 - protein, 35 aa, Artificial Sequence; identical to SEQ ID NO: 40420
  Cyclic GFR-binding peptide
  MOD_RES (1)..(3)..(35): Xaa is C or S

SEQ ID NO: 87135 - protein, 40 aa, Artificial Sequence; identical to SEQ ID NO: 5025
  Cyclic GFR-binding peptide
  MOD_RES (2)..(4)..(36): Xaa is C or S

SEQ ID NO: 87136 - protein, 33 aa, Artificial Sequence; identical to SEQ ID NO: 15502
  Cyclic GFR-binding peptide
  MOD_RES (2)..(2): Xaa is C or S

SEQ ID NO: 87137 - protein, 39 aa, Artificial Sequence; identical to SEQ ID NO: 5030
  Cyclic GFR-binding peptide
  MOD_RES (2)..(4)..(37)..(38): Xaa is C or S

SEQ ID NO: 87138 - protein, 31 aa, Artificial Sequence
  Cyclic GFR-binding peptide
  MOD_RES (1)..(1): Xaa is C or S
XSEVVMDYHYKLVVNNASDKYLISIPSLRTP

SEQ ID NO: 87139 - protein, 35 aa, Artificial Sequence
  Cyclic GFR-binding peptide
  MOD_RES (2)..(33)..(34): Xaa is C or S
KXSKVIMPIKGYIKPTKGIFYLINIPSLDQSVXXP

SEQ ID NO: 87140 - protein, 38 aa, Artificial Sequence; identical to SEQ ID NO: 5032
  Cyclic GFR-binding peptide
  MOD_RES (1)..(3)..(35)..(36): Xaa is C or S

SEQ ID NO: 87141 - protein, 29 aa, Artificial Sequence
  Cyclic GFR-binding peptide
  MOD_RES (27)..(28): Xaa is C or S
MEYKFKVKPKRGVLYLISIPELAQPVXXP

SEQ ID NO: 87142 - protein, 26 aa, Artificial Sequence
  Cyclic GFR-binding peptide
MEYKFKVKPTRGVLYLISIPELDQPV

SEQ ID NO: 87143 - protein, 32 aa, Artificial Sequence; identical to SEQ ID NO: 40433
  Cyclic GFR-binding peptide
  MOD_RES (28)..(29): Xaa is C or S

SEQ ID NO: 87144 - protein, 36 aa, Artificial Sequence; identical to SEQ ID NO: 5036
  Cyclic GFR-binding peptide
  MOD_RES (2)..(4)..(36): Xaa is C or S

SEQ ID NO: 87145 - protein, 40 aa, Artificial Sequence; identical to SEQ ID NO: 5037
  Cyclic GFR-binding peptide
  MOD_RES (1)..(3)..(35)..(36): Xaa is C or S

SEQ ID NO: 87146 - protein, 26 aa, Artificial Sequence
  Cyclic GFR-binding peptide
  MOD_RES (1)..(1): Xaa is C or S
XSKVIMPIKGYIKPTKGIFYLINIPS

SEQ ID NO: 87147 - protein, 39 aa, Artificial Sequence; identical to SEQ ID NO: 33370
  Cyclic GFR-binding peptide
  MOD_RES (1)..(33)..(34): Xaa is C or S

SEQ ID NO: 87148 - protein, 34 aa, Artificial Sequence; identical to SEQ ID NO: 40453
  Cyclic GFR-binding peptide
  MOD_RES (2)..(34): Xaa is C or S

SEQ ID NO: 87149 - protein, 31 aa, Artificial Sequence
  Cyclic GFR-binding peptide
  MOD_RES (31)..(31): Xaa is C or S
SKVIMPIKGYIKPTKGIFYLINIPSLDQSVX

SEQ ID NO: 87150 - protein, 20 aa, Artificial Sequence
  Cyclic GFR-binding peptide
EYKFKVKPTRGVLYLISIPE

SEQ ID NO: 87151 - protein, 41 aa, Artificial Sequence; identical to SEQ ID NO: 40460
  Cyclic GFR-binding peptide
  MOD_RES (1)..(3)..(35): Xaa is C or S

SEQ ID NO: 87152 - protein, 20 aa, Artificial Sequence
  Cyclic GFR-binding peptide
PIKGYLLVRGNDFYLMNIPS

SEQ ID NO: 87153 - protein, 33 aa, Artificial Sequence
  Cyclic GFR-binding peptide
  MOD_RES (2)..(2): Xaa is C or S
GXSEVVMDEYKFKVVNNASDLYLISIPELRTPV

SEQ ID NO: 87154 - protein, 38 aa, Artificial Sequence; identical to SEQ ID NO: 5045
  Cyclic GFR-binding peptide
  MOD_RES (32)..(33): Xaa is C or S

SEQ ID NO: 87155 - protein, 34 aa, Artificial Sequence
  Cyclic GFR-binding peptide
  MOD_RES (1)..(33)..(34): Xaa is C or S
XESVAMGRHKRLYTVVGKDYYLISTASLKTPVXX

SEQ ID NO: 87156 - protein, 31 aa, Artificial Sequence; identical to SEQ ID NO: 33376
  Cyclic GFR-binding peptide
  MOD_RES (26)..(27): Xaa is C or S

SEQ ID NO: 87157 - protein, 33 aa, Artificial Sequence; identical to SEQ ID NO: 5049
  Cyclic GFR-binding peptide
  MOD_RES (32)..(32): Xaa is C or S

SEQ ID NO: 87158 - protein, 23 aa, Artificial Sequence
  Cyclic GFR-binding peptide
VMGRYKKLIIQQKDNFYLMSIAN

SEQ ID NO: 87159 - protein, 37 aa, Artificial Sequence; identical to SEQ ID NO: 33379
  Cyclic GFR-binding peptide
  MOD_RES (1)..(32)..(33): Xaa is C or S

SEQ ID NO: 87160 - protein, 27 aa, Artificial Sequence
  Cyclic GFR-binding peptide
  MOD_RES (26)..(27): Xaa is C or S
EYKFKTPVGMDDLYLVSIPELKTPVXX

SEQ ID NO: 87161 - protein, 29 aa, Artificial Sequence
  Cyclic GFR-binding peptide
ARVVMNRYKKLIVNSSDDFYLVSIANLQT

SEQ ID NO: 87162 - protein, 29 aa, Artificial Sequence
  Cyclic GFR-binding peptide
  MOD_RES (28)..(29): Xaa is C or S
VMRHKRLVKPTRGVYYLISTASLDQPVXX

SEQ ID NO: 87163 - protein, 32 aa, Artificial Sequence; identical to SEQ ID NO: 40482
  Cyclic GFR-binding peptide
  MOD_RES (2)..(4): Xaa is C or S

SEQ ID NO: 87164 - protein, 23 aa, Artificial Sequence
  Cyclic GFR-binding peptide
VMDYHYKLVVNNAADKYLISIPS

SEQ ID NO: 87165 - protein, 29 aa, Artificial Sequence
  Cyclic GFR-binding peptide
  MOD_RES (29)..(29): Xaa is C or S
VMEEYKFKVVKDYEDLYLMSIPELETPVX

SEQ ID NO: 87166 - protein, 38 aa, Artificial Sequence
  Cyclic GFR-binding peptide
  MOD_RES (1)..(33)..(34): Xaa is C or S
XSEVVMDRHKRLVVNNASDYYLISTASLRTPVXXTPPT

SEQ ID NO: 87167 - protein, 27 aa, Artificial Sequence
  Cyclic GFR-binding peptide
KVIMRHKRLIKPTKGIYYLISTASLDQ

SEQ ID NO: 87168 - protein, 35 aa, Artificial Sequence
  Cyclic GFR-binding peptide
  MOD_RES (2)..(4): Xaa is C or S
SXGXRDVVMGEYKFKIIQQKDNLYLMSIPEMKTPT

SEQ ID NO: 87169 - protein, 33 aa, Artificial Sequence; identical to SEQ ID NO: 40485
  Cyclic GFR-binding peptide
  MOD_RES (27)..(28): Xaa is C or S

SEQ ID NO: 87170 - protein, 41 aa, Artificial Sequence; identical to SEQ ID NO: 5061
  Cyclic GFR-binding peptide
  MOD_RES (2)..(4)..(36)..(37): Xaa is C or S

SEQ ID NO: 87171 - protein, 28 aa, Artificial Sequence
  Cyclic GFR-binding peptide
  MOD_RES (27)..(28): Xaa is C or S
DRHKRLVVNNASDYYLISTASLRTPVXX

SEQ ID NO: 87172 - protein, 39 aa, Artificial Sequence; identical to SEQ ID NO: 5066
  Cyclic GFR-binding peptide
  MOD_RES (2)..(34)..(35): Xaa is C or S

SEQ ID NO: 87173 - protein, 23 aa, Artificial Sequence
  Cyclic GFR-binding peptide
YHYKLIKPTKGIKYLISIPSLDQ

SEQ ID NO: 87174 - protein, 27 aa, Artificial Sequence
  Cyclic GFR-binding peptide
VMDRYKKLVVNNASDFYLISIANLRTP

SEQ ID NO: 87175 - protein, 26 aa, Artificial Sequence
  Cyclic GFR-binding peptide
MYHYKLIKPTKGIKYLISIPSLDQSV

SEQ ID NO: 87176 - protein, 31 aa, Artificial Sequence; identical to SEQ ID NO: 5074
  Cyclic GFR-binding peptide
  MOD_RES (31)..(31): Xaa is C or S

SEQ ID NO: 87177 - protein, 34 aa, Artificial Sequence; identical to SEQ ID NO: 33403
  Cyclic GFR-binding peptide
  MOD_RES (32)..(33): Xaa is C or S

SEQ ID NO: 87178 - protein, 31 aa, Artificial Sequence
  Cyclic GFR-binding peptide
  MOD_RES (30)..(31): Xaa is C or S
VVMGYHYKLIIQQKDNKYLMSIPSMKTPTXX

SEQ ID NO: 87179 - protein, 29 aa, Artificial Sequence
  Cyclic GFR-binding peptide
  MOD_RES (28)..(29): Xaa is C or S
MGEYKFKIIQQKDNLYLMSIPEMKTPTXX

SEQ ID NO: 87180 - protein, 25 aa, Artificial Sequence
  Cyclic GFR-binding peptide
RVVMNYHYKLIVNSSDDKYLVSIPS

SEQ ID NO: 87181 - protein, 28 aa, Artificial Sequence
  Cyclic GFR-binding peptide
RVVMNRYKKLIVNSSDDFYLVSIANLKT

SEQ ID NO: 87182 - protein, 34 aa, Artificial Sequence; identical to SEQ ID NO: 5088
  Cyclic GFR-binding peptide
  MOD_RES (28)..(29): Xaa is C or S

SEQ ID NO: 87183 - protein, 37 aa, Artificial Sequence; identical to SEQ ID NO: 5089
  Cyclic GFR-binding peptide
  MOD_RES (32)..(33): Xaa is C or S

SEQ ID NO: 87184 - protein, 33 aa, Artificial Sequence; identical to SEQ ID NO: 5090
  Cyclic GFR-binding peptide
  MOD_RES (1)..(3): Xaa is C or S

SEQ ID NO: 87185 - protein, 34 aa, Artificial Sequence; identical to SEQ ID NO: 33418
  Cyclic GFR-binding peptide
  MOD_RES (28)..(29): Xaa is C or S

SEQ ID NO: 87186 - protein, 41 aa, Artificial Sequence
  Cyclic GFR-binding peptide
  MOD_RES (2)..(4)..(36)..(37): Xaa is C or S
RXGXSEVVMDRHKRLVVNNASDYYLISTASLRTPVXXTPPT

SEQ ID NO: 87187 - protein, 29 aa, Artificial Sequence
  Cyclic GFR-binding peptide
VVMNYHYKLIVNSSDDKYLVSIPSLKTPA

SEQ ID NO: 87188 - protein, 32 aa, Artificial Sequence; identical to SEQ ID NO: 5098
  Cyclic GFR-binding peptide
  MOD_RES (2)..(4): Xaa is C or S

SEQ ID NO: 87189 - protein, 32 aa, Artificial Sequence; identical to SEQ ID NO: 5100
  Cyclic GFR-binding peptide
  MOD_RES (26)..(27): Xaa is C or S

SEQ ID NO: 87190 - protein, 33 aa, Artificial Sequence; identical to SEQ ID NO: 40523
  Cyclic GFR-binding peptide
  MOD_RES (2)..(4): Xaa is C or S

SEQ ID NO: 87191 - protein, 35 aa, Artificial Sequence
  Cyclic GFR-binding peptide
  MOD_RES (2)..(4): Xaa is C or S
SXGXRDVVMGYHYKLIIQQKDNKYLMSIPSMKTPT

SEQ ID NO: 87192 - protein, 25 aa, Artificial Sequence
  Cyclic GFR-binding peptide
DVVMGEYKFKIIQQKDNLYLMSIPE

SEQ ID NO: 87193 - protein, 31 aa, Artificial Sequence; identical to SEQ ID NO: 5103
  Cyclic GFR-binding peptide
  MOD_RES (31)..(31): Xaa is C or S

SEQ ID NO: 87194 - protein, 35 aa, Artificial Sequence; identical to SEQ ID NO: 33428
  Cyclic GFR-binding peptide
  MOD_RES (1)..(3)..(35): Xaa is C or S

SEQ ID NO: 87195 - protein, 34 aa, Artificial Sequence; identical to SEQ ID NO: 33431
  Cyclic GFR-binding peptide
  MOD_RES (31)..(32): Xaa is C or S

SEQ ID NO: 87196 - protein, 21 aa, Artificial Sequence
  Cyclic GFR-binding peptide
NRYKKLVVNKNEDFYLISIAN

SEQ ID NO: 87197 - protein, 39 aa, Artificial Sequence
  Cyclic GFR-binding peptide
  MOD_RES (1)..(3)..(34)..(35): Xaa is C or S
XGXEEVIMYHYKLLLVRGNDKYLMSIPSTKVPAXXTSPV

SEQ ID NO: 87198 - protein, 23 aa, Artificial Sequence
  Cyclic GFR-binding peptide
VMRYKKLVKPTRGVFYLISIANL

SEQ ID NO: 87199 - protein, 31 aa, Artificial Sequence
  Cyclic GFR-binding peptide
  MOD_RES (31)..(31): Xaa is C or S
EVVMDRHKRLVVNNAADYYLISTASLRAPVX

SEQ ID NO: 87200 - protein, 35 aa, Artificial Sequence; identical to SEQ ID NO: 40528
  Cyclic GFR-binding peptide
  MOD_RES (30)..(31): Xaa is C or S

SEQ ID NO: 87201 - protein, 37 aa, Artificial Sequence; identical to SEQ ID NO: 40530
  Cyclic GFR-binding peptide
  MOD_RES (2)..(34)..(35): Xaa is C or S

SEQ ID NO: 87202 - protein, 36 aa, Artificial Sequence; identical to SEQ ID NO: 33436
  Cyclic GFR-binding peptide
  MOD_RES (2)..(4)..(35)..(36): Xaa is C or S

SEQ ID NO: 87203 - protein, 25 aa, Artificial Sequence
  Cyclic GFR-binding peptide
KVIMRHKRLIKPTKGIYYLISTASL

SEQ ID NO: 87204 - protein, 31 aa, Artificial Sequence; identical to SEQ ID NO: 15590
  Cyclic GFR-binding peptide
  MOD_RES (1)..(1): Xaa is C or S

SEQ ID NO: 87205 - protein, 38 aa, Artificial Sequence
  Cyclic GFR-binding peptide
  MOD_RES (1)..(3)..(35)..(36): Xaa is C or S
XGXSEVVMDEYKFKVVNNASDLYLISIPELRTPVXXTP

SEQ ID NO: 87206 - protein, 28 aa, Artificial Sequence
  Cyclic GFR-binding peptide
  MOD_RES (1)..(3): Xaa is C or S
XKXSKVVMEYKFKVKPTRGVLYLISIPE

SEQ ID NO: 87207 - protein, 36 aa, Artificial Sequence; identical to SEQ ID NO: 40540
  Cyclic GFR-binding peptide
  MOD_RES (31)..(32): Xaa is C or S

SEQ ID NO: 87208 - protein, 30 aa, Artificial Sequence; identical to SEQ ID NO: 33446
  Cyclic GFR-binding peptide
  MOD_RES (30)..(30): Xaa is C or S

SEQ ID NO: 87209 - protein, 30 aa, Artificial Sequence
  Cyclic GFR-binding peptide
  MOD_RES (28)..(29): Xaa is C or S
VMPIKGYVKPTRGVFYLINIPSLDQPVXXP

SEQ ID NO: 87210 - protein, 30 aa, Artificial Sequence; identical to SEQ ID NO: 5122
  Cyclic GFR-binding peptide
  MOD_RES (1)..(1): Xaa is C or S

SEQ ID NO: 87211 - protein, 30 aa, Artificial Sequence; identical to SEQ ID NO: 5123
  Cyclic GFR-binding peptide
  MOD_RES (1)..(3): Xaa is C or S

SEQ ID NO: 87212 - protein, 28 aa, Artificial Sequence
  Cyclic GFR-binding peptide
  MOD_RES (26)..(27): Xaa is C or S
EYKFKVKPKRGVLYLISIPELAQPVXXP

SEQ ID NO: 87213 - protein, 31 aa, Artificial Sequence; identical to SEQ ID NO: 5127
  Cyclic GFR-binding peptide
  MOD_RES (1)..(3): Xaa is C or S

SEQ ID NO: 87214 - protein, 26 aa, Artificial Sequence
  Cyclic GFR-binding peptide
RVIMPIKGYVKPKRGVFYLINIPSLA

SEQ ID NO: 87215 - protein, 28 aa, Artificial Sequence
  Cyclic GFR-binding peptide
KVVMYHYKLVKPTRGVKYLISIPSLDQP

SEQ ID NO: 87216 - protein, 33 aa, Artificial Sequence; identical to SEQ ID NO: 5134
  Cyclic GFR-binding peptide
  MOD_RES (1)..(33): Xaa is C or S

SEQ ID NO: 87217 - protein, 26 aa, Artificial Sequence
  Cyclic GFR-binding peptide
NRHKRLIVNSSDDYYLVSTASLKTPA

SEQ ID NO: 87218 - protein, 27 aa, Artificial Sequence
  Cyclic GFR-binding peptide
VMNRYKKLIVNSSDDFYLVSIANLKTP

SEQ ID NO: 87219 - protein, 32 aa, Artificial Sequence; identical to SEQ ID NO: 5139
  Cyclic GFR-binding peptide
  MOD_RES (2)..(4): Xaa is C or S

SEQ ID NO: 87220 - protein, 22 aa, Artificial Sequence
  Cyclic GFR-binding peptide
VMEYKFKVKPTRGVLYLISIPE

SEQ ID NO: 87221 - protein, 31 aa, Artificial Sequence
  Cyclic GFR-binding peptide
  MOD_RES (27)..(28): Xaa is C or S
MEYKFKLLVRGNDLYLMSIPETKVPAXXTSP

SEQ ID NO: 87222 - protein, 35 aa, Artificial Sequence; identical to SEQ ID NO: 5140
  Cyclic GFR-binding peptide
  MOD_RES (29)..(30): Xaa is C or S

SEQ ID NO: 87223 - protein, 29 aa, Artificial Sequence
  Cyclic GFR-binding peptide
AKVVMNEYKFKIVNNSSDLYLVSIPELKT

SEQ ID NO: 87224 - protein, 32 aa, Artificial Sequence; identical to SEQ ID NO: 33466
  Cyclic GFR-binding peptide
  MOD_RES (1)..(32): Xaa is C or S

SEQ ID NO: 87225 - protein, 22 aa, Artificial Sequence
  Cyclic GFR-binding peptide
PIKGYLLVRGNDFYLMNIPSTK

SEQ ID NO: 87226 - protein, 40 aa, Artificial Sequence; identical to SEQ ID NO: 5144
  Cyclic GFR-binding peptide
  MOD_RES (1)..(3)..(34)..(35): Xaa is C or S

SEQ ID NO: 87227 - protein, 39 aa, Artificial Sequence; identical to SEQ ID NO: 5145
  Cyclic GFR-binding peptide
  MOD_RES (1)..(33): Xaa is C or S

SEQ ID NO: 87228 - protein, 23 aa, Artificial Sequence
  Cyclic GFR-binding peptide
VMERHKRLVVKDYEDYYLMSTAS

SEQ ID NO: 87229 - protein, 33 aa, Artificial Sequence; identical to SEQ ID NO: 40563
  Cyclic GFR-binding peptide
  MOD_RES (1)..(3): Xaa is C or S

SEQ ID NO: 87230 - protein, 28 aa, Artificial Sequence
  Cyclic GFR-binding peptide
  MOD_RES (28)..(28): Xaa is C or S
MGEYKFKIIQQKDNLYLMSIPEMKTPTX

SEQ ID NO: 87231 - protein, 29 aa, Artificial Sequence
  Cyclic GFR-binding peptide
  MOD_RES (2)..(4): Xaa is C or S
SXKXSRVIMPIKGYVKPKRGVFYLINIPS

SEQ ID NO: 87232 - protein, 35 aa, Artificial Sequence
  Cyclic GFR-binding peptide
  MOD_RES (1)..(33)..(34): Xaa is C or S
XESVAMGRHKRLYTVVGKDYYLISTASLKTPVXXA

SEQ ID NO: 87233 - protein, 28 aa, Artificial Sequence
  Cyclic GFR-binding peptide
  MOD_RES (1)..(1): Xaa is C or S
XSEVVMDPIKGYVVNNASDFYLINIPSL

SEQ ID NO: 87234 - protein, 30 aa, Artificial Sequence; identical to SEQ ID NO: 5150
  Cyclic GFR-binding peptide
  MOD_RES (1)..(1): Xaa is C or S

SEQ ID NO: 87235 - protein, 30 aa, Artificial Sequence; identical to SEQ ID NO: 5151
  Cyclic GFR-binding peptide
  MOD_RES (27)..(28): Xaa is C or S

SEQ ID NO: 87236 - protein, 24 aa, Artificial Sequence
  Cyclic GFR-binding peptide
VVMDRYKKLVVNNASDFYLISIAN

SEQ ID NO: 87237 - protein, 21 aa, Artificial Sequence
  Cyclic GFR-binding peptide
DRYKKLVVNNASDFYLISIAN

SEQ ID NO: 87238 - protein, 31 aa, Artificial Sequence; identical to SEQ ID NO: 5154
  Cyclic GFR-binding peptide
  MOD_RES (31)..(31): Xaa is C or S

SEQ ID NO: 87239 - protein, 37 aa, Artificial Sequence
  Cyclic GFR-binding peptide
  MOD_RES (2)..(4)..(35)..(36): Xaa is C or S
SXKXSRVIMPIKGYVKPKRGVFYLINIPSLAQPVXXP

SEQ ID NO: 87240 - protein, 25 aa, Artificial Sequence
  Cyclic GFR-binding peptide
YHYKLIVNSSDDKYLVSIPSLQTPA

SEQ ID NO: 87241 - protein, 29 aa, Artificial Sequence
  Cyclic GFR-binding peptide
  MOD_RES (2)..(2): Xaa is C or S
GXARVVMNRHKRLIVNSSDDYYLVSTASL

SEQ ID NO: 87242 - protein, 29 aa, Artificial Sequence
  Cyclic GFR-binding peptide
  MOD_RES (29)..(29): Xaa is C or S
VVMRYKKLVKPTRGVFYLISIANLDQPVX

SEQ ID NO: 87243 - protein, 30 aa, Artificial Sequence; identical to SEQ ID NO: 5166
  Cyclic GFR-binding peptide
  MOD_RES (2)..(4): Xaa is C or S

SEQ ID NO: 87244 - protein, 29 aa, Artificial Sequence
  Cyclic GFR-binding peptide
  MOD_RES (2)..(2): Xaa is C or S
GXSEVVMDEYKFKVVNNASDLYLISIPEL

SEQ ID NO: 87245 - protein, 27 aa, Artificial Sequence
  Cyclic GFR-binding peptide
  MOD_RES (1)..(1): Xaa is C or S
XSEVTMNEYKFKVVNKNEDLYLISIPE

SEQ ID NO: 87246 - protein, 32 aa, Artificial Sequence; identical to SEQ ID NO: 5168
  Cyclic GFR-binding peptide
  MOD_RES (31)..(32): Xaa is C or S

SEQ ID NO: 87247 - protein, 31 aa, Artificial Sequence; identical to SEQ ID NO: 15632
  Cyclic GFR-binding peptide

SEQ ID NO: 87248 - protein, 34 aa, Artificial Sequence; identical to SEQ ID NO: 33491
  Cyclic GFR-binding peptide
  MOD_RES (30)..(31): Xaa is C or S

SEQ ID NO: 87249 - protein, 35 aa, Artificial Sequence; identical to SEQ ID NO: 40584
  Cyclic GFR-binding peptide
  MOD_RES (29)..(30): Xaa is C or S

SEQ ID NO: 87250 - protein, 34 aa, Artificial Sequence
  Cyclic GFR-binding peptide
  MOD_RES (2)..(4): Xaa is C or S
LXGXEEVIMYHYKLLLVRGNDKYLMSIPSTKVPA

SEQ ID NO: 87251 - protein, 33 aa, Artificial Sequence; identical to SEQ ID NO: 5170
  Cyclic GFR-binding peptide
  MOD_RES (32)..(33): Xaa is C or S

SEQ ID NO: 87252 - protein, 32 aa, Artificial Sequence; identical to SEQ ID NO: 5171
  Cyclic GFR-binding peptide
  MOD_RES (31)..(32): Xaa is C or S

SEQ ID NO: 87253 - protein, 30 aa, Artificial Sequence
  Cyclic GFR-binding peptide
  MOD_RES (28)..(29): Xaa is C or S
IMPIKGYIKPTKGIFYLINIPSLDQSVXXP

SEQ ID NO: 87254 - protein, 24 aa, Artificial Sequence
  Cyclic GFR-binding peptide
PIKGYIKPTKGIFYLINIPSLDQS

SEQ ID NO: 87255 - protein, 32 aa, Artificial Sequence; identical to SEQ ID NO: 33496
  Cyclic GFR-binding peptide
  MOD_RES (31)..(32): Xaa is C or S

SEQ ID NO: 87256 - protein, 35 aa, Artificial Sequence; identical to SEQ ID NO: 5174
  Cyclic GFR-binding peptide
  MOD_RES (30)..(31): Xaa is C or S

SEQ ID NO: 87257 - protein, 39 aa, Artificial Sequence
  Cyclic GFR-binding peptide
  MOD_RES (1)..(3)..(35)..(36): Xaa is C or S
XAXSEVTMNPIKGYVVNKNEDFYLINIPSMKEPVXXPEP

SEQ ID NO: 87258 - protein, 20 aa, Artificial Sequence
  Cyclic GFR-binding peptide
YHYKLVVNNAADKYLISIPS

SEQ ID NO: 87259 - protein, 32 aa, Artificial Sequence
  Cyclic GFR-binding peptide
  MOD_RES (29)..(30): Xaa is C or S
VMDYHYKLVVNNASDKYLISIPSLRTPVXXTP

SEQ ID NO: 87260 - protein, 27 aa, Artificial Sequence
  Cyclic GFR-binding peptide
VVMGRHKRLIIQQKDNYYLMSTASMKT

SEQ ID NO: 87261 - protein, 38 aa, Artificial Sequence
  Cyclic GFR-binding peptide
  MOD_RES (1)..(3)..(35)..(36): Xaa is C or S
XAXSEVTMNRHKRLVVNKNEDYYLISTASMKEPVXXPE

SEQ ID NO: 87262 - protein, 23 aa, Artificial Sequence
  Cyclic GFR-binding peptide
EPIKGYVVKDYEDFYLMNIPSLE

SEQ ID NO: 87263 - protein, 32 aa, Artificial Sequence; identical to SEQ ID NO: 5185
  Cyclic GFR-binding peptide
  MOD_RES (2)..(4): Xaa is C or S

SEQ ID NO: 87264 - protein, 31 aa, Artificial Sequence
  Cyclic GFR-binding peptide
  MOD_RES (29)..(30): Xaa is C or S
TMNYHYKLVVNKNEDKYLISIPSMKEPVXXP

SEQ ID NO: 87265 - protein, 32 aa, Artificial Sequence; identical to SEQ ID NO: 33507
  Cyclic GFR-binding peptide
  MOD_RES (2)..(4): Xaa is C or S

SEQ ID NO: 87266 - protein, 35 aa, Artificial Sequence
  Cyclic GFR-binding peptide
  MOD_RES (30)..(31): Xaa is C or S
EVIMEYKFKLLVRGNDLYLMSIPETKVPAXXTSPV

SEQ ID NO: 87267 - protein, 26 aa, Artificial Sequence
  Cyclic GFR-binding peptide
EVTMNRYKKLVVNKNEDFYLISIANM

SEQ ID NO: 87268 - protein, 37 aa, Artificial Sequence
  Cyclic GFR-binding peptide
  MOD_RES (31)..(32): Xaa is C or S
EEVIMYHYKLLLVRGNDKYLMSIPSTKVPAXXTSPVR

SEQ ID NO: 87269 - protein, 31 aa, Artificial Sequence
  Cyclic GFR-binding peptide
  MOD_RES (28)..(29): Xaa is C or S
MGRHKRLIIQQKDNYYLMSTASMKTPTXXPG

SEQ ID NO: 87270 - protein, 32 aa, Artificial Sequence
  Cyclic GFR-binding peptide
  MOD_RES (1)..(3): Xaa is C or S
XGXAEVVMDRHKRLVVNNAADYYLISTASLRA

SEQ ID NO: 87271 - protein, 25 aa, Artificial Sequence
  Cyclic GFR-binding peptide
TMNRYKKLVVNKNEDFYLISIANMK

SEQ ID NO: 87272 - protein, 38 aa, Artificial Sequence; identical to SEQ ID NO: 33508
  Cyclic GFR-binding peptide
  MOD_RES (1)..(3)..(34)..(35): Xaa is C or S

SEQ ID NO: 87273 - protein, 37 aa, Artificial Sequence; identical to SEQ ID NO: 5190
  Cyclic GFR-binding peptide
  MOD_RES (1)..(3)..(35)..(36): Xaa is C or S

SEQ ID NO: 87274 - protein, 31 aa, Artificial Sequence
  Cyclic GFR-binding peptide
  MOD_RES (1)..(1): Xaa is C or S
XRDVVMGRHKRLIIQQKDNYYLMSTASMKTP

SEQ ID NO: 87275 - protein, 34 aa, Artificial Sequence; identical to SEQ ID NO: 40611
  Cyclic GFR-binding peptide
  MOD_RES (2)..(4): Xaa is C or S

SEQ ID NO: 87276 - protein, 33 aa, Artificial Sequence
  Cyclic GFR-binding peptide
  MOD_RES (1)..(33): Xaa is C or S
XRDVVMGEYKFKIIQQKDNLYLMSIPEMKTPTX

SEQ ID NO: 87277 - protein, 33 aa, Artificial Sequence; identical to SEQ ID NO: 40612
  Cyclic GFR-binding peptide
  MOD_RES (2)..(2): Xaa is C or S

SEQ ID NO: 87278 - protein, 32 aa, Artificial Sequence; identical to SEQ ID NO: 40613
  Cyclic GFR-binding peptide
  MOD_RES (28)..(29): Xaa is C or S

SEQ ID NO: 87279 - protein, 23 aa, Artificial Sequence
  Cyclic GFR-binding peptide
MEPIKGYVVKDYEDFYLMNIPSL

SEQ ID NO: 87280 - protein, 29 aa, Artificial Sequence
  Cyclic GFR-binding peptide
  MOD_RES (1)..(1): Xaa is C or S
XRDVVMGYHYKLIIQQKDNKYLMSIPSMK

SEQ ID NO: 87281 - protein, 28 aa, Artificial Sequence
  Cyclic GFR-binding peptide
AKVVMNYHYKLIVNNSSDKYLVSIPSLK

SEQ ID NO: 87282 - protein, 20 aa, Artificial Sequence
  Cyclic GFR-binding peptide
YHYKLLLVRGNDKYLMSIPS

SEQ ID NO: 87283 - protein, 32 aa, Artificial Sequence; identical to SEQ ID NO: 33516
  Cyclic GFR-binding peptide
  MOD_RES (1)..(3): Xaa is C or S

SEQ ID NO: 87284 - protein, 32 aa, Artificial Sequence
  Cyclic GFR-binding peptide
  MOD_RES (1)..(1): Xaa is C or S
XSEVTMNYHYKLVVNKNEDKYLISIPSMKEPV

SEQ ID NO: 87285 - protein, 33 aa, Artificial Sequence; identical to SEQ ID NO: 33519
  Cyclic GFR-binding peptide
  MOD_RES (1)..(33): Xaa is C or S

SEQ ID NO: 87286 - protein, 32 aa, Artificial Sequence; identical to SEQ ID NO: 40622
  Cyclic GFR-binding peptide
  MOD_RES (26)..(27): Xaa is C or S

SEQ ID NO: 87287 - protein, 35 aa, Artificial Sequence
  Cyclic GFR-binding peptide
  MOD_RES (31)..(32): Xaa is C or S
EVVMDEYKFKVVNNASDLYLISIPELRTPVXXTPP

SEQ ID NO: 87288 - protein, 26 aa, Artificial Sequence
  Cyclic GFR-binding peptide
VMERYKKLVVKDYEDFYLMSIANLET

SEQ ID NO: 87289 - protein, 28 aa, Artificial Sequence
  Cyclic GFR-binding peptide
  MOD_RES (28)..(28): Xaa is C or S
IMRYKKLLLVRGNDFYLMSIANTKVPAX

SEQ ID NO: 87290 - protein, 25 aa, Artificial Sequence
  Cyclic GFR-binding peptide
VVMNRYKKLIVNSSDDFYLVSIANL

SEQ ID NO: 87291 - protein, 28 aa, Artificial Sequence
  Cyclic GFR-binding peptide
TMNEYKFKVVNKNEDLYLISIPEMKEPV

SEQ ID NO: 87292 - protein, 30 aa, Artificial Sequence; identical to SEQ ID NO: 40634
  Cyclic GFR-binding peptide
  MOD_RES (27)..(28): Xaa is C or S

SEQ ID NO: 87293 - protein, 26 aa, Artificial Sequence
  Cyclic GFR-binding peptide
MEYKFKVKPKRGVLYLISIPELAQPV

SEQ ID NO: 87294 - protein, 29 aa, Artificial Sequence
  Cyclic GFR-binding peptide
  MOD_RES (1)..(1): Xaa is C or S
XAEVVMDRHKRLVVNNAADYYLISTASLR

SEQ ID NO: 87295 - protein, 33 aa, Artificial Sequence; identical to SEQ ID NO: 5207
  Cyclic GFR-binding peptide
  MOD_RES (27)..(28): Xaa is C or S

SEQ ID NO: 87296 - protein, 41 aa, Artificial Sequence
  Cyclic GFR-binding peptide
  MOD_RES (2)..(4)..(36)..(37): Xaa is C or S
RXAXSEVTMNRHKRLVVNKNEDYYLISTASMKEPVXXPEPI

SEQ ID NO: 87297 - protein, 29 aa, Artificial Sequence
  Cyclic GFR-binding peptide
  MOD_RES (1)..(1): Xaa is C or S
XSRVIMYHYKLVKPKRGVKYLISIPSLAQ

SEQ ID NO: 87298 - protein, 28 aa, Artificial Sequence
  Cyclic GFR-binding peptide
VMDRYKKLVVNNAADFYLISIANLRAPV

SEQ ID NO: 87299 - protein, 26 aa, Artificial Sequence
  Cyclic GFR-binding peptide
EPIKGYVVKDYEDFYLMNIPSLETPV

SEQ ID NO: 87300 - protein, 24 aa, Artificial Sequence
  Cyclic GFR-binding peptide
DRYKKLVVKENEDFYLMSIANLET

SEQ ID NO: 87301 - protein, 24 aa, Artificial Sequence
  Cyclic GFR-binding peptide
NPIKGYIVNSSDDFYLVNIPSLKT

SEQ ID NO: 87302 - protein, 30 aa, Artificial Sequence
  Cyclic GFR-binding peptide
  MOD_RES (1)..(3): Xaa is C or S
XGXSEVVMDEYKFKVVNNASDLYLISIPEL

SEQ ID NO: 87303 - protein, 37 aa, Artificial Sequence; identical to SEQ ID NO: 5214
  Cyclic GFR-binding peptide
  MOD_RES (2)..(34)..(35): Xaa is C or S

SEQ ID NO: 87304 - protein, 31 aa, Artificial Sequence
  Cyclic GFR-binding peptide
  MOD_RES (1)..(3): Xaa is C or S
XKXSKVIMPIKGYIKPTKGIFYLINIPSLDQ

SEQ ID NO: 87305 - protein, 32 aa, Artificial Sequence
  Cyclic GFR-binding peptide
  MOD_RES (29)..(30): Xaa is C or S
VVMPIKGYVKPTRGVFYLINIPSLDQPVXXPS

SEQ ID NO: 87306 - protein, 34 aa, Artificial Sequence
  Cyclic GFR-binding peptide
  MOD_RES (2)..(4): Xaa is C or S
RXAXSEVTMNRHKRLVVNKNEDYYLISTASMKEP

SEQ ID NO: 87307 - protein, 36 aa, Artificial Sequence; identical to SEQ ID NO: 5217
  Cyclic GFR-binding peptide
  MOD_RES (30)..(31): Xaa is C or S

SEQ ID NO: 87308 - protein, 38 aa, Artificial Sequence
  Cyclic GFR-binding peptide
  MOD_RES (32)..(33): Xaa is C or S
AEVVMDRHKRLVVNNAADYYLISTASLRAPVXXSAPAA

SEQ ID NO: 87309 - protein, 27 aa, Artificial Sequence
  Cyclic GFR-binding peptide
VMPIKGYVKPTRGVFYLINIPSLDQPV

SEQ ID NO: 87310 - protein, 36 aa, Artificial Sequence; identical to SEQ ID NO: 5224
  Cyclic GFR-binding peptide
  MOD_RES (31)..(32): Xaa is C or S

SEQ ID NO: 87311 - protein, 22 aa, Artificial Sequence
  Cyclic GFR-binding peptide
NPIKGYVVNKNEDFYLINIPSM

SEQ ID NO: 87312 - protein, 35 aa, Artificial Sequence; identical to SEQ ID NO: 76097
  Cyclic GFR-binding peptide
  MOD_RES (2)..(4): Xaa is C or S

SEQ ID NO: 87313 - protein, 30 aa, Artificial Sequence; identical to SEQ ID NO: 5227
  Cyclic GFR-binding peptide
  MOD_RES (26)..(27): Xaa is C or S

SEQ ID NO: 87314 - protein, 29 aa, Artificial Sequence
  Cyclic GFR-binding peptide
  MOD_RES (29)..(29): Xaa is C or S
VMGEYKFKIIQQKDNLYLMSIPEMKTPTX

SEQ ID NO: 87315 - protein, 21 aa, Artificial Sequence
  Cyclic GFR-binding peptide
DPIKGYVVNNAADFYLINIPS

SEQ ID NO: 87316 - protein, 30 aa, Artificial Sequence; identical to SEQ ID NO: 5232
  Cyclic GFR-binding peptide
  MOD_RES (28)..(29): Xaa is C or S

SEQ ID NO: 87317 - protein, 32 aa, Artificial Sequence; identical to SEQ ID NO: 40678
  Cyclic GFR-binding peptide
  MOD_RES (32)..(32): Xaa is C or S

SEQ ID NO: 87318 - protein, 28 aa, Artificial Sequence
  Cyclic GFR-binding peptide
  MOD_RES (1)..(3): Xaa is C or S
XKXSRVIMRHKRLVKPKRGVYYLISTAS

SEQ ID NO: 87319 - protein, 26 aa, Artificial Sequence
  Cyclic GFR-binding peptide
  MOD_RES (26)..(26): Xaa is C or S
PIKGYIKPTKGIFYLINIPSLDQSVX

SEQ ID NO: 87320 - protein, 28 aa, Artificial Sequence
  Cyclic GFR-binding peptide
KVIMRHKRLIKPTKGIYYLISTASLDQS

SEQ ID NO: 87321 - protein, 24 aa, Artificial Sequence
  Cyclic GFR-binding peptide
TMNYHYKLVVNKNEDKYLISIPSM

SEQ ID NO: 87322 - protein, 30 aa, Artificial Sequence; identical to SEQ ID NO: 76107
  Cyclic GFR-binding peptide

SEQ ID NO: 87323 - protein, 31 aa, Artificial Sequence; identical to SEQ ID NO: 33554
  Cyclic GFR-binding peptide
  MOD_RES (28)..(29): Xaa is C or S

SEQ ID NO: 87324 - protein, 33 aa, Artificial Sequence; identical to SEQ ID NO: 76110
  Cyclic GFR-binding peptide
  MOD_RES (27)..(28): Xaa is C or S

SEQ ID NO: 87325 - protein, 35 aa, Artificial Sequence; identical to SEQ ID NO: 5240
  Cyclic GFR-binding peptide
  MOD_RES (32)..(33): Xaa is C or S

SEQ ID NO: 87326 - protein, 25 aa, Artificial Sequence
  Cyclic GFR-binding peptide
SVAMGRHKRLYTVVGKDYYLISTAS

SEQ ID NO: 87327 - protein, 28 aa, Artificial Sequence
  Cyclic GFR-binding peptide
  MOD_RES (26)..(27): Xaa is C or S
RHKRLLLVRGNDYYLMSTASTKVPAXXT

SEQ ID NO: 87328 - protein, 32 aa, Artificial Sequence; identical to SEQ ID NO: 40688
  Cyclic GFR-binding peptide
  MOD_RES (29)..(30): Xaa is C or S

SEQ ID NO: 87329 - protein, 25 aa, Artificial Sequence
  Cyclic GFR-binding peptide
MEYKFKVKPKRGVLYLISIPELAQP

SEQ ID NO: 87330 - protein, 28 aa, Artificial Sequence
  Cyclic GFR-binding peptide
EVVMDPIKGYVVNNASDFYLINIPSLRT

SEQ ID NO: 87331 - protein, 36 aa, Artificial Sequence; identical to SEQ ID NO: 40698
  Cyclic GFR-binding peptide
  MOD_RES (32)..(33): Xaa is C or S

SEQ ID NO: 87332 - protein, 32 aa, Artificial Sequence; identical to SEQ ID NO: 5247
  Cyclic GFR-binding peptide
  MOD_RES (28)..(29): Xaa is C or S

SEQ ID NO: 87333 - protein, 39 aa, Artificial Sequence; identical to SEQ ID NO: 5248
  Cyclic GFR-binding peptide
  MOD_RES (2)..(4)..(35)..(36): Xaa is C or S

SEQ ID NO: 87334 - protein, 32 aa, Artificial Sequence
  Cyclic GFR-binding peptide
  MOD_RES (29)..(30): Xaa is C or S
AMGRHKRLYTVVGKDYYLISTASLKTPVXXAK

SEQ ID NO: 87335 - protein, 24 aa, Artificial Sequence
  Cyclic GFR-binding peptide
MEEYKFKVVKDYEDLYLMSIPELE

SEQ ID NO: 87336 - protein, 39 aa, Artificial Sequence
  Cyclic GFR-binding peptide
  MOD_RES (1)..(33)..(34): Xaa is C or S
XESVAMGRHKRLYTVVGKDYYLISTASLKTPVXXAKSAK

SEQ ID NO: 87337 - protein, 30 aa, Artificial Sequence; identical to SEQ ID NO: 33564
  Cyclic GFR-binding peptide
  MOD_RES (1)..(3): Xaa is C or S

SEQ ID NO: 87338 - protein, 28 aa, Artificial Sequence
  Cyclic GFR-binding peptide
  MOD_RES (1)..(1): Xaa is C or S
XSKVIMEYKFKIKPTKGILYLISIPELD

SEQ ID NO: 87339 - protein, 33 aa, Artificial Sequence; identical to SEQ ID NO: 5252
  Cyclic GFR-binding peptide
  MOD_RES (28)..(29): Xaa is C or S

SEQ ID NO: 87340 - protein, 31 aa, Artificial Sequence; identical to SEQ ID NO: 5254
  Cyclic GFR-binding peptide
  MOD_RES (31)..(31): Xaa is C or S

SEQ ID NO: 87341 - protein, 28 aa, Artificial Sequence
  Cyclic GFR-binding peptide
  MOD_RES (28)..(28): Xaa is C or S
IMPIKGYLLVRGNDFYLMNIPSTKVPAX

SEQ ID NO: 87342 - protein, 28 aa, Artificial Sequence
  Cyclic GFR-binding peptide
  MOD_RES (1)..(1): Xaa is C or S
XSKVVMRYKKLVKPTRGVFYLISIANLD

SEQ ID NO: 87343 - protein, 30 aa, Artificial Sequence; identical to SEQ ID NO: 40704
  Cyclic GFR-binding peptide
  MOD_RES (30)..(30): Xaa is C or S

SEQ ID NO: 87344 - protein, 34 aa, Artificial Sequence; identical to SEQ ID NO: 5258
  Cyclic GFR-binding peptide
  MOD_RES (2)..(4): Xaa is C or S

SEQ ID NO: 87345 - protein, 29 aa, Artificial Sequence
  Cyclic GFR-binding peptide
  MOD_RES (2)..(4): Xaa is C or S
SXKXSKVIMYHYKLIKPTKGIKYLISIPS

SEQ ID NO: 87346 - protein, 33 aa, Artificial Sequence; identical to SEQ ID NO: 5262
  Cyclic GFR-binding peptide
  MOD_RES (2)..(4): Xaa is C or S

SEQ ID NO: 87347 - protein, 27 aa, Artificial Sequence
  Cyclic GFR-binding peptide
  MOD_RES (2)..(2): Xaa is C or S
KXSKVVMEYKFKVKPTRGVLYLISIPE

SEQ ID NO: 87348 - protein, 39 aa, Artificial Sequence; identical to SEQ ID NO: 5264
  Cyclic GFR-binding peptide
  MOD_RES (1)..(3)..(35)..(36): Xaa is C or S

SEQ ID NO: 87349 - protein, 42 aa, Artificial Sequence; identical to SEQ ID NO: 40710
  Cyclic GFR-binding peptide
  MOD_RES (2)..(4)..(36)..(37): Xaa is C or S

SEQ ID NO: 87350 - protein, 22 aa, Artificial Sequence
  Cyclic GFR-binding peptide
MDYHYKLVVNNASDKYLISIPS

SEQ ID NO: 87351 - protein, 35 aa, Artificial Sequence
  Cyclic GFR-binding peptide
  MOD_RES (29)..(30): Xaa is C or S
VMDEYKFKVVNNASDLYLISIPELRTPVXXTPPTS

SEQ ID NO: 87352 - protein, 24 aa, Artificial Sequence
  Cyclic GFR-binding peptide
RHKRLIKPTKGIYYLISTASLDQS

SEQ ID NO: 87353 - protein, 28 aa, Artificial Sequence
  Cyclic GFR-binding peptide
VVMERYKKLVVKDYEDFYLMSIANLETP

SEQ ID NO: 87354 - protein, 39 aa, Artificial Sequence
  Cyclic GFR-binding peptide
  MOD_RES (2)..(4)..(35)..(36): Xaa is C or S
LXGXEEVIMEYKFKLLVRGNDLYLMSIPETKVPAXXTSP

SEQ ID NO: 87355 - protein, 24 aa, Artificial Sequence
  Cyclic GFR-binding peptide
VIMYHYKLLLVRGNDKYLMSIPST

SEQ ID NO: 87356 - protein, 40 aa, Artificial Sequence
  Cyclic GFR-binding peptide
  MOD_RES (2)..(4)..(36)..(37): Xaa is C or S
RXGXSEVVMDEYKFKVVNNASDLYLISIPELRTPVXXTPP

SEQ ID NO: 87357 - protein, 26 aa, Artificial Sequence
  Cyclic GFR-binding peptide
VMDEYKFKVVNNASDLYLISIPELRT

SEQ ID NO: 87358 - protein, 33 aa, Artificial Sequence; identical to SEQ ID NO: 5278
  Cyclic GFR-binding peptide
  MOD_RES (27)..(28): Xaa is C or S

SEQ ID NO: 87359 - protein, 32 aa, Artificial Sequence; identical to SEQ ID NO: 40724
  Cyclic GFR-binding peptide
  MOD_RES (26)..(27): Xaa is C or S

SEQ ID NO: 87360 - protein, 27 aa, Artificial Sequence
  Cyclic GFR-binding peptide
  MOD_RES (26)..(27): Xaa is C or S
EYKFKIVNSSDDLYLVSIPELQTPAXX

SEQ ID NO: 87361 - protein, 29 aa, Artificial Sequence
  Cyclic GFR-binding peptide
  MOD_RES (2)..(2): Xaa is C or S
KXSKVIMRHKRLIKPTKGIYYLISTASLD

SEQ ID NO: 87362 - protein, 31 aa, Artificial Sequence
  Cyclic GFR-binding peptide
  MOD_RES (27)..(28): Xaa is C or S
GYHYKLIIQQKDNKYLMSIPSMKTPTXXPGA

SEQ ID NO: 87363 - protein, 30 aa, Artificial Sequence; identical to SEQ ID NO: 5287
  Cyclic GFR-binding peptide
  MOD_RES (30)..(30): Xaa is C or S

SEQ ID NO: 87364 - protein, 32 aa, Artificial Sequence
  Cyclic GFR-binding peptide
  MOD_RES (1)..(1): Xaa is C or S
XSEVTMNRYKKLVVNKNEDFYLISIANMKEPV

SEQ ID NO: 87365 - protein, 25 aa, Artificial Sequence
  Cyclic GFR-binding peptide
EVIMYHYKLLLVRGNDKYLMSIPST

SEQ ID NO: 87366 - protein, 30 aa, Artificial Sequence; identical to SEQ ID NO: 33596
  Cyclic GFR-binding peptide
  MOD_RES (1)..(1): Xaa is C or S

SEQ ID NO: 87367 - protein, 29 aa, Artificial Sequence
  Cyclic GFR-binding peptide
  MOD_RES (28)..(29): Xaa is C or S
IMRHKRLLLVRGNDYYLMSTASTKVPAXX

SEQ ID NO: 87368 - protein, 24 aa, Artificial Sequence
  Cyclic GFR-binding peptide
VMGRHKRLIIQQKDNYYLMSTASM

SEQ ID NO: 87369 - protein, 20 aa, Artificial Sequence
  Cyclic GFR-binding peptide
EYKFKVVNNASDLYLISIPE

SEQ ID NO: 87370 - protein, 27 aa, Artificial Sequence
  Cyclic GFR-binding peptide
VMDEYKFKVVNNAADLYLISIPELRAP

SEQ ID NO: 87371 - protein, 32 aa, Artificial Sequence; identical to SEQ ID NO: 5296
  Cyclic GFR-binding peptide
  MOD_RES (1)..(3): Xaa is C or S

SEQ ID NO: 87372 - protein, 24 aa, Artificial Sequence
  Cyclic GFR-binding peptide
GRYKKLYTVVGKDFYLISIANLKT

SEQ ID NO: 87373 - protein, 34 aa, Artificial Sequence
  Cyclic GFR-binding peptide
  MOD_RES (1)..(3)..(34): Xaa is C or S
XKXSKVVMPIKGYVKPTRGVFYLINIPSLDQPVX

SEQ ID NO: 87374 - protein, 31 aa, Artificial Sequence; identical to SEQ ID NO: 5300
  Cyclic GFR-binding peptide
  MOD_RES (1)..(1): Xaa is C or S

SEQ ID NO: 87375 - protein, 25 aa, Artificial Sequence
  Cyclic GFR-binding peptide
VTMNEYKFKVVNKNEDLYLISIPEM

SEQ ID NO: 87376 - protein, 23 aa, Artificial Sequence
  Cyclic GFR-binding peptide
PIKGYVVKDYEDFYLMNIPSLET

SEQ ID NO: 87377 - protein, 37 aa, Artificial Sequence; identical to SEQ ID NO: 33609
  Cyclic GFR-binding peptide
  MOD_RES (2)..(4)..(36): Xaa is C or S

SEQ ID NO: 87378 - protein, 29 aa, Artificial Sequence
  Cyclic GFR-binding peptide
  MOD_RES (27)..(28): Xaa is C or S
MRYKKLVKPKRGVFYLISIANLAQPVXXP

SEQ ID NO: 87379 - protein, 39 aa, Artificial Sequence
  Cyclic GFR-binding peptide
  MOD_RES (2)..(33)..(34): Xaa is C or S
KXSKVIMPIKGYIKPTKGIFYLINIPSLDQSVXXPSASA

SEQ ID NO: 87380 - protein, 28 aa, Artificial Sequence
  Cyclic GFR-binding peptide
VMNEYKFKIVNSSDDLYLVSIPELQTPA

SEQ ID NO: 87381 - protein, 26 aa, Artificial Sequence
  Cyclic GFR-binding peptide
AKVVMNEYKFKIVNNSSDLYLVSIPE

SEQ ID NO: 87382 - protein, 22 aa, Artificial Sequence
  Cyclic GFR-binding peptide
DPIKGYVVNNASDFYLINIPSL

SEQ ID NO: 87383 - protein, 35 aa, Artificial Sequence; identical to SEQ ID NO: 33617
  Cyclic GFR-binding peptide
  MOD_RES (32)..(33): Xaa is C or S

SEQ ID NO: 87384 - protein, 38 aa, Artificial Sequence; identical to SEQ ID NO: 76150
  Cyclic GFR-binding peptide
  MOD_RES (2)..(4)..(35)..(36): Xaa is C or S

SEQ ID NO: 87385 - protein, 33 aa, Artificial Sequence
  Cyclic GFR-binding peptide
  MOD_RES (30)..(31): Xaa is C or S
VVMGEYKFKIIQQKDNLYLMSIPEMKTPTXXPG

SEQ ID NO: 87386 - protein, 34 aa, Artificial Sequence; identical to SEQ ID NO: 33619
  Cyclic GFR-binding peptide
  MOD_RES (1)..(33)..(34): Xaa is C or S

SEQ ID NO: 87387 - protein, 29 aa, Artificial Sequence
  Cyclic GFR-binding peptide
  MOD_RES (27)..(28): Xaa is C or S
DPIKGYVVNNASDFYLINIPSLRTPVXXT

SEQ ID NO: 87388 - protein, 27 aa, Artificial Sequence
  Cyclic GFR-binding peptide
VIMRYKKLIKPTKGIFYLISIANLDQS

SEQ ID NO: 87389 - protein, 25 aa, Artificial Sequence
  Cyclic GFR-binding peptide
SKVIMRYKKLIKPTKGIFYLISIAN

SEQ ID NO: 87390 - protein, 31 aa, Artificial Sequence
  Cyclic GFR-binding peptide
  MOD_RES (30)..(31): Xaa is C or S
VVMDRHKRLVVNNAADYYLISTASLRAPVXX

SEQ ID NO: 87391 - protein, 32 aa, Artificial Sequence; identical to SEQ ID NO: 33623
  Cyclic GFR-binding peptide
  MOD_RES (2)..(2): Xaa is C or S

SEQ ID NO: 87392 - protein, 27 aa, Artificial Sequence
  Cyclic GFR-binding peptide
RVIMRHKRLVKPKRGVYYLISTASLAQ

SEQ ID NO: 87393 - protein, 34 aa, Artificial Sequence
  Cyclic GFR-binding peptide
  MOD_RES (28)..(29): Xaa is C or S
MNEYKFKVVNKNEDLYLISIPEMKEPVXXPEPIG

SEQ ID NO: 87394 - protein, 37 aa, Artificial Sequence; identical to SEQ ID NO: 5314
  Cyclic GFR-binding peptide
  MOD_RES (31)..(32): Xaa is C or S

SEQ ID NO: 87395 - protein, 37 aa, Artificial Sequence
  Cyclic GFR-binding peptide
  MOD_RES (2)..(4)..(36)..(37): Xaa is C or S
RXGXSEVVMDRHKRLVVNNASDYYLISTASLRTPVXX

SEQ ID NO: 87396 - protein, 25 aa, Artificial Sequence
  Cyclic GFR-binding peptide
VVMDYHYKLVVNNAADKYLISIPSL

SEQ ID NO: 87397 - protein, 33 aa, Artificial Sequence; identical to SEQ ID NO: 40759
  Cyclic GFR-binding peptide
  MOD_RES (31)..(32): Xaa is C or S

SEQ ID NO: 87398 - protein, 37 aa, Artificial Sequence; identical to SEQ ID NO: 33626
  Cyclic GFR-binding peptide
  MOD_RES (32)..(32): Xaa is C or S

SEQ ID NO: 87399 - protein, 23 aa, Artificial Sequence
  Cyclic GFR-binding peptide
EYKFKIVNSSDDLYLVSIPELKT

SEQ ID NO: 87400 - protein, 38 aa, Artificial Sequence
  Cyclic GFR-binding peptide
  MOD_RES (2)..(4)..(36)..(37): Xaa is C or S
RXAXSEVTMNYHYKLVVNKNEDKYLISIPSMKEPVXXP

SEQ ID NO: 87401 - protein, 35 aa, Artificial Sequence; identical to SEQ ID NO: 33631
  Cyclic GFR-binding peptide
  MOD_RES (32)..(33): Xaa is C or S

SEQ ID NO: 87402 - protein, 38 aa, Artificial Sequence; identical to SEQ ID NO: 40764
  Cyclic GFR-binding peptide
  MOD_RES (2)..(4)..(36): Xaa is C or S

SEQ ID NO: 87403 - protein, 32 aa, Artificial Sequence; identical to SEQ ID NO: 5321
  Cyclic GFR-binding peptide
  MOD_RES (31)..(32): Xaa is C or S

SEQ ID NO: 87404 - protein, 31 aa, Artificial Sequence; identical to SEQ ID NO: 5322
  Cyclic GFR-binding peptide
  MOD_RES (26)..(27): Xaa is C or S

SEQ ID NO: 87405 - protein, 29 aa, Artificial Sequence
  Cyclic GFR-binding peptide
  MOD_RES (1)..(1): Xaa is C or S
XEEVIMRHKRLLLVRGNDYYLMSTASTKV

SEQ ID NO: 87406 - protein, 26 aa, Artificial Sequence
  Cyclic GFR-binding peptide
NPIKGYIVNSSDDFYLVNIPSLQTPA

SEQ ID NO: 87407 - protein, 31 aa, Artificial Sequence; identical to SEQ ID NO: 40769
  Cyclic GFR-binding peptide
  MOD_RES (1)..(3): Xaa is C or S

SEQ ID NO: 87408 - protein, 34 aa, Artificial Sequence; identical to SEQ ID NO: 40775
  Cyclic GFR-binding peptide
  MOD_RES (2)..(4): Xaa is C or S

SEQ ID NO: 87409 - protein, 26 aa, Artificial Sequence
  Cyclic GFR-binding peptide
  MOD_RES (26)..(26): Xaa is C or S
RHKRLTPVGMDDYYLVSTASLKTPVX

SEQ ID NO: 87410 - protein, 33 aa, Artificial Sequence; identical to SEQ ID NO: 33641
  Cyclic GFR-binding peptide
  MOD_RES (29)..(30): Xaa is C or S

SEQ ID NO: 87411 - protein, 36 aa, Artificial Sequence; identical to SEQ ID NO: 5337
  Cyclic GFR-binding peptide
  MOD_RES (31)..(32): Xaa is C or S

SEQ ID NO: 87412 - protein, 38 aa, Artificial Sequence; identical to SEQ ID NO: 5338
  Cyclic GFR-binding peptide
  MOD_RES (2)..(34)..(35): Xaa is C or S

SEQ ID NO: 87413 - protein, 33 aa, Artificial Sequence
  Cyclic GFR-binding peptide
  MOD_RES (2)..(2): Xaa is C or S
AXSEVTMNPIKGYVVNKNEDFYLINIPSMKEPV

SEQ ID NO: 87414 - protein, 26 aa, Artificial Sequence
  Cyclic GFR-binding peptide
VMDRHKRLVVNNAADYYLISTASLRA

SEQ ID NO: 87415 - protein, 32 aa, Artificial Sequence; identical to SEQ ID NO: 33649
  Cyclic GFR-binding peptide
  MOD_RES (1)..(1): Xaa is C or S

SEQ ID NO: 87416 - protein, 25 aa, Artificial Sequence
  Cyclic GFR-binding peptide
EVVMDEYKFKVVNNAADLYLISIPE

SEQ ID NO: 87417 - protein, 36 aa, Artificial Sequence; identical to SEQ ID NO: 5340
  Cyclic GFR-binding peptide
  MOD_RES (32)..(33): Xaa is C or S

SEQ ID NO: 87418 - protein, 37 aa, Artificial Sequence
  Cyclic GFR-binding peptide
  MOD_RES (1)..(32)..(33): Xaa is C or S
XEEVIMEYKFKLLVRGNDLYLMSIPETKVPAXXTSPV

SEQ ID NO: 87419 - protein, 33 aa, Artificial Sequence; identical to SEQ ID NO: 5342
  Cyclic GFR-binding peptide
  MOD_RES (28)..(28): Xaa is C or S

SEQ ID NO: 87420 - protein, 32 aa, Artificial Sequence; identical to SEQ ID NO: 5344
  Cyclic GFR-binding peptide
  MOD_RES (2)..(2): Xaa is C or S

SEQ ID NO: 87421 - protein, 25 aa, Artificial Sequence
  Cyclic GFR-binding peptide
PIKGYVKPTRGVFYLINIPSLDQPV

SEQ ID NO: 87422 - protein, 32 aa, Artificial Sequence; identical to SEQ ID NO: 5348
  Cyclic GFR-binding peptide
  MOD_RES (26)..(27): Xaa is C or S

SEQ ID NO: 87423 - protein, 31 aa, Artificial Sequence; identical to SEQ ID NO: 5349
  Cyclic GFR-binding peptide
  MOD_RES (2)..(2): Xaa is C or S

SEQ ID NO: 87424 - protein, 36 aa, Artificial Sequence
  Cyclic GFR-binding peptide
  MOD_RES (30)..(31): Xaa is C or S
RVIMPIKGYVKPKRGVFYLINIPSLAQPVXXPAASA

SEQ ID NO: 87425 - protein, 30 aa, Artificial Sequence; identical to SEQ ID NO: 5352
  Cyclic GFR-binding peptide
  MOD_RES (29)..(30): Xaa is C or S

SEQ ID NO: 87426 - protein, 34 aa, Artificial Sequence; identical to SEQ ID NO: 5353
  Cyclic GFR-binding peptide
  MOD_RES (31)..(32): Xaa is C or S

SEQ ID NO: 87427 - protein, 31 aa, Artificial Sequence; identical to SEQ ID NO: 40797
  Cyclic GFR-binding peptide
  MOD_RES (29)..(30): Xaa is C or S

SEQ ID NO: 87428 - protein, 33 aa, Artificial Sequence
  Cyclic GFR-binding peptide
  MOD_RES (27)..(28): Xaa is C or S
NYHYKLVVNKNEDKYLISIPSMKEPVXXPEPIG

SEQ ID NO: 87429 - protein, 31 aa, Artificial Sequence; identical to SEQ ID NO: 5355
  Cyclic GFR-binding peptide
  MOD_RES (30)..(31): Xaa is C or S

SEQ ID NO: 87430 - protein, 31 aa, Artificial Sequence; identical to SEQ ID NO: 5357
  Cyclic GFR-binding peptide
  MOD_RES (27)..(27): Xaa is C or S

SEQ ID NO: 87431 - protein, 33 aa, Artificial Sequence; identical to SEQ ID NO: 33665
  Cyclic GFR-binding peptide
  MOD_RES (1)..(3): Xaa is C or S

SEQ ID NO: 87432 - protein, 26 aa, Artificial Sequence
  Cyclic GFR-binding peptide
EEVIMYHYKLLLVRGNDKYLMSIPST

SEQ ID NO: 87433 - protein, 34 aa, Artificial Sequence; identical to SEQ ID NO: 33667
  Cyclic GFR-binding peptide
  MOD_RES (2)..(34): Xaa is C or S

SEQ ID NO: 87434 - protein, 26 aa, Artificial Sequence
  Cyclic GFR-binding peptide
  MOD_RES (26)..(26): Xaa is C or S
RHKRLIVNSSDDYYLVSTASLQTPAX

SEQ ID NO: 87435 - protein, 33 aa, Artificial Sequence; identical to SEQ ID NO: 40810
  Cyclic GFR-binding peptide
  MOD_RES (1)..(33): Xaa is C or S

SEQ ID NO: 87436 - protein, 23 aa, Artificial Sequence
  Cyclic GFR-binding peptide
VMDEYKFKVVKENEDLYLMSIPE

SEQ ID NO: 87437 - protein, 35 aa, Artificial Sequence; identical to SEQ ID NO: 40813
  Cyclic GFR-binding peptide
  MOD_RES (1)..(33)..(34): Xaa is C or S

SEQ ID NO: 87438 - protein, 25 aa, Artificial Sequence
  Cyclic GFR-binding peptide
RHKRLLLVRGNDYYLMSTASTKVPA

SEQ ID NO: 87439 - protein, 34 aa, Artificial Sequence; identical to SEQ ID NO: 33672
  Cyclic GFR-binding peptide
  MOD_RES (1)..(32)..(33): Xaa is C or S

SEQ ID NO: 87440 - protein, 25 aa, Artificial Sequence
  Cyclic GFR-binding peptide
DYHYKLVVKENEDKYLMSIPSLETP

SEQ ID NO: 87441 - protein, 28 aa, Artificial Sequence
  Cyclic GFR-binding peptide
  MOD_RES (2)..(2): Xaa is C or S
GXESVAMGRHKRLYTVVGKDYYLISTAS

SEQ ID NO: 87442 - protein, 30 aa, Artificial Sequence
  Cyclic GFR-binding peptide
  MOD_RES (27)..(28): Xaa is C or S
DYHYKLVVNNASDKYLISIPSLRTPVXXTP

SEQ ID NO: 87443 - protein, 34 aa, Artificial Sequence; identical to SEQ ID NO: 5372
  Cyclic GFR-binding peptide
  MOD_RES (32)..(33): Xaa is C or S

SEQ ID NO: 87444 - protein, 22 aa, Artificial Sequence
  Cyclic GFR-binding peptide
YHYKLIVNNSSDKYLVSIPSLK

SEQ ID NO: 87445 - protein, 33 aa, Artificial Sequence; identical to SEQ ID NO: 33683
  Cyclic GFR-binding peptide
  MOD_RES (31)..(32): Xaa is C or S

SEQ ID NO: 87446 - protein, 32 aa, Artificial Sequence
  Cyclic GFR-binding peptide
  MOD_RES (26)..(27): Xaa is C or S
PIKGYVKPKRGVFYLINIPSLAQPVXXPAASA

SEQ ID NO: 87447 - protein, 29 aa, Artificial Sequence
  Cyclic GFR-binding peptide
EVVMDEYKFKVVKENEDLYLMSIPELETP

SEQ ID NO: 87448 - protein, 32 aa, Artificial Sequence; identical to SEQ ID NO: 5378
  Cyclic GFR-binding peptide
  MOD_RES (2)..(2): Xaa is C or S

SEQ ID NO: 87449 - protein, 32 aa, Artificial Sequence
  Cyclic GFR-binding peptide
  MOD_RES (26)..(27): Xaa is C or S
RHKRLIIQQKDNYYLMSTASMKTPTXXPGASG

SEQ ID NO: 87450 - protein, 32 aa, Artificial Sequence
  Cyclic GFR-binding peptide
  MOD_RES (31)..(32): Xaa is C or S
EVVMDRHKRLVVNNAADYYLISTASLRAPVXX

SEQ ID NO: 87451 - protein, 32 aa, Artificial Sequence; identical to SEQ ID NO: 76182
  Cyclic GFR-binding peptide
  MOD_RES (31)..(32): Xaa is C or S

SEQ ID NO: 87452 - protein, 31 aa, Artificial Sequence
  Cyclic GFR-binding peptide
  MOD_RES (31)..(31): Xaa is C or S
EEVIMYHYKLLLVRGNDKYLMSIPSTKVPAX

SEQ ID NO: 87453 - protein, 25 aa, Artificial Sequence
  Cyclic GFR-binding peptide
KVVMRHKRLVKPTRGVYYLISTASL

SEQ ID NO: 87454 - protein, 35 aa, Artificial Sequence; identical to SEQ ID NO: 5385
  Cyclic GFR-binding peptide
  MOD_RES (31)..(32): Xaa is C or S

SEQ ID NO: 87455 - protein, 37 aa, Artificial Sequence
  Cyclic GFR-binding peptide
  MOD_RES (2)..(34)..(35): Xaa is C or S
AXSEVTMNPIKGYVVNKNEDFYLINIPSMKEPVXXPE

SEQ ID NO: 87456 - protein, 39 aa, Artificial Sequence; identical to SEQ ID NO: 76184
  Cyclic GFR-binding peptide
  MOD_RES (1)..(3)..(35)..(36): Xaa is C or S

SEQ ID NO: 87457 - protein, 41 aa, Artificial Sequence; identical to SEQ ID NO: 5386
  Cyclic GFR-binding peptide
  MOD_RES (2)..(4)..(36)..(37): Xaa is C or S

SEQ ID NO: 87458 - protein, 41 aa, Artificial Sequence; identical to SEQ ID NO: 40832
  Cyclic GFR-binding peptide
  MOD_RES (1)..(3)..(36)..(37): Xaa is C or S

SEQ ID NO: 87459 - protein, 26 aa, Artificial Sequence
  Cyclic GFR-binding peptide
MRYKKLVKPKRGVFYLISIANLAQPV

SEQ ID NO: 87460 - protein, 21 aa, Artificial Sequence
  Cyclic GFR-binding peptide
MYHYKLVKPTRGVKYLISIPS

SEQ ID NO: 87461 - protein, 22 aa, Artificial Sequence
  Cyclic GFR-binding peptide
GEPIKGYTPVGMDDFYLVNIPS

SEQ ID NO: 87462 - protein, 32 aa, Artificial Sequence; identical to SEQ ID NO: 33700
  Cyclic GFR-binding peptide
  MOD_RES (30)..(31): Xaa is C or S

SEQ ID NO: 87463 - protein, 22 aa, Artificial Sequence
  Cyclic GFR-binding peptide
MYHYKLIKPTKGIKYLISIPSL

SEQ ID NO: 87464 - protein, 36 aa, Artificial Sequence; identical to SEQ ID NO: 33703
  Cyclic GFR-binding peptide
  MOD_RES (1)..(3)..(34)..(35): Xaa is C or S

SEQ ID NO: 87465 - protein, 31 aa, Artificial Sequence; identical to SEQ ID NO: 40845
  Cyclic GFR-binding peptide
  MOD_RES (30)..(31): Xaa is C or S

SEQ ID NO: 87466 - protein, 27 aa, Artificial Sequence
  Cyclic GFR-binding peptide
RDVVMGYHYKLIIQQKDNKYLMSIPSM

SEQ ID NO: 87467 - protein, 32 aa, Artificial Sequence; identical to SEQ ID NO: 5400
  Cyclic GFR-binding peptide
  MOD_RES (26)..(27): Xaa is C or S

SEQ ID NO: 87468 - protein, 28 aa, Artificial Sequence
  Cyclic GFR-binding peptide
  MOD_RES (27)..(28): Xaa is C or S
GRYKKLYTVVGKDFYLISIANLKTPVXX

SEQ ID NO: 87469 - protein, 38 aa, Artificial Sequence; identical to SEQ ID NO: 15860
  Cyclic GFR-binding peptide
  MOD_RES (2)..(34)..(35): Xaa is C or S

SEQ ID NO: 87470 - protein, 26 aa, Artificial Sequence
  Cyclic GFR-binding peptide
  MOD_RES (26)..(26): Xaa is C or S
YHYKLVKPTRGVKYLISIPSLDQPVX

SEQ ID NO: 87471 - protein, 23 aa, Artificial Sequence
  Cyclic GFR-binding peptide
RHKRLIVNSSDDYYLVSTASLQT

SEQ ID NO: 87472 - protein, 25 aa, Artificial Sequence
  Cyclic GFR-binding peptide
VVMNPIKGYIVNSSDDFYLVNIPSL

SEQ ID NO: 87473 - protein, 26 aa, Artificial Sequence
  Cyclic GFR-binding peptide
ESVAMGRYKKLYTVVGKDFYLISIAN

SEQ ID NO: 87474 - protein, 32 aa, Artificial Sequence; identical to SEQ ID NO: 40856
  Cyclic GFR-binding peptide
  MOD_RES (27)..(28): Xaa is C or S

SEQ ID NO: 87475 - protein, 31 aa, Artificial Sequence; identical to SEQ ID NO: 33711
  Cyclic GFR-binding peptide
  MOD_RES (1)..(1): Xaa is C or S

SEQ ID NO: 87476 - protein, 28 aa, Artificial Sequence
  Cyclic GFR-binding peptide
  MOD_RES (26)..(27): Xaa is C or S
PIKGYTPVGMDDFYLVNIPSLKTPVXXA

SEQ ID NO: 87477 - protein, 24 aa, Artificial Sequence
  Cyclic GFR-binding peptide
EYKFKIVNNSSDLYLVSIPELKTP

SEQ ID NO: 87478 - protein, 23 aa, Artificial Sequence
  Cyclic GFR-binding peptide
RHKRLIKPTKGIYYLISTASLDQ

SEQ ID NO: 87479 - protein, 32 aa, Artificial Sequence; identical to SEQ ID NO: 5405
  Cyclic GFR-binding peptide
  MOD_RES (31)..(32): Xaa is C or S

SEQ ID NO: 87480 - protein, 33 aa, Artificial Sequence; identical to SEQ ID NO: 33715
  Cyclic GFR-binding peptide
  MOD_RES (1)..(32)..(33): Xaa is C or S

SEQ ID NO: 87481 - protein, 32 aa, Artificial Sequence; identical to SEQ ID NO: 5407
  Cyclic GFR-binding peptide
  MOD_RES (27)..(28): Xaa is C or S

SEQ ID NO: 87482 - protein, 35 aa, Artificial Sequence; identical to SEQ ID NO: 5411
  Cyclic GFR-binding peptide
  MOD_RES (30)..(30): Xaa is C or S

SEQ ID NO: 87483 - protein, 32 aa, Artificial Sequence; identical to SEQ ID NO: 5412
  Cyclic GFR-binding peptide
  MOD_RES (1)..(32): Xaa is C or S

SEQ ID NO: 87484 - protein, 38 aa, Artificial Sequence
  Cyclic GFR-binding peptide
  MOD_RES (1)..(3)..(35)..(36): Xaa is C or S
XGXSEVVMDYHYKLVVNNASDKYLISIPSLRTPVXXTP

SEQ ID NO: 87485 - protein, 20 aa, Artificial Sequence
  Cyclic GFR-binding peptide
RHKRLVVKDYEDYYLMSTAS

SEQ ID NO: 87486 - protein, 32 aa, Artificial Sequence; identical to SEQ ID NO: 40861
  Cyclic GFR-binding peptide
  MOD_RES (32)..(32): Xaa is C or S

SEQ ID NO: 87487 - protein, 26 aa, Artificial Sequence
  Cyclic GFR-binding peptide
IMRHKRLVKPKRGVYYLISTASLAQP

SEQ ID NO: 87488 - protein, 35 aa, Artificial Sequence
  Cyclic GFR-binding peptide
  MOD_RES (29)..(30): Xaa is C or S
TMNYHYKLVVNKNEDKYLISIPSMKEPVXXPEPIG

SEQ ID NO: 87489 - protein, 31 aa, Artificial Sequence; identical to SEQ ID NO: 40875
  Cyclic GFR-binding peptide
  MOD_RES (2)..(4): Xaa is C or S

SEQ ID NO: 87490 - protein, 29 aa, Artificial Sequence
  Cyclic GFR-binding peptide
  MOD_RES (29)..(29): Xaa is C or S
VIMRYKKLIKPTKGIFYLISIANLDQSVX

SEQ ID NO: 87491 - protein, 26 aa, Artificial Sequence
  Cyclic GFR-binding peptide
VVMDPIKGYVVNNAADFYLINIPSLR

SEQ ID NO: 87492 - protein, 28 aa, Artificial Sequence
  Cyclic GFR-binding peptide
VVMNPIKGYIVNSSDDFYLVNIPSLQTP

SEQ ID NO: 87493 - protein, 35 aa, Artificial Sequence; identical to SEQ ID NO: 5423
  Cyclic GFR-binding peptide
  MOD_RES (31)..(32): Xaa is C or S

SEQ ID NO: 87494 - protein, 28 aa, Artificial Sequence
  Cyclic GFR-binding peptide
  MOD_RES (2)..(2): Xaa is C or S
GXRDVVMGRHKRLIIQQKDNYYLMSTAS

SEQ ID NO: 87495 - protein, 32 aa, Artificial Sequence; identical to SEQ ID NO: 33733
  Cyclic GFR-binding peptide
  MOD_RES (1)..(3): Xaa is C or S

SEQ ID NO: 87496 - protein, 30 aa, Artificial Sequence; identical to SEQ ID NO: 5424
  Cyclic GFR-binding peptide

SEQ ID NO: 87497 - protein, 30 aa, Artificial Sequence; identical to SEQ ID NO: 5431
  Cyclic GFR-binding peptide
  MOD_RES (29)..(29): Xaa is C or S

SEQ ID NO: 87498 - protein, 34 aa, Artificial Sequence; identical to SEQ ID NO: 33739
  Cyclic GFR-binding peptide
  MOD_RES (29)..(30): Xaa is C or S

SEQ ID NO: 87499 - protein, 27 aa, Artificial Sequence
  Cyclic GFR-binding peptide
IMYHYKLVKPKRGVKYLISIPSLAQPV

SEQ ID NO: 87500 - protein, 28 aa, Artificial Sequence
  Cyclic GFR-binding peptide
GEVVMEEYKFKVVKDYEDLYLMSIPELE

SEQ ID NO: 87501 - protein, 32 aa, Artificial Sequence
  Cyclic GFR-binding peptide
  MOD_RES (30)..(31): Xaa is C or S
EVIMRHKRLLLVRGNDYYLMSTASTKVPAXXT

SEQ ID NO: 87502 - protein, 33 aa, Artificial Sequence
  Cyclic GFR-binding peptide
  MOD_RES (2)..(4): Xaa is C or S
RXAXSEVTMNPIKGYVVNKNEDFYLINIPSMKE

SEQ ID NO: 87503 - protein, 29 aa, Artificial Sequence
  Cyclic GFR-binding peptide
  MOD_RES (28)..(29): Xaa is C or S
MNPIKGYVVNKNEDFYLINIPSMKEPVXX

SEQ ID NO: 87504 - protein, 29 aa, Artificial Sequence
  Cyclic GFR-binding peptide
EVVMDYHYKLVVNNAADKYLISIPSLRAP

SEQ ID NO: 87505 - protein, 29 aa, Artificial Sequence
  Cyclic GFR-binding peptide
  MOD_RES (1)..(3): Xaa is C or S
XGXAEVVMDPIKGYVVNNAADFYLINIPS

SEQ ID NO: 87506 - protein, 24 aa, Artificial Sequence
  Cyclic GFR-binding peptide
VVMDPIKGYVVNNASDFYLINIPS

SEQ ID NO: 87507 - protein, 34 aa, Artificial Sequence; identical to SEQ ID NO: 40895
  Cyclic GFR-binding peptide
  MOD_RES (1)..(33)..(34): Xaa is C or S

SEQ ID NO: 87508 - protein, 33 aa, Artificial Sequence; identical to SEQ ID NO: 40897
  Cyclic GFR-binding peptide
  MOD_RES (27)..(28): Xaa is C or S

SEQ ID NO: 87509 - protein, 31 aa, Artificial Sequence; identical to SEQ ID NO: 33758
  Cyclic GFR-binding peptide
  MOD_RES (29)..(30): Xaa is C or S

SEQ ID NO: 87510 - protein, 37 aa, Artificial Sequence; identical to SEQ ID NO: 5444
  Cyclic GFR-binding peptide
  MOD_RES (1)..(33)..(34): Xaa is C or S

SEQ ID NO: 87511 - protein, 25 aa, Artificial Sequence
  Cyclic GFR-binding peptide
VMYHYKLVKPTRGVKYLISIPSLDQ

SEQ ID NO: 87512 - protein, 36 aa, Artificial Sequence; identical to SEQ ID NO: 33761
  Cyclic GFR-binding peptide
  MOD_RES (2)..(33)..(34): Xaa is C or S

SEQ ID NO: 87513 - protein, 24 aa, Artificial Sequence
  Cyclic GFR-binding peptide
IMRHKRLVKPKRGVYYLISTASLA

SEQ ID NO: 87514 - protein, 37 aa, Artificial Sequence; identical to SEQ ID NO: 33762
  Cyclic GFR-binding peptide
  MOD_RES (1)..(33)..(34): Xaa is C or S

SEQ ID NO: 87515 - protein, 29 aa, Artificial Sequence
  Cyclic GFR-binding peptide
VSMGEPIKGYTPVGMDDFYLVNIPSLKTP

SEQ ID NO: 87516 - protein, 40 aa, Artificial Sequence; identical to SEQ ID NO: 5449
  Cyclic GFR-binding peptide
  MOD_RES (1)..(3)..(35)..(36): Xaa is C or S

SEQ ID NO: 87517 - protein, 27 aa, Artificial Sequence
  Cyclic GFR-binding peptide
MGERYKKLTPVGMDDFYLVSIANLKTP

SEQ ID NO: 87518 - protein, 33 aa, Artificial Sequence; identical to SEQ ID NO: 5453
  Cyclic GFR-binding peptide
  MOD_RES (28)..(29): Xaa is C or S

SEQ ID NO: 87519 - protein, 23 aa, Artificial Sequence
  Cyclic GFR-binding peptide
MRHKRLIKPTKGIYYLISTASLD

SEQ ID NO: 87520 - protein, 37 aa, Artificial Sequence; identical to SEQ ID NO: 40907
  Cyclic GFR-binding peptide
  MOD_RES (2)..(4)..(36)..(37): Xaa is C or S

SEQ ID NO: 87521 - protein, 26 aa, Artificial Sequence
  Cyclic GFR-binding peptide
SKVIMRYKKLIKPTKGIFYLISIANL

SEQ ID NO: 87522 - protein, 32 aa, Artificial Sequence
  Cyclic GFR-binding peptide
  MOD_RES (31)..(32): Xaa is C or S
SKVIMPIKGYIKPTKGIFYLINIPSLDQSVXX

SEQ ID NO: 87523 - protein, 31 aa, Artificial Sequence; identical to SEQ ID NO: 40913
  Cyclic GFR-binding peptide
  MOD_RES (28)..(29): Xaa is C or S

SEQ ID NO: 87524 - protein, 29 aa, Artificial Sequence
  Cyclic GFR-binding peptide
  MOD_RES (28)..(29): Xaa is C or S
IMRHKRLIKPTKGIYYLISTASLDQSVXX

SEQ ID NO: 87525 - protein, 38 aa, Artificial Sequence; identical to SEQ ID NO: 40922
  Cyclic GFR-binding peptide
  MOD_RES (32)..(32): Xaa is C or S

SEQ ID NO: 87526 - protein, 34 aa, Artificial Sequence; identical to SEQ ID NO: 40925
  Cyclic GFR-binding peptide
  MOD_RES (1)..(3): Xaa is C or S

SEQ ID NO: 87527 - protein, 27 aa, Artificial Sequence
  Cyclic GFR-binding peptide
DVVMGEYKFKIIQQKDNLYLMSIPEMK

SEQ ID NO: 87528 - protein, 28 aa, Artificial Sequence
  Cyclic GFR-binding peptide
  MOD_RES (2)..(2): Xaa is C or S
KXSRVIMPIKGYVKPKRGVFYLINIPSL

SEQ ID NO: 87529 - protein, 36 aa, Artificial Sequence; identical to SEQ ID NO: 5463
  Cyclic GFR-binding peptide
  MOD_RES (30)..(30): Xaa is C or S

SEQ ID NO: 87530 - protein, 28 aa, Artificial Sequence
  Cyclic GFR-binding peptide
  MOD_RES (28)..(28): Xaa is C or S
IMRHKRLIKPTKGIYYLISTASLDQSVX

SEQ ID NO: 87531 - protein, 31 aa, Artificial Sequence; identical to SEQ ID NO: 5465
  Cyclic GFR-binding peptide
  MOD_RES (29)..(30): Xaa is C or S

SEQ ID NO: 87532 - protein, 34 aa, Artificial Sequence
  Cyclic GFR-binding peptide
  MOD_RES (31)..(32): Xaa is C or S
SKVIMPIKGYIKPTKGIFYLINIPSLDQSVXXPS

SEQ ID NO: 87533 - protein, 33 aa, Artificial Sequence; identical to SEQ ID NO: 5466
  Cyclic GFR-binding peptide
  MOD_RES (30)..(31): Xaa is C or S

SEQ ID NO: 87534 - protein, 29 aa, Artificial Sequence
  Cyclic GFR-binding peptide
  MOD_RES (2)..(2): Xaa is C or S
GXEAVSMGEEYKFKTPVGMDDLYLVSIPE

SEQ ID NO: 87535 - protein, 32 aa, Artificial Sequence
  Cyclic GFR-binding peptide
  MOD_RES (1)..(1): Xaa is C or S
XESVAMGRHKRLYTVVGKDYYLISTASLKTPV

SEQ ID NO: 87536 - protein, 30 aa, Artificial Sequence
  Cyclic GFR-binding peptide
  MOD_RES (27)..(28): Xaa is C or S
DRHKRLVVNNAADYYLISTASLRAPVXXSA

SEQ ID NO: 87537 - protein, 30 aa, Artificial Sequence
  Cyclic GFR-binding peptide
DVVMGYHYKLIIQQKDNKYLMSIPSMKTPT

SEQ ID NO: 87538 - protein, 32 aa, Artificial Sequence; identical to SEQ ID NO: 5470
  Cyclic GFR-binding peptide
  MOD_RES (1)..(3): Xaa is C or S

SEQ ID NO: 87539 - protein, 22 aa, Artificial Sequence
  Cyclic GFR-binding peptide
PIKGYIKPTKGIFYLINIPSLD

SEQ ID NO: 87540 - protein, 32 aa, Artificial Sequence; identical to SEQ ID NO: 33784
  Cyclic GFR-binding peptide
  MOD_RES (29)..(30): Xaa is C or S

SEQ ID NO: 87541 - protein, 34 aa, Artificial Sequence; identical to SEQ ID NO: 5472
  Cyclic GFR-binding peptide
  MOD_RES (1)..(32)..(33): Xaa is C or S

SEQ ID NO: 87542 - protein, 32 aa, Artificial Sequence; identical to SEQ ID NO: 5473
  Cyclic GFR-binding peptide
  MOD_RES (26)..(27): Xaa is C or S

SEQ ID NO: 87543 - protein, 25 aa, Artificial Sequence
  Cyclic GFR-binding peptide
IMEYKFKVKPKRGVLYLISIPELAQ

SEQ ID NO: 87544 - protein, 28 aa, Artificial Sequence
  Cyclic GFR-binding peptide
  MOD_RES (27)..(28): Xaa is C or S
NRYKKLIVNSSDDFYLVSIANLQTPAXX

SEQ ID NO: 87545 - protein, 34 aa, Artificial Sequence; identical to SEQ ID NO: 40951
  Cyclic GFR-binding peptide
  MOD_RES (2)..(4): Xaa is C or S

SEQ ID NO: 87546 - protein, 35 aa, Artificial Sequence
  Cyclic GFR-binding peptide
  MOD_RES (32)..(33): Xaa is C or S
SEVVMDEYKFKVVNNASDLYLISIPELRTPVXXTP

SEQ ID NO: 87547 - protein, 28 aa, Artificial Sequence
  Cyclic GFR-binding peptide
  MOD_RES (26)..(26): Xaa is C or S
EYKFKIVNSSDDLYLVSIPELKTPAXTP

SEQ ID NO: 87548 - protein, 33 aa, Artificial Sequence; identical to SEQ ID NO: 5483
  Cyclic GFR-binding peptide
  MOD_RES (1)..(33): Xaa is C or S

SEQ ID NO: 87549 - protein, 32 aa, Artificial Sequence; identical to SEQ ID NO: 5484
  Cyclic GFR-binding peptide
  MOD_RES (27)..(28): Xaa is C or S

SEQ ID NO: 87550 - protein, 34 aa, Artificial Sequence; identical to SEQ ID NO: 76240
  Cyclic GFR-binding peptide
  MOD_RES (2)..(34): Xaa is C or S

SEQ ID NO: 87551 - protein, 27 aa, Artificial Sequence
  Cyclic GFR-binding peptide
  MOD_RES (27)..(27): Xaa is C or S
MYHYKLIKPTKGIKYLISIPSLDQSVX

SEQ ID NO: 87552 - protein, 22 aa, Artificial Sequence
  Cyclic GFR-binding peptide
IMPIKGYLLVRGNDFYLMNIPS

SEQ ID NO: 87553 - protein, 22 aa, Artificial Sequence
  Cyclic GFR-binding peptide
RHKRLVVNNASDYYLISTASLR

SEQ ID NO: 87554 - protein, 27 aa, Artificial Sequence
  Cyclic GFR-binding peptide
  MOD_RES (26)..(27): Xaa is C or S
RHKRLIVNSSDDYYLVSTASLKTPAXX

SEQ ID NO: 87555 - protein, 33 aa, Artificial Sequence
  Cyclic GFR-binding peptide
  MOD_RES (2)..(2): Xaa is C or S
GXRDVVMGEYKFKIIQQKDNLYLMSIPEMKTPT

SEQ ID NO: 87556 - protein, 29 aa, Artificial Sequence
  Cyclic GFR-binding peptide
  MOD_RES (29)..(29): Xaa is C or S
VIMYHYKLVKPKRGVKYLISIPSLAQPVX

SEQ ID NO: 87557 - protein, 26 aa, Artificial Sequence
  Cyclic GFR-binding peptide
MDPIKGYVVNNAADFYLINIPSLRAP

SEQ ID NO: 87558 - protein, 21 aa, Artificial Sequence
  Cyclic GFR-binding peptide
MRYKKLLLVRGNDFYLMSIAN

SEQ ID NO: 87559 - protein, 34 aa, Artificial Sequence; identical to SEQ ID NO: 33806
  Cyclic GFR-binding peptide
  MOD_RES (30)..(31): Xaa is C or S

SEQ ID NO: 87560 - protein, 26 aa, Artificial Sequence
  Cyclic GFR-binding peptide
VMNRYKKLIVNSSDDFYLVSIANLQT

SEQ ID NO: 87561 - protein, 42 aa, Artificial Sequence; identical to SEQ ID NO: 33807
  Cyclic GFR-binding peptide
  MOD_RES (2)..(4)..(36): Xaa is C or S

SEQ ID NO: 87562 - protein, 34 aa, Artificial Sequence
  Cyclic GFR-binding peptide
  MOD_RES (30)..(31): Xaa is C or S
KVIMPIKGYIKPTKGIFYLINIPSLDQSVXXPSA

SEQ ID NO: 87563 - protein, 31 aa, Artificial Sequence; identical to SEQ ID NO: 5492
  Cyclic GFR-binding peptide
  MOD_RES (1)..(3): Xaa is C or S

SEQ ID NO: 87564 - protein, 27 aa, Artificial Sequence
  Cyclic GFR-binding peptide
  MOD_RES (1)..(1): Xaa is C or S
XSRVIMPIKGYVKPKRGVFYLINIPSL

SEQ ID NO: 87565 - protein, 32 aa, Artificial Sequence; identical to SEQ ID NO: 5494
  Cyclic GFR-binding peptide
  MOD_RES (29)..(30): Xaa is C or S

SEQ ID NO: 87566 - protein, 34 aa, Artificial Sequence; identical to SEQ ID NO: 15945
  Cyclic GFR-binding peptide
  MOD_RES (2)..(34): Xaa is C or S

SEQ ID NO: 87567 - protein, 31 aa, Artificial Sequence; identical to SEQ ID NO: 33813
  Cyclic GFR-binding peptide
  MOD_RES (1)..(1): Xaa is C or S

SEQ ID NO: 87568 - protein, 40 aa, Artificial Sequence; identical to SEQ ID NO: 5498
  Cyclic GFR-binding peptide
  MOD_RES (2)..(4)..(36)..(37): Xaa is C or S

SEQ ID NO: 87569 - protein, 35 aa, Artificial Sequence; identical to SEQ ID NO: 5499
  Cyclic GFR-binding peptide
  MOD_RES (29)..(30): Xaa is C or S

SEQ ID NO: 87570 - protein, 28 aa, Artificial Sequence
  Cyclic GFR-binding peptide
RDVVMGRYKKLIIQQKDNFYLMSIANMK

SEQ ID NO: 87571 - protein, 39 aa, Artificial Sequence; identical to SEQ ID NO: 5500
  Cyclic GFR-binding peptide
  MOD_RES (2)..(4)..(36)..(37): Xaa is C or S

SEQ ID NO: 87572 - protein, 31 aa, Artificial Sequence; identical to SEQ ID NO: 33816
  Cyclic GFR-binding peptide
  MOD_RES (1)..(1): Xaa is C or S

SEQ ID NO: 87573 - protein, 33 aa, Artificial Sequence; identical to SEQ ID NO: 76249
  Cyclic GFR-binding peptide
  MOD_RES (30)..(31): Xaa is C or S

SEQ ID NO: 87574 - protein, 30 aa, Artificial Sequence; identical to SEQ ID NO: 33824
  Cyclic GFR-binding peptide

SEQ ID NO: 87575 - protein, 32 aa, Artificial Sequence; identical to SEQ ID NO: 33825
  Cyclic GFR-binding peptide
  MOD_RES (2)..(2): Xaa is C or S

SEQ ID NO: 87576 - protein, 30 aa, Artificial Sequence; identical to SEQ ID NO: 33830
  Cyclic GFR-binding peptide
  MOD_RES (29)..(30): Xaa is C or S

SEQ ID NO: 87577 - protein, 39 aa, Artificial Sequence; identical to SEQ ID NO: 33831
  Cyclic GFR-binding peptide
  MOD_RES (2)..(4)..(35)..(36): Xaa is C or S

SEQ ID NO: 87578 - protein, 33 aa, Artificial Sequence
  Cyclic GFR-binding peptide
  MOD_RES (2)..(4): Xaa is C or S
SXKXSRVIMPIKGYVKPKRGVFYLINIPSLAQP

SEQ ID NO: 87579 - protein, 29 aa, Artificial Sequence
  Cyclic GFR-binding peptide
  MOD_RES (2)..(2): Xaa is C or S
GXSRVVMNPIKGYIVNSSDDFYLVNIPSL

SEQ ID NO: 87580 - protein, 38 aa, Artificial Sequence; identical to SEQ ID NO: 33834
  Cyclic GFR-binding peptide
  MOD_RES (33)..(34): Xaa is C or S

SEQ ID NO: 87581 - protein, 27 aa, Artificial Sequence
  Cyclic GFR-binding peptide
AVSMGERHKRLTPVGMDDYYLVSTASL

SEQ ID NO: 87582 - protein, 26 aa, Artificial Sequence
  Cyclic GFR-binding peptide
  MOD_RES (1)..(1): Xaa is C or S
XSRVIMEYKFKVKPKRGVLYLISIPE

SEQ ID NO: 87583 - protein, 36 aa, Artificial Sequence; identical to SEQ ID NO: 5521
  Cyclic GFR-binding peptide
  MOD_RES (2)..(4)..(36): Xaa is C or S

SEQ ID NO: 87584 - protein, 31 aa, Artificial Sequence; identical to SEQ ID NO: 5522
  Cyclic GFR-binding peptide
  MOD_RES (1)..(3): Xaa is C or S

SEQ ID NO: 87585 - protein, 36 aa, Artificial Sequence; identical to SEQ ID NO: 5523
  Cyclic GFR-binding peptide
  MOD_RES (31)..(31): Xaa is C or S

SEQ ID NO: 87586 - protein, 32 aa, Artificial Sequence; identical to SEQ ID NO: 33842
  Cyclic GFR-binding peptide
  MOD_RES (2)..(2): Xaa is C or S

SEQ ID NO: 87587 - protein, 29 aa, Artificial Sequence
  Cyclic GFR-binding peptide
  MOD_RES (2)..(4): Xaa is C or S
SXKXSKVIMEYKFKIKPTKGILYLISIPE

SEQ ID NO: 87588 - protein, 30 aa, Artificial Sequence; identical to SEQ ID NO: 5528
  Cyclic GFR-binding peptide
  MOD_RES (2)..(2): Xaa is C or S

SEQ ID NO: 87589 - protein, 27 aa, Artificial Sequence
  Cyclic GFR-binding peptide
  MOD_RES (26)..(27): Xaa is C or S
PIKGYVVNNASDFYLINIPSLRTPVXX

SEQ ID NO: 87590 - protein, 23 aa, Artificial Sequence
  Cyclic GFR-binding peptide
RHKRLVVNKNEDYYLISTASMKE

SEQ ID NO: 87591 - protein, 32 aa, Artificial Sequence
  Cyclic GFR-binding peptide
  MOD_RES (2)..(4): Xaa is C or S
SXKXSKVIMPIKGYIKPTKGIFYLINIPSLDQ

SEQ ID NO: 87592 - protein, 27 aa, Artificial Sequence
  Cyclic GFR-binding peptide
  MOD_RES (26)..(27): Xaa is C or S
RHKRLIKPTKGIYYLISTASLDQSVXX

SEQ ID NO: 87593 - protein, 28 aa, Artificial Sequence
  Cyclic GFR-binding peptide
  MOD_RES (26)..(27): Xaa is C or S
YHYKLLLVRGNDKYLMSIPSTKVPAXXT

SEQ ID NO: 87594 - protein, 28 aa, Artificial Sequence
  Cyclic GFR-binding peptide
EVVMEPIKGYVVKDYEDFYLMNIPSLET

SEQ ID NO: 87595 - protein, 24 aa, Artificial Sequence
  Cyclic GFR-binding peptide
MYHYKLVKPKRGVKYLISIPSLAQ

SEQ ID NO: 87596 - protein, 41 aa, Artificial Sequence
  Cyclic GFR-binding peptide
  MOD_RES (2)..(4)..(36)..(37): Xaa is C or S
SXGXRDVVMGEYKFKIIQQKDNLYLMSIPEMKTPTXXPGAS

SEQ ID NO: 87597 - protein, 21 aa, Artificial Sequence
  Cyclic GFR-binding peptide
EEYKFKVVKDYEDLYLMSIPE

SEQ ID NO: 87598 - protein, 33 aa, Artificial Sequence; identical to SEQ ID NO: 5536
  Cyclic GFR-binding peptide
  MOD_RES (30)..(31): Xaa is C or S

SEQ ID NO: 87599 - protein, 26 aa, Artificial Sequence
  Cyclic GFR-binding peptide
MNYHYKLIVNSSDDKYLVSIPSLQTP

SEQ ID NO: 87600 - protein, 30 aa, Artificial Sequence; identical to SEQ ID NO: 5538
  Cyclic GFR-binding peptide
  MOD_RES (27)..(28): Xaa is C or S

SEQ ID NO: 87601 - protein, 30 aa, Artificial Sequence; identical to SEQ ID NO: 41002
  Cyclic GFR-binding peptide
  MOD_RES (2)..(4): Xaa is C or S

SEQ ID NO: 87602 - protein, 36 aa, Artificial Sequence; identical to SEQ ID NO: 33862
  Cyclic GFR-binding peptide
  MOD_RES (1)..(32)..(33): Xaa is C or S

SEQ ID NO: 87603 - protein, 37 aa, Artificial Sequence; identical to SEQ ID NO: 41003
  Cyclic GFR-binding peptide
  MOD_RES (1)..(3)..(35)..(36): Xaa is C or S

SEQ ID NO: 87604 - protein, 35 aa, Artificial Sequence
  Cyclic GFR-binding peptide
  MOD_RES (2)..(33)..(34): Xaa is C or S
KXSKVVMPIKGYVKPTRGVFYLINIPSLDQPVXXP

SEQ ID NO: 87605 - protein, 33 aa, Artificial Sequence
  Cyclic GFR-binding peptide
  MOD_RES (2)..(2): Xaa is C or S
GXRDVVMGRHKRLIIQQKDNYYLMSTASMKTPT

SEQ ID NO: 87606 - protein, 29 aa, Artificial Sequence
  Cyclic GFR-binding peptide
  MOD_RES (26)..(26): Xaa is C or S
RYKKLIVNSSDDFYLVSIANLKTPAXTPK

SEQ ID NO: 87607 - protein, 28 aa, Artificial Sequence
  Cyclic GFR-binding peptide
  MOD_RES (1)..(1): Xaa is C or S
XSEVTMNYHYKLVVNKNEDKYLISIPSM

SEQ ID NO: 87608 - protein, 23 aa, Artificial Sequence
  Cyclic GFR-binding peptide
PIKGYIVNSSDDFYLVNIPSLQT

SEQ ID NO: 87609 - protein, 25 aa, Artificial Sequence
  Cyclic GFR-binding peptide
MNPIKGYIVNSSDDFYLVNIPSLKT

SEQ ID NO: 87610 - protein, 30 aa, Artificial Sequence; identical to SEQ ID NO: 33866
  Cyclic GFR-binding peptide
  MOD_RES (30)..(30): Xaa is C or S

SEQ ID NO: 87611 - protein, 34 aa, Artificial Sequence
  Cyclic GFR-binding peptide
  MOD_RES (28)..(29): Xaa is C or S
MGEYKFKIIQQKDNLYLMSIPEMKTPTXXPGASG

SEQ ID NO: 87612 - protein, 38 aa, Artificial Sequence; identical to SEQ ID NO: 33871
  Cyclic GFR-binding peptide
  MOD_RES (1)..(32)..(33): Xaa is C or S

SEQ ID NO: 87613 - protein, 30 aa, Artificial Sequence; identical to SEQ ID NO: 5550
  Cyclic GFR-binding peptide
  MOD_RES (1)..(3): Xaa is C or S

SEQ ID NO: 87614 - protein, 36 aa, Artificial Sequence; identical to SEQ ID NO: 33875
  Cyclic GFR-binding peptide
  MOD_RES (2)..(4)..(36): Xaa is C or S

SEQ ID NO: 87615 - protein, 21 aa, Artificial Sequence
  Cyclic GFR-binding peptide
MRHKRLVKPKRGVYYLISTAS

SEQ ID NO: 87616 - protein, 34 aa, Artificial Sequence; identical to SEQ ID NO: 33879
  Cyclic GFR-binding peptide
  MOD_RES (32)..(33): Xaa is C or S

SEQ ID NO: 87617 - protein, 22 aa, Artificial Sequence
  Cyclic GFR-binding peptide
RHKRLIKPTKGIYYLISTASLD

SEQ ID NO: 87618 - protein, 24 aa, Artificial Sequence
  Cyclic GFR-binding peptide
DRHKRLVVNNAADYYLISTASLRA

SEQ ID NO: 87619 - protein, 28 aa, Artificial Sequence
  Cyclic GFR-binding peptide
KVVMNEYKFKIVNNSSDLYLVSIPELKT

SEQ ID NO: 87620 - protein, 40 aa, Artificial Sequence
  Cyclic GFR-binding peptide
  MOD_RES (2)..(4)..(36)..(37): Xaa is C or S
RXGXSEVVMDYHYKLVVNNASDKYLISIPSLRTPVXXTPP

SEQ ID NO: 87621 - protein, 33 aa, Artificial Sequence; identical to SEQ ID NO: 5557
  Cyclic GFR-binding peptide
  MOD_RES (27)..(28): Xaa is C or S

SEQ ID NO: 87622 - protein, 29 aa, Artificial Sequence
  Cyclic GFR-binding peptide
VVMNRYKKLIVNSSDDFYLVSIANLQTPA

SEQ ID NO: 87623 - protein, 37 aa, Artificial Sequence
  Cyclic GFR-binding peptide
  MOD_RES (31)..(32): Xaa is C or S
RVVMNRHKRLIVNSSDDYYLVSTASLKTPAXXPKPVH

SEQ ID NO: 87624 - protein, 27 aa, Artificial Sequence
  Cyclic GFR-binding peptide
VSMGERHKRLTPVGMDDYYLVSTASLK

SEQ ID NO: 87625 - protein, 37 aa, Artificial Sequence; identical to SEQ ID NO: 76281
  Cyclic GFR-binding peptide
  MOD_RES (31)..(32): Xaa is C or S

SEQ ID NO: 87626 - protein, 34 aa, Artificial Sequence
  Cyclic GFR-binding peptide
  MOD_RES (2)..(4): Xaa is C or S
RXGXAEVVMDRHKRLVVNNAADYYLISTASLRAP

SEQ ID NO: 87627 - protein, 29 aa, Artificial Sequence
  Cyclic GFR-binding peptide
KVIMEYKFKIKPTKGILYLISIPELDQSV

SEQ ID NO: 87628 - protein, 33 aa, Artificial Sequence; identical to SEQ ID NO: 5562
  Cyclic GFR-binding peptide
  MOD_RES (30)..(31): Xaa is C or S

SEQ ID NO: 87629 - protein, 21 aa, Artificial Sequence
  Cyclic GFR-binding peptide
RYKKLYTVVGKDFYLISIANL

SEQ ID NO: 87630 - protein, 30 aa, Artificial Sequence
  Cyclic GFR-binding peptide
  MOD_RES (1)..(1): Xaa is C or S
XRDVVMGEYKFKIIQQKDNLYLMSIPEMKT

SEQ ID NO: 87631 - protein, 30 aa, Artificial Sequence; identical to SEQ ID NO: 33890
  Cyclic GFR-binding peptide
  MOD_RES (2)..(4): Xaa is C or S

SEQ ID NO: 87632 - protein, 28 aa, Artificial Sequence
  Cyclic GFR-binding peptide
VVMNRYKKLIVNSSDDFYLVSIANLKTP

SEQ ID NO: 87633 - protein, 27 aa, Artificial Sequence
  Cyclic GFR-binding peptide
MEPIKGYVVKDYEDFYLMNIPSLETPV

SEQ ID NO: 87634 - protein, 34 aa, Artificial Sequence
  Cyclic GFR-binding peptide
  MOD_RES (30)..(31): Xaa is C or S
VAMGRHKRLYTVVGKDYYLISTASLKTPVXXAKS

SEQ ID NO: 87635 - protein, 32 aa, Artificial Sequence; identical to SEQ ID NO: 5569
  Cyclic GFR-binding peptide
  MOD_RES (28)..(29): Xaa is C or S

SEQ ID NO: 87636 - protein, 28 aa, Artificial Sequence
  Cyclic GFR-binding peptide
  MOD_RES (26)..(27): Xaa is C or S
RYKKLIIQQKDNFYLMSIANMKTPTXXP

SEQ ID NO: 87637 - protein, 31 aa, Artificial Sequence
  Cyclic GFR-binding peptide
  MOD_RES (27)..(28): Xaa is C or S
GRHKRLYTVVGKDYYLISTASLKTPVXXAKS

SEQ ID NO: 87638 - protein, 27 aa, Artificial Sequence
  Cyclic GFR-binding peptide
EVVMDRHKRLVVKENEDYYLMSTASLE

SEQ ID NO: 87639 - protein, 39 aa, Artificial Sequence
  Cyclic GFR-binding peptide
  MOD_RES (2)..(4)..(35)..(36): Xaa is C or S
LXGXEEVIMYHYKLLLVRGNDKYLMSIPSTKVPAXXTSP

SEQ ID NO: 87640 - protein, 27 aa, Artificial Sequence
  Cyclic GFR-binding peptide
  MOD_RES (27)..(27): Xaa is C or S
GEYKFKIIQQKDNLYLMSIPEMKTPTX

SEQ ID NO: 87641 - protein, 40 aa, Artificial Sequence; identical to SEQ ID NO: 41049
  Cyclic GFR-binding peptide
  MOD_RES (1)..(3)..(35): Xaa is C or S

SEQ ID NO: 87642 - protein, 30 aa, Artificial Sequence; identical to SEQ ID NO: 41050
  Cyclic GFR-binding peptide
  MOD_RES (2)..(4): Xaa is C or S

SEQ ID NO: 87643 - protein, 29 aa, Artificial Sequence
  Cyclic GFR-binding peptide
  MOD_RES (27)..(28): Xaa is C or S
NRYKKLIVNSSDDFYLVSIANLKTPAXXP

SEQ ID NO: 87644 - protein, 28 aa, Artificial Sequence
  Cyclic GFR-binding peptide
VTMNRHKRLVVNKNEDYYLISTASMKEP

SEQ ID NO: 87645 - protein, 25 aa, Artificial Sequence
  Cyclic GFR-binding peptide
RVVMNRHKRLIVNSSDDYYLVSTAS

SEQ ID NO: 87646 - protein, 35 aa, Artificial Sequence; identical to SEQ ID NO: 33910
  Cyclic GFR-binding peptide
  MOD_RES (1)..(32)..(33): Xaa is C or S

SEQ ID NO: 87647 - protein, 32 aa, Artificial Sequence; identical to SEQ ID NO: 5584
  Cyclic GFR-binding peptide
  MOD_RES (29)..(30): Xaa is C or S

SEQ ID NO: 87648 - protein, 27 aa, Artificial Sequence
  Cyclic GFR-binding peptide
TMNRHKRLVVNKNEDYYLISTASMKEP

SEQ ID NO: 87649 - protein, 31 aa, Artificial Sequence
  Cyclic GFR-binding peptide
  MOD_RES (30)..(31): Xaa is C or S
EVIMEYKFKLLVRGNDLYLMSIPETKVPAXX

SEQ ID NO: 87650 - protein, 31 aa, Artificial Sequence; identical to SEQ ID NO: 41060
  Cyclic GFR-binding peptide
  MOD_RES (1)..(1): Xaa is C or S

SEQ ID NO: 87651 - protein, 28 aa, Artificial Sequence
  Cyclic GFR-binding peptide
  MOD_RES (26)..(27): Xaa is C or S
RHKRLVVNKNEDYYLISTASMKEPVXXP

SEQ ID NO: 87652 - protein, 28 aa, Artificial Sequence
  Cyclic GFR-binding peptide
  MOD_RES (26)..(27): Xaa is C or S
RHKRLTPVGMDDYYLVSTASLKTPVXXA

SEQ ID NO: 87653 - protein, 40 aa, Artificial Sequence; identical to SEQ ID NO: 33917
  Cyclic GFR-binding peptide
  MOD_RES (1)..(3)..(35)..(36): Xaa is C or S

SEQ ID NO: 87654 - protein, 34 aa, Artificial Sequence
  Cyclic GFR-binding peptide
  MOD_RES (2)..(4): Xaa is C or S
LXGXEEVIMEYKFKLLVRGNDLYLMSIPETKVPA

SEQ ID NO: 87655 - protein, 29 aa, Artificial Sequence
  Cyclic GFR-binding peptide
RDVVMGRYKKLIIQQKDNFYLMSIANMKT

SEQ ID NO: 87656 - protein, 29 aa, Artificial Sequence
  Cyclic GFR-binding peptide
VVMDRYKKLVVNNAADFYLISIANLRAPV

SEQ ID NO: 87657 - protein, 26 aa, Artificial Sequence
  Cyclic GFR-binding peptide
VMDEYKFKVVKENEDLYLMSIPELET

SEQ ID NO: 87658 - protein, 28 aa, Artificial Sequence
  Cyclic GFR-binding peptide
VVMGYHYKLIIQQKDNKYLMSIPSMKTP

SEQ ID NO: 87659 - protein, 24 aa, Artificial Sequence
  Cyclic GFR-binding peptide
DEYKFKVVKENEDLYLMSIPELET

SEQ ID NO: 87660 - protein, 39 aa, Artificial Sequence; identical to SEQ ID NO: 33923
  Cyclic GFR-binding peptide
  MOD_RES (2)..(4)..(36)..(37): Xaa is C or S

SEQ ID NO: 87661 - protein, 29 aa, Artificial Sequence
  Cyclic GFR-binding peptide
  MOD_RES (29)..(29): Xaa is C or S
MGERYKKLTPVGMDDFYLVSIANLKTPVX

SEQ ID NO: 87662 - protein, 29 aa, Artificial Sequence
  Cyclic GFR-binding peptide
  MOD_RES (2)..(2): Xaa is C or S
GXGEVVMDYHYKLVVKENEDKYLMSIPSL

SEQ ID NO: 87663 - protein, 36 aa, Artificial Sequence; identical to SEQ ID NO: 41070
  Cyclic GFR-binding peptide
  MOD_RES (30)..(31): Xaa is C or S

SEQ ID NO: 87664 - protein, 30 aa, Artificial Sequence; identical to SEQ ID NO: 5596
  Cyclic GFR-binding peptide
  MOD_RES (2)..(2): Xaa is C or S

SEQ ID NO: 87665 - protein, 28 aa, Artificial Sequence
  Cyclic GFR-binding peptide
  MOD_RES (28)..(28): Xaa is C or S
VMRHKRLVKPTRGVYYLISTASLDQPVX

SEQ ID NO: 87666 - protein, 33 aa, Artificial Sequence; identical to SEQ ID NO: 33928
  Cyclic GFR-binding peptide
  MOD_RES (27)..(28): Xaa is C or S

SEQ ID NO: 87667 - protein, 33 aa, Artificial Sequence; identical to SEQ ID NO: 41073
  Cyclic GFR-binding peptide
  MOD_RES (30)..(31): Xaa is C or S

SEQ ID NO: 87668 - protein, 36 aa, Artificial Sequence; identical to SEQ ID NO: 33930
  Cyclic GFR-binding peptide
  MOD_RES (1)..(33)..(34): Xaa is C or S

SEQ ID NO: 87669 - protein, 29 aa, Artificial Sequence
  Cyclic GFR-binding peptide
  MOD_RES (29)..(29): Xaa is C or S
VMNPIKGYIVNSSDDFYLVNIPSLQTPAX

SEQ ID NO: 87670 - protein, 37 aa, Artificial Sequence; identical to SEQ ID NO: 33936
  Cyclic GFR-binding peptide
  MOD_RES (1)..(3)..(35)..(36): Xaa is C or S

SEQ ID NO: 87671 - protein, 27 aa, Artificial Sequence
  Cyclic GFR-binding peptide
  MOD_RES (27)..(27): Xaa is C or S
MRYKKLVKPTRGVFYLISIANLDQPVX

SEQ ID NO: 87672 - protein, 38 aa, Artificial Sequence; identical to SEQ ID NO: 33938
  Cyclic GFR-binding peptide
  MOD_RES (1)..(3)..(35)..(36): Xaa is C or S

SEQ ID NO: 87673 - protein, 35 aa, Artificial Sequence
  Cyclic GFR-binding peptide
  MOD_RES (29)..(30): Xaa is C or S
VVMPIKGYVKPTRGVFYLINIPSLDQPVXXPSASA

SEQ ID NO: 87674 - protein, 34 aa, Artificial Sequence; identical to SEQ ID NO: 5606
  Cyclic GFR-binding peptide
  MOD_RES (28)..(29): Xaa is C or S

SEQ ID NO: 87675 - protein, 20 aa, Artificial Sequence
  Cyclic GFR-binding peptide
RHKRLVVNNAADYYLISTAS

SEQ ID NO: 87676 - protein, 24 aa, Artificial Sequence
  Cyclic GFR-binding peptide
MDYHYKLVVNNASDKYLISIPSLR

SEQ ID NO: 87677 - protein, 31 aa, Artificial Sequence; identical to SEQ ID NO: 41084
  Cyclic GFR-binding peptide
  MOD_RES (28)..(29): Xaa is C or S

SEQ ID NO: 87678 - protein, 30 aa, Artificial Sequence
  Cyclic GFR-binding peptide
  MOD_RES (2)..(4): Xaa is C or S
SXGXRDVVMGRHKRLIIQQKDNYYLMSTAS

SEQ ID NO: 87679 - protein, 35 aa, Artificial Sequence
  Cyclic GFR-binding peptide
  MOD_RES (2)..(4)..(35): Xaa is C or S
SXKXSKVVMPIKGYVKPTRGVFYLINIPSLDQPVX

SEQ ID NO: 87680 - protein, 22 aa, Artificial Sequence
  Cyclic GFR-binding peptide
MERHKRLVVKDYEDYYLMSTAS

SEQ ID NO: 87681 - protein, 28 aa, Artificial Sequence
  Cyclic GFR-binding peptide
  MOD_RES (26)..(27): Xaa is C or S
EYKFKVVNNAADLYLISIPELRAPVXXS

SEQ ID NO: 87682 - protein, 37 aa, Artificial Sequence
  Cyclic GFR-binding peptide
  MOD_RES (2)..(4)..(36)..(37): Xaa is C or S
RXGXAEVVMDRHKRLVVNNAADYYLISTASLRAPVXX

SEQ ID NO: 87683 - protein, 38 aa, Artificial Sequence; identical to SEQ ID NO: 5618
  Cyclic GFR-binding peptide
  MOD_RES (1)..(33)..(34): Xaa is C or S

SEQ ID NO: 87684 - protein, 31 aa, Artificial Sequence
  Cyclic GFR-binding peptide
  MOD_RES (1)..(3): Xaa is C or S
XAXSEVTMNRYKKLVVNKNEDFYLISIANMK

SEQ ID NO: 87685 - protein, 28 aa, Artificial Sequence
  Cyclic GFR-binding peptide
  MOD_RES (28)..(28): Xaa is C or S
MNPIKGYVVNKNEDFYLINIPSMKEPVX

SEQ ID NO: 87686 - protein, 36 aa, Artificial Sequence; identical to SEQ ID NO: 33950
  Cyclic GFR-binding peptide
  MOD_RES (30)..(31): Xaa is C or S

SEQ ID NO: 87687 - protein, 26 aa, Artificial Sequence
  Cyclic GFR-binding peptide
SVAMGRHKRLYTVVGKDYYLISTASL

SEQ ID NO: 87688 - protein, 33 aa, Artificial Sequence; identical to SEQ ID NO: 33955
  Cyclic GFR-binding peptide
  MOD_RES (29)..(30): Xaa is C or S

SEQ ID NO: 87689 - protein, 35 aa, Artificial Sequence; identical to SEQ ID NO: 5629
  Cyclic GFR-binding peptide
  MOD_RES (1)..(3)..(35): Xaa is C or S

SEQ ID NO: 87690 - protein, 34 aa, Artificial Sequence
  Cyclic GFR-binding peptide
  MOD_RES (31)..(32): Xaa is C or S
EVVMDYHYKLVVNNASDKYLISIPSLRTPVXXTP

SEQ ID NO: 87691 - protein, 37 aa, Artificial Sequence; identical to SEQ ID NO: 33959
  Cyclic GFR-binding peptide
  MOD_RES (32)..(33): Xaa is C or S

SEQ ID NO: 87692 - protein, 24 aa, Artificial Sequence
  Cyclic GFR-binding peptide
VIMPIKGYIKPTKGIFYLINIPSL

SEQ ID NO: 87693 - protein, 28 aa, Artificial Sequence
  Cyclic GFR-binding peptide
  MOD_RES (1)..(1): Xaa is C or S
XSEVTMNRYKKLVVNKNEDFYLISIANM

SEQ ID NO: 87694 - protein, 26 aa, Artificial Sequence
  Cyclic GFR-binding peptide
  MOD_RES (26)..(26): Xaa is C or S
YHYKLIVNSSDDKYLVSIPSLQTPAX

SEQ ID NO: 87695 - protein, 24 aa, Artificial Sequence
  Cyclic GFR-binding peptide
MGEYKFKIIQQKDNLYLMSIPEMK

SEQ ID NO: 87696 - protein, 27 aa, Artificial Sequence
  Cyclic GFR-binding peptide
  MOD_RES (27)..(27): Xaa is C or S
NYHYKLIVNSSDDKYLVSIPSLQTPAX

SEQ ID NO: 87697 - protein, 27 aa, Artificial Sequence
  Cyclic GFR-binding peptide
VMDRYKKLVVKENEDFYLMSIANLETP

SEQ ID NO: 87698 - protein, 37 aa, Artificial Sequence; identical to SEQ ID NO: 41109
  Cyclic GFR-binding peptide
  MOD_RES (1)..(33): Xaa is C or S

SEQ ID NO: 87699 - protein, 24 aa, Artificial Sequence
  Cyclic GFR-binding peptide
DRYKKLVVNNASDFYLISIANLRT

SEQ ID NO: 87700 - protein, 33 aa, Artificial Sequence; identical to SEQ ID NO: 33971
  Cyclic GFR-binding peptide
  MOD_RES (29)..(30): Xaa is C or S

SEQ ID NO: 87701 - protein, 35 aa, Artificial Sequence; identical to SEQ ID NO: 5644
  Cyclic GFR-binding peptide
  MOD_RES (1)..(32)..(33): Xaa is C or S

SEQ ID NO: 87702 - protein, 35 aa, Artificial Sequence; identical to SEQ ID NO: 5646
  Cyclic GFR-binding peptide
  MOD_RES (2)..(33)..(34): Xaa is C or S

SEQ ID NO: 87703 - protein, 32 aa, Artificial Sequence; identical to SEQ ID NO: 5648
  Cyclic GFR-binding peptide
  MOD_RES (30)..(30): Xaa is C or S

SEQ ID NO: 87704 - protein, 37 aa, Artificial Sequence; identical to SEQ ID NO: 16084
  Cyclic GFR-binding peptide
  MOD_RES (31)..(32): Xaa is C or S

SEQ ID NO: 87705 - protein, 28 aa, Artificial Sequence
  Cyclic GFR-binding peptide
  MOD_RES (2)..(2): Xaa is C or S
GXGEVVMEYHYKLVVKDYEDKYLMSIPS

SEQ ID NO: 87706 - protein, 32 aa, Artificial Sequence; identical to SEQ ID NO: 33979
  Cyclic GFR-binding peptide
  MOD_RES (26)..(27): Xaa is C or S

SEQ ID NO: 87707 - protein, 31 aa, Artificial Sequence; identical to SEQ ID NO: 33980
  Cyclic GFR-binding peptide

SEQ ID NO: 87708 - protein, 28 aa, Artificial Sequence
  Cyclic GFR-binding peptide
SEVTMNEYKFKVVNKNEDLYLISIPEMK

SEQ ID NO: 87709 - protein, 29 aa, Artificial Sequence
  Cyclic GFR-binding peptide
ESVAMGRHKRLYTVVGKDYYLISTASLKT

SEQ ID NO: 87710 - protein, 28 aa, Artificial Sequence
  Cyclic GFR-binding peptide
  MOD_RES (27)..(28): Xaa is C or S
DRHKRLVVNNAADYYLISTASLRAPVXX

SEQ ID NO: 87711 - protein, 24 aa, Artificial Sequence
  Cyclic GFR-binding peptide
PIKGYIVNNSSDFYLVNIPSLKTP

SEQ ID NO: 87712 - protein, 26 aa, Artificial Sequence
  Cyclic GFR-binding peptide
  MOD_RES (1)..(1): Xaa is C or S
XSKVIMYHYKLIKPTKGIKYLISIPS

SEQ ID NO: 87713 - protein, 23 aa, Artificial Sequence
  Cyclic GFR-binding peptide
MNPIKGYVVNKNEDFYLINIPSM

SEQ ID NO: 87714 - protein, 28 aa, Artificial Sequence
  Cyclic GFR-binding peptide
  MOD_RES (26)..(27): Xaa is C or S
RYKKLVVNNAADFYLISIANLRAPVXXS

SEQ ID NO: 87715 - protein, 31 aa, Artificial Sequence; identical to SEQ ID NO: 5657
  Cyclic GFR-binding peptide

SEQ ID NO: 87716 - protein, 28 aa, Artificial Sequence
  Cyclic GFR-binding peptide
VAMGYHYKLYTVVGKDKYLISIPSLKTP

SEQ ID NO: 87717 - protein, 32 aa, Artificial Sequence; identical to SEQ ID NO: 5659
  Cyclic GFR-binding peptide
  MOD_RES (30)..(31): Xaa is C or S

SEQ ID NO: 87718 - protein, 33 aa, Artificial Sequence; identical to SEQ ID NO: 41139
  Cyclic GFR-binding peptide
  MOD_RES (28)..(29): Xaa is C or S

SEQ ID NO: 87719 - protein, 28 aa, Artificial Sequence
  Cyclic GFR-binding peptide
  MOD_RES (26)..(27): Xaa is C or S
YHYKLIIQQKDNKYLMSIPSMKTPTXXP

SEQ ID NO: 87720 - protein, 35 aa, Artificial Sequence; identical to SEQ ID NO: 33989
  Cyclic GFR-binding peptide
  MOD_RES (2)..(4): Xaa is C or S

SEQ ID NO: 87721 - protein, 25 aa, Artificial Sequence
  Cyclic GFR-binding peptide
IMYHYKLIKPTKGIKYLISIPSLDQ

SEQ ID NO: 87722 - protein, 38 aa, Artificial Sequence; identical to SEQ ID NO: 5666
  Cyclic GFR-binding peptide
  MOD_RES (2)..(4)..(35)..(36): Xaa is C or S

SEQ ID NO: 87723 - protein, 34 aa, Artificial Sequence; identical to SEQ ID NO: 33995
  Cyclic GFR-binding peptide
  MOD_RES (2)..(34): Xaa is C or S

SEQ ID NO: 87724 - protein, 27 aa, Artificial Sequence
  Cyclic GFR-binding peptide
  MOD_RES (27)..(27): Xaa is C or S
MPIKGYIKPTKGIFYLINIPSLDQSVX

SEQ ID NO: 87725 - protein, 37 aa, Artificial Sequence; identical to SEQ ID NO: 5669
  Cyclic GFR-binding peptide
  MOD_RES (32)..(33): Xaa is C or S

SEQ ID NO: 87726 - protein, 32 aa, Artificial Sequence; identical to SEQ ID NO: 5670
  Cyclic GFR-binding peptide
  MOD_RES (32)..(32): Xaa is C or S

SEQ ID NO: 87727 - protein, 27 aa, Artificial Sequence
  Cyclic GFR-binding peptide
  MOD_RES (26)..(27): Xaa is C or S
RYKKLIVNSSDDFYLVSIANLKTPAXX

SEQ ID NO: 87728 - protein, 35 aa, Artificial Sequence; identical to SEQ ID NO: 33999
  Cyclic GFR-binding peptide
  MOD_RES (32)..(33): Xaa is C or S

SEQ ID NO: 87729 - protein, 39 aa, Artificial Sequence; identical to SEQ ID NO: 5673
  Cyclic GFR-binding peptide
  MOD_RES (2)..(34)..(35): Xaa is C or S

SEQ ID NO: 87730 - protein, 32 aa, Artificial Sequence; identical to SEQ ID NO: 5674
  Cyclic GFR-binding peptide
  MOD_RES (27)..(28): Xaa is C or S

SEQ ID NO: 87731 - protein, 30 aa, Artificial Sequence; identical to SEQ ID NO: 34004
  Cyclic GFR-binding peptide
  MOD_RES (1)..(1): Xaa is C or S

SEQ ID NO: 87732 - protein, 38 aa, Artificial Sequence
  Cyclic GFR-binding peptide
  MOD_RES (2)..(4)..(36)..(37): Xaa is C or S
RXAXSEVTMNRYKKLVVNKNEDFYLISIANMKEPVXXP

SEQ ID NO: 87733 - protein, 30 aa, Artificial Sequence; identical to SEQ ID NO: 34005
  Cyclic GFR-binding peptide
  MOD_RES (29)..(30): Xaa is C or S

SEQ ID NO: 87734 - protein, 33 aa, Artificial Sequence
  Cyclic GFR-binding peptide
  MOD_RES (1)..(33): Xaa is C or S
XESVAMGRHKRLYTVVGKDYYLISTASLKTPVX

SEQ ID NO: 87735 - protein, 33 aa, Artificial Sequence; identical to SEQ ID NO: 5678
  Cyclic GFR-binding peptide
  MOD_RES (28)..(29): Xaa is C or S

SEQ ID NO: 87736 - protein, 29 aa, Artificial Sequence
  Cyclic GFR-binding peptide
  MOD_RES (29)..(29): Xaa is C or S
VMDRHKRLVVKENEDYYLMSTASLETPVX

SEQ ID NO: 87737 - protein, 32 aa, Artificial Sequence; identical to SEQ ID NO: 5680
  Cyclic GFR-binding peptide
  MOD_RES (28)..(29): Xaa is C or S

SEQ ID NO: 87738 - protein, 38 aa, Artificial Sequence; identical to SEQ ID NO: 34010
  Cyclic GFR-binding peptide
  MOD_RES (1)..(32)..(33): Xaa is C or S

SEQ ID NO: 87739 - protein, 25 aa, Artificial Sequence
  Cyclic GFR-binding peptide
VIMEYKFKIKPTKGILYLISIPELD

SEQ ID NO: 87740 - protein, 28 aa, Artificial Sequence
  Cyclic GFR-binding peptide
  MOD_RES (27)..(28): Xaa is C or S
GYHYKLIIQQKDNKYLMSIPSMKTPTXX

SEQ ID NO: 87741 - protein, 33 aa, Artificial Sequence; identical to SEQ ID NO: 5682
  Cyclic GFR-binding peptide
  MOD_RES (33)..(33): Xaa is C or S

SEQ ID NO: 87742 - protein, 35 aa, Artificial Sequence; identical to SEQ ID NO: 5683
  Cyclic GFR-binding peptide
  MOD_RES (31)..(32): Xaa is C or S

SEQ ID NO: 87743 - protein, 36 aa, Artificial Sequence; identical to SEQ ID NO: 5685
  Cyclic GFR-binding peptide
  MOD_RES (2)..(4)..(36): Xaa is C or S

SEQ ID NO: 87744 - protein, 24 aa, Artificial Sequence
  Cyclic GFR-binding peptide
PIKGYVVNNASDFYLINIPSLRTP

SEQ ID NO: 87745 - protein, 31 aa, Artificial Sequence; identical to SEQ ID NO: 5688
  Cyclic GFR-binding peptide
  MOD_RES (2)..(4): Xaa is C or S

SEQ ID NO: 87746 - protein, 41 aa, Artificial Sequence
  Cyclic GFR-binding peptide
  MOD_RES (2)..(4)..(36)..(37): Xaa is C or S
SXGXRDVVMGYHYKLIIQQKDNKYLMSIPSMKTPTXXPGAS

SEQ ID NO: 87747 - protein, 35 aa, Artificial Sequence; identical to SEQ ID NO: 5692
  Cyclic GFR-binding peptide
  MOD_RES (29)..(30): Xaa is C or S

SEQ ID NO: 87748 - protein, 32 aa, Artificial Sequence; identical to SEQ ID NO: 34024
  Cyclic GFR-binding peptide
  MOD_RES (31)..(31): Xaa is C or S

SEQ ID NO: 87749 - protein, 35 aa, Artificial Sequence
  Cyclic GFR-binding peptide
  MOD_RES (31)..(32): Xaa is C or S
SVAMGRHKRLYTVVGKDYYLISTASLKTPVXXAKS

SEQ ID NO: 87750 - protein, 26 aa, Artificial Sequence
  Cyclic GFR-binding peptide
VMGYHYKLIIQQKDNKYLMSIPSMKT

SEQ ID NO: 87751 - protein, 31 aa, Artificial Sequence; identical to SEQ ID NO: 5697
  Cyclic GFR-binding peptide
  MOD_RES (31)..(31): Xaa is C or S

SEQ ID NO: 87752 - protein, 33 aa, Artificial Sequence
  Cyclic GFR-binding peptide
  MOD_RES (27)..(28): Xaa is C or S
NEYKFKIVNSSDDLYLVSIPELKTPAXXPKPVH

SEQ ID NO: 87753 - protein, 34 aa, Artificial Sequence; identical to SEQ ID NO: 34028
  Cyclic GFR-binding peptide
  MOD_RES (28)..(29): Xaa is C or S

SEQ ID NO: 87754 - protein, 22 aa, Artificial Sequence
  Cyclic GFR-binding peptide
IMEYKFKVKPKRGVLYLISIPE

SEQ ID NO: 87755 - protein, 34 aa, Artificial Sequence; identical to SEQ ID NO: 5699
  Cyclic GFR-binding peptide
  MOD_RES (1)..(33)..(34): Xaa is C or S

SEQ ID NO: 87756 - protein, 27 aa, Artificial Sequence
  Cyclic GFR-binding peptide
  MOD_RES (27)..(27): Xaa is C or S
MEYKFKVKPKRGVLYLISIPELAQPVX

SEQ ID NO: 87757 - protein, 31 aa, Artificial Sequence; identical to SEQ ID NO: 34037
  Cyclic GFR-binding peptide
  MOD_RES (31)..(31): Xaa is C or S

SEQ ID NO: 87758 - protein, 43 aa, Artificial Sequence; identical to SEQ ID NO: 5701
  Cyclic GFR-binding peptide
  MOD_RES (2)..(4)..(37)..(38): Xaa is C or S

SEQ ID NO: 87759 - protein, 27 aa, Artificial Sequence
  Cyclic GFR-binding peptide
EVVMDEYKFKVVKENEDLYLMSIPELE

SEQ ID NO: 87760 - protein, 38 aa, Artificial Sequence
  Cyclic GFR-binding peptide
  MOD_RES (32)..(33): Xaa is C or S
SEVTMNRYKKLVVNKNEDFYLISIANMKEPVXXPEPIG

SEQ ID NO: 87761 - protein, 26 aa, Artificial Sequence
  Cyclic GFR-binding peptide
SVAMGYHYKLYTVVGKDKYLISIPSL

SEQ ID NO: 87762 - protein, 22 aa, Artificial Sequence
  Cyclic GFR-binding peptide
RYKKLIVNNSSDFYLVSIANLK

SEQ ID NO: 87763 - protein, 27 aa, Artificial Sequence
  Cyclic GFR-binding peptide
VMEEYKFKVVKDYEDLYLMSIPELETP

SEQ ID NO: 87764 - protein, 35 aa, Artificial Sequence; identical to SEQ ID NO: 34045
  Cyclic GFR-binding peptide
  MOD_RES (2)..(4): Xaa is C or S

SEQ ID NO: 87765 - protein, 38 aa, Artificial Sequence
  Cyclic GFR-binding peptide
  MOD_RES (1)..(33)..(34): Xaa is C or S
XESVAMGRHKRLYTVVGKDYYLISTASLKTPVXXAKSA

SEQ ID NO: 87766 - protein, 28 aa, Artificial Sequence
  Cyclic GFR-binding peptide
  MOD_RES (27)..(28): Xaa is C or S
MEYKFKLLVRGNDLYLMSIPETKVPAXX

SEQ ID NO: 87767 - protein, 31 aa, Artificial Sequence
  Cyclic GFR-binding peptide
  MOD_RES (1)..(3): Xaa is C or S
XGXESVAMGRHKRLYTVVGKDYYLISTASLK

SEQ ID NO: 87768 - protein, 28 aa, Artificial Sequence
  Cyclic GFR-binding peptide
VMDRHKRLVVNNAADYYLISTASLRAPV

SEQ ID NO: 87769 - protein, 27 aa, Artificial Sequence
  Cyclic GFR-binding peptide
  MOD_RES (26)..(27): Xaa is C or S
YHYKLIKPTKGIKYLISIPSLDQSVXX

SEQ ID NO: 87770 - protein, 36 aa, Artificial Sequence; identical to SEQ ID NO: 5720
  Cyclic GFR-binding peptide
  MOD_RES (31)..(32): Xaa is C or S

SEQ ID NO: 87771 - protein, 29 aa, Artificial Sequence
  Cyclic GFR-binding peptide
EVVMDRHKRLVVNNAADYYLISTASLRAP

SEQ ID NO: 87772 - protein, 36 aa, Artificial Sequence; identical to SEQ ID NO: 34057
  Cyclic GFR-binding peptide
  MOD_RES (1)..(34)..(35): Xaa is C or S

SEQ ID NO: 87773 - protein, 32 aa, Artificial Sequence; identical to SEQ ID NO: 41200
  Cyclic GFR-binding peptide
  MOD_RES (27)..(28): Xaa is C or S

SEQ ID NO: 87774 - protein, 32 aa, Artificial Sequence; identical to SEQ ID NO: 41208
  Cyclic GFR-binding peptide
  MOD_RES (2)..(4): Xaa is C or S

SEQ ID NO: 87775 - protein, 25 aa, Artificial Sequence
  Cyclic GFR-binding peptide
MDRYKKLVVNNASDFYLISIANLRT

SEQ ID NO: 87776 - protein, 33 aa, Artificial Sequence; identical to SEQ ID NO: 5727
  Cyclic GFR-binding peptide
  MOD_RES (2)..(4): Xaa is C or S

SEQ ID NO: 87777 - protein, 25 aa, Artificial Sequence
  Cyclic GFR-binding peptide
ERHKRLVVKDYEDYYLMSTASLETP

SEQ ID NO: 87778 - protein, 29 aa, Artificial Sequence
  Cyclic GFR-binding peptide
  MOD_RES (29)..(29): Xaa is C or S
TMNPIKGYVVNKNEDFYLINIPSMKEPVX

SEQ ID NO: 87779 - protein, 33 aa, Artificial Sequence; identical to SEQ ID NO: 5732
  Cyclic GFR-binding peptide
  MOD_RES (27)..(28): Xaa is C or S

SEQ ID NO: 87780 - protein, 30 aa, Artificial Sequence; identical to SEQ ID NO: 5733
  Cyclic GFR-binding peptide
  MOD_RES (30)..(30): Xaa is C or S

SEQ ID NO: 87781 - protein, 42 aa, Artificial Sequence; identical to SEQ ID NO: 76392
  Cyclic GFR-binding peptide
  MOD_RES (2)..(4)..(36)..(37): Xaa is C or S

SEQ ID NO: 87782 - protein, 32 aa, Artificial Sequence; identical to SEQ ID NO: 34064
  Cyclic GFR-binding peptide
  MOD_RES (28)..(29): Xaa is C or S

SEQ ID NO: 87783 - protein, 34 aa, Artificial Sequence; identical to SEQ ID NO: 5735
  Cyclic GFR-binding peptide
  MOD_RES (31)..(32): Xaa is C or S

SEQ ID NO: 87784 - protein, 38 aa, Artificial Sequence
  Cyclic GFR-binding peptide
  MOD_RES (32)..(33): Xaa is C or S
SEVVMDEYKFKVVNNASDLYLISIPELRTPVXXTPPTS

SEQ ID NO: 87785 - protein, 31 aa, Artificial Sequence
  Cyclic GFR-binding peptide
  MOD_RES (1)..(1): Xaa is C or S
XSKVIMPIKGYIKPTKGIFYLINIPSLDQSV

SEQ ID NO: 87786 - protein, 34 aa, Artificial Sequence; identical to SEQ ID NO: 34067
  Cyclic GFR-binding peptide
  MOD_RES (30)..(31): Xaa is C or S

SEQ ID NO: 87787 - protein, 30 aa, Artificial Sequence; identical to SEQ ID NO: 34072
  Cyclic GFR-binding peptide
  MOD_RES (2)..(2): Xaa is C or S

SEQ ID NO: 87788 - protein, 33 aa, Artificial Sequence; identical to SEQ ID NO: 5742
  Cyclic GFR-binding peptide
  MOD_RES (31)..(31): Xaa is C or S

SEQ ID NO: 87789 - protein, 39 aa, Artificial Sequence; identical to SEQ ID NO: 34080
  Cyclic GFR-binding peptide
  MOD_RES (2)..(34)..(35): Xaa is C or S

SEQ ID NO: 87790 - protein, 21 aa, Artificial Sequence
  Cyclic GFR-binding peptide
RHKRLVKPKRGVYYLISTASL

SEQ ID NO: 87791 - protein, 31 aa, Artificial Sequence; identical to SEQ ID NO: 34082
  Cyclic GFR-binding peptide
  MOD_RES (30)..(31): Xaa is C or S

SEQ ID NO: 87792 - protein, 29 aa, Artificial Sequence
  Cyclic GFR-binding peptide
  MOD_RES (1)..(1): Xaa is C or S
XSKVVMEYKFKVKPTRGVLYLISIPELDQ

SEQ ID NO: 87793 - protein, 35 aa, Artificial Sequence; identical to SEQ ID NO: 34085
  Cyclic GFR-binding peptide
  MOD_RES (1)..(33)..(34): Xaa is C or S

SEQ ID NO: 87794 - protein, 34 aa, Artificial Sequence
  Cyclic GFR-binding peptide
  MOD_RES (29)..(30): Xaa is C or S
VMGYHYKLIIQQKDNKYLMSIPSMKTPTXXPGAS

SEQ ID NO: 87795 - protein, 29 aa, Artificial Sequence
  Cyclic GFR-binding peptide
EVVMDRHKRLVVKENEDYYLMSTASLETP

SEQ ID NO: 87796 - protein, 25 aa, Artificial Sequence
  Cyclic GFR-binding peptide
RYKKLVVKDYEDFYLMSIANLETPV

SEQ ID NO: 87797 - protein, 24 aa, Artificial Sequence
  Cyclic GFR-binding peptide
PIKGYVKPTRGVFYLINIPSLDQP

SEQ ID NO: 87798 - protein, 27 aa, Artificial Sequence
  Cyclic GFR-binding peptide
ESVAMGRHKRLYTVVGKDYYLISTASL

SEQ ID NO: 87799 - protein, 30 aa, Artificial Sequence; identical to SEQ ID NO: 34089
  Cyclic GFR-binding peptide

SEQ ID NO: 87800 - protein, 29 aa, Artificial Sequence
  Cyclic GFR-binding peptide
VVMDYHYKLVVNNAADKYLISIPSLRAPV

SEQ ID NO: 87801 - protein, 36 aa, Artificial Sequence; identical to SEQ ID NO: 34092
  Cyclic GFR-binding peptide
  MOD_RES (2)..(33)..(34): Xaa is C or S

SEQ ID NO: 87802 - protein, 34 aa, Artificial Sequence; identical to SEQ ID NO: 5755
  Cyclic GFR-binding peptide
  MOD_RES (1)..(33)..(34): Xaa is C or S

SEQ ID NO: 87803 - protein, 36 aa, Artificial Sequence; identical to SEQ ID NO: 5756
  Cyclic GFR-binding peptide
  MOD_RES (1)..(32)..(33): Xaa is C or S

SEQ ID NO: 87804 - protein, 28 aa, Artificial Sequence
  Cyclic GFR-binding peptide
  MOD_RES (27)..(28): Xaa is C or S
DRHKRLVVKENEDYYLMSTASLETPVXX

SEQ ID NO: 87805 - protein, 25 aa, Artificial Sequence
  Cyclic GFR-binding peptide
VVMEYHYKLVVKDYEDKYLMSIPSL

SEQ ID NO: 87806 - protein, 26 aa, Artificial Sequence
  Cyclic GFR-binding peptide
  MOD_RES (26)..(26): Xaa is C or S
EYKFKIKPTKGILYLISIPELDQSVX

SEQ ID NO: 87807 - protein, 30 aa, Artificial Sequence; identical to SEQ ID NO: 5761
  Cyclic GFR-binding peptide
  MOD_RES (2)..(4): Xaa is C or S

SEQ ID NO: 87808 - protein, 27 aa, Artificial Sequence
  Cyclic GFR-binding peptide
VAMGRHKRLYTVVGKDYYLISTASLKT

SEQ ID NO: 87809 - protein, 36 aa, Artificial Sequence; identical to SEQ ID NO: 41247
  Cyclic GFR-binding peptide
  MOD_RES (30)..(30): Xaa is C or S

SEQ ID NO: 87810 - protein, 30 aa, Artificial Sequence
  Cyclic GFR-binding peptide
  MOD_RES (30)..(30): Xaa is C or S
VVMGEYKFKIIQQKDNLYLMSIPEMKTPTX

SEQ ID NO: 87811 - protein, 35 aa, Artificial Sequence; identical to SEQ ID NO: 34101
  Cyclic GFR-binding peptide
  MOD_RES (30)..(31): Xaa is C or S

SEQ ID NO: 87812 - protein, 36 aa, Artificial Sequence; identical to SEQ ID NO: 5765
  Cyclic GFR-binding peptide
  MOD_RES (2)..(35)..(36): Xaa is C or S

SEQ ID NO: 87813 - protein, 28 aa, Artificial Sequence
  Cyclic GFR-binding peptide
  MOD_RES (1)..(3): Xaa is C or S
XGXEEVIMRYKKLLLVRGNDFYLMSIAN

SEQ ID NO: 87814 - protein, 41 aa, Artificial Sequence; identical to SEQ ID NO: 5768
  Cyclic GFR-binding peptide
  MOD_RES (2)..(4)..(37)..(38): Xaa is C or S

SEQ ID NO: 87815 - protein, 33 aa, Artificial Sequence; identical to SEQ ID NO: 34108
  Cyclic GFR-binding peptide
  MOD_RES (28)..(29): Xaa is C or S

SEQ ID NO: 87816 - protein, 30 aa, Artificial Sequence; identical to SEQ ID NO: 5771
  Cyclic GFR-binding peptide
  MOD_RES (30)..(30): Xaa is C or S

SEQ ID NO: 87817 - protein, 23 aa, Artificial Sequence
  Cyclic GFR-binding peptide
RYKKLVVNKNEDFYLISIANMKE

SEQ ID NO: 87818 - protein, 33 aa, Artificial Sequence
  Cyclic GFR-binding peptide
  MOD_RES (2)..(2): Xaa is C or S
GXSEVVMDRHKRLVVNNASDYYLISTASLRTPV

SEQ ID NO: 87819 - protein, 35 aa, Artificial Sequence; identical to SEQ ID NO: 5775
  Cyclic GFR-binding peptide
  MOD_RES (2)..(33)..(34): Xaa is C or S

SEQ ID NO: 87820 - protein, 35 aa, Artificial Sequence
  Cyclic GFR-binding peptide
  MOD_RES (2)..(4): Xaa is C or S
RXGXESVAMGPIKGYYTVVGKDFYLINIPSLKTPV

SEQ ID NO: 87821 - protein, 27 aa, Artificial Sequence
  Cyclic GFR-binding peptide
  MOD_RES (27)..(27): Xaa is C or S
EEYKFKTPVGMDDLYLVSIPELKTPVX

SEQ ID NO: 87822 - protein, 32 aa, Artificial Sequence; identical to SEQ ID NO: 5778
  Cyclic GFR-binding peptide
  MOD_RES (1)..(32): Xaa is C or S

SEQ ID NO: 87823 - protein, 30 aa, Artificial Sequence
  Cyclic GFR-binding peptide
SKVVMPIKGYVKPTRGVFYLINIPSLDQPV

SEQ ID NO: 87824 - protein, 36 aa, Artificial Sequence; identical to SEQ ID NO: 76417
  Cyclic GFR-binding peptide
  MOD_RES (1)..(3)..(35)..(36): Xaa is C or S

SEQ ID NO: 87825 - protein, 28 aa, Artificial Sequence
  Cyclic GFR-binding peptide
VVMNPIKGYIVNSSDDFYLVNIPSLKTP

SEQ ID NO: 87826 - protein, 36 aa, Artificial Sequence; identical to SEQ ID NO: 34115
  Cyclic GFR-binding peptide
  MOD_RES (1)..(3)..(35)..(36): Xaa is C or S

SEQ ID NO: 87827 - protein, 36 aa, Artificial Sequence; identical to SEQ ID NO: 5781
  Cyclic GFR-binding peptide
  MOD_RES (2)..(34)..(35): Xaa is C or S

SEQ ID NO: 87828 - protein, 30 aa, Artificial Sequence; identical to SEQ ID NO: 34123
  Cyclic GFR-binding peptide
  MOD_RES (1)..(1): Xaa is C or S

SEQ ID NO: 87829 - protein, 23 aa, Artificial Sequence
  Cyclic GFR-binding peptide
VMRHKRLVKPTRGVYYLISTASL

SEQ ID NO: 87830 - protein, 25 aa, Artificial Sequence
  Cyclic GFR-binding peptide
MRHKRLIKPTKGIYYLISTASLDQS

SEQ ID NO: 87831 - protein, 31 aa, Artificial Sequence; identical to SEQ ID NO: 41283
  Cyclic GFR-binding peptide
  MOD_RES (2)..(4): Xaa is C or S

SEQ ID NO: 87832 - protein, 31 aa, Artificial Sequence; identical to SEQ ID NO: 5788
  Cyclic GFR-binding peptide
  MOD_RES (2)..(4): Xaa is C or S

SEQ ID NO: 87833 - protein, 38 aa, Artificial Sequence; identical to SEQ ID NO: 34128
  Cyclic GFR-binding peptide
  MOD_RES (2)..(4)..(35)..(36): Xaa is C or S

SEQ ID NO: 87834 - protein, 39 aa, Artificial Sequence; identical to SEQ ID NO: 5794
  Cyclic GFR-binding peptide
  MOD_RES (1)..(33)..(34): Xaa is C or S

SEQ ID NO: 87835 - protein, 39 aa, Artificial Sequence
  Cyclic GFR-binding peptide
  MOD_RES (2)..(4)..(36)..(37): Xaa is C or S
RXAXSEVTMNPIKGYVVNKNEDFYLINIPSMKEPVXXPE

SEQ ID NO: 87836 - protein, 24 aa, Artificial Sequence
  Cyclic GFR-binding peptide
VVMNEYKFKIVNNSSDLYLVSIPE

SEQ ID NO: 87837 - protein, 28 aa, Artificial Sequence
  Cyclic GFR-binding peptide
EAVSMGEEYKFKTPVGMDDLYLVSIPEL

SEQ ID NO: 87838 - protein, 29 aa, Artificial Sequence
  Cyclic GFR-binding peptide
  MOD_RES (29)..(29): Xaa is C or S
VMDRYKKLVVNNASDFYLISIANLRTPVX

SEQ ID NO: 87839 - protein, 23 aa, Artificial Sequence
  Cyclic GFR-binding peptide
YHYKLIVNSSDDKYLVSIPSLQT

SEQ ID NO: 87840 - protein, 30 aa, Artificial Sequence; identical to SEQ ID NO: 5800
  Cyclic GFR-binding peptide
  MOD_RES (1)..(1): Xaa is C or S

SEQ ID NO: 87841 - protein, 23 aa, Artificial Sequence
  Cyclic GFR-binding peptide
GEPIKGYTPVGMDDFYLVNIPSL

SEQ ID NO: 87842 - protein, 33 aa, Artificial Sequence; identical to SEQ ID NO: 5806
  Cyclic GFR-binding peptide
  MOD_RES (30)..(31): Xaa is C or S

SEQ ID NO: 87843 - protein, 26 aa, Artificial Sequence
  Cyclic GFR-binding peptide
DVVMGRHKRLIIQQKDNYYLMSTASM

SEQ ID NO: 87844 - protein, 26 aa, Artificial Sequence
  Cyclic GFR-binding peptide
  MOD_RES (26)..(26): Xaa is C or S
RHKRLIKPTKGIYYLISTASLDQSVX

SEQ ID NO: 87845 - protein, 35 aa, Artificial Sequence; identical to SEQ ID NO: 5815
  Cyclic GFR-binding peptide
  MOD_RES (30)..(31): Xaa is C or S

SEQ ID NO: 87846 - protein, 34 aa, Artificial Sequence; identical to SEQ ID NO: 41304
  Cyclic GFR-binding peptide
  MOD_RES (1)..(3): Xaa is C or S

SEQ ID NO: 87847 - protein, 41 aa, Artificial Sequence; identical to SEQ ID NO: 16246
  Cyclic GFR-binding peptide
  MOD_RES (1)..(3)..(35)..(36): Xaa is C or S

SEQ ID NO: 87848 - protein, 34 aa, Artificial Sequence; identical to SEQ ID NO: 5816
  Cyclic GFR-binding peptide
  MOD_RES (1)..(3): Xaa is C or S

SEQ ID NO: 87849 - protein, 28 aa, Artificial Sequence
  Cyclic GFR-binding peptide
VMNRYKKLIVNSSDDFYLVSIANLKTPA

SEQ ID NO: 87850 - protein, 39 aa, Artificial Sequence
  Cyclic GFR-binding peptide
  MOD_RES (1)..(33)..(34): Xaa is C or S
XAEVVMDRHKRLVVNNAADYYLISTASLRAPVXXSAPAA

SEQ ID NO: 87851 - protein, 36 aa, Artificial Sequence
  Cyclic GFR-binding peptide
  MOD_RES (30)..(31): Xaa is C or S
VVMDEYKFKVVNNASDLYLISIPELRTPVXXTPPTS

SEQ ID NO: 87852 - protein, 34 aa, Artificial Sequence; identical to SEQ ID NO: 5820
  Cyclic GFR-binding peptide
  MOD_RES (28)..(29): Xaa is C or S

SEQ ID NO: 87853 - protein, 30 aa, Artificial Sequence
  Cyclic GFR-binding peptide
EVVMDRHKRLVVNNASDYYLISTASLRTPV

SEQ ID NO: 87854 - protein, 29 aa, Artificial Sequence
  Cyclic GFR-binding peptide
  MOD_RES (29)..(29): Xaa is C or S
VMNEYKFKIVNSSDDLYLVSIPELKTPAX

SEQ ID NO: 87855 - protein, 39 aa, Artificial Sequence; identical to SEQ ID NO: 5825
  Cyclic GFR-binding peptide
  MOD_RES (1)..(33)..(34): Xaa is C or S

SEQ ID NO: 87856 - protein, 30 aa, Artificial Sequence; identical to SEQ ID NO: 5826
  Cyclic GFR-binding peptide
  MOD_RES (27)..(28): Xaa is C or S

SEQ ID NO: 87857 - protein, 31 aa, Artificial Sequence
  Cyclic GFR-binding peptide
  MOD_RES (2)..(2): Xaa is C or S
GXSEVVMDRHKRLVVNNASDYYLISTASLRT

SEQ ID NO: 87858 - protein, 23 aa, Artificial Sequence
  Cyclic GFR-binding peptide
EYKFKVKPKRGVLYLISIPELAQ

SEQ ID NO: 87859 - protein, 21 aa, Artificial Sequence
  Cyclic GFR-binding peptide
NEYKFKVVNKNEDLYLISIPE

SEQ ID NO: 87860 - protein, 32 aa, Artificial Sequence; identical to SEQ ID NO: 34159
  Cyclic GFR-binding peptide
  MOD_RES (27)..(28): Xaa is C or S

SEQ ID NO: 87861 - protein, 25 aa, Artificial Sequence
  Cyclic GFR-binding peptide
GPIKGYYTVVGKDFYLINIPSLKTP

SEQ ID NO: 87862 - protein, 23 aa, Artificial Sequence
  Cyclic GFR-binding peptide
RYKKLIVNSSDDFYLVSIANLKT

SEQ ID NO: 87863 - protein, 23 aa, Artificial Sequence
  Cyclic GFR-binding peptide
RYKKLVVNNAADFYLISIANLRA

SEQ ID NO: 87864 - protein, 39 aa, Artificial Sequence
  Cyclic GFR-binding peptide
  MOD_RES (1)..(33)..(34): Xaa is C or S
XRDVVMGRHKRLIIQQKDNYYLMSTASMKTPTXXPGASG

SEQ ID NO: 87865 - protein, 33 aa, Artificial Sequence; identical to SEQ ID NO: 5835
  Cyclic GFR-binding peptide
  MOD_RES (2)..(4): Xaa is C or S

SEQ ID NO: 87866 - protein, 29 aa, Artificial Sequence
  Cyclic GFR-binding peptide
  MOD_RES (1)..(1): Xaa is C or S
XSRVIMPIKGYVKPKRGVFYLINIPSLAQ

SEQ ID NO: 87867 - protein, 21 aa, Artificial Sequence
  Cyclic GFR-binding peptide
EYKFKVKPKRGVLYLISIPEL

SEQ ID NO: 87868 - protein, 30 aa, Artificial Sequence; identical to SEQ ID NO: 34172
  Cyclic GFR-binding peptide
  MOD_RES (27)..(28): Xaa is C or S

SEQ ID NO: 87869 - protein, 42 aa, Artificial Sequence
  Cyclic GFR-binding peptide
  MOD_RES (2)..(4)..(36)..(37): Xaa is C or S
RXAXSEVTMNRYKKLVVNKNEDFYLISIANMKEPVXXPEPIG

SEQ ID NO: 87870 - protein, 35 aa, Artificial Sequence
  Cyclic GFR-binding peptide
  MOD_RES (29)..(30): Xaa is C or S
VIMEYKFKLLVRGNDLYLMSIPETKVPAXXTSPVR

SEQ ID NO: 87871 - protein, 28 aa, Artificial Sequence
  Cyclic GFR-binding peptide
  MOD_RES (27)..(28): Xaa is C or S
NEYKFKIVNSSDDLYLVSIPELQTPAXX

SEQ ID NO: 87872 - protein, 34 aa, Artificial Sequence
  Cyclic GFR-binding peptide
  MOD_RES (31)..(32): Xaa is C or S
EVVMDEYKFKVVNNASDLYLISIPELRTPVXXTP

SEQ ID NO: 87873 - protein, 21 aa, Artificial Sequence
  Cyclic GFR-binding peptide
RHKRLVVKENEDYYLMSTASL

SEQ ID NO: 87874 - protein, 29 aa, Artificial Sequence
  Cyclic GFR-binding peptide
SKVIMPIKGYIKPTKGIFYLINIPSLDQS

SEQ ID NO: 87875 - protein, 29 aa, Artificial Sequence
  Cyclic GFR-binding peptide
VVMNRYKKLIVNSSDDFYLVSIANLKTPA

SEQ ID NO: 87876 - protein, 31 aa, Artificial Sequence; identical to SEQ ID NO: 5842
  Cyclic GFR-binding peptide
  MOD_RES (26)..(27): Xaa is C or S

SEQ ID NO: 87877 - protein, 33 aa, Artificial Sequence
  Cyclic GFR-binding peptide
  MOD_RES (1)..(3): Xaa is C or S
XGXSEVVMDEYKFKVVNNASDLYLISIPELRTP

SEQ ID NO: 87878 - protein, 25 aa, Artificial Sequence
  Cyclic GFR-binding peptide
VVMGYHYKLIIQQKDNKYLMSIPSM

SEQ ID NO: 87879 - protein, 32 aa, Artificial Sequence; identical to SEQ ID NO: 41332
  Cyclic GFR-binding peptide
  MOD_RES (26)..(27): Xaa is C or S

SEQ ID NO: 87880 - protein, 40 aa, Artificial Sequence; identical to SEQ ID NO: 5843
  Cyclic GFR-binding peptide
  MOD_RES (2)..(4)..(36)..(37): Xaa is C or S

SEQ ID NO: 87881 - protein, 33 aa, Artificial Sequence; identical to SEQ ID NO: 76453
  Cyclic GFR-binding peptide
  MOD_RES (31)..(32): Xaa is C or S

SEQ ID NO: 87882 - protein, 30 aa, Artificial Sequence
  Cyclic GFR-binding peptide
  MOD_RES (29)..(30): Xaa is C or S
VMGRHKRLIIQQKDNYYLMSTASMKTPTXX

SEQ ID NO: 87883 - protein, 36 aa, Artificial Sequence; identical to SEQ ID NO: 41336
  Cyclic GFR-binding peptide
  MOD_RES (31)..(32): Xaa is C or S

SEQ ID NO: 87884 - protein, 32 aa, Artificial Sequence
  Cyclic GFR-binding peptide
  MOD_RES (31)..(32): Xaa is C or S
EVTMNYHYKLVVNKNEDKYLISIPSMKEPVXX

SEQ ID NO: 87885 - protein, 38 aa, Artificial Sequence
  Cyclic GFR-binding peptide
  MOD_RES (2)..(34)..(35): Xaa is C or S
GXRDVVMGYHYKLIIQQKDNKYLMSIPSMKTPTXXPGA

SEQ ID NO: 87886 - protein, 36 aa, Artificial Sequence; identical to SEQ ID NO: 41340
  Cyclic GFR-binding peptide
  MOD_RES (1)..(3)..(34)..(35): Xaa is C or S

SEQ ID NO: 87887 - protein, 33 aa, Artificial Sequence; identical to SEQ ID NO: 41341
  Cyclic GFR-binding peptide
  MOD_RES (31)..(32): Xaa is C or S

SEQ ID NO: 87888 - protein, 34 aa, Artificial Sequence; identical to SEQ ID NO: 5850
  Cyclic GFR-binding peptide
  MOD_RES (2)..(34): Xaa is C or S

SEQ ID NO: 87889 - protein, 35 aa, Artificial Sequence; identical to SEQ ID NO: 34187
  Cyclic GFR-binding peptide
  MOD_RES (32)..(33): Xaa is C or S

SEQ ID NO: 87890 - protein, 30 aa, Artificial Sequence; identical to SEQ ID NO: 41349
  Cyclic GFR-binding peptide

SEQ ID NO: 87891 - protein, 24 aa, Artificial Sequence
  Cyclic GFR-binding peptide
GERYKKLTPVGMDDFYLVSIANLK

SEQ ID NO: 87892 - protein, 37 aa, Artificial Sequence; identical to SEQ ID NO: 5865
  Cyclic GFR-binding peptide
  MOD_RES (2)..(4)..(36)..(37): Xaa is C or S

SEQ ID NO: 87893 - protein, 27 aa, Artificial Sequence
  Cyclic GFR-binding peptide
  MOD_RES (27)..(27): Xaa is C or S
EYHYKLVVKDYEDKYLMSIPSLETPVX

SEQ ID NO: 87894 - protein, 39 aa, Artificial Sequence; identical to SEQ ID NO: 16292
  Cyclic GFR-binding peptide
  MOD_RES (1)..(33)..(34): Xaa is C or S

SEQ ID NO: 87895 - protein, 24 aa, Artificial Sequence
  Cyclic GFR-binding peptide
NEYKFKIVNNSSDLYLVSIPELKT

SEQ ID NO: 87896 - protein, 40 aa, Artificial Sequence; identical to SEQ ID NO: 41363
  Cyclic GFR-binding peptide
  MOD_RES (1)..(34)..(35): Xaa is C or S

SEQ ID NO: 87897 - protein, 36 aa, Artificial Sequence; identical to SEQ ID NO: 34203
  Cyclic GFR-binding peptide
  MOD_RES (1)..(3)..(35)..(36): Xaa is C or S

SEQ ID NO: 87898 - protein, 30 aa, Artificial Sequence; identical to SEQ ID NO: 5868
  Cyclic GFR-binding peptide
  MOD_RES (1)..(1): Xaa is C or S

SEQ ID NO: 87899 - protein, 29 aa, Artificial Sequence
  Cyclic GFR-binding peptide
EVVMDRYKKLVVNNASDFYLISIANLRTP

SEQ ID NO: 87900 - protein, 36 aa, Artificial Sequence; identical to SEQ ID NO: 5870
  Cyclic GFR-binding peptide
  MOD_RES (1)..(3)..(35)..(36): Xaa is C or S

SEQ ID NO: 87901 - protein, 31 aa, Artificial Sequence
  Cyclic GFR-binding peptide
  MOD_RES (31)..(31): Xaa is C or S
EVTMNYHYKLVVNKNEDKYLISIPSMKEPVX

SEQ ID NO: 87902 - protein, 22 aa, Artificial Sequence
  Cyclic GFR-binding peptide
YHYKLIKPTKGIKYLISIPSLD

SEQ ID NO: 87903 - protein, 35 aa, Artificial Sequence; identical to SEQ ID NO: 5872
  Cyclic GFR-binding peptide
  MOD_RES (2)..(33)..(34): Xaa is C or S

SEQ ID NO: 87904 - protein, 39 aa, Artificial Sequence; identical to SEQ ID NO: 5874
  Cyclic GFR-binding peptide
  MOD_RES (2)..(34)..(35): Xaa is C or S

SEQ ID NO: 87905 - protein, 28 aa, Artificial Sequence
  Cyclic GFR-binding peptide
  MOD_RES (26)..(27): Xaa is C or S
RYKKLLLVRGNDFYLMSIANTKVPAXXT

SEQ ID NO: 87906 - protein, 35 aa, Artificial Sequence
  Cyclic GFR-binding peptide
  MOD_RES (2)..(4): Xaa is C or S
RXAXSEVTMNRYKKLVVNKNEDFYLISIANMKEPV

SEQ ID NO: 87907 - protein, 41 aa, Artificial Sequence
  Cyclic GFR-binding peptide
  MOD_RES (2)..(4)..(36)..(37): Xaa is C or S
RXAXSEVTMNEYKFKVVNKNEDLYLISIPEMKEPVXXPEPI

SEQ ID NO: 87908 - protein, 37 aa, Artificial Sequence; identical to SEQ ID NO: 5878
  Cyclic GFR-binding peptide
  MOD_RES (32)..(33): Xaa is C or S

SEQ ID NO: 87909 - protein, 33 aa, Artificial Sequence
  Cyclic GFR-binding peptide
  MOD_RES (1)..(3): Xaa is C or S
XKXSKVVMPIKGYVKPTRGVFYLINIPSLDQPV

SEQ ID NO: 87910 - protein, 20 aa, Artificial Sequence
  Cyclic GFR-binding peptide
PIKGYTPVGMDDFYLVNIPS

SEQ ID NO: 87911 - protein, 39 aa, Artificial Sequence; identical to SEQ ID NO: 5879
  Cyclic GFR-binding peptide
  MOD_RES (2)..(33)..(34): Xaa is C or S

SEQ ID NO: 87912 - protein, 37 aa, Artificial Sequence; identical to SEQ ID NO: 34216
  Cyclic GFR-binding peptide
  MOD_RES (32)..(33): Xaa is C or S

SEQ ID NO: 87913 - protein, 28 aa, Artificial Sequence
  Cyclic GFR-binding peptide
  MOD_RES (1)..(3): Xaa is C or S
XKXSKVIMRYKKLIKPTKGIFYLISIAN

SEQ ID NO: 87914 - protein, 27 aa, Artificial Sequence
  Cyclic GFR-binding peptide
  MOD_RES (27)..(27): Xaa is C or S
MEYKFKVKPTRGVLYLISIPELDQPVX

SEQ ID NO: 87915 - protein, 30 aa, Artificial Sequence; identical to SEQ ID NO: 34220
  Cyclic GFR-binding peptide
  MOD_RES (29)..(30): Xaa is C or S

SEQ ID NO: 87916 - protein, 31 aa, Artificial Sequence; identical to SEQ ID NO: 5884
  Cyclic GFR-binding peptide
  MOD_RES (1)..(1): Xaa is C or S

SEQ ID NO: 87917 - protein, 34 aa, Artificial Sequence
  Cyclic GFR-binding peptide
  MOD_RES (1)..(32)..(33): Xaa is C or S
XEEVIMYHYKLLLVRGNDKYLMSIPSTKVPAXXT

SEQ ID NO: 87918 - protein, 37 aa, Artificial Sequence; identical to SEQ ID NO: 5885
  Cyclic GFR-binding peptide
  MOD_RES (31)..(32): Xaa is C or S

SEQ ID NO: 87919 - protein, 37 aa, Artificial Sequence; identical to SEQ ID NO: 5888
  Cyclic GFR-binding peptide
  MOD_RES (2)..(4)..(35)..(36): Xaa is C or S

SEQ ID NO: 87920 - protein, 31 aa, Artificial Sequence; identical to SEQ ID NO: 5890
  Cyclic GFR-binding peptide

SEQ ID NO: 87921 - protein, 24 aa, Artificial Sequence
  Cyclic GFR-binding peptide
MDYHYKLVVNNAADKYLISIPSLR

SEQ ID NO: 87922 - protein, 29 aa, Artificial Sequence
  Cyclic GFR-binding peptide
VVMGEYKFKIIQQKDNLYLMSIPEMKTPT

SEQ ID NO: 87923 - protein, 32 aa, Artificial Sequence; identical to SEQ ID NO: 41393
  Cyclic GFR-binding peptide
  MOD_RES (28)..(29): Xaa is C or S

SEQ ID NO: 87924 - protein, 31 aa, Artificial Sequence; identical to SEQ ID NO: 5892
  Cyclic GFR-binding peptide
  MOD_RES (26)..(26): Xaa is C or S

SEQ ID NO: 87925 - protein, 33 aa, Artificial Sequence; identical to SEQ ID NO: 76489
  Cyclic GFR-binding peptide
  MOD_RES (2)..(2): Xaa is C or S

SEQ ID NO: 87926 - protein, 34 aa, Artificial Sequence; identical to SEQ ID NO: 41396
  Cyclic GFR-binding peptide
  MOD_RES (30)..(30): Xaa is C or S

SEQ ID NO: 87927 - protein, 29 aa, Artificial Sequence
  Cyclic GFR-binding peptide
  MOD_RES (2)..(2): Xaa is C or S
GXSEVVMDRHKRLVVNNASDYYLISTASL

SEQ ID NO: 87928 - protein, 33 aa, Artificial Sequence; identical to SEQ ID NO: 34233
  Cyclic GFR-binding peptide
  MOD_RES (31)..(32): Xaa is C or S

SEQ ID NO: 87929 - protein, 33 aa, Artificial Sequence; identical to SEQ ID NO: 41398
  Cyclic GFR-binding peptide
  MOD_RES (30)..(31): Xaa is C or S

SEQ ID NO: 87930 - protein, 25 aa, Artificial Sequence
  Cyclic GFR-binding peptide
MDEYKFKVVKENEDLYLMSIPELET

SEQ ID NO: 87931 - protein, 27 aa, Artificial Sequence
  Cyclic GFR-binding peptide
VMDRHKRLVVNNASDYYLISTASLRTP

SEQ ID NO: 87932 - protein, 32 aa, Artificial Sequence; identical to SEQ ID NO: 5900
  Cyclic GFR-binding peptide
  MOD_RES (31)..(32): Xaa is C or S

SEQ ID NO: 87933 - protein, 37 aa, Artificial Sequence
  Cyclic GFR-binding peptide
  MOD_RES (32)..(33): Xaa is C or S
AEVVMDRHKRLVVNNAADYYLISTASLRAPVXXSAPA

SEQ ID NO: 87934 - protein, 26 aa, Artificial Sequence
  Cyclic GFR-binding peptide
VIMRHKRLIKPTKGIYYLISTASLDQ

SEQ ID NO: 87935 - protein, 28 aa, Artificial Sequence
  Cyclic GFR-binding peptide
VMERHKRLVVKDYEDYYLMSTASLETPV

SEQ ID NO: 87936 - protein, 32 aa, Artificial Sequence; identical to SEQ ID NO: 34241
  Cyclic GFR-binding peptide
  MOD_RES (32)..(32): Xaa is C or S

SEQ ID NO: 87937 - protein, 32 aa, Artificial Sequence; identical to SEQ ID NO: 34245
  Cyclic GFR-binding peptide
  MOD_RES (28)..(29): Xaa is C or S

SEQ ID NO: 87938 - protein, 31 aa, Artificial Sequence; identical to SEQ ID NO: 41413
  Cyclic GFR-binding peptide
  MOD_RES (1)..(1): Xaa is C or S

SEQ ID NO: 87939 - protein, 28 aa, Artificial Sequence
  Cyclic GFR-binding peptide
  MOD_RES (26)..(27): Xaa is C or S
EYKFKIIQQKDNLYLMSIPEMKTPTXXP

SEQ ID NO: 87940 - protein, 24 aa, Artificial Sequence
  Cyclic GFR-binding peptide
EYKFKTPVGMDDLYLVSIPELKTP

SEQ ID NO: 87941 - protein, 25 aa, Artificial Sequence
  Cyclic GFR-binding peptide
EVVMDPIKGYVVKENEDFYLMNIPS

SEQ ID NO: 87942 - protein, 36 aa, Artificial Sequence; identical to SEQ ID NO: 5914
  Cyclic GFR-binding peptide
  MOD_RES (2)..(4)..(36): Xaa is C or S

SEQ ID NO: 87943 - protein, 29 aa, Artificial Sequence
  Cyclic GFR-binding peptide
  MOD_RES (29)..(29): Xaa is C or S
VMNRHKRLIVNSSDDYYLVSTASLQTPAX

SEQ ID NO: 87944 - protein, 35 aa, Artificial Sequence
  Cyclic GFR-binding peptide
  MOD_RES (30)..(31): Xaa is C or S
VTMNRHKRLVVNKNEDYYLISTASMKEPVXXPEPI

SEQ ID NO: 87945 - protein, 26 aa, Artificial Sequence
  Cyclic GFR-binding peptide
MNYHYKLIVNSSDDKYLVSIPSLKTP

SEQ ID NO: 87946 - protein, 24 aa, Artificial Sequence
  Cyclic GFR-binding peptide
MNRYKKLVVNKNEDFYLISIANMK

SEQ ID NO: 87947 - protein, 28 aa, Artificial Sequence
  Cyclic GFR-binding peptide
  MOD_RES (28)..(28): Xaa is C or S
IMRHKRLLLVRGNDYYLMSTASTKVPAX

SEQ ID NO: 87948 - protein, 26 aa, Artificial Sequence
  Cyclic GFR-binding peptide
SEVVMDEYKFKVVNNASDLYLISIPE

SEQ ID NO: 87949 - protein, 29 aa, Artificial Sequence
  Cyclic GFR-binding peptide
  MOD_RES (1)..(1): Xaa is C or S
XSRVIMRYKKLVKPKRGVFYLISIANLAQ

SEQ ID NO: 87950 - protein, 23 aa, Artificial Sequence
  Cyclic GFR-binding peptide
IMRYKKLVKPKRGVFYLISIANL

SEQ ID NO: 87951 - protein, 25 aa, Artificial Sequence
  Cyclic GFR-binding peptide
GYHYKLIIQQKDNKYLMSIPSMKTP

SEQ ID NO: 87952 - protein, 31 aa, Artificial Sequence; identical to SEQ ID NO: 5930
  Cyclic GFR-binding peptide
  MOD_RES (26)..(26): Xaa is C or S

SEQ ID NO: 87953 - protein, 35 aa, Artificial Sequence; identical to SEQ ID NO: 5931
  Cyclic GFR-binding peptide
  MOD_RES (30)..(31): Xaa is C or S

SEQ ID NO: 87954 - protein, 31 aa, Artificial Sequence
  Cyclic GFR-binding peptide
  MOD_RES (1)..(1): Xaa is C or S
XSEVTMNRHKRLVVNKNEDYYLISTASMKEP

SEQ ID NO: 87955 - protein, 37 aa, Artificial Sequence; identical to SEQ ID NO: 5933
  Cyclic GFR-binding peptide
  MOD_RES (2)..(33)..(34): Xaa is C or S

SEQ ID NO: 87956 - protein, 30 aa, Artificial Sequence; identical to SEQ ID NO: 34265
  Cyclic GFR-binding peptide
  MOD_RES (2)..(2): Xaa is C or S

SEQ ID NO: 87957 - protein, 33 aa, Artificial Sequence; identical to SEQ ID NO: 5934
  Cyclic GFR-binding peptide
  MOD_RES (1)..(32)..(33): Xaa is C or S

SEQ ID NO: 87958 - protein, 35 aa, Artificial Sequence; identical to SEQ ID NO: 5935
  Cyclic GFR-binding peptide
  MOD_RES (30)..(31): Xaa is C or S

SEQ ID NO: 87959 - protein, 28 aa, Artificial Sequence
  Cyclic GFR-binding peptide
  MOD_RES (1)..(1): Xaa is C or S
XSRVIMPIKGYVKPKRGVFYLINIPSLA

SEQ ID NO: 87960 - protein, 34 aa, Artificial Sequence
  Cyclic GFR-binding peptide
  MOD_RES (2)..(4): Xaa is C or S
RXGXSEVVMDRHKRLVVNNASDYYLISTASLRTP

SEQ ID NO: 87961 - protein, 29 aa, Artificial Sequence
  Cyclic GFR-binding peptide
KVVMNPIKGYIVNNSSDFYLVNIPSLKTP

SEQ ID NO: 87962 - protein, 33 aa, Artificial Sequence
  Cyclic GFR-binding peptide
  MOD_RES (1)..(33): Xaa is C or S
XSEVTMNPIKGYVVNKNEDFYLINIPSMKEPVX

SEQ ID NO: 87963 - protein, 22 aa, Artificial Sequence
  Cyclic GFR-binding peptide
RYKKLVVNNAADFYLISIANLR

SEQ ID NO: 87964 - protein, 32 aa, Artificial Sequence; identical to SEQ ID NO: 34275
  Cyclic GFR-binding peptide
  MOD_RES (31)..(32): Xaa is C or S

SEQ ID NO: 87965 - protein, 31 aa, Artificial Sequence; identical to SEQ ID NO: 41444
  Cyclic GFR-binding peptide
  MOD_RES (29)..(30): Xaa is C or S

SEQ ID NO: 87966 - protein, 28 aa, Artificial Sequence
  Cyclic GFR-binding peptide
  MOD_RES (27)..(28): Xaa is C or S
MPIKGYVKPTRGVFYLINIPSLDQPVXX

SEQ ID NO: 87967 - protein, 27 aa, Artificial Sequence
  Cyclic GFR-binding peptide
  MOD_RES (26)..(27): Xaa is C or S
EYKFKIKPTKGILYLISIPELDQSVXX

SEQ ID NO: 87968 - protein, 25 aa, Artificial Sequence
  Cyclic GFR-binding peptide
VMNEYKFKIVNNSSDLYLVSIPELK

SEQ ID NO: 87969 - protein, 32 aa, Artificial Sequence; identical to SEQ ID NO: 41446
  Cyclic GFR-binding peptide
  MOD_RES (28)..(29): Xaa is C or S

SEQ ID NO: 87970 - protein, 29 aa, Artificial Sequence
  Cyclic GFR-binding peptide
  MOD_RES (1)..(3): Xaa is C or S
XGXRDVVMGRHKRLIIQQKDNYYLMSTAS

SEQ ID NO: 87971 - protein, 36 aa, Artificial Sequence
  Cyclic GFR-binding peptide
  MOD_RES (1)..(33)..(34): Xaa is C or S
XAEVVMDRHKRLVVNNAADYYLISTASLRAPVXXSA

SEQ ID NO: 87972 - protein, 38 aa, Artificial Sequence
  Cyclic GFR-binding peptide
  MOD_RES (32)..(33): Xaa is C or S
SRVVMNRHKRLIVNSSDDYYLVSTASLKTPAXXPKPVH

SEQ ID NO: 87973 - protein, 37 aa, Artificial Sequence; identical to SEQ ID NO: 34282
  Cyclic GFR-binding peptide
  MOD_RES (2)..(4)..(36)..(37): Xaa is C or S

SEQ ID NO: 87974 - protein, 39 aa, Artificial Sequence; identical to SEQ ID NO: 5941
  Cyclic GFR-binding peptide
  MOD_RES (2)..(4)..(36)..(37): Xaa is C or S

SEQ ID NO: 87975 - protein, 32 aa, Artificial Sequence; identical to SEQ ID NO: 41451
  Cyclic GFR-binding peptide
  MOD_RES (29)..(30): Xaa is C or S

SEQ ID NO: 87976 - protein, 36 aa, Artificial Sequence; identical to SEQ ID NO: 34284
  Cyclic GFR-binding peptide
  MOD_RES (31)..(31): Xaa is C or S

SEQ ID NO: 87977 - protein, 28 aa, Artificial Sequence
  Cyclic GFR-binding peptide
  MOD_RES (1)..(3): Xaa is C or S
XKXSKVIMYHYKLIKPTKGIKYLISIPS

SEQ ID NO: 87978 - protein, 39 aa, Artificial Sequence; identical to SEQ ID NO: 34292
  Cyclic GFR-binding peptide
  MOD_RES (2)..(34)..(35): Xaa is C or S

SEQ ID NO: 87979 - protein, 29 aa, Artificial Sequence
  Cyclic GFR-binding peptide
  MOD_RES (26)..(27): Xaa is C or S
RYKKLVVKDYEDFYLMSIANLETPVXXAK

SEQ ID NO: 87980 - protein, 38 aa, Artificial Sequence; identical to SEQ ID NO: 5952
  Cyclic GFR-binding peptide
  MOD_RES (32)..(33): Xaa is C or S

SEQ ID NO: 87981 - protein, 28 aa, Artificial Sequence
  Cyclic GFR-binding peptide
  MOD_RES (2)..(2): Xaa is C or S
AXSEVTMNYHYKLVVNKNEDKYLISIPS

SEQ ID NO: 87982 - protein, 31 aa, Artificial Sequence; identical to SEQ ID NO: 5954
  Cyclic GFR-binding peptide
  MOD_RES (1)..(1): Xaa is C or S

SEQ ID NO: 87983 - protein, 33 aa, Artificial Sequence
  Cyclic GFR-binding peptide
  MOD_RES (29)..(30): Xaa is C or S
AMGRHKRLYTVVGKDYYLISTASLKTPVXXAKS

SEQ ID NO: 87984 - protein, 34 aa, Artificial Sequence
  Cyclic GFR-binding peptide
  MOD_RES (1)..(33)..(34): Xaa is C or S
XRDVVMGEYKFKIIQQKDNLYLMSIPEMKTPTXX

SEQ ID NO: 87985 - protein, 40 aa, Artificial Sequence; identical to SEQ ID NO: 5956
  Cyclic GFR-binding peptide
  MOD_RES (2)..(4)..(35)..(36): Xaa is C or S

SEQ ID NO: 87986 - protein, 29 aa, Artificial Sequence
  Cyclic GFR-binding peptide
AEVVMDYHYKLVVNNAADKYLISIPSLRA

SEQ ID NO: 87987 - protein, 39 aa, Artificial Sequence; identical to SEQ ID NO: 41469
  Cyclic GFR-binding peptide
  MOD_RES (2)..(34)..(35): Xaa is C or S

SEQ ID NO: 87988 - protein, 28 aa, Artificial Sequence
  Cyclic GFR-binding peptide
  MOD_RES (2)..(2): Xaa is C or S
KXSRVIMRYKKLVKPKRGVFYLISIANL

SEQ ID NO: 87989 - protein, 24 aa, Artificial Sequence
  Cyclic GFR-binding peptide
RVIMEYKFKVKPKRGVLYLISIPE

SEQ ID NO: 87990 - protein, 26 aa, Artificial Sequence
  Cyclic GFR-binding peptide
MDRHKRLVVKENEDYYLMSTASLETP

SEQ ID NO: 87991 - protein, 30 aa, Artificial Sequence; identical to SEQ ID NO: 5963
  Cyclic GFR-binding peptide
  MOD_RES (2)..(4): Xaa is C or S

SEQ ID NO: 87992 - protein, 33 aa, Artificial Sequence; identical to SEQ ID NO: 34308
  Cyclic GFR-binding peptide
  MOD_RES (27)..(28): Xaa is C or S

SEQ ID NO: 87993 - protein, 38 aa, Artificial Sequence
  Cyclic GFR-binding peptide
  MOD_RES (1)..(3)..(35)..(36): Xaa is C or S
XGXRDVVMGRHKRLIIQQKDNYYLMSTASMKTPTXXPG

SEQ ID NO: 87994 - protein, 37 aa, Artificial Sequence; identical to SEQ ID NO: 41478
  Cyclic GFR-binding peptide
  MOD_RES (32)..(33): Xaa is C or S

SEQ ID NO: 87995 - protein, 35 aa, Artificial Sequence; identical to SEQ ID NO: 41481
  Cyclic GFR-binding peptide
  MOD_RES (30)..(31): Xaa is C or S

SEQ ID NO: 87996 - protein, 28 aa, Artificial Sequence
  Cyclic GFR-binding peptide
  MOD_RES (1)..(3): Xaa is C or S
XKXSKVVMRHKRLVKPTRGVYYLISTAS

SEQ ID NO: 87997 - protein, 34 aa, Artificial Sequence; identical to SEQ ID NO: 5969
  Cyclic GFR-binding peptide
  MOD_RES (2)..(34): Xaa is C or S

SEQ ID NO: 87998 - protein, 32 aa, Artificial Sequence; identical to SEQ ID NO: 5971
  Cyclic GFR-binding peptide
  MOD_RES (26)..(27): Xaa is C or S

SEQ ID NO: 87999 - protein, 39 aa, Artificial Sequence; identical to SEQ ID NO: 5972
  Cyclic GFR-binding peptide
  MOD_RES (2)..(33)..(34): Xaa is C or S

SEQ ID NO: 88000 - protein, 37 aa, Artificial Sequence; identical to SEQ ID NO: 41483
  Cyclic GFR-binding peptide
  MOD_RES (2)..(34)..(35): Xaa is C or S

SEQ ID NO: 88001 - protein, 31 aa, Artificial Sequence; identical to SEQ ID NO: 34317
  Cyclic GFR-binding peptide

SEQ ID NO: 88002 - protein, 32 aa, Artificial Sequence; identical to SEQ ID NO: 5975
  Cyclic GFR-binding peptide
  MOD_RES (2)..(4): Xaa is C or S

SEQ ID NO: 88003 - protein, 33 aa, Artificial Sequence
  Cyclic GFR-binding peptide
  MOD_RES (27)..(28): Xaa is C or S
GEYKFKIIQQKDNLYLMSIPEMKTPTXXPGASG

SEQ ID NO: 88004 - protein, 35 aa, Artificial Sequence
  Cyclic GFR-binding peptide
  MOD_RES (2)..(34)..(35): Xaa is C or S
GXSEVVMDRHKRLVVNNASDYYLISTASLRTPVXX

SEQ ID NO: 88005 - protein, 31 aa, Artificial Sequence; identical to SEQ ID NO: 41492
  Cyclic GFR-binding peptide
  MOD_RES (1)..(3): Xaa is C or S

SEQ ID NO: 88006 - protein, 26 aa, Artificial Sequence
  Cyclic GFR-binding peptide
VIMRHKRLLLVRGNDYYLMSTASTKV

SEQ ID NO: 88007 - protein, 30 aa, Artificial Sequence; identical to SEQ ID NO: 34327
  Cyclic GFR-binding peptide
  MOD_RES (28)..(29): Xaa is C or S

SEQ ID NO: 88008 - protein, 40 aa, Artificial Sequence; identical to SEQ ID NO: 5983
  Cyclic GFR-binding peptide
  MOD_RES (1)..(34)..(35): Xaa is C or S

SEQ ID NO: 88009 - protein, 32 aa, Artificial Sequence; identical to SEQ ID NO: 5986
  Cyclic GFR-binding peptide
  MOD_RES (32)..(32): Xaa is C or S

SEQ ID NO: 88010 - protein, 36 aa, Artificial Sequence; identical to SEQ ID NO: 34332
  Cyclic GFR-binding peptide
  MOD_RES (30)..(31): Xaa is C or S

SEQ ID NO: 88011 - protein, 39 aa, Artificial Sequence; identical to SEQ ID NO: 41497
  Cyclic GFR-binding peptide
  MOD_RES (2)..(34)..(35): Xaa is C or S

SEQ ID NO: 88012 - protein, 27 aa, Artificial Sequence
  Cyclic GFR-binding peptide
KVVMPIKGYVKPTRGVFYLINIPSLDQ

SEQ ID NO: 88013 - protein, 34 aa, Artificial Sequence; identical to SEQ ID NO: 5992
  Cyclic GFR-binding peptide
  MOD_RES (1)..(3)..(34): Xaa is C or S

SEQ ID NO: 88014 - protein, 37 aa, Artificial Sequence
  Cyclic GFR-binding peptide
  MOD_RES (1)..(3)..(34)..(35): Xaa is C or S
XGXEEVIMRHKRLLLVRGNDYYLMSTASTKVPAXXTS

SEQ ID NO: 88015 - protein, 32 aa, Artificial Sequence; identical to SEQ ID NO: 5994
  Cyclic GFR-binding peptide
  MOD_RES (31)..(31): Xaa is C or S

SEQ ID NO: 88016 - protein, 21 aa, Artificial Sequence
  Cyclic GFR-binding peptide
ERHKRLTPVGMDDYYLVSTAS

SEQ ID NO: 88017 - protein, 36 aa, Artificial Sequence; identical to SEQ ID NO: 5997
  Cyclic GFR-binding peptide
  MOD_RES (2)..(4)..(36): Xaa is C or S

SEQ ID NO: 88018 - protein, 29 aa, Artificial Sequence
  Cyclic GFR-binding peptide
  MOD_RES (29)..(29): Xaa is C or S
VIMRHKRLIKPTKGIYYLISTASLDQSVX

SEQ ID NO: 88019 - protein, 26 aa, Artificial Sequence
  Cyclic GFR-binding peptide
VVMNEYKFKIVNNSSDLYLVSIPELK

SEQ ID NO: 88020 - protein, 32 aa, Artificial Sequence; identical to SEQ ID NO: 41502
  Cyclic GFR-binding peptide
  MOD_RES (2)..(2): Xaa is C or S

SEQ ID NO: 88021 - protein, 26 aa, Artificial Sequence
  Cyclic GFR-binding peptide
AMGYHYKLYTVVGKDKYLISIPSLKT

SEQ ID NO: 88022 - protein, 37 aa, Artificial Sequence; identical to SEQ ID NO: 6001
  Cyclic GFR-binding peptide
  MOD_RES (2)..(34)..(35): Xaa is C or S

SEQ ID NO: 88023 - protein, 36 aa, Artificial Sequence; identical to SEQ ID NO: 6002
  Cyclic GFR-binding peptide
  MOD_RES (1)..(32)..(33): Xaa is C or S

SEQ ID NO: 88024 - protein, 29 aa, Artificial Sequence
  Cyclic GFR-binding peptide
  MOD_RES (2)..(2): Xaa is C or S
KXSRVIMRYKKLVKPKRGVFYLISIANLA

SEQ ID NO: 88025 - protein, 28 aa, Artificial Sequence
  Cyclic GFR-binding peptide
  MOD_RES (27)..(28): Xaa is C or S
MRYKKLLLVRGNDFYLMSIANTKVPAXX

SEQ ID NO: 88026 - protein, 25 aa, Artificial Sequence
  Cyclic GFR-binding peptide
VMNYHYKLIVNSSDDKYLVSIPSLK

SEQ ID NO: 88027 - protein, 26 aa, Artificial Sequence
  Cyclic GFR-binding peptide
MRYKKLVKPTRGVFYLISIANLDQPV

SEQ ID NO: 88028 - protein, 35 aa, Artificial Sequence
  Cyclic GFR-binding peptide
  MOD_RES (31)..(32): Xaa is C or S
DVVMGYHYKLIIQQKDNKYLMSIPSMKTPTXXPGA

SEQ ID NO: 88029 - protein, 32 aa, Artificial Sequence; identical to SEQ ID NO: 6006
  Cyclic GFR-binding peptide
  MOD_RES (30)..(31): Xaa is C or S

SEQ ID NO: 88030 - protein, 28 aa, Artificial Sequence
  Cyclic GFR-binding peptide
VMDEYKFKVVKENEDLYLMSIPELETPV

SEQ ID NO: 88031 - protein, 22 aa, Artificial Sequence
  Cyclic GFR-binding peptide
RYKKLTPVGMDDFYLVSIANLK

SEQ ID NO: 88032 - protein, 25 aa, Artificial Sequence
  Cyclic GFR-binding peptide
SRVIMEYKFKVKPKRGVLYLISIPE

SEQ ID NO: 88033 - protein, 38 aa, Artificial Sequence; identical to SEQ ID NO: 34361
  Cyclic GFR-binding peptide
  MOD_RES (1)..(33)..(34): Xaa is C or S

SEQ ID NO: 88034 - protein, 35 aa, Artificial Sequence; identical to SEQ ID NO: 41510
  Cyclic GFR-binding peptide
  MOD_RES (32)..(32): Xaa is C or S

SEQ ID NO: 88035 - protein, 33 aa, Artificial Sequence; identical to SEQ ID NO: 34363
  Cyclic GFR-binding peptide
  MOD_RES (30)..(30): Xaa is C or S

SEQ ID NO: 88036 - protein, 23 aa, Artificial Sequence
  Cyclic GFR-binding peptide
RHKRLIVNSSDDYYLVSTASLKT

SEQ ID NO: 88037 - protein, 26 aa, Artificial Sequence
  Cyclic GFR-binding peptide
  MOD_RES (26)..(26): Xaa is C or S
RYKKLIVNSSDDFYLVSIANLKTPAX

SEQ ID NO: 88038 - protein, 34 aa, Artificial Sequence; identical to SEQ ID NO: 41522
  Cyclic GFR-binding peptide
  MOD_RES (2)..(4): Xaa is C or S

SEQ ID NO: 88039 - protein, 25 aa, Artificial Sequence
  Cyclic GFR-binding peptide
GYHYKLYTVVGKDKYLISIPSLKTP

SEQ ID NO: 88040 - protein, 35 aa, Artificial Sequence; identical to SEQ ID NO: 6022
  Cyclic GFR-binding peptide
  MOD_RES (2)..(4): Xaa is C or S

SEQ ID NO: 88041 - protein, 34 aa, Artificial Sequence; identical to SEQ ID NO: 34376
  Cyclic GFR-binding peptide
  MOD_RES (30)..(31): Xaa is C or S

SEQ ID NO: 88042 - protein, 28 aa, Artificial Sequence
  Cyclic GFR-binding peptide
RVIMPIKGYVKPKRGVFYLINIPSLAQP

SEQ ID NO: 88043 - protein, 29 aa, Artificial Sequence
  Cyclic GFR-binding peptide
  MOD_RES (2)..(2): Xaa is C or S
GXESVAMGYHYKLYTVVGKDKYLISIPSL

SEQ ID NO: 88044 - protein, 36 aa, Artificial Sequence; identical to SEQ ID NO: 6024
  Cyclic GFR-binding peptide
  MOD_RES (32)..(32): Xaa is C or S

SEQ ID NO: 88045 - protein, 30 aa, Artificial Sequence
  Cyclic GFR-binding peptide
DVVMGRHKRLIIQQKDNYYLMSTASMKTPT

SEQ ID NO: 88046 - protein, 38 aa, Artificial Sequence; identical to SEQ ID NO: 6026
  Cyclic GFR-binding peptide
  MOD_RES (2)..(34)..(35): Xaa is C or S

SEQ ID NO: 88047 - protein, 25 aa, Artificial Sequence
  Cyclic GFR-binding peptide
EVTMNPIKGYVVNKNEDFYLINIPS

SEQ ID NO: 88048 - protein, 30 aa, Artificial Sequence; identical to SEQ ID NO: 34384
  Cyclic GFR-binding peptide
  MOD_RES (29)..(30): Xaa is C or S

SEQ ID NO: 88049 - protein, 29 aa, Artificial Sequence
  Cyclic GFR-binding peptide
  MOD_RES (2)..(2): Xaa is C or S
KXSRVIMYHYKLVKPKRGVKYLISIPSLA

SEQ ID NO: 88050 - protein, 26 aa, Artificial Sequence
  Cyclic GFR-binding peptide
EVVMERYKKLVVKDYEDFYLMSIANL

SEQ ID NO: 88051 - protein, 30 aa, Artificial Sequence
  Cyclic GFR-binding peptide
  MOD_RES (1)..(3): Xaa is C or S
XGXEEVIMEYKFKLLVRGNDLYLMSIPETK

SEQ ID NO: 88052 - protein, 38 aa, Artificial Sequence; identical to SEQ ID NO: 6037
  Cyclic GFR-binding peptide
  MOD_RES (32)..(33): Xaa is C or S

SEQ ID NO: 88053 - protein, 31 aa, Artificial Sequence; identical to SEQ ID NO: 6040
  Cyclic GFR-binding peptide
  MOD_RES (1)..(3): Xaa is C or S

SEQ ID NO: 88054 - protein, 31 aa, Artificial Sequence; identical to SEQ ID NO: 6043
  Cyclic GFR-binding peptide
  MOD_RES (31)..(31): Xaa is C or S

SEQ ID NO: 88055 - protein, 42 aa, Artificial Sequence
  Cyclic GFR-binding peptide
  MOD_RES (2)..(4)..(36)..(37): Xaa is C or S
RXGXAEVVMDRHKRLVVNNAADYYLISTASLRAPVXXSAPAA

SEQ ID NO: 88056 - protein, 30 aa, Artificial Sequence; identical to SEQ ID NO: 6047
  Cyclic GFR-binding peptide

SEQ ID NO: 88057 - protein, 29 aa, Artificial Sequence
  Cyclic GFR-binding peptide
  MOD_RES (1)..(3): Xaa is C or S
XGXGEVVMERYKKLVVKDYEDFYLMSIAN

SEQ ID NO: 88058 - protein, 35 aa, Artificial Sequence
  Cyclic GFR-binding peptide
  MOD_RES (2)..(34)..(35): Xaa is C or S
GXSEVVMDEYKFKVVNNASDLYLISIPELRTPVXX

SEQ ID NO: 88059 - protein, 28 aa, Artificial Sequence
  Cyclic GFR-binding peptide
  MOD_RES (27)..(28): Xaa is C or S
MYHYKLVKPTRGVKYLISIPSLDQPVXX

SEQ ID NO: 88060 - protein, 37 aa, Artificial Sequence; identical to SEQ ID NO: 6050
  Cyclic GFR-binding peptide
  MOD_RES (1)..(3)..(35)..(36): Xaa is C or S

SEQ ID NO: 88061 - protein, 32 aa, Artificial Sequence; identical to SEQ ID NO: 6053
  Cyclic GFR-binding peptide
  MOD_RES (1)..(3): Xaa is C or S

SEQ ID NO: 88062 - protein, 26 aa, Artificial Sequence
  Cyclic GFR-binding peptide
EEVIMEYKFKLLVRGNDLYLMSIPET

SEQ ID NO: 88063 - protein, 26 aa, Artificial Sequence
  Cyclic GFR-binding peptide
VIMPIKGYVKPKRGVFYLINIPSLAQ

SEQ ID NO: 88064 - protein, 37 aa, Artificial Sequence
  Cyclic GFR-binding peptide
  MOD_RES (31)..(32): Xaa is C or S
EEVIMEYKFKLLVRGNDLYLMSIPETKVPAXXTSPVR

SEQ ID NO: 88065 - protein, 25 aa, Artificial Sequence
  Cyclic GFR-binding peptide
SRVIMYHYKLVKPKRGVKYLISIPS

SEQ ID NO: 88066 - protein, 27 aa, Artificial Sequence
  Cyclic GFR-binding peptide
  MOD_RES (27)..(27): Xaa is C or S
ERYKKLTPVGMDDFYLVSIANLKTPVX

SEQ ID NO: 88067 - protein, 33 aa, Artificial Sequence; identical to SEQ ID NO: 6060
  Cyclic GFR-binding peptide
  MOD_RES (30)..(31): Xaa is C or S

SEQ ID NO: 88068 - protein, 37 aa, Artificial Sequence; identical to SEQ ID NO: 6066
  Cyclic GFR-binding peptide
  MOD_RES (1)..(33)..(34): Xaa is C or S

SEQ ID NO: 88069 - protein, 35 aa, Artificial Sequence; identical to SEQ ID NO: 6067
  Cyclic GFR-binding peptide
  MOD_RES (31)..(32): Xaa is C or S

SEQ ID NO: 88070 - protein, 32 aa, Artificial Sequence; identical to SEQ ID NO: 6070
  Cyclic GFR-binding peptide
  MOD_RES (1)..(3): Xaa is C or S

SEQ ID NO: 88071 - protein, 35 aa, Artificial Sequence
  Cyclic GFR-binding peptide
  MOD_RES (31)..(32): Xaa is C or S
DVVMGEYKFKIIQQKDNLYLMSIPEMKTPTXXPGA

SEQ ID NO: 88072 - protein, 29 aa, Artificial Sequence
  Cyclic GFR-binding peptide
EEVIMRYKKLLLVRGNDFYLMSIANTKVP

SEQ ID NO: 88073 - protein, 22 aa, Artificial Sequence
  Cyclic GFR-binding peptide
IMRYKKLIKPTKGIFYLISIAN

SEQ ID NO: 88074 - protein, 22 aa, Artificial Sequence
  Cyclic GFR-binding peptide
PIKGYVKPKRGVFYLINIPSLA

SEQ ID NO: 88075 - protein, 31 aa, Artificial Sequence; identical to SEQ ID NO: 41557
  Cyclic GFR-binding peptide
  MOD_RES (30)..(31): Xaa is C or S

SEQ ID NO: 88076 - protein, 32 aa, Artificial Sequence; identical to SEQ ID NO: 41559
  Cyclic GFR-binding peptide
  MOD_RES (28)..(29): Xaa is C or S

SEQ ID NO: 88077 - protein, 35 aa, Artificial Sequence; identical to SEQ ID NO: 34425
  Cyclic GFR-binding peptide
  MOD_RES (1)..(3): Xaa is C or S

SEQ ID NO: 88078 - protein, 36 aa, Artificial Sequence; identical to SEQ ID NO: 6075
  Cyclic GFR-binding peptide
  MOD_RES (1)..(33)..(34): Xaa is C or S

SEQ ID NO: 88079 - protein, 35 aa, Artificial Sequence; identical to SEQ ID NO: 6076
  Cyclic GFR-binding peptide
  MOD_RES (2)..(4): Xaa is C or S

SEQ ID NO: 88080 - protein, 42 aa, Artificial Sequence; identical to SEQ ID NO: 41562
  Cyclic GFR-binding peptide
  MOD_RES (2)..(4)..(36)..(37): Xaa is C or S

SEQ ID NO: 88081 - protein, 31 aa, Artificial Sequence; identical to SEQ ID NO: 6078
  Cyclic GFR-binding peptide
  MOD_RES (2)..(4): Xaa is C or S

SEQ ID NO: 88082 - protein, 24 aa, Artificial Sequence
  Cyclic GFR-binding peptide
VIMPIKGYVKPKRGVFYLINIPSL

SEQ ID NO: 88083 - protein, 23 aa, Artificial Sequence
  Cyclic GFR-binding peptide
NYHYKLIVNSSDDKYLVSIPSLQ

SEQ ID NO: 88084 - protein, 39 aa, Artificial Sequence
  Cyclic GFR-binding peptide
  MOD_RES (1)..(33)..(34): Xaa is C or S
XSEVTMNRHKRLVVNKNEDYYLISTASMKEPVXXPEPIG

SEQ ID NO: 88085 - protein, 35 aa, Artificial Sequence; identical to SEQ ID NO: 6083
  Cyclic GFR-binding peptide
  MOD_RES (31)..(32): Xaa is C or S

SEQ ID NO: 88086 - protein, 42 aa, Artificial Sequence
  Cyclic GFR-binding peptide
  MOD_RES (2)..(4)..(36)..(37): Xaa is C or S
RXGXESVAMGRHKRLYTVVGKDYYLISTASLKTPVXXAKSAK

SEQ ID NO: 88087 - protein, 34 aa, Artificial Sequence
  Cyclic GFR-binding peptide
  MOD_RES (2)..(4): Xaa is C or S
SXKXSRVIMPIKGYVKPKRGVFYLINIPSLAQPV

SEQ ID NO: 88088 - protein, 20 aa, Artificial Sequence
  Cyclic GFR-binding peptide
PIKGYIVNNSSDFYLVNIPS

SEQ ID NO: 88089 - protein, 31 aa, Artificial Sequence
  Cyclic GFR-binding peptide
  MOD_RES (29)..(30): Xaa is C or S
VIMEYKFKLLVRGNDLYLMSIPETKVPAXXT

SEQ ID NO: 88090 - protein, 37 aa, Artificial Sequence; identical to SEQ ID NO: 41576
  Cyclic GFR-binding peptide
  MOD_RES (2)..(34)..(35): Xaa is C or S

SEQ ID NO: 88091 - protein, 39 aa, Artificial Sequence; identical to SEQ ID NO: 34440
  Cyclic GFR-binding peptide
  MOD_RES (1)..(3)..(34)..(35): Xaa is C or S

SEQ ID NO: 88092 - protein, 29 aa, Artificial Sequence
  Cyclic GFR-binding peptide
  MOD_RES (1)..(1): Xaa is C or S
XRDVVMGRYKKLIIQQKDNFYLMSIANMK

SEQ ID NO: 88093 - protein, 38 aa, Artificial Sequence
  Cyclic GFR-binding peptide
  MOD_RES (2)..(4)..(36)..(37): Xaa is C or S
SXGXRDVVMGEYKFKIIQQKDNLYLMSIPEMKTPTXXP

SEQ ID NO: 88094 - protein, 32 aa, Artificial Sequence; identical to SEQ ID NO: 34443
  Cyclic GFR-binding peptide
  MOD_RES (1)..(1): Xaa is C or S

SEQ ID NO: 88095 - protein, 31 aa, Artificial Sequence; identical to SEQ ID NO: 6090
  Cyclic GFR-binding peptide
  MOD_RES (1)..(3): Xaa is C or S

SEQ ID NO: 88096 - protein, 35 aa, Artificial Sequence; identical to SEQ ID NO: 34447
  Cyclic GFR-binding peptide
  MOD_RES (31)..(32): Xaa is C or S

SEQ ID NO: 88097 - protein, 35 aa, Artificial Sequence; identical to SEQ ID NO: 6091
  Cyclic GFR-binding peptide
  MOD_RES (1)..(3)..(35): Xaa is C or S

SEQ ID NO: 88098 - protein, 37 aa, Artificial Sequence; identical to SEQ ID NO: 34449
  Cyclic GFR-binding peptide
  MOD_RES (2)..(34)..(35): Xaa is C or S

SEQ ID NO: 88099 - protein, 25 aa, Artificial Sequence
  Cyclic GFR-binding peptide
VVMDEYKFKVVNNASDLYLISIPEL

SEQ ID NO: 88100 - protein, 22 aa, Artificial Sequence
  Cyclic GFR-binding peptide
MGYHYKLYTVVGKDKYLISIPS

SEQ ID NO: 88101 - protein, 25 aa, Artificial Sequence
  Cyclic GFR-binding peptide
YHYKLIVNSSDDKYLVSIPSLKTPA

SEQ ID NO: 88102 - protein, 33 aa, Artificial Sequence; identical to SEQ ID NO: 6096
  Cyclic GFR-binding peptide
  MOD_RES (30)..(31): Xaa is C or S

SEQ ID NO: 88103 - protein, 36 aa, Artificial Sequence; identical to SEQ ID NO: 34457
  Cyclic GFR-binding peptide
  MOD_RES (1)..(3)..(34)..(35): Xaa is C or S

SEQ ID NO: 88104 - protein, 36 aa, Artificial Sequence; identical to SEQ ID NO: 6100
  Cyclic GFR-binding peptide
  MOD_RES (2)..(4)..(35)..(36): Xaa is C or S

SEQ ID NO: 88105 - protein, 31 aa, Artificial Sequence
  Cyclic GFR-binding peptide
  MOD_RES (31)..(31): Xaa is C or S
EVTMNRHKRLVVNKNEDYYLISTASMKEPVX

SEQ ID NO: 88106 - protein, 23 aa, Artificial Sequence
  Cyclic GFR-binding peptide
VMGRHKRLIIQQKDNYYLMSTAS

SEQ ID NO: 88107 - protein, 25 aa, Artificial Sequence
  Cyclic GFR-binding peptide
NRHKRLIVNSSDDYYLVSTASLQTP

SEQ ID NO: 88108 - protein, 32 aa, Artificial Sequence; identical to SEQ ID NO: 41603
  Cyclic GFR-binding peptide
  MOD_RES (28)..(29): Xaa is C or S

SEQ ID NO: 88109 - protein, 29 aa, Artificial Sequence
  Cyclic GFR-binding peptide
  MOD_RES (2)..(4): Xaa is C or S
SXKXSKVVMRHKRLVKPTRGVYYLISTAS

SEQ ID NO: 88110 - protein, 29 aa, Artificial Sequence
  Cyclic GFR-binding peptide
  MOD_RES (2)..(2): Xaa is C or S
GXAKVVMNEYKFKIVNNSSDLYLVSIPEL

SEQ ID NO: 88111 - protein, 24 aa, Artificial Sequence
  Cyclic GFR-binding peptide
IMRYKKLVKPKRGVFYLISIANLA

SEQ ID NO: 88112 - protein, 26 aa, Artificial Sequence
  Cyclic GFR-binding peptide
AVSMGERHKRLTPVGMDDYYLVSTAS

SEQ ID NO: 88113 - protein, 29 aa, Artificial Sequence
  Cyclic GFR-binding peptide
EVVMDYHYKLVVKENEDKYLMSIPSLETP

SEQ ID NO: 88114 - protein, 33 aa, Artificial Sequence; identical to SEQ ID NO: 6115
  Cyclic GFR-binding peptide
  MOD_RES (28)..(29): Xaa is C or S

SEQ ID NO: 88115 - protein, 28 aa, Artificial Sequence
  Cyclic GFR-binding peptide
VMERYKKLVVKDYEDFYLMSIANLETPV

SEQ ID NO: 88116 - protein, 28 aa, Artificial Sequence
  Cyclic GFR-binding peptide
  MOD_RES (1)..(1): Xaa is C or S
XSRVIMRHKRLVKPKRGVYYLISTASLA

SEQ ID NO: 88117 - protein, 32 aa, Artificial Sequence
  Cyclic GFR-binding peptide
  MOD_RES (27)..(28): Xaa is C or S
DYHYKLVVNNASDKYLISIPSLRTPVXXTPPT

SEQ ID NO: 88118 - protein, 29 aa, Artificial Sequence
  Cyclic GFR-binding peptide
  MOD_RES (1)..(3): Xaa is C or S
XKXSKVIMEYKFKIKPTKGILYLISIPEL

SEQ ID NO: 88119 - protein, 29 aa, Artificial Sequence
  Cyclic GFR-binding peptide
  MOD_RES (27)..(28): Xaa is C or S
NPIKGYIVNSSDDFYLVNIPSLQTPAXXP

SEQ ID NO: 88120 - protein, 24 aa, Artificial Sequence
  Cyclic GFR-binding peptide
VVMEYKFKVKPTRGVLYLISIPEL

SEQ ID NO: 88121 - protein, 35 aa, Artificial Sequence; identical to SEQ ID NO: 16519
  Cyclic GFR-binding peptide
  MOD_RES (30)..(31): Xaa is C or S

SEQ ID NO: 88122 - protein, 28 aa, Artificial Sequence
  Cyclic GFR-binding peptide
  MOD_RES (1)..(1): Xaa is C or S
XSEVVMDYHYKLVVNNASDKYLISIPSL

SEQ ID NO: 88123 - protein, 28 aa, Artificial Sequence
  Cyclic GFR-binding peptide
  MOD_RES (26)..(27): Xaa is C or S
RHKRLIIQQKDNYYLMSTASMKTPTXXP

SEQ ID NO: 88124 - protein, 36 aa, Artificial Sequence; identical to SEQ ID NO: 34478
  Cyclic GFR-binding peptide
  MOD_RES (32)..(33): Xaa is C or S

SEQ ID NO: 88125 - protein, 36 aa, Artificial Sequence; identical to SEQ ID NO: 6121
  Cyclic GFR-binding peptide
  MOD_RES (32)..(33): Xaa is C or S

SEQ ID NO: 88126 - protein, 39 aa, Artificial Sequence
  Cyclic GFR-binding peptide
  MOD_RES (1)..(33)..(34): Xaa is C or S
XSEVVMDYHYKLVVNNASDKYLISIPSLRTPVXXTPPTS

SEQ ID NO: 88127 - protein, 29 aa, Artificial Sequence
  Cyclic GFR-binding peptide
  MOD_RES (2)..(2): Xaa is C or S
AXSEVTMNRHKRLVVNKNEDYYLISTASM

SEQ ID NO: 88128 - protein, 20 aa, Artificial Sequence
  Cyclic GFR-binding peptide
RYKKLVKPTRGVFYLISIAN

SEQ ID NO: 88129 - protein, 21 aa, Artificial Sequence
  Cyclic GFR-binding peptide
EYKFKVVKENEDLYLMSIPEL

SEQ ID NO: 88130 - protein, 23 aa, Artificial Sequence
  Cyclic GFR-binding peptide
NPIKGYIVNSSDDFYLVNIPSLQ

SEQ ID NO: 88131 - protein, 29 aa, Artificial Sequence
  Cyclic GFR-binding peptide
VVMNPIKGYIVNSSDDFYLVNIPSLQTPA

SEQ ID NO: 88132 - protein, 30 aa, Artificial Sequence; identical to SEQ ID NO: 6132
  Cyclic GFR-binding peptide
  MOD_RES (2)..(2): Xaa is C or S

SEQ ID NO: 88133 - protein, 33 aa, Artificial Sequence; identical to SEQ ID NO: 34487
  Cyclic GFR-binding peptide
  MOD_RES (30)..(31): Xaa is C or S

SEQ ID NO: 88134 - protein, 31 aa, Artificial Sequence; identical to SEQ ID NO: 41628
  Cyclic GFR-binding peptide
  MOD_RES (1)..(1): Xaa is C or S

SEQ ID NO: 88135 - protein, 27 aa, Artificial Sequence
  Cyclic GFR-binding peptide
  MOD_RES (27)..(27): Xaa is C or S
MRYKKLVKPKRGVFYLISIANLAQPVX

SEQ ID NO: 88136 - protein, 31 aa, Artificial Sequence; identical to SEQ ID NO: 6136
  Cyclic GFR-binding peptide
  MOD_RES (29)..(30): Xaa is C or S

SEQ ID NO: 88137 - protein, 26 aa, Artificial Sequence
  Cyclic GFR-binding peptide
RVIMRYKKLVKPKRGVFYLISIANLA

SEQ ID NO: 88138 - protein, 41 aa, Artificial Sequence; identical to SEQ ID NO: 6138
  Cyclic GFR-binding peptide
  MOD_RES (2)..(4)..(36)..(37): Xaa is C or S

SEQ ID NO: 88139 - protein, 37 aa, Artificial Sequence
  Cyclic GFR-binding peptide
  MOD_RES (1)..(33)..(34): Xaa is C or S
XAEVVMDRHKRLVVNNAADYYLISTASLRAPVXXSAP

SEQ ID NO: 88140 - protein, 32 aa, Artificial Sequence; identical to SEQ ID NO: 34492
  Cyclic GFR-binding peptide
  MOD_RES (26)..(26): Xaa is C or S

SEQ ID NO: 88141 - protein, 33 aa, Artificial Sequence; identical to SEQ ID NO: 6140
  Cyclic GFR-binding peptide
  MOD_RES (2)..(4): Xaa is C or S

SEQ ID NO: 88142 - protein, 32 aa, Artificial Sequence; identical to SEQ ID NO: 34496
  Cyclic GFR-binding peptide
  MOD_RES (26)..(27): Xaa is C or S

SEQ ID NO: 88143 - protein, 34 aa, Artificial Sequence
  Cyclic GFR-binding peptide
  MOD_RES (1)..(32)..(33): Xaa is C or S
XEEVIMRHKRLLLVRGNDYYLMSTASTKVPAXXT

SEQ ID NO: 88144 - protein, 32 aa, Artificial Sequence
  Cyclic GFR-binding peptide
  MOD_RES (1)..(32): Xaa is C or S
XSKVIMPIKGYIKPTKGIFYLINIPSLDQSVX

SEQ ID NO: 88145 - protein, 26 aa, Artificial Sequence
  Cyclic GFR-binding peptide
  MOD_RES (26)..(26): Xaa is C or S
PIKGYVKPTRGVFYLINIPSLDQPVX

SEQ ID NO: 88146 - protein, 35 aa, Artificial Sequence; identical to SEQ ID NO: 6155
  Cyclic GFR-binding peptide
  MOD_RES (31)..(32): Xaa is C or S

SEQ ID NO: 88147 - protein, 39 aa, Artificial Sequence; identical to SEQ ID NO: 34508
  Cyclic GFR-binding peptide
  MOD_RES (2)..(34)..(35): Xaa is C or S

SEQ ID NO: 88148 - protein, 36 aa, Artificial Sequence; identical to SEQ ID NO: 6156
  Cyclic GFR-binding peptide
  MOD_RES (1)..(33)..(34): Xaa is C or S

SEQ ID NO: 88149 - protein, 33 aa, Artificial Sequence
  Cyclic GFR-binding peptide
  MOD_RES (31)..(32): Xaa is C or S
EVVMDRHKRLVVNNAADYYLISTASLRAPVXXS

SEQ ID NO: 88150 - protein, 30 aa, Artificial Sequence; identical to SEQ ID NO: 34511
  Cyclic GFR-binding peptide
  MOD_RES (2)..(2): Xaa is C or S

SEQ ID NO: 88151 - protein, 34 aa, Artificial Sequence; identical to SEQ ID NO: 6159
  Cyclic GFR-binding peptide
  MOD_RES (30)..(31): Xaa is C or S

SEQ ID NO: 88152 - protein, 28 aa, Artificial Sequence
  Cyclic GFR-binding peptide
SEVVMDEYKFKVVNNASDLYLISIPELR

SEQ ID NO: 88153 - protein, 37 aa, Artificial Sequence; identical to SEQ ID NO: 34515
  Cyclic GFR-binding peptide
  MOD_RES (2)..(4)..(36)..(37): Xaa is C or S

SEQ ID NO: 88154 - protein, 21 aa, Artificial Sequence
  Cyclic GFR-binding peptide
DEYKFKVVNNASDLYLISIPE

SEQ ID NO: 88155 - protein, 25 aa, Artificial Sequence
  Cyclic GFR-binding peptide
RVVMNEYKFKIVNSSDDLYLVSIPE

SEQ ID NO: 88156 - protein, 26 aa, Artificial Sequence
  Cyclic GFR-binding peptide
  MOD_RES (26)..(26): Xaa is C or S
EYKFKIVNSSDDLYLVSIPELQTPAX

SEQ ID NO: 88157 - protein, 26 aa, Artificial Sequence
  Cyclic GFR-binding peptide
VMNRYKKLIVNNSSDFYLVSIANLKT

SEQ ID NO: 88158 - protein, 27 aa, Artificial Sequence
  Cyclic GFR-binding peptide
  MOD_RES (26)..(27): Xaa is C or S
YHYKLIVNSSDDKYLVSIPSLQTPAXX

SEQ ID NO: 88159 - protein, 25 aa, Artificial Sequence
  Cyclic GFR-binding peptide
RYKKLLLVRGNDFYLMSIANTKVPA

SEQ ID NO: 88160 - protein, 29 aa, Artificial Sequence
  Cyclic GFR-binding peptide
VVMNPIKGYIVNSSDDFYLVNIPSLKTPA

SEQ ID NO: 88161 - protein, 29 aa, Artificial Sequence
  Cyclic GFR-binding peptide
  MOD_RES (1)..(1): Xaa is C or S
XAEVVMDEYKFKVVNNAADLYLISIPELR

SEQ ID NO: 88162 - protein, 32 aa, Artificial Sequence; identical to SEQ ID NO: 6166
  Cyclic GFR-binding peptide
  MOD_RES (1)..(3): Xaa is C or S

SEQ ID NO: 88163 - protein, 35 aa, Artificial Sequence; identical to SEQ ID NO: 6167
  Cyclic GFR-binding peptide
  MOD_RES (2)..(33)..(34): Xaa is C or S

SEQ ID NO: 88164 - protein, 32 aa, Artificial Sequence; identical to SEQ ID NO: 34527
  Cyclic GFR-binding peptide
  MOD_RES (26)..(27): Xaa is C or S

SEQ ID NO: 88165 - protein, 22 aa, Artificial Sequence
  Cyclic GFR-binding peptide
MNEYKFKIVNSSDDLYLVSIPE

SEQ ID NO: 88166 - protein, 40 aa, Artificial Sequence; identical to SEQ ID NO: 6171
  Cyclic GFR-binding peptide
  MOD_RES (2)..(34)..(35): Xaa is C or S

SEQ ID NO: 88167 - protein, 31 aa, Artificial Sequence; identical to SEQ ID NO: 34536
  Cyclic GFR-binding peptide
  MOD_RES (31)..(31): Xaa is C or S

SEQ ID NO: 88168 - protein, 27 aa, Artificial Sequence
  Cyclic GFR-binding peptide
  MOD_RES (27)..(27): Xaa is C or S
NRHKRLVVNKNEDYYLISTASMKEPVX

SEQ ID NO: 88169 - protein, 33 aa, Artificial Sequence; identical to SEQ ID NO: 6173
  Cyclic GFR-binding peptide
  MOD_RES (1)..(32)..(33): Xaa is C or S

SEQ ID NO: 88170 - protein, 28 aa, Artificial Sequence
  Cyclic GFR-binding peptide
  MOD_RES (2)..(2): Xaa is C or S
KXSKVIMEYKFKIKPTKGILYLISIPEL

SEQ ID NO: 88171 - protein, 23 aa, Artificial Sequence
  Cyclic GFR-binding peptide
IMRHKRLIKPTKGIYYLISTASL

SEQ ID NO: 88172 - protein, 37 aa, Artificial Sequence; identical to SEQ ID NO: 6175
  Cyclic GFR-binding peptide
  MOD_RES (31)..(32): Xaa is C or S

SEQ ID NO: 88173 - protein, 31 aa, Artificial Sequence; identical to SEQ ID NO: 6176
  Cyclic GFR-binding peptide
  MOD_RES (31)..(31): Xaa is C or S

SEQ ID NO: 88174 - protein, 30 aa, Artificial Sequence; identical to SEQ ID NO: 41675
  Cyclic GFR-binding peptide
  MOD_RES (30)..(30): Xaa is C or S

SEQ ID NO: 88175 - protein, 38 aa, Artificial Sequence; identical to SEQ ID NO: 41678
  Cyclic GFR-binding peptide
  MOD_RES (2)..(34)..(35): Xaa is C or S

SEQ ID NO: 88176 - protein, 34 aa, Artificial Sequence; identical to SEQ ID NO: 34543
  Cyclic GFR-binding peptide
  MOD_RES (29)..(30): Xaa is C or S

SEQ ID NO: 88177 - protein, 29 aa, Artificial Sequence
  Cyclic GFR-binding peptide
  MOD_RES (2)..(2): Xaa is C or S
GXAEVVMDPIKGYVVNNAADFYLINIPSL

SEQ ID NO: 88178 - protein, 30 aa, Artificial Sequence; identical to SEQ ID NO: 6177
  Cyclic GFR-binding peptide
  MOD_RES (26)..(27): Xaa is C or S

SEQ ID NO: 88179 - protein, 23 aa, Artificial Sequence
  Cyclic GFR-binding peptide
RHKRLVKPKRGVYYLISTASLAQ

SEQ ID NO: 88180 - protein, 33 aa, Artificial Sequence
  Cyclic GFR-binding peptide
  MOD_RES (27)..(28): Xaa is C or S
NPIKGYVVNKNEDFYLINIPSMKEPVXXPEPIG

SEQ ID NO: 88181 - protein, 31 aa, Artificial Sequence; identical to SEQ ID NO: 34548
  Cyclic GFR-binding peptide
  MOD_RES (2)..(4): Xaa is C or S

SEQ ID NO: 88182 - protein, 36 aa, Artificial Sequence; identical to SEQ ID NO: 6183
  Cyclic GFR-binding peptide
  MOD_RES (1)..(3)..(35)..(36): Xaa is C or S

SEQ ID NO: 88183 - protein, 28 aa, Artificial Sequence
  Cyclic GFR-binding peptide
VVMEYHYKLVVKDYEDKYLMSIPSLETP

SEQ ID NO: 88184 - protein, 42 aa, Artificial Sequence
  Cyclic GFR-binding peptide
  MOD_RES (2)..(4)..(36)..(37): Xaa is C or S
RXAXSEVTMNYHYKLVVNKNEDKYLISIPSMKEPVXXPEPIG

SEQ ID NO: 88185 - protein, 26 aa, Artificial Sequence
  Cyclic GFR-binding peptide
IMEYKFKLLVRGNDLYLMSIPETKVP

SEQ ID NO: 88186 - protein, 32 aa, Artificial Sequence; identical to SEQ ID NO: 6188
  Cyclic GFR-binding peptide
  MOD_RES (2)..(2): Xaa is C or S

SEQ ID NO: 88187 - protein, 31 aa, Artificial Sequence
  Cyclic GFR-binding peptide
  MOD_RES (1)..(1): Xaa is C or S
XSEVTMNEYKFKVVNKNEDLYLISIPEMKEP

SEQ ID NO: 88188 - protein, 24 aa, Artificial Sequence
  Cyclic GFR-binding peptide
NRYKKLIVNNSSDFYLVSIANLKT

SEQ ID NO: 88189 - protein, 34 aa, Artificial Sequence; identical to SEQ ID NO: 34557
  Cyclic GFR-binding peptide
  MOD_RES (2)..(4): Xaa is C or S

SEQ ID NO: 88190 - protein, 29 aa, Artificial Sequence
  Cyclic GFR-binding peptide
  MOD_RES (27)..(28): Xaa is C or S
DYHYKLVVNNASDKYLISIPSLRTPVXXT

SEQ ID NO: 88191 - protein, 35 aa, Artificial Sequence
  Cyclic GFR-binding peptide
  MOD_RES (1)..(3)..(35): Xaa is C or S
XAXSEVTMNPIKGYVVNKNEDFYLINIPSMKEPVX

SEQ ID NO: 88192 - protein, 32 aa, Artificial Sequence
  Cyclic GFR-binding peptide
  MOD_RES (29)..(30): Xaa is C or S
TMNPIKGYVVNKNEDFYLINIPSMKEPVXXPE

SEQ ID NO: 88193 - protein, 40 aa, Artificial Sequence; identical to SEQ ID NO: 34559
  Cyclic GFR-binding peptide
  MOD_RES (1)..(3)..(35)..(36): Xaa is C or S

SEQ ID NO: 88194 - protein, 30 aa, Artificial Sequence
  Cyclic GFR-binding peptide
  MOD_RES (29)..(30): Xaa is C or S
TMNEYKFKVVNKNEDLYLISIPEMKEPVXX

SEQ ID NO: 88195 - protein, 25 aa, Artificial Sequence
  Cyclic GFR-binding peptide
VVMYHYKLVKPTRGVKYLISIPSLD

SEQ ID NO: 88196 - protein, 26 aa, Artificial Sequence
  Cyclic GFR-binding peptide
MGRHKRLYTVVGKDYYLISTASLKTP

SEQ ID NO: 88197 - protein, 27 aa, Artificial Sequence
  Cyclic GFR-binding peptide
  MOD_RES (1)..(1): Xaa is C or S
XSRVIMRHKRLVKPKRGVYYLISTASL

SEQ ID NO: 88198 - protein, 36 aa, Artificial Sequence; identical to SEQ ID NO: 41701
  Cyclic GFR-binding peptide
  MOD_RES (31)..(32): Xaa is C or S

SEQ ID NO: 88199 - protein, 30 aa, Artificial Sequence; identical to SEQ ID NO: 34569
  Cyclic GFR-binding peptide
  MOD_RES (26)..(27): Xaa is C or S

SEQ ID NO: 88200 - protein, 37 aa, Artificial Sequence
  Cyclic GFR-binding peptide
  MOD_RES (32)..(33): Xaa is C or S
SEVTMNYHYKLVVNKNEDKYLISIPSMKEPVXXPEPI

SEQ ID NO: 88201 - protein, 27 aa, Artificial Sequence
  Cyclic GFR-binding peptide
SKVIMPIKGYIKPTKGIFYLINIPSLD

SEQ ID NO: 88202 - protein, 34 aa, Artificial Sequence; identical to SEQ ID NO: 6204
  Cyclic GFR-binding peptide
  MOD_RES (30)..(30): Xaa is C or S

SEQ ID NO: 88203 - protein, 33 aa, Artificial Sequence; identical to SEQ ID NO: 34571
  Cyclic GFR-binding peptide
  MOD_RES (28)..(29): Xaa is C or S

SEQ ID NO: 88204 - protein, 28 aa, Artificial Sequence
  Cyclic GFR-binding peptide
ARVVMNRHKRLIVNSSDDYYLVSTASLQ

SEQ ID NO: 88205 - protein, 26 aa, Artificial Sequence
  Cyclic GFR-binding peptide
TMNEYKFKVVNKNEDLYLISIPEMKE

SEQ ID NO: 88206 - protein, 42 aa, Artificial Sequence; identical to SEQ ID NO: 6207
  Cyclic GFR-binding peptide
  MOD_RES (1)..(3)..(36)..(37): Xaa is C or S

SEQ ID NO: 88207 - protein, 32 aa, Artificial Sequence; identical to SEQ ID NO: 6208
  Cyclic GFR-binding peptide
  MOD_RES (26)..(27): Xaa is C or S

SEQ ID NO: 88208 - protein, 35 aa, Artificial Sequence; identical to SEQ ID NO: 41709
  Cyclic GFR-binding peptide
  MOD_RES (30)..(30): Xaa is C or S

SEQ ID NO: 88209 - protein, 29 aa, Artificial Sequence
  Cyclic GFR-binding peptide
  MOD_RES (29)..(29): Xaa is C or S
VMNPIKGYIVNNSSDFYLVNIPSLKTPAX

SEQ ID NO: 88210 - protein, 30 aa, Artificial Sequence
  Cyclic GFR-binding peptide
  MOD_RES (29)..(30): Xaa is C or S
VIMPIKGYVKPKRGVFYLINIPSLAQPVXX

SEQ ID NO: 88211 - protein, 39 aa, Artificial Sequence
  Cyclic GFR-binding peptide
  MOD_RES (1)..(3)..(35)..(36): Xaa is C or S
XAXSEVTMNRHKRLVVNKNEDYYLISTASMKEPVXXPEP

SEQ ID NO: 88212 - protein, 29 aa, Artificial Sequence
  Cyclic GFR-binding peptide
  MOD_RES (1)..(1): Xaa is C or S
XEAVSMGEEYKFKTPVGMDDLYLVSIPEL

SEQ ID NO: 88213 - protein, 27 aa, Artificial Sequence
  Cyclic GFR-binding peptide
EVVMDRYKKLVVNNASDFYLISIANLR

SEQ ID NO: 88214 - protein, 32 aa, Artificial Sequence; identical to SEQ ID NO: 41715
  Cyclic GFR-binding peptide
  MOD_RES (2)..(2): Xaa is C or S

SEQ ID NO: 88215 - protein, 28 aa, Artificial Sequence
  Cyclic GFR-binding peptide
SRVIMPIKGYVKPKRGVFYLINIPSLAQ

SEQ ID NO: 88216 - protein, 31 aa, Artificial Sequence; identical to SEQ ID NO: 76666
  Cyclic GFR-binding peptide
  MOD_RES (2)..(4): Xaa is C or S

SEQ ID NO: 88217 - protein, 31 aa, Artificial Sequence; identical to SEQ ID NO: 6215
  Cyclic GFR-binding peptide
  MOD_RES (2)..(2): Xaa is C or S

SEQ ID NO: 88218 - protein, 22 aa, Artificial Sequence
  Cyclic GFR-binding peptide
YHYKLVVNNASDKYLISIPSLR

SEQ ID NO: 88219 - protein, 30 aa, Artificial Sequence; identical to SEQ ID NO: 6219
  Cyclic GFR-binding peptide

SEQ ID NO: 88220 - protein, 37 aa, Artificial Sequence; identical to SEQ ID NO: 16626
  Cyclic GFR-binding peptide
  MOD_RES (32)..(33): Xaa is C or S

SEQ ID NO: 88221 - protein, 32 aa, Artificial Sequence; identical to SEQ ID NO: 34579
  Cyclic GFR-binding peptide
  MOD_RES (31)..(32): Xaa is C or S

SEQ ID NO: 88222 - protein, 31 aa, Artificial Sequence
  Cyclic GFR-binding peptide
  MOD_RES (1)..(1): Xaa is C or S
XRDVVMGEYKFKIIQQKDNLYLMSIPEMKTP

SEQ ID NO: 88223 - protein, 20 aa, Artificial Sequence
  Cyclic GFR-binding peptide
RYKKLVVNNAADFYLISIAN

SEQ ID NO: 88224 - protein, 42 aa, Artificial Sequence; identical to SEQ ID NO: 6225
  Cyclic GFR-binding peptide
  MOD_RES (2)..(4)..(36)..(37): Xaa is C or S

SEQ ID NO: 88225 - protein, 26 aa, Artificial Sequence
  Cyclic GFR-binding peptide
IMRYKKLVKPKRGVFYLISIANLAQP

SEQ ID NO: 88226 - protein, 34 aa, Artificial Sequence; identical to SEQ ID NO: 6227
  Cyclic GFR-binding peptide
  MOD_RES (31)..(32): Xaa is C or S

SEQ ID NO: 88227 - protein, 39 aa, Artificial Sequence; identical to SEQ ID NO: 34587
  Cyclic GFR-binding peptide
  MOD_RES (2)..(4)..(36)..(37): Xaa is C or S

SEQ ID NO: 88228 - protein, 27 aa, Artificial Sequence
  Cyclic GFR-binding peptide
VMDRHKRLVVKENEDYYLMSTASLETP

SEQ ID NO: 88229 - protein, 21 aa, Artificial Sequence
  Cyclic GFR-binding peptide
NRHKRLIVNSSDDYYLVSTAS

SEQ ID NO: 88230 - protein, 29 aa, Artificial Sequence
  Cyclic GFR-binding peptide
  MOD_RES (29)..(29): Xaa is C or S
VMDRYKKLVVKENEDFYLMSIANLETPVX

SEQ ID NO: 88231 - protein, 33 aa, Artificial Sequence; identical to SEQ ID NO: 6234
  Cyclic GFR-binding peptide
  MOD_RES (1)..(3): Xaa is C or S

SEQ ID NO: 88232 - protein, 31 aa, Artificial Sequence; identical to SEQ ID NO: 76679
  Cyclic GFR-binding peptide
  MOD_RES (27)..(28): Xaa is C or S

SEQ ID NO: 88233 - protein, 39 aa, Artificial Sequence; identical to SEQ ID NO: 34594
  Cyclic GFR-binding peptide
  MOD_RES (1)..(33)..(34): Xaa is C or S

SEQ ID NO: 88234 - protein, 39 aa, Artificial Sequence; identical to SEQ ID NO: 41735
  Cyclic GFR-binding peptide
  MOD_RES (2)..(4)..(36): Xaa is C or S

SEQ ID NO: 88235 - protein, 34 aa, Artificial Sequence; identical to SEQ ID NO: 6235
  Cyclic GFR-binding peptide
  MOD_RES (28)..(29): Xaa is C or S

SEQ ID NO: 88236 - protein, 34 aa, Artificial Sequence; identical to SEQ ID NO: 6236
  Cyclic GFR-binding peptide
  MOD_RES (29)..(30): Xaa is C or S

SEQ ID NO: 88237 - protein, 35 aa, Artificial Sequence; identical to SEQ ID NO: 6237
  Cyclic GFR-binding peptide
  MOD_RES (1)..(3)..(35): Xaa is C or S

SEQ ID NO: 88238 - protein, 32 aa, Artificial Sequence; identical to SEQ ID NO: 41738
  Cyclic GFR-binding peptide
  MOD_RES (27)..(28): Xaa is C or S

SEQ ID NO: 88239 - protein, 32 aa, Artificial Sequence
  Cyclic GFR-binding peptide
  MOD_RES (2)..(4): Xaa is C or S
SXGXRDVVMGRHKRLIIQQKDNYYLMSTASMK

SEQ ID NO: 88240 - protein, 26 aa, Artificial Sequence
  Cyclic GFR-binding peptide
VIMRYKKLLLVRGNDFYLMSIANTKV

SEQ ID NO: 88241 - protein, 28 aa, Artificial Sequence
  Cyclic GFR-binding peptide
  MOD_RES (26)..(27): Xaa is C or S
RHKRLVKPKRGVYYLISTASLAQPVXXP

SEQ ID NO: 88242 - protein, 33 aa, Artificial Sequence
  Cyclic GFR-binding peptide
  MOD_RES (1)..(3): Xaa is C or S
XGXSEVVMDYHYKLVVNNASDKYLISIPSLRTP

SEQ ID NO: 88243 - protein, 27 aa, Artificial Sequence
  Cyclic GFR-binding peptide
AEVVMDYHYKLVVNNAADKYLISIPSL

SEQ ID NO: 88244 - protein, 30 aa, Artificial Sequence; identical to SEQ ID NO: 41742
  Cyclic GFR-binding peptide
  MOD_RES (26)..(26): Xaa is C or S

SEQ ID NO: 88245 - protein, 28 aa, Artificial Sequence
  Cyclic GFR-binding peptide
  MOD_RES (1)..(1): Xaa is C or S
XSEVVMDRYKKLVVNNASDFYLISIANL

SEQ ID NO: 88246 - protein, 24 aa, Artificial Sequence
  Cyclic GFR-binding peptide
AMGPIKGYYTVVGKDFYLINIPSL

SEQ ID NO: 88247 - protein, 35 aa, Artificial Sequence; identical to SEQ ID NO: 6250
  Cyclic GFR-binding peptide
  MOD_RES (29)..(30): Xaa is C or S

SEQ ID NO: 88248 - protein, 29 aa, Artificial Sequence
  Cyclic GFR-binding peptide
SEVTMNYHYKLVVNKNEDKYLISIPSMKE

SEQ ID NO: 88249 - protein, 36 aa, Artificial Sequence; identical to SEQ ID NO: 6252
  Cyclic GFR-binding peptide
  MOD_RES (30)..(30): Xaa is C or S

SEQ ID NO: 88250 - protein, 31 aa, Artificial Sequence
  Cyclic GFR-binding peptide
  MOD_RES (2)..(4): Xaa is C or S
SXKXSKVVMPIKGYVKPTRGVFYLINIPSLD

SEQ ID NO: 88251 - protein, 24 aa, Artificial Sequence
  Cyclic GFR-binding peptide
YHYKLIKPTKGIKYLISIPSLDQS

SEQ ID NO: 88252 - protein, 34 aa, Artificial Sequence; identical to SEQ ID NO: 6254
  Cyclic GFR-binding peptide
  MOD_RES (32)..(33): Xaa is C or S

SEQ ID NO: 88253 - protein, 31 aa, Artificial Sequence; identical to SEQ ID NO: 6255
  Cyclic GFR-binding peptide
  MOD_RES (29)..(30): Xaa is C or S

SEQ ID NO: 88254 - protein, 30 aa, Artificial Sequence; identical to SEQ ID NO: 34612
  Cyclic GFR-binding peptide
  MOD_RES (30)..(30): Xaa is C or S

SEQ ID NO: 88255 - protein, 28 aa, Artificial Sequence
  Cyclic GFR-binding peptide
SVAMGRYKKLYTVVGKDFYLISIANLKT

SEQ ID NO: 88256 - protein, 21 aa, Artificial Sequence
  Cyclic GFR-binding peptide
YHYKLVVKENEDKYLMSIPSL

SEQ ID NO: 88257 - protein, 29 aa, Artificial Sequence
  Cyclic GFR-binding peptide
  MOD_RES (1)..(1): Xaa is C or S
XEAVSMGERHKRLTPVGMDDYYLVSTASL

SEQ ID NO: 88258 - protein, 37 aa, Artificial Sequence; identical to SEQ ID NO: 6259
  Cyclic GFR-binding peptide
  MOD_RES (1)..(33)..(34): Xaa is C or S

SEQ ID NO: 88259 - protein, 32 aa, Artificial Sequence; identical to SEQ ID NO: 6260
  Cyclic GFR-binding peptide
  MOD_RES (31)..(32): Xaa is C or S

SEQ ID NO: 88260 - protein, 28 aa, Artificial Sequence
  Cyclic GFR-binding peptide
VMDEYKFKVVNNASDLYLISIPELRTPV

SEQ ID NO: 88261 - protein, 27 aa, Artificial Sequence
  Cyclic GFR-binding peptide
SEVVMDEYKFKVVNNASDLYLISIPEL

SEQ ID NO: 88262 - protein, 26 aa, Artificial Sequence
  Cyclic GFR-binding peptide
  MOD_RES (26)..(26): Xaa is C or S
YHYKLIKPTKGIKYLISIPSLDQSVX

SEQ ID NO: 88263 - protein, 23 aa, Artificial Sequence
  Cyclic GFR-binding peptide
MDYHYKLVVNNASDKYLISIPSL

SEQ ID NO: 88264 - protein, 38 aa, Artificial Sequence; identical to SEQ ID NO: 6269
  Cyclic GFR-binding peptide
  MOD_RES (2)..(34): Xaa is C or S

SEQ ID NO: 88265 - protein, 32 aa, Artificial Sequence; identical to SEQ ID NO: 6270
  Cyclic GFR-binding peptide
  MOD_RES (26)..(26): Xaa is C or S

SEQ ID NO: 88266 - protein, 32 aa, Artificial Sequence
  Cyclic GFR-binding peptide
  MOD_RES (1)..(1): Xaa is C or S
XSEVTMNPIKGYVVNKNEDFYLINIPSMKEPV

SEQ ID NO: 88267 - protein, 26 aa, Artificial Sequence
  Cyclic GFR-binding peptide
VIMRYKKLIKPTKGIFYLISIANLDQ

SEQ ID NO: 88268 - protein, 31 aa, Artificial Sequence; identical to SEQ ID NO: 6276
  Cyclic GFR-binding peptide
  MOD_RES (2)..(2): Xaa is C or S

SEQ ID NO: 88269 - protein, 26 aa, Artificial Sequence
  Cyclic GFR-binding peptide
EYHYKLVVKDYEDKYLMSIPSLETPV

SEQ ID NO: 88270 - protein, 31 aa, Artificial Sequence
  Cyclic GFR-binding peptide
  MOD_RES (2)..(4): Xaa is C or S
RXGXSEVVMDRHKRLVVNNASDYYLISTASL

SEQ ID NO: 88271 - protein, 27 aa, Artificial Sequence
  Cyclic GFR-binding peptide
EVVMDYHYKLVVKENEDKYLMSIPSLE

SEQ ID NO: 88272 - protein, 37 aa, Artificial Sequence; identical to SEQ ID NO: 41762
  Cyclic GFR-binding peptide
  MOD_RES (2)..(4)..(36)..(37): Xaa is C or S

SEQ ID NO: 88273 - protein, 36 aa, Artificial Sequence; identical to SEQ ID NO: 34636
  Cyclic GFR-binding peptide
  MOD_RES (1)..(3)..(35)..(36): Xaa is C or S

SEQ ID NO: 88274 - protein, 35 aa, Artificial Sequence
  Cyclic GFR-binding peptide
  MOD_RES (2)..(34)..(35): Xaa is C or S
GXRDVVMGRHKRLIIQQKDNYYLMSTASMKTPTXX

SEQ ID NO: 88275 - protein, 25 aa, Artificial Sequence
  Cyclic GFR-binding peptide
PIKGYIVNSSDDFYLVNIPSLQTPA

SEQ ID NO: 88276 - protein, 31 aa, Artificial Sequence; identical to SEQ ID NO: 6293
  Cyclic GFR-binding peptide
  MOD_RES (30)..(31): Xaa is C or S

SEQ ID NO: 88277 - protein, 32 aa, Artificial Sequence; identical to SEQ ID NO: 6295
  Cyclic GFR-binding peptide
  MOD_RES (31)..(32): Xaa is C or S

SEQ ID NO: 88278 - protein, 20 aa, Artificial Sequence
  Cyclic GFR-binding peptide
RYKKLVVKDYEDFYLMSIAN

SEQ ID NO: 88279 - protein, 32 aa, Artificial Sequence; identical to SEQ ID NO: 34647
  Cyclic GFR-binding peptide
  MOD_RES (29)..(30): Xaa is C or S

SEQ ID NO: 88280 - protein, 28 aa, Artificial Sequence
  Cyclic GFR-binding peptide
  MOD_RES (26)..(27): Xaa is C or S
RYKKLVVNKNEDFYLISIANMKEPVXXP

SEQ ID NO: 88281 - protein, 33 aa, Artificial Sequence
  Cyclic GFR-binding peptide
  MOD_RES (30)..(31): Xaa is C or S
VVMDRHKRLVVNNASDYYLISTASLRTPVXXTP

SEQ ID NO: 88282 - protein, 38 aa, Artificial Sequence; identical to SEQ ID NO: 6297
  Cyclic GFR-binding peptide
  MOD_RES (2)..(4)..(36)..(37): Xaa is C or S

SEQ ID NO: 88283 - protein, 27 aa, Artificial Sequence
  Cyclic GFR-binding peptide
SMGEEYKFKTPVGMDDLYLVSIPELKT

SEQ ID NO: 88284 - protein, 36 aa, Artificial Sequence; identical to SEQ ID NO: 6310
  Cyclic GFR-binding peptide
  MOD_RES (30)..(31): Xaa is C or S

SEQ ID NO: 88285 - protein, 33 aa, Artificial Sequence; identical to SEQ ID NO: 34661
  Cyclic GFR-binding peptide
  MOD_RES (32)..(33): Xaa is C or S

SEQ ID NO: 88286 - protein, 38 aa, Artificial Sequence; identical to SEQ ID NO: 34663
  Cyclic GFR-binding peptide
  MOD_RES (2)..(4)..(36)..(37): Xaa is C or S

SEQ ID NO: 88287 - protein, 23 aa, Artificial Sequence
  Cyclic GFR-binding peptide
RYKKLIKPTKGIFYLISIANLDQ

SEQ ID NO: 88288 - protein, 31 aa, Artificial Sequence; identical to SEQ ID NO: 6316
  Cyclic GFR-binding peptide
  MOD_RES (2)..(4): Xaa is C or S

SEQ ID NO: 88289 - protein, 31 aa, Artificial Sequence
  Cyclic GFR-binding peptide
  MOD_RES (2)..(2): Xaa is C or S
GXRDVVMGRHKRLIIQQKDNYYLMSTASMKT

SEQ ID NO: 88290 - protein, 31 aa, Artificial Sequence; identical to SEQ ID NO: 76723
  Cyclic GFR-binding peptide
  MOD_RES (30)..(31): Xaa is C or S

SEQ ID NO: 88291 - protein, 26 aa, Artificial Sequence
  Cyclic GFR-binding peptide
MPIKGYIKPTKGIFYLINIPSLDQSV

SEQ ID NO: 88292 - protein, 27 aa, Artificial Sequence
  Cyclic GFR-binding peptide
  MOD_RES (27)..(27): Xaa is C or S
EPIKGYVVKDYEDFYLMNIPSLETPVX

SEQ ID NO: 88293 - protein, 34 aa, Artificial Sequence; identical to SEQ ID NO: 6321
  Cyclic GFR-binding peptide
  MOD_RES (30)..(31): Xaa is C or S

SEQ ID NO: 88294 - protein, 26 aa, Artificial Sequence
  Cyclic GFR-binding peptide
SEVTMNEYKFKVVNKNEDLYLISIPE

SEQ ID NO: 88295 - protein, 34 aa, Artificial Sequence; identical to SEQ ID NO: 34673
  Cyclic GFR-binding peptide
  MOD_RES (1)..(3): Xaa is C or S

SEQ ID NO: 88296 - protein, 28 aa, Artificial Sequence
  Cyclic GFR-binding peptide
AEVVMDYHYKLVVNNAADKYLISIPSLR

SEQ ID NO: 88297 - protein, 40 aa, Artificial Sequence; identical to SEQ ID NO: 34679
  Cyclic GFR-binding peptide
  MOD_RES (2)..(34)..(35): Xaa is C or S

SEQ ID NO: 88298 - protein, 36 aa, Artificial Sequence; identical to SEQ ID NO: 6325
  Cyclic GFR-binding peptide
  MOD_RES (31)..(31): Xaa is C or S

SEQ ID NO: 88299 - protein, 30 aa, Artificial Sequence; identical to SEQ ID NO: 76733
  Cyclic GFR-binding peptide
  MOD_RES (29)..(30): Xaa is C or S

SEQ ID NO: 88300 - protein, 34 aa, Artificial Sequence; identical to SEQ ID NO: 34683
  Cyclic GFR-binding peptide
  MOD_RES (32)..(32): Xaa is C or S

SEQ ID NO: 88301 - protein, 25 aa, Artificial Sequence
  Cyclic GFR-binding peptide
VAMGYHYKLYTVVGKDKYLISIPSL

SEQ ID NO: 88302 - protein, 39 aa, Artificial Sequence
  Cyclic GFR-binding peptide
  MOD_RES (2)..(33)..(34): Xaa is C or S
KXSKVVMPIKGYVKPTRGVFYLINIPSLDQPVXXPSASA

SEQ ID NO: 88303 - protein, 32 aa, Artificial Sequence; identical to SEQ ID NO: 6334
  Cyclic GFR-binding peptide
  MOD_RES (26)..(27): Xaa is C or S

SEQ ID NO: 88304 - protein, 27 aa, Artificial Sequence
  Cyclic GFR-binding peptide
  MOD_RES (26)..(27): Xaa is C or S
PIKGYVKPTRGVFYLINIPSLDQPVXX

SEQ ID NO: 88305 - protein, 32 aa, Artificial Sequence; identical to SEQ ID NO: 76738
  Cyclic GFR-binding peptide
  MOD_RES (26)..(27): Xaa is C or S

SEQ ID NO: 88306 - protein, 36 aa, Artificial Sequence; identical to SEQ ID NO: 6336
  Cyclic GFR-binding peptide
  MOD_RES (2)..(34)..(35): Xaa is C or S

SEQ ID NO: 88307 - protein, 27 aa, Artificial Sequence
  Cyclic GFR-binding peptide
  MOD_RES (1)..(1): Xaa is C or S
XSRVIMYHYKLVKPKRGVKYLISIPSL

SEQ ID NO: 88308 - protein, 27 aa, Artificial Sequence
  Cyclic GFR-binding peptide
  MOD_RES (2)..(2): Xaa is C or S
KXSKVVMRHKRLVKPTRGVYYLISTAS

SEQ ID NO: 88309 - protein, 34 aa, Artificial Sequence; identical to SEQ ID NO: 6340
  Cyclic GFR-binding peptide
  MOD_RES (29)..(30): Xaa is C or S

SEQ ID NO: 88310 - protein, 35 aa, Artificial Sequence; identical to SEQ ID NO: 6343
  Cyclic GFR-binding peptide
  MOD_RES (2)..(4)..(35): Xaa is C or S

SEQ ID NO: 88311 - protein, 35 aa, Artificial Sequence
  Cyclic GFR-binding peptide
  MOD_RES (2)..(34)..(35): Xaa is C or S
GXRDVVMGEYKFKIIQQKDNLYLMSIPEMKTPTXX

SEQ ID NO: 88312 - protein, 36 aa, Artificial Sequence; identical to SEQ ID NO: 41818
  Cyclic GFR-binding peptide
  MOD_RES (2)..(34): Xaa is C or S

SEQ ID NO: 88313 - protein, 31 aa, Artificial Sequence
  Cyclic GFR-binding peptide
  MOD_RES (2)..(2): Xaa is C or S
GXRDVVMGEYKFKIIQQKDNLYLMSIPEMKT

SEQ ID NO: 88314 - protein, 28 aa, Artificial Sequence
  Cyclic GFR-binding peptide
SRVVMNPIKGYIVNSSDDFYLVNIPSLK

SEQ ID NO: 88315 - protein, 28 aa, Artificial Sequence
  Cyclic GFR-binding peptide
GEVVMDRYKKLVVKENEDFYLMSIANLE

SEQ ID NO: 88316 - protein, 36 aa, Artificial Sequence
  Cyclic GFR-binding peptide
  MOD_RES (31)..(32): Xaa is C or S
EVTMNYHYKLVVNKNEDKYLISIPSMKEPVXXPEPI

SEQ ID NO: 88317 - protein, 25 aa, Artificial Sequence
  Cyclic GFR-binding peptide
PIKGYIKPTKGIFYLINIPSLDQSV

SEQ ID NO: 88318 - protein, 33 aa, Artificial Sequence; identical to SEQ ID NO: 6348
  Cyclic GFR-binding peptide
  MOD_RES (31)..(32): Xaa is C or S

SEQ ID NO: 88319 - protein, 28 aa, Artificial Sequence
  Cyclic GFR-binding peptide
  MOD_RES (1)..(1): Xaa is C or S
XAKVVMNEYKFKIVNNSSDLYLVSIPEL

SEQ ID NO: 88320 - protein, 37 aa, Artificial Sequence; identical to SEQ ID NO: 34709
  Cyclic GFR-binding peptide
  MOD_RES (2)..(34)..(35): Xaa is C or S

SEQ ID NO: 88321 - protein, 31 aa, Artificial Sequence; identical to SEQ ID NO: 6351
  Cyclic GFR-binding peptide
  MOD_RES (30)..(31): Xaa is C or S

SEQ ID NO: 88322 - protein, 35 aa, Artificial Sequence
  Cyclic GFR-binding peptide
  MOD_RES (5)..(6): Xaa is C or S
IPEPXXVPEKMEPISILYLDENKNVVKFKYENMTV

SEQ ID NO: 88323 - protein, 32 aa, Artificial Sequence
  Cyclic GFR-binding peptide
  MOD_RES (4)..(5): Xaa is C or S
PPTXXVPTRLSPISILYKDSANNVVLKYHYDM

SEQ ID NO: 88324 - protein, 27 aa, Artificial Sequence
  Cyclic GFR-binding peptide
PTKLSPISVLYKDDSSNVILKYHYNMV

SEQ ID NO: 88325 - protein, 36 aa, Artificial Sequence
  Cyclic GFR-binding peptide
  MOD_RES (5)..(6): Xaa is C or S
IPEPXXVPEKMEPISILYLDENKNVVKFKYENMTVE

SEQ ID NO: 88326 - protein, 31 aa, Artificial Sequence
  Cyclic GFR-binding peptide
  MOD_RES (1)..(1): Xaa is C or S
XVPQALSPINILYFVGRKPKVYGKIPMIVRS

SEQ ID NO: 88327 - protein, 29 aa, Artificial Sequence
  Cyclic GFR-binding peptide
  MOD_RES (3)..(4): Xaa is C or S
KAXXVPTELSATSMLYYDEYDKVVLRKHR

SEQ ID NO: 88328 - protein, 31 aa, Artificial Sequence; identical to SEQ ID NO: 6362
  Cyclic GFR-binding peptide
  MOD_RES (30)..(30): Xaa is C or S

SEQ ID NO: 88329 - protein, 32 aa, Artificial Sequence
  Cyclic GFR-binding peptide
  MOD_RES (1)..(2): Xaa is C or S
XXVPEKMSATSILYYDENKNVVLRKHRNMTVE

SEQ ID NO: 88330 - protein, 40 aa, Artificial Sequence; identical to SEQ ID NO: 34723
  Cyclic GFR-binding peptide
  MOD_RES (4)..(5)..(37)..(39): Xaa is C or S

SEQ ID NO: 88331 - protein, 28 aa, Artificial Sequence
  Cyclic GFR-binding peptide
  MOD_RES (2)..(3): Xaa is C or S
TXXVPTRLSPISILYKDSANNVVLKYHY

SEQ ID NO: 88332 - protein, 28 aa, Artificial Sequence
  Cyclic GFR-binding peptide
PQALNAISILYFVGRKPKVLKKYRMIVR

SEQ ID NO: 88333 - protein, 25 aa, Artificial Sequence
  Cyclic GFR-binding peptide
LNAISMLYFDENEKVVLKKYRDMVV

SEQ ID NO: 88334 - protein, 39 aa, Artificial Sequence
  Cyclic GFR-binding peptide
  MOD_RES (6)..(7)..(39): Xaa is C or S
GIPEPXXVPEKMNAISILYFDENKNVVLKKYRNMTVESX

SEQ ID NO: 88335 - protein, 29 aa, Artificial Sequence
  Cyclic GFR-binding peptide
  MOD_RES (27)..(29): Xaa is C or S
SPISILYKDSANNVVLKYHYDMVVESXGX

SEQ ID NO: 88336 - protein, 36 aa, Artificial Sequence; identical to SEQ ID NO: 6371
  Cyclic GFR-binding peptide
  MOD_RES (3)..(4)..(36): Xaa is C or S

SEQ ID NO: 88337 - protein, 25 aa, Artificial Sequence
  Cyclic GFR-binding peptide
KLSATSVLYYDDSSNVILRKHRNMV

SEQ ID NO: 88338 - protein, 32 aa, Artificial Sequence; identical to SEQ ID NO: 6373
  Cyclic GFR-binding peptide
  MOD_RES (1)..(32): Xaa is C or S

SEQ ID NO: 88339 - protein, 27 aa, Artificial Sequence
  Cyclic GFR-binding peptide
  MOD_RES (1)..(1): Xaa is C or S
XAPTKLNAISVLYFDSSNNVILKKYRN

SEQ ID NO: 88340 - protein, 32 aa, Artificial Sequence
  Cyclic GFR-binding peptide
  MOD_RES (4)..(5): Xaa is C or S
PPTXXVPTRLSATSILYYDSANNVVLRKHRDM

SEQ ID NO: 88341 - protein, 33 aa, Artificial Sequence
  Cyclic GFR-binding peptide
  MOD_RES (1)..(33): Xaa is C or S
XVPTRLSPISILYKDSANNVVLKYHYDMVVESX

SEQ ID NO: 88342 - protein, 32 aa, Artificial Sequence
  Cyclic GFR-binding peptide
  MOD_RES (1)..(1): Xaa is C or S
XVPTRLEPISILYLDSANNVVKFKYEDMVVES

SEQ ID NO: 88343 - protein, 22 aa, Artificial Sequence
  Cyclic GFR-binding peptide
LSPINILYFDAANNVVYGKIPD

SEQ ID NO: 88344 - protein, 35 aa, Artificial Sequence; identical to SEQ ID NO: 6380
  Cyclic GFR-binding peptide
  MOD_RES (4)..(5): Xaa is C or S

SEQ ID NO: 88345 - protein, 29 aa, Artificial Sequence
  Cyclic GFR-binding peptide
  MOD_RES (4)..(4): Xaa is C or S
KPTXAPTKLEPISVLYLDDSSNVIKFKYE

SEQ ID NO: 88346 - protein, 36 aa, Artificial Sequence; identical to SEQ ID NO: 41859
  Cyclic GFR-binding peptide
  MOD_RES (4)..(5): Xaa is C or S

SEQ ID NO: 88347 - protein, 33 aa, Artificial Sequence
  Cyclic GFR-binding peptide
  MOD_RES (4)..(5): Xaa is C or S
PPTXXVPTRLSPISILYKDSANNVVLKYHYDMV

SEQ ID NO: 88348 - protein, 28 aa, Artificial Sequence
  Cyclic GFR-binding peptide
VPTELEPISMLYLDEYDKVVKFKYEEMV

SEQ ID NO: 88349 - protein, 37 aa, Artificial Sequence; identical to SEQ ID NO: 34746
  Cyclic GFR-binding peptide
  MOD_RES (4)..(5)..(36): Xaa is C or S

SEQ ID NO: 88350 - protein, 23 aa, Artificial Sequence
  Cyclic GFR-binding peptide
TRLEPISILYLDSANNVVKFKYE

SEQ ID NO: 88351 - protein, 30 aa, Artificial Sequence; identical to SEQ ID NO: 41871
  Cyclic GFR-binding peptide
  MOD_RES (28)..(30): Xaa is C or S

SEQ ID NO: 88352 - protein, 32 aa, Artificial Sequence; identical to SEQ ID NO: 6383
  Cyclic GFR-binding peptide
  MOD_RES (2)..(3): Xaa is C or S

SEQ ID NO: 88353 - protein, 33 aa, Artificial Sequence
  Cyclic GFR-binding peptide
  MOD_RES (1)..(2)..(33): Xaa is C or S
XXVPQALSPINILYFVGRKPKVYGKIPMIVRSX

SEQ ID NO: 88354 - protein, 35 aa, Artificial Sequence; identical to SEQ ID NO: 6385
  Cyclic GFR-binding peptide
  MOD_RES (5)..(6): Xaa is C or S

SEQ ID NO: 88355 - protein, 39 aa, Artificial Sequence; identical to SEQ ID NO: 6386
  Cyclic GFR-binding peptide
  MOD_RES (4)..(5)..(37)..(39): Xaa is C or S

SEQ ID NO: 88356 - protein, 34 aa, Artificial Sequence; identical to SEQ ID NO: 34754
  Cyclic GFR-binding peptide
  MOD_RES (1)..(2)..(34): Xaa is C or S

SEQ ID NO: 88357 - protein, 23 aa, Artificial Sequence
  Cyclic GFR-binding peptide
QDLSATSILYYVGRTPKVLRKHR

SEQ ID NO: 88358 - protein, 32 aa, Artificial Sequence; identical to SEQ ID NO: 6389
  Cyclic GFR-binding peptide
  MOD_RES (1)..(2): Xaa is C or S

SEQ ID NO: 88359 - protein, 24 aa, Artificial Sequence
  Cyclic GFR-binding peptide
ELEPISMLYLDENEKVVKFKYEDM

SEQ ID NO: 88360 - protein, 29 aa, Artificial Sequence
  Cyclic GFR-binding peptide
VPQALSPINILYFVGRKPKVYGKIPMIVR

SEQ ID NO: 88361 - protein, 31 aa, Artificial Sequence; identical to SEQ ID NO: 6390
  Cyclic GFR-binding peptide
  MOD_RES (3)..(4): Xaa is C or S

SEQ ID NO: 88362 - protein, 35 aa, Artificial Sequence; identical to SEQ ID NO: 34758
  Cyclic GFR-binding peptide
  MOD_RES (1)..(33)..(35): Xaa is C or S

SEQ ID NO: 88363 - protein, 33 aa, Artificial Sequence
  Cyclic GFR-binding peptide
  MOD_RES (31)..(33): Xaa is C or S
PARLSATSILYYDAANNVVLRKHRDMVVEAXGX

SEQ ID NO: 88364 - protein, 22 aa, Artificial Sequence
  Cyclic GFR-binding peptide
SPINMLYFDEYDKVVYGKIPEM

SEQ ID NO: 88365 - protein, 35 aa, Artificial Sequence; identical to SEQ ID NO: 6397
  Cyclic GFR-binding peptide
  MOD_RES (2)..(3)..(35): Xaa is C or S

SEQ ID NO: 88366 - protein, 34 aa, Artificial Sequence
  Cyclic GFR-binding peptide
  MOD_RES (2)..(3)..(34): Xaa is C or S
PXXVPQDLSPINILYFVGRTPKVYGKIPMVVKSX

SEQ ID NO: 88367 - protein, 32 aa, Artificial Sequence; identical to SEQ ID NO: 6398
  Cyclic GFR-binding peptide
  MOD_RES (2)..(3): Xaa is C or S

SEQ ID NO: 88368 - protein, 25 aa, Artificial Sequence
  Cyclic GFR-binding peptide
SPINILYFDAANNVVYGKIPDMVVE

SEQ ID NO: 88369 - protein, 37 aa, Artificial Sequence
  Cyclic GFR-binding peptide
  MOD_RES (5)..(6): Xaa is C or S
IPEPXXVPEKMNAISILYFDENKNVVLKKYRNMTVES

SEQ ID NO: 88370 - protein, 29 aa, Artificial Sequence
  Cyclic GFR-binding peptide
PTRLSPISILYKDSANNVVLKYHYDMVVE

SEQ ID NO: 88371 - protein, 29 aa, Artificial Sequence
  Cyclic GFR-binding peptide
PQALNAISILYFVGRKPKVLKKYRMIVRS

SEQ ID NO: 88372 - protein, 31 aa, Artificial Sequence; identical to SEQ ID NO: 34762
  Cyclic GFR-binding peptide
  MOD_RES (1)..(1): Xaa is C or S

SEQ ID NO: 88373 - protein, 35 aa, Artificial Sequence; identical to SEQ ID NO: 6404
  Cyclic GFR-binding peptide
  MOD_RES (5)..(6): Xaa is C or S

SEQ ID NO: 88374 - protein, 30 aa, Artificial Sequence; identical to SEQ ID NO: 6406
  Cyclic GFR-binding peptide
  MOD_RES (3)..(4): Xaa is C or S

SEQ ID NO: 88375 - protein, 35 aa, Artificial Sequence
  Cyclic GFR-binding peptide
  MOD_RES (3)..(4): Xaa is C or S
EPXXVPEKMSATSILYYDENKNVVLRKHRNMTVES

SEQ ID NO: 88376 - protein, 35 aa, Artificial Sequence; identical to SEQ ID NO: 6408
  Cyclic GFR-binding peptide
  MOD_RES (6)..(7): Xaa is C or S

SEQ ID NO: 88377 - protein, 32 aa, Artificial Sequence; identical to SEQ ID NO: 6409
  Cyclic GFR-binding peptide
  MOD_RES (32)..(32): Xaa is C or S

SEQ ID NO: 88378 - protein, 32 aa, Artificial Sequence; identical to SEQ ID NO: 41898
  Cyclic GFR-binding peptide
  MOD_RES (31)..(31): Xaa is C or S

SEQ ID NO: 88379 - protein, 34 aa, Artificial Sequence; identical to SEQ ID NO: 6411
  Cyclic GFR-binding peptide
  MOD_RES (4)..(5): Xaa is C or S

SEQ ID NO: 88380 - protein, 24 aa, Artificial Sequence
  Cyclic GFR-binding peptide
TKLEPISVLYLDDSSNVIKFKYEN

SEQ ID NO: 88381 - protein, 35 aa, Artificial Sequence
  Cyclic GFR-binding peptide
  MOD_RES (6)..(7): Xaa is C or S
RVPSTXXAPVKTSATSMLYYDNGRVLLLRKHRMIV

SEQ ID NO: 88382 - protein, 42 aa, Artificial Sequence; identical to SEQ ID NO: 34770
  Cyclic GFR-binding peptide
  MOD_RES (6)..(7)..(39)..(41): Xaa is C or S

SEQ ID NO: 88383 - protein, 33 aa, Artificial Sequence; identical to SEQ ID NO: 6412
  Cyclic GFR-binding peptide
  MOD_RES (3)..(4): Xaa is C or S

SEQ ID NO: 88384 - protein, 38 aa, Artificial Sequence; identical to SEQ ID NO: 6413
  Cyclic GFR-binding peptide
  MOD_RES (4)..(5)..(37): Xaa is C or S

SEQ ID NO: 88385 - protein, 37 aa, Artificial Sequence; identical to SEQ ID NO: 41904
  Cyclic GFR-binding peptide
  MOD_RES (6)..(7): Xaa is C or S

SEQ ID NO: 88386 - protein, 23 aa, Artificial Sequence
  Cyclic GFR-binding peptide
KLEPISVLYLDDMGVPTKFKYEE

SEQ ID NO: 88387 - protein, 37 aa, Artificial Sequence
  Cyclic GFR-binding peptide
  MOD_RES (6)..(7): Xaa is C or S
GSAGPXXTPTKMSPISMLYKNDKQQIILKYHYGMVVD

SEQ ID NO: 88388 - protein, 32 aa, Artificial Sequence; identical to SEQ ID NO: 34773
  Cyclic GFR-binding peptide
  MOD_RES (4)..(5): Xaa is C or S

SEQ ID NO: 88389 - protein, 33 aa, Artificial Sequence; identical to SEQ ID NO: 6416
  Cyclic GFR-binding peptide
  MOD_RES (4)..(5): Xaa is C or S

SEQ ID NO: 88390 - protein, 25 aa, Artificial Sequence
  Cyclic GFR-binding peptide
ELEPISMLYLDENEKVVKFKYEDMV

SEQ ID NO: 88391 - protein, 31 aa, Artificial Sequence; identical to SEQ ID NO: 34782
  Cyclic GFR-binding peptide
  MOD_RES (1)..(2): Xaa is C or S

SEQ ID NO: 88392 - protein, 24 aa, Artificial Sequence
  Cyclic GFR-binding peptide
SPINMLYFDENEKVVYGKIPDMVV

SEQ ID NO: 88393 - protein, 34 aa, Artificial Sequence; identical to SEQ ID NO: 76789
  Cyclic GFR-binding peptide
  MOD_RES (2)..(3)..(34): Xaa is C or S

SEQ ID NO: 88394 - protein, 40 aa, Artificial Sequence; identical to SEQ ID NO: 34785
  Cyclic GFR-binding peptide
  MOD_RES (5)..(6)..(38)..(40): Xaa is C or S

SEQ ID NO: 88395 - protein, 26 aa, Artificial Sequence
  Cyclic GFR-binding peptide
  MOD_RES (1)..(1): Xaa is C or S
XVPTELNAISMLYFDEYDKVVLKKYR

SEQ ID NO: 88396 - protein, 31 aa, Artificial Sequence; identical to SEQ ID NO: 6420
  Cyclic GFR-binding peptide
  MOD_RES (3)..(4): Xaa is C or S

SEQ ID NO: 88397 - protein, 40 aa, Artificial Sequence; identical to SEQ ID NO: 6421
  Cyclic GFR-binding peptide
  MOD_RES (4)..(5)..(38)..(40): Xaa is C or S

SEQ ID NO: 88398 - protein, 26 aa, Artificial Sequence
  Cyclic GFR-binding peptide
TELSPINMLYFDENEKVVYGKIPDMV

SEQ ID NO: 88399 - protein, 20 aa, Artificial Sequence
  Cyclic GFR-binding peptide
SATSILYYVGRTPKVLRKHR

SEQ ID NO: 88400 - protein, 37 aa, Artificial Sequence; identical to SEQ ID NO: 41932
  Cyclic GFR-binding peptide
  MOD_RES (3)..(4)..(36): Xaa is C or S

SEQ ID NO: 88401 - protein, 31 aa, Artificial Sequence; identical to SEQ ID NO: 6429
  Cyclic GFR-binding peptide
  MOD_RES (29)..(31): Xaa is C or S

SEQ ID NO: 88402 - protein, 25 aa, Artificial Sequence
  Cyclic GFR-binding peptide
TNAISMLYFDNGRVLLLKKYRMIVE

SEQ ID NO: 88403 - protein, 27 aa, Artificial Sequence
  Cyclic GFR-binding peptide
TKLSPISILYKDKGVVTYLKYHYGMAV

SEQ ID NO: 88404 - protein, 32 aa, Artificial Sequence; identical to SEQ ID NO: 41938
  Cyclic GFR-binding peptide
  MOD_RES (1)..(1): Xaa is C or S

SEQ ID NO: 88405 - protein, 26 aa, Artificial Sequence
  Cyclic GFR-binding peptide
  MOD_RES (1)..(1): Xaa is C or S
XVPARLEPISILYLDAANNVVKFKYE

SEQ ID NO: 88406 - protein, 26 aa, Artificial Sequence
  Cyclic GFR-binding peptide
VPEKMNAISILYFDENKNVVLKKYRN

SEQ ID NO: 88407 - protein, 26 aa, Artificial Sequence
  Cyclic GFR-binding peptide
  MOD_RES (1)..(1): Xaa is C or S
XVPTELSPISMLYKDENEKVVLKYHY

SEQ ID NO: 88408 - protein, 37 aa, Artificial Sequence; identical to SEQ ID NO: 34798
  Cyclic GFR-binding peptide
  MOD_RES (3)..(4)..(36): Xaa is C or S

SEQ ID NO: 88409 - protein, 30 aa, Artificial Sequence
  Cyclic GFR-binding peptide
VSQDLSPINILYFIGKTPKIYGKIPMIVKS

SEQ ID NO: 88410 - protein, 30 aa, Artificial Sequence; identical to SEQ ID NO: 6434
  Cyclic GFR-binding peptide

SEQ ID NO: 88411 - protein, 33 aa, Artificial Sequence; identical to SEQ ID NO: 6435
  Cyclic GFR-binding peptide
  MOD_RES (30)..(32): Xaa is C or S

SEQ ID NO: 88412 - protein, 34 aa, Artificial Sequence
  Cyclic GFR-binding peptide
  MOD_RES (3)..(4): Xaa is C or S
SPXXVPQDLSPINILYFVGRTPKVYGKIPMVVKS

SEQ ID NO: 88413 - protein, 37 aa, Artificial Sequence
  Cyclic GFR-binding peptide
  MOD_RES (5)..(6): Xaa is C or S
IPEPXXVPEKMEPISILYLDENKNVVKFKYENMTVES

SEQ ID NO: 88414 - protein, 32 aa, Artificial Sequence; identical to SEQ ID NO: 6441
  Cyclic GFR-binding peptide
  MOD_RES (29)..(31): Xaa is C or S

SEQ ID NO: 88415 - protein, 30 aa, Artificial Sequence; identical to SEQ ID NO: 6445
  Cyclic GFR-binding peptide
  MOD_RES (1)..(2): Xaa is C or S

SEQ ID NO: 88416 - protein, 26 aa, Artificial Sequence
  Cyclic GFR-binding peptide
SPISILYKDSANNVVLKYHYDMVVES

SEQ ID NO: 88417 - protein, 21 aa, Artificial Sequence
  Cyclic GFR-binding peptide
SATSMLYYDENEKVVLRKHRD

SEQ ID NO: 88418 - protein, 34 aa, Artificial Sequence; identical to SEQ ID NO: 34811
  Cyclic GFR-binding peptide
  MOD_RES (6)..(7): Xaa is C or S

SEQ ID NO: 88419 - protein, 34 aa, Artificial Sequence; identical to SEQ ID NO: 41976
  Cyclic GFR-binding peptide
  MOD_RES (1)..(33): Xaa is C or S

SEQ ID NO: 88420 - protein, 34 aa, Artificial Sequence; identical to SEQ ID NO: 76806
  Cyclic GFR-binding peptide
  MOD_RES (31)..(33): Xaa is C or S

SEQ ID NO: 88421 - protein, 40 aa, Artificial Sequence; identical to SEQ ID NO: 41981
  Cyclic GFR-binding peptide
  MOD_RES (4)..(5)..(37)..(39): Xaa is C or S

SEQ ID NO: 88422 - protein, 28 aa, Artificial Sequence
  Cyclic GFR-binding peptide
  MOD_RES (1)..(2): Xaa is C or S
XXVPARLSPINILYFDAANNVVYGKIPD

SEQ ID NO: 88423 - protein, 33 aa, Artificial Sequence; identical to SEQ ID NO: 34819
  Cyclic GFR-binding peptide
  MOD_RES (1)..(33): Xaa is C or S

SEQ ID NO: 88424 - protein, 30 aa, Artificial Sequence; identical to SEQ ID NO: 34820
  Cyclic GFR-binding peptide
  MOD_RES (27)..(29): Xaa is C or S

SEQ ID NO: 88425 - protein, 32 aa, Artificial Sequence; identical to SEQ ID NO: 41993
  Cyclic GFR-binding peptide
  MOD_RES (1)..(1): Xaa is C or S

SEQ ID NO: 88426 - protein, 33 aa, Artificial Sequence
  Cyclic GFR-binding peptide
  MOD_RES (1)..(2): Xaa is C or S
XXVPEKMSATSILYYDENKNVVLRKHRNMTVES

SEQ ID NO: 88427 - protein, 31 aa, Artificial Sequence; identical to SEQ ID NO: 6459
  Cyclic GFR-binding peptide

SEQ ID NO: 88428 - protein, 26 aa, Artificial Sequence
  Cyclic GFR-binding peptide
KLSPISVLYKDSSNNVILKYHYNMVV

SEQ ID NO: 88429 - protein, 36 aa, Artificial Sequence; identical to SEQ ID NO: 34825
  Cyclic GFR-binding peptide
  MOD_RES (1)..(2)..(33)..(35): Xaa is C or S

SEQ ID NO: 88430 - protein, 37 aa, Artificial Sequence; identical to SEQ ID NO: 6462
  Cyclic GFR-binding peptide
  MOD_RES (5)..(6): Xaa is C or S

SEQ ID NO: 88431 - protein, 30 aa, Artificial Sequence; identical to SEQ ID NO: 16850
  Cyclic GFR-binding peptide
  MOD_RES (28)..(30): Xaa is C or S

SEQ ID NO: 88432 - protein, 27 aa, Artificial Sequence
  Cyclic GFR-binding peptide
  MOD_RES (1)..(2): Xaa is C or S
XXAPVKTSATSMLYYDNGRVLLLRKHR

SEQ ID NO: 88433 - protein, 38 aa, Artificial Sequence; identical to SEQ ID NO: 6467
  Cyclic GFR-binding peptide
  MOD_RES (5)..(6)..(38): Xaa is C or S

SEQ ID NO: 88434 - protein, 31 aa, Artificial Sequence; identical to SEQ ID NO: 6468
  Cyclic GFR-binding peptide
  MOD_RES (4)..(5): Xaa is C or S

SEQ ID NO: 88435 - protein, 23 aa, Artificial Sequence
  Cyclic GFR-binding peptide
ELEPISMLYLDEYDKVVKFKYEE

SEQ ID NO: 88436 - protein, 39 aa, Artificial Sequence; identical to SEQ ID NO: 6470
  Cyclic GFR-binding peptide
  MOD_RES (5)..(6)..(38): Xaa is C or S

SEQ ID NO: 88437 - protein, 28 aa, Artificial Sequence
  Cyclic GFR-binding peptide
  MOD_RES (1)..(1): Xaa is C or S
XVPTRLSPISILYKDSANNVVLKYHYDM

SEQ ID NO: 88438 - protein, 28 aa, Artificial Sequence
  Cyclic GFR-binding peptide
  MOD_RES (1)..(1): Xaa is C or S
XVPTRLSATSILYYDSANNVVLRKHRDM

SEQ ID NO: 88439 - protein, 37 aa, Artificial Sequence; identical to SEQ ID NO: 6471
  Cyclic GFR-binding peptide
  MOD_RES (1)..(34)..(36): Xaa is C or S

SEQ ID NO: 88440 - protein, 24 aa, Artificial Sequence
  Cyclic GFR-binding peptide
SATSMLYYNDKQQIILRKHRGMVV

SEQ ID NO: 88441 - protein, 30 aa, Artificial Sequence; identical to SEQ ID NO: 34833
  Cyclic GFR-binding peptide

SEQ ID NO: 88442 - protein, 20 aa, Artificial Sequence
  Cyclic GFR-binding peptide
SPISILYKDSANNVVLKYHY

SEQ ID NO: 88443 - protein, 36 aa, Artificial Sequence; identical to SEQ ID NO: 6473
  Cyclic GFR-binding peptide
  MOD_RES (6)..(7): Xaa is C or S

SEQ ID NO: 88444 - protein, 26 aa, Artificial Sequence
  Cyclic GFR-binding peptide
DLSPISILYKVGRTPKVLKYHYMVVK

SEQ ID NO: 88445 - protein, 30 aa, Artificial Sequence; identical to SEQ ID NO: 6475
  Cyclic GFR-binding peptide
  MOD_RES (2)..(3): Xaa is C or S

SEQ ID NO: 88446 - protein, 37 aa, Artificial Sequence; identical to SEQ ID NO: 6476
  Cyclic GFR-binding peptide
  MOD_RES (6)..(7): Xaa is C or S

SEQ ID NO: 88447 - protein, 28 aa, Artificial Sequence
  Cyclic GFR-binding peptide
QALNAISILYFVGRKPKVLKKYRMIVRS

SEQ ID NO: 88448 - protein, 28 aa, Artificial Sequence
  Cyclic GFR-binding peptide
TRLSPISILYKDSANNVVLKYHYDMVVE

SEQ ID NO: 88449 - protein, 30 aa, Artificial Sequence; identical to SEQ ID NO: 6481
  Cyclic GFR-binding peptide
  MOD_RES (29)..(29): Xaa is C or S

SEQ ID NO: 88450 - protein, 32 aa, Artificial Sequence; identical to SEQ ID NO: 42016
  Cyclic GFR-binding peptide
  MOD_RES (2)..(3): Xaa is C or S

SEQ ID NO: 88451 - protein, 28 aa, Artificial Sequence
  Cyclic GFR-binding peptide
PTKLSPISVLYKDDSSNVILKYHYNMVV

SEQ ID NO: 88452 - protein, 37 aa, Artificial Sequence
  Cyclic GFR-binding peptide
  MOD_RES (4)..(5)..(36): Xaa is C or S
ASPXXVPQDLSPINILYFVGRTPKVYGKIPMVVKSXK

SEQ ID NO: 88453 - protein, 27 aa, Artificial Sequence
  Cyclic GFR-binding peptide
VPEKMSPINILYFDENKNVVYGKIPNM

SEQ ID NO: 88454 - protein, 35 aa, Artificial Sequence; identical to SEQ ID NO: 6486
  Cyclic GFR-binding peptide
  MOD_RES (1)..(33)..(35): Xaa is C or S

SEQ ID NO: 88455 - protein, 25 aa, Artificial Sequence
  Cyclic GFR-binding peptide
PTKLEPISVLYLDDSSNVIKFKYEN

SEQ ID NO: 88456 - protein, 23 aa, Artificial Sequence
  Cyclic GFR-binding peptide
ELSPISMLYKDEYDKVVLKYHYE

SEQ ID NO: 88457 - protein, 41 aa, Artificial Sequence; identical to SEQ ID NO: 34852
  Cyclic GFR-binding peptide
  MOD_RES (6)..(7)..(39)..(41): Xaa is C or S

SEQ ID NO: 88458 - protein, 31 aa, Artificial Sequence; identical to SEQ ID NO: 34853
  Cyclic GFR-binding peptide
  MOD_RES (3)..(4): Xaa is C or S

SEQ ID NO: 88459 - protein, 34 aa, Artificial Sequence; identical to SEQ ID NO: 42024
  Cyclic GFR-binding peptide
  MOD_RES (5)..(6): Xaa is C or S

SEQ ID NO: 88460 - protein, 23 aa, Artificial Sequence
  Cyclic GFR-binding peptide
TKLEPISVLYLDSSNNVIKFKYE

SEQ ID NO: 88461 - protein, 39 aa, Artificial Sequence; identical to SEQ ID NO: 42026
  Cyclic GFR-binding peptide
  MOD_RES (5)..(6)..(37)..(39): Xaa is C or S

SEQ ID NO: 88462 - protein, 27 aa, Artificial Sequence
  Cyclic GFR-binding peptide
PTKLSPISVLYKDSSNNVILKYHYNMV

SEQ ID NO: 88463 - protein, 42 aa, Artificial Sequence; identical to SEQ ID NO: 42028
  Cyclic GFR-binding peptide
  MOD_RES (6)..(7)..(39)..(41): Xaa is C or S

SEQ ID NO: 88464 - protein, 34 aa, Artificial Sequence; identical to SEQ ID NO: 6493
  Cyclic GFR-binding peptide
  MOD_RES (2)..(3)..(34): Xaa is C or S

SEQ ID NO: 88465 - protein, 34 aa, Artificial Sequence; identical to SEQ ID NO: 42033
  Cyclic GFR-binding peptide
  MOD_RES (4)..(5): Xaa is C or S

SEQ ID NO: 88466 - protein, 24 aa, Artificial Sequence
  Cyclic GFR-binding peptide
EPISILYLDENKNVVKFKYENMTV

SEQ ID NO: 88467 - protein, 27 aa, Artificial Sequence
  Cyclic GFR-binding peptide
PTELSPINMLYFDEYDKVVYGKIPEMV

SEQ ID NO: 88468 - protein, 26 aa, Artificial Sequence
  Cyclic GFR-binding peptide
  MOD_RES (1)..(1): Xaa is C or S
XTPTKMEPISMLYLNDKQQIIKFKYE

SEQ ID NO: 88469 - protein, 29 aa, Artificial Sequence
  Cyclic GFR-binding peptide
  MOD_RES (27)..(29): Xaa is C or S
SPINVLYFDDSSNVIYGKIPNMVVRAXGX

SEQ ID NO: 88470 - protein, 25 aa, Artificial Sequence
  Cyclic GFR-binding peptide
TQLSATSVLYYDDSSNVILRKHRNM

SEQ ID NO: 88471 - protein, 28 aa, Artificial Sequence
  Cyclic GFR-binding peptide
  MOD_RES (2)..(3): Xaa is C or S
SXXVPARLSATSILYYDAANNVVLRKHR

SEQ ID NO: 88472 - protein, 37 aa, Artificial Sequence; identical to SEQ ID NO: 42041
  Cyclic GFR-binding peptide
  MOD_RES (4)..(5)..(37): Xaa is C or S

SEQ ID NO: 88473 - protein, 34 aa, Artificial Sequence
  Cyclic GFR-binding peptide
  MOD_RES (1)..(2)..(34): Xaa is C or S
XXVPEKMSPINILYFDENKNVVYGKIPNMTVESX

SEQ ID NO: 88474 - protein, 28 aa, Artificial Sequence
  Cyclic GFR-binding peptide
  MOD_RES (28)..(28): Xaa is C or S
LSPISILYKDKGVVTYLKYHYGMAVSEX

SEQ ID NO: 88475 - protein, 22 aa, Artificial Sequence
  Cyclic GFR-binding peptide
LSPISILYKDSANNVVLKYHYD

SEQ ID NO: 88476 - protein, 30 aa, Artificial Sequence; identical to SEQ ID NO: 34867
  Cyclic GFR-binding peptide
  MOD_RES (30)..(30): Xaa is C or S

SEQ ID NO: 88477 - protein, 40 aa, Artificial Sequence; identical to SEQ ID NO: 6504
  Cyclic GFR-binding peptide
  MOD_RES (4)..(5)..(37)..(39): Xaa is C or S

SEQ ID NO: 88478 - protein, 31 aa, Artificial Sequence
  Cyclic GFR-binding peptide
  MOD_RES (1)..(1): Xaa is C or S
XTPTKMSPISMLYKNDKQQIILKYHYGMVVD

SEQ ID NO: 88479 - protein, 30 aa, Artificial Sequence
  Cyclic GFR-binding peptide
  MOD_RES (1)..(1): Xaa is C or S
XVPTRLEPISILYLDSANNVVKFKYEDMVV

SEQ ID NO: 88480 - protein, 20 aa, Artificial Sequence
  Cyclic GFR-binding peptide
SATSMLYYNDKQQIILRKHR

SEQ ID NO: 88481 - protein, 42 aa, Artificial Sequence
  Cyclic GFR-binding peptide
  MOD_RES (6)..(7)..(39)..(41): Xaa is C or S
STPPTXXVPTRLSATSILYYDSANNVVLRKHRDMVVESXGXR

SEQ ID NO: 88482 - protein, 34 aa, Artificial Sequence
  Cyclic GFR-binding peptide
  MOD_RES (1)..(32)..(34): Xaa is C or S
XVPQALSPINILYFVGRKPKVYGKIPMIVRSXKX

SEQ ID NO: 88483 - protein, 40 aa, Artificial Sequence; identical to SEQ ID NO: 34878
  Cyclic GFR-binding peptide
  MOD_RES (5)..(6)..(38)..(40): Xaa is C or S

SEQ ID NO: 88484 - protein, 38 aa, Artificial Sequence
  Cyclic GFR-binding peptide
  MOD_RES (3)..(4)..(36)..(38): Xaa is C or S
PTXXVPTRLSATSILYYDSANNVVLRKHRDMVVESXGX

SEQ ID NO: 88485 - protein, 40 aa, Artificial Sequence
  Cyclic GFR-binding peptide
  MOD_RES (6)..(7)..(39): Xaa is C or S
GSAGPXXTPTKMSPISMLYKNDKQQIILKYHYGMVVDRXG

SEQ ID NO: 88486 - protein, 37 aa, Artificial Sequence; identical to SEQ ID NO: 34884
  Cyclic GFR-binding peptide
  MOD_RES (3)..(4)..(36): Xaa is C or S

SEQ ID NO: 88487 - protein, 31 aa, Artificial Sequence; identical to SEQ ID NO: 34885
  Cyclic GFR-binding peptide
  MOD_RES (4)..(5): Xaa is C or S

SEQ ID NO: 88488 - protein, 32 aa, Artificial Sequence; identical to SEQ ID NO: 6518
  Cyclic GFR-binding peptide
  MOD_RES (1)..(2): Xaa is C or S

SEQ ID NO: 88489 - protein, 38 aa, Artificial Sequence; identical to SEQ ID NO: 6519
  Cyclic GFR-binding peptide
  MOD_RES (5)..(6)..(38): Xaa is C or S

SEQ ID NO: 88490 - protein, 37 aa, Artificial Sequence
  Cyclic GFR-binding peptide
  MOD_RES (1)..(2)..(34)..(36): Xaa is C or S
XXVPEKMEPISILYLDENKNVVKFKYENMTVESXAXR

SEQ ID NO: 88491 - protein, 30 aa, Artificial Sequence
  Cyclic GFR-binding peptide
  MOD_RES (30)..(30): Xaa is C or S
PVKTSPISMLYKDNGRVLLLKYHYMIVEEX

SEQ ID NO: 88492 - protein, 26 aa, Artificial Sequence
  Cyclic GFR-binding peptide
PTELNAISMLYFDENEKVVLKKYRDM

SEQ ID NO: 88493 - protein, 37 aa, Artificial Sequence
  Cyclic GFR-binding peptide
  MOD_RES (2)..(3)..(35)..(37): Xaa is C or S
TXXVPTRLEPISILYLDSANNVVKFKYEDMVVESXGX

SEQ ID NO: 88494 - protein, 37 aa, Artificial Sequence; identical to SEQ ID NO: 6523
  Cyclic GFR-binding peptide
  MOD_RES (3)..(4)..(35)..(37): Xaa is C or S

SEQ ID NO: 88495 - protein, 31 aa, Artificial Sequence
  Cyclic GFR-binding peptide
  MOD_RES (28)..(30): Xaa is C or S
MSPISILYKDENKNVVLKYHYNMTVESXAXR

SEQ ID NO: 88496 - protein, 38 aa, Artificial Sequence; identical to SEQ ID NO: 34894
  Cyclic GFR-binding peptide
  MOD_RES (4)..(5)..(37): Xaa is C or S

SEQ ID NO: 88497 - protein, 29 aa, Artificial Sequence
  Cyclic GFR-binding peptide
TQLSATSVLYYDDSSNVILRKHRNMVVRA

SEQ ID NO: 88498 - protein, 29 aa, Artificial Sequence
  Cyclic GFR-binding peptide
  MOD_RES (1)..(2): Xaa is C or S
XXVPTELSPINMLYFDEYDKVVYGKIPEM

SEQ ID NO: 88499 - protein, 34 aa, Artificial Sequence
  Cyclic GFR-binding peptide
  MOD_RES (1)..(32)..(34): Xaa is C or S
XAPVKTSPISMLYKDNGRVLLLKYHYMIVEEXGX

SEQ ID NO: 88500 - protein, 32 aa, Artificial Sequence; identical to SEQ ID NO: 42062
  Cyclic GFR-binding peptide
  MOD_RES (30)..(32): Xaa is C or S

SEQ ID NO: 88501 - protein, 23 aa, Artificial Sequence
  Cyclic GFR-binding peptide
TELEPISMLYLDENEKVVKFKYE

SEQ ID NO: 88502 - protein, 35 aa, Artificial Sequence; identical to SEQ ID NO: 6527
  Cyclic GFR-binding peptide
  MOD_RES (6)..(7): Xaa is C or S

SEQ ID NO: 88503 - protein, 34 aa, Artificial Sequence; identical to SEQ ID NO: 34897
  Cyclic GFR-binding peptide
  MOD_RES (4)..(5): Xaa is C or S

SEQ ID NO: 88504 - protein, 38 aa, Artificial Sequence; identical to SEQ ID NO: 76844
  Cyclic GFR-binding peptide
  MOD_RES (4)..(5)..(37): Xaa is C or S

SEQ ID NO: 88505 - protein, 26 aa, Artificial Sequence
  Cyclic GFR-binding peptide
APVKTNAISMLYFDNGRVLLLKKYRM

SEQ ID NO: 88506 - protein, 33 aa, Artificial Sequence; identical to SEQ ID NO: 6532
  Cyclic GFR-binding peptide
  MOD_RES (4)..(5): Xaa is C or S

SEQ ID NO: 88507 - protein, 36 aa, Artificial Sequence; identical to SEQ ID NO: 6533
  Cyclic GFR-binding peptide
  MOD_RES (3)..(4)..(36): Xaa is C or S

SEQ ID NO: 88508 - protein, 32 aa, Artificial Sequence; identical to SEQ ID NO: 6534
  Cyclic GFR-binding peptide
  MOD_RES (1)..(1): Xaa is C or S

SEQ ID NO: 88509 - protein, 27 aa, Artificial Sequence
  Cyclic GFR-binding peptide
  MOD_RES (1)..(2): Xaa is C or S
XXVPQDLNAISILYFVGRTPKVLKKYR

SEQ ID NO: 88510 - protein, 35 aa, Artificial Sequence; identical to SEQ ID NO: 6540
  Cyclic GFR-binding peptide
  MOD_RES (2)..(3)..(35): Xaa is C or S

SEQ ID NO: 88511 - protein, 27 aa, Artificial Sequence
  Cyclic GFR-binding peptide
APVKTSATSMLYYDNGRVLLLRKHRMI

SEQ ID NO: 88512 - protein, 36 aa, Artificial Sequence
  Cyclic GFR-binding peptide
  MOD_RES (4)..(5)..(36): Xaa is C or S
AAPXXVPQALSPINILYFVGRKPKVYGKIPMIVRSX

SEQ ID NO: 88513 - protein, 38 aa, Artificial Sequence
  Cyclic GFR-binding peptide
  MOD_RES (6)..(7): Xaa is C or S
HVPKPXXAPTKLSPISVLYKDDSSNVILKYHYNMVVRS

SEQ ID NO: 88514 - protein, 31 aa, Artificial Sequence; identical to SEQ ID NO: 6542
  Cyclic GFR-binding peptide
  MOD_RES (5)..(6): Xaa is C or S

SEQ ID NO: 88515 - protein, 40 aa, Artificial Sequence
  Cyclic GFR-binding peptide
  MOD_RES (6)..(7)..(39): Xaa is C or S
GIPEPXXVPEKMNAISILYFDENKNVVLKKYRNMTVESXA

SEQ ID NO: 88516 - protein, 20 aa, Artificial Sequence
  Cyclic GFR-binding peptide
NAISILYFDSANNVVLKKYR

SEQ ID NO: 88517 - protein, 33 aa, Artificial Sequence
  Cyclic GFR-binding peptide
  MOD_RES (3)..(4): Xaa is C or S
STXXAPVKTSPISMLYKDNGRVLLLKYHYMIVE

SEQ ID NO: 88518 - protein, 34 aa, Artificial Sequence
  Cyclic GFR-binding peptide
  MOD_RES (2)..(3): Xaa is C or S
TXXVPTRLEPISILYLDSANNVVKFKYEDMVVES

SEQ ID NO: 88519 - protein, 33 aa, Artificial Sequence; identical to SEQ ID NO: 6548
  Cyclic GFR-binding peptide
  MOD_RES (2)..(3): Xaa is C or S

SEQ ID NO: 88520 - protein, 36 aa, Artificial Sequence
  Cyclic GFR-binding peptide
  MOD_RES (1)..(33)..(35): Xaa is C or S
XVPEKMSPISILYKDENKNVVLKYHYNMTVESXAXR

SEQ ID NO: 88521 - protein, 25 aa, Artificial Sequence
  Cyclic GFR-binding peptide
RLSPISILYKDSANNVVLKYHYDMV

SEQ ID NO: 88522 - protein, 27 aa, Artificial Sequence
  Cyclic GFR-binding peptide
  MOD_RES (1)..(1): Xaa is C or S
XAPVKTSATSMLYYDNGRVLLLRKHRM

SEQ ID NO: 88523 - protein, 27 aa, Artificial Sequence
  Cyclic GFR-binding peptide
  MOD_RES (27)..(27): Xaa is C or S
LSPINILYFVGRTPKVYGKIPMVVKSX

SEQ ID NO: 88524 - protein, 31 aa, Artificial Sequence
  Cyclic GFR-binding peptide
  MOD_RES (29)..(31): Xaa is C or S
RLEPISILYLDSANNVVKFKYEDMVVESXGX

SEQ ID NO: 88525 - protein, 34 aa, Artificial Sequence
  Cyclic GFR-binding peptide
  MOD_RES (31)..(33): Xaa is C or S
VSQDLSPINILYFIGKTPKIYGKIPMIVKSXKXS

SEQ ID NO: 88526 - protein, 35 aa, Artificial Sequence; identical to SEQ ID NO: 34921
  Cyclic GFR-binding peptide
  MOD_RES (1)..(2)..(34): Xaa is C or S

SEQ ID NO: 88527 - protein, 26 aa, Artificial Sequence
  Cyclic GFR-binding peptide
APTQLSPISVLYKDDSSNVILKYHYN

SEQ ID NO: 88528 - protein, 33 aa, Artificial Sequence; identical to SEQ ID NO: 34923
  Cyclic GFR-binding peptide
  MOD_RES (3)..(4): Xaa is C or S

SEQ ID NO: 88529 - protein, 32 aa, Artificial Sequence; identical to SEQ ID NO: 42100
  Cyclic GFR-binding peptide
  MOD_RES (29)..(31): Xaa is C or S

SEQ ID NO: 88530 - protein, 22 aa, Artificial Sequence
  Cyclic GFR-binding peptide
DLEPISILYLIGKTPKIKFKYE

SEQ ID NO: 88531 - protein, 28 aa, Artificial Sequence
  Cyclic GFR-binding peptide
  MOD_RES (1)..(1): Xaa is C or S
XVPTKLNAISVLYFDDMGVPTLKKYREG

SEQ ID NO: 88532 - protein, 34 aa, Artificial Sequence; identical to SEQ ID NO: 34927
  Cyclic GFR-binding peptide
  MOD_RES (31)..(33): Xaa is C or S

SEQ ID NO: 88533 - protein, 34 aa, Artificial Sequence; identical to SEQ ID NO: 16941
  Cyclic GFR-binding peptide
  MOD_RES (2)..(3): Xaa is C or S

SEQ ID NO: 88534 - protein, 30 aa, Artificial Sequence; identical to SEQ ID NO: 42108
  Cyclic GFR-binding peptide
  MOD_RES (28)..(30): Xaa is C or S

SEQ ID NO: 88535 - protein, 27 aa, Artificial Sequence
  Cyclic GFR-binding peptide
PTRLSPISILYKDSANNVVLKYHYDMV

SEQ ID NO: 88536 - protein, 32 aa, Artificial Sequence
  Cyclic GFR-binding peptide
  MOD_RES (3)..(4): Xaa is C or S
GPXXTPTKMSATSMLYYNDKQQIILRKHRGMV

SEQ ID NO: 88537 - protein, 37 aa, Artificial Sequence; identical to SEQ ID NO: 34934
  Cyclic GFR-binding peptide
  MOD_RES (3)..(35)..(37): Xaa is C or S

SEQ ID NO: 88538 - protein, 24 aa, Artificial Sequence
  Cyclic GFR-binding peptide
EPISMLYLDNGRVLLKFKYEMIVE

SEQ ID NO: 88539 - protein, 34 aa, Artificial Sequence
  Cyclic GFR-binding peptide
  MOD_RES (32)..(34): Xaa is C or S
TPTKMSATSMLYYNDKQQIILRKHRGMVVDRXGX

SEQ ID NO: 88540 - protein, 25 aa, Artificial Sequence
  Cyclic GFR-binding peptide
RLSATSILYYDSANNVVLRKHRDMV

SEQ ID NO: 88541 - protein, 33 aa, Artificial Sequence; identical to SEQ ID NO: 6572
  Cyclic GFR-binding peptide
  MOD_RES (2)..(2): Xaa is C or S

SEQ ID NO: 88542 - protein, 37 aa, Artificial Sequence
  Cyclic GFR-binding peptide
  MOD_RES (3)..(4)..(36): Xaa is C or S
PTXXVPTRLSATSILYYDSANNVVLRKHRDMVVESXG

SEQ ID NO: 88543 - protein, 40 aa, Artificial Sequence; identical to SEQ ID NO: 6573
  Cyclic GFR-binding peptide
  MOD_RES (4)..(5)..(37)..(39): Xaa is C or S

SEQ ID NO: 88544 - protein, 29 aa, Artificial Sequence
  Cyclic GFR-binding peptide
VPTRLNAISILYFDSANNVVLKKYRDMVV

SEQ ID NO: 88545 - protein, 32 aa, Artificial Sequence; identical to SEQ ID NO: 6577
  Cyclic GFR-binding peptide
  MOD_RES (3)..(4): Xaa is C or S

SEQ ID NO: 88546 - protein, 33 aa, Artificial Sequence; identical to SEQ ID NO: 6578
  Cyclic GFR-binding peptide
  MOD_RES (4)..(5): Xaa is C or S

SEQ ID NO: 88547 - protein, 23 aa, Artificial Sequence
  Cyclic GFR-binding peptide
TKMSATSMLYYNDKQQIILRKHR

SEQ ID NO: 88548 - protein, 37 aa, Artificial Sequence
  Cyclic GFR-binding peptide
  MOD_RES (1)..(2)..(34)..(36): Xaa is C or S
XXTPTKMSATSMLYYNDKQQIILRKHRGMVVDRXGXS

SEQ ID NO: 88549 - protein, 30 aa, Artificial Sequence; identical to SEQ ID NO: 6581
  Cyclic GFR-binding peptide
  MOD_RES (4)..(5): Xaa is C or S

SEQ ID NO: 88550 - protein, 33 aa, Artificial Sequence
  Cyclic GFR-binding peptide
  MOD_RES (30)..(32): Xaa is C or S
PVKTSATSMLYYDNGRVLLLRKHRMIVEEXGXL

SEQ ID NO: 88551 - protein, 26 aa, Artificial Sequence
  Cyclic GFR-binding peptide
PTKLSPINVLYFDDSSNVIYGKIPNM

SEQ ID NO: 88552 - protein, 27 aa, Artificial Sequence
  Cyclic GFR-binding peptide
PEKMNAISILYFDENKNVVLKKYRNMT

SEQ ID NO: 88553 - protein, 37 aa, Artificial Sequence
  Cyclic GFR-binding peptide
  MOD_RES (3)..(4)..(35)..(37): Xaa is C or S
STXXAPVKTEPISMLYLDNGRVLLKFKYEMIVEEXGX

SEQ ID NO: 88554 - protein, 31 aa, Artificial Sequence
  Cyclic GFR-binding peptide
  MOD_RES (29)..(31): Xaa is C or S
QDLSPINILYFVGRTPKVYGKIPMVVKSXKX

SEQ ID NO: 88555 - protein, 26 aa, Artificial Sequence
  Cyclic GFR-binding peptide
ALSATSILYYVGRKPKVLRKHRMIVR

SEQ ID NO: 88556 - protein, 26 aa, Artificial Sequence
  Cyclic GFR-binding peptide
LSPINVLYFDSSNNVIYGKIPNMVVK

SEQ ID NO: 88557 - protein, 41 aa, Artificial Sequence; identical to SEQ ID NO: 42138
  Cyclic GFR-binding peptide
  MOD_RES (6)..(7)..(39)..(41): Xaa is C or S

SEQ ID NO: 88558 - protein, 38 aa, Artificial Sequence
  Cyclic GFR-binding peptide
  MOD_RES (3)..(4)..(36)..(38): Xaa is C or S
KAXXVPTKLSATSILYYDKGVVTYLRKHRGMAVSEXGX

SEQ ID NO: 88559 - protein, 27 aa, Artificial Sequence
  Cyclic GFR-binding peptide
  MOD_RES (1)..(2): Xaa is C or S
XXVPQDLSPISILYKVGRTPKVLKYHY

SEQ ID NO: 88560 - protein, 31 aa, Artificial Sequence; identical to SEQ ID NO: 6591
  Cyclic GFR-binding peptide
  MOD_RES (5)..(6): Xaa is C or S

SEQ ID NO: 88561 - protein, 26 aa, Artificial Sequence
  Cyclic GFR-binding peptide
PTRLSPINILYFDSANNVVYGKIPDM

SEQ ID NO: 88562 - protein, 28 aa, Artificial Sequence
  Cyclic GFR-binding peptide
  MOD_RES (2)..(3): Xaa is C or S
TXXVPTRLNAISILYFDSANNVVLKKYR

SEQ ID NO: 88563 - protein, 37 aa, Artificial Sequence; identical to SEQ ID NO: 6594
  Cyclic GFR-binding peptide
  MOD_RES (5)..(6): Xaa is C or S

SEQ ID NO: 88564 - protein, 33 aa, Artificial Sequence; identical to SEQ ID NO: 6597
  Cyclic GFR-binding peptide
  MOD_RES (6)..(7): Xaa is C or S

SEQ ID NO: 88565 - protein, 40 aa, Artificial Sequence; identical to SEQ ID NO: 6598
  Cyclic GFR-binding peptide
  MOD_RES (6)..(7)..(38)..(40): Xaa is C or S

SEQ ID NO: 88566 - protein, 28 aa, Artificial Sequence
  Cyclic GFR-binding peptide
  MOD_RES (2)..(3): Xaa is C or S
PXXVSQDLSPINILYFIGKTPKIYGKIP

SEQ ID NO: 88567 - protein, 31 aa, Artificial Sequence
  Cyclic GFR-binding peptide
  MOD_RES (29)..(31): Xaa is C or S
VKTSPISMLYKDNGRVLLLKYHYMIVEEXGX

SEQ ID NO: 88568 - protein, 33 aa, Artificial Sequence; identical to SEQ ID NO: 6600
  Cyclic GFR-binding peptide
  MOD_RES (4)..(5): Xaa is C or S

SEQ ID NO: 88569 - protein, 37 aa, Artificial Sequence; identical to SEQ ID NO: 6601
  Cyclic GFR-binding peptide
  MOD_RES (2)..(3)..(35)..(37): Xaa is C or S

SEQ ID NO: 88570 - protein, 25 aa, Artificial Sequence
  Cyclic GFR-binding peptide
LNAISILYFIGKTPKILKKYRMIVK

SEQ ID NO: 88571 - protein, 36 aa, Artificial Sequence
  Cyclic GFR-binding peptide
  MOD_RES (5)..(6): Xaa is C or S
VPSTXXAPVKTEPISMLYLDNGRVLLKFKYEMIVEE

SEQ ID NO: 88572 - protein, 37 aa, Artificial Sequence
  Cyclic GFR-binding peptide
  MOD_RES (3)..(4)..(35)..(37): Xaa is C or S
APXXVPQALSPINILYFVGRKPKVYGKIPMIVRSXKX

SEQ ID NO: 88573 - protein, 26 aa, Artificial Sequence
  Cyclic GFR-binding peptide
TPTKMEPISMLYLNDKQQIIKFKYEG

SEQ ID NO: 88574 - protein, 39 aa, Artificial Sequence; identical to SEQ ID NO: 6604
  Cyclic GFR-binding peptide
  MOD_RES (4)..(5)..(36)..(38): Xaa is C or S

SEQ ID NO: 88575 - protein, 22 aa, Artificial Sequence
  Cyclic GFR-binding peptide
SATSILYYIGKTPKILRKHRMI

SEQ ID NO: 88576 - protein, 30 aa, Artificial Sequence
  Cyclic GFR-binding peptide
  MOD_RES (2)..(3): Xaa is C or S
PXXVPEKMNAISILYFDENKNVVLKKYRNM

SEQ ID NO: 88577 - protein, 31 aa, Artificial Sequence
  Cyclic GFR-binding peptide
  MOD_RES (3)..(4): Xaa is C or S
EPXXVPEKMNAISILYFDENKNVVLKKYRNM

SEQ ID NO: 88578 - protein, 31 aa, Artificial Sequence; identical to SEQ ID NO: 6606
  Cyclic GFR-binding peptide
  MOD_RES (4)..(5): Xaa is C or S

SEQ ID NO: 88579 - protein, 35 aa, Artificial Sequence
  Cyclic GFR-binding peptide
  MOD_RES (2)..(3)..(35): Xaa is C or S
TXXVPTRLSATSILYYDSANNVVLRKHRDMVVESX

SEQ ID NO: 88580 - protein, 23 aa, Artificial Sequence
  Cyclic GFR-binding peptide
LSPISILYKVGRKPKVLKYHYMI

SEQ ID NO: 88581 - protein, 40 aa, Artificial Sequence; identical to SEQ ID NO: 6609
  Cyclic GFR-binding peptide
  MOD_RES (5)..(6)..(37)..(39): Xaa is C or S

SEQ ID NO: 88582 - protein, 35 aa, Artificial Sequence; identical to SEQ ID NO: 34966
  Cyclic GFR-binding peptide
  MOD_RES (6)..(7): Xaa is C or S

SEQ ID NO: 88583 - protein, 36 aa, Artificial Sequence
  Cyclic GFR-binding peptide
  MOD_RES (2)..(3)..(35): Xaa is C or S
TXXVPTRLEPISILYLDSANNVVKFKYEDMVVESXG

SEQ ID NO: 88584 - protein, 27 aa, Artificial Sequence
  Cyclic GFR-binding peptide
TQLSPINVLYFDDSSNVIYGKIPNMVV

SEQ ID NO: 88585 - protein, 30 aa, Artificial Sequence; identical to SEQ ID NO: 34968
  Cyclic GFR-binding peptide
  MOD_RES (30)..(30): Xaa is C or S

SEQ ID NO: 88586 - protein, 26 aa, Artificial Sequence
  Cyclic GFR-binding peptide
VPTELEPISMLYLDEYDKVVKFKYEE

SEQ ID NO: 88587 - protein, 31 aa, Artificial Sequence
  Cyclic GFR-binding peptide
  MOD_RES (3)..(4): Xaa is C or S
SPXXVPQDLSPINILYFVGRTPKVYGKIPMV

SEQ ID NO: 88588 - protein, 29 aa, Artificial Sequence
  Cyclic GFR-binding peptide
  MOD_RES (27)..(29): Xaa is C or S
SATSILYYDAANNVVLRKHRDMVVEAXGX

SEQ ID NO: 88589 - protein, 38 aa, Artificial Sequence; identical to SEQ ID NO: 6616
  Cyclic GFR-binding peptide
  MOD_RES (4)..(5)..(37): Xaa is C or S

SEQ ID NO: 88590 - protein, 34 aa, Artificial Sequence; identical to SEQ ID NO: 42183
  Cyclic GFR-binding peptide
  MOD_RES (6)..(6): Xaa is C or S

SEQ ID NO: 88591 - protein, 31 aa, Artificial Sequence
  Cyclic GFR-binding peptide
  MOD_RES (1)..(1): Xaa is C or S
XTPTKMSATSMLYYNDKQQIILRKHRGMVVD

SEQ ID NO: 88592 - protein, 31 aa, Artificial Sequence; identical to SEQ ID NO: 42191
  Cyclic GFR-binding peptide
  MOD_RES (31)..(31): Xaa is C or S

SEQ ID NO: 88593 - protein, 29 aa, Artificial Sequence
  Cyclic GFR-binding peptide
  MOD_RES (2)..(3): Xaa is C or S
TXXVPTRLEPISILYLDSANNVVKFKYED

SEQ ID NO: 88594 - protein, 32 aa, Artificial Sequence; identical to SEQ ID NO: 6625
  Cyclic GFR-binding peptide
  MOD_RES (2)..(2): Xaa is C or S

SEQ ID NO: 88595 - protein, 31 aa, Artificial Sequence; identical to SEQ ID NO: 76896
  Cyclic GFR-binding peptide
  MOD_RES (29)..(31): Xaa is C or S

SEQ ID NO: 88596 - protein, 24 aa, Artificial Sequence
  Cyclic GFR-binding peptide
SPINILYFIGKTPKIYGKIPMIVK

SEQ ID NO: 88597 - protein, 31 aa, Artificial Sequence
  Cyclic GFR-binding peptide
  MOD_RES (30)..(30): Xaa is C or S
TRLEPISILYLDSANNVVKFKYEDMVVESXG

SEQ ID NO: 88598 - protein, 29 aa, Artificial Sequence
  Cyclic GFR-binding peptide
  MOD_RES (29)..(29): Xaa is C or S
KLSPISVLYKDDSSNVILKYHYNMVVRSX

SEQ ID NO: 88599 - protein, 35 aa, Artificial Sequence; identical to SEQ ID NO: 34990
  Cyclic GFR-binding peptide
  MOD_RES (1)..(2)..(35): Xaa is C or S

SEQ ID NO: 88600 - protein, 24 aa, Artificial Sequence
  Cyclic GFR-binding peptide
QDLSPINILYFVGRTPKVYGKIPM

SEQ ID NO: 88601 - protein, 39 aa, Artificial Sequence; identical to SEQ ID NO: 6632
  Cyclic GFR-binding peptide
  MOD_RES (6)..(7)..(39): Xaa is C or S

SEQ ID NO: 88602 - protein, 34 aa, Artificial Sequence; identical to SEQ ID NO: 76899
  Cyclic GFR-binding peptide
  MOD_RES (2)..(3): Xaa is C or S

SEQ ID NO: 88603 - protein, 35 aa, Artificial Sequence; identical to SEQ ID NO: 6635
  Cyclic GFR-binding peptide
  MOD_RES (5)..(6): Xaa is C or S

SEQ ID NO: 88604 - protein, 28 aa, Artificial Sequence
  Cyclic GFR-binding peptide
PTRLEPISILYLDSANNVVKFKYEDMVV

SEQ ID NO: 88605 - protein, 32 aa, Artificial Sequence; identical to SEQ ID NO: 6636
  Cyclic GFR-binding peptide
  MOD_RES (4)..(5): Xaa is C or S

SEQ ID NO: 88606 - protein, 31 aa, Artificial Sequence; identical to SEQ ID NO: 6637
  Cyclic GFR-binding peptide
  MOD_RES (30)..(30): Xaa is C or S

SEQ ID NO: 88607 - protein, 23 aa, Artificial Sequence
  Cyclic GFR-binding peptide
LSATSILYYVGRKPKVLRKHRMI

SEQ ID NO: 88608 - protein, 38 aa, Artificial Sequence; identical to SEQ ID NO: 6639
  Cyclic GFR-binding peptide
  MOD_RES (3)..(4)..(36)..(38): Xaa is C or S

SEQ ID NO: 88609 - protein, 30 aa, Artificial Sequence; identical to SEQ ID NO: 34999
  Cyclic GFR-binding peptide

SEQ ID NO: 88610 - protein, 28 aa, Artificial Sequence
  Cyclic GFR-binding peptide
ELSPISMLYKDEYDKVVLKYHYEMVVEG

SEQ ID NO: 88611 - protein, 37 aa, Artificial Sequence; identical to SEQ ID NO: 42206
  Cyclic GFR-binding peptide
  MOD_RES (4)..(5)..(37): Xaa is C or S

SEQ ID NO: 88612 - protein, 41 aa, Artificial Sequence; identical to SEQ ID NO: 42207
  Cyclic GFR-binding peptide
  MOD_RES (5)..(6)..(38)..(40): Xaa is C or S

SEQ ID NO: 88613 - protein, 32 aa, Artificial Sequence
  Cyclic GFR-binding peptide
  MOD_RES (31)..(31): Xaa is C or S
PEKMSATSILYYDENKNVVLRKHRNMTVESXA

SEQ ID NO: 88614 - protein, 26 aa, Artificial Sequence
  Cyclic GFR-binding peptide
VPQALSPINILYFVGRKPKVYGKIPM

SEQ ID NO: 88615 - protein, 33 aa, Artificial Sequence; identical to SEQ ID NO: 42211
  Cyclic GFR-binding peptide
  MOD_RES (1)..(32): Xaa is C or S

SEQ ID NO: 88616 - protein, 37 aa, Artificial Sequence
  Cyclic GFR-binding peptide
  MOD_RES (4)..(5)..(37): Xaa is C or S
PPTXXVPTRLSATSILYYDSANNVVLRKHRDMVVESX

SEQ ID NO: 88617 - protein, 33 aa, Artificial Sequence; identical to SEQ ID NO: 35002
  Cyclic GFR-binding peptide
  MOD_RES (4)..(5): Xaa is C or S

SEQ ID NO: 88618 - protein, 22 aa, Artificial Sequence
  Cyclic GFR-binding peptide
SPISILYKIGKTPKILKYHYMI

SEQ ID NO: 88619 - protein, 31 aa, Artificial Sequence; identical to SEQ ID NO: 6646
  Cyclic GFR-binding peptide
  MOD_RES (5)..(6): Xaa is C or S

SEQ ID NO: 88620 - protein, 32 aa, Artificial Sequence; identical to SEQ ID NO: 42213
  Cyclic GFR-binding peptide
  MOD_RES (7)..(7): Xaa is C or S

SEQ ID NO: 88621 - protein, 38 aa, Artificial Sequence
  Cyclic GFR-binding peptide
  MOD_RES (5)..(6)..(38): Xaa is C or S
IPEPXXVPEKMSPISILYKDENKNVVLKYHYNMTVESX

SEQ ID NO: 88622 - protein, 32 aa, Artificial Sequence; identical to SEQ ID NO: 6647
  Cyclic GFR-binding peptide
  MOD_RES (31)..(31): Xaa is C or S

SEQ ID NO: 88623 - protein, 30 aa, Artificial Sequence; identical to SEQ ID NO: 35004
  Cyclic GFR-binding peptide
  MOD_RES (28)..(30): Xaa is C or S

SEQ ID NO: 88624 - protein, 25 aa, Artificial Sequence
  Cyclic GFR-binding peptide
TQLSPISVLYKDDSSNVILKYHYNM

SEQ ID NO: 88625 - protein, 27 aa, Artificial Sequence
  Cyclic GFR-binding peptide
PVKTSPINMLYFDNGRVLLYGKIPMIV

SEQ ID NO: 88626 - protein, 30 aa, Artificial Sequence; identical to SEQ ID NO: 42224
  Cyclic GFR-binding peptide
  MOD_RES (1)..(1): Xaa is C or S

SEQ ID NO: 88627 - protein, 32 aa, Artificial Sequence; identical to SEQ ID NO: 6653
  Cyclic GFR-binding peptide
  MOD_RES (6)..(7): Xaa is C or S

SEQ ID NO: 88628 - protein, 28 aa, Artificial Sequence
  Cyclic GFR-binding peptide
VPTKLNAISVLYFDDMGVPTLKKYREGM

SEQ ID NO: 88629 - protein, 24 aa, Artificial Sequence
  Cyclic GFR-binding peptide
KLSPISVLYKDSSNNVILKYHYNM

SEQ ID NO: 88630 - protein, 35 aa, Artificial Sequence; identical to SEQ ID NO: 6660
  Cyclic GFR-binding peptide
  MOD_RES (2)..(34): Xaa is C or S

SEQ ID NO: 88631 - protein, 31 aa, Artificial Sequence; identical to SEQ ID NO: 42232
  Cyclic GFR-binding peptide
  MOD_RES (29)..(31): Xaa is C or S

SEQ ID NO: 88632 - protein, 35 aa, Artificial Sequence; identical to SEQ ID NO: 17036
  Cyclic GFR-binding peptide
  MOD_RES (2)..(3)..(35): Xaa is C or S

SEQ ID NO: 88633 - protein, 31 aa, Artificial Sequence
  Cyclic GFR-binding peptide
  MOD_RES (30)..(30): Xaa is C or S
PQALSPINILYFVGRKPKVYGKIPMIVRSXK

SEQ ID NO: 88634 - protein, 37 aa, Artificial Sequence; identical to SEQ ID NO: 35017
  Cyclic GFR-binding peptide
  MOD_RES (1)..(2)..(34)..(36): Xaa is C or S

SEQ ID NO: 88635 - protein, 36 aa, Artificial Sequence; identical to SEQ ID NO: 6662
  Cyclic GFR-binding peptide
  MOD_RES (3)..(4)..(36): Xaa is C or S

SEQ ID NO: 88636 - protein, 27 aa, Artificial Sequence
  Cyclic GFR-binding peptide
KMSPINILYFDENKNVVYGKIPNMTVE

SEQ ID NO: 88637 - protein, 29 aa, Artificial Sequence
  Cyclic GFR-binding peptide
  MOD_RES (28)..(28): Xaa is C or S
DLSPINILYFIGKTPKIYGKIPMIVKSXK

SEQ ID NO: 88638 - protein, 32 aa, Artificial Sequence; identical to SEQ ID NO: 76920
  Cyclic GFR-binding peptide
  MOD_RES (2)..(3): Xaa is C or S

SEQ ID NO: 88639 - protein, 35 aa, Artificial Sequence; identical to SEQ ID NO: 35022
  Cyclic GFR-binding peptide
  MOD_RES (1)..(2)..(33)..(35): Xaa is C or S

SEQ ID NO: 88640 - protein, 30 aa, Artificial Sequence
  Cyclic GFR-binding peptide
  MOD_RES (3)..(4): Xaa is C or S
SPXXVPQDLSPINILYFVGRTPKVYGKIPM

SEQ ID NO: 88641 - protein, 34 aa, Artificial Sequence; identical to SEQ ID NO: 6665
  Cyclic GFR-binding peptide
  MOD_RES (2)..(3): Xaa is C or S

SEQ ID NO: 88642 - protein, 35 aa, Artificial Sequence
  Cyclic GFR-binding peptide
  MOD_RES (6)..(7): Xaa is C or S
RVPSTXXAPVKTSPISMLYKDNGRVLLLKYHYMIV

SEQ ID NO: 88643 - protein, 36 aa, Artificial Sequence; identical to SEQ ID NO: 6668
  Cyclic GFR-binding peptide
  MOD_RES (6)..(7): Xaa is C or S

SEQ ID NO: 88644 - protein, 34 aa, Artificial Sequence
  Cyclic GFR-binding peptide
  MOD_RES (1)..(2)..(34): Xaa is C or S
XXTPTKMSPISMLYKNDKQQIILKYHYGMVVDRX

SEQ ID NO: 88645 - protein, 33 aa, Artificial Sequence; identical to SEQ ID NO: 6670
  Cyclic GFR-binding peptide
  MOD_RES (32)..(32): Xaa is C or S

SEQ ID NO: 88646 - protein, 36 aa, Artificial Sequence; identical to SEQ ID NO: 6672
  Cyclic GFR-binding peptide
  MOD_RES (1)..(2)..(34)..(36): Xaa is C or S

SEQ ID NO: 88647 - protein, 30 aa, Artificial Sequence; identical to SEQ ID NO: 42245
  Cyclic GFR-binding peptide
  MOD_RES (3)..(4): Xaa is C or S

SEQ ID NO: 88648 - protein, 30 aa, Artificial Sequence; identical to SEQ ID NO: 6673
  Cyclic GFR-binding peptide
  MOD_RES (27)..(29): Xaa is C or S

SEQ ID NO: 88649 - protein, 28 aa, Artificial Sequence
  Cyclic GFR-binding peptide
TKLSPISVLYKDSSNNVILKYHYNMVVK

SEQ ID NO: 88650 - protein, 37 aa, Artificial Sequence; identical to SEQ ID NO: 6675
  Cyclic GFR-binding peptide
  MOD_RES (4)..(5)..(36): Xaa is C or S

SEQ ID NO: 88651 - protein, 30 aa, Artificial Sequence
  Cyclic GFR-binding peptide
  MOD_RES (1)..(1): Xaa is C or S
XTPTKMSATSMLYYNDKQQIILRKHRGMVV

SEQ ID NO: 88652 - protein, 22 aa, Artificial Sequence
  Cyclic GFR-binding peptide
KLSATSILYYDKGVVTYLRKHR

SEQ ID NO: 88653 - protein, 36 aa, Artificial Sequence; identical to SEQ ID NO: 76929
  Cyclic GFR-binding peptide
  MOD_RES (6)..(7): Xaa is C or S

SEQ ID NO: 88654 - protein, 28 aa, Artificial Sequence
  Cyclic GFR-binding peptide
APVKTNAISMLYFDNGRVLLLKKYRMIV

SEQ ID NO: 88655 - protein, 28 aa, Artificial Sequence
  Cyclic GFR-binding peptide
PTKLSPISVLYKDSSNNVILKYHYNMVV

SEQ ID NO: 88656 - protein, 26 aa, Artificial Sequence
  Cyclic GFR-binding peptide
APVKTSATSMLYYDNGRVLLLRKHRM

SEQ ID NO: 88657 - protein, 24 aa, Artificial Sequence
  Cyclic GFR-binding peptide
LNAISILYFIGKTPKILKKYRMIV

SEQ ID NO: 88658 - protein, 30 aa, Artificial Sequence
  Cyclic GFR-binding peptide
  MOD_RES (1)..(1): Xaa is C or S
XTPTKMSPISMLYKNDKQQIILKYHYGMVV

SEQ ID NO: 88659 - protein, 36 aa, Artificial Sequence; identical to SEQ ID NO: 35041
  Cyclic GFR-binding peptide
  MOD_RES (1)..(33)..(35): Xaa is C or S

SEQ ID NO: 88660 - protein, 25 aa, Artificial Sequence
  Cyclic GFR-binding peptide
KLSPISVLYKDSSNNVILKYHYNMV

SEQ ID NO: 88661 - protein, 33 aa, Artificial Sequence; identical to SEQ ID NO: 42252
  Cyclic GFR-binding peptide
  MOD_RES (4)..(5): Xaa is C or S

SEQ ID NO: 88662 - protein, 27 aa, Artificial Sequence
  Cyclic GFR-binding peptide
MEPISMLYLNDKQQIIKFKYEGMVVDR

SEQ ID NO: 88663 - protein, 21 aa, Artificial Sequence
  Cyclic GFR-binding peptide
LSPINMLYFDEYDKVVYGKIP

SEQ ID NO: 88664 - protein, 26 aa, Artificial Sequence
  Cyclic GFR-binding peptide
SPISMLYKNDKQQIILKYHYGMVVDR

SEQ ID NO: 88665 - protein, 33 aa, Artificial Sequence; identical to SEQ ID NO: 76934
  Cyclic GFR-binding peptide
  MOD_RES (31)..(33): Xaa is C or S

SEQ ID NO: 88666 - protein, 35 aa, Artificial Sequence; identical to SEQ ID NO: 6686
  Cyclic GFR-binding peptide
  MOD_RES (1)..(2)..(34): Xaa is C or S

SEQ ID NO: 88667 - protein, 33 aa, Artificial Sequence; identical to SEQ ID NO: 76935
  Cyclic GFR-binding peptide
  MOD_RES (2)..(3): Xaa is C or S

SEQ ID NO: 88668 - protein, 33 aa, Artificial Sequence; identical to SEQ ID NO: 6687
  Cyclic GFR-binding peptide
  MOD_RES (2)..(3): Xaa is C or S

SEQ ID NO: 88669 - protein, 36 aa, Artificial Sequence; identical to SEQ ID NO: 6688
  Cyclic GFR-binding peptide
  MOD_RES (4)..(5): Xaa is C or S

SEQ ID NO: 88670 - protein, 23 aa, Artificial Sequence
  Cyclic GFR-binding peptide
TKLSATSVLYYDDMGVPTLRKHR

SEQ ID NO: 88671 - protein, 36 aa, Artificial Sequence; identical to SEQ ID NO: 6690
  Cyclic GFR-binding peptide
  MOD_RES (6)..(7): Xaa is C or S

SEQ ID NO: 88672 - protein, 39 aa, Artificial Sequence
  Cyclic GFR-binding peptide
  MOD_RES (6)..(7)..(39): Xaa is C or S
GIPEPXXVPEKMEPISILYLDENKNVVKFKYENMTVESX

SEQ ID NO: 88673 - protein, 34 aa, Artificial Sequence; identical to SEQ ID NO: 42272
  Cyclic GFR-binding peptide
  MOD_RES (5)..(6): Xaa is C or S

SEQ ID NO: 88674 - protein, 29 aa, Artificial Sequence
  Cyclic GFR-binding peptide
  MOD_RES (3)..(4): Xaa is C or S
SPXXVPQDLSPINILYFVGRTPKVYGKIP

SEQ ID NO: 88675 - protein, 27 aa, Artificial Sequence
  Cyclic GFR-binding peptide
PQALSPISILYKVGRKPKVLKYHYMIV

SEQ ID NO: 88676 - protein, 32 aa, Artificial Sequence
  Cyclic GFR-binding peptide
  MOD_RES (3)..(4): Xaa is C or S
GPXXTPTKMEPISMLYLNDKQQIIKFKYEGMV

SEQ ID NO: 88677 - protein, 29 aa, Artificial Sequence
  Cyclic GFR-binding peptide
  MOD_RES (1)..(1): Xaa is C or S
XAPTQLEPISVLYLDDSSNVIKFKYENMV

SEQ ID NO: 88678 - protein, 29 aa, Artificial Sequence
  Cyclic GFR-binding peptide
TKLEPISVLYLDDSSNVIKFKYENMVVRS

SEQ ID NO: 88679 - protein, 29 aa, Artificial Sequence
  Cyclic GFR-binding peptide
  MOD_RES (1)..(2): Xaa is C or S
XXVPEKMSATSILYYDENKNVVLRKHRNM

SEQ ID NO: 88680 - protein, 28 aa, Artificial Sequence
  Cyclic GFR-binding peptide
  MOD_RES (27)..(27): Xaa is C or S
LSPISILYKVGRKPKVLKYHYMIVRSXK

SEQ ID NO: 88681 - protein, 26 aa, Artificial Sequence
  Cyclic GFR-binding peptide
VPEKMSATSILYYDENKNVVLRKHRN

SEQ ID NO: 88682 - protein, 36 aa, Artificial Sequence; identical to SEQ ID NO: 6698
  Cyclic GFR-binding peptide
  MOD_RES (1)..(33)..(35): Xaa is C or S

SEQ ID NO: 88683 - protein, 32 aa, Artificial Sequence
  Cyclic GFR-binding peptide
  MOD_RES (1)..(2): Xaa is C or S
XXVPEKMEPISILYLDENKNVVKFKYENMTVE

SEQ ID NO: 88684 - protein, 31 aa, Artificial Sequence; identical to SEQ ID NO: 35059
  Cyclic GFR-binding peptide
  MOD_RES (3)..(4): Xaa is C or S

SEQ ID NO: 88685 - protein, 24 aa, Artificial Sequence
  Cyclic GFR-binding peptide
TRLEPISILYLDSANNVVKFKYED

SEQ ID NO: 88686 - protein, 27 aa, Artificial Sequence
  Cyclic GFR-binding peptide
  MOD_RES (1)..(1): Xaa is C or S
XVPTKLNAISILYFDKGVVTYLKKYRG

SEQ ID NO: 88687 - protein, 32 aa, Artificial Sequence; identical to SEQ ID NO: 6702
  Cyclic GFR-binding peptide
  MOD_RES (4)..(5): Xaa is C or S

SEQ ID NO: 88688 - protein, 40 aa, Artificial Sequence; identical to SEQ ID NO: 6703
  Cyclic GFR-binding peptide
  MOD_RES (5)..(6)..(38)..(40): Xaa is C or S

SEQ ID NO: 88689 - protein, 26 aa, Artificial Sequence
  Cyclic GFR-binding peptide
LSPINVLYFDDSSNVIYGKIPNMVVR

SEQ ID NO: 88690 - protein, 34 aa, Artificial Sequence; identical to SEQ ID NO: 6705
  Cyclic GFR-binding peptide
  MOD_RES (2)..(3): Xaa is C or S

SEQ ID NO: 88691 - protein, 39 aa, Artificial Sequence; identical to SEQ ID NO: 6709
  Cyclic GFR-binding peptide
  MOD_RES (4)..(5)..(38): Xaa is C or S

SEQ ID NO: 88692 - protein, 35 aa, Artificial Sequence; identical to SEQ ID NO: 35075
  Cyclic GFR-binding peptide
  MOD_RES (6)..(7): Xaa is C or S

SEQ ID NO: 88693 - protein, 29 aa, Artificial Sequence
  Cyclic GFR-binding peptide
  MOD_RES (1)..(2): Xaa is C or S
XXVPQALNAISILYFVGRKPKVLKKYRMI

SEQ ID NO: 88694 - protein, 35 aa, Artificial Sequence; identical to SEQ ID NO: 6711
  Cyclic GFR-binding peptide
  MOD_RES (2)..(3)..(35): Xaa is C or S

SEQ ID NO: 88695 - protein, 33 aa, Artificial Sequence; identical to SEQ ID NO: 35079
  Cyclic GFR-binding peptide
  MOD_RES (31)..(33): Xaa is C or S

SEQ ID NO: 88696 - protein, 32 aa, Artificial Sequence; identical to SEQ ID NO: 42299
  Cyclic GFR-binding peptide
  MOD_RES (30)..(32): Xaa is C or S

SEQ ID NO: 88697 - protein, 27 aa, Artificial Sequence
  Cyclic GFR-binding peptide
QDLNAISILYFIGKTPKILKKYRMIVK

SEQ ID NO: 88698 - protein, 25 aa, Artificial Sequence
  Cyclic GFR-binding peptide
DLSATSILYYIGKTPKILRKHRMIV

SEQ ID NO: 88699 - protein, 30 aa, Artificial Sequence; identical to SEQ ID NO: 35081
  Cyclic GFR-binding peptide

SEQ ID NO: 88700 - protein, 25 aa, Artificial Sequence
  Cyclic GFR-binding peptide
SPINILYFDSANNVVYGKIPDMVVE

SEQ ID NO: 88701 - protein, 32 aa, Artificial Sequence; identical to SEQ ID NO: 6715
  Cyclic GFR-binding peptide
  MOD_RES (6)..(6): Xaa is C or S

SEQ ID NO: 88702 - protein, 37 aa, Artificial Sequence; identical to SEQ ID NO: 76953
  Cyclic GFR-binding peptide
  MOD_RES (2)..(3)..(35)..(37): Xaa is C or S

SEQ ID NO: 88703 - protein, 31 aa, Artificial Sequence; identical to SEQ ID NO: 6718
  Cyclic GFR-binding peptide
  MOD_RES (1)..(2): Xaa is C or S

SEQ ID NO: 88704 - protein, 29 aa, Artificial Sequence
  Cyclic GFR-binding peptide
  MOD_RES (3)..(4): Xaa is C or S
STXXAPVKTSATSMLYYDNGRVLLLRKHR

SEQ ID NO: 88705 - protein, 36 aa, Artificial Sequence
  Cyclic GFR-binding peptide
  MOD_RES (5)..(6): Xaa is C or S
IPEPXXVPEKMSATSILYYDENKNVVLRKHRNMTVE

SEQ ID NO: 88706 - protein, 34 aa, Artificial Sequence
  Cyclic GFR-binding peptide
  MOD_RES (6)..(7): Xaa is C or S
ASAAPXXVPQALSPINILYFVGRKPKVYGKIPMI

SEQ ID NO: 88707 - protein, 23 aa, Artificial Sequence
  Cyclic GFR-binding peptide
LSPINVLYFDSSNNVIYGKIPNM

SEQ ID NO: 88708 - protein, 28 aa, Artificial Sequence
  Cyclic GFR-binding peptide
  MOD_RES (27)..(27): Xaa is C or S
SATSILYYDSANNVVLRKHRDMVVESXG

SEQ ID NO: 88709 - protein, 38 aa, Artificial Sequence; identical to SEQ ID NO: 6723
  Cyclic GFR-binding peptide
  MOD_RES (3)..(4)..(35)..(37): Xaa is C or S

SEQ ID NO: 88710 - protein, 30 aa, Artificial Sequence; identical to SEQ ID NO: 6725
  Cyclic GFR-binding peptide
  MOD_RES (3)..(4): Xaa is C or S

SEQ ID NO: 88711 - protein, 33 aa, Artificial Sequence; identical to SEQ ID NO: 42313
  Cyclic GFR-binding peptide
  MOD_RES (2)..(3): Xaa is C or S

SEQ ID NO: 88712 - protein, 41 aa, Artificial Sequence; identical to SEQ ID NO: 35091
  Cyclic GFR-binding peptide
  MOD_RES (5)..(6)..(38)..(40): Xaa is C or S

SEQ ID NO: 88713 - protein, 38 aa, Artificial Sequence; identical to SEQ ID NO: 35094
  Cyclic GFR-binding peptide
  MOD_RES (6)..(7): Xaa is C or S

SEQ ID NO: 88714 - protein, 30 aa, Artificial Sequence
  Cyclic GFR-binding peptide
  MOD_RES (30)..(30): Xaa is C or S
PVKTEPISMLYLDNGRVLLKFKYEMIVEEX

SEQ ID NO: 88715 - protein, 29 aa, Artificial Sequence
  Cyclic GFR-binding peptide
TKLSATSVLYYDDMGVPTLRKHREGMSVA

SEQ ID NO: 88716 - protein, 31 aa, Artificial Sequence; identical to SEQ ID NO: 42319
  Cyclic GFR-binding peptide
  MOD_RES (2)..(3): Xaa is C or S

SEQ ID NO: 88717 - protein, 28 aa, Artificial Sequence
  Cyclic GFR-binding peptide
APTQLSPINVLYFDDSSNVIYGKIPNMV

SEQ ID NO: 88718 - protein, 27 aa, Artificial Sequence
  Cyclic GFR-binding peptide
MNAISMLYFNDKQQIILKKYRGMVVDR

SEQ ID NO: 88719 - protein, 26 aa, Artificial Sequence
  Cyclic GFR-binding peptide
NAISILYFDAANNVVLKKYRDMVVEA

SEQ ID NO: 88720 - protein, 21 aa, Artificial Sequence
  Cyclic GFR-binding peptide
LEPISILYLVGRTPKVKFKYE

SEQ ID NO: 88721 - protein, 38 aa, Artificial Sequence; identical to SEQ ID NO: 42330
  Cyclic GFR-binding peptide
  MOD_RES (3)..(4)..(36)..(38): Xaa is C or S

SEQ ID NO: 88722 - protein, 34 aa, Artificial Sequence; identical to SEQ ID NO: 6740
  Cyclic GFR-binding peptide
  MOD_RES (31)..(33): Xaa is C or S

SEQ ID NO: 88723 - protein, 27 aa, Artificial Sequence
  Cyclic GFR-binding peptide
LNAISMLYFDENEKVVLKKYRDMVVEG

SEQ ID NO: 88724 - protein, 26 aa, Artificial Sequence
  Cyclic GFR-binding peptide
KLSATSVLYYDDSSNVILRKHRNMVV

SEQ ID NO: 88725 - protein, 34 aa, Artificial Sequence; identical to SEQ ID NO: 42332
  Cyclic GFR-binding peptide
  MOD_RES (6)..(7): Xaa is C or S

SEQ ID NO: 88726 - protein, 27 aa, Artificial Sequence
  Cyclic GFR-binding peptide
  MOD_RES (1)..(1): Xaa is C or S
XVPTELNAISMLYFDENEKVVLKKYRD

SEQ ID NO: 88727 - protein, 40 aa, Artificial Sequence
  Cyclic GFR-binding peptide
  MOD_RES (6)..(7)..(39): Xaa is C or S
GIPEPXXVPEKMEPISILYLDENKNVVKFKYENMTVESXA

SEQ ID NO: 88728 - protein, 36 aa, Artificial Sequence; identical to SEQ ID NO: 35115
  Cyclic GFR-binding peptide
  MOD_RES (2)..(3)..(35): Xaa is C or S

SEQ ID NO: 88729 - protein, 37 aa, Artificial Sequence; identical to SEQ ID NO: 76968
  Cyclic GFR-binding peptide
  MOD_RES (6)..(7): Xaa is C or S

SEQ ID NO: 88730 - protein, 30 aa, Artificial Sequence; identical to SEQ ID NO: 42340
  Cyclic GFR-binding peptide

SEQ ID NO: 88731 - protein, 37 aa, Artificial Sequence; identical to SEQ ID NO: 35116
  Cyclic GFR-binding peptide
  MOD_RES (2)..(3)..(34)..(36): Xaa is C or S

SEQ ID NO: 88732 - protein, 41 aa, Artificial Sequence
  Cyclic GFR-binding peptide
  MOD_RES (6)..(7)..(39)..(41): Xaa is C or S
GIPEPXXVPEKMEPISILYLDENKNVVKFKYENMTVESXAX

SEQ ID NO: 88733 - protein, 35 aa, Artificial Sequence
  Cyclic GFR-binding peptide
  MOD_RES (3)..(4)..(35): Xaa is C or S
APXXVPQALSPINILYFVGRKPKVYGKIPMIVRSX

SEQ ID NO: 88734 - protein, 28 aa, Artificial Sequence
  Cyclic GFR-binding peptide
  MOD_RES (28)..(28): Xaa is C or S
LSPINMLYFDENEKVVYGKIPDMVVEGX

SEQ ID NO: 88735 - protein, 25 aa, Artificial Sequence
  Cyclic GFR-binding peptide
TKLSPINVLYFDDMGVPTYGKIPEG

SEQ ID NO: 88736 - protein, 29 aa, Artificial Sequence
  Cyclic GFR-binding peptide
VPQDLEPISILYLVGRTPKVKFKYEMVVK

SEQ ID NO: 88737 - protein, 35 aa, Artificial Sequence; identical to SEQ ID NO: 6749
  Cyclic GFR-binding peptide
  MOD_RES (4)..(5): Xaa is C or S

SEQ ID NO: 88738 - protein, 29 aa, Artificial Sequence
  Cyclic GFR-binding peptide
  MOD_RES (27)..(29): Xaa is C or S
TEPISMLYLDNGRVLLKFKYEMIVEEXGX

SEQ ID NO: 88739 - protein, 28 aa, Artificial Sequence
  Cyclic GFR-binding peptide
  MOD_RES (1)..(1): Xaa is C or S
XAPTKLNAISVLYFDSSNNVILKKYRNM

SEQ ID NO: 88740 - protein, 27 aa, Artificial Sequence
  Cyclic GFR-binding peptide
VPQALEPISILYLVGRKPKVKFKYEMI

SEQ ID NO: 88741 - protein, 29 aa, Artificial Sequence
  Cyclic GFR-binding peptide
  MOD_RES (3)..(4): Xaa is C or S
KAXXVPTELSATSMLYYDENEKVVLRKHR

SEQ ID NO: 88742 - protein, 30 aa, Artificial Sequence; identical to SEQ ID NO: 35139
  Cyclic GFR-binding peptide
  MOD_RES (4)..(5): Xaa is C or S

SEQ ID NO: 88743 - protein, 32 aa, Artificial Sequence; identical to SEQ ID NO: 6764
  Cyclic GFR-binding peptide
  MOD_RES (29)..(31): Xaa is C or S

SEQ ID NO: 88744 - protein, 39 aa, Artificial Sequence
  Cyclic GFR-binding peptide
  MOD_RES (5)..(6)..(38): Xaa is C or S
TPPTXXVPTRLSATSILYYDSANNVVLRKHRDMVVESXG

SEQ ID NO: 88745 - protein, 28 aa, Artificial Sequence
  Cyclic GFR-binding peptide
VKTSPINMLYFDNGRVLLYGKIPMIVEE

SEQ ID NO: 88746 - protein, 28 aa, Artificial Sequence
  Cyclic GFR-binding peptide
  MOD_RES (27)..(27): Xaa is C or S
NAISMLYFDENEKVVLKKYRDMVVEGXG

SEQ ID NO: 88747 - protein, 20 aa, Artificial Sequence
  Cyclic GFR-binding peptide
NAISVLYFDDMGVPTLKKYR

SEQ ID NO: 88748 - protein, 30 aa, Artificial Sequence; identical to SEQ ID NO: 35146
  Cyclic GFR-binding peptide
  MOD_RES (2)..(3): Xaa is C or S

SEQ ID NO: 88749 - protein, 38 aa, Artificial Sequence; identical to SEQ ID NO: 42365
  Cyclic GFR-binding peptide
  MOD_RES (4)..(5)..(37): Xaa is C or S

SEQ ID NO: 88750 - protein, 31 aa, Artificial Sequence
  Cyclic GFR-binding peptide
  MOD_RES (4)..(5): Xaa is C or S
PEPXXVPEKMEPISILYLDENKNVVKFKYEN

SEQ ID NO: 88751 - protein, 39 aa, Artificial Sequence; identical to SEQ ID NO: 6778
  Cyclic GFR-binding peptide
  MOD_RES (4)..(5)..(37)..(39): Xaa is C or S

SEQ ID NO: 88752 - protein, 25 aa, Artificial Sequence
  Cyclic GFR-binding peptide
PTKLSPISVLYKDDSSNVILKYHYN

SEQ ID NO: 88753 - protein, 41 aa, Artificial Sequence; identical to SEQ ID NO: 76989
  Cyclic GFR-binding peptide
  MOD_RES (6)..(7)..(38)..(40): Xaa is C or S

SEQ ID NO: 88754 - protein, 27 aa, Artificial Sequence
  Cyclic GFR-binding peptide
  MOD_RES (1)..(1): Xaa is C or S
XVPEKMNAISILYFDENKNVVLKKYRN

SEQ ID NO: 88755 - protein, 25 aa, Artificial Sequence
  Cyclic GFR-binding peptide
KLEPISVLYLDDSSNVIKFKYENMV

SEQ ID NO: 88756 - protein, 31 aa, Artificial Sequence; identical to SEQ ID NO: 6780
  Cyclic GFR-binding peptide
  MOD_RES (1)..(2): Xaa is C or S

SEQ ID NO: 88757 - protein, 28 aa, Artificial Sequence
  Cyclic GFR-binding peptide
PTELSPINMLYFDENEKVVYGKIPDMVV

SEQ ID NO: 88758 - protein, 28 aa, Artificial Sequence
  Cyclic GFR-binding peptide
  MOD_RES (28)..(28): Xaa is C or S
MSATSILYYDENKNVVLRKHRNMTVESX

SEQ ID NO: 88759 - protein, 28 aa, Artificial Sequence
  Cyclic GFR-binding peptide
  MOD_RES (28)..(28): Xaa is C or S
LSPINMLYFDEYDKVVYGKIPEMVVEGX

SEQ ID NO: 88760 - protein, 29 aa, Artificial Sequence
  Cyclic GFR-binding peptide
  MOD_RES (1)..(2): Xaa is C or S
XXVPEKMSPISILYKDENKNVVLKYHYNM

SEQ ID NO: 88761 - protein, 30 aa, Artificial Sequence; identical to SEQ ID NO: 6782
  Cyclic GFR-binding peptide
  MOD_RES (1)..(1): Xaa is C or S

SEQ ID NO: 88762 - protein, 34 aa, Artificial Sequence
  Cyclic GFR-binding peptide
  MOD_RES (2)..(3): Xaa is C or S
PXXTPTKMEPISMLYLNDKQQIIKFKYEGMVVDR

SEQ ID NO: 88763 - protein, 29 aa, Artificial Sequence
  Cyclic GFR-binding peptide
  MOD_RES (28)..(28): Xaa is C or S
LSPISVLYKDDSSNVILKYHYNMVVRAXG

SEQ ID NO: 88764 - protein, 40 aa, Artificial Sequence
  Cyclic GFR-binding peptide
  MOD_RES (5)..(6)..(37)..(39): Xaa is C or S
SASPXXVSQDLSPINILYFIGKTPKIYGKIPMIVKSXKXS

SEQ ID NO: 88765 - protein, 28 aa, Artificial Sequence
  Cyclic GFR-binding peptide
  MOD_RES (27)..(27): Xaa is C or S
SPISMLYKNDKQQIILKYHYGMVVDRXG

SEQ ID NO: 88766 - protein, 41 aa, Artificial Sequence; identical to SEQ ID NO: 6789
  Cyclic GFR-binding peptide
  MOD_RES (6)..(7)..(38)..(40): Xaa is C or S

SEQ ID NO: 88767 - protein, 38 aa, Artificial Sequence
  Cyclic GFR-binding peptide
  MOD_RES (5)..(6)..(37): Xaa is C or S
VPSTXXAPVKTSPISMLYKDNGRVLLLKYHYMIVEEXG

SEQ ID NO: 88768 - protein, 31 aa, Artificial Sequence; identical to SEQ ID NO: 6792
  Cyclic GFR-binding peptide
  MOD_RES (1)..(1): Xaa is C or S

SEQ ID NO: 88769 - protein, 38 aa, Artificial Sequence; identical to SEQ ID NO: 42378
  Cyclic GFR-binding peptide
  MOD_RES (3)..(4)..(35)..(37): Xaa is C or S

SEQ ID NO: 88770 - protein, 34 aa, Artificial Sequence; identical to SEQ ID NO: 76996
  Cyclic GFR-binding peptide
  MOD_RES (1)..(32)..(34): Xaa is C or S

SEQ ID NO: 88771 - protein, 39 aa, Artificial Sequence
  Cyclic GFR-binding peptide
  MOD_RES (6)..(7)..(39): Xaa is C or S
GSAGPXXTPTKMEPISMLYLNDKQQIIKFKYEGMVVDRX

SEQ ID NO: 88772 - protein, 32 aa, Artificial Sequence; identical to SEQ ID NO: 42381
  Cyclic GFR-binding peptide
  MOD_RES (2)..(3): Xaa is C or S

SEQ ID NO: 88773 - protein, 31 aa, Artificial Sequence
  Cyclic GFR-binding peptide
  MOD_RES (4)..(5): Xaa is C or S
PEPXXVPEKMSPISILYKDENKNVVLKYHYN

SEQ ID NO: 88774 - protein, 31 aa, Artificial Sequence; identical to SEQ ID NO: 35174
  Cyclic GFR-binding peptide

SEQ ID NO: 88775 - protein, 32 aa, Artificial Sequence
  Cyclic GFR-binding peptide
  MOD_RES (1)..(1): Xaa is C or S
XVPTKLSATSILYYDKGVVTYLRKHRGMAVSE

SEQ ID NO: 88776 - protein, 33 aa, Artificial Sequence
  Cyclic GFR-binding peptide
  MOD_RES (3)..(4): Xaa is C or S
EPXXVPEKMEPISILYLDENKNVVKFKYENMTV

SEQ ID NO: 88777 - protein, 32 aa, Artificial Sequence; identical to SEQ ID NO: 6799
  Cyclic GFR-binding peptide
  MOD_RES (30)..(32): Xaa is C or S

SEQ ID NO: 88778 - protein, 28 aa, Artificial Sequence
  Cyclic GFR-binding peptide
PTKLSPINVLYFDDMGVPTYGKIPEGMS

SEQ ID NO: 88779 - protein, 32 aa, Artificial Sequence
  Cyclic GFR-binding peptide
  MOD_RES (6)..(7): Xaa is C or S
AAPASXXVPARLSATSILYYDAANNVVLRKHR

SEQ ID NO: 88780 - protein, 31 aa, Artificial Sequence; identical to SEQ ID NO: 35179
  Cyclic GFR-binding peptide

SEQ ID NO: 88781 - protein, 33 aa, Artificial Sequence; identical to SEQ ID NO: 35180
  Cyclic GFR-binding peptide
  MOD_RES (1)..(33): Xaa is C or S

SEQ ID NO: 88782 - protein, 23 aa, Artificial Sequence
  Cyclic GFR-binding peptide
EKMEPISILYLDENKNVVKFKYE

SEQ ID NO: 88783 - protein, 34 aa, Artificial Sequence; identical to SEQ ID NO: 6804
  Cyclic GFR-binding peptide
  MOD_RES (31)..(33): Xaa is C or S

SEQ ID NO: 88784 - protein, 35 aa, Artificial Sequence; identical to SEQ ID NO: 77002
  Cyclic GFR-binding peptide
  MOD_RES (1)..(2)..(33)..(35): Xaa is C or S

SEQ ID NO: 88785 - protein, 35 aa, Artificial Sequence; identical to SEQ ID NO: 42402
  Cyclic GFR-binding peptide
  MOD_RES (32)..(34): Xaa is C or S

SEQ ID NO: 88786 - protein, 33 aa, Artificial Sequence; identical to SEQ ID NO: 35185
  Cyclic GFR-binding peptide
  MOD_RES (5)..(6): Xaa is C or S

SEQ ID NO: 88787 - protein, 38 aa, Artificial Sequence; identical to SEQ ID NO: 42403
  Cyclic GFR-binding peptide
  MOD_RES (3)..(4)..(36)..(38): Xaa is C or S

SEQ ID NO: 88788 - protein, 26 aa, Artificial Sequence
  Cyclic GFR-binding peptide
VPTKLEPISVLYLDDMGVPTKFKYEE

SEQ ID NO: 88789 - protein, 28 aa, Artificial Sequence
  Cyclic GFR-binding peptide
  MOD_RES (28)..(28): Xaa is C or S
LEPISVLYLDDSSNVIKFKYENMVVRSX

SEQ ID NO: 88790 - protein, 27 aa, Artificial Sequence
  Cyclic GFR-binding peptide
VSQDLSATSILYYIGKTPKILRKHRMI

SEQ ID NO: 88791 - protein, 36 aa, Artificial Sequence; identical to SEQ ID NO: 17184
  Cyclic GFR-binding peptide
  MOD_RES (2)..(3)..(35): Xaa is C or S

SEQ ID NO: 88792 - protein, 30 aa, Artificial Sequence; identical to SEQ ID NO: 17187
  Cyclic GFR-binding peptide
  MOD_RES (2)..(3): Xaa is C or S

SEQ ID NO: 88793 - protein, 24 aa, Artificial Sequence
  Cyclic GFR-binding peptide
SPISILYKVGRKPKVLKYHYMIVR

SEQ ID NO: 88794 - protein, 22 aa, Artificial Sequence
  Cyclic GFR-binding peptide
KLSATSVLYYDDSSNVILRKHR

SEQ ID NO: 88795 - protein, 35 aa, Artificial Sequence; identical to SEQ ID NO: 6818
  Cyclic GFR-binding peptide
  MOD_RES (1)..(32)..(34): Xaa is C or S

SEQ ID NO: 88796 - protein, 32 aa, Artificial Sequence; identical to SEQ ID NO: 6822
  Cyclic GFR-binding peptide
  MOD_RES (29)..(31): Xaa is C or S

SEQ ID NO: 88797 - protein, 30 aa, Artificial Sequence
  Cyclic GFR-binding peptide
VPEKMSPINILYFDENKNVVYGKIPNMTVE

SEQ ID NO: 88798 - protein, 28 aa, Artificial Sequence
  Cyclic GFR-binding peptide
  MOD_RES (1)..(2): Xaa is C or S
XXVPQALSPISILYKVGRKPKVLKYHYM

SEQ ID NO: 88799 - protein, 32 aa, Artificial Sequence; identical to SEQ ID NO: 77012
  Cyclic GFR-binding peptide
  MOD_RES (5)..(6): Xaa is C or S

SEQ ID NO: 88800 - protein, 31 aa, Artificial Sequence; identical to SEQ ID NO: 35207
  Cyclic GFR-binding peptide
  MOD_RES (3)..(4): Xaa is C or S

SEQ ID NO: 88801 - protein, 29 aa, Artificial Sequence
  Cyclic GFR-binding peptide
  MOD_RES (26)..(28): Xaa is C or S
SATSILYYVGRKPKVLRKHRMIVRSXKXS

SEQ ID NO: 88802 - protein, 38 aa, Artificial Sequence
  Cyclic GFR-binding peptide
  MOD_RES (5)..(6)..(38): Xaa is C or S
SAGPXXTPTKMSPISMLYKNDKQQIILKYHYGMVVDRX

SEQ ID NO: 88803 - protein, 26 aa, Artificial Sequence
  Cyclic GFR-binding peptide
SPINVLYFDSSNNVIYGKIPNMVVKA

SEQ ID NO: 88804 - protein, 40 aa, Artificial Sequence; identical to SEQ ID NO: 42444
  Cyclic GFR-binding peptide
  MOD_RES (4)..(5)..(38)..(40): Xaa is C or S

SEQ ID NO: 88805 - protein, 35 aa, Artificial Sequence; identical to SEQ ID NO: 6833
  Cyclic GFR-binding peptide
  MOD_RES (6)..(7): Xaa is C or S

SEQ ID NO: 88806 - protein, 26 aa, Artificial Sequence
  Cyclic GFR-binding peptide
LSATSILYYIGKTPKILRKHRMIVKS

SEQ ID NO: 88807 - protein, 32 aa, Artificial Sequence; identical to SEQ ID NO: 35212
  Cyclic GFR-binding peptide
  MOD_RES (2)..(3): Xaa is C or S

SEQ ID NO: 88808 - protein, 26 aa, Artificial Sequence
  Cyclic GFR-binding peptide
LSPINMLYFDEYDKVVYGKIPEMVVE

SEQ ID NO: 88809 - protein, 28 aa, Artificial Sequence
  Cyclic GFR-binding peptide
KMSPINILYFDENKNVVYGKIPNMTVES

SEQ ID NO: 88810 - protein, 37 aa, Artificial Sequence; identical to SEQ ID NO: 6840
  Cyclic GFR-binding peptide
  MOD_RES (6)..(7): Xaa is C or S

SEQ ID NO: 88811 - protein, 30 aa, Artificial Sequence; identical to SEQ ID NO: 42452
  Cyclic GFR-binding peptide
  MOD_RES (4)..(5): Xaa is C or S

SEQ ID NO: 88812 - protein, 32 aa, Artificial Sequence; identical to SEQ ID NO: 35217
  Cyclic GFR-binding peptide
  MOD_RES (31)..(31): Xaa is C or S

SEQ ID NO: 88813 - protein, 36 aa, Artificial Sequence; identical to SEQ ID NO: 42453
  Cyclic GFR-binding peptide
  MOD_RES (2)..(34)..(36): Xaa is C or S

SEQ ID NO: 88814 - protein, 24 aa, Artificial Sequence
  Cyclic GFR-binding peptide
SATSILYYVGRKPKVLRKHRMIVR

SEQ ID NO: 88815 - protein, 33 aa, Artificial Sequence; identical to SEQ ID NO: 6846
  Cyclic GFR-binding peptide
  MOD_RES (3)..(4): Xaa is C or S

SEQ ID NO: 88816 - protein, 39 aa, Artificial Sequence
  Cyclic GFR-binding peptide
  MOD_RES (4)..(5)..(37)..(39): Xaa is C or S
PPTXXVPTRLEPISILYLDSANNVVKFKYEDMVVESXGX

SEQ ID NO: 88817 - protein, 30 aa, Artificial Sequence
  Cyclic GFR-binding peptide
  MOD_RES (4)..(5): Xaa is C or S
PSTXXAPVKTSPISMLYKDNGRVLLLKYHY

SEQ ID NO: 88818 - protein, 25 aa, Artificial Sequence
  Cyclic GFR-binding peptide
PTRLEPISILYLDSANNVVKFKYED

SEQ ID NO: 88819 - protein, 35 aa, Artificial Sequence; identical to SEQ ID NO: 6852
  Cyclic GFR-binding peptide
  MOD_RES (2)..(3)..(35): Xaa is C or S

SEQ ID NO: 88820 - protein, 38 aa, Artificial Sequence
  Cyclic GFR-binding peptide
  MOD_RES (2)..(3)..(35)..(37): Xaa is C or S
TXXVPTRLSPISILYKDSANNVVLKYHYDMVVESXGXR

SEQ ID NO: 88821 - protein, 29 aa, Artificial Sequence
  Cyclic GFR-binding peptide
  MOD_RES (28)..(28): Xaa is C or S
LNAISMLYFDENEKVVLKKYRDMVVEGXG

SEQ ID NO: 88822 - protein, 39 aa, Artificial Sequence; identical to SEQ ID NO: 42458
  Cyclic GFR-binding peptide
  MOD_RES (5)..(6)..(39): Xaa is C or S

SEQ ID NO: 88823 - protein, 30 aa, Artificial Sequence; identical to SEQ ID NO: 6854
  Cyclic GFR-binding peptide

SEQ ID NO: 88824 - protein, 30 aa, Artificial Sequence
  Cyclic GFR-binding peptide
  MOD_RES (29)..(29): Xaa is C or S
QDLSPINILYFVGRTPKVYGKIPMVVKSXK

SEQ ID NO: 88825 - protein, 36 aa, Artificial Sequence; identical to SEQ ID NO: 6856
  Cyclic GFR-binding peptide
  MOD_RES (6)..(7): Xaa is C or S

SEQ ID NO: 88826 - protein, 38 aa, Artificial Sequence; identical to SEQ ID NO: 6865
  Cyclic GFR-binding peptide
  MOD_RES (5)..(6)..(38): Xaa is C or S

SEQ ID NO: 88827 - protein, 21 aa, Artificial Sequence
  Cyclic GFR-binding peptide
NAISMLYFDENEKVVLKKYRD

SEQ ID NO: 88828 - protein, 23 aa, Artificial Sequence
  Cyclic GFR-binding peptide
TQLEPISVLYLDDSSNVIKFKYE

SEQ ID NO: 88829 - protein, 32 aa, Artificial Sequence; identical to SEQ ID NO: 6869
  Cyclic GFR-binding peptide
  MOD_RES (1)..(2): Xaa is C or S

SEQ ID NO: 88830 - protein, 38 aa, Artificial Sequence; identical to SEQ ID NO: 35234
  Cyclic GFR-binding peptide
  MOD_RES (4)..(5)..(37): Xaa is C or S

SEQ ID NO: 88831 - protein, 32 aa, Artificial Sequence; identical to SEQ ID NO: 35235
  Cyclic GFR-binding peptide
  MOD_RES (1)..(2): Xaa is C or S

SEQ ID NO: 88832 - protein, 35 aa, Artificial Sequence
  Cyclic GFR-binding peptide
  MOD_RES (1)..(2)..(33)..(35): Xaa is C or S
XXVPQALSPINILYFVGRKPKVYGKIPMIVRSXKX

SEQ ID NO: 88833 - protein, 28 aa, Artificial Sequence
  Cyclic GFR-binding peptide
  MOD_RES (2)..(3): Xaa is C or S
PXXAPTKLSATSVLYYDDSSNVILRKHR

SEQ ID NO: 88834 - protein, 31 aa, Artificial Sequence; identical to SEQ ID NO: 17241
  Cyclic GFR-binding peptide
  MOD_RES (30)..(30): Xaa is C or S

SEQ ID NO: 88835 - protein, 27 aa, Artificial Sequence
  Cyclic GFR-binding peptide
SPINVLYFDDMGVPTYGKIPEGMSVAE

SEQ ID NO: 88836 - protein, 30 aa, Artificial Sequence; identical to SEQ ID NO: 6872
  Cyclic GFR-binding peptide
  MOD_RES (3)..(4): Xaa is C or S

SEQ ID NO: 88837 - protein, 25 aa, Artificial Sequence
  Cyclic GFR-binding peptide
SQDLSPINILYFIGKTPKIYGKIPM

SEQ ID NO: 88838 - protein, 27 aa, Artificial Sequence
  Cyclic GFR-binding peptide
EKMSPINILYFDENKNVVYGKIPNMTV

SEQ ID NO: 88839 - protein, 36 aa, Artificial Sequence; identical to SEQ ID NO: 6875
  Cyclic GFR-binding peptide
  MOD_RES (6)..(7): Xaa is C or S

SEQ ID NO: 88840 - protein, 34 aa, Artificial Sequence; identical to SEQ ID NO: 35245
  Cyclic GFR-binding peptide
  MOD_RES (4)..(5): Xaa is C or S

SEQ ID NO: 88841 - protein, 20 aa, Artificial Sequence
  Cyclic GFR-binding peptide
EPISVLYLDDMGVPTKFKYE

SEQ ID NO: 88842 - protein, 35 aa, Artificial Sequence
  Cyclic GFR-binding peptide
  MOD_RES (32)..(34): Xaa is C or S
VPEKMSPISILYKDENKNVVLKYHYNMTVESXAXR

SEQ ID NO: 88843 - protein, 33 aa, Artificial Sequence
  Cyclic GFR-binding peptide
  MOD_RES (6)..(7): Xaa is C or S
RVPSTXXAPVKTSATSMLYYDNGRVLLLRKHRM

SEQ ID NO: 88844 - protein, 29 aa, Artificial Sequence
  Cyclic GFR-binding peptide
PTKLSPISVLYKDSSNNVILKYHYNMVVK

SEQ ID NO: 88845 - protein, 30 aa, Artificial Sequence; identical to SEQ ID NO: 6885
  Cyclic GFR-binding peptide

SEQ ID NO: 88846 - protein, 30 aa, Artificial Sequence; identical to SEQ ID NO: 42484
  Cyclic GFR-binding peptide
  MOD_RES (1)..(1): Xaa is C or S

SEQ ID NO: 88847 - protein, 25 aa, Artificial Sequence
  Cyclic GFR-binding peptide
TELSATSMLYYDENEKVVLRKHRDM

SEQ ID NO: 88848 - protein, 36 aa, Artificial Sequence
  Cyclic GFR-binding peptide
  MOD_RES (1)..(2)..(34)..(36): Xaa is C or S
XXVPTRLSATSILYYDSANNVVLRKHRDMVVESXGX

SEQ ID NO: 88849 - protein, 30 aa, Artificial Sequence; identical to SEQ ID NO: 6888
  Cyclic GFR-binding peptide
  MOD_RES (1)..(2): Xaa is C or S

SEQ ID NO: 88850 - protein, 28 aa, Artificial Sequence
  Cyclic GFR-binding peptide
  MOD_RES (27)..(27): Xaa is C or S
SPISVLYKDDSSNVILKYHYNMVVRAXG

SEQ ID NO: 88851 - protein, 32 aa, Artificial Sequence; identical to SEQ ID NO: 35257
  Cyclic GFR-binding peptide
  MOD_RES (6)..(7): Xaa is C or S

SEQ ID NO: 88852 - protein, 25 aa, Artificial Sequence
  Cyclic GFR-binding peptide
DLSPISILYKIGKTPKILKYHYMIV

SEQ ID NO: 88853 - protein, 36 aa, Artificial Sequence
  Cyclic GFR-binding peptide
  MOD_RES (1)..(33)..(35): Xaa is C or S
XVPTRLEPISILYLDSANNVVKFKYEDMVVESXGXR

SEQ ID NO: 88854 - protein, 21 aa, Artificial Sequence
  Cyclic GFR-binding peptide
NAISILYFDAANNVVLKKYRD

SEQ ID NO: 88855 - protein, 26 aa, Artificial Sequence
  Cyclic GFR-binding peptide
  MOD_RES (1)..(1): Xaa is C or S
XAPTKLEPISVLYLDSSNNVIKFKYE

SEQ ID NO: 88856 - protein, 31 aa, Artificial Sequence; identical to SEQ ID NO: 6897
  Cyclic GFR-binding peptide
  MOD_RES (4)..(5): Xaa is C or S

SEQ ID NO: 88857 - protein, 24 aa, Artificial Sequence
  Cyclic GFR-binding peptide
TKLSPISVLYKDDSSNVILKYHYN

SEQ ID NO: 88858 - protein, 33 aa, Artificial Sequence; identical to SEQ ID NO: 6902
  Cyclic GFR-binding peptide
  MOD_RES (3)..(4): Xaa is C or S

SEQ ID NO: 88859 - protein, 27 aa, Artificial Sequence
  Cyclic GFR-binding peptide
  MOD_RES (27)..(27): Xaa is C or S
NAISILYFDKGVVTYLKKYRGMAVSEX

SEQ ID NO: 88860 - protein, 34 aa, Artificial Sequence; identical to SEQ ID NO: 6903
  Cyclic GFR-binding peptide
  MOD_RES (4)..(4): Xaa is C or S

SEQ ID NO: 88861 - protein, 31 aa, Artificial Sequence
  Cyclic GFR-binding peptide
  MOD_RES (29)..(31): Xaa is C or S
KMSPISILYKDENKNVVLKYHYNMTVESXAX

SEQ ID NO: 88862 - protein, 24 aa, Artificial Sequence
  Cyclic GFR-binding peptide
EPISVLYLDDSSNVIKFKYENMVV

SEQ ID NO: 88863 - protein, 32 aa, Artificial Sequence; identical to SEQ ID NO: 17271
  Cyclic GFR-binding peptide
  MOD_RES (1)..(1): Xaa is C or S

SEQ ID NO: 88864 - protein, 24 aa, Artificial Sequence
  Cyclic GFR-binding peptide
LSPINVLYFDSSNNVIYGKIPNMV

SEQ ID NO: 88865 - protein, 38 aa, Artificial Sequence; identical to SEQ ID NO: 42519
  Cyclic GFR-binding peptide
  MOD_RES (4)..(5)..(37): Xaa is C or S

SEQ ID NO: 88866 - protein, 37 aa, Artificial Sequence; identical to SEQ ID NO: 35279
  Cyclic GFR-binding peptide
  MOD_RES (5)..(6)..(37): Xaa is C or S

SEQ ID NO: 88867 - protein, 22 aa, Artificial Sequence
  Cyclic GFR-binding peptide
LSATSMLYYDEYDKVVLRKHRE

SEQ ID NO: 88868 - protein, 25 aa, Artificial Sequence
  Cyclic GFR-binding peptide
TELSPISMLYKDENEKVVLKYHYDM

SEQ ID NO: 88869 - protein, 32 aa, Artificial Sequence; identical to SEQ ID NO: 35281
  Cyclic GFR-binding peptide
  MOD_RES (3)..(4): Xaa is C or S

SEQ ID NO: 88870 - protein, 34 aa, Artificial Sequence; identical to SEQ ID NO: 35282
  Cyclic GFR-binding peptide
  MOD_RES (32)..(34): Xaa is C or S

SEQ ID NO: 88871 - protein, 28 aa, Artificial Sequence
  Cyclic GFR-binding peptide
VSQDLNAISILYFIGKTPKILKKYRMIV

SEQ ID NO: 88872 - protein, 36 aa, Artificial Sequence
  Cyclic GFR-binding peptide
  MOD_RES (1)..(2)..(34)..(36): Xaa is C or S
XXVPEKMSPINILYFDENKNVVYGKIPNMTVESXAX

SEQ ID NO: 88873 - protein, 32 aa, Artificial Sequence; identical to SEQ ID NO: 6911
  Cyclic GFR-binding peptide
  MOD_RES (30)..(32): Xaa is C or S

SEQ ID NO: 88874 - protein, 38 aa, Artificial Sequence
  Cyclic GFR-binding peptide
  MOD_RES (4)..(5)..(37): Xaa is C or S
AGPXXTPTKMEPISMLYLNDKQQIIKFKYEGMVVDRXG

SEQ ID NO: 88875 - protein, 28 aa, Artificial Sequence
  Cyclic GFR-binding peptide
  MOD_RES (1)..(1): Xaa is C or S
XVPARLNAISILYFDAANNVVLKKYRDM

SEQ ID NO: 88876 - protein, 35 aa, Artificial Sequence
  Cyclic GFR-binding peptide
  MOD_RES (3)..(4): Xaa is C or S
PTXXVPTRLSPISILYKDSANNVVLKYHYDMVVES

SEQ ID NO: 88877 - protein, 32 aa, Artificial Sequence; identical to SEQ ID NO: 35287
  Cyclic GFR-binding peptide
  MOD_RES (3)..(3): Xaa is C or S

SEQ ID NO: 88878 - protein, 26 aa, Artificial Sequence
  Cyclic GFR-binding peptide
TKLSPINVLYFDDSSNVIYGKIPNMV

SEQ ID NO: 88879 - protein, 39 aa, Artificial Sequence; identical to SEQ ID NO: 77057
  Cyclic GFR-binding peptide
  MOD_RES (6)..(7)..(39): Xaa is C or S

SEQ ID NO: 88880 - protein, 36 aa, Artificial Sequence; identical to SEQ ID NO: 6918
  Cyclic GFR-binding peptide
  MOD_RES (1)..(2)..(34)..(36): Xaa is C or S

SEQ ID NO: 88881 - protein, 31 aa, Artificial Sequence; identical to SEQ ID NO: 6919
  Cyclic GFR-binding peptide
  MOD_RES (31)..(31): Xaa is C or S

SEQ ID NO: 88882 - protein, 30 aa, Artificial Sequence; identical to SEQ ID NO: 35298
  Cyclic GFR-binding peptide

SEQ ID NO: 88883 - protein, 35 aa, Artificial Sequence; identical to SEQ ID NO: 35299
  Cyclic GFR-binding peptide
  MOD_RES (2)..(3): Xaa is C or S

SEQ ID NO: 88884 - protein, 37 aa, Artificial Sequence; identical to SEQ ID NO: 42541
  Cyclic GFR-binding peptide
  MOD_RES (5)..(6): Xaa is C or S

SEQ ID NO: 88885 - protein, 39 aa, Artificial Sequence; identical to SEQ ID NO: 6925
  Cyclic GFR-binding peptide
  MOD_RES (4)..(5)..(36)..(38): Xaa is C or S

SEQ ID NO: 88886 - protein, 27 aa, Artificial Sequence
  Cyclic GFR-binding peptide
  MOD_RES (1)..(1): Xaa is C or S
XVPEKMSPINILYFDENKNVVYGKIPN

SEQ ID NO: 88887 - protein, 35 aa, Artificial Sequence; identical to SEQ ID NO: 42545
  Cyclic GFR-binding peptide
  MOD_RES (3)..(4): Xaa is C or S

SEQ ID NO: 88888 - protein, 36 aa, Artificial Sequence
  Cyclic GFR-binding peptide
  MOD_RES (4)..(5)..(36): Xaa is C or S
PSTXXAPVKTSPISMLYKDNGRVLLLKYHYMIVEEX

SEQ ID NO: 88889 - protein, 30 aa, Artificial Sequence
  Cyclic GFR-binding peptide
  MOD_RES (2)..(3): Xaa is C or S
PXXTPTKMEPISMLYLNDKQQIIKFKYEGM

SEQ ID NO: 88890 - protein, 38 aa, Artificial Sequence; identical to SEQ ID NO: 6929
  Cyclic GFR-binding peptide
  MOD_RES (5)..(6)..(38): Xaa is C or S

SEQ ID NO: 88891 - protein, 32 aa, Artificial Sequence; identical to SEQ ID NO: 6930
  Cyclic GFR-binding peptide
  MOD_RES (2)..(3): Xaa is C or S

SEQ ID NO: 88892 - protein, 41 aa, Artificial Sequence; identical to SEQ ID NO: 6931
  Cyclic GFR-binding peptide
  MOD_RES (5)..(6)..(39)..(41): Xaa is C or S

SEQ ID NO: 88893 - protein, 35 aa, Artificial Sequence; identical to SEQ ID NO: 6935
  Cyclic GFR-binding peptide
  MOD_RES (2)..(3)..(35): Xaa is C or S

SEQ ID NO: 88894 - protein, 36 aa, Artificial Sequence; identical to SEQ ID NO: 35315
  Cyclic GFR-binding peptide
  MOD_RES (1)..(2)..(34)..(36): Xaa is C or S

SEQ ID NO: 88895 - protein, 32 aa, Artificial Sequence; identical to SEQ ID NO: 42556
  Cyclic GFR-binding peptide
  MOD_RES (5)..(6): Xaa is C or S

SEQ ID NO: 88896 - protein, 26 aa, Artificial Sequence
  Cyclic GFR-binding peptide
SATSVLYYDDSSNVILRKHRNMVVRS

SEQ ID NO: 88897 - protein, 26 aa, Artificial Sequence
  Cyclic GFR-binding peptide
KMNAISMLYFNDKQQIILKKYRGMVV

SEQ ID NO: 88898 - protein, 30 aa, Artificial Sequence; identical to SEQ ID NO: 42557
  Cyclic GFR-binding peptide
  MOD_RES (30)..(30): Xaa is C or S

SEQ ID NO: 88899 - protein, 31 aa, Artificial Sequence
  Cyclic GFR-binding peptide
  MOD_RES (2)..(3): Xaa is C or S
TXXVPTRLEPISILYLDSANNVVKFKYEDMV

SEQ ID NO: 88900 - protein, 30 aa, Artificial Sequence
  Cyclic GFR-binding peptide
  MOD_RES (4)..(5): Xaa is C or S
PEPXXVPEKMSPINILYFDENKNVVYGKIP

SEQ ID NO: 88901 - protein, 39 aa, Artificial Sequence; identical to SEQ ID NO: 6944
  Cyclic GFR-binding peptide
  MOD_RES (6)..(7): Xaa is C or S

SEQ ID NO: 88902 - protein, 39 aa, Artificial Sequence; identical to SEQ ID NO: 6945
  Cyclic GFR-binding peptide
  MOD_RES (4)..(5)..(36)..(38): Xaa is C or S

SEQ ID NO: 88903 - protein, 30 aa, Artificial Sequence; identical to SEQ ID NO: 42566
  Cyclic GFR-binding peptide
  MOD_RES (28)..(30): Xaa is C or S

SEQ ID NO: 88904 - protein, 30 aa, Artificial Sequence; identical to SEQ ID NO: 42567
  Cyclic GFR-binding peptide
  MOD_RES (27)..(29): Xaa is C or S

SEQ ID NO: 88905 - protein, 33 aa, Artificial Sequence; identical to SEQ ID NO: 35323
  Cyclic GFR-binding peptide
  MOD_RES (31)..(33): Xaa is C or S

SEQ ID NO: 88906 - protein, 29 aa, Artificial Sequence
  Cyclic GFR-binding peptide
APVKTSPISMLYKDNGRVLLLKYHYMIVE

SEQ ID NO: 88907 - protein, 31 aa, Artificial Sequence
  Cyclic GFR-binding peptide
  MOD_RES (31)..(31): Xaa is C or S
VPQALSPINILYFVGRKPKVYGKIPMIVRSX

SEQ ID NO: 88908 - protein, 33 aa, Artificial Sequence; identical to SEQ ID NO: 6948
  Cyclic GFR-binding peptide
  MOD_RES (31)..(33): Xaa is C or S

SEQ ID NO: 88909 - protein, 30 aa, Artificial Sequence; identical to SEQ ID NO: 77074
  Cyclic GFR-binding peptide
  MOD_RES (4)..(5): Xaa is C or S

SEQ ID NO: 88910 - protein, 33 aa, Artificial Sequence; identical to SEQ ID NO: 35328
  Cyclic GFR-binding peptide
  MOD_RES (1)..(33): Xaa is C or S

SEQ ID NO: 88911 - protein, 26 aa, Artificial Sequence
  Cyclic GFR-binding peptide
SATSVLYYDDSSNVILRKHRNMVVRA

SEQ ID NO: 88912 - protein, 32 aa, Artificial Sequence; identical to SEQ ID NO: 35334
  Cyclic GFR-binding peptide
  MOD_RES (6)..(7): Xaa is C or S

SEQ ID NO: 88913 - protein, 30 aa, Artificial Sequence; identical to SEQ ID NO: 35335
  Cyclic GFR-binding peptide
  MOD_RES (1)..(2): Xaa is C or S

SEQ ID NO: 88914 - protein, 29 aa, Artificial Sequence
  Cyclic GFR-binding peptide
PVKTSPINMLYFDNGRVLLYGKIPMIVEE

SEQ ID NO: 88915 - protein, 37 aa, Artificial Sequence
  Cyclic GFR-binding peptide
  MOD_RES (3)..(4)..(36): Xaa is C or S
GPXXTPTKMSATSMLYYNDKQQIILRKHRGMVVDRXG

SEQ ID NO: 88916 - protein, 33 aa, Artificial Sequence
  Cyclic GFR-binding peptide
  MOD_RES (4)..(5): Xaa is C or S
PASXXVPARLSATSILYYDAANNVVLRKHRDMV

SEQ ID NO: 88917 - protein, 28 aa, Artificial Sequence
  Cyclic GFR-binding peptide
TKLSPISVLYKDDSSNVILKYHYNMVVR

SEQ ID NO: 88918 - protein, 28 aa, Artificial Sequence
  Cyclic GFR-binding peptide
  MOD_RES (27)..(27): Xaa is C or S
SPINILYFDKGVVTYYGKIPGMAVSEXG

SEQ ID NO: 88919 - protein, 24 aa, Artificial Sequence
  Cyclic GFR-binding peptide
PQDLNAISILYFVGRTPKVLKKYR

SEQ ID NO: 88920 - protein, 29 aa, Artificial Sequence
  Cyclic GFR-binding peptide
  MOD_RES (29)..(29): Xaa is C or S
QLSPISVLYKDDSSNVILKYHYNMVVRAX

SEQ ID NO: 88921 - protein, 37 aa, Artificial Sequence; identical to SEQ ID NO: 42587
  Cyclic GFR-binding peptide
  MOD_RES (4)..(5)..(37): Xaa is C or S

SEQ ID NO: 88922 - protein, 24 aa, Artificial Sequence
  Cyclic GFR-binding peptide
TELSATSMLYYDEYDKVVLRKHRE

SEQ ID NO: 88923 - protein, 38 aa, Artificial Sequence
  Cyclic GFR-binding peptide
  MOD_RES (3)..(4)..(36)..(38): Xaa is C or S
EPXXVPEKMEPISILYLDENKNVVKFKYENMTVESXAX

SEQ ID NO: 88924 - protein, 24 aa, Artificial Sequence
  Cyclic GFR-binding peptide
SPISMLYKNDKQQIILKYHYGMVV

SEQ ID NO: 88925 - protein, 22 aa, Artificial Sequence
  Cyclic GFR-binding peptide
DLSATSILYYVGRTPKVLRKHR

SEQ ID NO: 88926 - protein, 35 aa, Artificial Sequence; identical to SEQ ID NO: 35352
  Cyclic GFR-binding peptide
  MOD_RES (1)..(2)..(34): Xaa is C or S

SEQ ID NO: 88927 - protein, 38 aa, Artificial Sequence; identical to SEQ ID NO: 35354
  Cyclic GFR-binding peptide
  MOD_RES (4)..(5)..(36)..(38): Xaa is C or S

SEQ ID NO: 88928 - protein, 33 aa, Artificial Sequence; identical to SEQ ID NO: 42599
  Cyclic GFR-binding peptide
  MOD_RES (6)..(7): Xaa is C or S

SEQ ID NO: 88929 - protein, 25 aa, Artificial Sequence
  Cyclic GFR-binding peptide
SATSVLYYDDMGVPTLRKHREGMSV

SEQ ID NO: 88930 - protein, 30 aa, Artificial Sequence; identical to SEQ ID NO: 6968
  Cyclic GFR-binding peptide
  MOD_RES (4)..(5): Xaa is C or S

SEQ ID NO: 88931 - protein, 29 aa, Artificial Sequence
  Cyclic GFR-binding peptide
  MOD_RES (2)..(3): Xaa is C or S
PXXAPTKLEPISVLYLDDSSNVIKFKYEN

SEQ ID NO: 88932 - protein, 40 aa, Artificial Sequence; identical to SEQ ID NO: 6970
  Cyclic GFR-binding peptide
  MOD_RES (5)..(6)..(37)..(39): Xaa is C or S

SEQ ID NO: 88933 - protein, 23 aa, Artificial Sequence
  Cyclic GFR-binding peptide
EPISMLYLDNGRVLLKFKYEMIV

SEQ ID NO: 88934 - protein, 31 aa, Artificial Sequence; identical to SEQ ID NO: 35358
  Cyclic GFR-binding peptide
  MOD_RES (1)..(1): Xaa is C or S

SEQ ID NO: 88935 - protein, 32 aa, Artificial Sequence; identical to SEQ ID NO: 35359
  Cyclic GFR-binding peptide
  MOD_RES (29)..(31): Xaa is C or S

SEQ ID NO: 88936 - protein, 32 aa, Artificial Sequence; identical to SEQ ID NO: 6974
  Cyclic GFR-binding peptide
  MOD_RES (2)..(3): Xaa is C or S

SEQ ID NO: 88937 - protein, 34 aa, Artificial Sequence; identical to SEQ ID NO: 6975
  Cyclic GFR-binding peptide
  MOD_RES (1)..(2)..(33): Xaa is C or S

SEQ ID NO: 88938 - protein, 22 aa, Artificial Sequence
  Cyclic GFR-binding peptide
NAISMLYFNDKQQIILKKYRGM

SEQ ID NO: 88939 - protein, 39 aa, Artificial Sequence; identical to SEQ ID NO: 42622
  Cyclic GFR-binding peptide
  MOD_RES (3)..(4)..(36)..(38): Xaa is C or S

SEQ ID NO: 88940 - protein, 24 aa, Artificial Sequence
  Cyclic GFR-binding peptide
LSATSVLYYDDMGVPTLRKHREGM

SEQ ID NO: 88941 - protein, 37 aa, Artificial Sequence; identical to SEQ ID NO: 42625
  Cyclic GFR-binding peptide
  MOD_RES (3)..(4)..(35)..(37): Xaa is C or S

SEQ ID NO: 88942 - protein, 30 aa, Artificial Sequence; identical to SEQ ID NO: 42626
  Cyclic GFR-binding peptide
  MOD_RES (1)..(2): Xaa is C or S

SEQ ID NO: 88943 - protein, 35 aa, Artificial Sequence
  Cyclic GFR-binding peptide
  MOD_RES (2)..(3)..(35): Xaa is C or S
TXXVPTRLEPISILYLDSANNVVKFKYEDMVVESX

SEQ ID NO: 88944 - protein, 35 aa, Artificial Sequence; identical to SEQ ID NO: 6984
  Cyclic GFR-binding peptide
  MOD_RES (1)..(32)..(34): Xaa is C or S

SEQ ID NO: 88945 - protein, 21 aa, Artificial Sequence
  Cyclic GFR-binding peptide
SPISVLYKDSSNNVILKYHYN

SEQ ID NO: 88946 - protein, 29 aa, Artificial Sequence
  Cyclic GFR-binding peptide
  MOD_RES (28)..(28): Xaa is C or S
ALEPISILYLVGRKPKVKFKYEMIVRSXK

SEQ ID NO: 88947 - protein, 31 aa, Artificial Sequence; identical to SEQ ID NO: 35375
  Cyclic GFR-binding peptide
  MOD_RES (28)..(30): Xaa is C or S

SEQ ID NO: 88948 - protein, 36 aa, Artificial Sequence; identical to SEQ ID NO: 35376
  Cyclic GFR-binding peptide
  MOD_RES (1)..(2)..(34)..(36): Xaa is C or S

SEQ ID NO: 88949 - protein, 29 aa, Artificial Sequence
  Cyclic GFR-binding peptide
  MOD_RES (27)..(29): Xaa is C or S
LSATSILYYIGKTPKILRKHRMIVKSXKX

SEQ ID NO: 88950 - protein, 27 aa, Artificial Sequence
  Cyclic GFR-binding peptide
TELEPISMLYLDENEKVVKFKYEDMVV

SEQ ID NO: 88951 - protein, 33 aa, Artificial Sequence; identical to SEQ ID NO: 6995
  Cyclic GFR-binding peptide
  MOD_RES (1)..(33): Xaa is C or S

SEQ ID NO: 88952 - protein, 28 aa, Artificial Sequence
  Cyclic GFR-binding peptide
  MOD_RES (28)..(28): Xaa is C or S
LSATSILYYDSANNVVLRKHRDMVVESX

SEQ ID NO: 88953 - protein, 39 aa, Artificial Sequence; identical to SEQ ID NO: 42631
  Cyclic GFR-binding peptide
  MOD_RES (5)..(6)..(38): Xaa is C or S

SEQ ID NO: 88954 - protein, 29 aa, Artificial Sequence
  Cyclic GFR-binding peptide
  MOD_RES (1)..(1): Xaa is C or S
XAPVKTEPISMLYLDNGRVLLKFKYEMIV

SEQ ID NO: 88955 - protein, 26 aa, Artificial Sequence
  Cyclic GFR-binding peptide
DLSATSILYYVGRTPKVLRKHRMVVK

SEQ ID NO: 88956 - protein, 40 aa, Artificial Sequence; identical to SEQ ID NO: 35381
  Cyclic GFR-binding peptide
  MOD_RES (6)..(7)..(39): Xaa is C or S

SEQ ID NO: 88957 - protein, 33 aa, Artificial Sequence; identical to SEQ ID NO: 7000
  Cyclic GFR-binding peptide
  MOD_RES (4)..(5): Xaa is C or S

SEQ ID NO: 88958 - protein, 27 aa, Artificial Sequence
  Cyclic GFR-binding peptide
  MOD_RES (1)..(1): Xaa is C or S
XVPTELEPISMLYLDEYDKVVKFKYEE

SEQ ID NO: 88959 - protein, 29 aa, Artificial Sequence
  Cyclic GFR-binding peptide
  MOD_RES (3)..(4): Xaa is C or S
PTXXVPTRLSPINILYFDSANNVVYGKIP

SEQ ID NO: 88960 - protein, 29 aa, Artificial Sequence
  Cyclic GFR-binding peptide
PTQLEPISVLYLDDSSNVIKFKYENMVVR

SEQ ID NO: 88961 - protein, 28 aa, Artificial Sequence
  Cyclic GFR-binding peptide
  MOD_RES (1)..(1): Xaa is C or S
XAPTQLSATSVLYYDDSSNVILRKHRNM

SEQ ID NO: 88962 - protein, 27 aa, Artificial Sequence
  Cyclic GFR-binding peptide
TQLEPISVLYLDDSSNVIKFKYENMVV

SEQ ID NO: 88963 - protein, 23 aa, Artificial Sequence
  Cyclic GFR-binding peptide
RLSPISILYKDAANNVVLKYHYD

SEQ ID NO: 88964 - protein, 23 aa, Artificial Sequence
  Cyclic GFR-binding peptide
MNAISMLYFNDKQQIILKKYRGM

SEQ ID NO: 88965 - protein, 25 aa, Artificial Sequence
  Cyclic GFR-binding peptide
VKTNAISMLYFDNGRVLLLKKYRMI

SEQ ID NO: 88966 - protein, 25 aa, Artificial Sequence
  Cyclic GFR-binding peptide
QDLSATSILYYIGKTPKILRKHRMI

SEQ ID NO: 88967 - protein, 30 aa, Artificial Sequence
  Cyclic GFR-binding peptide
  MOD_RES (29)..(29): Xaa is C or S
VKTSATSMLYYDNGRVLLLRKHRMIVEEXG

SEQ ID NO: 88968 - protein, 30 aa, Artificial Sequence; identical to SEQ ID NO: 35398
  Cyclic GFR-binding peptide
  MOD_RES (28)..(30): Xaa is C or S

SEQ ID NO: 88969 - protein, 30 aa, Artificial Sequence
  Cyclic GFR-binding peptide
  MOD_RES (4)..(5): Xaa is C or S
AAPXXVPQALSPINILYFVGRKPKVYGKIP

SEQ ID NO: 88970 - protein, 30 aa, Artificial Sequence; identical to SEQ ID NO: 42649
  Cyclic GFR-binding peptide
  MOD_RES (2)..(3): Xaa is C or S

SEQ ID NO: 88971 - protein, 24 aa, Artificial Sequence
  Cyclic GFR-binding peptide
TELSPINMLYFDENEKVVYGKIPD

SEQ ID NO: 88972 - protein, 37 aa, Artificial Sequence
  Cyclic GFR-binding peptide
  MOD_RES (6)..(7): Xaa is C or S
HVPKPXXAPTKLEPISVLYLDDSSNVIKFKYENMVVR

SEQ ID NO: 88973 - protein, 30 aa, Artificial Sequence; identical to SEQ ID NO: 7017
  Cyclic GFR-binding peptide
  MOD_RES (4)..(4): Xaa is C or S

SEQ ID NO: 88974 - protein, 32 aa, Artificial Sequence; identical to SEQ ID NO: 7018
  Cyclic GFR-binding peptide
  MOD_RES (4)..(5): Xaa is C or S

SEQ ID NO: 88975 - protein, 25 aa, Artificial Sequence
  Cyclic GFR-binding peptide
SPISMLYKNDKQQIILKYHYGMVVD

SEQ ID NO: 88976 - protein, 40 aa, Artificial Sequence
  Cyclic GFR-binding peptide
  MOD_RES (6)..(7)..(39): Xaa is C or S
HVPKPXXAPTKLSPISVLYKDDSSNVILKYHYNMVVRSXG

SEQ ID NO: 88977 - protein, 25 aa, Artificial Sequence
  Cyclic GFR-binding peptide
PTRLSPISILYKDSANNVVLKYHYD

SEQ ID NO: 88978 - protein, 29 aa, Artificial Sequence
  Cyclic GFR-binding peptide
  MOD_RES (1)..(1): Xaa is C or S
XVPTKLSPISILYKDKGVVTYLKYHYGMA

SEQ ID NO: 88979 - protein, 33 aa, Artificial Sequence
  Cyclic GFR-binding peptide
  MOD_RES (31)..(33): Xaa is C or S
APVKTSPISMLYKDNGRVLLLKYHYMIVEEXGX

SEQ ID NO: 88980 - protein, 32 aa, Artificial Sequence; identical to SEQ ID NO: 7019
  Cyclic GFR-binding peptide
  MOD_RES (3)..(4): Xaa is C or S

SEQ ID NO: 88981 - protein, 26 aa, Artificial Sequence
  Cyclic GFR-binding peptide
  MOD_RES (1)..(1): Xaa is C or S
XVPEKMNAISILYFDENKNVVLKKYR

SEQ ID NO: 88982 - protein, 25 aa, Artificial Sequence
  Cyclic GFR-binding peptide
LSPISILYKIGKTPKILKYHYMIVK

SEQ ID NO: 88983 - protein, 28 aa, Artificial Sequence
  Cyclic GFR-binding peptide
VPEKMSPISILYKDENKNVVLKYHYNMT

SEQ ID NO: 88984 - protein, 26 aa, Artificial Sequence
  Cyclic GFR-binding peptide
TKLSATSVLYYDDMGVPTLRKHREGM

SEQ ID NO: 88985 - protein, 30 aa, Artificial Sequence; identical to SEQ ID NO: 35405
  Cyclic GFR-binding peptide
  MOD_RES (4)..(5): Xaa is C or S

SEQ ID NO: 88986 - protein, 36 aa, Artificial Sequence; identical to SEQ ID NO: 7024
  Cyclic GFR-binding peptide
  MOD_RES (1)..(33)..(35): Xaa is C or S

SEQ ID NO: 88987 - protein, 24 aa, Artificial Sequence
  Cyclic GFR-binding peptide
ELSATSMLYYDEYDKVVLRKHREM

SEQ ID NO: 88988 - protein, 34 aa, Artificial Sequence; identical to SEQ ID NO: 42660
  Cyclic GFR-binding peptide
  MOD_RES (2)..(3): Xaa is C or S

SEQ ID NO: 88989 - protein, 26 aa, Artificial Sequence
  Cyclic GFR-binding peptide
  MOD_RES (26)..(26): Xaa is C or S
NAISILYFVGRKPKVLKKYRMIVRSX

SEQ ID NO: 88990 - protein, 28 aa, Artificial Sequence
  Cyclic GFR-binding peptide
PTKLSATSVLYYDDSSNVILRKHRNMVV

SEQ ID NO: 88991 - protein, 33 aa, Artificial Sequence; identical to SEQ ID NO: 42662
  Cyclic GFR-binding peptide
  MOD_RES (30)..(32): Xaa is C or S

SEQ ID NO: 88992 - protein, 32 aa, Artificial Sequence; identical to SEQ ID NO: 35412
  Cyclic GFR-binding peptide
  MOD_RES (4)..(5): Xaa is C or S

SEQ ID NO: 88993 - protein, 29 aa, Artificial Sequence
  Cyclic GFR-binding peptide
TELEPISMLYLDENEKVVKFKYEDMVVEG

SEQ ID NO: 88994 - protein, 25 aa, Artificial Sequence
  Cyclic GFR-binding peptide
NAISVLYFDSSNNVILKKYRNMVVK

SEQ ID NO: 88995 - protein, 34 aa, Artificial Sequence; identical to SEQ ID NO: 35416
  Cyclic GFR-binding peptide
  MOD_RES (2)..(3)..(34): Xaa is C or S

SEQ ID NO: 88996 - protein, 39 aa, Artificial Sequence; identical to SEQ ID NO: 7039
  Cyclic GFR-binding peptide
  MOD_RES (5)..(6)..(37)..(39): Xaa is C or S

SEQ ID NO: 88997 - protein, 34 aa, Artificial Sequence
  Cyclic GFR-binding peptide
  MOD_RES (31)..(33): Xaa is C or S
PTKMSPISMLYKNDKQQIILKYHYGMVVDRXGXS

SEQ ID NO: 88998 - protein, 25 aa, Artificial Sequence
  Cyclic GFR-binding peptide
RLEPISILYLDSANNVVKFKYEDMV

SEQ ID NO: 88999 - protein, 35 aa, Artificial Sequence; identical to SEQ ID NO: 35423
  Cyclic GFR-binding peptide
  MOD_RES (2)..(3)..(35): Xaa is C or S

SEQ ID NO: 89000 - protein, 39 aa, Artificial Sequence; identical to SEQ ID NO: 7040
  Cyclic GFR-binding peptide
  MOD_RES (3)..(4)..(36)..(38): Xaa is C or S

SEQ ID NO: 89001 - protein, 27 aa, Artificial Sequence
  Cyclic GFR-binding peptide
LSPISVLYKDSSNNVILKYHYNMVVKA

SEQ ID NO: 89002 - protein, 34 aa, Artificial Sequence; identical to SEQ ID NO: 42671
  Cyclic GFR-binding peptide
  MOD_RES (2)..(34): Xaa is C or S

SEQ ID NO: 89003 - protein, 29 aa, Artificial Sequence
  Cyclic GFR-binding peptide
  MOD_RES (28)..(28): Xaa is C or S
KTSATSMLYYDNGRVLLLRKHRMIVEEXG

SEQ ID NO: 89004 - protein, 37 aa, Artificial Sequence
  Cyclic GFR-binding peptide
  MOD_RES (5)..(6): Xaa is C or S
SAGPXXTPTKMSATSMLYYNDKQQIILRKHRGMVVDR

SEQ ID NO: 89005 - protein, 28 aa, Artificial Sequence
  Cyclic GFR-binding peptide
  MOD_RES (2)..(3): Xaa is C or S
AXXVPTELSPINMLYFDEYDKVVYGKIP

SEQ ID NO: 89006 - protein, 28 aa, Artificial Sequence
  Cyclic GFR-binding peptide
PQDLNAISILYFVGRTPKVLKKYRMVVK

SEQ ID NO: 89007 - protein, 36 aa, Artificial Sequence; identical to SEQ ID NO: 42674
  Cyclic GFR-binding peptide
  MOD_RES (1)..(2)..(34)..(36): Xaa is C or S

SEQ ID NO: 89008 - protein, 40 aa, Artificial Sequence; identical to SEQ ID NO: 42675
  Cyclic GFR-binding peptide
  MOD_RES (5)..(6)..(38)..(40): Xaa is C or S

SEQ ID NO: 89009 - protein, 30 aa, Artificial Sequence; identical to SEQ ID NO: 7048
  Cyclic GFR-binding peptide
  MOD_RES (4)..(5): Xaa is C or S

SEQ ID NO: 89010 - protein, 39 aa, Artificial Sequence; identical to SEQ ID NO: 7049
  Cyclic GFR-binding peptide
  MOD_RES (5)..(6)..(37)..(39): Xaa is C or S

SEQ ID NO: 89011 - protein, 31 aa, Artificial Sequence
  Cyclic GFR-binding peptide
  MOD_RES (1)..(2): Xaa is C or S
XXTPTKMSATSMLYYNDKQQIILRKHRGMVV

SEQ ID NO: 89012 - protein, 30 aa, Artificial Sequence; identical to SEQ ID NO: 7050
  Cyclic GFR-binding peptide

SEQ ID NO: 89013 - protein, 27 aa, Artificial Sequence
  Cyclic GFR-binding peptide
PTQLSPINVLYFDDSSNVIYGKIPNMV

SEQ ID NO: 89014 - protein, 38 aa, Artificial Sequence; identical to SEQ ID NO: 7051
  Cyclic GFR-binding peptide
  MOD_RES (3)..(35)..(37): Xaa is C or S

SEQ ID NO: 89015 - protein, 34 aa, Artificial Sequence; identical to SEQ ID NO: 42687
  Cyclic GFR-binding peptide
  MOD_RES (31)..(33): Xaa is C or S

SEQ ID NO: 89016 - protein, 37 aa, Artificial Sequence; identical to SEQ ID NO: 7052
  Cyclic GFR-binding peptide
  MOD_RES (5)..(6)..(37): Xaa is C or S

SEQ ID NO: 89017 - protein, 27 aa, Artificial Sequence
  Cyclic GFR-binding peptide
  MOD_RES (27)..(27): Xaa is C or S
SPINVLYFDSSNNVIYGKIPNMVVKAX

SEQ ID NO: 89018 - protein, 33 aa, Artificial Sequence
  Cyclic GFR-binding peptide
  MOD_RES (5)..(6): Xaa is C or S
VPSTXXAPVKTSATSMLYYDNGRVLLLRKHRMI

SEQ ID NO: 89019 - protein, 22 aa, Artificial Sequence
  Cyclic GFR-binding peptide
LSATSILYYVGRTPKVLRKHRM

SEQ ID NO: 89020 - protein, 22 aa, Artificial Sequence
  Cyclic GFR-binding peptide
NAISILYFDSANNVVLKKYRDM

SEQ ID NO: 89021 - protein, 32 aa, Artificial Sequence; identical to SEQ ID NO: 7054
  Cyclic GFR-binding peptide
  MOD_RES (31)..(31): Xaa is C or S

SEQ ID NO: 89022 - protein, 37 aa, Artificial Sequence; identical to SEQ ID NO: 42697
  Cyclic GFR-binding peptide
  MOD_RES (1)..(2)..(34)..(36): Xaa is C or S

SEQ ID NO: 89023 - protein, 26 aa, Artificial Sequence
  Cyclic GFR-binding peptide
  MOD_RES (1)..(1): Xaa is C or S
XTPTKMNAISMLYFNDKQQIILKKYR

SEQ ID NO: 89024 - protein, 32 aa, Artificial Sequence; identical to SEQ ID NO: 42699
  Cyclic GFR-binding peptide
  MOD_RES (3)..(3): Xaa is C or S

SEQ ID NO: 89025 - protein, 29 aa, Artificial Sequence
  Cyclic GFR-binding peptide
  MOD_RES (1)..(2): Xaa is C or S
XXVPTKLSATSILYYDKGVVTYLRKHRGM

SEQ ID NO: 89026 - protein, 32 aa, Artificial Sequence; identical to SEQ ID NO: 7056
  Cyclic GFR-binding peptide
  MOD_RES (5)..(6): Xaa is C or S

SEQ ID NO: 89027 - protein, 30 aa, Artificial Sequence
  Cyclic GFR-binding peptide
  MOD_RES (30)..(30): Xaa is C or S
TKLSATSILYYDKGVVTYLRKHRGMAVSEX

SEQ ID NO: 89028 - protein, 26 aa, Artificial Sequence
  Cyclic GFR-binding peptide
TSATSMLYYDNGRVLLLRKHRMIVEE

SEQ ID NO: 89029 - protein, 36 aa, Artificial Sequence
  Cyclic GFR-binding peptide
  MOD_RES (6)..(7): Xaa is C or S
RVPSTXXAPVKTSPISMLYKDNGRVLLLKYHYMIVE

SEQ ID NO: 89030 - protein, 26 aa, Artificial Sequence
  Cyclic GFR-binding peptide
TKLSPINVLYFDSSNNVIYGKIPNMV

SEQ ID NO: 89031 - protein, 38 aa, Artificial Sequence; identical to SEQ ID NO: 7059
  Cyclic GFR-binding peptide
  MOD_RES (6)..(7): Xaa is C or S

SEQ ID NO: 89032 - protein, 32 aa, Artificial Sequence; identical to SEQ ID NO: 7060
  Cyclic GFR-binding peptide
  MOD_RES (2)..(3): Xaa is C or S

SEQ ID NO: 89033 - protein, 30 aa, Artificial Sequence
  Cyclic GFR-binding peptide
  MOD_RES (29)..(29): Xaa is C or S
RLEPISILYLDSANNVVKFKYEDMVVESXG

SEQ ID NO: 89034 - protein, 24 aa, Artificial Sequence
  Cyclic GFR-binding peptide
PQDLSPISILYKVGRTPKVLKYHY

SEQ ID NO: 89035 - protein, 33 aa, Artificial Sequence; identical to SEQ ID NO: 7065
  Cyclic GFR-binding peptide
  MOD_RES (30)..(32): Xaa is C or S

SEQ ID NO: 89036 - protein, 36 aa, Artificial Sequence
  Cyclic GFR-binding peptide
  MOD_RES (2)..(3)..(34)..(36): Xaa is C or S
TXXAPVKTSATSMLYYDNGRVLLLRKHRMIVEEXGX

SEQ ID NO: 89037 - protein, 37 aa, Artificial Sequence
  Cyclic GFR-binding peptide
  MOD_RES (5)..(6): Xaa is C or S
IPEPXXVPEKMSPINILYFDENKNVVYGKIPNMTVES

SEQ ID NO: 89038 - protein, 36 aa, Artificial Sequence; identical to SEQ ID NO: 7067
  Cyclic GFR-binding peptide
  MOD_RES (5)..(6): Xaa is C or S

SEQ ID NO: 89039 - protein, 28 aa, Artificial Sequence
  Cyclic GFR-binding peptide
  MOD_RES (1)..(1): Xaa is C or S
XVPTELEPISMLYLDEYDKVVKFKYEEM

SEQ ID NO: 89040 - protein, 35 aa, Artificial Sequence; identical to SEQ ID NO: 7071
  Cyclic GFR-binding peptide
  MOD_RES (1)..(33)..(35): Xaa is C or S

SEQ ID NO: 89041 - protein, 35 aa, Artificial Sequence; identical to SEQ ID NO: 42710
  Cyclic GFR-binding peptide
  MOD_RES (1)..(2)..(34): Xaa is C or S

SEQ ID NO: 89042 - protein, 28 aa, Artificial Sequence
  Cyclic GFR-binding peptide
  MOD_RES (2)..(3): Xaa is C or S
PXXAPTQLSATSVLYYDDSSNVILRKHR

SEQ ID NO: 89043 - protein, 26 aa, Artificial Sequence
  Cyclic GFR-binding peptide
LSATSILYYVGRKPKVLRKHRMIVRS

SEQ ID NO: 89044 - protein, 26 aa, Artificial Sequence
  Cyclic GFR-binding peptide
LNAISILYFDSANNVVLKKYRDMVVE

SEQ ID NO: 89045 - protein, 31 aa, Artificial Sequence; identical to SEQ ID NO: 42711
  Cyclic GFR-binding peptide

SEQ ID NO: 89046 - protein, 35 aa, Artificial Sequence; identical to SEQ ID NO: 42712
  Cyclic GFR-binding peptide
  MOD_RES (4)..(5): Xaa is C or S

SEQ ID NO: 89047 - protein, 36 aa, Artificial Sequence; identical to SEQ ID NO: 7074
  Cyclic GFR-binding peptide
  MOD_RES (6)..(7): Xaa is C or S

SEQ ID NO: 89048 - protein, 41 aa, Artificial Sequence; identical to SEQ ID NO: 35459
  Cyclic GFR-binding peptide
  MOD_RES (5)..(6)..(38)..(40): Xaa is C or S

SEQ ID NO: 89049 - protein, 36 aa, Artificial Sequence; identical to SEQ ID NO: 42714
  Cyclic GFR-binding peptide
  MOD_RES (1)..(2)..(34)..(36): Xaa is C or S

SEQ ID NO: 89050 - protein, 33 aa, Artificial Sequence; identical to SEQ ID NO: 42715
  Cyclic GFR-binding peptide
  MOD_RES (2)..(3): Xaa is C or S

SEQ ID NO: 89051 - protein, 35 aa, Artificial Sequence; identical to SEQ ID NO: 77131
  Cyclic GFR-binding peptide
  MOD_RES (5)..(6): Xaa is C or S

SEQ ID NO: 89052 - protein, 24 aa, Artificial Sequence
  Cyclic GFR-binding peptide
QDLSATSILYYVGRTPKVLRKHRM

SEQ ID NO: 89053 - protein, 34 aa, Artificial Sequence; identical to SEQ ID NO: 42717
  Cyclic GFR-binding peptide
  MOD_RES (4)..(5): Xaa is C or S

SEQ ID NO: 89054 - protein, 35 aa, Artificial Sequence; identical to SEQ ID NO: 35464
  Cyclic GFR-binding peptide
  MOD_RES (2)..(3)..(35): Xaa is C or S

SEQ ID NO: 89055 - protein, 24 aa, Artificial Sequence
  Cyclic GFR-binding peptide
LSATSILYYDKGVVTYLRKHRGMA

SEQ ID NO: 89056 - protein, 34 aa, Artificial Sequence
  Cyclic GFR-binding peptide
  MOD_RES (32)..(34): Xaa is C or S
TPTKMSPISMLYKNDKQQIILKYHYGMVVDRXGX

SEQ ID NO: 89057 - protein, 24 aa, Artificial Sequence
  Cyclic GFR-binding peptide
TKLSATSVLYYDDMGVPTLRKHRE

SEQ ID NO: 89058 - protein, 41 aa, Artificial Sequence
  Cyclic GFR-binding peptide
  MOD_RES (6)..(7)..(39)..(41): Xaa is C or S
KASKAXXVPTKLSATSILYYDKGVVTYLRKHRGMAVSEXGX

SEQ ID NO: 89059 - protein, 36 aa, Artificial Sequence; identical to SEQ ID NO: 42726
  Cyclic GFR-binding peptide
  MOD_RES (6)..(7): Xaa is C or S

SEQ ID NO: 89060 - protein, 41 aa, Artificial Sequence
  Cyclic GFR-binding peptide
  MOD_RES (6)..(7)..(39)..(41): Xaa is C or S
STPPTXXVPTRLSPISILYKDSANNVVLKYHYDMVVESXGX

SEQ ID NO: 89061 - protein, 27 aa, Artificial Sequence
  Cyclic GFR-binding peptide
VPTKLSPINVLYFDDMGVPTYGKIPEG

SEQ ID NO: 89062 - protein, 30 aa, Artificial Sequence; identical to SEQ ID NO: 42732
  Cyclic GFR-binding peptide
  MOD_RES (3)..(4): Xaa is C or S

SEQ ID NO: 89063 - protein, 33 aa, Artificial Sequence
  Cyclic GFR-binding peptide
  MOD_RES (3)..(4): Xaa is C or S
EPXXVPEKMSPINILYFDENKNVVYGKIPNMTV

SEQ ID NO: 89064 - protein, 25 aa, Artificial Sequence
  Cyclic GFR-binding peptide
PTKLNAISVLYFDDMGVPTLKKYRE

SEQ ID NO: 89065 - protein, 29 aa, Artificial Sequence
  Cyclic GFR-binding peptide
ARLSPINILYFDAANNVVYGKIPDMVVEA

SEQ ID NO: 89066 - protein, 37 aa, Artificial Sequence
  Cyclic GFR-binding peptide
  MOD_RES (5)..(6): Xaa is C or S
SAGPXXTPTKMEPISMLYLNDKQQIIKFKYEGMVVDR

SEQ ID NO: 89067 - protein, 26 aa, Artificial Sequence
  Cyclic GFR-binding peptide
  MOD_RES (1)..(1): Xaa is C or S
XVPTKLSPINVLYFDDMGVPTYGKIP

SEQ ID NO: 89068 - protein, 37 aa, Artificial Sequence; identical to SEQ ID NO: 35481
  Cyclic GFR-binding peptide
  MOD_RES (6)..(7): Xaa is C or S

SEQ ID NO: 89069 - protein, 39 aa, Artificial Sequence; identical to SEQ ID NO: 35482
  Cyclic GFR-binding peptide
  MOD_RES (6)..(7)..(39): Xaa is C or S

SEQ ID NO: 89070 - protein, 38 aa, Artificial Sequence
  Cyclic GFR-binding peptide
  MOD_RES (5)..(6)..(38): Xaa is C or S
TPPTXXVPTRLEPISILYLDSANNVVKFKYEDMVVESX

SEQ ID NO: 89071 - protein, 31 aa, Artificial Sequence; identical to SEQ ID NO: 42743
  Cyclic GFR-binding peptide
  MOD_RES (6)..(6): Xaa is C or S

SEQ ID NO: 89072 - protein, 22 aa, Artificial Sequence
  Cyclic GFR-binding peptide
QLSPINVLYFDDSSNVIYGKIP

SEQ ID NO: 89073 - protein, 33 aa, Artificial Sequence; identical to SEQ ID NO: 35488
  Cyclic GFR-binding peptide
  MOD_RES (5)..(6): Xaa is C or S

SEQ ID NO: 89074 - protein, 31 aa, Artificial Sequence; identical to SEQ ID NO: 7095
  Cyclic GFR-binding peptide

SEQ ID NO: 89075 - protein, 28 aa, Artificial Sequence
  Cyclic GFR-binding peptide
TRLEPISILYLDSANNVVKFKYEDMVVE

SEQ ID NO: 89076 - protein, 29 aa, Artificial Sequence
  Cyclic GFR-binding peptide
  MOD_RES (1)..(2): Xaa is C or S
XXVPQDLNAISILYFVGRTPKVLKKYRMV

SEQ ID NO: 89077 - protein, 30 aa, Artificial Sequence; identical to SEQ ID NO: 35491
  Cyclic GFR-binding peptide
  MOD_RES (28)..(30): Xaa is C or S

SEQ ID NO: 89078 - protein, 25 aa, Artificial Sequence
  Cyclic GFR-binding peptide
LNAISILYFDKGVVTYLKKYRGMAV

SEQ ID NO: 89079 - protein, 30 aa, Artificial Sequence
  Cyclic GFR-binding peptide
  MOD_RES (1)..(2): Xaa is C or S
XXVSQDLSPINILYFIGKTPKIYGKIPMIV

SEQ ID NO: 89080 - protein, 21 aa, Artificial Sequence
  Cyclic GFR-binding peptide
SATSILYYDAANNVVLRKHRD

SEQ ID NO: 89081 - protein, 33 aa, Artificial Sequence; identical to SEQ ID NO: 35496
  Cyclic GFR-binding peptide
  MOD_RES (1)..(33): Xaa is C or S

SEQ ID NO: 89082 - protein, 22 aa, Artificial Sequence
  Cyclic GFR-binding peptide
LSPINMLYFDENEKVVYGKIPD

SEQ ID NO: 89083 - protein, 36 aa, Artificial Sequence
  Cyclic GFR-binding peptide
  MOD_RES (5)..(6): Xaa is C or S
VPSTXXAPVKTSATSMLYYDNGRVLLLRKHRMIVEE

SEQ ID NO: 89084 - protein, 34 aa, Artificial Sequence; identical to SEQ ID NO: 35500
  Cyclic GFR-binding peptide
  MOD_RES (4)..(5): Xaa is C or S

SEQ ID NO: 89085 - protein, 30 aa, Artificial Sequence
  Cyclic GFR-binding peptide
TPTKMEPISMLYLNDKQQIIKFKYEGMVVD

SEQ ID NO: 89086 - protein, 35 aa, Artificial Sequence
  Cyclic GFR-binding peptide
  MOD_RES (6)..(7): Xaa is C or S
ASAAPXXVPQALSPINILYFVGRKPKVYGKIPMIV

SEQ ID NO: 89087 - protein, 32 aa, Artificial Sequence; identical to SEQ ID NO: 7104
  Cyclic GFR-binding peptide
  MOD_RES (29)..(31): Xaa is C or S

SEQ ID NO: 89088 - protein, 36 aa, Artificial Sequence
  Cyclic GFR-binding peptide
  MOD_RES (6)..(7): Xaa is C or S
GSAGPXXTPTKMEPISMLYLNDKQQIIKFKYEGMVV

SEQ ID NO: 89089 - protein, 28 aa, Artificial Sequence
  Cyclic GFR-binding peptide
PTKMNAISMLYFNDKQQIILKKYRGMVV

SEQ ID NO: 89090 - protein, 20 aa, Artificial Sequence
  Cyclic GFR-binding peptide
EPISILYLIGKTPKIKFKYE

SEQ ID NO: 89091 - protein, 34 aa, Artificial Sequence; identical to SEQ ID NO: 7107
  Cyclic GFR-binding peptide
  MOD_RES (4)..(5): Xaa is C or S

SEQ ID NO: 89092 - protein, 33 aa, Artificial Sequence; identical to SEQ ID NO: 7109
  Cyclic GFR-binding peptide
  MOD_RES (30)..(32): Xaa is C or S

SEQ ID NO: 89093 - protein, 22 aa, Artificial Sequence
  Cyclic GFR-binding peptide
RLSPISILYKDAANNVVLKYHY

SEQ ID NO: 89094 - protein, 37 aa, Artificial Sequence; identical to SEQ ID NO: 35506
  Cyclic GFR-binding peptide
  MOD_RES (3)..(4)..(35)..(37): Xaa is C or S

SEQ ID NO: 89095 - protein, 36 aa, Artificial Sequence
  Cyclic GFR-binding peptide
  MOD_RES (4)..(5): Xaa is C or S
PPTXXVPTRLEPISILYLDSANNVVKFKYEDMVVES

SEQ ID NO: 89096 - protein, 31 aa, Artificial Sequence
  Cyclic GFR-binding peptide
  MOD_RES (1)..(1): Xaa is C or S
XVPEKMSPINILYFDENKNVVYGKIPNMTVE

SEQ ID NO: 89097 - protein, 30 aa, Artificial Sequence; identical to SEQ ID NO: 35509
  Cyclic GFR-binding peptide
  MOD_RES (4)..(5): Xaa is C or S

SEQ ID NO: 89098 - protein, 23 aa, Artificial Sequence
  Cyclic GFR-binding peptide
NAISILYFDENKNVVLKKYRNMT

SEQ ID NO: 89099 - protein, 33 aa, Artificial Sequence; identical to SEQ ID NO: 42780
  Cyclic GFR-binding peptide
  MOD_RES (1)..(2): Xaa is C or S

SEQ ID NO: 89100 - protein, 28 aa, Artificial Sequence
  Cyclic GFR-binding peptide
  MOD_RES (27)..(27): Xaa is C or S
SPINILYFDAANNVVYGKIPDMVVEAXG

SEQ ID NO: 89101 - protein, 37 aa, Artificial Sequence; identical to SEQ ID NO: 42784
  Cyclic GFR-binding peptide
  MOD_RES (2)..(3)..(35)..(37): Xaa is C or S

SEQ ID NO: 89102 - protein, 35 aa, Artificial Sequence; identical to SEQ ID NO: 35516
  Cyclic GFR-binding peptide
  MOD_RES (5)..(6): Xaa is C or S

SEQ ID NO: 89103 - protein, 27 aa, Artificial Sequence
  Cyclic GFR-binding peptide
LSPINVLYFDDSSNVIYGKIPNMVVRS

SEQ ID NO: 89104 - protein, 27 aa, Artificial Sequence
  Cyclic GFR-binding peptide
  MOD_RES (26)..(26): Xaa is C or S
SPINILYFIGKTPKIYGKIPMIVKSXK

SEQ ID NO: 89105 - protein, 37 aa, Artificial Sequence; identical to SEQ ID NO: 7116
  Cyclic GFR-binding peptide
  MOD_RES (2)..(3)..(34)..(36): Xaa is C or S

SEQ ID NO: 89106 - protein, 27 aa, Artificial Sequence
  Cyclic GFR-binding peptide
PTKLEPISVLYLDSSNNVIKFKYENMV

SEQ ID NO: 89107 - protein, 29 aa, Artificial Sequence
  Cyclic GFR-binding peptide
  MOD_RES (27)..(29): Xaa is C or S
SPISVLYKDDSSNVILKYHYNMVVRSXGX

SEQ ID NO: 89108 - protein, 27 aa, Artificial Sequence
  Cyclic GFR-binding peptide
  MOD_RES (26)..(26): Xaa is C or S
SATSMLYYDNGRVLLLRKHRMIVEEXG

SEQ ID NO: 89109 - protein, 25 aa, Artificial Sequence
  Cyclic GFR-binding peptide
PTKLSATSVLYYDDMGVPTLRKHRE

SEQ ID NO: 89110 - protein, 38 aa, Artificial Sequence; identical to SEQ ID NO: 17467
  Cyclic GFR-binding peptide
  MOD_RES (6)..(7): Xaa is C or S

SEQ ID NO: 89111 - protein, 31 aa, Artificial Sequence; identical to SEQ ID NO: 42788
  Cyclic GFR-binding peptide
  MOD_RES (2)..(3): Xaa is C or S

SEQ ID NO: 89112 - protein, 36 aa, Artificial Sequence
  Cyclic GFR-binding peptide
  MOD_RES (4)..(5)..(36): Xaa is C or S
PSTXXAPVKTEPISMLYLDNGRVLLKFKYEMIVEEX

SEQ ID NO: 89113 - protein, 29 aa, Artificial Sequence
  Cyclic GFR-binding peptide
  MOD_RES (3)..(4): Xaa is C or S
GPXXTPTKMSATSMLYYNDKQQIILRKHR

SEQ ID NO: 89114 - protein, 27 aa, Artificial Sequence
  Cyclic GFR-binding peptide
VSQDLSPISILYKIGKTPKILKYHYMI

SEQ ID NO: 89115 - protein, 26 aa, Artificial Sequence
  Cyclic GFR-binding peptide
PEKMEPISILYLDENKNVVKFKYENM

SEQ ID NO: 89116 - protein, 30 aa, Artificial Sequence; identical to SEQ ID NO: 7121
  Cyclic GFR-binding peptide

SEQ ID NO: 89117 - protein, 27 aa, Artificial Sequence
  Cyclic GFR-binding peptide
LSATSMLYYDENEKVVLRKHRDMVVEG

SEQ ID NO: 89118 - protein, 32 aa, Artificial Sequence; identical to SEQ ID NO: 42792
  Cyclic GFR-binding peptide
  MOD_RES (1)..(1): Xaa is C or S

SEQ ID NO: 89119 - protein, 27 aa, Artificial Sequence
  Cyclic GFR-binding peptide
LSPINVLYFDDSSNVIYGKIPNMVVRA

SEQ ID NO: 89120 - protein, 26 aa, Artificial Sequence
  Cyclic GFR-binding peptide
LSPINILYFVGRKPKVYGKIPMIVRS

SEQ ID NO: 89121 - protein, 41 aa, Artificial Sequence; identical to SEQ ID NO: 35530
  Cyclic GFR-binding peptide
  MOD_RES (6)..(7)..(39)..(41): Xaa is C or S

SEQ ID NO: 89122 - protein, 39 aa, Artificial Sequence; identical to SEQ ID NO: 35531
  Cyclic GFR-binding peptide
  MOD_RES (4)..(5)..(36)..(38): Xaa is C or S

SEQ ID NO: 89123 - protein, 35 aa, Artificial Sequence; identical to SEQ ID NO: 7130
  Cyclic GFR-binding peptide
  MOD_RES (5)..(6): Xaa is C or S

SEQ ID NO: 89124 - protein, 30 aa, Artificial Sequence
  Cyclic GFR-binding peptide
  MOD_RES (3)..(4): Xaa is C or S
SPXXVSQDLSPINILYFIGKTPKIYGKIPM

SEQ ID NO: 89125 - protein, 23 aa, Artificial Sequence
  Cyclic GFR-binding peptide
TKLNAISVLYFDSSNNVILKKYR

SEQ ID NO: 89126 - protein, 25 aa, Artificial Sequence
  Cyclic GFR-binding peptide
MSPISILYKDENKNVVLKYHYNMTV

SEQ ID NO: 89127 - protein, 38 aa, Artificial Sequence; identical to SEQ ID NO: 7136
  Cyclic GFR-binding peptide
  MOD_RES (2)..(3)..(35)..(37): Xaa is C or S

SEQ ID NO: 89128 - protein, 32 aa, Artificial Sequence
  Cyclic GFR-binding peptide
  MOD_RES (30)..(32): Xaa is C or S
EKMSPINILYFDENKNVVYGKIPNMTVESXAX

SEQ ID NO: 89129 - protein, 26 aa, Artificial Sequence
  Cyclic GFR-binding peptide
EPISILYLDAANNVVKFKYEDMVVEA

SEQ ID NO: 89130 - protein, 35 aa, Artificial Sequence; identical to SEQ ID NO: 35540
  Cyclic GFR-binding peptide
  MOD_RES (3)..(4): Xaa is C or S

SEQ ID NO: 89131 - protein, 30 aa, Artificial Sequence; identical to SEQ ID NO: 77161
  Cyclic GFR-binding peptide
  MOD_RES (4)..(5): Xaa is C or S

SEQ ID NO: 89132 - protein, 36 aa, Artificial Sequence; identical to SEQ ID NO: 17484
  Cyclic GFR-binding peptide
  MOD_RES (5)..(6): Xaa is C or S

SEQ ID NO: 89133 - protein, 38 aa, Artificial Sequence; identical to SEQ ID NO: 35542
  Cyclic GFR-binding peptide
  MOD_RES (5)..(6)..(38): Xaa is C or S

SEQ ID NO: 89134 - protein, 27 aa, Artificial Sequence
  Cyclic GFR-binding peptide
  MOD_RES (1)..(2): Xaa is C or S
XXVPTKLNAISVLYFDDMGVPTLKKYR

SEQ ID NO: 89135 - protein, 26 aa, Artificial Sequence
  Cyclic GFR-binding peptide
  MOD_RES (1)..(1): Xaa is C or S
XVPQALEPISILYLVGRKPKVKFKYE

SEQ ID NO: 89136 - protein, 33 aa, Artificial Sequence; identical to SEQ ID NO: 35549
  Cyclic GFR-binding peptide
  MOD_RES (6)..(7): Xaa is C or S

SEQ ID NO: 89137 - protein, 33 aa, Artificial Sequence; identical to SEQ ID NO: 7142
  Cyclic GFR-binding peptide
  MOD_RES (1)..(1): Xaa is C or S

SEQ ID NO: 89138 - protein, 31 aa, Artificial Sequence; identical to SEQ ID NO: 7143
  Cyclic GFR-binding peptide
  MOD_RES (5)..(6): Xaa is C or S

SEQ ID NO: 89139 - protein, 27 aa, Artificial Sequence
  Cyclic GFR-binding peptide
LSPINILYFDAANNVVYGKIPDMVVEA

SEQ ID NO: 89140 - protein, 29 aa, Artificial Sequence
  Cyclic GFR-binding peptide
VPTELEPISMLYLDEYDKVVKFKYEEMVV

SEQ ID NO: 89141 - protein, 23 aa, Artificial Sequence
  Cyclic GFR-binding peptide
TRLNAISILYFDSANNVVLKKYR

SEQ ID NO: 89142 - protein, 32 aa, Artificial Sequence; identical to SEQ ID NO: 7150
  Cyclic GFR-binding peptide
  MOD_RES (2)..(3): Xaa is C or S

SEQ ID NO: 89143 - protein, 35 aa, Artificial Sequence
  Cyclic GFR-binding peptide
  MOD_RES (1)..(33)..(35): Xaa is C or S
XVPARLSATSILYYDAANNVVLRKHRDMVVEAXGX

SEQ ID NO: 89144 - protein, 27 aa, Artificial Sequence
  Cyclic GFR-binding peptide
QDLSPISILYKIGKTPKILKYHYMIVK

SEQ ID NO: 89145 - protein, 32 aa, Artificial Sequence
  Cyclic GFR-binding peptide
  MOD_RES (4)..(5): Xaa is C or S
PEPXXVPEKMEPISILYLDENKNVVKFKYENM

SEQ ID NO: 89146 - protein, 31 aa, Artificial Sequence; identical to SEQ ID NO: 42839
  Cyclic GFR-binding peptide
  MOD_RES (4)..(5): Xaa is C or S

SEQ ID NO: 89147 - protein, 34 aa, Artificial Sequence
  Cyclic GFR-binding peptide
  MOD_RES (4)..(5): Xaa is C or S
PEPXXVPEKMSPINILYFDENKNVVYGKIPNMTV

SEQ ID NO: 89148 - protein, 41 aa, Artificial Sequence; identical to SEQ ID NO: 42840
  Cyclic GFR-binding peptide
  MOD_RES (6)..(7)..(39)..(41): Xaa is C or S

SEQ ID NO: 89149 - protein, 36 aa, Artificial Sequence; identical to SEQ ID NO: 42844
  Cyclic GFR-binding peptide
  MOD_RES (5)..(5): Xaa is C or S

SEQ ID NO: 89150 - protein, 23 aa, Artificial Sequence
  Cyclic GFR-binding peptide
TKLSPINVLYFDDSSNVIYGKIP

SEQ ID NO: 89151 - protein, 30 aa, Artificial Sequence; identical to SEQ ID NO: 7162
  Cyclic GFR-binding peptide
  MOD_RES (29)..(29): Xaa is C or S

SEQ ID NO: 89152 - protein, 35 aa, Artificial Sequence
  Cyclic GFR-binding peptide
  MOD_RES (1)..(33)..(35): Xaa is C or S
XVPEKMEPISILYLDENKNVVKFKYENMTVESXAX

SEQ ID NO: 89153 - protein, 26 aa, Artificial Sequence
  Cyclic GFR-binding peptide
TRLNAISILYFDSANNVVLKKYRDMV

SEQ ID NO: 89154 - protein, 32 aa, Artificial Sequence
  Cyclic GFR-binding peptide
  MOD_RES (3)..(4): Xaa is C or S
GPXXTPTKMSPISMLYKNDKQQIILKYHYGMV

SEQ ID NO: 89155 - protein, 29 aa, Artificial Sequence
  Cyclic GFR-binding peptide
  MOD_RES (28)..(28): Xaa is C or S
LSPINILYFDSANNVVYGKIPDMVVESXG

SEQ ID NO: 89156 - protein, 29 aa, Artificial Sequence
  Cyclic GFR-binding peptide
APTKLSATSVLYYDDSSNVILRKHRNMVV

SEQ ID NO: 89157 - protein, 32 aa, Artificial Sequence; identical to SEQ ID NO: 35580
  Cyclic GFR-binding peptide
  MOD_RES (29)..(31): Xaa is C or S

SEQ ID NO: 89158 - protein, 23 aa, Artificial Sequence
  Cyclic GFR-binding peptide
LSPISMLYKDENEKVVLKYHYDM

SEQ ID NO: 89159 - protein, 22 aa, Artificial Sequence
  Cyclic GFR-binding peptide
RLSPINILYFDSANNVVYGKIP

SEQ ID NO: 89160 - protein, 39 aa, Artificial Sequence; identical to SEQ ID NO: 42862
  Cyclic GFR-binding peptide
  MOD_RES (6)..(7)..(39): Xaa is C or S

SEQ ID NO: 89161 - protein, 30 aa, Artificial Sequence; identical to SEQ ID NO: 35583
  Cyclic GFR-binding peptide
  MOD_RES (4)..(4): Xaa is C or S

SEQ ID NO: 89162 - protein, 24 aa, Artificial Sequence
  Cyclic GFR-binding peptide
ARLEPISILYLDAANNVVKFKYED

SEQ ID NO: 89163 - protein, 34 aa, Artificial Sequence; identical to SEQ ID NO: 7175
  Cyclic GFR-binding peptide
  MOD_RES (31)..(33): Xaa is C or S

SEQ ID NO: 89164 - protein, 30 aa, Artificial Sequence; identical to SEQ ID NO: 42866
  Cyclic GFR-binding peptide
  MOD_RES (3)..(4): Xaa is C or S

SEQ ID NO: 89165 - protein, 29 aa, Artificial Sequence
  Cyclic GFR-binding peptide
  MOD_RES (27)..(29): Xaa is C or S
LSPISILYKIGKTPKILKYHYMIVKSXKX

SEQ ID NO: 89166 - protein, 32 aa, Artificial Sequence; identical to SEQ ID NO: 7179
  Cyclic GFR-binding peptide
  MOD_RES (3)..(4): Xaa is C or S

SEQ ID NO: 89167 - protein, 33 aa, Artificial Sequence
  Cyclic GFR-binding peptide
  MOD_RES (5)..(6): Xaa is C or S
IPEPXXVPEKMSPINILYFDENKNVVYGKIPNM

SEQ ID NO: 89168 - protein, 34 aa, Artificial Sequence; identical to SEQ ID NO: 35592
  Cyclic GFR-binding peptide
  MOD_RES (31)..(33): Xaa is C or S

SEQ ID NO: 89169 - protein, 31 aa, Artificial Sequence; identical to SEQ ID NO: 42876
  Cyclic GFR-binding peptide

SEQ ID NO: 89170 - protein, 23 aa, Artificial Sequence
  Cyclic GFR-binding peptide
QDLEPISILYLIGKTPKIKFKYE

SEQ ID NO: 89171 - protein, 37 aa, Artificial Sequence; identical to SEQ ID NO: 35595
  Cyclic GFR-binding peptide
  MOD_RES (4)..(5)..(37): Xaa is C or S

SEQ ID NO: 89172 - protein, 32 aa, Artificial Sequence; identical to SEQ ID NO: 7183
  Cyclic GFR-binding peptide
  MOD_RES (6)..(7): Xaa is C or S

SEQ ID NO: 89173 - protein, 27 aa, Artificial Sequence
  Cyclic GFR-binding peptide
PARLSPINILYFDAANNVVYGKIPDMV

SEQ ID NO: 89174 - protein, 25 aa, Artificial Sequence
  Cyclic GFR-binding peptide
NAISMLYFDEYDKVVLKKYREMVVE

SEQ ID NO: 89175 - protein, 41 aa, Artificial Sequence; identical to SEQ ID NO: 77192
  Cyclic GFR-binding peptide
  MOD_RES (5)..(6)..(38)..(40): Xaa is C or S

SEQ ID NO: 89176 - protein, 39 aa, Artificial Sequence; identical to SEQ ID NO: 7187
  Cyclic GFR-binding peptide
  MOD_RES (6)..(38): Xaa is C or S

SEQ ID NO: 89177 - protein, 37 aa, Artificial Sequence; identical to SEQ ID NO: 77193
  Cyclic GFR-binding peptide
  MOD_RES (5)..(6): Xaa is C or S

SEQ ID NO: 89178 - protein, 32 aa, Artificial Sequence
  Cyclic GFR-binding peptide
  MOD_RES (5)..(6): Xaa is C or S
IPEPXXVPEKMEPISILYLDENKNVVKFKYEN

SEQ ID NO: 89179 - protein, 35 aa, Artificial Sequence; identical to SEQ ID NO: 7195
  Cyclic GFR-binding peptide
  MOD_RES (32)..(34): Xaa is C or S

SEQ ID NO: 89180 - protein, 23 aa, Artificial Sequence
  Cyclic GFR-binding peptide
LEPISILYLDSANNVVKFKYEDM

SEQ ID NO: 89181 - protein, 31 aa, Artificial Sequence; identical to SEQ ID NO: 7198
  Cyclic GFR-binding peptide
  MOD_RES (30)..(30): Xaa is C or S

SEQ ID NO: 89182 - protein, 27 aa, Artificial Sequence
  Cyclic GFR-binding peptide
VPTKLSPINILYFDKGVVTYYGKIPGM

SEQ ID NO: 89183 - protein, 37 aa, Artificial Sequence; identical to SEQ ID NO: 42895
  Cyclic GFR-binding peptide
  MOD_RES (4)..(5)..(36): Xaa is C or S

SEQ ID NO: 89184 - protein, 26 aa, Artificial Sequence
  Cyclic GFR-binding peptide
VPTKLNAISILYFDKGVVTYLKKYRG

SEQ ID NO: 89185 - protein, 26 aa, Artificial Sequence
  Cyclic GFR-binding peptide
LEPISILYLVGRKPKVKFKYEMIVRS

SEQ ID NO: 89186 - protein, 33 aa, Artificial Sequence; identical to SEQ ID NO: 35612
  Cyclic GFR-binding peptide
  MOD_RES (32)..(32): Xaa is C or S

SEQ ID NO: 89187 - protein, 31 aa, Artificial Sequence; identical to SEQ ID NO: 42897
  Cyclic GFR-binding peptide
  MOD_RES (30)..(30): Xaa is C or S

SEQ ID NO: 89188 - protein, 23 aa, Artificial Sequence
  Cyclic GFR-binding peptide
LSPINILYFDAANNVVYGKIPDM

SEQ ID NO: 89189 - protein, 29 aa, Artificial Sequence
  Cyclic GFR-binding peptide
  MOD_RES (1)..(1): Xaa is C or S
XVPTKLSATSVLYYDDMGVPTLRKHREGM

SEQ ID NO: 89190 - protein, 23 aa, Artificial Sequence
  Cyclic GFR-binding peptide
TELEPISMLYLDEYDKVVKFKYE

SEQ ID NO: 89191 - protein, 37 aa, Artificial Sequence; identical to SEQ ID NO: 42899
  Cyclic GFR-binding peptide
  MOD_RES (5)..(6)..(37): Xaa is C or S

SEQ ID NO: 89192 - protein, 22 aa, Artificial Sequence
  Cyclic GFR-binding peptide
ELSATSMLYYDEYDKVVLRKHR

SEQ ID NO: 89193 - protein, 37 aa, Artificial Sequence; identical to SEQ ID NO: 7204
  Cyclic GFR-binding peptide
  MOD_RES (3)..(4)..(37): Xaa is C or S

SEQ ID NO: 89194 - protein, 30 aa, Artificial Sequence; identical to SEQ ID NO: 7205
  Cyclic GFR-binding peptide

SEQ ID NO: 89195 - protein, 32 aa, Artificial Sequence; identical to SEQ ID NO: 35619
  Cyclic GFR-binding peptide
  MOD_RES (2)..(3): Xaa is C or S

SEQ ID NO: 89196 - protein, 23 aa, Artificial Sequence
  Cyclic GFR-binding peptide
NAISILYFVGRTPKVLKKYRMVV

SEQ ID NO: 89197 - protein, 21 aa, Artificial Sequence
  Cyclic GFR-binding peptide
LEPISILYLDAANNVVKFKYE

SEQ ID NO: 89198 - protein, 32 aa, Artificial Sequence; identical to SEQ ID NO: 42907
  Cyclic GFR-binding peptide
  MOD_RES (32)..(32): Xaa is C or S

SEQ ID NO: 89199 - protein, 28 aa, Artificial Sequence
  Cyclic GFR-binding peptide
TQLEPISVLYLDDSSNVIKFKYENMVVR

SEQ ID NO: 89200 - protein, 21 aa, Artificial Sequence
  Cyclic GFR-binding peptide
LSPISILYKVGRTPKVLKYHY

SEQ ID NO: 89201 - protein, 22 aa, Artificial Sequence
  Cyclic GFR-binding peptide
LSPINVLYFDDSSNVIYGKIPN

SEQ ID NO: 89202 - protein, 40 aa, Artificial Sequence; identical to SEQ ID NO: 7211
  Cyclic GFR-binding peptide
  MOD_RES (6)..(7)..(39): Xaa is C or S

SEQ ID NO: 89203 - protein, 29 aa, Artificial Sequence
  Cyclic GFR-binding peptide
PTQLSATSVLYYDDSSNVILRKHRNMVVR

SEQ ID NO: 89204 - protein, 33 aa, Artificial Sequence
  Cyclic GFR-binding peptide
  MOD_RES (4)..(5): Xaa is C or S
PPTXXVPTRLSATSILYYDSANNVVLRKHRDMV

SEQ ID NO: 89205 - protein, 24 aa, Artificial Sequence
  Cyclic GFR-binding peptide
TRLSPISILYKDSANNVVLKYHYD

SEQ ID NO: 89206 - protein, 31 aa, Artificial Sequence; identical to SEQ ID NO: 7214
  Cyclic GFR-binding peptide
  MOD_RES (5)..(6): Xaa is C or S

SEQ ID NO: 89207 - protein, 36 aa, Artificial Sequence; identical to SEQ ID NO: 17556
  Cyclic GFR-binding peptide
  MOD_RES (4)..(5): Xaa is C or S

SEQ ID NO: 89208 - protein, 26 aa, Artificial Sequence
  Cyclic GFR-binding peptide
QALNAISILYFVGRKPKVLKKYRMIV

SEQ ID NO: 89209 - protein, 37 aa, Artificial Sequence; identical to SEQ ID NO: 35634
  Cyclic GFR-binding peptide
  MOD_RES (5)..(6): Xaa is C or S

SEQ ID NO: 89210 - protein, 30 aa, Artificial Sequence
  Cyclic GFR-binding peptide
  MOD_RES (4)..(5): Xaa is C or S
PSTXXAPVKTEPISMLYLDNGRVLLKFKYE

SEQ ID NO: 89211 - protein, 40 aa, Artificial Sequence; identical to SEQ ID NO: 7216
  Cyclic GFR-binding peptide
  MOD_RES (6)..(7)..(38)..(40): Xaa is C or S

SEQ ID NO: 89212 - protein, 32 aa, Artificial Sequence; identical to SEQ ID NO: 35636
  Cyclic GFR-binding peptide
  MOD_RES (4)..(4): Xaa is C or S

SEQ ID NO: 89213 - protein, 23 aa, Artificial Sequence
  Cyclic GFR-binding peptide
DLSATSILYYVGRTPKVLRKHRM

SEQ ID NO: 89214 - protein, 37 aa, Artificial Sequence; identical to SEQ ID NO: 42923
  Cyclic GFR-binding peptide
  MOD_RES (3)..(4)..(36): Xaa is C or S

SEQ ID NO: 89215 - protein, 29 aa, Artificial Sequence
  Cyclic GFR-binding peptide
  MOD_RES (28)..(28): Xaa is C or S
LSATSILYYDKGVVTYLRKHRGMAVSEXG

SEQ ID NO: 89216 - protein, 26 aa, Artificial Sequence
  Cyclic GFR-binding peptide
VPTKLSATSILYYDKGVVTYLRKHRG

SEQ ID NO: 89217 - protein, 40 aa, Artificial Sequence
  Cyclic GFR-binding peptide
  MOD_RES (4)..(5)..(37)..(39): Xaa is C or S
PEPXXVPEKMSPISILYKDENKNVVLKYHYNMTVESXAXR

SEQ ID NO: 89218 - protein, 24 aa, Artificial Sequence
  Cyclic GFR-binding peptide
EPISMLYLDENEKVVKFKYEDMVV

SEQ ID NO: 89219 - protein, 24 aa, Artificial Sequence
  Cyclic GFR-binding peptide
PQDLEPISILYLVGRTPKVKFKYE

SEQ ID NO: 89220 - protein, 28 aa, Artificial Sequence
  Cyclic GFR-binding peptide
  MOD_RES (28)..(28): Xaa is C or S
ALNAISILYFVGRKPKVLKKYRMIVRSX

SEQ ID NO: 89221 - protein, 37 aa, Artificial Sequence; identical to SEQ ID NO: 42925
  Cyclic GFR-binding peptide
  MOD_RES (6)..(7): Xaa is C or S

SEQ ID NO: 89222 - protein, 21 aa, Artificial Sequence
  Cyclic GFR-binding peptide
LSPINMLYFDENEKVVYGKIP

SEQ ID NO: 89223 - protein, 29 aa, Artificial Sequence
  Cyclic GFR-binding peptide
TKLSPISVLYKDSSNNVILKYHYNMVVKA

SEQ ID NO: 89224 - protein, 32 aa, Artificial Sequence; identical to SEQ ID NO: 42928
  Cyclic GFR-binding peptide
  MOD_RES (1)..(2): Xaa is C or S

SEQ ID NO: 89225 - protein, 26 aa, Artificial Sequence
  Cyclic GFR-binding peptide
KLSPISVLYKDDSSNVILKYHYNMVV

SEQ ID NO: 89226 - protein, 34 aa, Artificial Sequence; identical to SEQ ID NO: 17576
  Cyclic GFR-binding peptide
  MOD_RES (4)..(5): Xaa is C or S

SEQ ID NO: 89227 - protein, 27 aa, Artificial Sequence
  Cyclic GFR-binding peptide
PQDLNAISILYFVGRTPKVLKKYRMVV

SEQ ID NO: 89228 - protein, 25 aa, Artificial Sequence
  Cyclic GFR-binding peptide
SPISILYKDAANNVVLKYHYDMVVE

SEQ ID NO: 89229 - protein, 27 aa, Artificial Sequence
  Cyclic GFR-binding peptide
APTKLSPISVLYKDSSNNVILKYHYNM

SEQ ID NO: 89230 - protein, 23 aa, Artificial Sequence
  Cyclic GFR-binding peptide
KLNAISILYFDKGVVTYLKKYRG

SEQ ID NO: 89231 - protein, 29 aa, Artificial Sequence
  Cyclic GFR-binding peptide
PTRLEPISILYLDSANNVVKFKYEDMVVE

SEQ ID NO: 89232 - protein, 33 aa, Artificial Sequence; identical to SEQ ID NO: 77214
  Cyclic GFR-binding peptide
  MOD_RES (4)..(5): Xaa is C or S

SEQ ID NO: 89233 - protein, 24 aa, Artificial Sequence
  Cyclic GFR-binding peptide
PTKMSPISMLYKNDKQQIILKYHY

SEQ ID NO: 89234 - protein, 32 aa, Artificial Sequence; identical to SEQ ID NO: 7235
  Cyclic GFR-binding peptide
  MOD_RES (1)..(1): Xaa is C or S

SEQ ID NO: 89235 - protein, 21 aa, Artificial Sequence
  Cyclic GFR-binding peptide
LSPINILYFVGRKPKVYGKIP

SEQ ID NO: 89236 - protein, 37 aa, Artificial Sequence; identical to SEQ ID NO: 35663
  Cyclic GFR-binding peptide
  MOD_RES (3)..(4)..(36): Xaa is C or S

SEQ ID NO: 89237 - protein, 26 aa, Artificial Sequence
  Cyclic GFR-binding peptide
  MOD_RES (1)..(1): Xaa is C or S
XAPTKLEPISVLYLDDSSNVIKFKYE

SEQ ID NO: 89238 - protein, 37 aa, Artificial Sequence; identical to SEQ ID NO: 7241
  Cyclic GFR-binding peptide
  MOD_RES (2)..(3)..(34)..(36): Xaa is C or S

SEQ ID NO: 89239 - protein, 33 aa, Artificial Sequence; identical to SEQ ID NO: 42945
  Cyclic GFR-binding peptide
  MOD_RES (2)..(3): Xaa is C or S

SEQ ID NO: 89240 - protein, 41 aa, Artificial Sequence; identical to SEQ ID NO: 35667
  Cyclic GFR-binding peptide
  MOD_RES (5)..(6)..(38)..(40): Xaa is C or S

SEQ ID NO: 89241 - protein, 40 aa, Artificial Sequence; identical to SEQ ID NO: 77216
  Cyclic GFR-binding peptide
  MOD_RES (5)..(6)..(37)..(39): Xaa is C or S

SEQ ID NO: 89242 - protein, 28 aa, Artificial Sequence
  Cyclic GFR-binding peptide
  MOD_RES (1)..(1): Xaa is C or S
XVPQALSPISILYKVGRKPKVLKYHYMI

SEQ ID NO: 89243 - protein, 27 aa, Artificial Sequence
  Cyclic GFR-binding peptide
PTKLEPISVLYLDDSSNVIKFKYENMV

SEQ ID NO: 89244 - protein, 35 aa, Artificial Sequence
  Cyclic GFR-binding peptide
  MOD_RES (1)..(2)..(34): Xaa is C or S
XXTPTKMSPISMLYKNDKQQIILKYHYGMVVDRXG

SEQ ID NO: 89245 - protein, 26 aa, Artificial Sequence
  Cyclic GFR-binding peptide
LNAISMLYFDENEKVVLKKYRDMVVE

SEQ ID NO: 89246 - protein, 30 aa, Artificial Sequence; identical to SEQ ID NO: 42948
  Cyclic GFR-binding peptide

SEQ ID NO: 89247 - protein, 28 aa, Artificial Sequence
  Cyclic GFR-binding peptide
  MOD_RES (1)..(1): Xaa is C or S
XVPEKMEPISILYLDENKNVVKFKYENM

SEQ ID NO: 89248 - protein, 27 aa, Artificial Sequence
  Cyclic GFR-binding peptide
KLSPINVLYFDDMGVPTYGKIPEGMSV

SEQ ID NO: 89249 - protein, 24 aa, Artificial Sequence
  Cyclic GFR-binding peptide
KTSPINMLYFDNGRVLLYGKIPMI

SEQ ID NO: 89250 - protein, 32 aa, Artificial Sequence; identical to SEQ ID NO: 77220
  Cyclic GFR-binding peptide
  MOD_RES (3)..(4): Xaa is C or S

SEQ ID NO: 89251 - protein, 23 aa, Artificial Sequence
  Cyclic GFR-binding peptide
EKMSPISILYKDENKNVVLKYHY

SEQ ID NO: 89252 - protein, 26 aa, Artificial Sequence
  Cyclic GFR-binding peptide
  MOD_RES (1)..(1): Xaa is C or S
XVPTKLNAISILYFDKGVVTYLKKYR

SEQ ID NO: 89253 - protein, 32 aa, Artificial Sequence; identical to SEQ ID NO: 7252
  Cyclic GFR-binding peptide
  MOD_RES (3)..(4): Xaa is C or S

SEQ ID NO: 89254 - protein, 27 aa, Artificial Sequence
  Cyclic GFR-binding peptide
  MOD_RES (1)..(1): Xaa is C or S
XAPVKTSPINMLYFDNGRVLLYGKIPM

SEQ ID NO: 89255 - protein, 24 aa, Artificial Sequence
  Cyclic GFR-binding peptide
RLSATSILYYDAANNVVLRKHRDM

SEQ ID NO: 89256 - protein, 26 aa, Artificial Sequence
  Cyclic GFR-binding peptide
ALSPISILYKVGRKPKVLKYHYMIVR

SEQ ID NO: 89257 - protein, 34 aa, Artificial Sequence
  Cyclic GFR-binding peptide
  MOD_RES (6)..(7): Xaa is C or S
HVPKPXXAPTKLSATSVLYYDDSSNVILRKHRNM

SEQ ID NO: 89258 - protein, 35 aa, Artificial Sequence
  Cyclic GFR-binding peptide
  MOD_RES (5)..(6): Xaa is C or S
SASPXXVSQDLSPINILYFIGKTPKIYGKIPMIVK

SEQ ID NO: 89259 - protein, 33 aa, Artificial Sequence; identical to SEQ ID NO: 7262
  Cyclic GFR-binding peptide
  MOD_RES (32)..(32): Xaa is C or S

SEQ ID NO: 89260 - protein, 31 aa, Artificial Sequence
  Cyclic GFR-binding peptide
  MOD_RES (5)..(6): Xaa is C or S
IPEPXXVPEKMEPISILYLDENKNVVKFKYE

SEQ ID NO: 89261 - protein, 23 aa, Artificial Sequence
  Cyclic GFR-binding peptide
LSPISILYKDKGVVTYLKYHYGM

SEQ ID NO: 89262 - protein, 31 aa, Artificial Sequence; identical to SEQ ID NO: 7267
  Cyclic GFR-binding peptide
  MOD_RES (4)..(5): Xaa is C or S

SEQ ID NO: 89263 - protein, 29 aa, Artificial Sequence
  Cyclic GFR-binding peptide
  MOD_RES (28)..(28): Xaa is C or S
LNAISVLYFDSSNNVILKKYRNMVVKAXG

SEQ ID NO: 89264 - protein, 21 aa, Artificial Sequence
  Cyclic GFR-binding peptide
SATSMLYYDNGRVLLLRKHRM

SEQ ID NO: 89265 - protein, 26 aa, Artificial Sequence
  Cyclic GFR-binding peptide
SPINILYFDAANNVVYGKIPDMVVEA

SEQ ID NO: 89266 - protein, 27 aa, Artificial Sequence
  Cyclic GFR-binding peptide
DLEPISILYLVGRTPKVKFKYEMVVKS

SEQ ID NO: 89267 - protein, 42 aa, Artificial Sequence
  Cyclic GFR-binding peptide
  MOD_RES (6)..(7)..(39)..(41): Xaa is C or S
HVPKPXXAPTKLSATSVLYYDDSSNVILRKHRNMVVRSXGXH

SEQ ID NO: 89268 - protein, 31 aa, Artificial Sequence; identical to SEQ ID NO: 35702
  Cyclic GFR-binding peptide
  MOD_RES (28)..(30): Xaa is C or S

SEQ ID NO: 89269 - protein, 32 aa, Artificial Sequence
  Cyclic GFR-binding peptide
  MOD_RES (6)..(7): Xaa is C or S
STPPTXXVPTRLSATSILYYDSANNVVLRKHR

SEQ ID NO: 89270 - protein, 33 aa, Artificial Sequence; identical to SEQ ID NO: 7274
  Cyclic GFR-binding peptide
  MOD_RES (2)..(3): Xaa is C or S

SEQ ID NO: 89271 - protein, 38 aa, Artificial Sequence; identical to SEQ ID NO: 7275
  Cyclic GFR-binding peptide
  MOD_RES (5)..(37): Xaa is C or S

SEQ ID NO: 89272 - protein, 33 aa, Artificial Sequence; identical to SEQ ID NO: 7276
  Cyclic GFR-binding peptide
  MOD_RES (4)..(5): Xaa is C or S

SEQ ID NO: 89273 - protein, 31 aa, Artificial Sequence; identical to SEQ ID NO: 35706
  Cyclic GFR-binding peptide
  MOD_RES (5)..(6): Xaa is C or S

SEQ ID NO: 89274 - protein, 26 aa, Artificial Sequence
  Cyclic GFR-binding peptide
PARLNAISILYFDAANNVVLKKYRDM

SEQ ID NO: 89275 - protein, 29 aa, Artificial Sequence
  Cyclic GFR-binding peptide
  MOD_RES (1)..(1): Xaa is C or S
XVPTKLSATSILYYDKGVVTYLRKHRGMA

SEQ ID NO: 89276 - protein, 35 aa, Artificial Sequence; identical to SEQ ID NO: 35710
  Cyclic GFR-binding peptide
  MOD_RES (1)..(2)..(33)..(35): Xaa is C or S

SEQ ID NO: 89277 - protein, 39 aa, Artificial Sequence; identical to SEQ ID NO: 77235
  Cyclic GFR-binding peptide
  MOD_RES (5)..(6)..(37)..(39): Xaa is C or S

SEQ ID NO: 89278 - protein, 29 aa, Artificial Sequence
  Cyclic GFR-binding peptide
VPTKLNAISVLYFDDMGVPTLKKYREGMS

SEQ ID NO: 89279 - protein, 28 aa, Artificial Sequence
  Cyclic GFR-binding peptide
APTKLSPISVLYKDSSNNVILKYHYNMV

SEQ ID NO: 89280 - protein, 37 aa, Artificial Sequence; identical to SEQ ID NO: 35713
  Cyclic GFR-binding peptide
  MOD_RES (6)..(7): Xaa is C or S

SEQ ID NO: 89281 - protein, 30 aa, Artificial Sequence; identical to SEQ ID NO: 7283
  Cyclic GFR-binding peptide
  MOD_RES (3)..(4): Xaa is C or S

SEQ ID NO: 89282 - protein, 33 aa, Artificial Sequence; identical to SEQ ID NO: 7286
  Cyclic GFR-binding peptide
  MOD_RES (6)..(7): Xaa is C or S

SEQ ID NO: 89283 - protein, 24 aa, Artificial Sequence
  Cyclic GFR-binding peptide
LNAISMLYFDENEKVVLKKYRDMV

SEQ ID NO: 89284 - protein, 29 aa, Artificial Sequence
  Cyclic GFR-binding peptide
PTRLSPINILYFDSANNVVYGKIPDMVVE

SEQ ID NO: 89285 - protein, 31 aa, Artificial Sequence; identical to SEQ ID NO: 7288
  Cyclic GFR-binding peptide
  MOD_RES (4)..(5): Xaa is C or S

SEQ ID NO: 89286 - protein, 23 aa, Artificial Sequence
  Cyclic GFR-binding peptide
TELNAISMLYFDENEKVVLKKYR

SEQ ID NO: 89287 - protein, 25 aa, Artificial Sequence
  Cyclic GFR-binding peptide
VPEKMSATSILYYDENKNVVLRKHR

SEQ ID NO: 89288 - protein, 25 aa, Artificial Sequence
  Cyclic GFR-binding peptide
PQDLSATSILYYVGRTPKVLRKHRM

SEQ ID NO: 89289 - protein, 26 aa, Artificial Sequence
  Cyclic GFR-binding peptide
SATSMLYYDENEKVVLRKHRDMVVEG

SEQ ID NO: 89290 - protein, 25 aa, Artificial Sequence
  Cyclic GFR-binding peptide
TKLNAISVLYFDSSNNVILKKYRNM

SEQ ID NO: 89291 - protein, 24 aa, Artificial Sequence
  Cyclic GFR-binding peptide
LSPISILYKDKGVVTYLKYHYGMA

SEQ ID NO: 89292 - protein, 40 aa, Artificial Sequence; identical to SEQ ID NO: 7294
  Cyclic GFR-binding peptide
  MOD_RES (5)..(6)..(37)..(39): Xaa is C or S

SEQ ID NO: 89293 - protein, 39 aa, Artificial Sequence; identical to SEQ ID NO: 35724
  Cyclic GFR-binding peptide
  MOD_RES (6)..(38): Xaa is C or S

SEQ ID NO: 89294 - protein, 34 aa, Artificial Sequence; identical to SEQ ID NO: 35727
  Cyclic GFR-binding peptide
  MOD_RES (5)..(6): Xaa is C or S

SEQ ID NO: 89295 - protein, 27 aa, Artificial Sequence
  Cyclic GFR-binding peptide
VPARLSATSILYYDAANNVVLRKHRDM

SEQ ID NO: 89296 - protein, 30 aa, Artificial Sequence; identical to SEQ ID NO: 7304
  Cyclic GFR-binding peptide
  MOD_RES (1)..(2): Xaa is C or S

SEQ ID NO: 89297 - protein, 29 aa, Artificial Sequence
  Cyclic GFR-binding peptide
VPTELSPISMLYKDENEKVVLKYHYDMVV

SEQ ID NO: 89298 - protein, 41 aa, Artificial Sequence; identical to SEQ ID NO: 7306
  Cyclic GFR-binding peptide
  MOD_RES (5)..(6)..(38)..(40): Xaa is C or S

SEQ ID NO: 89299 - protein, 37 aa, Artificial Sequence; identical to SEQ ID NO: 35735
  Cyclic GFR-binding peptide
  MOD_RES (2)..(3)..(35)..(37): Xaa is C or S

SEQ ID NO: 89300 - protein, 23 aa, Artificial Sequence
  Cyclic GFR-binding peptide
TKLSPINILYFDKGVVTYYGKIP

SEQ ID NO: 89301 - protein, 38 aa, Artificial Sequence; identical to SEQ ID NO: 35740
  Cyclic GFR-binding peptide
  MOD_RES (2)..(3)..(35)..(37): Xaa is C or S

SEQ ID NO: 89302 - protein, 29 aa, Artificial Sequence
  Cyclic GFR-binding peptide
  MOD_RES (1)..(1): Xaa is C or S
XVPTELSPINMLYFDENEKVVYGKIPDMV

SEQ ID NO: 89303 - protein, 35 aa, Artificial Sequence; identical to SEQ ID NO: 7312
  Cyclic GFR-binding peptide
  MOD_RES (3)..(4): Xaa is C or S

SEQ ID NO: 89304 - protein, 29 aa, Artificial Sequence
  Cyclic GFR-binding peptide
  MOD_RES (3)..(4): Xaa is C or S
KPXXAPTQLSATSVLYYDDSSNVILRKHR

SEQ ID NO: 89305 - protein, 25 aa, Artificial Sequence
  Cyclic GFR-binding peptide
NAISMLYFDNGRVLLLKKYRMIVEE

SEQ ID NO: 89306 - protein, 32 aa, Artificial Sequence; identical to SEQ ID NO: 7315
  Cyclic GFR-binding peptide
  MOD_RES (31)..(31): Xaa is C or S

SEQ ID NO: 89307 - protein, 35 aa, Artificial Sequence; identical to SEQ ID NO: 35745
  Cyclic GFR-binding peptide
  MOD_RES (32)..(34): Xaa is C or S

SEQ ID NO: 89308 - protein, 25 aa, Artificial Sequence
  Cyclic GFR-binding peptide
VSQDLSATSILYYIGKTPKILRKHR

SEQ ID NO: 89309 - protein, 30 aa, Artificial Sequence; identical to SEQ ID NO: 43017
  Cyclic GFR-binding peptide
  MOD_RES (2)..(2): Xaa is C or S

SEQ ID NO: 89310 - protein, 35 aa, Artificial Sequence
  Cyclic GFR-binding peptide
  MOD_RES (2)..(3)..(34): Xaa is C or S
TXXAPVKTSPISMLYKDNGRVLLLKYHYMIVEEXG

SEQ ID NO: 89311 - protein, 29 aa, Artificial Sequence
  Cyclic GFR-binding peptide
VPTELSATSMLYYDENEKVVLRKHRDMVV

SEQ ID NO: 89312 - protein, 39 aa, Artificial Sequence; identical to SEQ ID NO: 35753
  Cyclic GFR-binding peptide
  MOD_RES (6)..(7): Xaa is C or S

SEQ ID NO: 89313 - protein, 27 aa, Artificial Sequence
  Cyclic GFR-binding peptide
  MOD_RES (1)..(1): Xaa is C or S
XAPTKLSPINVLYFDSSNNVIYGKIPN

SEQ ID NO: 89314 - protein, 22 aa, Artificial Sequence
  Cyclic GFR-binding peptide
KLSPINVLYFDSSNNVIYGKIP

SEQ ID NO: 89315 - protein, 37 aa, Artificial Sequence; identical to SEQ ID NO: 43030
  Cyclic GFR-binding peptide
  MOD_RES (4)..(5)..(37): Xaa is C or S

SEQ ID NO: 89316 - protein, 37 aa, Artificial Sequence; identical to SEQ ID NO: 43031
  Cyclic GFR-binding peptide
  MOD_RES (4)..(5)..(37): Xaa is C or S

SEQ ID NO: 89317 - protein, 33 aa, Artificial Sequence; identical to SEQ ID NO: 43033
  Cyclic GFR-binding peptide
  MOD_RES (7)..(7): Xaa is C or S

SEQ ID NO: 89318 - protein, 25 aa, Artificial Sequence
  Cyclic GFR-binding peptide
PQDLSPINILYFVGRTPKVYGKIPM

SEQ ID NO: 89319 - protein, 33 aa, Artificial Sequence; identical to SEQ ID NO: 35765
  Cyclic GFR-binding peptide
  MOD_RES (1)..(2): Xaa is C or S

SEQ ID NO: 89320 - protein, 24 aa, Artificial Sequence
  Cyclic GFR-binding peptide
QLEPISVLYLDDSSNVIKFKYENM

SEQ ID NO: 89321 - protein, 27 aa, Artificial Sequence
  Cyclic GFR-binding peptide
KLNAISVLYFDSSNNVILKKYRNMVVK

SEQ ID NO: 89322 - protein, 36 aa, Artificial Sequence; identical to SEQ ID NO: 7339
  Cyclic GFR-binding peptide
  MOD_RES (3)..(35): Xaa is C or S

SEQ ID NO: 89323 - protein, 39 aa, Artificial Sequence; identical to SEQ ID NO: 7341
  Cyclic GFR-binding peptide
  MOD_RES (6)..(7)..(38): Xaa is C or S

SEQ ID NO: 89324 - protein, 34 aa, Artificial Sequence
  Cyclic GFR-binding peptide
  MOD_RES (2)..(3): Xaa is C or S
PXXTPTKMSATSMLYYNDKQQIILRKHRGMVVDR

SEQ ID NO: 89325 - protein, 42 aa, Artificial Sequence; identical to SEQ ID NO: 35781
  Cyclic GFR-binding peptide
  MOD_RES (6)..(7)..(39)..(41): Xaa is C or S

SEQ ID NO: 89326 - protein, 28 aa, Artificial Sequence
  Cyclic GFR-binding peptide
TKLSATSVLYYDDSSNVILRKHRNMVVR

SEQ ID NO: 89327 - protein, 36 aa, Artificial Sequence
  Cyclic GFR-binding peptide
  MOD_RES (5)..(6): Xaa is C or S
VPSTXXAPVKTSPISMLYKDNGRVLLLKYHYMIVEE

SEQ ID NO: 89328 - protein, 29 aa, Artificial Sequence
  Cyclic GFR-binding peptide
  MOD_RES (29)..(29): Xaa is C or S
RLSATSILYYDSANNVVLRKHRDMVVESX

SEQ ID NO: 89329 - protein, 36 aa, Artificial Sequence; identical to SEQ ID NO: 35788
  Cyclic GFR-binding peptide
  MOD_RES (6)..(7): Xaa is C or S

SEQ ID NO: 89330 - protein, 39 aa, Artificial Sequence; identical to SEQ ID NO: 43059
  Cyclic GFR-binding peptide
  MOD_RES (4)..(5)..(37)..(39): Xaa is C or S

SEQ ID NO: 89331 - protein, 32 aa, Artificial Sequence
  Cyclic GFR-binding peptide
  MOD_RES (6)..(7): Xaa is C or S
GIPEPXXVPEKMNAISILYFDENKNVVLKKYR

SEQ ID NO: 89332 - protein, 29 aa, Artificial Sequence
  Cyclic GFR-binding peptide
  MOD_RES (28)..(28): Xaa is C or S
LSPISVLYKDSSNNVILKYHYNMVVKAXG

SEQ ID NO: 89333 - protein, 32 aa, Artificial Sequence; identical to SEQ ID NO: 7351
  Cyclic GFR-binding peptide
  MOD_RES (1)..(2): Xaa is C or S

SEQ ID NO: 89334 - protein, 26 aa, Artificial Sequence
  Cyclic GFR-binding peptide
ELNAISMLYFDEYDKVVLKKYREMVV

SEQ ID NO: 89335 - protein, 35 aa, Artificial Sequence; identical to SEQ ID NO: 7356
  Cyclic GFR-binding peptide
  MOD_RES (5)..(6): Xaa is C or S

SEQ ID NO: 89336 - protein, 32 aa, Artificial Sequence; identical to SEQ ID NO: 17674
  Cyclic GFR-binding peptide
  MOD_RES (29)..(31): Xaa is C or S

SEQ ID NO: 89337 - protein, 31 aa, Artificial Sequence; identical to SEQ ID NO: 35796
  Cyclic GFR-binding peptide
  MOD_RES (1)..(2): Xaa is C or S

SEQ ID NO: 89338 - protein, 24 aa, Artificial Sequence
  Cyclic GFR-binding peptide
PTKMEPISMLYLNDKQQIIKFKYE

SEQ ID NO: 89339 - protein, 35 aa, Artificial Sequence; identical to SEQ ID NO: 77278
  Cyclic GFR-binding peptide
  MOD_RES (4)..(5): Xaa is C or S

SEQ ID NO: 89340 - protein, 29 aa, Artificial Sequence
  Cyclic GFR-binding peptide
  MOD_RES (1)..(2): Xaa is C or S
XXVPARLSATSILYYDAANNVVLRKHRDM

SEQ ID NO: 89341 - protein, 35 aa, Artificial Sequence; identical to SEQ ID NO: 7363
  Cyclic GFR-binding peptide
  MOD_RES (4)..(5): Xaa is C or S

SEQ ID NO: 89342 - protein, 20 aa, Artificial Sequence
  Cyclic GFR-binding peptide
SATSILYYDENKNVVLRKHR

SEQ ID NO: 89343 - protein, 30 aa, Artificial Sequence; identical to SEQ ID NO: 7364
  Cyclic GFR-binding peptide
  MOD_RES (4)..(5): Xaa is C or S

SEQ ID NO: 89344 - protein, 34 aa, Artificial Sequence; identical to SEQ ID NO: 35801
  Cyclic GFR-binding peptide
  MOD_RES (1)..(2)..(34): Xaa is C or S

SEQ ID NO: 89345 - protein, 21 aa, Artificial Sequence
  Cyclic GFR-binding peptide
LSATSVLYYDDSSNVILRKHR

SEQ ID NO: 89346 - protein, 34 aa, Artificial Sequence; identical to SEQ ID NO: 7367
  Cyclic GFR-binding peptide
  MOD_RES (32)..(34): Xaa is C or S

SEQ ID NO: 89347 - protein, 40 aa, Artificial Sequence; identical to SEQ ID NO: 35802
  Cyclic GFR-binding peptide
  MOD_RES (4)..(5)..(37)..(39): Xaa is C or S

SEQ ID NO: 89348 - protein, 34 aa, Artificial Sequence; identical to SEQ ID NO: 7368
  Cyclic GFR-binding peptide
  MOD_RES (2)..(3)..(34): Xaa is C or S

SEQ ID NO: 89349 - protein, 30 aa, Artificial Sequence; identical to SEQ ID NO: 7369
  Cyclic GFR-binding peptide
  MOD_RES (3)..(4): Xaa is C or S

SEQ ID NO: 89350 - protein, 28 aa, Artificial Sequence
  Cyclic GFR-binding peptide
VPTKLNAISILYFDKGVVTYLKKYRGMA

SEQ ID NO: 89351 - protein, 34 aa, Artificial Sequence
  Cyclic GFR-binding peptide
  MOD_RES (1)..(33): Xaa is C or S
XVPEKMSPINILYFDENKNVVYGKIPNMTVESXA

SEQ ID NO: 89352 - protein, 33 aa, Artificial Sequence; identical to SEQ ID NO: 77282
  Cyclic GFR-binding peptide
  MOD_RES (6)..(7): Xaa is C or S

SEQ ID NO: 89353 - protein, 32 aa, Artificial Sequence; identical to SEQ ID NO: 43081
  Cyclic GFR-binding peptide
  MOD_RES (31)..(31): Xaa is C or S

SEQ ID NO: 89354 - protein, 26 aa, Artificial Sequence
  Cyclic GFR-binding peptide
VPQALSATSILYYVGRKPKVLRKHRM

SEQ ID NO: 89355 - protein, 32 aa, Artificial Sequence; identical to SEQ ID NO: 35806
  Cyclic GFR-binding peptide
  MOD_RES (29)..(31): Xaa is C or S

SEQ ID NO: 89356 - protein, 32 aa, Artificial Sequence; identical to SEQ ID NO: 35807
  Cyclic GFR-binding peptide
  MOD_RES (3)..(4): Xaa is C or S

SEQ ID NO: 89357 - protein, 31 aa, Artificial Sequence; identical to SEQ ID NO: 35808
  Cyclic GFR-binding peptide
  MOD_RES (29)..(31): Xaa is C or S

SEQ ID NO: 89358 - protein, 23 aa, Artificial Sequence
  Cyclic GFR-binding peptide
KTNAISMLYFDNGRVLLLKKYRM

SEQ ID NO: 89359 - protein, 32 aa, Artificial Sequence; identical to SEQ ID NO: 43086
  Cyclic GFR-binding peptide
  MOD_RES (5)..(6): Xaa is C or S

SEQ ID NO: 89360 - protein, 34 aa, Artificial Sequence; identical to SEQ ID NO: 43087
  Cyclic GFR-binding peptide
  MOD_RES (4)..(4): Xaa is C or S

SEQ ID NO: 89361 - protein, 32 aa, Artificial Sequence
  Cyclic GFR-binding peptide
  MOD_RES (30)..(32): Xaa is C or S
TRLSATSILYYDSANNVVLRKHRDMVVESXGX

SEQ ID NO: 89362 - protein, 29 aa, Artificial Sequence
  Cyclic GFR-binding peptide
  MOD_RES (28)..(28): Xaa is C or S
LSATSILYYDAANNVVLRKHRDMVVEAXG

SEQ ID NO: 89363 - protein, 30 aa, Artificial Sequence; identical to SEQ ID NO: 7374
  Cyclic GFR-binding peptide
  MOD_RES (28)..(30): Xaa is C or S

SEQ ID NO: 89364 - protein, 34 aa, Artificial Sequence; identical to SEQ ID NO: 43089
  Cyclic GFR-binding peptide
  MOD_RES (31)..(33): Xaa is C or S

SEQ ID NO: 89365 - protein, 31 aa, Artificial Sequence
  Cyclic GFR-binding peptide
  MOD_RES (4)..(5): Xaa is C or S
ASPXXVSQDLSPINILYFIGKTPKIYGKIPM

SEQ ID NO: 89366 - protein, 26 aa, Artificial Sequence
  Cyclic GFR-binding peptide
PTKLEPISVLYLDDMGVPTKFKYEEG

SEQ ID NO: 89367 - protein, 28 aa, Artificial Sequence
  Cyclic GFR-binding peptide
PQALSPISILYKVGRKPKVLKYHYMIVR

SEQ ID NO: 89368 - protein, 38 aa, Artificial Sequence
  Cyclic GFR-binding peptide
  MOD_RES (3)..(4)..(35)..(37): Xaa is C or S
SPXXVPQDLSPINILYFVGRTPKVYGKIPMVVKSXKXS

SEQ ID NO: 89369 - protein, 32 aa, Artificial Sequence; identical to SEQ ID NO: 35826
  Cyclic GFR-binding peptide
  MOD_RES (6)..(7): Xaa is C or S

SEQ ID NO: 89370 - protein, 32 aa, Artificial Sequence; identical to SEQ ID NO: 35828
  Cyclic GFR-binding peptide
  MOD_RES (1)..(1): Xaa is C or S

SEQ ID NO: 89371 - protein, 26 aa, Artificial Sequence
  Cyclic GFR-binding peptide
  MOD_RES (1)..(1): Xaa is C or S
XVPTRLSPISILYKDSANNVVLKYHY

SEQ ID NO: 89372 - protein, 36 aa, Artificial Sequence; identical to SEQ ID NO: 7384
  Cyclic GFR-binding peptide
  MOD_RES (1)..(2)..(34)..(36): Xaa is C or S

SEQ ID NO: 89373 - protein, 36 aa, Artificial Sequence; identical to SEQ ID NO: 35837
  Cyclic GFR-binding peptide
  MOD_RES (2)..(3)..(35): Xaa is C or S

SEQ ID NO: 89374 - protein, 27 aa, Artificial Sequence
  Cyclic GFR-binding peptide
  MOD_RES (1)..(1): Xaa is C or S
XVSQDLNAISILYFIGKTPKILKKYRM

SEQ ID NO: 89375 - protein, 32 aa, Artificial Sequence; identical to SEQ ID NO: 7388
  Cyclic GFR-binding peptide
  MOD_RES (30)..(32): Xaa is C or S

SEQ ID NO: 89376 - protein, 36 aa, Artificial Sequence; identical to SEQ ID NO: 7389
  Cyclic GFR-binding peptide
  MOD_RES (4)..(5): Xaa is C or S

SEQ ID NO: 89377 - protein, 38 aa, Artificial Sequence; identical to SEQ ID NO: 43110
  Cyclic GFR-binding peptide
  MOD_RES (2)..(3)..(35)..(37): Xaa is C or S

SEQ ID NO: 89378 - protein, 26 aa, Artificial Sequence
  Cyclic GFR-binding peptide
RLEPISILYLDSANNVVKFKYEDMVV

SEQ ID NO: 89379 - protein, 31 aa, Artificial Sequence; identical to SEQ ID NO: 7390
  Cyclic GFR-binding peptide
  MOD_RES (4)..(5): Xaa is C or S

SEQ ID NO: 89380 - protein, 35 aa, Artificial Sequence; identical to SEQ ID NO: 7391
  Cyclic GFR-binding peptide
  MOD_RES (2)..(3): Xaa is C or S

SEQ ID NO: 89381 - protein, 32 aa, Artificial Sequence
  Cyclic GFR-binding peptide
  MOD_RES (30)..(32): Xaa is C or S
PVKTSATSMLYYDNGRVLLLRKHRMIVEEXGX

SEQ ID NO: 89382 - protein, 26 aa, Artificial Sequence
  Cyclic GFR-binding peptide
KTSATSMLYYDNGRVLLLRKHRMIVE

SEQ ID NO: 89383 - protein, 27 aa, Artificial Sequence
  Cyclic GFR-binding peptide
  MOD_RES (1)..(2): Xaa is C or S
XXVPQDLEPISILYLVGRTPKVKFKYE

SEQ ID NO: 89384 - protein, 33 aa, Artificial Sequence; identical to SEQ ID NO: 17720
  Cyclic GFR-binding peptide
  MOD_RES (31)..(33): Xaa is C or S

SEQ ID NO: 89385 - protein, 33 aa, Artificial Sequence; identical to SEQ ID NO: 35855
  Cyclic GFR-binding peptide
  MOD_RES (31)..(33): Xaa is C or S

SEQ ID NO: 89386 - protein, 36 aa, Artificial Sequence; identical to SEQ ID NO: 35857
  Cyclic GFR-binding peptide
  MOD_RES (5)..(6): Xaa is C or S

SEQ ID NO: 89387 - protein, 33 aa, Artificial Sequence
  Cyclic GFR-binding peptide
  MOD_RES (4)..(5): Xaa is C or S
PEPXXVPEKMNAISILYFDENKNVVLKKYRNMT

SEQ ID NO: 89388 - protein, 38 aa, Artificial Sequence
  Cyclic GFR-binding peptide
  MOD_RES (4)..(5)..(37): Xaa is C or S
PEPXXVPEKMSATSILYYDENKNVVLRKHRNMTVESXA

SEQ ID NO: 89389 - protein, 27 aa, Artificial Sequence
  Cyclic GFR-binding peptide
VPQDLNAISILYFVGRTPKVLKKYRMV

SEQ ID NO: 89390 - protein, 26 aa, Artificial Sequence
  Cyclic GFR-binding peptide
LSPISVLYKDSSNNVILKYHYNMVVK

SEQ ID NO: 89391 - protein, 22 aa, Artificial Sequence
  Cyclic GFR-binding peptide
ELSPINMLYFDENEKVVYGKIP

SEQ ID NO: 89392 - protein, 27 aa, Artificial Sequence
  Cyclic GFR-binding peptide
APVKTSPISMLYKDNGRVLLLKYHYMI

SEQ ID NO: 89393 - protein, 32 aa, Artificial Sequence; identical to SEQ ID NO: 7416
  Cyclic GFR-binding peptide
  MOD_RES (1)..(2): Xaa is C or S

SEQ ID NO: 89394 - protein, 29 aa, Artificial Sequence
  Cyclic GFR-binding peptide
ARLEPISILYLDAANNVVKFKYEDMVVEA

SEQ ID NO: 89395 - protein, 30 aa, Artificial Sequence; identical to SEQ ID NO: 7419
  Cyclic GFR-binding peptide
  MOD_RES (3)..(4): Xaa is C or S

SEQ ID NO: 89396 - protein, 31 aa, Artificial Sequence; identical to SEQ ID NO: 35879
  Cyclic GFR-binding peptide
  MOD_RES (28)..(30): Xaa is C or S

SEQ ID NO: 89397 - protein, 26 aa, Artificial Sequence
  Cyclic GFR-binding peptide
KMSPISMLYKNDKQQIILKYHYGMVV

SEQ ID NO: 89398 - protein, 33 aa, Artificial Sequence
  Cyclic GFR-binding peptide
  MOD_RES (3)..(4): Xaa is C or S
STXXAPVKTSATSMLYYDNGRVLLLRKHRMIVE

SEQ ID NO: 89399 - protein, 40 aa, Artificial Sequence
  Cyclic GFR-binding peptide
  MOD_RES (4)..(5)..(37)..(39): Xaa is C or S
SKAXXVPTKLSATSILYYDKGVVTYLRKHRGMAVSEXGXR

SEQ ID NO: 89400 - protein, 29 aa, Artificial Sequence
  Cyclic GFR-binding peptide
  MOD_RES (26)..(28): Xaa is C or S
SPINMLYFDNGRVLLYGKIPMIVEEXGXL

SEQ ID NO: 89401 - protein, 26 aa, Artificial Sequence
  Cyclic GFR-binding peptide
SATSILYYDAANNVVLRKHRDMVVEA

SEQ ID NO: 89402 - protein, 30 aa, Artificial Sequence; identical to SEQ ID NO: 43143
  Cyclic GFR-binding peptide
  MOD_RES (27)..(29): Xaa is C or S

SEQ ID NO: 89403 - protein, 29 aa, Artificial Sequence
  Cyclic GFR-binding peptide
  MOD_RES (1)..(2): Xaa is C or S
XXVPTRLEPISILYLDSANNVVKFKYEDM

SEQ ID NO: 89404 - protein, 31 aa, Artificial Sequence; identical to SEQ ID NO: 35888
  Cyclic GFR-binding peptide
  MOD_RES (28)..(30): Xaa is C or S

SEQ ID NO: 89405 - protein, 27 aa, Artificial Sequence
  Cyclic GFR-binding peptide
  MOD_RES (1)..(1): Xaa is C or S
XVPTKLSATSILYYDKGVVTYLRKHRG

SEQ ID NO: 89406 - protein, 35 aa, Artificial Sequence
  Cyclic GFR-binding peptide
  MOD_RES (1)..(33)..(35): Xaa is C or S
XVPTRLSPISILYKDSANNVVLKYHYDMVVESXGX

SEQ ID NO: 89407 - protein, 32 aa, Artificial Sequence; identical to SEQ ID NO: 7425
  Cyclic GFR-binding peptide
  MOD_RES (1)..(32): Xaa is C or S

SEQ ID NO: 89408 - protein, 27 aa, Artificial Sequence
  Cyclic GFR-binding peptide
TKLNAISILYFDKGVVTYLKKYRGMAV

SEQ ID NO: 89409 - protein, 32 aa, Artificial Sequence; identical to SEQ ID NO: 7426
  Cyclic GFR-binding peptide
  MOD_RES (1)..(2): Xaa is C or S

SEQ ID NO: 89410 - protein, 31 aa, Artificial Sequence; identical to SEQ ID NO: 43149
  Cyclic GFR-binding peptide
  MOD_RES (1)..(2): Xaa is C or S

SEQ ID NO: 89411 - protein, 25 aa, Artificial Sequence
  Cyclic GFR-binding peptide
ELSATSMLYYDENEKVVLRKHRDMV

SEQ ID NO: 89412 - protein, 32 aa, Artificial Sequence; identical to SEQ ID NO: 35893
  Cyclic GFR-binding peptide
  MOD_RES (6)..(7): Xaa is C or S

SEQ ID NO: 89413 - protein, 31 aa, Artificial Sequence
  Cyclic GFR-binding peptide
  MOD_RES (31)..(31): Xaa is C or S
PTKMSPISMLYKNDKQQIILKYHYGMVVDRX

SEQ ID NO: 89414 - protein, 34 aa, Artificial Sequence
  Cyclic GFR-binding peptide
  MOD_RES (4)..(5): Xaa is C or S
PSTXXAPVKTSATSMLYYDNGRVLLLRKHRMIVE

SEQ ID NO: 89415 - protein, 33 aa, Artificial Sequence
  Cyclic GFR-binding peptide
  MOD_RES (4)..(5): Xaa is C or S
PPTXXVPTRLEPISILYLDSANNVVKFKYEDMV

SEQ ID NO: 89416 - protein, 26 aa, Artificial Sequence
  Cyclic GFR-binding peptide
LSPISILYKVGRKPKVLKYHYMIVRS

SEQ ID NO: 89417 - protein, 21 aa, Artificial Sequence
  Cyclic GFR-binding peptide
EPISVLYLDSSNNVIKFKYEN

SEQ ID NO: 89418 - protein, 30 aa, Artificial Sequence; identical to SEQ ID NO: 43159
  Cyclic GFR-binding peptide
  MOD_RES (3)..(3): Xaa is C or S

SEQ ID NO: 89419 - protein, 33 aa, Artificial Sequence; identical to SEQ ID NO: 35900
  Cyclic GFR-binding peptide
  MOD_RES (4)..(5): Xaa is C or S

SEQ ID NO: 89420 - protein, 29 aa, Artificial Sequence
  Cyclic GFR-binding peptide
TELNAISMLYFDENEKVVLKKYRDMVVEG

SEQ ID NO: 89421 - protein, 29 aa, Artificial Sequence
  Cyclic GFR-binding peptide
  MOD_RES (29)..(29): Xaa is C or S
KMSATSMLYYNDKQQIILRKHRGMVVDRX

SEQ ID NO: 89422 - protein, 30 aa, Artificial Sequence; identical to SEQ ID NO: 43167
  Cyclic GFR-binding peptide
  MOD_RES (30)..(30): Xaa is C or S

SEQ ID NO: 89423 - protein, 31 aa, Artificial Sequence; identical to SEQ ID NO: 43168
  Cyclic GFR-binding peptide

SEQ ID NO: 89424 - protein, 38 aa, Artificial Sequence; identical to SEQ ID NO: 35906
  Cyclic GFR-binding peptide
  MOD_RES (4)..(5)..(36)..(38): Xaa is C or S

SEQ ID NO: 89425 - protein, 30 aa, Artificial Sequence; identical to SEQ ID NO: 35907
  Cyclic GFR-binding peptide
  MOD_RES (27)..(29): Xaa is C or S

SEQ ID NO: 89426 - protein, 30 aa, Artificial Sequence; identical to SEQ ID NO: 17756
  Cyclic GFR-binding peptide
  MOD_RES (1)..(2): Xaa is C or S

SEQ ID NO: 89427 - protein, 29 aa, Artificial Sequence
  Cyclic GFR-binding peptide
  MOD_RES (1)..(1): Xaa is C or S
XAPVKTSPISMLYKDNGRVLLLKYHYMIV

SEQ ID NO: 89428 - protein, 33 aa, Artificial Sequence
  Cyclic GFR-binding peptide
  MOD_RES (30)..(32): Xaa is C or S
TRLEPISILYLDSANNVVKFKYEDMVVESXGXR

SEQ ID NO: 89429 - protein, 30 aa, Artificial Sequence; identical to SEQ ID NO: 7438
  Cyclic GFR-binding peptide
  MOD_RES (5)..(5): Xaa is C or S

SEQ ID NO: 89430 - protein, 32 aa, Artificial Sequence; identical to SEQ ID NO: 7440
  Cyclic GFR-binding peptide
  MOD_RES (3)..(4): Xaa is C or S

SEQ ID NO: 89431 - protein, 36 aa, Artificial Sequence; identical to SEQ ID NO: 7441
  Cyclic GFR-binding peptide
  MOD_RES (1)..(2)..(33)..(35): Xaa is C or S

SEQ ID NO: 89432 - protein, 30 aa, Artificial Sequence; identical to SEQ ID NO: 7443
  Cyclic GFR-binding peptide
  MOD_RES (3)..(4): Xaa is C or S

SEQ ID NO: 89433 - protein, 39 aa, Artificial Sequence; identical to SEQ ID NO: 43173
  Cyclic GFR-binding peptide
  MOD_RES (3)..(4)..(36)..(38): Xaa is C or S

SEQ ID NO: 89434 - protein, 34 aa, Artificial Sequence; identical to SEQ ID NO: 7446
  Cyclic GFR-binding peptide
  MOD_RES (3)..(4): Xaa is C or S

SEQ ID NO: 89435 - protein, 38 aa, Artificial Sequence; identical to SEQ ID NO: 7448
  Cyclic GFR-binding peptide
  MOD_RES (6)..(7)..(38): Xaa is C or S

SEQ ID NO: 89436 - protein, 37 aa, Artificial Sequence
  Cyclic GFR-binding peptide
  MOD_RES (6)..(7): Xaa is C or S
GSAGPXXTPTKMEPISMLYLNDKQQIIKFKYEGMVVD

SEQ ID NO: 89437 - protein, 38 aa, Artificial Sequence; identical to SEQ ID NO: 7458
  Cyclic GFR-binding peptide
  MOD_RES (2)..(3)..(35)..(37): Xaa is C or S

SEQ ID NO: 89438 - protein, 37 aa, Artificial Sequence; identical to SEQ ID NO: 35922
  Cyclic GFR-binding peptide
  MOD_RES (1)..(2)..(35)..(37): Xaa is C or S

SEQ ID NO: 89439 - protein, 31 aa, Artificial Sequence
  Cyclic GFR-binding peptide
  MOD_RES (31)..(31): Xaa is C or S
PEKMSPISILYKDENKNVVLKYHYNMTVESX

SEQ ID NO: 89440 - protein, 31 aa, Artificial Sequence; identical to SEQ ID NO: 43186
  Cyclic GFR-binding peptide
  MOD_RES (28)..(30): Xaa is C or S

SEQ ID NO: 89441 - protein, 28 aa, Artificial Sequence
  Cyclic GFR-binding peptide
  MOD_RES (27)..(27): Xaa is C or S
EPISMLYLDENEKVVKFKYEDMVVEGXG

SEQ ID NO: 89442 - protein, 32 aa, Artificial Sequence
  Cyclic GFR-binding peptide
  MOD_RES (5)..(6): Xaa is C or S
APASXXVPARLSATSILYYDAANNVVLRKHRD

SEQ ID NO: 89443 - protein, 23 aa, Artificial Sequence
  Cyclic GFR-binding peptide
SATSMLYYDNGRVLLLRKHRMIV

SEQ ID NO: 89444 - protein, 33 aa, Artificial Sequence; identical to SEQ ID NO: 7462
  Cyclic GFR-binding peptide
  MOD_RES (30)..(32): Xaa is C or S

SEQ ID NO: 89445 - protein, 22 aa, Artificial Sequence
  Cyclic GFR-binding peptide
ALEPISILYLVGRKPKVKFKYE

SEQ ID NO: 89446 - protein, 28 aa, Artificial Sequence
  Cyclic GFR-binding peptide
  MOD_RES (1)..(1): Xaa is C or S
XVSQDLNAISILYFIGKTPKILKKYRMI

SEQ ID NO: 89447 - protein, 37 aa, Artificial Sequence; identical to SEQ ID NO: 7466
  Cyclic GFR-binding peptide
  MOD_RES (2)..(34)..(36): Xaa is C or S

SEQ ID NO: 89448 - protein, 26 aa, Artificial Sequence
  Cyclic GFR-binding peptide
QDLSPINILYFIGKTPKIYGKIPMIV

SEQ ID NO: 89449 - protein, 25 aa, Artificial Sequence
  Cyclic GFR-binding peptide
ELSPISMLYKDENEKVVLKYHYDMV

SEQ ID NO: 89450 - protein, 36 aa, Artificial Sequence; identical to SEQ ID NO: 7469
  Cyclic GFR-binding peptide
  MOD_RES (1)..(2)..(33)..(35): Xaa is C or S

SEQ ID NO: 89451 - protein, 32 aa, Artificial Sequence; identical to SEQ ID NO: 35938
  Cyclic GFR-binding peptide
  MOD_RES (1)..(1): Xaa is C or S

SEQ ID NO: 89452 - protein, 40 aa, Artificial Sequence; identical to SEQ ID NO: 7470
  Cyclic GFR-binding peptide
  MOD_RES (3)..(4)..(37)..(39): Xaa is C or S

SEQ ID NO: 89453 - protein, 21 aa, Artificial Sequence
  Cyclic GFR-binding peptide
LSATSILYYDKGVVTYLRKHR

SEQ ID NO: 89454 - protein, 33 aa, Artificial Sequence; identical to SEQ ID NO: 7473
  Cyclic GFR-binding peptide
  MOD_RES (1)..(32): Xaa is C or S

SEQ ID NO: 89455 - protein, 29 aa, Artificial Sequence
  Cyclic GFR-binding peptide
VPTRLSPISILYKDSANNVVLKYHYDMVV

SEQ ID NO: 89456 - protein, 34 aa, Artificial Sequence; identical to SEQ ID NO: 43200
  Cyclic GFR-binding peptide
  MOD_RES (3)..(4): Xaa is C or S

SEQ ID NO: 89457 - protein, 24 aa, Artificial Sequence
  Cyclic GFR-binding peptide
SPINMLYFDNGRVLLYGKIPMIVE

SEQ ID NO: 89458 - protein, 29 aa, Artificial Sequence
  Cyclic GFR-binding peptide
  MOD_RES (1)..(1): Xaa is C or S
XAPVKTSATSMLYYDNGRVLLLRKHRMIV

SEQ ID NO: 89459 - protein, 34 aa, Artificial Sequence; identical to SEQ ID NO: 7477
  Cyclic GFR-binding peptide
  MOD_RES (1)..(33): Xaa is C or S

SEQ ID NO: 89460 - protein, 30 aa, Artificial Sequence
  Cyclic GFR-binding peptide
VPEKMSPISILYKDENKNVVLKYHYNMTVE

SEQ ID NO: 89461 - protein, 33 aa, Artificial Sequence
  Cyclic GFR-binding peptide
  MOD_RES (5)..(6): Xaa is C or S
SASPXXVSQDLSPINILYFIGKTPKIYGKIPMI

SEQ ID NO: 89462 - protein, 37 aa, Artificial Sequence; identical to SEQ ID NO: 7481
  Cyclic GFR-binding peptide
  MOD_RES (1)..(2)..(34)..(36): Xaa is C or S

SEQ ID NO: 89463 - protein, 36 aa, Artificial Sequence; identical to SEQ ID NO: 7482
  Cyclic GFR-binding peptide
  MOD_RES (2)..(3)..(36): Xaa is C or S

SEQ ID NO: 89464 - protein, 35 aa, Artificial Sequence
  Cyclic GFR-binding peptide
  MOD_RES (1)..(2)..(33)..(35): Xaa is C or S
XXAPVKTSPISMLYKDNGRVLLLKYHYMIVEEXGX

SEQ ID NO: 89465 - protein, 38 aa, Artificial Sequence; identical to SEQ ID NO: 43208
  Cyclic GFR-binding peptide
  MOD_RES (3)..(4)..(36)..(38): Xaa is C or S

SEQ ID NO: 89466 - protein, 37 aa, Artificial Sequence; identical to SEQ ID NO: 43211
  Cyclic GFR-binding peptide
  MOD_RES (6)..(7): Xaa is C or S

SEQ ID NO: 89467 - protein, 26 aa, Artificial Sequence
  Cyclic GFR-binding peptide
PQDLSPISILYKVGRTPKVLKYHYMV

SEQ ID NO: 89468 - protein, 29 aa, Artificial Sequence
  Cyclic GFR-binding peptide
  MOD_RES (28)..(28): Xaa is C or S
MSPINILYFDENKNVVYGKIPNMTVESXA

SEQ ID NO: 89469 - protein, 31 aa, Artificial Sequence; identical to SEQ ID NO: 7487
  Cyclic GFR-binding peptide
  MOD_RES (1)..(2): Xaa is C or S

SEQ ID NO: 89470 - protein, 33 aa, Artificial Sequence; identical to SEQ ID NO: 35964
  Cyclic GFR-binding peptide
  MOD_RES (4)..(5): Xaa is C or S

SEQ ID NO: 89471 - protein, 22 aa, Artificial Sequence
  Cyclic GFR-binding peptide
DLNAISILYFIGKTPKILKKYR

SEQ ID NO: 89472 - protein, 34 aa, Artificial Sequence
  Cyclic GFR-binding peptide
  MOD_RES (1)..(2)..(34): Xaa is C or S
XXVPTRLSPISILYKDSANNVVLKYHYDMVVESX

SEQ ID NO: 89473 - protein, 23 aa, Artificial Sequence
  Cyclic GFR-binding peptide
RLEPISILYLDAANNVVKFKYED

SEQ ID NO: 89474 - protein, 27 aa, Artificial Sequence
  Cyclic GFR-binding peptide
  MOD_RES (27)..(27): Xaa is C or S
SPINVLYFDDSSNVIYGKIPNMVVRAX

SEQ ID NO: 89475 - protein, 24 aa, Artificial Sequence
  Cyclic GFR-binding peptide
LNAISILYFDAANNVVLKKYRDMV

SEQ ID NO: 89476 - protein, 29 aa, Artificial Sequence
  Cyclic GFR-binding peptide
TKLSPINVLYFDDSSNVIYGKIPNMVVRS

SEQ ID NO: 89477 - protein, 30 aa, Artificial Sequence; identical to SEQ ID NO: 35978
  Cyclic GFR-binding peptide
  MOD_RES (4)..(5): Xaa is C or S

SEQ ID NO: 89478 - protein, 31 aa, Artificial Sequence; identical to SEQ ID NO: 35980
  Cyclic GFR-binding peptide
  MOD_RES (3)..(4): Xaa is C or S

SEQ ID NO: 89479 - protein, 31 aa, Artificial Sequence; identical to SEQ ID NO: 7499
  Cyclic GFR-binding peptide
  MOD_RES (3)..(4): Xaa is C or S

SEQ ID NO: 89480 - protein, 38 aa, Artificial Sequence; identical to SEQ ID NO: 7500
  Cyclic GFR-binding peptide
  MOD_RES (5)..(6): Xaa is C or S

SEQ ID NO: 89481 - protein, 21 aa, Artificial Sequence
  Cyclic GFR-binding peptide
TSATSMLYYDNGRVLLLRKHR

SEQ ID NO: 89482 - protein, 36 aa, Artificial Sequence; identical to SEQ ID NO: 7501
  Cyclic GFR-binding peptide
  MOD_RES (3)..(4)..(35): Xaa is C or S

SEQ ID NO: 89483 - protein, 30 aa, Artificial Sequence; identical to SEQ ID NO: 35987
  Cyclic GFR-binding peptide
  MOD_RES (2)..(3): Xaa is C or S

SEQ ID NO: 89484 - protein, 24 aa, Artificial Sequence
  Cyclic GFR-binding peptide
RLNAISILYFDSANNVVLKKYRDM

SEQ ID NO: 89485 - protein, 30 aa, Artificial Sequence; identical to SEQ ID NO: 35988
  Cyclic GFR-binding peptide
  MOD_RES (1)..(2): Xaa is C or S

SEQ ID NO: 89486 - protein, 39 aa, Artificial Sequence; identical to SEQ ID NO: 43227
  Cyclic GFR-binding peptide
  MOD_RES (5)..(6)..(38): Xaa is C or S

SEQ ID NO: 89487 - protein, 28 aa, Artificial Sequence
  Cyclic GFR-binding peptide
  MOD_RES (26)..(28): Xaa is C or S
SATSMLYYDNGRVLLLRKHRMIVEEXGX

SEQ ID NO: 89488 - protein, 27 aa, Artificial Sequence
  Cyclic GFR-binding peptide
  MOD_RES (27)..(27): Xaa is C or S
LSPINILYFIGKTPKIYGKIPMIVKSX

SEQ ID NO: 89489 - protein, 26 aa, Artificial Sequence
  Cyclic GFR-binding peptide
DLEPISILYLIGKTPKIKFKYEMIVK

SEQ ID NO: 89490 - protein, 26 aa, Artificial Sequence
  Cyclic GFR-binding peptide
TKLEPISVLYLDDMGVPTKFKYEEGM

SEQ ID NO: 89491 - protein, 27 aa, Artificial Sequence
  Cyclic GFR-binding peptide
  MOD_RES (27)..(27): Xaa is C or S
SATSMLYYDEYDKVVLRKHREMVVEGX

SEQ ID NO: 89492 - protein, 34 aa, Artificial Sequence; identical to SEQ ID NO: 36001
  Cyclic GFR-binding peptide
  MOD_RES (31)..(33): Xaa is C or S

SEQ ID NO: 89493 - protein, 30 aa, Artificial Sequence; identical to SEQ ID NO: 7512
  Cyclic GFR-binding peptide
  MOD_RES (27)..(29): Xaa is C or S

SEQ ID NO: 89494 - protein, 27 aa, Artificial Sequence
  Cyclic GFR-binding peptide
  MOD_RES (26)..(26): Xaa is C or S
EPISMLYLDNGRVLLKFKYEMIVEEXG

SEQ ID NO: 89495 - protein, 31 aa, Artificial Sequence; identical to SEQ ID NO: 7514
  Cyclic GFR-binding peptide
  MOD_RES (1)..(2): Xaa is C or S

SEQ ID NO: 89496 - protein, 32 aa, Artificial Sequence; identical to SEQ ID NO: 36004
  Cyclic GFR-binding peptide
  MOD_RES (1)..(1): Xaa is C or S

SEQ ID NO: 89497 - protein, 38 aa, Artificial Sequence
  Cyclic GFR-binding peptide
  MOD_RES (2)..(3)..(35)..(37): Xaa is C or S
PXXVPEKMSPINILYFDENKNVVYGKIPNMTVESXAXR

SEQ ID NO: 89498 - protein, 35 aa, Artificial Sequence; identical to SEQ ID NO: 7516
  Cyclic GFR-binding peptide
  MOD_RES (1)..(2)..(35): Xaa is C or S

SEQ ID NO: 89499 - protein, 40 aa, Artificial Sequence; identical to SEQ ID NO: 7517
  Cyclic GFR-binding peptide
  MOD_RES (5)..(6)..(38)..(40): Xaa is C or S

SEQ ID NO: 89500 - protein, 38 aa, Artificial Sequence
  Cyclic GFR-binding peptide
  MOD_RES (4)..(5)..(37): Xaa is C or S
PPTXXVPTRLSATSILYYDSANNVVLRKHRDMVVESXG

SEQ ID NO: 89501 - protein, 32 aa, Artificial Sequence; identical to SEQ ID NO: 7519
  Cyclic GFR-binding peptide
  MOD_RES (4)..(5): Xaa is C or S

SEQ ID NO: 89502 - protein, 34 aa, Artificial Sequence
  Cyclic GFR-binding peptide
  MOD_RES (6)..(7): Xaa is C or S
STPPTXXVPTRLSATSILYYDSANNVVLRKHRDM

SEQ ID NO: 89503 - protein, 35 aa, Artificial Sequence; identical to SEQ ID NO: 43252
  Cyclic GFR-binding peptide
  MOD_RES (1)..(32)..(34): Xaa is C or S

SEQ ID NO: 89504 - protein, 26 aa, Artificial Sequence
  Cyclic GFR-binding peptide
NAISVLYFDSSNNVILKKYRNMVVKA

SEQ ID NO: 89505 - protein, 29 aa, Artificial Sequence
  Cyclic GFR-binding peptide
TKLSATSVLYYDDSSNVILRKHRNMVVRS

SEQ ID NO: 89506 - protein, 22 aa, Artificial Sequence
  Cyclic GFR-binding peptide
LNAISILYFVGRTPKVLKKYRM

SEQ ID NO: 89507 - protein, 34 aa, Artificial Sequence; identical to SEQ ID NO: 7528
  Cyclic GFR-binding peptide
  MOD_RES (31)..(33): Xaa is C or S

SEQ ID NO: 89508 - protein, 39 aa, Artificial Sequence; identical to SEQ ID NO: 43260
  Cyclic GFR-binding peptide
  MOD_RES (5)..(6)..(38): Xaa is C or S

SEQ ID NO: 89509 - protein, 36 aa, Artificial Sequence; identical to SEQ ID NO: 7532
  Cyclic GFR-binding peptide
  MOD_RES (5)..(6): Xaa is C or S

SEQ ID NO: 89510 - protein, 31 aa, Artificial Sequence
  Cyclic GFR-binding peptide
TPTKMSATSMLYYNDKQQIILRKHRGMVVDR

SEQ ID NO: 89511 - protein, 42 aa, Artificial Sequence; identical to SEQ ID NO: 7533
  Cyclic GFR-binding peptide
  MOD_RES (6)..(7)..(39)..(41): Xaa is C or S

SEQ ID NO: 89512 - protein, 23 aa, Artificial Sequence
  Cyclic GFR-binding peptide
QALSPINILYFVGRKPKVYGKIP

SEQ ID NO: 89513 - protein, 24 aa, Artificial Sequence
  Cyclic GFR-binding peptide
TKLNAISVLYFDDMGVPTLKKYRE

SEQ ID NO: 89514 - protein, 29 aa, Artificial Sequence
  Cyclic GFR-binding peptide
  MOD_RES (1)..(2): Xaa is C or S
XXAPTKLSPISVLYKDSSNNVILKYHYNM

SEQ ID NO: 89515 - protein, 32 aa, Artificial Sequence
  Cyclic GFR-binding peptide
  MOD_RES (31)..(31): Xaa is C or S
PTRLSPISILYKDSANNVVLKYHYDMVVESXG

SEQ ID NO: 89516 - protein, 38 aa, Artificial Sequence; identical to SEQ ID NO: 7543
  Cyclic GFR-binding peptide
  MOD_RES (6)..(7)..(38): Xaa is C or S

SEQ ID NO: 89517 - protein, 25 aa, Artificial Sequence
  Cyclic GFR-binding peptide
VPTELSATSMLYYDEYDKVVLRKHR

SEQ ID NO: 89518 - protein, 30 aa, Artificial Sequence; identical to SEQ ID NO: 7551
  Cyclic GFR-binding peptide
  MOD_RES (30)..(30): Xaa is C or S

SEQ ID NO: 89519 - protein, 27 aa, Artificial Sequence
  Cyclic GFR-binding peptide
LEPISMLYLDENEKVVKFKYEDMVVEG

SEQ ID NO: 89520 - protein, 27 aa, Artificial Sequence
  Cyclic GFR-binding peptide
  MOD_RES (26)..(26): Xaa is C or S
NAISILYFVGRKPKVLKKYRMIVRSXK

SEQ ID NO: 89521 - protein, 31 aa, Artificial Sequence; identical to SEQ ID NO: 43280
  Cyclic GFR-binding peptide

SEQ ID NO: 89522 - protein, 33 aa, Artificial Sequence; identical to SEQ ID NO: 7556
  Cyclic GFR-binding peptide
  MOD_RES (2)..(3): Xaa is C or S

SEQ ID NO: 89523 - protein, 32 aa, Artificial Sequence; identical to SEQ ID NO: 36042
  Cyclic GFR-binding peptide
  MOD_RES (30)..(32): Xaa is C or S

SEQ ID NO: 89524 - protein, 31 aa, Artificial Sequence; identical to SEQ ID NO: 7558
  Cyclic GFR-binding peptide
  MOD_RES (29)..(31): Xaa is C or S

SEQ ID NO: 89525 - protein, 23 aa, Artificial Sequence
  Cyclic GFR-binding peptide
LSPINILYFIGKTPKIYGKIPMI

SEQ ID NO: 89526 - protein, 27 aa, Artificial Sequence
  Cyclic GFR-binding peptide
  MOD_RES (1)..(1): Xaa is C or S
XVPQALSPINILYFVGRKPKVYGKIPM

SEQ ID NO: 89527 - protein, 32 aa, Artificial Sequence; identical to SEQ ID NO: 7559
  Cyclic GFR-binding peptide
  MOD_RES (32)..(32): Xaa is C or S

SEQ ID NO: 89528 - protein, 26 aa, Artificial Sequence
  Cyclic GFR-binding peptide
  MOD_RES (1)..(1): Xaa is C or S
XVPTELEPISMLYLDENEKVVKFKYE

SEQ ID NO: 89529 - protein, 30 aa, Artificial Sequence
  Cyclic GFR-binding peptide
PTRLSPISILYKDSANNVVLKYHYDMVVES

SEQ ID NO: 89530 - protein, 27 aa, Artificial Sequence
  Cyclic GFR-binding peptide
APTQLEPISVLYLDDSSNVIKFKYENM

SEQ ID NO: 89531 - protein, 38 aa, Artificial Sequence; identical to SEQ ID NO: 43288
  Cyclic GFR-binding peptide
  MOD_RES (6)..(7)..(38): Xaa is C or S

SEQ ID NO: 89532 - protein, 24 aa, Artificial Sequence
  Cyclic GFR-binding peptide
PTKLNAISVLYFDDMGVPTLKKYR

SEQ ID NO: 89533 - protein, 32 aa, Artificial Sequence; identical to SEQ ID NO: 7568
  Cyclic GFR-binding peptide
  MOD_RES (31)..(31): Xaa is C or S

SEQ ID NO: 89534 - protein, 26 aa, Artificial Sequence
  Cyclic GFR-binding peptide
KLSPINVLYFDDMGVPTYGKIPEGMS

SEQ ID NO: 89535 - protein, 36 aa, Artificial Sequence; identical to SEQ ID NO: 7569
  Cyclic GFR-binding peptide
  MOD_RES (3)..(4)..(36): Xaa is C or S

SEQ ID NO: 89536 - protein, 32 aa, Artificial Sequence
  Cyclic GFR-binding peptide
  MOD_RES (5)..(6): Xaa is C or S
IPEPXXVPEKMSPISILYKDENKNVVLKYHYN

SEQ ID NO: 89537 - protein, 25 aa, Artificial Sequence
  Cyclic GFR-binding peptide
PTELSPINMLYFDENEKVVYGKIPD

SEQ ID NO: 89538 - protein, 22 aa, Artificial Sequence
  Cyclic GFR-binding peptide
LEPISILYLDSANNVVKFKYED

SEQ ID NO: 89539 - protein, 32 aa, Artificial Sequence; identical to SEQ ID NO: 36065
  Cyclic GFR-binding peptide
  MOD_RES (31)..(31): Xaa is C or S

SEQ ID NO: 89540 - protein, 26 aa, Artificial Sequence
  Cyclic GFR-binding peptide
APVKTSPINMLYFDNGRVLLYGKIPM

SEQ ID NO: 89541 - protein, 37 aa, Artificial Sequence
  Cyclic GFR-binding peptide
  MOD_RES (4)..(5)..(37): Xaa is C or S
PPTXXVPTRLEPISILYLDSANNVVKFKYEDMVVESX

SEQ ID NO: 89542 - protein, 29 aa, Artificial Sequence
  Cyclic GFR-binding peptide
  MOD_RES (2)..(3): Xaa is C or S
PXXAPTKLSPISVLYKDDSSNVILKYHYN

SEQ ID NO: 89543 - protein, 27 aa, Artificial Sequence
  Cyclic GFR-binding peptide
PTKLSATSVLYYDDSSNVILRKHRNMV

SEQ ID NO: 89544 - protein, 22 aa, Artificial Sequence
  Cyclic GFR-binding peptide
SPISILYKDENKNVVLKYHYNM

SEQ ID NO: 89545 - protein, 33 aa, Artificial Sequence
  Cyclic GFR-binding peptide
  MOD_RES (30)..(32): Xaa is C or S
TKMSPISMLYKNDKQQIILKYHYGMVVDRXGXS

SEQ ID NO: 89546 - protein, 36 aa, Artificial Sequence; identical to SEQ ID NO: 36073
  Cyclic GFR-binding peptide
  MOD_RES (2)..(3)..(35): Xaa is C or S

SEQ ID NO: 89547 - protein, 31 aa, Artificial Sequence; identical to SEQ ID NO: 77397
  Cyclic GFR-binding peptide
  MOD_RES (1)..(1): Xaa is C or S

SEQ ID NO: 89548 - protein, 28 aa, Artificial Sequence
  Cyclic GFR-binding peptide
  MOD_RES (1)..(1): Xaa is C or S
XVPTKLNAISILYFDKGVVTYLKKYRGM

SEQ ID NO: 89549 - protein, 31 aa, Artificial Sequence; identical to SEQ ID NO: 7582
  Cyclic GFR-binding peptide
  MOD_RES (1)..(2): Xaa is C or S

SEQ ID NO: 89550 - protein, 29 aa, Artificial Sequence
  Cyclic GFR-binding peptide
  MOD_RES (29)..(29): Xaa is C or S
RLSPISILYKDSANNVVLKYHYDMVVESX

SEQ ID NO: 89551 - protein, 32 aa, Artificial Sequence
  Cyclic GFR-binding peptide
  MOD_RES (1)..(1): Xaa is C or S
XVPTRLSATSILYYDSANNVVLRKHRDMVVES

SEQ ID NO: 89552 - protein, 31 aa, Artificial Sequence
  Cyclic GFR-binding peptide
  MOD_RES (29)..(31): Xaa is C or S
KMSATSILYYDENKNVVLRKHRNMTVESXAX

SEQ ID NO: 89553 - protein, 22 aa, Artificial Sequence
  Cyclic GFR-binding peptide
LSPINMLYFDEYDKVVYGKIPE

SEQ ID NO: 89554 - protein, 39 aa, Artificial Sequence; identical to SEQ ID NO: 7587
  Cyclic GFR-binding peptide
  MOD_RES (6)..(7)..(39): Xaa is C or S

SEQ ID NO: 89555 - protein, 30 aa, Artificial Sequence; identical to SEQ ID NO: 7589
  Cyclic GFR-binding peptide
  MOD_RES (29)..(29): Xaa is C or S

SEQ ID NO: 89556 - protein, 39 aa, Artificial Sequence
  Cyclic GFR-binding peptide
  MOD_RES (3)..(4)..(36)..(38): Xaa is C or S
ASXXVPARLSATSILYYDAANNVVLRKHRDMVVEAXGXR

SEQ ID NO: 89557 - protein, 35 aa, Artificial Sequence; identical to SEQ ID NO: 41835
  Cyclic GFR-binding peptide
  MOD_RES (3)..(4): Xaa is C or S

SEQ ID NO: 89558 - protein, 27 aa, Artificial Sequence
  Cyclic GFR-binding peptide
  MOD_RES (1)..(1): Xaa is C or S
XVPTELSPINMLYFDENEKVVYGKIPD

SEQ ID NO: 89559 - protein, 30 aa, Artificial Sequence; identical to SEQ ID NO: 36086
  Cyclic GFR-binding peptide
  MOD_RES (28)..(30): Xaa is C or S

SEQ ID NO: 89560 - protein, 39 aa, Artificial Sequence; identical to SEQ ID NO: 41839
  Cyclic GFR-binding peptide
  MOD_RES (3)..(4)..(36)..(38): Xaa is C or S

SEQ ID NO: 89561 - protein, 30 aa, Artificial Sequence
  Cyclic GFR-binding peptide
VPQALSPINILYFVGRKPKVYGKIPMIVRS

SEQ ID NO: 89562 - protein, 31 aa, Artificial Sequence
  Cyclic GFR-binding peptide
  MOD_RES (1)..(2): Xaa is C or S
XXVSQDLSPINILYFIGKTPKIYGKIPMIVK

SEQ ID NO: 89563 - protein, 29 aa, Artificial Sequence
  Cyclic GFR-binding peptide
VPEKMSATSILYYDENKNVVLRKHRNMTV

SEQ ID NO: 89564 - protein, 22 aa, Artificial Sequence
  Cyclic GFR-binding peptide
ELSATSMLYYDENEKVVLRKHR

SEQ ID NO: 89565 - protein, 34 aa, Artificial Sequence; identical to SEQ ID NO: 7599
  Cyclic GFR-binding peptide
  MOD_RES (3)..(4): Xaa is C or S

SEQ ID NO: 89566 - protein, 31 aa, Artificial Sequence; identical to SEQ ID NO: 7600
  Cyclic GFR-binding peptide
  MOD_RES (28)..(30): Xaa is C or S

SEQ ID NO: 89567 - protein, 35 aa, Artificial Sequence; identical to SEQ ID NO: 7602
  Cyclic GFR-binding peptide
  MOD_RES (1)..(2)..(33)..(35): Xaa is C or S

SEQ ID NO: 89568 - protein, 31 aa, Artificial Sequence; identical to SEQ ID NO: 41846
  Cyclic GFR-binding peptide
  MOD_RES (5)..(6): Xaa is C or S

SEQ ID NO: 89569 - protein, 25 aa, Artificial Sequence
  Cyclic GFR-binding peptide
LSATSMLYYDEYDKVVLRKHREMVV

SEQ ID NO: 89570 - protein, 26 aa, Artificial Sequence
  Cyclic GFR-binding peptide
  MOD_RES (1)..(1): Xaa is C or S
XVPQALNAISILYFVGRKPKVLKKYR

SEQ ID NO: 89571 - protein, 34 aa, Artificial Sequence; identical to SEQ ID NO: 41848
  Cyclic GFR-binding peptide
  MOD_RES (1)..(33): Xaa is C or S

SEQ ID NO: 89572 - protein, 23 aa, Artificial Sequence
  Cyclic GFR-binding peptide
LSATSVLYYDDMGVPTLRKHREG

SEQ ID NO: 89573 - protein, 32 aa, Artificial Sequence; identical to SEQ ID NO: 7611
  Cyclic GFR-binding peptide
  MOD_RES (32)..(32): Xaa is C or S

SEQ ID NO: 89574 - protein, 28 aa, Artificial Sequence
  Cyclic GFR-binding peptide
  MOD_RES (28)..(28): Xaa is C or S
DLSPINILYFVGRTPKVYGKIPMVVKSX

SEQ ID NO: 89575 - protein, 32 aa, Artificial Sequence
  Cyclic GFR-binding peptide
  MOD_RES (31)..(31): Xaa is C or S
PARLSATSILYYDAANNVVLRKHRDMVVEAXG

SEQ ID NO: 89576 - protein, 22 aa, Artificial Sequence
  Cyclic GFR-binding peptide
MEPISMLYLNDKQQIIKFKYEG

SEQ ID NO: 89577 - protein, 25 aa, Artificial Sequence
  Cyclic GFR-binding peptide
TKLSPINILYFDKGVVTYYGKIPGM

SEQ ID NO: 89578 - protein, 30 aa, Artificial Sequence; identical to SEQ ID NO: 36108
  Cyclic GFR-binding peptide
  MOD_RES (28)..(30): Xaa is C or S

SEQ ID NO: 89579 - protein, 31 aa, Artificial Sequence; identical to SEQ ID NO: 7616
  Cyclic GFR-binding peptide
  MOD_RES (2)..(3): Xaa is C or S

SEQ ID NO: 89580 - protein, 29 aa, Artificial Sequence
  Cyclic GFR-binding peptide
VPTKLSATSVLYYDDMGVPTLRKHREGMS

SEQ ID NO: 89581 - protein, 26 aa, Artificial Sequence
  Cyclic GFR-binding peptide
  MOD_RES (1)..(1): Xaa is C or S
XVPTRLEPISILYLDSANNVVKFKYE

SEQ ID NO: 89582 - protein, 22 aa, Artificial Sequence
  Cyclic GFR-binding peptide
LSATSMLYYDENEKVVLRKHRD

SEQ ID NO: 89583 - protein, 26 aa, Artificial Sequence
  Cyclic GFR-binding peptide
  MOD_RES (26)..(26): Xaa is C or S
SPISMLYKDNGRVLLLKYHYMIVEEX

SEQ ID NO: 89584 - protein, 34 aa, Artificial Sequence; identical to SEQ ID NO: 36111
  Cyclic GFR-binding peptide
  MOD_RES (4)..(4): Xaa is C or S

SEQ ID NO: 89585 - protein, 30 aa, Artificial Sequence; identical to SEQ ID NO: 7623
  Cyclic GFR-binding peptide
  MOD_RES (30)..(30): Xaa is C or S

SEQ ID NO: 89586 - protein, 31 aa, Artificial Sequence; identical to SEQ ID NO: 7625
  Cyclic GFR-binding peptide
  MOD_RES (1)..(2): Xaa is C or S

SEQ ID NO: 89587 - protein, 29 aa, Artificial Sequence
  Cyclic GFR-binding peptide
SQDLNAISILYFIGKTPKILKKYRMIVKS

SEQ ID NO: 89588 - protein, 37 aa, Artificial Sequence
  Cyclic GFR-binding peptide
  MOD_RES (3)..(4)..(36): Xaa is C or S
GPXXTPTKMEPISMLYLNDKQQIIKFKYEGMVVDRXG

SEQ ID NO: 89589 - protein, 29 aa, Artificial Sequence
  Cyclic GFR-binding peptide
PTELSPINMLYFDEYDKVVYGKIPEMVVE

SEQ ID NO: 89590 - protein, 30 aa, Artificial Sequence
  Cyclic GFR-binding peptide
  MOD_RES (3)..(4): Xaa is C or S
PTXXVPTRLSATSILYYDSANNVVLRKHRD

SEQ ID NO: 89591 - protein, 34 aa, Artificial Sequence; identical to SEQ ID NO: 7631
  Cyclic GFR-binding peptide
  MOD_RES (6)..(7): Xaa is C or S

SEQ ID NO: 89592 - protein, 37 aa, Artificial Sequence; identical to SEQ ID NO: 77419
  Cyclic GFR-binding peptide
  MOD_RES (3)..(4)..(36): Xaa is C or S

SEQ ID NO: 89593 - protein, 26 aa, Artificial Sequence
  Cyclic GFR-binding peptide
SPINVLYFDDSSNVIYGKIPNMVVRS

SEQ ID NO: 89594 - protein, 31 aa, Artificial Sequence; identical to SEQ ID NO: 36126
  Cyclic GFR-binding peptide
  MOD_RES (5)..(6): Xaa is C or S

SEQ ID NO: 89595 - protein, 30 aa, Artificial Sequence; identical to SEQ ID NO: 36127
  Cyclic GFR-binding peptide

SEQ ID NO: 89596 - protein, 29 aa, Artificial Sequence
  Cyclic GFR-binding peptide
PTQLSPISVLYKDDSSNVILKYHYNMVVR

SEQ ID NO: 89597 - protein, 33 aa, Artificial Sequence; identical to SEQ ID NO: 36129
  Cyclic GFR-binding peptide
  MOD_RES (1)..(2)..(33): Xaa is C or S

SEQ ID NO: 89598 - protein, 26 aa, Artificial Sequence
  Cyclic GFR-binding peptide
LEPISILYLVGRTPKVKFKYEMVVKS

SEQ ID NO: 89599 - protein, 21 aa, Artificial Sequence
  Cyclic GFR-binding peptide
SATSILYYDENKNVVLRKHRN

SEQ ID NO: 89600 - protein, 24 aa, Artificial Sequence
  Cyclic GFR-binding peptide
TELSATSMLYYDENEKVVLRKHRD

SEQ ID NO: 89601 - protein, 31 aa, Artificial Sequence
  Cyclic GFR-binding peptide
  MOD_RES (1)..(2): Xaa is C or S
XXVPTRLEPISILYLDSANNVVKFKYEDMVV

SEQ ID NO: 89602 - protein, 26 aa, Artificial Sequence
  Cyclic GFR-binding peptide
PTKLSPISVLYKDSSNNVILKYHYNM

SEQ ID NO: 89603 - protein, 30 aa, Artificial Sequence; identical to SEQ ID NO: 7647
  Cyclic GFR-binding peptide
  MOD_RES (1)..(1): Xaa is C or S

SEQ ID NO: 89604 - protein, 37 aa, Artificial Sequence; identical to SEQ ID NO: 7650
  Cyclic GFR-binding peptide
  MOD_RES (5)..(6): Xaa is C or S

SEQ ID NO: 89605 - protein, 29 aa, Artificial Sequence
  Cyclic GFR-binding peptide
  MOD_RES (29)..(29): Xaa is C or S
KLSPISVLYKDSSNNVILKYHYNMVVKAX

SEQ ID NO: 89606 - protein, 24 aa, Artificial Sequence
  Cyclic GFR-binding peptide
TELSPINMLYFDEYDKVVYGKIPE

SEQ ID NO: 89607 - protein, 28 aa, Artificial Sequence
  Cyclic GFR-binding peptide
  MOD_RES (1)..(1): Xaa is C or S
XAPTKLEPISVLYLDDSSNVIKFKYENM

SEQ ID NO: 89608 - protein, 27 aa, Artificial Sequence
  Cyclic GFR-binding peptide
RLNAISILYFDAANNVVLKKYRDMVVE

SEQ ID NO: 89609 - protein, 30 aa, Artificial Sequence
  Cyclic GFR-binding peptide
  MOD_RES (29)..(29): Xaa is C or S
VKTEPISMLYLDNGRVLLKFKYEMIVEEXG

SEQ ID NO: 89610 - protein, 34 aa, Artificial Sequence; identical to SEQ ID NO: 41899
  Cyclic GFR-binding peptide
  MOD_RES (1)..(32)..(34): Xaa is C or S

SEQ ID NO: 89611 - protein, 30 aa, Artificial Sequence; identical to SEQ ID NO: 7658
  Cyclic GFR-binding peptide

SEQ ID NO: 89612 - protein, 36 aa, Artificial Sequence
  Cyclic GFR-binding peptide
  MOD_RES (6)..(7): Xaa is C or S
RVPSTXXAPVKTSATSMLYYDNGRVLLLRKHRMIVE

SEQ ID NO: 89613 - protein, 33 aa, Artificial Sequence; identical to SEQ ID NO: 17966
  Cyclic GFR-binding peptide
  MOD_RES (3)..(4): Xaa is C or S

SEQ ID NO: 89614 - protein, 38 aa, Artificial Sequence
  Cyclic GFR-binding peptide
  MOD_RES (6)..(7)..(38): Xaa is C or S
ASASPXXVPQDLSPINILYFVGRTPKVYGKIPMVVKSX

SEQ ID NO: 89615 - protein, 37 aa, Artificial Sequence
  Cyclic GFR-binding peptide
  MOD_RES (3)..(4)..(36): Xaa is C or S
EPXXVPEKMSATSILYYDENKNVVLRKHRNMTVESXA

SEQ ID NO: 89616 - protein, 30 aa, Artificial Sequence; identical to SEQ ID NO: 77433
  Cyclic GFR-binding peptide
  MOD_RES (1)..(1): Xaa is C or S

SEQ ID NO: 89617 - protein, 29 aa, Artificial Sequence
  Cyclic GFR-binding peptide
  MOD_RES (29)..(29): Xaa is C or S
RLNAISILYFDSANNVVLKKYRDMVVESX

SEQ ID NO: 89618 - protein, 25 aa, Artificial Sequence
  Cyclic GFR-binding peptide
PTKLSATSILYYDKGVVTYLRKHRG

SEQ ID NO: 89619 - protein, 23 aa, Artificial Sequence
  Cyclic GFR-binding peptide
TELSPINMLYFDENEKVVYGKIP

SEQ ID NO: 89620 - protein, 27 aa, Artificial Sequence
  Cyclic GFR-binding peptide
  MOD_RES (1)..(1): Xaa is C or S
XVPQALSATSILYYVGRKPKVLRKHRM

SEQ ID NO: 89621 - protein, 38 aa, Artificial Sequence; identical to SEQ ID NO: 36155
  Cyclic GFR-binding peptide
  MOD_RES (5)..(6)..(37): Xaa is C or S

SEQ ID NO: 89622 - protein, 27 aa, Artificial Sequence
  Cyclic GFR-binding peptide
LEPISILYLDAANNVVKFKYEDMVVEA

SEQ ID NO: 89623 - protein, 33 aa, Artificial Sequence
  Cyclic GFR-binding peptide
  MOD_RES (1)..(2): Xaa is C or S
XXTPTKMEPISMLYLNDKQQIIKFKYEGMVVDR

SEQ ID NO: 89624 - protein, 25 aa, Artificial Sequence
  Cyclic GFR-binding peptide
SATSILYYDAANNVVLRKHRDMVVE

SEQ ID NO: 89625 - protein, 30 aa, Artificial Sequence
  Cyclic GFR-binding peptide
  MOD_RES (29)..(29): Xaa is C or S
RLSATSILYYDAANNVVLRKHRDMVVEAXG

SEQ ID NO: 89626 - protein, 25 aa, Artificial Sequence
  Cyclic GFR-binding peptide
ARLSATSILYYDAANNVVLRKHRDM

SEQ ID NO: 89627 - protein, 25 aa, Artificial Sequence
  Cyclic GFR-binding peptide
VPQDLNAISILYFVGRTPKVLKKYR

SEQ ID NO: 89628 - protein, 27 aa, Artificial Sequence
  Cyclic GFR-binding peptide
LNAISILYFDAANNVVLKKYRDMVVEA

SEQ ID NO: 89629 - protein, 41 aa, Artificial Sequence; identical to SEQ ID NO: 7672
  Cyclic GFR-binding peptide
  MOD_RES (6)..(7)..(38)..(40): Xaa is C or S

SEQ ID NO: 89630 - protein, 32 aa, Artificial Sequence; identical to SEQ ID NO: 7675
  Cyclic GFR-binding peptide
  MOD_RES (5)..(6): Xaa is C or S

SEQ ID NO: 89631 - protein, 26 aa, Artificial Sequence
  Cyclic GFR-binding peptide
SPINVLYFDDSSNVIYGKIPNMVVRA

SEQ ID NO: 89632 - protein, 30 aa, Artificial Sequence; identical to SEQ ID NO: 41923
  Cyclic GFR-binding peptide
  MOD_RES (28)..(30): Xaa is C or S

SEQ ID NO: 89633 - protein, 27 aa, Artificial Sequence
  Cyclic GFR-binding peptide
KMEPISILYLDENKNVVKFKYENMTVE

SEQ ID NO: 89634 - protein, 32 aa, Artificial Sequence; identical to SEQ ID NO: 7679
  Cyclic GFR-binding peptide
  MOD_RES (3)..(4): Xaa is C or S

SEQ ID NO: 89635 - protein, 32 aa, Artificial Sequence; identical to SEQ ID NO: 41930
  Cyclic GFR-binding peptide
  MOD_RES (1)..(1): Xaa is C or S

SEQ ID NO: 89636 - protein, 33 aa, Artificial Sequence; identical to SEQ ID NO: 41931
  Cyclic GFR-binding peptide
  MOD_RES (5)..(6): Xaa is C or S

SEQ ID NO: 89637 - protein, 41 aa, Artificial Sequence
  Cyclic GFR-binding peptide
  MOD_RES (6)..(7)..(39)..(41): Xaa is C or S
HVPKPXXAPTKLEPISVLYLDDSSNVIKFKYENMVVRSXGX

SEQ ID NO: 89638 - protein, 28 aa, Artificial Sequence
  Cyclic GFR-binding peptide
  MOD_RES (2)..(3): Xaa is C or S
AXXVPTKLSPINILYFDKGVVTYYGKIP

SEQ ID NO: 89639 - protein, 37 aa, Artificial Sequence; identical to SEQ ID NO: 7683
  Cyclic GFR-binding peptide
  MOD_RES (5)..(6)..(37): Xaa is C or S

SEQ ID NO: 89640 - protein, 35 aa, Artificial Sequence; identical to SEQ ID NO: 36174
  Cyclic GFR-binding peptide
  MOD_RES (2)..(3)..(35): Xaa is C or S

SEQ ID NO: 89641 - protein, 31 aa, Artificial Sequence
  Cyclic GFR-binding peptide
  MOD_RES (31)..(31): Xaa is C or S
PARLSATSILYYDAANNVVLRKHRDMVVEAX

SEQ ID NO: 89642 - protein, 24 aa, Artificial Sequence
  Cyclic GFR-binding peptide
SATSILYYVGRTPKVLRKHRMVVK

SEQ ID NO: 89643 - protein, 30 aa, Artificial Sequence; identical to SEQ ID NO: 7687
  Cyclic GFR-binding peptide
  MOD_RES (1)..(2): Xaa is C or S

SEQ ID NO: 89644 - protein, 28 aa, Artificial Sequence
  Cyclic GFR-binding peptide
  MOD_RES (28)..(28): Xaa is C or S
KTEPISMLYLDNGRVLLKFKYEMIVEEX

SEQ ID NO: 89645 - protein, 28 aa, Artificial Sequence
  Cyclic GFR-binding peptide
  MOD_RES (1)..(2): Xaa is C or S
XXAPTKLEPISVLYLDDSSNVIKFKYEN

SEQ ID NO: 89646 - protein, 27 aa, Artificial Sequence
  Cyclic GFR-binding peptide
  MOD_RES (1)..(1): Xaa is C or S
XVPTKLSPINILYFDKGVVTYYGKIPG

SEQ ID NO: 89647 - protein, 25 aa, Artificial Sequence
  Cyclic GFR-binding peptide
TKLEPISVLYLDSSNNVIKFKYENM

SEQ ID NO: 89648 - protein, 29 aa, Artificial Sequence
  Cyclic GFR-binding peptide
  MOD_RES (27)..(29): Xaa is C or S
SPINVLYFDSSNNVIYGKIPNMVVKAXGX

SEQ ID NO: 89649 - protein, 35 aa, Artificial Sequence
  Cyclic GFR-binding peptide
  MOD_RES (32)..(34): Xaa is C or S
VPTELSPINMLYFDENEKVVYGKIPDMVVEGXGXR

SEQ ID NO: 89650 - protein, 35 aa, Artificial Sequence; identical to SEQ ID NO: 7691
  Cyclic GFR-binding peptide
  MOD_RES (6)..(7): Xaa is C or S

SEQ ID NO: 89651 - protein, 28 aa, Artificial Sequence
  Cyclic GFR-binding peptide
VPQDLSPISILYKVGRTPKVLKYHYMVV

SEQ ID NO: 89652 - protein, 34 aa, Artificial Sequence
  Cyclic GFR-binding peptide
  MOD_RES (3)..(4): Xaa is C or S
GPXXTPTKMEPISMLYLNDKQQIIKFKYEGMVVD

SEQ ID NO: 89653 - protein, 30 aa, Artificial Sequence; identical to SEQ ID NO: 7693
  Cyclic GFR-binding peptide
  MOD_RES (27)..(29): Xaa is C or S

SEQ ID NO: 89654 - protein, 30 aa, Artificial Sequence; identical to SEQ ID NO: 41953
  Cyclic GFR-binding peptide
  MOD_RES (27)..(29): Xaa is C or S

SEQ ID NO: 89655 - protein, 35 aa, Artificial Sequence
  Cyclic GFR-binding peptide
  MOD_RES (2)..(3)..(35): Xaa is C or S
SXXVPARLSATSILYYDAANNVVLRKHRDMVVEAX

SEQ ID NO: 89656 - protein, 31 aa, Artificial Sequence; identical to SEQ ID NO: 41954
  Cyclic GFR-binding peptide
  MOD_RES (28)..(30): Xaa is C or S

SEQ ID NO: 89657 - protein, 31 aa, Artificial Sequence; identical to SEQ ID NO: 41957
  Cyclic GFR-binding peptide
  MOD_RES (28)..(30): Xaa is C or S

SEQ ID NO: 89658 - protein, 41 aa, Artificial Sequence; identical to SEQ ID NO: 41958
  Cyclic GFR-binding peptide
  MOD_RES (6)..(7)..(39)..(41): Xaa is C or S

SEQ ID NO: 89659 - protein, 28 aa, Artificial Sequence
  Cyclic GFR-binding peptide
  MOD_RES (28)..(28): Xaa is C or S
LEPISILYLDSANNVVKFKYEDMVVESX

SEQ ID NO: 89660 - protein, 31 aa, Artificial Sequence; identical to SEQ ID NO: 41959
  Cyclic GFR-binding peptide
  MOD_RES (1)..(2): Xaa is C or S

SEQ ID NO: 89661 - protein, 24 aa, Artificial Sequence
  Cyclic GFR-binding peptide
NAISILYFVGRKPKVLKKYRMIVR

SEQ ID NO: 89662 - protein, 36 aa, Artificial Sequence; identical to SEQ ID NO: 7699
  Cyclic GFR-binding peptide
  MOD_RES (2)..(3)..(35): Xaa is C or S

SEQ ID NO: 89663 - protein, 36 aa, Artificial Sequence
  Cyclic GFR-binding peptide
  MOD_RES (1)..(2)..(34)..(36): Xaa is C or S
XXVPTRLSPISILYKDSANNVVLKYHYDMVVESXGX

SEQ ID NO: 89664 - protein, 31 aa, Artificial Sequence
  Cyclic GFR-binding peptide
  MOD_RES (2)..(3): Xaa is C or S
PXXVPEKMSPINILYFDENKNVVYGKIPNMT

SEQ ID NO: 89665 - protein, 31 aa, Artificial Sequence; identical to SEQ ID NO: 7702
  Cyclic GFR-binding peptide
  MOD_RES (1)..(1): Xaa is C or S

SEQ ID NO: 89666 - protein, 35 aa, Artificial Sequence; identical to SEQ ID NO: 36191
  Cyclic GFR-binding peptide
  MOD_RES (4)..(5): Xaa is C or S

SEQ ID NO: 89667 - protein, 23 aa, Artificial Sequence
  Cyclic GFR-binding peptide
TELSPISMLYKDENEKVVLKYHY

SEQ ID NO: 89668 - protein, 31 aa, Artificial Sequence; identical to SEQ ID NO: 7708
  Cyclic GFR-binding peptide

SEQ ID NO: 89669 - protein, 30 aa, Artificial Sequence; identical to SEQ ID NO: 41971
  Cyclic GFR-binding peptide
  MOD_RES (27)..(29): Xaa is C or S

SEQ ID NO: 89670 - protein, 34 aa, Artificial Sequence
  Cyclic GFR-binding peptide
  MOD_RES (4)..(5): Xaa is C or S
PPTXXVPTRLSATSILYYDSANNVVLRKHRDMVV

SEQ ID NO: 89671 - protein, 38 aa, Artificial Sequence
  Cyclic GFR-binding peptide
  MOD_RES (4)..(5)..(36)..(38): Xaa is C or S
ASPXXVSQDLSPINILYFIGKTPKIYGKIPMIVKSXKX

SEQ ID NO: 89672 - protein, 32 aa, Artificial Sequence; identical to SEQ ID NO: 7711
  Cyclic GFR-binding peptide
  MOD_RES (6)..(7): Xaa is C or S

SEQ ID NO: 89673 - protein, 29 aa, Artificial Sequence
  Cyclic GFR-binding peptide
  MOD_RES (29)..(29): Xaa is C or S
QDLSATSILYYVGRTPKVLRKHRMVVKSX

SEQ ID NO: 89674 - protein, 29 aa, Artificial Sequence
  Cyclic GFR-binding peptide
  MOD_RES (26)..(28): Xaa is C or S
NAISILYFVGRTPKVLKKYRMVVKSXKXS

SEQ ID NO: 89675 - protein, 30 aa, Artificial Sequence
  Cyclic GFR-binding peptide
  MOD_RES (4)..(5): Xaa is C or S
ASPXXVSQDLSPINILYFIGKTPKIYGKIP

SEQ ID NO: 89676 - protein, 37 aa, Artificial Sequence; identical to SEQ ID NO: 7715
  Cyclic GFR-binding peptide
  MOD_RES (1)..(2)..(34)..(36): Xaa is C or S

SEQ ID NO: 89677 - protein, 40 aa, Artificial Sequence; identical to SEQ ID NO: 41983
  Cyclic GFR-binding peptide
  MOD_RES (6)..(7)..(39): Xaa is C or S

SEQ ID NO: 89678 - protein, 36 aa, Artificial Sequence; identical to SEQ ID NO: 41985
  Cyclic GFR-binding peptide
  MOD_RES (2)..(3)..(35): Xaa is C or S

SEQ ID NO: 89679 - protein, 28 aa, Artificial Sequence
  Cyclic GFR-binding peptide
PTELEPISMLYLDENEKVVKFKYEDMVV

SEQ ID NO: 89680 - protein, 36 aa, Artificial Sequence
  Cyclic GFR-binding peptide
  MOD_RES (1)..(33)..(35): Xaa is C or S
XTPTKMSPISMLYKNDKQQIILKYHYGMVVDRXGXS

SEQ ID NO: 89681 - protein, 41 aa, Artificial Sequence; identical to SEQ ID NO: 36207
  Cyclic GFR-binding peptide
  MOD_RES (6)..(7)..(39)..(41): Xaa is C or S

SEQ ID NO: 89682 - protein, 33 aa, Artificial Sequence
  Cyclic GFR-binding peptide
  MOD_RES (2)..(3): Xaa is C or S
PXXVPEKMSATSILYYDENKNVVLRKHRNMTVE

SEQ ID NO: 89683 - protein, 34 aa, Artificial Sequence; identical to SEQ ID NO: 41986
  Cyclic GFR-binding peptide
  MOD_RES (32)..(34): Xaa is C or S

SEQ ID NO: 89684 - protein, 30 aa, Artificial Sequence; identical to SEQ ID NO: 41988
  Cyclic GFR-binding peptide

SEQ ID NO: 89685 - protein, 39 aa, Artificial Sequence; identical to SEQ ID NO: 41990
  Cyclic GFR-binding peptide
  MOD_RES (5)..(6)..(38): Xaa is C or S

SEQ ID NO: 89686 - protein, 37 aa, Artificial Sequence; identical to SEQ ID NO: 7720
  Cyclic GFR-binding peptide
  MOD_RES (3)..(4)..(35)..(37): Xaa is C or S

SEQ ID NO: 89687 - protein, 33 aa, Artificial Sequence; identical to SEQ ID NO: 7721
  Cyclic GFR-binding peptide
  MOD_RES (30)..(32): Xaa is C or S

SEQ ID NO: 89688 - protein, 34 aa, Artificial Sequence; identical to SEQ ID NO: 7723
  Cyclic GFR-binding peptide
  MOD_RES (5)..(6): Xaa is C or S

SEQ ID NO: 89689 - protein, 34 aa, Artificial Sequence; identical to SEQ ID NO: 7724
  Cyclic GFR-binding peptide
  MOD_RES (32)..(34): Xaa is C or S

SEQ ID NO: 89690 - protein, 40 aa, Artificial Sequence; identical to SEQ ID NO: 7725
  Cyclic GFR-binding peptide
  MOD_RES (6)..(7)..(39): Xaa is C or S

SEQ ID NO: 89691 - protein, 37 aa, Artificial Sequence; identical to SEQ ID NO: 36220
  Cyclic GFR-binding peptide
  MOD_RES (6)..(7): Xaa is C or S

SEQ ID NO: 89692 - protein, 31 aa, Artificial Sequence; identical to SEQ ID NO: 18023
  Cyclic GFR-binding peptide
  MOD_RES (28)..(30): Xaa is C or S

SEQ ID NO: 89693 - protein, 28 aa, Artificial Sequence
  Cyclic GFR-binding peptide
ELSPINMLYFDEYDKVVYGKIPEMVVEG

SEQ ID NO: 89694 - protein, 27 aa, Artificial Sequence
  Cyclic GFR-binding peptide
KLEPISVLYLDDMGVPTKFKYEEGMSV

SEQ ID NO: 89695 - protein, 34 aa, Artificial Sequence
  Cyclic GFR-binding peptide
  MOD_RES (1)..(33): Xaa is C or S
XVPEKMSATSILYYDENKNVVLRKHRNMTVESXA

SEQ ID NO: 89696 - protein, 23 aa, Artificial Sequence
  Cyclic GFR-binding peptide
SPINMLYFDEYDKVVYGKIPEMV

SEQ ID NO: 89697 - protein, 30 aa, Artificial Sequence; identical to SEQ ID NO: 7732
  Cyclic GFR-binding peptide
  MOD_RES (1)..(1): Xaa is C or S

SEQ ID NO: 89698 - protein, 32 aa, Artificial Sequence; identical to SEQ ID NO: 42012
  Cyclic GFR-binding peptide
  MOD_RES (1)..(2): Xaa is C or S

SEQ ID NO: 89699 - protein, 25 aa, Artificial Sequence
  Cyclic GFR-binding peptide
APTQLSATSVLYYDDSSNVILRKHR

SEQ ID NO: 89700 - protein, 40 aa, Artificial Sequence; identical to SEQ ID NO: 18035
  Cyclic GFR-binding peptide
  MOD_RES (5)..(6)..(38)..(40): Xaa is C or S

SEQ ID NO: 89701 - protein, 37 aa, Artificial Sequence; identical to SEQ ID NO: 7736
  Cyclic GFR-binding peptide
  MOD_RES (6)..(7): Xaa is C or S

SEQ ID NO: 89702 - protein, 30 aa, Artificial Sequence; identical to SEQ ID NO: 7737
  Cyclic GFR-binding peptide
  MOD_RES (3)..(4): Xaa is C or S

SEQ ID NO: 89703 - protein, 36 aa, Artificial Sequence; identical to SEQ ID NO: 7738
  Cyclic GFR-binding peptide
  MOD_RES (1)..(33)..(35): Xaa is C or S

SEQ ID NO: 89704 - protein, 32 aa, Artificial Sequence; identical to SEQ ID NO: 7739
  Cyclic GFR-binding peptide
  MOD_RES (3)..(4): Xaa is C or S

SEQ ID NO: 89705 - protein, 28 aa, Artificial Sequence
  Cyclic GFR-binding peptide
  MOD_RES (27)..(27): Xaa is C or S
LNAISILYFVGRTPKVLKKYRMVVKSXK

SEQ ID NO: 89706 - protein, 32 aa, Artificial Sequence; identical to SEQ ID NO: 36236
  Cyclic GFR-binding peptide
  MOD_RES (1)..(1): Xaa is C or S

SEQ ID NO: 89707 - protein, 29 aa, Artificial Sequence
  Cyclic GFR-binding peptide
PTKLEPISVLYLDDSSNVIKFKYENMVVR

SEQ ID NO: 89708 - protein, 29 aa, Artificial Sequence
  Cyclic GFR-binding peptide
  MOD_RES (29)..(29): Xaa is C or S
KLNAISVLYFDSSNNVILKKYRNMVVKAX

SEQ ID NO: 89709 - protein, 37 aa, Artificial Sequence
  Cyclic GFR-binding peptide
  MOD_RES (5)..(6): Xaa is C or S
IPEPXXVPEKMSATSILYYDENKNVVLRKHRNMTVES

SEQ ID NO: 89710 - protein, 30 aa, Artificial Sequence
  Cyclic GFR-binding peptide
  MOD_RES (1)..(1): Xaa is C or S
XVPTKLSATSILYYDKGVVTYLRKHRGMAV

SEQ ID NO: 89711 - protein, 35 aa, Artificial Sequence
  Cyclic GFR-binding peptide
  MOD_RES (3)..(4): Xaa is C or S
EPXXVPEKMEPISILYLDENKNVVKFKYENMTVES

SEQ ID NO: 89712 - protein, 34 aa, Artificial Sequence; identical to SEQ ID NO: 42027
  Cyclic GFR-binding peptide
  MOD_RES (3)..(4): Xaa is C or S

SEQ ID NO: 89713 - protein, 36 aa, Artificial Sequence
  Cyclic GFR-binding peptide
  MOD_RES (3)..(4)..(36): Xaa is C or S
PTXXVPTRLEPISILYLDSANNVVKFKYEDMVVESX

SEQ ID NO: 89714 - protein, 24 aa, Artificial Sequence
  Cyclic GFR-binding peptide
TKLSATSILYYDKGVVTYLRKHRG

SEQ ID NO: 89715 - protein, 24 aa, Artificial Sequence
  Cyclic GFR-binding peptide
EKMSPINILYFDENKNVVYGKIPN

SEQ ID NO: 89716 - protein, 34 aa, Artificial Sequence; identical to SEQ ID NO: 7756
  Cyclic GFR-binding peptide
  MOD_RES (1)..(2)..(34): Xaa is C or S

SEQ ID NO: 89717 - protein, 30 aa, Artificial Sequence
  Cyclic GFR-binding peptide
  MOD_RES (29)..(29): Xaa is C or S
RLSPISILYKDSANNVVLKYHYDMVVESXG

SEQ ID NO: 89718 - protein, 32 aa, Artificial Sequence
  Cyclic GFR-binding peptide
  MOD_RES (29)..(31): Xaa is C or S
KMSATSILYYDENKNVVLRKHRNMTVESXAXR

SEQ ID NO: 89719 - protein, 24 aa, Artificial Sequence
  Cyclic GFR-binding peptide
KLSATSILYYDKGVVTYLRKHRGM

SEQ ID NO: 89720 - protein, 28 aa, Artificial Sequence
  Cyclic GFR-binding peptide
QDLNAISILYFIGKTPKILKKYRMIVKS

SEQ ID NO: 89721 - protein, 34 aa, Artificial Sequence
  Cyclic GFR-binding peptide
  MOD_RES (1)..(2)..(33): Xaa is C or S
XXVPQALSPINILYFVGRKPKVYGKIPMIVRSXK

SEQ ID NO: 89722 - protein, 32 aa, Artificial Sequence; identical to SEQ ID NO: 36245
  Cyclic GFR-binding peptide
  MOD_RES (5)..(6): Xaa is C or S

SEQ ID NO: 89723 - protein, 27 aa, Artificial Sequence
  Cyclic GFR-binding peptide
PTKMNAISMLYFNDKQQIILKKYRGMV

SEQ ID NO: 89724 - protein, 33 aa, Artificial Sequence; identical to SEQ ID NO: 18059
  Cyclic GFR-binding peptide
  MOD_RES (5)..(6): Xaa is C or S

SEQ ID NO: 89725 - protein, 27 aa, Artificial Sequence
  Cyclic GFR-binding peptide
  MOD_RES (27)..(27): Xaa is C or S
NAISMLYFDEYDKVVLKKYREMVVEGX

SEQ ID NO: 89726 - protein, 32 aa, Artificial Sequence; identical to SEQ ID NO: 7766
  Cyclic GFR-binding peptide
  MOD_RES (2)..(3): Xaa is C or S

SEQ ID NO: 89727 - protein, 34 aa, Artificial Sequence; identical to SEQ ID NO: 7768
  Cyclic GFR-binding peptide
  MOD_RES (7)..(7): Xaa is C or S

SEQ ID NO: 89728 - protein, 22 aa, Artificial Sequence
  Cyclic GFR-binding peptide
MSPISMLYKNDKQQIILKYHYG

SEQ ID NO: 89729 - protein, 34 aa, Artificial Sequence; identical to SEQ ID NO: 7769
  Cyclic GFR-binding peptide
  MOD_RES (7)..(7): Xaa is C or S

SEQ ID NO: 89730 - protein, 36 aa, Artificial Sequence; identical to SEQ ID NO: 36253
  Cyclic GFR-binding peptide
  MOD_RES (1)..(2)..(35): Xaa is C or S

SEQ ID NO: 89731 - protein, 39 aa, Artificial Sequence; identical to SEQ ID NO: 7770
  Cyclic GFR-binding peptide
  MOD_RES (5)..(6)..(38): Xaa is C or S

SEQ ID NO: 89732 - protein, 32 aa, Artificial Sequence; identical to SEQ ID NO: 42049
  Cyclic GFR-binding peptide
  MOD_RES (1)..(2): Xaa is C or S

SEQ ID NO: 89733 - protein, 24 aa, Artificial Sequence
  Cyclic GFR-binding peptide
LNAISILYFDSANNVVLKKYRDMV

SEQ ID NO: 89734 - protein, 27 aa, Artificial Sequence
  Cyclic GFR-binding peptide
  MOD_RES (26)..(26): Xaa is C or S
SPINILYFVGRTPKVYGKIPMVVKSXK

SEQ ID NO: 89735 - protein, 38 aa, Artificial Sequence; identical to SEQ ID NO: 36255
  Cyclic GFR-binding peptide
  MOD_RES (3)..(4)..(36)..(38): Xaa is C or S

SEQ ID NO: 89736 - protein, 37 aa, Artificial Sequence; identical to SEQ ID NO: 7772
  Cyclic GFR-binding peptide
  MOD_RES (6)..(7): Xaa is C or S

SEQ ID NO: 89737 - protein, 35 aa, Artificial Sequence; identical to SEQ ID NO: 7773
  Cyclic GFR-binding peptide
  MOD_RES (5)..(6): Xaa is C or S

SEQ ID NO: 89738 - protein, 34 aa, Artificial Sequence; identical to SEQ ID NO: 7774
  Cyclic GFR-binding peptide
  MOD_RES (2)..(34): Xaa is C or S

SEQ ID NO: 89739 - protein, 23 aa, Artificial Sequence
  Cyclic GFR-binding peptide
QDLSPINILYFIGKTPKIYGKIP

SEQ ID NO: 89740 - protein, 28 aa, Artificial Sequence
  Cyclic GFR-binding peptide
  MOD_RES (2)..(3): Xaa is C or S
AXXVPTKLSATSILYYDKGVVTYLRKHR

SEQ ID NO: 89741 - protein, 33 aa, Artificial Sequence
  Cyclic GFR-binding peptide
  MOD_RES (1)..(2): Xaa is C or S
XXVPEKMEPISILYLDENKNVVKFKYENMTVES

SEQ ID NO: 89742 - protein, 24 aa, Artificial Sequence
  Cyclic GFR-binding peptide
KLSPISILYKDKGVVTYLKYHYGM

SEQ ID NO: 89743 - protein, 27 aa, Artificial Sequence
  Cyclic GFR-binding peptide
  MOD_RES (27)..(27): Xaa is C or S
SPISMLYKDEYDKVVLKYHYEMVVEGX

SEQ ID NO: 89744 - protein, 37 aa, Artificial Sequence; identical to SEQ ID NO: 36265
  Cyclic GFR-binding peptide
  MOD_RES (4)..(5)..(36): Xaa is C or S

SEQ ID NO: 89745 - protein, 36 aa, Artificial Sequence; identical to SEQ ID NO: 36268
  Cyclic GFR-binding peptide
  MOD_RES (6)..(7): Xaa is C or S

SEQ ID NO: 89746 - protein, 38 aa, Artificial Sequence; identical to SEQ ID NO: 36270
  Cyclic GFR-binding peptide
  MOD_RES (5)..(6)..(38): Xaa is C or S

SEQ ID NO: 89747 - protein, 32 aa, Artificial Sequence; identical to SEQ ID NO: 7778
  Cyclic GFR-binding peptide
  MOD_RES (31)..(31): Xaa is C or S

SEQ ID NO: 89748 - protein, 29 aa, Artificial Sequence
  Cyclic GFR-binding peptide
PTKLEPISVLYLDSSNNVIKFKYENMVVK

SEQ ID NO: 89749 - protein, 38 aa, Artificial Sequence; identical to SEQ ID NO: 42065
  Cyclic GFR-binding peptide
  MOD_RES (5)..(6)..(38): Xaa is C or S

SEQ ID NO: 89750 - protein, 35 aa, Artificial Sequence; identical to SEQ ID NO: 7781
  Cyclic GFR-binding peptide
  MOD_RES (3)..(4): Xaa is C or S

SEQ ID NO: 89751 - protein, 30 aa, Artificial Sequence; identical to SEQ ID NO: 7782
  Cyclic GFR-binding peptide
  MOD_RES (4)..(5): Xaa is C or S

SEQ ID NO: 89752 - protein, 29 aa, Artificial Sequence
  Cyclic GFR-binding peptide
PTKLSATSVLYYDDSSNVILRKHRNMVVR

SEQ ID NO: 89753 - protein, 34 aa, Artificial Sequence
  Cyclic GFR-binding peptide
  MOD_RES (1)..(33): Xaa is C or S
XVPTRLEPISILYLDSANNVVKFKYEDMVVESXG

SEQ ID NO: 89754 - protein, 27 aa, Artificial Sequence
  Cyclic GFR-binding peptide
  MOD_RES (27)..(27): Xaa is C or S
EPISILYLDAANNVVKFKYEDMVVEAX

SEQ ID NO: 89755 - protein, 30 aa, Artificial Sequence; identical to SEQ ID NO: 18086
  Cyclic GFR-binding peptide

SEQ ID NO: 89756 - protein, 30 aa, Artificial Sequence
  Cyclic GFR-binding peptide
  MOD_RES (28)..(30): Xaa is C or S
LSATSILYYDAANNVVLRKHRDMVVEAXGX

SEQ ID NO: 89757 - protein, 23 aa, Artificial Sequence
  Cyclic GFR-binding peptide
MSATSILYYDENKNVVLRKHRNM

SEQ ID NO: 89758 - protein, 35 aa, Artificial Sequence; identical to SEQ ID NO: 36282
  Cyclic GFR-binding peptide
  MOD_RES (4)..(4): Xaa is C or S

SEQ ID NO: 89759 - protein, 27 aa, Artificial Sequence
  Cyclic GFR-binding peptide
VPTKLSATSVLYYDDMGVPTLRKHREG

SEQ ID NO: 89760 - protein, 25 aa, Artificial Sequence
  Cyclic GFR-binding peptide
PTELSPINMLYFDEYDKVVYGKIPE

SEQ ID NO: 89761 - protein, 23 aa, Artificial Sequence
  Cyclic GFR-binding peptide
LSPISVLYKDSSNNVILKYHYNM

SEQ ID NO: 89762 - protein, 33 aa, Artificial Sequence; identical to SEQ ID NO: 42077
  Cyclic GFR-binding peptide
  MOD_RES (2)..(3): Xaa is C or S

SEQ ID NO: 89763 - protein, 32 aa, Artificial Sequence; identical to SEQ ID NO: 77502
  Cyclic GFR-binding peptide
  MOD_RES (4)..(5): Xaa is C or S

SEQ ID NO: 89764 - protein, 31 aa, Artificial Sequence; identical to SEQ ID NO: 36286
  Cyclic GFR-binding peptide
  MOD_RES (5)..(6): Xaa is C or S

SEQ ID NO: 89765 - protein, 30 aa, Artificial Sequence; identical to SEQ ID NO: 42078
  Cyclic GFR-binding peptide
  MOD_RES (3)..(4): Xaa is C or S

SEQ ID NO: 89766 - protein, 33 aa, Artificial Sequence; identical to SEQ ID NO: 36287
  Cyclic GFR-binding peptide
  MOD_RES (3)..(4): Xaa is C or S

SEQ ID NO: 89767 - protein, 32 aa, Artificial Sequence; identical to SEQ ID NO: 42079
  Cyclic GFR-binding peptide
  MOD_RES (5)..(6): Xaa is C or S

SEQ ID NO: 89768 - protein, 26 aa, Artificial Sequence
  Cyclic GFR-binding peptide
PTKMSPISMLYKNDKQQIILKYHYGM

SEQ ID NO: 89769 - protein, 35 aa, Artificial Sequence; identical to SEQ ID NO: 36288
  Cyclic GFR-binding peptide
  MOD_RES (32)..(34): Xaa is C or S

SEQ ID NO: 89770 - protein, 35 aa, Artificial Sequence
  Cyclic GFR-binding peptide
  MOD_RES (32)..(34): Xaa is C or S
VPTRLSATSILYYDSANNVVLRKHRDMVVESXGXR

SEQ ID NO: 89771 - protein, 40 aa, Artificial Sequence; identical to SEQ ID NO: 7796
  Cyclic GFR-binding peptide
  MOD_RES (5)..(37)..(39): Xaa is C or S

SEQ ID NO: 89772 - protein, 31 aa, Artificial Sequence
  Cyclic GFR-binding peptide
  MOD_RES (3)..(4): Xaa is C or S
STXXAPVKTSATSMLYYDNGRVLLLRKHRMI

SEQ ID NO: 89773 - protein, 37 aa, Artificial Sequence; identical to SEQ ID NO: 7797
  Cyclic GFR-binding peptide
  MOD_RES (5)..(37): Xaa is C or S

SEQ ID NO: 89774 - protein, 30 aa, Artificial Sequence; identical to SEQ ID NO: 36298
  Cyclic GFR-binding peptide
  MOD_RES (1)..(1): Xaa is C or S

SEQ ID NO: 89775 - protein, 34 aa, Artificial Sequence
  Cyclic GFR-binding peptide
  MOD_RES (1)..(33): Xaa is C or S
XTPTKMSATSMLYYNDKQQIILRKHRGMVVDRXG

SEQ ID NO: 89776 - protein, 30 aa, Artificial Sequence; identical to SEQ ID NO: 42088
  Cyclic GFR-binding peptide
  MOD_RES (1)..(1): Xaa is C or S

SEQ ID NO: 89777 - protein, 24 aa, Artificial Sequence
  Cyclic GFR-binding peptide
KLSPINVLYFDSSNNVIYGKIPNM

SEQ ID NO: 89778 - protein, 31 aa, Artificial Sequence; identical to SEQ ID NO: 7804
  Cyclic GFR-binding peptide
  MOD_RES (3)..(4): Xaa is C or S

SEQ ID NO: 89779 - protein, 25 aa, Artificial Sequence
  Cyclic GFR-binding peptide
PEKMSPINILYFDENKNVVYGKIPN

SEQ ID NO: 89780 - protein, 31 aa, Artificial Sequence; identical to SEQ ID NO: 7806
  Cyclic GFR-binding peptide
  MOD_RES (30)..(30): Xaa is C or S

SEQ ID NO: 89781 - protein, 40 aa, Artificial Sequence; identical to SEQ ID NO: 36306
  Cyclic GFR-binding peptide
  MOD_RES (5)..(6)..(38)..(40): Xaa is C or S

SEQ ID NO: 89782 - protein, 23 aa, Artificial Sequence
  Cyclic GFR-binding peptide
SPISMLYKDEYDKVVLKYHYEMV

SEQ ID NO: 89783 - protein, 30 aa, Artificial Sequence
  Cyclic GFR-binding peptide
  MOD_RES (27)..(29): Xaa is C or S
SATSILYYDENKNVVLRKHRNMTVESXAXR

SEQ ID NO: 89784 - protein, 28 aa, Artificial Sequence
  Cyclic GFR-binding peptide
  MOD_RES (27)..(27): Xaa is C or S
SPINMLYFDEYDKVVYGKIPEMVVEGXG

SEQ ID NO: 89785 - protein, 27 aa, Artificial Sequence
  Cyclic GFR-binding peptide
  MOD_RES (27)..(27): Xaa is C or S
SPISILYKDAANNVVLKYHYDMVVEAX

SEQ ID NO: 89786 - protein, 39 aa, Artificial Sequence
  Cyclic GFR-binding peptide
  MOD_RES (4)..(5)..(37)..(39): Xaa is C or S
PPTXXVPTRLSATSILYYDSANNVVLRKHRDMVVESXGX

SEQ ID NO: 89787 - protein, 40 aa, Artificial Sequence; identical to SEQ ID NO: 7808
  Cyclic GFR-binding peptide
  MOD_RES (5)..(6)..(37)..(39): Xaa is C or S

SEQ ID NO: 89788 - protein, 25 aa, Artificial Sequence
  Cyclic GFR-binding peptide
QLSPINVLYFDDSSNVIYGKIPNMV

SEQ ID NO: 89789 - protein, 32 aa, Artificial Sequence
  Cyclic GFR-binding peptide
  MOD_RES (1)..(2): Xaa is C or S
XXVPEKMSPINILYFDENKNVVYGKIPNMTVE

SEQ ID NO: 89790 - protein, 29 aa, Artificial Sequence
  Cyclic GFR-binding peptide
  MOD_RES (28)..(28): Xaa is C or S
KTEPISMLYLDNGRVLLKFKYEMIVEEXG

SEQ ID NO: 89791 - protein, 42 aa, Artificial Sequence; identical to SEQ ID NO: 42111
  Cyclic GFR-binding peptide
  MOD_RES (6)..(7)..(39)..(41): Xaa is C or S

SEQ ID NO: 89792 - protein, 34 aa, Artificial Sequence; identical to SEQ ID NO: 7815
  Cyclic GFR-binding peptide
  MOD_RES (4)..(5): Xaa is C or S

SEQ ID NO: 89793 - protein, 27 aa, Artificial Sequence
  Cyclic GFR-binding peptide
  MOD_RES (1)..(1): Xaa is C or S
XVSQDLSATSILYYIGKTPKILRKHRM

SEQ ID NO: 89794 - protein, 23 aa, Artificial Sequence
  Cyclic GFR-binding peptide
MSPISILYKDENKNVVLKYHYNM

SEQ ID NO: 89795 - protein, 22 aa, Artificial Sequence
  Cyclic GFR-binding peptide
LSATSVLYYDDSSNVILRKHRN

SEQ ID NO: 89796 - protein, 38 aa, Artificial Sequence
  Cyclic GFR-binding peptide
  MOD_RES (2)..(3)..(35)..(37): Xaa is C or S
AXXVPTKLSATSILYYDKGVVTYLRKHRGMAVSEXGXR

SEQ ID NO: 89797 - protein, 22 aa, Artificial Sequence
  Cyclic GFR-binding peptide
SPINVLYFDDSSNVIYGKIPNM

SEQ ID NO: 89798 - protein, 35 aa, Artificial Sequence; identical to SEQ ID NO: 36331
  Cyclic GFR-binding peptide
  MOD_RES (6)..(7): Xaa is C or S

SEQ ID NO: 89799 - protein, 37 aa, Artificial Sequence
  Cyclic GFR-binding peptide
  MOD_RES (1)..(2)..(34)..(36): Xaa is C or S
XXTPTKMEPISMLYLNDKQQIIKFKYEGMVVDRXGXS

SEQ ID NO: 89800 - protein, 27 aa, Artificial Sequence
  Cyclic GFR-binding peptide
  MOD_RES (1)..(1): Xaa is C or S
XAPTKLSPINVLYFDDSSNVIYGKIPN

SEQ ID NO: 89801 - protein, 22 aa, Artificial Sequence
  Cyclic GFR-binding peptide
KTSATSMLYYDNGRVLLLRKHR

SEQ ID NO: 89802 - protein, 32 aa, Artificial Sequence; identical to SEQ ID NO: 36333
  Cyclic GFR-binding peptide
  MOD_RES (32)..(32): Xaa is C or S

SEQ ID NO: 89803 - protein, 32 aa, Artificial Sequence
  Cyclic GFR-binding peptide
  MOD_RES (1)..(32): Xaa is C or S
XAPVKTSATSMLYYDNGRVLLLRKHRMIVEEX

SEQ ID NO: 89804 - protein, 36 aa, Artificial Sequence; identical to SEQ ID NO: 36337
  Cyclic GFR-binding peptide
  MOD_RES (2)..(3)..(35): Xaa is C or S

SEQ ID NO: 89805 - protein, 25 aa, Artificial Sequence
  Cyclic GFR-binding peptide
APVKTSPINMLYFDNGRVLLYGKIP

SEQ ID NO: 89806 - protein, 28 aa, Artificial Sequence
  Cyclic GFR-binding peptide
  MOD_RES (28)..(28): Xaa is C or S
LSATSVLYYDDSSNVILRKHRNMVVRSX

SEQ ID NO: 89807 - protein, 27 aa, Artificial Sequence
  Cyclic GFR-binding peptide
APTKLSPINVLYFDSSNNVIYGKIPNM

SEQ ID NO: 89808 - protein, 32 aa, Artificial Sequence; identical to SEQ ID NO: 36339
  Cyclic GFR-binding peptide
  MOD_RES (3)..(4): Xaa is C or S

SEQ ID NO: 89809 - protein, 28 aa, Artificial Sequence
  Cyclic GFR-binding peptide
  MOD_RES (2)..(3): Xaa is C or S
AXXAPTKLSPINVLYFDSSNNVIYGKIP

SEQ ID NO: 89810 - protein, 27 aa, Artificial Sequence
  Cyclic GFR-binding peptide
EKMEPISILYLDENKNVVKFKYENMTV

SEQ ID NO: 89811 - protein, 30 aa, Artificial Sequence; identical to SEQ ID NO: 7835
  Cyclic GFR-binding peptide
  MOD_RES (1)..(1): Xaa is C or S

SEQ ID NO: 89812 - protein, 36 aa, Artificial Sequence; identical to SEQ ID NO: 7837
  Cyclic GFR-binding peptide
  MOD_RES (1)..(33)..(35): Xaa is C or S

SEQ ID NO: 89813 - protein, 20 aa, Artificial Sequence
  Cyclic GFR-binding peptide
SPINILYFIGKTPKIYGKIP

SEQ ID NO: 89814 - protein, 33 aa, Artificial Sequence; identical to SEQ ID NO: 7841
  Cyclic GFR-binding peptide
  MOD_RES (32)..(32): Xaa is C or S

SEQ ID NO: 89815 - protein, 28 aa, Artificial Sequence
  Cyclic GFR-binding peptide
APTKLSPINVLYFDDSSNVIYGKIPNMV

SEQ ID NO: 89816 - protein, 29 aa, Artificial Sequence
  Cyclic GFR-binding peptide
  MOD_RES (1)..(1): Xaa is C or S
XAPTQLSPISVLYKDDSSNVILKYHYNMV

SEQ ID NO: 89817 - protein, 30 aa, Artificial Sequence
  Cyclic GFR-binding peptide
VPEKMEPISILYLDENKNVVKFKYENMTVE

SEQ ID NO: 89818 - protein, 26 aa, Artificial Sequence
  Cyclic GFR-binding peptide
QDLSPISILYKIGKTPKILKYHYMIV

SEQ ID NO: 89819 - protein, 32 aa, Artificial Sequence; identical to SEQ ID NO: 36357
  Cyclic GFR-binding peptide
  MOD_RES (32)..(32): Xaa is C or S

SEQ ID NO: 89820 - protein, 29 aa, Artificial Sequence
  Cyclic GFR-binding peptide
  MOD_RES (1)..(2): Xaa is C or S
XXVPTRLNAISILYFDSANNVVLKKYRDM

SEQ ID NO: 89821 - protein, 29 aa, Artificial Sequence
  Cyclic GFR-binding peptide
  MOD_RES (3)..(3): Xaa is C or S
PTXAPTKLEPISVLYLDDSSNVIKFKYEN

SEQ ID NO: 89822 - protein, 38 aa, Artificial Sequence; identical to SEQ ID NO: 7846
  Cyclic GFR-binding peptide
  MOD_RES (3)..(4)..(36)..(38): Xaa is C or S

SEQ ID NO: 89823 - protein, 38 aa, Artificial Sequence; identical to SEQ ID NO: 42157
  Cyclic GFR-binding peptide
  MOD_RES (4)..(5)..(37): Xaa is C or S

SEQ ID NO: 89824 - protein, 34 aa, Artificial Sequence; identical to SEQ ID NO: 7847
  Cyclic GFR-binding peptide
  MOD_RES (1)..(2)..(33): Xaa is C or S

SEQ ID NO: 89825 - protein, 35 aa, Artificial Sequence; identical to SEQ ID NO: 77533
  Cyclic GFR-binding peptide
  MOD_RES (3)..(4): Xaa is C or S

SEQ ID NO: 89826 - protein, 29 aa, Artificial Sequence
  Cyclic GFR-binding peptide
  MOD_RES (1)..(1): Xaa is C or S
XVPTRLSPINILYFDSANNVVYGKIPDMV

SEQ ID NO: 89827 - protein, 37 aa, Artificial Sequence; identical to SEQ ID NO: 7851
  Cyclic GFR-binding peptide
  MOD_RES (6)..(7): Xaa is C or S

SEQ ID NO: 89828 - protein, 33 aa, Artificial Sequence
  Cyclic GFR-binding peptide
  MOD_RES (4)..(5): Xaa is C or S
AAPXXVPQALSPINILYFVGRKPKVYGKIPMIV

SEQ ID NO: 89829 - protein, 27 aa, Artificial Sequence
  Cyclic GFR-binding peptide
ELNAISMLYFDEYDKVVLKKYREMVVE

SEQ ID NO: 89830 - protein, 32 aa, Artificial Sequence; identical to SEQ ID NO: 7856
  Cyclic GFR-binding peptide
  MOD_RES (6)..(7): Xaa is C or S

SEQ ID NO: 89831 - protein, 33 aa, Artificial Sequence; identical to SEQ ID NO: 42171
  Cyclic GFR-binding peptide
  MOD_RES (31)..(33): Xaa is C or S

SEQ ID NO: 89832 - protein, 28 aa, Artificial Sequence
  Cyclic GFR-binding peptide
  MOD_RES (1)..(2): Xaa is C or S
XXVPTRLNAISILYFDSANNVVLKKYRD

SEQ ID NO: 89833 - protein, 31 aa, Artificial Sequence; identical to SEQ ID NO: 36372
  Cyclic GFR-binding peptide
  MOD_RES (1)..(1): Xaa is C or S

SEQ ID NO: 89834 - protein, 29 aa, Artificial Sequence
  Cyclic GFR-binding peptide
  MOD_RES (29)..(29): Xaa is C or S
KLSPINILYFDKGVVTYYGKIPGMAVSEX

SEQ ID NO: 89835 - protein, 29 aa, Artificial Sequence
  Cyclic GFR-binding peptide
  MOD_RES (4)..(4): Xaa is C or S
KPTXAPTKLSPINVLYFDDSSNVIYGKIP

SEQ ID NO: 89836 - protein, 22 aa, Artificial Sequence
  Cyclic GFR-binding peptide
SPINILYFIGKTPKIYGKIPMI

SEQ ID NO: 89837 - protein, 29 aa, Artificial Sequence
  Cyclic GFR-binding peptide
  MOD_RES (1)..(2): Xaa is C or S
XXVPTELSATSMLYYDEYDKVVLRKHREM

SEQ ID NO: 89838 - protein, 34 aa, Artificial Sequence
  Cyclic GFR-binding peptide
  MOD_RES (3)..(4): Xaa is C or S
GPXXTPTKMSATSMLYYNDKQQIILRKHRGMVVD

SEQ ID NO: 89839 - protein, 30 aa, Artificial Sequence; identical to SEQ ID NO: 7862
  Cyclic GFR-binding peptide
  MOD_RES (30)..(30): Xaa is C or S

SEQ ID NO: 89840 - protein, 34 aa, Artificial Sequence; identical to SEQ ID NO: 36385
  Cyclic GFR-binding peptide
  MOD_RES (5)..(6): Xaa is C or S

SEQ ID NO: 89841 - protein, 28 aa, Artificial Sequence
  Cyclic GFR-binding peptide
  MOD_RES (1)..(2): Xaa is C or S
XXVPTELSPISMLYKDENEKVVLKYHYD

SEQ ID NO: 89842 - protein, 35 aa, Artificial Sequence; identical to SEQ ID NO: 36389
  Cyclic GFR-binding peptide
  MOD_RES (2)..(3)..(35): Xaa is C or S

SEQ ID NO: 89843 - protein, 27 aa, Artificial Sequence
  Cyclic GFR-binding peptide
KMSATSMLYYNDKQQIILRKHRGMVVD

SEQ ID NO: 89844 - protein, 37 aa, Artificial Sequence; identical to SEQ ID NO: 77552
  Cyclic GFR-binding peptide
  MOD_RES (4)..(5)..(37): Xaa is C or S

SEQ ID NO: 89845 - protein, 40 aa, Artificial Sequence
  Cyclic GFR-binding peptide
  MOD_RES (6)..(7)..(39): Xaa is C or S
AAPASXXVPARLSATSILYYDAANNVVLRKHRDMVVEAXG

SEQ ID NO: 89846 - protein, 37 aa, Artificial Sequence; identical to SEQ ID NO: 7866
  Cyclic GFR-binding peptide
  MOD_RES (3)..(4)..(35)..(37): Xaa is C or S

SEQ ID NO: 89847 - protein, 30 aa, Artificial Sequence
  Cyclic GFR-binding peptide
  MOD_RES (1)..(2): Xaa is C or S
XXAPVKTSPISMLYKDNGRVLLLKYHYMIV

SEQ ID NO: 89848 - protein, 31 aa, Artificial Sequence; identical to SEQ ID NO: 7868
  Cyclic GFR-binding peptide
  MOD_RES (30)..(30): Xaa is C or S

SEQ ID NO: 89849 - protein, 23 aa, Artificial Sequence
  Cyclic GFR-binding peptide
LNAISMLYFDEYDKVVLKKYREM

SEQ ID NO: 89850 - protein, 26 aa, Artificial Sequence
  Cyclic GFR-binding peptide
SPISVLYKDSSNNVILKYHYNMVVKA

SEQ ID NO: 89851 - protein, 31 aa, Artificial Sequence
  Cyclic GFR-binding peptide
  MOD_RES (30)..(30): Xaa is C or S
TKMSPISMLYKNDKQQIILKYHYGMVVDRXG

SEQ ID NO: 89852 - protein, 28 aa, Artificial Sequence
  Cyclic GFR-binding peptide
VPQDLSPINILYFVGRTPKVYGKIPMVV

SEQ ID NO: 89853 - protein, 29 aa, Artificial Sequence
  Cyclic GFR-binding peptide
  MOD_RES (1)..(2): Xaa is C or S
XXVPTELSPISMLYKDEYDKVVLKYHYEM

SEQ ID NO: 89854 - protein, 25 aa, Artificial Sequence
  Cyclic GFR-binding peptide
PARLEPISILYLDAANNVVKFKYED

SEQ ID NO: 89855 - protein, 35 aa, Artificial Sequence; identical to SEQ ID NO: 36401
  Cyclic GFR-binding peptide
  MOD_RES (32)..(34): Xaa is C or S

SEQ ID NO: 89856 - protein, 27 aa, Artificial Sequence
  Cyclic GFR-binding peptide
LSPINMLYFDENEKVVYGKIPDMVVEG

SEQ ID NO: 89857 - protein, 35 aa, Artificial Sequence; identical to SEQ ID NO: 18184
  Cyclic GFR-binding peptide
  MOD_RES (4)..(5): Xaa is C or S

SEQ ID NO: 89858 - protein, 31 aa, Artificial Sequence
  Cyclic GFR-binding peptide
  MOD_RES (28)..(30): Xaa is C or S
LSPISILYKDSANNVVLKYHYDMVVESXGXR

SEQ ID NO: 89859 - protein, 40 aa, Artificial Sequence; identical to SEQ ID NO: 7875
  Cyclic GFR-binding peptide
  MOD_RES (4)..(5)..(37)..(39): Xaa is C or S

SEQ ID NO: 89860 - protein, 30 aa, Artificial Sequence
  Cyclic GFR-binding peptide
  MOD_RES (29)..(29): Xaa is C or S
VKTSPISMLYKDNGRVLLLKYHYMIVEEXG

SEQ ID NO: 89861 - protein, 24 aa, Artificial Sequence
  Cyclic GFR-binding peptide
TSATSMLYYDNGRVLLLRKHRMIV

SEQ ID NO: 89862 - protein, 37 aa, Artificial Sequence; identical to SEQ ID NO: 42209
  Cyclic GFR-binding peptide
  MOD_RES (2)..(3)..(35)..(37): Xaa is C or S

SEQ ID NO: 89863 - protein, 23 aa, Artificial Sequence
  Cyclic GFR-binding peptide
ALSPINILYFVGRKPKVYGKIPM

SEQ ID NO: 89864 - protein, 28 aa, Artificial Sequence
  Cyclic GFR-binding peptide
PTKLSATSILYYDKGVVTYLRKHRGMAV

SEQ ID NO: 89865 - protein, 31 aa, Artificial Sequence
  Cyclic GFR-binding peptide
  MOD_RES (5)..(6): Xaa is C or S
TPPTXXVPTRLSATSILYYDSANNVVLRKHR

SEQ ID NO: 89866 - protein, 40 aa, Artificial Sequence
  Cyclic GFR-binding peptide
  MOD_RES (5)..(6)..(37)..(39): Xaa is C or S
VPSTXXAPVKTSATSMLYYDNGRVLLLRKHRMIVEEXGXL

SEQ ID NO: 89867 - protein, 30 aa, Artificial Sequence; identical to SEQ ID NO: 7880
  Cyclic GFR-binding peptide
  MOD_RES (2)..(3): Xaa is C or S

SEQ ID NO: 89868 - protein, 32 aa, Artificial Sequence; identical to SEQ ID NO: 36420
  Cyclic GFR-binding peptide
  MOD_RES (3)..(4): Xaa is C or S

SEQ ID NO: 89869 - protein, 38 aa, Artificial Sequence
  Cyclic GFR-binding peptide
  MOD_RES (4)..(5)..(37): Xaa is C or S
SKAXXVPTKLSATSILYYDKGVVTYLRKHRGMAVSEXG

SEQ ID NO: 89870 - protein, 30 aa, Artificial Sequence; identical to SEQ ID NO: 42227
  Cyclic GFR-binding peptide
  MOD_RES (1)..(2): Xaa is C or S

SEQ ID NO: 89871 - protein, 28 aa, Artificial Sequence
  Cyclic GFR-binding peptide
  MOD_RES (2)..(3): Xaa is C or S
PXXAPTQLSPINVLYFDDSSNVIYGKIP

SEQ ID NO: 89872 - protein, 22 aa, Artificial Sequence
  Cyclic GFR-binding peptide
SATSMLYYDNGRVLLLRKHRMI

SEQ ID NO: 89873 - protein, 36 aa, Artificial Sequence; identical to SEQ ID NO: 36428
  Cyclic GFR-binding peptide
  MOD_RES (2)..(3)..(35): Xaa is C or S

SEQ ID NO: 89874 - protein, 28 aa, Artificial Sequence
  Cyclic GFR-binding peptide
PTRLSPINILYFDSANNVVYGKIPDMVV

SEQ ID NO: 89875 - protein, 32 aa, Artificial Sequence; identical to SEQ ID NO: 7892
  Cyclic GFR-binding peptide
  MOD_RES (32)..(32): Xaa is C or S

SEQ ID NO: 89876 - protein, 38 aa, Artificial Sequence; identical to SEQ ID NO: 36431
  Cyclic GFR-binding peptide
  MOD_RES (2)..(3)..(35)..(37): Xaa is C or S

SEQ ID NO: 89877 - protein, 35 aa, Artificial Sequence; identical to SEQ ID NO: 36435
  Cyclic GFR-binding peptide
  MOD_RES (2)..(3)..(35): Xaa is C or S

SEQ ID NO: 89878 - protein, 32 aa, Artificial Sequence; identical to SEQ ID NO: 7895
  Cyclic GFR-binding peptide
  MOD_RES (3)..(4): Xaa is C or S

SEQ ID NO: 89879 - protein, 22 aa, Artificial Sequence
  Cyclic GFR-binding peptide
KMSPISILYKDENKNVVLKYHY

SEQ ID NO: 89880 - protein, 32 aa, Artificial Sequence; identical to SEQ ID NO: 7897
  Cyclic GFR-binding peptide
  MOD_RES (29)..(31): Xaa is C or S

SEQ ID NO: 89881 - protein, 24 aa, Artificial Sequence
  Cyclic GFR-binding peptide
ARLSPISILYKDAANNVVLKYHYD

SEQ ID NO: 89882 - protein, 35 aa, Artificial Sequence; identical to SEQ ID NO: 36444
  Cyclic GFR-binding peptide
  MOD_RES (3)..(4): Xaa is C or S

SEQ ID NO: 89883 - protein, 22 aa, Artificial Sequence
  Cyclic GFR-binding peptide
SPISMLYKDNGRVLLLKYHYMI

SEQ ID NO: 89884 - protein, 28 aa, Artificial Sequence
  Cyclic GFR-binding peptide
APTKLSPISVLYKDDSSNVILKYHYNMV

SEQ ID NO: 89885 - protein, 31 aa, Artificial Sequence; identical to SEQ ID NO: 36447
  Cyclic GFR-binding peptide
  MOD_RES (1)..(2): Xaa is C or S

SEQ ID NO: 89886 - protein, 29 aa, Artificial Sequence
  Cyclic GFR-binding peptide
  MOD_RES (1)..(2): Xaa is C or S
XXAPVKTSPISMLYKDNGRVLLLKYHYMI

SEQ ID NO: 89887 - protein, 36 aa, Artificial Sequence
  Cyclic GFR-binding peptide
  MOD_RES (3)..(4)..(35): Xaa is C or S
STXXAPVKTSATSMLYYDNGRVLLLRKHRMIVEEXG

SEQ ID NO: 89888 - protein, 31 aa, Artificial Sequence; identical to SEQ ID NO: 77575
  Cyclic GFR-binding peptide

SEQ ID NO: 89889 - protein, 33 aa, Artificial Sequence; identical to SEQ ID NO: 7907
  Cyclic GFR-binding peptide
  MOD_RES (3)..(4): Xaa is C or S

SEQ ID NO: 89890 - protein, 28 aa, Artificial Sequence
  Cyclic GFR-binding peptide
TELNAISMLYFDENEKVVLKKYRDMVVE

SEQ ID NO: 89891 - protein, 34 aa, Artificial Sequence; identical to SEQ ID NO: 36460
  Cyclic GFR-binding peptide
  MOD_RES (2)..(3): Xaa is C or S

SEQ ID NO: 89892 - protein, 31 aa, Artificial Sequence
  Cyclic GFR-binding peptide
VPTRLSPISILYKDSANNVVLKYHYDMVVES

SEQ ID NO: 89893 - protein, 27 aa, Artificial Sequence
  Cyclic GFR-binding peptide
KLSPISILYKDKGVVTYLKYHYGMAVS

SEQ ID NO: 89894 - protein, 26 aa, Artificial Sequence
  Cyclic GFR-binding peptide
VPEKMSPINILYFDENKNVVYGKIPN

SEQ ID NO: 89895 - protein, 27 aa, Artificial Sequence
  Cyclic GFR-binding peptide
  MOD_RES (1)..(2): Xaa is C or S
XXVPTRLSATSILYYDSANNVVLRKHR

SEQ ID NO: 89896 - protein, 33 aa, Artificial Sequence; identical to SEQ ID NO: 7913
  Cyclic GFR-binding peptide
  MOD_RES (31)..(33): Xaa is C or S

SEQ ID NO: 89897 - protein, 24 aa, Artificial Sequence
  Cyclic GFR-binding peptide
DLSPISILYKIGKTPKILKYHYMI

SEQ ID NO: 89898 - protein, 23 aa, Artificial Sequence
  Cyclic GFR-binding peptide
VKTSPISMLYKDNGRVLLLKYHY

SEQ ID NO: 89899 - protein, 26 aa, Artificial Sequence
  Cyclic GFR-binding peptide
  MOD_RES (1)..(1): Xaa is C or S
XVPTKLSPINILYFDKGVVTYYGKIP

SEQ ID NO: 89900 - protein, 39 aa, Artificial Sequence
  Cyclic GFR-binding peptide
  MOD_RES (5)..(6)..(38): Xaa is C or S
SAGPXXTPTKMSATSMLYYNDKQQIILRKHRGMVVDRXG

SEQ ID NO: 89901 - protein, 35 aa, Artificial Sequence
  Cyclic GFR-binding peptide
  MOD_RES (5)..(6): Xaa is C or S
IPEPXXVPEKMSPINILYFDENKNVVYGKIPNMTV

SEQ ID NO: 89902 - protein, 29 aa, Artificial Sequence
  Cyclic GFR-binding peptide
  MOD_RES (1)..(2): Xaa is C or S
XXVSQDLSPISILYKIGKTPKILKYHYMI

SEQ ID NO: 89903 - protein, 35 aa, Artificial Sequence; identical to SEQ ID NO: 36470
  Cyclic GFR-binding peptide
  MOD_RES (1)..(33)..(35): Xaa is C or S

SEQ ID NO: 89904 - protein, 30 aa, Artificial Sequence; identical to SEQ ID NO: 77580
  Cyclic GFR-binding peptide
  MOD_RES (29)..(29): Xaa is C or S

SEQ ID NO: 89905 - protein, 27 aa, Artificial Sequence
  Cyclic GFR-binding peptide
VPTRLEPISILYLDSANNVVKFKYEDM

SEQ ID NO: 89906 - protein, 33 aa, Artificial Sequence; identical to SEQ ID NO: 36473
  Cyclic GFR-binding peptide
  MOD_RES (32)..(32): Xaa is C or S

SEQ ID NO: 89907 - protein, 28 aa, Artificial Sequence
  Cyclic GFR-binding peptide
  MOD_RES (2)..(3): Xaa is C or S
TXXVPTRLEPISILYLDSANNVVKFKYE

SEQ ID NO: 89908 - protein, 25 aa, Artificial Sequence
  Cyclic GFR-binding peptide
TSATSMLYYDNGRVLLLRKHRMIVE

SEQ ID NO: 89909 - protein, 29 aa, Artificial Sequence
  Cyclic GFR-binding peptide
  MOD_RES (27)..(29): Xaa is C or S
SPISILYKDAANNVVLKYHYDMVVEAXGX

SEQ ID NO: 89910 - protein, 28 aa, Artificial Sequence
  Cyclic GFR-binding peptide
KLNAISVLYFDSSNNVILKKYRNMVVKA

SEQ ID NO: 89911 - protein, 30 aa, Artificial Sequence; identical to SEQ ID NO: 7929
  Cyclic GFR-binding peptide
  MOD_RES (28)..(30): Xaa is C or S

SEQ ID NO: 89912 - protein, 22 aa, Artificial Sequence
  Cyclic GFR-binding peptide
LNAISILYFDAANNVVLKKYRD

SEQ ID NO: 89913 - protein, 29 aa, Artificial Sequence
  Cyclic GFR-binding peptide
  MOD_RES (4)..(4): Xaa is C or S
KPTXAPTKLSPISVLYKDDSSNVILKYHY

SEQ ID NO: 89914 - protein, 30 aa, Artificial Sequence; identical to SEQ ID NO: 42287
  Cyclic GFR-binding peptide
  MOD_RES (29)..(29): Xaa is C or S

SEQ ID NO: 89915 - protein, 30 aa, Artificial Sequence; identical to SEQ ID NO: 7934
  Cyclic GFR-binding peptide
  MOD_RES (29)..(29): Xaa is C or S

SEQ ID NO: 89916 - protein, 36 aa, Artificial Sequence; identical to SEQ ID NO: 42291
  Cyclic GFR-binding peptide
  MOD_RES (6)..(7): Xaa is C or S

SEQ ID NO: 89917 - protein, 26 aa, Artificial Sequence
  Cyclic GFR-binding peptide
  MOD_RES (1)..(1): Xaa is C or S
XAPTKLSPINVLYFDSSNNVIYGKIP

SEQ ID NO: 89918 - protein, 36 aa, Artificial Sequence; identical to SEQ ID NO: 42293
  Cyclic GFR-binding peptide
  MOD_RES (1)..(2)..(33)..(35): Xaa is C or S

SEQ ID NO: 89919 - protein, 37 aa, Artificial Sequence; identical to SEQ ID NO: 7938
  Cyclic GFR-binding peptide
  MOD_RES (1)..(34)..(36): Xaa is C or S

SEQ ID NO: 89920 - protein, 22 aa, Artificial Sequence
  Cyclic GFR-binding peptide
LSPISILYKDKGVVTYLKYHYG

SEQ ID NO: 89921 - protein, 33 aa, Artificial Sequence; identical to SEQ ID NO: 7939
  Cyclic GFR-binding peptide
  MOD_RES (32)..(32): Xaa is C or S

SEQ ID NO: 89922 - protein, 33 aa, Artificial Sequence; identical to SEQ ID NO: 42301
  Cyclic GFR-binding peptide
  MOD_RES (31)..(33): Xaa is C or S

SEQ ID NO: 89923 - protein, 25 aa, Artificial Sequence
  Cyclic GFR-binding peptide
KTEPISMLYLDNGRVLLKFKYEMIV

SEQ ID NO: 89924 - protein, 33 aa, Artificial Sequence; identical to SEQ ID NO: 7941
  Cyclic GFR-binding peptide
  MOD_RES (3)..(4): Xaa is C or S

SEQ ID NO: 89925 - protein, 34 aa, Artificial Sequence; identical to SEQ ID NO: 42306
  Cyclic GFR-binding peptide
  MOD_RES (6)..(7): Xaa is C or S

SEQ ID NO: 89926 - protein, 35 aa, Artificial Sequence; identical to SEQ ID NO: 36495
  Cyclic GFR-binding peptide
  MOD_RES (2)..(3)..(35): Xaa is C or S

SEQ ID NO: 89927 - protein, 41 aa, Artificial Sequence
  Cyclic GFR-binding peptide
  MOD_RES (6)..(7)..(38)..(40): Xaa is C or S
RVPSTXXAPVKTSPISMLYKDNGRVLLLKYHYMIVEEXGXL

SEQ ID NO: 89928 - protein, 31 aa, Artificial Sequence; identical to SEQ ID NO: 7944
  Cyclic GFR-binding peptide
  MOD_RES (29)..(31): Xaa is C or S

SEQ ID NO: 89929 - protein, 35 aa, Artificial Sequence; identical to SEQ ID NO: 7947
  Cyclic GFR-binding peptide
  MOD_RES (3)..(4): Xaa is C or S

SEQ ID NO: 89930 - protein, 31 aa, Artificial Sequence
  Cyclic GFR-binding peptide
  MOD_RES (29)..(31): Xaa is C or S
VKTSATSMLYYDNGRVLLLRKHRMIVEEXGX

SEQ ID NO: 89931 - protein, 39 aa, Artificial Sequence; identical to SEQ ID NO: 7950
  Cyclic GFR-binding peptide
  MOD_RES (3)..(4)..(36)..(38): Xaa is C or S

SEQ ID NO: 89932 - protein, 36 aa, Artificial Sequence; identical to SEQ ID NO: 7954
  Cyclic GFR-binding peptide
  MOD_RES (5)..(6): Xaa is C or S

SEQ ID NO: 89933 - protein, 20 aa, Artificial Sequence
  Cyclic GFR-binding peptide
NAISMLYFDNGRVLLLKKYR

SEQ ID NO: 89934 - protein, 26 aa, Artificial Sequence
  Cyclic GFR-binding peptide
VSQDLSATSILYYIGKTPKILRKHRM

SEQ ID NO: 89935 - protein, 31 aa, Artificial Sequence; identical to SEQ ID NO: 7958
  Cyclic GFR-binding peptide
  MOD_RES (4)..(4): Xaa is C or S

SEQ ID NO: 89936 - protein, 32 aa, Artificial Sequence; identical to SEQ ID NO: 7960
  Cyclic GFR-binding peptide
  MOD_RES (5)..(6): Xaa is C or S

SEQ ID NO: 89937 - protein, 21 aa, Artificial Sequence
  Cyclic GFR-binding peptide
SPINMLYFDNGRVLLYGKIPM

SEQ ID NO: 89938 - protein, 27 aa, Artificial Sequence
  Cyclic GFR-binding peptide
ELSATSMLYYDEYDKVVLRKHREMVVE

SEQ ID NO: 89939 - protein, 30 aa, Artificial Sequence; identical to SEQ ID NO: 36511
  Cyclic GFR-binding peptide
  MOD_RES (2)..(3): Xaa is C or S

SEQ ID NO: 89940 - protein, 39 aa, Artificial Sequence; identical to SEQ ID NO: 36512
  Cyclic GFR-binding peptide
  MOD_RES (6)..(7)..(38): Xaa is C or S

SEQ ID NO: 89941 - protein, 35 aa, Artificial Sequence; identical to SEQ ID NO: 7965
  Cyclic GFR-binding peptide
  MOD_RES (3)..(35): Xaa is C or S

SEQ ID NO: 89942 - protein, 24 aa, Artificial Sequence
  Cyclic GFR-binding peptide
LEPISVLYLDDMGVPTKFKYEEGM

SEQ ID NO: 89943 - protein, 26 aa, Artificial Sequence
  Cyclic GFR-binding peptide
LSPINILYFIGKTPKIYGKIPMIVKS

SEQ ID NO: 89944 - protein, 29 aa, Artificial Sequence
  Cyclic GFR-binding peptide
  MOD_RES (2)..(2): Xaa is C or S
TXAPTKLSPINVLYFDDSSNVIYGKIPNM

SEQ ID NO: 89945 - protein, 35 aa, Artificial Sequence
  Cyclic GFR-binding peptide
  MOD_RES (5)..(6): Xaa is C or S
SAGPXXTPTKMEPISMLYLNDKQQIIKFKYEGMVV

SEQ ID NO: 89946 - protein, 21 aa, Artificial Sequence
  Cyclic GFR-binding peptide
SPINVLYFDDMGVPTYGKIPE

SEQ ID NO: 89947 - protein, 25 aa, Artificial Sequence
  Cyclic GFR-binding peptide
LEPISVLYLDDMGVPTKFKYEEGMS

SEQ ID NO: 89948 - protein, 29 aa, Artificial Sequence
  Cyclic GFR-binding peptide
SQDLSATSILYYIGKTPKILRKHRMIVKS

SEQ ID NO: 89949 - protein, 32 aa, Artificial Sequence
  Cyclic GFR-binding peptide
  MOD_RES (32)..(32): Xaa is C or S
VPEKMSATSILYYDENKNVVLRKHRNMTVESX

SEQ ID NO: 89950 - protein, 25 aa, Artificial Sequence
  Cyclic GFR-binding peptide
VPQDLSPISILYKVGRTPKVLKYHY

SEQ ID NO: 89951 - protein, 26 aa, Artificial Sequence
  Cyclic GFR-binding peptide
  MOD_RES (26)..(26): Xaa is C or S
EPISMLYLDNGRVLLKFKYEMIVEEX

SEQ ID NO: 89952 - protein, 38 aa, Artificial Sequence; identical to SEQ ID NO: 7972
  Cyclic GFR-binding peptide
  MOD_RES (3)..(4)..(35)..(37): Xaa is C or S

SEQ ID NO: 89953 - protein, 31 aa, Artificial Sequence
  Cyclic GFR-binding peptide
  MOD_RES (5)..(6): Xaa is C or S
IPEPXXVPEKMSPINILYFDENKNVVYGKIP

SEQ ID NO: 89954 - protein, 40 aa, Artificial Sequence; identical to SEQ ID NO: 36524
  Cyclic GFR-binding peptide
  MOD_RES (6)..(7)..(39): Xaa is C or S

SEQ ID NO: 89955 - protein, 36 aa, Artificial Sequence; identical to SEQ ID NO: 42334
  Cyclic GFR-binding peptide
  MOD_RES (3)..(4): Xaa is C or S

SEQ ID NO: 89956 - protein, 26 aa, Artificial Sequence
  Cyclic GFR-binding peptide
KLSATSILYYDKGVVTYLRKHRGMAV

SEQ ID NO: 89957 - protein, 39 aa, Artificial Sequence; identical to SEQ ID NO: 42337
  Cyclic GFR-binding peptide
  MOD_RES (5)..(37)..(39): Xaa is C or S

SEQ ID NO: 89958 - protein, 31 aa, Artificial Sequence; identical to SEQ ID NO: 42338
  Cyclic GFR-binding peptide
  MOD_RES (4)..(5): Xaa is C or S

SEQ ID NO: 89959 - protein, 35 aa, Artificial Sequence; identical to SEQ ID NO: 7980
  Cyclic GFR-binding peptide
  MOD_RES (5)..(6): Xaa is C or S

SEQ ID NO: 89960 - protein, 33 aa, Artificial Sequence; identical to SEQ ID NO: 7982
  Cyclic GFR-binding peptide
  MOD_RES (6)..(6): Xaa is C or S

SEQ ID NO: 89961 - protein, 30 aa, Artificial Sequence; identical to SEQ ID NO: 36536
  Cyclic GFR-binding peptide

SEQ ID NO: 89962 - protein, 37 aa, Artificial Sequence
  Cyclic GFR-binding peptide
  MOD_RES (5)..(6): Xaa is C or S
TPPTXXVPTRLSPISILYKDSANNVVLKYHYDMVVES

SEQ ID NO: 89963 - protein, 23 aa, Artificial Sequence
  Cyclic GFR-binding peptide
SATSILYYDAANNVVLRKHRDMV

SEQ ID NO: 89964 - protein, 27 aa, Artificial Sequence
  Cyclic GFR-binding peptide
VPEKMSPISILYKDENKNVVLKYHYNM

SEQ ID NO: 89965 - protein, 33 aa, Artificial Sequence
  Cyclic GFR-binding peptide
  MOD_RES (1)..(32): Xaa is C or S
XVPQALSPINILYFVGRKPKVYGKIPMIVRSXK

SEQ ID NO: 89966 - protein, 28 aa, Artificial Sequence
  Cyclic GFR-binding peptide
TKLSPINILYFDKGVVTYYGKIPGMAVS

SEQ ID NO: 89967 - protein, 35 aa, Artificial Sequence; identical to SEQ ID NO: 77610
  Cyclic GFR-binding peptide
  MOD_RES (6)..(7): Xaa is C or S

SEQ ID NO: 89968 - protein, 27 aa, Artificial Sequence
  Cyclic GFR-binding peptide
KMSATSILYYDENKNVVLRKHRNMTVE

SEQ ID NO: 89969 - protein, 27 aa, Artificial Sequence
  Cyclic GFR-binding peptide
TRLSPISILYKDSANNVVLKYHYDMVV

SEQ ID NO: 89970 - protein, 34 aa, Artificial Sequence; identical to SEQ ID NO: 7990
  Cyclic GFR-binding peptide
  MOD_RES (31)..(33): Xaa is C or S

SEQ ID NO: 89971 - protein, 31 aa, Artificial Sequence; identical to SEQ ID NO: 7991
  Cyclic GFR-binding peptide
  MOD_RES (3)..(4): Xaa is C or S

SEQ ID NO: 89972 - protein, 36 aa, Artificial Sequence
  Cyclic GFR-binding peptide
  MOD_RES (5)..(6): Xaa is C or S
IPEPXXVPEKMSPINILYFDENKNVVYGKIPNMTVE

SEQ ID NO: 89973 - protein, 36 aa, Artificial Sequence; identical to SEQ ID NO: 7993
  Cyclic GFR-binding peptide
  MOD_RES (1)..(2)..(34)..(36): Xaa is C or S

SEQ ID NO: 89974 - protein, 31 aa, Artificial Sequence
  Cyclic GFR-binding peptide
VPTRLEPISILYLDSANNVVKFKYEDMVVES

SEQ ID NO: 89975 - protein, 22 aa, Artificial Sequence
  Cyclic GFR-binding peptide
LSPINVLYFDSSNNVIYGKIPN

SEQ ID NO: 89976 - protein, 37 aa, Artificial Sequence
  Cyclic GFR-binding peptide
  MOD_RES (4)..(5)..(37): Xaa is C or S
AGPXXTPTKMEPISMLYLNDKQQIIKFKYEGMVVDRX

SEQ ID NO: 89977 - protein, 26 aa, Artificial Sequence
  Cyclic GFR-binding peptide
VPTKLSPINILYFDKGVVTYYGKIPG

SEQ ID NO: 89978 - protein, 27 aa, Artificial Sequence
  Cyclic GFR-binding peptide
  MOD_RES (27)..(27): Xaa is C or S
NAISILYFDAANNVVLKKYRDMVVEAX

SEQ ID NO: 89979 - protein, 23 aa, Artificial Sequence
  Cyclic GFR-binding peptide
TNAISMLYFDNGRVLLLKKYRMI

SEQ ID NO: 89980 - protein, 39 aa, Artificial Sequence
  Cyclic GFR-binding peptide
  MOD_RES (5)..(6)..(38): Xaa is C or S
TPPTXXVPTRLEPISILYLDSANNVVKFKYEDMVVESXG

SEQ ID NO: 89981 - protein, 32 aa, Artificial Sequence; identical to SEQ ID NO: 42372
  Cyclic GFR-binding peptide
  MOD_RES (32)..(32): Xaa is C or S

SEQ ID NO: 89982 - protein, 38 aa, Artificial Sequence; identical to SEQ ID NO: 8002
  Cyclic GFR-binding peptide
  MOD_RES (4)..(5)..(38): Xaa is C or S

SEQ ID NO: 89983 - protein, 28 aa, Artificial Sequence
  Cyclic GFR-binding peptide
TQLSATSVLYYDDSSNVILRKHRNMVVR

SEQ ID NO: 89984 - protein, 26 aa, Artificial Sequence
  Cyclic GFR-binding peptide
  MOD_RES (1)..(1): Xaa is C or S
XVPTKLSPISILYKDKGVVTYLKYHY

SEQ ID NO: 89985 - protein, 29 aa, Artificial Sequence
  Cyclic GFR-binding peptide
  MOD_RES (27)..(29): Xaa is C or S
EPISILYLDAANNVVKFKYEDMVVEAXGX

SEQ ID NO: 89986 - protein, 39 aa, Artificial Sequence; identical to SEQ ID NO: 8006
  Cyclic GFR-binding peptide
  MOD_RES (5)..(6)..(37)..(39): Xaa is C or S

SEQ ID NO: 89987 - protein, 30 aa, Artificial Sequence; identical to SEQ ID NO: 42377
  Cyclic GFR-binding peptide
  MOD_RES (29)..(29): Xaa is C or S

SEQ ID NO: 89988 - protein, 36 aa, Artificial Sequence; identical to SEQ ID NO: 8007
  Cyclic GFR-binding peptide
  MOD_RES (5)..(6): Xaa is C or S

SEQ ID NO: 89989 - protein, 35 aa, Artificial Sequence; identical to SEQ ID NO: 8009
  Cyclic GFR-binding peptide
  MOD_RES (4)..(5): Xaa is C or S

SEQ ID NO: 89990 - protein, 30 aa, Artificial Sequence; identical to SEQ ID NO: 8012
  Cyclic GFR-binding peptide
  MOD_RES (29)..(29): Xaa is C or S

SEQ ID NO: 89991 - protein, 31 aa, Artificial Sequence; identical to SEQ ID NO: 36572
  Cyclic GFR-binding peptide
  MOD_RES (29)..(31): Xaa is C or S

SEQ ID NO: 89992 - protein, 31 aa, Artificial Sequence; identical to SEQ ID NO: 36573
  Cyclic GFR-binding peptide
  MOD_RES (2)..(3): Xaa is C or S

SEQ ID NO: 89993 - protein, 32 aa, Artificial Sequence; identical to SEQ ID NO: 8014
  Cyclic GFR-binding peptide
  MOD_RES (6)..(7): Xaa is C or S

SEQ ID NO: 89994 - protein, 35 aa, Artificial Sequence; identical to SEQ ID NO: 8015
  Cyclic GFR-binding peptide
  MOD_RES (5)..(6): Xaa is C or S

SEQ ID NO: 89995 - protein, 21 aa, Artificial Sequence
  Cyclic GFR-binding peptide
SPINVLYFDDSSNVIYGKIPN

SEQ ID NO: 89996 - protein, 42 aa, Artificial Sequence; identical to SEQ ID NO: 8018
  Cyclic GFR-binding peptide
  MOD_RES (6)..(7)..(39)..(41): Xaa is C or S

SEQ ID NO: 89997 - protein, 28 aa, Artificial Sequence
  Cyclic GFR-binding peptide
  MOD_RES (1)..(2): Xaa is C or S
XXAPTKLSPISVLYKDDSSNVILKYHYN

SEQ ID NO: 89998 - protein, 33 aa, Artificial Sequence
  Cyclic GFR-binding peptide
  MOD_RES (30)..(32): Xaa is C or S
PQDLSPINILYFVGRTPKVYGKIPMVVKSXKXS

SEQ ID NO: 89999 - protein, 29 aa, Artificial Sequence
  Cyclic GFR-binding peptide
  MOD_RES (27)..(29): Xaa is C or S
LNAISILYFIGKTPKILKKYRMIVKSXKX

SEQ ID NO: 90000 - protein, 36 aa, Artificial Sequence
  Cyclic GFR-binding peptide
  MOD_RES (4)..(5)..(36): Xaa is C or S
PSTXXAPVKTSATSMLYYDNGRVLLLRKHRMIVEEX

SEQ ID NO: 90001 - protein, 33 aa, Artificial Sequence; identical to SEQ ID NO: 8024
  Cyclic GFR-binding peptide
  MOD_RES (5)..(6): Xaa is C or S

SEQ ID NO: 90002 - protein, 31 aa, Artificial Sequence; identical to SEQ ID NO: 36586
  Cyclic GFR-binding peptide
  MOD_RES (4)..(5): Xaa is C or S

SEQ ID NO: 90003 - protein, 33 aa, Artificial Sequence
  Cyclic GFR-binding peptide
  MOD_RES (1)..(33): Xaa is C or S
XTPTKMSPISMLYKNDKQQIILKYHYGMVVDRX

SEQ ID NO: 90004 - protein, 34 aa, Artificial Sequence; identical to SEQ ID NO: 42401
  Cyclic GFR-binding peptide
  MOD_RES (31)..(33): Xaa is C or S

SEQ ID NO: 90005 - protein, 33 aa, Artificial Sequence; identical to SEQ ID NO: 36593
  Cyclic GFR-binding peptide
  MOD_RES (2)..(3): Xaa is C or S

SEQ ID NO: 90006 - protein, 33 aa, Artificial Sequence; identical to SEQ ID NO: 8033
  Cyclic GFR-binding peptide
  MOD_RES (32)..(32): Xaa is C or S

SEQ ID NO: 90007 - protein, 33 aa, Artificial Sequence; identical to SEQ ID NO: 8034
  Cyclic GFR-binding peptide
  MOD_RES (1)..(33): Xaa is C or S

SEQ ID NO: 90008 - protein, 27 aa, Artificial Sequence
  Cyclic GFR-binding peptide
LSPINVLYFDDMGVPTYGKIPEGMSVA

SEQ ID NO: 90009 - protein, 34 aa, Artificial Sequence; identical to SEQ ID NO: 8035
  Cyclic GFR-binding peptide
  MOD_RES (5)..(6): Xaa is C or S

SEQ ID NO: 90010 - protein, 37 aa, Artificial Sequence
  Cyclic GFR-binding peptide
  MOD_RES (6)..(7): Xaa is C or S
KASKAXXVPTKLSATSILYYDKGVVTYLRKHRGMAVS

SEQ ID NO: 90011 - protein, 25 aa, Artificial Sequence
  Cyclic GFR-binding peptide
EKMSPINILYFDENKNVVYGKIPNM

SEQ ID NO: 90012 - protein, 33 aa, Artificial Sequence; identical to SEQ ID NO: 36601
  Cyclic GFR-binding peptide
  MOD_RES (4)..(5): Xaa is C or S

SEQ ID NO: 90013 - protein, 27 aa, Artificial Sequence
  Cyclic GFR-binding peptide
  MOD_RES (27)..(27): Xaa is C or S
SPINVLYFDDSSNVIYGKIPNMVVRSX

SEQ ID NO: 90014 - protein, 34 aa, Artificial Sequence; identical to SEQ ID NO: 42420
  Cyclic GFR-binding peptide
  MOD_RES (4)..(5): Xaa is C or S

SEQ ID NO: 90015 - protein, 29 aa, Artificial Sequence
  Cyclic GFR-binding peptide
TQLEPISVLYLDDSSNVIKFKYENMVVRA

SEQ ID NO: 90016 - protein, 34 aa, Artificial Sequence; identical to SEQ ID NO: 8040
  Cyclic GFR-binding peptide
  MOD_RES (1)..(2)..(34): Xaa is C or S

SEQ ID NO: 90017 - protein, 24 aa, Artificial Sequence
  Cyclic GFR-binding peptide
PQALNAISILYFVGRKPKVLKKYR

SEQ ID NO: 90018 - protein, 33 aa, Artificial Sequence; identical to SEQ ID NO: 42429
  Cyclic GFR-binding peptide
  MOD_RES (31)..(33): Xaa is C or S

SEQ ID NO: 90019 - protein, 37 aa, Artificial Sequence; identical to SEQ ID NO: 42432
  Cyclic GFR-binding peptide
  MOD_RES (5)..(6): Xaa is C or S

SEQ ID NO: 90020 - protein, 28 aa, Artificial Sequence
  Cyclic GFR-binding peptide
VKTSATSMLYYDNGRVLLLRKHRMIVEE

SEQ ID NO: 90021 - protein, 37 aa, Artificial Sequence; identical to SEQ ID NO: 8048
  Cyclic GFR-binding peptide
  MOD_RES (3)..(4)..(35)..(37): Xaa is C or S

SEQ ID NO: 90022 - protein, 27 aa, Artificial Sequence
  Cyclic GFR-binding peptide
  MOD_RES (27)..(27): Xaa is C or S
TSPINMLYFDNGRVLLYGKIPMIVEEX

SEQ ID NO: 90023 - protein, 24 aa, Artificial Sequence
  Cyclic GFR-binding peptide
EPISILYLIGKTPKIKFKYEMIVK

SEQ ID NO: 90024 - protein, 42 aa, Artificial Sequence
  Cyclic GFR-binding peptide
  MOD_RES (6)..(7)..(39)..(41): Xaa is C or S
GSAGPXXTPTKMSATSMLYYNDKQQIILRKHRGMVVDRXGXS

SEQ ID NO: 90025 - protein, 33 aa, Artificial Sequence; identical to SEQ ID NO: 36620
  Cyclic GFR-binding peptide
  MOD_RES (3)..(4): Xaa is C or S

SEQ ID NO: 90026 - protein, 25 aa, Artificial Sequence
  Cyclic GFR-binding peptide
TPTKMSATSMLYYNDKQQIILRKHR

SEQ ID NO: 90027 - protein, 25 aa, Artificial Sequence
  Cyclic GFR-binding peptide
SATSMLYYNDKQQIILRKHRGMVVD

SEQ ID NO: 90028 - protein, 25 aa, Artificial Sequence
  Cyclic GFR-binding peptide
SATSILYYDSANNVVLRKHRDMVVE

SEQ ID NO: 90029 - protein, 34 aa, Artificial Sequence
  Cyclic GFR-binding peptide
  MOD_RES (4)..(5): Xaa is C or S
PEPXXVPEKMEPISILYLDENKNVVKFKYENMTV

SEQ ID NO: 90030 - protein, 29 aa, Artificial Sequence
  Cyclic GFR-binding peptide
VPTELSPINMLYFDEYDKVVYGKIPEMVV

SEQ ID NO: 90031 - protein, 27 aa, Artificial Sequence
  Cyclic GFR-binding peptide
VPTELSPISMLYKDENEKVVLKYHYDM

SEQ ID NO: 90032 - protein, 24 aa, Artificial Sequence
  Cyclic GFR-binding peptide
EPISILYLVGRTPKVKFKYEMVVK

SEQ ID NO: 90033 - protein, 36 aa, Artificial Sequence
  Cyclic GFR-binding peptide
  MOD_RES (4)..(5): Xaa is C or S
PPTXXVPTRLSATSILYYDSANNVVLRKHRDMVVES

SEQ ID NO: 90034 - protein, 31 aa, Artificial Sequence
  Cyclic GFR-binding peptide
  MOD_RES (1)..(2): Xaa is C or S
XXVPEKMNAISILYFDENKNVVLKKYRNMTV

SEQ ID NO: 90035 - protein, 29 aa, Artificial Sequence
  Cyclic GFR-binding peptide
  MOD_RES (1)..(2): Xaa is C or S
XXVPQALEPISILYLVGRKPKVKFKYEMI

SEQ ID NO: 90036 - protein, 38 aa, Artificial Sequence; identical to SEQ ID NO: 8060
  Cyclic GFR-binding peptide
  MOD_RES (5)..(6)..(38): Xaa is C or S

SEQ ID NO: 90037 - protein, 32 aa, Artificial Sequence
  Cyclic GFR-binding peptide
  MOD_RES (4)..(5): Xaa is C or S
ASPXXVPQDLSPINILYFVGRTPKVYGKIPMV

SEQ ID NO: 90038 - protein, 27 aa, Artificial Sequence
  Cyclic GFR-binding peptide
  MOD_RES (27)..(27): Xaa is C or S
NAISILYFDENKNVVLKKYRNMTVESX

SEQ ID NO: 90039 - protein, 37 aa, Artificial Sequence
  Cyclic GFR-binding peptide
  MOD_RES (2)..(3)..(35)..(37): Xaa is C or S
TXXVPTRLSATSILYYDSANNVVLRKHRDMVVESXGX

SEQ ID NO: 90040 - protein, 32 aa, Artificial Sequence
  Cyclic GFR-binding peptide
  MOD_RES (5)..(6): Xaa is C or S
SASPXXVPQDLSPINILYFVGRTPKVYGKIPM

SEQ ID NO: 90041 - protein, 33 aa, Artificial Sequence; identical to SEQ ID NO: 36641
  Cyclic GFR-binding peptide
  MOD_RES (1)..(33): Xaa is C or S

SEQ ID NO: 90042 - protein, 31 aa, Artificial Sequence; identical to SEQ ID NO: 8067
  Cyclic GFR-binding peptide
  MOD_RES (1)..(2): Xaa is C or S

SEQ ID NO: 90043 - protein, 33 aa, Artificial Sequence; identical to SEQ ID NO: 36643
  Cyclic GFR-binding peptide
  MOD_RES (2)..(3): Xaa is C or S

SEQ ID NO: 90044 - protein, 25 aa, Artificial Sequence
  Cyclic GFR-binding peptide
PTELSATSMLYYDENEKVVLRKHRD

SEQ ID NO: 90045 - protein, 37 aa, Artificial Sequence
  Cyclic GFR-binding peptide
  MOD_RES (4)..(5)..(36): Xaa is C or S
PSTXXAPVKTSPISMLYKDNGRVLLLKYHYMIVEEXG

SEQ ID NO: 90046 - protein, 25 aa, Artificial Sequence
  Cyclic GFR-binding peptide
PARLSPISILYKDAANNVVLKYHYD

SEQ ID NO: 90047 - protein, 37 aa, Artificial Sequence; identical to SEQ ID NO: 42457
  Cyclic GFR-binding peptide
  MOD_RES (4)..(5)..(37): Xaa is C or S

SEQ ID NO: 90048 - protein, 27 aa, Artificial Sequence
  Cyclic GFR-binding peptide
ARLSPINILYFDAANNVVYGKIPDMVV

SEQ ID NO: 90049 - protein, 40 aa, Artificial Sequence; identical to SEQ ID NO: 8077
  Cyclic GFR-binding peptide
  MOD_RES (6)..(7)..(38)..(40): Xaa is C or S

SEQ ID NO: 90050 - protein, 28 aa, Artificial Sequence
  Cyclic GFR-binding peptide
  MOD_RES (1)..(1): Xaa is C or S
XVPQDLSPISILYKVGRTPKVLKYHYMV

SEQ ID NO: 90051 - protein, 23 aa, Artificial Sequence
  Cyclic GFR-binding peptide
KTSPISMLYKDNGRVLLLKYHYM

SEQ ID NO: 90052 - protein, 30 aa, Artificial Sequence; identical to SEQ ID NO: 8081
  Cyclic GFR-binding peptide
  MOD_RES (2)..(3): Xaa is C or S

SEQ ID NO: 90053 - protein, 32 aa, Artificial Sequence; identical to SEQ ID NO: 8083
  Cyclic GFR-binding peptide
  MOD_RES (1)..(1): Xaa is C or S

SEQ ID NO: 90054 - protein, 35 aa, Artificial Sequence
  Cyclic GFR-binding peptide
  MOD_RES (4)..(5): Xaa is C or S
PEPXXVPEKMNAISILYFDENKNVVLKKYRNMTVE

SEQ ID NO: 90055 - protein, 38 aa, Artificial Sequence; identical to SEQ ID NO: 42469
  Cyclic GFR-binding peptide
  MOD_RES (2)..(3)..(35)..(37): Xaa is C or S

SEQ ID NO: 90056 - protein, 35 aa, Artificial Sequence; identical to SEQ ID NO: 42470
  Cyclic GFR-binding peptide
  MOD_RES (5)..(6): Xaa is C or S

SEQ ID NO: 90057 - protein, 26 aa, Artificial Sequence
  Cyclic GFR-binding peptide
  MOD_RES (26)..(26): Xaa is C or S
SATSILYYVGRTPKVLRKHRMVVKSX

SEQ ID NO: 90058 - protein, 26 aa, Artificial Sequence
  Cyclic GFR-binding peptide
VPTELNAISMLYFDENEKVVLKKYRD

SEQ ID NO: 90059 - protein, 40 aa, Artificial Sequence; identical to SEQ ID NO: 36664
  Cyclic GFR-binding peptide
  MOD_RES (6)..(7)..(39): Xaa is C or S

SEQ ID NO: 90060 - protein, 28 aa, Artificial Sequence
  Cyclic GFR-binding peptide
  MOD_RES (1)..(1): Xaa is C or S
XAPTKLEPISVLYLDSSNNVIKFKYENM

SEQ ID NO: 90061 - protein, 36 aa, Artificial Sequence; identical to SEQ ID NO: 8093
  Cyclic GFR-binding peptide
  MOD_RES (5)..(5): Xaa is C or S

SEQ ID NO: 90062 - protein, 34 aa, Artificial Sequence; identical to SEQ ID NO: 36669
  Cyclic GFR-binding peptide
  MOD_RES (2)..(3): Xaa is C or S

SEQ ID NO: 90063 - protein, 29 aa, Artificial Sequence
  Cyclic GFR-binding peptide
  MOD_RES (28)..(28): Xaa is C or S
LSATSMLYYDEYDKVVLRKHREMVVEGXG

SEQ ID NO: 90064 - protein, 35 aa, Artificial Sequence; identical to SEQ ID NO: 36673
  Cyclic GFR-binding peptide
  MOD_RES (1)..(2)..(34): Xaa is C or S

SEQ ID NO: 90065 - protein, 32 aa, Artificial Sequence
  Cyclic GFR-binding peptide
  MOD_RES (31)..(31): Xaa is C or S
APVKTEPISMLYLDNGRVLLKFKYEMIVEEXG

SEQ ID NO: 90066 - protein, 27 aa, Artificial Sequence
  Cyclic GFR-binding peptide
DLSPISILYKIGKTPKILKYHYMIVKS

SEQ ID NO: 90067 - protein, 33 aa, Artificial Sequence; identical to SEQ ID NO: 8102
  Cyclic GFR-binding peptide
  MOD_RES (4)..(5): Xaa is C or S

SEQ ID NO: 90068 - protein, 40 aa, Artificial Sequence; identical to SEQ ID NO: 8103
  Cyclic GFR-binding peptide
  MOD_RES (5)..(6)..(38)..(40): Xaa is C or S

SEQ ID NO: 90069 - protein, 33 aa, Artificial Sequence
  Cyclic GFR-binding peptide
  MOD_RES (5)..(6): Xaa is C or S
VPSTXXAPVKTSPISMLYKDNGRVLLLKYHYMI

SEQ ID NO: 90070 - protein, 32 aa, Artificial Sequence; identical to SEQ ID NO: 42487
  Cyclic GFR-binding peptide
  MOD_RES (2)..(2): Xaa is C or S

SEQ ID NO: 90071 - protein, 24 aa, Artificial Sequence
  Cyclic GFR-binding peptide
ELNAISMLYFDENEKVVLKKYRDM

SEQ ID NO: 90072 - protein, 30 aa, Artificial Sequence; identical to SEQ ID NO: 36686
  Cyclic GFR-binding peptide
  MOD_RES (2)..(3): Xaa is C or S

SEQ ID NO: 90073 - protein, 34 aa, Artificial Sequence
  Cyclic GFR-binding peptide
  MOD_RES (6)..(7): Xaa is C or S
ASASPXXVSQDLSPINILYFIGKTPKIYGKIPMI

SEQ ID NO: 90074 - protein, 33 aa, Artificial Sequence
  Cyclic GFR-binding peptide
  MOD_RES (2)..(3): Xaa is C or S
PXXVPEKMEPISILYLDENKNVVKFKYENMTVE

SEQ ID NO: 90075 - protein, 31 aa, Artificial Sequence; identical to SEQ ID NO: 8110
  Cyclic GFR-binding peptide
  MOD_RES (4)..(5): Xaa is C or S

SEQ ID NO: 90076 - protein, 26 aa, Artificial Sequence
  Cyclic GFR-binding peptide
VPTELSPINMLYFDENEKVVYGKIPD

SEQ ID NO: 90077 - protein, 30 aa, Artificial Sequence; identical to SEQ ID NO: 42501
  Cyclic GFR-binding peptide
  MOD_RES (3)..(4): Xaa is C or S

SEQ ID NO: 90078 - protein, 39 aa, Artificial Sequence
  Cyclic GFR-binding peptide
  MOD_RES (3)..(4)..(36)..(38): Xaa is C or S
PTXXVPTRLSPISILYKDSANNVVLKYHYDMVVESXGXR

SEQ ID NO: 90079 - protein, 31 aa, Artificial Sequence; identical to SEQ ID NO: 42503
  Cyclic GFR-binding peptide
  MOD_RES (2)..(3): Xaa is C or S

SEQ ID NO: 90080 - protein, 27 aa, Artificial Sequence
  Cyclic GFR-binding peptide
VPEKMSATSILYYDENKNVVLRKHRNM

SEQ ID NO: 90081 - protein, 23 aa, Artificial Sequence
  Cyclic GFR-binding peptide
SPISMLYKDENEKVVLKYHYDMV

SEQ ID NO: 90082 - protein, 36 aa, Artificial Sequence
  Cyclic GFR-binding peptide
  MOD_RES (2)..(3)..(35): Xaa is C or S
TXXVPTRLSPISILYKDSANNVVLKYHYDMVVESXG

SEQ ID NO: 90083 - protein, 32 aa, Artificial Sequence; identical to SEQ ID NO: 8118
  Cyclic GFR-binding peptide
  MOD_RES (1)..(1): Xaa is C or S

SEQ ID NO: 90084 - protein, 30 aa, Artificial Sequence; identical to SEQ ID NO: 36694
  Cyclic GFR-binding peptide
  MOD_RES (29)..(29): Xaa is C or S

SEQ ID NO: 90085 - protein, 30 aa, Artificial Sequence; identical to SEQ ID NO: 42509
  Cyclic GFR-binding peptide
  MOD_RES (27)..(29): Xaa is C or S

SEQ ID NO: 90086 - protein, 29 aa, Artificial Sequence
  Cyclic GFR-binding peptide
  MOD_RES (1)..(2): Xaa is C or S
XXVPTKLSPISILYKDKGVVTYLKYHYGM

SEQ ID NO: 90087 - protein, 31 aa, Artificial Sequence; identical to SEQ ID NO: 8119
  Cyclic GFR-binding peptide
  MOD_RES (28)..(30): Xaa is C or S

SEQ ID NO: 90088 - protein, 34 aa, Artificial Sequence
  Cyclic GFR-binding peptide
  MOD_RES (5)..(6): Xaa is C or S
VPSTXXAPVKTEPISMLYLDNGRVLLKFKYEMIV

SEQ ID NO: 90089 - protein, 40 aa, Artificial Sequence; identical to SEQ ID NO: 42510
  Cyclic GFR-binding peptide
  MOD_RES (6)..(7)..(39): Xaa is C or S

SEQ ID NO: 90090 - protein, 24 aa, Artificial Sequence
  Cyclic GFR-binding peptide
PVKTSPINMLYFDNGRVLLYGKIP

SEQ ID NO: 90091 - protein, 28 aa, Artificial Sequence
  Cyclic GFR-binding peptide
  MOD_RES (28)..(28): Xaa is C or S
LSPISMLYKDEYDKVVLKYHYEMVVEGX

SEQ ID NO: 90092 - protein, 33 aa, Artificial Sequence; identical to SEQ ID NO: 36702
  Cyclic GFR-binding peptide
  MOD_RES (5)..(6): Xaa is C or S

SEQ ID NO: 90093 - protein, 35 aa, Artificial Sequence
  Cyclic GFR-binding peptide
  MOD_RES (3)..(4)..(35): Xaa is C or S
SPXXVPQDLSPINILYFVGRTPKVYGKIPMVVKSX

SEQ ID NO: 90094 - protein, 27 aa, Artificial Sequence
  Cyclic GFR-binding peptide
DLSPISILYKVGRTPKVLKYHYMVVKS

SEQ ID NO: 90095 - protein, 37 aa, Artificial Sequence; identical to SEQ ID NO: 8130
  Cyclic GFR-binding peptide
  MOD_RES (6)..(7): Xaa is C or S

SEQ ID NO: 90096 - protein, 32 aa, Artificial Sequence; identical to SEQ ID NO: 42522
  Cyclic GFR-binding peptide
  MOD_RES (31)..(31): Xaa is C or S

SEQ ID NO: 90097 - protein, 41 aa, Artificial Sequence; identical to SEQ ID NO: 8132
  Cyclic GFR-binding peptide
  MOD_RES (4)..(5)..(38)..(40): Xaa is C or S

SEQ ID NO: 90098 - protein, 29 aa, Artificial Sequence
  Cyclic GFR-binding peptide
VPTELNAISMLYFDENEKVVLKKYRDMVV

SEQ ID NO: 90099 - protein, 31 aa, Artificial Sequence; identical to SEQ ID NO: 8136
  Cyclic GFR-binding peptide

SEQ ID NO: 90100 - protein, 34 aa, Artificial Sequence; identical to SEQ ID NO: 36712
  Cyclic GFR-binding peptide
  MOD_RES (1)..(32)..(34): Xaa is C or S

SEQ ID NO: 90101 - protein, 22 aa, Artificial Sequence
  Cyclic GFR-binding peptide
SPISMLYKDEYDKVVLKYHYEM

SEQ ID NO: 90102 - protein, 36 aa, Artificial Sequence; identical to SEQ ID NO: 36715
  Cyclic GFR-binding peptide
  MOD_RES (5)..(5): Xaa is C or S

SEQ ID NO: 90103 - protein, 34 aa, Artificial Sequence; identical to SEQ ID NO: 36716
  Cyclic GFR-binding peptide
  MOD_RES (2)..(3): Xaa is C or S

SEQ ID NO: 90104 - protein, 39 aa, Artificial Sequence; identical to SEQ ID NO: 42528
  Cyclic GFR-binding peptide
  MOD_RES (4)..(5)..(37)..(39): Xaa is C or S

SEQ ID NO: 90105 - protein, 33 aa, Artificial Sequence; identical to SEQ ID NO: 8140
  Cyclic GFR-binding peptide
  MOD_RES (1)..(2): Xaa is C or S

SEQ ID NO: 90106 - protein, 29 aa, Artificial Sequence
  Cyclic GFR-binding peptide
  MOD_RES (3)..(3): Xaa is C or S
PTXAPTKLSPISVLYKDDSSNVILKYHYN

SEQ ID NO: 90107 - protein, 32 aa, Artificial Sequence; identical to SEQ ID NO: 8143
  Cyclic GFR-binding peptide
  MOD_RES (2)..(3): Xaa is C or S

SEQ ID NO: 90108 - protein, 23 aa, Artificial Sequence
  Cyclic GFR-binding peptide
ELSPISMLYKDENEKVVLKYHYD

SEQ ID NO: 90109 - protein, 32 aa, Artificial Sequence; identical to SEQ ID NO: 8145
  Cyclic GFR-binding peptide
  MOD_RES (4)..(4): Xaa is C or S

SEQ ID NO: 90110 - protein, 27 aa, Artificial Sequence
  Cyclic GFR-binding peptide
TPTKMNAISMLYFNDKQQIILKKYRGM

SEQ ID NO: 90111 - protein, 29 aa, Artificial Sequence
  Cyclic GFR-binding peptide
APVKTSATSMLYYDNGRVLLLRKHRMIVE

SEQ ID NO: 90112 - protein, 33 aa, Artificial Sequence
  Cyclic GFR-binding peptide
  MOD_RES (6)..(7): Xaa is C or S
GIPEPXXVPEKMSATSILYYDENKNVVLRKHRN

SEQ ID NO: 90113 - protein, 34 aa, Artificial Sequence; identical to SEQ ID NO: 36729
  Cyclic GFR-binding peptide
  MOD_RES (5)..(5): Xaa is C or S

SEQ ID NO: 90114 - protein, 31 aa, Artificial Sequence; identical to SEQ ID NO: 8150
  Cyclic GFR-binding peptide

SEQ ID NO: 90115 - protein, 34 aa, Artificial Sequence; identical to SEQ ID NO: 36733
  Cyclic GFR-binding peptide
  MOD_RES (2)..(3): Xaa is C or S

SEQ ID NO: 90116 - protein, 30 aa, Artificial Sequence; identical to SEQ ID NO: 8152
  Cyclic GFR-binding peptide
  MOD_RES (30)..(30): Xaa is C or S

SEQ ID NO: 90117 - protein, 30 aa, Artificial Sequence; identical to SEQ ID NO: 8158
  Cyclic GFR-binding peptide
  MOD_RES (4)..(5): Xaa is C or S

SEQ ID NO: 90118 - protein, 29 aa, Artificial Sequence
  Cyclic GFR-binding peptide
  MOD_RES (27)..(29): Xaa is C or S
SATSILYYDSANNVVLRKHRDMVVESXGX

SEQ ID NO: 90119 - protein, 31 aa, Artificial Sequence; identical to SEQ ID NO: 8160
  Cyclic GFR-binding peptide
  MOD_RES (4)..(4): Xaa is C or S

SEQ ID NO: 90120 - protein, 30 aa, Artificial Sequence; identical to SEQ ID NO: 36742
  Cyclic GFR-binding peptide
  MOD_RES (1)..(1): Xaa is C or S

SEQ ID NO: 90121 - protein, 35 aa, Artificial Sequence; identical to SEQ ID NO: 8162
  Cyclic GFR-binding peptide
  MOD_RES (1)..(32)..(34): Xaa is C or S

SEQ ID NO: 90122 - protein, 20 aa, Artificial Sequence
  Cyclic GFR-binding peptide
SPISILYKIGKTPKILKYHY

SEQ ID NO: 90123 - protein, 24 aa, Artificial Sequence
  Cyclic GFR-binding peptide
TEPISMLYLDNGRVLLKFKYEMIV

SEQ ID NO: 90124 - protein, 26 aa, Artificial Sequence
  Cyclic GFR-binding peptide
KLNAISVLYFDSSNNVILKKYRNMVV

SEQ ID NO: 90125 - protein, 35 aa, Artificial Sequence; identical to SEQ ID NO: 8165
  Cyclic GFR-binding peptide
  MOD_RES (1)..(33)..(35): Xaa is C or S

SEQ ID NO: 90126 - protein, 35 aa, Artificial Sequence
  Cyclic GFR-binding peptide
  MOD_RES (4)..(5): Xaa is C or S
ASPXXVPQDLSPINILYFVGRTPKVYGKIPMVVKS

SEQ ID NO: 90127 - protein, 35 aa, Artificial Sequence; identical to SEQ ID NO: 8167
  Cyclic GFR-binding peptide
  MOD_RES (1)..(32)..(34): Xaa is C or S

SEQ ID NO: 90128 - protein, 40 aa, Artificial Sequence
  Cyclic GFR-binding peptide
  MOD_RES (6)..(7)..(38)..(40): Xaa is C or S
ASAAPXXVPQALSPINILYFVGRKPKVYGKIPMIVRSXKX

SEQ ID NO: 90129 - protein, 26 aa, Artificial Sequence
  Cyclic GFR-binding peptide
DLNAISILYFVGRTPKVLKKYRMVVK

SEQ ID NO: 90130 - protein, 39 aa, Artificial Sequence; identical to SEQ ID NO: 8171
  Cyclic GFR-binding peptide
  MOD_RES (5)..(6)..(38): Xaa is C or S

SEQ ID NO: 90131 - protein, 30 aa, Artificial Sequence; identical to SEQ ID NO: 36755
  Cyclic GFR-binding peptide
  MOD_RES (27)..(29): Xaa is C or S

SEQ ID NO: 90132 - protein, 32 aa, Artificial Sequence
  Cyclic GFR-binding peptide
  MOD_RES (3)..(4): Xaa is C or S
ASXXVPARLSATSILYYDAANNVVLRKHRDMV

SEQ ID NO: 90133 - protein, 22 aa, Artificial Sequence
  Cyclic GFR-binding peptide
LNAISVLYFDSSNNVILKKYRN

SEQ ID NO: 90134 - protein, 27 aa, Artificial Sequence
  Cyclic GFR-binding peptide
  MOD_RES (27)..(27): Xaa is C or S
SATSILYYDAANNVVLRKHRDMVVEAX

SEQ ID NO: 90135 - protein, 36 aa, Artificial Sequence
  Cyclic GFR-binding peptide
  MOD_RES (6)..(7): Xaa is C or S
GIPEPXXVPEKMSATSILYYDENKNVVLRKHRNMTV

SEQ ID NO: 90136 - protein, 24 aa, Artificial Sequence
  Cyclic GFR-binding peptide
RLSPINILYFDSANNVVYGKIPDM

SEQ ID NO: 90137 - protein, 29 aa, Artificial Sequence
  Cyclic GFR-binding peptide
TKLNAISVLYFDSSNNVILKKYRNMVVKA

SEQ ID NO: 90138 - protein, 28 aa, Artificial Sequence
  Cyclic GFR-binding peptide
  MOD_RES (1)..(2): Xaa is C or S
XXAPTKLSPISVLYKDSSNNVILKYHYN

SEQ ID NO: 90139 - protein, 32 aa, Artificial Sequence; identical to SEQ ID NO: 42561
  Cyclic GFR-binding peptide
  MOD_RES (32)..(32): Xaa is C or S

SEQ ID NO: 90140 - protein, 32 aa, Artificial Sequence; identical to SEQ ID NO: 42564
  Cyclic GFR-binding peptide
  MOD_RES (30)..(32): Xaa is C or S

SEQ ID NO: 90141 - protein, 40 aa, Artificial Sequence; identical to SEQ ID NO: 8181
  Cyclic GFR-binding peptide
  MOD_RES (6)..(38)..(40): Xaa is C or S

SEQ ID NO: 90142 - protein, 32 aa, Artificial Sequence; identical to SEQ ID NO: 8182
  Cyclic GFR-binding peptide
  MOD_RES (5)..(6): Xaa is C or S

SEQ ID NO: 90143 - protein, 30 aa, Artificial Sequence; identical to SEQ ID NO: 36767
  Cyclic GFR-binding peptide
  MOD_RES (29)..(29): Xaa is C or S

SEQ ID NO: 90144 - protein, 39 aa, Artificial Sequence; identical to SEQ ID NO: 42569
  Cyclic GFR-binding peptide
  MOD_RES (4)..(5)..(36)..(38): Xaa is C or S

SEQ ID NO: 90145 - protein, 34 aa, Artificial Sequence; identical to SEQ ID NO: 36768
  Cyclic GFR-binding peptide
  MOD_RES (1)..(2)..(34): Xaa is C or S

SEQ ID NO: 90146 - protein, 33 aa, Artificial Sequence
  Cyclic GFR-binding peptide
  MOD_RES (6)..(7): Xaa is C or S
STPPTXXVPTRLSATSILYYDSANNVVLRKHRD

SEQ ID NO: 90147 - protein, 24 aa, Artificial Sequence
  Cyclic GFR-binding peptide
KMNAISMLYFNDKQQIILKKYRGM

SEQ ID NO: 90148 - protein, 40 aa, Artificial Sequence
  Cyclic GFR-binding peptide
  MOD_RES (6)..(7)..(38)..(40): Xaa is C or S
RVPSTXXAPVKTEPISMLYLDNGRVLLKFKYEMIVEEXGX

SEQ ID NO: 90149 - protein, 25 aa, Artificial Sequence
  Cyclic GFR-binding peptide
LSATSVLYYDDMGVPTLRKHREGMS

SEQ ID NO: 90150 - protein, 40 aa, Artificial Sequence; identical to SEQ ID NO: 8187
  Cyclic GFR-binding peptide
  MOD_RES (4)..(5)..(37)..(39): Xaa is C or S

SEQ ID NO: 90151 - protein, 24 aa, Artificial Sequence
  Cyclic GFR-binding peptide
LNAISVLYFDSSNNVILKKYRNMV

SEQ ID NO: 90152 - protein, 29 aa, Artificial Sequence
  Cyclic GFR-binding peptide
ARLNAISILYFDAANNVVLKKYRDMVVEA

SEQ ID NO: 90153 - protein, 34 aa, Artificial Sequence; identical to SEQ ID NO: 8190
  Cyclic GFR-binding peptide
  MOD_RES (6)..(7): Xaa is C or S

SEQ ID NO: 90154 - protein, 23 aa, Artificial Sequence
  Cyclic GFR-binding peptide
EKMSPINILYFDENKNVVYGKIP

SEQ ID NO: 90155 - protein, 37 aa, Artificial Sequence; identical to SEQ ID NO: 8192
  Cyclic GFR-binding peptide
  MOD_RES (7)..(7): Xaa is C or S

SEQ ID NO: 90156 - protein, 33 aa, Artificial Sequence; identical to SEQ ID NO: 8193
  Cyclic GFR-binding peptide
  MOD_RES (33)..(33): Xaa is C or S

SEQ ID NO: 90157 - protein, 33 aa, Artificial Sequence; identical to SEQ ID NO: 8195
  Cyclic GFR-binding peptide
  MOD_RES (7)..(7): Xaa is C or S

SEQ ID NO: 90158 - protein, 34 aa, Artificial Sequence; identical to SEQ ID NO: 8198
  Cyclic GFR-binding peptide
  MOD_RES (4)..(5): Xaa is C or S

SEQ ID NO: 90159 - protein, 31 aa, Artificial Sequence
  Cyclic GFR-binding peptide
  MOD_RES (30)..(30): Xaa is C or S
SQDLSPINILYFIGKTPKIYGKIPMIVKSXK

SEQ ID NO: 90160 - protein, 32 aa, Artificial Sequence; identical to SEQ ID NO: 36784
  Cyclic GFR-binding peptide
  MOD_RES (1)..(2): Xaa is C or S

SEQ ID NO: 90161 - protein, 28 aa, Artificial Sequence
  Cyclic GFR-binding peptide
  MOD_RES (1)..(2): Xaa is C or S
XXVPTELEPISMLYLDENEKVVKFKYED

SEQ ID NO: 90162 - protein, 31 aa, Artificial Sequence
  Cyclic GFR-binding peptide
  MOD_RES (4)..(5): Xaa is C or S
ASPXXVPQDLSPINILYFVGRTPKVYGKIPM

SEQ ID NO: 90163 - protein, 25 aa, Artificial Sequence
  Cyclic GFR-binding peptide
TELSPINMLYFDENEKVVYGKIPDM

SEQ ID NO: 90164 - protein, 22 aa, Artificial Sequence
  Cyclic GFR-binding peptide
SATSILYYVGRKPKVLRKHRMI

SEQ ID NO: 90165 - protein, 32 aa, Artificial Sequence; identical to SEQ ID NO: 42586
  Cyclic GFR-binding peptide
  MOD_RES (32)..(32): Xaa is C or S

SEQ ID NO: 90166 - protein, 34 aa, Artificial Sequence; identical to SEQ ID NO: 8208
  Cyclic GFR-binding peptide
  MOD_RES (6)..(7): Xaa is C or S

SEQ ID NO: 90167 - protein, 22 aa, Artificial Sequence
  Cyclic GFR-binding peptide
KLSPINVLYFDDSSNVIYGKIP

SEQ ID NO: 90168 - protein, 30 aa, Artificial Sequence; identical to SEQ ID NO: 8213
  Cyclic GFR-binding peptide
  MOD_RES (4)..(5): Xaa is C or S

SEQ ID NO: 90169 - protein, 33 aa, Artificial Sequence; identical to SEQ ID NO: 36801
  Cyclic GFR-binding peptide
  MOD_RES (33)..(33): Xaa is C or S

SEQ ID NO: 90170 - protein, 34 aa, Artificial Sequence
  Cyclic GFR-binding peptide
  MOD_RES (3)..(4): Xaa is C or S
GPXXTPTKMSPISMLYKNDKQQIILKYHYGMVVD

SEQ ID NO: 90171 - protein, 21 aa, Artificial Sequence
  Cyclic GFR-binding peptide
SATSMLYYDEYDKVVLRKHRE

SEQ ID NO: 90172 - protein, 34 aa, Artificial Sequence
  Cyclic GFR-binding peptide
  MOD_RES (1)..(33): Xaa is C or S
XVPTKLSATSILYYDKGVVTYLRKHRGMAVSEXG

SEQ ID NO: 90173 - protein, 36 aa, Artificial Sequence
  Cyclic GFR-binding peptide
  MOD_RES (6)..(7): Xaa is C or S
HVPKPXXAPTKLEPISVLYLDDSSNVIKFKYENMVV

SEQ ID NO: 90174 - protein, 26 aa, Artificial Sequence
  Cyclic GFR-binding peptide
TSPINMLYFDNGRVLLYGKIPMIVEE

SEQ ID NO: 90175 - protein, 34 aa, Artificial Sequence; identical to SEQ ID NO: 8220
  Cyclic GFR-binding peptide
  MOD_RES (32)..(34): Xaa is C or S

SEQ ID NO: 90176 - protein, 22 aa, Artificial Sequence
  Cyclic GFR-binding peptide
ALNAISILYFVGRKPKVLKKYR

SEQ ID NO: 90177 - protein, 36 aa, Artificial Sequence; identical to SEQ ID NO: 42605
  Cyclic GFR-binding peptide
  MOD_RES (2)..(3)..(35): Xaa is C or S

SEQ ID NO: 90178 - protein, 28 aa, Artificial Sequence
  Cyclic GFR-binding peptide
  MOD_RES (1)..(2): Xaa is C or S
XXVPEKMSPISILYKDENKNVVLKYHYN

SEQ ID NO: 90179 - protein, 35 aa, Artificial Sequence; identical to SEQ ID NO: 36813
  Cyclic GFR-binding peptide
  MOD_RES (2)..(3)..(35): Xaa is C or S

SEQ ID NO: 90180 - protein, 34 aa, Artificial Sequence; identical to SEQ ID NO: 77717
  Cyclic GFR-binding peptide
  MOD_RES (32)..(34): Xaa is C or S

SEQ ID NO: 90181 - protein, 30 aa, Artificial Sequence
  Cyclic GFR-binding peptide
  MOD_RES (1)..(2): Xaa is C or S
XXVPEKMSPISILYKDENKNVVLKYHYNMT

SEQ ID NO: 90182 - protein, 28 aa, Artificial Sequence
  Cyclic GFR-binding peptide
  MOD_RES (1)..(1): Xaa is C or S
XVSQDLEPISILYLIGKTPKIKFKYEMI

SEQ ID NO: 90183 - protein, 30 aa, Artificial Sequence; identical to SEQ ID NO: 36817
  Cyclic GFR-binding peptide
  MOD_RES (29)..(29): Xaa is C or S

SEQ ID NO: 90184 - protein, 37 aa, Artificial Sequence; identical to SEQ ID NO: 8225
  Cyclic GFR-binding peptide
  MOD_RES (6)..(7): Xaa is C or S

SEQ ID NO: 90185 - protein, 30 aa, Artificial Sequence
  Cyclic GFR-binding peptide
  MOD_RES (29)..(29): Xaa is C or S
KMSPISMLYKNDKQQIILKYHYGMVVDRXG

SEQ ID NO: 90186 - protein, 28 aa, Artificial Sequence
  Cyclic GFR-binding peptide
TKLSPINVLYFDSSNNVIYGKIPNMVVK

SEQ ID NO: 90187 - protein, 29 aa, Artificial Sequence
  Cyclic GFR-binding peptide
  MOD_RES (27)..(29): Xaa is C or S
SPINMLYFDENEKVVYGKIPDMVVEGXGX

SEQ ID NO: 90188 - protein, 30 aa, Artificial Sequence; identical to SEQ ID NO: 36821
  Cyclic GFR-binding peptide
  MOD_RES (3)..(4): Xaa is C or S

SEQ ID NO: 90189 - protein, 27 aa, Artificial Sequence
  Cyclic GFR-binding peptide
KMSPISILYKDENKNVVLKYHYNMTVE

SEQ ID NO: 90190 - protein, 23 aa, Artificial Sequence
  Cyclic GFR-binding peptide
KLSPISILYKDKGVVTYLKYHYG

SEQ ID NO: 90191 - protein, 33 aa, Artificial Sequence; identical to SEQ ID NO: 36828
  Cyclic GFR-binding peptide
  MOD_RES (30)..(32): Xaa is C or S

SEQ ID NO: 90192 - protein, 33 aa, Artificial Sequence; identical to SEQ ID NO: 8240
  Cyclic GFR-binding peptide
  MOD_RES (6)..(7): Xaa is C or S

SEQ ID NO: 90193 - protein, 38 aa, Artificial Sequence; identical to SEQ ID NO: 8243
  Cyclic GFR-binding peptide
  MOD_RES (4)..(5)..(37): Xaa is C or S

SEQ ID NO: 90194 - protein, 31 aa, Artificial Sequence; identical to SEQ ID NO: 36834
  Cyclic GFR-binding peptide
  MOD_RES (3)..(4): Xaa is C or S

SEQ ID NO: 90195 - protein, 40 aa, Artificial Sequence; identical to SEQ ID NO: 8245
  Cyclic GFR-binding peptide
  MOD_RES (5)..(6)..(38)..(40): Xaa is C or S

SEQ ID NO: 90196 - protein, 36 aa, Artificial Sequence; identical to SEQ ID NO: 36836
  Cyclic GFR-binding peptide
  MOD_RES (6)..(7): Xaa is C or S

SEQ ID NO: 90197 - protein, 33 aa, Artificial Sequence; identical to SEQ ID NO: 36837
  Cyclic GFR-binding peptide
  MOD_RES (2)..(3): Xaa is C or S

SEQ ID NO: 90198 - protein, 34 aa, Artificial Sequence; identical to SEQ ID NO: 36841
  Cyclic GFR-binding peptide
  MOD_RES (5)..(6): Xaa is C or S

SEQ ID NO: 90199 - protein, 32 aa, Artificial Sequence
  Cyclic GFR-binding peptide
  MOD_RES (6)..(7): Xaa is C or S
RVPSTXXAPVKTSATSMLYYDNGRVLLLRKHR

SEQ ID NO: 90200 - protein, 41 aa, Artificial Sequence; identical to SEQ ID NO: 8256
  Cyclic GFR-binding peptide
  MOD_RES (5)..(6)..(38)..(40): Xaa is C or S

SEQ ID NO: 90201 - protein, 32 aa, Artificial Sequence; identical to SEQ ID NO: 8257
  Cyclic GFR-binding peptide
  MOD_RES (5)..(6): Xaa is C or S

SEQ ID NO: 90202 - protein, 33 aa, Artificial Sequence; identical to SEQ ID NO: 8259
  Cyclic GFR-binding peptide
  MOD_RES (3)..(4): Xaa is C or S

SEQ ID NO: 90203 - protein, 30 aa, Artificial Sequence; identical to SEQ ID NO: 42637
  Cyclic GFR-binding peptide
  MOD_RES (28)..(30): Xaa is C or S

SEQ ID NO: 90204 - protein, 30 aa, Artificial Sequence; identical to SEQ ID NO: 8261
  Cyclic GFR-binding peptide
  MOD_RES (30)..(30): Xaa is C or S

SEQ ID NO: 90205 - protein, 35 aa, Artificial Sequence; identical to SEQ ID NO: 8262
  Cyclic GFR-binding peptide
  MOD_RES (1)..(33)..(35): Xaa is C or S

SEQ ID NO: 90206 - protein, 41 aa, Artificial Sequence; identical to SEQ ID NO: 42644
  Cyclic GFR-binding peptide
  MOD_RES (6)..(38)..(40): Xaa is C or S

SEQ ID NO: 90207 - protein, 35 aa, Artificial Sequence; identical to SEQ ID NO: 8263
  Cyclic GFR-binding peptide
  MOD_RES (6)..(7): Xaa is C or S

SEQ ID NO: 90208 - protein, 23 aa, Artificial Sequence
  Cyclic GFR-binding peptide
EPISILYLDAANNVVKFKYEDMV

SEQ ID NO: 90209 - protein, 27 aa, Artificial Sequence
  Cyclic GFR-binding peptide
VPQDLEPISILYLVGRTPKVKFKYEMV

SEQ ID NO: 90210 - protein, 34 aa, Artificial Sequence; identical to SEQ ID NO: 8264
  Cyclic GFR-binding peptide
  MOD_RES (6)..(7): Xaa is C or S

SEQ ID NO: 90211 - protein, 37 aa, Artificial Sequence; identical to SEQ ID NO: 8265
  Cyclic GFR-binding peptide
  MOD_RES (2)..(3)..(35)..(37): Xaa is C or S

SEQ ID NO: 90212 - protein, 30 aa, Artificial Sequence; identical to SEQ ID NO: 8266
  Cyclic GFR-binding peptide
  MOD_RES (3)..(4): Xaa is C or S

SEQ ID NO: 90213 - protein, 33 aa, Artificial Sequence
  Cyclic GFR-binding peptide
  MOD_RES (1)..(2): Xaa is C or S
XXTPTKMSPISMLYKNDKQQIILKYHYGMVVDR

SEQ ID NO: 90214 - protein, 37 aa, Artificial Sequence; identical to SEQ ID NO: 36862
  Cyclic GFR-binding peptide
  MOD_RES (2)..(3)..(35)..(37): Xaa is C or S

SEQ ID NO: 90215 - protein, 28 aa, Artificial Sequence
  Cyclic GFR-binding peptide
  MOD_RES (27)..(27): Xaa is C or S
TEPISMLYLDNGRVLLKFKYEMIVEEXG

SEQ ID NO: 90216 - protein, 27 aa, Artificial Sequence
  Cyclic GFR-binding peptide
VKTSPINMLYFDNGRVLLYGKIPMIVE

SEQ ID NO: 90217 - protein, 32 aa, Artificial Sequence; identical to SEQ ID NO: 42654
  Cyclic GFR-binding peptide
  MOD_RES (32)..(32): Xaa is C or S

SEQ ID NO: 90218 - protein, 34 aa, Artificial Sequence
  Cyclic GFR-binding peptide
  MOD_RES (1)..(33): Xaa is C or S
XVPTRLSPISILYKDSANNVVLKYHYDMVVESXG

SEQ ID NO: 90219 - protein, 26 aa, Artificial Sequence
  Cyclic GFR-binding peptide
TKLSATSILYYDKGVVTYLRKHRGMA

SEQ ID NO: 90220 - protein, 40 aa, Artificial Sequence; identical to SEQ ID NO: 8271
  Cyclic GFR-binding peptide
  MOD_RES (5)..(6)..(37)..(39): Xaa is C or S

SEQ ID NO: 90221 - protein, 37 aa, Artificial Sequence
  Cyclic GFR-binding peptide
  MOD_RES (1)..(2)..(34)..(36): Xaa is C or S
XXVPTRLSPISILYKDSANNVVLKYHYDMVVESXGXR

SEQ ID NO: 90222 - protein, 26 aa, Artificial Sequence
  Cyclic GFR-binding peptide
  MOD_RES (1)..(1): Xaa is C or S
XVPTELEPISMLYLDEYDKVVKFKYE

SEQ ID NO: 90223 - protein, 36 aa, Artificial Sequence
  Cyclic GFR-binding peptide
  MOD_RES (3)..(4)..(36): Xaa is C or S
KAXXVPTKLSATSILYYDKGVVTYLRKHRGMAVSEX

SEQ ID NO: 90224 - protein, 34 aa, Artificial Sequence
  Cyclic GFR-binding peptide
  MOD_RES (5)..(6): Xaa is C or S
IPEPXXVPEKMEPISILYLDENKNVVKFKYENMT

SEQ ID NO: 90225 - protein, 25 aa, Artificial Sequence
  Cyclic GFR-binding peptide
SQDLNAISILYFIGKTPKILKKYRM

SEQ ID NO: 90226 - protein, 35 aa, Artificial Sequence; identical to SEQ ID NO: 8275
  Cyclic GFR-binding peptide
  MOD_RES (32)..(34): Xaa is C or S

SEQ ID NO: 90227 - protein, 38 aa, Artificial Sequence; identical to SEQ ID NO: 36868
  Cyclic GFR-binding peptide
  MOD_RES (4)..(5)..(37): Xaa is C or S

SEQ ID NO: 90228 - protein, 31 aa, Artificial Sequence; identical to SEQ ID NO: 8276
  Cyclic GFR-binding peptide
  MOD_RES (28)..(30): Xaa is C or S

SEQ ID NO: 90229 - protein, 34 aa, Artificial Sequence; identical to SEQ ID NO: 42664
  Cyclic GFR-binding peptide
  MOD_RES (2)..(3): Xaa is C or S

SEQ ID NO: 90230 - protein, 29 aa, Artificial Sequence
  Cyclic GFR-binding peptide
  MOD_RES (29)..(29): Xaa is C or S
QLSATSVLYYDDSSNVILRKHRNMVVRAX

SEQ ID NO: 90231 - protein, 30 aa, Artificial Sequence; identical to SEQ ID NO: 36869
  Cyclic GFR-binding peptide
  MOD_RES (4)..(5): Xaa is C or S

SEQ ID NO: 90232 - protein, 31 aa, Artificial Sequence
  Cyclic GFR-binding peptide
  MOD_RES (29)..(31): Xaa is C or S
VKTEPISMLYLDNGRVLLKFKYEMIVEEXGX

SEQ ID NO: 90233 - protein, 38 aa, Artificial Sequence; identical to SEQ ID NO: 42667
  Cyclic GFR-binding peptide
  MOD_RES (6)..(7): Xaa is C or S

SEQ ID NO: 90234 - protein, 21 aa, Artificial Sequence
  Cyclic GFR-binding peptide
LSPINILYFVGRTPKVYGKIP

SEQ ID NO: 90235 - protein, 35 aa, Artificial Sequence
  Cyclic GFR-binding peptide
  MOD_RES (1)..(2)..(34): Xaa is C or S
XXVPEKMSPISILYKDENKNVVLKYHYNMTVESXA

SEQ ID NO: 90236 - protein, 31 aa, Artificial Sequence
  Cyclic GFR-binding peptide
  MOD_RES (2)..(3): Xaa is C or S
PXXVPEKMEPISILYLDENKNVVKFKYENMT

SEQ ID NO: 90237 - protein, 34 aa, Artificial Sequence
  Cyclic GFR-binding peptide
  MOD_RES (5)..(6): Xaa is C or S
VPSTXXAPVKTSATSMLYYDNGRVLLLRKHRMIV

SEQ ID NO: 90238 - protein, 23 aa, Artificial Sequence
  Cyclic GFR-binding peptide
TKLNAISILYFDKGVVTYLKKYR

SEQ ID NO: 90239 - protein, 38 aa, Artificial Sequence; identical to SEQ ID NO: 8284
  Cyclic GFR-binding peptide
  MOD_RES (5)..(6)..(37): Xaa is C or S

SEQ ID NO: 90240 - protein, 36 aa, Artificial Sequence; identical to SEQ ID NO: 36876
  Cyclic GFR-binding peptide
  MOD_RES (4)..(5)..(36): Xaa is C or S

SEQ ID NO: 90241 - protein, 25 aa, Artificial Sequence
  Cyclic GFR-binding peptide
PVKTEPISMLYLDNGRVLLKFKYEM

SEQ ID NO: 90242 - protein, 40 aa, Artificial Sequence; identical to SEQ ID NO: 8289
  Cyclic GFR-binding peptide
  MOD_RES (5)..(6)..(38)..(40): Xaa is C or S

SEQ ID NO: 90243 - protein, 32 aa, Artificial Sequence
  Cyclic GFR-binding peptide
  MOD_RES (31)..(31): Xaa is C or S
PEKMSPINILYFDENKNVVYGKIPNMTVESXA

SEQ ID NO: 90244 - protein, 41 aa, Artificial Sequence
  Cyclic GFR-binding peptide
  MOD_RES (6)..(7)..(38)..(40): Xaa is C or S
ASAAPXXVPQALSPINILYFVGRKPKVYGKIPMIVRSXKXS

SEQ ID NO: 90245 - protein, 23 aa, Artificial Sequence
  Cyclic GFR-binding peptide
ELEPISMLYLDENEKVVKFKYED

SEQ ID NO: 90246 - protein, 31 aa, Artificial Sequence; identical to SEQ ID NO: 8290
  Cyclic GFR-binding peptide
  MOD_RES (5)..(6): Xaa is C or S

SEQ ID NO: 90247 - protein, 24 aa, Artificial Sequence
  Cyclic GFR-binding peptide
QDLNAISILYFVGRTPKVLKKYRM

SEQ ID NO: 90248 - protein, 30 aa, Artificial Sequence; identical to SEQ ID NO: 42676
  Cyclic GFR-binding peptide
  MOD_RES (30)..(30): Xaa is C or S

SEQ ID NO: 90249 - protein, 22 aa, Artificial Sequence
  Cyclic GFR-binding peptide
KMNAISILYFDENKNVVLKKYR

SEQ ID NO: 90250 - protein, 33 aa, Artificial Sequence; identical to SEQ ID NO: 8294
  Cyclic GFR-binding peptide
  MOD_RES (6)..(7): Xaa is C or S

SEQ ID NO: 90251 - protein, 26 aa, Artificial Sequence
  Cyclic GFR-binding peptide
APTKLSPINVLYFDDSSNVIYGKIPN

SEQ ID NO: 90252 - protein, 30 aa, Artificial Sequence; identical to SEQ ID NO: 8296
  Cyclic GFR-binding peptide
  MOD_RES (28)..(30): Xaa is C or S

SEQ ID NO: 90253 - protein, 41 aa, Artificial Sequence; identical to SEQ ID NO: 36885
  Cyclic GFR-binding peptide
  MOD_RES (6)..(7)..(39)..(41): Xaa is C or S

SEQ ID NO: 90254 - protein, 34 aa, Artificial Sequence; identical to SEQ ID NO: 42684
  Cyclic GFR-binding peptide
  MOD_RES (32)..(34): Xaa is C or S

SEQ ID NO: 90255 - protein, 37 aa, Artificial Sequence; identical to SEQ ID NO: 36886
  Cyclic GFR-binding peptide
  MOD_RES (6)..(7): Xaa is C or S

SEQ ID NO: 90256 - protein, 29 aa, Artificial Sequence
  Cyclic GFR-binding peptide
  MOD_RES (3)..(4): Xaa is C or S
SPXXVPQDLEPISILYLVGRTPKVKFKYE

SEQ ID NO: 90257 - protein, 26 aa, Artificial Sequence
  Cyclic GFR-binding peptide
PQALSPINILYFVGRKPKVYGKIPMI

SEQ ID NO: 90258 - protein, 30 aa, Artificial Sequence; identical to SEQ ID NO: 77758
  Cyclic GFR-binding peptide
  MOD_RES (3)..(4): Xaa is C or S

SEQ ID NO: 90259 - protein, 39 aa, Artificial Sequence; identical to SEQ ID NO: 36891
  Cyclic GFR-binding peptide
  MOD_RES (5)..(6)..(38): Xaa is C or S

SEQ ID NO: 90260 - protein, 35 aa, Artificial Sequence; identical to SEQ ID NO: 36894
  Cyclic GFR-binding peptide
  MOD_RES (1)..(2)..(34): Xaa is C or S

SEQ ID NO: 90261 - protein, 21 aa, Artificial Sequence
  Cyclic GFR-binding peptide
EPISMLYLNDKQQIIKFKYEG

SEQ ID NO: 90262 - protein, 38 aa, Artificial Sequence; identical to SEQ ID NO: 8302
  Cyclic GFR-binding peptide
  MOD_RES (6)..(7)..(38): Xaa is C or S

SEQ ID NO: 90263 - protein, 41 aa, Artificial Sequence; identical to SEQ ID NO: 42700
  Cyclic GFR-binding peptide
  MOD_RES (6)..(7)..(39)..(41): Xaa is C or S

SEQ ID NO: 90264 - protein, 32 aa, Artificial Sequence; identical to SEQ ID NO: 42701
  Cyclic GFR-binding peptide
  MOD_RES (31)..(31): Xaa is C or S

SEQ ID NO: 90265 - protein, 35 aa, Artificial Sequence; identical to SEQ ID NO: 8304
  Cyclic GFR-binding peptide
  MOD_RES (4)..(5): Xaa is C or S

SEQ ID NO: 90266 - protein, 24 aa, Artificial Sequence
  Cyclic GFR-binding peptide
LSPISILYKVGRTPKVLKYHYMVV

SEQ ID NO: 90267 - protein, 36 aa, Artificial Sequence; identical to SEQ ID NO: 77763
  Cyclic GFR-binding peptide
  MOD_RES (3)..(4)..(35): Xaa is C or S

SEQ ID NO: 90268 - protein, 29 aa, Artificial Sequence
  Cyclic GFR-binding peptide
TELSATSMLYYDENEKVVLRKHRDMVVEG

SEQ ID NO: 90269 - protein, 25 aa, Artificial Sequence
  Cyclic GFR-binding peptide
KTSATSMLYYDNGRVLLLRKHRMIV

SEQ ID NO: 90270 - protein, 36 aa, Artificial Sequence; identical to SEQ ID NO: 8310
  Cyclic GFR-binding peptide
  MOD_RES (6)..(7): Xaa is C or S

SEQ ID NO: 90271 - protein, 33 aa, Artificial Sequence; identical to SEQ ID NO: 36912
  Cyclic GFR-binding peptide
  MOD_RES (6)..(7): Xaa is C or S

SEQ ID NO: 90272 - protein, 32 aa, Artificial Sequence; identical to SEQ ID NO: 36913
  Cyclic GFR-binding peptide
  MOD_RES (1)..(1): Xaa is C or S

SEQ ID NO: 90273 - protein, 27 aa, Artificial Sequence
  Cyclic GFR-binding peptide
QALNAISILYFVGRKPKVLKKYRMIVR

SEQ ID NO: 90274 - protein, 28 aa, Artificial Sequence
  Cyclic GFR-binding peptide
PTKLNAISVLYFDSSNNVILKKYRNMVV

SEQ ID NO: 90275 - protein, 37 aa, Artificial Sequence; identical to SEQ ID NO: 42713
  Cyclic GFR-binding peptide
  MOD_RES (1)..(2)..(34)..(36): Xaa is C or S

SEQ ID NO: 90276 - protein, 33 aa, Artificial Sequence
  Cyclic GFR-binding peptide
  MOD_RES (2)..(3): Xaa is C or S
PXXVPEKMSPISILYKDENKNVVLKYHYNMTVE

SEQ ID NO: 90277 - protein, 32 aa, Artificial Sequence; identical to SEQ ID NO: 42723
  Cyclic GFR-binding peptide
  MOD_RES (6)..(7): Xaa is C or S

SEQ ID NO: 90278 - protein, 35 aa, Artificial Sequence
  Cyclic GFR-binding peptide
  MOD_RES (6)..(7): Xaa is C or S
GIPEPXXVPEKMSATSILYYDENKNVVLRKHRNMT

SEQ ID NO: 90279 - protein, 25 aa, Artificial Sequence
  Cyclic GFR-binding peptide
PQDLNAISILYFVGRTPKVLKKYRM

SEQ ID NO: 90280 - protein, 35 aa, Artificial Sequence; identical to SEQ ID NO: 42724
  Cyclic GFR-binding peptide
  MOD_RES (6)..(7): Xaa is C or S

SEQ ID NO: 90281 - protein, 33 aa, Artificial Sequence; identical to SEQ ID NO: 42725
  Cyclic GFR-binding peptide
  MOD_RES (2)..(3): Xaa is C or S

SEQ ID NO: 90282 - protein, 29 aa, Artificial Sequence
  Cyclic GFR-binding peptide
PTKLSPISVLYKDDSSNVILKYHYNMVVR

SEQ ID NO: 90283 - protein, 28 aa, Artificial Sequence
  Cyclic GFR-binding peptide
  MOD_RES (28)..(28): Xaa is C or S
DLSPINILYFIGKTPKIYGKIPMIVKSX

SEQ ID NO: 90284 - protein, 36 aa, Artificial Sequence; identical to SEQ ID NO: 42727
  Cyclic GFR-binding peptide
  MOD_RES (1)..(33)..(35): Xaa is C or S

SEQ ID NO: 90285 - protein, 34 aa, Artificial Sequence; identical to SEQ ID NO: 8330
  Cyclic GFR-binding peptide
  MOD_RES (31)..(33): Xaa is C or S

SEQ ID NO: 90286 - protein, 26 aa, Artificial Sequence
  Cyclic GFR-binding peptide
VPTELSPISMLYKDENEKVVLKYHYD

SEQ ID NO: 90287 - protein, 32 aa, Artificial Sequence
  Cyclic GFR-binding peptide
  MOD_RES (2)..(3): Xaa is C or S
PXXTPTKMSATSMLYYNDKQQIILRKHRGMVV

SEQ ID NO: 90288 - protein, 33 aa, Artificial Sequence
  Cyclic GFR-binding peptide
  MOD_RES (4)..(5): Xaa is C or S
PEPXXVPEKMSPINILYFDENKNVVYGKIPNMT

SEQ ID NO: 90289 - protein, 38 aa, Artificial Sequence; identical to SEQ ID NO: 8333
  Cyclic GFR-binding peptide
  MOD_RES (5)..(6)..(38): Xaa is C or S

SEQ ID NO: 90290 - protein, 24 aa, Artificial Sequence
  Cyclic GFR-binding peptide
PTKMNAISMLYFNDKQQIILKKYR

SEQ ID NO: 90291 - protein, 25 aa, Artificial Sequence
  Cyclic GFR-binding peptide
LSPINILYFVGRKPKVYGKIPMIVR

SEQ ID NO: 90292 - protein, 30 aa, Artificial Sequence; identical to SEQ ID NO: 42737
  Cyclic GFR-binding peptide

SEQ ID NO: 90293 - protein, 28 aa, Artificial Sequence
  Cyclic GFR-binding peptide
LSPINVLYFDDMGVPTYGKIPEGMSVAE

SEQ ID NO: 90294 - protein, 29 aa, Artificial Sequence
  Cyclic GFR-binding peptide
  MOD_RES (1)..(1): Xaa is C or S
XVSQDLSPISILYKIGKTPKILKYHYMIV

SEQ ID NO: 90295 - protein, 28 aa, Artificial Sequence
  Cyclic GFR-binding peptide
  MOD_RES (2)..(3): Xaa is C or S
PXXVPEKMSPINILYFDENKNVVYGKIP

SEQ ID NO: 90296 - protein, 24 aa, Artificial Sequence
  Cyclic GFR-binding peptide
SPINILYFDKGVVTYYGKIPGMAV

SEQ ID NO: 90297 - protein, 27 aa, Artificial Sequence
  Cyclic GFR-binding peptide
DLSATSILYYVGRTPKVLRKHRMVVKS

SEQ ID NO: 90298 - protein, 34 aa, Artificial Sequence; identical to SEQ ID NO: 18639
  Cyclic GFR-binding peptide
  MOD_RES (31)..(33): Xaa is C or S

SEQ ID NO: 90299 - protein, 35 aa, Artificial Sequence; identical to SEQ ID NO: 36954
  Cyclic GFR-binding peptide
  MOD_RES (6)..(7): Xaa is C or S

SEQ ID NO: 90300 - protein, 28 aa, Artificial Sequence
  Cyclic GFR-binding peptide
  MOD_RES (1)..(1): Xaa is C or S
XAPTQLSPISVLYKDDSSNVILKYHYNM

SEQ ID NO: 90301 - protein, 31 aa, Artificial Sequence
  Cyclic GFR-binding peptide
  MOD_RES (3)..(4): Xaa is C or S
GPXXTPTKMEPISMLYLNDKQQIIKFKYEGM

SEQ ID NO: 90302 - protein, 33 aa, Artificial Sequence
  Cyclic GFR-binding peptide
  MOD_RES (5)..(6): Xaa is C or S
IPEPXXVPEKMNAISILYFDENKNVVLKKYRNM

SEQ ID NO: 90303 - protein, 25 aa, Artificial Sequence
  Cyclic GFR-binding peptide
ARLSPINILYFDAANNVVYGKIPDM

SEQ ID NO: 90304 - protein, 35 aa, Artificial Sequence; identical to SEQ ID NO: 8345
  Cyclic GFR-binding peptide
  MOD_RES (3)..(35): Xaa is C or S

SEQ ID NO: 90305 - protein, 25 aa, Artificial Sequence
  Cyclic GFR-binding peptide
SPINVLYFDDMGVPTYGKIPEGMSV

SEQ ID NO: 90306 - protein, 40 aa, Artificial Sequence
  Cyclic GFR-binding peptide
  MOD_RES (4)..(5)..(37)..(39): Xaa is C or S
PASXXVPARLSATSILYYDAANNVVLRKHRDMVVEAXGXR

SEQ ID NO: 90307 - protein, 32 aa, Artificial Sequence; identical to SEQ ID NO: 36959
  Cyclic GFR-binding peptide
  MOD_RES (5)..(6): Xaa is C or S

SEQ ID NO: 90308 - protein, 21 aa, Artificial Sequence
  Cyclic GFR-binding peptide
LSPINILYFDAANNVVYGKIP

SEQ ID NO: 90309 - protein, 30 aa, Artificial Sequence; identical to SEQ ID NO: 42751
  Cyclic GFR-binding peptide
  MOD_RES (1)..(1): Xaa is C or S

SEQ ID NO: 90310 - protein, 28 aa, Artificial Sequence
  Cyclic GFR-binding peptide
EKMNAISILYFDENKNVVLKKYRNMTVE

SEQ ID NO: 90311 - protein, 29 aa, Artificial Sequence
  Cyclic GFR-binding peptide
  MOD_RES (28)..(28): Xaa is C or S
DLSPINILYFVGRTPKVYGKIPMVVKSXK

SEQ ID NO: 90312 - protein, 27 aa, Artificial Sequence
  Cyclic GFR-binding peptide
PTQLSPISVLYKDDSSNVILKYHYNMV

SEQ ID NO: 90313 - protein, 26 aa, Artificial Sequence
  Cyclic GFR-binding peptide
  MOD_RES (1)..(1): Xaa is C or S
XAPTKLSPINVLYFDDSSNVIYGKIP

SEQ ID NO: 90314 - protein, 31 aa, Artificial Sequence; identical to SEQ ID NO: 36966
  Cyclic GFR-binding peptide
  MOD_RES (28)..(30): Xaa is C or S

SEQ ID NO: 90315 - protein, 22 aa, Artificial Sequence
  Cyclic GFR-binding peptide
EPISVLYLDDMGVPTKFKYEEG

SEQ ID NO: 90316 - protein, 31 aa, Artificial Sequence; identical to SEQ ID NO: 36969
  Cyclic GFR-binding peptide

SEQ ID NO: 90317 - protein, 30 aa, Artificial Sequence
  Cyclic GFR-binding peptide
  MOD_RES (29)..(29): Xaa is C or S
QDLSPINILYFIGKTPKIYGKIPMIVKSXK

SEQ ID NO: 90318 - protein, 34 aa, Artificial Sequence; identical to SEQ ID NO: 8353
  Cyclic GFR-binding peptide
  MOD_RES (5)..(6): Xaa is C or S

SEQ ID NO: 90319 - protein, 28 aa, Artificial Sequence
  Cyclic GFR-binding peptide
VPTKLSPINILYFDKGVVTYYGKIPGMA

SEQ ID NO: 90320 - protein, 29 aa, Artificial Sequence
  Cyclic GFR-binding peptide
  MOD_RES (3)..(4): Xaa is C or S
SPXXVSQDLSPISILYKIGKTPKILKYHY

SEQ ID NO: 90321 - protein, 31 aa, Artificial Sequence; identical to SEQ ID NO: 36979
  Cyclic GFR-binding peptide
  MOD_RES (29)..(31): Xaa is C or S

SEQ ID NO: 90322 - protein, 24 aa, Artificial Sequence
  Cyclic GFR-binding peptide
VKTSPISMLYKDNGRVLLLKYHYM

SEQ ID NO: 90323 - protein, 32 aa, Artificial Sequence; identical to SEQ ID NO: 8361
  Cyclic GFR-binding peptide
  MOD_RES (6)..(7): Xaa is C or S

SEQ ID NO: 90324 - protein, 38 aa, Artificial Sequence; identical to SEQ ID NO: 36981
  Cyclic GFR-binding peptide
  MOD_RES (2)..(3)..(35)..(37): Xaa is C or S

SEQ ID NO: 90325 - protein, 32 aa, Artificial Sequence; identical to SEQ ID NO: 36982
  Cyclic GFR-binding peptide
  MOD_RES (3)..(4): Xaa is C or S

SEQ ID NO: 90326 - protein, 33 aa, Artificial Sequence; identical to SEQ ID NO: 36983
  Cyclic GFR-binding peptide
  MOD_RES (5)..(6): Xaa is C or S

SEQ ID NO: 90327 - protein, 33 aa, Artificial Sequence; identical to SEQ ID NO: 36985
  Cyclic GFR-binding peptide
  MOD_RES (30)..(32): Xaa is C or S

SEQ ID NO: 90328 - protein, 39 aa, Artificial Sequence
  Cyclic GFR-binding peptide
  MOD_RES (3)..(4)..(36)..(38): Xaa is C or S
GPXXTPTKMSPISMLYKNDKQQIILKYHYGMVVDRXGXS

SEQ ID NO: 90329 - protein, 31 aa, Artificial Sequence; identical to SEQ ID NO: 36988
  Cyclic GFR-binding peptide
  MOD_RES (31)..(31): Xaa is C or S

SEQ ID NO: 90330 - protein, 32 aa, Artificial Sequence; identical to SEQ ID NO: 36991
  Cyclic GFR-binding peptide
  MOD_RES (4)..(5): Xaa is C or S

SEQ ID NO: 90331 - protein, 37 aa, Artificial Sequence; identical to SEQ ID NO: 8368
  Cyclic GFR-binding peptide
  MOD_RES (3)..(4)..(36): Xaa is C or S

SEQ ID NO: 90332 - protein, 35 aa, Artificial Sequence; identical to SEQ ID NO: 8370
  Cyclic GFR-binding peptide
  MOD_RES (5)..(6): Xaa is C or S

SEQ ID NO: 90333 - protein, 32 aa, Artificial Sequence
  Cyclic GFR-binding peptide
  MOD_RES (6)..(7): Xaa is C or S
GIPEPXXVPEKMSPISILYKDENKNVVLKYHY

SEQ ID NO: 90334 - protein, 36 aa, Artificial Sequence
  Cyclic GFR-binding peptide
  MOD_RES (2)..(3)..(34)..(36): Xaa is C or S
PXXVPQALSPINILYFVGRKPKVYGKIPMIVRSXKX

SEQ ID NO: 90335 - protein, 30 aa, Artificial Sequence; identical to SEQ ID NO: 8372
  Cyclic GFR-binding peptide
  MOD_RES (28)..(30): Xaa is C or S

SEQ ID NO: 90336 - protein, 30 aa, Artificial Sequence; identical to SEQ ID NO: 42789
  Cyclic GFR-binding peptide
  MOD_RES (4)..(5): Xaa is C or S

SEQ ID NO: 90337 - protein, 26 aa, Artificial Sequence
  Cyclic GFR-binding peptide
  MOD_RES (1)..(1): Xaa is C or S
XAPVKTSPISMLYKDNGRVLLLKYHY

SEQ ID NO: 90338 - protein, 33 aa, Artificial Sequence; identical to SEQ ID NO: 8378
  Cyclic GFR-binding peptide
  MOD_RES (32)..(32): Xaa is C or S

SEQ ID NO: 90339 - protein, 33 aa, Artificial Sequence; identical to SEQ ID NO: 8379
  Cyclic GFR-binding peptide
  MOD_RES (6)..(7): Xaa is C or S

SEQ ID NO: 90340 - protein, 28 aa, Artificial Sequence
  Cyclic GFR-binding peptide
  MOD_RES (28)..(28): Xaa is C or S
LSATSVLYYDDSSNVILRKHRNMVVRAX

SEQ ID NO: 90341 - protein, 32 aa, Artificial Sequence; identical to SEQ ID NO: 8382
  Cyclic GFR-binding peptide
  MOD_RES (6)..(7): Xaa is C or S

SEQ ID NO: 90342 - protein, 28 aa, Artificial Sequence
  Cyclic GFR-binding peptide
VKTEPISMLYLDNGRVLLKFKYEMIVEE

SEQ ID NO: 90343 - protein, 33 aa, Artificial Sequence; identical to SEQ ID NO: 8384
  Cyclic GFR-binding peptide
  MOD_RES (1)..(32): Xaa is C or S

SEQ ID NO: 90344 - protein, 39 aa, Artificial Sequence; identical to SEQ ID NO: 8387
  Cyclic GFR-binding peptide
  MOD_RES (4)..(5)..(37)..(39): Xaa is C or S

SEQ ID NO: 90345 - protein, 31 aa, Artificial Sequence; identical to SEQ ID NO: 8389
  Cyclic GFR-binding peptide
  MOD_RES (4)..(5): Xaa is C or S

SEQ ID NO: 90346 - protein, 25 aa, Artificial Sequence
  Cyclic GFR-binding peptide
PTQLSPINVLYFDDSSNVIYGKIPN

SEQ ID NO: 90347 - protein, 21 aa, Artificial Sequence
  Cyclic GFR-binding peptide
SPINMLYFDENEKVVYGKIPD

SEQ ID NO: 90348 - protein, 28 aa, Artificial Sequence
  Cyclic GFR-binding peptide
  MOD_RES (2)..(3): Xaa is C or S
AXXVPTELSATSMLYYDEYDKVVLRKHR

SEQ ID NO: 90349 - protein, 35 aa, Artificial Sequence; identical to SEQ ID NO: 37017
  Cyclic GFR-binding peptide
  MOD_RES (32)..(34): Xaa is C or S

SEQ ID NO: 90350 - protein, 36 aa, Artificial Sequence; identical to SEQ ID NO: 42804
  Cyclic GFR-binding peptide
  MOD_RES (5)..(6): Xaa is C or S

SEQ ID NO: 90351 - protein, 29 aa, Artificial Sequence
  Cyclic GFR-binding peptide
  MOD_RES (28)..(28): Xaa is C or S
LEPISMLYLDENEKVVKFKYEDMVVEGXG

SEQ ID NO: 90352 - protein, 33 aa, Artificial Sequence; identical to SEQ ID NO: 37019
  Cyclic GFR-binding peptide
  MOD_RES (32)..(32): Xaa is C or S

SEQ ID NO: 90353 - protein, 29 aa, Artificial Sequence
  Cyclic GFR-binding peptide
APTKLNAISVLYFDSSNNVILKKYRNMVV

SEQ ID NO: 90354 - protein, 31 aa, Artificial Sequence; identical to SEQ ID NO: 8398
  Cyclic GFR-binding peptide
  MOD_RES (5)..(6): Xaa is C or S

SEQ ID NO: 90355 - protein, 28 aa, Artificial Sequence
  Cyclic GFR-binding peptide
  MOD_RES (1)..(2): Xaa is C or S
XXVPEKMEPISILYLDENKNVVKFKYEN

SEQ ID NO: 90356 - protein, 28 aa, Artificial Sequence
  Cyclic GFR-binding peptide
PTKLEPISVLYLDDMGVPTKFKYEEGMS

SEQ ID NO: 90357 - protein, 23 aa, Artificial Sequence
  Cyclic GFR-binding peptide
QLSATSVLYYDDSSNVILRKHRN

SEQ ID NO: 90358 - protein, 23 aa, Artificial Sequence
  Cyclic GFR-binding peptide
NAISILYFDKGVVTYLKKYRGMA

SEQ ID NO: 90359 - protein, 36 aa, Artificial Sequence; identical to SEQ ID NO: 8409
  Cyclic GFR-binding peptide
  MOD_RES (5)..(6): Xaa is C or S

SEQ ID NO: 90360 - protein, 28 aa, Artificial Sequence
  Cyclic GFR-binding peptide
VPTELSPISMLYKDEYDKVVLKYHYEMV

SEQ ID NO: 90361 - protein, 24 aa, Artificial Sequence
  Cyclic GFR-binding peptide
PTKLSPISILYKDKGVVTYLKYHY

SEQ ID NO: 90362 - protein, 28 aa, Artificial Sequence
  Cyclic GFR-binding peptide
  MOD_RES (1)..(1): Xaa is C or S
XVPTELNAISMLYFDEYDKVVLKKYREM

SEQ ID NO: 90363 - protein, 31 aa, Artificial Sequence; identical to SEQ ID NO: 37040
  Cyclic GFR-binding peptide
  MOD_RES (2)..(3): Xaa is C or S

SEQ ID NO: 90364 - protein, 30 aa, Artificial Sequence
  Cyclic GFR-binding peptide
  MOD_RES (28)..(30): Xaa is C or S
MNAISILYFDENKNVVLKKYRNMTVESXAX

SEQ ID NO: 90365 - protein, 35 aa, Artificial Sequence
  Cyclic GFR-binding peptide
  MOD_RES (1)..(2)..(33)..(35): Xaa is C or S
XXAPVKTEPISMLYLDNGRVLLKFKYEMIVEEXGX

SEQ ID NO: 90366 - protein, 25 aa, Artificial Sequence
  Cyclic GFR-binding peptide
VPTRLSATSILYYDSANNVVLRKHR

SEQ ID NO: 90367 - protein, 29 aa, Artificial Sequence
  Cyclic GFR-binding peptide
VPQDLSPINILYFVGRTPKVYGKIPMVVK

SEQ ID NO: 90368 - protein, 26 aa, Artificial Sequence
  Cyclic GFR-binding peptide
TRLSPINILYFDSANNVVYGKIPDMV

SEQ ID NO: 90369 - protein, 38 aa, Artificial Sequence; identical to SEQ ID NO: 42832
  Cyclic GFR-binding peptide
  MOD_RES (5)..(37): Xaa is C or S

SEQ ID NO: 90370 - protein, 30 aa, Artificial Sequence; identical to SEQ ID NO: 37045
  Cyclic GFR-binding peptide
  MOD_RES (1)..(2): Xaa is C or S

SEQ ID NO: 90371 - protein, 26 aa, Artificial Sequence
  Cyclic GFR-binding peptide
APTKLNAISVLYFDSSNNVILKKYRN

SEQ ID NO: 90372 - protein, 25 aa, Artificial Sequence
  Cyclic GFR-binding peptide
EPISILYLDSANNVVKFKYEDMVVE

SEQ ID NO: 90373 - protein, 37 aa, Artificial Sequence; identical to SEQ ID NO: 8420
  Cyclic GFR-binding peptide
  MOD_RES (2)..(3)..(34)..(36): Xaa is C or S

SEQ ID NO: 90374 - protein, 32 aa, Artificial Sequence
  Cyclic GFR-binding peptide
  MOD_RES (6)..(7): Xaa is C or S
GIPEPXXVPEKMEPISILYLDENKNVVKFKYE

SEQ ID NO: 90375 - protein, 25 aa, Artificial Sequence
  Cyclic GFR-binding peptide
PVKTSPISMLYKDNGRVLLLKYHYM

SEQ ID NO: 90376 - protein, 30 aa, Artificial Sequence
  Cyclic GFR-binding peptide
  MOD_RES (1)..(1): Xaa is C or S
XAPVKTEPISMLYLDNGRVLLKFKYEMIVE

SEQ ID NO: 90377 - protein, 39 aa, Artificial Sequence; identical to SEQ ID NO: 37050
  Cyclic GFR-binding peptide
  MOD_RES (4)..(5)..(36)..(38): Xaa is C or S

SEQ ID NO: 90378 - protein, 35 aa, Artificial Sequence; identical to SEQ ID NO: 37051
  Cyclic GFR-binding peptide
  MOD_RES (2)..(3)..(35): Xaa is C or S

SEQ ID NO: 90379 - protein, 26 aa, Artificial Sequence
  Cyclic GFR-binding peptide
TKMNAISMLYFNDKQQIILKKYRGMV

SEQ ID NO: 90380 - protein, 26 aa, Artificial Sequence
  Cyclic GFR-binding peptide
PARLEPISILYLDAANNVVKFKYEDM

SEQ ID NO: 90381 - protein, 27 aa, Artificial Sequence
  Cyclic GFR-binding peptide
DLEPISILYLIGKTPKIKFKYEMIVKS

SEQ ID NO: 90382 - protein, 26 aa, Artificial Sequence
  Cyclic GFR-binding peptide
VPQDLSATSILYYVGRTPKVLRKHRM

SEQ ID NO: 90383 - protein, 23 aa, Artificial Sequence
  Cyclic GFR-binding peptide
MEPISMLYLNDKQQIIKFKYEGM

SEQ ID NO: 90384 - protein, 34 aa, Artificial Sequence; identical to SEQ ID NO: 42848
  Cyclic GFR-binding peptide
  MOD_RES (1)..(2)..(34): Xaa is C or S

SEQ ID NO: 90385 - protein, 29 aa, Artificial Sequence
  Cyclic GFR-binding peptide
  MOD_RES (28)..(28): Xaa is C or S
LSPINILYFDKGVVTYYGKIPGMAVSEXG

SEQ ID NO: 90386 - protein, 25 aa, Artificial Sequence
  Cyclic GFR-binding peptide
LEPISMLYLDEYDKVVKFKYEEMVV

SEQ ID NO: 90387 - protein, 25 aa, Artificial Sequence
  Cyclic GFR-binding peptide
VKTEPISMLYLDNGRVLLKFKYEMI

SEQ ID NO: 90388 - protein, 28 aa, Artificial Sequence
  Cyclic GFR-binding peptide
  MOD_RES (2)..(2): Xaa is C or S
TXAPTKLEPISVLYLDDSSNVIKFKYEN

SEQ ID NO: 90389 - protein, 26 aa, Artificial Sequence
  Cyclic GFR-binding peptide
  MOD_RES (26)..(26): Xaa is C or S
SPINILYFVGRKPKVYGKIPMIVRSX

SEQ ID NO: 90390 - protein, 30 aa, Artificial Sequence; identical to SEQ ID NO: 8429
  Cyclic GFR-binding peptide
  MOD_RES (29)..(29): Xaa is C or S

SEQ ID NO: 90391 - protein, 36 aa, Artificial Sequence; identical to SEQ ID NO: 8432
  Cyclic GFR-binding peptide
  MOD_RES (2)..(3)..(35): Xaa is C or S

SEQ ID NO: 90392 - protein, 34 aa, Artificial Sequence; identical to SEQ ID NO: 37074
  Cyclic GFR-binding peptide
  MOD_RES (4)..(5): Xaa is C or S

SEQ ID NO: 90393 - protein, 32 aa, Artificial Sequence; identical to SEQ ID NO: 37075
  Cyclic GFR-binding peptide
  MOD_RES (4)..(5): Xaa is C or S

SEQ ID NO: 90394 - protein, 34 aa, Artificial Sequence; identical to SEQ ID NO: 8435
  Cyclic GFR-binding peptide
  MOD_RES (4)..(5): Xaa is C or S

SEQ ID NO: 90395 - protein, 29 aa, Artificial Sequence
  Cyclic GFR-binding peptide
  MOD_RES (1)..(2): Xaa is C or S
XXTPTKMSATSMLYYNDKQQIILRKHRGM

SEQ ID NO: 90396 - protein, 32 aa, Artificial Sequence; identical to SEQ ID NO: 42861
  Cyclic GFR-binding peptide
  MOD_RES (32)..(32): Xaa is C or S

SEQ ID NO: 90397 - protein, 37 aa, Artificial Sequence
  Cyclic GFR-binding peptide
  MOD_RES (2)..(3)..(35)..(37): Xaa is C or S
SXXVPARLSATSILYYDAANNVVLRKHRDMVVEAXGX

SEQ ID NO: 90398 - protein, 21 aa, Artificial Sequence
  Cyclic GFR-binding peptide
SPISMLYKNDKQQIILKYHYG

SEQ ID NO: 90399 - protein, 29 aa, Artificial Sequence
  Cyclic GFR-binding peptide
SQDLSPISILYKIGKTPKILKYHYMIVKS

SEQ ID NO: 90400 - protein, 35 aa, Artificial Sequence; identical to SEQ ID NO: 37081
  Cyclic GFR-binding peptide
  MOD_RES (6)..(7): Xaa is C or S

SEQ ID NO: 90401 - protein, 31 aa, Artificial Sequence; identical to SEQ ID NO: 8439
  Cyclic GFR-binding peptide
  MOD_RES (3)..(4): Xaa is C or S

SEQ ID NO: 90402 - protein, 33 aa, Artificial Sequence; identical to SEQ ID NO: 42865
  Cyclic GFR-binding peptide
  MOD_RES (1)..(33): Xaa is C or S

SEQ ID NO: 90403 - protein, 32 aa, Artificial Sequence; identical to SEQ ID NO: 8444
  Cyclic GFR-binding peptide
  MOD_RES (32)..(32): Xaa is C or S

SEQ ID NO: 90404 - protein, 30 aa, Artificial Sequence; identical to SEQ ID NO: 37092
  Cyclic GFR-binding peptide
  MOD_RES (29)..(29): Xaa is C or S

SEQ ID NO: 90405 - protein, 23 aa, Artificial Sequence
  Cyclic GFR-binding peptide
LSPINILYFVGRKPKVYGKIPMI

SEQ ID NO: 90406 - protein, 35 aa, Artificial Sequence; identical to SEQ ID NO: 8446
  Cyclic GFR-binding peptide
  MOD_RES (4)..(5): Xaa is C or S

SEQ ID NO: 90407 - protein, 36 aa, Artificial Sequence
  Cyclic GFR-binding peptide
  MOD_RES (3)..(4)..(35): Xaa is C or S
STXXAPVKTSPISMLYKDNGRVLLLKYHYMIVEEXG

SEQ ID NO: 90408 - protein, 33 aa, Artificial Sequence; identical to SEQ ID NO: 8447
  Cyclic GFR-binding peptide
  MOD_RES (2)..(3): Xaa is C or S

SEQ ID NO: 90409 - protein, 29 aa, Artificial Sequence
  Cyclic GFR-binding peptide
  MOD_RES (1)..(2): Xaa is C or S
XXVPQDLEPISILYLVGRTPKVKFKYEMV

SEQ ID NO: 90410 - protein, 36 aa, Artificial Sequence
  Cyclic GFR-binding peptide
  MOD_RES (4)..(5): Xaa is C or S
AGPXXTPTKMEPISMLYLNDKQQIIKFKYEGMVVDR

SEQ ID NO: 90411 - protein, 31 aa, Artificial Sequence; identical to SEQ ID NO: 42887
  Cyclic GFR-binding peptide
  MOD_RES (5)..(6): Xaa is C or S

SEQ ID NO: 90412 - protein, 37 aa, Artificial Sequence
  Cyclic GFR-binding peptide
  MOD_RES (4)..(5)..(37): Xaa is C or S
PEPXXVPEKMSPINILYFDENKNVVYGKIPNMTVESX

SEQ ID NO: 90413 - protein, 25 aa, Artificial Sequence
  Cyclic GFR-binding peptide
LSPINILYFDAANNVVYGKIPDMVV

SEQ ID NO: 90414 - protein, 35 aa, Artificial Sequence; identical to SEQ ID NO: 8450
  Cyclic GFR-binding peptide
  MOD_RES (1)..(2)..(35): Xaa is C or S

SEQ ID NO: 90415 - protein, 24 aa, Artificial Sequence
  Cyclic GFR-binding peptide
LSPINILYFDSANNVVYGKIPDMV

SEQ ID NO: 90416 - protein, 23 aa, Artificial Sequence
  Cyclic GFR-binding peptide
EPISILYLIGKTPKIKFKYEMIV

SEQ ID NO: 90417 - protein, 36 aa, Artificial Sequence; identical to SEQ ID NO: 8455
  Cyclic GFR-binding peptide
  MOD_RES (5)..(6): Xaa is C or S

SEQ ID NO: 90418 - protein, 32 aa, Artificial Sequence; identical to SEQ ID NO: 8456
  Cyclic GFR-binding peptide
  MOD_RES (31)..(31): Xaa is C or S

SEQ ID NO: 90419 - protein, 26 aa, Artificial Sequence
  Cyclic GFR-binding peptide
PTRLSPISILYKDSANNVVLKYHYDM

SEQ ID NO: 90420 - protein, 29 aa, Artificial Sequence
  Cyclic GFR-binding peptide
  MOD_RES (1)..(2): Xaa is C or S
XXVPTELSPISMLYKDENEKVVLKYHYDM

SEQ ID NO: 90421 - protein, 25 aa, Artificial Sequence
  Cyclic GFR-binding peptide
MNAISILYFDENKNVVLKKYRNMTV

SEQ ID NO: 90422 - protein, 33 aa, Artificial Sequence
  Cyclic GFR-binding peptide
  MOD_RES (3)..(4): Xaa is C or S
ASXXVPARLSATSILYYDAANNVVLRKHRDMVV

SEQ ID NO: 90423 - protein, 32 aa, Artificial Sequence
  Cyclic GFR-binding peptide
  MOD_RES (1)..(2): Xaa is C or S
XXVPQALSPINILYFVGRKPKVYGKIPMIVRS

SEQ ID NO: 90424 - protein, 28 aa, Artificial Sequence
  Cyclic GFR-binding peptide
  MOD_RES (27)..(27): Xaa is C or S
SATSMLYYDEYDKVVLRKHREMVVEGXG

SEQ ID NO: 90425 - protein, 32 aa, Artificial Sequence
  Cyclic GFR-binding peptide
  MOD_RES (30)..(32): Xaa is C or S
TRLEPISILYLDSANNVVKFKYEDMVVESXGX

SEQ ID NO: 90426 - protein, 28 aa, Artificial Sequence
  Cyclic GFR-binding peptide
EKMSATSILYYDENKNVVLRKHRNMTVE

SEQ ID NO: 90427 - protein, 35 aa, Artificial Sequence; identical to SEQ ID NO: 8463
  Cyclic GFR-binding peptide
  MOD_RES (2)..(3)..(35): Xaa is C or S

SEQ ID NO: 90428 - protein, 38 aa, Artificial Sequence; identical to SEQ ID NO: 42911
  Cyclic GFR-binding peptide
  MOD_RES (6)..(7): Xaa is C or S

SEQ ID NO: 90429 - protein, 31 aa, Artificial Sequence; identical to SEQ ID NO: 8465
  Cyclic GFR-binding peptide
  MOD_RES (5)..(6): Xaa is C or S

SEQ ID NO: 90430 - protein, 35 aa, Artificial Sequence; identical to SEQ ID NO: 8466
  Cyclic GFR-binding peptide
  MOD_RES (2)..(3)..(35): Xaa is C or S

SEQ ID NO: 90431 - protein, 29 aa, Artificial Sequence
  Cyclic GFR-binding peptide
APTKLSPISVLYKDSSNNVILKYHYNMVV

SEQ ID NO: 90432 - protein, 30 aa, Artificial Sequence; identical to SEQ ID NO: 37120
  Cyclic GFR-binding peptide
  MOD_RES (30)..(30): Xaa is C or S

SEQ ID NO: 90433 - protein, 23 aa, Artificial Sequence
  Cyclic GFR-binding peptide
NAISVLYFDDMGVPTLKKYREGM

SEQ ID NO: 90434 - protein, 22 aa, Artificial Sequence
  Cyclic GFR-binding peptide
LEPISVLYLDSSNNVIKFKYEN

SEQ ID NO: 90435 - protein, 35 aa, Artificial Sequence; identical to SEQ ID NO: 8469
  Cyclic GFR-binding peptide
  MOD_RES (1)..(2)..(33)..(35): Xaa is C or S

SEQ ID NO: 90436 - protein, 34 aa, Artificial Sequence; identical to SEQ ID NO: 42915
  Cyclic GFR-binding peptide
  MOD_RES (1)..(2)..(34): Xaa is C or S

SEQ ID NO: 90437 - protein, 27 aa, Artificial Sequence
  Cyclic GFR-binding peptide
PQALSATSILYYVGRKPKVLRKHRMIV

SEQ ID NO: 90438 - protein, 35 aa, Artificial Sequence; identical to SEQ ID NO: 18759
  Cyclic GFR-binding peptide
  MOD_RES (3)..(4): Xaa is C or S

SEQ ID NO: 90439 - protein, 32 aa, Artificial Sequence
  Cyclic GFR-binding peptide
  MOD_RES (2)..(3): Xaa is C or S
PXXVPEKMSPINILYFDENKNVVYGKIPNMTV

SEQ ID NO: 90440 - protein, 32 aa, Artificial Sequence; identical to SEQ ID NO: 42918
  Cyclic GFR-binding peptide
  MOD_RES (6)..(6): Xaa is C or S

SEQ ID NO: 90441 - protein, 34 aa, Artificial Sequence
  Cyclic GFR-binding peptide
  MOD_RES (6)..(7): Xaa is C or S
HVPKPXXAPTKLSPISVLYKDDSSNVILKYHYNM

SEQ ID NO: 90442 - protein, 26 aa, Artificial Sequence
  Cyclic GFR-binding peptide
KMSPISILYKDENKNVVLKYHYNMTV

SEQ ID NO: 90443 - protein, 27 aa, Artificial Sequence
  Cyclic GFR-binding peptide
LNAISVLYFDDMGVPTLKKYREGMSVA

SEQ ID NO: 90444 - protein, 30 aa, Artificial Sequence; identical to SEQ ID NO: 42927
  Cyclic GFR-binding peptide
  MOD_RES (1)..(2): Xaa is C or S

SEQ ID NO: 90445 - protein, 35 aa, Artificial Sequence; identical to SEQ ID NO: 8479
  Cyclic GFR-binding peptide
  MOD_RES (1)..(2)..(33)..(35): Xaa is C or S

SEQ ID NO: 90446 - protein, 31 aa, Artificial Sequence; identical to SEQ ID NO: 37138
  Cyclic GFR-binding peptide
  MOD_RES (1)..(2): Xaa is C or S

SEQ ID NO: 90447 - protein, 25 aa, Artificial Sequence
  Cyclic GFR-binding peptide
DLNAISILYFVGRTPKVLKKYRMVV

SEQ ID NO: 90448 - protein, 36 aa, Artificial Sequence
  Cyclic GFR-binding peptide
  MOD_RES (5)..(6): Xaa is C or S
TPPTXXVPTRLEPISILYLDSANNVVKFKYEDMVVE

SEQ ID NO: 90449 - protein, 33 aa, Artificial Sequence; identical to SEQ ID NO: 42929
  Cyclic GFR-binding peptide
  MOD_RES (4)..(5): Xaa is C or S

SEQ ID NO: 90450 - protein, 36 aa, Artificial Sequence; identical to SEQ ID NO: 42932
  Cyclic GFR-binding peptide
  MOD_RES (4)..(5): Xaa is C or S

SEQ ID NO: 90451 - protein, 32 aa, Artificial Sequence; identical to SEQ ID NO: 37144
  Cyclic GFR-binding peptide
  MOD_RES (1)..(1): Xaa is C or S

SEQ ID NO: 90452 - protein, 33 aa, Artificial Sequence
  Cyclic GFR-binding peptide
  MOD_RES (30)..(32): Xaa is C or S
PVKTSPISMLYKDNGRVLLLKYHYMIVEEXGXL

SEQ ID NO: 90453 - protein, 36 aa, Artificial Sequence
  Cyclic GFR-binding peptide
  MOD_RES (3)..(4)..(35): Xaa is C or S
SPXXVPQDLSPINILYFVGRTPKVYGKIPMVVKSXK

SEQ ID NO: 90454 - protein, 37 aa, Artificial Sequence; identical to SEQ ID NO: 37148
  Cyclic GFR-binding peptide
  MOD_RES (7)..(7): Xaa is C or S

SEQ ID NO: 90455 - protein, 34 aa, Artificial Sequence; identical to SEQ ID NO: 8494
  Cyclic GFR-binding peptide
  MOD_RES (32)..(34): Xaa is C or S

SEQ ID NO: 90456 - protein, 40 aa, Artificial Sequence; identical to SEQ ID NO: 37154
  Cyclic GFR-binding peptide
  MOD_RES (6)..(7)..(39): Xaa is C or S

SEQ ID NO: 90457 - protein, 32 aa, Artificial Sequence; identical to SEQ ID NO: 42941
  Cyclic GFR-binding peptide
  MOD_RES (29)..(31): Xaa is C or S

SEQ ID NO: 90458 - protein, 28 aa, Artificial Sequence
  Cyclic GFR-binding peptide
SQDLSPISILYKIGKTPKILKYHYMIVK

SEQ ID NO: 90459 - protein, 23 aa, Artificial Sequence
  Cyclic GFR-binding peptide
KTSPINMLYFDNGRVLLYGKIPM

SEQ ID NO: 90460 - protein, 39 aa, Artificial Sequence; identical to SEQ ID NO: 8499
  Cyclic GFR-binding peptide
  MOD_RES (3)..(4)..(36)..(38): Xaa is C or S

SEQ ID NO: 90461 - protein, 29 aa, Artificial Sequence
  Cyclic GFR-binding peptide
KLEPISVLYLDDMGVPTKFKYEEGMSVAE

SEQ ID NO: 90462 - protein, 34 aa, Artificial Sequence; identical to SEQ ID NO: 37159
  Cyclic GFR-binding peptide
  MOD_RES (6)..(7): Xaa is C or S

SEQ ID NO: 90463 - protein, 40 aa, Artificial Sequence; identical to SEQ ID NO: 37160
  Cyclic GFR-binding peptide
  MOD_RES (5)..(6)..(37)..(39): Xaa is C or S

SEQ ID NO: 90464 - protein, 32 aa, Artificial Sequence
  Cyclic GFR-binding peptide
  MOD_RES (31)..(31): Xaa is C or S
PTKLSATSILYYDKGVVTYLRKHRGMAVSEXG

SEQ ID NO: 90465 - protein, 31 aa, Artificial Sequence
  Cyclic GFR-binding peptide
  MOD_RES (2)..(3): Xaa is C or S
TXXVPTRLSATSILYYDSANNVVLRKHRDMV

SEQ ID NO: 90466 - protein, 28 aa, Artificial Sequence
  Cyclic GFR-binding peptide
  MOD_RES (28)..(28): Xaa is C or S
MSATSMLYYNDKQQIILRKHRGMVVDRX

SEQ ID NO: 90467 - protein, 37 aa, Artificial Sequence; identical to SEQ ID NO: 8510
  Cyclic GFR-binding peptide
  MOD_RES (3)..(4)..(36): Xaa is C or S

SEQ ID NO: 90468 - protein, 27 aa, Artificial Sequence
  Cyclic GFR-binding peptide
PQDLSPINILYFVGRTPKVYGKIPMVV

SEQ ID NO: 90469 - protein, 28 aa, Artificial Sequence
  Cyclic GFR-binding peptide
  MOD_RES (1)..(2): Xaa is C or S
XXAPTKLEPISVLYLDSSNNVIKFKYEN

SEQ ID NO: 90470 - protein, 33 aa, Artificial Sequence; identical to SEQ ID NO: 8513
  Cyclic GFR-binding peptide
  MOD_RES (5)..(6): Xaa is C or S

SEQ ID NO: 90471 - protein, 26 aa, Artificial Sequence
  Cyclic GFR-binding peptide
PTELSPISMLYKDEYDKVVLKYHYEM

SEQ ID NO: 90472 - protein, 31 aa, Artificial Sequence
  Cyclic GFR-binding peptide
  MOD_RES (31)..(31): Xaa is C or S
PTRLSATSILYYDSANNVVLRKHRDMVVESX

SEQ ID NO: 90473 - protein, 29 aa, Artificial Sequence
  Cyclic GFR-binding peptide
  MOD_RES (2)..(3): Xaa is C or S
AXXVPTKLSPINVLYFDDMGVPTYGKIPE

SEQ ID NO: 90474 - protein, 36 aa, Artificial Sequence; identical to SEQ ID NO: 37174
  Cyclic GFR-binding peptide
  MOD_RES (5)..(6): Xaa is C or S

SEQ ID NO: 90475 - protein, 31 aa, Artificial Sequence; identical to SEQ ID NO: 42967
  Cyclic GFR-binding peptide
  MOD_RES (1)..(2): Xaa is C or S

SEQ ID NO: 90476 - protein, 26 aa, Artificial Sequence
  Cyclic GFR-binding peptide
ELSPINMLYFDENEKVVYGKIPDMVV

SEQ ID NO: 90477 - protein, 39 aa, Artificial Sequence; identical to SEQ ID NO: 42973
  Cyclic GFR-binding peptide
  MOD_RES (6)..(7)..(39): Xaa is C or S

SEQ ID NO: 90478 - protein, 25 aa, Artificial Sequence
  Cyclic GFR-binding peptide
EPISMLYLDENEKVVKFKYEDMVVE

SEQ ID NO: 90479 - protein, 31 aa, Artificial Sequence; identical to SEQ ID NO: 37179
  Cyclic GFR-binding peptide
  MOD_RES (31)..(31): Xaa is C or S

SEQ ID NO: 90480 - protein, 27 aa, Artificial Sequence
  Cyclic GFR-binding peptide
  MOD_RES (27)..(27): Xaa is C or S
EPISILYLDSANNVVKFKYEDMVVESX

SEQ ID NO: 90481 - protein, 34 aa, Artificial Sequence; identical to SEQ ID NO: 8522
  Cyclic GFR-binding peptide
  MOD_RES (3)..(4): Xaa is C or S

SEQ ID NO: 90482 - protein, 30 aa, Artificial Sequence; identical to SEQ ID NO: 8524
  Cyclic GFR-binding peptide
  MOD_RES (1)..(2): Xaa is C or S

SEQ ID NO: 90483 - protein, 26 aa, Artificial Sequence
  Cyclic GFR-binding peptide
KLEPISVLYLDDMGVPTKFKYEEGMS

SEQ ID NO: 90484 - protein, 26 aa, Artificial Sequence
  Cyclic GFR-binding peptide
TKLSPINVLYFDDMGVPTYGKIPEGM

SEQ ID NO: 90485 - protein, 32 aa, Artificial Sequence
  Cyclic GFR-binding peptide
  MOD_RES (5)..(6): Xaa is C or S
SASPXXVSQDLSPINILYFIGKTPKIYGKIPM

SEQ ID NO: 90486 - protein, 30 aa, Artificial Sequence
  Cyclic GFR-binding peptide
PTKMSPISMLYKNDKQQIILKYHYGMVVDR

SEQ ID NO: 90487 - protein, 29 aa, Artificial Sequence
  Cyclic GFR-binding peptide
  MOD_RES (27)..(29): Xaa is C or S
LSPINILYFVGRTPKVYGKIPMVVKSXKX

SEQ ID NO: 90488 - protein, 26 aa, Artificial Sequence
  Cyclic GFR-binding peptide
LNAISILYFDAANNVVLKKYRDMVVE

SEQ ID NO: 90489 - protein, 26 aa, Artificial Sequence
  Cyclic GFR-binding peptide
  MOD_RES (1)..(1): Xaa is C or S
XVPTELSPISMLYKDEYDKVVLKYHY

SEQ ID NO: 90490 - protein, 30 aa, Artificial Sequence
  Cyclic GFR-binding peptide
  MOD_RES (1)..(2): Xaa is C or S
XXVPTKLSATSILYYDKGVVTYLRKHRGMA

SEQ ID NO: 90491 - protein, 29 aa, Artificial Sequence
  Cyclic GFR-binding peptide
TKLNAISVLYFDDMGVPTLKKYREGMSVA

SEQ ID NO: 90492 - protein, 38 aa, Artificial Sequence; identical to SEQ ID NO: 42988
  Cyclic GFR-binding peptide
  MOD_RES (3)..(4)..(37): Xaa is C or S

SEQ ID NO: 90493 - protein, 36 aa, Artificial Sequence
  Cyclic GFR-binding peptide
  MOD_RES (3)..(4)..(36): Xaa is C or S
EPXXVPEKMSPINILYFDENKNVVYGKIPNMTVESX

SEQ ID NO: 90494 - protein, 32 aa, Artificial Sequence; identical to SEQ ID NO: 8530
  Cyclic GFR-binding peptide
  MOD_RES (1)..(1): Xaa is C or S

SEQ ID NO: 90495 - protein, 40 aa, Artificial Sequence
  Cyclic GFR-binding peptide
  MOD_RES (4)..(5)..(37)..(39): Xaa is C or S
AGPXXTPTKMSPISMLYKNDKQQIILKYHYGMVVDRXGXS

SEQ ID NO: 90496 - protein, 31 aa, Artificial Sequence; identical to SEQ ID NO: 8531
  Cyclic GFR-binding peptide
  MOD_RES (2)..(3): Xaa is C or S

SEQ ID NO: 90497 - protein, 23 aa, Artificial Sequence
  Cyclic GFR-binding peptide
ELNAISMLYFDENEKVVLKKYRD

SEQ ID NO: 90498 - protein, 28 aa, Artificial Sequence
  Cyclic GFR-binding peptide
TRLSATSILYYDSANNVVLRKHRDMVVE

SEQ ID NO: 90499 - protein, 34 aa, Artificial Sequence; identical to SEQ ID NO: 37206
  Cyclic GFR-binding peptide
  MOD_RES (1)..(2)..(33): Xaa is C or S

SEQ ID NO: 90500 - protein, 29 aa, Artificial Sequence
  Cyclic GFR-binding peptide
VPARLEPISILYLDAANNVVKFKYEDMVV

SEQ ID NO: 90501 - protein, 30 aa, Artificial Sequence; identical to SEQ ID NO: 8538
  Cyclic GFR-binding peptide
  MOD_RES (2)..(3): Xaa is C or S

SEQ ID NO: 90502 - protein, 33 aa, Artificial Sequence; identical to SEQ ID NO: 42996
  Cyclic GFR-binding peptide
  MOD_RES (1)..(33): Xaa is C or S

SEQ ID NO: 90503 - protein, 29 aa, Artificial Sequence
  Cyclic GFR-binding peptide
TKMEPISMLYLNDKQQIIKFKYEGMVVDR

SEQ ID NO: 90504 - protein, 42 aa, Artificial Sequence; identical to SEQ ID NO: 37211
  Cyclic GFR-binding peptide
  MOD_RES (6)..(7)..(39)..(41): Xaa is C or S

SEQ ID NO: 90505 - protein, 29 aa, Artificial Sequence
  Cyclic GFR-binding peptide
  MOD_RES (29)..(29): Xaa is C or S
VKTEPISMLYLDNGRVLLKFKYEMIVEEX

SEQ ID NO: 90506 - protein, 39 aa, Artificial Sequence; identical to SEQ ID NO: 8541
  Cyclic GFR-binding peptide
  MOD_RES (2)..(3)..(36)..(38): Xaa is C or S

SEQ ID NO: 90507 - protein, 37 aa, Artificial Sequence
  Cyclic GFR-binding peptide
  MOD_RES (2)..(3)..(35)..(37): Xaa is C or S
PXXVPEKMSPINILYFDENKNVVYGKIPNMTVESXAX

SEQ ID NO: 90508 - protein, 32 aa, Artificial Sequence; identical to SEQ ID NO: 8543
  Cyclic GFR-binding peptide
  MOD_RES (2)..(3): Xaa is C or S

SEQ ID NO: 90509 - protein, 30 aa, Artificial Sequence; identical to SEQ ID NO: 37215
  Cyclic GFR-binding peptide

SEQ ID NO: 90510 - protein, 32 aa, Artificial Sequence; identical to SEQ ID NO: 8544
  Cyclic GFR-binding peptide
  MOD_RES (1)..(1): Xaa is C or S

SEQ ID NO: 90511 - protein, 33 aa, Artificial Sequence; identical to SEQ ID NO: 43004
  Cyclic GFR-binding peptide
  MOD_RES (4)..(5): Xaa is C or S

SEQ ID NO: 90512 - protein, 32 aa, Artificial Sequence; identical to SEQ ID NO: 77891
  Cyclic GFR-binding peptide
  MOD_RES (4)..(5): Xaa is C or S

SEQ ID NO: 90513 - protein, 28 aa, Artificial Sequence
  Cyclic GFR-binding peptide
TKLSPINVLYFDDSSNVIYGKIPNMVVR

SEQ ID NO: 90514 - protein, 26 aa, Artificial Sequence
  Cyclic GFR-binding peptide
SPINILYFDSANNVVYGKIPDMVVES

SEQ ID NO: 90515 - protein, 27 aa, Artificial Sequence
  Cyclic GFR-binding peptide
MSATSMLYYNDKQQIILRKHRGMVVDR

SEQ ID NO: 90516 - protein, 35 aa, Artificial Sequence
  Cyclic GFR-binding peptide
  MOD_RES (5)..(6): Xaa is C or S
VPSTXXAPVKTSPISMLYKDNGRVLLLKYHYMIVE

SEQ ID NO: 90517 - protein, 26 aa, Artificial Sequence
  Cyclic GFR-binding peptide
PTELEPISMLYLDENEKVVKFKYEDM

SEQ ID NO: 90518 - protein, 25 aa, Artificial Sequence
  Cyclic GFR-binding peptide
VPTKLNAISVLYFDDMGVPTLKKYR

SEQ ID NO: 90519 - protein, 37 aa, Artificial Sequence; identical to SEQ ID NO: 8557
  Cyclic GFR-binding peptide
  MOD_RES (3)..(4)..(35)..(37): Xaa is C or S

SEQ ID NO: 90520 - protein, 39 aa, Artificial Sequence; identical to SEQ ID NO: 37234
  Cyclic GFR-binding peptide
  MOD_RES (5)..(6)..(38): Xaa is C or S

SEQ ID NO: 90521 - protein, 30 aa, Artificial Sequence; identical to SEQ ID NO: 8563
  Cyclic GFR-binding peptide
  MOD_RES (1)..(1): Xaa is C or S

SEQ ID NO: 90522 - protein, 25 aa, Artificial Sequence
  Cyclic GFR-binding peptide
LSATSMLYYDENEKVVLRKHRDMVV

SEQ ID NO: 90523 - protein, 30 aa, Artificial Sequence; identical to SEQ ID NO: 37241
  Cyclic GFR-binding peptide
  MOD_RES (4)..(5): Xaa is C or S

SEQ ID NO: 90524 - protein, 33 aa, Artificial Sequence
  Cyclic GFR-binding peptide
  MOD_RES (30)..(32): Xaa is C or S
TRLSATSILYYDSANNVVLRKHRDMVVESXGXR

SEQ ID NO: 90525 - protein, 29 aa, Artificial Sequence
  Cyclic GFR-binding peptide
  MOD_RES (27)..(29): Xaa is C or S
TSPINMLYFDNGRVLLYGKIPMIVEEXGX

SEQ ID NO: 90526 - protein, 34 aa, Artificial Sequence; identical to SEQ ID NO: 37242
  Cyclic GFR-binding peptide
  MOD_RES (3)..(4): Xaa is C or S

SEQ ID NO: 90527 - protein, 29 aa, Artificial Sequence
  Cyclic GFR-binding peptide
TKMSATSMLYYNDKQQIILRKHRGMVVDR

SEQ ID NO: 90528 - protein, 33 aa, Artificial Sequence; identical to SEQ ID NO: 37244
  Cyclic GFR-binding peptide
  MOD_RES (30)..(32): Xaa is C or S

SEQ ID NO: 90529 - protein, 30 aa, Artificial Sequence; identical to SEQ ID NO: 8568
  Cyclic GFR-binding peptide
  MOD_RES (1)..(2): Xaa is C or S

SEQ ID NO: 90530 - protein, 41 aa, Artificial Sequence
  Cyclic GFR-binding peptide
  MOD_RES (6)..(7)..(39)..(41): Xaa is C or S
AAPASXXVPARLSATSILYYDAANNVVLRKHRDMVVEAXGX

SEQ ID NO: 90531 - protein, 36 aa, Artificial Sequence; identical to SEQ ID NO: 8569
  Cyclic GFR-binding peptide
  MOD_RES (2)..(3)..(35): Xaa is C or S

SEQ ID NO: 90532 - protein, 38 aa, Artificial Sequence; identical to SEQ ID NO: 8570
  Cyclic GFR-binding peptide
  MOD_RES (5)..(6)..(37): Xaa is C or S

SEQ ID NO: 90533 - protein, 34 aa, Artificial Sequence; identical to SEQ ID NO: 37248
  Cyclic GFR-binding peptide
  MOD_RES (4)..(5): Xaa is C or S

SEQ ID NO: 90534 - protein, 29 aa, Artificial Sequence
  Cyclic GFR-binding peptide
VPQALEPISILYLVGRKPKVKFKYEMIVR

SEQ ID NO: 90535 - protein, 31 aa, Artificial Sequence; identical to SEQ ID NO: 43038
  Cyclic GFR-binding peptide
  MOD_RES (5)..(6): Xaa is C or S

SEQ ID NO: 90536 - protein, 29 aa, Artificial Sequence
  Cyclic GFR-binding peptide
  MOD_RES (1)..(1): Xaa is C or S
XVPQALNAISILYFVGRKPKVLKKYRMIV

SEQ ID NO: 90537 - protein, 30 aa, Artificial Sequence; identical to SEQ ID NO: 43040
  Cyclic GFR-binding peptide
  MOD_RES (1)..(2): Xaa is C or S

SEQ ID NO: 90538 - protein, 39 aa, Artificial Sequence; identical to SEQ ID NO: 18876
  Cyclic GFR-binding peptide
  MOD_RES (3)..(4)..(36)..(38): Xaa is C or S

SEQ ID NO: 90539 - protein, 26 aa, Artificial Sequence
  Cyclic GFR-binding peptide
DLSPINILYFIGKTPKIYGKIPMIVK

SEQ ID NO: 90540 - protein, 24 aa, Artificial Sequence
  Cyclic GFR-binding peptide
RLSPINILYFDAANNVVYGKIPDM

SEQ ID NO: 90541 - protein, 40 aa, Artificial Sequence; identical to SEQ ID NO: 37255
  Cyclic GFR-binding peptide
  MOD_RES (4)..(5)..(37)..(39): Xaa is C or S

SEQ ID NO: 90542 - protein, 37 aa, Artificial Sequence; identical to SEQ ID NO: 8579
  Cyclic GFR-binding peptide
  MOD_RES (3)..(4)..(35)..(37): Xaa is C or S

SEQ ID NO: 90543 - protein, 35 aa, Artificial Sequence
  Cyclic GFR-binding peptide
  MOD_RES (32)..(34): Xaa is C or S
VPTRLEPISILYLDSANNVVKFKYEDMVVESXGXR

SEQ ID NO: 90544 - protein, 24 aa, Artificial Sequence
  Cyclic GFR-binding peptide
TELNAISMLYFDEYDKVVLKKYRE

SEQ ID NO: 90545 - protein, 27 aa, Artificial Sequence
  Cyclic GFR-binding peptide
LSPINVLYFDSSNNVIYGKIPNMVVKA

SEQ ID NO: 90546 - protein, 38 aa, Artificial Sequence; identical to SEQ ID NO: 43052
  Cyclic GFR-binding peptide
  MOD_RES (4)..(36)..(38): Xaa is C or S

SEQ ID NO: 90547 - protein, 38 aa, Artificial Sequence; identical to SEQ ID NO: 43055
  Cyclic GFR-binding peptide
  MOD_RES (6)..(7): Xaa is C or S

SEQ ID NO: 90548 - protein, 33 aa, Artificial Sequence; identical to SEQ ID NO: 43056
  Cyclic GFR-binding peptide
  MOD_RES (5)..(6): Xaa is C or S

SEQ ID NO: 90549 - protein, 31 aa, Artificial Sequence; identical to SEQ ID NO: 43060
  Cyclic GFR-binding peptide
  MOD_RES (1)..(1): Xaa is C or S

SEQ ID NO: 90550 - protein, 38 aa, Artificial Sequence; identical to SEQ ID NO: 43061
  Cyclic GFR-binding peptide
  MOD_RES (5)..(6)..(38): Xaa is C or S

SEQ ID NO: 90551 - protein, 41 aa, Artificial Sequence; identical to SEQ ID NO: 37270
  Cyclic GFR-binding peptide
  MOD_RES (5)..(6)..(38)..(40): Xaa is C or S

SEQ ID NO: 90552 - protein, 37 aa, Artificial Sequence
  Cyclic GFR-binding peptide
  MOD_RES (1)..(2)..(34)..(36): Xaa is C or S
XXVPEKMSPINILYFDENKNVVYGKIPNMTVESXAXR

SEQ ID NO: 90553 - protein, 38 aa, Artificial Sequence; identical to SEQ ID NO: 18889
  Cyclic GFR-binding peptide
  MOD_RES (2)..(3)..(35)..(37): Xaa is C or S

SEQ ID NO: 90554 - protein, 25 aa, Artificial Sequence
  Cyclic GFR-binding peptide
SPISMLYKDENEKVVLKYHYDMVVE

SEQ ID NO: 90555 - protein, 31 aa, Artificial Sequence; identical to SEQ ID NO: 43067
  Cyclic GFR-binding peptide
  MOD_RES (29)..(31): Xaa is C or S

SEQ ID NO: 90556 - protein, 32 aa, Artificial Sequence
  Cyclic GFR-binding peptide
  MOD_RES (4)..(5): Xaa is C or S
PEPXXVPEKMNAISILYFDENKNVVLKKYRNM

SEQ ID NO: 90557 - protein, 26 aa, Artificial Sequence
  Cyclic GFR-binding peptide
SQDLEPISILYLIGKTPKIKFKYEMI

SEQ ID NO: 90558 - protein, 28 aa, Artificial Sequence
  Cyclic GFR-binding peptide
  MOD_RES (28)..(28): Xaa is C or S
LEPISVLYLDDSSNVIKFKYENMVVRAX

SEQ ID NO: 90559 - protein, 31 aa, Artificial Sequence; identical to SEQ ID NO: 43072
  Cyclic GFR-binding peptide
  MOD_RES (1)..(1): Xaa is C or S

SEQ ID NO: 90560 - protein, 32 aa, Artificial Sequence; identical to SEQ ID NO: 8595
  Cyclic GFR-binding peptide
  MOD_RES (31)..(31): Xaa is C or S

SEQ ID NO: 90561 - protein, 35 aa, Artificial Sequence
  Cyclic GFR-binding peptide
  MOD_RES (6)..(7): Xaa is C or S
GIPEPXXVPEKMEPISILYLDENKNVVKFKYENMT

SEQ ID NO: 90562 - protein, 37 aa, Artificial Sequence; identical to SEQ ID NO: 37282
  Cyclic GFR-binding peptide
  MOD_RES (1)..(2)..(34)..(36): Xaa is C or S

SEQ ID NO: 90563 - protein, 30 aa, Artificial Sequence; identical to SEQ ID NO: 8597
  Cyclic GFR-binding peptide
  MOD_RES (30)..(30): Xaa is C or S

SEQ ID NO: 90564 - protein, 39 aa, Artificial Sequence; identical to SEQ ID NO: 37284
  Cyclic GFR-binding peptide
  MOD_RES (4)..(5)..(37)..(39): Xaa is C or S

SEQ ID NO: 90565 - protein, 33 aa, Artificial Sequence; identical to SEQ ID NO: 8598
  Cyclic GFR-binding peptide
  MOD_RES (30)..(32): Xaa is C or S

SEQ ID NO: 90566 - protein, 31 aa, Artificial Sequence
  Cyclic GFR-binding peptide
  MOD_RES (2)..(3): Xaa is C or S
PXXVPEKMSATSILYYDENKNVVLRKHRNMT

SEQ ID NO: 90567 - protein, 25 aa, Artificial Sequence
  Cyclic GFR-binding peptide
KMSPINILYFDENKNVVYGKIPNMT

SEQ ID NO: 90568 - protein, 35 aa, Artificial Sequence; identical to SEQ ID NO: 8602
  Cyclic GFR-binding peptide
  MOD_RES (5)..(6): Xaa is C or S

SEQ ID NO: 90569 - protein, 23 aa, Artificial Sequence
  Cyclic GFR-binding peptide
EPISVLYLDDSSNVIKFKYENMV

SEQ ID NO: 90570 - protein, 37 aa, Artificial Sequence; identical to SEQ ID NO: 8603
  Cyclic GFR-binding peptide
  MOD_RES (1)..(2)..(35)..(37): Xaa is C or S

SEQ ID NO: 90571 - protein, 28 aa, Artificial Sequence
  Cyclic GFR-binding peptide
  MOD_RES (27)..(27): Xaa is C or S
SATSILYYDAANNVVLRKHRDMVVEAXG

SEQ ID NO: 90572 - protein, 29 aa, Artificial Sequence
  Cyclic GFR-binding peptide
  MOD_RES (1)..(2): Xaa is C or S
XXVPARLSPISILYKDAANNVVLKYHYDM

SEQ ID NO: 90573 - protein, 32 aa, Artificial Sequence; identical to SEQ ID NO: 43091
  Cyclic GFR-binding peptide
  MOD_RES (29)..(31): Xaa is C or S

SEQ ID NO: 90574 - protein, 34 aa, Artificial Sequence; identical to SEQ ID NO: 43092
  Cyclic GFR-binding peptide
  MOD_RES (4)..(5): Xaa is C or S

SEQ ID NO: 90575 - protein, 35 aa, Artificial Sequence; identical to SEQ ID NO: 37290
  Cyclic GFR-binding peptide
  MOD_RES (6)..(7): Xaa is C or S

SEQ ID NO: 90576 - protein, 28 aa, Artificial Sequence
  Cyclic GFR-binding peptide
TELEPISMLYLDENEKVVKFKYEDMVVE

SEQ ID NO: 90577 - protein, 28 aa, Artificial Sequence
  Cyclic GFR-binding peptide
  MOD_RES (2)..(3): Xaa is C or S
AXXVPTELSPINMLYFDENEKVVYGKIP

SEQ ID NO: 90578 - protein, 36 aa, Artificial Sequence; identical to SEQ ID NO: 43097
  Cyclic GFR-binding peptide
  MOD_RES (4)..(5): Xaa is C or S

SEQ ID NO: 90579 - protein, 37 aa, Artificial Sequence; identical to SEQ ID NO: 37297
  Cyclic GFR-binding peptide
  MOD_RES (3)..(4)..(36): Xaa is C or S

SEQ ID NO: 90580 - protein, 34 aa, Artificial Sequence; identical to SEQ ID NO: 8612
  Cyclic GFR-binding peptide
  MOD_RES (5)..(6): Xaa is C or S

SEQ ID NO: 90581 - protein, 38 aa, Artificial Sequence; identical to SEQ ID NO: 8613
  Cyclic GFR-binding peptide
  MOD_RES (2)..(3)..(35)..(37): Xaa is C or S

SEQ ID NO: 90582 - protein, 29 aa, Artificial Sequence
  Cyclic GFR-binding peptide
  MOD_RES (29)..(29): Xaa is C or S
RLSPINILYFDAANNVVYGKIPDMVVEAX

SEQ ID NO: 90583 - protein, 37 aa, Artificial Sequence
  Cyclic GFR-binding peptide
  MOD_RES (4)..(5)..(37): Xaa is C or S
AGPXXTPTKMSATSMLYYNDKQQIILRKHRGMVVDRX

SEQ ID NO: 90584 - protein, 29 aa, Artificial Sequence
  Cyclic GFR-binding peptide
  MOD_RES (27)..(29): Xaa is C or S
TNAISMLYFDNGRVLLLKKYRMIVEEXGX

SEQ ID NO: 90585 - protein, 24 aa, Artificial Sequence
  Cyclic GFR-binding peptide
VKTEPISMLYLDNGRVLLKFKYEM

SEQ ID NO: 90586 - protein, 34 aa, Artificial Sequence; identical to SEQ ID NO: 8615
  Cyclic GFR-binding peptide
  MOD_RES (4)..(4): Xaa is C or S

SEQ ID NO: 90587 - protein, 33 aa, Artificial Sequence; identical to SEQ ID NO: 37302
  Cyclic GFR-binding peptide
  MOD_RES (5)..(5): Xaa is C or S

SEQ ID NO: 90588 - protein, 37 aa, Artificial Sequence; identical to SEQ ID NO: 37304
  Cyclic GFR-binding peptide
  MOD_RES (6)..(7): Xaa is C or S

SEQ ID NO: 90589 - protein, 32 aa, Artificial Sequence; identical to SEQ ID NO: 8618
  Cyclic GFR-binding peptide
  MOD_RES (31)..(31): Xaa is C or S

SEQ ID NO: 90590 - protein, 31 aa, Artificial Sequence
  Cyclic GFR-binding peptide
  MOD_RES (31)..(31): Xaa is C or S
PEKMSPINILYFDENKNVVYGKIPNMTVESX

SEQ ID NO: 90591 - protein, 35 aa, Artificial Sequence; identical to SEQ ID NO: 8621
  Cyclic GFR-binding peptide
  MOD_RES (3)..(4)..(35): Xaa is C or S

SEQ ID NO: 90592 - protein, 28 aa, Artificial Sequence
  Cyclic GFR-binding peptide
ARLNAISILYFDAANNVVLKKYRDMVVE

SEQ ID NO: 90593 - protein, 21 aa, Artificial Sequence
  Cyclic GFR-binding peptide
LSPINILYFDKGVVTYYGKIP

SEQ ID NO: 90594 - protein, 31 aa, Artificial Sequence
  Cyclic GFR-binding peptide
  MOD_RES (3)..(4): Xaa is C or S
STXXAPVKTSPISMLYKDNGRVLLLKYHYMI

SEQ ID NO: 90595 - protein, 35 aa, Artificial Sequence
  Cyclic GFR-binding peptide
  MOD_RES (2)..(3)..(35): Xaa is C or S
PXXTPTKMSPISMLYKNDKQQIILKYHYGMVVDRX

SEQ ID NO: 90596 - protein, 35 aa, Artificial Sequence; identical to SEQ ID NO: 77939
  Cyclic GFR-binding peptide
  MOD_RES (3)..(4)..(35): Xaa is C or S

SEQ ID NO: 90597 - protein, 33 aa, Artificial Sequence; identical to SEQ ID NO: 8627
  Cyclic GFR-binding peptide
  MOD_RES (6)..(7): Xaa is C or S

SEQ ID NO: 90598 - protein, 36 aa, Artificial Sequence
  Cyclic GFR-binding peptide
  MOD_RES (4)..(5): Xaa is C or S
AGPXXTPTKMSATSMLYYNDKQQIILRKHRGMVVDR

SEQ ID NO: 90599 - protein, 32 aa, Artificial Sequence; identical to SEQ ID NO: 37315
  Cyclic GFR-binding peptide
  MOD_RES (1)..(32): Xaa is C or S

SEQ ID NO: 90600 - protein, 29 aa, Artificial Sequence
  Cyclic GFR-binding peptide
TKLSPINVLYFDSSNNVIYGKIPNMVVKA

SEQ ID NO: 90601 - protein, 29 aa, Artificial Sequence
  Cyclic GFR-binding peptide
  MOD_RES (1)..(2): Xaa is C or S
XXVPTKLSATSVLYYDDMGVPTLRKHREG

SEQ ID NO: 90602 - protein, 26 aa, Artificial Sequence
  Cyclic GFR-binding peptide
LNAISVLYFDDMGVPTLKKYREGMSV

SEQ ID NO: 90603 - protein, 37 aa, Artificial Sequence; identical to SEQ ID NO: 8635
  Cyclic GFR-binding peptide
  MOD_RES (5)..(6)..(37): Xaa is C or S

SEQ ID NO: 90604 - protein, 22 aa, Artificial Sequence
  Cyclic GFR-binding peptide
LNAISMLYFDEYDKVVLKKYRE

SEQ ID NO: 90605 - protein, 25 aa, Artificial Sequence
  Cyclic GFR-binding peptide
LNAISVLYFDSSNNVILKKYRNMVV

SEQ ID NO: 90606 - protein, 27 aa, Artificial Sequence
  Cyclic GFR-binding peptide
VPARLSPISILYKDAANNVVLKYHYDM

SEQ ID NO: 90607 - protein, 38 aa, Artificial Sequence; identical to SEQ ID NO: 37323
  Cyclic GFR-binding peptide
  MOD_RES (6)..(7): Xaa is C or S

SEQ ID NO: 90608 - protein, 41 aa, Artificial Sequence
  Cyclic GFR-binding peptide
  MOD_RES (6)..(7)..(39)..(41): Xaa is C or S
STPPTXXVPTRLSATSILYYDSANNVVLRKHRDMVVESXGX

SEQ ID NO: 90609 - protein, 31 aa, Artificial Sequence; identical to SEQ ID NO: 77947
  Cyclic GFR-binding peptide
  MOD_RES (29)..(31): Xaa is C or S

SEQ ID NO: 90610 - protein, 33 aa, Artificial Sequence; identical to SEQ ID NO: 37326
  Cyclic GFR-binding peptide
  MOD_RES (32)..(32): Xaa is C or S

SEQ ID NO: 90611 - protein, 31 aa, Artificial Sequence; identical to SEQ ID NO: 37328
  Cyclic GFR-binding peptide
  MOD_RES (30)..(30): Xaa is C or S

SEQ ID NO: 90612 - protein, 32 aa, Artificial Sequence; identical to SEQ ID NO: 43134
  Cyclic GFR-binding peptide
  MOD_RES (6)..(7): Xaa is C or S

SEQ ID NO: 90613 - protein, 27 aa, Artificial Sequence
  Cyclic GFR-binding peptide
  MOD_RES (26)..(26): Xaa is C or S
SATSILYYVGRKPKVLRKHRMIVRSXK

SEQ ID NO: 90614 - protein, 30 aa, Artificial Sequence; identical to SEQ ID NO: 8639
  Cyclic GFR-binding peptide
  MOD_RES (2)..(3): Xaa is C or S

SEQ ID NO: 90615 - protein, 27 aa, Artificial Sequence
  Cyclic GFR-binding peptide
  MOD_RES (26)..(26): Xaa is C or S
EPISILYLVGRKPKVKFKYEMIVRSXK

SEQ ID NO: 90616 - protein, 28 aa, Artificial Sequence
  Cyclic GFR-binding peptide
LNAISVLYFDDMGVPTLKKYREGMSVAE

SEQ ID NO: 90617 - protein, 21 aa, Artificial Sequence
  Cyclic GFR-binding peptide
SPINILYFIGKTPKIYGKIPM

SEQ ID NO: 90618 - protein, 26 aa, Artificial Sequence
  Cyclic GFR-binding peptide
VPTELEPISMLYLDENEKVVKFKYED

SEQ ID NO: 90619 - protein, 27 aa, Artificial Sequence
  Cyclic GFR-binding peptide
  MOD_RES (1)..(1): Xaa is C or S
XVPTRLSPISILYKDSANNVVLKYHYD

SEQ ID NO: 90620 - protein, 23 aa, Artificial Sequence
  Cyclic GFR-binding peptide
ARLSPINILYFDAANNVVYGKIP

SEQ ID NO: 90621 - protein, 23 aa, Artificial Sequence
  Cyclic GFR-binding peptide
NAISILYFVGRKPKVLKKYRMIV

SEQ ID NO: 90622 - protein, 33 aa, Artificial Sequence
  Cyclic GFR-binding peptide
  MOD_RES (3)..(4): Xaa is C or S
SPXXVSQDLSPINILYFIGKTPKIYGKIPMIVK

SEQ ID NO: 90623 - protein, 33 aa, Artificial Sequence; identical to SEQ ID NO: 43145
  Cyclic GFR-binding peptide
  MOD_RES (6)..(7): Xaa is C or S

SEQ ID NO: 90624 - protein, 35 aa, Artificial Sequence; identical to SEQ ID NO: 8647
  Cyclic GFR-binding peptide
  MOD_RES (4)..(4): Xaa is C or S

SEQ ID NO: 90625 - protein, 34 aa, Artificial Sequence; identical to SEQ ID NO: 37344
  Cyclic GFR-binding peptide
  MOD_RES (6)..(7): Xaa is C or S

SEQ ID NO: 90626 - protein, 28 aa, Artificial Sequence
  Cyclic GFR-binding peptide
TELSPISMLYKDENEKVVLKYHYDMVVE

SEQ ID NO: 90627 - protein, 34 aa, Artificial Sequence
  Cyclic GFR-binding peptide
  MOD_RES (5)..(6): Xaa is C or S
IPEPXXVPEKMSATSILYYDENKNVVLRKHRNMT

SEQ ID NO: 90628 - protein, 28 aa, Artificial Sequence
  Cyclic GFR-binding peptide
  MOD_RES (28)..(28): Xaa is C or S
DLNAISILYFIGKTPKILKKYRMIVKSX

SEQ ID NO: 90629 - protein, 27 aa, Artificial Sequence
  Cyclic GFR-binding peptide
PTELSPISMLYKDENEKVVLKYHYDMV

SEQ ID NO: 90630 - protein, 38 aa, Artificial Sequence; identical to SEQ ID NO: 8660
  Cyclic GFR-binding peptide
  MOD_RES (3)..(4)..(37): Xaa is C or S

SEQ ID NO: 90631 - protein, 30 aa, Artificial Sequence
  Cyclic GFR-binding peptide
  MOD_RES (3)..(4): Xaa is C or S
APXXVPQALSPINILYFVGRKPKVYGKIPM

SEQ ID NO: 90632 - protein, 28 aa, Artificial Sequence
  Cyclic GFR-binding peptide
  MOD_RES (1)..(2): Xaa is C or S
XXVPARLNAISILYFDAANNVVLKKYRD

SEQ ID NO: 90633 - protein, 26 aa, Artificial Sequence
  Cyclic GFR-binding peptide
PTKLNAISVLYFDDMGVPTLKKYREG

SEQ ID NO: 90634 - protein, 29 aa, Artificial Sequence
  Cyclic GFR-binding peptide
  MOD_RES (27)..(29): Xaa is C or S
SPINMLYFDEYDKVVYGKIPEMVVEGXGX

SEQ ID NO: 90635 - protein, 32 aa, Artificial Sequence
  Cyclic GFR-binding peptide
  MOD_RES (32)..(32): Xaa is C or S
VPEKMEPISILYLDENKNVVKFKYENMTVESX

SEQ ID NO: 90636 - protein, 33 aa, Artificial Sequence
  Cyclic GFR-binding peptide
  MOD_RES (3)..(4): Xaa is C or S
PTXXVPTRLSPISILYKDSANNVVLKYHYDMVV

SEQ ID NO: 90637 - protein, 37 aa, Artificial Sequence; identical to SEQ ID NO: 8671
  Cyclic GFR-binding peptide
  MOD_RES (4)..(5)..(37): Xaa is C or S

SEQ ID NO: 90638 - protein, 36 aa, Artificial Sequence
  Cyclic GFR-binding peptide
  MOD_RES (1)..(2)..(34)..(36): Xaa is C or S
XXVPTRLEPISILYLDSANNVVKFKYEDMVVESXGX

SEQ ID NO: 90639 - protein, 31 aa, Artificial Sequence; identical to SEQ ID NO: 43174
  Cyclic GFR-binding peptide

SEQ ID NO: 90640 - protein, 34 aa, Artificial Sequence
  Cyclic GFR-binding peptide
  MOD_RES (5)..(6): Xaa is C or S
APASXXVPARLSATSILYYDAANNVVLRKHRDMV

SEQ ID NO: 90641 - protein, 26 aa, Artificial Sequence
  Cyclic GFR-binding peptide
RLSPINILYFDSANNVVYGKIPDMVV

SEQ ID NO: 90642 - protein, 33 aa, Artificial Sequence; identical to SEQ ID NO: 43179
  Cyclic GFR-binding peptide
  MOD_RES (6)..(7): Xaa is C or S

SEQ ID NO: 90643 - protein, 26 aa, Artificial Sequence
  Cyclic GFR-binding peptide
  MOD_RES (1)..(1): Xaa is C or S
XVPTRLNAISILYFDSANNVVLKKYR

SEQ ID NO: 90644 - protein, 27 aa, Artificial Sequence
  Cyclic GFR-binding peptide
PQALEPISILYLVGRKPKVKFKYEMIV

SEQ ID NO: 90645 - protein, 32 aa, Artificial Sequence; identical to SEQ ID NO: 43181
  Cyclic GFR-binding peptide
  MOD_RES (3)..(4): Xaa is C or S

SEQ ID NO: 90646 - protein, 34 aa, Artificial Sequence; identical to SEQ ID NO: 8677
  Cyclic GFR-binding peptide
  MOD_RES (31)..(33): Xaa is C or S

SEQ ID NO: 90647 - protein, 36 aa, Artificial Sequence; identical to SEQ ID NO: 8678
  Cyclic GFR-binding peptide
  MOD_RES (3)..(4)..(36): Xaa is C or S

SEQ ID NO: 90648 - protein, 23 aa, Artificial Sequence
  Cyclic GFR-binding peptide
KLSPINILYFDKGVVTYYGKIPG

SEQ ID NO: 90649 - protein, 27 aa, Artificial Sequence
  Cyclic GFR-binding peptide
KLSATSILYYDKGVVTYLRKHRGMAVS

SEQ ID NO: 90650 - protein, 37 aa, Artificial Sequence; identical to SEQ ID NO: 8683
  Cyclic GFR-binding peptide
  MOD_RES (1)..(2)..(34)..(36): Xaa is C or S

SEQ ID NO: 90651 - protein, 31 aa, Artificial Sequence
  Cyclic GFR-binding peptide
  MOD_RES (3)..(4): Xaa is C or S
PTXXVPTRLEPISILYLDSANNVVKFKYEDM

SEQ ID NO: 90652 - protein, 28 aa, Artificial Sequence
  Cyclic GFR-binding peptide
  MOD_RES (1)..(1): Xaa is C or S
XVPEKMNAISILYFDENKNVVLKKYRNM

SEQ ID NO: 90653 - protein, 37 aa, Artificial Sequence
  Cyclic GFR-binding peptide
  MOD_RES (6)..(7): Xaa is C or S
GIPEPXXVPEKMNAISILYFDENKNVVLKKYRNMTVE

SEQ ID NO: 90654 - protein, 31 aa, Artificial Sequence; identical to SEQ ID NO: 37384
  Cyclic GFR-binding peptide
  MOD_RES (2)..(3): Xaa is C or S

SEQ ID NO: 90655 - protein, 42 aa, Artificial Sequence; identical to SEQ ID NO: 8695
  Cyclic GFR-binding peptide
  MOD_RES (6)..(7)..(39)..(41): Xaa is C or S

SEQ ID NO: 90656 - protein, 38 aa, Artificial Sequence; identical to SEQ ID NO: 8696
  Cyclic GFR-binding peptide
  MOD_RES (4)..(5)..(37): Xaa is C or S

SEQ ID NO: 90657 - protein, 39 aa, Artificial Sequence; identical to SEQ ID NO: 8697
  Cyclic GFR-binding peptide
  MOD_RES (5)..(6)..(38): Xaa is C or S

SEQ ID NO: 90658 - protein, 35 aa, Artificial Sequence
  Cyclic GFR-binding peptide
  MOD_RES (1)..(2)..(33)..(35): Xaa is C or S
XXVSQDLSPINILYFIGKTPKIYGKIPMIVKSXKX

SEQ ID NO: 90659 - protein, 39 aa, Artificial Sequence
  Cyclic GFR-binding peptide
  MOD_RES (4)..(5)..(36)..(38): Xaa is C or S
ASPXXVSQDLSPINILYFIGKTPKIYGKIPMIVKSXKXS

SEQ ID NO: 90660 - protein, 28 aa, Artificial Sequence
  Cyclic GFR-binding peptide
  MOD_RES (2)..(3): Xaa is C or S
AXXVPTELEPISMLYLDEYDKVVKFKYE

SEQ ID NO: 90661 - protein, 32 aa, Artificial Sequence
  Cyclic GFR-binding peptide
  MOD_RES (30)..(32): Xaa is C or S
EKMEPISILYLDENKNVVKFKYENMTVESXAX

SEQ ID NO: 90662 - protein, 35 aa, Artificial Sequence; identical to SEQ ID NO: 8700
  Cyclic GFR-binding peptide
  MOD_RES (3)..(4)..(35): Xaa is C or S

SEQ ID NO: 90663 - protein, 32 aa, Artificial Sequence; identical to SEQ ID NO: 43204
  Cyclic GFR-binding peptide
  MOD_RES (30)..(32): Xaa is C or S

SEQ ID NO: 90664 - protein, 29 aa, Artificial Sequence
  Cyclic GFR-binding peptide
  MOD_RES (3)..(4): Xaa is C or S
PTXXVPTRLEPISILYLDSANNVVKFKYE

SEQ ID NO: 90665 - protein, 32 aa, Artificial Sequence
  Cyclic GFR-binding peptide
  MOD_RES (31)..(31): Xaa is C or S
PEKMNAISILYFDENKNVVLKKYRNMTVESXA

SEQ ID NO: 90666 - protein, 35 aa, Artificial Sequence; identical to SEQ ID NO: 37397
  Cyclic GFR-binding peptide
  MOD_RES (1)..(33)..(35): Xaa is C or S

SEQ ID NO: 90667 - protein, 28 aa, Artificial Sequence
  Cyclic GFR-binding peptide
KMNAISILYFDENKNVVLKKYRNMTVES

SEQ ID NO: 90668 - protein, 36 aa, Artificial Sequence
  Cyclic GFR-binding peptide
  MOD_RES (6)..(7): Xaa is C or S
ASASPXXVSQDLSPINILYFIGKTPKIYGKIPMIVK

SEQ ID NO: 90669 - protein, 25 aa, Artificial Sequence
  Cyclic GFR-binding peptide
LSATSILYYDKGVVTYLRKHRGMAV

SEQ ID NO: 90670 - protein, 22 aa, Artificial Sequence
  Cyclic GFR-binding peptide
SPINILYFDAANNVVYGKIPDM

SEQ ID NO: 90671 - protein, 36 aa, Artificial Sequence
  Cyclic GFR-binding peptide
  MOD_RES (6)..(7): Xaa is C or S
HVPKPXXAPTKLSATSVLYYDDSSNVILRKHRNMVV

SEQ ID NO: 90672 - protein, 34 aa, Artificial Sequence; identical to SEQ ID NO: 37405
  Cyclic GFR-binding peptide
  MOD_RES (1)..(32)..(34): Xaa is C or S

SEQ ID NO: 90673 - protein, 35 aa, Artificial Sequence; identical to SEQ ID NO: 8708
  Cyclic GFR-binding peptide
  MOD_RES (1)..(33)..(35): Xaa is C or S

SEQ ID NO: 90674 - protein, 32 aa, Artificial Sequence; identical to SEQ ID NO: 8709
  Cyclic GFR-binding peptide
  MOD_RES (31)..(31): Xaa is C or S

SEQ ID NO: 90675 - protein, 34 aa, Artificial Sequence; identical to SEQ ID NO: 77978
  Cyclic GFR-binding peptide
  MOD_RES (5)..(6): Xaa is C or S

SEQ ID NO: 90676 - protein, 32 aa, Artificial Sequence
  Cyclic GFR-binding peptide
  MOD_RES (30)..(32): Xaa is C or S
TRLSPISILYKDSANNVVLKYHYDMVVESXGX

SEQ ID NO: 90677 - protein, 31 aa, Artificial Sequence; identical to SEQ ID NO: 43221
  Cyclic GFR-binding peptide
  MOD_RES (4)..(5): Xaa is C or S

SEQ ID NO: 90678 - protein, 36 aa, Artificial Sequence; identical to SEQ ID NO: 37413
  Cyclic GFR-binding peptide
  MOD_RES (5)..(6): Xaa is C or S

SEQ ID NO: 90679 - protein, 28 aa, Artificial Sequence
  Cyclic GFR-binding peptide
  MOD_RES (1)..(2): Xaa is C or S
XXVPTRLSPINILYFDSANNVVYGKIPD

SEQ ID NO: 90680 - protein, 36 aa, Artificial Sequence; identical to SEQ ID NO: 37418
  Cyclic GFR-binding peptide
  MOD_RES (6)..(7): Xaa is C or S

SEQ ID NO: 90681 - protein, 35 aa, Artificial Sequence; identical to SEQ ID NO: 8717
  Cyclic GFR-binding peptide
  MOD_RES (2)..(3)..(35): Xaa is C or S

SEQ ID NO: 90682 - protein, 32 aa, Artificial Sequence; identical to SEQ ID NO: 37427
  Cyclic GFR-binding peptide
  MOD_RES (4)..(5): Xaa is C or S

SEQ ID NO: 90683 - protein, 36 aa, Artificial Sequence; identical to SEQ ID NO: 8722
  Cyclic GFR-binding peptide
  MOD_RES (6)..(7): Xaa is C or S

SEQ ID NO: 90684 - protein, 28 aa, Artificial Sequence
  Cyclic GFR-binding peptide
VPARLSPISILYKDAANNVVLKYHYDMV

SEQ ID NO: 90685 - protein, 27 aa, Artificial Sequence
  Cyclic GFR-binding peptide
VPTELNAISMLYFDEYDKVVLKKYREM

SEQ ID NO: 90686 - protein, 37 aa, Artificial Sequence; identical to SEQ ID NO: 8727
  Cyclic GFR-binding peptide
  MOD_RES (1)..(2)..(34)..(36): Xaa is C or S

SEQ ID NO: 90687 - protein, 40 aa, Artificial Sequence
  Cyclic GFR-binding peptide
  MOD_RES (6)..(7)..(39): Xaa is C or S
HVPKPXXAPTKLEPISVLYLDDSSNVIKFKYENMVVRSXG

SEQ ID NO: 90688 - protein, 30 aa, Artificial Sequence
  Cyclic GFR-binding peptide
  MOD_RES (28)..(30): Xaa is C or S
DLSPINILYFIGKTPKIYGKIPMIVKSXKX

SEQ ID NO: 90689 - protein, 34 aa, Artificial Sequence
  Cyclic GFR-binding peptide
  MOD_RES (6)..(7): Xaa is C or S
STPPTXXVPTRLSPISILYKDSANNVVLKYHYDM

SEQ ID NO: 90690 - protein, 37 aa, Artificial Sequence; identical to SEQ ID NO: 8731
  Cyclic GFR-binding peptide
  MOD_RES (5)..(6)..(37): Xaa is C or S

SEQ ID NO: 90691 - protein, 30 aa, Artificial Sequence; identical to SEQ ID NO: 8732
  Cyclic GFR-binding peptide
  MOD_RES (3)..(4): Xaa is C or S

SEQ ID NO: 90692 - protein, 30 aa, Artificial Sequence; identical to SEQ ID NO: 8733
  Cyclic GFR-binding peptide

SEQ ID NO: 90693 - protein, 32 aa, Artificial Sequence
  Cyclic GFR-binding peptide
  MOD_RES (3)..(4): Xaa is C or S
SPXXVSQDLSPINILYFIGKTPKIYGKIPMIV

SEQ ID NO: 90694 - protein, 34 aa, Artificial Sequence; identical to SEQ ID NO: 8737
  Cyclic GFR-binding peptide
  MOD_RES (1)..(2): Xaa is C or S

SEQ ID NO: 90695 - protein, 31 aa, Artificial Sequence
  Cyclic GFR-binding peptide
  MOD_RES (28)..(30): Xaa is C or S
MSPISMLYKNDKQQIILKYHYGMVVDRXGXS

SEQ ID NO: 90696 - protein, 30 aa, Artificial Sequence; identical to SEQ ID NO: 8740
  Cyclic GFR-binding peptide
  MOD_RES (2)..(3): Xaa is C or S

SEQ ID NO: 90697 - protein, 34 aa, Artificial Sequence; identical to SEQ ID NO: 37442
  Cyclic GFR-binding peptide
  MOD_RES (1)..(32)..(34): Xaa is C or S

SEQ ID NO: 90698 - protein, 30 aa, Artificial Sequence
  Cyclic GFR-binding peptide
  MOD_RES (2)..(3): Xaa is C or S
TXXAPVKTSPISMLYKDNGRVLLLKYHYMI

SEQ ID NO: 90699 - protein, 27 aa, Artificial Sequence
  Cyclic GFR-binding peptide
  MOD_RES (1)..(1): Xaa is C or S
XAPTQLSATSVLYYDDSSNVILRKHRN

SEQ ID NO: 90700 - protein, 27 aa, Artificial Sequence
  Cyclic GFR-binding peptide
  MOD_RES (1)..(1): Xaa is C or S
XVPQDLSATSILYYVGRTPKVLRKHRM

SEQ ID NO: 90701 - protein, 29 aa, Artificial Sequence
  Cyclic GFR-binding peptide
  MOD_RES (3)..(4): Xaa is C or S
PTXXVPTRLSPISILYKDSANNVVLKYHY

SEQ ID NO: 90702 - protein, 34 aa, Artificial Sequence; identical to SEQ ID NO: 43242
  Cyclic GFR-binding peptide
  MOD_RES (5)..(6): Xaa is C or S

SEQ ID NO: 90703 - protein, 28 aa, Artificial Sequence
  Cyclic GFR-binding peptide
  MOD_RES (27)..(27): Xaa is C or S
SPISVLYKDSSNNVILKYHYNMVVKAXG

SEQ ID NO: 90704 - protein, 28 aa, Artificial Sequence
  Cyclic GFR-binding peptide
KLSATSVLYYDDSSNVILRKHRNMVVRS

SEQ ID NO: 90705 - protein, 32 aa, Artificial Sequence; identical to SEQ ID NO: 8753
  Cyclic GFR-binding peptide
  MOD_RES (4)..(5): Xaa is C or S

SEQ ID NO: 90706 - protein, 32 aa, Artificial Sequence; identical to SEQ ID NO: 37454
  Cyclic GFR-binding peptide
  MOD_RES (3)..(4): Xaa is C or S

SEQ ID NO: 90707 - protein, 31 aa, Artificial Sequence; identical to SEQ ID NO: 8757
  Cyclic GFR-binding peptide
  MOD_RES (28)..(30): Xaa is C or S

SEQ ID NO: 90708 - protein, 29 aa, Artificial Sequence
  Cyclic GFR-binding peptide
SQDLEPISILYLIGKTPKIKFKYEMIVKS

SEQ ID NO: 90709 - protein, 42 aa, Artificial Sequence
  Cyclic GFR-binding peptide
  MOD_RES (6)..(7)..(39)..(41): Xaa is C or S
HVPKPXXAPTKLEPISVLYLDDSSNVIKFKYENMVVRSXGXH

SEQ ID NO: 90710 - protein, 31 aa, Artificial Sequence; identical to SEQ ID NO: 8761
  Cyclic GFR-binding peptide
  MOD_RES (30)..(30): Xaa is C or S

SEQ ID NO: 90711 - protein, 24 aa, Artificial Sequence
  Cyclic GFR-binding peptide
LSPINMLYFDENEKVVYGKIPDMV

SEQ ID NO: 90712 - protein, 31 aa, Artificial Sequence; identical to SEQ ID NO: 37464
  Cyclic GFR-binding peptide
  MOD_RES (31)..(31): Xaa is C or S

SEQ ID NO: 90713 - protein, 22 aa, Artificial Sequence
  Cyclic GFR-binding peptide
SPISVLYKDSSNNVILKYHYNM

SEQ ID NO: 90714 - protein, 35 aa, Artificial Sequence
  Cyclic GFR-binding peptide
  MOD_RES (1)..(2)..(33)..(35): Xaa is C or S
XXVPQDLSPINILYFVGRTPKVYGKIPMVVKSXKX

SEQ ID NO: 90715 - protein, 33 aa, Artificial Sequence; identical to SEQ ID NO: 37468
  Cyclic GFR-binding peptide
  MOD_RES (31)..(33): Xaa is C or S

SEQ ID NO: 90716 - protein, 37 aa, Artificial Sequence; identical to SEQ ID NO: 8768
  Cyclic GFR-binding peptide
  MOD_RES (3)..(4)..(36): Xaa is C or S

SEQ ID NO: 90717 - protein, 32 aa, Artificial Sequence; identical to SEQ ID NO: 37471
  Cyclic GFR-binding peptide
  MOD_RES (6)..(7): Xaa is C or S

SEQ ID NO: 90718 - protein, 31 aa, Artificial Sequence; identical to SEQ ID NO: 37472
  Cyclic GFR-binding peptide
  MOD_RES (3)..(4): Xaa is C or S

SEQ ID NO: 90719 - protein, 30 aa, Artificial Sequence; identical to SEQ ID NO: 8770
  Cyclic GFR-binding peptide
  MOD_RES (27)..(29): Xaa is C or S

SEQ ID NO: 90720 - protein, 33 aa, Artificial Sequence
  Cyclic GFR-binding peptide
  MOD_RES (2)..(3): Xaa is C or S
PXXVPEKMNAISILYFDENKNVVLKKYRNMTVE

SEQ ID NO: 90721 - protein, 35 aa, Artificial Sequence; identical to SEQ ID NO: 8771
  Cyclic GFR-binding peptide
  MOD_RES (2)..(3)..(35): Xaa is C or S

SEQ ID NO: 90722 - protein, 33 aa, Artificial Sequence; identical to SEQ ID NO: 8773
  Cyclic GFR-binding peptide
  MOD_RES (2)..(3): Xaa is C or S

SEQ ID NO: 90723 - protein, 25 aa, Artificial Sequence
  Cyclic GFR-binding peptide
SPISILYKDSANNVVLKYHYDMVVE

SEQ ID NO: 90724 - protein, 31 aa, Artificial Sequence
  Cyclic GFR-binding peptide
  MOD_RES (31)..(31): Xaa is C or S
PTRLEPISILYLDSANNVVKFKYEDMVVESX

SEQ ID NO: 90725 - protein, 28 aa, Artificial Sequence
  Cyclic GFR-binding peptide
  MOD_RES (28)..(28): Xaa is C or S
LSPINILYFDKGVVTYYGKIPGMAVSEX

SEQ ID NO: 90726 - protein, 33 aa, Artificial Sequence; identical to SEQ ID NO: 37480
  Cyclic GFR-binding peptide
  MOD_RES (6)..(7): Xaa is C or S

SEQ ID NO: 90727 - protein, 23 aa, Artificial Sequence
  Cyclic GFR-binding peptide
SATSILYYIGKTPKILRKHRMIV

SEQ ID NO: 90728 - protein, 32 aa, Artificial Sequence
  Cyclic GFR-binding peptide
  MOD_RES (5)..(6): Xaa is C or S
VPSTXXAPVKTSPISMLYKDNGRVLLLKYHYM

SEQ ID NO: 90729 - protein, 24 aa, Artificial Sequence
  Cyclic GFR-binding peptide
DLEPISILYLVGRTPKVKFKYEMV

SEQ ID NO: 90730 - protein, 25 aa, Artificial Sequence
  Cyclic GFR-binding peptide
ELSPINMLYFDEYDKVVYGKIPEMV

SEQ ID NO: 90731 - protein, 22 aa, Artificial Sequence
  Cyclic GFR-binding peptide
LSPISVLYKDSSNNVILKYHYN

SEQ ID NO: 90732 - protein, 25 aa, Artificial Sequence
  Cyclic GFR-binding peptide
KMNAISMLYFNDKQQIILKKYRGMV

SEQ ID NO: 90733 - protein, 34 aa, Artificial Sequence; identical to SEQ ID NO: 8781
  Cyclic GFR-binding peptide
  MOD_RES (3)..(4): Xaa is C or S

SEQ ID NO: 90734 - protein, 29 aa, Artificial Sequence
  Cyclic GFR-binding peptide
  MOD_RES (29)..(29): Xaa is C or S
KMSPINILYFDENKNVVYGKIPNMTVESX

SEQ ID NO: 90735 - protein, 33 aa, Artificial Sequence
  Cyclic GFR-binding peptide
  MOD_RES (30)..(32): Xaa is C or S
PVKTEPISMLYLDNGRVLLKFKYEMIVEEXGXL

SEQ ID NO: 90736 - protein, 26 aa, Artificial Sequence
  Cyclic GFR-binding peptide
  MOD_RES (26)..(26): Xaa is C or S
SPINILYFVGRTPKVYGKIPMVVKSX

SEQ ID NO: 90737 - protein, 33 aa, Artificial Sequence; identical to SEQ ID NO: 37486
  Cyclic GFR-binding peptide
  MOD_RES (31)..(33): Xaa is C or S

SEQ ID NO: 90738 - protein, 33 aa, Artificial Sequence; identical to SEQ ID NO: 37488
  Cyclic GFR-binding peptide
  MOD_RES (2)..(2): Xaa is C or S

SEQ ID NO: 90739 - protein, 28 aa, Artificial Sequence
  Cyclic GFR-binding peptide
ELNAISMLYFDEYDKVVLKKYREMVVEG

SEQ ID NO: 90740 - protein, 38 aa, Artificial Sequence; identical to SEQ ID NO: 43286
  Cyclic GFR-binding peptide
  MOD_RES (4)..(5)..(36)..(38): Xaa is C or S

SEQ ID NO: 90741 - protein, 31 aa, Artificial Sequence; identical to SEQ ID NO: 37491
  Cyclic GFR-binding peptide
  MOD_RES (30)..(30): Xaa is C or S

SEQ ID NO: 90742 - protein, 37 aa, Artificial Sequence; identical to SEQ ID NO: 43287
  Cyclic GFR-binding peptide
  MOD_RES (1)..(2)..(34)..(36): Xaa is C or S

SEQ ID NO: 90743 - protein, 35 aa, Artificial Sequence; identical to SEQ ID NO: 19069
  Cyclic GFR-binding peptide
  MOD_RES (1)..(33)..(35): Xaa is C or S

SEQ ID NO: 90744 - protein, 30 aa, Artificial Sequence; identical to SEQ ID NO: 37493
  Cyclic GFR-binding peptide
  MOD_RES (27)..(29): Xaa is C or S

SEQ ID NO: 90745 - protein, 33 aa, Artificial Sequence; identical to SEQ ID NO: 8786
  Cyclic GFR-binding peptide
  MOD_RES (3)..(4): Xaa is C or S

SEQ ID NO: 90746 - protein, 29 aa, Artificial Sequence
  Cyclic GFR-binding peptide
  MOD_RES (1)..(1): Xaa is C or S
XVPTKLSPINILYFDKGVVTYYGKIPGMA

SEQ ID NO: 90747 - protein, 34 aa, Artificial Sequence; identical to SEQ ID NO: 8787
  Cyclic GFR-binding peptide
  MOD_RES (5)..(6): Xaa is C or S

SEQ ID NO: 90748 - protein, 27 aa, Artificial Sequence
  Cyclic GFR-binding peptide
KLNAISILYFDKGVVTYLKKYRGMAVS

SEQ ID NO: 90749 - protein, 30 aa, Artificial Sequence; identical to SEQ ID NO: 8789
  Cyclic GFR-binding peptide
  MOD_RES (3)..(3): Xaa is C or S

SEQ ID NO: 90750 - protein, 38 aa, Artificial Sequence; identical to SEQ ID NO: 8790
  Cyclic GFR-binding peptide
  MOD_RES (6)..(7)..(38): Xaa is C or S

SEQ ID NO: 90751 - protein, 28 aa, Artificial Sequence
  Cyclic GFR-binding peptide
VKTSPISMLYKDNGRVLLLKYHYMIVEE

SEQ ID NO: 90752 - protein, 30 aa, Artificial Sequence; identical to SEQ ID NO: 8792
  Cyclic GFR-binding peptide

SEQ ID NO: 90753 - protein, 28 aa, Artificial Sequence
  Cyclic GFR-binding peptide
VPQALEPISILYLVGRKPKVKFKYEMIV

SEQ ID NO: 90754 - protein, 25 aa, Artificial Sequence
  Cyclic GFR-binding peptide
PTELNAISMLYFDEYDKVVLKKYRE

SEQ ID NO: 90755 - protein, 24 aa, Artificial Sequence
  Cyclic GFR-binding peptide
MNAISILYFDENKNVVLKKYRNMT

SEQ ID NO: 90756 - protein, 33 aa, Artificial Sequence; identical to SEQ ID NO: 37510
  Cyclic GFR-binding peptide
  MOD_RES (30)..(32): Xaa is C or S

SEQ ID NO: 90757 - protein, 23 aa, Artificial Sequence
  Cyclic GFR-binding peptide
TELNAISMLYFDEYDKVVLKKYR

SEQ ID NO: 90758 - protein, 31 aa, Artificial Sequence; identical to SEQ ID NO: 37513
  Cyclic GFR-binding peptide
  MOD_RES (28)..(30): Xaa is C or S

SEQ ID NO: 90759 - protein, 30 aa, Artificial Sequence; identical to SEQ ID NO: 43309
  Cyclic GFR-binding peptide
  MOD_RES (1)..(1): Xaa is C or S

SEQ ID NO: 90760 - protein, 30 aa, Artificial Sequence; identical to SEQ ID NO: 8804
  Cyclic GFR-binding peptide
  MOD_RES (3)..(4): Xaa is C or S

SEQ ID NO: 90761 - protein, 36 aa, Artificial Sequence; identical to SEQ ID NO: 8805
  Cyclic GFR-binding peptide
  MOD_RES (1)..(2)..(33)..(35): Xaa is C or S

SEQ ID NO: 90762 - protein, 32 aa, Artificial Sequence
  Cyclic GFR-binding peptide
  MOD_RES (5)..(6): Xaa is C or S
TPPTXXVPTRLSATSILYYDSANNVVLRKHRD

SEQ ID NO: 90763 - protein, 28 aa, Artificial Sequence
  Cyclic GFR-binding peptide
  MOD_RES (28)..(28): Xaa is C or S
MEPISMLYLNDKQQIIKFKYEGMVVDRX

SEQ ID NO: 90764 - protein, 24 aa, Artificial Sequence
  Cyclic GFR-binding peptide
ELSPINMLYFDEYDKVVYGKIPEM

SEQ ID NO: 90765 - protein, 35 aa, Artificial Sequence; identical to SEQ ID NO: 8806
  Cyclic GFR-binding peptide
  MOD_RES (1)..(32)..(34): Xaa is C or S

SEQ ID NO: 90766 - protein, 28 aa, Artificial Sequence
  Cyclic GFR-binding peptide
  MOD_RES (27)..(27): Xaa is C or S
SPISVLYKDDSSNVILKYHYNMVVRSXG

SEQ ID NO: 90767 - protein, 34 aa, Artificial Sequence; identical to SEQ ID NO: 8812
  Cyclic GFR-binding peptide
  MOD_RES (6)..(7): Xaa is C or S

SEQ ID NO: 90768 - protein, 32 aa, Artificial Sequence
  Cyclic GFR-binding peptide
  MOD_RES (5)..(6): Xaa is C or S
IPEPXXVPEKMSATSILYYDENKNVVLRKHRN

SEQ ID NO: 90769 - protein, 37 aa, Artificial Sequence; identical to SEQ ID NO: 8814
  Cyclic GFR-binding peptide
  MOD_RES (2)..(3)..(34)..(36): Xaa is C or S

SEQ ID NO: 90770 - protein, 40 aa, Artificial Sequence; identical to SEQ ID NO: 41844
  Cyclic GFR-binding peptide
  MOD_RES (5)..(6)..(38)..(40): Xaa is C or S

SEQ ID NO: 90771 - protein, 37 aa, Artificial Sequence; identical to SEQ ID NO: 41845
  Cyclic GFR-binding peptide
  MOD_RES (4)..(36): Xaa is C or S

SEQ ID NO: 90772 - protein, 29 aa, Artificial Sequence
  Cyclic GFR-binding peptide
  MOD_RES (29)..(29): Xaa is C or S
QLEPISVLYLDDSSNVIKFKYENMVVRAX

SEQ ID NO: 90773 - protein, 35 aa, Artificial Sequence; identical to SEQ ID NO: 8816
  Cyclic GFR-binding peptide
  MOD_RES (1)..(2)..(33)..(35): Xaa is C or S

SEQ ID NO: 90774 - protein, 32 aa, Artificial Sequence; identical to SEQ ID NO: 41847
  Cyclic GFR-binding peptide
  MOD_RES (29)..(31): Xaa is C or S

SEQ ID NO: 90775 - protein, 38 aa, Artificial Sequence; identical to SEQ ID NO: 8819
  Cyclic GFR-binding peptide
  MOD_RES (5)..(6)..(38): Xaa is C or S

SEQ ID NO: 90776 - protein, 29 aa, Artificial Sequence
  Cyclic GFR-binding peptide
  MOD_RES (26)..(28): Xaa is C or S
SPISILYKVGRTPKVLKYHYMVVKSXKXS

SEQ ID NO: 90777 - protein, 35 aa, Artificial Sequence
  Cyclic GFR-binding peptide
  MOD_RES (2)..(3)..(34): Xaa is C or S
TXXAPVKTEPISMLYLDNGRVLLKFKYEMIVEEXG

SEQ ID NO: 90778 - protein, 23 aa, Artificial Sequence
  Cyclic GFR-binding peptide
LSPINMLYFDENEKVVYGKIPDM

SEQ ID NO: 90779 - protein, 29 aa, Artificial Sequence
  Cyclic GFR-binding peptide
  MOD_RES (26)..(28): Xaa is C or S
NAISILYFVGRKPKVLKKYRMIVRSXKXS

SEQ ID NO: 90780 - protein, 29 aa, Artificial Sequence
  Cyclic GFR-binding peptide
  MOD_RES (27)..(29): Xaa is C or S
EPISVLYLDDSSNVIKFKYENMVVRAXGX

SEQ ID NO: 90781 - protein, 30 aa, Artificial Sequence; identical to SEQ ID NO: 8826
  Cyclic GFR-binding peptide

SEQ ID NO: 90782 - protein, 23 aa, Artificial Sequence
  Cyclic GFR-binding peptide
KLSPISVLYKDDSSNVILKYHYN

SEQ ID NO: 90783 - protein, 39 aa, Artificial Sequence
  Cyclic GFR-binding peptide
  MOD_RES (3)..(4)..(36)..(38): Xaa is C or S
KAXXVPTKLSATSILYYDKGVVTYLRKHRGMAVSEXGXR

SEQ ID NO: 90784 - protein, 37 aa, Artificial Sequence; identical to SEQ ID NO: 8829
  Cyclic GFR-binding peptide
  MOD_RES (2)..(3)..(35)..(37): Xaa is C or S

SEQ ID NO: 90785 - protein, 28 aa, Artificial Sequence
  Cyclic GFR-binding peptide
VPTRLSATSILYYDSANNVVLRKHRDMV

SEQ ID NO: 90786 - protein, 33 aa, Artificial Sequence; identical to SEQ ID NO: 8831
  Cyclic GFR-binding peptide
  MOD_RES (4)..(5): Xaa is C or S

SEQ ID NO: 90787 - protein, 39 aa, Artificial Sequence
  Cyclic GFR-binding peptide
  MOD_RES (6)..(7)..(39): Xaa is C or S
GIPEPXXVPEKMSPISILYKDENKNVVLKYHYNMTVESX

SEQ ID NO: 90788 - protein, 40 aa, Artificial Sequence
  Cyclic GFR-binding peptide
  MOD_RES (6)..(7)..(39): Xaa is C or S
GIPEPXXVPEKMSPINILYFDENKNVVYGKIPNMTVESXA

SEQ ID NO: 90789 - protein, 22 aa, Artificial Sequence
  Cyclic GFR-binding peptide
LEPISMLYLDEYDKVVKFKYEE

SEQ ID NO: 90790 - protein, 27 aa, Artificial Sequence
  Cyclic GFR-binding peptide
TRLNAISILYFDSANNVVLKKYRDMVV

SEQ ID NO: 90791 - protein, 39 aa, Artificial Sequence; identical to SEQ ID NO: 41857
  Cyclic GFR-binding peptide
  MOD_RES (2)..(3)..(36)..(38): Xaa is C or S

SEQ ID NO: 90792 - protein, 25 aa, Artificial Sequence
  Cyclic GFR-binding peptide
EKMSATSILYYDENKNVVLRKHRNM

SEQ ID NO: 90793 - protein, 38 aa, Artificial Sequence; identical to SEQ ID NO: 8832
  Cyclic GFR-binding peptide
  MOD_RES (3)..(4)..(37): Xaa is C or S

SEQ ID NO: 90794 - protein, 33 aa, Artificial Sequence; identical to SEQ ID NO: 41864
  Cyclic GFR-binding peptide
  MOD_RES (1)..(2): Xaa is C or S

SEQ ID NO: 90795 - protein, 31 aa, Artificial Sequence; identical to SEQ ID NO: 41866
  Cyclic GFR-binding peptide
  MOD_RES (1)..(2): Xaa is C or S

SEQ ID NO: 90796 - protein, 24 aa, Artificial Sequence
  Cyclic GFR-binding peptide
KMSPISILYKDENKNVVLKYHYNM

SEQ ID NO: 90797 - protein, 39 aa, Artificial Sequence; identical to SEQ ID NO: 41869
  Cyclic GFR-binding peptide
  MOD_RES (3)..(4)..(36)..(38): Xaa is C or S

SEQ ID NO: 90798 - protein, 33 aa, Artificial Sequence; identical to SEQ ID NO: 8834
  Cyclic GFR-binding peptide
  MOD_RES (4)..(5): Xaa is C or S

SEQ ID NO: 90799 - protein, 31 aa, Artificial Sequence
  Cyclic GFR-binding peptide
  MOD_RES (3)..(4): Xaa is C or S
PTXXVPTRLSATSILYYDSANNVVLRKHRDM

SEQ ID NO: 90800 - protein, 31 aa, Artificial Sequence; identical to SEQ ID NO: 76765
  Cyclic GFR-binding peptide
  MOD_RES (31)..(31): Xaa is C or S

SEQ ID NO: 90801 - protein, 35 aa, Artificial Sequence; identical to SEQ ID NO: 8838
  Cyclic GFR-binding peptide
  MOD_RES (1)..(32)..(34): Xaa is C or S

SEQ ID NO: 90802 - protein, 25 aa, Artificial Sequence
  Cyclic GFR-binding peptide
TRLSPISILYKDSANNVVLKYHYDM

SEQ ID NO: 90803 - protein, 29 aa, Artificial Sequence
  Cyclic GFR-binding peptide
  MOD_RES (3)..(4): Xaa is C or S
SPXXVPQDLNAISILYFVGRTPKVLKKYR

SEQ ID NO: 90804 - protein, 31 aa, Artificial Sequence; identical to SEQ ID NO: 41879
  Cyclic GFR-binding peptide
  MOD_RES (28)..(30): Xaa is C or S

SEQ ID NO: 90805 - protein, 37 aa, Artificial Sequence; identical to SEQ ID NO: 8844
  Cyclic GFR-binding peptide
  MOD_RES (6)..(7): Xaa is C or S

SEQ ID NO: 90806 - protein, 32 aa, Artificial Sequence; identical to SEQ ID NO: 19123
  Cyclic GFR-binding peptide
  MOD_RES (5)..(6): Xaa is C or S

SEQ ID NO: 90807 - protein, 36 aa, Artificial Sequence
  Cyclic GFR-binding peptide
  MOD_RES (3)..(4)..(36): Xaa is C or S
GPXXTPTKMEPISMLYLNDKQQIIKFKYEGMVVDRX

SEQ ID NO: 90808 - protein, 29 aa, Artificial Sequence
  Cyclic GFR-binding peptide
  MOD_RES (2)..(3): Xaa is C or S
AXXAPTKLSPISVLYKDSSNNVILKYHYN

SEQ ID NO: 90809 - protein, 36 aa, Artificial Sequence
  Cyclic GFR-binding peptide
  MOD_RES (4)..(5): Xaa is C or S
PEPXXVPEKMEPISILYLDENKNVVKFKYENMTVES

SEQ ID NO: 90810 - protein, 32 aa, Artificial Sequence; identical to SEQ ID NO: 8847
  Cyclic GFR-binding peptide
  MOD_RES (29)..(31): Xaa is C or S

SEQ ID NO: 90811 - protein, 27 aa, Artificial Sequence
  Cyclic GFR-binding peptide
  MOD_RES (27)..(27): Xaa is C or S
LNAISILYFVGRTPKVLKKYRMVVKSX

SEQ ID NO: 90812 - protein, 40 aa, Artificial Sequence
  Cyclic GFR-binding peptide
  MOD_RES (4)..(5)..(37)..(39): Xaa is C or S
PEPXXVPEKMSPINILYFDENKNVVYGKIPNMTVESXAXR

SEQ ID NO: 90813 - protein, 28 aa, Artificial Sequence
  Cyclic GFR-binding peptide
VPTELNAISMLYFDENEKVVLKKYRDMV

SEQ ID NO: 90814 - protein, 39 aa, Artificial Sequence; identical to SEQ ID NO: 41888
  Cyclic GFR-binding peptide
  MOD_RES (6)..(7)..(39): Xaa is C or S

SEQ ID NO: 90815 - protein, 27 aa, Artificial Sequence
  Cyclic GFR-binding peptide
VPTELSPINMLYFDENEKVVYGKIPDM

SEQ ID NO: 90816 - protein, 30 aa, Artificial Sequence
  Cyclic GFR-binding peptide
  MOD_RES (29)..(29): Xaa is C or S
RLSATSILYYDSANNVVLRKHRDMVVESXG

SEQ ID NO: 90817 - protein, 29 aa, Artificial Sequence
  Cyclic GFR-binding peptide
  MOD_RES (2)..(3): Xaa is C or S
AXXVPTELSATSMLYYDEYDKVVLRKHRE

SEQ ID NO: 90818 - protein, 37 aa, Artificial Sequence; identical to SEQ ID NO: 8861
  Cyclic GFR-binding peptide
  MOD_RES (2)..(3)..(34)..(36): Xaa is C or S

SEQ ID NO: 90819 - protein, 32 aa, Artificial Sequence; identical to SEQ ID NO: 19140
  Cyclic GFR-binding peptide
  MOD_RES (2)..(3): Xaa is C or S

SEQ ID NO: 90820 - protein, 30 aa, Artificial Sequence; identical to SEQ ID NO: 41902
  Cyclic GFR-binding peptide
  MOD_RES (2)..(3): Xaa is C or S

SEQ ID NO: 90821 - protein, 29 aa, Artificial Sequence
  Cyclic GFR-binding peptide
PTELSATSMLYYDEYDKVVLRKHREMVVE

SEQ ID NO: 90822 - protein, 32 aa, Artificial Sequence
  Cyclic GFR-binding peptide
  MOD_RES (1)..(32): Xaa is C or S
XAPVKTSPISMLYKDNGRVLLLKYHYMIVEEX

SEQ ID NO: 90823 - protein, 35 aa, Artificial Sequence; identical to SEQ ID NO: 8869
  Cyclic GFR-binding peptide
  MOD_RES (5)..(6): Xaa is C or S

SEQ ID NO: 90824 - protein, 27 aa, Artificial Sequence
  Cyclic GFR-binding peptide
  MOD_RES (26)..(26): Xaa is C or S
SPISILYKVGRKPKVLKYHYMIVRSXK

SEQ ID NO: 90825 - protein, 36 aa, Artificial Sequence; identical to SEQ ID NO: 19150
  Cyclic GFR-binding peptide
  MOD_RES (1)..(2)..(34)..(36): Xaa is C or S

SEQ ID NO: 90826 - protein, 22 aa, Artificial Sequence
  Cyclic GFR-binding peptide
LNAISILYFDSANNVVLKKYRD

SEQ ID NO: 90827 - protein, 27 aa, Artificial Sequence
  Cyclic GFR-binding peptide
KLSPINILYFDKGVVTYYGKIPGMAVS

SEQ ID NO: 90828 - protein, 36 aa, Artificial Sequence
  Cyclic GFR-binding peptide
  MOD_RES (2)..(3)..(35): Xaa is C or S
PXXTPTKMSPISMLYKNDKQQIILKYHYGMVVDRXG

SEQ ID NO: 90829 - protein, 31 aa, Artificial Sequence; identical to SEQ ID NO: 37592
  Cyclic GFR-binding peptide
  MOD_RES (5)..(6): Xaa is C or S

SEQ ID NO: 90830 - protein, 30 aa, Artificial Sequence; identical to SEQ ID NO: 41924
  Cyclic GFR-binding peptide
  MOD_RES (1)..(1): Xaa is C or S

SEQ ID NO: 90831 - protein, 40 aa, Artificial Sequence; identical to SEQ ID NO: 41926
  Cyclic GFR-binding peptide
  MOD_RES (6)..(7)..(39): Xaa is C or S

SEQ ID NO: 90832 - protein, 28 aa, Artificial Sequence
  Cyclic GFR-binding peptide
  MOD_RES (2)..(3): Xaa is C or S
AXXVPTELNAISMLYFDENEKVVLKKYR

SEQ ID NO: 90833 - protein, 27 aa, Artificial Sequence
  Cyclic GFR-binding peptide
PTKLSPINVLYFDSSNNVIYGKIPNMV

SEQ ID NO: 90834 - protein, 27 aa, Artificial Sequence
  Cyclic GFR-binding peptide
  MOD_RES (1)..(2): Xaa is C or S
XXAPTKLSPISVLYKDSSNNVILKYHY

SEQ ID NO: 90835 - protein, 42 aa, Artificial Sequence; identical to SEQ ID NO: 8884
  Cyclic GFR-binding peptide
  MOD_RES (5)..(6)..(39)..(41): Xaa is C or S

SEQ ID NO: 90836 - protein, 38 aa, Artificial Sequence; identical to SEQ ID NO: 37596
  Cyclic GFR-binding peptide
  MOD_RES (4)..(5)..(37): Xaa is C or S

SEQ ID NO: 90837 - protein, 32 aa, Artificial Sequence; identical to SEQ ID NO: 8886
  Cyclic GFR-binding peptide
  MOD_RES (4)..(5): Xaa is C or S

SEQ ID NO: 90838 - protein, 38 aa, Artificial Sequence
  Cyclic GFR-binding peptide
  MOD_RES (5)..(6)..(37): Xaa is C or S
VPSTXXAPVKTEPISMLYLDNGRVLLKFKYEMIVEEXG

SEQ ID NO: 90839 - protein, 36 aa, Artificial Sequence
  Cyclic GFR-binding peptide
  MOD_RES (5)..(6): Xaa is C or S
SASPXXVPQDLSPINILYFVGRTPKVYGKIPMVVKS

SEQ ID NO: 90840 - protein, 30 aa, Artificial Sequence; identical to SEQ ID NO: 8890
  Cyclic GFR-binding peptide
  MOD_RES (28)..(30): Xaa is C or S

SEQ ID NO: 90841 - protein, 40 aa, Artificial Sequence; identical to SEQ ID NO: 41936
  Cyclic GFR-binding peptide
  MOD_RES (5)..(6)..(38)..(40): Xaa is C or S

SEQ ID NO: 90842 - protein, 27 aa, Artificial Sequence
  Cyclic GFR-binding peptide
LSPISMLYKDENEKVVLKYHYDMVVEG

SEQ ID NO: 90843 - protein, 32 aa, Artificial Sequence; identical to SEQ ID NO: 76799
  Cyclic GFR-binding peptide
  MOD_RES (1)..(1): Xaa is C or S

SEQ ID NO: 90844 - protein, 29 aa, Artificial Sequence
  Cyclic GFR-binding peptide
  MOD_RES (1)..(1): Xaa is C or S
XAPTKLSATSVLYYDDSSNVILRKHRNMV

SEQ ID NO: 90845 - protein, 29 aa, Artificial Sequence
  Cyclic GFR-binding peptide
  MOD_RES (2)..(3): Xaa is C or S
TXXVPTRLNAISILYFDSANNVVLKKYRD

SEQ ID NO: 90846 - protein, 30 aa, Artificial Sequence; identical to SEQ ID NO: 37601
  Cyclic GFR-binding peptide
  MOD_RES (1)..(2): Xaa is C or S

SEQ ID NO: 90847 - protein, 28 aa, Artificial Sequence
  Cyclic GFR-binding peptide
  MOD_RES (1)..(1): Xaa is C or S
XAPTKLSPINVLYFDSSNNVIYGKIPNM

SEQ ID NO: 90848 - protein, 41 aa, Artificial Sequence; identical to SEQ ID NO: 41948
  Cyclic GFR-binding peptide
  MOD_RES (5)..(6)..(38)..(40): Xaa is C or S

SEQ ID NO: 90849 - protein, 34 aa, Artificial Sequence
  Cyclic GFR-binding peptide
  MOD_RES (32)..(34): Xaa is C or S
VPEKMSPISILYKDENKNVVLKYHYNMTVESXAX

SEQ ID NO: 90850 - protein, 33 aa, Artificial Sequence; identical to SEQ ID NO: 8895
  Cyclic GFR-binding peptide
  MOD_RES (3)..(3): Xaa is C or S

SEQ ID NO: 90851 - protein, 36 aa, Artificial Sequence
  Cyclic GFR-binding peptide
  MOD_RES (2)..(3)..(35): Xaa is C or S
PXXVPEKMSPISILYKDENKNVVLKYHYNMTVESXA

SEQ ID NO: 90852 - protein, 38 aa, Artificial Sequence; identical to SEQ ID NO: 37606
  Cyclic GFR-binding peptide
  MOD_RES (6)..(7): Xaa is C or S

SEQ ID NO: 90853 - protein, 30 aa, Artificial Sequence; identical to SEQ ID NO: 8898
  Cyclic GFR-binding peptide
  MOD_RES (3)..(4): Xaa is C or S

SEQ ID NO: 90854 - protein, 32 aa, Artificial Sequence
  Cyclic GFR-binding peptide
  MOD_RES (1)..(2): Xaa is C or S
XXVPTRLSATSILYYDSANNVVLRKHRDMVVE

SEQ ID NO: 90855 - protein, 21 aa, Artificial Sequence
  Cyclic GFR-binding peptide
SPINMLYFDEYDKVVYGKIPE

SEQ ID NO: 90856 - protein, 29 aa, Artificial Sequence
  Cyclic GFR-binding peptide
  MOD_RES (2)..(3): Xaa is C or S
PXXVPEKMSPISILYKDENKNVVLKYHYN

SEQ ID NO: 90857 - protein, 31 aa, Artificial Sequence; identical to SEQ ID NO: 37616
  Cyclic GFR-binding peptide
  MOD_RES (1)..(2): Xaa is C or S

SEQ ID NO: 90858 - protein, 34 aa, Artificial Sequence; identical to SEQ ID NO: 37617
  Cyclic GFR-binding peptide
  MOD_RES (32)..(34): Xaa is C or S

SEQ ID NO: 90859 - protein, 38 aa, Artificial Sequence; identical to SEQ ID NO: 41973
  Cyclic GFR-binding peptide
  MOD_RES (3)..(4)..(36)..(38): Xaa is C or S

SEQ ID NO: 90860 - protein, 39 aa, Artificial Sequence
  Cyclic GFR-binding peptide
  MOD_RES (5)..(6)..(38): Xaa is C or S
IPEPXXVPEKMSATSILYYDENKNVVLRKHRNMTVESXA

SEQ ID NO: 90861 - protein, 31 aa, Artificial Sequence; identical to SEQ ID NO: 37619
  Cyclic GFR-binding peptide
  MOD_RES (3)..(4): Xaa is C or S

SEQ ID NO: 90862 - protein, 25 aa, Artificial Sequence
  Cyclic GFR-binding peptide
LSPINVLYFDDMGVPTYGKIPEGMS

SEQ ID NO: 90863 - protein, 31 aa, Artificial Sequence; identical to SEQ ID NO: 41980
  Cyclic GFR-binding peptide

SEQ ID NO: 90864 - protein, 26 aa, Artificial Sequence
  Cyclic GFR-binding peptide
QDLSATSILYYVGRTPKVLRKHRMVV

SEQ ID NO: 90865 - protein, 33 aa, Artificial Sequence
  Cyclic GFR-binding peptide
  MOD_RES (2)..(3): Xaa is C or S
TXXAPVKTSPISMLYKDNGRVLLLKYHYMIVEE

SEQ ID NO: 90866 - protein, 31 aa, Artificial Sequence; identical to SEQ ID NO: 8914
  Cyclic GFR-binding peptide
  MOD_RES (1)..(2): Xaa is C or S

SEQ ID NO: 90867 - protein, 33 aa, Artificial Sequence; identical to SEQ ID NO: 8916
  Cyclic GFR-binding peptide
  MOD_RES (1)..(32): Xaa is C or S

SEQ ID NO: 90868 - protein, 36 aa, Artificial Sequence
  Cyclic GFR-binding peptide
  MOD_RES (5)..(6): Xaa is C or S
IPEPXXVPEKMNAISILYFDENKNVVLKKYRNMTVE

SEQ ID NO: 90869 - protein, 29 aa, Artificial Sequence
  Cyclic GFR-binding peptide
APTKLEPISVLYLDDSSNVIKFKYENMVV

SEQ ID NO: 90870 - protein, 33 aa, Artificial Sequence; identical to SEQ ID NO: 37630
  Cyclic GFR-binding peptide
  MOD_RES (6)..(7): Xaa is C or S

SEQ ID NO: 90871 - protein, 33 aa, Artificial Sequence; identical to SEQ ID NO: 41992
  Cyclic GFR-binding peptide
  MOD_RES (4)..(5): Xaa is C or S

SEQ ID NO: 90872 - protein, 30 aa, Artificial Sequence; identical to SEQ ID NO: 8918
  Cyclic GFR-binding peptide
  MOD_RES (27)..(29): Xaa is C or S

SEQ ID NO: 90873 - protein, 33 aa, Artificial Sequence; identical to SEQ ID NO: 8921
  Cyclic GFR-binding peptide
  MOD_RES (1)..(32): Xaa is C or S

SEQ ID NO: 90874 - protein, 33 aa, Artificial Sequence
  Cyclic GFR-binding peptide
  MOD_RES (6)..(7): Xaa is C or S
STPPTXXVPTRLEPISILYLDSANNVVKFKYED

SEQ ID NO: 90875 - protein, 29 aa, Artificial Sequence
  Cyclic GFR-binding peptide
  MOD_RES (1)..(1): Xaa is C or S
XVPARLNAISILYFDAANNVVLKKYRDMV

SEQ ID NO: 90876 - protein, 33 aa, Artificial Sequence
  Cyclic GFR-binding peptide
  MOD_RES (1)..(2): Xaa is C or S
XXTPTKMSATSMLYYNDKQQIILRKHRGMVVDR

SEQ ID NO: 90877 - protein, 31 aa, Artificial Sequence; identical to SEQ ID NO: 37640
  Cyclic GFR-binding peptide
  MOD_RES (2)..(3): Xaa is C or S

SEQ ID NO: 90878 - protein, 29 aa, Artificial Sequence
  Cyclic GFR-binding peptide
  MOD_RES (29)..(29): Xaa is C or S
ELSATSMLYYDENEKVVLRKHRDMVVEGX

SEQ ID NO: 90879 - protein, 24 aa, Artificial Sequence
  Cyclic GFR-binding peptide
TELSPISMLYKDEYDKVVLKYHYE

SEQ ID NO: 90880 - protein, 29 aa, Artificial Sequence
  Cyclic GFR-binding peptide
PQALEPISILYLVGRKPKVKFKYEMIVRS

SEQ ID NO: 90881 - protein, 40 aa, Artificial Sequence; identical to SEQ ID NO: 42002
  Cyclic GFR-binding peptide
  MOD_RES (6)..(7)..(38)..(40): Xaa is C or S

SEQ ID NO: 90882 - protein, 20 aa, Artificial Sequence
  Cyclic GFR-binding peptide
SATSILYYVGRKPKVLRKHR

SEQ ID NO: 90883 - protein, 40 aa, Artificial Sequence; identical to SEQ ID NO: 8930
  Cyclic GFR-binding peptide
  MOD_RES (5)..(6)..(39): Xaa is C or S

SEQ ID NO: 90884 - protein, 26 aa, Artificial Sequence
  Cyclic GFR-binding peptide
  MOD_RES (1)..(1): Xaa is C or S
XVPTELSPINMLYFDENEKVVYGKIP

SEQ ID NO: 90885 - protein, 36 aa, Artificial Sequence; identical to SEQ ID NO: 42007
  Cyclic GFR-binding peptide
  MOD_RES (3)..(4)..(36): Xaa is C or S

SEQ ID NO: 90886 - protein, 28 aa, Artificial Sequence
  Cyclic GFR-binding peptide
  MOD_RES (26)..(28): Xaa is C or S
EPISILYLIGKTPKIKFKYEMIVKSXKX

SEQ ID NO: 90887 - protein, 23 aa, Artificial Sequence
  Cyclic GFR-binding peptide
TKLSATSILYYDKGVVTYLRKHR

SEQ ID NO: 90888 - protein, 30 aa, Artificial Sequence; identical to SEQ ID NO: 8937
  Cyclic GFR-binding peptide

SEQ ID NO: 90889 - protein, 40 aa, Artificial Sequence; identical to SEQ ID NO: 76816
  Cyclic GFR-binding peptide
  MOD_RES (5)..(6)..(38)..(40): Xaa is C or S

SEQ ID NO: 90890 - protein, 26 aa, Artificial Sequence
  Cyclic GFR-binding peptide
VPTRLEPISILYLDSANNVVKFKYED

SEQ ID NO: 90891 - protein, 34 aa, Artificial Sequence; identical to SEQ ID NO: 76817
  Cyclic GFR-binding peptide
  MOD_RES (4)..(5): Xaa is C or S

SEQ ID NO: 90892 - protein, 39 aa, Artificial Sequence; identical to SEQ ID NO: 8938
  Cyclic GFR-binding peptide
  MOD_RES (6)..(7)..(38): Xaa is C or S

SEQ ID NO: 90893 - protein, 22 aa, Artificial Sequence
  Cyclic GFR-binding peptide
KMEPISILYLDENKNVVKFKYE

SEQ ID NO: 90894 - protein, 36 aa, Artificial Sequence
  Cyclic GFR-binding peptide
  MOD_RES (1)..(2)..(33)..(35): Xaa is C or S
XXVSQDLSPINILYFIGKTPKIYGKIPMIVKSXKXS

SEQ ID NO: 90895 - protein, 25 aa, Artificial Sequence
  Cyclic GFR-binding peptide
DLSPINILYFIGKTPKIYGKIPMIV

SEQ ID NO: 90896 - protein, 33 aa, Artificial Sequence; identical to SEQ ID NO: 42014
  Cyclic GFR-binding peptide
  MOD_RES (6)..(7): Xaa is C or S

SEQ ID NO: 90897 - protein, 31 aa, Artificial Sequence; identical to SEQ ID NO: 8939
  Cyclic GFR-binding peptide
  MOD_RES (1)..(2): Xaa is C or S

SEQ ID NO: 90898 - protein, 27 aa, Artificial Sequence
  Cyclic GFR-binding peptide
LSATSILYYDAANNVVLRKHRDMVVEA

SEQ ID NO: 90899 - protein, 39 aa, Artificial Sequence; identical to SEQ ID NO: 37665
  Cyclic GFR-binding peptide
  MOD_RES (5)..(6)..(38): Xaa is C or S

SEQ ID NO: 90900 - protein, 29 aa, Artificial Sequence
  Cyclic GFR-binding peptide
  MOD_RES (28)..(28): Xaa is C or S
SPINVLYFDDMGVPTYGKIPEGMSVAEXG

SEQ ID NO: 90901 - protein, 27 aa, Artificial Sequence
  Cyclic GFR-binding peptide
  MOD_RES (1)..(1): Xaa is C or S
XVPTELEPISMLYLDENEKVVKFKYED

SEQ ID NO: 90902 - protein, 31 aa, Artificial Sequence
  Cyclic GFR-binding peptide
  MOD_RES (3)..(4): Xaa is C or S
EPXXVPEKMSPINILYFDENKNVVYGKIPNM

SEQ ID NO: 90903 - protein, 27 aa, Artificial Sequence
  Cyclic GFR-binding peptide
  MOD_RES (1)..(2): Xaa is C or S
XXTPTKMSPISMLYKNDKQQIILKYHY

SEQ ID NO: 90904 - protein, 32 aa, Artificial Sequence; identical to SEQ ID NO: 42019
  Cyclic GFR-binding peptide
  MOD_RES (29)..(31): Xaa is C or S

SEQ ID NO: 90905 - protein, 36 aa, Artificial Sequence; identical to SEQ ID NO: 8944
  Cyclic GFR-binding peptide
  MOD_RES (1)..(2)..(34)..(36): Xaa is C or S

SEQ ID NO: 90906 - protein, 28 aa, Artificial Sequence
  Cyclic GFR-binding peptide
  MOD_RES (2)..(3): Xaa is C or S
PXXVSQDLSATSILYYIGKTPKILRKHR

SEQ ID NO: 90907 - protein, 33 aa, Artificial Sequence; identical to SEQ ID NO: 8946
  Cyclic GFR-binding peptide
  MOD_RES (31)..(33): Xaa is C or S

SEQ ID NO: 90908 - protein, 31 aa, Artificial Sequence; identical to SEQ ID NO: 37671
  Cyclic GFR-binding peptide
  MOD_RES (31)..(31): Xaa is C or S

SEQ ID NO: 90909 - protein, 27 aa, Artificial Sequence
  Cyclic GFR-binding peptide
  MOD_RES (1)..(1): Xaa is C or S
XTPTKMSATSMLYYNDKQQIILRKHRG

SEQ ID NO: 90910 - protein, 28 aa, Artificial Sequence
  Cyclic GFR-binding peptide
  MOD_RES (1)..(1): Xaa is C or S
XAPTQLSPINVLYFDDSSNVIYGKIPNM

SEQ ID NO: 90911 - protein, 34 aa, Artificial Sequence; identical to SEQ ID NO: 37674
  Cyclic GFR-binding peptide
  MOD_RES (4)..(5): Xaa is C or S

SEQ ID NO: 90912 - protein, 36 aa, Artificial Sequence; identical to SEQ ID NO: 42029
  Cyclic GFR-binding peptide
  MOD_RES (2)..(3)..(35): Xaa is C or S

SEQ ID NO: 90913 - protein, 38 aa, Artificial Sequence; identical to SEQ ID NO: 42031
  Cyclic GFR-binding peptide
  MOD_RES (6)..(7): Xaa is C or S

SEQ ID NO: 90914 - protein, 24 aa, Artificial Sequence
  Cyclic GFR-binding peptide
PQALEPISILYLVGRKPKVKFKYE

SEQ ID NO: 90915 - protein, 38 aa, Artificial Sequence; identical to SEQ ID NO: 8949
  Cyclic GFR-binding peptide
  MOD_RES (4)..(5)..(37): Xaa is C or S

SEQ ID NO: 90916 - protein, 37 aa, Artificial Sequence; identical to SEQ ID NO: 8950
  Cyclic GFR-binding peptide
  MOD_RES (6)..(7): Xaa is C or S

SEQ ID NO: 90917 - protein, 33 aa, Artificial Sequence; identical to SEQ ID NO: 8952
  Cyclic GFR-binding peptide
  MOD_RES (2)..(3): Xaa is C or S

SEQ ID NO: 90918 - protein, 38 aa, Artificial Sequence; identical to SEQ ID NO: 37684
  Cyclic GFR-binding peptide
  MOD_RES (5)..(6)..(37): Xaa is C or S

SEQ ID NO: 90919 - protein, 35 aa, Artificial Sequence; identical to SEQ ID NO: 8954
  Cyclic GFR-binding peptide
  MOD_RES (4)..(5): Xaa is C or S

SEQ ID NO: 90920 - protein, 26 aa, Artificial Sequence
  Cyclic GFR-binding peptide
VPQDLSPINILYFVGRTPKVYGKIPM

SEQ ID NO: 90921 - protein, 36 aa, Artificial Sequence
  Cyclic GFR-binding peptide
  MOD_RES (1)..(2)..(34)..(36): Xaa is C or S
XXTPTKMSATSMLYYNDKQQIILRKHRGMVVDRXGX

SEQ ID NO: 90922 - protein, 34 aa, Artificial Sequence
  Cyclic GFR-binding peptide
  MOD_RES (1)..(2)..(33): Xaa is C or S
XXVSQDLSPINILYFIGKTPKIYGKIPMIVKSXK

SEQ ID NO: 90923 - protein, 29 aa, Artificial Sequence
  Cyclic GFR-binding peptide
  MOD_RES (2)..(3): Xaa is C or S
PXXVPQDLSPINILYFVGRTPKVYGKIPM

SEQ ID NO: 90924 - protein, 21 aa, Artificial Sequence
  Cyclic GFR-binding peptide
LSATSMLYYDEYDKVVLRKHR

SEQ ID NO: 90925 - protein, 28 aa, Artificial Sequence
  Cyclic GFR-binding peptide
  MOD_RES (27)..(27): Xaa is C or S
LSATSILYYVGRKPKVLRKHRMIVRSXK

SEQ ID NO: 90926 - protein, 34 aa, Artificial Sequence; identical to SEQ ID NO: 8961
  Cyclic GFR-binding peptide
  MOD_RES (6)..(7): Xaa is C or S

SEQ ID NO: 90927 - protein, 34 aa, Artificial Sequence
  Cyclic GFR-binding peptide
  MOD_RES (2)..(3): Xaa is C or S
AXXVPTKLSATSILYYDKGVVTYLRKHRGMAVSE

SEQ ID NO: 90928 - protein, 35 aa, Artificial Sequence; identical to SEQ ID NO: 42036
  Cyclic GFR-binding peptide
  MOD_RES (5)..(6): Xaa is C or S

SEQ ID NO: 90929 - protein, 30 aa, Artificial Sequence; identical to SEQ ID NO: 8962
  Cyclic GFR-binding peptide

SEQ ID NO: 90930 - protein, 37 aa, Artificial Sequence; identical to SEQ ID NO: 8964
  Cyclic GFR-binding peptide
  MOD_RES (2)..(3)..(34)..(36): Xaa is C or S

SEQ ID NO: 90931 - protein, 31 aa, Artificial Sequence; identical to SEQ ID NO: 42039
  Cyclic GFR-binding peptide

SEQ ID NO: 90932 - protein, 34 aa, Artificial Sequence
  Cyclic GFR-binding peptide
  MOD_RES (1)..(2)..(34): Xaa is C or S
XXVPTRLEPISILYLDSANNVVKFKYEDMVVESX

SEQ ID NO: 90933 - protein, 37 aa, Artificial Sequence; identical to SEQ ID NO: 42042
  Cyclic GFR-binding peptide
  MOD_RES (6)..(7): Xaa is C or S

SEQ ID NO: 90934 - protein, 24 aa, Artificial Sequence
  Cyclic GFR-binding peptide
SPINILYFVGRTPKVYGKIPMVVK

SEQ ID NO: 90935 - protein, 30 aa, Artificial Sequence
  Cyclic GFR-binding peptide
  MOD_RES (4)..(5): Xaa is C or S
PASXXVPARLSATSILYYDAANNVVLRKHR

SEQ ID NO: 90936 - protein, 37 aa, Artificial Sequence
  Cyclic GFR-binding peptide
  MOD_RES (6)..(7): Xaa is C or S
STPPTXXVPTRLSPISILYKDSANNVVLKYHYDMVVE

SEQ ID NO: 90937 - protein, 28 aa, Artificial Sequence
  Cyclic GFR-binding peptide
  MOD_RES (26)..(28): Xaa is C or S
NAISILYFVGRKPKVLKKYRMIVRSXKX

SEQ ID NO: 90938 - protein, 25 aa, Artificial Sequence
  Cyclic GFR-binding peptide
ELSATSMLYYDEYDKVVLRKHREMV

SEQ ID NO: 90939 - protein, 30 aa, Artificial Sequence; identical to SEQ ID NO: 8971
  Cyclic GFR-binding peptide
  MOD_RES (2)..(3): Xaa is C or S

SEQ ID NO: 90940 - protein, 28 aa, Artificial Sequence
  Cyclic GFR-binding peptide
  MOD_RES (28)..(28): Xaa is C or S
SPINVLYFDDMGVPTYGKIPEGMSVAEX

SEQ ID NO: 90941 - protein, 39 aa, Artificial Sequence; identical to SEQ ID NO: 8973
  Cyclic GFR-binding peptide
  MOD_RES (6)..(7)..(38): Xaa is C or S

SEQ ID NO: 90942 - protein, 30 aa, Artificial Sequence
  Cyclic GFR-binding peptide
  MOD_RES (4)..(5): Xaa is C or S
PEPXXVPEKMNAISILYFDENKNVVLKKYR

SEQ ID NO: 90943 - protein, 27 aa, Artificial Sequence
  Cyclic GFR-binding peptide
PTELSPISMLYKDEYDKVVLKYHYEMV

SEQ ID NO: 90944 - protein, 36 aa, Artificial Sequence; identical to SEQ ID NO: 8981
  Cyclic GFR-binding peptide
  MOD_RES (4)..(5)..(36): Xaa is C or S

SEQ ID NO: 90945 - protein, 28 aa, Artificial Sequence
  Cyclic GFR-binding peptide
  MOD_RES (28)..(28): Xaa is C or S
LNAISILYFDKGVVTYLKKYRGMAVSEX

SEQ ID NO: 90946 - protein, 26 aa, Artificial Sequence
  Cyclic GFR-binding peptide
KTNAISMLYFDNGRVLLLKKYRMIVE

SEQ ID NO: 90947 - protein, 38 aa, Artificial Sequence; identical to SEQ ID NO: 42050
  Cyclic GFR-binding peptide
  MOD_RES (2)..(3)..(36)..(38): Xaa is C or S

SEQ ID NO: 90948 - protein, 31 aa, Artificial Sequence; identical to SEQ ID NO: 37704
  Cyclic GFR-binding peptide

SEQ ID NO: 90949 - protein, 38 aa, Artificial Sequence; identical to SEQ ID NO: 37705
  Cyclic GFR-binding peptide
  MOD_RES (4)..(5)..(37): Xaa is C or S

SEQ ID NO: 90950 - protein, 25 aa, Artificial Sequence
  Cyclic GFR-binding peptide
PTELEPISMLYLDEYDKVVKFKYEE

SEQ ID NO: 90951 - protein, 26 aa, Artificial Sequence
  Cyclic GFR-binding peptide
TNAISMLYFDNGRVLLLKKYRMIVEE

SEQ ID NO: 90952 - protein, 34 aa, Artificial Sequence; identical to SEQ ID NO: 8988
  Cyclic GFR-binding peptide
  MOD_RES (2)..(3)..(34): Xaa is C or S

SEQ ID NO: 90953 - protein, 37 aa, Artificial Sequence; identical to SEQ ID NO: 8991
  Cyclic GFR-binding peptide
  MOD_RES (1)..(2)..(34)..(36): Xaa is C or S

SEQ ID NO: 90954 - protein, 37 aa, Artificial Sequence; identical to SEQ ID NO: 37715
  Cyclic GFR-binding peptide
  MOD_RES (5)..(6): Xaa is C or S

SEQ ID NO: 90955 - protein, 37 aa, Artificial Sequence; identical to SEQ ID NO: 8994
  Cyclic GFR-binding peptide
  MOD_RES (1)..(2)..(34)..(36): Xaa is C or S

SEQ ID NO: 90956 - protein, 34 aa, Artificial Sequence; identical to SEQ ID NO: 8995
  Cyclic GFR-binding peptide
  MOD_RES (5)..(6): Xaa is C or S

SEQ ID NO: 90957 - protein, 39 aa, Artificial Sequence
  Cyclic GFR-binding peptide
  MOD_RES (5)..(6)..(37)..(39): Xaa is C or S
VPSTXXAPVKTSATSMLYYDNGRVLLLRKHRMIVEEXGX

SEQ ID NO: 90958 - protein, 34 aa, Artificial Sequence; identical to SEQ ID NO: 8996
  Cyclic GFR-binding peptide
  MOD_RES (31)..(33): Xaa is C or S

SEQ ID NO: 90959 - protein, 32 aa, Artificial Sequence; identical to SEQ ID NO: 8998
  Cyclic GFR-binding peptide
  MOD_RES (1)..(1): Xaa is C or S

SEQ ID NO: 90960 - protein, 35 aa, Artificial Sequence; identical to SEQ ID NO: 8999
  Cyclic GFR-binding peptide
  MOD_RES (4)..(5): Xaa is C or S

SEQ ID NO: 90961 - protein, 25 aa, Artificial Sequence
  Cyclic GFR-binding peptide
TKLNAISVLYFDDMGVPTLKKYREG

SEQ ID NO: 90962 - protein, 27 aa, Artificial Sequence
  Cyclic GFR-binding peptide
PTKMSPISMLYKNDKQQIILKYHYGMV

SEQ ID NO: 90963 - protein, 34 aa, Artificial Sequence; identical to SEQ ID NO: 42069
  Cyclic GFR-binding peptide
  MOD_RES (3)..(4): Xaa is C or S

SEQ ID NO: 90964 - protein, 31 aa, Artificial Sequence; identical to SEQ ID NO: 37725
  Cyclic GFR-binding peptide

SEQ ID NO: 90965 - protein, 38 aa, Artificial Sequence; identical to SEQ ID NO: 37727
  Cyclic GFR-binding peptide
  MOD_RES (6)..(7): Xaa is C or S

SEQ ID NO: 90966 - protein, 28 aa, Artificial Sequence
  Cyclic GFR-binding peptide
PVKTSATSMLYYDNGRVLLLRKHRMIVE

SEQ ID NO: 90967 - protein, 24 aa, Artificial Sequence
  Cyclic GFR-binding peptide
PTKLNAISILYFDKGVVTYLKKYR

SEQ ID NO: 90968 - protein, 38 aa, Artificial Sequence; identical to SEQ ID NO: 37731
  Cyclic GFR-binding peptide
  MOD_RES (3)..(4)..(36)..(38): Xaa is C or S

SEQ ID NO: 90969 - protein, 24 aa, Artificial Sequence
  Cyclic GFR-binding peptide
DLSATSILYYVGRTPKVLRKHRMV

SEQ ID NO: 90970 - protein, 33 aa, Artificial Sequence; identical to SEQ ID NO: 42082
  Cyclic GFR-binding peptide
  MOD_RES (32)..(32): Xaa is C or S

SEQ ID NO: 90971 - protein, 33 aa, Artificial Sequence
  Cyclic GFR-binding peptide
  MOD_RES (4)..(5): Xaa is C or S
AGPXXTPTKMEPISMLYLNDKQQIIKFKYEGMV

SEQ ID NO: 90972 - protein, 30 aa, Artificial Sequence; identical to SEQ ID NO: 9013
  Cyclic GFR-binding peptide
  MOD_RES (27)..(29): Xaa is C or S

SEQ ID NO: 90973 - protein, 34 aa, Artificial Sequence; identical to SEQ ID NO: 37737
  Cyclic GFR-binding peptide
  MOD_RES (31)..(33): Xaa is C or S

SEQ ID NO: 90974 - protein, 27 aa, Artificial Sequence
  Cyclic GFR-binding peptide
  MOD_RES (1)..(2): Xaa is C or S
XXVPARLNAISILYFDAANNVVLKKYR

SEQ ID NO: 90975 - protein, 42 aa, Artificial Sequence; identical to SEQ ID NO: 37739
  Cyclic GFR-binding peptide
  MOD_RES (6)..(7)..(39)..(41): Xaa is C or S

SEQ ID NO: 90976 - protein, 29 aa, Artificial Sequence
  Cyclic GFR-binding peptide
  MOD_RES (28)..(28): Xaa is C or S
LSATSMLYYDENEKVVLRKHRDMVVEGXG

SEQ ID NO: 90977 - protein, 27 aa, Artificial Sequence
  Cyclic GFR-binding peptide
  MOD_RES (1)..(2): Xaa is C or S
XXVPARLSPISILYKDAANNVVLKYHY

SEQ ID NO: 90978 - protein, 33 aa, Artificial Sequence; identical to SEQ ID NO: 42090
  Cyclic GFR-binding peptide
  MOD_RES (1)..(33): Xaa is C or S

SEQ ID NO: 90979 - protein, 29 aa, Artificial Sequence
  Cyclic GFR-binding peptide
  MOD_RES (29)..(29): Xaa is C or S
QLSPINVLYFDDSSNVIYGKIPNMVVRAX

SEQ ID NO: 90980 - protein, 31 aa, Artificial Sequence; identical to SEQ ID NO: 9022
  Cyclic GFR-binding peptide
  MOD_RES (31)..(31): Xaa is C or S

SEQ ID NO: 90981 - protein, 33 aa, Artificial Sequence; identical to SEQ ID NO: 9023
  Cyclic GFR-binding peptide
  MOD_RES (31)..(33): Xaa is C or S

SEQ ID NO: 90982 - protein, 31 aa, Artificial Sequence; identical to SEQ ID NO: 9024
  Cyclic GFR-binding peptide
  MOD_RES (4)..(5): Xaa is C or S

SEQ ID NO: 90983 - protein, 39 aa, Artificial Sequence; identical to SEQ ID NO: 42098
  Cyclic GFR-binding peptide
  MOD_RES (4)..(5)..(37)..(39): Xaa is C or S

SEQ ID NO: 90984 - protein, 28 aa, Artificial Sequence
  Cyclic GFR-binding peptide
PTQLEPISVLYLDDSSNVIKFKYENMVV

SEQ ID NO: 90985 - protein, 27 aa, Artificial Sequence
  Cyclic GFR-binding peptide
  MOD_RES (1)..(2): Xaa is C or S
XXVPTKLSATSILYYDKGVVTYLRKHR

SEQ ID NO: 90986 - protein, 30 aa, Artificial Sequence; identical to SEQ ID NO: 37754
  Cyclic GFR-binding peptide
  MOD_RES (30)..(30): Xaa is C or S

SEQ ID NO: 90987 - protein, 36 aa, Artificial Sequence; identical to SEQ ID NO: 37755
  Cyclic GFR-binding peptide
  MOD_RES (2)..(3)..(34)..(36): Xaa is C or S

SEQ ID NO: 90988 - protein, 27 aa, Artificial Sequence
  Cyclic GFR-binding peptide
PTELSATSMLYYDEYDKVVLRKHREMV

SEQ ID NO: 90989 - protein, 30 aa, Artificial Sequence; identical to SEQ ID NO: 37757
  Cyclic GFR-binding peptide

SEQ ID NO: 90990 - protein, 30 aa, Artificial Sequence; identical to SEQ ID NO: 76871
  Cyclic GFR-binding peptide
  MOD_RES (28)..(30): Xaa is C or S

SEQ ID NO: 90991 - protein, 38 aa, Artificial Sequence
  Cyclic GFR-binding peptide
  MOD_RES (5)..(6)..(38): Xaa is C or S
IPEPXXVPEKMNAISILYFDENKNVVLKKYRNMTVESX

SEQ ID NO: 90992 - protein, 29 aa, Artificial Sequence
  Cyclic GFR-binding peptide
ARLSATSILYYDAANNVVLRKHRDMVVEA

SEQ ID NO: 90993 - protein, 29 aa, Artificial Sequence
  Cyclic GFR-binding peptide
  MOD_RES (27)..(29): Xaa is C or S
NAISILYFDKGVVTYLKKYRGMAVSEXGX

SEQ ID NO: 90994 - protein, 40 aa, Artificial Sequence; identical to SEQ ID NO: 42119
  Cyclic GFR-binding peptide
  MOD_RES (4)..(5)..(37)..(39): Xaa is C or S

SEQ ID NO: 90995 - protein, 27 aa, Artificial Sequence
  Cyclic GFR-binding peptide
LNAISVLYFDSSNNVILKKYRNMVVKA

SEQ ID NO: 90996 - protein, 29 aa, Artificial Sequence
  Cyclic GFR-binding peptide
  MOD_RES (1)..(1): Xaa is C or S
XVPEKMEPISILYLDENKNVVKFKYENMT

SEQ ID NO: 90997 - protein, 28 aa, Artificial Sequence
  Cyclic GFR-binding peptide
TKLSPISILYKDKGVVTYLKYHYGMAVS

SEQ ID NO: 90998 - protein, 32 aa, Artificial Sequence
  Cyclic GFR-binding peptide
  MOD_RES (1)..(2): Xaa is C or S
XXTPTKMSPISMLYKNDKQQIILKYHYGMVVD

SEQ ID NO: 90999 - protein, 21 aa, Artificial Sequence
  Cyclic GFR-binding peptide
MNAISILYFDENKNVVLKKYR

SEQ ID NO: 91000 - protein, 40 aa, Artificial Sequence; identical to SEQ ID NO: 37770
  Cyclic GFR-binding peptide
  MOD_RES (4)..(5)..(38)..(40): Xaa is C or S

SEQ ID NO: 91001 - protein, 30 aa, Artificial Sequence
  Cyclic GFR-binding peptide
  MOD_RES (1)..(1): Xaa is C or S
XVPEKMNAISILYFDENKNVVLKKYRNMTV

SEQ ID NO: 91002 - protein, 33 aa, Artificial Sequence; identical to SEQ ID NO: 9045
  Cyclic GFR-binding peptide
  MOD_RES (1)..(2): Xaa is C or S

SEQ ID NO: 91003 - protein, 28 aa, Artificial Sequence
  Cyclic GFR-binding peptide
VPQDLNAISILYFVGRTPKVLKKYRMVV

SEQ ID NO: 91004 - protein, 35 aa, Artificial Sequence; identical to SEQ ID NO: 9049
  Cyclic GFR-binding peptide
  MOD_RES (2)..(3)..(34): Xaa is C or S

SEQ ID NO: 91005 - protein, 38 aa, Artificial Sequence; identical to SEQ ID NO: 42133
  Cyclic GFR-binding peptide
  MOD_RES (6)..(7): Xaa is C or S

SEQ ID NO: 91006 - protein, 33 aa, Artificial Sequence; identical to SEQ ID NO: 9055
  Cyclic GFR-binding peptide
  MOD_RES (1)..(33): Xaa is C or S

SEQ ID NO: 91007 - protein, 30 aa, Artificial Sequence
  Cyclic GFR-binding peptide
  MOD_RES (30)..(30): Xaa is C or S
EKMNAISILYFDENKNVVLKKYRNMTVESX

SEQ ID NO: 91008 - protein, 29 aa, Artificial Sequence
  Cyclic GFR-binding peptide
  MOD_RES (27)..(29): Xaa is C or S
EPISILYLDSANNVVKFKYEDMVVESXGX

SEQ ID NO: 91009 - protein, 34 aa, Artificial Sequence; identical to SEQ ID NO: 9059
  Cyclic GFR-binding peptide
  MOD_RES (32)..(34): Xaa is C or S

SEQ ID NO: 91010 - protein, 28 aa, Artificial Sequence
  Cyclic GFR-binding peptide
VPQALSPISILYKVGRKPKVLKYHYMIV

SEQ ID NO: 91011 - protein, 35 aa, Artificial Sequence; identical to SEQ ID NO: 42144
  Cyclic GFR-binding peptide
  MOD_RES (6)..(7): Xaa is C or S

SEQ ID NO: 91012 - protein, 33 aa, Artificial Sequence; identical to SEQ ID NO: 42145
  Cyclic GFR-binding peptide
  MOD_RES (30)..(32): Xaa is C or S

SEQ ID NO: 91013 - protein, 24 aa, Artificial Sequence
  Cyclic GFR-binding peptide
SPINMLYFDEYDKVVYGKIPEMVV

SEQ ID NO: 91014 - protein, 30 aa, Artificial Sequence; identical to SEQ ID NO: 9061
  Cyclic GFR-binding peptide
  MOD_RES (27)..(29): Xaa is C or S

SEQ ID NO: 91015 - protein, 26 aa, Artificial Sequence
  Cyclic GFR-binding peptide
PEKMNAISILYFDENKNVVLKKYRNM

SEQ ID NO: 91016 - protein, 21 aa, Artificial Sequence
  Cyclic GFR-binding peptide
EPISILYLDAANNVVKFKYED

SEQ ID NO: 91017 - protein, 28 aa, Artificial Sequence
  Cyclic GFR-binding peptide
TKMSATSMLYYNDKQQIILRKHRGMVVD

SEQ ID NO: 91018 - protein, 24 aa, Artificial Sequence
  Cyclic GFR-binding peptide
PTKLSPISVLYKDDSSNVILKYHY

SEQ ID NO: 91019 - protein, 23 aa, Artificial Sequence
  Cyclic GFR-binding peptide
LSATSILYYDAANNVVLRKHRDM

SEQ ID NO: 91020 - protein, 40 aa, Artificial Sequence; identical to SEQ ID NO: 42153
  Cyclic GFR-binding peptide
  MOD_RES (5)..(6)..(38)..(40): Xaa is C or S

SEQ ID NO: 91021 - protein, 34 aa, Artificial Sequence; identical to SEQ ID NO: 9066
  Cyclic GFR-binding peptide
  MOD_RES (3)..(4): Xaa is C or S

SEQ ID NO: 91022 - protein, 24 aa, Artificial Sequence
  Cyclic GFR-binding peptide
RLEPISILYLDSANNVVKFKYEDM

SEQ ID NO: 91023 - protein, 34 aa, Artificial Sequence; identical to SEQ ID NO: 9068
  Cyclic GFR-binding peptide
  MOD_RES (1)..(33): Xaa is C or S

SEQ ID NO: 91024 - protein, 29 aa, Artificial Sequence
  Cyclic GFR-binding peptide
VPTKLSPINILYFDKGVVTYYGKIPGMAV

SEQ ID NO: 91025 - protein, 33 aa, Artificial Sequence
  Cyclic GFR-binding peptide
  MOD_RES (30)..(32): Xaa is C or S
ARLSATSILYYDAANNVVLRKHRDMVVEAXGXR

SEQ ID NO: 91026 - protein, 29 aa, Artificial Sequence
  Cyclic GFR-binding peptide
VPTKLSPISILYKDKGVVTYLKYHYGMAV

SEQ ID NO: 91027 - protein, 38 aa, Artificial Sequence; identical to SEQ ID NO: 37797
  Cyclic GFR-binding peptide
  MOD_RES (5)..(37): Xaa is C or S

SEQ ID NO: 91028 - protein, 42 aa, Artificial Sequence; identical to SEQ ID NO: 9069
  Cyclic GFR-binding peptide
  MOD_RES (6)..(7)..(39)..(41): Xaa is C or S

SEQ ID NO: 91029 - protein, 25 aa, Artificial Sequence
  Cyclic GFR-binding peptide
KMSPISMLYKNDKQQIILKYHYGMV

SEQ ID NO: 91030 - protein, 33 aa, Artificial Sequence; identical to SEQ ID NO: 9071
  Cyclic GFR-binding peptide
  MOD_RES (1)..(2)..(33): Xaa is C or S

SEQ ID NO: 91031 - protein, 35 aa, Artificial Sequence; identical to SEQ ID NO: 37802
  Cyclic GFR-binding peptide
  MOD_RES (32)..(34): Xaa is C or S

SEQ ID NO: 91032 - protein, 35 aa, Artificial Sequence; identical to SEQ ID NO: 9073
  Cyclic GFR-binding peptide
  MOD_RES (4)..(5): Xaa is C or S

SEQ ID NO: 91033 - protein, 21 aa, Artificial Sequence
  Cyclic GFR-binding peptide
LNAISVLYFDSSNNVILKKYR

SEQ ID NO: 91034 - protein, 33 aa, Artificial Sequence; identical to SEQ ID NO: 9080
  Cyclic GFR-binding peptide
  MOD_RES (2)..(3): Xaa is C or S

SEQ ID NO: 91035 - protein, 30 aa, Artificial Sequence
  Cyclic GFR-binding peptide
  MOD_RES (4)..(5): Xaa is C or S
PEPXXVPEKMSPISILYKDENKNVVLKYHY

SEQ ID NO: 91036 - protein, 33 aa, Artificial Sequence
  Cyclic GFR-binding peptide
  MOD_RES (6)..(7): Xaa is C or S
HVPKPXXAPTKLSATSVLYYDDSSNVILRKHRN

SEQ ID NO: 91037 - protein, 31 aa, Artificial Sequence; identical to SEQ ID NO: 9085
  Cyclic GFR-binding peptide
  MOD_RES (3)..(4): Xaa is C or S

SEQ ID NO: 91038 - protein, 38 aa, Artificial Sequence
  Cyclic GFR-binding peptide
  MOD_RES (3)..(4)..(36)..(38): Xaa is C or S
EPXXVPEKMSPISILYKDENKNVVLKYHYNMTVESXAX

SEQ ID NO: 91039 - protein, 25 aa, Artificial Sequence
  Cyclic GFR-binding peptide
KLEPISVLYLDDMGVPTKFKYEEGM

SEQ ID NO: 91040 - protein, 36 aa, Artificial Sequence; identical to SEQ ID NO: 9087
  Cyclic GFR-binding peptide
  MOD_RES (33)..(35): Xaa is C or S

SEQ ID NO: 91041 - protein, 38 aa, Artificial Sequence; identical to SEQ ID NO: 9090
  Cyclic GFR-binding peptide
  MOD_RES (5)..(6)..(37): Xaa is C or S

SEQ ID NO: 91042 - protein, 28 aa, Artificial Sequence
  Cyclic GFR-binding peptide
  MOD_RES (26)..(28): Xaa is C or S
SPISILYKVGRKPKVLKYHYMIVRSXKX

SEQ ID NO: 91043 - protein, 30 aa, Artificial Sequence
  Cyclic GFR-binding peptide
  MOD_RES (3)..(4): Xaa is C or S
GPXXTPTKMSPISMLYKNDKQQIILKYHYG

SEQ ID NO: 91044 - protein, 31 aa, Artificial Sequence; identical to SEQ ID NO: 9094
  Cyclic GFR-binding peptide
  MOD_RES (5)..(6): Xaa is C or S

SEQ ID NO: 91045 - protein, 24 aa, Artificial Sequence
  Cyclic GFR-binding peptide
TKLEPISVLYLDDMGVPTKFKYEE

SEQ ID NO: 91046 - protein, 34 aa, Artificial Sequence; identical to SEQ ID NO: 9096
  Cyclic GFR-binding peptide
  MOD_RES (31)..(33): Xaa is C or S

SEQ ID NO: 91047 - protein, 34 aa, Artificial Sequence; identical to SEQ ID NO: 9101
  Cyclic GFR-binding peptide
  MOD_RES (1)..(2)..(34): Xaa is C or S

SEQ ID NO: 91048 - protein, 29 aa, Artificial Sequence
  Cyclic GFR-binding peptide
VSQDLSPISILYKIGKTPKILKYHYMIVK

SEQ ID NO: 91049 - protein, 29 aa, Artificial Sequence
  Cyclic GFR-binding peptide
  MOD_RES (26)..(28): Xaa is C or S
SATSILYYIGKTPKILRKHRMIVKSXKXS

SEQ ID NO: 91050 - protein, 35 aa, Artificial Sequence; identical to SEQ ID NO: 9106
  Cyclic GFR-binding peptide
  MOD_RES (1)..(2)..(34): Xaa is C or S

SEQ ID NO: 91051 - protein, 30 aa, Artificial Sequence; identical to SEQ ID NO: 42193
  Cyclic GFR-binding peptide
  MOD_RES (1)..(2): Xaa is C or S

SEQ ID NO: 91052 - protein, 30 aa, Artificial Sequence; identical to SEQ ID NO: 9108
  Cyclic GFR-binding peptide
  MOD_RES (29)..(29): Xaa is C or S

SEQ ID NO: 91053 - protein, 39 aa, Artificial Sequence; identical to SEQ ID NO: 42195
  Cyclic GFR-binding peptide
  MOD_RES (6)..(7)..(39): Xaa is C or S

SEQ ID NO: 91054 - protein, 32 aa, Artificial Sequence; identical to SEQ ID NO: 42198
  Cyclic GFR-binding peptide
  MOD_RES (5)..(6): Xaa is C or S

SEQ ID NO: 91055 - protein, 36 aa, Artificial Sequence; identical to SEQ ID NO: 37847
  Cyclic GFR-binding peptide
  MOD_RES (6)..(7): Xaa is C or S

SEQ ID NO: 91056 - protein, 33 aa, Artificial Sequence
  Cyclic GFR-binding peptide
  MOD_RES (5)..(6): Xaa is C or S
SAGPXXTPTKMSATSMLYYNDKQQIILRKHRGM

SEQ ID NO: 91057 - protein, 29 aa, Artificial Sequence
  Cyclic GFR-binding peptide
  MOD_RES (1)..(1): Xaa is C or S
XAPTKLSPISVLYKDSSNNVILKYHYNMV

SEQ ID NO: 91058 - protein, 32 aa, Artificial Sequence
  Cyclic GFR-binding peptide
  MOD_RES (1)..(2): Xaa is C or S
XXVPTRLEPISILYLDSANNVVKFKYEDMVVE

SEQ ID NO: 91059 - protein, 26 aa, Artificial Sequence
  Cyclic GFR-binding peptide
APTQLSATSVLYYDDSSNVILRKHRN

SEQ ID NO: 91060 - protein, 28 aa, Artificial Sequence
  Cyclic GFR-binding peptide
  MOD_RES (1)..(1): Xaa is C or S
XVPQALSPINILYFVGRKPKVYGKIPMI

SEQ ID NO: 91061 - protein, 41 aa, Artificial Sequence; identical to SEQ ID NO: 42203
  Cyclic GFR-binding peptide
  MOD_RES (5)..(6)..(38)..(40): Xaa is C or S

SEQ ID NO: 91062 - protein, 24 aa, Artificial Sequence
  Cyclic GFR-binding peptide
LEPISILYLVGRKPKVKFKYEMIV

SEQ ID NO: 91063 - protein, 31 aa, Artificial Sequence
  Cyclic GFR-binding peptide
  MOD_RES (2)..(3): Xaa is C or S
PXXTPTKMSATSMLYYNDKQQIILRKHRGMV

SEQ ID NO: 91064 - protein, 35 aa, Artificial Sequence; identical to SEQ ID NO: 42208
  Cyclic GFR-binding peptide
  MOD_RES (6)..(7): Xaa is C or S

SEQ ID NO: 91065 - protein, 26 aa, Artificial Sequence
  Cyclic GFR-binding peptide
TELSPISMLYKDENEKVVLKYHYDMV

SEQ ID NO: 91066 - protein, 36 aa, Artificial Sequence; identical to SEQ ID NO: 9120
  Cyclic GFR-binding peptide
  MOD_RES (5)..(6): Xaa is C or S

SEQ ID NO: 91067 - protein, 38 aa, Artificial Sequence; identical to SEQ ID NO: 76903
  Cyclic GFR-binding peptide
  MOD_RES (3)..(4)..(36)..(38): Xaa is C or S

SEQ ID NO: 91068 - protein, 28 aa, Artificial Sequence
  Cyclic GFR-binding peptide
  MOD_RES (27)..(27): Xaa is C or S
NAISILYFDAANNVVLKKYRDMVVEAXG

SEQ ID NO: 91069 - protein, 27 aa, Artificial Sequence
  Cyclic GFR-binding peptide
TKLSPINVLYFDDMGVPTYGKIPEGMS

SEQ ID NO: 91070 - protein, 37 aa, Artificial Sequence
  Cyclic GFR-binding peptide
  MOD_RES (6)..(7): Xaa is C or S
STPPTXXVPTRLSATSILYYDSANNVVLRKHRDMVVE

SEQ ID NO: 91071 - protein, 31 aa, Artificial Sequence; identical to SEQ ID NO: 9124
  Cyclic GFR-binding peptide
  MOD_RES (31)..(31): Xaa is C or S

SEQ ID NO: 91072 - protein, 25 aa, Artificial Sequence
  Cyclic GFR-binding peptide
LSPISVLYKDSSNNVILKYHYNMVV

SEQ ID NO: 91073 - protein, 36 aa, Artificial Sequence; identical to SEQ ID NO: 42220
  Cyclic GFR-binding peptide
  MOD_RES (4)..(36): Xaa is C or S

SEQ ID NO: 91074 - protein, 27 aa, Artificial Sequence
  Cyclic GFR-binding peptide
SQDLSPISILYKIGKTPKILKYHYMIV

SEQ ID NO: 91075 - protein, 27 aa, Artificial Sequence
  Cyclic GFR-binding peptide
KLEPISVLYLDDSSNVIKFKYENMVVR

SEQ ID NO: 91076 - protein, 32 aa, Artificial Sequence
  Cyclic GFR-binding peptide
  MOD_RES (5)..(6): Xaa is C or S
VPSTXXAPVKTEPISMLYLDNGRVLLKFKYEM

SEQ ID NO: 91077 - protein, 37 aa, Artificial Sequence; identical to SEQ ID NO: 42225
  Cyclic GFR-binding peptide
  MOD_RES (6)..(7): Xaa is C or S

SEQ ID NO: 91078 - protein, 27 aa, Artificial Sequence
  Cyclic GFR-binding peptide
  MOD_RES (1)..(2): Xaa is C or S
XXVPQALNAISILYFVGRKPKVLKKYR

SEQ ID NO: 91079 - protein, 31 aa, Artificial Sequence; identical to SEQ ID NO: 9131
  Cyclic GFR-binding peptide
  MOD_RES (2)..(3): Xaa is C or S

SEQ ID NO: 91080 - protein, 34 aa, Artificial Sequence; identical to SEQ ID NO: 9132
  Cyclic GFR-binding peptide
  MOD_RES (5)..(6): Xaa is C or S

SEQ ID NO: 91081 - protein, 30 aa, Artificial Sequence; identical to SEQ ID NO: 9136
  Cyclic GFR-binding peptide
  MOD_RES (1)..(1): Xaa is C or S

SEQ ID NO: 91082 - protein, 29 aa, Artificial Sequence
  Cyclic GFR-binding peptide
  MOD_RES (1)..(2): Xaa is C or S
XXVPTELNAISMLYFDEYDKVVLKKYREM

SEQ ID NO: 91083 - protein, 28 aa, Artificial Sequence
  Cyclic GFR-binding peptide
PARLSATSILYYDAANNVVLRKHRDMVV

SEQ ID NO: 91084 - protein, 34 aa, Artificial Sequence; identical to SEQ ID NO: 76918
  Cyclic GFR-binding peptide
  MOD_RES (1)..(2)..(34): Xaa is C or S

SEQ ID NO: 91085 - protein, 26 aa, Artificial Sequence
  Cyclic GFR-binding peptide
KLSPINILYFDKGVVTYYGKIPGMAV

SEQ ID NO: 91086 - protein, 22 aa, Artificial Sequence
  Cyclic GFR-binding peptide
SPINILYFVGRKPKVYGKIPMI

SEQ ID NO: 91087 - protein, 31 aa, Artificial Sequence; identical to SEQ ID NO: 42237
  Cyclic GFR-binding peptide
  MOD_RES (1)..(2): Xaa is C or S

SEQ ID NO: 91088 - protein, 29 aa, Artificial Sequence
  Cyclic GFR-binding peptide
  MOD_RES (29)..(29): Xaa is C or S
QDLSPISILYKVGRTPKVLKYHYMVVKSX

SEQ ID NO: 91089 - protein, 22 aa, Artificial Sequence
  Cyclic GFR-binding peptide
LSPISILYKVGRTPKVLKYHYM

SEQ ID NO: 91090 - protein, 41 aa, Artificial Sequence
  Cyclic GFR-binding peptide
  MOD_RES (5)..(6)..(38)..(40): Xaa is C or S
TPPTXXVPTRLSPISILYKDSANNVVLKYHYDMVVESXGXR

SEQ ID NO: 91091 - protein, 34 aa, Artificial Sequence; identical to SEQ ID NO: 9145
  Cyclic GFR-binding peptide
  MOD_RES (4)..(5): Xaa is C or S

SEQ ID NO: 91092 - protein, 42 aa, Artificial Sequence; identical to SEQ ID NO: 42241
  Cyclic GFR-binding peptide
  MOD_RES (6)..(7)..(39)..(41): Xaa is C or S

SEQ ID NO: 91093 - protein, 30 aa, Artificial Sequence; identical to SEQ ID NO: 9147
  Cyclic GFR-binding peptide
  MOD_RES (30)..(30): Xaa is C or S

SEQ ID NO: 91094 - protein, 31 aa, Artificial Sequence; identical to SEQ ID NO: 42244
  Cyclic GFR-binding peptide
  MOD_RES (3)..(4): Xaa is C or S

SEQ ID NO: 91095 - protein, 24 aa, Artificial Sequence
  Cyclic GFR-binding peptide
EKMNAISILYFDENKNVVLKKYRN

SEQ ID NO: 91096 - protein, 30 aa, Artificial Sequence; identical to SEQ ID NO: 9149
  Cyclic GFR-binding peptide
  MOD_RES (1)..(2): Xaa is C or S

SEQ ID NO: 91097 - protein, 31 aa, Artificial Sequence
  Cyclic GFR-binding peptide
  MOD_RES (1)..(2): Xaa is C or S
XXTPTKMEPISMLYLNDKQQIIKFKYEGMVV

SEQ ID NO: 91098 - protein, 29 aa, Artificial Sequence
  Cyclic GFR-binding peptide
  MOD_RES (1)..(2): Xaa is C or S
XXAPTQLSPINVLYFDDSSNVIYGKIPNM

SEQ ID NO: 91099 - protein, 26 aa, Artificial Sequence
  Cyclic GFR-binding peptide
PTELSATSMLYYDEYDKVVLRKHREM

SEQ ID NO: 91100 - protein, 24 aa, Artificial Sequence
  Cyclic GFR-binding peptide
SATSILYYDENKNVVLRKHRNMTV

SEQ ID NO: 91101 - protein, 26 aa, Artificial Sequence
  Cyclic GFR-binding peptide
QDLSPISILYKVGRTPKVLKYHYMVV

SEQ ID NO: 91102 - protein, 36 aa, Artificial Sequence
  Cyclic GFR-binding peptide
  MOD_RES (1)..(2)..(34)..(36): Xaa is C or S
XXVPARLSATSILYYDAANNVVLRKHRDMVVEAXGX

SEQ ID NO: 91103 - protein, 36 aa, Artificial Sequence; identical to SEQ ID NO: 37910
  Cyclic GFR-binding peptide
  MOD_RES (7)..(7): Xaa is C or S

SEQ ID NO: 91104 - protein, 33 aa, Artificial Sequence; identical to SEQ ID NO: 9156
  Cyclic GFR-binding peptide
  MOD_RES (32)..(32): Xaa is C or S

SEQ ID NO: 91105 - protein, 39 aa, Artificial Sequence; identical to SEQ ID NO: 37911
  Cyclic GFR-binding peptide
  MOD_RES (6)..(7)..(39): Xaa is C or S

SEQ ID NO: 91106 - protein, 32 aa, Artificial Sequence
  Cyclic GFR-binding peptide
  MOD_RES (6)..(7): Xaa is C or S
HVPKPXXAPTKLSATSVLYYDDSSNVILRKHR

SEQ ID NO: 91107 - protein, 33 aa, Artificial Sequence; identical to SEQ ID NO: 9158
  Cyclic GFR-binding peptide
  MOD_RES (4)..(5): Xaa is C or S

SEQ ID NO: 91108 - protein, 33 aa, Artificial Sequence
  Cyclic GFR-binding peptide
  MOD_RES (32)..(32): Xaa is C or S
TPTKMSPISMLYKNDKQQIILKYHYGMVVDRXG

SEQ ID NO: 91109 - protein, 34 aa, Artificial Sequence
  Cyclic GFR-binding peptide
  MOD_RES (1)..(2)..(34): Xaa is C or S
XXVPARLSATSILYYDAANNVVLRKHRDMVVEAX

SEQ ID NO: 91110 - protein, 24 aa, Artificial Sequence
  Cyclic GFR-binding peptide
LSPINVLYFDDMGVPTYGKIPEGM

SEQ ID NO: 91111 - protein, 29 aa, Artificial Sequence
  Cyclic GFR-binding peptide
PTELEPISMLYLDEYDKVVKFKYEEMVVE

SEQ ID NO: 91112 - protein, 29 aa, Artificial Sequence
  Cyclic GFR-binding peptide
PQALSATSILYYVGRKPKVLRKHRMIVRS

SEQ ID NO: 91113 - protein, 30 aa, Artificial Sequence
  Cyclic GFR-binding peptide
  MOD_RES (4)..(5): Xaa is C or S
PEPXXVPEKMSATSILYYDENKNVVLRKHR

SEQ ID NO: 91114 - protein, 30 aa, Artificial Sequence; identical to SEQ ID NO: 9161
  Cyclic GFR-binding peptide
  MOD_RES (28)..(30): Xaa is C or S

SEQ ID NO: 91115 - protein, 35 aa, Artificial Sequence; identical to SEQ ID NO: 9163
  Cyclic GFR-binding peptide
  MOD_RES (4)..(5): Xaa is C or S

SEQ ID NO: 91116 - protein, 24 aa, Artificial Sequence
  Cyclic GFR-binding peptide
TQLSPINVLYFDDSSNVIYGKIPN

SEQ ID NO: 91117 - protein, 29 aa, Artificial Sequence
  Cyclic GFR-binding peptide
  MOD_RES (1)..(2): Xaa is C or S
XXAPTKLSPISVLYKDDSSNVILKYHYNM

SEQ ID NO: 91118 - protein, 35 aa, Artificial Sequence; identical to SEQ ID NO: 9165
  Cyclic GFR-binding peptide
  MOD_RES (5)..(6): Xaa is C or S

SEQ ID NO: 91119 - protein, 32 aa, Artificial Sequence; identical to SEQ ID NO: 9167
  Cyclic GFR-binding peptide
  MOD_RES (3)..(4): Xaa is C or S

SEQ ID NO: 91120 - protein, 30 aa, Artificial Sequence; identical to SEQ ID NO: 9168
  Cyclic GFR-binding peptide
  MOD_RES (28)..(30): Xaa is C or S

SEQ ID NO: 91121 - protein, 36 aa, Artificial Sequence
  Cyclic GFR-binding peptide
  MOD_RES (4)..(5): Xaa is C or S
AGPXXTPTKMSPISMLYKNDKQQIILKYHYGMVVDR

SEQ ID NO: 91122 - protein, 29 aa, Artificial Sequence
  Cyclic GFR-binding peptide
  MOD_RES (3)..(4): Xaa is C or S
SPXXVPQDLSPISILYKVGRTPKVLKYHY

SEQ ID NO: 91123 - protein, 36 aa, Artificial Sequence; identical to SEQ ID NO: 19408
  Cyclic GFR-binding peptide
  MOD_RES (1)..(33)..(35): Xaa is C or S

SEQ ID NO: 91124 - protein, 37 aa, Artificial Sequence; identical to SEQ ID NO: 9170
  Cyclic GFR-binding peptide
  MOD_RES (4)..(5)..(36): Xaa is C or S

SEQ ID NO: 91125 - protein, 33 aa, Artificial Sequence; identical to SEQ ID NO: 9171
  Cyclic GFR-binding peptide
  MOD_RES (4)..(5): Xaa is C or S

SEQ ID NO: 91126 - protein, 29 aa, Artificial Sequence
  Cyclic GFR-binding peptide
  MOD_RES (29)..(29): Xaa is C or S
QDLSPISILYKIGKTPKILKYHYMIVKSX

SEQ ID NO: 91127 - protein, 32 aa, Artificial Sequence; identical to SEQ ID NO: 37938
  Cyclic GFR-binding peptide
  MOD_RES (30)..(32): Xaa is C or S

SEQ ID NO: 91128 - protein, 30 aa, Artificial Sequence; identical to SEQ ID NO: 76943
  Cyclic GFR-binding peptide
  MOD_RES (1)..(2): Xaa is C or S

SEQ ID NO: 91129 - protein, 24 aa, Artificial Sequence
  Cyclic GFR-binding peptide
SPISMLYKDEYDKVVLKYHYEMVV

SEQ ID NO: 91130 - protein, 26 aa, Artificial Sequence
  Cyclic GFR-binding peptide
PTQLSPINVLYFDDSSNVIYGKIPNM

SEQ ID NO: 91131 - protein, 36 aa, Artificial Sequence; identical to SEQ ID NO: 9180
  Cyclic GFR-binding peptide
  MOD_RES (6)..(7): Xaa is C or S

SEQ ID NO: 91132 - protein, 29 aa, Artificial Sequence
  Cyclic GFR-binding peptide
PTQLSPINVLYFDDSSNVIYGKIPNMVVR

SEQ ID NO: 91133 - protein, 27 aa, Artificial Sequence
  Cyclic GFR-binding peptide
  MOD_RES (1)..(2): Xaa is C or S
XXAPTKLNAISVLYFDSSNNVILKKYR

SEQ ID NO: 91134 - protein, 35 aa, Artificial Sequence; identical to SEQ ID NO: 9184
  Cyclic GFR-binding peptide
  MOD_RES (2)..(3)..(35): Xaa is C or S

SEQ ID NO: 91135 - protein, 24 aa, Artificial Sequence
  Cyclic GFR-binding peptide
PARLNAISILYFDAANNVVLKKYR

SEQ ID NO: 91136 - protein, 25 aa, Artificial Sequence
  Cyclic GFR-binding peptide
KLSPINVLYFDDSSNVIYGKIPNMV

SEQ ID NO: 91137 - protein, 33 aa, Artificial Sequence; identical to SEQ ID NO: 9187
  Cyclic GFR-binding peptide
  MOD_RES (30)..(32): Xaa is C or S

SEQ ID NO: 91138 - protein, 37 aa, Artificial Sequence
  Cyclic GFR-binding peptide
  MOD_RES (2)..(3)..(35)..(37): Xaa is C or S
PXXVPEKMEPISILYLDENKNVVKFKYENMTVESXAX

SEQ ID NO: 91139 - protein, 25 aa, Artificial Sequence
  Cyclic GFR-binding peptide
KLSPINVLYFDSSNNVIYGKIPNMV

SEQ ID NO: 91140 - protein, 38 aa, Artificial Sequence; identical to SEQ ID NO: 42300
  Cyclic GFR-binding peptide
  MOD_RES (2)..(3)..(35)..(37): Xaa is C or S

SEQ ID NO: 91141 - protein, 41 aa, Artificial Sequence; identical to SEQ ID NO: 9191
  Cyclic GFR-binding peptide
  MOD_RES (6)..(7)..(39)..(41): Xaa is C or S

SEQ ID NO: 91142 - protein, 30 aa, Artificial Sequence; identical to SEQ ID NO: 9192
  Cyclic GFR-binding peptide

SEQ ID NO: 91143 - protein, 27 aa, Artificial Sequence
  Cyclic GFR-binding peptide
TELEPISMLYLDEYDKVVKFKYEEMVV

SEQ ID NO: 91144 - protein, 29 aa, Artificial Sequence
  Cyclic GFR-binding peptide
PTKLNAISVLYFDDMGVPTLKKYREGMSV

SEQ ID NO: 91145 - protein, 34 aa, Artificial Sequence; identical to SEQ ID NO: 76954
  Cyclic GFR-binding peptide
  MOD_RES (6)..(7): Xaa is C or S

SEQ ID NO: 91146 - protein, 29 aa, Artificial Sequence
  Cyclic GFR-binding peptide
  MOD_RES (2)..(3): Xaa is C or S
AXXVPTELSPISMLYKDENEKVVLKYHYD

SEQ ID NO: 91147 - protein, 26 aa, Artificial Sequence
  Cyclic GFR-binding peptide
PVKTSPISMLYKDNGRVLLLKYHYMI

SEQ ID NO: 91148 - protein, 37 aa, Artificial Sequence; identical to SEQ ID NO: 42307
  Cyclic GFR-binding peptide
  MOD_RES (5)..(6): Xaa is C or S

SEQ ID NO: 91149 - protein, 33 aa, Artificial Sequence; identical to SEQ ID NO: 37970
  Cyclic GFR-binding peptide
  MOD_RES (3)..(4): Xaa is C or S

SEQ ID NO: 91150 - protein, 35 aa, Artificial Sequence; identical to SEQ ID NO: 42308
  Cyclic GFR-binding peptide
  MOD_RES (1)..(34): Xaa is C or S

SEQ ID NO: 91151 - protein, 43 aa, Artificial Sequence; identical to SEQ ID NO: 42309
  Cyclic GFR-binding peptide
  MOD_RES (6)..(7)..(40)..(42): Xaa is C or S

SEQ ID NO: 91152 - protein, 29 aa, Artificial Sequence
  Cyclic GFR-binding peptide
TKLSPISVLYKDDSSNVILKYHYNMVVRS

SEQ ID NO: 91153 - protein, 38 aa, Artificial Sequence; identical to SEQ ID NO: 37972
  Cyclic GFR-binding peptide
  MOD_RES (6)..(7)..(38): Xaa is C or S

SEQ ID NO: 91154 - protein, 32 aa, Artificial Sequence; identical to SEQ ID NO: 37973
  Cyclic GFR-binding peptide
  MOD_RES (29)..(31): Xaa is C or S

SEQ ID NO: 91155 - protein, 32 aa, Artificial Sequence; identical to SEQ ID NO: 37974
  Cyclic GFR-binding peptide
  MOD_RES (2)..(3): Xaa is C or S

SEQ ID NO: 91156 - protein, 23 aa, Artificial Sequence
  Cyclic GFR-binding peptide
RLSPISILYKDSANNVVLKYHYD

SEQ ID NO: 91157 - protein, 20 aa, Artificial Sequence
  Cyclic GFR-binding peptide
SPISILYKVGRKPKVLKYHY

SEQ ID NO: 91158 - protein, 34 aa, Artificial Sequence; identical to SEQ ID NO: 42312
  Cyclic GFR-binding peptide
  MOD_RES (7)..(7): Xaa is C or S

SEQ ID NO: 91159 - protein, 25 aa, Artificial Sequence
  Cyclic GFR-binding peptide
ALSATSILYYVGRKPKVLRKHRMIV

SEQ ID NO: 91160 - protein, 36 aa, Artificial Sequence; identical to SEQ ID NO: 76957
  Cyclic GFR-binding peptide
  MOD_RES (4)..(5)..(36): Xaa is C or S

SEQ ID NO: 91161 - protein, 32 aa, Artificial Sequence; identical to SEQ ID NO: 9203
  Cyclic GFR-binding peptide
  MOD_RES (5)..(6): Xaa is C or S

SEQ ID NO: 91162 - protein, 26 aa, Artificial Sequence
  Cyclic GFR-binding peptide
TKLSPINILYFDKGVVTYYGKIPGMA

SEQ ID NO: 91163 - protein, 30 aa, Artificial Sequence; identical to SEQ ID NO: 9206
  Cyclic GFR-binding peptide
  MOD_RES (1)..(2): Xaa is C or S

SEQ ID NO: 91164 - protein, 39 aa, Artificial Sequence; identical to SEQ ID NO: 9208
  Cyclic GFR-binding peptide
  MOD_RES (6)..(7)..(39): Xaa is C or S

SEQ ID NO: 91165 - protein, 35 aa, Artificial Sequence; identical to SEQ ID NO: 37981
  Cyclic GFR-binding peptide
  MOD_RES (5)..(6): Xaa is C or S

SEQ ID NO: 91166 - protein, 37 aa, Artificial Sequence; identical to SEQ ID NO: 19441
  Cyclic GFR-binding peptide
  MOD_RES (1)..(2)..(34)..(36): Xaa is C or S

SEQ ID NO: 91167 - protein, 30 aa, Artificial Sequence
  Cyclic GFR-binding peptide
  MOD_RES (29)..(29): Xaa is C or S
KMSPINILYFDENKNVVYGKIPNMTVESXA

SEQ ID NO: 91168 - protein, 37 aa, Artificial Sequence
  Cyclic GFR-binding peptide
  MOD_RES (2)..(3)..(34)..(36): Xaa is C or S
TXXAPVKTSPISMLYKDNGRVLLLKYHYMIVEEXGXL

SEQ ID NO: 91169 - protein, 32 aa, Artificial Sequence; identical to SEQ ID NO: 9213
  Cyclic GFR-binding peptide
  MOD_RES (2)..(3): Xaa is C or S

SEQ ID NO: 91170 - protein, 27 aa, Artificial Sequence
  Cyclic GFR-binding peptide
TKLSPISVLYKDSSNNVILKYHYNMVV

SEQ ID NO: 91171 - protein, 29 aa, Artificial Sequence
  Cyclic GFR-binding peptide
TRLNAISILYFDSANNVVLKKYRDMVVES

SEQ ID NO: 91172 - protein, 40 aa, Artificial Sequence; identical to SEQ ID NO: 42325
  Cyclic GFR-binding peptide
  MOD_RES (4)..(5)..(37)..(39): Xaa is C or S

SEQ ID NO: 91173 - protein, 27 aa, Artificial Sequence
  Cyclic GFR-binding peptide
  MOD_RES (1)..(1): Xaa is C or S
XVPTRLEPISILYLDSANNVVKFKYED

SEQ ID NO: 91174 - protein, 29 aa, Artificial Sequence
  Cyclic GFR-binding peptide
PVKTEPISMLYLDNGRVLLKFKYEMIVEE

SEQ ID NO: 91175 - protein, 28 aa, Artificial Sequence
  Cyclic GFR-binding peptide
TKMEPISMLYLNDKQQIIKFKYEGMVVD

SEQ ID NO: 91176 - protein, 31 aa, Artificial Sequence; identical to SEQ ID NO: 37993
  Cyclic GFR-binding peptide
  MOD_RES (31)..(31): Xaa is C or S

SEQ ID NO: 91177 - protein, 32 aa, Artificial Sequence; identical to SEQ ID NO: 76970
  Cyclic GFR-binding peptide
  MOD_RES (32)..(32): Xaa is C or S

SEQ ID NO: 91178 - protein, 27 aa, Artificial Sequence
  Cyclic GFR-binding peptide
  MOD_RES (1)..(1): Xaa is C or S
XAPTKLSPISVLYKDSSNNVILKYHYN

SEQ ID NO: 91179 - protein, 33 aa, Artificial Sequence; identical to SEQ ID NO: 9221
  Cyclic GFR-binding peptide
  MOD_RES (2)..(3): Xaa is C or S

SEQ ID NO: 91180 - protein, 30 aa, Artificial Sequence
  Cyclic GFR-binding peptide
  MOD_RES (30)..(30): Xaa is C or S
TKMSPISMLYKNDKQQIILKYHYGMVVDRX

SEQ ID NO: 91181 - protein, 41 aa, Artificial Sequence
  Cyclic GFR-binding peptide
  MOD_RES (5)..(6)..(38)..(40): Xaa is C or S
IPEPXXVPEKMSPINILYFDENKNVVYGKIPNMTVESXAXR

SEQ ID NO: 91182 - protein, 32 aa, Artificial Sequence; identical to SEQ ID NO: 37998
  Cyclic GFR-binding peptide
  MOD_RES (29)..(31): Xaa is C or S

SEQ ID NO: 91183 - protein, 27 aa, Artificial Sequence
  Cyclic GFR-binding peptide
VPTKLSATSILYYDKGVVTYLRKHRGM

SEQ ID NO: 91184 - protein, 30 aa, Artificial Sequence; identical to SEQ ID NO: 38001
  Cyclic GFR-binding peptide
  MOD_RES (3)..(4): Xaa is C or S

SEQ ID NO: 91185 - protein, 31 aa, Artificial Sequence; identical to SEQ ID NO: 9227
  Cyclic GFR-binding peptide
  MOD_RES (29)..(31): Xaa is C or S

SEQ ID NO: 91186 - protein, 28 aa, Artificial Sequence
  Cyclic GFR-binding peptide
  MOD_RES (28)..(28): Xaa is C or S
ALEPISILYLVGRKPKVKFKYEMIVRSX

SEQ ID NO: 91187 - protein, 30 aa, Artificial Sequence
  Cyclic GFR-binding peptide
  MOD_RES (1)..(1): Xaa is C or S
XVSQDLSPINILYFIGKTPKIYGKIPMIVK

SEQ ID NO: 91188 - protein, 31 aa, Artificial Sequence; identical to SEQ ID NO: 38006
  Cyclic GFR-binding peptide
  MOD_RES (2)..(3): Xaa is C or S

SEQ ID NO: 91189 - protein, 26 aa, Artificial Sequence
  Cyclic GFR-binding peptide
NAISILYFDSANNVVLKKYRDMVVES

SEQ ID NO: 91190 - protein, 24 aa, Artificial Sequence
  Cyclic GFR-binding peptide
KTNAISMLYFDNGRVLLLKKYRMI

SEQ ID NO: 91191 - protein, 26 aa, Artificial Sequence
  Cyclic GFR-binding peptide
EPISMLYLNDKQQIIKFKYEGMVVDR

SEQ ID NO: 91192 - protein, 36 aa, Artificial Sequence; identical to SEQ ID NO: 38009
  Cyclic GFR-binding peptide
  MOD_RES (4)..(36): Xaa is C or S

SEQ ID NO: 91193 - protein, 38 aa, Artificial Sequence; identical to SEQ ID NO: 38010
  Cyclic GFR-binding peptide
  MOD_RES (5)..(6)..(38): Xaa is C or S

SEQ ID NO: 91194 - protein, 26 aa, Artificial Sequence
  Cyclic GFR-binding peptide
PTKLEPISVLYLDSSNNVIKFKYENM

SEQ ID NO: 91195 - protein, 28 aa, Artificial Sequence
  Cyclic GFR-binding peptide
PARLSPISILYKDAANNVVLKYHYDMVV

SEQ ID NO: 91196 - protein, 30 aa, Artificial Sequence; identical to SEQ ID NO: 9233
  Cyclic GFR-binding peptide

SEQ ID NO: 91197 - protein, 29 aa, Artificial Sequence
  Cyclic GFR-binding peptide
  MOD_RES (1)..(1): Xaa is C or S
XAPTKLSPISVLYKDDSSNVILKYHYNMV

SEQ ID NO: 91198 - protein, 32 aa, Artificial Sequence
  Cyclic GFR-binding peptide
  MOD_RES (29)..(31): Xaa is C or S
QDLSPINILYFVGRTPKVYGKIPMVVKSXKXS

SEQ ID NO: 91199 - protein, 35 aa, Artificial Sequence
  Cyclic GFR-binding peptide
  MOD_RES (5)..(6): Xaa is C or S
ASKAXXVPTKLSATSILYYDKGVVTYLRKHRGMAV

SEQ ID NO: 91200 - protein, 38 aa, Artificial Sequence; identical to SEQ ID NO: 9235
  Cyclic GFR-binding peptide
  MOD_RES (3)..(35)..(37): Xaa is C or S

SEQ ID NO: 91201 - protein, 34 aa, Artificial Sequence; identical to SEQ ID NO: 9238
  Cyclic GFR-binding peptide
  MOD_RES (1)..(2)..(33): Xaa is C or S

SEQ ID NO: 91202 - protein, 30 aa, Artificial Sequence; identical to SEQ ID NO: 9239
  Cyclic GFR-binding peptide
  MOD_RES (1)..(2): Xaa is C or S

SEQ ID NO: 91203 - protein, 34 aa, Artificial Sequence; identical to SEQ ID NO: 9241
  Cyclic GFR-binding peptide
  MOD_RES (1)..(33): Xaa is C or S

SEQ ID NO: 91204 - protein, 27 aa, Artificial Sequence
  Cyclic GFR-binding peptide
  MOD_RES (1)..(2): Xaa is C or S
XXVPTKLNAISILYFDKGVVTYLKKYR

SEQ ID NO: 91205 - protein, 37 aa, Artificial Sequence; identical to SEQ ID NO: 38026
  Cyclic GFR-binding peptide
  MOD_RES (1)..(2)..(34)..(36): Xaa is C or S

SEQ ID NO: 91206 - protein, 25 aa, Artificial Sequence
  Cyclic GFR-binding peptide
PQALSATSILYYVGRKPKVLRKHRM

SEQ ID NO: 91207 - protein, 40 aa, Artificial Sequence; identical to SEQ ID NO: 9244
  Cyclic GFR-binding peptide
  MOD_RES (6)..(7)..(38)..(40): Xaa is C or S

SEQ ID NO: 91208 - protein, 34 aa, Artificial Sequence
  Cyclic GFR-binding peptide
  MOD_RES (1)..(33): Xaa is C or S
XVPARLSATSILYYDAANNVVLRKHRDMVVEAXG

SEQ ID NO: 91209 - protein, 29 aa, Artificial Sequence
  Cyclic GFR-binding peptide
VPEKMNAISILYFDENKNVVLKKYRNMTV

SEQ ID NO: 91210 - protein, 27 aa, Artificial Sequence
  Cyclic GFR-binding peptide
  MOD_RES (1)..(1): Xaa is C or S
XVPARLSPISILYKDAANNVVLKYHYD

SEQ ID NO: 91211 - protein, 25 aa, Artificial Sequence
  Cyclic GFR-binding peptide
TKLSPISILYKDKGVVTYLKYHYGM

SEQ ID NO: 91212 - protein, 33 aa, Artificial Sequence; identical to SEQ ID NO: 38035
  Cyclic GFR-binding peptide
  MOD_RES (30)..(32): Xaa is C or S

SEQ ID NO: 91213 - protein, 35 aa, Artificial Sequence; identical to SEQ ID NO: 9246
  Cyclic GFR-binding peptide
  MOD_RES (6)..(7): Xaa is C or S

SEQ ID NO: 91214 - protein, 25 aa, Artificial Sequence
  Cyclic GFR-binding peptide
VPQALSATSILYYVGRKPKVLRKHR

SEQ ID NO: 91215 - protein, 28 aa, Artificial Sequence
  Cyclic GFR-binding peptide
  MOD_RES (1)..(1): Xaa is C or S
XVPTELSATSMLYYDENEKVVLRKHRDM

SEQ ID NO: 91216 - protein, 27 aa, Artificial Sequence
  Cyclic GFR-binding peptide
TRLSPINILYFDSANNVVYGKIPDMVV

SEQ ID NO: 91217 - protein, 33 aa, Artificial Sequence; identical to SEQ ID NO: 9253
  Cyclic GFR-binding peptide
  MOD_RES (30)..(32): Xaa is C or S

SEQ ID NO: 91218 - protein, 36 aa, Artificial Sequence
  Cyclic GFR-binding peptide
  MOD_RES (6)..(7): Xaa is C or S
KASKAXXVPTKLSATSILYYDKGVVTYLRKHRGMAV

SEQ ID NO: 91219 - protein, 37 aa, Artificial Sequence; identical to SEQ ID NO: 42399
  Cyclic GFR-binding peptide
  MOD_RES (1)..(2)..(34)..(36): Xaa is C or S

SEQ ID NO: 91220 - protein, 35 aa, Artificial Sequence
  Cyclic GFR-binding peptide
  MOD_RES (5)..(6): Xaa is C or S
APASXXVPARLSATSILYYDAANNVVLRKHRDMVV

SEQ ID NO: 91221 - protein, 29 aa, Artificial Sequence
  Cyclic GFR-binding peptide
  MOD_RES (1)..(2): Xaa is C or S
XXAPTKLSATSVLYYDDSSNVILRKHRNM

SEQ ID NO: 91222 - protein, 33 aa, Artificial Sequence; identical to SEQ ID NO: 38049
  Cyclic GFR-binding peptide
  MOD_RES (5)..(6): Xaa is C or S

SEQ ID NO: 91223 - protein, 22 aa, Artificial Sequence
  Cyclic GFR-binding peptide
MNAISILYFDENKNVVLKKYRN

SEQ ID NO: 91224 - protein, 39 aa, Artificial Sequence; identical to SEQ ID NO: 9265
  Cyclic GFR-binding peptide
  MOD_RES (4)..(5)..(37)..(39): Xaa is C or S

SEQ ID NO: 91225 - protein, 36 aa, Artificial Sequence; identical to SEQ ID NO: 77005
  Cyclic GFR-binding peptide
  MOD_RES (1)..(2)..(33)..(35): Xaa is C or S

SEQ ID NO: 91226 - protein, 41 aa, Artificial Sequence; identical to SEQ ID NO: 9269
  Cyclic GFR-binding peptide
  MOD_RES (6)..(7)..(39)..(41): Xaa is C or S

SEQ ID NO: 91227 - protein, 25 aa, Artificial Sequence
  Cyclic GFR-binding peptide
TELSPINMLYFDEYDKVVYGKIPEM

SEQ ID NO: 91228 - protein, 40 aa, Artificial Sequence; identical to SEQ ID NO: 42419
  Cyclic GFR-binding peptide
  MOD_RES (5)..(6)..(38)..(40): Xaa is C or S

SEQ ID NO: 91229 - protein, 32 aa, Artificial Sequence; identical to SEQ ID NO: 9270
  Cyclic GFR-binding peptide
  MOD_RES (5)..(6): Xaa is C or S

SEQ ID NO: 91230 - protein, 21 aa, Artificial Sequence
  Cyclic GFR-binding peptide
SATSILYYVGRTPKVLRKHRM

SEQ ID NO: 91231 - protein, 38 aa, Artificial Sequence; identical to SEQ ID NO: 9276
  Cyclic GFR-binding peptide
  MOD_RES (6)..(7): Xaa is C or S

SEQ ID NO: 91232 - protein, 31 aa, Artificial Sequence; identical to SEQ ID NO: 38058
  Cyclic GFR-binding peptide
  MOD_RES (31)..(31): Xaa is C or S

SEQ ID NO: 91233 - protein, 37 aa, Artificial Sequence; identical to SEQ ID NO: 38060
  Cyclic GFR-binding peptide
  MOD_RES (5)..(6): Xaa is C or S

SEQ ID NO: 91234 - protein, 28 aa, Artificial Sequence
  Cyclic GFR-binding peptide
  MOD_RES (2)..(3): Xaa is C or S
AXXAPTKLEPISVLYLDSSNNVIKFKYE

SEQ ID NO: 91235 - protein, 26 aa, Artificial Sequence
  Cyclic GFR-binding peptide
ARLEPISILYLDAANNVVKFKYEDMV

SEQ ID NO: 91236 - protein, 41 aa, Artificial Sequence
  Cyclic GFR-binding peptide
  MOD_RES (6)..(7)..(39)..(41): Xaa is C or S
GIPEPXXVPEKMSPISILYKDENKNVVLKYHYNMTVESXAX

SEQ ID NO: 91237 - protein, 37 aa, Artificial Sequence; identical to SEQ ID NO: 42431
  Cyclic GFR-binding peptide
  MOD_RES (6)..(7): Xaa is C or S

SEQ ID NO: 91238 - protein, 27 aa, Artificial Sequence
  Cyclic GFR-binding peptide
TELSPISMLYKDENEKVVLKYHYDMVV

SEQ ID NO: 91239 - protein, 29 aa, Artificial Sequence
  Cyclic GFR-binding peptide
  MOD_RES (29)..(29): Xaa is C or S
ELEPISMLYLDEYDKVVKFKYEEMVVEGX

SEQ ID NO: 91240 - protein, 20 aa, Artificial Sequence
  Cyclic GFR-binding peptide
SPISVLYKDDSSNVILKYHY

SEQ ID NO: 91241 - protein, 25 aa, Artificial Sequence
  Cyclic GFR-binding peptide
VKTSPINMLYFDNGRVLLYGKIPMI

SEQ ID NO: 91242 - protein, 38 aa, Artificial Sequence; identical to SEQ ID NO: 77010
  Cyclic GFR-binding peptide
  MOD_RES (5)..(6)..(38): Xaa is C or S

SEQ ID NO: 91243 - protein, 28 aa, Artificial Sequence
  Cyclic GFR-binding peptide
PTKMSATSMLYYNDKQQIILRKHRGMVV

SEQ ID NO: 91244 - protein, 31 aa, Artificial Sequence
  Cyclic GFR-binding peptide
  MOD_RES (30)..(30): Xaa is C or S
PVKTEPISMLYLDNGRVLLKFKYEMIVEEXG

SEQ ID NO: 91245 - protein, 29 aa, Artificial Sequence
  Cyclic GFR-binding peptide
EKMSPINILYFDENKNVVYGKIPNMTVES

SEQ ID NO: 91246 - protein, 27 aa, Artificial Sequence
  Cyclic GFR-binding peptide
  MOD_RES (27)..(27): Xaa is C or S
SPINMLYFDENEKVVYGKIPDMVVEGX

SEQ ID NO: 91247 - protein, 33 aa, Artificial Sequence; identical to SEQ ID NO: 9288
  Cyclic GFR-binding peptide
  MOD_RES (6)..(7): Xaa is C or S

SEQ ID NO: 91248 - protein, 21 aa, Artificial Sequence
  Cyclic GFR-binding peptide
SPISILYKDKGVVTYLKYHYG

SEQ ID NO: 91249 - protein, 21 aa, Artificial Sequence
  Cyclic GFR-binding peptide
SPINVLYFDSSNNVIYGKIPN

SEQ ID NO: 91250 - protein, 32 aa, Artificial Sequence; identical to SEQ ID NO: 38081
  Cyclic GFR-binding peptide
  MOD_RES (32)..(32): Xaa is C or S

SEQ ID NO: 91251 - protein, 27 aa, Artificial Sequence
  Cyclic GFR-binding peptide
VPTRLNAISILYFDSANNVVLKKYRDM

SEQ ID NO: 91252 - protein, 30 aa, Artificial Sequence; identical to SEQ ID NO: 9292
  Cyclic GFR-binding peptide
  MOD_RES (4)..(5): Xaa is C or S

SEQ ID NO: 91253 - protein, 37 aa, Artificial Sequence
  Cyclic GFR-binding peptide
  MOD_RES (6)..(7): Xaa is C or S
ASASPXXVSQDLSPINILYFIGKTPKIYGKIPMIVKS

SEQ ID NO: 91254 - protein, 33 aa, Artificial Sequence
  Cyclic GFR-binding peptide
  MOD_RES (1)..(32): Xaa is C or S
XVSQDLSPINILYFIGKTPKIYGKIPMIVKSXK

SEQ ID NO: 91255 - protein, 33 aa, Artificial Sequence; identical to SEQ ID NO: 9295
  Cyclic GFR-binding peptide
  MOD_RES (5)..(5): Xaa is C or S

SEQ ID NO: 91256 - protein, 23 aa, Artificial Sequence
  Cyclic GFR-binding peptide
SATSVLYYDDSSNVILRKHRNMV

SEQ ID NO: 91257 - protein, 32 aa, Artificial Sequence
  Cyclic GFR-binding peptide
  MOD_RES (5)..(6): Xaa is C or S
IPEPXXVPEKMNAISILYFDENKNVVLKKYRN

SEQ ID NO: 91258 - protein, 24 aa, Artificial Sequence
  Cyclic GFR-binding peptide
SATSVLYYDDSSNVILRKHRNMVV

SEQ ID NO: 91259 - protein, 27 aa, Artificial Sequence
  Cyclic GFR-binding peptide
TKLNAISVLYFDDMGVPTLKKYREGMS

SEQ ID NO: 91260 - protein, 40 aa, Artificial Sequence; identical to SEQ ID NO: 9306
  Cyclic GFR-binding peptide
  MOD_RES (5)..(6)..(38)..(40): Xaa is C or S

SEQ ID NO: 91261 - protein, 40 aa, Artificial Sequence; identical to SEQ ID NO: 38090
  Cyclic GFR-binding peptide
  MOD_RES (6)..(7)..(39): Xaa is C or S

SEQ ID NO: 91262 - protein, 31 aa, Artificial Sequence; identical to SEQ ID NO: 9310
  Cyclic GFR-binding peptide
  MOD_RES (28)..(30): Xaa is C or S

SEQ ID NO: 91263 - protein, 34 aa, Artificial Sequence; identical to SEQ ID NO: 9311
  Cyclic GFR-binding peptide
  MOD_RES (1)..(32)..(34): Xaa is C or S

SEQ ID NO: 91264 - protein, 37 aa, Artificial Sequence; identical to SEQ ID NO: 42456
  Cyclic GFR-binding peptide
  MOD_RES (3)..(35)..(37): Xaa is C or S

SEQ ID NO: 91265 - protein, 34 aa, Artificial Sequence; identical to SEQ ID NO: 9312
  Cyclic GFR-binding peptide
  MOD_RES (1)..(32)..(34): Xaa is C or S

SEQ ID NO: 91266 - protein, 29 aa, Artificial Sequence
  Cyclic GFR-binding peptide
  MOD_RES (3)..(4): Xaa is C or S
GPXXTPTKMEPISMLYLNDKQQIIKFKYE

SEQ ID NO: 91267 - protein, 35 aa, Artificial Sequence; identical to SEQ ID NO: 38094
  Cyclic GFR-binding peptide
  MOD_RES (5)..(6): Xaa is C or S

SEQ ID NO: 91268 - protein, 26 aa, Artificial Sequence
  Cyclic GFR-binding peptide
KLSPISILYKDKGVVTYLKYHYGMAV

SEQ ID NO: 91269 - protein, 34 aa, Artificial Sequence
  Cyclic GFR-binding peptide
  MOD_RES (4)..(5): Xaa is C or S
ASPXXVPQDLSPINILYFVGRTPKVYGKIPMVVK

SEQ ID NO: 91270 - protein, 24 aa, Artificial Sequence
  Cyclic GFR-binding peptide
PTKLSATSVLYYDDSSNVILRKHR

SEQ ID NO: 91271 - protein, 28 aa, Artificial Sequence
  Cyclic GFR-binding peptide
APTQLSATSVLYYDDSSNVILRKHRNMV

SEQ ID NO: 91272 - protein, 34 aa, Artificial Sequence; identical to SEQ ID NO: 19544
  Cyclic GFR-binding peptide
  MOD_RES (5)..(6): Xaa is C or S

SEQ ID NO: 91273 - protein, 37 aa, Artificial Sequence
  Cyclic GFR-binding peptide
  MOD_RES (5)..(6)..(37): Xaa is C or S
SASPXXVPQDLSPINILYFVGRTPKVYGKIPMVVKSX

SEQ ID NO: 91274 - protein, 31 aa, Artificial Sequence; identical to SEQ ID NO: 38106
  Cyclic GFR-binding peptide
  MOD_RES (29)..(31): Xaa is C or S

SEQ ID NO: 91275 - protein, 30 aa, Artificial Sequence; identical to SEQ ID NO: 9324
  Cyclic GFR-binding peptide
  MOD_RES (30)..(30): Xaa is C or S

SEQ ID NO: 91276 - protein, 34 aa, Artificial Sequence; identical to SEQ ID NO: 38108
  Cyclic GFR-binding peptide
  MOD_RES (31)..(33): Xaa is C or S

SEQ ID NO: 91277 - protein, 26 aa, Artificial Sequence
  Cyclic GFR-binding peptide
VPTELNAISMLYFDEYDKVVLKKYRE

SEQ ID NO: 91278 - protein, 34 aa, Artificial Sequence; identical to SEQ ID NO: 42471
  Cyclic GFR-binding peptide
  MOD_RES (6)..(7): Xaa is C or S

SEQ ID NO: 91279 - protein, 36 aa, Artificial Sequence; identical to SEQ ID NO: 38114
  Cyclic GFR-binding peptide
  MOD_RES (1)..(33)..(35): Xaa is C or S

SEQ ID NO: 91280 - protein, 29 aa, Artificial Sequence
  Cyclic GFR-binding peptide
  MOD_RES (27)..(29): Xaa is C or S
SPISILYKDENKNVVLKYHYNMTVESXAX

SEQ ID NO: 91281 - protein, 34 aa, Artificial Sequence
  Cyclic GFR-binding peptide
  MOD_RES (31)..(33): Xaa is C or S
PTKMSATSMLYYNDKQQIILRKHRGMVVDRXGXS

SEQ ID NO: 91282 - protein, 20 aa, Artificial Sequence
  Cyclic GFR-binding peptide
NAISILYFDKGVVTYLKKYR

SEQ ID NO: 91283 - protein, 20 aa, Artificial Sequence
  Cyclic GFR-binding peptide
NAISILYFVGRKPKVLKKYR

SEQ ID NO: 91284 - protein, 23 aa, Artificial Sequence
  Cyclic GFR-binding peptide
DLEPISILYLVGRTPKVKFKYEM

SEQ ID NO: 91285 - protein, 30 aa, Artificial Sequence; identical to SEQ ID NO: 38120
  Cyclic GFR-binding peptide
  MOD_RES (1)..(1): Xaa is C or S

SEQ ID NO: 91286 - protein, 26 aa, Artificial Sequence
  Cyclic GFR-binding peptide
ALEPISILYLVGRKPKVKFKYEMIVR

SEQ ID NO: 91287 - protein, 33 aa, Artificial Sequence; identical to SEQ ID NO: 9336
  Cyclic GFR-binding peptide
  MOD_RES (31)..(33): Xaa is C or S

SEQ ID NO: 91288 - protein, 34 aa, Artificial Sequence; identical to SEQ ID NO: 9337
  Cyclic GFR-binding peptide
  MOD_RES (6)..(6): Xaa is C or S

SEQ ID NO: 91289 - protein, 30 aa, Artificial Sequence; identical to SEQ ID NO: 42477
  Cyclic GFR-binding peptide
  MOD_RES (2)..(3): Xaa is C or S

SEQ ID NO: 91290 - protein, 33 aa, Artificial Sequence
  Cyclic GFR-binding peptide
  MOD_RES (1)..(2): Xaa is C or S
XXVPTRLSPISILYKDSANNVVLKYHYDMVVES

SEQ ID NO: 91291 - protein, 36 aa, Artificial Sequence; identical to SEQ ID NO: 19561
  Cyclic GFR-binding peptide
  MOD_RES (6)..(7): Xaa is C or S

SEQ ID NO: 91292 - protein, 34 aa, Artificial Sequence; identical to SEQ ID NO: 42481
  Cyclic GFR-binding peptide
  MOD_RES (5)..(6): Xaa is C or S

SEQ ID NO: 91293 - protein, 23 aa, Artificial Sequence
  Cyclic GFR-binding peptide
TKLSPINVLYFDDMGVPTYGKIP

SEQ ID NO: 91294 - protein, 30 aa, Artificial Sequence; identical to SEQ ID NO: 42486
  Cyclic GFR-binding peptide
  MOD_RES (27)..(29): Xaa is C or S

SEQ ID NO: 91295 - protein, 26 aa, Artificial Sequence
  Cyclic GFR-binding peptide
APVKTEPISMLYLDNGRVLLKFKYEM

SEQ ID NO: 91296 - protein, 37 aa, Artificial Sequence; identical to SEQ ID NO: 42493
  Cyclic GFR-binding peptide
  MOD_RES (2)..(3)..(35)..(37): Xaa is C or S

SEQ ID NO: 91297 - protein, 33 aa, Artificial Sequence
  Cyclic GFR-binding peptide
  MOD_RES (1)..(33): Xaa is C or S
XVPARLSATSILYYDAANNVVLRKHRDMVVEAX

SEQ ID NO: 91298 - protein, 31 aa, Artificial Sequence; identical to SEQ ID NO: 9348
  Cyclic GFR-binding peptide
  MOD_RES (29)..(31): Xaa is C or S

SEQ ID NO: 91299 - protein, 41 aa, Artificial Sequence; identical to SEQ ID NO: 42494
  Cyclic GFR-binding peptide
  MOD_RES (5)..(6)..(38)..(40): Xaa is C or S

SEQ ID NO: 91300 - protein, 30 aa, Artificial Sequence; identical to SEQ ID NO: 77038
  Cyclic GFR-binding peptide

SEQ ID NO: 91301 - protein, 27 aa, Artificial Sequence
  Cyclic GFR-binding peptide
PVKTSATSMLYYDNGRVLLLRKHRMIV

SEQ ID NO: 91302 - protein, 31 aa, Artificial Sequence; identical to SEQ ID NO: 9349
  Cyclic GFR-binding peptide
  MOD_RES (29)..(31): Xaa is C or S

SEQ ID NO: 91303 - protein, 31 aa, Artificial Sequence; identical to SEQ ID NO: 9351
  Cyclic GFR-binding peptide
  MOD_RES (30)..(30): Xaa is C or S

SEQ ID NO: 91304 - protein, 27 aa, Artificial Sequence
  Cyclic GFR-binding peptide
  MOD_RES (1)..(2): Xaa is C or S
XXAPVKTSPINMLYFDNGRVLLYGKIP

SEQ ID NO: 91305 - protein, 37 aa, Artificial Sequence; identical to SEQ ID NO: 38135
  Cyclic GFR-binding peptide
  MOD_RES (5)..(6)..(37): Xaa is C or S

SEQ ID NO: 91306 - protein, 32 aa, Artificial Sequence; identical to SEQ ID NO: 9352
  Cyclic GFR-binding peptide
  MOD_RES (6)..(7): Xaa is C or S

SEQ ID NO: 91307 - protein, 27 aa, Artificial Sequence
  Cyclic GFR-binding peptide
TELSATSMLYYDENEKVVLRKHRDMVV

SEQ ID NO: 91308 - protein, 34 aa, Artificial Sequence; identical to SEQ ID NO: 42504
  Cyclic GFR-binding peptide
  MOD_RES (1)..(33): Xaa is C or S

SEQ ID NO: 91309 - protein, 31 aa, Artificial Sequence
  Cyclic GFR-binding peptide
  MOD_RES (1)..(2): Xaa is C or S
XXVPTKLSATSILYYDKGVVTYLRKHRGMAV

SEQ ID NO: 91310 - protein, 33 aa, Artificial Sequence
  Cyclic GFR-binding peptide
  MOD_RES (6)..(7): Xaa is C or S
KASKAXXVPTKLSATSILYYDKGVVTYLRKHRG

SEQ ID NO: 91311 - protein, 39 aa, Artificial Sequence
  Cyclic GFR-binding peptide
  MOD_RES (6)..(7)..(39): Xaa is C or S
GSAGPXXTPTKMSPISMLYKNDKQQIILKYHYGMVVDRX

SEQ ID NO: 91312 - protein, 31 aa, Artificial Sequence
  Cyclic GFR-binding peptide
  MOD_RES (1)..(1): Xaa is C or S
XVPTKLSATSILYYDKGVVTYLRKHRGMAVS

SEQ ID NO: 91313 - protein, 33 aa, Artificial Sequence
  Cyclic GFR-binding peptide
  MOD_RES (30)..(32): Xaa is C or S
EKMSATSILYYDENKNVVLRKHRNMTVESXAXR

SEQ ID NO: 91314 - protein, 28 aa, Artificial Sequence
  Cyclic GFR-binding peptide
  MOD_RES (1)..(2): Xaa is C or S
XXVPQALSATSILYYVGRKPKVLRKHRM

SEQ ID NO: 91315 - protein, 31 aa, Artificial Sequence; identical to SEQ ID NO: 42517
  Cyclic GFR-binding peptide
  MOD_RES (30)..(30): Xaa is C or S

SEQ ID NO: 91316 - protein, 32 aa, Artificial Sequence; identical to SEQ ID NO: 42518
  Cyclic GFR-binding peptide
  MOD_RES (32)..(32): Xaa is C or S

SEQ ID NO: 91317 - protein, 24 aa, Artificial Sequence
  Cyclic GFR-binding peptide
TKLSPISVLYKDSSNNVILKYHYN

SEQ ID NO: 91318 - protein, 34 aa, Artificial Sequence; identical to SEQ ID NO: 42521
  Cyclic GFR-binding peptide
  MOD_RES (3)..(4): Xaa is C or S

SEQ ID NO: 91319 - protein, 24 aa, Artificial Sequence
  Cyclic GFR-binding peptide
TNAISMLYFDNGRVLLLKKYRMIV

SEQ ID NO: 91320 - protein, 38 aa, Artificial Sequence
  Cyclic GFR-binding peptide
  MOD_RES (6)..(7): Xaa is C or S
HVPKPXXAPTKLEPISVLYLDDSSNVIKFKYENMVVRS

SEQ ID NO: 91321 - protein, 25 aa, Artificial Sequence
  Cyclic GFR-binding peptide
PTKMEPISMLYLNDKQQIIKFKYEG

SEQ ID NO: 91322 - protein, 32 aa, Artificial Sequence; identical to SEQ ID NO: 9372
  Cyclic GFR-binding peptide
  MOD_RES (6)..(7): Xaa is C or S

SEQ ID NO: 91323 - protein, 27 aa, Artificial Sequence
  Cyclic GFR-binding peptide
LSPINILYFDKGVVTYYGKIPGMAVSE

SEQ ID NO: 91324 - protein, 38 aa, Artificial Sequence; identical to SEQ ID NO: 42529
  Cyclic GFR-binding peptide
  MOD_RES (4)..(5)..(37): Xaa is C or S

SEQ ID NO: 91325 - protein, 25 aa, Artificial Sequence
  Cyclic GFR-binding peptide
TKMSATSMLYYNDKQQIILRKHRGM

SEQ ID NO: 91326 - protein, 23 aa, Artificial Sequence
  Cyclic GFR-binding peptide
TKLSPISILYKDKGVVTYLKYHY

SEQ ID NO: 91327 - protein, 41 aa, Artificial Sequence; identical to SEQ ID NO: 38161
  Cyclic GFR-binding peptide
  MOD_RES (6)..(7)..(39)..(41): Xaa is C or S

SEQ ID NO: 91328 - protein, 27 aa, Artificial Sequence
  Cyclic GFR-binding peptide
  MOD_RES (1)..(2): Xaa is C or S
XXTPTKMNAISMLYFNDKQQIILKKYR

SEQ ID NO: 91329 - protein, 38 aa, Artificial Sequence; identical to SEQ ID NO: 9385
  Cyclic GFR-binding peptide
  MOD_RES (4)..(5)..(36)..(38): Xaa is C or S

SEQ ID NO: 91330 - protein, 31 aa, Artificial Sequence; identical to SEQ ID NO: 9392
  Cyclic GFR-binding peptide
  MOD_RES (31)..(31): Xaa is C or S

SEQ ID NO: 91331 - protein, 34 aa, Artificial Sequence; identical to SEQ ID NO: 42535
  Cyclic GFR-binding peptide
  MOD_RES (33)..(33): Xaa is C or S

SEQ ID NO: 91332 - protein, 30 aa, Artificial Sequence; identical to SEQ ID NO: 9394
  Cyclic GFR-binding peptide
  MOD_RES (3)..(4): Xaa is C or S

SEQ ID NO: 91333 - protein, 22 aa, Artificial Sequence
  Cyclic GFR-binding peptide
SATSMLYYDENEKVVLRKHRDM

SEQ ID NO: 91334 - protein, 31 aa, Artificial Sequence; identical to SEQ ID NO: 38174
  Cyclic GFR-binding peptide
  MOD_RES (4)..(5): Xaa is C or S

SEQ ID NO: 91335 - protein, 22 aa, Artificial Sequence
  Cyclic GFR-binding peptide
NAISILYFDAANNVVLKKYRDM

SEQ ID NO: 91336 - protein, 32 aa, Artificial Sequence; identical to SEQ ID NO: 9399
  Cyclic GFR-binding peptide
  MOD_RES (1)..(1): Xaa is C or S

SEQ ID NO: 91337 - protein, 29 aa, Artificial Sequence
  Cyclic GFR-binding peptide
  MOD_RES (3)..(4): Xaa is C or S
KAXXVPTKLNAISVLYFDDMGVPTLKKYR

SEQ ID NO: 91338 - protein, 38 aa, Artificial Sequence
  Cyclic GFR-binding peptide
  MOD_RES (4)..(5)..(37): Xaa is C or S
PEPXXVPEKMNAISILYFDENKNVVLKKYRNMTVESXA

SEQ ID NO: 91339 - protein, 30 aa, Artificial Sequence; identical to SEQ ID NO: 38178
  Cyclic GFR-binding peptide
  MOD_RES (28)..(30): Xaa is C or S

SEQ ID NO: 91340 - protein, 32 aa, Artificial Sequence; identical to SEQ ID NO: 9402
  Cyclic GFR-binding peptide
  MOD_RES (3)..(4): Xaa is C or S

SEQ ID NO: 91341 - protein, 31 aa, Artificial Sequence; identical to SEQ ID NO: 38180
  Cyclic GFR-binding peptide
  MOD_RES (3)..(3): Xaa is C or S

SEQ ID NO: 91342 - protein, 31 aa, Artificial Sequence; identical to SEQ ID NO: 9403
  Cyclic GFR-binding peptide

SEQ ID NO: 91343 - protein, 30 aa, Artificial Sequence; identical to SEQ ID NO: 38182
  Cyclic GFR-binding peptide
  MOD_RES (1)..(1): Xaa is C or S

SEQ ID NO: 91344 - protein, 30 aa, Artificial Sequence; identical to SEQ ID NO: 38184
  Cyclic GFR-binding peptide
  MOD_RES (29)..(29): Xaa is C or S

SEQ ID NO: 91345 - protein, 34 aa, Artificial Sequence; identical to SEQ ID NO: 77066
  Cyclic GFR-binding peptide
  MOD_RES (4)..(5): Xaa is C or S

SEQ ID NO: 91346 - protein, 31 aa, Artificial Sequence; identical to SEQ ID NO: 42550
  Cyclic GFR-binding peptide
  MOD_RES (4)..(4): Xaa is C or S

SEQ ID NO: 91347 - protein, 31 aa, Artificial Sequence; identical to SEQ ID NO: 9405
  Cyclic GFR-binding peptide
  MOD_RES (29)..(31): Xaa is C or S

SEQ ID NO: 91348 - protein, 21 aa, Artificial Sequence
  Cyclic GFR-binding peptide
LSATSILYYDAANNVVLRKHR

SEQ ID NO: 91349 - protein, 28 aa, Artificial Sequence
  Cyclic GFR-binding peptide
TELSATSMLYYDENEKVVLRKHRDMVVE

SEQ ID NO: 91350 - protein, 28 aa, Artificial Sequence
  Cyclic GFR-binding peptide
TKLNAISVLYFDDMGVPTLKKYREGMSV

SEQ ID NO: 91351 - protein, 27 aa, Artificial Sequence
  Cyclic GFR-binding peptide
  MOD_RES (1)..(2): Xaa is C or S
XXVPTKLSPISILYKDKGVVTYLKYHY

SEQ ID NO: 91352 - protein, 35 aa, Artificial Sequence
  Cyclic GFR-binding peptide
  MOD_RES (6)..(7): Xaa is C or S
STPPTXXVPTRLSPISILYKDSANNVVLKYHYDMV

SEQ ID NO: 91353 - protein, 36 aa, Artificial Sequence; identical to SEQ ID NO: 77069
  Cyclic GFR-binding peptide
  MOD_RES (2)..(3)..(34)..(36): Xaa is C or S

SEQ ID NO: 91354 - protein, 23 aa, Artificial Sequence
  Cyclic GFR-binding peptide
RLSPINILYFDAANNVVYGKIPD

SEQ ID NO: 91355 - protein, 39 aa, Artificial Sequence; identical to SEQ ID NO: 9414
  Cyclic GFR-binding peptide
  MOD_RES (5)..(6)..(37)..(39): Xaa is C or S

SEQ ID NO: 91356 - protein, 31 aa, Artificial Sequence; identical to SEQ ID NO: 38190
  Cyclic GFR-binding peptide
  MOD_RES (4)..(5): Xaa is C or S

SEQ ID NO: 91357 - protein, 37 aa, Artificial Sequence; identical to SEQ ID NO: 9415
  Cyclic GFR-binding peptide
  MOD_RES (5)..(6): Xaa is C or S

SEQ ID NO: 91358 - protein, 37 aa, Artificial Sequence
  Cyclic GFR-binding peptide
  MOD_RES (6)..(7): Xaa is C or S
GIPEPXXVPEKMEPISILYLDENKNVVKFKYENMTVE

SEQ ID NO: 91359 - protein, 31 aa, Artificial Sequence
  Cyclic GFR-binding peptide
  MOD_RES (5)..(6): Xaa is C or S
SASPXXVSQDLSPINILYFIGKTPKIYGKIP

SEQ ID NO: 91360 - protein, 39 aa, Artificial Sequence; identical to SEQ ID NO: 38191
  Cyclic GFR-binding peptide
  MOD_RES (5)..(6)..(39): Xaa is C or S

SEQ ID NO: 91361 - protein, 34 aa, Artificial Sequence
  Cyclic GFR-binding peptide
  MOD_RES (31)..(33): Xaa is C or S
PEKMSPISILYKDENKNVVLKYHYNMTVESXAXR

SEQ ID NO: 91362 - protein, 29 aa, Artificial Sequence
  Cyclic GFR-binding peptide
  MOD_RES (29)..(29): Xaa is C or S
ELNAISMLYFDENEKVVLKKYRDMVVEGX

SEQ ID NO: 91363 - protein, 32 aa, Artificial Sequence
  Cyclic GFR-binding peptide
  MOD_RES (31)..(31): Xaa is C or S
PTKMSATSMLYYNDKQQIILRKHRGMVVDRXG

SEQ ID NO: 91364 - protein, 30 aa, Artificial Sequence; identical to SEQ ID NO: 9419
  Cyclic GFR-binding peptide
  MOD_RES (28)..(30): Xaa is C or S

SEQ ID NO: 91365 - protein, 31 aa, Artificial Sequence; identical to SEQ ID NO: 38197
  Cyclic GFR-binding peptide
  MOD_RES (1)..(2): Xaa is C or S

SEQ ID NO: 91366 - protein, 34 aa, Artificial Sequence; identical to SEQ ID NO: 9421
  Cyclic GFR-binding peptide
  MOD_RES (5)..(6): Xaa is C or S

SEQ ID NO: 91367 - protein, 28 aa, Artificial Sequence
  Cyclic GFR-binding peptide
  MOD_RES (28)..(28): Xaa is C or S
KTNAISMLYFDNGRVLLLKKYRMIVEEX

SEQ ID NO: 91368 - protein, 38 aa, Artificial Sequence
  Cyclic GFR-binding peptide
  MOD_RES (4)..(5)..(37): Xaa is C or S
AGPXXTPTKMSATSMLYYNDKQQIILRKHRGMVVDRXG

SEQ ID NO: 91369 - protein, 37 aa, Artificial Sequence; identical to SEQ ID NO: 38202
  Cyclic GFR-binding peptide
  MOD_RES (2)..(3)..(35)..(37): Xaa is C or S

SEQ ID NO: 91370 - protein, 29 aa, Artificial Sequence
  Cyclic GFR-binding peptide
  MOD_RES (3)..(4): Xaa is C or S
SPXXVSQDLNAISILYFIGKTPKILKKYR

SEQ ID NO: 91371 - protein, 30 aa, Artificial Sequence
  Cyclic GFR-binding peptide
PEKMSATSILYYDENKNVVLRKHRNMTVES

SEQ ID NO: 91372 - protein, 40 aa, Artificial Sequence; identical to SEQ ID NO: 9425
  Cyclic GFR-binding peptide
  MOD_RES (6)..(7)..(39): Xaa is C or S

SEQ ID NO: 91373 - protein, 37 aa, Artificial Sequence
  Cyclic GFR-binding peptide
  MOD_RES (2)..(3)..(35)..(37): Xaa is C or S
TXXVPTRLSPISILYKDSANNVVLKYHYDMVVESXGX

SEQ ID NO: 91374 - protein, 23 aa, Artificial Sequence
  Cyclic GFR-binding peptide
EPISILYLDSANNVVKFKYEDMV

SEQ ID NO: 91375 - protein, 37 aa, Artificial Sequence; identical to SEQ ID NO: 9427
  Cyclic GFR-binding peptide
  MOD_RES (3)..(4)..(35)..(37): Xaa is C or S

SEQ ID NO: 91376 - protein, 31 aa, Artificial Sequence
  Cyclic GFR-binding peptide
  MOD_RES (30)..(30): Xaa is C or S
TRLSPISILYKDSANNVVLKYHYDMVVESXG

SEQ ID NO: 91377 - protein, 36 aa, Artificial Sequence; identical to SEQ ID NO: 9429
  Cyclic GFR-binding peptide
  MOD_RES (3)..(4)..(35): Xaa is C or S

SEQ ID NO: 91378 - protein, 38 aa, Artificial Sequence
  Cyclic GFR-binding peptide
  MOD_RES (4)..(5)..(37): Xaa is C or S
PASXXVPARLSATSILYYDAANNVVLRKHRDMVVEAXG

SEQ ID NO: 91379 - protein, 32 aa, Artificial Sequence; identical to SEQ ID NO: 9433
  Cyclic GFR-binding peptide
  MOD_RES (1)..(32): Xaa is C or S

SEQ ID NO: 91380 - protein, 28 aa, Artificial Sequence
  Cyclic GFR-binding peptide
  MOD_RES (26)..(28): Xaa is C or S
SPINILYFIGKTPKIYGKIPMIVKSXKX

SEQ ID NO: 91381 - protein, 32 aa, Artificial Sequence
  Cyclic GFR-binding peptide
  MOD_RES (1)..(32): Xaa is C or S
XVPQALSPINILYFVGRKPKVYGKIPMIVRSX

SEQ ID NO: 91382 - protein, 38 aa, Artificial Sequence; identical to SEQ ID NO: 77076
  Cyclic GFR-binding peptide
  MOD_RES (6)..(7)..(38): Xaa is C or S

SEQ ID NO: 91383 - protein, 34 aa, Artificial Sequence; identical to SEQ ID NO: 9435
  Cyclic GFR-binding peptide
  MOD_RES (4)..(5): Xaa is C or S

SEQ ID NO: 91384 - protein, 33 aa, Artificial Sequence; identical to SEQ ID NO: 38213
  Cyclic GFR-binding peptide
  MOD_RES (30)..(32): Xaa is C or S

SEQ ID NO: 91385 - protein, 31 aa, Artificial Sequence; identical to SEQ ID NO: 38214
  Cyclic GFR-binding peptide
  MOD_RES (30)..(30): Xaa is C or S

SEQ ID NO: 91386 - protein, 31 aa, Artificial Sequence; identical to SEQ ID NO: 9441
  Cyclic GFR-binding peptide
  MOD_RES (3)..(4): Xaa is C or S

SEQ ID NO: 91387 - protein, 27 aa, Artificial Sequence
  Cyclic GFR-binding peptide
  MOD_RES (1)..(1): Xaa is C or S
XVSQDLEPISILYLIGKTPKIKFKYEM

SEQ ID NO: 91388 - protein, 36 aa, Artificial Sequence; identical to SEQ ID NO: 42593
  Cyclic GFR-binding peptide
  MOD_RES (1)..(2)..(34)..(36): Xaa is C or S

SEQ ID NO: 91389 - protein, 33 aa, Artificial Sequence; identical to SEQ ID NO: 9446
  Cyclic GFR-binding peptide
  MOD_RES (30)..(32): Xaa is C or S

SEQ ID NO: 91390 - protein, 34 aa, Artificial Sequence; identical to SEQ ID NO: 9450
  Cyclic GFR-binding peptide
  MOD_RES (1)..(2)..(33): Xaa is C or S

SEQ ID NO: 91391 - protein, 29 aa, Artificial Sequence
  Cyclic GFR-binding peptide
  MOD_RES (3)..(3): Xaa is C or S
PTXAPTKLSATSVLYYDDSSNVILRKHRN

SEQ ID NO: 91392 - protein, 21 aa, Artificial Sequence
  Cyclic GFR-binding peptide
LEPISVLYLDSSNNVIKFKYE

SEQ ID NO: 91393 - protein, 27 aa, Artificial Sequence
  Cyclic GFR-binding peptide
SQDLEPISILYLIGKTPKIKFKYEMIV

SEQ ID NO: 91394 - protein, 30 aa, Artificial Sequence; identical to SEQ ID NO: 38232
  Cyclic GFR-binding peptide

SEQ ID NO: 91395 - protein, 28 aa, Artificial Sequence
  Cyclic GFR-binding peptide
  MOD_RES (1)..(2): Xaa is C or S
XXAPTKLSATSVLYYDDSSNVILRKHRN

SEQ ID NO: 91396 - protein, 25 aa, Artificial Sequence
  Cyclic GFR-binding peptide
QALSPISILYKVGRKPKVLKYHYMI

SEQ ID NO: 91397 - protein, 23 aa, Artificial Sequence
  Cyclic GFR-binding peptide
KMNAISMLYFNDKQQIILKKYRG

SEQ ID NO: 91398 - protein, 36 aa, Artificial Sequence; identical to SEQ ID NO: 42604
  Cyclic GFR-binding peptide
  MOD_RES (6)..(7): Xaa is C or S

SEQ ID NO: 91399 - protein, 27 aa, Artificial Sequence
  Cyclic GFR-binding peptide
  MOD_RES (1)..(1): Xaa is C or S
XVPTKLSPINVLYFDDMGVPTYGKIPE

SEQ ID NO: 91400 - protein, 29 aa, Artificial Sequence
  Cyclic GFR-binding peptide
  MOD_RES (1)..(1): Xaa is C or S
XVPTELSPINMLYFDEYDKVVYGKIPEMV

SEQ ID NO: 91401 - protein, 32 aa, Artificial Sequence; identical to SEQ ID NO: 9456
  Cyclic GFR-binding peptide
  MOD_RES (5)..(5): Xaa is C or S

SEQ ID NO: 91402 - protein, 29 aa, Artificial Sequence
  Cyclic GFR-binding peptide
TQLSPINVLYFDDSSNVIYGKIPNMVVRA

SEQ ID NO: 91403 - protein, 36 aa, Artificial Sequence
  Cyclic GFR-binding peptide
  MOD_RES (2)..(3)..(34)..(36): Xaa is C or S
TXXAPVKTSPISMLYKDNGRVLLLKYHYMIVEEXGX

SEQ ID NO: 91404 - protein, 28 aa, Artificial Sequence
  Cyclic GFR-binding peptide
  MOD_RES (1)..(1): Xaa is C or S
XTPTKMSPISMLYKNDKQQIILKYHYGM

SEQ ID NO: 91405 - protein, 26 aa, Artificial Sequence
  Cyclic GFR-binding peptide
LEPISILYLDSANNVVKFKYEDMVVE

SEQ ID NO: 91406 - protein, 34 aa, Artificial Sequence; identical to SEQ ID NO: 9460
  Cyclic GFR-binding peptide
  MOD_RES (1)..(2)..(34): Xaa is C or S

SEQ ID NO: 91407 - protein, 35 aa, Artificial Sequence
  Cyclic GFR-binding peptide
  MOD_RES (2)..(3)..(35): Xaa is C or S
PXXVPEKMSPISILYKDENKNVVLKYHYNMTVESX

SEQ ID NO: 91408 - protein, 40 aa, Artificial Sequence; identical to SEQ ID NO: 42621
  Cyclic GFR-binding peptide
  MOD_RES (7)..(39): Xaa is C or S

SEQ ID NO: 91409 - protein, 37 aa, Artificial Sequence; identical to SEQ ID NO: 38242
  Cyclic GFR-binding peptide
  MOD_RES (5)..(6): Xaa is C or S

SEQ ID NO: 91410 - protein, 36 aa, Artificial Sequence; identical to SEQ ID NO: 42623
  Cyclic GFR-binding peptide
  MOD_RES (5)..(6): Xaa is C or S

SEQ ID NO: 91411 - protein, 35 aa, Artificial Sequence; identical to SEQ ID NO: 38243
  Cyclic GFR-binding peptide
  MOD_RES (32)..(34): Xaa is C or S

SEQ ID NO: 91412 - protein, 32 aa, Artificial Sequence; identical to SEQ ID NO: 38244
  Cyclic GFR-binding peptide
  MOD_RES (1)..(2): Xaa is C or S

SEQ ID NO: 91413 - protein, 23 aa, Artificial Sequence
  Cyclic GFR-binding peptide
KLSPINVLYFDSSNNVIYGKIPN

SEQ ID NO: 91414 - protein, 36 aa, Artificial Sequence; identical to SEQ ID NO: 9461
  Cyclic GFR-binding peptide
  MOD_RES (1)..(2)..(34)..(36): Xaa is C or S

SEQ ID NO: 91415 - protein, 26 aa, Artificial Sequence
  Cyclic GFR-binding peptide
PTQLEPISVLYLDDSSNVIKFKYENM

SEQ ID NO: 91416 - protein, 36 aa, Artificial Sequence; identical to SEQ ID NO: 9462
  Cyclic GFR-binding peptide
  MOD_RES (6)..(7): Xaa is C or S

SEQ ID NO: 91417 - protein, 24 aa, Artificial Sequence
  Cyclic GFR-binding peptide
PTQLSATSVLYYDDSSNVILRKHR

SEQ ID NO: 91418 - protein, 33 aa, Artificial Sequence
  Cyclic GFR-binding peptide
  MOD_RES (1)..(32): Xaa is C or S
XAPVKTSPISMLYKDNGRVLLLKYHYMIVEEXG

SEQ ID NO: 91419 - protein, 33 aa, Artificial Sequence; identical to SEQ ID NO: 9464
  Cyclic GFR-binding peptide
  MOD_RES (3)..(4): Xaa is C or S

SEQ ID NO: 91420 - protein, 40 aa, Artificial Sequence
  Cyclic GFR-binding peptide
  MOD_RES (6)..(7)..(39): Xaa is C or S
GSAGPXXTPTKMEPISMLYLNDKQQIIKFKYEGMVVDRXG

SEQ ID NO: 91421 - protein, 31 aa, Artificial Sequence
  Cyclic GFR-binding peptide
  MOD_RES (1)..(1): Xaa is C or S
XVPQDLSPINILYFVGRTPKVYGKIPMVVKS

SEQ ID NO: 91422 - protein, 37 aa, Artificial Sequence; identical to SEQ ID NO: 9465
  Cyclic GFR-binding peptide
  MOD_RES (5)..(6)..(37): Xaa is C or S

SEQ ID NO: 91423 - protein, 37 aa, Artificial Sequence; identical to SEQ ID NO: 38252
  Cyclic GFR-binding peptide
  MOD_RES (2)..(3)..(35)..(37): Xaa is C or S

SEQ ID NO: 91424 - protein, 33 aa, Artificial Sequence; identical to SEQ ID NO: 38253
  Cyclic GFR-binding peptide
  MOD_RES (3)..(3): Xaa is C or S

SEQ ID NO: 91425 - protein, 27 aa, Artificial Sequence
  Cyclic GFR-binding peptide
  MOD_RES (27)..(27): Xaa is C or S
NAISILYFDSANNVVLKKYRDMVVESX

SEQ ID NO: 91426 - protein, 26 aa, Artificial Sequence
  Cyclic GFR-binding peptide
EPISMLYLDEYDKVVKFKYEEMVVEG

SEQ ID NO: 91427 - protein, 34 aa, Artificial Sequence; identical to SEQ ID NO: 38255
  Cyclic GFR-binding peptide
  MOD_RES (31)..(33): Xaa is C or S

SEQ ID NO: 91428 - protein, 31 aa, Artificial Sequence; identical to SEQ ID NO: 38258
  Cyclic GFR-binding peptide
  MOD_RES (4)..(5): Xaa is C or S

SEQ ID NO: 91429 - protein, 22 aa, Artificial Sequence
  Cyclic GFR-binding peptide
SPISVLYKDDSSNVILKYHYNM

SEQ ID NO: 91430 - protein, 36 aa, Artificial Sequence; identical to SEQ ID NO: 42634
  Cyclic GFR-binding peptide
  MOD_RES (5)..(6): Xaa is C or S

SEQ ID NO: 91431 - protein, 23 aa, Artificial Sequence
  Cyclic GFR-binding peptide
ALSATSILYYVGRKPKVLRKHRM

SEQ ID NO: 91432 - protein, 32 aa, Artificial Sequence; identical to SEQ ID NO: 9480
  Cyclic GFR-binding peptide
  MOD_RES (1)..(2): Xaa is C or S

SEQ ID NO: 91433 - protein, 20 aa, Artificial Sequence
  Cyclic GFR-binding peptide
SPISILYKDKGVVTYLKYHY

SEQ ID NO: 91434 - protein, 31 aa, Artificial Sequence; identical to SEQ ID NO: 38271
  Cyclic GFR-binding peptide
  MOD_RES (31)..(31): Xaa is C or S

SEQ ID NO: 91435 - protein, 33 aa, Artificial Sequence
  Cyclic GFR-binding peptide
  MOD_RES (5)..(6): Xaa is C or S
TPPTXXVPTRLSPISILYKDSANNVVLKYHYDM

SEQ ID NO: 91436 - protein, 23 aa, Artificial Sequence
  Cyclic GFR-binding peptide
SPINVLYFDDMGVPTYGKIPEGM

SEQ ID NO: 91437 - protein, 30 aa, Artificial Sequence
  Cyclic GFR-binding peptide
  MOD_RES (1)..(1): Xaa is C or S
XVPTRLSATSILYYDSANNVVLRKHRDMVV

SEQ ID NO: 91438 - protein, 32 aa, Artificial Sequence
  Cyclic GFR-binding peptide
  MOD_RES (30)..(32): Xaa is C or S
SQDLSPINILYFIGKTPKIYGKIPMIVKSXKX

SEQ ID NO: 91439 - protein, 34 aa, Artificial Sequence
  Cyclic GFR-binding peptide
  MOD_RES (4)..(5): Xaa is C or S
PSTXXAPVKTEPISMLYLDNGRVLLKFKYEMIVE

SEQ ID NO: 91440 - protein, 40 aa, Artificial Sequence; identical to SEQ ID NO: 9487
  Cyclic GFR-binding peptide
  MOD_RES (6)..(7)..(38)..(40): Xaa is C or S

SEQ ID NO: 91441 - protein, 29 aa, Artificial Sequence
  Cyclic GFR-binding peptide
  MOD_RES (2)..(3): Xaa is C or S
PXXVPQDLSATSILYYVGRTPKVLRKHRM

SEQ ID NO: 91442 - protein, 28 aa, Artificial Sequence
  Cyclic GFR-binding peptide
VSQDLSPINILYFIGKTPKIYGKIPMIV

SEQ ID NO: 91443 - protein, 24 aa, Artificial Sequence
  Cyclic GFR-binding peptide
NAISMLYFDEYDKVVLKKYREMVV

SEQ ID NO: 91444 - protein, 22 aa, Artificial Sequence
  Cyclic GFR-binding peptide
DLEPISILYLVGRTPKVKFKYE

SEQ ID NO: 91445 - protein, 30 aa, Artificial Sequence; identical to SEQ ID NO: 9492
  Cyclic GFR-binding peptide
  MOD_RES (1)..(2): Xaa is C or S

SEQ ID NO: 91446 - protein, 30 aa, Artificial Sequence; identical to SEQ ID NO: 9493
  Cyclic GFR-binding peptide
  MOD_RES (4)..(5): Xaa is C or S

SEQ ID NO: 91447 - protein, 32 aa, Artificial Sequence; identical to SEQ ID NO: 9495
  Cyclic GFR-binding peptide
  MOD_RES (31)..(31): Xaa is C or S

SEQ ID NO: 91448 - protein, 33 aa, Artificial Sequence
  Cyclic GFR-binding peptide
  MOD_RES (4)..(5): Xaa is C or S
PSTXXAPVKTSPISMLYKDNGRVLLLKYHYMIV

SEQ ID NO: 91449 - protein, 31 aa, Artificial Sequence
  Cyclic GFR-binding peptide
  MOD_RES (5)..(6): Xaa is C or S
IPEPXXVPEKMSATSILYYDENKNVVLRKHR

SEQ ID NO: 91450 - protein, 23 aa, Artificial Sequence
  Cyclic GFR-binding peptide
EPISMLYLDEYDKVVKFKYEEMV

SEQ ID NO: 91451 - protein, 27 aa, Artificial Sequence
  Cyclic GFR-binding peptide
  MOD_RES (2)..(2): Xaa is C or S
TXAPTKLSATSVLYYDDSSNVILRKHR

SEQ ID NO: 91452 - protein, 23 aa, Artificial Sequence
  Cyclic GFR-binding peptide
NAISVLYFDSSNNVILKKYRNMV

SEQ ID NO: 91453 - protein, 38 aa, Artificial Sequence; identical to SEQ ID NO: 38292
  Cyclic GFR-binding peptide
  MOD_RES (2)..(3)..(35)..(37): Xaa is C or S

SEQ ID NO: 91454 - protein, 32 aa, Artificial Sequence
  Cyclic GFR-binding peptide
  MOD_RES (4)..(5): Xaa is C or S
PSTXXAPVKTEPISMLYLDNGRVLLKFKYEMI

SEQ ID NO: 91455 - protein, 37 aa, Artificial Sequence; identical to SEQ ID NO: 9503
  Cyclic GFR-binding peptide
  MOD_RES (6)..(7): Xaa is C or S

SEQ ID NO: 91456 - protein, 27 aa, Artificial Sequence
  Cyclic GFR-binding peptide
TKMEPISMLYLNDKQQIIKFKYEGMVV

SEQ ID NO: 91457 - protein, 33 aa, Artificial Sequence; identical to SEQ ID NO: 38298
  Cyclic GFR-binding peptide
  MOD_RES (2)..(3): Xaa is C or S

SEQ ID NO: 91458 - protein, 30 aa, Artificial Sequence; identical to SEQ ID NO: 19737
  Cyclic GFR-binding peptide
  MOD_RES (27)..(29): Xaa is C or S

SEQ ID NO: 91459 - protein, 30 aa, Artificial Sequence
  Cyclic GFR-binding peptide
  MOD_RES (2)..(3): Xaa is C or S
PXXVPQALSPINILYFVGRKPKVYGKIPMI

SEQ ID NO: 91460 - protein, 34 aa, Artificial Sequence; identical to SEQ ID NO: 38302
  Cyclic GFR-binding peptide
  MOD_RES (6)..(6): Xaa is C or S

SEQ ID NO: 91461 - protein, 37 aa, Artificial Sequence; identical to SEQ ID NO: 9508
  Cyclic GFR-binding peptide
  MOD_RES (2)..(3)..(35)..(37): Xaa is C or S

SEQ ID NO: 91462 - protein, 27 aa, Artificial Sequence
  Cyclic GFR-binding peptide
  MOD_RES (1)..(2): Xaa is C or S
XXVPQALSPISILYKVGRKPKVLKYHY

SEQ ID NO: 91463 - protein, 31 aa, Artificial Sequence; identical to SEQ ID NO: 9510
  Cyclic GFR-binding peptide
  MOD_RES (30)..(30): Xaa is C or S

SEQ ID NO: 91464 - protein, 23 aa, Artificial Sequence
  Cyclic GFR-binding peptide
LSPISILYKVGRTPKVLKYHYMV

SEQ ID NO: 91465 - protein, 36 aa, Artificial Sequence; identical to SEQ ID NO: 38310
  Cyclic GFR-binding peptide
  MOD_RES (1)..(33)..(35): Xaa is C or S

SEQ ID NO: 91466 - protein, 32 aa, Artificial Sequence; identical to SEQ ID NO: 9514
  Cyclic GFR-binding peptide
  MOD_RES (6)..(6): Xaa is C or S

SEQ ID NO: 91467 - protein, 34 aa, Artificial Sequence; identical to SEQ ID NO: 9515
  Cyclic GFR-binding peptide
  MOD_RES (4)..(5): Xaa is C or S

SEQ ID NO: 91468 - protein, 35 aa, Artificial Sequence
  Cyclic GFR-binding peptide
  MOD_RES (32)..(34): Xaa is C or S
VPARLSATSILYYDAANNVVLRKHRDMVVEAXGXR

SEQ ID NO: 91469 - protein, 23 aa, Artificial Sequence
  Cyclic GFR-binding peptide
ELSPINMLYFDENEKVVYGKIPD

SEQ ID NO: 91470 - protein, 38 aa, Artificial Sequence; identical to SEQ ID NO: 38315
  Cyclic GFR-binding peptide
  MOD_RES (6)..(7): Xaa is C or S

SEQ ID NO: 91471 - protein, 30 aa, Artificial Sequence; identical to SEQ ID NO: 42695
  Cyclic GFR-binding peptide
  MOD_RES (2)..(3): Xaa is C or S

SEQ ID NO: 91472 - protein, 30 aa, Artificial Sequence; identical to SEQ ID NO: 9519
  Cyclic GFR-binding peptide
  MOD_RES (30)..(30): Xaa is C or S

SEQ ID NO: 91473 - protein, 38 aa, Artificial Sequence; identical to SEQ ID NO: 38319
  Cyclic GFR-binding peptide
  MOD_RES (4)..(5)..(37): Xaa is C or S

SEQ ID NO: 91474 - protein, 28 aa, Artificial Sequence
  Cyclic GFR-binding peptide
  MOD_RES (28)..(28): Xaa is C or S
LNAISVLYFDSSNNVILKKYRNMVVKAX

SEQ ID NO: 91475 - protein, 31 aa, Artificial Sequence; identical to SEQ ID NO: 9528
  Cyclic GFR-binding peptide
  MOD_RES (4)..(5): Xaa is C or S

SEQ ID NO: 91476 - protein, 30 aa, Artificial Sequence
  Cyclic GFR-binding peptide
  MOD_RES (28)..(30): Xaa is C or S
DLSPINILYFVGRTPKVYGKIPMVVKSXKX

SEQ ID NO: 91477 - protein, 21 aa, Artificial Sequence
  Cyclic GFR-binding peptide
MEPISILYLDENKNVVKFKYE

SEQ ID NO: 91478 - protein, 24 aa, Artificial Sequence
  Cyclic GFR-binding peptide
PTELSPISMLYKDENEKVVLKYHY

SEQ ID NO: 91479 - protein, 32 aa, Artificial Sequence; identical to SEQ ID NO: 38328
  Cyclic GFR-binding peptide
  MOD_RES (4)..(5): Xaa is C or S

SEQ ID NO: 91480 - protein, 40 aa, Artificial Sequence
  Cyclic GFR-binding peptide
  MOD_RES (5)..(6)..(37)..(39): Xaa is C or S
VPSTXXAPVKTEPISMLYLDNGRVLLKFKYEMIVEEXGXL

SEQ ID NO: 91481 - protein, 29 aa, Artificial Sequence
  Cyclic GFR-binding peptide
  MOD_RES (29)..(29): Xaa is C or S
QDLSATSILYYIGKTPKILRKHRMIVKSX

SEQ ID NO: 91482 - protein, 30 aa, Artificial Sequence; identical to SEQ ID NO: 9534
  Cyclic GFR-binding peptide
  MOD_RES (4)..(5): Xaa is C or S

SEQ ID NO: 91483 - protein, 21 aa, Artificial Sequence
  Cyclic GFR-binding peptide
LSPISILYKDAANNVVLKYHY

SEQ ID NO: 91484 - protein, 38 aa, Artificial Sequence
  Cyclic GFR-binding peptide
  MOD_RES (3)..(4)..(35)..(37): Xaa is C or S
APXXVPQALSPINILYFVGRKPKVYGKIPMIVRSXKXS

SEQ ID NO: 91485 - protein, 37 aa, Artificial Sequence; identical to SEQ ID NO: 19764
  Cyclic GFR-binding peptide
  MOD_RES (3)..(4)..(36): Xaa is C or S

SEQ ID NO: 91486 - protein, 31 aa, Artificial Sequence; identical to SEQ ID NO: 42709
  Cyclic GFR-binding peptide
  MOD_RES (28)..(30): Xaa is C or S

SEQ ID NO: 91487 - protein, 24 aa, Artificial Sequence
  Cyclic GFR-binding peptide
KLSATSVLYYDDSSNVILRKHRNM

SEQ ID NO: 91488 - protein, 35 aa, Artificial Sequence; identical to SEQ ID NO: 38336
  Cyclic GFR-binding peptide
  MOD_RES (6)..(7): Xaa is C or S

SEQ ID NO: 91489 - protein, 28 aa, Artificial Sequence
  Cyclic GFR-binding peptide
  MOD_RES (1)..(2): Xaa is C or S
XXTPTKMEPISMLYLNDKQQIIKFKYEG

SEQ ID NO: 91490 - protein, 26 aa, Artificial Sequence
  Cyclic GFR-binding peptide
VPARLSPISILYKDAANNVVLKYHYD

SEQ ID NO: 91491 - protein, 35 aa, Artificial Sequence
  Cyclic GFR-binding peptide
  MOD_RES (1)..(33)..(35): Xaa is C or S
XVPEKMSPISILYKDENKNVVLKYHYNMTVESXAX

SEQ ID NO: 91492 - protein, 25 aa, Artificial Sequence
  Cyclic GFR-binding peptide
ALNAISILYFVGRKPKVLKKYRMIV

SEQ ID NO: 91493 - protein, 20 aa, Artificial Sequence
  Cyclic GFR-binding peptide
SATSVLYYDDSSNVILRKHR

SEQ ID NO: 91494 - protein, 28 aa, Artificial Sequence
  Cyclic GFR-binding peptide
KLSPISILYKDKGVVTYLKYHYGMAVSE

SEQ ID NO: 91495 - protein, 32 aa, Artificial Sequence
  Cyclic GFR-binding peptide
  MOD_RES (31)..(31): Xaa is C or S
VSQDLSPINILYFIGKTPKIYGKIPMIVKSXK

SEQ ID NO: 91496 - protein, 31 aa, Artificial Sequence
  Cyclic GFR-binding peptide
  MOD_RES (4)..(5): Xaa is C or S
AGPXXTPTKMSATSMLYYNDKQQIILRKHRG

SEQ ID NO: 91497 - protein, 35 aa, Artificial Sequence; identical to SEQ ID NO: 9552
  Cyclic GFR-binding peptide
  MOD_RES (4)..(4): Xaa is C or S

SEQ ID NO: 91498 - protein, 36 aa, Artificial Sequence; identical to SEQ ID NO: 9553
  Cyclic GFR-binding peptide
  MOD_RES (33)..(35): Xaa is C or S

SEQ ID NO: 91499 - protein, 31 aa, Artificial Sequence; identical to SEQ ID NO: 9556
  Cyclic GFR-binding peptide
  MOD_RES (1)..(2): Xaa is C or S

SEQ ID NO: 91500 - protein, 32 aa, Artificial Sequence; identical to SEQ ID NO: 38355
  Cyclic GFR-binding peptide
  MOD_RES (1)..(1): Xaa is C or S

SEQ ID NO: 91501 - protein, 21 aa, Artificial Sequence
  Cyclic GFR-binding peptide
MSATSILYYDENKNVVLRKHR

SEQ ID NO: 91502 - protein, 21 aa, Artificial Sequence
  Cyclic GFR-binding peptide
MSATSMLYYNDKQQIILRKHR

SEQ ID NO: 91503 - protein, 36 aa, Artificial Sequence; identical to SEQ ID NO: 9560
  Cyclic GFR-binding peptide
  MOD_RES (5)..(6): Xaa is C or S

SEQ ID NO: 91504 - protein, 35 aa, Artificial Sequence
  Cyclic GFR-binding peptide
  MOD_RES (3)..(4)..(35): Xaa is C or S
STXXAPVKTSPISMLYKDNGRVLLLKYHYMIVEEX

SEQ ID NO: 91505 - protein, 34 aa, Artificial Sequence; identical to SEQ ID NO: 19784
  Cyclic GFR-binding peptide
  MOD_RES (3)..(4): Xaa is C or S

SEQ ID NO: 91506 - protein, 28 aa, Artificial Sequence
  Cyclic GFR-binding peptide
RLSPINILYFDAANNVVYGKIPDMVVEA

SEQ ID NO: 91507 - protein, 29 aa, Artificial Sequence
  Cyclic GFR-binding peptide
  MOD_RES (29)..(29): Xaa is C or S
ELEPISMLYLDENEKVVKFKYEDMVVEGX

SEQ ID NO: 91508 - protein, 42 aa, Artificial Sequence; identical to SEQ ID NO: 9563
  Cyclic GFR-binding peptide
  MOD_RES (6)..(7)..(39)..(41): Xaa is C or S

SEQ ID NO: 91509 - protein, 32 aa, Artificial Sequence; identical to SEQ ID NO: 9565
  Cyclic GFR-binding peptide
  MOD_RES (29)..(31): Xaa is C or S

SEQ ID NO: 91510 - protein, 38 aa, Artificial Sequence; identical to SEQ ID NO: 9566
  Cyclic GFR-binding peptide
  MOD_RES (5)..(6)..(37): Xaa is C or S

SEQ ID NO: 91511 - protein, 33 aa, Artificial Sequence; identical to SEQ ID NO: 42734
  Cyclic GFR-binding peptide
  MOD_RES (5)..(6): Xaa is C or S

SEQ ID NO: 91512 - protein, 31 aa, Artificial Sequence; identical to SEQ ID NO: 9569
  Cyclic GFR-binding peptide
  MOD_RES (2)..(3): Xaa is C or S

SEQ ID NO: 91513 - protein, 35 aa, Artificial Sequence; identical to SEQ ID NO: 9571
  Cyclic GFR-binding peptide
  MOD_RES (5)..(5): Xaa is C or S

SEQ ID NO: 91514 - protein, 33 aa, Artificial Sequence
  Cyclic GFR-binding peptide
  MOD_RES (2)..(3): Xaa is C or S
TXXAPVKTEPISMLYLDNGRVLLKFKYEMIVEE

SEQ ID NO: 91515 - protein, 34 aa, Artificial Sequence; identical to SEQ ID NO: 9573
  Cyclic GFR-binding peptide
  MOD_RES (31)..(33): Xaa is C or S

SEQ ID NO: 91516 - protein, 24 aa, Artificial Sequence
  Cyclic GFR-binding peptide
SPISILYKDAANNVVLKYHYDMVV

SEQ ID NO: 91517 - protein, 29 aa, Artificial Sequence
  Cyclic GFR-binding peptide
VSQDLNAISILYFIGKTPKILKKYRMIVK

SEQ ID NO: 91518 - protein, 39 aa, Artificial Sequence; identical to SEQ ID NO: 9580
  Cyclic GFR-binding peptide
  MOD_RES (4)..(5)..(36)..(38): Xaa is C or S

SEQ ID NO: 91519 - protein, 28 aa, Artificial Sequence
  Cyclic GFR-binding peptide
VPTKLSPINVLYFDDMGVPTYGKIPEGM

SEQ ID NO: 91520 - protein, 32 aa, Artificial Sequence; identical to SEQ ID NO: 9581
  Cyclic GFR-binding peptide
  MOD_RES (4)..(5): Xaa is C or S

SEQ ID NO: 91521 - protein, 27 aa, Artificial Sequence
  Cyclic GFR-binding peptide
  MOD_RES (27)..(27): Xaa is C or S
SPINMLYFDEYDKVVYGKIPEMVVEGX

SEQ ID NO: 91522 - protein, 24 aa, Artificial Sequence
  Cyclic GFR-binding peptide
PTKLSATSILYYDKGVVTYLRKHR

SEQ ID NO: 91523 - protein, 29 aa, Artificial Sequence
  Cyclic GFR-binding peptide
  MOD_RES (3)..(4): Xaa is C or S
SPXXVPQDLSATSILYYVGRTPKVLRKHR

SEQ ID NO: 91524 - protein, 33 aa, Artificial Sequence; identical to SEQ ID NO: 9583
  Cyclic GFR-binding peptide
  MOD_RES (31)..(33): Xaa is C or S

SEQ ID NO: 91525 - protein, 37 aa, Artificial Sequence; identical to SEQ ID NO: 9585
  Cyclic GFR-binding peptide
  MOD_RES (2)..(3)..(35)..(37): Xaa is C or S

SEQ ID NO: 91526 - protein, 31 aa, Artificial Sequence; identical to SEQ ID NO: 9586
  Cyclic GFR-binding peptide
  MOD_RES (31)..(31): Xaa is C or S

SEQ ID NO: 91527 - protein, 29 aa, Artificial Sequence
  Cyclic GFR-binding peptide
VPTKLNAISILYFDKGVVTYLKKYRGMAV

SEQ ID NO: 91528 - protein, 30 aa, Artificial Sequence; identical to SEQ ID NO: 38379
  Cyclic GFR-binding peptide
  MOD_RES (2)..(3): Xaa is C or S

SEQ ID NO: 91529 - protein, 28 aa, Artificial Sequence
  Cyclic GFR-binding peptide
  MOD_RES (27)..(27): Xaa is C or S
LEPISILYLVGRKPKVKFKYEMIVRSXK

SEQ ID NO: 91530 - protein, 21 aa, Artificial Sequence
  Cyclic GFR-binding peptide
SPISMLYKDNGRVLLLKYHYM

SEQ ID NO: 91531 - protein, 37 aa, Artificial Sequence; identical to SEQ ID NO: 42765
  Cyclic GFR-binding peptide
  MOD_RES (2)..(3)..(35)..(37): Xaa is C or S

SEQ ID NO: 91532 - protein, 28 aa, Artificial Sequence
  Cyclic GFR-binding peptide
KMSATSILYYDENKNVVLRKHRNMTVES

SEQ ID NO: 91533 - protein, 32 aa, Artificial Sequence; identical to SEQ ID NO: 9588
  Cyclic GFR-binding peptide
  MOD_RES (32)..(32): Xaa is C or S

SEQ ID NO: 91534 - protein, 31 aa, Artificial Sequence; identical to SEQ ID NO: 19806
  Cyclic GFR-binding peptide
  MOD_RES (3)..(4): Xaa is C or S

SEQ ID NO: 91535 - protein, 25 aa, Artificial Sequence
  Cyclic GFR-binding peptide
PQDLSPISILYKVGRTPKVLKYHYM

SEQ ID NO: 91536 - protein, 27 aa, Artificial Sequence
  Cyclic GFR-binding peptide
ELSPISMLYKDEYDKVVLKYHYEMVVE

SEQ ID NO: 91537 - protein, 29 aa, Artificial Sequence
  Cyclic GFR-binding peptide
  MOD_RES (27)..(29): Xaa is C or S
EPISMLYLDENEKVVKFKYEDMVVEGXGX

SEQ ID NO: 91538 - protein, 38 aa, Artificial Sequence; identical to SEQ ID NO: 42773
  Cyclic GFR-binding peptide
  MOD_RES (2)..(3)..(35)..(37): Xaa is C or S

SEQ ID NO: 91539 - protein, 29 aa, Artificial Sequence
  Cyclic GFR-binding peptide
VPTELSPISMLYKDEYDKVVLKYHYEMVV

SEQ ID NO: 91540 - protein, 38 aa, Artificial Sequence; identical to SEQ ID NO: 38389
  Cyclic GFR-binding peptide
  MOD_RES (6)..(7): Xaa is C or S

SEQ ID NO: 91541 - protein, 34 aa, Artificial Sequence; identical to SEQ ID NO: 38390
  Cyclic GFR-binding peptide
  MOD_RES (31)..(33): Xaa is C or S

SEQ ID NO: 91542 - protein, 41 aa, Artificial Sequence; identical to SEQ ID NO: 38393
  Cyclic GFR-binding peptide
  MOD_RES (6)..(7)..(39)..(41): Xaa is C or S

SEQ ID NO: 91543 - protein, 31 aa, Artificial Sequence; identical to SEQ ID NO: 9599
  Cyclic GFR-binding peptide
  MOD_RES (1)..(1): Xaa is C or S

SEQ ID NO: 91544 - protein, 37 aa, Artificial Sequence; identical to SEQ ID NO: 9601
  Cyclic GFR-binding peptide
  MOD_RES (4)..(5)..(37): Xaa is C or S

SEQ ID NO: 91545 - protein, 37 aa, Artificial Sequence; identical to SEQ ID NO: 9603
  Cyclic GFR-binding peptide
  MOD_RES (5)..(6): Xaa is C or S

SEQ ID NO: 91546 - protein, 39 aa, Artificial Sequence; identical to SEQ ID NO: 9604
  Cyclic GFR-binding peptide
  MOD_RES (4)..(5)..(38): Xaa is C or S

SEQ ID NO: 91547 - protein, 37 aa, Artificial Sequence; identical to SEQ ID NO: 9606
  Cyclic GFR-binding peptide
  MOD_RES (6)..(7): Xaa is C or S

SEQ ID NO: 91548 - protein, 36 aa, Artificial Sequence
  Cyclic GFR-binding peptide
  MOD_RES (2)..(3)..(35): Xaa is C or S
TXXVPTRLSATSILYYDSANNVVLRKHRDMVVESXG

SEQ ID NO: 91549 - protein, 27 aa, Artificial Sequence
  Cyclic GFR-binding peptide
PTKMSATSMLYYNDKQQIILRKHRGMV

SEQ ID NO: 91550 - protein, 37 aa, Artificial Sequence
  Cyclic GFR-binding peptide
  MOD_RES (3)..(4)..(36): Xaa is C or S
PTXXVPTRLEPISILYLDSANNVVKFKYEDMVVESXG

SEQ ID NO: 91551 - protein, 34 aa, Artificial Sequence; identical to SEQ ID NO: 9610
  Cyclic GFR-binding peptide
  MOD_RES (5)..(6): Xaa is C or S

SEQ ID NO: 91552 - protein, 27 aa, Artificial Sequence
  Cyclic GFR-binding peptide
  MOD_RES (27)..(27): Xaa is C or S
LEPISILYLVGRKPKVKFKYEMIVRSX

SEQ ID NO: 91553 - protein, 28 aa, Artificial Sequence
  Cyclic GFR-binding peptide
  MOD_RES (27)..(27): Xaa is C or S
LNAISILYFIGKTPKILKKYRMIVKSXK

SEQ ID NO: 91554 - protein, 28 aa, Artificial Sequence
  Cyclic GFR-binding peptide
PEKMEPISILYLDENKNVVKFKYENMTV

SEQ ID NO: 91555 - protein, 30 aa, Artificial Sequence; identical to SEQ ID NO: 38405
  Cyclic GFR-binding peptide
  MOD_RES (1)..(1): Xaa is C or S

SEQ ID NO: 91556 - protein, 34 aa, Artificial Sequence; identical to SEQ ID NO: 38407
  Cyclic GFR-binding peptide
  MOD_RES (32)..(34): Xaa is C or S

SEQ ID NO: 91557 - protein, 39 aa, Artificial Sequence
  Cyclic GFR-binding peptide
  MOD_RES (6)..(7)..(39): Xaa is C or S
STPPTXXVPTRLSATSILYYDSANNVVLRKHRDMVVESX

SEQ ID NO: 91558 - protein, 26 aa, Artificial Sequence
  Cyclic GFR-binding peptide
  MOD_RES (1)..(1): Xaa is C or S
XVPQALSATSILYYVGRKPKVLRKHR

SEQ ID NO: 91559 - protein, 28 aa, Artificial Sequence
  Cyclic GFR-binding peptide
  MOD_RES (1)..(1): Xaa is C or S
XAPTKLSATSVLYYDDSSNVILRKHRNM

SEQ ID NO: 91560 - protein, 35 aa, Artificial Sequence; identical to SEQ ID NO: 42790
  Cyclic GFR-binding peptide
  MOD_RES (4)..(5): Xaa is C or S

SEQ ID NO: 91561 - protein, 31 aa, Artificial Sequence; identical to SEQ ID NO: 38412
  Cyclic GFR-binding peptide
  MOD_RES (29)..(31): Xaa is C or S

SEQ ID NO: 91562 - protein, 36 aa, Artificial Sequence; identical to SEQ ID NO: 9622
  Cyclic GFR-binding peptide
  MOD_RES (4)..(5)..(36): Xaa is C or S

SEQ ID NO: 91563 - protein, 26 aa, Artificial Sequence
  Cyclic GFR-binding peptide
PTKMNAISMLYFNDKQQIILKKYRGM

SEQ ID NO: 91564 - protein, 31 aa, Artificial Sequence; identical to SEQ ID NO: 42795
  Cyclic GFR-binding peptide
  MOD_RES (29)..(31): Xaa is C or S

SEQ ID NO: 91565 - protein, 31 aa, Artificial Sequence; identical to SEQ ID NO: 38418
  Cyclic GFR-binding peptide
  MOD_RES (30)..(30): Xaa is C or S

SEQ ID NO: 91566 - protein, 39 aa, Artificial Sequence
  Cyclic GFR-binding peptide
  MOD_RES (3)..(4)..(36)..(38): Xaa is C or S
EPXXVPEKMNAISILYFDENKNVVLKKYRNMTVESXAXR

SEQ ID NO: 91567 - protein, 37 aa, Artificial Sequence; identical to SEQ ID NO: 42801
  Cyclic GFR-binding peptide
  MOD_RES (5)..(6): Xaa is C or S

SEQ ID NO: 91568 - protein, 28 aa, Artificial Sequence
  Cyclic GFR-binding peptide
  MOD_RES (26)..(28): Xaa is C or S
NAISILYFVGRTPKVLKKYRMVVKSXKX

SEQ ID NO: 91569 - protein, 35 aa, Artificial Sequence
  Cyclic GFR-binding peptide
  MOD_RES (3)..(4)..(35): Xaa is C or S
STXXAPVKTSATSMLYYDNGRVLLLRKHRMIVEEX

SEQ ID NO: 91570 - protein, 22 aa, Artificial Sequence
  Cyclic GFR-binding peptide
ELNAISMLYFDENEKVVLKKYR

SEQ ID NO: 91571 - protein, 25 aa, Artificial Sequence
  Cyclic GFR-binding peptide
EKMEPISILYLDENKNVVKFKYENM

SEQ ID NO: 91572 - protein, 32 aa, Artificial Sequence; identical to SEQ ID NO: 9632
  Cyclic GFR-binding peptide
  MOD_RES (1)..(1): Xaa is C or S

SEQ ID NO: 91573 - protein, 23 aa, Artificial Sequence
  Cyclic GFR-binding peptide
LSPINILYFDKGVVTYYGKIPGM

SEQ ID NO: 91574 - protein, 29 aa, Artificial Sequence
  Cyclic GFR-binding peptide
  MOD_RES (29)..(29): Xaa is C or S
ELSPINMLYFDENEKVVYGKIPDMVVEGX

SEQ ID NO: 91575 - protein, 27 aa, Artificial Sequence
  Cyclic GFR-binding peptide
  MOD_RES (1)..(2): Xaa is C or S
XXVPTELSATSMLYYDENEKVVLRKHR

SEQ ID NO: 91576 - protein, 29 aa, Artificial Sequence
  Cyclic GFR-binding peptide
  MOD_RES (1)..(2): Xaa is C or S
XXVPQALSPINILYFVGRKPKVYGKIPMI

SEQ ID NO: 91577 - protein, 37 aa, Artificial Sequence; identical to SEQ ID NO: 77165
  Cyclic GFR-binding peptide
  MOD_RES (3)..(4)..(35)..(37): Xaa is C or S

SEQ ID NO: 91578 - protein, 34 aa, Artificial Sequence; identical to SEQ ID NO: 42814
  Cyclic GFR-binding peptide
  MOD_RES (6)..(7): Xaa is C or S

SEQ ID NO: 91579 - protein, 31 aa, Artificial Sequence; identical to SEQ ID NO: 9638
  Cyclic GFR-binding peptide
  MOD_RES (28)..(30): Xaa is C or S

SEQ ID NO: 91580 - protein, 24 aa, Artificial Sequence
  Cyclic GFR-binding peptide
DLNAISILYFVGRTPKVLKKYRMV

SEQ ID NO: 91581 - protein, 27 aa, Artificial Sequence
  Cyclic GFR-binding peptide
  MOD_RES (27)..(27): Xaa is C or S
EPISMLYLDEYDKVVKFKYEEMVVEGX

SEQ ID NO: 91582 - protein, 32 aa, Artificial Sequence; identical to SEQ ID NO: 9643
  Cyclic GFR-binding peptide
  MOD_RES (1)..(1): Xaa is C or S

SEQ ID NO: 91583 - protein, 31 aa, Artificial Sequence
  Cyclic GFR-binding peptide
  MOD_RES (5)..(6): Xaa is C or S
SASPXXVPQDLSPINILYFVGRTPKVYGKIP

SEQ ID NO: 91584 - protein, 40 aa, Artificial Sequence
  Cyclic GFR-binding peptide
  MOD_RES (6)..(7)..(39): Xaa is C or S
GIPEPXXVPEKMSATSILYYDENKNVVLRKHRNMTVESXA

SEQ ID NO: 91585 - protein, 40 aa, Artificial Sequence; identical to SEQ ID NO: 9647
  Cyclic GFR-binding peptide
  MOD_RES (6)..(7)..(39): Xaa is C or S

SEQ ID NO: 91586 - protein, 25 aa, Artificial Sequence
  Cyclic GFR-binding peptide
ELSPISMLYKDEYDKVVLKYHYEMV

SEQ ID NO: 91587 - protein, 30 aa, Artificial Sequence; identical to SEQ ID NO: 38446
  Cyclic GFR-binding peptide

SEQ ID NO: 91588 - protein, 36 aa, Artificial Sequence
  Cyclic GFR-binding peptide
  MOD_RES (3)..(4)..(36): Xaa is C or S
GPXXTPTKMSATSMLYYNDKQQIILRKHRGMVVDRX

SEQ ID NO: 91589 - protein, 31 aa, Artificial Sequence; identical to SEQ ID NO: 38449
  Cyclic GFR-binding peptide

SEQ ID NO: 91590 - protein, 32 aa, Artificial Sequence; identical to SEQ ID NO: 38450
  Cyclic GFR-binding peptide
  MOD_RES (29)..(31): Xaa is C or S

SEQ ID NO: 91591 - protein, 30 aa, Artificial Sequence; identical to SEQ ID NO: 38451
  Cyclic GFR-binding peptide
  MOD_RES (28)..(30): Xaa is C or S

SEQ ID NO: 91592 - protein, 30 aa, Artificial Sequence; identical to SEQ ID NO: 38452
  Cyclic GFR-binding peptide
  MOD_RES (30)..(30): Xaa is C or S

SEQ ID NO: 91593 - protein, 35 aa, Artificial Sequence; identical to SEQ ID NO: 38453
  Cyclic GFR-binding peptide
  MOD_RES (32)..(34): Xaa is C or S

SEQ ID NO: 91594 - protein, 28 aa, Artificial Sequence
  Cyclic GFR-binding peptide
ELSATSMLYYDEYDKVVLRKHREMVVEG

SEQ ID NO: 91595 - protein, 34 aa, Artificial Sequence; identical to SEQ ID NO: 9656
  Cyclic GFR-binding peptide
  MOD_RES (3)..(4): Xaa is C or S

SEQ ID NO: 91596 - protein, 34 aa, Artificial Sequence
  Cyclic GFR-binding peptide
  MOD_RES (6)..(7): Xaa is C or S
GIPEPXXVPEKMSPISILYKDENKNVVLKYHYNM

SEQ ID NO: 91597 - protein, 30 aa, Artificial Sequence; identical to SEQ ID NO: 77178
  Cyclic GFR-binding peptide
  MOD_RES (30)..(30): Xaa is C or S

SEQ ID NO: 91598 - protein, 20 aa, Artificial Sequence
  Cyclic GFR-binding peptide
EPISVLYLDDSSNVIKFKYE

SEQ ID NO: 91599 - protein, 35 aa, Artificial Sequence; identical to SEQ ID NO: 9659
  Cyclic GFR-binding peptide
  MOD_RES (2)..(3)..(34): Xaa is C or S

SEQ ID NO: 91600 - protein, 29 aa, Artificial Sequence
  Cyclic GFR-binding peptide
  MOD_RES (29)..(29): Xaa is C or S
RLSPINILYFDSANNVVYGKIPDMVVESX

SEQ ID NO: 91601 - protein, 21 aa, Artificial Sequence
  Cyclic GFR-binding peptide
MSPISILYKDENKNVVLKYHY

SEQ ID NO: 91602 - protein, 33 aa, Artificial Sequence; identical to SEQ ID NO: 42853
  Cyclic GFR-binding peptide
  MOD_RES (3)..(4): Xaa is C or S

SEQ ID NO: 91603 - protein, 31 aa, Artificial Sequence; identical to SEQ ID NO: 9665
  Cyclic GFR-binding peptide
  MOD_RES (2)..(3): Xaa is C or S

SEQ ID NO: 91604 - protein, 30 aa, Artificial Sequence; identical to SEQ ID NO: 9667
  Cyclic GFR-binding peptide

SEQ ID NO: 91605 - protein, 25 aa, Artificial Sequence
  Cyclic GFR-binding peptide
TKLEPISVLYLDDSSNVIKFKYENM

SEQ ID NO: 91606 - protein, 25 aa, Artificial Sequence
  Cyclic GFR-binding peptide
VPQALSPISILYKVGRKPKVLKYHY

SEQ ID NO: 91607 - protein, 20 aa, Artificial Sequence
  Cyclic GFR-binding peptide
SATSILYYIGKTPKILRKHR

SEQ ID NO: 91608 - protein, 32 aa, Artificial Sequence; identical to SEQ ID NO: 42868
  Cyclic GFR-binding peptide
  MOD_RES (5)..(6): Xaa is C or S

SEQ ID NO: 91609 - protein, 32 aa, Artificial Sequence; identical to SEQ ID NO: 77186
  Cyclic GFR-binding peptide
  MOD_RES (29)..(31): Xaa is C or S

SEQ ID NO: 91610 - protein, 25 aa, Artificial Sequence
  Cyclic GFR-binding peptide
LEPISILYLVGRTPKVKFKYEMVVK

SEQ ID NO: 91611 - protein, 23 aa, Artificial Sequence
  Cyclic GFR-binding peptide
TSPISMLYKDNGRVLLLKYHYMI

SEQ ID NO: 91612 - protein, 33 aa, Artificial Sequence; identical to SEQ ID NO: 42872
  Cyclic GFR-binding peptide
  MOD_RES (4)..(5): Xaa is C or S

SEQ ID NO: 91613 - protein, 39 aa, Artificial Sequence; identical to SEQ ID NO: 9678
  Cyclic GFR-binding peptide
  MOD_RES (3)..(4)..(36)..(38): Xaa is C or S

SEQ ID NO: 91614 - protein, 39 aa, Artificial Sequence
  Cyclic GFR-binding peptide
  MOD_RES (3)..(4)..(36)..(38): Xaa is C or S
PTXXVPTRLEPISILYLDSANNVVKFKYEDMVVESXGXR

SEQ ID NO: 91615 - protein, 37 aa, Artificial Sequence; identical to SEQ ID NO: 42881
  Cyclic GFR-binding peptide
  MOD_RES (1)..(2)..(34)..(36): Xaa is C or S

SEQ ID NO: 91616 - protein, 32 aa, Artificial Sequence
  Cyclic GFR-binding peptide
  MOD_RES (4)..(5): Xaa is C or S
PASXXVPARLSATSILYYDAANNVVLRKHRDM

SEQ ID NO: 91617 - protein, 33 aa, Artificial Sequence; identical to SEQ ID NO: 38485
  Cyclic GFR-binding peptide
  MOD_RES (1)..(2): Xaa is C or S

SEQ ID NO: 91618 - protein, 37 aa, Artificial Sequence; identical to SEQ ID NO: 9683
  Cyclic GFR-binding peptide
  MOD_RES (6)..(7): Xaa is C or S

SEQ ID NO: 91619 - protein, 32 aa, Artificial Sequence
  Cyclic GFR-binding peptide
  MOD_RES (6)..(7): Xaa is C or S
ASASPXXVPQDLSPINILYFVGRTPKVYGKIP

SEQ ID NO: 91620 - protein, 36 aa, Artificial Sequence; identical to SEQ ID NO: 38489
  Cyclic GFR-binding peptide
  MOD_RES (5)..(6): Xaa is C or S

SEQ ID NO: 91621 - protein, 26 aa, Artificial Sequence
  Cyclic GFR-binding peptide
  MOD_RES (1)..(1): Xaa is C or S
XVPEKMSPINILYFDENKNVVYGKIP

SEQ ID NO: 91622 - protein, 31 aa, Artificial Sequence
  Cyclic GFR-binding peptide
TPTKMEPISMLYLNDKQQIIKFKYEGMVVDR

SEQ ID NO: 91623 - protein, 36 aa, Artificial Sequence
  Cyclic GFR-binding peptide
  MOD_RES (2)..(3)..(35): Xaa is C or S
PXXVPEKMSPINILYFDENKNVVYGKIPNMTVESXA

SEQ ID NO: 91624 - protein, 33 aa, Artificial Sequence
  Cyclic GFR-binding peptide
  MOD_RES (2)..(3): Xaa is C or S
PXXTPTKMSATSMLYYNDKQQIILRKHRGMVVD

SEQ ID NO: 91625 - protein, 38 aa, Artificial Sequence
  Cyclic GFR-binding peptide
  MOD_RES (4)..(5)..(36)..(38): Xaa is C or S
ASPXXVPQDLSPINILYFVGRTPKVYGKIPMVVKSXKX

SEQ ID NO: 91626 - protein, 33 aa, Artificial Sequence; identical to SEQ ID NO: 77197
  Cyclic GFR-binding peptide
  MOD_RES (5)..(6): Xaa is C or S

SEQ ID NO: 91627 - protein, 25 aa, Artificial Sequence
  Cyclic GFR-binding peptide
VPARLSATSILYYDAANNVVLRKHR

SEQ ID NO: 91628 - protein, 29 aa, Artificial Sequence
  Cyclic GFR-binding peptide
  MOD_RES (29)..(29): Xaa is C or S
KMEPISMLYLNDKQQIIKFKYEGMVVDRX

SEQ ID NO: 91629 - protein, 29 aa, Artificial Sequence
  Cyclic GFR-binding peptide
  MOD_RES (3)..(4): Xaa is C or S
STXXAPVKTSPINMLYFDNGRVLLYGKIP

SEQ ID NO: 91630 - protein, 36 aa, Artificial Sequence; identical to SEQ ID NO: 42896
  Cyclic GFR-binding peptide
  MOD_RES (1)..(2)..(34)..(36): Xaa is C or S

SEQ ID NO: 91631 - protein, 29 aa, Artificial Sequence
  Cyclic GFR-binding peptide
VSQDLSPINILYFIGKTPKIYGKIPMIVK

SEQ ID NO: 91632 - protein, 34 aa, Artificial Sequence; identical to SEQ ID NO: 9694
  Cyclic GFR-binding peptide
  MOD_RES (1)..(2)..(34): Xaa is C or S

SEQ ID NO: 91633 - protein, 28 aa, Artificial Sequence
  Cyclic GFR-binding peptide
  MOD_RES (2)..(3): Xaa is C or S
PXXAPTQLEPISVLYLDDSSNVIKFKYE

SEQ ID NO: 91634 - protein, 26 aa, Artificial Sequence
  Cyclic GFR-binding peptide
KTEPISMLYLDNGRVLLKFKYEMIVE

SEQ ID NO: 91635 - protein, 34 aa, Artificial Sequence; identical to SEQ ID NO: 38501
  Cyclic GFR-binding peptide
  MOD_RES (6)..(7): Xaa is C or S

SEQ ID NO: 91636 - protein, 26 aa, Artificial Sequence
  Cyclic GFR-binding peptide
VPARLSPINILYFDAANNVVYGKIPD

SEQ ID NO: 91637 - protein, 37 aa, Artificial Sequence; identical to SEQ ID NO: 38502
  Cyclic GFR-binding peptide
  MOD_RES (4)..(5)..(37): Xaa is C or S

SEQ ID NO: 91638 - protein, 30 aa, Artificial Sequence; identical to SEQ ID NO: 9699
  Cyclic GFR-binding peptide
  MOD_RES (1)..(2): Xaa is C or S

SEQ ID NO: 91639 - protein, 28 aa, Artificial Sequence
  Cyclic GFR-binding peptide
PVKTSPISMLYKDNGRVLLLKYHYMIVE

SEQ ID NO: 91640 - protein, 34 aa, Artificial Sequence; identical to SEQ ID NO: 9701
  Cyclic GFR-binding peptide
  MOD_RES (2)..(3): Xaa is C or S

SEQ ID NO: 91641 - protein, 34 aa, Artificial Sequence; identical to SEQ ID NO: 9702
  Cyclic GFR-binding peptide
  MOD_RES (32)..(34): Xaa is C or S

SEQ ID NO: 91642 - protein, 35 aa, Artificial Sequence
  Cyclic GFR-binding peptide
  MOD_RES (32)..(34): Xaa is C or S
VPEKMSPINILYFDENKNVVYGKIPNMTVESXAXR

SEQ ID NO: 91643 - protein, 38 aa, Artificial Sequence; identical to SEQ ID NO: 9703
  Cyclic GFR-binding peptide
  MOD_RES (7)..(7): Xaa is C or S

SEQ ID NO: 91644 - protein, 29 aa, Artificial Sequence
  Cyclic GFR-binding peptide
  MOD_RES (1)..(1): Xaa is C or S
XVPQDLEPISILYLVGRTPKVKFKYEMVV

SEQ ID NO: 91645 - protein, 35 aa, Artificial Sequence; identical to SEQ ID NO: 38509
  Cyclic GFR-binding peptide
  MOD_RES (5)..(5): Xaa is C or S

SEQ ID NO: 91646 - protein, 37 aa, Artificial Sequence; identical to SEQ ID NO: 38510
  Cyclic GFR-binding peptide
  MOD_RES (3)..(4)..(36): Xaa is C or S

SEQ ID NO: 91647 - protein, 28 aa, Artificial Sequence
  Cyclic GFR-binding peptide
  MOD_RES (1)..(2): Xaa is C or S
XXVSQDLSPISILYKIGKTPKILKYHYM

SEQ ID NO: 91648 - protein, 31 aa, Artificial Sequence; identical to SEQ ID NO: 42913
  Cyclic GFR-binding peptide
  MOD_RES (2)..(3): Xaa is C or S

SEQ ID NO: 91649 - protein, 27 aa, Artificial Sequence
  Cyclic GFR-binding peptide
VPTELEPISMLYLDEYDKVVKFKYEEM

SEQ ID NO: 91650 - protein, 31 aa, Artificial Sequence; identical to SEQ ID NO: 38516
  Cyclic GFR-binding peptide
  MOD_RES (28)..(30): Xaa is C or S

SEQ ID NO: 91651 - protein, 36 aa, Artificial Sequence; identical to SEQ ID NO: 38517
  Cyclic GFR-binding peptide
  MOD_RES (6)..(7): Xaa is C or S

SEQ ID NO: 91652 - protein, 32 aa, Artificial Sequence; identical to SEQ ID NO: 38518
  Cyclic GFR-binding peptide
  MOD_RES (32)..(32): Xaa is C or S

SEQ ID NO: 91653 - protein, 40 aa, Artificial Sequence
  Cyclic GFR-binding peptide
  MOD_RES (6)..(7)..(39): Xaa is C or S
STPPTXXVPTRLSPISILYKDSANNVVLKYHYDMVVESXG

SEQ ID NO: 91654 - protein, 32 aa, Artificial Sequence; identical to SEQ ID NO: 9706
  Cyclic GFR-binding peptide
  MOD_RES (4)..(5): Xaa is C or S

SEQ ID NO: 91655 - protein, 33 aa, Artificial Sequence; identical to SEQ ID NO: 9707
  Cyclic GFR-binding peptide
  MOD_RES (30)..(32): Xaa is C or S

SEQ ID NO: 91656 - protein, 35 aa, Artificial Sequence
  Cyclic GFR-binding peptide
  MOD_RES (32)..(34): Xaa is C or S
VPTELSPINMLYFDEYDKVVYGKIPEMVVEGXGXR

SEQ ID NO: 91657 - protein, 32 aa, Artificial Sequence
  Cyclic GFR-binding peptide
  MOD_RES (6)..(7): Xaa is C or S
HVPKPXXAPTKLSPISVLYKDDSSNVILKYHY

SEQ ID NO: 91658 - protein, 27 aa, Artificial Sequence
  Cyclic GFR-binding peptide
  MOD_RES (1)..(2): Xaa is C or S
XXVPQALEPISILYLVGRKPKVKFKYE

SEQ ID NO: 91659 - protein, 26 aa, Artificial Sequence
  Cyclic GFR-binding peptide
LSPINILYFVGRTPKVYGKIPMVVKS

SEQ ID NO: 91660 - protein, 24 aa, Artificial Sequence
  Cyclic GFR-binding peptide
SPISILYKVGRTPKVLKYHYMVVK

SEQ ID NO: 91661 - protein, 25 aa, Artificial Sequence
  Cyclic GFR-binding peptide
DLSPINILYFVGRTPKVYGKIPMVV

SEQ ID NO: 91662 - protein, 32 aa, Artificial Sequence; identical to SEQ ID NO: 42920
  Cyclic GFR-binding peptide
  MOD_RES (1)..(32): Xaa is C or S

SEQ ID NO: 91663 - protein, 33 aa, Artificial Sequence; identical to SEQ ID NO: 9711
  Cyclic GFR-binding peptide
  MOD_RES (1)..(33): Xaa is C or S

SEQ ID NO: 91664 - protein, 37 aa, Artificial Sequence
  Cyclic GFR-binding peptide
  MOD_RES (2)..(3)..(34)..(36): Xaa is C or S
PXXVPQDLSPINILYFVGRTPKVYGKIPMVVKSXKXS

SEQ ID NO: 91665 - protein, 28 aa, Artificial Sequence
  Cyclic GFR-binding peptide
  MOD_RES (2)..(3): Xaa is C or S
AXXVPTKLNAISILYFDKGVVTYLKKYR

SEQ ID NO: 91666 - protein, 37 aa, Artificial Sequence
  Cyclic GFR-binding peptide
  MOD_RES (5)..(6)..(37): Xaa is C or S
VPSTXXAPVKTSATSMLYYDNGRVLLLRKHRMIVEEX

SEQ ID NO: 91667 - protein, 28 aa, Artificial Sequence
  Cyclic GFR-binding peptide
PQDLSATSILYYVGRTPKVLRKHRMVVK

SEQ ID NO: 91668 - protein, 32 aa, Artificial Sequence
  Cyclic GFR-binding peptide
  MOD_RES (30)..(32): Xaa is C or S
EKMSATSILYYDENKNVVLRKHRNMTVESXAX

SEQ ID NO: 91669 - protein, 41 aa, Artificial Sequence; identical to SEQ ID NO: 9717
  Cyclic GFR-binding peptide
  MOD_RES (6)..(7)..(38)..(40): Xaa is C or S

SEQ ID NO: 91670 - protein, 28 aa, Artificial Sequence
  Cyclic GFR-binding peptide
  MOD_RES (2)..(3): Xaa is C or S
AXXVPTELSATSMLYYDENEKVVLRKHR

SEQ ID NO: 91671 - protein, 26 aa, Artificial Sequence
  Cyclic GFR-binding peptide
KLNAISILYFDKGVVTYLKKYRGMAV

SEQ ID NO: 91672 - protein, 30 aa, Artificial Sequence; identical to SEQ ID NO: 9725
  Cyclic GFR-binding peptide
  MOD_RES (1)..(1): Xaa is C or S

SEQ ID NO: 91673 - protein, 25 aa, Artificial Sequence
  Cyclic GFR-binding peptide
TELEPISMLYLDEYDKVVKFKYEEM

SEQ ID NO: 91674 - protein, 33 aa, Artificial Sequence
  Cyclic GFR-binding peptide
  MOD_RES (1)..(2)..(33): Xaa is C or S
XXVPQDLSPINILYFVGRTPKVYGKIPMVVKSX

SEQ ID NO: 91675 - protein, 25 aa, Artificial Sequence
  Cyclic GFR-binding peptide
PTKLSATSVLYYDDSSNVILRKHRN

SEQ ID NO: 91676 - protein, 23 aa, Artificial Sequence
  Cyclic GFR-binding peptide
KMSPISILYKDENKNVVLKYHYN

SEQ ID NO: 91677 - protein, 33 aa, Artificial Sequence; identical to SEQ ID NO: 9728
  Cyclic GFR-binding peptide
  MOD_RES (4)..(5): Xaa is C or S

SEQ ID NO: 91678 - protein, 28 aa, Artificial Sequence
  Cyclic GFR-binding peptide
VPEKMNAISILYFDENKNVVLKKYRNMT

SEQ ID NO: 91679 - protein, 26 aa, Artificial Sequence
  Cyclic GFR-binding peptide
LSATSILYYDSANNVVLRKHRDMVVE

SEQ ID NO: 91680 - protein, 33 aa, Artificial Sequence; identical to SEQ ID NO: 9729
  Cyclic GFR-binding peptide
  MOD_RES (1)..(2): Xaa is C or S

SEQ ID NO: 91681 - protein, 33 aa, Artificial Sequence; identical to SEQ ID NO: 9732
  Cyclic GFR-binding peptide
  MOD_RES (30)..(32): Xaa is C or S

SEQ ID NO: 91682 - protein, 33 aa, Artificial Sequence
  Cyclic GFR-binding peptide
  MOD_RES (31)..(33): Xaa is C or S
APVKTSATSMLYYDNGRVLLLRKHRMIVEEXGX

SEQ ID NO: 91683 - protein, 38 aa, Artificial Sequence; identical to SEQ ID NO: 42939
  Cyclic GFR-binding peptide
  MOD_RES (6)..(7): Xaa is C or S

SEQ ID NO: 91684 - protein, 27 aa, Artificial Sequence
  Cyclic GFR-binding peptide
  MOD_RES (2)..(2): Xaa is C or S
TXAPTKLEPISVLYLDDSSNVIKFKYE

SEQ ID NO: 91685 - protein, 36 aa, Artificial Sequence; identical to SEQ ID NO: 38548
  Cyclic GFR-binding peptide
  MOD_RES (3)..(4)..(36): Xaa is C or S

SEQ ID NO: 91686 - protein, 28 aa, Artificial Sequence
  Cyclic GFR-binding peptide
  MOD_RES (1)..(1): Xaa is C or S
XAPVKTSPISMLYKDNGRVLLLKYHYMI

SEQ ID NO: 91687 - protein, 32 aa, Artificial Sequence; identical to SEQ ID NO: 38549
  Cyclic GFR-binding peptide
  MOD_RES (32)..(32): Xaa is C or S

SEQ ID NO: 91688 - protein, 33 aa, Artificial Sequence; identical to SEQ ID NO: 9737
  Cyclic GFR-binding peptide
  MOD_RES (4)..(5): Xaa is C or S

SEQ ID NO: 91689 - protein, 32 aa, Artificial Sequence; identical to SEQ ID NO: 9740
  Cyclic GFR-binding peptide
  MOD_RES (4)..(5): Xaa is C or S

SEQ ID NO: 91690 - protein, 32 aa, Artificial Sequence
  Cyclic GFR-binding peptide
  MOD_RES (1)..(2): Xaa is C or S
XXTPTKMSATSMLYYNDKQQIILRKHRGMVVD

SEQ ID NO: 91691 - protein, 34 aa, Artificial Sequence
  Cyclic GFR-binding peptide
  MOD_RES (32)..(34): Xaa is C or S
VPTRLSATSILYYDSANNVVLRKHRDMVVESXGX

SEQ ID NO: 91692 - protein, 32 aa, Artificial Sequence; identical to SEQ ID NO: 38552
  Cyclic GFR-binding peptide
  MOD_RES (6)..(7): Xaa is C or S

SEQ ID NO: 91693 - protein, 39 aa, Artificial Sequence; identical to SEQ ID NO: 42951
  Cyclic GFR-binding peptide
  MOD_RES (3)..(4)..(36)..(38): Xaa is C or S

SEQ ID NO: 91694 - protein, 33 aa, Artificial Sequence; identical to SEQ ID NO: 9742
  Cyclic GFR-binding peptide
  MOD_RES (3)..(4): Xaa is C or S

SEQ ID NO: 91695 - protein, 26 aa, Artificial Sequence
  Cyclic GFR-binding peptide
TELSATSMLYYDENEKVVLRKHRDMV

SEQ ID NO: 91696 - protein, 28 aa, Artificial Sequence
  Cyclic GFR-binding peptide
  MOD_RES (27)..(27): Xaa is C or S
SPINVLYFDDSSNVIYGKIPNMVVRSXG

SEQ ID NO: 91697 - protein, 33 aa, Artificial Sequence; identical to SEQ ID NO: 9746
  Cyclic GFR-binding peptide
  MOD_RES (4)..(5): Xaa is C or S

SEQ ID NO: 91698 - protein, 29 aa, Artificial Sequence
  Cyclic GFR-binding peptide
  MOD_RES (1)..(2): Xaa is C or S
XXVPTELSATSMLYYDENEKVVLRKHRDM

SEQ ID NO: 91699 - protein, 30 aa, Artificial Sequence; identical to SEQ ID NO: 38558
  Cyclic GFR-binding peptide
  MOD_RES (3)..(4): Xaa is C or S

SEQ ID NO: 91700 - protein, 31 aa, Artificial Sequence; identical to SEQ ID NO: 38562
  Cyclic GFR-binding peptide
  MOD_RES (3)..(4): Xaa is C or S

SEQ ID NO: 91701 - protein, 29 aa, Artificial Sequence
  Cyclic GFR-binding peptide
PTELSPISMLYKDEYDKVVLKYHYEMVVE

SEQ ID NO: 91702 - protein, 34 aa, Artificial Sequence; identical to SEQ ID NO: 38564
  Cyclic GFR-binding peptide
  MOD_RES (32)..(34): Xaa is C or S

SEQ ID NO: 91703 - protein, 36 aa, Artificial Sequence; identical to SEQ ID NO: 38565
  Cyclic GFR-binding peptide
  MOD_RES (3)..(4)..(36): Xaa is C or S

SEQ ID NO: 91704 - protein, 33 aa, Artificial Sequence; identical to SEQ ID NO: 38568
  Cyclic GFR-binding peptide
  MOD_RES (1)..(32): Xaa is C or S

SEQ ID NO: 91705 - protein, 42 aa, Artificial Sequence; identical to SEQ ID NO: 42974
  Cyclic GFR-binding peptide
  MOD_RES (6)..(7)..(40)..(42): Xaa is C or S

SEQ ID NO: 91706 - protein, 35 aa, Artificial Sequence; identical to SEQ ID NO: 38569
  Cyclic GFR-binding peptide
  MOD_RES (4)..(5): Xaa is C or S

SEQ ID NO: 91707 - protein, 27 aa, Artificial Sequence
  Cyclic GFR-binding peptide
  MOD_RES (2)..(2): Xaa is C or S
TXAPTKLSPISVLYKDDSSNVILKYHY

SEQ ID NO: 91708 - protein, 40 aa, Artificial Sequence; identical to SEQ ID NO: 42977
  Cyclic GFR-binding peptide
  MOD_RES (6)..(7)..(39): Xaa is C or S

SEQ ID NO: 91709 - protein, 27 aa, Artificial Sequence
  Cyclic GFR-binding peptide
  MOD_RES (1)..(1): Xaa is C or S
XVPTELNAISMLYFDEYDKVVLKKYRE

SEQ ID NO: 91710 - protein, 21 aa, Artificial Sequence
  Cyclic GFR-binding peptide
LSPISMLYKDEYDKVVLKYHY

SEQ ID NO: 91711 - protein, 23 aa, Artificial Sequence
  Cyclic GFR-binding peptide
TSPINMLYFDNGRVLLYGKIPMI

SEQ ID NO: 91712 - protein, 38 aa, Artificial Sequence; identical to SEQ ID NO: 9764
  Cyclic GFR-binding peptide
  MOD_RES (4)..(36)..(38): Xaa is C or S

SEQ ID NO: 91713 - protein, 39 aa, Artificial Sequence; identical to SEQ ID NO: 38579
  Cyclic GFR-binding peptide
  MOD_RES (6)..(7)..(39): Xaa is C or S

SEQ ID NO: 91714 - protein, 39 aa, Artificial Sequence; identical to SEQ ID NO: 38580
  Cyclic GFR-binding peptide
  MOD_RES (2)..(3)..(36)..(38): Xaa is C or S

SEQ ID NO: 91715 - protein, 26 aa, Artificial Sequence
  Cyclic GFR-binding peptide
PQDLSPINILYFVGRTPKVYGKIPMV

SEQ ID NO: 91716 - protein, 35 aa, Artificial Sequence; identical to SEQ ID NO: 42982
  Cyclic GFR-binding peptide
  MOD_RES (5)..(6): Xaa is C or S

SEQ ID NO: 91717 - protein, 34 aa, Artificial Sequence; identical to SEQ ID NO: 9774
  Cyclic GFR-binding peptide
  MOD_RES (31)..(33): Xaa is C or S

SEQ ID NO: 91718 - protein, 24 aa, Artificial Sequence
  Cyclic GFR-binding peptide
LEPISMLYLDEYDKVVKFKYEEMV

SEQ ID NO: 91719 - protein, 27 aa, Artificial Sequence
  Cyclic GFR-binding peptide
TPTKMSPISMLYKNDKQQIILKYHYGM

SEQ ID NO: 91720 - protein, 29 aa, Artificial Sequence
  Cyclic GFR-binding peptide
  MOD_RES (28)..(28): Xaa is C or S
LSPISILYKDSANNVVLKYHYDMVVESXG

SEQ ID NO: 91721 - protein, 30 aa, Artificial Sequence; identical to SEQ ID NO: 38591
  Cyclic GFR-binding peptide

SEQ ID NO: 91722 - protein, 35 aa, Artificial Sequence; identical to SEQ ID NO: 38593
  Cyclic GFR-binding peptide
  MOD_RES (6)..(7): Xaa is C or S

SEQ ID NO: 91723 - protein, 32 aa, Artificial Sequence; identical to SEQ ID NO: 19980
  Cyclic GFR-binding peptide
  MOD_RES (31)..(31): Xaa is C or S

SEQ ID NO: 91724 - protein, 30 aa, Artificial Sequence; identical to SEQ ID NO: 38594
  Cyclic GFR-binding peptide
  MOD_RES (4)..(5): Xaa is C or S

SEQ ID NO: 91725 - protein, 30 aa, Artificial Sequence; identical to SEQ ID NO: 9781
  Cyclic GFR-binding peptide

SEQ ID NO: 91726 - protein, 34 aa, Artificial Sequence
  Cyclic GFR-binding peptide
  MOD_RES (4)..(5): Xaa is C or S
AGPXXTPTKMEPISMLYLNDKQQIIKFKYEGMVV

SEQ ID NO: 91727 - protein, 31 aa, Artificial Sequence; identical to SEQ ID NO: 38601
  Cyclic GFR-binding peptide
  MOD_RES (5)..(6): Xaa is C or S

SEQ ID NO: 91728 - protein, 21 aa, Artificial Sequence
  Cyclic GFR-binding peptide
LSPISVLYKDSSNNVILKYHY

SEQ ID NO: 91729 - protein, 23 aa, Artificial Sequence
  Cyclic GFR-binding peptide
SATSILYYDENKNVVLRKHRNMT

SEQ ID NO: 91730 - protein, 36 aa, Artificial Sequence; identical to SEQ ID NO: 9790
  Cyclic GFR-binding peptide
  MOD_RES (1)..(33)..(35): Xaa is C or S

SEQ ID NO: 91731 - protein, 24 aa, Artificial Sequence
  Cyclic GFR-binding peptide
PTQLSPISVLYKDDSSNVILKYHY

SEQ ID NO: 91732 - protein, 34 aa, Artificial Sequence; identical to SEQ ID NO: 9792
  Cyclic GFR-binding peptide
  MOD_RES (4)..(5): Xaa is C or S

SEQ ID NO: 91733 - protein, 35 aa, Artificial Sequence
  Cyclic GFR-binding peptide
  MOD_RES (6)..(7): Xaa is C or S
GIPEPXXVPEKMSPINILYFDENKNVVYGKIPNMT

SEQ ID NO: 91734 - protein, 31 aa, Artificial Sequence; identical to SEQ ID NO: 9793
  Cyclic GFR-binding peptide
  MOD_RES (2)..(3): Xaa is C or S

SEQ ID NO: 91735 - protein, 21 aa, Artificial Sequence
  Cyclic GFR-binding peptide
SPINILYFDKGVVTYYGKIPG

SEQ ID NO: 91736 - protein, 33 aa, Artificial Sequence; identical to SEQ ID NO: 38611
  Cyclic GFR-binding peptide
  MOD_RES (5)..(6): Xaa is C or S

SEQ ID NO: 91737 - protein, 23 aa, Artificial Sequence
  Cyclic GFR-binding peptide
MEPISILYLDENKNVVKFKYENM

SEQ ID NO: 91738 - protein, 26 aa, Artificial Sequence
  Cyclic GFR-binding peptide
  MOD_RES (1)..(1): Xaa is C or S
XVPTELSPINMLYFDEYDKVVYGKIP

SEQ ID NO: 91739 - protein, 38 aa, Artificial Sequence
  Cyclic GFR-binding peptide
  MOD_RES (4)..(5)..(37): Xaa is C or S
PEPXXVPEKMEPISILYLDENKNVVKFKYENMTVESXA

SEQ ID NO: 91740 - protein, 27 aa, Artificial Sequence
  Cyclic GFR-binding peptide
QALSPISILYKVGRKPKVLKYHYMIVR

SEQ ID NO: 91741 - protein, 36 aa, Artificial Sequence; identical to SEQ ID NO: 9799
  Cyclic GFR-binding peptide
  MOD_RES (6)..(7): Xaa is C or S

SEQ ID NO: 91742 - protein, 27 aa, Artificial Sequence
  Cyclic GFR-binding peptide
  MOD_RES (1)..(2): Xaa is C or S
XXTPTKMSATSMLYYNDKQQIILRKHR

SEQ ID NO: 91743 - protein, 24 aa, Artificial Sequence
  Cyclic GFR-binding peptide
PTELSATSMLYYDENEKVVLRKHR

SEQ ID NO: 91744 - protein, 28 aa, Artificial Sequence
  Cyclic GFR-binding peptide
TKLSPINVLYFDDMGVPTYGKIPEGMSV

SEQ ID NO: 91745 - protein, 30 aa, Artificial Sequence
  Cyclic GFR-binding peptide
  MOD_RES (3)..(4): Xaa is C or S
EPXXVPEKMSPISILYKDENKNVVLKYHYN

SEQ ID NO: 91746 - protein, 28 aa, Artificial Sequence
  Cyclic GFR-binding peptide
KLSPINVLYFDSSNNVIYGKIPNMVVKA

SEQ ID NO: 91747 - protein, 25 aa, Artificial Sequence
  Cyclic GFR-binding peptide
RLNAISILYFDAANNVVLKKYRDMV

SEQ ID NO: 91748 - protein, 28 aa, Artificial Sequence
  Cyclic GFR-binding peptide
EKMSPINILYFDENKNVVYGKIPNMTVE

SEQ ID NO: 91749 - protein, 34 aa, Artificial Sequence
  Cyclic GFR-binding peptide
  MOD_RES (5)..(6): Xaa is C or S
SAAPXXVPQALSPINILYFVGRKPKVYGKIPMIV

SEQ ID NO: 91750 - protein, 26 aa, Artificial Sequence
  Cyclic GFR-binding peptide
PEKMSATSILYYDENKNVVLRKHRNM

SEQ ID NO: 91751 - protein, 32 aa, Artificial Sequence
  Cyclic GFR-binding peptide
  MOD_RES (32)..(32): Xaa is C or S
VPARLSATSILYYDAANNVVLRKHRDMVVEAX

SEQ ID NO: 91752 - protein, 31 aa, Artificial Sequence; identical to SEQ ID NO: 38630
  Cyclic GFR-binding peptide
  MOD_RES (5)..(6): Xaa is C or S

SEQ ID NO: 91753 - protein, 38 aa, Artificial Sequence; identical to SEQ ID NO: 9809
  Cyclic GFR-binding peptide
  MOD_RES (5)..(6)..(37): Xaa is C or S

SEQ ID NO: 91754 - protein, 34 aa, Artificial Sequence; identical to SEQ ID NO: 43041
  Cyclic GFR-binding peptide
  MOD_RES (6)..(7): Xaa is C or S

SEQ ID NO: 91755 - protein, 36 aa, Artificial Sequence; identical to SEQ ID NO: 9814
  Cyclic GFR-binding peptide
  MOD_RES (1)..(2)..(34)..(36): Xaa is C or S

SEQ ID NO: 91756 - protein, 31 aa, Artificial Sequence; identical to SEQ ID NO: 9815
  Cyclic GFR-binding peptide
  MOD_RES (2)..(3): Xaa is C or S

SEQ ID NO: 91757 - protein, 28 aa, Artificial Sequence
  Cyclic GFR-binding peptide
VPQDLSATSILYYVGRTPKVLRKHRMVV

SEQ ID NO: 91758 - protein, 29 aa, Artificial Sequence
  Cyclic GFR-binding peptide
  MOD_RES (29)..(29): Xaa is C or S
RLEPISILYLDSANNVVKFKYEDMVVESX

SEQ ID NO: 91759 - protein, 25 aa, Artificial Sequence
  Cyclic GFR-binding peptide
LEPISILYLVGRKPKVKFKYEMIVR

SEQ ID NO: 91760 - protein, 22 aa, Artificial Sequence
  Cyclic GFR-binding peptide
LEPISILYLVGRKPKVKFKYEM

SEQ ID NO: 91761 - protein, 33 aa, Artificial Sequence; identical to SEQ ID NO: 38641
  Cyclic GFR-binding peptide
  MOD_RES (1)..(33): Xaa is C or S

SEQ ID NO: 91762 - protein, 31 aa, Artificial Sequence; identical to SEQ ID NO: 9826
  Cyclic GFR-binding peptide
  MOD_RES (1)..(1): Xaa is C or S

SEQ ID NO: 91763 - protein, 30 aa, Artificial Sequence; identical to SEQ ID NO: 38647
  Cyclic GFR-binding peptide
  MOD_RES (2)..(3): Xaa is C or S

SEQ ID NO: 91764 - protein, 27 aa, Artificial Sequence
  Cyclic GFR-binding peptide
  MOD_RES (26)..(26): Xaa is C or S
SPISILYKVGRTPKVLKYHYMVVKSXK

SEQ ID NO: 91765 - protein, 31 aa, Artificial Sequence
  Cyclic GFR-binding peptide
  MOD_RES (4)..(5): Xaa is C or S
PASXXVPARLSATSILYYDAANNVVLRKHRD

SEQ ID NO: 91766 - protein, 31 aa, Artificial Sequence; identical to SEQ ID NO: 43047
  Cyclic GFR-binding peptide
  MOD_RES (2)..(3): Xaa is C or S

SEQ ID NO: 91767 - protein, 39 aa, Artificial Sequence; identical to SEQ ID NO: 9832
  Cyclic GFR-binding peptide
  MOD_RES (4)..(5)..(37)..(39): Xaa is C or S

SEQ ID NO: 91768 - protein, 34 aa, Artificial Sequence
  Cyclic GFR-binding peptide
  MOD_RES (6)..(7): Xaa is C or S
HVPKPXXAPTKLEPISVLYLDDSSNVIKFKYENM

SEQ ID NO: 91769 - protein, 33 aa, Artificial Sequence; identical to SEQ ID NO: 9834
  Cyclic GFR-binding peptide
  MOD_RES (2)..(3): Xaa is C or S

SEQ ID NO: 91770 - protein, 33 aa, Artificial Sequence
  Cyclic GFR-binding peptide
  MOD_RES (1)..(2): Xaa is C or S
XXVPARLSATSILYYDAANNVVLRKHRDMVVEA

SEQ ID NO: 91771 - protein, 29 aa, Artificial Sequence
  Cyclic GFR-binding peptide
PTKLSPINILYFDKGVVTYYGKIPGMAVS

SEQ ID NO: 91772 - protein, 37 aa, Artificial Sequence; identical to SEQ ID NO: 9835
  Cyclic GFR-binding peptide
  MOD_RES (3)..(4)..(35)..(37): Xaa is C or S

SEQ ID NO: 91773 - protein, 31 aa, Artificial Sequence; identical to SEQ ID NO: 38662
  Cyclic GFR-binding peptide
  MOD_RES (31)..(31): Xaa is C or S

SEQ ID NO: 91774 - protein, 33 aa, Artificial Sequence; identical to SEQ ID NO: 9840
  Cyclic GFR-binding peptide
  MOD_RES (5)..(6): Xaa is C or S

SEQ ID NO: 91775 - protein, 32 aa, Artificial Sequence; identical to SEQ ID NO: 43064
  Cyclic GFR-binding peptide
  MOD_RES (3)..(4): Xaa is C or S

SEQ ID NO: 91776 - protein, 30 aa, Artificial Sequence; identical to SEQ ID NO: 43066
  Cyclic GFR-binding peptide

SEQ ID NO: 91777 - protein, 27 aa, Artificial Sequence
  Cyclic GFR-binding peptide
KMNAISMLYFNDKQQIILKKYRGMVVD

SEQ ID NO: 91778 - protein, 23 aa, Artificial Sequence
  Cyclic GFR-binding peptide
QDLSPINILYFVGRTPKVYGKIP

SEQ ID NO: 91779 - protein, 32 aa, Artificial Sequence; identical to SEQ ID NO: 38667
  Cyclic GFR-binding peptide
  MOD_RES (6)..(7): Xaa is C or S

SEQ ID NO: 91780 - protein, 32 aa, Artificial Sequence
  Cyclic GFR-binding peptide
  MOD_RES (1)..(32): Xaa is C or S
XAPVKTEPISMLYLDNGRVLLKFKYEMIVEEX

SEQ ID NO: 91781 - protein, 37 aa, Artificial Sequence; identical to SEQ ID NO: 9849
  Cyclic GFR-binding peptide
  MOD_RES (6)..(7): Xaa is C or S

SEQ ID NO: 91782 - protein, 36 aa, Artificial Sequence; identical to SEQ ID NO: 9850
  Cyclic GFR-binding peptide
  MOD_RES (2)..(3)..(35): Xaa is C or S

SEQ ID NO: 91783 - protein, 39 aa, Artificial Sequence; identical to SEQ ID NO: 43073
  Cyclic GFR-binding peptide
  MOD_RES (6)..(7)..(38): Xaa is C or S

SEQ ID NO: 91784 - protein, 26 aa, Artificial Sequence
  Cyclic GFR-binding peptide
  MOD_RES (26)..(26): Xaa is C or S
SATSMLYYDNGRVLLLRKHRMIVEEX

SEQ ID NO: 91785 - protein, 32 aa, Artificial Sequence; identical to SEQ ID NO: 38672
  Cyclic GFR-binding peptide
  MOD_RES (4)..(5): Xaa is C or S

SEQ ID NO: 91786 - protein, 40 aa, Artificial Sequence; identical to SEQ ID NO: 38673
  Cyclic GFR-binding peptide
  MOD_RES (4)..(5)..(37)..(39): Xaa is C or S

SEQ ID NO: 91787 - protein, 28 aa, Artificial Sequence
  Cyclic GFR-binding peptide
  MOD_RES (28)..(28): Xaa is C or S
SATSVLYYDDMGVPTLRKHREGMSVAEX

SEQ ID NO: 91788 - protein, 26 aa, Artificial Sequence
  Cyclic GFR-binding peptide
APTKLSPISVLYKDSSNNVILKYHYN

SEQ ID NO: 91789 - protein, 32 aa, Artificial Sequence; identical to SEQ ID NO: 43080
  Cyclic GFR-binding peptide
  MOD_RES (2)..(3): Xaa is C or S

SEQ ID NO: 91790 - protein, 31 aa, Artificial Sequence; identical to SEQ ID NO: 9855
  Cyclic GFR-binding peptide
  MOD_RES (2)..(3): Xaa is C or S

SEQ ID NO: 91791 - protein, 28 aa, Artificial Sequence
  Cyclic GFR-binding peptide
  MOD_RES (27)..(27): Xaa is C or S
TNAISMLYFDNGRVLLLKKYRMIVEEXG

SEQ ID NO: 91792 - protein, 32 aa, Artificial Sequence; identical to SEQ ID NO: 9859
  Cyclic GFR-binding peptide
  MOD_RES (29)..(31): Xaa is C or S

SEQ ID NO: 91793 - protein, 22 aa, Artificial Sequence
  Cyclic GFR-binding peptide
SATSILYYDKGVVTYLRKHRGM

SEQ ID NO: 91794 - protein, 31 aa, Artificial Sequence
  Cyclic GFR-binding peptide
  MOD_RES (30)..(30): Xaa is C or S
PVKTSATSMLYYDNGRVLLLRKHRMIVEEXG

SEQ ID NO: 91795 - protein, 33 aa, Artificial Sequence; identical to SEQ ID NO: 38681
  Cyclic GFR-binding peptide
  MOD_RES (32)..(32): Xaa is C or S

SEQ ID NO: 91796 - protein, 33 aa, Artificial Sequence; identical to SEQ ID NO: 38684
  Cyclic GFR-binding peptide
  MOD_RES (6)..(7): Xaa is C or S

SEQ ID NO: 91797 - protein, 31 aa, Artificial Sequence
  Cyclic GFR-binding peptide
  MOD_RES (1)..(2): Xaa is C or S
XXVPEKMSATSILYYDENKNVVLRKHRNMTV

SEQ ID NO: 91798 - protein, 33 aa, Artificial Sequence; identical to SEQ ID NO: 9861
  Cyclic GFR-binding peptide
  MOD_RES (2)..(3): Xaa is C or S

SEQ ID NO: 91799 - protein, 40 aa, Artificial Sequence; identical to SEQ ID NO: 9862
  Cyclic GFR-binding peptide
  MOD_RES (3)..(4)..(37)..(39): Xaa is C or S

SEQ ID NO: 91800 - protein, 37 aa, Artificial Sequence
  Cyclic GFR-binding peptide
  MOD_RES (1)..(2)..(34)..(36): Xaa is C or S
XXVPEKMNAISILYFDENKNVVLKKYRNMTVESXAXR

SEQ ID NO: 91801 - protein, 27 aa, Artificial Sequence
  Cyclic GFR-binding peptide
PTKLSATSILYYDKGVVTYLRKHRGMA

SEQ ID NO: 91802 - protein, 28 aa, Artificial Sequence
  Cyclic GFR-binding peptide
  MOD_RES (1)..(1): Xaa is C or S
XVPTELNAISMLYFDENEKVVLKKYRDM

SEQ ID NO: 91803 - protein, 24 aa, Artificial Sequence
  Cyclic GFR-binding peptide
SPINVLYFDSSNNVIYGKIPNMVV

SEQ ID NO: 91804 - protein, 36 aa, Artificial Sequence
  Cyclic GFR-binding peptide
  MOD_RES (3)..(4)..(35): Xaa is C or S
APXXVPQALSPINILYFVGRKPKVYGKIPMIVRSXK

SEQ ID NO: 91805 - protein, 30 aa, Artificial Sequence; identical to SEQ ID NO: 9866
  Cyclic GFR-binding peptide
  MOD_RES (2)..(3): Xaa is C or S

SEQ ID NO: 91806 - protein, 36 aa, Artificial Sequence; identical to SEQ ID NO: 43099
  Cyclic GFR-binding peptide
  MOD_RES (3)..(4)..(36): Xaa is C or S

SEQ ID NO: 91807 - protein, 27 aa, Artificial Sequence
  Cyclic GFR-binding peptide
PQALSPINILYFVGRKPKVYGKIPMIV

SEQ ID NO: 91808 - protein, 26 aa, Artificial Sequence
  Cyclic GFR-binding peptide
KTSPISMLYKDNGRVLLLKYHYMIVE

SEQ ID NO: 91809 - protein, 30 aa, Artificial Sequence; identical to SEQ ID NO: 38695
  Cyclic GFR-binding peptide
  MOD_RES (2)..(3): Xaa is C or S

SEQ ID NO: 91810 - protein, 30 aa, Artificial Sequence
  Cyclic GFR-binding peptide
  MOD_RES (28)..(30): Xaa is C or S
LSATSILYYDSANNVVLRKHRDMVVESXGX

SEQ ID NO: 91811 - protein, 34 aa, Artificial Sequence; identical to SEQ ID NO: 38696
  Cyclic GFR-binding peptide
  MOD_RES (1)..(33): Xaa is C or S

SEQ ID NO: 91812 - protein, 37 aa, Artificial Sequence; identical to SEQ ID NO: 9870
  Cyclic GFR-binding peptide
  MOD_RES (6)..(7): Xaa is C or S

SEQ ID NO: 91813 - protein, 29 aa, Artificial Sequence
  Cyclic GFR-binding peptide
  MOD_RES (1)..(2): Xaa is C or S
XXTPTKMSPISMLYKNDKQQIILKYHYGM

SEQ ID NO: 91814 - protein, 38 aa, Artificial Sequence; identical to SEQ ID NO: 43106
  Cyclic GFR-binding peptide
  MOD_RES (5)..(6)..(38): Xaa is C or S

SEQ ID NO: 91815 - protein, 22 aa, Artificial Sequence
  Cyclic GFR-binding peptide
EPISMLYLDENEKVVKFKYEDM

SEQ ID NO: 91816 - protein, 29 aa, Artificial Sequence
  Cyclic GFR-binding peptide
  MOD_RES (3)..(4): Xaa is C or S
APXXVPQALSATSILYYVGRKPKVLRKHR

SEQ ID NO: 91817 - protein, 31 aa, Artificial Sequence
  Cyclic GFR-binding peptide
  MOD_RES (5)..(6): Xaa is C or S
IPEPXXVPEKMSPISILYKDENKNVVLKYHY

SEQ ID NO: 91818 - protein, 38 aa, Artificial Sequence; identical to SEQ ID NO: 9875
  Cyclic GFR-binding peptide
  MOD_RES (1)..(2)..(35)..(37): Xaa is C or S

SEQ ID NO: 91819 - protein, 34 aa, Artificial Sequence; identical to SEQ ID NO: 9877
  Cyclic GFR-binding peptide
  MOD_RES (2)..(3): Xaa is C or S

SEQ ID NO: 91820 - protein, 34 aa, Artificial Sequence
  Cyclic GFR-binding peptide
  MOD_RES (2)..(3): Xaa is C or S
PXXVPEKMSPINILYFDENKNVVYGKIPNMTVES

SEQ ID NO: 91821 - protein, 37 aa, Artificial Sequence; identical to SEQ ID NO: 9881
  Cyclic GFR-binding peptide
  MOD_RES (5)..(6): Xaa is C or S

SEQ ID NO: 91822 - protein, 29 aa, Artificial Sequence
  Cyclic GFR-binding peptide
  MOD_RES (29)..(29): Xaa is C or S
QDLSPINILYFIGKTPKIYGKIPMIVKSX

SEQ ID NO: 91823 - protein, 31 aa, Artificial Sequence
  Cyclic GFR-binding peptide
  MOD_RES (3)..(4): Xaa is C or S
GPXXTPTKMSPISMLYKNDKQQIILKYHYGM

SEQ ID NO: 91824 - protein, 31 aa, Artificial Sequence; identical to SEQ ID NO: 9887
  Cyclic GFR-binding peptide
  MOD_RES (29)..(31): Xaa is C or S

SEQ ID NO: 91825 - protein, 22 aa, Artificial Sequence
  Cyclic GFR-binding peptide
TEPISMLYLDNGRVLLKFKYEM

SEQ ID NO: 91826 - protein, 31 aa, Artificial Sequence; identical to SEQ ID NO: 43119
  Cyclic GFR-binding peptide
  MOD_RES (2)..(2): Xaa is C or S

SEQ ID NO: 91827 - protein, 32 aa, Artificial Sequence; identical to SEQ ID NO: 9890
  Cyclic GFR-binding peptide
  MOD_RES (2)..(3): Xaa is C or S

SEQ ID NO: 91828 - protein, 32 aa, Artificial Sequence; identical to SEQ ID NO: 9891
  Cyclic GFR-binding peptide
  MOD_RES (31)..(31): Xaa is C or S

SEQ ID NO: 91829 - protein, 23 aa, Artificial Sequence
  Cyclic GFR-binding peptide
LEPISVLYLDDMGVPTKFKYEEG

SEQ ID NO: 91830 - protein, 41 aa, Artificial Sequence; identical to SEQ ID NO: 38721
  Cyclic GFR-binding peptide
  MOD_RES (6)..(7)..(38)..(40): Xaa is C or S

SEQ ID NO: 91831 - protein, 40 aa, Artificial Sequence; identical to SEQ ID NO: 38722
  Cyclic GFR-binding peptide
  MOD_RES (5)..(6)..(38)..(40): Xaa is C or S

SEQ ID NO: 91832 - protein, 36 aa, Artificial Sequence; identical to SEQ ID NO: 43123
  Cyclic GFR-binding peptide
  MOD_RES (6)..(7): Xaa is C or S

SEQ ID NO: 91833 - protein, 28 aa, Artificial Sequence
  Cyclic GFR-binding peptide
TKMSPISMLYKNDKQQIILKYHYGMVVD

SEQ ID NO: 91834 - protein, 31 aa, Artificial Sequence; identical to SEQ ID NO: 9894
  Cyclic GFR-binding peptide
  MOD_RES (2)..(3): Xaa is C or S

SEQ ID NO: 91835 - protein, 29 aa, Artificial Sequence
  Cyclic GFR-binding peptide
  MOD_RES (2)..(3): Xaa is C or S
PXXTPTKMSATSMLYYNDKQQIILRKHRG

SEQ ID NO: 91836 - protein, 36 aa, Artificial Sequence; identical to SEQ ID NO: 38731
  Cyclic GFR-binding peptide
  MOD_RES (4)..(5): Xaa is C or S

SEQ ID NO: 91837 - protein, 32 aa, Artificial Sequence; identical to SEQ ID NO: 38733
  Cyclic GFR-binding peptide

SEQ ID NO: 91838 - protein, 31 aa, Artificial Sequence; identical to SEQ ID NO: 38734
  Cyclic GFR-binding peptide
  MOD_RES (1)..(2): Xaa is C or S

SEQ ID NO: 91839 - protein, 39 aa, Artificial Sequence
  Cyclic GFR-binding peptide
  MOD_RES (4)..(5)..(37)..(39): Xaa is C or S
PEPXXVPEKMSPISILYKDENKNVVLKYHYNMTVESXAX

SEQ ID NO: 91840 - protein, 38 aa, Artificial Sequence
  Cyclic GFR-binding peptide
  MOD_RES (6)..(7): Xaa is C or S
GSAGPXXTPTKMSPISMLYKNDKQQIILKYHYGMVVDR

SEQ ID NO: 91841 - protein, 33 aa, Artificial Sequence; identical to SEQ ID NO: 38737
  Cyclic GFR-binding peptide
  MOD_RES (32)..(32): Xaa is C or S

SEQ ID NO: 91842 - protein, 30 aa, Artificial Sequence; identical to SEQ ID NO: 43138
  Cyclic GFR-binding peptide
  MOD_RES (29)..(29): Xaa is C or S

SEQ ID NO: 91843 - protein, 27 aa, Artificial Sequence
  Cyclic GFR-binding peptide
PTKLNAISILYFDKGVVTYLKKYRGMA

SEQ ID NO: 91844 - protein, 22 aa, Artificial Sequence
  Cyclic GFR-binding peptide
LSATSVLYYDDMGVPTLRKHRE

SEQ ID NO: 91845 - protein, 26 aa, Artificial Sequence
  Cyclic GFR-binding peptide
VSQDLNAISILYFIGKTPKILKKYRM

SEQ ID NO: 91846 - protein, 26 aa, Artificial Sequence
  Cyclic GFR-binding peptide
DLSATSILYYIGKTPKILRKHRMIVK

SEQ ID NO: 91847 - protein, 32 aa, Artificial Sequence; identical to SEQ ID NO: 9907
  Cyclic GFR-binding peptide
  MOD_RES (2)..(3): Xaa is C or S

SEQ ID NO: 91848 - protein, 31 aa, Artificial Sequence; identical to SEQ ID NO: 38743
  Cyclic GFR-binding peptide
  MOD_RES (28)..(30): Xaa is C or S

SEQ ID NO: 91849 - protein, 27 aa, Artificial Sequence
  Cyclic GFR-binding peptide
VPTKLNAISILYFDKGVVTYLKKYRGM

SEQ ID NO: 91850 - protein, 23 aa, Artificial Sequence
  Cyclic GFR-binding peptide
LSPISILYKIGKTPKILKYHYMI

SEQ ID NO: 91851 - protein, 30 aa, Artificial Sequence
  Cyclic GFR-binding peptide
  MOD_RES (1)..(1): Xaa is C or S
XVPEKMSPISILYKDENKNVVLKYHYNMTV

SEQ ID NO: 91852 - protein, 35 aa, Artificial Sequence
  Cyclic GFR-binding peptide
  MOD_RES (3)..(4): Xaa is C or S
PTXXVPTRLSATSILYYDSANNVVLRKHRDMVVES

SEQ ID NO: 91853 - protein, 31 aa, Artificial Sequence; identical to SEQ ID NO: 43144
  Cyclic GFR-binding peptide
  MOD_RES (4)..(5): Xaa is C or S

SEQ ID NO: 91854 - protein, 28 aa, Artificial Sequence
  Cyclic GFR-binding peptide
PTKLEPISVLYLDDSSNVIKFKYENMVV

SEQ ID NO: 91855 - protein, 24 aa, Artificial Sequence
  Cyclic GFR-binding peptide
KMSPISMLYKNDKQQIILKYHYGM

SEQ ID NO: 91856 - protein, 36 aa, Artificial Sequence; identical to SEQ ID NO: 9915
  Cyclic GFR-binding peptide
  MOD_RES (5)..(6): Xaa is C or S

SEQ ID NO: 91857 - protein, 33 aa, Artificial Sequence; identical to SEQ ID NO: 43146
  Cyclic GFR-binding peptide
  MOD_RES (5)..(6): Xaa is C or S

SEQ ID NO: 91858 - protein, 24 aa, Artificial Sequence
  Cyclic GFR-binding peptide
LSPINILYFVGRTPKVYGKIPMVV

SEQ ID NO: 91859 - protein, 34 aa, Artificial Sequence; identical to SEQ ID NO: 38756
  Cyclic GFR-binding peptide
  MOD_RES (1)..(33): Xaa is C or S

SEQ ID NO: 91860 - protein, 29 aa, Artificial Sequence
  Cyclic GFR-binding peptide
VPTRLSATSILYYDSANNVVLRKHRDMVV

SEQ ID NO: 91861 - protein, 26 aa, Artificial Sequence
  Cyclic GFR-binding peptide
  MOD_RES (1)..(1): Xaa is C or S
XVPARLSPINILYFDAANNVVYGKIP

SEQ ID NO: 91862 - protein, 33 aa, Artificial Sequence
  Cyclic GFR-binding peptide
  MOD_RES (31)..(33): Xaa is C or S
PTRLSATSILYYDSANNVVLRKHRDMVVESXGX

SEQ ID NO: 91863 - protein, 25 aa, Artificial Sequence
  Cyclic GFR-binding peptide
RLSATSILYYDAANNVVLRKHRDMV

SEQ ID NO: 91864 - protein, 23 aa, Artificial Sequence
  Cyclic GFR-binding peptide
LEPISMLYLDEYDKVVKFKYEEM

SEQ ID NO: 91865 - protein, 23 aa, Artificial Sequence
  Cyclic GFR-binding peptide
RLSPINILYFDSANNVVYGKIPD

SEQ ID NO: 91866 - protein, 34 aa, Artificial Sequence
  Cyclic GFR-binding peptide
  MOD_RES (4)..(5): Xaa is C or S
AGPXXTPTKMSPISMLYKNDKQQIILKYHYGMVV

SEQ ID NO: 91867 - protein, 40 aa, Artificial Sequence; identical to SEQ ID NO: 43151
  Cyclic GFR-binding peptide
  MOD_RES (6)..(7)..(39): Xaa is C or S

SEQ ID NO: 91868 - protein, 34 aa, Artificial Sequence; identical to SEQ ID NO: 43153
  Cyclic GFR-binding peptide
  MOD_RES (2)..(3): Xaa is C or S

SEQ ID NO: 91869 - protein, 37 aa, Artificial Sequence; identical to SEQ ID NO: 43154
  Cyclic GFR-binding peptide
  MOD_RES (6)..(6): Xaa is C or S

SEQ ID NO: 91870 - protein, 32 aa, Artificial Sequence; identical to SEQ ID NO: 77317
  Cyclic GFR-binding peptide
  MOD_RES (1)..(2): Xaa is C or S

SEQ ID NO: 91871 - protein, 36 aa, Artificial Sequence; identical to SEQ ID NO: 9919
  Cyclic GFR-binding peptide
  MOD_RES (3)..(4)..(36): Xaa is C or S

SEQ ID NO: 91872 - protein, 28 aa, Artificial Sequence
  Cyclic GFR-binding peptide
  MOD_RES (28)..(28): Xaa is C or S
DLSPISILYKIGKTPKILKYHYMIVKSX

SEQ ID NO: 91873 - protein, 28 aa, Artificial Sequence
  Cyclic GFR-binding peptide
TQLSPISVLYKDDSSNVILKYHYNMVVR

SEQ ID NO: 91874 - protein, 41 aa, Artificial Sequence
  Cyclic GFR-binding peptide
  MOD_RES (6)..(7)..(39)..(41): Xaa is C or S
GSAGPXXTPTKMEPISMLYLNDKQQIIKFKYEGMVVDRXGX

SEQ ID NO: 91875 - protein, 37 aa, Artificial Sequence; identical to SEQ ID NO: 38765
  Cyclic GFR-binding peptide
  MOD_RES (2)..(3)..(36): Xaa is C or S

SEQ ID NO: 91876 - protein, 25 aa, Artificial Sequence
  Cyclic GFR-binding peptide
VPTELSPINMLYFDENEKVVYGKIP

SEQ ID NO: 91877 - protein, 28 aa, Artificial Sequence
  Cyclic GFR-binding peptide
APTKLNAISVLYFDSSNNVILKKYRNMV

SEQ ID NO: 91878 - protein, 35 aa, Artificial Sequence; identical to SEQ ID NO: 9924
  Cyclic GFR-binding peptide
  MOD_RES (5)..(5): Xaa is C or S

SEQ ID NO: 91879 - protein, 28 aa, Artificial Sequence
  Cyclic GFR-binding peptide
TPTKMEPISMLYLNDKQQIIKFKYEGMV

SEQ ID NO: 91880 - protein, 35 aa, Artificial Sequence; identical to SEQ ID NO: 38770
  Cyclic GFR-binding peptide
  MOD_RES (3)..(4): Xaa is C or S

SEQ ID NO: 91881 - protein, 28 aa, Artificial Sequence
  Cyclic GFR-binding peptide
  MOD_RES (2)..(3): Xaa is C or S
AXXVPTELSPISMLYKDENEKVVLKYHY

SEQ ID NO: 91882 - protein, 24 aa, Artificial Sequence
  Cyclic GFR-binding peptide
EKMSATSILYYDENKNVVLRKHRN

SEQ ID NO: 91883 - protein, 28 aa, Artificial Sequence
  Cyclic GFR-binding peptide
TKLNAISVLYFDSSNNVILKKYRNMVVK

SEQ ID NO: 91884 - protein, 37 aa, Artificial Sequence; identical to SEQ ID NO: 9929
  Cyclic GFR-binding peptide
  MOD_RES (1)..(2)..(34)..(36): Xaa is C or S

SEQ ID NO: 91885 - protein, 25 aa, Artificial Sequence
  Cyclic GFR-binding peptide
QDLNAISILYFVGRTPKVLKKYRMV

SEQ ID NO: 91886 - protein, 36 aa, Artificial Sequence; identical to SEQ ID NO: 9931
  Cyclic GFR-binding peptide
  MOD_RES (2)..(3)..(35): Xaa is C or S

SEQ ID NO: 91887 - protein, 25 aa, Artificial Sequence
  Cyclic GFR-binding peptide
TKMNAISMLYFNDKQQIILKKYRGM

SEQ ID NO: 91888 - protein, 36 aa, Artificial Sequence; identical to SEQ ID NO: 43172
  Cyclic GFR-binding peptide
  MOD_RES (6)..(7): Xaa is C or S

SEQ ID NO: 91889 - protein, 28 aa, Artificial Sequence
  Cyclic GFR-binding peptide
  MOD_RES (2)..(3): Xaa is C or S
AXXVPTELEPISMLYLDENEKVVKFKYE

SEQ ID NO: 91890 - protein, 27 aa, Artificial Sequence
  Cyclic GFR-binding peptide
  MOD_RES (27)..(27): Xaa is C or S
TSATSMLYYDNGRVLLLRKHRMIVEEX

SEQ ID NO: 91891 - protein, 31 aa, Artificial Sequence; identical to SEQ ID NO: 9933
  Cyclic GFR-binding peptide
  MOD_RES (29)..(31): Xaa is C or S

SEQ ID NO: 91892 - protein, 24 aa, Artificial Sequence
  Cyclic GFR-binding peptide
PEKMNAISILYFDENKNVVLKKYR

SEQ ID NO: 91893 - protein, 27 aa, Artificial Sequence
  Cyclic GFR-binding peptide
  MOD_RES (1)..(2): Xaa is C or S
XXVPQALSATSILYYVGRKPKVLRKHR

SEQ ID NO: 91894 - protein, 27 aa, Artificial Sequence
  Cyclic GFR-binding peptide
PTKLSPISILYKDKGVVTYLKYHYGMA

SEQ ID NO: 91895 - protein, 27 aa, Artificial Sequence
  Cyclic GFR-binding peptide
  MOD_RES (1)..(1): Xaa is C or S
XVPARLSPINILYFDAANNVVYGKIPD

SEQ ID NO: 91896 - protein, 26 aa, Artificial Sequence
  Cyclic GFR-binding peptide
LEPISVLYLDSSNNVIKFKYENMVVK

SEQ ID NO: 91897 - protein, 29 aa, Artificial Sequence
  Cyclic GFR-binding peptide
  MOD_RES (1)..(2): Xaa is C or S
XXVPTKLNAISILYFDKGVVTYLKKYRGM

SEQ ID NO: 91898 - protein, 27 aa, Artificial Sequence
  Cyclic GFR-binding peptide
VPTRLSATSILYYDSANNVVLRKHRDM

SEQ ID NO: 91899 - protein, 29 aa, Artificial Sequence
  Cyclic GFR-binding peptide
  MOD_RES (2)..(3): Xaa is C or S
SXXVPARLSPISILYKDAANNVVLKYHYD

SEQ ID NO: 91900 - protein, 34 aa, Artificial Sequence
  Cyclic GFR-binding peptide
  MOD_RES (32)..(34): Xaa is C or S
VPEKMNAISILYFDENKNVVLKKYRNMTVESXAX

SEQ ID NO: 91901 - protein, 32 aa, Artificial Sequence; identical to SEQ ID NO: 9937
  Cyclic GFR-binding peptide
  MOD_RES (32)..(32): Xaa is C or S

SEQ ID NO: 91902 - protein, 34 aa, Artificial Sequence; identical to SEQ ID NO: 38788
  Cyclic GFR-binding peptide
  MOD_RES (1)..(2)..(34): Xaa is C or S

SEQ ID NO: 91903 - protein, 27 aa, Artificial Sequence
  Cyclic GFR-binding peptide
SATSVLYYDDMGVPTLRKHREGMSVAE

SEQ ID NO: 91904 - protein, 35 aa, Artificial Sequence; identical to SEQ ID NO: 38790
  Cyclic GFR-binding peptide
  MOD_RES (2)..(3)..(34): Xaa is C or S

SEQ ID NO: 91905 - protein, 35 aa, Artificial Sequence; identical to SEQ ID NO: 9941
  Cyclic GFR-binding peptide
  MOD_RES (1)..(33)..(35): Xaa is C or S

SEQ ID NO: 91906 - protein, 24 aa, Artificial Sequence
  Cyclic GFR-binding peptide
QALNAISILYFVGRKPKVLKKYRM

SEQ ID NO: 91907 - protein, 31 aa, Artificial Sequence
  Cyclic GFR-binding peptide
  MOD_RES (31)..(31): Xaa is C or S
PEKMNAISILYFDENKNVVLKKYRNMTVESX

SEQ ID NO: 91908 - protein, 39 aa, Artificial Sequence; identical to SEQ ID NO: 9945
  Cyclic GFR-binding peptide
  MOD_RES (4)..(36)..(38): Xaa is C or S

SEQ ID NO: 91909 - protein, 35 aa, Artificial Sequence
  Cyclic GFR-binding peptide
  MOD_RES (3)..(4): Xaa is C or S
GPXXTPTKMEPISMLYLNDKQQIIKFKYEGMVVDR

SEQ ID NO: 91910 - protein, 23 aa, Artificial Sequence
  Cyclic GFR-binding peptide
SPISVLYKDSSNNVILKYHYNMV

SEQ ID NO: 91911 - protein, 33 aa, Artificial Sequence; identical to SEQ ID NO: 9952
  Cyclic GFR-binding peptide
  MOD_RES (5)..(6): Xaa is C or S

SEQ ID NO: 91912 - protein, 41 aa, Artificial Sequence; identical to SEQ ID NO: 9954
  Cyclic GFR-binding peptide
  MOD_RES (6)..(7)..(40): Xaa is C or S

SEQ ID NO: 91913 - protein, 38 aa, Artificial Sequence
  Cyclic GFR-binding peptide
  MOD_RES (5)..(6)..(37): Xaa is C or S
SAAPXXVPQALSPINILYFVGRKPKVYGKIPMIVRSXK

SEQ ID NO: 91914 - protein, 23 aa, Artificial Sequence
  Cyclic GFR-binding peptide
SPISMLYKDNGRVLLLKYHYMIV

SEQ ID NO: 91915 - protein, 29 aa, Artificial Sequence
  Cyclic GFR-binding peptide
  MOD_RES (1)..(1): Xaa is C or S
XAPTKLEPISVLYLDSSNNVIKFKYENMV

SEQ ID NO: 91916 - protein, 27 aa, Artificial Sequence
  Cyclic GFR-binding peptide
KLSATSVLYYDDSSNVILRKHRNMVVR

SEQ ID NO: 91917 - protein, 23 aa, Artificial Sequence
  Cyclic GFR-binding peptide
ALNAISILYFVGRKPKVLKKYRM

SEQ ID NO: 91918 - protein, 33 aa, Artificial Sequence
  Cyclic GFR-binding peptide
  MOD_RES (6)..(7): Xaa is C or S
GIPEPXXVPEKMNAISILYFDENKNVVLKKYRN

SEQ ID NO: 91919 - protein, 30 aa, Artificial Sequence; identical to SEQ ID NO: 9960
  Cyclic GFR-binding peptide
  MOD_RES (4)..(5): Xaa is C or S

SEQ ID NO: 91920 - protein, 29 aa, Artificial Sequence
  Cyclic GFR-binding peptide
  MOD_RES (1)..(2): Xaa is C or S
XXAPTKLSPINVLYFDSSNNVIYGKIPNM

SEQ ID NO: 91921 - protein, 37 aa, Artificial Sequence; identical to SEQ ID NO: 9965
  Cyclic GFR-binding peptide
  MOD_RES (1)..(2)..(34)..(36): Xaa is C or S

SEQ ID NO: 91922 - protein, 31 aa, Artificial Sequence; identical to SEQ ID NO: 38810
  Cyclic GFR-binding peptide
  MOD_RES (1)..(1): Xaa is C or S

SEQ ID NO: 91923 - protein, 33 aa, Artificial Sequence; identical to SEQ ID NO: 9966
  Cyclic GFR-binding peptide
  MOD_RES (4)..(5): Xaa is C or S

SEQ ID NO: 91924 - protein, 26 aa, Artificial Sequence
  Cyclic GFR-binding peptide
TKLNAISVLYFDDMGVPTLKKYREGM

SEQ ID NO: 91925 - protein, 34 aa, Artificial Sequence
  Cyclic GFR-binding peptide
  MOD_RES (2)..(3): Xaa is C or S
PXXVPEKMSATSILYYDENKNVVLRKHRNMTVES

SEQ ID NO: 91926 - protein, 30 aa, Artificial Sequence; identical to SEQ ID NO: 9970
  Cyclic GFR-binding peptide

SEQ ID NO: 91927 - protein, 33 aa, Artificial Sequence; identical to SEQ ID NO: 38817
  Cyclic GFR-binding peptide
  MOD_RES (2)..(3): Xaa is C or S

SEQ ID NO: 91928 - protein, 24 aa, Artificial Sequence
  Cyclic GFR-binding peptide
LSATSVLYYDDSSNVILRKHRNMV

SEQ ID NO: 91929 - protein, 35 aa, Artificial Sequence
  Cyclic GFR-binding peptide
  MOD_RES (1)..(2)..(33)..(35): Xaa is C or S
XXAPVKTSATSMLYYDNGRVLLLRKHRMIVEEXGX

SEQ ID NO: 91930 - protein, 28 aa, Artificial Sequence
  Cyclic GFR-binding peptide
  MOD_RES (28)..(28): Xaa is C or S
LSPISILYKDAANNVVLKYHYDMVVEAX

SEQ ID NO: 91931 - protein, 32 aa, Artificial Sequence; identical to SEQ ID NO: 9974
  Cyclic GFR-binding peptide
  MOD_RES (6)..(7): Xaa is C or S

SEQ ID NO: 91932 - protein, 34 aa, Artificial Sequence; identical to SEQ ID NO: 38826
  Cyclic GFR-binding peptide
  MOD_RES (3)..(4): Xaa is C or S

SEQ ID NO: 91933 - protein, 31 aa, Artificial Sequence
  Cyclic GFR-binding peptide
  MOD_RES (2)..(3): Xaa is C or S
PXXVSQDLSPINILYFIGKTPKIYGKIPMIV

SEQ ID NO: 91934 - protein, 34 aa, Artificial Sequence; identical to SEQ ID NO: 9975
  Cyclic GFR-binding peptide
  MOD_RES (1)..(33): Xaa is C or S

SEQ ID NO: 91935 - protein, 31 aa, Artificial Sequence; identical to SEQ ID NO: 9976
  Cyclic GFR-binding peptide
  MOD_RES (31)..(31): Xaa is C or S

SEQ ID NO: 91936 - protein, 30 aa, Artificial Sequence; identical to SEQ ID NO: 43209
  Cyclic GFR-binding peptide
  MOD_RES (29)..(29): Xaa is C or S

SEQ ID NO: 91937 - protein, 26 aa, Artificial Sequence
  Cyclic GFR-binding peptide
PTKLSPISILYKDKGVVTYLKYHYGM

SEQ ID NO: 91938 - protein, 37 aa, Artificial Sequence; identical to SEQ ID NO: 9981
  Cyclic GFR-binding peptide
  MOD_RES (7)..(7): Xaa is C or S

SEQ ID NO: 91939 - protein, 32 aa, Artificial Sequence; identical to SEQ ID NO: 9982
  Cyclic GFR-binding peptide
  MOD_RES (1)..(2): Xaa is C or S

SEQ ID NO: 91940 - protein, 21 aa, Artificial Sequence
  Cyclic GFR-binding peptide
MSPISMLYKNDKQQIILKYHY

SEQ ID NO: 91941 - protein, 36 aa, Artificial Sequence; identical to SEQ ID NO: 9983
  Cyclic GFR-binding peptide
  MOD_RES (1)..(34)..(36): Xaa is C or S

SEQ ID NO: 91942 - protein, 33 aa, Artificial Sequence
  Cyclic GFR-binding peptide
  MOD_RES (5)..(6): Xaa is C or S
ASKAXXVPTKLSATSILYYDKGVVTYLRKHRGM

SEQ ID NO: 91943 - protein, 39 aa, Artificial Sequence; identical to SEQ ID NO: 20166
  Cyclic GFR-binding peptide
  MOD_RES (5)..(6)..(38): Xaa is C or S

SEQ ID NO: 91944 - protein, 26 aa, Artificial Sequence
  Cyclic GFR-binding peptide
SPISVLYKDDSSNVILKYHYNMVVRS

SEQ ID NO: 91945 - protein, 33 aa, Artificial Sequence; identical to SEQ ID NO: 9987
  Cyclic GFR-binding peptide
  MOD_RES (31)..(33): Xaa is C or S

SEQ ID NO: 91946 - protein, 31 aa, Artificial Sequence; identical to SEQ ID NO: 9990
  Cyclic GFR-binding peptide
  MOD_RES (1)..(2): Xaa is C or S

SEQ ID NO: 91947 - protein, 26 aa, Artificial Sequence
  Cyclic GFR-binding peptide
LSPISILYKVGRTPKVLKYHYMVVKS

SEQ ID NO: 91948 - protein, 26 aa, Artificial Sequence
  Cyclic GFR-binding peptide
SPISVLYKDDSSNVILKYHYNMVVRA

SEQ ID NO: 91949 - protein, 31 aa, Artificial Sequence; identical to SEQ ID NO: 9995
  Cyclic GFR-binding peptide
  MOD_RES (5)..(6): Xaa is C or S

SEQ ID NO: 91950 - protein, 28 aa, Artificial Sequence
  Cyclic GFR-binding peptide
  MOD_RES (2)..(3): Xaa is C or S
PXXVSQDLSPISILYKIGKTPKILKYHY

SEQ ID NO: 91951 - protein, 31 aa, Artificial Sequence; identical to SEQ ID NO: 77362
  Cyclic GFR-binding peptide
  MOD_RES (31)..(31): Xaa is C or S

SEQ ID NO: 91952 - protein, 30 aa, Artificial Sequence; identical to SEQ ID NO: 38853
  Cyclic GFR-binding peptide
  MOD_RES (4)..(5): Xaa is C or S

SEQ ID NO: 91953 - protein, 39 aa, Artificial Sequence; identical to SEQ ID NO: 43228
  Cyclic GFR-binding peptide
  MOD_RES (6)..(7)..(39): Xaa is C or S

SEQ ID NO: 91954 - protein, 40 aa, Artificial Sequence; identical to SEQ ID NO: 9999
  Cyclic GFR-binding peptide
  MOD_RES (5)..(37)..(39): Xaa is C or S

SEQ ID NO: 91955 - protein, 40 aa, Artificial Sequence; identical to SEQ ID NO: 43231
  Cyclic GFR-binding peptide
  MOD_RES (3)..(4)..(37)..(39): Xaa is C or S

SEQ ID NO: 91956 - protein, 27 aa, Artificial Sequence
  Cyclic GFR-binding peptide
  MOD_RES (27)..(27): Xaa is C or S
TSPISMLYKDNGRVLLLKYHYMIVEEX

SEQ ID NO: 91957 - protein, 26 aa, Artificial Sequence
  Cyclic GFR-binding peptide
TRLSATSILYYDSANNVVLRKHRDMV

SEQ ID NO: 91958 - protein, 30 aa, Artificial Sequence; identical to SEQ ID NO: 10003
  Cyclic GFR-binding peptide
  MOD_RES (1)..(1): Xaa is C or S

SEQ ID NO: 91959 - protein, 37 aa, Artificial Sequence; identical to SEQ ID NO: 43234
  Cyclic GFR-binding peptide
  MOD_RES (5)..(6): Xaa is C or S

SEQ ID NO: 91960 - protein, 37 aa, Artificial Sequence; identical to SEQ ID NO: 38862
  Cyclic GFR-binding peptide
  MOD_RES (6)..(7): Xaa is C or S

SEQ ID NO: 91961 - protein, 26 aa, Artificial Sequence
  Cyclic GFR-binding peptide
  MOD_RES (26)..(26): Xaa is C or S
EPISILYLIGKTPKIKFKYEMIVKSX

SEQ ID NO: 91962 - protein, 27 aa, Artificial Sequence
  Cyclic GFR-binding peptide
  MOD_RES (1)..(2): Xaa is C or S
XXVPTELSPISMLYKDENEKVVLKYHY

SEQ ID NO: 91963 - protein, 37 aa, Artificial Sequence
  Cyclic GFR-binding peptide
  MOD_RES (3)..(4)..(35)..(37): Xaa is C or S
SPXXVSQDLSPINILYFIGKTPKIYGKIPMIVKSXKX

SEQ ID NO: 91964 - protein, 35 aa, Artificial Sequence
  Cyclic GFR-binding peptide
  MOD_RES (32)..(34): Xaa is C or S
VPTKLSATSILYYDKGVVTYLRKHRGMAVSEXGXR

SEQ ID NO: 91965 - protein, 38 aa, Artificial Sequence; identical to SEQ ID NO: 10009
  Cyclic GFR-binding peptide
  MOD_RES (4)..(5)..(37): Xaa is C or S

SEQ ID NO: 91966 - protein, 32 aa, Artificial Sequence; identical to SEQ ID NO: 10010
  Cyclic GFR-binding peptide
  MOD_RES (32)..(32): Xaa is C or S

SEQ ID NO: 91967 - protein, 39 aa, Artificial Sequence; identical to SEQ ID NO: 38869
  Cyclic GFR-binding peptide
  MOD_RES (6)..(7)..(39): Xaa is C or S

SEQ ID NO: 91968 - protein, 24 aa, Artificial Sequence
  Cyclic GFR-binding peptide
DLNAISILYFIGKTPKILKKYRMI

SEQ ID NO: 91969 - protein, 34 aa, Artificial Sequence; identical to SEQ ID NO: 43239
  Cyclic GFR-binding peptide
  MOD_RES (3)..(4): Xaa is C or S

SEQ ID NO: 91970 - protein, 27 aa, Artificial Sequence
  Cyclic GFR-binding peptide
TKLSPISVLYKDDSSNVILKYHYNMVV

SEQ ID NO: 91971 - protein, 25 aa, Artificial Sequence
  Cyclic GFR-binding peptide
LSPINILYFDSANNVVYGKIPDMVV

SEQ ID NO: 91972 - protein, 38 aa, Artificial Sequence; identical to SEQ ID NO: 38877
  Cyclic GFR-binding peptide
  MOD_RES (3)..(4)..(36)..(38): Xaa is C or S

SEQ ID NO: 91973 - protein, 32 aa, Artificial Sequence; identical to SEQ ID NO: 10016
  Cyclic GFR-binding peptide
  MOD_RES (1)..(32): Xaa is C or S

SEQ ID NO: 91974 - protein, 32 aa, Artificial Sequence; identical to SEQ ID NO: 43248
  Cyclic GFR-binding peptide
  MOD_RES (4)..(5): Xaa is C or S

SEQ ID NO: 91975 - protein, 33 aa, Artificial Sequence
  Cyclic GFR-binding peptide
  MOD_RES (3)..(4): Xaa is C or S
STXXAPVKTEPISMLYLDNGRVLLKFKYEMIVE

SEQ ID NO: 91976 - protein, 32 aa, Artificial Sequence; identical to SEQ ID NO: 43250
  Cyclic GFR-binding peptide
  MOD_RES (1)..(2): Xaa is C or S

SEQ ID NO: 91977 - protein, 34 aa, Artificial Sequence
  Cyclic GFR-binding peptide
  MOD_RES (4)..(5): Xaa is C or S
AAPXXVPQALSPINILYFVGRKPKVYGKIPMIVR

SEQ ID NO: 91978 - protein, 34 aa, Artificial Sequence; identical to SEQ ID NO: 10019
  Cyclic GFR-binding peptide
  MOD_RES (6)..(7): Xaa is C or S

SEQ ID NO: 91979 - protein, 30 aa, Artificial Sequence
  Cyclic GFR-binding peptide
  MOD_RES (2)..(3): Xaa is C or S
TXXAPVKTSATSMLYYDNGRVLLLRKHRMI

SEQ ID NO: 91980 - protein, 31 aa, Artificial Sequence; identical to SEQ ID NO: 43253
  Cyclic GFR-binding peptide
  MOD_RES (28)..(30): Xaa is C or S

SEQ ID NO: 91981 - protein, 36 aa, Artificial Sequence
  Cyclic GFR-binding peptide
  MOD_RES (6)..(7): Xaa is C or S
GSAGPXXTPTKMSATSMLYYNDKQQIILRKHRGMVV

SEQ ID NO: 91982 - protein, 33 aa, Artificial Sequence; identical to SEQ ID NO: 43257
  Cyclic GFR-binding peptide
  MOD_RES (3)..(3): Xaa is C or S

SEQ ID NO: 91983 - protein, 29 aa, Artificial Sequence
  Cyclic GFR-binding peptide
  MOD_RES (3)..(4): Xaa is C or S
KAXXVPTKLSPINILYFDKGVVTYYGKIP

SEQ ID NO: 91984 - protein, 31 aa, Artificial Sequence
  Cyclic GFR-binding peptide
  MOD_RES (4)..(5): Xaa is C or S
PPTXXVPTRLSPISILYKDSANNVVLKYHYD

SEQ ID NO: 91985 - protein, 39 aa, Artificial Sequence; identical to SEQ ID NO: 10023
  Cyclic GFR-binding peptide
  MOD_RES (6)..(7)..(39): Xaa is C or S

SEQ ID NO: 91986 - protein, 42 aa, Artificial Sequence; identical to SEQ ID NO: 43262
  Cyclic GFR-binding peptide
  MOD_RES (6)..(7)..(39)..(41): Xaa is C or S

SEQ ID NO: 91987 - protein, 39 aa, Artificial Sequence
  Cyclic GFR-binding peptide
  MOD_RES (6)..(7)..(39): Xaa is C or S
STPPTXXVPTRLEPISILYLDSANNVVKFKYEDMVVESX

SEQ ID NO: 91988 - protein, 29 aa, Artificial Sequence
  Cyclic GFR-binding peptide
  MOD_RES (28)..(28): Xaa is C or S
ALSATSILYYVGRKPKVLRKHRMIVRSXK

SEQ ID NO: 91989 - protein, 32 aa, Artificial Sequence
  Cyclic GFR-binding peptide
  MOD_RES (3)..(4): Xaa is C or S
PTXXVPTRLEPISILYLDSANNVVKFKYEDMV

SEQ ID NO: 91990 - protein, 33 aa, Artificial Sequence; identical to SEQ ID NO: 10028
  Cyclic GFR-binding peptide
  MOD_RES (3)..(4): Xaa is C or S

SEQ ID NO: 91991 - protein, 22 aa, Artificial Sequence
  Cyclic GFR-binding peptide
ELEPISMLYLDEYDKVVKFKYE

SEQ ID NO: 91992 - protein, 33 aa, Artificial Sequence; identical to SEQ ID NO: 20223
  Cyclic GFR-binding peptide
  MOD_RES (2)..(3): Xaa is C or S

SEQ ID NO: 91993 - protein, 34 aa, Artificial Sequence; identical to SEQ ID NO: 38894
  Cyclic GFR-binding peptide
  MOD_RES (31)..(33): Xaa is C or S

SEQ ID NO: 91994 - protein, 26 aa, Artificial Sequence
  Cyclic GFR-binding peptide
RLSATSILYYDSANNVVLRKHRDMVV

SEQ ID NO: 91995 - protein, 33 aa, Artificial Sequence; identical to SEQ ID NO: 43266
  Cyclic GFR-binding peptide
  MOD_RES (30)..(32): Xaa is C or S

SEQ ID NO: 91996 - protein, 29 aa, Artificial Sequence
  Cyclic GFR-binding peptide
  MOD_RES (26)..(28): Xaa is C or S
NAISMLYFDNGRVLLLKKYRMIVEEXGXL

SEQ ID NO: 91997 - protein, 39 aa, Artificial Sequence; identical to SEQ ID NO: 38899
  Cyclic GFR-binding peptide
  MOD_RES (6)..(7)..(39): Xaa is C or S

SEQ ID NO: 91998 - protein, 24 aa, Artificial Sequence
  Cyclic GFR-binding peptide
MSPINILYFDENKNVVYGKIPNMT

SEQ ID NO: 91999 - protein, 24 aa, Artificial Sequence
  Cyclic GFR-binding peptide
LSPISILYKVGRKPKVLKYHYMIV

SEQ ID NO: 92000 - protein, 27 aa, Artificial Sequence
  Cyclic GFR-binding peptide
QDLEPISILYLVGRTPKVKFKYEMVVK

SEQ ID NO: 92001 - protein, 41 aa, Artificial Sequence; identical to SEQ ID NO: 10043
  Cyclic GFR-binding peptide
  MOD_RES (6)..(38)..(40): Xaa is C or S

SEQ ID NO: 92002 - protein, 31 aa, Artificial Sequence; identical to SEQ ID NO: 10047
  Cyclic GFR-binding peptide
  MOD_RES (28)..(30): Xaa is C or S

SEQ ID NO: 92003 - protein, 34 aa, Artificial Sequence; identical to SEQ ID NO: 10048
  Cyclic GFR-binding peptide
  MOD_RES (2)..(3): Xaa is C or S

SEQ ID NO: 92004 - protein, 32 aa, Artificial Sequence
  Cyclic GFR-binding peptide
  MOD_RES (6)..(7): Xaa is C or S
STPPTXXVPTRLEPISILYLDSANNVVKFKYE

SEQ ID NO: 92005 - protein, 26 aa, Artificial Sequence
  Cyclic GFR-binding peptide
QALSPISILYKVGRKPKVLKYHYMIV

SEQ ID NO: 92006 - protein, 36 aa, Artificial Sequence; identical to SEQ ID NO: 10050
  Cyclic GFR-binding peptide
  MOD_RES (3)..(4)..(36): Xaa is C or S

SEQ ID NO: 92007 - protein, 30 aa, Artificial Sequence; identical to SEQ ID NO: 10052
  Cyclic GFR-binding peptide
  MOD_RES (29)..(29): Xaa is C or S

SEQ ID NO: 92008 - protein, 22 aa, Artificial Sequence
  Cyclic GFR-binding peptide
SPINILYFDENKNVVYGKIPNM

SEQ ID NO: 92009 - protein, 42 aa, Artificial Sequence; identical to SEQ ID NO: 38913
  Cyclic GFR-binding peptide
  MOD_RES (6)..(7)..(39)..(41): Xaa is C or S

SEQ ID NO: 92010 - protein, 31 aa, Artificial Sequence; identical to SEQ ID NO: 10056
  Cyclic GFR-binding peptide
  MOD_RES (3)..(4): Xaa is C or S

SEQ ID NO: 92011 - protein, 26 aa, Artificial Sequence
  Cyclic GFR-binding peptide
TRLSPISILYKDSANNVVLKYHYDMV

SEQ ID NO: 92012 - protein, 29 aa, Artificial Sequence
  Cyclic GFR-binding peptide
  MOD_RES (29)..(29): Xaa is C or S
RLSPISILYKDAANNVVLKYHYDMVVEAX

SEQ ID NO: 92013 - protein, 35 aa, Artificial Sequence
  Cyclic GFR-binding peptide
  MOD_RES (4)..(5): Xaa is C or S
PEPXXVPEKMEPISILYLDENKNVVKFKYENMTVE

SEQ ID NO: 92014 - protein, 20 aa, Artificial Sequence
  Cyclic GFR-binding peptide
SATSILYYDKGVVTYLRKHR

SEQ ID NO: 92015 - protein, 29 aa, Artificial Sequence
  Cyclic GFR-binding peptide
  MOD_RES (1)..(1): Xaa is C or S
XVPTKLNAISILYFDKGVVTYLKKYRGMA

SEQ ID NO: 92016 - protein, 34 aa, Artificial Sequence; identical to SEQ ID NO: 10064
  Cyclic GFR-binding peptide
  MOD_RES (1)..(32)..(34): Xaa is C or S

SEQ ID NO: 92017 - protein, 23 aa, Artificial Sequence
  Cyclic GFR-binding peptide
MSPISMLYKNDKQQIILKYHYGM

SEQ ID NO: 92018 - protein, 32 aa, Artificial Sequence; identical to SEQ ID NO: 10066
  Cyclic GFR-binding peptide
  MOD_RES (3)..(4): Xaa is C or S

SEQ ID NO: 92019 - protein, 32 aa, Artificial Sequence; identical to SEQ ID NO: 10067
  Cyclic GFR-binding peptide
  MOD_RES (32)..(32): Xaa is C or S

SEQ ID NO: 92020 - protein, 33 aa, Artificial Sequence; identical to SEQ ID NO: 38931
  Cyclic GFR-binding peptide
  MOD_RES (31)..(33): Xaa is C or S

SEQ ID NO: 92021 - protein, 29 aa, Artificial Sequence
  Cyclic GFR-binding peptide
  MOD_RES (2)..(3): Xaa is C or S
AXXVPTELSPINMLYFDENEKVVYGKIPD

SEQ ID NO: 92022 - protein, 33 aa, Artificial Sequence; identical to SEQ ID NO: 10071
  Cyclic GFR-binding peptide
  MOD_RES (3)..(4): Xaa is C or S

SEQ ID NO: 92023 - protein, 23 aa, Artificial Sequence
  Cyclic GFR-binding peptide
TKLSPINVLYFDSSNNVIYGKIP

SEQ ID NO: 92024 - protein, 38 aa, Artificial Sequence; identical to SEQ ID NO: 38934
  Cyclic GFR-binding peptide
  MOD_RES (6)..(7): Xaa is C or S

SEQ ID NO: 92025 - protein, 31 aa, Artificial Sequence; identical to SEQ ID NO: 10073
  Cyclic GFR-binding peptide
  MOD_RES (31)..(31): Xaa is C or S

SEQ ID NO: 92026 - protein, 32 aa, Artificial Sequence; identical to SEQ ID NO: 10078
  Cyclic GFR-binding peptide
  MOD_RES (5)..(6): Xaa is C or S

SEQ ID NO: 92027 - protein, 31 aa, Artificial Sequence; identical to SEQ ID NO: 43300
  Cyclic GFR-binding peptide
  MOD_RES (29)..(31): Xaa is C or S

SEQ ID NO: 92028 - protein, 30 aa, Artificial Sequence; identical to SEQ ID NO: 43301
  Cyclic GFR-binding peptide
  MOD_RES (2)..(3): Xaa is C or S

SEQ ID NO: 92029 - protein, 36 aa, Artificial Sequence; identical to SEQ ID NO: 10081
  Cyclic GFR-binding peptide
  MOD_RES (3)..(4)..(35): Xaa is C or S

SEQ ID NO: 92030 - protein, 39 aa, Artificial Sequence; identical to SEQ ID NO: 43302
  Cyclic GFR-binding peptide
  MOD_RES (7)..(39): Xaa is C or S

SEQ ID NO: 92031 - protein, 33 aa, Artificial Sequence; identical to SEQ ID NO: 43306
  Cyclic GFR-binding peptide
  MOD_RES (4)..(4): Xaa is C or S

SEQ ID NO: 92032 - protein, 34 aa, Artificial Sequence
  Cyclic GFR-binding peptide
  MOD_RES (4)..(5): Xaa is C or S
PSTXXAPVKTSPISMLYKDNGRVLLLKYHYMIVE

SEQ ID NO: 92033 - protein, 37 aa, Artificial Sequence; identical to SEQ ID NO: 10082
  Cyclic GFR-binding peptide
  MOD_RES (5)..(6)..(37): Xaa is C or S

SEQ ID NO: 92034 - protein, 25 aa, Artificial Sequence
  Cyclic GFR-binding peptide
ELNAISMLYFDEYDKVVLKKYREMV

SEQ ID NO: 92035 - protein, 33 aa, Artificial Sequence; identical to SEQ ID NO: 43311
  Cyclic GFR-binding peptide
  MOD_RES (2)..(3): Xaa is C or S

SEQ ID NO: 92036 - protein, 25 aa, Artificial Sequence
  Cyclic GFR-binding peptide
QLSPISVLYKDDSSNVILKYHYNMV

SEQ ID NO: 92037 - protein, 29 aa, Artificial Sequence
  Cyclic GFR-binding peptide
  MOD_RES (3)..(4): Xaa is C or S
EPXXVPEKMSATSILYYDENKNVVLRKHR

SEQ ID NO: 92038 - protein, 26 aa, Artificial Sequence
  Cyclic GFR-binding peptide
QLSPISVLYKDDSSNVILKYHYNMVV

SEQ ID NO: 92039 - protein, 35 aa, Artificial Sequence; identical to SEQ ID NO: 10093
  Cyclic GFR-binding peptide
  MOD_RES (3)..(4)..(35): Xaa is C or S

SEQ ID NO: 92040 - protein, 40 aa, Artificial Sequence; identical to SEQ ID NO: 38949
  Cyclic GFR-binding peptide
  MOD_RES (4)..(5)..(37)..(39): Xaa is C or S

SEQ ID NO: 92041 - protein, 29 aa, Artificial Sequence
  Cyclic GFR-binding peptide
VPEKMSPISILYKDENKNVVLKYHYNMTV

SEQ ID NO: 92042 - protein, 25 aa, Artificial Sequence
  Cyclic GFR-binding peptide
QLSATSVLYYDDSSNVILRKHRNMV

SEQ ID NO: 92043 - protein, 36 aa, Artificial Sequence; identical to SEQ ID NO: 10095
  Cyclic GFR-binding peptide
  MOD_RES (4)..(5): Xaa is C or S

SEQ ID NO: 92044 - protein, 34 aa, Artificial Sequence; identical to SEQ ID NO: 38953
  Cyclic GFR-binding peptide
  MOD_RES (1)..(33): Xaa is C or S

SEQ ID NO: 92045 - protein, 41 aa, Artificial Sequence; identical to SEQ ID NO: 10096
  Cyclic GFR-binding peptide
  MOD_RES (7)..(39)..(41): Xaa is C or S

SEQ ID NO: 92046 - protein, 38 aa, Artificial Sequence; identical to SEQ ID NO: 10097
  Cyclic GFR-binding peptide
  MOD_RES (5)..(6)..(38): Xaa is C or S

SEQ ID NO: 92047 - protein, 23 aa, Artificial Sequence
  Cyclic GFR-binding peptide
QDLEPISILYLVGRTPKVKFKYE

SEQ ID NO: 92048 - protein, 30 aa, Artificial Sequence; identical to SEQ ID NO: 38965
  Cyclic GFR-binding peptide
  MOD_RES (27)..(29): Xaa is C or S

SEQ ID NO: 92049 - protein, 32 aa, Artificial Sequence; identical to SEQ ID NO: 41834
  Cyclic GFR-binding peptide
  MOD_RES (31)..(31): Xaa is C or S

SEQ ID NO: 92050 - protein, 37 aa, Artificial Sequence; identical to SEQ ID NO: 38966
  Cyclic GFR-binding peptide
  MOD_RES (3)..(4)..(37): Xaa is C or S

SEQ ID NO: 92051 - protein, 31 aa, Artificial Sequence; identical to SEQ ID NO: 10102
  Cyclic GFR-binding peptide
  MOD_RES (31)..(31): Xaa is C or S

SEQ ID NO: 92052 - protein, 37 aa, Artificial Sequence; identical to SEQ ID NO: 10103
  Cyclic GFR-binding peptide
  MOD_RES (3)..(4)..(36): Xaa is C or S

SEQ ID NO: 92053 - protein, 25 aa, Artificial Sequence
  Cyclic GFR-binding peptide
VKTSATSMLYYDNGRVLLLRKHRMI

SEQ ID NO: 92054 - protein, 26 aa, Artificial Sequence
  Cyclic GFR-binding peptide
TKLEPISVLYLDSSNNVIKFKYENMV

SEQ ID NO: 92055 - protein, 35 aa, Artificial Sequence; identical to SEQ ID NO: 41840
  Cyclic GFR-binding peptide
  MOD_RES (2)..(3)..(35): Xaa is C or S

SEQ ID NO: 92056 - protein, 32 aa, Artificial Sequence; identical to SEQ ID NO: 10110
  Cyclic GFR-binding peptide
  MOD_RES (4)..(5): Xaa is C or S

SEQ ID NO: 92057 - protein, 27 aa, Artificial Sequence
  Cyclic GFR-binding peptide
PVKTNAISMLYFDNGRVLLLKKYRMIV

SEQ ID NO: 92058 - protein, 22 aa, Artificial Sequence
  Cyclic GFR-binding peptide
SATSILYYDAANNVVLRKHRDM

SEQ ID NO: 92059 - protein, 26 aa, Artificial Sequence
  Cyclic GFR-binding peptide
VPQALSPISILYKVGRKPKVLKYHYM

SEQ ID NO: 92060 - protein, 30 aa, Artificial Sequence; identical to SEQ ID NO: 10113
  Cyclic GFR-binding peptide
  MOD_RES (28)..(30): Xaa is C or S

SEQ ID NO: 92061 - protein, 28 aa, Artificial Sequence
  Cyclic GFR-binding peptide
  MOD_RES (1)..(2): Xaa is C or S
XXVPTKLSPISILYKDKGVVTYLKYHYG

SEQ ID NO: 92062 - protein, 25 aa, Artificial Sequence
  Cyclic GFR-binding peptide
TELSATSMLYYDEYDKVVLRKHREM

SEQ ID NO: 92063 - protein, 26 aa, Artificial Sequence
  Cyclic GFR-binding peptide
SPISMLYKDEYDKVVLKYHYEMVVEG

SEQ ID NO: 92064 - protein, 34 aa, Artificial Sequence; identical to SEQ ID NO: 10117
  Cyclic GFR-binding peptide
  MOD_RES (6)..(7): Xaa is C or S

SEQ ID NO: 92065 - protein, 27 aa, Artificial Sequence
  Cyclic GFR-binding peptide
  MOD_RES (26)..(26): Xaa is C or S
SPINMLYFDNGRVLLYGKIPMIVEEXG

SEQ ID NO: 92066 - protein, 31 aa, Artificial Sequence
  Cyclic GFR-binding peptide
VPEKMSPISILYKDENKNVVLKYHYNMTVES

SEQ ID NO: 92067 - protein, 30 aa, Artificial Sequence; identical to SEQ ID NO: 38981
  Cyclic GFR-binding peptide
  MOD_RES (28)..(30): Xaa is C or S

SEQ ID NO: 92068 - protein, 34 aa, Artificial Sequence
  Cyclic GFR-binding peptide
  MOD_RES (3)..(4): Xaa is C or S
EPXXVPEKMSPISILYKDENKNVVLKYHYNMTVE

SEQ ID NO: 92069 - protein, 33 aa, Artificial Sequence; identical to SEQ ID NO: 10119
  Cyclic GFR-binding peptide
  MOD_RES (31)..(33): Xaa is C or S

SEQ ID NO: 92070 - protein, 36 aa, Artificial Sequence; identical to SEQ ID NO: 38986
  Cyclic GFR-binding peptide
  MOD_RES (3)..(4)..(36): Xaa is C or S

SEQ ID NO: 92071 - protein, 29 aa, Artificial Sequence
  Cyclic GFR-binding peptide
  MOD_RES (27)..(29): Xaa is C or S
LSATSILYYVGRKPKVLRKHRMIVRSXKX

SEQ ID NO: 92072 - protein, 35 aa, Artificial Sequence; identical to SEQ ID NO: 10123
  Cyclic GFR-binding peptide
  MOD_RES (1)..(2)..(34): Xaa is C or S

SEQ ID NO: 92073 - protein, 36 aa, Artificial Sequence; identical to SEQ ID NO: 38990
  Cyclic GFR-binding peptide
  MOD_RES (5)..(6): Xaa is C or S

SEQ ID NO: 92074 - protein, 23 aa, Artificial Sequence
  Cyclic GFR-binding peptide
TRLSATSILYYDSANNVVLRKHR

SEQ ID NO: 92075 - protein, 27 aa, Artificial Sequence
  Cyclic GFR-binding peptide
  MOD_RES (1)..(2): Xaa is C or S
XXVPTELNAISMLYFDENEKVVLKKYR

SEQ ID NO: 92076 - protein, 21 aa, Artificial Sequence
  Cyclic GFR-binding peptide
LSPINVLYFDDMGVPTYGKIP

SEQ ID NO: 92077 - protein, 31 aa, Artificial Sequence
  Cyclic GFR-binding peptide
  MOD_RES (4)..(5): Xaa is C or S
PSTXXAPVKTSPISMLYKDNGRVLLLKYHYM

SEQ ID NO: 92078 - protein, 32 aa, Artificial Sequence; identical to SEQ ID NO: 41868
  Cyclic GFR-binding peptide
  MOD_RES (30)..(32): Xaa is C or S

SEQ ID NO: 92079 - protein, 38 aa, Artificial Sequence
  Cyclic GFR-binding peptide
  MOD_RES (3)..(4)..(36)..(38): Xaa is C or S
GPXXTPTKMSPISMLYKNDKQQIILKYHYGMVVDRXGX

SEQ ID NO: 92080 - protein, 27 aa, Artificial Sequence
  Cyclic GFR-binding peptide
ELEPISMLYLDEYDKVVKFKYEEMVVE

SEQ ID NO: 92081 - protein, 35 aa, Artificial Sequence; identical to SEQ ID NO: 39000
  Cyclic GFR-binding peptide
  MOD_RES (1)..(2)..(34): Xaa is C or S

SEQ ID NO: 92082 - protein, 29 aa, Artificial Sequence
  Cyclic GFR-binding peptide
  MOD_RES (27)..(29): Xaa is C or S
SPINILYFDKGVVTYYGKIPGMAVSEXGX

SEQ ID NO: 92083 - protein, 28 aa, Artificial Sequence
  Cyclic GFR-binding peptide
TKLEPISVLYLDDSSNVIKFKYENMVVR

SEQ ID NO: 92084 - protein, 28 aa, Artificial Sequence
  Cyclic GFR-binding peptide
  MOD_RES (1)..(1): Xaa is C or S
XVPTKLEPISVLYLDDMGVPTKFKYEEG

SEQ ID NO: 92085 - protein, 39 aa, Artificial Sequence; identical to SEQ ID NO: 39004
  Cyclic GFR-binding peptide
  MOD_RES (4)..(5)..(37)..(39): Xaa is C or S

SEQ ID NO: 92086 - protein, 37 aa, Artificial Sequence; identical to SEQ ID NO: 77416
  Cyclic GFR-binding peptide
  MOD_RES (1)..(2)..(34)..(36): Xaa is C or S

SEQ ID NO: 92087 - protein, 32 aa, Artificial Sequence; identical to SEQ ID NO: 10130
  Cyclic GFR-binding peptide
  MOD_RES (3)..(4): Xaa is C or S

SEQ ID NO: 92088 - protein, 27 aa, Artificial Sequence
  Cyclic GFR-binding peptide
QLSPINVLYFDDSSNVIYGKIPNMVVR

SEQ ID NO: 92089 - protein, 21 aa, Artificial Sequence
  Cyclic GFR-binding peptide
LEPISMLYLDEYDKVVKFKYE

SEQ ID NO: 92090 - protein, 23 aa, Artificial Sequence
  Cyclic GFR-binding peptide
SPINILYFDAANNVVYGKIPDMV

SEQ ID NO: 92091 - protein, 31 aa, Artificial Sequence; identical to SEQ ID NO: 41882
  Cyclic GFR-binding peptide
  MOD_RES (31)..(31): Xaa is C or S

SEQ ID NO: 92092 - protein, 35 aa, Artificial Sequence; identical to SEQ ID NO: 39007
  Cyclic GFR-binding peptide
  MOD_RES (1)..(2)..(34): Xaa is C or S

SEQ ID NO: 92093 - protein, 35 aa, Artificial Sequence; identical to SEQ ID NO: 39008
  Cyclic GFR-binding peptide
  MOD_RES (1)..(2)..(34): Xaa is C or S

SEQ ID NO: 92094 - protein, 32 aa, Artificial Sequence; identical to SEQ ID NO: 10132
  Cyclic GFR-binding peptide
  MOD_RES (2)..(3): Xaa is C or S

SEQ ID NO: 92095 - protein, 42 aa, Artificial Sequence
  Cyclic GFR-binding peptide
  MOD_RES (6)..(7)..(39)..(41): Xaa is C or S
STPPTXXVPTRLEPISILYLDSANNVVKFKYEDMVVESXGXR

SEQ ID NO: 92096 - protein, 37 aa, Artificial Sequence; identical to SEQ ID NO: 20311
  Cyclic GFR-binding peptide
  MOD_RES (2)..(3)..(35)..(37): Xaa is C or S

SEQ ID NO: 92097 - protein, 33 aa, Artificial Sequence; identical to SEQ ID NO: 39010
  Cyclic GFR-binding peptide
  MOD_RES (5)..(6): Xaa is C or S

SEQ ID NO: 92098 - protein, 27 aa, Artificial Sequence
  Cyclic GFR-binding peptide
KLNAISVLYFDDMGVPTLKKYREGMSV

SEQ ID NO: 92099 - protein, 35 aa, Artificial Sequence; identical to SEQ ID NO: 10138
  Cyclic GFR-binding peptide
  MOD_RES (1)..(2)..(34): Xaa is C or S

SEQ ID NO: 92100 - protein, 37 aa, Artificial Sequence; identical to SEQ ID NO: 41892
  Cyclic GFR-binding peptide
  MOD_RES (2)..(34)..(36): Xaa is C or S

SEQ ID NO: 92101 - protein, 26 aa, Artificial Sequence
  Cyclic GFR-binding peptide
  MOD_RES (1)..(1): Xaa is C or S
XTPTKMSATSMLYYNDKQQIILRKHR

SEQ ID NO: 92102 - protein, 35 aa, Artificial Sequence; identical to SEQ ID NO: 10139
  Cyclic GFR-binding peptide
  MOD_RES (1)..(32)..(34): Xaa is C or S

SEQ ID NO: 92103 - protein, 31 aa, Artificial Sequence; identical to SEQ ID NO: 39017
  Cyclic GFR-binding peptide
  MOD_RES (1)..(1): Xaa is C or S

SEQ ID NO: 92104 - protein, 33 aa, Artificial Sequence
  Cyclic GFR-binding peptide
  MOD_RES (1)..(2): Xaa is C or S
XXVPEKMNAISILYFDENKNVVLKKYRNMTVES

SEQ ID NO: 92105 - protein, 37 aa, Artificial Sequence; identical to SEQ ID NO: 41896
  Cyclic GFR-binding peptide
  MOD_RES (2)..(3)..(36): Xaa is C or S

SEQ ID NO: 92106 - protein, 26 aa, Artificial Sequence
  Cyclic GFR-binding peptide
SQDLSPINILYFIGKTPKIYGKIPMI

SEQ ID NO: 92107 - protein, 29 aa, Artificial Sequence
  Cyclic GFR-binding peptide
  MOD_RES (3)..(4): Xaa is C or S
GPXXTPTKMNAISMLYFNDKQQIILKKYR

SEQ ID NO: 92108 - protein, 22 aa, Artificial Sequence
  Cyclic GFR-binding peptide
LNAISVLYFDDMGVPTLKKYRE

SEQ ID NO: 92109 - protein, 30 aa, Artificial Sequence; identical to SEQ ID NO: 10146
  Cyclic GFR-binding peptide
  MOD_RES (3)..(4): Xaa is C or S

SEQ ID NO: 92110 - protein, 36 aa, Artificial Sequence; identical to SEQ ID NO: 41901
  Cyclic GFR-binding peptide
  MOD_RES (1)..(33)..(35): Xaa is C or S

SEQ ID NO: 92111 - protein, 35 aa, Artificial Sequence; identical to SEQ ID NO: 10148
  Cyclic GFR-binding peptide
  MOD_RES (5)..(6): Xaa is C or S

SEQ ID NO: 92112 - protein, 29 aa, Artificial Sequence
  Cyclic GFR-binding peptide
  MOD_RES (3)..(4): Xaa is C or S
EPXXVPEKMNAISILYFDENKNVVLKKYR

SEQ ID NO: 92113 - protein, 24 aa, Artificial Sequence
  Cyclic GFR-binding peptide
PQALSATSILYYVGRKPKVLRKHR

SEQ ID NO: 92114 - protein, 27 aa, Artificial Sequence
  Cyclic GFR-binding peptide
  MOD_RES (1)..(2): Xaa is C or S
XXVPEKMSPINILYFDENKNVVYGKIP

SEQ ID NO: 92115 - protein, 34 aa, Artificial Sequence; identical to SEQ ID NO: 39031
  Cyclic GFR-binding peptide
  MOD_RES (2)..(3): Xaa is C or S

SEQ ID NO: 92116 - protein, 29 aa, Artificial Sequence
  Cyclic GFR-binding peptide
  MOD_RES (1)..(2): Xaa is C or S
XXVPTELSPINMLYFDENEKVVYGKIPDM

SEQ ID NO: 92117 - protein, 35 aa, Artificial Sequence; identical to SEQ ID NO: 10155
  Cyclic GFR-binding peptide
  MOD_RES (4)..(5): Xaa is C or S

SEQ ID NO: 92118 - protein, 37 aa, Artificial Sequence; identical to SEQ ID NO: 10157
  Cyclic GFR-binding peptide
  MOD_RES (5)..(6): Xaa is C or S

SEQ ID NO: 92119 - protein, 30 aa, Artificial Sequence
  Cyclic GFR-binding peptide
  MOD_RES (27)..(29): Xaa is C or S
LSPINILYFVGRTPKVYGKIPMVVKSXKXS

SEQ ID NO: 92120 - protein, 26 aa, Artificial Sequence
  Cyclic GFR-binding peptide
APTKLSPINVLYFDSSNNVIYGKIPN

SEQ ID NO: 92121 - protein, 39 aa, Artificial Sequence; identical to SEQ ID NO: 41922
  Cyclic GFR-binding peptide
  MOD_RES (6)..(38): Xaa is C or S

SEQ ID NO: 92122 - protein, 30 aa, Artificial Sequence
  Cyclic GFR-binding peptide
  MOD_RES (2)..(3): Xaa is C or S
TXXVPTRLEPISILYLDSANNVVKFKYEDM

SEQ ID NO: 92123 - protein, 30 aa, Artificial Sequence
  Cyclic GFR-binding peptide
PTKLSATSILYYDKGVVTYLRKHRGMAVSE

SEQ ID NO: 92124 - protein, 37 aa, Artificial Sequence; identical to SEQ ID NO: 10163
  Cyclic GFR-binding peptide
  MOD_RES (3)..(4)..(37): Xaa is C or S

SEQ ID NO: 92125 - protein, 38 aa, Artificial Sequence
  Cyclic GFR-binding peptide
  MOD_RES (6)..(7): Xaa is C or S
GIPEPXXVPEKMSPINILYFDENKNVVYGKIPNMTVES

SEQ ID NO: 92126 - protein, 34 aa, Artificial Sequence; identical to SEQ ID NO: 10164
  Cyclic GFR-binding peptide
  MOD_RES (5)..(6): Xaa is C or S

SEQ ID NO: 92127 - protein, 20 aa, Artificial Sequence
  Cyclic GFR-binding peptide
EPISILYLVGRKPKVKFKYE

SEQ ID NO: 92128 - protein, 29 aa, Artificial Sequence
  Cyclic GFR-binding peptide
  MOD_RES (1)..(1): Xaa is C or S
XVPTKLEPISVLYLDDMGVPTKFKYEEGM

SEQ ID NO: 92129 - protein, 25 aa, Artificial Sequence
  Cyclic GFR-binding peptide
ARLSPISILYKDAANNVVLKYHYDM

SEQ ID NO: 92130 - protein, 31 aa, Artificial Sequence; identical to SEQ ID NO: 41940
  Cyclic GFR-binding peptide
  MOD_RES (5)..(6): Xaa is C or S

SEQ ID NO: 92131 - protein, 24 aa, Artificial Sequence
  Cyclic GFR-binding peptide
QALEPISILYLVGRKPKVKFKYEM

SEQ ID NO: 92132 - protein, 41 aa, Artificial Sequence; identical to SEQ ID NO: 39050
  Cyclic GFR-binding peptide
  MOD_RES (7)..(39)..(41): Xaa is C or S

SEQ ID NO: 92133 - protein, 32 aa, Artificial Sequence; identical to SEQ ID NO: 10170
  Cyclic GFR-binding peptide
  MOD_RES (31)..(31): Xaa is C or S

SEQ ID NO: 92134 - protein, 27 aa, Artificial Sequence
  Cyclic GFR-binding peptide
TELNAISMLYFDENEKVVLKKYRDMVV

SEQ ID NO: 92135 - protein, 30 aa, Artificial Sequence; identical to SEQ ID NO: 41960
  Cyclic GFR-binding peptide
  MOD_RES (1)..(2): Xaa is C or S

SEQ ID NO: 92136 - protein, 36 aa, Artificial Sequence; identical to SEQ ID NO: 10175
  Cyclic GFR-binding peptide
  MOD_RES (4)..(5)..(36): Xaa is C or S

SEQ ID NO: 92137 - protein, 29 aa, Artificial Sequence
  Cyclic GFR-binding peptide
  MOD_RES (2)..(3): Xaa is C or S
PXXVPQALSPISILYKVGRKPKVLKYHYM

SEQ ID NO: 92138 - protein, 38 aa, Artificial Sequence; identical to SEQ ID NO: 41962
  Cyclic GFR-binding peptide
  MOD_RES (5)..(6)..(38): Xaa is C or S

SEQ ID NO: 92139 - protein, 21 aa, Artificial Sequence
  Cyclic GFR-binding peptide
SPISILYKDSANNVVLKYHYD

SEQ ID NO: 92140 - protein, 35 aa, Artificial Sequence; identical to SEQ ID NO: 41964
  Cyclic GFR-binding peptide
  MOD_RES (4)..(5): Xaa is C or S

SEQ ID NO: 92141 - protein, 31 aa, Artificial Sequence; identical to SEQ ID NO: 41965
  Cyclic GFR-binding peptide
  MOD_RES (30)..(30): Xaa is C or S

SEQ ID NO: 92142 - protein, 39 aa, Artificial Sequence; identical to SEQ ID NO: 41967
  Cyclic GFR-binding peptide
  MOD_RES (6)..(7): Xaa is C or S

SEQ ID NO: 92143 - protein, 26 aa, Artificial Sequence
  Cyclic GFR-binding peptide
LSATSMLYYDEYDKVVLRKHREMVVE

SEQ ID NO: 92144 - protein, 41 aa, Artificial Sequence
  Cyclic GFR-binding peptide
  MOD_RES (6)..(7)..(39)..(41): Xaa is C or S
GIPEPXXVPEKMNAISILYFDENKNVVLKKYRNMTVESXAX

SEQ ID NO: 92145 - protein, 28 aa, Artificial Sequence
  Cyclic GFR-binding peptide
  MOD_RES (1)..(1): Xaa is C or S
XVPTKLSPINILYFDKGVVTYYGKIPGM

SEQ ID NO: 92146 - protein, 34 aa, Artificial Sequence; identical to SEQ ID NO: 39059
  Cyclic GFR-binding peptide
  MOD_RES (2)..(3): Xaa is C or S

SEQ ID NO: 92147 - protein, 24 aa, Artificial Sequence
  Cyclic GFR-binding peptide
MEPISMLYLNDKQQIIKFKYEGMV

SEQ ID NO: 92148 - protein, 40 aa, Artificial Sequence; identical to SEQ ID NO: 10182
  Cyclic GFR-binding peptide
  MOD_RES (6)..(7)..(39): Xaa is C or S

SEQ ID NO: 92149 - protein, 33 aa, Artificial Sequence; identical to SEQ ID NO: 39060
  Cyclic GFR-binding peptide
  MOD_RES (3)..(4): Xaa is C or S

SEQ ID NO: 92150 - protein, 37 aa, Artificial Sequence; identical to SEQ ID NO: 39062
  Cyclic GFR-binding peptide
  MOD_RES (2)..(3)..(35)..(37): Xaa is C or S

SEQ ID NO: 92151 - protein, 31 aa, Artificial Sequence; identical to SEQ ID NO: 77454
  Cyclic GFR-binding peptide
  MOD_RES (2)..(3): Xaa is C or S

SEQ ID NO: 92152 - protein, 34 aa, Artificial Sequence; identical to SEQ ID NO: 10183
  Cyclic GFR-binding peptide
  MOD_RES (6)..(7): Xaa is C or S

SEQ ID NO: 92153 - protein, 26 aa, Artificial Sequence
  Cyclic GFR-binding peptide
MNAISMLYFNDKQQIILKKYRGMVVD

SEQ ID NO: 92154 - protein, 35 aa, Artificial Sequence
  Cyclic GFR-binding peptide
  MOD_RES (4)..(5): Xaa is C or S
AAPXXVPQALSPINILYFVGRKPKVYGKIPMIVRS

SEQ ID NO: 92155 - protein, 31 aa, Artificial Sequence; identical to SEQ ID NO: 39065
  Cyclic GFR-binding peptide
  MOD_RES (2)..(3): Xaa is C or S

SEQ ID NO: 92156 - protein, 29 aa, Artificial Sequence
  Cyclic GFR-binding peptide
  MOD_RES (26)..(28): Xaa is C or S
SPISILYKVGRKPKVLKYHYMIVRSXKXS

SEQ ID NO: 92157 - protein, 29 aa, Artificial Sequence
  Cyclic GFR-binding peptide
  MOD_RES (1)..(1): Xaa is C or S
XVSQDLEPISILYLIGKTPKIKFKYEMIV

SEQ ID NO: 92158 - protein, 29 aa, Artificial Sequence
  Cyclic GFR-binding peptide
  MOD_RES (3)..(4): Xaa is C or S
ASXXVPARLSATSILYYDAANNVVLRKHR

SEQ ID NO: 92159 - protein, 27 aa, Artificial Sequence
  Cyclic GFR-binding peptide
VPARLSPINILYFDAANNVVYGKIPDM

SEQ ID NO: 92160 - protein, 35 aa, Artificial Sequence; identical to SEQ ID NO: 10195
  Cyclic GFR-binding peptide
  MOD_RES (1)..(33)..(35): Xaa is C or S

SEQ ID NO: 92161 - protein, 39 aa, Artificial Sequence
  Cyclic GFR-binding peptide
  MOD_RES (4)..(5)..(37)..(39): Xaa is C or S
PEPXXVPEKMEPISILYLDENKNVVKFKYENMTVESXAX

SEQ ID NO: 92162 - protein, 33 aa, Artificial Sequence; identical to SEQ ID NO: 10197
  Cyclic GFR-binding peptide
  MOD_RES (2)..(3): Xaa is C or S

SEQ ID NO: 92163 - protein, 39 aa, Artificial Sequence; identical to SEQ ID NO: 39079
  Cyclic GFR-binding peptide
  MOD_RES (5)..(6)..(37)..(39): Xaa is C or S

SEQ ID NO: 92164 - protein, 36 aa, Artificial Sequence; identical to SEQ ID NO: 10199
  Cyclic GFR-binding peptide
  MOD_RES (2)..(34)..(36): Xaa is C or S

SEQ ID NO: 92165 - protein, 36 aa, Artificial Sequence; identical to SEQ ID NO: 41996
  Cyclic GFR-binding peptide
  MOD_RES (4)..(5): Xaa is C or S

SEQ ID NO: 92166 - protein, 32 aa, Artificial Sequence; identical to SEQ ID NO: 10200
  Cyclic GFR-binding peptide
  MOD_RES (1)..(2): Xaa is C or S

SEQ ID NO: 92167 - protein, 27 aa, Artificial Sequence
  Cyclic GFR-binding peptide
MSATSILYYDENKNVVLRKHRNMTVES

SEQ ID NO: 92168 - protein, 32 aa, Artificial Sequence; identical to SEQ ID NO: 39083
  Cyclic GFR-binding peptide
  MOD_RES (5)..(6): Xaa is C or S

SEQ ID NO: 92169 - protein, 25 aa, Artificial Sequence
  Cyclic GFR-binding peptide
PTELNAISMLYFDENEKVVLKKYRD

SEQ ID NO: 92170 - protein, 20 aa, Artificial Sequence
  Cyclic GFR-binding peptide
NAISILYFIGKTPKILKKYR

SEQ ID NO: 92171 - protein, 36 aa, Artificial Sequence; identical to SEQ ID NO: 39086
  Cyclic GFR-binding peptide
  MOD_RES (3)..(4)..(36): Xaa is C or S

SEQ ID NO: 92172 - protein, 29 aa, Artificial Sequence
  Cyclic GFR-binding peptide
  MOD_RES (28)..(28): Xaa is C or S
LSPINMLYFDEYDKVVYGKIPEMVVEGXG

SEQ ID NO: 92173 - protein, 35 aa, Artificial Sequence; identical to SEQ ID NO: 10210
  Cyclic GFR-binding peptide
  MOD_RES (32)..(34): Xaa is C or S

SEQ ID NO: 92174 - protein, 20 aa, Artificial Sequence
  Cyclic GFR-binding peptide
SATSMLYYDENEKVVLRKHR

SEQ ID NO: 92175 - protein, 38 aa, Artificial Sequence; identical to SEQ ID NO: 10212
  Cyclic GFR-binding peptide
  MOD_RES (3)..(4)..(35)..(37): Xaa is C or S

SEQ ID NO: 92176 - protein, 38 aa, Artificial Sequence
  Cyclic GFR-binding peptide
  MOD_RES (5)..(6)..(38): Xaa is C or S
APASXXVPARLSATSILYYDAANNVVLRKHRDMVVEAX

SEQ ID NO: 92177 - protein, 36 aa, Artificial Sequence; identical to SEQ ID NO: 10213
  Cyclic GFR-binding peptide
  MOD_RES (5)..(6): Xaa is C or S

SEQ ID NO: 92178 - protein, 32 aa, Artificial Sequence; identical to SEQ ID NO: 10214
  Cyclic GFR-binding peptide
  MOD_RES (5)..(6): Xaa is C or S

SEQ ID NO: 92179 - protein, 22 aa, Artificial Sequence
  Cyclic GFR-binding peptide
LNAISILYFIGKTPKILKKYRM

SEQ ID NO: 92180 - protein, 30 aa, Artificial Sequence; identical to SEQ ID NO: 10218
  Cyclic GFR-binding peptide
  MOD_RES (4)..(5): Xaa is C or S

SEQ ID NO: 92181 - protein, 26 aa, Artificial Sequence
  Cyclic GFR-binding peptide
VKTEPISMLYLDNGRVLLKFKYEMIV

SEQ ID NO: 92182 - protein, 32 aa, Artificial Sequence
  Cyclic GFR-binding peptide
  MOD_RES (30)..(32): Xaa is C or S
TKLSATSILYYDKGVVTYLRKHRGMAVSEXGX

SEQ ID NO: 92183 - protein, 33 aa, Artificial Sequence; identical to SEQ ID NO: 10219
  Cyclic GFR-binding peptide
  MOD_RES (1)..(2): Xaa is C or S

SEQ ID NO: 92184 - protein, 38 aa, Artificial Sequence; identical to SEQ ID NO: 10220
  Cyclic GFR-binding peptide
  MOD_RES (4)..(5)..(37): Xaa is C or S

SEQ ID NO: 92185 - protein, 30 aa, Artificial Sequence
  Cyclic GFR-binding peptide
  MOD_RES (27)..(29): Xaa is C or S
TSATSMLYYDNGRVLLLRKHRMIVEEXGXL

SEQ ID NO: 92186 - protein, 32 aa, Artificial Sequence; identical to SEQ ID NO: 39099
  Cyclic GFR-binding peptide
  MOD_RES (32)..(32): Xaa is C or S

SEQ ID NO: 92187 - protein, 39 aa, Artificial Sequence; identical to SEQ ID NO: 10222
  Cyclic GFR-binding peptide
  MOD_RES (3)..(4)..(36)..(38): Xaa is C or S

SEQ ID NO: 92188 - protein, 38 aa, Artificial Sequence; identical to SEQ ID NO: 10223
  Cyclic GFR-binding peptide
  MOD_RES (5)..(6)..(38): Xaa is C or S

SEQ ID NO: 92189 - protein, 25 aa, Artificial Sequence
  Cyclic GFR-binding peptide
VPTKLSPISILYKDKGVVTYLKYHY

SEQ ID NO: 92190 - protein, 35 aa, Artificial Sequence; identical to SEQ ID NO: 42021
  Cyclic GFR-binding peptide
  MOD_RES (1)..(33)..(35): Xaa is C or S

SEQ ID NO: 92191 - protein, 32 aa, Artificial Sequence; identical to SEQ ID NO: 10226
  Cyclic GFR-binding peptide
  MOD_RES (31)..(31): Xaa is C or S

SEQ ID NO: 92192 - protein, 25 aa, Artificial Sequence
  Cyclic GFR-binding peptide
SATSMLYYDEYDKVVLRKHREMVVE

SEQ ID NO: 92193 - protein, 30 aa, Artificial Sequence
  Cyclic GFR-binding peptide
  MOD_RES (29)..(29): Xaa is C or S
KMEPISMLYLNDKQQIIKFKYEGMVVDRXG

SEQ ID NO: 92194 - protein, 38 aa, Artificial Sequence; identical to SEQ ID NO: 10229
  Cyclic GFR-binding peptide
  MOD_RES (5)..(6)..(37): Xaa is C or S

SEQ ID NO: 92195 - protein, 32 aa, Artificial Sequence; identical to SEQ ID NO: 10230
  Cyclic GFR-binding peptide
  MOD_RES (4)..(5): Xaa is C or S

SEQ ID NO: 92196 - protein, 34 aa, Artificial Sequence; identical to SEQ ID NO: 39111
  Cyclic GFR-binding peptide
  MOD_RES (1)..(2): Xaa is C or S

SEQ ID NO: 92197 - protein, 29 aa, Artificial Sequence
  Cyclic GFR-binding peptide
  MOD_RES (26)..(28): Xaa is C or S
EPISILYLVGRKPKVKFKYEMIVRSXKXS

SEQ ID NO: 92198 - protein, 25 aa, Artificial Sequence
  Cyclic GFR-binding peptide
PTKLNAISILYFDKGVVTYLKKYRG

SEQ ID NO: 92199 - protein, 30 aa, Artificial Sequence; identical to SEQ ID NO: 20407
  Cyclic GFR-binding peptide

SEQ ID NO: 92200 - protein, 34 aa, Artificial Sequence
  Cyclic GFR-binding peptide
  MOD_RES (1)..(2)..(33): Xaa is C or S
XXAPVKTSPISMLYKDNGRVLLLKYHYMIVEEXG

SEQ ID NO: 92201 - protein, 33 aa, Artificial Sequence
  Cyclic GFR-binding peptide
  MOD_RES (4)..(5): Xaa is C or S
ASPXXVSQDLSPINILYFIGKTPKIYGKIPMIV

SEQ ID NO: 92202 - protein, 28 aa, Artificial Sequence
  Cyclic GFR-binding peptide
  MOD_RES (2)..(3): Xaa is C or S
PXXVSQDLEPISILYLIGKTPKIKFKYE

SEQ ID NO: 92203 - protein, 29 aa, Artificial Sequence
  Cyclic GFR-binding peptide
PVKTSPISMLYKDNGRVLLLKYHYMIVEE

SEQ ID NO: 92204 - protein, 22 aa, Artificial Sequence
  Cyclic GFR-binding peptide
LSPINILYFVGRTPKVYGKIPM

SEQ ID NO: 92205 - protein, 22 aa, Artificial Sequence
  Cyclic GFR-binding peptide
ELSPINMLYFDEYDKVVYGKIP

SEQ ID NO: 92206 - protein, 40 aa, Artificial Sequence; identical to SEQ ID NO: 42040
  Cyclic GFR-binding peptide
  MOD_RES (5)..(6)..(38)..(40): Xaa is C or S

SEQ ID NO: 92207 - protein, 33 aa, Artificial Sequence; identical to SEQ ID NO: 10240
  Cyclic GFR-binding peptide
  MOD_RES (1)..(33): Xaa is C or S

SEQ ID NO: 92208 - protein, 30 aa, Artificial Sequence; identical to SEQ ID NO: 10241
  Cyclic GFR-binding peptide

SEQ ID NO: 92209 - protein, 27 aa, Artificial Sequence
  Cyclic GFR-binding peptide
TKLNAISVLYFDSSNNVILKKYRNMVV

SEQ ID NO: 92210 - protein, 32 aa, Artificial Sequence; identical to SEQ ID NO: 42044
  Cyclic GFR-binding peptide
  MOD_RES (4)..(4): Xaa is C or S

SEQ ID NO: 92211 - protein, 32 aa, Artificial Sequence; identical to SEQ ID NO: 10247
  Cyclic GFR-binding peptide
  MOD_RES (29)..(31): Xaa is C or S

SEQ ID NO: 92212 - protein, 30 aa, Artificial Sequence; identical to SEQ ID NO: 39127
  Cyclic GFR-binding peptide
  MOD_RES (30)..(30): Xaa is C or S

SEQ ID NO: 92213 - protein, 28 aa, Artificial Sequence
  Cyclic GFR-binding peptide
PTKLEPISVLYLDSSNNVIKFKYENMVV

SEQ ID NO: 92214 - protein, 38 aa, Artificial Sequence
  Cyclic GFR-binding peptide
  MOD_RES (2)..(3)..(35)..(37): Xaa is C or S
TXXVPTRLSATSILYYDSANNVVLRKHRDMVVESXGXR

SEQ ID NO: 92215 - protein, 32 aa, Artificial Sequence; identical to SEQ ID NO: 39132
  Cyclic GFR-binding peptide
  MOD_RES (29)..(31): Xaa is C or S

SEQ ID NO: 92216 - protein, 32 aa, Artificial Sequence
  Cyclic GFR-binding peptide
  MOD_RES (1)..(1): Xaa is C or S
XTPTKMSATSMLYYNDKQQIILRKHRGMVVDR

SEQ ID NO: 92217 - protein, 35 aa, Artificial Sequence; identical to SEQ ID NO: 39134
  Cyclic GFR-binding peptide
  MOD_RES (4)..(5): Xaa is C or S

SEQ ID NO: 92218 - protein, 27 aa, Artificial Sequence
  Cyclic GFR-binding peptide
  MOD_RES (27)..(27): Xaa is C or S
LSATSILYYVGRTPKVLRKHRMVVKSX

SEQ ID NO: 92219 - protein, 25 aa, Artificial Sequence
  Cyclic GFR-binding peptide
SPISVLYKDSSNNVILKYHYNMVVK

SEQ ID NO: 92220 - protein, 29 aa, Artificial Sequence
  Cyclic GFR-binding peptide
  MOD_RES (28)..(28): Xaa is C or S
MSPISMLYKNDKQQIILKYHYGMVVDRXG

SEQ ID NO: 92221 - protein, 34 aa, Artificial Sequence
  Cyclic GFR-binding peptide
  MOD_RES (1)..(32)..(34): Xaa is C or S
XVSQDLSPINILYFIGKTPKIYGKIPMIVKSXKX

SEQ ID NO: 92222 - protein, 30 aa, Artificial Sequence; identical to SEQ ID NO: 42053
  Cyclic GFR-binding peptide
  MOD_RES (4)..(5): Xaa is C or S

SEQ ID NO: 92223 - protein, 31 aa, Artificial Sequence; identical to SEQ ID NO: 10261
  Cyclic GFR-binding peptide
  MOD_RES (5)..(6): Xaa is C or S

SEQ ID NO: 92224 - protein, 32 aa, Artificial Sequence; identical to SEQ ID NO: 10263
  Cyclic GFR-binding peptide
  MOD_RES (5)..(6): Xaa is C or S

SEQ ID NO: 92225 - protein, 37 aa, Artificial Sequence
  Cyclic GFR-binding peptide
  MOD_RES (5)..(6)..(37): Xaa is C or S
VPSTXXAPVKTSPISMLYKDNGRVLLLKYHYMIVEEX

SEQ ID NO: 92226 - protein, 31 aa, Artificial Sequence; identical to SEQ ID NO: 39141
  Cyclic GFR-binding peptide
  MOD_RES (30)..(30): Xaa is C or S

SEQ ID NO: 92227 - protein, 33 aa, Artificial Sequence; identical to SEQ ID NO: 39144
  Cyclic GFR-binding peptide
  MOD_RES (6)..(7): Xaa is C or S

SEQ ID NO: 92228 - protein, 31 aa, Artificial Sequence; identical to SEQ ID NO: 39145
  Cyclic GFR-binding peptide

SEQ ID NO: 92229 - protein, 36 aa, Artificial Sequence; identical to SEQ ID NO: 42060
  Cyclic GFR-binding peptide
  MOD_RES (4)..(5): Xaa is C or S

SEQ ID NO: 92230 - protein, 37 aa, Artificial Sequence
  Cyclic GFR-binding peptide
  MOD_RES (2)..(3)..(35)..(37): Xaa is C or S
PXXTPTKMEPISMLYLNDKQQIIKFKYEGMVVDRXGX

SEQ ID NO: 92231 - protein, 25 aa, Artificial Sequence
  Cyclic GFR-binding peptide
APTKLSPISVLYKDSSNNVILKYHY

SEQ ID NO: 92232 - protein, 25 aa, Artificial Sequence
  Cyclic GFR-binding peptide
KMEPISILYLDENKNVVKFKYENMT

SEQ ID NO: 92233 - protein, 31 aa, Artificial Sequence; identical to SEQ ID NO: 42067
  Cyclic GFR-binding peptide
  MOD_RES (4)..(5): Xaa is C or S

SEQ ID NO: 92234 - protein, 26 aa, Artificial Sequence
  Cyclic GFR-binding peptide
PTKMSATSMLYYNDKQQIILRKHRGM

SEQ ID NO: 92235 - protein, 38 aa, Artificial Sequence; identical to SEQ ID NO: 10274
  Cyclic GFR-binding peptide
  MOD_RES (3)..(4)..(36)..(38): Xaa is C or S

SEQ ID NO: 92236 - protein, 33 aa, Artificial Sequence; identical to SEQ ID NO: 10275
  Cyclic GFR-binding peptide
  MOD_RES (6)..(7): Xaa is C or S

SEQ ID NO: 92237 - protein, 40 aa, Artificial Sequence; identical to SEQ ID NO: 39154
  Cyclic GFR-binding peptide
  MOD_RES (6)..(7)..(39): Xaa is C or S

SEQ ID NO: 92238 - protein, 26 aa, Artificial Sequence
  Cyclic GFR-binding peptide
SQDLNAISILYFIGKTPKILKKYRMI

SEQ ID NO: 92239 - protein, 39 aa, Artificial Sequence; identical to SEQ ID NO: 10280
  Cyclic GFR-binding peptide
  MOD_RES (4)..(36)..(38): Xaa is C or S

SEQ ID NO: 92240 - protein, 29 aa, Artificial Sequence
  Cyclic GFR-binding peptide
  MOD_RES (3)..(4): Xaa is C or S
ASXXVPARLSPISILYKDAANNVVLKYHY

SEQ ID NO: 92241 - protein, 29 aa, Artificial Sequence
  Cyclic GFR-binding peptide
  MOD_RES (29)..(29): Xaa is C or S
KMSATSILYYDENKNVVLRKHRNMTVESX

SEQ ID NO: 92242 - protein, 24 aa, Artificial Sequence
  Cyclic GFR-binding peptide
RLNAISILYFDAANNVVLKKYRDM

SEQ ID NO: 92243 - protein, 39 aa, Artificial Sequence; identical to SEQ ID NO: 42071
  Cyclic GFR-binding peptide
  MOD_RES (4)..(5)..(37)..(39): Xaa is C or S

SEQ ID NO: 92244 - protein, 26 aa, Artificial Sequence
  Cyclic GFR-binding peptide
PTELSPINMLYFDEYDKVVYGKIPEM

SEQ ID NO: 92245 - protein, 28 aa, Artificial Sequence
  Cyclic GFR-binding peptide
  MOD_RES (27)..(27): Xaa is C or S
SATSVLYYDDSSNVILRKHRNMVVRAXG

SEQ ID NO: 92246 - protein, 37 aa, Artificial Sequence; identical to SEQ ID NO: 39161
  Cyclic GFR-binding peptide
  MOD_RES (3)..(4)..(36): Xaa is C or S

SEQ ID NO: 92247 - protein, 34 aa, Artificial Sequence; identical to SEQ ID NO: 42074
  Cyclic GFR-binding peptide
  MOD_RES (2)..(3): Xaa is C or S

SEQ ID NO: 92248 - protein, 21 aa, Artificial Sequence
  Cyclic GFR-binding peptide
LSATSILYYDSANNVVLRKHR

SEQ ID NO: 92249 - protein, 26 aa, Artificial Sequence
  Cyclic GFR-binding peptide
  MOD_RES (1)..(1): Xaa is C or S
XVPARLSPISILYKDAANNVVLKYHY

SEQ ID NO: 92250 - protein, 39 aa, Artificial Sequence; identical to SEQ ID NO: 10286
  Cyclic GFR-binding peptide
  MOD_RES (4)..(5)..(37)..(39): Xaa is C or S

SEQ ID NO: 92251 - protein, 32 aa, Artificial Sequence; identical to SEQ ID NO: 42080
  Cyclic GFR-binding peptide
  MOD_RES (4)..(5): Xaa is C or S

SEQ ID NO: 92252 - protein, 27 aa, Artificial Sequence
  Cyclic GFR-binding peptide
VPQALSATSILYYVGRKPKVLRKHRMI

SEQ ID NO: 92253 - protein, 34 aa, Artificial Sequence; identical to SEQ ID NO: 10289
  Cyclic GFR-binding peptide
  MOD_RES (2)..(3): Xaa is C or S

SEQ ID NO: 92254 - protein, 33 aa, Artificial Sequence; identical to SEQ ID NO: 10291
  Cyclic GFR-binding peptide
  MOD_RES (2)..(3): Xaa is C or S

SEQ ID NO: 92255 - protein, 31 aa, Artificial Sequence; identical to SEQ ID NO: 10294
  Cyclic GFR-binding peptide
  MOD_RES (28)..(30): Xaa is C or S

SEQ ID NO: 92256 - protein, 29 aa, Artificial Sequence
  Cyclic GFR-binding peptide
  MOD_RES (26)..(28): Xaa is C or S
SPINILYFIGKTPKIYGKIPMIVKSXKXS

SEQ ID NO: 92257 - protein, 27 aa, Artificial Sequence
  Cyclic GFR-binding peptide
APTKLNAISVLYFDSSNNVILKKYRNM

SEQ ID NO: 92258 - protein, 32 aa, Artificial Sequence; identical to SEQ ID NO: 10296
  Cyclic GFR-binding peptide
  MOD_RES (29)..(31): Xaa is C or S

SEQ ID NO: 92259 - protein, 35 aa, Artificial Sequence; identical to SEQ ID NO: 10298
  Cyclic GFR-binding peptide
  MOD_RES (3)..(4): Xaa is C or S

SEQ ID NO: 92260 - protein, 35 aa, Artificial Sequence
  Cyclic GFR-binding peptide
  MOD_RES (2)..(3)..(35): Xaa is C or S
PXXVPEKMSPINILYFDENKNVVYGKIPNMTVESX

SEQ ID NO: 92261 - protein, 33 aa, Artificial Sequence
  Cyclic GFR-binding peptide
  MOD_RES (31)..(33): Xaa is C or S
PTKMSATSMLYYNDKQQIILRKHRGMVVDRXGX

SEQ ID NO: 92262 - protein, 26 aa, Artificial Sequence
  Cyclic GFR-binding peptide
VPQDLSPISILYKVGRTPKVLKYHYM

SEQ ID NO: 92263 - protein, 35 aa, Artificial Sequence; identical to SEQ ID NO: 10300
  Cyclic GFR-binding peptide
  MOD_RES (4)..(5): Xaa is C or S

SEQ ID NO: 92264 - protein, 35 aa, Artificial Sequence; identical to SEQ ID NO: 42095
  Cyclic GFR-binding peptide
  MOD_RES (2)..(3): Xaa is C or S

SEQ ID NO: 92265 - protein, 20 aa, Artificial Sequence
  Cyclic GFR-binding peptide
SPINMLYFDENEKVVYGKIP

SEQ ID NO: 92266 - protein, 24 aa, Artificial Sequence
  Cyclic GFR-binding peptide
SPINVLYFDDSSNVIYGKIPNMVV

SEQ ID NO: 92267 - protein, 29 aa, Artificial Sequence
  Cyclic GFR-binding peptide
  MOD_RES (1)..(1): Xaa is C or S
XVPQALSPINILYFVGRKPKVYGKIPMIV

SEQ ID NO: 92268 - protein, 38 aa, Artificial Sequence
  Cyclic GFR-binding peptide
  MOD_RES (5)..(6)..(37): Xaa is C or S
SASPXXVPQDLSPINILYFVGRTPKVYGKIPMVVKSXK

SEQ ID NO: 92269 - protein, 25 aa, Artificial Sequence
  Cyclic GFR-binding peptide
MSATSILYYDENKNVVLRKHRNMTV

SEQ ID NO: 92270 - protein, 37 aa, Artificial Sequence; identical to SEQ ID NO: 39181
  Cyclic GFR-binding peptide
  MOD_RES (6)..(7): Xaa is C or S

SEQ ID NO: 92271 - protein, 39 aa, Artificial Sequence
  Cyclic GFR-binding peptide
  MOD_RES (4)..(5)..(36)..(38): Xaa is C or S
ASPXXVPQDLSPINILYFVGRTPKVYGKIPMVVKSXKXS

SEQ ID NO: 92272 - protein, 24 aa, Artificial Sequence
  Cyclic GFR-binding peptide
LSPISILYKIGKTPKILKYHYMIV

SEQ ID NO: 92273 - protein, 29 aa, Artificial Sequence
  Cyclic GFR-binding peptide
  MOD_RES (28)..(28): Xaa is C or S
KTNAISMLYFDNGRVLLLKKYRMIVEEXG

SEQ ID NO: 92274 - protein, 30 aa, Artificial Sequence; identical to SEQ ID NO: 10305
  Cyclic GFR-binding peptide
  MOD_RES (4)..(4): Xaa is C or S

SEQ ID NO: 92275 - protein, 26 aa, Artificial Sequence
  Cyclic GFR-binding peptide
VPARLSATSILYYDAANNVVLRKHRD

SEQ ID NO: 92276 - protein, 27 aa, Artificial Sequence
  Cyclic GFR-binding peptide
  MOD_RES (1)..(2): Xaa is C or S
XXVPEKMSPISILYKDENKNVVLKYHY

SEQ ID NO: 92277 - protein, 35 aa, Artificial Sequence; identical to SEQ ID NO: 42110
  Cyclic GFR-binding peptide
  MOD_RES (1)..(2)..(33)..(35): Xaa is C or S

SEQ ID NO: 92278 - protein, 35 aa, Artificial Sequence; identical to SEQ ID NO: 10308
  Cyclic GFR-binding peptide
  MOD_RES (2)..(3): Xaa is C or S

SEQ ID NO: 92279 - protein, 35 aa, Artificial Sequence; identical to SEQ ID NO: 20470
  Cyclic GFR-binding peptide
  MOD_RES (6)..(7): Xaa is C or S

SEQ ID NO: 92280 - protein, 33 aa, Artificial Sequence; identical to SEQ ID NO: 10310
  Cyclic GFR-binding peptide
  MOD_RES (1)..(33): Xaa is C or S

SEQ ID NO: 92281 - protein, 29 aa, Artificial Sequence
  Cyclic GFR-binding peptide
  MOD_RES (3)..(4): Xaa is C or S
APXXVPQALSPINILYFVGRKPKVYGKIP

SEQ ID NO: 92282 - protein, 29 aa, Artificial Sequence
  Cyclic GFR-binding peptide
  MOD_RES (1)..(2): Xaa is C or S
XXVPTRLSPINILYFDSANNVVYGKIPDM

SEQ ID NO: 92283 - protein, 27 aa, Artificial Sequence
  Cyclic GFR-binding peptide
TKLSATSVLYYDDMGVPTLRKHREGMS

SEQ ID NO: 92284 - protein, 26 aa, Artificial Sequence
  Cyclic GFR-binding peptide
  MOD_RES (1)..(1): Xaa is C or S
XVPEKMEPISILYLDENKNVVKFKYE

SEQ ID NO: 92285 - protein, 31 aa, Artificial Sequence; identical to SEQ ID NO: 39191
  Cyclic GFR-binding peptide
  MOD_RES (5)..(5): Xaa is C or S

SEQ ID NO: 92286 - protein, 27 aa, Artificial Sequence
  Cyclic GFR-binding peptide
  MOD_RES (1)..(2): Xaa is C or S
XXAPTKLEPISVLYLDSSNNVIKFKYE

SEQ ID NO: 92287 - protein, 33 aa, Artificial Sequence
  Cyclic GFR-binding peptide
  MOD_RES (1)..(2): Xaa is C or S
XXVPTRLEPISILYLDSANNVVKFKYEDMVVES

SEQ ID NO: 92288 - protein, 25 aa, Artificial Sequence
  Cyclic GFR-binding peptide
PTKLSPINVLYFDDSSNVIYGKIPN

SEQ ID NO: 92289 - protein, 37 aa, Artificial Sequence
  Cyclic GFR-binding peptide
  MOD_RES (4)..(5)..(36): Xaa is C or S
AAPXXVPQALSPINILYFVGRKPKVYGKIPMIVRSXK

SEQ ID NO: 92290 - protein, 31 aa, Artificial Sequence
  Cyclic GFR-binding peptide
  MOD_RES (5)..(6): Xaa is C or S
APASXXVPARLSATSILYYDAANNVVLRKHR

SEQ ID NO: 92291 - protein, 29 aa, Artificial Sequence
  Cyclic GFR-binding peptide
  MOD_RES (28)..(28): Xaa is C or S
KTSPISMLYKDNGRVLLLKYHYMIVEEXG

SEQ ID NO: 92292 - protein, 35 aa, Artificial Sequence; identical to SEQ ID NO: 39196
  Cyclic GFR-binding peptide
  MOD_RES (4)..(5): Xaa is C or S

SEQ ID NO: 92293 - protein, 35 aa, Artificial Sequence; identical to SEQ ID NO: 39197
  Cyclic GFR-binding peptide
  MOD_RES (5)..(6): Xaa is C or S

SEQ ID NO: 92294 - protein, 38 aa, Artificial Sequence; identical to SEQ ID NO: 42130
  Cyclic GFR-binding peptide
  MOD_RES (3)..(4)..(36)..(38): Xaa is C or S

SEQ ID NO: 92295 - protein, 30 aa, Artificial Sequence
  Cyclic GFR-binding peptide
PTKMSATSMLYYNDKQQIILRKHRGMVVDR

SEQ ID NO: 92296 - protein, 25 aa, Artificial Sequence
  Cyclic GFR-binding peptide
TKMEPISMLYLNDKQQIIKFKYEGM

SEQ ID NO: 92297 - protein, 34 aa, Artificial Sequence
  Cyclic GFR-binding peptide
  MOD_RES (1)..(32)..(34): Xaa is C or S
XAPVKTSATSMLYYDNGRVLLLRKHRMIVEEXGX

SEQ ID NO: 92298 - protein, 31 aa, Artificial Sequence
  Cyclic GFR-binding peptide
VPTKLSATSILYYDKGVVTYLRKHRGMAVSE

SEQ ID NO: 92299 - protein, 21 aa, Artificial Sequence
  Cyclic GFR-binding peptide
SPISMLYKDEYDKVVLKYHYE

SEQ ID NO: 92300 - protein, 28 aa, Artificial Sequence
  Cyclic GFR-binding peptide
  MOD_RES (27)..(27): Xaa is C or S
LSATSILYYVGRTPKVLRKHRMVVKSXK

SEQ ID NO: 92301 - protein, 39 aa, Artificial Sequence
  Cyclic GFR-binding peptide
  MOD_RES (3)..(4)..(36)..(38): Xaa is C or S
EPXXVPEKMSPISILYKDENKNVVLKYHYNMTVESXAXR

SEQ ID NO: 92302 - protein, 24 aa, Artificial Sequence
  Cyclic GFR-binding peptide
QLSPINVLYFDDSSNVIYGKIPNM

SEQ ID NO: 92303 - protein, 33 aa, Artificial Sequence; identical to SEQ ID NO: 10326
  Cyclic GFR-binding peptide
  MOD_RES (3)..(4): Xaa is C or S

SEQ ID NO: 92304 - protein, 40 aa, Artificial Sequence; identical to SEQ ID NO: 10328
  Cyclic GFR-binding peptide
  MOD_RES (5)..(6)..(38)..(40): Xaa is C or S

SEQ ID NO: 92305 - protein, 21 aa, Artificial Sequence
  Cyclic GFR-binding peptide
LSATSVLYYDDMGVPTLRKHR

SEQ ID NO: 92306 - protein, 32 aa, Artificial Sequence; identical to SEQ ID NO: 42149
  Cyclic GFR-binding peptide
  MOD_RES (29)..(31): Xaa is C or S

SEQ ID NO: 92307 - protein, 39 aa, Artificial Sequence; identical to SEQ ID NO: 39210
  Cyclic GFR-binding peptide
  MOD_RES (3)..(4)..(36)..(38): Xaa is C or S

SEQ ID NO: 92308 - protein, 32 aa, Artificial Sequence
  Cyclic GFR-binding peptide
  MOD_RES (2)..(3): Xaa is C or S
PXXTPTKMSPISMLYKNDKQQIILKYHYGMVV

SEQ ID NO: 92309 - protein, 42 aa, Artificial Sequence; identical to SEQ ID NO: 20500
  Cyclic GFR-binding peptide
  MOD_RES (6)..(7)..(39)..(41): Xaa is C or S

SEQ ID NO: 92310 - protein, 32 aa, Artificial Sequence; identical to SEQ ID NO: 10333
  Cyclic GFR-binding peptide
  MOD_RES (3)..(4): Xaa is C or S

SEQ ID NO: 92311 - protein, 31 aa, Artificial Sequence; identical to SEQ ID NO: 42155
  Cyclic GFR-binding peptide
  MOD_RES (3)..(4): Xaa is C or S

SEQ ID NO: 92312 - protein, 33 aa, Artificial Sequence; identical to SEQ ID NO: 39212
  Cyclic GFR-binding peptide
  MOD_RES (32)..(32): Xaa is C or S

SEQ ID NO: 92313 - protein, 37 aa, Artificial Sequence; identical to SEQ ID NO: 39214
  Cyclic GFR-binding peptide
  MOD_RES (1)..(2)..(34)..(36): Xaa is C or S

SEQ ID NO: 92314 - protein, 37 aa, Artificial Sequence; identical to SEQ ID NO: 10337
  Cyclic GFR-binding peptide
  MOD_RES (2)..(3)..(34)..(36): Xaa is C or S

SEQ ID NO: 92315 - protein, 32 aa, Artificial Sequence; identical to SEQ ID NO: 39218
  Cyclic GFR-binding peptide
  MOD_RES (30)..(32): Xaa is C or S

SEQ ID NO: 92316 - protein, 28 aa, Artificial Sequence
  Cyclic GFR-binding peptide
PVKTSPINMLYFDNGRVLLYGKIPMIVE

SEQ ID NO: 92317 - protein, 26 aa, Artificial Sequence
  Cyclic GFR-binding peptide
  MOD_RES (1)..(1): Xaa is C or S
XVPQALSPINILYFVGRKPKVYGKIP

SEQ ID NO: 92318 - protein, 28 aa, Artificial Sequence
  Cyclic GFR-binding peptide
  MOD_RES (27)..(27): Xaa is C or S
EPISVLYLDSSNNVIKFKYENMVVKAXG

SEQ ID NO: 92319 - protein, 30 aa, Artificial Sequence; identical to SEQ ID NO: 10340
  Cyclic GFR-binding peptide
  MOD_RES (30)..(30): Xaa is C or S

SEQ ID NO: 92320 - protein, 30 aa, Artificial Sequence; identical to SEQ ID NO: 10343
  Cyclic GFR-binding peptide

SEQ ID NO: 92321 - protein, 36 aa, Artificial Sequence; identical to SEQ ID NO: 42176
  Cyclic GFR-binding peptide
  MOD_RES (3)..(4)..(36): Xaa is C or S

SEQ ID NO: 92322 - protein, 22 aa, Artificial Sequence
  Cyclic GFR-binding peptide
LNAISMLYFDENEKVVLKKYRD

SEQ ID NO: 92323 - protein, 23 aa, Artificial Sequence
  Cyclic GFR-binding peptide
TRLSPISILYKDSANNVVLKYHY

SEQ ID NO: 92324 - protein, 29 aa, Artificial Sequence
  Cyclic GFR-binding peptide
  MOD_RES (1)..(1): Xaa is C or S
XTPTKMNAISMLYFNDKQQIILKKYRGMV

SEQ ID NO: 92325 - protein, 38 aa, Artificial Sequence
  Cyclic GFR-binding peptide
  MOD_RES (6)..(7): Xaa is C or S
GSAGPXXTPTKMEPISMLYLNDKQQIIKFKYEGMVVDR

SEQ ID NO: 92326 - protein, 23 aa, Artificial Sequence
  Cyclic GFR-binding peptide
SPINILYFVGRTPKVYGKIPMVV

SEQ ID NO: 92327 - protein, 32 aa, Artificial Sequence; identical to SEQ ID NO: 10348
  Cyclic GFR-binding peptide
  MOD_RES (3)..(4): Xaa is C or S

SEQ ID NO: 92328 - protein, 22 aa, Artificial Sequence
  Cyclic GFR-binding peptide
KMSPINILYFDENKNVVYGKIP

SEQ ID NO: 92329 - protein, 34 aa, Artificial Sequence; identical to SEQ ID NO: 39226
  Cyclic GFR-binding peptide
  MOD_RES (1)..(2)..(33): Xaa is C or S

SEQ ID NO: 92330 - protein, 32 aa, Artificial Sequence; identical to SEQ ID NO: 42182
  Cyclic GFR-binding peptide
  MOD_RES (1)..(2): Xaa is C or S

SEQ ID NO: 92331 - protein, 29 aa, Artificial Sequence
  Cyclic GFR-binding peptide
  MOD_RES (2)..(3): Xaa is C or S
AXXAPTKLSPINVLYFDSSNNVIYGKIPN

SEQ ID NO: 92332 - protein, 30 aa, Artificial Sequence; identical to SEQ ID NO: 10349
  Cyclic GFR-binding peptide
  MOD_RES (1)..(2): Xaa is C or S

SEQ ID NO: 92333 - protein, 28 aa, Artificial Sequence
  Cyclic GFR-binding peptide
APVKTSPINMLYFDNGRVLLYGKIPMIV

SEQ ID NO: 92334 - protein, 30 aa, Artificial Sequence; identical to SEQ ID NO: 42188
  Cyclic GFR-binding peptide
  MOD_RES (1)..(2): Xaa is C or S

SEQ ID NO: 92335 - protein, 29 aa, Artificial Sequence
  Cyclic GFR-binding peptide
PTELNAISMLYFDENEKVVLKKYRDMVVE

SEQ ID NO: 92336 - protein, 32 aa, Artificial Sequence; identical to SEQ ID NO: 39237
  Cyclic GFR-binding peptide
  MOD_RES (4)..(5): Xaa is C or S

SEQ ID NO: 92337 - protein, 35 aa, Artificial Sequence; identical to SEQ ID NO: 39238
  Cyclic GFR-binding peptide
  MOD_RES (1)..(32)..(34): Xaa is C or S

SEQ ID NO: 92338 - protein, 34 aa, Artificial Sequence
  Cyclic GFR-binding peptide
  MOD_RES (31)..(33): Xaa is C or S
APVKTSPINMLYFDNGRVLLYGKIPMIVEEXGXL

SEQ ID NO: 92339 - protein, 38 aa, Artificial Sequence; identical to SEQ ID NO: 10359
  Cyclic GFR-binding peptide
  MOD_RES (1)..(2)..(35)..(37): Xaa is C or S

SEQ ID NO: 92340 - protein, 33 aa, Artificial Sequence; identical to SEQ ID NO: 39242
  Cyclic GFR-binding peptide
  MOD_RES (6)..(7): Xaa is C or S

SEQ ID NO: 92341 - protein, 31 aa, Artificial Sequence
  Cyclic GFR-binding peptide
  MOD_RES (5)..(6): Xaa is C or S
VPSTXXAPVKTSATSMLYYDNGRVLLLRKHR

SEQ ID NO: 92342 - protein, 26 aa, Artificial Sequence
  Cyclic GFR-binding peptide
TELEPISMLYLDEYDKVVKFKYEEMV

SEQ ID NO: 92343 - protein, 33 aa, Artificial Sequence; identical to SEQ ID NO: 39244
  Cyclic GFR-binding peptide
  MOD_RES (30)..(32): Xaa is C or S

SEQ ID NO: 92344 - protein, 34 aa, Artificial Sequence; identical to SEQ ID NO: 10363
  Cyclic GFR-binding peptide
  MOD_RES (2)..(3)..(34): Xaa is C or S

SEQ ID NO: 92345 - protein, 30 aa, Artificial Sequence
  Cyclic GFR-binding peptide
  MOD_RES (1)..(2): Xaa is C or S
XXAPVKTSATSMLYYDNGRVLLLRKHRMIV

SEQ ID NO: 92346 - protein, 40 aa, Artificial Sequence; identical to SEQ ID NO: 39250
  Cyclic GFR-binding peptide
  MOD_RES (5)..(6)..(39): Xaa is C or S

SEQ ID NO: 92347 - protein, 24 aa, Artificial Sequence
  Cyclic GFR-binding peptide
PQALSPINILYFVGRKPKVYGKIP

SEQ ID NO: 92348 - protein, 30 aa, Artificial Sequence; identical to SEQ ID NO: 10368
  Cyclic GFR-binding peptide
  MOD_RES (2)..(3): Xaa is C or S

SEQ ID NO: 92349 - protein, 23 aa, Artificial Sequence
  Cyclic GFR-binding peptide
TKLSPISVLYKDSSNNVILKYHY

SEQ ID NO: 92350 - protein, 33 aa, Artificial Sequence
  Cyclic GFR-binding peptide
  MOD_RES (6)..(7): Xaa is C or S
GSAGPXXTPTKMSPISMLYKNDKQQIILKYHYG

SEQ ID NO: 92351 - protein, 34 aa, Artificial Sequence; identical to SEQ ID NO: 39253
  Cyclic GFR-binding peptide
  MOD_RES (5)..(6): Xaa is C or S

SEQ ID NO: 92352 - protein, 24 aa, Artificial Sequence
  Cyclic GFR-binding peptide
KLNAISVLYFDSSNNVILKKYRNM

SEQ ID NO: 92353 - protein, 33 aa, Artificial Sequence; identical to SEQ ID NO: 10374
  Cyclic GFR-binding peptide
  MOD_RES (1)..(33): Xaa is C or S

SEQ ID NO: 92354 - protein, 29 aa, Artificial Sequence
  Cyclic GFR-binding peptide
  MOD_RES (28)..(28): Xaa is C or S
LNAISMLYFDEYDKVVLKKYREMVVEGXG

SEQ ID NO: 92355 - protein, 30 aa, Artificial Sequence; identical to SEQ ID NO: 10376
  Cyclic GFR-binding peptide
  MOD_RES (30)..(30): Xaa is C or S

SEQ ID NO: 92356 - protein, 25 aa, Artificial Sequence
  Cyclic GFR-binding peptide
QDLEPISILYLIGKTPKIKFKYEMI

SEQ ID NO: 92357 - protein, 35 aa, Artificial Sequence; identical to SEQ ID NO: 42214
  Cyclic GFR-binding peptide
  MOD_RES (1)..(2)..(34): Xaa is C or S

SEQ ID NO: 92358 - protein, 26 aa, Artificial Sequence
  Cyclic GFR-binding peptide
KLSPINVLYFDDSSNVIYGKIPNMVV

SEQ ID NO: 92359 - protein, 31 aa, Artificial Sequence
  Cyclic GFR-binding peptide
  MOD_RES (2)..(3): Xaa is C or S
TXXVPTRLSPISILYKDSANNVVLKYHYDMV

SEQ ID NO: 92360 - protein, 27 aa, Artificial Sequence
  Cyclic GFR-binding peptide
  MOD_RES (1)..(2): Xaa is C or S
XXTPTKMEPISMLYLNDKQQIIKFKYE

SEQ ID NO: 92361 - protein, 25 aa, Artificial Sequence
  Cyclic GFR-binding peptide
PTKLSPINVLYFDDMGVPTYGKIPE

SEQ ID NO: 92362 - protein, 30 aa, Artificial Sequence
  Cyclic GFR-binding peptide
  MOD_RES (2)..(3): Xaa is C or S
PXXTPTKMSPISMLYKNDKQQIILKYHYGM

SEQ ID NO: 92363 - protein, 30 aa, Artificial Sequence; identical to SEQ ID NO: 39265
  Cyclic GFR-binding peptide
  MOD_RES (28)..(30): Xaa is C or S

SEQ ID NO: 92364 - protein, 34 aa, Artificial Sequence; identical to SEQ ID NO: 10387
  Cyclic GFR-binding peptide
  MOD_RES (1)..(33): Xaa is C or S

SEQ ID NO: 92365 - protein, 33 aa, Artificial Sequence; identical to SEQ ID NO: 10388
  Cyclic GFR-binding peptide
  MOD_RES (1)..(2)..(33): Xaa is C or S

SEQ ID NO: 92366 - protein, 27 aa, Artificial Sequence
  Cyclic GFR-binding peptide
LEPISVLYLDDSSNVIKFKYENMVVRA

SEQ ID NO: 92367 - protein, 36 aa, Artificial Sequence; identical to SEQ ID NO: 42230
  Cyclic GFR-binding peptide
  MOD_RES (1)..(33)..(35): Xaa is C or S

SEQ ID NO: 92368 - protein, 39 aa, Artificial Sequence; identical to SEQ ID NO: 39275
  Cyclic GFR-binding peptide
  MOD_RES (5)..(6)..(38): Xaa is C or S

SEQ ID NO: 92369 - protein, 30 aa, Artificial Sequence
  Cyclic GFR-binding peptide
APVKTEPISMLYLDNGRVLLKFKYEMIVEE

SEQ ID NO: 92370 - protein, 31 aa, Artificial Sequence; identical to SEQ ID NO: 39277
  Cyclic GFR-binding peptide
  MOD_RES (30)..(30): Xaa is C or S

SEQ ID NO: 92371 - protein, 32 aa, Artificial Sequence
  Cyclic GFR-binding peptide
  MOD_RES (1)..(1): Xaa is C or S
XVPEKMSATSILYYDENKNVVLRKHRNMTVES

SEQ ID NO: 92372 - protein, 34 aa, Artificial Sequence; identical to SEQ ID NO: 39282
  Cyclic GFR-binding peptide
  MOD_RES (3)..(4): Xaa is C or S

SEQ ID NO: 92373 - protein, 28 aa, Artificial Sequence
  Cyclic GFR-binding peptide
VPEKMSATSILYYDENKNVVLRKHRNMT

SEQ ID NO: 92374 - protein, 33 aa, Artificial Sequence
  Cyclic GFR-binding peptide
  MOD_RES (30)..(32): Xaa is C or S
EKMNAISILYFDENKNVVLKKYRNMTVESXAXR

SEQ ID NO: 92375 - protein, 25 aa, Artificial Sequence
  Cyclic GFR-binding peptide
VPARLSPISILYKDAANNVVLKYHY

SEQ ID NO: 92376 - protein, 34 aa, Artificial Sequence; identical to SEQ ID NO: 42239
  Cyclic GFR-binding peptide
  MOD_RES (5)..(6): Xaa is C or S

SEQ ID NO: 92377 - protein, 33 aa, Artificial Sequence
  Cyclic GFR-binding peptide
  MOD_RES (5)..(6): Xaa is C or S
SAGPXXTPTKMEPISMLYLNDKQQIIKFKYEGM

SEQ ID NO: 92378 - protein, 22 aa, Artificial Sequence
  Cyclic GFR-binding peptide
LEPISVLYLDDMGVPTKFKYEE

SEQ ID NO: 92379 - protein, 35 aa, Artificial Sequence
  Cyclic GFR-binding peptide
  MOD_RES (4)..(5): Xaa is C or S
PSTXXAPVKTEPISMLYLDNGRVLLKFKYEMIVEE

SEQ ID NO: 92380 - protein, 29 aa, Artificial Sequence
  Cyclic GFR-binding peptide
TRLSATSILYYDSANNVVLRKHRDMVVES

SEQ ID NO: 92381 - protein, 24 aa, Artificial Sequence
  Cyclic GFR-binding peptide
SPISILYKDENKNVVLKYHYNMTV

SEQ ID NO: 92382 - protein, 27 aa, Artificial Sequence
  Cyclic GFR-binding peptide
TRLSATSILYYDSANNVVLRKHRDMVV

SEQ ID NO: 92383 - protein, 35 aa, Artificial Sequence; identical to SEQ ID NO: 39291
  Cyclic GFR-binding peptide
  MOD_RES (5)..(6): Xaa is C or S

SEQ ID NO: 92384 - protein, 31 aa, Artificial Sequence; identical to SEQ ID NO: 10405
  Cyclic GFR-binding peptide
  MOD_RES (1)..(1): Xaa is C or S

SEQ ID NO: 92385 - protein, 38 aa, Artificial Sequence; identical to SEQ ID NO: 42249
  Cyclic GFR-binding peptide
  MOD_RES (4)..(5)..(37): Xaa is C or S

SEQ ID NO: 92386 - protein, 27 aa, Artificial Sequence
  Cyclic GFR-binding peptide
KTSPINMLYFDNGRVLLYGKIPMIVEE

SEQ ID NO: 92387 - protein, 36 aa, Artificial Sequence; identical to SEQ ID NO: 10409
  Cyclic GFR-binding peptide
  MOD_RES (4)..(36): Xaa is C or S

SEQ ID NO: 92388 - protein, 28 aa, Artificial Sequence
  Cyclic GFR-binding peptide
  MOD_RES (28)..(28): Xaa is C or S
KTSPISMLYKDNGRVLLLKYHYMIVEEX

SEQ ID NO: 92389 - protein, 24 aa, Artificial Sequence
  Cyclic GFR-binding peptide
ALSPISILYKVGRKPKVLKYHYMI

SEQ ID NO: 92390 - protein, 31 aa, Artificial Sequence
  Cyclic GFR-binding peptide
  MOD_RES (30)..(30): Xaa is C or S
TKLSATSILYYDKGVVTYLRKHRGMAVSEXG

SEQ ID NO: 92391 - protein, 25 aa, Artificial Sequence
  Cyclic GFR-binding peptide
VPARLSPINILYFDAANNVVYGKIP

SEQ ID NO: 92392 - protein, 40 aa, Artificial Sequence; identical to SEQ ID NO: 42262
  Cyclic GFR-binding peptide
  MOD_RES (6)..(7)..(39): Xaa is C or S

SEQ ID NO: 92393 - protein, 31 aa, Artificial Sequence; identical to SEQ ID NO: 39303
  Cyclic GFR-binding peptide
  MOD_RES (28)..(30): Xaa is C or S

SEQ ID NO: 92394 - protein, 25 aa, Artificial Sequence
  Cyclic GFR-binding peptide
TQLEPISVLYLDDSSNVIKFKYENM

SEQ ID NO: 92395 - protein, 34 aa, Artificial Sequence; identical to SEQ ID NO: 10416
  Cyclic GFR-binding peptide
  MOD_RES (6)..(7): Xaa is C or S

SEQ ID NO: 92396 - protein, 32 aa, Artificial Sequence; identical to SEQ ID NO: 10419
  Cyclic GFR-binding peptide
  MOD_RES (30)..(32): Xaa is C or S

SEQ ID NO: 92397 - protein, 28 aa, Artificial Sequence
  Cyclic GFR-binding peptide
  MOD_RES (27)..(27): Xaa is C or S
SPISMLYKDENEKVVLKYHYDMVVEGXG

SEQ ID NO: 92398 - protein, 34 aa, Artificial Sequence; identical to SEQ ID NO: 10422
  Cyclic GFR-binding peptide
  MOD_RES (1)..(33): Xaa is C or S

SEQ ID NO: 92399 - protein, 29 aa, Artificial Sequence
  Cyclic GFR-binding peptide
  MOD_RES (1)..(1): Xaa is C or S
XVPTELSATSMLYYDEYDKVVLRKHREMV

SEQ ID NO: 92400 - protein, 36 aa, Artificial Sequence; identical to SEQ ID NO: 39311
  Cyclic GFR-binding peptide
  MOD_RES (5)..(6): Xaa is C or S

SEQ ID NO: 92401 - protein, 28 aa, Artificial Sequence
  Cyclic GFR-binding peptide
  MOD_RES (1)..(1): Xaa is C or S
XVPTELSPINMLYFDENEKVVYGKIPDM

SEQ ID NO: 92402 - protein, 36 aa, Artificial Sequence; identical to SEQ ID NO: 10425
  Cyclic GFR-binding peptide
  MOD_RES (1)..(2)..(33)..(35): Xaa is C or S

SEQ ID NO: 92403 - protein, 38 aa, Artificial Sequence; identical to SEQ ID NO: 39313
  Cyclic GFR-binding peptide
  MOD_RES (5)..(6)..(38): Xaa is C or S

SEQ ID NO: 92404 - protein, 28 aa, Artificial Sequence
  Cyclic GFR-binding peptide
VPARLEPISILYLDAANNVVKFKYEDMV

SEQ ID NO: 92405 - protein, 27 aa, Artificial Sequence
  Cyclic GFR-binding peptide
RLSPISILYKDSANNVVLKYHYDMVVE

SEQ ID NO: 92406 - protein, 34 aa, Artificial Sequence; identical to SEQ ID NO: 10428
  Cyclic GFR-binding peptide
  MOD_RES (4)..(5): Xaa is C or S

SEQ ID NO: 92407 - protein, 30 aa, Artificial Sequence; identical to SEQ ID NO: 39317
  Cyclic GFR-binding peptide
  MOD_RES (27)..(29): Xaa is C or S

SEQ ID NO: 92408 - protein, 37 aa, Artificial Sequence; identical to SEQ ID NO: 42280
  Cyclic GFR-binding peptide
  MOD_RES (4)..(5): Xaa is C or S

SEQ ID NO: 92409 - protein, 33 aa, Artificial Sequence
  Cyclic GFR-binding peptide
  MOD_RES (2)..(3): Xaa is C or S
PXXVPQALSPINILYFVGRKPKVYGKIPMIVRS

SEQ ID NO: 92410 - protein, 35 aa, Artificial Sequence; identical to SEQ ID NO: 42281
  Cyclic GFR-binding peptide
  MOD_RES (5)..(6): Xaa is C or S

SEQ ID NO: 92411 - protein, 32 aa, Artificial Sequence; identical to SEQ ID NO: 10434
  Cyclic GFR-binding peptide
  MOD_RES (30)..(32): Xaa is C or S

SEQ ID NO: 92412 - protein, 30 aa, Artificial Sequence; identical to SEQ ID NO: 10435
  Cyclic GFR-binding peptide
  MOD_RES (1)..(1): Xaa is C or S

SEQ ID NO: 92413 - protein, 34 aa, Artificial Sequence; identical to SEQ ID NO: 10436
  Cyclic GFR-binding peptide
  MOD_RES (32)..(34): Xaa is C or S

SEQ ID NO: 92414 - protein, 23 aa, Artificial Sequence
  Cyclic GFR-binding peptide
TKLEPISVLYLDDMGVPTKFKYE

SEQ ID NO: 92415 - protein, 34 aa, Artificial Sequence; identical to SEQ ID NO: 39327
  Cyclic GFR-binding peptide
  MOD_RES (32)..(34): Xaa is C or S

SEQ ID NO: 92416 - protein, 33 aa, Artificial Sequence; identical to SEQ ID NO: 10445
  Cyclic GFR-binding peptide
  MOD_RES (4)..(5): Xaa is C or S

SEQ ID NO: 92417 - protein, 29 aa, Artificial Sequence
  Cyclic GFR-binding peptide
  MOD_RES (3)..(4): Xaa is C or S
KAXXVPTELEPISMLYLDENEKVVKFKYE

SEQ ID NO: 92418 - protein, 30 aa, Artificial Sequence; identical to SEQ ID NO: 42294
  Cyclic GFR-binding peptide

SEQ ID NO: 92419 - protein, 30 aa, Artificial Sequence; identical to SEQ ID NO: 42296
  Cyclic GFR-binding peptide
  MOD_RES (27)..(29): Xaa is C or S

SEQ ID NO: 92420 - protein, 31 aa, Artificial Sequence; identical to SEQ ID NO: 39333
  Cyclic GFR-binding peptide
  MOD_RES (2)..(3): Xaa is C or S

SEQ ID NO: 92421 - protein, 37 aa, Artificial Sequence; identical to SEQ ID NO: 42297
  Cyclic GFR-binding peptide
  MOD_RES (3)..(4)..(37): Xaa is C or S

SEQ ID NO: 92422 - protein, 29 aa, Artificial Sequence
  Cyclic GFR-binding peptide
KLSATSVLYYDDMGVPTLRKHREGMSVAE

SEQ ID NO: 92423 - protein, 33 aa, Artificial Sequence; identical to SEQ ID NO: 10448
  Cyclic GFR-binding peptide
  MOD_RES (30)..(32): Xaa is C or S

SEQ ID NO: 92424 - protein, 37 aa, Artificial Sequence
  Cyclic GFR-binding peptide
  MOD_RES (4)..(5)..(37): Xaa is C or S
PEPXXVPEKMEPISILYLDENKNVVKFKYENMTVESX

SEQ ID NO: 92425 - protein, 30 aa, Artificial Sequence
  Cyclic GFR-binding peptide
  MOD_RES (1)..(2): Xaa is C or S
XXVPEKMSATSILYYDENKNVVLRKHRNMT

SEQ ID NO: 92426 - protein, 26 aa, Artificial Sequence
  Cyclic GFR-binding peptide
  MOD_RES (1)..(1): Xaa is C or S
XAPTKLSPISVLYKDSSNNVILKYHY

SEQ ID NO: 92427 - protein, 31 aa, Artificial Sequence; identical to SEQ ID NO: 10452
  Cyclic GFR-binding peptide
  MOD_RES (29)..(31): Xaa is C or S

SEQ ID NO: 92428 - protein, 33 aa, Artificial Sequence; identical to SEQ ID NO: 10453
  Cyclic GFR-binding peptide
  MOD_RES (5)..(6): Xaa is C or S

SEQ ID NO: 92429 - protein, 42 aa, Artificial Sequence
  Cyclic GFR-binding peptide
  MOD_RES (6)..(7)..(39)..(41): Xaa is C or S
GIPEPXXVPEKMSPINILYFDENKNVVYGKIPNMTVESXAXR

SEQ ID NO: 92430 - protein, 37 aa, Artificial Sequence; identical to SEQ ID NO: 10455
  Cyclic GFR-binding peptide
  MOD_RES (4)..(5)..(37): Xaa is C or S

SEQ ID NO: 92431 - protein, 26 aa, Artificial Sequence
  Cyclic GFR-binding peptide
PTKLSATSVLYYDDSSNVILRKHRNM

SEQ ID NO: 92432 - protein, 28 aa, Artificial Sequence
  Cyclic GFR-binding peptide
RLSATSILYYDSANNVVLRKHRDMVVES

SEQ ID NO: 92433 - protein, 32 aa, Artificial Sequence; identical to SEQ ID NO: 10457
  Cyclic GFR-binding peptide
  MOD_RES (30)..(32): Xaa is C or S

SEQ ID NO: 92434 - protein, 30 aa, Artificial Sequence; identical to SEQ ID NO: 10459
  Cyclic GFR-binding peptide
  MOD_RES (29)..(29): Xaa is C or S

SEQ ID NO: 92435 - protein, 36 aa, Artificial Sequence; identical to SEQ ID NO: 39347
  Cyclic GFR-binding peptide
  MOD_RES (3)..(4)..(36): Xaa is C or S

SEQ ID NO: 92436 - protein, 30 aa, Artificial Sequence; identical to SEQ ID NO: 10460
  Cyclic GFR-binding peptide
  MOD_RES (4)..(5): Xaa is C or S

SEQ ID NO: 92437 - protein, 22 aa, Artificial Sequence
  Cyclic GFR-binding peptide
QLSATSVLYYDDSSNVILRKHR

SEQ ID NO: 92438 - protein, 35 aa, Artificial Sequence; identical to SEQ ID NO: 10464
  Cyclic GFR-binding peptide
  MOD_RES (32)..(34): Xaa is C or S

SEQ ID NO: 92439 - protein, 34 aa, Artificial Sequence; identical to SEQ ID NO: 10465
  Cyclic GFR-binding peptide
  MOD_RES (3)..(3): Xaa is C or S

SEQ ID NO: 92440 - protein, 33 aa, Artificial Sequence; identical to SEQ ID NO: 39354
  Cyclic GFR-binding peptide
  MOD_RES (1)..(33): Xaa is C or S

SEQ ID NO: 92441 - protein, 32 aa, Artificial Sequence; identical to SEQ ID NO: 10468
  Cyclic GFR-binding peptide
  MOD_RES (1)..(2): Xaa is C or S

SEQ ID NO: 92442 - protein, 24 aa, Artificial Sequence
  Cyclic GFR-binding peptide
NAISMLYFNDKQQIILKKYRGMVV

SEQ ID NO: 92443 - protein, 32 aa, Artificial Sequence; identical to SEQ ID NO: 39356
  Cyclic GFR-binding peptide
  MOD_RES (2)..(3): Xaa is C or S

SEQ ID NO: 92444 - protein, 31 aa, Artificial Sequence; identical to SEQ ID NO: 10471
  Cyclic GFR-binding peptide
  MOD_RES (5)..(6): Xaa is C or S

SEQ ID NO: 92445 - protein, 31 aa, Artificial Sequence; identical to SEQ ID NO: 10473
  Cyclic GFR-binding peptide
  MOD_RES (3)..(4): Xaa is C or S

SEQ ID NO: 92446 - protein, 39 aa, Artificial Sequence; identical to SEQ ID NO: 10475
  Cyclic GFR-binding peptide
  MOD_RES (3)..(4)..(37)..(39): Xaa is C or S

SEQ ID NO: 92447 - protein, 38 aa, Artificial Sequence; identical to SEQ ID NO: 39361
  Cyclic GFR-binding peptide
  MOD_RES (3)..(4)..(37): Xaa is C or S

SEQ ID NO: 92448 - protein, 30 aa, Artificial Sequence
  Cyclic GFR-binding peptide
VPEKMSATSILYYDENKNVVLRKHRNMTVE

SEQ ID NO: 92449 - protein, 35 aa, Artificial Sequence; identical to SEQ ID NO: 42328
  Cyclic GFR-binding peptide
  MOD_RES (1)..(2)..(34): Xaa is C or S

SEQ ID NO: 92450 - protein, 38 aa, Artificial Sequence
  Cyclic GFR-binding peptide
  MOD_RES (4)..(5)..(36)..(38): Xaa is C or S
PSTXXAPVKTEPISMLYLDNGRVLLKFKYEMIVEEXGX

SEQ ID NO: 92451 - protein, 31 aa, Artificial Sequence; identical to SEQ ID NO: 39367
  Cyclic GFR-binding peptide
  MOD_RES (1)..(1): Xaa is C or S

SEQ ID NO: 92452 - protein, 23 aa, Artificial Sequence
  Cyclic GFR-binding peptide
KLSATSILYYDKGVVTYLRKHRG

SEQ ID NO: 92453 - protein, 22 aa, Artificial Sequence
  Cyclic GFR-binding peptide
LEPISVLYLDDSSNVIKFKYEN

SEQ ID NO: 92454 - protein, 24 aa, Artificial Sequence
  Cyclic GFR-binding peptide
PTQLSPINVLYFDDSSNVIYGKIP

SEQ ID NO: 92455 - protein, 29 aa, Artificial Sequence
  Cyclic GFR-binding peptide
  MOD_RES (27)..(29): Xaa is C or S
LEPISILYLVGRTPKVKFKYEMVVKSXKX

SEQ ID NO: 92456 - protein, 33 aa, Artificial Sequence; identical to SEQ ID NO: 39373
  Cyclic GFR-binding peptide
  MOD_RES (31)..(33): Xaa is C or S

SEQ ID NO: 92457 - protein, 31 aa, Artificial Sequence; identical to SEQ ID NO: 42346
  Cyclic GFR-binding peptide
  MOD_RES (4)..(5): Xaa is C or S

SEQ ID NO: 92458 - protein, 32 aa, Artificial Sequence; identical to SEQ ID NO: 10488
  Cyclic GFR-binding peptide
  MOD_RES (1)..(1): Xaa is C or S

SEQ ID NO: 92459 - protein, 21 aa, Artificial Sequence
  Cyclic GFR-binding peptide
LSPINILYFDSANNVVYGKIP

SEQ ID NO: 92460 - protein, 24 aa, Artificial Sequence
  Cyclic GFR-binding peptide
SPINILYFDENKNVVYGKIPNMTV

SEQ ID NO: 92461 - protein, 24 aa, Artificial Sequence
  Cyclic GFR-binding peptide
SPISVLYKDDSSNVILKYHYNMVV

SEQ ID NO: 92462 - protein, 35 aa, Artificial Sequence; identical to SEQ ID NO: 10494
  Cyclic GFR-binding peptide
  MOD_RES (32)..(34): Xaa is C or S

SEQ ID NO: 92463 - protein, 21 aa, Artificial Sequence
  Cyclic GFR-binding peptide
EPISILYLVGRTPKVKFKYEM

SEQ ID NO: 92464 - protein, 29 aa, Artificial Sequence
  Cyclic GFR-binding peptide
TELSATSMLYYDEYDKVVLRKHREMVVEG

SEQ ID NO: 92465 - protein, 34 aa, Artificial Sequence; identical to SEQ ID NO: 42353
  Cyclic GFR-binding peptide
  MOD_RES (1)..(33): Xaa is C or S

SEQ ID NO: 92466 - protein, 29 aa, Artificial Sequence
  Cyclic GFR-binding peptide
  MOD_RES (2)..(2): Xaa is C or S
TXAPTKLSPISVLYKDDSSNVILKYHYNM

SEQ ID NO: 92467 - protein, 24 aa, Artificial Sequence
  Cyclic GFR-binding peptide
EPISILYLDAANNVVKFKYEDMVV

SEQ ID NO: 92468 - protein, 25 aa, Artificial Sequence
  Cyclic GFR-binding peptide
DLNAISILYFIGKTPKILKKYRMIV

SEQ ID NO: 92469 - protein, 28 aa, Artificial Sequence
  Cyclic GFR-binding peptide
PARLSPINILYFDAANNVVYGKIPDMVV

SEQ ID NO: 92470 - protein, 28 aa, Artificial Sequence
  Cyclic GFR-binding peptide
  MOD_RES (27)..(27): Xaa is C or S
EPISILYLDSANNVVKFKYEDMVVESXG

SEQ ID NO: 92471 - protein, 30 aa, Artificial Sequence; identical to SEQ ID NO: 42363
  Cyclic GFR-binding peptide

SEQ ID NO: 92472 - protein, 26 aa, Artificial Sequence
  Cyclic GFR-binding peptide
PQDLNAISILYFVGRTPKVLKKYRMV

SEQ ID NO: 92473 - protein, 25 aa, Artificial Sequence
  Cyclic GFR-binding peptide
EPISMLYLDNGRVLLKFKYEMIVEE

SEQ ID NO: 92474 - protein, 39 aa, Artificial Sequence; identical to SEQ ID NO: 39396
  Cyclic GFR-binding peptide
  MOD_RES (3)..(4)..(36)..(38): Xaa is C or S

SEQ ID NO: 92475 - protein, 32 aa, Artificial Sequence
  Cyclic GFR-binding peptide
  MOD_RES (31)..(31): Xaa is C or S
APVKTSPISMLYKDNGRVLLLKYHYMIVEEXG

SEQ ID NO: 92476 - protein, 37 aa, Artificial Sequence
  Cyclic GFR-binding peptide
  MOD_RES (2)..(3)..(35)..(37): Xaa is C or S
PXXTPTKMSPISMLYKNDKQQIILKYHYGMVVDRXGX

SEQ ID NO: 92477 - protein, 28 aa, Artificial Sequence
  Cyclic GFR-binding peptide
  MOD_RES (2)..(3): Xaa is C or S
AXXAPTKLNAISVLYFDSSNNVILKKYR

SEQ ID NO: 92478 - protein, 34 aa, Artificial Sequence; identical to SEQ ID NO: 39401
  Cyclic GFR-binding peptide
  MOD_RES (32)..(34): Xaa is C or S

SEQ ID NO: 92479 - protein, 30 aa, Artificial Sequence
  Cyclic GFR-binding peptide
  MOD_RES (4)..(5): Xaa is C or S
PEPXXVPEKMEPISILYLDENKNVVKFKYE

SEQ ID NO: 92480 - protein, 33 aa, Artificial Sequence; identical to SEQ ID NO: 10512
  Cyclic GFR-binding peptide
  MOD_RES (1)..(33): Xaa is C or S

SEQ ID NO: 92481 - protein, 33 aa, Artificial Sequence; identical to SEQ ID NO: 39406
  Cyclic GFR-binding peptide
  MOD_RES (31)..(33): Xaa is C or S

SEQ ID NO: 92482 - protein, 28 aa, Artificial Sequence
  Cyclic GFR-binding peptide
  MOD_RES (2)..(3): Xaa is C or S
PXXVPQDLNAISILYFVGRTPKVLKKYR

SEQ ID NO: 92483 - protein, 34 aa, Artificial Sequence; identical to SEQ ID NO: 10515
  Cyclic GFR-binding peptide
  MOD_RES (31)..(33): Xaa is C or S

SEQ ID NO: 92484 - protein, 31 aa, Artificial Sequence; identical to SEQ ID NO: 39411
  Cyclic GFR-binding peptide
  MOD_RES (5)..(6): Xaa is C or S

SEQ ID NO: 92485 - protein, 27 aa, Artificial Sequence
  Cyclic GFR-binding peptide
LSPISVLYKDDSSNVILKYHYNMVVRA

SEQ ID NO: 92486 - protein, 33 aa, Artificial Sequence; identical to SEQ ID NO: 39413
  Cyclic GFR-binding peptide
  MOD_RES (30)..(32): Xaa is C or S

SEQ ID NO: 92487 - protein, 34 aa, Artificial Sequence; identical to SEQ ID NO: 39414
  Cyclic GFR-binding peptide
  MOD_RES (5)..(6): Xaa is C or S

SEQ ID NO: 92488 - protein, 28 aa, Artificial Sequence
  Cyclic GFR-binding peptide
  MOD_RES (28)..(28): Xaa is C or S
MEPISILYLDENKNVVKFKYENMTVESX

SEQ ID NO: 92489 - protein, 32 aa, Artificial Sequence; identical to SEQ ID NO: 10517
  Cyclic GFR-binding peptide
  MOD_RES (3)..(4): Xaa is C or S

SEQ ID NO: 92490 - protein, 27 aa, Artificial Sequence
  Cyclic GFR-binding peptide
RLEPISILYLDSANNVVKFKYEDMVVE

SEQ ID NO: 92491 - protein, 36 aa, Artificial Sequence; identical to SEQ ID NO: 39416
  Cyclic GFR-binding peptide
  MOD_RES (4)..(5): Xaa is C or S

SEQ ID NO: 92492 - protein, 32 aa, Artificial Sequence
  Cyclic GFR-binding peptide
  MOD_RES (2)..(3): Xaa is C or S
SXXVPARLSATSILYYDAANNVVLRKHRDMVV

SEQ ID NO: 92493 - protein, 22 aa, Artificial Sequence
  Cyclic GFR-binding peptide
KLEPISVLYLDDSSNVIKFKYE

SEQ ID NO: 92494 - protein, 31 aa, Artificial Sequence
  Cyclic GFR-binding peptide
TPTKMSPISMLYKNDKQQIILKYHYGMVVDR

SEQ ID NO: 92495 - protein, 32 aa, Artificial Sequence; identical to SEQ ID NO: 39420
  Cyclic GFR-binding peptide
  MOD_RES (1)..(1): Xaa is C or S

SEQ ID NO: 92496 - protein, 37 aa, Artificial Sequence; identical to SEQ ID NO: 10521
  Cyclic GFR-binding peptide
  MOD_RES (2)..(3)..(35)..(37): Xaa is C or S

SEQ ID NO: 92497 - protein, 21 aa, Artificial Sequence
  Cyclic GFR-binding peptide
LSPISILYKDSANNVVLKYHY

SEQ ID NO: 92498 - protein, 30 aa, Artificial Sequence; identical to SEQ ID NO: 10522
  Cyclic GFR-binding peptide
  MOD_RES (28)..(30): Xaa is C or S

SEQ ID NO: 92499 - protein, 33 aa, Artificial Sequence
  Cyclic GFR-binding peptide
  MOD_RES (31)..(33): Xaa is C or S
VSQDLSPINILYFIGKTPKIYGKIPMIVKSXKX

SEQ ID NO: 92500 - protein, 32 aa, Artificial Sequence; identical to SEQ ID NO: 10526
  Cyclic GFR-binding peptide
  MOD_RES (1)..(2): Xaa is C or S

SEQ ID NO: 92501 - protein, 38 aa, Artificial Sequence; identical to SEQ ID NO: 39427
  Cyclic GFR-binding peptide
  MOD_RES (5)..(6)..(38): Xaa is C or S

SEQ ID NO: 92502 - protein, 27 aa, Artificial Sequence
  Cyclic GFR-binding peptide
LSPISVLYKDDSSNVILKYHYNMVVRS

SEQ ID NO: 92503 - protein, 25 aa, Artificial Sequence
  Cyclic GFR-binding peptide
NAISILYFDKGVVTYLKKYRGMAVS

SEQ ID NO: 92504 - protein, 31 aa, Artificial Sequence; identical to SEQ ID NO: 42392
  Cyclic GFR-binding peptide
  MOD_RES (3)..(4): Xaa is C or S

SEQ ID NO: 92505 - protein, 35 aa, Artificial Sequence; identical to SEQ ID NO: 42396
  Cyclic GFR-binding peptide
  MOD_RES (6)..(7): Xaa is C or S

SEQ ID NO: 92506 - protein, 31 aa, Artificial Sequence
  Cyclic GFR-binding peptide
  MOD_RES (5)..(6): Xaa is C or S
SAGPXXTPTKMSATSMLYYNDKQQIILRKHR

SEQ ID NO: 92507 - protein, 37 aa, Artificial Sequence; identical to SEQ ID NO: 77624
  Cyclic GFR-binding peptide
  MOD_RES (2)..(3)..(34)..(36): Xaa is C or S

SEQ ID NO: 92508 - protein, 29 aa, Artificial Sequence
  Cyclic GFR-binding peptide
  MOD_RES (27)..(29): Xaa is C or S
NAISILYFDENKNVVLKKYRNMTVESXAX

SEQ ID NO: 92509 - protein, 26 aa, Artificial Sequence
  Cyclic GFR-binding peptide
PQALSPISILYKVGRKPKVLKYHYMI

SEQ ID NO: 92510 - protein, 37 aa, Artificial Sequence
  Cyclic GFR-binding peptide
  MOD_RES (6)..(7): Xaa is C or S
AAPASXXVPARLSATSILYYDAANNVVLRKHRDMVVE

SEQ ID NO: 92511 - protein, 25 aa, Artificial Sequence
  Cyclic GFR-binding peptide
PARLSATSILYYDAANNVVLRKHRD

SEQ ID NO: 92512 - protein, 32 aa, Artificial Sequence
  Cyclic GFR-binding peptide
  MOD_RES (6)..(7): Xaa is C or S
ASASPXXVSQDLSPINILYFIGKTPKIYGKIP

SEQ ID NO: 92513 - protein, 28 aa, Artificial Sequence
  Cyclic GFR-binding peptide
ELSPINMLYFDENEKVVYGKIPDMVVEG

SEQ ID NO: 92514 - protein, 31 aa, Artificial Sequence; identical to SEQ ID NO: 10537
  Cyclic GFR-binding peptide
  MOD_RES (3)..(4): Xaa is C or S

SEQ ID NO: 92515 - protein, 38 aa, Artificial Sequence
  Cyclic GFR-binding peptide
  MOD_RES (5)..(6)..(37): Xaa is C or S
VPSTXXAPVKTSATSMLYYDNGRVLLLRKHRMIVEEXG

SEQ ID NO: 92516 - protein, 29 aa, Artificial Sequence
  Cyclic GFR-binding peptide
  MOD_RES (3)..(4): Xaa is C or S
ASXXVPARLSPINILYFDAANNVVYGKIP

SEQ ID NO: 92517 - protein, 27 aa, Artificial Sequence
  Cyclic GFR-binding peptide
  MOD_RES (1)..(2): Xaa is C or S
XXVPEKMSATSILYYDENKNVVLRKHR

SEQ ID NO: 92518 - protein, 30 aa, Artificial Sequence; identical to SEQ ID NO: 42421
  Cyclic GFR-binding peptide
  MOD_RES (3)..(4): Xaa is C or S

SEQ ID NO: 92519 - protein, 33 aa, Artificial Sequence
  Cyclic GFR-binding peptide
  MOD_RES (5)..(6): Xaa is C or S
IPEPXXVPEKMEPISILYLDENKNVVKFKYENM

SEQ ID NO: 92520 - protein, 36 aa, Artificial Sequence
  Cyclic GFR-binding peptide
  MOD_RES (6)..(7): Xaa is C or S
GIPEPXXVPEKMSPISILYKDENKNVVLKYHYNMTV

SEQ ID NO: 92521 - protein, 31 aa, Artificial Sequence; identical to SEQ ID NO: 42426
  Cyclic GFR-binding peptide
  MOD_RES (1)..(2): Xaa is C or S

SEQ ID NO: 92522 - protein, 28 aa, Artificial Sequence
  Cyclic GFR-binding peptide
  MOD_RES (27)..(27): Xaa is C or S
SPINILYFDSANNVVYGKIPDMVVESXG

SEQ ID NO: 92523 - protein, 28 aa, Artificial Sequence
  Cyclic GFR-binding peptide
  MOD_RES (27)..(27): Xaa is C or S
LEPISILYLVGRTPKVKFKYEMVVKSXK

SEQ ID NO: 92524 - protein, 23 aa, Artificial Sequence
  Cyclic GFR-binding peptide
ELSATSMLYYDENEKVVLRKHRD

SEQ ID NO: 92525 - protein, 33 aa, Artificial Sequence; identical to SEQ ID NO: 39446
  Cyclic GFR-binding peptide
  MOD_RES (3)..(4): Xaa is C or S

SEQ ID NO: 92526 - protein, 32 aa, Artificial Sequence
  Cyclic GFR-binding peptide
  MOD_RES (2)..(3): Xaa is C or S
TXXAPVKTEPISMLYLDNGRVLLKFKYEMIVE

SEQ ID NO: 92527 - protein, 26 aa, Artificial Sequence
  Cyclic GFR-binding peptide
LNAISILYFDKGVVTYLKKYRGMAVS

SEQ ID NO: 92528 - protein, 25 aa, Artificial Sequence
  Cyclic GFR-binding peptide
APTKLSPINVLYFDSSNNVIYGKIP

SEQ ID NO: 92529 - protein, 33 aa, Artificial Sequence; identical to SEQ ID NO: 39451
  Cyclic GFR-binding peptide
  MOD_RES (30)..(32): Xaa is C or S

SEQ ID NO: 92530 - protein, 24 aa, Artificial Sequence
  Cyclic GFR-binding peptide
NAISMLYFDNGRVLLLKKYRMIVE

SEQ ID NO: 92531 - protein, 33 aa, Artificial Sequence
  Cyclic GFR-binding peptide
  MOD_RES (30)..(32): Xaa is C or S
EKMEPISILYLDENKNVVKFKYENMTVESXAXR

SEQ ID NO: 92532 - protein, 24 aa, Artificial Sequence
  Cyclic GFR-binding peptide
PVKTEPISMLYLDNGRVLLKFKYE

SEQ ID NO: 92533 - protein, 26 aa, Artificial Sequence
  Cyclic GFR-binding peptide
TELNAISMLYFDENEKVVLKKYRDMV

SEQ ID NO: 92534 - protein, 37 aa, Artificial Sequence; identical to SEQ ID NO: 39457
  Cyclic GFR-binding peptide
  MOD_RES (2)..(3)..(35)..(37): Xaa is C or S

SEQ ID NO: 92535 - protein, 32 aa, Artificial Sequence; identical to SEQ ID NO: 42440
  Cyclic GFR-binding peptide
  MOD_RES (5)..(6): Xaa is C or S

SEQ ID NO: 92536 - protein, 23 aa, Artificial Sequence
  Cyclic GFR-binding peptide
KMSATSMLYYNDKQQIILRKHRG

SEQ ID NO: 92537 - protein, 27 aa, Artificial Sequence
  Cyclic GFR-binding peptide
PTKLNAISVLYFDSSNNVILKKYRNMV

SEQ ID NO: 92538 - protein, 22 aa, Artificial Sequence
  Cyclic GFR-binding peptide
SPISILYKVGRKPKVLKYHYMI

SEQ ID NO: 92539 - protein, 41 aa, Artificial Sequence; identical to SEQ ID NO: 39468
  Cyclic GFR-binding peptide
  MOD_RES (5)..(6)..(39)..(41): Xaa is C or S

SEQ ID NO: 92540 - protein, 32 aa, Artificial Sequence
  Cyclic GFR-binding peptide
  MOD_RES (32)..(32): Xaa is C or S
VPTRLSATSILYYDSANNVVLRKHRDMVVESX

SEQ ID NO: 92541 - protein, 33 aa, Artificial Sequence; identical to SEQ ID NO: 10561
  Cyclic GFR-binding peptide
  MOD_RES (31)..(33): Xaa is C or S

SEQ ID NO: 92542 - protein, 28 aa, Artificial Sequence
  Cyclic GFR-binding peptide
  MOD_RES (2)..(3): Xaa is C or S
AXXAPTKLSPISVLYKDSSNNVILKYHY

SEQ ID NO: 92543 - protein, 27 aa, Artificial Sequence
  Cyclic GFR-binding peptide
VKTSATSMLYYDNGRVLLLRKHRMIVE

SEQ ID NO: 92544 - protein, 34 aa, Artificial Sequence; identical to SEQ ID NO: 10573
  Cyclic GFR-binding peptide
  MOD_RES (1)..(2)..(34): Xaa is C or S

SEQ ID NO: 92545 - protein, 29 aa, Artificial Sequence
  Cyclic GFR-binding peptide
  MOD_RES (28)..(28): Xaa is C or S
DLSPISILYKIGKTPKILKYHYMIVKSXK

SEQ ID NO: 92546 - protein, 27 aa, Artificial Sequence
  Cyclic GFR-binding peptide
QALEPISILYLVGRKPKVKFKYEMIVR

SEQ ID NO: 92547 - protein, 26 aa, Artificial Sequence
  Cyclic GFR-binding peptide
  MOD_RES (1)..(1): Xaa is C or S
XVPARLNAISILYFDAANNVVLKKYR

SEQ ID NO: 92548 - protein, 34 aa, Artificial Sequence; identical to SEQ ID NO: 77650
  Cyclic GFR-binding peptide
  MOD_RES (1)..(2)..(33): Xaa is C or S

SEQ ID NO: 92549 - protein, 27 aa, Artificial Sequence
  Cyclic GFR-binding peptide
TKLSPINVLYFDSSNNVIYGKIPNMVV

SEQ ID NO: 92550 - protein, 33 aa, Artificial Sequence; identical to SEQ ID NO: 77652
  Cyclic GFR-binding peptide
  MOD_RES (1)..(2): Xaa is C or S

SEQ ID NO: 92551 - protein, 29 aa, Artificial Sequence
  Cyclic GFR-binding peptide
  MOD_RES (2)..(3): Xaa is C or S
PXXVPQDLSPISILYKVGRTPKVLKYHYM

SEQ ID NO: 92552 - protein, 33 aa, Artificial Sequence; identical to SEQ ID NO: 10579
  Cyclic GFR-binding peptide
  MOD_RES (5)..(6): Xaa is C or S

SEQ ID NO: 92553 - protein, 31 aa, Artificial Sequence; identical to SEQ ID NO: 10580
  Cyclic GFR-binding peptide
  MOD_RES (1)..(2): Xaa is C or S

SEQ ID NO: 92554 - protein, 35 aa, Artificial Sequence
  Cyclic GFR-binding peptide
  MOD_RES (1)..(2)..(34): Xaa is C or S
XXVPTKLSATSILYYDKGVVTYLRKHRGMAVSEXG

SEQ ID NO: 92555 - protein, 38 aa, Artificial Sequence; identical to SEQ ID NO: 10582
  Cyclic GFR-binding peptide
  MOD_RES (5)..(6)..(37): Xaa is C or S

SEQ ID NO: 92556 - protein, 36 aa, Artificial Sequence; identical to SEQ ID NO: 77656
  Cyclic GFR-binding peptide
  MOD_RES (4)..(5): Xaa is C or S

SEQ ID NO: 92557 - protein, 31 aa, Artificial Sequence
  Cyclic GFR-binding peptide
  MOD_RES (5)..(6): Xaa is C or S
VPSTXXAPVKTSPISMLYKDNGRVLLLKYHY

SEQ ID NO: 92558 - protein, 32 aa, Artificial Sequence; identical to SEQ ID NO: 42468
  Cyclic GFR-binding peptide
  MOD_RES (30)..(32): Xaa is C or S

SEQ ID NO: 92559 - protein, 25 aa, Artificial Sequence
  Cyclic GFR-binding peptide
NAISILYFVGRKPKVLKKYRMIVRS

SEQ ID NO: 92560 - protein, 40 aa, Artificial Sequence; identical to SEQ ID NO: 39498
  Cyclic GFR-binding peptide
  MOD_RES (6)..(7)..(39): Xaa is C or S

SEQ ID NO: 92561 - protein, 32 aa, Artificial Sequence; identical to SEQ ID NO: 39500
  Cyclic GFR-binding peptide
  MOD_RES (29)..(31): Xaa is C or S

SEQ ID NO: 92562 - protein, 29 aa, Artificial Sequence
  Cyclic GFR-binding peptide
  MOD_RES (1)..(2): Xaa is C or S
XXVPTKLEPISVLYLDDMGVPTKFKYEEG

SEQ ID NO: 92563 - protein, 31 aa, Artificial Sequence; identical to SEQ ID NO: 39503
  Cyclic GFR-binding peptide

SEQ ID NO: 92564 - protein, 37 aa, Artificial Sequence; identical to SEQ ID NO: 10593
  Cyclic GFR-binding peptide
  MOD_RES (4)..(5)..(36): Xaa is C or S

SEQ ID NO: 92565 - protein, 34 aa, Artificial Sequence; identical to SEQ ID NO: 10595
  Cyclic GFR-binding peptide
  MOD_RES (3)..(4): Xaa is C or S

SEQ ID NO: 92566 - protein, 34 aa, Artificial Sequence
  Cyclic GFR-binding peptide
  MOD_RES (31)..(33): Xaa is C or S
PTKMEPISMLYLNDKQQIIKFKYEGMVVDRXGXS

SEQ ID NO: 92567 - protein, 29 aa, Artificial Sequence
  Cyclic GFR-binding peptide
  MOD_RES (1)..(2): Xaa is C or S
XXVPTELEPISMLYLDEYDKVVKFKYEEM

SEQ ID NO: 92568 - protein, 26 aa, Artificial Sequence
  Cyclic GFR-binding peptide
VSQDLEPISILYLIGKTPKIKFKYEM

SEQ ID NO: 92569 - protein, 32 aa, Artificial Sequence; identical to SEQ ID NO: 42474
  Cyclic GFR-binding peptide
  MOD_RES (1)..(1): Xaa is C or S

SEQ ID NO: 92570 - protein, 23 aa, Artificial Sequence
  Cyclic GFR-binding peptide
QLEPISVLYLDDSSNVIKFKYEN

SEQ ID NO: 92571 - protein, 30 aa, Artificial Sequence; identical to SEQ ID NO: 10597
  Cyclic GFR-binding peptide
  MOD_RES (30)..(30): Xaa is C or S

SEQ ID NO: 92572 - protein, 29 aa, Artificial Sequence
  Cyclic GFR-binding peptide
  MOD_RES (28)..(28): Xaa is C or S
KTSPINMLYFDNGRVLLYGKIPMIVEEXG

SEQ ID NO: 92573 - protein, 34 aa, Artificial Sequence
  Cyclic GFR-binding peptide
  MOD_RES (3)..(4): Xaa is C or S
STXXAPVKTSPISMLYKDNGRVLLLKYHYMIVEE

SEQ ID NO: 92574 - protein, 29 aa, Artificial Sequence
  Cyclic GFR-binding peptide
  MOD_RES (3)..(4): Xaa is C or S
APXXVPQALSPISILYKVGRKPKVLKYHY

SEQ ID NO: 92575 - protein, 36 aa, Artificial Sequence
  Cyclic GFR-binding peptide
  MOD_RES (1)..(33)..(35): Xaa is C or S
XVPTRLSATSILYYDSANNVVLRKHRDMVVESXGXR

SEQ ID NO: 92576 - protein, 32 aa, Artificial Sequence; identical to SEQ ID NO: 10602
  Cyclic GFR-binding peptide
  MOD_RES (1)..(32): Xaa is C or S

SEQ ID NO: 92577 - protein, 38 aa, Artificial Sequence
  Cyclic GFR-binding peptide
  MOD_RES (3)..(4)..(36)..(38): Xaa is C or S
GPXXTPTKMEPISMLYLNDKQQIIKFKYEGMVVDRXGX

SEQ ID NO: 92578 - protein, 37 aa, Artificial Sequence
  Cyclic GFR-binding peptide
  MOD_RES (4)..(5)..(37): Xaa is C or S
PEPXXVPEKMSATSILYYDENKNVVLRKHRNMTVESX

SEQ ID NO: 92579 - protein, 34 aa, Artificial Sequence; identical to SEQ ID NO: 39521
  Cyclic GFR-binding peptide
  MOD_RES (1)..(2)..(34): Xaa is C or S

SEQ ID NO: 92580 - protein, 33 aa, Artificial Sequence; identical to SEQ ID NO: 10607
  Cyclic GFR-binding peptide
  MOD_RES (4)..(5): Xaa is C or S

SEQ ID NO: 92581 - protein, 35 aa, Artificial Sequence; identical to SEQ ID NO: 42495
  Cyclic GFR-binding peptide
  MOD_RES (2)..(34): Xaa is C or S

SEQ ID NO: 92582 - protein, 24 aa, Artificial Sequence
  Cyclic GFR-binding peptide
TSPINMLYFDNGRVLLYGKIPMIV

SEQ ID NO: 92583 - protein, 23 aa, Artificial Sequence
  Cyclic GFR-binding peptide
SATSILYYVGRTPKVLRKHRMVV

SEQ ID NO: 92584 - protein, 36 aa, Artificial Sequence
  Cyclic GFR-binding peptide
  MOD_RES (3)..(4)..(36): Xaa is C or S
EPXXVPEKMSATSILYYDENKNVVLRKHRNMTVESX

SEQ ID NO: 92585 - protein, 32 aa, Artificial Sequence
  Cyclic GFR-binding peptide
  MOD_RES (2)..(3): Xaa is C or S
PXXVPEKMEPISILYLDENKNVVKFKYENMTV

SEQ ID NO: 92586 - protein, 23 aa, Artificial Sequence
  Cyclic GFR-binding peptide
SATSMLYYDENEKVVLRKHRDMV

SEQ ID NO: 92587 - protein, 31 aa, Artificial Sequence; identical to SEQ ID NO: 10612
  Cyclic GFR-binding peptide
  MOD_RES (31)..(31): Xaa is C or S

SEQ ID NO: 92588 - protein, 30 aa, Artificial Sequence; identical to SEQ ID NO: 39529
  Cyclic GFR-binding peptide
  MOD_RES (29)..(29): Xaa is C or S

SEQ ID NO: 92589 - protein, 41 aa, Artificial Sequence; identical to SEQ ID NO: 10613
  Cyclic GFR-binding peptide
  MOD_RES (6)..(7)..(38)..(40): Xaa is C or S

SEQ ID NO: 92590 - protein, 28 aa, Artificial Sequence
  Cyclic GFR-binding peptide
QDLSPISILYKVGRTPKVLKYHYMVVKS

SEQ ID NO: 92591 - protein, 24 aa, Artificial Sequence
  Cyclic GFR-binding peptide
DLSPINILYFIGKTPKIYGKIPMI

SEQ ID NO: 92592 - protein, 31 aa, Artificial Sequence; identical to SEQ ID NO: 10615
  Cyclic GFR-binding peptide
  MOD_RES (2)..(3): Xaa is C or S

SEQ ID NO: 92593 - protein, 22 aa, Artificial Sequence
  Cyclic GFR-binding peptide
EPISMLYLNDKQQIIKFKYEGM

SEQ ID NO: 92594 - protein, 25 aa, Artificial Sequence
  Cyclic GFR-binding peptide
VPTKLSATSILYYDKGVVTYLRKHR

SEQ ID NO: 92595 - protein, 29 aa, Artificial Sequence
  Cyclic GFR-binding peptide
TELSPINMLYFDENEKVVYGKIPDMVVEG

SEQ ID NO: 92596 - protein, 23 aa, Artificial Sequence
  Cyclic GFR-binding peptide
TRLSPINILYFDSANNVVYGKIP

SEQ ID NO: 92597 - protein, 39 aa, Artificial Sequence; identical to SEQ ID NO: 10618
  Cyclic GFR-binding peptide
  MOD_RES (4)..(5)..(36)..(38): Xaa is C or S

SEQ ID NO: 92598 - protein, 25 aa, Artificial Sequence
  Cyclic GFR-binding peptide
PTELEPISMLYLDENEKVVKFKYED

SEQ ID NO: 92599 - protein, 32 aa, Artificial Sequence; identical to SEQ ID NO: 42514
  Cyclic GFR-binding peptide
  MOD_RES (3)..(4): Xaa is C or S

SEQ ID NO: 92600 - protein, 31 aa, Artificial Sequence; identical to SEQ ID NO: 39545
  Cyclic GFR-binding peptide
  MOD_RES (29)..(31): Xaa is C or S

SEQ ID NO: 92601 - protein, 30 aa, Artificial Sequence; identical to SEQ ID NO: 42516
  Cyclic GFR-binding peptide
  MOD_RES (3)..(4): Xaa is C or S

SEQ ID NO: 92602 - protein, 21 aa, Artificial Sequence
  Cyclic GFR-binding peptide
SATSILYYDKGVVTYLRKHRG

SEQ ID NO: 92603 - protein, 37 aa, Artificial Sequence; identical to SEQ ID NO: 39547
  Cyclic GFR-binding peptide
  MOD_RES (6)..(7): Xaa is C or S

SEQ ID NO: 92604 - protein, 37 aa, Artificial Sequence
  Cyclic GFR-binding peptide
  MOD_RES (1)..(2)..(34)..(36): Xaa is C or S
XXTPTKMSPISMLYKNDKQQIILKYHYGMVVDRXGXS

SEQ ID NO: 92605 - protein, 34 aa, Artificial Sequence
  Cyclic GFR-binding peptide
  MOD_RES (4)..(5): Xaa is C or S
PASXXVPARLSATSILYYDAANNVVLRKHRDMVV

SEQ ID NO: 92606 - protein, 35 aa, Artificial Sequence
  Cyclic GFR-binding peptide
  MOD_RES (6)..(7): Xaa is C or S
STPPTXXVPTRLSATSILYYDSANNVVLRKHRDMV

SEQ ID NO: 92607 - protein, 40 aa, Artificial Sequence; identical to SEQ ID NO: 39551
  Cyclic GFR-binding peptide
  MOD_RES (6)..(7)..(38)..(40): Xaa is C or S

SEQ ID NO: 92608 - protein, 30 aa, Artificial Sequence; identical to SEQ ID NO: 42530
  Cyclic GFR-binding peptide

SEQ ID NO: 92609 - protein, 25 aa, Artificial Sequence
  Cyclic GFR-binding peptide
LEPISVLYLDSSNNVIKFKYENMVV

SEQ ID NO: 92610 - protein, 40 aa, Artificial Sequence; identical to SEQ ID NO: 10629
  Cyclic GFR-binding peptide
  MOD_RES (5)..(6)..(38)..(40): Xaa is C or S

SEQ ID NO: 92611 - protein, 30 aa, Artificial Sequence; identical to SEQ ID NO: 39556
  Cyclic GFR-binding peptide
  MOD_RES (1)..(2): Xaa is C or S

SEQ ID NO: 92612 - protein, 29 aa, Artificial Sequence
  Cyclic GFR-binding peptide
  MOD_RES (27)..(29): Xaa is C or S
NAISILYFDSANNVVLKKYRDMVVESXGX

SEQ ID NO: 92613 - protein, 39 aa, Artificial Sequence; identical to SEQ ID NO: 10630
  Cyclic GFR-binding peptide
  MOD_RES (5)..(6)..(39): Xaa is C or S

SEQ ID NO: 92614 - protein, 35 aa, Artificial Sequence; identical to SEQ ID NO: 39557
  Cyclic GFR-binding peptide
  MOD_RES (2)..(34): Xaa is C or S

SEQ ID NO: 92615 - protein, 32 aa, Artificial Sequence; identical to SEQ ID NO: 39559
  Cyclic GFR-binding peptide
  MOD_RES (5)..(6): Xaa is C or S

SEQ ID NO: 92616 - protein, 32 aa, Artificial Sequence; identical to SEQ ID NO: 42533
  Cyclic GFR-binding peptide
  MOD_RES (1)..(1): Xaa is C or S

SEQ ID NO: 92617 - protein, 32 aa, Artificial Sequence; identical to SEQ ID NO: 10632
  Cyclic GFR-binding peptide
  MOD_RES (29)..(31): Xaa is C or S

SEQ ID NO: 92618 - protein, 38 aa, Artificial Sequence; identical to SEQ ID NO: 42534
  Cyclic GFR-binding peptide
  MOD_RES (6)..(7): Xaa is C or S

SEQ ID NO: 92619 - protein, 34 aa, Artificial Sequence; identical to SEQ ID NO: 10634
  Cyclic GFR-binding peptide
  MOD_RES (3)..(4): Xaa is C or S

SEQ ID NO: 92620 - protein, 39 aa, Artificial Sequence; identical to SEQ ID NO: 10635
  Cyclic GFR-binding peptide
  MOD_RES (5)..(6)..(38): Xaa is C or S

SEQ ID NO: 92621 - protein, 31 aa, Artificial Sequence; identical to SEQ ID NO: 10636
  Cyclic GFR-binding peptide
  MOD_RES (30)..(30): Xaa is C or S

SEQ ID NO: 92622 - protein, 29 aa, Artificial Sequence
  Cyclic GFR-binding peptide
  MOD_RES (1)..(2): Xaa is C or S
XXVPTKLSPINILYFDKGVVTYYGKIPGM

SEQ ID NO: 92623 - protein, 36 aa, Artificial Sequence
  Cyclic GFR-binding peptide
  MOD_RES (1)..(2)..(33)..(35): Xaa is C or S
XXAPVKTSPISMLYKDNGRVLLLKYHYMIVEEXGXL

SEQ ID NO: 92624 - protein, 26 aa, Artificial Sequence
  Cyclic GFR-binding peptide
  MOD_RES (1)..(1): Xaa is C or S
XVPQALSPISILYKVGRKPKVLKYHY

SEQ ID NO: 92625 - protein, 21 aa, Artificial Sequence
  Cyclic GFR-binding peptide
LSATSILYYVGRTPKVLRKHR

SEQ ID NO: 92626 - protein, 39 aa, Artificial Sequence
  Cyclic GFR-binding peptide
  MOD_RES (5)..(6)..(37)..(39): Xaa is C or S
VPSTXXAPVKTEPISMLYLDNGRVLLKFKYEMIVEEXGX

SEQ ID NO: 92627 - protein, 31 aa, Artificial Sequence; identical to SEQ ID NO: 10640
  Cyclic GFR-binding peptide
  MOD_RES (29)..(31): Xaa is C or S

SEQ ID NO: 92628 - protein, 31 aa, Artificial Sequence; identical to SEQ ID NO: 39567
  Cyclic GFR-binding peptide
  MOD_RES (1)..(1): Xaa is C or S

SEQ ID NO: 92629 - protein, 36 aa, Artificial Sequence; identical to SEQ ID NO: 42547
  Cyclic GFR-binding peptide
  MOD_RES (5)..(6): Xaa is C or S

SEQ ID NO: 92630 - protein, 31 aa, Artificial Sequence; identical to SEQ ID NO: 39569
  Cyclic GFR-binding peptide
  MOD_RES (30)..(30): Xaa is C or S

SEQ ID NO: 92631 - protein, 28 aa, Artificial Sequence
  Cyclic GFR-binding peptide
PTRLSPISILYKDSANNVVLKYHYDMVV

SEQ ID NO: 92632 - protein, 31 aa, Artificial Sequence; identical to SEQ ID NO: 39571
  Cyclic GFR-binding peptide
  MOD_RES (28)..(30): Xaa is C or S

SEQ ID NO: 92633 - protein, 36 aa, Artificial Sequence; identical to SEQ ID NO: 10645
  Cyclic GFR-binding peptide
  MOD_RES (5)..(6): Xaa is C or S

SEQ ID NO: 92634 - protein, 30 aa, Artificial Sequence; identical to SEQ ID NO: 10646
  Cyclic GFR-binding peptide
  MOD_RES (30)..(30): Xaa is C or S

SEQ ID NO: 92635 - protein, 23 aa, Artificial Sequence
  Cyclic GFR-binding peptide
RLSATSILYYDSANNVVLRKHRD

SEQ ID NO: 92636 - protein, 39 aa, Artificial Sequence
  Cyclic GFR-binding peptide
  MOD_RES (3)..(4)..(36)..(38): Xaa is C or S
EPXXVPEKMEPISILYLDENKNVVKFKYENMTVESXAXR

SEQ ID NO: 92637 - protein, 33 aa, Artificial Sequence; identical to SEQ ID NO: 39573
  Cyclic GFR-binding peptide
  MOD_RES (2)..(3): Xaa is C or S

SEQ ID NO: 92638 - protein, 24 aa, Artificial Sequence
  Cyclic GFR-binding peptide
DLSATSILYYIGKTPKILRKHRMI

SEQ ID NO: 92639 - protein, 25 aa, Artificial Sequence
  Cyclic GFR-binding peptide
EPISVLYLDDMGVPTKFKYEEGMSV

SEQ ID NO: 92640 - protein, 34 aa, Artificial Sequence; identical to SEQ ID NO: 10649
  Cyclic GFR-binding peptide
  MOD_RES (4)..(5): Xaa is C or S

SEQ ID NO: 92641 - protein, 42 aa, Artificial Sequence; identical to SEQ ID NO: 42551
  Cyclic GFR-binding peptide
  MOD_RES (7)..(39)..(41): Xaa is C or S

SEQ ID NO: 92642 - protein, 33 aa, Artificial Sequence; identical to SEQ ID NO: 42552
  Cyclic GFR-binding peptide
  MOD_RES (1)..(2)..(33): Xaa is C or S

SEQ ID NO: 92643 - protein, 26 aa, Artificial Sequence
  Cyclic GFR-binding peptide
PTQLSATSVLYYDDSSNVILRKHRNM

SEQ ID NO: 92644 - protein, 30 aa, Artificial Sequence; identical to SEQ ID NO: 39576
  Cyclic GFR-binding peptide
  MOD_RES (27)..(29): Xaa is C or S

SEQ ID NO: 92645 - protein, 33 aa, Artificial Sequence; identical to SEQ ID NO: 10651
  Cyclic GFR-binding peptide
  MOD_RES (31)..(33): Xaa is C or S

SEQ ID NO: 92646 - protein, 29 aa, Artificial Sequence
  Cyclic GFR-binding peptide
  MOD_RES (1)..(1): Xaa is C or S
XTPTKMSATSMLYYNDKQQIILRKHRGMV

SEQ ID NO: 92647 - protein, 35 aa, Artificial Sequence; identical to SEQ ID NO: 39584
  Cyclic GFR-binding peptide
  MOD_RES (1)..(33)..(35): Xaa is C or S

SEQ ID NO: 92648 - protein, 34 aa, Artificial Sequence; identical to SEQ ID NO: 10654
  Cyclic GFR-binding peptide
  MOD_RES (6)..(7): Xaa is C or S

SEQ ID NO: 92649 - protein, 35 aa, Artificial Sequence
  Cyclic GFR-binding peptide
  MOD_RES (3)..(4): Xaa is C or S
EPXXVPEKMNAISILYFDENKNVVLKKYRNMTVES

SEQ ID NO: 92650 - protein, 32 aa, Artificial Sequence; identical to SEQ ID NO: 10655
  Cyclic GFR-binding peptide
  MOD_RES (4)..(4): Xaa is C or S

SEQ ID NO: 92651 - protein, 29 aa, Artificial Sequence
  Cyclic GFR-binding peptide
PEKMNAISILYFDENKNVVLKKYRNMTVE

SEQ ID NO: 92652 - protein, 30 aa, Artificial Sequence
  Cyclic GFR-binding peptide
  MOD_RES (3)..(4): Xaa is C or S
EPXXVPEKMSPINILYFDENKNVVYGKIPN

SEQ ID NO: 92653 - protein, 30 aa, Artificial Sequence; identical to SEQ ID NO: 39587
  Cyclic GFR-binding peptide

SEQ ID NO: 92654 - protein, 41 aa, Artificial Sequence; identical to SEQ ID NO: 10658
  Cyclic GFR-binding peptide
  MOD_RES (5)..(6)..(38)..(40): Xaa is C or S

SEQ ID NO: 92655 - protein, 31 aa, Artificial Sequence
  Cyclic GFR-binding peptide
  MOD_RES (4)..(5): Xaa is C or S
AGPXXTPTKMEPISMLYLNDKQQIIKFKYEG

SEQ ID NO: 92656 - protein, 35 aa, Artificial Sequence; identical to SEQ ID NO: 10660
  Cyclic GFR-binding peptide
  MOD_RES (6)..(7): Xaa is C or S

SEQ ID NO: 92657 - protein, 27 aa, Artificial Sequence
  Cyclic GFR-binding peptide
VPTELSATSMLYYDENEKVVLRKHRDM

SEQ ID NO: 92658 - protein, 26 aa, Artificial Sequence
  Cyclic GFR-binding peptide
LEPISMLYLDEYDKVVKFKYEEMVVE

SEQ ID NO: 92659 - protein, 25 aa, Artificial Sequence
  Cyclic GFR-binding peptide
PQALSPISILYKVGRKPKVLKYHYM

SEQ ID NO: 92660 - protein, 29 aa, Artificial Sequence
  Cyclic GFR-binding peptide
  MOD_RES (3)..(4): Xaa is C or S
KPXXAPTQLSPISVLYKDDSSNVILKYHY

SEQ ID NO: 92661 - protein, 26 aa, Artificial Sequence
  Cyclic GFR-binding peptide
  MOD_RES (26)..(26): Xaa is C or S
SPINMLYFDNGRVLLYGKIPMIVEEX

SEQ ID NO: 92662 - protein, 34 aa, Artificial Sequence
  Cyclic GFR-binding peptide
  MOD_RES (2)..(3): Xaa is C or S
TXXVPTRLSATSILYYDSANNVVLRKHRDMVVES

SEQ ID NO: 92663 - protein, 30 aa, Artificial Sequence; identical to SEQ ID NO: 10669
  Cyclic GFR-binding peptide
  MOD_RES (2)..(3): Xaa is C or S

SEQ ID NO: 92664 - protein, 36 aa, Artificial Sequence; identical to SEQ ID NO: 10670
  Cyclic GFR-binding peptide
  MOD_RES (1)..(2)..(34)..(36): Xaa is C or S

SEQ ID NO: 92665 - protein, 27 aa, Artificial Sequence
  Cyclic GFR-binding peptide
TELSPINMLYFDENEKVVYGKIPDMVV

SEQ ID NO: 92666 - protein, 26 aa, Artificial Sequence
  Cyclic GFR-binding peptide
LSATSILYYVGRTPKVLRKHRMVVKS

SEQ ID NO: 92667 - protein, 32 aa, Artificial Sequence; identical to SEQ ID NO: 10674
  Cyclic GFR-binding peptide
  MOD_RES (2)..(3): Xaa is C or S

SEQ ID NO: 92668 - protein, 30 aa, Artificial Sequence; identical to SEQ ID NO: 10677
  Cyclic GFR-binding peptide

SEQ ID NO: 92669 - protein, 27 aa, Artificial Sequence
  Cyclic GFR-binding peptide
LEPISVLYLDDSSNVIKFKYENMVVRS

SEQ ID NO: 92670 - protein, 26 aa, Artificial Sequence
  Cyclic GFR-binding peptide
  MOD_RES (1)..(1): Xaa is C or S
XTPTKMSPISMLYKNDKQQIILKYHY

SEQ ID NO: 92671 - protein, 37 aa, Artificial Sequence; identical to SEQ ID NO: 10678
  Cyclic GFR-binding peptide
  MOD_RES (3)..(35)..(37): Xaa is C or S

SEQ ID NO: 92672 - protein, 23 aa, Artificial Sequence
  Cyclic GFR-binding peptide
SPISILYKDKGVVTYLKYHYGMA

SEQ ID NO: 92673 - protein, 32 aa, Artificial Sequence; identical to SEQ ID NO: 10681
  Cyclic GFR-binding peptide
  MOD_RES (4)..(5): Xaa is C or S

SEQ ID NO: 92674 - protein, 31 aa, Artificial Sequence; identical to SEQ ID NO: 10682
  Cyclic GFR-binding peptide
  MOD_RES (1)..(2): Xaa is C or S

SEQ ID NO: 92675 - protein, 24 aa, Artificial Sequence
  Cyclic GFR-binding peptide
PQALSPISILYKVGRKPKVLKYHY

SEQ ID NO: 92676 - protein, 33 aa, Artificial Sequence; identical to SEQ ID NO: 10686
  Cyclic GFR-binding peptide
  MOD_RES (5)..(6): Xaa is C or S

SEQ ID NO: 92677 - protein, 26 aa, Artificial Sequence
  Cyclic GFR-binding peptide
ELSPISMLYKDEYDKVVLKYHYEMVV

SEQ ID NO: 92678 - protein, 24 aa, Artificial Sequence
  Cyclic GFR-binding peptide
PEKMSATSILYYDENKNVVLRKHR

SEQ ID NO: 92679 - protein, 37 aa, Artificial Sequence; identical to SEQ ID NO: 10693
  Cyclic GFR-binding peptide
  MOD_RES (3)..(4)..(36): Xaa is C or S

SEQ ID NO: 92680 - protein, 29 aa, Artificial Sequence
  Cyclic GFR-binding peptide
  MOD_RES (3)..(4): Xaa is C or S
KPXXAPTKLSPISVLYKDDSSNVILKYHY

SEQ ID NO: 92681 - protein, 27 aa, Artificial Sequence
  Cyclic GFR-binding peptide
  MOD_RES (27)..(27): Xaa is C or S
LNAISILYFIGKTPKILKKYRMIVKSX

SEQ ID NO: 92682 - protein, 41 aa, Artificial Sequence; identical to SEQ ID NO: 42598
  Cyclic GFR-binding peptide
  MOD_RES (5)..(6)..(38)..(40): Xaa is C or S

SEQ ID NO: 92683 - protein, 33 aa, Artificial Sequence
  Cyclic GFR-binding peptide
  MOD_RES (3)..(4): Xaa is C or S
PTXXVPTRLEPISILYLDSANNVVKFKYEDMVV

SEQ ID NO: 92684 - protein, 30 aa, Artificial Sequence; identical to SEQ ID NO: 42600
  Cyclic GFR-binding peptide
  MOD_RES (30)..(30): Xaa is C or S

SEQ ID NO: 92685 - protein, 35 aa, Artificial Sequence
  Cyclic GFR-binding peptide
  MOD_RES (1)..(2)..(34): Xaa is C or S
XXVPARLSATSILYYDAANNVVLRKHRDMVVEAXG

SEQ ID NO: 92686 - protein, 29 aa, Artificial Sequence
  Cyclic GFR-binding peptide
  MOD_RES (3)..(4): Xaa is C or S
KAXXVPTELSPISMLYKDENEKVVLKYHY

SEQ ID NO: 92687 - protein, 31 aa, Artificial Sequence
  Cyclic GFR-binding peptide
  MOD_RES (5)..(6): Xaa is C or S
SAGPXXTPTKMSPISMLYKNDKQQIILKYHY

SEQ ID NO: 92688 - protein, 30 aa, Artificial Sequence; identical to SEQ ID NO: 77715
  Cyclic GFR-binding peptide

SEQ ID NO: 92689 - protein, 22 aa, Artificial Sequence
  Cyclic GFR-binding peptide
SPISILYKVGRTPKVLKYHYMV

SEQ ID NO: 92690 - protein, 40 aa, Artificial Sequence
  Cyclic GFR-binding peptide
  MOD_RES (5)..(6)..(37)..(39): Xaa is C or S
VPSTXXAPVKTSPISMLYKDNGRVLLLKYHYMIVEEXGXL

SEQ ID NO: 92691 - protein, 38 aa, Artificial Sequence; identical to SEQ ID NO: 39639
  Cyclic GFR-binding peptide
  MOD_RES (4)..(5)..(37): Xaa is C or S

SEQ ID NO: 92692 - protein, 33 aa, Artificial Sequence; identical to SEQ ID NO: 10709
  Cyclic GFR-binding peptide
  MOD_RES (6)..(7): Xaa is C or S

SEQ ID NO: 92693 - protein, 41 aa, Artificial Sequence; identical to SEQ ID NO: 10711
  Cyclic GFR-binding peptide
  MOD_RES (6)..(7)..(38)..(40): Xaa is C or S

SEQ ID NO: 92694 - protein, 24 aa, Artificial Sequence
  Cyclic GFR-binding peptide
PEKMEPISILYLDENKNVVKFKYE

SEQ ID NO: 92695 - protein, 27 aa, Artificial Sequence
  Cyclic GFR-binding peptide
NAISVLYFDDMGVPTLKKYREGMSVAE

SEQ ID NO: 92696 - protein, 35 aa, Artificial Sequence; identical to SEQ ID NO: 42624
  Cyclic GFR-binding peptide
  MOD_RES (33)..(35): Xaa is C or S

SEQ ID NO: 92697 - protein, 27 aa, Artificial Sequence
  Cyclic GFR-binding peptide
APTKLSPINVLYFDDSSNVIYGKIPNM

SEQ ID NO: 92698 - protein, 28 aa, Artificial Sequence
  Cyclic GFR-binding peptide
  MOD_RES (2)..(3): Xaa is C or S
PXXVPQDLSPISILYKVGRTPKVLKYHY

SEQ ID NO: 92699 - protein, 25 aa, Artificial Sequence
  Cyclic GFR-binding peptide
TELNAISMLYFDEYDKVVLKKYREM

SEQ ID NO: 92700 - protein, 23 aa, Artificial Sequence
  Cyclic GFR-binding peptide
NAISMLYFDENEKVVLKKYRDMV

SEQ ID NO: 92701 - protein, 27 aa, Artificial Sequence
  Cyclic GFR-binding peptide
  MOD_RES (27)..(27): Xaa is C or S
SATSILYYDKGVVTYLRKHRGMAVSEX

SEQ ID NO: 92702 - protein, 24 aa, Artificial Sequence
  Cyclic GFR-binding peptide
PARLSPISILYKDAANNVVLKYHY

SEQ ID NO: 92703 - protein, 36 aa, Artificial Sequence
  Cyclic GFR-binding peptide
  MOD_RES (1)..(33)..(35): Xaa is C or S
XVPARLSATSILYYDAANNVVLRKHRDMVVEAXGXR

SEQ ID NO: 92704 - protein, 30 aa, Artificial Sequence
  Cyclic GFR-binding peptide
  MOD_RES (28)..(30): Xaa is C or S
MSPINILYFDENKNVVYGKIPNMTVESXAX

SEQ ID NO: 92705 - protein, 26 aa, Artificial Sequence
  Cyclic GFR-binding peptide
PTKLSPINVLYFDDMGVPTYGKIPEG

SEQ ID NO: 92706 - protein, 33 aa, Artificial Sequence
  Cyclic GFR-binding peptide
  MOD_RES (3)..(4): Xaa is C or S
EPXXVPEKMSATSILYYDENKNVVLRKHRNMTV

SEQ ID NO: 92707 - protein, 37 aa, Artificial Sequence; identical to SEQ ID NO: 39656
  Cyclic GFR-binding peptide
  MOD_RES (6)..(7): Xaa is C or S

SEQ ID NO: 92708 - protein, 26 aa, Artificial Sequence
  Cyclic GFR-binding peptide
VPTRLSATSILYYDSANNVVLRKHRD

SEQ ID NO: 92709 - protein, 33 aa, Artificial Sequence
  Cyclic GFR-binding peptide
  MOD_RES (30)..(32): Xaa is C or S
EKMSPISILYKDENKNVVLKYHYNMTVESXAXR

SEQ ID NO: 92710 - protein, 37 aa, Artificial Sequence; identical to SEQ ID NO: 10728
  Cyclic GFR-binding peptide
  MOD_RES (4)..(5)..(37): Xaa is C or S

SEQ ID NO: 92711 - protein, 32 aa, Artificial Sequence; identical to SEQ ID NO: 42642
  Cyclic GFR-binding peptide
  MOD_RES (6)..(7): Xaa is C or S

SEQ ID NO: 92712 - protein, 37 aa, Artificial Sequence; identical to SEQ ID NO: 39663
  Cyclic GFR-binding peptide
  MOD_RES (1)..(34)..(36): Xaa is C or S

SEQ ID NO: 92713 - protein, 36 aa, Artificial Sequence; identical to SEQ ID NO: 10729
  Cyclic GFR-binding peptide
  MOD_RES (1)..(2)..(34)..(36): Xaa is C or S

SEQ ID NO: 92714 - protein, 29 aa, Artificial Sequence
  Cyclic GFR-binding peptide
  MOD_RES (29)..(29): Xaa is C or S
KMEPISILYLDENKNVVKFKYENMTVESX

SEQ ID NO: 92715 - protein, 35 aa, Artificial Sequence
  Cyclic GFR-binding peptide
  MOD_RES (2)..(3)..(35): Xaa is C or S
PXXVPEKMNAISILYFDENKNVVLKKYRNMTVESX

SEQ ID NO: 92716 - protein, 23 aa, Artificial Sequence
  Cyclic GFR-binding peptide
LNAISILYFDAANNVVLKKYRDM

SEQ ID NO: 92717 - protein, 27 aa, Artificial Sequence
  Cyclic GFR-binding peptide
  MOD_RES (27)..(27): Xaa is C or S
NAISMLYFDENEKVVLKKYRDMVVEGX

SEQ ID NO: 92718 - protein, 38 aa, Artificial Sequence
  Cyclic GFR-binding peptide
  MOD_RES (4)..(5)..(37): Xaa is C or S
PEPXXVPEKMSPINILYFDENKNVVYGKIPNMTVESXA

SEQ ID NO: 92719 - protein, 30 aa, Artificial Sequence; identical to SEQ ID NO: 39673
  Cyclic GFR-binding peptide
  MOD_RES (3)..(4): Xaa is C or S

SEQ ID NO: 92720 - protein, 36 aa, Artificial Sequence; identical to SEQ ID NO: 39676
  Cyclic GFR-binding peptide
  MOD_RES (4)..(5): Xaa is C or S

SEQ ID NO: 92721 - protein, 33 aa, Artificial Sequence; identical to SEQ ID NO: 42650
  Cyclic GFR-binding peptide
  MOD_RES (1)..(2): Xaa is C or S

SEQ ID NO: 92722 - protein, 28 aa, Artificial Sequence
  Cyclic GFR-binding peptide
  MOD_RES (1)..(2): Xaa is C or S
XXAPTQLSPISVLYKDDSSNVILKYHYN

SEQ ID NO: 92723 - protein, 25 aa, Artificial Sequence
  Cyclic GFR-binding peptide
SATSILYYIGKTPKILRKHRMIVKS

SEQ ID NO: 92724 - protein, 30 aa, Artificial Sequence; identical to SEQ ID NO: 20865
  Cyclic GFR-binding peptide
  MOD_RES (29)..(29): Xaa is C or S

SEQ ID NO: 92725 - protein, 33 aa, Artificial Sequence; identical to SEQ ID NO: 10746
  Cyclic GFR-binding peptide
  MOD_RES (5)..(6): Xaa is C or S

SEQ ID NO: 92726 - protein, 30 aa, Artificial Sequence; identical to SEQ ID NO: 39685
  Cyclic GFR-binding peptide

SEQ ID NO: 92727 - protein, 27 aa, Artificial Sequence
  Cyclic GFR-binding peptide
  MOD_RES (1)..(1): Xaa is C or S
XAPVKTEPISMLYLDNGRVLLKFKYEM

SEQ ID NO: 92728 - protein, 31 aa, Artificial Sequence; identical to SEQ ID NO: 39689
  Cyclic GFR-binding peptide
  MOD_RES (5)..(6): Xaa is C or S

SEQ ID NO: 92729 - protein, 24 aa, Artificial Sequence
  Cyclic GFR-binding peptide
TKLSPINILYFDKGVVTYYGKIPG

SEQ ID NO: 92730 - protein, 31 aa, Artificial Sequence
  Cyclic GFR-binding peptide
  MOD_RES (28)..(30): Xaa is C or S
DLSPINILYFIGKTPKIYGKIPMIVKSXKXS

SEQ ID NO: 92731 - protein, 34 aa, Artificial Sequence; identical to SEQ ID NO: 42663
  Cyclic GFR-binding peptide
  MOD_RES (32)..(34): Xaa is C or S

SEQ ID NO: 92732 - protein, 26 aa, Artificial Sequence
  Cyclic GFR-binding peptide
  MOD_RES (1)..(1): Xaa is C or S
XAPTKLNAISVLYFDSSNNVILKKYR

SEQ ID NO: 92733 - protein, 28 aa, Artificial Sequence
  Cyclic GFR-binding peptide
  MOD_RES (1)..(2): Xaa is C or S
XXVPQALEPISILYLVGRKPKVKFKYEM

SEQ ID NO: 92734 - protein, 23 aa, Artificial Sequence
  Cyclic GFR-binding peptide
LNAISILYFDSANNVVLKKYRDM

SEQ ID NO: 92735 - protein, 41 aa, Artificial Sequence; identical to SEQ ID NO: 10754
  Cyclic GFR-binding peptide
  MOD_RES (6)..(7)..(39)..(41): Xaa is C or S

SEQ ID NO: 92736 - protein, 28 aa, Artificial Sequence
  Cyclic GFR-binding peptide
  MOD_RES (1)..(2): Xaa is C or S
XXVPTELSPISMLYKDEYDKVVLKYHYE

SEQ ID NO: 92737 - protein, 24 aa, Artificial Sequence
  Cyclic GFR-binding peptide
NAISILYFDENKNVVLKKYRNMTV

SEQ ID NO: 92738 - protein, 30 aa, Artificial Sequence; identical to SEQ ID NO: 10756
  Cyclic GFR-binding peptide
  MOD_RES (1)..(2): Xaa is C or S

SEQ ID NO: 92739 - protein, 39 aa, Artificial Sequence; identical to SEQ ID NO: 10757
  Cyclic GFR-binding peptide
  MOD_RES (4)..(5)..(36)..(38): Xaa is C or S

SEQ ID NO: 92740 - protein, 29 aa, Artificial Sequence
  Cyclic GFR-binding peptide
  MOD_RES (2)..(3): Xaa is C or S
AXXVPTKLSATSILYYDKGVVTYLRKHRG

SEQ ID NO: 92741 - protein, 28 aa, Artificial Sequence
  Cyclic GFR-binding peptide
  MOD_RES (28)..(28): Xaa is C or S
LSATSMLYYDENEKVVLRKHRDMVVEGX

SEQ ID NO: 92742 - protein, 33 aa, Artificial Sequence; identical to SEQ ID NO: 10760
  Cyclic GFR-binding peptide
  MOD_RES (32)..(32): Xaa is C or S

SEQ ID NO: 92743 - protein, 31 aa, Artificial Sequence; identical to SEQ ID NO: 39704
  Cyclic GFR-binding peptide
  MOD_RES (29)..(31): Xaa is C or S

SEQ ID NO: 92744 - protein, 29 aa, Artificial Sequence
  Cyclic GFR-binding peptide
  MOD_RES (3)..(4): Xaa is C or S
KAXXVPTELSPINMLYFDENEKVVYGKIP

SEQ ID NO: 92745 - protein, 29 aa, Artificial Sequence
  Cyclic GFR-binding peptide
  MOD_RES (1)..(1): Xaa is C or S
XVPARLSATSILYYDAANNVVLRKHRDMV

SEQ ID NO: 92746 - protein, 31 aa, Artificial Sequence; identical to SEQ ID NO: 10763
  Cyclic GFR-binding peptide
  MOD_RES (29)..(31): Xaa is C or S

SEQ ID NO: 92747 - protein, 32 aa, Artificial Sequence; identical to SEQ ID NO: 10764
  Cyclic GFR-binding peptide
  MOD_RES (5)..(6): Xaa is C or S

SEQ ID NO: 92748 - protein, 21 aa, Artificial Sequence
  Cyclic GFR-binding peptide
LNAISMLYFDEYDKVVLKKYR

SEQ ID NO: 92749 - protein, 39 aa, Artificial Sequence; identical to SEQ ID NO: 39708
  Cyclic GFR-binding peptide
  MOD_RES (3)..(4)..(36)..(38): Xaa is C or S

SEQ ID NO: 92750 - protein, 37 aa, Artificial Sequence
  Cyclic GFR-binding peptide
  MOD_RES (6)..(7): Xaa is C or S
STPPTXXVPTRLEPISILYLDSANNVVKFKYEDMVVE

SEQ ID NO: 92751 - protein, 28 aa, Artificial Sequence
  Cyclic GFR-binding peptide
  MOD_RES (27)..(27): Xaa is C or S
EPISVLYLDDSSNVIKFKYENMVVRAXG

SEQ ID NO: 92752 - protein, 42 aa, Artificial Sequence; identical to SEQ ID NO: 10769
  Cyclic GFR-binding peptide
  MOD_RES (6)..(7)..(39)..(41): Xaa is C or S

SEQ ID NO: 92753 - protein, 33 aa, Artificial Sequence; identical to SEQ ID NO: 42685
  Cyclic GFR-binding peptide
  MOD_RES (32)..(32): Xaa is C or S

SEQ ID NO: 92754 - protein, 38 aa, Artificial Sequence
  Cyclic GFR-binding peptide
  MOD_RES (6)..(7): Xaa is C or S
STPPTXXVPTRLSATSILYYDSANNVVLRKHRDMVVES

SEQ ID NO: 92755 - protein, 31 aa, Artificial Sequence; identical to SEQ ID NO: 10770
  Cyclic GFR-binding peptide
  MOD_RES (1)..(1): Xaa is C or S

SEQ ID NO: 92756 - protein, 30 aa, Artificial Sequence; identical to SEQ ID NO: 42694
  Cyclic GFR-binding peptide
  MOD_RES (4)..(5): Xaa is C or S

SEQ ID NO: 92757 - protein, 35 aa, Artificial Sequence; identical to SEQ ID NO: 10772
  Cyclic GFR-binding peptide
  MOD_RES (4)..(5): Xaa is C or S

SEQ ID NO: 92758 - protein, 37 aa, Artificial Sequence; identical to SEQ ID NO: 10773
  Cyclic GFR-binding peptide
  MOD_RES (2)..(3)..(35)..(37): Xaa is C or S

SEQ ID NO: 92759 - protein, 37 aa, Artificial Sequence; identical to SEQ ID NO: 39717
  Cyclic GFR-binding peptide
  MOD_RES (5)..(6): Xaa is C or S

SEQ ID NO: 92760 - protein, 26 aa, Artificial Sequence
  Cyclic GFR-binding peptide
SATSILYYDENKNVVLRKHRNMTVES

SEQ ID NO: 92761 - protein, 29 aa, Artificial Sequence
  Cyclic GFR-binding peptide
  MOD_RES (29)..(29): Xaa is C or S
ELSATSMLYYDEYDKVVLRKHREMVVEGX

SEQ ID NO: 92762 - protein, 32 aa, Artificial Sequence
  Cyclic GFR-binding peptide
  MOD_RES (32)..(32): Xaa is C or S
VPTRLEPISILYLDSANNVVKFKYEDMVVESX

SEQ ID NO: 92763 - protein, 34 aa, Artificial Sequence; identical to SEQ ID NO: 39722
  Cyclic GFR-binding peptide
  MOD_RES (6)..(7): Xaa is C or S

SEQ ID NO: 92764 - protein, 40 aa, Artificial Sequence
  Cyclic GFR-binding peptide
  MOD_RES (5)..(6)..(38)..(40): Xaa is C or S
TPPTXXVPTRLSATSILYYDSANNVVLRKHRDMVVESXGX

SEQ ID NO: 92765 - protein, 28 aa, Artificial Sequence
  Cyclic GFR-binding peptide
  MOD_RES (28)..(28): Xaa is C or S
KTSATSMLYYDNGRVLLLRKHRMIVEEX

SEQ ID NO: 92766 - protein, 27 aa, Artificial Sequence
  Cyclic GFR-binding peptide
PTKLEPISVLYLDDMGVPTKFKYEEGM

SEQ ID NO: 92767 - protein, 29 aa, Artificial Sequence
  Cyclic GFR-binding peptide
  MOD_RES (27)..(29): Xaa is C or S
SPINVLYFDDSSNVIYGKIPNMVVRSXGX

SEQ ID NO: 92768 - protein, 25 aa, Artificial Sequence
  Cyclic GFR-binding peptide
EPISVLYLDSSNNVIKFKYENMVVK

SEQ ID NO: 92769 - protein, 28 aa, Artificial Sequence
  Cyclic GFR-binding peptide
  MOD_RES (1)..(2): Xaa is C or S
XXVSQDLSPINILYFIGKTPKIYGKIPM

SEQ ID NO: 92770 - protein, 35 aa, Artificial Sequence
  Cyclic GFR-binding peptide
  MOD_RES (2)..(3)..(34): Xaa is C or S
TXXAPVKTSATSMLYYDNGRVLLLRKHRMIVEEXG

SEQ ID NO: 92771 - protein, 24 aa, Artificial Sequence
  Cyclic GFR-binding peptide
PTKLEPISVLYLDDSSNVIKFKYE

SEQ ID NO: 92772 - protein, 30 aa, Artificial Sequence; identical to SEQ ID NO: 10783
  Cyclic GFR-binding peptide

SEQ ID NO: 92773 - protein, 31 aa, Artificial Sequence; identical to SEQ ID NO: 10784
  Cyclic GFR-binding peptide
  MOD_RES (4)..(5): Xaa is C or S

SEQ ID NO: 92774 - protein, 36 aa, Artificial Sequence; identical to SEQ ID NO: 42705
  Cyclic GFR-binding peptide
  MOD_RES (6)..(7): Xaa is C or S

SEQ ID NO: 92775 - protein, 28 aa, Artificial Sequence
  Cyclic GFR-binding peptide
  MOD_RES (1)..(2): Xaa is C or S
XXVPTELSPINMLYFDEYDKVVYGKIPE

SEQ ID NO: 92776 - protein, 24 aa, Artificial Sequence
  Cyclic GFR-binding peptide
LNAISILYFVGRTPKVLKKYRMVV

SEQ ID NO: 92777 - protein, 31 aa, Artificial Sequence
  Cyclic GFR-binding peptide
  MOD_RES (1)..(1): Xaa is C or S
XTPTKMEPISMLYLNDKQQIIKFKYEGMVVD

SEQ ID NO: 92778 - protein, 40 aa, Artificial Sequence; identical to SEQ ID NO: 77766
  Cyclic GFR-binding peptide
  MOD_RES (6)..(7)..(39): Xaa is C or S

SEQ ID NO: 92779 - protein, 34 aa, Artificial Sequence; identical to SEQ ID NO: 39732
  Cyclic GFR-binding peptide
  MOD_RES (1)..(2)..(34): Xaa is C or S

SEQ ID NO: 92780 - protein, 30 aa, Artificial Sequence
  Cyclic GFR-binding peptide
  MOD_RES (1)..(1): Xaa is C or S
XAPVKTSPISMLYKDNGRVLLLKYHYMIVE

SEQ ID NO: 92781 - protein, 30 aa, Artificial Sequence; identical to SEQ ID NO: 39736
  Cyclic GFR-binding peptide
  MOD_RES (4)..(5): Xaa is C or S

SEQ ID NO: 92782 - protein, 32 aa, Artificial Sequence; identical to SEQ ID NO: 10792
  Cyclic GFR-binding peptide
  MOD_RES (30)..(32): Xaa is C or S

SEQ ID NO: 92783 - protein, 42 aa, Artificial Sequence; identical to SEQ ID NO: 39739
  Cyclic GFR-binding peptide
  MOD_RES (6)..(7)..(39)..(41): Xaa is C or S

SEQ ID NO: 92784 - protein, 36 aa, Artificial Sequence
  Cyclic GFR-binding peptide
  MOD_RES (6)..(7): Xaa is C or S
GIPEPXXVPEKMSPINILYFDENKNVVYGKIPNMTV

SEQ ID NO: 92785 - protein, 23 aa, Artificial Sequence
  Cyclic GFR-binding peptide
LSPISVLYKDDSSNVILKYHYNM

SEQ ID NO: 92786 - protein, 29 aa, Artificial Sequence
  Cyclic GFR-binding peptide
PQALSPISILYKVGRKPKVLKYHYMIVRS

SEQ ID NO: 92787 - protein, 28 aa, Artificial Sequence
  Cyclic GFR-binding peptide
  MOD_RES (27)..(27): Xaa is C or S
TSPINMLYFDNGRVLLYGKIPMIVEEXG

SEQ ID NO: 92788 - protein, 32 aa, Artificial Sequence
  Cyclic GFR-binding peptide
  MOD_RES (31)..(31): Xaa is C or S
VPQDLSPINILYFVGRTPKVYGKIPMVVKSXK

SEQ ID NO: 92789 - protein, 29 aa, Artificial Sequence
  Cyclic GFR-binding peptide
  MOD_RES (3)..(4): Xaa is C or S
KAXXVPTKLSATSILYYDKGVVTYLRKHR

SEQ ID NO: 92790 - protein, 34 aa, Artificial Sequence
  Cyclic GFR-binding peptide
  MOD_RES (6)..(7): Xaa is C or S
RVPSTXXAPVKTEPISMLYLDNGRVLLKFKYEMI

SEQ ID NO: 92791 - protein, 31 aa, Artificial Sequence; identical to SEQ ID NO: 39748
  Cyclic GFR-binding peptide
  MOD_RES (1)..(2): Xaa is C or S

SEQ ID NO: 92792 - protein, 37 aa, Artificial Sequence; identical to SEQ ID NO: 10802
  Cyclic GFR-binding peptide
  MOD_RES (4)..(5)..(36): Xaa is C or S

SEQ ID NO: 92793 - protein, 27 aa, Artificial Sequence
  Cyclic GFR-binding peptide
  MOD_RES (1)..(2): Xaa is C or S
XXVPQALSPINILYFVGRKPKVYGKIP

SEQ ID NO: 92794 - protein, 24 aa, Artificial Sequence
  Cyclic GFR-binding peptide
TKMSPISMLYKNDKQQIILKYHYG

SEQ ID NO: 92795 - protein, 31 aa, Artificial Sequence
  Cyclic GFR-binding peptide
  MOD_RES (2)..(3): Xaa is C or S
PXXVPQDLSPINILYFVGRTPKVYGKIPMVV

SEQ ID NO: 92796 - protein, 27 aa, Artificial Sequence
  Cyclic GFR-binding peptide
ELNAISMLYFDENEKVVLKKYRDMVVE

SEQ ID NO: 92797 - protein, 30 aa, Artificial Sequence
  Cyclic GFR-binding peptide
APVKTSATSMLYYDNGRVLLLRKHRMIVEE

SEQ ID NO: 92798 - protein, 31 aa, Artificial Sequence; identical to SEQ ID NO: 10809
  Cyclic GFR-binding peptide
  MOD_RES (30)..(30): Xaa is C or S

SEQ ID NO: 92799 - protein, 30 aa, Artificial Sequence
  Cyclic GFR-binding peptide
  MOD_RES (4)..(5): Xaa is C or S
AGPXXTPTKMSPISMLYKNDKQQIILKYHY

SEQ ID NO: 92800 - protein, 32 aa, Artificial Sequence
  Cyclic GFR-binding peptide
  MOD_RES (5)..(6): Xaa is C or S
VPSTXXAPVKTSATSMLYYDNGRVLLLRKHRM

SEQ ID NO: 92801 - protein, 29 aa, Artificial Sequence
  Cyclic GFR-binding peptide
KLSPINVLYFDDMGVPTYGKIPEGMSVAE

SEQ ID NO: 92802 - protein, 33 aa, Artificial Sequence; identical to SEQ ID NO: 42753
  Cyclic GFR-binding peptide
  MOD_RES (6)..(7): Xaa is C or S

SEQ ID NO: 92803 - protein, 24 aa, Artificial Sequence
  Cyclic GFR-binding peptide
PVKTSATSMLYYDNGRVLLLRKHR

SEQ ID NO: 92804 - protein, 31 aa, Artificial Sequence
  Cyclic GFR-binding peptide
  MOD_RES (3)..(4): Xaa is C or S
KAXXVPTKLSATSILYYDKGVVTYLRKHRGM

SEQ ID NO: 92805 - protein, 27 aa, Artificial Sequence
  Cyclic GFR-binding peptide
KLSPINVLYFDDSSNVIYGKIPNMVVR

SEQ ID NO: 92806 - protein, 31 aa, Artificial Sequence; identical to SEQ ID NO: 10815
  Cyclic GFR-binding peptide
  MOD_RES (2)..(2): Xaa is C or S

SEQ ID NO: 92807 - protein, 28 aa, Artificial Sequence
  Cyclic GFR-binding peptide
  MOD_RES (27)..(27): Xaa is C or S
SPINVLYFDSSNNVIYGKIPNMVVKAXG

SEQ ID NO: 92808 - protein, 24 aa, Artificial Sequence
  Cyclic GFR-binding peptide
LSPINVLYFDDSSNVIYGKIPNMV

SEQ ID NO: 92809 - protein, 24 aa, Artificial Sequence
  Cyclic GFR-binding peptide
NAISILYFIGKTPKILKKYRMIVK

SEQ ID NO: 92810 - protein, 21 aa, Artificial Sequence
  Cyclic GFR-binding peptide
NAISILYFVGRTPKVLKKYRM

SEQ ID NO: 92811 - protein, 37 aa, Artificial Sequence
  Cyclic GFR-binding peptide
  MOD_RES (6)..(7): Xaa is C or S
GSAGPXXTPTKMSATSMLYYNDKQQIILRKHRGMVVD

SEQ ID NO: 92812 - protein, 31 aa, Artificial Sequence; identical to SEQ ID NO: 10821
  Cyclic GFR-binding peptide
  MOD_RES (1)..(2): Xaa is C or S

SEQ ID NO: 92813 - protein, 25 aa, Artificial Sequence
  Cyclic GFR-binding peptide
ALSPINILYFVGRKPKVYGKIPMIV

SEQ ID NO: 92814 - protein, 22 aa, Artificial Sequence
  Cyclic GFR-binding peptide
QLSPISVLYKDDSSNVILKYHY

SEQ ID NO: 92815 - protein, 34 aa, Artificial Sequence; identical to SEQ ID NO: 39777
  Cyclic GFR-binding peptide
  MOD_RES (33)..(33): Xaa is C or S

SEQ ID NO: 92816 - protein, 37 aa, Artificial Sequence; identical to SEQ ID NO: 10828
  Cyclic GFR-binding peptide
  MOD_RES (4)..(5): Xaa is C or S

SEQ ID NO: 92817 - protein, 39 aa, Artificial Sequence; identical to SEQ ID NO: 10830
  Cyclic GFR-binding peptide
  MOD_RES (3)..(4)..(36)..(38): Xaa is C or S

SEQ ID NO: 92818 - protein, 28 aa, Artificial Sequence
  Cyclic GFR-binding peptide
  MOD_RES (28)..(28): Xaa is C or S
LSPINILYFDAANNVVYGKIPDMVVEAX

SEQ ID NO: 92819 - protein, 34 aa, Artificial Sequence
  Cyclic GFR-binding peptide
  MOD_RES (32)..(34): Xaa is C or S
TPTKMEPISMLYLNDKQQIIKFKYEGMVVDRXGX

SEQ ID NO: 92820 - protein, 31 aa, Artificial Sequence
  Cyclic GFR-binding peptide
  MOD_RES (2)..(3): Xaa is C or S
TXXAPVKTSATSMLYYDNGRVLLLRKHRMIV

SEQ ID NO: 92821 - protein, 35 aa, Artificial Sequence; identical to SEQ ID NO: 39783
  Cyclic GFR-binding peptide
  MOD_RES (4)..(5): Xaa is C or S

SEQ ID NO: 92822 - protein, 23 aa, Artificial Sequence
  Cyclic GFR-binding peptide
SPISILYKVGRKPKVLKYHYMIV

SEQ ID NO: 92823 - protein, 25 aa, Artificial Sequence
  Cyclic GFR-binding peptide
KLNAISVLYFDSSNNVILKKYRNMV

SEQ ID NO: 92824 - protein, 31 aa, Artificial Sequence; identical to SEQ ID NO: 10840
  Cyclic GFR-binding peptide
  MOD_RES (31)..(31): Xaa is C or S

SEQ ID NO: 92825 - protein, 37 aa, Artificial Sequence; identical to SEQ ID NO: 10841
  Cyclic GFR-binding peptide
  MOD_RES (5)..(6): Xaa is C or S

SEQ ID NO: 92826 - protein, 39 aa, Artificial Sequence; identical to SEQ ID NO: 77788
  Cyclic GFR-binding peptide
  MOD_RES (6)..(7)..(38): Xaa is C or S

SEQ ID NO: 92827 - protein, 26 aa, Artificial Sequence
  Cyclic GFR-binding peptide
TKLSPISVLYKDDSSNVILKYHYNMV

SEQ ID NO: 92828 - protein, 27 aa, Artificial Sequence
  Cyclic GFR-binding peptide
  MOD_RES (1)..(1): Xaa is C or S
XVPQDLSPINILYFVGRTPKVYGKIPM

SEQ ID NO: 92829 - protein, 24 aa, Artificial Sequence
  Cyclic GFR-binding peptide
LSPISVLYKDSSNNVILKYHYNMV

SEQ ID NO: 92830 - protein, 22 aa, Artificial Sequence
  Cyclic GFR-binding peptide
NAISILYFDKGVVTYLKKYRGM

SEQ ID NO: 92831 - protein, 34 aa, Artificial Sequence; identical to SEQ ID NO: 39795
  Cyclic GFR-binding peptide
  MOD_RES (3)..(4): Xaa is C or S

SEQ ID NO: 92832 - protein, 31 aa, Artificial Sequence; identical to SEQ ID NO: 42794
  Cyclic GFR-binding peptide
  MOD_RES (1)..(1): Xaa is C or S

SEQ ID NO: 92833 - protein, 31 aa, Artificial Sequence; identical to SEQ ID NO: 39801
  Cyclic GFR-binding peptide
  MOD_RES (1)..(2): Xaa is C or S

SEQ ID NO: 92834 - protein, 27 aa, Artificial Sequence
  Cyclic GFR-binding peptide
  MOD_RES (1)..(1): Xaa is C or S
XAPTQLEPISVLYLDDSSNVIKFKYEN

SEQ ID NO: 92835 - protein, 30 aa, Artificial Sequence; identical to SEQ ID NO: 10855
  Cyclic GFR-binding peptide
  MOD_RES (4)..(5): Xaa is C or S

SEQ ID NO: 92836 - protein, 34 aa, Artificial Sequence; identical to SEQ ID NO: 10861
  Cyclic GFR-binding peptide
  MOD_RES (5)..(6): Xaa is C or S

SEQ ID NO: 92837 - protein, 30 aa, Artificial Sequence; identical to SEQ ID NO: 10862
  Cyclic GFR-binding peptide

SEQ ID NO: 92838 - protein, 32 aa, Artificial Sequence; identical to SEQ ID NO: 42799
  Cyclic GFR-binding peptide
  MOD_RES (6)..(7): Xaa is C or S

SEQ ID NO: 92839 - protein, 30 aa, Artificial Sequence; identical to SEQ ID NO: 39810
  Cyclic GFR-binding peptide

SEQ ID NO: 92840 - protein, 29 aa, Artificial Sequence
  Cyclic GFR-binding peptide
  MOD_RES (3)..(4): Xaa is C or S
KPXXAPTQLSPINVLYFDDSSNVIYGKIP

SEQ ID NO: 92841 - protein, 30 aa, Artificial Sequence; identical to SEQ ID NO: 42803
  Cyclic GFR-binding peptide
  MOD_RES (29)..(29): Xaa is C or S

SEQ ID NO: 92842 - protein, 35 aa, Artificial Sequence; identical to SEQ ID NO: 77796
  Cyclic GFR-binding peptide
  MOD_RES (6)..(7): Xaa is C or S

SEQ ID NO: 92843 - protein, 23 aa, Artificial Sequence
  Cyclic GFR-binding peptide
TKLNAISVLYFDDMGVPTLKKYR

SEQ ID NO: 92844 - protein, 29 aa, Artificial Sequence
  Cyclic GFR-binding peptide
  MOD_RES (2)..(3): Xaa is C or S
AXXVPTELEPISMLYLDEYDKVVKFKYEE

SEQ ID NO: 92845 - protein, 28 aa, Artificial Sequence
  Cyclic GFR-binding peptide
TELSPINMLYFDENEKVVYGKIPDMVVE

SEQ ID NO: 92846 - protein, 25 aa, Artificial Sequence
  Cyclic GFR-binding peptide
RLSPINILYFDAANNVVYGKIPDMV

SEQ ID NO: 92847 - protein, 38 aa, Artificial Sequence; identical to SEQ ID NO: 10866
  Cyclic GFR-binding peptide
  MOD_RES (6)..(7): Xaa is C or S

SEQ ID NO: 92848 - protein, 29 aa, Artificial Sequence
  Cyclic GFR-binding peptide
  MOD_RES (1)..(1): Xaa is C or S
XVPTRLEPISILYLDSANNVVKFKYEDMV

SEQ ID NO: 92849 - protein, 28 aa, Artificial Sequence
  Cyclic GFR-binding peptide
QDLEPISILYLVGRTPKVKFKYEMVVKS

SEQ ID NO: 92850 - protein, 31 aa, Artificial Sequence; identical to SEQ ID NO: 10869
  Cyclic GFR-binding peptide

SEQ ID NO: 92851 - protein, 28 aa, Artificial Sequence
  Cyclic GFR-binding peptide
APTKLEPISVLYLDDSSNVIKFKYENMV

SEQ ID NO: 92852 - protein, 29 aa, Artificial Sequence
  Cyclic GFR-binding peptide
  MOD_RES (26)..(28): Xaa is C or S
EPISMLYLDNGRVLLKFKYEMIVEEXGXL

SEQ ID NO: 92853 - protein, 28 aa, Artificial Sequence
  Cyclic GFR-binding peptide
  MOD_RES (26)..(28): Xaa is C or S
SPISILYKVGRTPKVLKYHYMVVKSXKX

SEQ ID NO: 92854 - protein, 31 aa, Artificial Sequence; identical to SEQ ID NO: 39826
  Cyclic GFR-binding peptide
  MOD_RES (29)..(31): Xaa is C or S

SEQ ID NO: 92855 - protein, 40 aa, Artificial Sequence; identical to SEQ ID NO: 42817
  Cyclic GFR-binding peptide
  MOD_RES (4)..(5)..(37)..(39): Xaa is C or S

SEQ ID NO: 92856 - protein, 31 aa, Artificial Sequence; identical to SEQ ID NO: 77806
  Cyclic GFR-binding peptide
  MOD_RES (4)..(5): Xaa is C or S

SEQ ID NO: 92857 - protein, 23 aa, Artificial Sequence
  Cyclic GFR-binding peptide
LSATSMLYYDENEKVVLRKHRDM

SEQ ID NO: 92858 - protein, 26 aa, Artificial Sequence
  Cyclic GFR-binding peptide
EPISVLYLDDSSNVIKFKYENMVVRA

SEQ ID NO: 92859 - protein, 34 aa, Artificial Sequence
  Cyclic GFR-binding peptide
  MOD_RES (31)..(33): Xaa is C or S
APVKTSATSMLYYDNGRVLLLRKHRMIVEEXGXL

SEQ ID NO: 92860 - protein, 38 aa, Artificial Sequence; identical to SEQ ID NO: 10878
  Cyclic GFR-binding peptide
  MOD_RES (2)..(3)..(35)..(37): Xaa is C or S

SEQ ID NO: 92861 - protein, 30 aa, Artificial Sequence; identical to SEQ ID NO: 39833
  Cyclic GFR-binding peptide
  MOD_RES (3)..(3): Xaa is C or S

SEQ ID NO: 92862 - protein, 23 aa, Artificial Sequence
  Cyclic GFR-binding peptide
EPISMLYLNDKQQIIKFKYEGMV

SEQ ID NO: 92863 - protein, 20 aa, Artificial Sequence
  Cyclic GFR-binding peptide
SPINVLYFDDSSNVIYGKIP

SEQ ID NO: 92864 - protein, 30 aa, Artificial Sequence; identical to SEQ ID NO: 42825
  Cyclic GFR-binding peptide
  MOD_RES (4)..(5): Xaa is C or S

SEQ ID NO: 92865 - protein, 34 aa, Artificial Sequence; identical to SEQ ID NO: 42829
  Cyclic GFR-binding peptide
  MOD_RES (6)..(7): Xaa is C or S

SEQ ID NO: 92866 - protein, 32 aa, Artificial Sequence; identical to SEQ ID NO: 10882
  Cyclic GFR-binding peptide
  MOD_RES (30)..(32): Xaa is C or S

SEQ ID NO: 92867 - protein, 25 aa, Artificial Sequence
  Cyclic GFR-binding peptide
VPTELSPISMLYKDENEKVVLKYHY

SEQ ID NO: 92868 - protein, 30 aa, Artificial Sequence
  Cyclic GFR-binding peptide
PEKMNAISILYFDENKNVVLKKYRNMTVES

SEQ ID NO: 92869 - protein, 28 aa, Artificial Sequence
  Cyclic GFR-binding peptide
  MOD_RES (1)..(1): Xaa is C or S
XVPQALSATSILYYVGRKPKVLRKHRMI

SEQ ID NO: 92870 - protein, 41 aa, Artificial Sequence; identical to SEQ ID NO: 39838
  Cyclic GFR-binding peptide
  MOD_RES (6)..(7)..(39)..(41): Xaa is C or S

SEQ ID NO: 92871 - protein, 25 aa, Artificial Sequence
  Cyclic GFR-binding peptide
PTRLNAISILYFDSANNVVLKKYRD

SEQ ID NO: 92872 - protein, 30 aa, Artificial Sequence
  Cyclic GFR-binding peptide
  MOD_RES (3)..(4): Xaa is C or S
PTXXVPTRLEPISILYLDSANNVVKFKYED

SEQ ID NO: 92873 - protein, 28 aa, Artificial Sequence
  Cyclic GFR-binding peptide
  MOD_RES (26)..(28): Xaa is C or S
SPINMLYFDNGRVLLYGKIPMIVEEXGX

SEQ ID NO: 92874 - protein, 31 aa, Artificial Sequence; identical to SEQ ID NO: 42838
  Cyclic GFR-binding peptide
  MOD_RES (30)..(30): Xaa is C or S

SEQ ID NO: 92875 - protein, 39 aa, Artificial Sequence; identical to SEQ ID NO: 10885
  Cyclic GFR-binding peptide
  MOD_RES (7)..(39): Xaa is C or S

SEQ ID NO: 92876 - protein, 39 aa, Artificial Sequence; identical to SEQ ID NO: 10886
  Cyclic GFR-binding peptide
  MOD_RES (3)..(4)..(36)..(38): Xaa is C or S

SEQ ID NO: 92877 - protein, 37 aa, Artificial Sequence
  Cyclic GFR-binding peptide
  MOD_RES (3)..(4)..(36): Xaa is C or S
GPXXTPTKMSPISMLYKNDKQQIILKYHYGMVVDRXG

SEQ ID NO: 92878 - protein, 31 aa, Artificial Sequence; identical to SEQ ID NO: 42841
  Cyclic GFR-binding peptide
  MOD_RES (30)..(30): Xaa is C or S

SEQ ID NO: 92879 - protein, 26 aa, Artificial Sequence
  Cyclic GFR-binding peptide
EPISVLYLDDSSNVIKFKYENMVVRS

SEQ ID NO: 92880 - protein, 29 aa, Artificial Sequence
  Cyclic GFR-binding peptide
TKLEPISVLYLDDMGVPTKFKYEEGMSVA

SEQ ID NO: 92881 - protein, 36 aa, Artificial Sequence; identical to SEQ ID NO: 10892
  Cyclic GFR-binding peptide
  MOD_RES (3)..(4)..(35): Xaa is C or S

SEQ ID NO: 92882 - protein, 32 aa, Artificial Sequence; identical to SEQ ID NO: 39847
  Cyclic GFR-binding peptide
  MOD_RES (5)..(6): Xaa is C or S

SEQ ID NO: 92883 - protein, 39 aa, Artificial Sequence; identical to SEQ ID NO: 42851
  Cyclic GFR-binding peptide
  MOD_RES (4)..(5)..(37)..(39): Xaa is C or S

SEQ ID NO: 92884 - protein, 34 aa, Artificial Sequence; identical to SEQ ID NO: 42852
  Cyclic GFR-binding peptide
  MOD_RES (1)..(2)..(33): Xaa is C or S

SEQ ID NO: 92885 - protein, 26 aa, Artificial Sequence
  Cyclic GFR-binding peptide
EKMSATSILYYDENKNVVLRKHRNMT

SEQ ID NO: 92886 - protein, 31 aa, Artificial Sequence; identical to SEQ ID NO: 42856
  Cyclic GFR-binding peptide
  MOD_RES (31)..(31): Xaa is C or S

SEQ ID NO: 92887 - protein, 29 aa, Artificial Sequence
  Cyclic GFR-binding peptide
VSQDLSATSILYYIGKTPKILRKHRMIVK

SEQ ID NO: 92888 - protein, 26 aa, Artificial Sequence
  Cyclic GFR-binding peptide
LEPISILYLIGKTPKIKFKYEMIVKS

SEQ ID NO: 92889 - protein, 32 aa, Artificial Sequence; identical to SEQ ID NO: 39858
  Cyclic GFR-binding peptide
  MOD_RES (2)..(3): Xaa is C or S

SEQ ID NO: 92890 - protein, 29 aa, Artificial Sequence
  Cyclic GFR-binding peptide
  MOD_RES (1)..(2): Xaa is C or S
XXAPTKLSPINVLYFDDSSNVIYGKIPNM

SEQ ID NO: 92891 - protein, 28 aa, Artificial Sequence
  Cyclic GFR-binding peptide
  MOD_RES (1)..(2): Xaa is C or S
XXVPQDLEPISILYLVGRTPKVKFKYEM

SEQ ID NO: 92892 - protein, 27 aa, Artificial Sequence
  Cyclic GFR-binding peptide
VPQALNAISILYFVGRKPKVLKKYRMI

SEQ ID NO: 92893 - protein, 35 aa, Artificial Sequence
  Cyclic GFR-binding peptide
  MOD_RES (6)..(7): Xaa is C or S
AAPASXXVPARLSATSILYYDAANNVVLRKHRDMV

SEQ ID NO: 92894 - protein, 35 aa, Artificial Sequence; identical to SEQ ID NO: 10911
  Cyclic GFR-binding peptide
  MOD_RES (1)..(2)..(34): Xaa is C or S

SEQ ID NO: 92895 - protein, 31 aa, Artificial Sequence; identical to SEQ ID NO: 42871
  Cyclic GFR-binding peptide
  MOD_RES (5)..(6): Xaa is C or S

SEQ ID NO: 92896 - protein, 37 aa, Artificial Sequence; identical to SEQ ID NO: 42875
  Cyclic GFR-binding peptide
  MOD_RES (3)..(4)..(36): Xaa is C or S

SEQ ID NO: 92897 - protein, 33 aa, Artificial Sequence
  Cyclic GFR-binding peptide
  MOD_RES (6)..(7): Xaa is C or S
HVPKPXXAPTKLSPISVLYKDDSSNVILKYHYN

SEQ ID NO: 92898 - protein, 35 aa, Artificial Sequence; identical to SEQ ID NO: 39869
  Cyclic GFR-binding peptide
  MOD_RES (1)..(2)..(33)..(35): Xaa is C or S

SEQ ID NO: 92899 - protein, 35 aa, Artificial Sequence; identical to SEQ ID NO: 42882
  Cyclic GFR-binding peptide
  MOD_RES (6)..(7): Xaa is C or S

SEQ ID NO: 92900 - protein, 30 aa, Artificial Sequence
  Cyclic GFR-binding peptide
  MOD_RES (30)..(30): Xaa is C or S
PVKTSATSMLYYDNGRVLLLRKHRMIVEEX

SEQ ID NO: 92901 - protein, 35 aa, Artificial Sequence
  Cyclic GFR-binding peptide
  MOD_RES (3)..(4): Xaa is C or S
KAXXVPTKLSATSILYYDKGVVTYLRKHRGMAVSE

SEQ ID NO: 92902 - protein, 25 aa, Artificial Sequence
  Cyclic GFR-binding peptide
TKLSATSVLYYDDMGVPTLRKHREG

SEQ ID NO: 92903 - protein, 25 aa, Artificial Sequence
  Cyclic GFR-binding peptide
VPTELEPISMLYLDENEKVVKFKYE

SEQ ID NO: 92904 - protein, 31 aa, Artificial Sequence; identical to SEQ ID NO: 39877
  Cyclic GFR-binding peptide
  MOD_RES (29)..(31): Xaa is C or S

SEQ ID NO: 92905 - protein, 40 aa, Artificial Sequence; identical to SEQ ID NO: 10922
  Cyclic GFR-binding peptide
  MOD_RES (6)..(7)..(39): Xaa is C or S

SEQ ID NO: 92906 - protein, 27 aa, Artificial Sequence
  Cyclic GFR-binding peptide
  MOD_RES (1)..(1): Xaa is C or S
XTPTKMSPISMLYKNDKQQIILKYHYG

SEQ ID NO: 92907 - protein, 32 aa, Artificial Sequence
  Cyclic GFR-binding peptide
  MOD_RES (1)..(1): Xaa is C or S
XVPTRLSPISILYKDSANNVVLKYHYDMVVES

SEQ ID NO: 92908 - protein, 36 aa, Artificial Sequence
  Cyclic GFR-binding peptide
  MOD_RES (4)..(5)..(36): Xaa is C or S
ASPXXVSQDLSPINILYFIGKTPKIYGKIPMIVKSX

SEQ ID NO: 92909 - protein, 30 aa, Artificial Sequence; identical to SEQ ID NO: 10925
  Cyclic GFR-binding peptide
  MOD_RES (1)..(2): Xaa is C or S

SEQ ID NO: 92910 - protein, 28 aa, Artificial Sequence
  Cyclic GFR-binding peptide
  MOD_RES (1)..(2): Xaa is C or S
XXAPVKTSPISMLYKDNGRVLLLKYHYM

SEQ ID NO: 92911 - protein, 27 aa, Artificial Sequence
  Cyclic GFR-binding peptide
  MOD_RES (1)..(1): Xaa is C or S
XVPTELSATSMLYYDENEKVVLRKHRD

SEQ ID NO: 92912 - protein, 28 aa, Artificial Sequence
  Cyclic GFR-binding peptide
VSQDLSATSILYYIGKTPKILRKHRMIV

SEQ ID NO: 92913 - protein, 31 aa, Artificial Sequence; identical to SEQ ID NO: 39887
  Cyclic GFR-binding peptide
  MOD_RES (4)..(5): Xaa is C or S

SEQ ID NO: 92914 - protein, 32 aa, Artificial Sequence
  Cyclic GFR-binding peptide
  MOD_RES (29)..(31): Xaa is C or S
VKTSPISMLYKDNGRVLLLKYHYMIVEEXGXL

SEQ ID NO: 92915 - protein, 29 aa, Artificial Sequence
  Cyclic GFR-binding peptide
  MOD_RES (27)..(29): Xaa is C or S
SATSVLYYDDSSNVILRKHRNMVVRSXGX

SEQ ID NO: 92916 - protein, 23 aa, Artificial Sequence
  Cyclic GFR-binding peptide
SPINILYFDENKNVVYGKIPNMT

SEQ ID NO: 92917 - protein, 41 aa, Artificial Sequence; identical to SEQ ID NO: 10931
  Cyclic GFR-binding peptide
  MOD_RES (6)..(7)..(38)..(40): Xaa is C or S

SEQ ID NO: 92918 - protein, 33 aa, Artificial Sequence; identical to SEQ ID NO: 10932
  Cyclic GFR-binding peptide
  MOD_RES (5)..(6): Xaa is C or S

SEQ ID NO: 92919 - protein, 35 aa, Artificial Sequence; identical to SEQ ID NO: 10934
  Cyclic GFR-binding peptide
  MOD_RES (1)..(2)..(34): Xaa is C or S

SEQ ID NO: 92920 - protein, 33 aa, Artificial Sequence
  Cyclic GFR-binding peptide
  MOD_RES (2)..(3): Xaa is C or S
TXXAPVKTSATSMLYYDNGRVLLLRKHRMIVEE

SEQ ID NO: 92921 - protein, 32 aa, Artificial Sequence; identical to SEQ ID NO: 77844
  Cyclic GFR-binding peptide
  MOD_RES (31)..(31): Xaa is C or S

SEQ ID NO: 92922 - protein, 30 aa, Artificial Sequence; identical to SEQ ID NO: 10936
  Cyclic GFR-binding peptide
  MOD_RES (2)..(3): Xaa is C or S

SEQ ID NO: 92923 - protein, 27 aa, Artificial Sequence
  Cyclic GFR-binding peptide
  MOD_RES (26)..(26): Xaa is C or S
SPINILYFVGRKPKVYGKIPMIVRSXK

SEQ ID NO: 92924 - protein, 30 aa, Artificial Sequence; identical to SEQ ID NO: 42910
  Cyclic GFR-binding peptide
  MOD_RES (30)..(30): Xaa is C or S

SEQ ID NO: 92925 - protein, 30 aa, Artificial Sequence; identical to SEQ ID NO: 10940
  Cyclic GFR-binding peptide
  MOD_RES (4)..(5): Xaa is C or S

SEQ ID NO: 92926 - protein, 23 aa, Artificial Sequence
  Cyclic GFR-binding peptide
DLNAISILYFVGRTPKVLKKYRM

SEQ ID NO: 92927 - protein, 26 aa, Artificial Sequence
  Cyclic GFR-binding peptide
NAISMLYFDENEKVVLKKYRDMVVEG

SEQ ID NO: 92928 - protein, 29 aa, Artificial Sequence
  Cyclic GFR-binding peptide
  MOD_RES (1)..(1): Xaa is C or S
XVPTELNAISMLYFDEYDKVVLKKYREMV

SEQ ID NO: 92929 - protein, 33 aa, Artificial Sequence; identical to SEQ ID NO: 42919
  Cyclic GFR-binding peptide
  MOD_RES (5)..(6): Xaa is C or S

SEQ ID NO: 92930 - protein, 34 aa, Artificial Sequence
  Cyclic GFR-binding peptide
  MOD_RES (6)..(7): Xaa is C or S
GSAGPXXTPTKMSPISMLYKNDKQQIILKYHYGM

SEQ ID NO: 92931 - protein, 34 aa, Artificial Sequence; identical to SEQ ID NO: 10949
  Cyclic GFR-binding peptide
  MOD_RES (31)..(33): Xaa is C or S

SEQ ID NO: 92932 - protein, 30 aa, Artificial Sequence; identical to SEQ ID NO: 10953
  Cyclic GFR-binding peptide
  MOD_RES (1)..(1): Xaa is C or S

SEQ ID NO: 92933 - protein, 24 aa, Artificial Sequence
  Cyclic GFR-binding peptide
PARLEPISILYLDAANNVVKFKYE

SEQ ID NO: 92934 - protein, 33 aa, Artificial Sequence; identical to SEQ ID NO: 42922
  Cyclic GFR-binding peptide
  MOD_RES (3)..(4): Xaa is C or S

SEQ ID NO: 92935 - protein, 38 aa, Artificial Sequence; identical to SEQ ID NO: 39913
  Cyclic GFR-binding peptide
  MOD_RES (6)..(38): Xaa is C or S

SEQ ID NO: 92936 - protein, 31 aa, Artificial Sequence; identical to SEQ ID NO: 10957
  Cyclic GFR-binding peptide

SEQ ID NO: 92937 - protein, 26 aa, Artificial Sequence
  Cyclic GFR-binding peptide
LSPISMLYKDEYDKVVLKYHYEMVVE

SEQ ID NO: 92938 - protein, 31 aa, Artificial Sequence; identical to SEQ ID NO: 39918
  Cyclic GFR-binding peptide
  MOD_RES (3)..(4): Xaa is C or S

SEQ ID NO: 92939 - protein, 21 aa, Artificial Sequence
  Cyclic GFR-binding peptide
SPINILYFDENKNVVYGKIPN

SEQ ID NO: 92940 - protein, 22 aa, Artificial Sequence
  Cyclic GFR-binding peptide
QLEPISVLYLDDSSNVIKFKYE

SEQ ID NO: 92941 - protein, 28 aa, Artificial Sequence
  Cyclic GFR-binding peptide
  MOD_RES (1)..(2): Xaa is C or S
XXAPTQLSPINVLYFDDSSNVIYGKIPN

SEQ ID NO: 92942 - protein, 34 aa, Artificial Sequence; identical to SEQ ID NO: 39925
  Cyclic GFR-binding peptide
  MOD_RES (1)..(2)..(34): Xaa is C or S

SEQ ID NO: 92943 - protein, 33 aa, Artificial Sequence; identical to SEQ ID NO: 42935
  Cyclic GFR-binding peptide
  MOD_RES (2)..(2): Xaa is C or S

SEQ ID NO: 92944 - protein, 31 aa, Artificial Sequence
  Cyclic GFR-binding peptide
  MOD_RES (28)..(30): Xaa is C or S
MSATSMLYYNDKQQIILRKHRGMVVDRXGXS

SEQ ID NO: 92945 - protein, 36 aa, Artificial Sequence; identical to SEQ ID NO: 10961
  Cyclic GFR-binding peptide
  MOD_RES (3)..(4)..(35): Xaa is C or S

SEQ ID NO: 92946 - protein, 29 aa, Artificial Sequence
  Cyclic GFR-binding peptide
PVKTSATSMLYYDNGRVLLLRKHRMIVEE

SEQ ID NO: 92947 - protein, 39 aa, Artificial Sequence; identical to SEQ ID NO: 10963
  Cyclic GFR-binding peptide
  MOD_RES (4)..(5)..(36)..(38): Xaa is C or S

SEQ ID NO: 92948 - protein, 22 aa, Artificial Sequence
  Cyclic GFR-binding peptide
LSATSILYYDAANNVVLRKHRD

SEQ ID NO: 92949 - protein, 28 aa, Artificial Sequence
  Cyclic GFR-binding peptide
  MOD_RES (26)..(28): Xaa is C or S
SATSILYYIGKTPKILRKHRMIVKSXKX

SEQ ID NO: 92950 - protein, 30 aa, Artificial Sequence; identical to SEQ ID NO: 10967
  Cyclic GFR-binding peptide

SEQ ID NO: 92951 - protein, 39 aa, Artificial Sequence
  Cyclic GFR-binding peptide
  MOD_RES (5)..(6)..(38): Xaa is C or S
IPEPXXVPEKMNAISILYFDENKNVVLKKYRNMTVESXA

SEQ ID NO: 92952 - protein, 25 aa, Artificial Sequence
  Cyclic GFR-binding peptide
PTKLEPISVLYLDSSNNVIKFKYEN

SEQ ID NO: 92953 - protein, 28 aa, Artificial Sequence
  Cyclic GFR-binding peptide
VPEKMSPINILYFDENKNVVYGKIPNMT

SEQ ID NO: 92954 - protein, 27 aa, Artificial Sequence
  Cyclic GFR-binding peptide
APTQLSPINVLYFDDSSNVIYGKIPNM

SEQ ID NO: 92955 - protein, 27 aa, Artificial Sequence
  Cyclic GFR-binding peptide
PARLNAISILYFDAANNVVLKKYRDMV

SEQ ID NO: 92956 - protein, 32 aa, Artificial Sequence; identical to SEQ ID NO: 21083
  Cyclic GFR-binding peptide
  MOD_RES (6)..(7): Xaa is C or S

SEQ ID NO: 92957 - protein, 37 aa, Artificial Sequence; identical to SEQ ID NO: 42960
  Cyclic GFR-binding peptide
  MOD_RES (3)..(4)..(36): Xaa is C or S

SEQ ID NO: 92958 - protein, 28 aa, Artificial Sequence
  Cyclic GFR-binding peptide
  MOD_RES (1)..(2): Xaa is C or S
XXVPTKLEPISVLYLDDMGVPTKFKYEE

SEQ ID NO: 92959 - protein, 27 aa, Artificial Sequence
  Cyclic GFR-binding peptide
  MOD_RES (27)..(27): Xaa is C or S
SPISMLYKDENEKVVLKYHYDMVVEGX

SEQ ID NO: 92960 - protein, 29 aa, Artificial Sequence
  Cyclic GFR-binding peptide
  MOD_RES (3)..(4): Xaa is C or S
KPXXAPTKLEPISVLYLDDSSNVIKFKYE

SEQ ID NO: 92961 - protein, 24 aa, Artificial Sequence
  Cyclic GFR-binding peptide
PTELNAISMLYFDENEKVVLKKYR

SEQ ID NO: 92962 - protein, 33 aa, Artificial Sequence; identical to SEQ ID NO: 10981
  Cyclic GFR-binding peptide
  MOD_RES (3)..(3): Xaa is C or S

SEQ ID NO: 92963 - protein, 29 aa, Artificial Sequence
  Cyclic GFR-binding peptide
VPQALNAISILYFVGRKPKVLKKYRMIVR

SEQ ID NO: 92964 - protein, 41 aa, Artificial Sequence; identical to SEQ ID NO: 39956
  Cyclic GFR-binding peptide
  MOD_RES (6)..(7)..(39)..(41): Xaa is C or S

SEQ ID NO: 92965 - protein, 35 aa, Artificial Sequence; identical to SEQ ID NO: 39958
  Cyclic GFR-binding peptide
  MOD_RES (1)..(2)..(34): Xaa is C or S

SEQ ID NO: 92966 - protein, 31 aa, Artificial Sequence
  Cyclic GFR-binding peptide
  MOD_RES (2)..(3): Xaa is C or S
PXXTPTKMSPISMLYKNDKQQIILKYHYGMV

SEQ ID NO: 92967 - protein, 37 aa, Artificial Sequence; identical to SEQ ID NO: 10987
  Cyclic GFR-binding peptide
  MOD_RES (1)..(2)..(35)..(37): Xaa is C or S

SEQ ID NO: 92968 - protein, 28 aa, Artificial Sequence
  Cyclic GFR-binding peptide
  MOD_RES (28)..(28): Xaa is C or S
LSPINVLYFDDSSNVIYGKIPNMVVRAX

SEQ ID NO: 92969 - protein, 37 aa, Artificial Sequence; identical to SEQ ID NO: 39963
  Cyclic GFR-binding peptide
  MOD_RES (1)..(2)..(34)..(36): Xaa is C or S

SEQ ID NO: 92970 - protein, 26 aa, Artificial Sequence
  Cyclic GFR-binding peptide
  MOD_RES (1)..(1): Xaa is C or S
XVPTELNAISMLYFDENEKVVLKKYR

SEQ ID NO: 92971 - protein, 27 aa, Artificial Sequence
  Cyclic GFR-binding peptide
PTELNAISMLYFDEYDKVVLKKYREMV

SEQ ID NO: 92972 - protein, 25 aa, Artificial Sequence
  Cyclic GFR-binding peptide
SPINILYFVGRTPKVYGKIPMVVKS

SEQ ID NO: 92973 - protein, 38 aa, Artificial Sequence
  Cyclic GFR-binding peptide
  MOD_RES (5)..(6)..(38): Xaa is C or S
TPPTXXVPTRLSPISILYKDSANNVVLKYHYDMVVESX

SEQ ID NO: 92974 - protein, 28 aa, Artificial Sequence
  Cyclic GFR-binding peptide
  MOD_RES (1)..(1): Xaa is C or S
XAPTKLSPINVLYFDDSSNVIYGKIPNM

SEQ ID NO: 92975 - protein, 36 aa, Artificial Sequence; identical to SEQ ID NO: 21098
  Cyclic GFR-binding peptide
  MOD_RES (3)..(4)..(36): Xaa is C or S

SEQ ID NO: 92976 - protein, 35 aa, Artificial Sequence; identical to SEQ ID NO: 10991
  Cyclic GFR-binding peptide
  MOD_RES (6)..(7): Xaa is C or S

SEQ ID NO: 92977 - protein, 34 aa, Artificial Sequence; identical to SEQ ID NO: 10992
  Cyclic GFR-binding peptide
  MOD_RES (6)..(7): Xaa is C or S

SEQ ID NO: 92978 - protein, 32 aa, Artificial Sequence; identical to SEQ ID NO: 10993
  Cyclic GFR-binding peptide
  MOD_RES (5)..(6): Xaa is C or S

SEQ ID NO: 92979 - protein, 29 aa, Artificial Sequence
  Cyclic GFR-binding peptide
  MOD_RES (1)..(2): Xaa is C or S
XXVPQALSATSILYYVGRKPKVLRKHRMI

SEQ ID NO: 92980 - protein, 33 aa, Artificial Sequence
  Cyclic GFR-binding peptide
  MOD_RES (1)..(32): Xaa is C or S
XVPQDLSPINILYFVGRTPKVYGKIPMVVKSXK

SEQ ID NO: 92981 - protein, 30 aa, Artificial Sequence; identical to SEQ ID NO: 10999
  Cyclic GFR-binding peptide
  MOD_RES (3)..(4): Xaa is C or S

SEQ ID NO: 92982 - protein, 36 aa, Artificial Sequence
  Cyclic GFR-binding peptide
  MOD_RES (3)..(4)..(36): Xaa is C or S
PTXXVPTRLSPISILYKDSANNVVLKYHYDMVVESX

SEQ ID NO: 92983 - protein, 41 aa, Artificial Sequence
  Cyclic GFR-binding peptide
  MOD_RES (6)..(7)..(38)..(40): Xaa is C or S
ASASPXXVPQDLSPINILYFVGRTPKVYGKIPMVVKSXKXS

SEQ ID NO: 92984 - protein, 30 aa, Artificial Sequence
  Cyclic GFR-binding peptide
  MOD_RES (2)..(3): Xaa is C or S
PXXVPEKMEPISILYLDENKNVVKFKYENM

SEQ ID NO: 92985 - protein, 35 aa, Artificial Sequence
  Cyclic GFR-binding peptide
  MOD_RES (5)..(6): Xaa is C or S
VPSTXXAPVKTSATSMLYYDNGRVLLLRKHRMIVE

SEQ ID NO: 92986 - protein, 35 aa, Artificial Sequence; identical to SEQ ID NO: 11002
  Cyclic GFR-binding peptide
  MOD_RES (7)..(7): Xaa is C or S

SEQ ID NO: 92987 - protein, 24 aa, Artificial Sequence
  Cyclic GFR-binding peptide
LSPINILYFDAANNVVYGKIPDMV

SEQ ID NO: 92988 - protein, 36 aa, Artificial Sequence; identical to SEQ ID NO: 39983
  Cyclic GFR-binding peptide
  MOD_RES (4)..(5): Xaa is C or S

SEQ ID NO: 92989 - protein, 37 aa, Artificial Sequence; identical to SEQ ID NO: 42987
  Cyclic GFR-binding peptide
  MOD_RES (4)..(5)..(37): Xaa is C or S

SEQ ID NO: 92990 - protein, 34 aa, Artificial Sequence
  Cyclic GFR-binding peptide
  MOD_RES (3)..(4): Xaa is C or S
STXXAPVKTEPISMLYLDNGRVLLKFKYEMIVEE

SEQ ID NO: 92991 - protein, 27 aa, Artificial Sequence
  Cyclic GFR-binding peptide
  MOD_RES (1)..(1): Xaa is C or S
XVPQDLSPISILYKVGRTPKVLKYHYM

SEQ ID NO: 92992 - protein, 32 aa, Artificial Sequence
  Cyclic GFR-binding peptide
  MOD_RES (29)..(31): Xaa is C or S
VKTEPISMLYLDNGRVLLKFKYEMIVEEXGXL

SEQ ID NO: 92993 - protein, 30 aa, Artificial Sequence
  Cyclic GFR-binding peptide
PTRLEPISILYLDSANNVVKFKYEDMVVES

SEQ ID NO: 92994 - protein, 33 aa, Artificial Sequence
  Cyclic GFR-binding peptide
  MOD_RES (31)..(33): Xaa is C or S
PEKMSPISILYKDENKNVVLKYHYNMTVESXAX

SEQ ID NO: 92995 - protein, 21 aa, Artificial Sequence
  Cyclic GFR-binding peptide
LNAISILYFDAANNVVLKKYR

SEQ ID NO: 92996 - protein, 31 aa, Artificial Sequence
  Cyclic GFR-binding peptide
  MOD_RES (1)..(2): Xaa is C or S
XXVPQDLSPINILYFVGRTPKVYGKIPMVVK

SEQ ID NO: 92997 - protein, 28 aa, Artificial Sequence
  Cyclic GFR-binding peptide
  MOD_RES (1)..(1): Xaa is C or S
XVPTRLSPINILYFDSANNVVYGKIPDM

SEQ ID NO: 92998 - protein, 33 aa, Artificial Sequence
  Cyclic GFR-binding peptide
  MOD_RES (6)..(7): Xaa is C or S
ASASPXXVPQDLSPINILYFVGRTPKVYGKIPM

SEQ ID NO: 92999 - protein, 40 aa, Artificial Sequence
  Cyclic GFR-binding peptide
  MOD_RES (5)..(6)..(38)..(40): Xaa is C or S
ASKAXXVPTKLSATSILYYDKGVVTYLRKHRGMAVSEXGX

SEQ ID NO: 93000 - protein, 38 aa, Artificial Sequence
  Cyclic GFR-binding peptide
  MOD_RES (5)..(6)..(37): Xaa is C or S
SASPXXVSQDLSPINILYFIGKTPKIYGKIPMIVKSXK

SEQ ID NO: 93001 - protein, 27 aa, Artificial Sequence
  Cyclic GFR-binding peptide
  MOD_RES (1)..(1): Xaa is C or S
XAPVKTNAISMLYFDNGRVLLLKKYRM

SEQ ID NO: 93002 - protein, 33 aa, Artificial Sequence; identical to SEQ ID NO: 11017
  Cyclic GFR-binding peptide
  MOD_RES (5)..(6): Xaa is C or S

SEQ ID NO: 93003 - protein, 33 aa, Artificial Sequence
  Cyclic GFR-binding peptide
  MOD_RES (5)..(6): Xaa is C or S
SAAPXXVPQALSPINILYFVGRKPKVYGKIPMI

SEQ ID NO: 93004 - protein, 23 aa, Artificial Sequence
  Cyclic GFR-binding peptide
LSATSILYYDKGVVTYLRKHRGM

SEQ ID NO: 93005 - protein, 29 aa, Artificial Sequence
  Cyclic GFR-binding peptide
  MOD_RES (3)..(4): Xaa is C or S
KAXXVPTKLSPISILYKDKGVVTYLKYHY

SEQ ID NO: 93006 - protein, 39 aa, Artificial Sequence; identical to SEQ ID NO: 40001
  Cyclic GFR-binding peptide
  MOD_RES (4)..(5)..(37)..(39): Xaa is C or S

SEQ ID NO: 93007 - protein, 28 aa, Artificial Sequence
  Cyclic GFR-binding peptide
  MOD_RES (2)..(3): Xaa is C or S
PXXVPQDLEPISILYLVGRTPKVKFKYE

SEQ ID NO: 93008 - protein, 26 aa, Artificial Sequence
  Cyclic GFR-binding peptide
MEPISILYLDENKNVVKFKYENMTVE

SEQ ID NO: 93009 - protein, 31 aa, Artificial Sequence; identical to SEQ ID NO: 11020
  Cyclic GFR-binding peptide
  MOD_RES (5)..(6): Xaa is C or S

SEQ ID NO: 93010 - protein, 32 aa, Artificial Sequence
  Cyclic GFR-binding peptide
  MOD_RES (1)..(2): Xaa is C or S
XXTPTKMEPISMLYLNDKQQIIKFKYEGMVVD

SEQ ID NO: 93011 - protein, 31 aa, Artificial Sequence; identical to SEQ ID NO: 11021
  Cyclic GFR-binding peptide
  MOD_RES (28)..(30): Xaa is C or S

SEQ ID NO: 93012 - protein, 26 aa, Artificial Sequence
  Cyclic GFR-binding peptide
APTQLEPISVLYLDDSSNVIKFKYEN

SEQ ID NO: 93013 - protein, 35 aa, Artificial Sequence; identical to SEQ ID NO: 40009
  Cyclic GFR-binding peptide
  MOD_RES (6)..(7): Xaa is C or S

SEQ ID NO: 93014 - protein, 34 aa, Artificial Sequence; identical to SEQ ID NO: 40010
  Cyclic GFR-binding peptide
  MOD_RES (31)..(33): Xaa is C or S

SEQ ID NO: 93015 - protein, 21 aa, Artificial Sequence
  Cyclic GFR-binding peptide
LNAISILYFVGRTPKVLKKYR

SEQ ID NO: 93016 - protein, 38 aa, Artificial Sequence; identical to SEQ ID NO: 21130
  Cyclic GFR-binding peptide
  MOD_RES (5)..(6)..(38): Xaa is C or S

SEQ ID NO: 93017 - protein, 42 aa, Artificial Sequence; identical to SEQ ID NO: 11024
  Cyclic GFR-binding peptide
  MOD_RES (5)..(6)..(39)..(41): Xaa is C or S

SEQ ID NO: 93018 - protein, 28 aa, Artificial Sequence
  Cyclic GFR-binding peptide
  MOD_RES (27)..(27): Xaa is C or S
NAISVLYFDSSNNVILKKYRNMVVKAXG

SEQ ID NO: 93019 - protein, 33 aa, Artificial Sequence; identical to SEQ ID NO: 40015
  Cyclic GFR-binding peptide
  MOD_RES (3)..(4): Xaa is C or S

SEQ ID NO: 93020 - protein, 32 aa, Artificial Sequence; identical to SEQ ID NO: 11027
  Cyclic GFR-binding peptide
  MOD_RES (30)..(32): Xaa is C or S

SEQ ID NO: 93021 - protein, 30 aa, Artificial Sequence; identical to SEQ ID NO: 43012
  Cyclic GFR-binding peptide
  MOD_RES (2)..(3): Xaa is C or S

SEQ ID NO: 93022 - protein, 33 aa, Artificial Sequence; identical to SEQ ID NO: 21133
  Cyclic GFR-binding peptide
  MOD_RES (30)..(32): Xaa is C or S

SEQ ID NO: 93023 - protein, 33 aa, Artificial Sequence; identical to SEQ ID NO: 43013
  Cyclic GFR-binding peptide
  MOD_RES (31)..(33): Xaa is C or S

SEQ ID NO: 93024 - protein, 37 aa, Artificial Sequence
  Cyclic GFR-binding peptide
  MOD_RES (4)..(5)..(37): Xaa is C or S
PPTXXVPTRLSPISILYKDSANNVVLKYHYDMVVESX

SEQ ID NO: 93025 - protein, 24 aa, Artificial Sequence
  Cyclic GFR-binding peptide
PVKTNAISMLYFDNGRVLLLKKYR

SEQ ID NO: 93026 - protein, 24 aa, Artificial Sequence
  Cyclic GFR-binding peptide
KLSPINVLYFDDSSNVIYGKIPNM

SEQ ID NO: 93027 - protein, 33 aa, Artificial Sequence; identical to SEQ ID NO: 43018
  Cyclic GFR-binding peptide
  MOD_RES (1)..(2): Xaa is C or S

SEQ ID NO: 93028 - protein, 28 aa, Artificial Sequence
  Cyclic GFR-binding peptide
  MOD_RES (2)..(3): Xaa is C or S
PXXVSQDLNAISILYFIGKTPKILKKYR

SEQ ID NO: 93029 - protein, 34 aa, Artificial Sequence; identical to SEQ ID NO: 11031
  Cyclic GFR-binding peptide
  MOD_RES (3)..(4): Xaa is C or S

SEQ ID NO: 93030 - protein, 30 aa, Artificial Sequence
  Cyclic GFR-binding peptide
  MOD_RES (1)..(1): Xaa is C or S
XVPEKMSPINILYFDENKNVVYGKIPNMTV

SEQ ID NO: 93031 - protein, 33 aa, Artificial Sequence
  Cyclic GFR-binding peptide
  MOD_RES (1)..(33): Xaa is C or S
XVPTRLSATSILYYDSANNVVLRKHRDMVVESX

SEQ ID NO: 93032 - protein, 32 aa, Artificial Sequence
  Cyclic GFR-binding peptide
  MOD_RES (2)..(3): Xaa is C or S
TXXVPTRLSPISILYKDSANNVVLKYHYDMVV

SEQ ID NO: 93033 - protein, 27 aa, Artificial Sequence
  Cyclic GFR-binding peptide
PTELEPISMLYLDENEKVVKFKYEDMV

SEQ ID NO: 93034 - protein, 39 aa, Artificial Sequence; identical to SEQ ID NO: 40027
  Cyclic GFR-binding peptide
  MOD_RES (4)..(36)..(38): Xaa is C or S

SEQ ID NO: 93035 - protein, 23 aa, Artificial Sequence
  Cyclic GFR-binding peptide
QDLSPISILYKVGRTPKVLKYHY

SEQ ID NO: 93036 - protein, 39 aa, Artificial Sequence; identical to SEQ ID NO: 11038
  Cyclic GFR-binding peptide
  MOD_RES (5)..(6)..(39): Xaa is C or S

SEQ ID NO: 93037 - protein, 32 aa, Artificial Sequence; identical to SEQ ID NO: 11039
  Cyclic GFR-binding peptide
  MOD_RES (31)..(31): Xaa is C or S

SEQ ID NO: 93038 - protein, 36 aa, Artificial Sequence; identical to SEQ ID NO: 43026
  Cyclic GFR-binding peptide
  MOD_RES (1)..(2)..(35): Xaa is C or S

SEQ ID NO: 93039 - protein, 27 aa, Artificial Sequence
  Cyclic GFR-binding peptide
PTRLEPISILYLDSANNVVKFKYEDMV

SEQ ID NO: 93040 - protein, 26 aa, Artificial Sequence
  Cyclic GFR-binding peptide
EPISVLYLDDMGVPTKFKYEEGMSVA

SEQ ID NO: 93041 - protein, 34 aa, Artificial Sequence; identical to SEQ ID NO: 11045
  Cyclic GFR-binding peptide
  MOD_RES (32)..(34): Xaa is C or S

SEQ ID NO: 93042 - protein, 29 aa, Artificial Sequence
  Cyclic GFR-binding peptide
  MOD_RES (3)..(4): Xaa is C or S
KPXXAPTKLSATSVLYYDDSSNVILRKHR

SEQ ID NO: 93043 - protein, 31 aa, Artificial Sequence
  Cyclic GFR-binding peptide
  MOD_RES (5)..(6): Xaa is C or S
SAGPXXTPTKMEPISMLYLNDKQQIIKFKYE

SEQ ID NO: 93044 - protein, 28 aa, Artificial Sequence
  Cyclic GFR-binding peptide
  MOD_RES (2)..(3): Xaa is C or S
PXXVPQDLSATSILYYVGRTPKVLRKHR

SEQ ID NO: 93045 - protein, 28 aa, Artificial Sequence
  Cyclic GFR-binding peptide
  MOD_RES (28)..(28): Xaa is C or S
NAISVLYFDDMGVPTLKKYREGMSVAEX

SEQ ID NO: 93046 - protein, 37 aa, Artificial Sequence; identical to SEQ ID NO: 40040
  Cyclic GFR-binding peptide
  MOD_RES (2)..(3)..(35)..(37): Xaa is C or S

SEQ ID NO: 93047 - protein, 24 aa, Artificial Sequence
  Cyclic GFR-binding peptide
QDLSPINILYFIGKTPKIYGKIPM

SEQ ID NO: 93048 - protein, 21 aa, Artificial Sequence
  Cyclic GFR-binding peptide
LSPINVLYFDSSNNVIYGKIP

SEQ ID NO: 93049 - protein, 31 aa, Artificial Sequence; identical to SEQ ID NO: 11057
  Cyclic GFR-binding peptide
  MOD_RES (2)..(3): Xaa is C or S

SEQ ID NO: 93050 - protein, 34 aa, Artificial Sequence
  Cyclic GFR-binding peptide
  MOD_RES (5)..(6): Xaa is C or S
VPSTXXAPVKTSPISMLYKDNGRVLLLKYHYMIV

SEQ ID NO: 93051 - protein, 30 aa, Artificial Sequence
  Cyclic GFR-binding peptide
  MOD_RES (28)..(30): Xaa is C or S
MSATSILYYDENKNVVLRKHRNMTVESXAX

SEQ ID NO: 93052 - protein, 28 aa, Artificial Sequence
  Cyclic GFR-binding peptide
  MOD_RES (1)..(2): Xaa is C or S
XXVPTKLNAISVLYFDDMGVPTLKKYRE

SEQ ID NO: 93053 - protein, 30 aa, Artificial Sequence
  Cyclic GFR-binding peptide
  MOD_RES (27)..(29): Xaa is C or S
SPISILYKDSANNVVLKYHYDMVVESXGXR

SEQ ID NO: 93054 - protein, 33 aa, Artificial Sequence; identical to SEQ ID NO: 11067
  Cyclic GFR-binding peptide
  MOD_RES (1)..(2): Xaa is C or S

SEQ ID NO: 93055 - protein, 39 aa, Artificial Sequence; identical to SEQ ID NO: 11068
  Cyclic GFR-binding peptide
  MOD_RES (4)..(5)..(37)..(39): Xaa is C or S

SEQ ID NO: 93056 - protein, 33 aa, Artificial Sequence; identical to SEQ ID NO: 40053
  Cyclic GFR-binding peptide
  MOD_RES (32)..(32): Xaa is C or S

SEQ ID NO: 93057 - protein, 25 aa, Artificial Sequence
  Cyclic GFR-binding peptide
PQALSPINILYFVGRKPKVYGKIPM

SEQ ID NO: 93058 - protein, 34 aa, Artificial Sequence; identical to SEQ ID NO: 11070
  Cyclic GFR-binding peptide
  MOD_RES (31)..(33): Xaa is C or S

SEQ ID NO: 93059 - protein, 24 aa, Artificial Sequence
  Cyclic GFR-binding peptide
KTSATSMLYYDNGRVLLLRKHRMI

SEQ ID NO: 93060 - protein, 28 aa, Artificial Sequence
  Cyclic GFR-binding peptide
SQDLEPISILYLIGKTPKIKFKYEMIVK

SEQ ID NO: 93061 - protein, 31 aa, Artificial Sequence; identical to SEQ ID NO: 40061
  Cyclic GFR-binding peptide
  MOD_RES (5)..(6): Xaa is C or S

SEQ ID NO: 93062 - protein, 33 aa, Artificial Sequence; identical to SEQ ID NO: 43045
  Cyclic GFR-binding peptide
  MOD_RES (32)..(32): Xaa is C or S

SEQ ID NO: 93063 - protein, 22 aa, Artificial Sequence
  Cyclic GFR-binding peptide
LEPISILYLIGKTPKIKFKYEM

SEQ ID NO: 93064 - protein, 31 aa, Artificial Sequence; identical to SEQ ID NO: 40065
  Cyclic GFR-binding peptide
  MOD_RES (3)..(4): Xaa is C or S

SEQ ID NO: 93065 - protein, 35 aa, Artificial Sequence; identical to SEQ ID NO: 77919
  Cyclic GFR-binding peptide
  MOD_RES (5)..(6): Xaa is C or S

SEQ ID NO: 93066 - protein, 35 aa, Artificial Sequence; identical to SEQ ID NO: 43050
  Cyclic GFR-binding peptide
  MOD_RES (3)..(4): Xaa is C or S

SEQ ID NO: 93067 - protein, 31 aa, Artificial Sequence; identical to SEQ ID NO: 40070
  Cyclic GFR-binding peptide
  MOD_RES (30)..(30): Xaa is C or S

SEQ ID NO: 93068 - protein, 32 aa, Artificial Sequence; identical to SEQ ID NO: 43053
  Cyclic GFR-binding peptide
  MOD_RES (30)..(32): Xaa is C or S

SEQ ID NO: 93069 - protein, 34 aa, Artificial Sequence
  Cyclic GFR-binding peptide
  MOD_RES (1)..(2)..(34): Xaa is C or S
XXVPTRLSATSILYYDSANNVVLRKHRDMVVESX

SEQ ID NO: 93070 - protein, 30 aa, Artificial Sequence
  Cyclic GFR-binding peptide
  MOD_RES (30)..(30): Xaa is C or S
PQALSPINILYFVGRKPKVYGKIPMIVRSX

SEQ ID NO: 93071 - protein, 29 aa, Artificial Sequence
  Cyclic GFR-binding peptide
  MOD_RES (27)..(29): Xaa is C or S
LEPISILYLVGRKPKVKFKYEMIVRSXKX

SEQ ID NO: 93072 - protein, 35 aa, Artificial Sequence; identical to SEQ ID NO: 40074
  Cyclic GFR-binding peptide
  MOD_RES (6)..(7): Xaa is C or S

SEQ ID NO: 93073 - protein, 23 aa, Artificial Sequence
  Cyclic GFR-binding peptide
ELNAISMLYFDEYDKVVLKKYRE

SEQ ID NO: 93074 - protein, 29 aa, Artificial Sequence
  Cyclic GFR-binding peptide
PTRLSATSILYYDSANNVVLRKHRDMVVE

SEQ ID NO: 93075 - protein, 30 aa, Artificial Sequence
  Cyclic GFR-binding peptide
APVKTSPISMLYKDNGRVLLLKYHYMIVEE

SEQ ID NO: 93076 - protein, 36 aa, Artificial Sequence
  Cyclic GFR-binding peptide
  MOD_RES (3)..(4)..(36): Xaa is C or S
EPXXVPEKMEPISILYLDENKNVVKFKYENMTVESX

SEQ ID NO: 93077 - protein, 31 aa, Artificial Sequence
  Cyclic GFR-binding peptide
  MOD_RES (2)..(3): Xaa is C or S
AXXVPTKLSATSILYYDKGVVTYLRKHRGMA

SEQ ID NO: 93078 - protein, 34 aa, Artificial Sequence; identical to SEQ ID NO: 40079
  Cyclic GFR-binding peptide
  MOD_RES (4)..(5): Xaa is C or S

SEQ ID NO: 93079 - protein, 31 aa, Artificial Sequence
  Cyclic GFR-binding peptide
  MOD_RES (28)..(30): Xaa is C or S
MNAISILYFDENKNVVLKKYRNMTVESXAXR

SEQ ID NO: 93080 - protein, 36 aa, Artificial Sequence; identical to SEQ ID NO: 11086
  Cyclic GFR-binding peptide
  MOD_RES (4)..(5): Xaa is C or S

SEQ ID NO: 93081 - protein, 34 aa, Artificial Sequence; identical to SEQ ID NO: 43069
  Cyclic GFR-binding peptide
  MOD_RES (31)..(33): Xaa is C or S

SEQ ID NO: 93082 - protein, 28 aa, Artificial Sequence
  Cyclic GFR-binding peptide
APTKLSPINVLYFDSSNNVIYGKIPNMV

SEQ ID NO: 93083 - protein, 39 aa, Artificial Sequence; identical to SEQ ID NO: 40083
  Cyclic GFR-binding peptide
  MOD_RES (4)..(5)..(37)..(39): Xaa is C or S

SEQ ID NO: 93084 - protein, 24 aa, Artificial Sequence
  Cyclic GFR-binding peptide
TQLSATSVLYYDDSSNVILRKHRN

SEQ ID NO: 93085 - protein, 38 aa, Artificial Sequence; identical to SEQ ID NO: 40086
  Cyclic GFR-binding peptide
  MOD_RES (3)..(4)..(36)..(38): Xaa is C or S

SEQ ID NO: 93086 - protein, 36 aa, Artificial Sequence; identical to SEQ ID NO: 11089
  Cyclic GFR-binding peptide
  MOD_RES (2)..(3)..(35): Xaa is C or S

SEQ ID NO: 93087 - protein, 24 aa, Artificial Sequence
  Cyclic GFR-binding peptide
QDLSPISILYKIGKTPKILKYHYM

SEQ ID NO: 93088 - protein, 32 aa, Artificial Sequence
  Cyclic GFR-binding peptide
  MOD_RES (5)..(6): Xaa is C or S
TPPTXXVPTRLEPISILYLDSANNVVKFKYED

SEQ ID NO: 93089 - protein, 35 aa, Artificial Sequence; identical to SEQ ID NO: 43075
  Cyclic GFR-binding peptide
  MOD_RES (1)..(33)..(35): Xaa is C or S

SEQ ID NO: 93090 - protein, 29 aa, Artificial Sequence
  Cyclic GFR-binding peptide
  MOD_RES (1)..(2): Xaa is C or S
XXVPARLSPINILYFDAANNVVYGKIPDM

SEQ ID NO: 93091 - protein, 37 aa, Artificial Sequence
  Cyclic GFR-binding peptide
  MOD_RES (3)..(4)..(35)..(37): Xaa is C or S
STXXAPVKTSPISMLYKDNGRVLLLKYHYMIVEEXGX

SEQ ID NO: 93092 - protein, 29 aa, Artificial Sequence
  Cyclic GFR-binding peptide
APTKLEPISVLYLDSSNNVIKFKYENMVV

SEQ ID NO: 93093 - protein, 40 aa, Artificial Sequence; identical to SEQ ID NO: 40092
  Cyclic GFR-binding peptide
  MOD_RES (6)..(7)..(39): Xaa is C or S

SEQ ID NO: 93094 - protein, 27 aa, Artificial Sequence
  Cyclic GFR-binding peptide
  MOD_RES (1)..(2): Xaa is C or S
XXVPARLSATSILYYDAANNVVLRKHR

SEQ ID NO: 93095 - protein, 30 aa, Artificial Sequence; identical to SEQ ID NO: 43084
  Cyclic GFR-binding peptide
  MOD_RES (4)..(5): Xaa is C or S

SEQ ID NO: 93096 - protein, 36 aa, Artificial Sequence; identical to SEQ ID NO: 40095
  Cyclic GFR-binding peptide
  MOD_RES (2)..(3)..(35): Xaa is C or S

SEQ ID NO: 93097 - protein, 33 aa, Artificial Sequence; identical to SEQ ID NO: 11098
  Cyclic GFR-binding peptide
  MOD_RES (2)..(3): Xaa is C or S

SEQ ID NO: 93098 - protein, 28 aa, Artificial Sequence
  Cyclic GFR-binding peptide
  MOD_RES (27)..(27): Xaa is C or S
NAISILYFDSANNVVLKKYRDMVVESXG

SEQ ID NO: 93099 - protein, 27 aa, Artificial Sequence
  Cyclic GFR-binding peptide
  MOD_RES (26)..(26): Xaa is C or S
SPISMLYKDNGRVLLLKYHYMIVEEXG

SEQ ID NO: 93100 - protein, 37 aa, Artificial Sequence; identical to SEQ ID NO: 11099
  Cyclic GFR-binding peptide
  MOD_RES (6)..(7): Xaa is C or S

SEQ ID NO: 93101 - protein, 40 aa, Artificial Sequence
  Cyclic GFR-binding peptide
  MOD_RES (5)..(6)..(38)..(40): Xaa is C or S
IPEPXXVPEKMSATSILYYDENKNVVLRKHRNMTVESXAX

SEQ ID NO: 93102 - protein, 36 aa, Artificial Sequence; identical to SEQ ID NO: 43088
  Cyclic GFR-binding peptide
  MOD_RES (3)..(4)..(36): Xaa is C or S

SEQ ID NO: 93103 - protein, 29 aa, Artificial Sequence
  Cyclic GFR-binding peptide
  MOD_RES (1)..(1): Xaa is C or S
XVPTELEPISMLYLDENEKVVKFKYEDMV

SEQ ID NO: 93104 - protein, 25 aa, Artificial Sequence
  Cyclic GFR-binding peptide
QDLEPISILYLVGRTPKVKFKYEMV

SEQ ID NO: 93105 - protein, 22 aa, Artificial Sequence
  Cyclic GFR-binding peptide
DLSPINILYFVGRTPKVYGKIP

SEQ ID NO: 93106 - protein, 29 aa, Artificial Sequence
  Cyclic GFR-binding peptide
  MOD_RES (29)..(29): Xaa is C or S
KLSPINVLYFDDSSNVIYGKIPNMVVRSX

SEQ ID NO: 93107 - protein, 35 aa, Artificial Sequence; identical to SEQ ID NO: 40106
  Cyclic GFR-binding peptide
  MOD_RES (1)..(34): Xaa is C or S

SEQ ID NO: 93108 - protein, 21 aa, Artificial Sequence
  Cyclic GFR-binding peptide
SPISILYKDENKNVVLKYHYN

SEQ ID NO: 93109 - protein, 33 aa, Artificial Sequence
  Cyclic GFR-binding peptide
  MOD_RES (1)..(33): Xaa is C or S
XVPTRLEPISILYLDSANNVVKFKYEDMVVESX

SEQ ID NO: 93110 - protein, 36 aa, Artificial Sequence; identical to SEQ ID NO: 11114
  Cyclic GFR-binding peptide
  MOD_RES (4)..(5): Xaa is C or S

SEQ ID NO: 93111 - protein, 25 aa, Artificial Sequence
  Cyclic GFR-binding peptide
LSPISMLYKDENEKVVLKYHYDMVV

SEQ ID NO: 93112 - protein, 27 aa, Artificial Sequence
  Cyclic GFR-binding peptide
  MOD_RES (26)..(26): Xaa is C or S
NAISMLYFDNGRVLLLKKYRMIVEEXG

SEQ ID NO: 93113 - protein, 37 aa, Artificial Sequence; identical to SEQ ID NO: 43104
  Cyclic GFR-binding peptide
  MOD_RES (7)..(7): Xaa is C or S

SEQ ID NO: 93114 - protein, 33 aa, Artificial Sequence; identical to SEQ ID NO: 11117
  Cyclic GFR-binding peptide
  MOD_RES (32)..(32): Xaa is C or S

SEQ ID NO: 93115 - protein, 27 aa, Artificial Sequence
  Cyclic GFR-binding peptide
  MOD_RES (27)..(27): Xaa is C or S
NAISMLYFNDKQQIILKKYRGMVVDRX

SEQ ID NO: 93116 - protein, 30 aa, Artificial Sequence; identical to SEQ ID NO: 11119
  Cyclic GFR-binding peptide
  MOD_RES (4)..(5): Xaa is C or S

SEQ ID NO: 93117 - protein, 40 aa, Artificial Sequence; identical to SEQ ID NO: 11120
  Cyclic GFR-binding peptide
  MOD_RES (6)..(7)..(39): Xaa is C or S

SEQ ID NO: 93118 - protein, 40 aa, Artificial Sequence; identical to SEQ ID NO: 11121
  Cyclic GFR-binding peptide
  MOD_RES (7)..(39): Xaa is C or S

SEQ ID NO: 93119 - protein, 36 aa, Artificial Sequence; identical to SEQ ID NO: 40119
  Cyclic GFR-binding peptide
  MOD_RES (2)..(3)..(35): Xaa is C or S

SEQ ID NO: 93120 - protein, 33 aa, Artificial Sequence; identical to SEQ ID NO: 11127
  Cyclic GFR-binding peptide
  MOD_RES (6)..(7): Xaa is C or S

SEQ ID NO: 93121 - protein, 35 aa, Artificial Sequence; identical to SEQ ID NO: 43114
  Cyclic GFR-binding peptide
  MOD_RES (1)..(2)..(34): Xaa is C or S

SEQ ID NO: 93122 - protein, 32 aa, Artificial Sequence; identical to SEQ ID NO: 43117
  Cyclic GFR-binding peptide
  MOD_RES (5)..(5): Xaa is C or S

SEQ ID NO: 93123 - protein, 29 aa, Artificial Sequence
  Cyclic GFR-binding peptide
  MOD_RES (3)..(4): Xaa is C or S
KAXXAPTKLSPINVLYFDSSNNVIYGKIP

SEQ ID NO: 93124 - protein, 24 aa, Artificial Sequence
  Cyclic GFR-binding peptide
LSATSILYYVGRTPKVLRKHRMVV

SEQ ID NO: 93125 - protein, 32 aa, Artificial Sequence; identical to SEQ ID NO: 11135
  Cyclic GFR-binding peptide
  MOD_RES (31)..(31): Xaa is C or S

SEQ ID NO: 93126 - protein, 27 aa, Artificial Sequence
  Cyclic GFR-binding peptide
PTQLSATSVLYYDDSSNVILRKHRNMV

SEQ ID NO: 93127 - protein, 39 aa, Artificial Sequence
  Cyclic GFR-binding peptide
  MOD_RES (5)..(6)..(38): Xaa is C or S
IPEPXXVPEKMSPINILYFDENKNVVYGKIPNMTVESXA

SEQ ID NO: 93128 - protein, 37 aa, Artificial Sequence; identical to SEQ ID NO: 21209
  Cyclic GFR-binding peptide
  MOD_RES (4)..(5)..(37): Xaa is C or S

SEQ ID NO: 93129 - protein, 26 aa, Artificial Sequence
  Cyclic GFR-binding peptide
SQDLSATSILYYIGKTPKILRKHRMI

SEQ ID NO: 93130 - protein, 31 aa, Artificial Sequence; identical to SEQ ID NO: 11141
  Cyclic GFR-binding peptide

SEQ ID NO: 93131 - protein, 29 aa, Artificial Sequence
  Cyclic GFR-binding peptide
APVKTNAISMLYFDNGRVLLLKKYRMIVE

SEQ ID NO: 93132 - protein, 31 aa, Artificial Sequence; identical to SEQ ID NO: 43127
  Cyclic GFR-binding peptide
  MOD_RES (3)..(4): Xaa is C or S

SEQ ID NO: 93133 - protein, 28 aa, Artificial Sequence
  Cyclic GFR-binding peptide
PVKTNAISMLYFDNGRVLLLKKYRMIVE

SEQ ID NO: 93134 - protein, 27 aa, Artificial Sequence
  Cyclic GFR-binding peptide
LSPISMLYKDEYDKVVLKYHYEMVVEG

SEQ ID NO: 93135 - protein, 35 aa, Artificial Sequence; identical to SEQ ID NO: 11144
  Cyclic GFR-binding peptide
  MOD_RES (6)..(7): Xaa is C or S

SEQ ID NO: 93136 - protein, 33 aa, Artificial Sequence
  Cyclic GFR-binding peptide
  MOD_RES (31)..(33): Xaa is C or S
APVKTEPISMLYLDNGRVLLKFKYEMIVEEXGX

SEQ ID NO: 93137 - protein, 23 aa, Artificial Sequence
  Cyclic GFR-binding peptide
TKMEPISMLYLNDKQQIIKFKYE

SEQ ID NO: 93138 - protein, 33 aa, Artificial Sequence; identical to SEQ ID NO: 40139
  Cyclic GFR-binding peptide
  MOD_RES (1)..(2): Xaa is C or S

SEQ ID NO: 93139 - protein, 33 aa, Artificial Sequence
  Cyclic GFR-binding peptide
  MOD_RES (31)..(33): Xaa is C or S
VPQALSPINILYFVGRKPKVYGKIPMIVRSXKX

SEQ ID NO: 93140 - protein, 37 aa, Artificial Sequence
  Cyclic GFR-binding peptide
  MOD_RES (2)..(3)..(35)..(37): Xaa is C or S
PXXVPEKMNAISILYFDENKNVVLKKYRNMTVESXAX

SEQ ID NO: 93141 - protein, 34 aa, Artificial Sequence
  Cyclic GFR-binding peptide
  MOD_RES (1)..(2)..(33): Xaa is C or S
XXVPQDLSPINILYFVGRTPKVYGKIPMVVKSXK

SEQ ID NO: 93142 - protein, 27 aa, Artificial Sequence
  Cyclic GFR-binding peptide
LEPISVLYLDDMGVPTKFKYEEGMSVA

SEQ ID NO: 93143 - protein, 28 aa, Artificial Sequence
  Cyclic GFR-binding peptide
TKLSATSILYYDKGVVTYLRKHRGMAVS

SEQ ID NO: 93144 - protein, 26 aa, Artificial Sequence
  Cyclic GFR-binding peptide
  MOD_RES (26)..(26): Xaa is C or S
EPISILYLVGRTPKVKFKYEMVVKSX

SEQ ID NO: 93145 - protein, 31 aa, Artificial Sequence
  Cyclic GFR-binding peptide
  MOD_RES (28)..(30): Xaa is C or S
LSATSILYYDAANNVVLRKHRDMVVEAXGXR

SEQ ID NO: 93146 - protein, 40 aa, Artificial Sequence; identical to SEQ ID NO: 40156
  Cyclic GFR-binding peptide
  MOD_RES (7)..(39): Xaa is C or S

SEQ ID NO: 93147 - protein, 31 aa, Artificial Sequence
  Cyclic GFR-binding peptide
  MOD_RES (29)..(31): Xaa is C or S
KMSATSMLYYNDKQQIILRKHRGMVVDRXGX

SEQ ID NO: 93148 - protein, 30 aa, Artificial Sequence
  Cyclic GFR-binding peptide
  MOD_RES (27)..(29): Xaa is C or S
LSPINILYFVGRKPKVYGKIPMIVRSXKXS

SEQ ID NO: 93149 - protein, 31 aa, Artificial Sequence; identical to SEQ ID NO: 11158
  Cyclic GFR-binding peptide
  MOD_RES (29)..(31): Xaa is C or S

SEQ ID NO: 93150 - protein, 32 aa, Artificial Sequence; identical to SEQ ID NO: 43156
  Cyclic GFR-binding peptide
  MOD_RES (3)..(4): Xaa is C or S

SEQ ID NO: 93151 - protein, 38 aa, Artificial Sequence; identical to SEQ ID NO: 11160
  Cyclic GFR-binding peptide
  MOD_RES (3)..(4)..(36)..(38): Xaa is C or S

SEQ ID NO: 93152 - protein, 30 aa, Artificial Sequence; identical to SEQ ID NO: 40168
  Cyclic GFR-binding peptide
  MOD_RES (30)..(30): Xaa is C or S

SEQ ID NO: 93153 - protein, 30 aa, Artificial Sequence; identical to SEQ ID NO: 11162
  Cyclic GFR-binding peptide
  MOD_RES (27)..(29): Xaa is C or S

SEQ ID NO: 93154 - protein, 25 aa, Artificial Sequence
  Cyclic GFR-binding peptide
KLSPISILYKDKGVVTYLKYHYGMA

SEQ ID NO: 93155 - protein, 30 aa, Artificial Sequence
  Cyclic GFR-binding peptide
VPARLSATSILYYDAANNVVLRKHRDMVVE

SEQ ID NO: 93156 - protein, 38 aa, Artificial Sequence
  Cyclic GFR-binding peptide
  MOD_RES (6)..(7): Xaa is C or S
KASKAXXVPTKLSATSILYYDKGVVTYLRKHRGMAVSE

SEQ ID NO: 93157 - protein, 33 aa, Artificial Sequence; identical to SEQ ID NO: 21237
  Cyclic GFR-binding peptide
  MOD_RES (6)..(7): Xaa is C or S

SEQ ID NO: 93158 - protein, 22 aa, Artificial Sequence
  Cyclic GFR-binding peptide
EPISILYLDSANNVVKFKYEDM

SEQ ID NO: 93159 - protein, 30 aa, Artificial Sequence
  Cyclic GFR-binding peptide
  MOD_RES (1)..(2): Xaa is C or S
XXVPEKMNAISILYFDENKNVVLKKYRNMT

SEQ ID NO: 93160 - protein, 34 aa, Artificial Sequence; identical to SEQ ID NO: 43178
  Cyclic GFR-binding peptide
  MOD_RES (6)..(7): Xaa is C or S

SEQ ID NO: 93161 - protein, 39 aa, Artificial Sequence
  Cyclic GFR-binding peptide
  MOD_RES (6)..(7)..(38): Xaa is C or S
RVPSTXXAPVKTSPISMLYKDNGRVLLLKYHYMIVEEXG

SEQ ID NO: 93162 - protein, 36 aa, Artificial Sequence
  Cyclic GFR-binding peptide
  MOD_RES (6)..(7): Xaa is C or S
HVPKPXXAPTKLSPISVLYKDDSSNVILKYHYNMVV

SEQ ID NO: 93163 - protein, 30 aa, Artificial Sequence; identical to SEQ ID NO: 40184
  Cyclic GFR-binding peptide
  MOD_RES (1)..(1): Xaa is C or S

SEQ ID NO: 93164 - protein, 36 aa, Artificial Sequence; identical to SEQ ID NO: 11174
  Cyclic GFR-binding peptide
  MOD_RES (5)..(6): Xaa is C or S

SEQ ID NO: 93165 - protein, 30 aa, Artificial Sequence; identical to SEQ ID NO: 40186
  Cyclic GFR-binding peptide
  MOD_RES (4)..(5): Xaa is C or S

SEQ ID NO: 93166 - protein, 25 aa, Artificial Sequence
  Cyclic GFR-binding peptide
LSATSILYYDSANNVVLRKHRDMVV

SEQ ID NO: 93167 - protein, 34 aa, Artificial Sequence
  Cyclic GFR-binding peptide
  MOD_RES (4)..(5): Xaa is C or S
PPTXXVPTRLSPISILYKDSANNVVLKYHYDMVV

SEQ ID NO: 93168 - protein, 39 aa, Artificial Sequence
  Cyclic GFR-binding peptide
  MOD_RES (4)..(5)..(37)..(39): Xaa is C or S
SKAXXVPTKLSATSILYYDKGVVTYLRKHRGMAVSEXGX

SEQ ID NO: 93169 - protein, 30 aa, Artificial Sequence; identical to SEQ ID NO: 43183
  Cyclic GFR-binding peptide

SEQ ID NO: 93170 - protein, 30 aa, Artificial Sequence; identical to SEQ ID NO: 11181
  Cyclic GFR-binding peptide
  MOD_RES (27)..(29): Xaa is C or S

SEQ ID NO: 93171 - protein, 30 aa, Artificial Sequence; identical to SEQ ID NO: 21257
  Cyclic GFR-binding peptide
  MOD_RES (3)..(4): Xaa is C or S

SEQ ID NO: 93172 - protein, 31 aa, Artificial Sequence; identical to SEQ ID NO: 40194
  Cyclic GFR-binding peptide
  MOD_RES (30)..(30): Xaa is C or S

SEQ ID NO: 93173 - protein, 26 aa, Artificial Sequence
  Cyclic GFR-binding peptide
PQDLSATSILYYVGRTPKVLRKHRMV

SEQ ID NO: 93174 - protein, 26 aa, Artificial Sequence
  Cyclic GFR-binding peptide
QDLEPISILYLIGKTPKIKFKYEMIV

SEQ ID NO: 93175 - protein, 31 aa, Artificial Sequence; identical to SEQ ID NO: 40198
  Cyclic GFR-binding peptide
  MOD_RES (29)..(31): Xaa is C or S

SEQ ID NO: 93176 - protein, 24 aa, Artificial Sequence
  Cyclic GFR-binding peptide
NAISILYFVGRTPKVLKKYRMVVK

SEQ ID NO: 93177 - protein, 34 aa, Artificial Sequence
  Cyclic GFR-binding peptide
  MOD_RES (5)..(6): Xaa is C or S
IPEPXXVPEKMSPISILYKDENKNVVLKYHYNMT

SEQ ID NO: 93178 - protein, 26 aa, Artificial Sequence
  Cyclic GFR-binding peptide
TPTKMSPISMLYKNDKQQIILKYHYG

SEQ ID NO: 93179 - protein, 26 aa, Artificial Sequence
  Cyclic GFR-binding peptide
  MOD_RES (1)..(1): Xaa is C or S
XVPEKMSPISILYKDENKNVVLKYHY

SEQ ID NO: 93180 - protein, 25 aa, Artificial Sequence
  Cyclic GFR-binding peptide
VPEKMSPINILYFDENKNVVYGKIP

SEQ ID NO: 93181 - protein, 31 aa, Artificial Sequence; identical to SEQ ID NO: 43198
  Cyclic GFR-binding peptide
  MOD_RES (29)..(31): Xaa is C or S

SEQ ID NO: 93182 - protein, 28 aa, Artificial Sequence
  Cyclic GFR-binding peptide
VPTRLNAISILYFDSANNVVLKKYRDMV

SEQ ID NO: 93183 - protein, 27 aa, Artificial Sequence
  Cyclic GFR-binding peptide
PARLSATSILYYDAANNVVLRKHRDMV

SEQ ID NO: 93184 - protein, 34 aa, Artificial Sequence; identical to SEQ ID NO: 43203
  Cyclic GFR-binding peptide
  MOD_RES (6)..(7): Xaa is C or S

SEQ ID NO: 93185 - protein, 32 aa, Artificial Sequence; identical to SEQ ID NO: 40206
  Cyclic GFR-binding peptide
  MOD_RES (2)..(3): Xaa is C or S

SEQ ID NO: 93186 - protein, 36 aa, Artificial Sequence
  Cyclic GFR-binding peptide
  MOD_RES (4)..(5): Xaa is C or S
PPTXXVPTRLSPISILYKDSANNVVLKYHYDMVVES

SEQ ID NO: 93187 - protein, 28 aa, Artificial Sequence
  Cyclic GFR-binding peptide
  MOD_RES (1)..(2): Xaa is C or S
XXVPEKMSATSILYYDENKNVVLRKHRN

SEQ ID NO: 93188 - protein, 36 aa, Artificial Sequence; identical to SEQ ID NO: 43206
  Cyclic GFR-binding peptide
  MOD_RES (3)..(4)..(36): Xaa is C or S

SEQ ID NO: 93189 - protein, 38 aa, Artificial Sequence; identical to SEQ ID NO: 40213
  Cyclic GFR-binding peptide
  MOD_RES (2)..(3)..(35)..(37): Xaa is C or S

SEQ ID NO: 93190 - protein, 22 aa, Artificial Sequence
  Cyclic GFR-binding peptide
SPINVLYFDSSNNVIYGKIPNM

SEQ ID NO: 93191 - protein, 34 aa, Artificial Sequence
  Cyclic GFR-binding peptide
  MOD_RES (1)..(32)..(34): Xaa is C or S
XAPVKTEPISMLYLDNGRVLLKFKYEMIVEEXGX

SEQ ID NO: 93192 - protein, 34 aa, Artificial Sequence; identical to SEQ ID NO: 11210
  Cyclic GFR-binding peptide
  MOD_RES (4)..(5): Xaa is C or S

SEQ ID NO: 93193 - protein, 37 aa, Artificial Sequence; identical to SEQ ID NO: 40216
  Cyclic GFR-binding peptide
  MOD_RES (2)..(3)..(34)..(36): Xaa is C or S

SEQ ID NO: 93194 - protein, 38 aa, Artificial Sequence; identical to SEQ ID NO: 43215
  Cyclic GFR-binding peptide
  MOD_RES (2)..(3)..(35)..(37): Xaa is C or S

SEQ ID NO: 93195 - protein, 33 aa, Artificial Sequence
  Cyclic GFR-binding peptide
  MOD_RES (31)..(33): Xaa is C or S
PEKMEPISILYLDENKNVVKFKYENMTVESXAX

SEQ ID NO: 93196 - protein, 27 aa, Artificial Sequence
  Cyclic GFR-binding peptide
  MOD_RES (1)..(2): Xaa is C or S
XXVPARLEPISILYLDAANNVVKFKYE

SEQ ID NO: 93197 - protein, 25 aa, Artificial Sequence
  Cyclic GFR-binding peptide
LNAISVLYFDDMGVPTLKKYREGMS

SEQ ID NO: 93198 - protein, 37 aa, Artificial Sequence; identical to SEQ ID NO: 11215
  Cyclic GFR-binding peptide
  MOD_RES (4)..(36): Xaa is C or S

SEQ ID NO: 93199 - protein, 27 aa, Artificial Sequence
  Cyclic GFR-binding peptide
  MOD_RES (27)..(27): Xaa is C or S
SPISMLYKNDKQQIILKYHYGMVVDRX

SEQ ID NO: 93200 - protein, 26 aa, Artificial Sequence
  Cyclic GFR-binding peptide
KMEPISILYLDENKNVVKFKYENMTV

SEQ ID NO: 93201 - protein, 29 aa, Artificial Sequence
  Cyclic GFR-binding peptide
  MOD_RES (26)..(28): Xaa is C or S
SPISMLYKDNGRVLLLKYHYMIVEEXGXL

SEQ ID NO: 93202 - protein, 33 aa, Artificial Sequence; identical to SEQ ID NO: 11219
  Cyclic GFR-binding peptide
  MOD_RES (6)..(7): Xaa is C or S

SEQ ID NO: 93203 - protein, 33 aa, Artificial Sequence; identical to SEQ ID NO: 40229
  Cyclic GFR-binding peptide
  MOD_RES (6)..(7): Xaa is C or S

SEQ ID NO: 93204 - protein, 37 aa, Artificial Sequence; identical to SEQ ID NO: 11222
  Cyclic GFR-binding peptide
  MOD_RES (2)..(3)..(36): Xaa is C or S

SEQ ID NO: 93205 - protein, 29 aa, Artificial Sequence
  Cyclic GFR-binding peptide
PQDLSPINILYFVGRTPKVYGKIPMVVKS

SEQ ID NO: 93206 - protein, 33 aa, Artificial Sequence; identical to SEQ ID NO: 11223
  Cyclic GFR-binding peptide
  MOD_RES (4)..(4): Xaa is C or S

SEQ ID NO: 93207 - protein, 42 aa, Artificial Sequence
  Cyclic GFR-binding peptide
  MOD_RES (6)..(7)..(39)..(41): Xaa is C or S
STPPTXXVPTRLSPISILYKDSANNVVLKYHYDMVVESXGXR

SEQ ID NO: 93208 - protein, 36 aa, Artificial Sequence
  Cyclic GFR-binding peptide
  MOD_RES (1)..(33)..(35): Xaa is C or S
XVPEKMSATSILYYDENKNVVLRKHRNMTVESXAXR

SEQ ID NO: 93209 - protein, 36 aa, Artificial Sequence
  Cyclic GFR-binding peptide
  MOD_RES (6)..(7): Xaa is C or S
GIPEPXXVPEKMNAISILYFDENKNVVLKKYRNMTV

SEQ ID NO: 93210 - protein, 30 aa, Artificial Sequence; identical to SEQ ID NO: 77986
  Cyclic GFR-binding peptide
  MOD_RES (29)..(29): Xaa is C or S

SEQ ID NO: 93211 - protein, 20 aa, Artificial Sequence
  Cyclic GFR-binding peptide
SPISMLYKDENEKVVLKYHY

SEQ ID NO: 93212 - protein, 31 aa, Artificial Sequence; identical to SEQ ID NO: 11227
  Cyclic GFR-binding peptide
  MOD_RES (5)..(6): Xaa is C or S

SEQ ID NO: 93213 - protein, 33 aa, Artificial Sequence; identical to SEQ ID NO: 11229
  Cyclic GFR-binding peptide
  MOD_RES (5)..(6): Xaa is C or S

SEQ ID NO: 93214 - protein, 24 aa, Artificial Sequence
  Cyclic GFR-binding peptide
SPISMLYKDNGRVLLLKYHYMIVE

SEQ ID NO: 93215 - protein, 35 aa, Artificial Sequence
  Cyclic GFR-binding peptide
  MOD_RES (1)..(33)..(35): Xaa is C or S
XVPTRLSATSILYYDSANNVVLRKHRDMVVESXGX

SEQ ID NO: 93216 - protein, 24 aa, Artificial Sequence
  Cyclic GFR-binding peptide
PARLSATSILYYDAANNVVLRKHR

SEQ ID NO: 93217 - protein, 33 aa, Artificial Sequence; identical to SEQ ID NO: 40239
  Cyclic GFR-binding peptide
  MOD_RES (2)..(3): Xaa is C or S

SEQ ID NO: 93218 - protein, 39 aa, Artificial Sequence
  Cyclic GFR-binding peptide
  MOD_RES (5)..(6)..(38): Xaa is C or S
SAGPXXTPTKMSPISMLYKNDKQQIILKYHYGMVVDRXG

SEQ ID NO: 93219 - protein, 26 aa, Artificial Sequence
  Cyclic GFR-binding peptide
EKMNAISILYFDENKNVVLKKYRNMT

SEQ ID NO: 93220 - protein, 38 aa, Artificial Sequence; identical to SEQ ID NO: 11238
  Cyclic GFR-binding peptide
  MOD_RES (3)..(4)..(36)..(38): Xaa is C or S

SEQ ID NO: 93221 - protein, 31 aa, Artificial Sequence
  Cyclic GFR-binding peptide
  MOD_RES (4)..(5): Xaa is C or S
AAPXXVPQALSPINILYFVGRKPKVYGKIPM

SEQ ID NO: 93222 - protein, 30 aa, Artificial Sequence
  Cyclic GFR-binding peptide
  MOD_RES (1)..(2): Xaa is C or S
XXTPTKMEPISMLYLNDKQQIIKFKYEGMV

SEQ ID NO: 93223 - protein, 24 aa, Artificial Sequence
  Cyclic GFR-binding peptide
TKLSPISILYKDKGVVTYLKYHYG

SEQ ID NO: 93224 - protein, 29 aa, Artificial Sequence
  Cyclic GFR-binding peptide
VPEKMSPINILYFDENKNVVYGKIPNMTV

SEQ ID NO: 93225 - protein, 32 aa, Artificial Sequence; identical to SEQ ID NO: 11244
  Cyclic GFR-binding peptide
  MOD_RES (5)..(6): Xaa is C or S

SEQ ID NO: 93226 - protein, 40 aa, Artificial Sequence
  Cyclic GFR-binding peptide
  MOD_RES (5)..(6)..(38)..(40): Xaa is C or S
IPEPXXVPEKMSPINILYFDENKNVVYGKIPNMTVESXAX

SEQ ID NO: 93227 - protein, 31 aa, Artificial Sequence; identical to SEQ ID NO: 43237
  Cyclic GFR-binding peptide
  MOD_RES (5)..(6): Xaa is C or S

SEQ ID NO: 93228 - protein, 32 aa, Artificial Sequence; identical to SEQ ID NO: 11245
  Cyclic GFR-binding peptide
  MOD_RES (30)..(32): Xaa is C or S

SEQ ID NO: 93229 - protein, 30 aa, Artificial Sequence; identical to SEQ ID NO: 11247
  Cyclic GFR-binding peptide
  MOD_RES (29)..(29): Xaa is C or S

SEQ ID NO: 93230 - protein, 27 aa, Artificial Sequence
  Cyclic GFR-binding peptide
RLSATSILYYDSANNVVLRKHRDMVVE

SEQ ID NO: 93231 - protein, 26 aa, Artificial Sequence
  Cyclic GFR-binding peptide
  MOD_RES (1)..(1): Xaa is C or S
XVPARLSATSILYYDAANNVVLRKHR

SEQ ID NO: 93232 - protein, 31 aa, Artificial Sequence; identical to SEQ ID NO: 43245
  Cyclic GFR-binding peptide
  MOD_RES (2)..(3): Xaa is C or S

SEQ ID NO: 93233 - protein, 27 aa, Artificial Sequence
  Cyclic GFR-binding peptide
  MOD_RES (27)..(27): Xaa is C or S
SPINILYFDSANNVVYGKIPDMVVESX

SEQ ID NO: 93234 - protein, 30 aa, Artificial Sequence
  Cyclic GFR-binding peptide
  MOD_RES (4)..(5): Xaa is C or S
AGPXXTPTKMEPISMLYLNDKQQIIKFKYE

SEQ ID NO: 93235 - protein, 40 aa, Artificial Sequence; identical to SEQ ID NO: 11254
  Cyclic GFR-binding peptide
  MOD_RES (6)..(7)..(39): Xaa is C or S

SEQ ID NO: 93236 - protein, 33 aa, Artificial Sequence; identical to SEQ ID NO: 40259
  Cyclic GFR-binding peptide
  MOD_RES (30)..(32): Xaa is C or S

SEQ ID NO: 93237 - protein, 24 aa, Artificial Sequence
  Cyclic GFR-binding peptide
PEKMSPISILYKDENKNVVLKYHY

SEQ ID NO: 93238 - protein, 26 aa, Artificial Sequence
  Cyclic GFR-binding peptide
LSPISILYKIGKTPKILKYHYMIVKS

SEQ ID NO: 93239 - protein, 25 aa, Artificial Sequence
  Cyclic GFR-binding peptide
VPTKLNAISILYFDKGVVTYLKKYR

SEQ ID NO: 93240 - protein, 29 aa, Artificial Sequence
  Cyclic GFR-binding peptide
  MOD_RES (27)..(29): Xaa is C or S
NAISMLYFDENEKVVLKKYRDMVVEGXGX

SEQ ID NO: 93241 - protein, 30 aa, Artificial Sequence
  Cyclic GFR-binding peptide
  MOD_RES (3)..(4): Xaa is C or S
STXXAPVKTSATSMLYYDNGRVLLLRKHRM

SEQ ID NO: 93242 - protein, 41 aa, Artificial Sequence; identical to SEQ ID NO: 40264
  Cyclic GFR-binding peptide
  MOD_RES (6)..(7)..(40): Xaa is C or S

SEQ ID NO: 93243 - protein, 30 aa, Artificial Sequence; identical to SEQ ID NO: 43251
  Cyclic GFR-binding peptide

SEQ ID NO: 93244 - protein, 32 aa, Artificial Sequence
  Cyclic GFR-binding peptide
  MOD_RES (4)..(5): Xaa is C or S
AGPXXTPTKMEPISMLYLNDKQQIIKFKYEGM

SEQ ID NO: 93245 - protein, 32 aa, Artificial Sequence
  Cyclic GFR-binding peptide
  MOD_RES (31)..(31): Xaa is C or S
PEKMSPISILYKDENKNVVLKYHYNMTVESXA

SEQ ID NO: 93246 - protein, 35 aa, Artificial Sequence
  Cyclic GFR-binding peptide
  MOD_RES (3)..(4): Xaa is C or S
GPXXTPTKMSPISMLYKNDKQQIILKYHYGMVVDR

SEQ ID NO: 93247 - protein, 28 aa, Artificial Sequence
  Cyclic GFR-binding peptide
  MOD_RES (28)..(28): Xaa is C or S
KTSPINMLYFDNGRVLLYGKIPMIVEEX

SEQ ID NO: 93248 - protein, 40 aa, Artificial Sequence; identical to SEQ ID NO: 40265
  Cyclic GFR-binding peptide
  MOD_RES (3)..(4)..(37)..(39): Xaa is C or S

SEQ ID NO: 93249 - protein, 42 aa, Artificial Sequence; identical to SEQ ID NO: 11263
  Cyclic GFR-binding peptide
  MOD_RES (6)..(7)..(39)..(41): Xaa is C or S

SEQ ID NO: 93250 - protein, 23 aa, Artificial Sequence
  Cyclic GFR-binding peptide
SPISILYKIGKTPKILKYHYMIV

SEQ ID NO: 93251 - protein, 35 aa, Artificial Sequence; identical to SEQ ID NO: 40268
  Cyclic GFR-binding peptide
  MOD_RES (5)..(6): Xaa is C or S

SEQ ID NO: 93252 - protein, 31 aa, Artificial Sequence
  Cyclic GFR-binding peptide
  MOD_RES (29)..(31): Xaa is C or S
RLSATSILYYDSANNVVLRKHRDMVVESXGX

SEQ ID NO: 93253 - protein, 28 aa, Artificial Sequence
  Cyclic GFR-binding peptide
VPTELSATSMLYYDENEKVVLRKHRDMV

SEQ ID NO: 93254 - protein, 29 aa, Artificial Sequence
  Cyclic GFR-binding peptide
  MOD_RES (28)..(28): Xaa is C or S
DLEPISILYLVGRTPKVKFKYEMVVKSXK

SEQ ID NO: 93255 - protein, 37 aa, Artificial Sequence; identical to SEQ ID NO: 40275
  Cyclic GFR-binding peptide
  MOD_RES (6)..(7): Xaa is C or S

SEQ ID NO: 93256 - protein, 30 aa, Artificial Sequence; identical to SEQ ID NO: 11270
  Cyclic GFR-binding peptide

SEQ ID NO: 93257 - protein, 22 aa, Artificial Sequence
  Cyclic GFR-binding peptide
SATSILYYDENKNVVLRKHRNM

SEQ ID NO: 93258 - protein, 37 aa, Artificial Sequence; identical to SEQ ID NO: 11273
  Cyclic GFR-binding peptide
  MOD_RES (4)..(5)..(36): Xaa is C or S

SEQ ID NO: 93259 - protein, 41 aa, Artificial Sequence; identical to SEQ ID NO: 40279
  Cyclic GFR-binding peptide
  MOD_RES (6)..(7)..(39)..(41): Xaa is C or S

SEQ ID NO: 93260 - protein, 31 aa, Artificial Sequence; identical to SEQ ID NO: 40280
  Cyclic GFR-binding peptide
  MOD_RES (30)..(30): Xaa is C or S

SEQ ID NO: 93261 - protein, 35 aa, Artificial Sequence; identical to SEQ ID NO: 11275
  Cyclic GFR-binding peptide
  MOD_RES (5)..(6): Xaa is C or S

SEQ ID NO: 93262 - protein, 33 aa, Artificial Sequence; identical to SEQ ID NO: 43267
  Cyclic GFR-binding peptide
  MOD_RES (3)..(4): Xaa is C or S

SEQ ID NO: 93263 - protein, 38 aa, Artificial Sequence; identical to SEQ ID NO: 11277
  Cyclic GFR-binding peptide
  MOD_RES (6)..(38): Xaa is C or S

SEQ ID NO: 93264 - protein, 31 aa, Artificial Sequence; identical to SEQ ID NO: 43270
  Cyclic GFR-binding peptide
  MOD_RES (28)..(30): Xaa is C or S

SEQ ID NO: 93265 - protein, 28 aa, Artificial Sequence
  Cyclic GFR-binding peptide
  MOD_RES (1)..(1): Xaa is C or S
XVPARLSPINILYFDAANNVVYGKIPDM

SEQ ID NO: 93266 - protein, 40 aa, Artificial Sequence; identical to SEQ ID NO: 40285
  Cyclic GFR-binding peptide
  MOD_RES (4)..(5)..(37)..(39): Xaa is C or S

SEQ ID NO: 93267 - protein, 27 aa, Artificial Sequence
  Cyclic GFR-binding peptide
RLSPINILYFDAANNVVYGKIPDMVVE

SEQ ID NO: 93268 - protein, 32 aa, Artificial Sequence; identical to SEQ ID NO: 11282
  Cyclic GFR-binding peptide
  MOD_RES (4)..(5): Xaa is C or S

SEQ ID NO: 93269 - protein, 34 aa, Artificial Sequence; identical to SEQ ID NO: 11284
  Cyclic GFR-binding peptide
  MOD_RES (3)..(4): Xaa is C or S

SEQ ID NO: 93270 - protein, 32 aa, Artificial Sequence; identical to SEQ ID NO: 43274
  Cyclic GFR-binding peptide
  MOD_RES (3)..(4): Xaa is C or S

SEQ ID NO: 93271 - protein, 33 aa, Artificial Sequence; identical to SEQ ID NO: 40293
  Cyclic GFR-binding peptide
  MOD_RES (6)..(6): Xaa is C or S

SEQ ID NO: 93272 - protein, 24 aa, Artificial Sequence
  Cyclic GFR-binding peptide
ELSPISMLYKDEYDKVVLKYHYEM

SEQ ID NO: 93273 - protein, 32 aa, Artificial Sequence
  Cyclic GFR-binding peptide
  MOD_RES (1)..(2): Xaa is C or S
XXVPTRLSPISILYKDSANNVVLKYHYDMVVE

SEQ ID NO: 93274 - protein, 33 aa, Artificial Sequence; identical to SEQ ID NO: 78015
  Cyclic GFR-binding peptide
  MOD_RES (1)..(2)..(33): Xaa is C or S

SEQ ID NO: 93275 - protein, 26 aa, Artificial Sequence
  Cyclic GFR-binding peptide
SATSILYYDSANNVVLRKHRDMVVES

SEQ ID NO: 93276 - protein, 26 aa, Artificial Sequence
  Cyclic GFR-binding peptide
QLSPINVLYFDDSSNVIYGKIPNMVV

SEQ ID NO: 93277 - protein, 31 aa, Artificial Sequence
  Cyclic GFR-binding peptide
  MOD_RES (5)..(6): Xaa is C or S
IPEPXXVPEKMNAISILYFDENKNVVLKKYR

SEQ ID NO: 93278 - protein, 29 aa, Artificial Sequence
  Cyclic GFR-binding peptide
PARLNAISILYFDAANNVVLKKYRDMVVE

SEQ ID NO: 93279 - protein, 32 aa, Artificial Sequence
  Cyclic GFR-binding peptide
  MOD_RES (1)..(2): Xaa is C or S
XXVPEKMNAISILYFDENKNVVLKKYRNMTVE

SEQ ID NO: 93280 - protein, 26 aa, Artificial Sequence
  Cyclic GFR-binding peptide
VPTELSATSMLYYDENEKVVLRKHRD

SEQ ID NO: 93281 - protein, 28 aa, Artificial Sequence
  Cyclic GFR-binding peptide
  MOD_RES (1)..(2): Xaa is C or S
XXVPQALNAISILYFVGRKPKVLKKYRM

SEQ ID NO: 93282 - protein, 40 aa, Artificial Sequence; identical to SEQ ID NO: 11298
  Cyclic GFR-binding peptide
  MOD_RES (4)..(5)..(37)..(39): Xaa is C or S

SEQ ID NO: 93283 - protein, 36 aa, Artificial Sequence
  Cyclic GFR-binding peptide
  MOD_RES (6)..(7): Xaa is C or S
STPPTXXVPTRLSATSILYYDSANNVVLRKHRDMVV

SEQ ID NO: 93284 - protein, 30 aa, Artificial Sequence
  Cyclic GFR-binding peptide
  MOD_RES (29)..(29): Xaa is C or S
KMSPISILYKDENKNVVLKYHYNMTVESXA

SEQ ID NO: 93285 - protein, 31 aa, Artificial Sequence; identical to SEQ ID NO: 11299
  Cyclic GFR-binding peptide
  MOD_RES (29)..(31): Xaa is C or S

SEQ ID NO: 93286 - protein, 33 aa, Artificial Sequence; identical to SEQ ID NO: 11300
  Cyclic GFR-binding peptide
  MOD_RES (3)..(4): Xaa is C or S

SEQ ID NO: 93287 - protein, 22 aa, Artificial Sequence
  Cyclic GFR-binding peptide
NAISMLYFDENEKVVLKKYRDM

SEQ ID NO: 93288 - protein, 33 aa, Artificial Sequence; identical to SEQ ID NO: 40314
  Cyclic GFR-binding peptide
  MOD_RES (4)..(5): Xaa is C or S

SEQ ID NO: 93289 - protein, 26 aa, Artificial Sequence
  Cyclic GFR-binding peptide
  MOD_RES (26)..(26): Xaa is C or S
NAISMLYFDNGRVLLLKKYRMIVEEX

SEQ ID NO: 93290 - protein, 23 aa, Artificial Sequence
  Cyclic GFR-binding peptide
TKMSPISMLYKNDKQQIILKYHY

SEQ ID NO: 93291 - protein, 29 aa, Artificial Sequence
  Cyclic GFR-binding peptide
  MOD_RES (2)..(3): Xaa is C or S
AXXVPTELNAISMLYFDEYDKVVLKKYRE

SEQ ID NO: 93292 - protein, 32 aa, Artificial Sequence; identical to SEQ ID NO: 11310
  Cyclic GFR-binding peptide
  MOD_RES (5)..(6): Xaa is C or S

SEQ ID NO: 93293 - protein, 30 aa, Artificial Sequence; identical to SEQ ID NO: 11311
  Cyclic GFR-binding peptide
  MOD_RES (4)..(5): Xaa is C or S

SEQ ID NO: 93294 - protein, 31 aa, Artificial Sequence
  Cyclic GFR-binding peptide
  MOD_RES (1)..(1): Xaa is C or S
XVPTRLSPISILYKDSANNVVLKYHYDMVVE

SEQ ID NO: 93295 - protein, 31 aa, Artificial Sequence
  Cyclic GFR-binding peptide
  MOD_RES (31)..(31): Xaa is C or S
VPQDLSPINILYFVGRTPKVYGKIPMVVKSX

SEQ ID NO: 93296 - protein, 32 aa, Artificial Sequence
  Cyclic GFR-binding peptide
  MOD_RES (1)..(32): Xaa is C or S
XVPQDLSPINILYFVGRTPKVYGKIPMVVKSX

SEQ ID NO: 93297 - protein, 39 aa, Artificial Sequence; identical to SEQ ID NO: 11313
  Cyclic GFR-binding peptide
  MOD_RES (3)..(4)..(36)..(38): Xaa is C or S

SEQ ID NO: 93298 - protein, 40 aa, Artificial Sequence; identical to SEQ ID NO: 40328
  Cyclic GFR-binding peptide
  MOD_RES (5)..(6)..(37)..(39): Xaa is C or S

SEQ ID NO: 93299 - protein, 25 aa, Artificial Sequence
  Cyclic GFR-binding peptide
VPTELSATSMLYYDENEKVVLRKHR

SEQ ID NO: 93300 - protein, 28 aa, Artificial Sequence
  Cyclic GFR-binding peptide
PARLNAISILYFDAANNVVLKKYRDMVV

SEQ ID NO: 93301 - protein, 31 aa, Artificial Sequence; identical to SEQ ID NO: 11321
  Cyclic GFR-binding peptide
  MOD_RES (4)..(5): Xaa is C or S

SEQ ID NO: 93302 - protein, 29 aa, Artificial Sequence
  Cyclic GFR-binding peptide
PTKLSPINVLYFDDSSNVIYGKIPNMVVR

SEQ ID NO: 93303 - protein, 25 aa, Artificial Sequence
  Cyclic GFR-binding peptide
EKMNAISILYFDENKNVVLKKYRNM

SEQ ID NO: 93304 - protein, 38 aa, Artificial Sequence; identical to SEQ ID NO: 6355
  Cyclic GFR-binding peptide
  MOD_RES (6)..(7): Xaa is C or S

SEQ ID NO: 93305 - protein, 35 aa, Artificial Sequence; identical to SEQ ID NO: 6356
  Cyclic GFR-binding peptide
  MOD_RES (32)..(34): Xaa is C or S

SEQ ID NO: 93306 - protein, 21 aa, Artificial Sequence
  Cyclic GFR-binding peptide
SATSMLYYNDKQQIILRKHRG

SEQ ID NO: 93307 - protein, 26 aa, Artificial Sequence
  Cyclic GFR-binding peptide
SPISILYKDENKNVVLKYHYNMTVES

SEQ ID NO: 93308 - protein, 28 aa, Artificial Sequence
  Cyclic GFR-binding peptide
KLSATSILYYDKGVVTYLRKHRGMAVSE

SEQ ID NO: 93309 - protein, 36 aa, Artificial Sequence
  Cyclic GFR-binding peptide
  MOD_RES (1)..(2)..(34)..(36): Xaa is C or S
XXVPEKMSPISILYKDENKNVVLKYHYNMTVESXAX

SEQ ID NO: 93310 - protein, 27 aa, Artificial Sequence
  Cyclic GFR-binding peptide
PQDLEPISILYLVGRTPKVKFKYEMVV

SEQ ID NO: 93311 - protein, 30 aa, Artificial Sequence; identical to SEQ ID NO: 41830
  Cyclic GFR-binding peptide
  MOD_RES (4)..(5): Xaa is C or S

SEQ ID NO: 93312 - protein, 32 aa, Artificial Sequence; identical to SEQ ID NO: 76752
  Cyclic GFR-binding peptide
  MOD_RES (29)..(31): Xaa is C or S

SEQ ID NO: 93313 - protein, 24 aa, Artificial Sequence
  Cyclic GFR-binding peptide
QDLNAISILYFIGKTPKILKKYRM

SEQ ID NO: 93314 - protein, 29 aa, Artificial Sequence
  Cyclic GFR-binding peptide
  MOD_RES (29)..(29): Xaa is C or S
QDLNAISILYFVGRTPKVLKKYRMVVKSX

SEQ ID NO: 93315 - protein, 30 aa, Artificial Sequence; identical to SEQ ID NO: 6363
  Cyclic GFR-binding peptide
  MOD_RES (30)..(30): Xaa is C or S

SEQ ID NO: 93316 - protein, 26 aa, Artificial Sequence
  Cyclic GFR-binding peptide
  MOD_RES (1)..(1): Xaa is C or S
XVPTRLSATSILYYDSANNVVLRKHR

SEQ ID NO: 93317 - protein, 31 aa, Artificial Sequence
  Cyclic GFR-binding peptide
  MOD_RES (1)..(1): Xaa is C or S
XVPEKMNAISILYFDENKNVVLKKYRNMTVE

SEQ ID NO: 93318 - protein, 38 aa, Artificial Sequence
  Cyclic GFR-binding peptide
  MOD_RES (4)..(5)..(36)..(38): Xaa is C or S
PSTXXAPVKTSATSMLYYDNGRVLLLRKHRMIVEEXGX

SEQ ID NO: 93319 - protein, 38 aa, Artificial Sequence; identical to SEQ ID NO: 6365
  Cyclic GFR-binding peptide
  MOD_RES (7)..(7): Xaa is C or S

SEQ ID NO: 93320 - protein, 33 aa, Artificial Sequence; identical to SEQ ID NO: 6366
  Cyclic GFR-binding peptide
  MOD_RES (32)..(32): Xaa is C or S

SEQ ID NO: 93321 - protein, 30 aa, Artificial Sequence
  Cyclic GFR-binding peptide
  MOD_RES (30)..(30): Xaa is C or S
TKMSATSMLYYNDKQQIILRKHRGMVVDRX

SEQ ID NO: 93322 - protein, 34 aa, Artificial Sequence
  Cyclic GFR-binding peptide
  MOD_RES (32)..(34): Xaa is C or S
VPEKMEPISILYLDENKNVVKFKYENMTVESXAX

SEQ ID NO: 93323 - protein, 27 aa, Artificial Sequence
  Cyclic GFR-binding peptide
QDLSPINILYFIGKTPKIYGKIPMIVK

SEQ ID NO: 93324 - protein, 40 aa, Artificial Sequence
  Cyclic GFR-binding peptide
  MOD_RES (6)..(7)..(38)..(40): Xaa is C or S
ASASPXXVSQDLSPINILYFIGKTPKIYGKIPMIVKSXKX

SEQ ID NO: 93325 - protein, 25 aa, Artificial Sequence
  Cyclic GFR-binding peptide
VPTRLNAISILYFDSANNVVLKKYR

SEQ ID NO: 93326 - protein, 27 aa, Artificial Sequence
  Cyclic GFR-binding peptide
  MOD_RES (1)..(2): Xaa is C or S
XXAPTKLSPINVLYFDSSNNVIYGKIP

SEQ ID NO: 93327 - protein, 34 aa, Artificial Sequence; identical to SEQ ID NO: 41843
  Cyclic GFR-binding peptide
  MOD_RES (4)..(5): Xaa is C or S

SEQ ID NO: 93328 - protein, 28 aa, Artificial Sequence
  Cyclic GFR-binding peptide
  MOD_RES (2)..(3): Xaa is C or S
AXXVPTKLEPISVLYLDDMGVPTKFKYE

SEQ ID NO: 93329 - protein, 32 aa, Artificial Sequence; identical to SEQ ID NO: 34730
  Cyclic GFR-binding peptide
  MOD_RES (31)..(31): Xaa is C or S

SEQ ID NO: 93330 - protein, 37 aa, Artificial Sequence
  Cyclic GFR-binding peptide
  MOD_RES (1)..(2)..(34)..(36): Xaa is C or S
XXVPEKMSPISILYKDENKNVVLKYHYNMTVESXAXR

SEQ ID NO: 93331 - protein, 32 aa, Artificial Sequence; identical to SEQ ID NO: 34732
  Cyclic GFR-binding peptide
  MOD_RES (2)..(3): Xaa is C or S

SEQ ID NO: 93332 - protein, 39 aa, Artificial Sequence
  Cyclic GFR-binding peptide
  MOD_RES (5)..(6)..(37)..(39): Xaa is C or S
SASPXXVPQDLSPINILYFVGRTPKVYGKIPMVVKSXKX

SEQ ID NO: 93333 - protein, 35 aa, Artificial Sequence; identical to SEQ ID NO: 41850
  Cyclic GFR-binding peptide
  MOD_RES (3)..(4): Xaa is C or S

SEQ ID NO: 93334 - protein, 28 aa, Artificial Sequence
  Cyclic GFR-binding peptide
PQDLEPISILYLVGRTPKVKFKYEMVVK

SEQ ID NO: 93335 - protein, 34 aa, Artificial Sequence
  Cyclic GFR-binding peptide
  MOD_RES (31)..(33): Xaa is C or S
PEKMNAISILYFDENKNVVLKKYRNMTVESXAXR

SEQ ID NO: 93336 - protein, 32 aa, Artificial Sequence
  Cyclic GFR-binding peptide
  MOD_RES (29)..(31): Xaa is C or S
KMSPINILYFDENKNVVYGKIPNMTVESXAXR

SEQ ID NO: 93337 - protein, 24 aa, Artificial Sequence
  Cyclic GFR-binding peptide
LEPISMLYLDENEKVVKFKYEDMV

SEQ ID NO: 93338 - protein, 38 aa, Artificial Sequence; identical to SEQ ID NO: 6378
  Cyclic GFR-binding peptide
  MOD_RES (6)..(7): Xaa is C or S

SEQ ID NO: 93339 - protein, 33 aa, Artificial Sequence; identical to SEQ ID NO: 34736
  Cyclic GFR-binding peptide
  MOD_RES (2)..(3): Xaa is C or S

SEQ ID NO: 93340 - protein, 29 aa, Artificial Sequence
  Cyclic GFR-binding peptide
APVKTSPINMLYFDNGRVLLYGKIPMIVE

SEQ ID NO: 93341 - protein, 34 aa, Artificial Sequence; identical to SEQ ID NO: 41853
  Cyclic GFR-binding peptide
  MOD_RES (4)..(5): Xaa is C or S

SEQ ID NO: 93342 - protein, 22 aa, Artificial Sequence
  Cyclic GFR-binding peptide
LNAISILYFVGRKPKVLKKYRM

SEQ ID NO: 93343 - protein, 34 aa, Artificial Sequence; identical to SEQ ID NO: 6381
  Cyclic GFR-binding peptide
  MOD_RES (32)..(34): Xaa is C or S

SEQ ID NO: 93344 - protein, 34 aa, Artificial Sequence
  Cyclic GFR-binding peptide
  MOD_RES (2)..(3): Xaa is C or S
SXXVPARLSATSILYYDAANNVVLRKHRDMVVEA

SEQ ID NO: 93345 - protein, 29 aa, Artificial Sequence
  Cyclic GFR-binding peptide
  MOD_RES (1)..(2): Xaa is C or S
XXAPTKLNAISVLYFDSSNNVILKKYRNM

SEQ ID NO: 93346 - protein, 32 aa, Artificial Sequence; identical to SEQ ID NO: 34745
  Cyclic GFR-binding peptide
  MOD_RES (31)..(31): Xaa is C or S

SEQ ID NO: 93347 - protein, 27 aa, Artificial Sequence
  Cyclic GFR-binding peptide
VPTRLSPINILYFDSANNVVYGKIPDM

SEQ ID NO: 93348 - protein, 40 aa, Artificial Sequence; identical to SEQ ID NO: 34747
  Cyclic GFR-binding peptide
  MOD_RES (4)..(5)..(37)..(39): Xaa is C or S

SEQ ID NO: 93349 - protein, 35 aa, Artificial Sequence; identical to SEQ ID NO: 34748
  Cyclic GFR-binding peptide
  MOD_RES (6)..(7): Xaa is C or S

SEQ ID NO: 93350 - protein, 27 aa, Artificial Sequence
  Cyclic GFR-binding peptide
  MOD_RES (1)..(2): Xaa is C or S
XXVPTKLSPINILYFDKGVVTYYGKIP

SEQ ID NO: 93351 - protein, 27 aa, Artificial Sequence
  Cyclic GFR-binding peptide
  MOD_RES (1)..(2): Xaa is C or S
XXVPTKLSATSVLYYDDMGVPTLRKHR

SEQ ID NO: 93352 - protein, 29 aa, Artificial Sequence
  Cyclic GFR-binding peptide
  MOD_RES (2)..(3): Xaa is C or S
PXXTPTKMSPISMLYKNDKQQIILKYHYG

SEQ ID NO: 93353 - protein, 27 aa, Artificial Sequence
  Cyclic GFR-binding peptide
  MOD_RES (1)..(1): Xaa is C or S
XVPTRLNAISILYFDSANNVVLKKYRD

SEQ ID NO: 93354 - protein, 28 aa, Artificial Sequence
  Cyclic GFR-binding peptide
  MOD_RES (1)..(2): Xaa is C or S
XXVPTELSPINMLYFDENEKVVYGKIPD

SEQ ID NO: 93355 - protein, 34 aa, Artificial Sequence; identical to SEQ ID NO: 6391
  Cyclic GFR-binding peptide
  MOD_RES (2)..(3): Xaa is C or S

SEQ ID NO: 93356 - protein, 28 aa, Artificial Sequence
  Cyclic GFR-binding peptide
  MOD_RES (1)..(2): Xaa is C or S
XXVPQDLSATSILYYVGRTPKVLRKHRM

SEQ ID NO: 93357 - protein, 33 aa, Artificial Sequence; identical to SEQ ID NO: 6393
  Cyclic GFR-binding peptide
  MOD_RES (30)..(32): Xaa is C or S

SEQ ID NO: 93358 - protein, 30 aa, Artificial Sequence; identical to SEQ ID NO: 6394
  Cyclic GFR-binding peptide

SEQ ID NO: 93359 - protein, 32 aa, Artificial Sequence; identical to SEQ ID NO: 6396
  Cyclic GFR-binding peptide
  MOD_RES (1)..(1): Xaa is C or S

SEQ ID NO: 93360 - protein, 31 aa, Artificial Sequence; identical to SEQ ID NO: 41886
  Cyclic GFR-binding peptide
  MOD_RES (3)..(4): Xaa is C or S

SEQ ID NO: 93361 - protein, 35 aa, Artificial Sequence; identical to SEQ ID NO: 6400
  Cyclic GFR-binding peptide
  MOD_RES (1)..(34): Xaa is C or S

SEQ ID NO: 93362 - protein, 30 aa, Artificial Sequence; identical to SEQ ID NO: 6407
  Cyclic GFR-binding peptide
  MOD_RES (29)..(29): Xaa is C or S

SEQ ID NO: 93363 - protein, 30 aa, Artificial Sequence; identical to SEQ ID NO: 41897
  Cyclic GFR-binding peptide
  MOD_RES (29)..(29): Xaa is C or S

SEQ ID NO: 93364 - protein, 34 aa, Artificial Sequence
  Cyclic GFR-binding peptide
  MOD_RES (6)..(7): Xaa is C or S
GIPEPXXVPEKMSPINILYFDENKNVVYGKIPNM

SEQ ID NO: 93365 - protein, 30 aa, Artificial Sequence
  Cyclic GFR-binding peptide
  MOD_RES (27)..(29): Xaa is C or S
NAISILYFDENKNVVLKKYRNMTVESXAXR

SEQ ID NO: 93366 - protein, 41 aa, Artificial Sequence; identical to SEQ ID NO: 76780
  Cyclic GFR-binding peptide
  MOD_RES (6)..(7)..(39)..(41): Xaa is C or S

SEQ ID NO: 93367 - protein, 35 aa, Artificial Sequence
  Cyclic GFR-binding peptide
  MOD_RES (5)..(6): Xaa is C or S
SAGPXXTPTKMSPISMLYKNDKQQIILKYHYGMVV

SEQ ID NO: 93368 - protein, 40 aa, Artificial Sequence
  Cyclic GFR-binding peptide
  MOD_RES (5)..(6)..(38)..(40): Xaa is C or S
IPEPXXVPEKMSPISILYKDENKNVVLKYHYNMTVESXAX

SEQ ID NO: 93369 - protein, 23 aa, Artificial Sequence
  Cyclic GFR-binding peptide
LSATSILYYDSANNVVLRKHRDM

SEQ ID NO: 93370 - protein, 30 aa, Artificial Sequence; identical to SEQ ID NO: 34769
  Cyclic GFR-binding peptide

SEQ ID NO: 93371 - protein, 29 aa, Artificial Sequence
  Cyclic GFR-binding peptide
  MOD_RES (27)..(29): Xaa is C or S
SPINILYFDSANNVVYGKIPDMVVESXGX

SEQ ID NO: 93372 - protein, 31 aa, Artificial Sequence; identical to SEQ ID NO: 41906
  Cyclic GFR-binding peptide
  MOD_RES (4)..(5): Xaa is C or S

SEQ ID NO: 93373 - protein, 25 aa, Artificial Sequence
  Cyclic GFR-binding peptide
PTKLNAISVLYFDSSNNVILKKYRN

SEQ ID NO: 93374 - protein, 28 aa, Artificial Sequence
  Cyclic GFR-binding peptide
PTKMEPISMLYLNDKQQIIKFKYEGMVV

SEQ ID NO: 93375 - protein, 40 aa, Artificial Sequence; identical to SEQ ID NO: 41908
  Cyclic GFR-binding peptide
  MOD_RES (6)..(7)..(39): Xaa is C or S

SEQ ID NO: 93376 - protein, 38 aa, Artificial Sequence; identical to SEQ ID NO: 41916
  Cyclic GFR-binding peptide
  MOD_RES (3)..(4)..(36)..(38): Xaa is C or S

SEQ ID NO: 93377 - protein, 26 aa, Artificial Sequence
  Cyclic GFR-binding peptide
TQLSATSVLYYDDSSNVILRKHRNMV

SEQ ID NO: 93378 - protein, 37 aa, Artificial Sequence; identical to SEQ ID NO: 34788
  Cyclic GFR-binding peptide
  MOD_RES (4)..(5)..(37): Xaa is C or S

SEQ ID NO: 93379 - protein, 33 aa, Artificial Sequence
  Cyclic GFR-binding peptide
  MOD_RES (30)..(32): Xaa is C or S
TRLSPISILYKDSANNVVLKYHYDMVVESXGXR

SEQ ID NO: 93380 - protein, 20 aa, Artificial Sequence
  Cyclic GFR-binding peptide
EPISMLYLDENEKVVKFKYE

SEQ ID NO: 93381 - protein, 28 aa, Artificial Sequence
  Cyclic GFR-binding peptide
  MOD_RES (1)..(1): Xaa is C or S
XVPEKMSATSILYYDENKNVVLRKHRNM

SEQ ID NO: 93382 - protein, 42 aa, Artificial Sequence; identical to SEQ ID NO: 34790
  Cyclic GFR-binding peptide
  MOD_RES (6)..(7)..(39)..(41): Xaa is C or S

SEQ ID NO: 93383 - protein, 24 aa, Artificial Sequence
  Cyclic GFR-binding peptide
EKMEPISILYLDENKNVVKFKYEN

SEQ ID NO: 93384 - protein, 28 aa, Artificial Sequence
  Cyclic GFR-binding peptide
VPTKLEPISVLYLDDMGVPTKFKYEEGM

SEQ ID NO: 93385 - protein, 24 aa, Artificial Sequence
  Cyclic GFR-binding peptide
SQDLEPISILYLIGKTPKIKFKYE

SEQ ID NO: 93386 - protein, 37 aa, Artificial Sequence
  Cyclic GFR-binding peptide
  MOD_RES (4)..(5)..(36): Xaa is C or S
ASPXXVSQDLSPINILYFIGKTPKIYGKIPMIVKSXK

SEQ ID NO: 93387 - protein, 25 aa, Artificial Sequence
  Cyclic GFR-binding peptide
QDLNAISILYFIGKTPKILKKYRMI

SEQ ID NO: 93388 - protein, 30 aa, Artificial Sequence; identical to SEQ ID NO: 41937
  Cyclic GFR-binding peptide
  MOD_RES (29)..(29): Xaa is C or S

SEQ ID NO: 93389 - protein, 25 aa, Artificial Sequence
  Cyclic GFR-binding peptide
VPEKMSPISILYKDENKNVVLKYHY

SEQ ID NO: 93390 - protein, 27 aa, Artificial Sequence
  Cyclic GFR-binding peptide
PTKLSPINILYFDKGVVTYYGKIPGMA

SEQ ID NO: 93391 - protein, 22 aa, Artificial Sequence
  Cyclic GFR-binding peptide
MEPISILYLDENKNVVKFKYEN

SEQ ID NO: 93392 - protein, 35 aa, Artificial Sequence; identical to SEQ ID NO: 41956
  Cyclic GFR-binding peptide
  MOD_RES (4)..(5): Xaa is C or S

SEQ ID NO: 93393 - protein, 35 aa, Artificial Sequence
  Cyclic GFR-binding peptide
  MOD_RES (6)..(7): Xaa is C or S
GSAGPXXTPTKMSATSMLYYNDKQQIILRKHRGMV

SEQ ID NO: 93394 - protein, 30 aa, Artificial Sequence; identical to SEQ ID NO: 6438
  Cyclic GFR-binding peptide
  MOD_RES (29)..(29): Xaa is C or S

SEQ ID NO: 93395 - protein, 37 aa, Artificial Sequence; identical to SEQ ID NO: 34801
  Cyclic GFR-binding peptide
  MOD_RES (4)..(5)..(37): Xaa is C or S

SEQ ID NO: 93396 - protein, 32 aa, Artificial Sequence
  Cyclic GFR-binding peptide
  MOD_RES (1)..(2): Xaa is C or S
XXAPVKTEPISMLYLDNGRVLLKFKYEMIVEE

SEQ ID NO: 93397 - protein, 25 aa, Artificial Sequence
  Cyclic GFR-binding peptide
SPINMLYFDEYDKVVYGKIPEMVVE

SEQ ID NO: 93398 - protein, 28 aa, Artificial Sequence
  Cyclic GFR-binding peptide
PTELSPISMLYKDENEKVVLKYHYDMVV

SEQ ID NO: 93399 - protein, 33 aa, Artificial Sequence; identical to SEQ ID NO: 6442
  Cyclic GFR-binding peptide
  MOD_RES (1)..(32): Xaa is C or S

SEQ ID NO: 93400 - protein, 35 aa, Artificial Sequence; identical to SEQ ID NO: 34807
  Cyclic GFR-binding peptide
  MOD_RES (3)..(4)..(35): Xaa is C or S

SEQ ID NO: 93401 - protein, 32 aa, Artificial Sequence
  Cyclic GFR-binding peptide
  MOD_RES (4)..(5): Xaa is C or S
PEPXXVPEKMSPINILYFDENKNVVYGKIPNM

SEQ ID NO: 93402 - protein, 27 aa, Artificial Sequence
  Cyclic GFR-binding peptide
QLSATSVLYYDDSSNVILRKHRNMVVR

SEQ ID NO: 93403 - protein, 27 aa, Artificial Sequence
  Cyclic GFR-binding peptide
MEPISILYLDENKNVVKFKYENMTVES

SEQ ID NO: 93404 - protein, 27 aa, Artificial Sequence
  Cyclic GFR-binding peptide
LNAISMLYFDEYDKVVLKKYREMVVEG

SEQ ID NO: 93405 - protein, 27 aa, Artificial Sequence
  Cyclic GFR-binding peptide
  MOD_RES (26)..(26): Xaa is C or S
NAISILYFIGKTPKILKKYRMIVKSXK

SEQ ID NO: 93406 - protein, 27 aa, Artificial Sequence
  Cyclic GFR-binding peptide
  MOD_RES (27)..(27): Xaa is C or S
LEPISILYLIGKTPKIKFKYEMIVKSX

SEQ ID NO: 93407 - protein, 22 aa, Artificial Sequence
  Cyclic GFR-binding peptide
SATSMLYYNDKQQIILRKHRGM

SEQ ID NO: 93408 - protein, 22 aa, Artificial Sequence
  Cyclic GFR-binding peptide
KTEPISMLYLDNGRVLLKFKYE

SEQ ID NO: 93409 - protein, 41 aa, Artificial Sequence; identical to SEQ ID NO: 34815
  Cyclic GFR-binding peptide
  MOD_RES (5)..(6)..(38)..(40): Xaa is C or S

SEQ ID NO: 93410 - protein, 33 aa, Artificial Sequence
  Cyclic GFR-binding peptide
  MOD_RES (5)..(6): Xaa is C or S
APASXXVPARLSATSILYYDAANNVVLRKHRDM

SEQ ID NO: 93411 - protein, 31 aa, Artificial Sequence; identical to SEQ ID NO: 6452
  Cyclic GFR-binding peptide
  MOD_RES (28)..(30): Xaa is C or S

SEQ ID NO: 93412 - protein, 27 aa, Artificial Sequence
  Cyclic GFR-binding peptide
LSATSILYYDSANNVVLRKHRDMVVES

SEQ ID NO: 93413 - protein, 35 aa, Artificial Sequence
  Cyclic GFR-binding peptide
  MOD_RES (1)..(2)..(34): Xaa is C or S
XXVPEKMSPINILYFDENKNVVYGKIPNMTVESXA

SEQ ID NO: 93414 - protein, 29 aa, Artificial Sequence
  Cyclic GFR-binding peptide
PTKLSATSVLYYDDMGVPTLRKHREGMSV

SEQ ID NO: 93415 - protein, 37 aa, Artificial Sequence; identical to SEQ ID NO: 41987
  Cyclic GFR-binding peptide
  MOD_RES (6)..(7): Xaa is C or S

SEQ ID NO: 93416 - protein, 29 aa, Artificial Sequence
  Cyclic GFR-binding peptide
TKLSPISILYKDKGVVTYLKYHYGMAVSE

SEQ ID NO: 93417 - protein, 30 aa, Artificial Sequence; identical to SEQ ID NO: 6458
  Cyclic GFR-binding peptide
  MOD_RES (1)..(1): Xaa is C or S

SEQ ID NO: 93418 - protein, 33 aa, Artificial Sequence; identical to SEQ ID NO: 6460
  Cyclic GFR-binding peptide
  MOD_RES (32)..(32): Xaa is C or S

SEQ ID NO: 93419 - protein, 24 aa, Artificial Sequence
  Cyclic GFR-binding peptide
PTELSPINMLYFDEYDKVVYGKIP

SEQ ID NO: 93420 - protein, 26 aa, Artificial Sequence
  Cyclic GFR-binding peptide
PEKMSPINILYFDENKNVVYGKIPNM

SEQ ID NO: 93421 - protein, 38 aa, Artificial Sequence; identical to SEQ ID NO: 42005
  Cyclic GFR-binding peptide
  MOD_RES (4)..(5)..(37): Xaa is C or S

SEQ ID NO: 93422 - protein, 28 aa, Artificial Sequence
  Cyclic GFR-binding peptide
  MOD_RES (2)..(3): Xaa is C or S
PXXVPQALSPISILYKVGRKPKVLKYHY

SEQ ID NO: 93423 - protein, 30 aa, Artificial Sequence
  Cyclic GFR-binding peptide
  MOD_RES (28)..(30): Xaa is C or S
KTSPISMLYKDNGRVLLLKYHYMIVEEXGX

SEQ ID NO: 93424 - protein, 31 aa, Artificial Sequence; identical to SEQ ID NO: 42009
  Cyclic GFR-binding peptide
  MOD_RES (5)..(5): Xaa is C or S

SEQ ID NO: 93425 - protein, 30 aa, Artificial Sequence
  Cyclic GFR-binding peptide
  MOD_RES (1)..(2): Xaa is C or S
XXVPTRLSATSILYYDSANNVVLRKHRDMV

SEQ ID NO: 93426 - protein, 29 aa, Artificial Sequence
  Cyclic GFR-binding peptide
VPTKLSPINVLYFDDMGVPTYGKIPEGMS

SEQ ID NO: 93427 - protein, 28 aa, Artificial Sequence
  Cyclic GFR-binding peptide
QLSPINVLYFDDSSNVIYGKIPNMVVRA

SEQ ID NO: 93428 - protein, 38 aa, Artificial Sequence; identical to SEQ ID NO: 34835
  Cyclic GFR-binding peptide
  MOD_RES (6)..(7): Xaa is C or S

SEQ ID NO: 93429 - protein, 30 aa, Artificial Sequence; identical to SEQ ID NO: 76818
  Cyclic GFR-binding peptide
  MOD_RES (27)..(29): Xaa is C or S

SEQ ID NO: 93430 - protein, 36 aa, Artificial Sequence; identical to SEQ ID NO: 34838
  Cyclic GFR-binding peptide
  MOD_RES (6)..(7): Xaa is C or S

SEQ ID NO: 93431 - protein, 36 aa, Artificial Sequence; identical to SEQ ID NO: 6477
  Cyclic GFR-binding peptide
  MOD_RES (2)..(3)..(34)..(36): Xaa is C or S

SEQ ID NO: 93432 - protein, 29 aa, Artificial Sequence
  Cyclic GFR-binding peptide
  MOD_RES (1)..(1): Xaa is C or S
XVPQDLSPINILYFVGRTPKVYGKIPMVV

SEQ ID NO: 93433 - protein, 39 aa, Artificial Sequence
  Cyclic GFR-binding peptide
  MOD_RES (4)..(5)..(37)..(39): Xaa is C or S
PASXXVPARLSATSILYYDAANNVVLRKHRDMVVEAXGX

SEQ ID NO: 93434 - protein, 27 aa, Artificial Sequence
  Cyclic GFR-binding peptide
  MOD_RES (27)..(27): Xaa is C or S
NAISVLYFDSSNNVILKKYRNMVVKAX

SEQ ID NO: 93435 - protein, 29 aa, Artificial Sequence
  Cyclic GFR-binding peptide
TPTKMSATSMLYYNDKQQIILRKHRGMVV

SEQ ID NO: 93436 - protein, 38 aa, Artificial Sequence; identical to SEQ ID NO: 34845
  Cyclic GFR-binding peptide
  MOD_RES (3)..(4)..(36)..(38): Xaa is C or S

SEQ ID NO: 93437 - protein, 33 aa, Artificial Sequence; identical to SEQ ID NO: 76823
  Cyclic GFR-binding peptide
  MOD_RES (5)..(6): Xaa is C or S

SEQ ID NO: 93438 - protein, 35 aa, Artificial Sequence; identical to SEQ ID NO: 6484
  Cyclic GFR-binding peptide
  MOD_RES (3)..(4)..(35): Xaa is C or S

SEQ ID NO: 93439 - protein, 38 aa, Artificial Sequence
  Cyclic GFR-binding peptide
  MOD_RES (2)..(3)..(35)..(37): Xaa is C or S
PXXTPTKMSPISMLYKNDKQQIILKYHYGMVVDRXGXS

SEQ ID NO: 93440 - protein, 31 aa, Artificial Sequence; identical to SEQ ID NO: 6487
  Cyclic GFR-binding peptide
  MOD_RES (5)..(6): Xaa is C or S

SEQ ID NO: 93441 - protein, 36 aa, Artificial Sequence; identical to SEQ ID NO: 42023
  Cyclic GFR-binding peptide
  MOD_RES (6)..(7): Xaa is C or S

SEQ ID NO: 93442 - protein, 25 aa, Artificial Sequence
  Cyclic GFR-binding peptide
MSPINILYFDENKNVVYGKIPNMTV

SEQ ID NO: 93443 - protein, 32 aa, Artificial Sequence; identical to SEQ ID NO: 6490
  Cyclic GFR-binding peptide
  MOD_RES (31)..(31): Xaa is C or S

SEQ ID NO: 93444 - protein, 30 aa, Artificial Sequence
  Cyclic GFR-binding peptide
  MOD_RES (30)..(30): Xaa is C or S
EKMSPISILYKDENKNVVLKYHYNMTVESX

SEQ ID NO: 93445 - protein, 35 aa, Artificial Sequence; identical to SEQ ID NO: 34857
  Cyclic GFR-binding peptide
  MOD_RES (1)..(33)..(35): Xaa is C or S

SEQ ID NO: 93446 - protein, 30 aa, Artificial Sequence; identical to SEQ ID NO: 6495
  Cyclic GFR-binding peptide

SEQ ID NO: 93447 - protein, 33 aa, Artificial Sequence
  Cyclic GFR-binding peptide
  MOD_RES (3)..(4): Xaa is C or S
GPXXTPTKMSPISMLYKNDKQQIILKYHYGMVV

SEQ ID NO: 93448 - protein, 41 aa, Artificial Sequence; identical to SEQ ID NO: 6496
  Cyclic GFR-binding peptide
  MOD_RES (6)..(7)..(39)..(41): Xaa is C or S

SEQ ID NO: 93449 - protein, 23 aa, Artificial Sequence
  Cyclic GFR-binding peptide
SPINILYFIGKTPKIYGKIPMIV

SEQ ID NO: 93450 - protein, 27 aa, Artificial Sequence
  Cyclic GFR-binding peptide
  MOD_RES (1)..(1): Xaa is C or S
XVPTRLSATSILYYDSANNVVLRKHRD

SEQ ID NO: 93451 - protein, 38 aa, Artificial Sequence; identical to SEQ ID NO: 6497
  Cyclic GFR-binding peptide
  MOD_RES (2)..(3)..(35)..(37): Xaa is C or S

SEQ ID NO: 93452 - protein, 22 aa, Artificial Sequence
  Cyclic GFR-binding peptide
LSATSILYYVGRKPKVLRKHRM

SEQ ID NO: 93453 - protein, 25 aa, Artificial Sequence
  Cyclic GFR-binding peptide
LSPISILYKVGRKPKVLKYHYMIVR

SEQ ID NO: 93454 - protein, 31 aa, Artificial Sequence
  Cyclic GFR-binding peptide
  MOD_RES (1)..(1): Xaa is C or S
XVPTRLEPISILYLDSANNVVKFKYEDMVVE

SEQ ID NO: 93455 - protein, 31 aa, Artificial Sequence; identical to SEQ ID NO: 42045
  Cyclic GFR-binding peptide
  MOD_RES (1)..(1): Xaa is C or S

SEQ ID NO: 93456 - protein, 36 aa, Artificial Sequence; identical to SEQ ID NO: 6502
  Cyclic GFR-binding peptide
  MOD_RES (2)..(3)..(35): Xaa is C or S

SEQ ID NO: 93457 - protein, 23 aa, Artificial Sequence
  Cyclic GFR-binding peptide
LNAISMLYFDENEKVVLKKYRDM

SEQ ID NO: 93458 - protein, 41 aa, Artificial Sequence; identical to SEQ ID NO: 42047
  Cyclic GFR-binding peptide
  MOD_RES (6)..(7)..(40): Xaa is C or S

SEQ ID NO: 93459 - protein, 28 aa, Artificial Sequence
  Cyclic GFR-binding peptide
LSATSVLYYDDMGVPTLRKHREGMSVAE

SEQ ID NO: 93460 - protein, 29 aa, Artificial Sequence
  Cyclic GFR-binding peptide
VPQDLNAISILYFVGRTPKVLKKYRMVVK

SEQ ID NO: 93461 - protein, 25 aa, Artificial Sequence
  Cyclic GFR-binding peptide
SPISILYKIGKTPKILKYHYMIVKS

SEQ ID NO: 93462 - protein, 30 aa, Artificial Sequence; identical to SEQ ID NO: 16887
  Cyclic GFR-binding peptide
  MOD_RES (30)..(30): Xaa is C or S

SEQ ID NO: 93463 - protein, 35 aa, Artificial Sequence; identical to SEQ ID NO: 34874
  Cyclic GFR-binding peptide
  MOD_RES (6)..(7): Xaa is C or S

SEQ ID NO: 93464 - protein, 34 aa, Artificial Sequence; identical to SEQ ID NO: 6511
  Cyclic GFR-binding peptide
  MOD_RES (3)..(4): Xaa is C or S

SEQ ID NO: 93465 - protein, 38 aa, Artificial Sequence; identical to SEQ ID NO: 6512
  Cyclic GFR-binding peptide
  MOD_RES (2)..(3)..(35)..(37): Xaa is C or S

SEQ ID NO: 93466 - protein, 30 aa, Artificial Sequence
  Cyclic GFR-binding peptide
  MOD_RES (1)..(1): Xaa is C or S
XVPQALSPINILYFVGRKPKVYGKIPMIVR

SEQ ID NO: 93467 - protein, 22 aa, Artificial Sequence
  Cyclic GFR-binding peptide
EPISMLYLDNGRVLLKFKYEMI

SEQ ID NO: 93468 - protein, 25 aa, Artificial Sequence
  Cyclic GFR-binding peptide
VPEKMNAISILYFDENKNVVLKKYR

SEQ ID NO: 93469 - protein, 30 aa, Artificial Sequence
  Cyclic GFR-binding peptide
  MOD_RES (27)..(29): Xaa is C or S
SPINILYFDENKNVVYGKIPNMTVESXAXR

SEQ ID NO: 93470 - protein, 39 aa, Artificial Sequence; identical to SEQ ID NO: 6516
  Cyclic GFR-binding peptide
  MOD_RES (4)..(5)..(37)..(39): Xaa is C or S

SEQ ID NO: 93471 - protein, 40 aa, Artificial Sequence; identical to SEQ ID NO: 16893
  Cyclic GFR-binding peptide
  MOD_RES (6)..(7)..(39): Xaa is C or S

SEQ ID NO: 93472 - protein, 25 aa, Artificial Sequence
  Cyclic GFR-binding peptide
VPTELEPISMLYLDEYDKVVKFKYE

SEQ ID NO: 93473 - protein, 26 aa, Artificial Sequence
  Cyclic GFR-binding peptide
LSPINILYFDAANNVVYGKIPDMVVE

SEQ ID NO: 93474 - protein, 37 aa, Artificial Sequence; identical to SEQ ID NO: 34886
  Cyclic GFR-binding peptide
  MOD_RES (1)..(2)..(34)..(36): Xaa is C or S

SEQ ID NO: 93475 - protein, 32 aa, Artificial Sequence; identical to SEQ ID NO: 6520
  Cyclic GFR-binding peptide
  MOD_RES (3)..(4): Xaa is C or S

SEQ ID NO: 93476 - protein, 36 aa, Artificial Sequence; identical to SEQ ID NO: 6521
  Cyclic GFR-binding peptide
  MOD_RES (4)..(5)..(36): Xaa is C or S

SEQ ID NO: 93477 - protein, 33 aa, Artificial Sequence; identical to SEQ ID NO: 34891
  Cyclic GFR-binding peptide
  MOD_RES (31)..(33): Xaa is C or S

SEQ ID NO: 93478 - protein, 27 aa, Artificial Sequence
  Cyclic GFR-binding peptide
  MOD_RES (1)..(2): Xaa is C or S
XXAPVKTSPISMLYKDNGRVLLLKYHY

SEQ ID NO: 93479 - protein, 40 aa, Artificial Sequence; identical to SEQ ID NO: 6524
  Cyclic GFR-binding peptide
  MOD_RES (4)..(5)..(37)..(39): Xaa is C or S

SEQ ID NO: 93480 - protein, 33 aa, Artificial Sequence
  Cyclic GFR-binding peptide
  MOD_RES (31)..(33): Xaa is C or S
PTKMSPISMLYKNDKQQIILKYHYGMVVDRXGX

SEQ ID NO: 93481 - protein, 35 aa, Artificial Sequence
  Cyclic GFR-binding peptide
  MOD_RES (6)..(7): Xaa is C or S
HVPKPXXAPTKLEPISVLYLDDSSNVIKFKYENMV

SEQ ID NO: 93482 - protein, 28 aa, Artificial Sequence
  Cyclic GFR-binding peptide
  MOD_RES (1)..(2): Xaa is C or S
XXVPTKLSPINILYFDKGVVTYYGKIPG

SEQ ID NO: 93483 - protein, 41 aa, Artificial Sequence; identical to SEQ ID NO: 34898
  Cyclic GFR-binding peptide
  MOD_RES (5)..(6)..(38)..(40): Xaa is C or S

SEQ ID NO: 93484 - protein, 25 aa, Artificial Sequence
  Cyclic GFR-binding peptide
APTKLSPINVLYFDDSSNVIYGKIP

SEQ ID NO: 93485 - protein, 34 aa, Artificial Sequence; identical to SEQ ID NO: 6529
  Cyclic GFR-binding peptide
  MOD_RES (5)..(6): Xaa is C or S

SEQ ID NO: 93486 - protein, 37 aa, Artificial Sequence; identical to SEQ ID NO: 42068
  Cyclic GFR-binding peptide
  MOD_RES (2)..(3)..(35)..(37): Xaa is C or S

SEQ ID NO: 93487 - protein, 30 aa, Artificial Sequence; identical to SEQ ID NO: 76843
  Cyclic GFR-binding peptide
  MOD_RES (1)..(1): Xaa is C or S

SEQ ID NO: 93488 - protein, 28 aa, Artificial Sequence
  Cyclic GFR-binding peptide
  MOD_RES (2)..(3): Xaa is C or S
PXXAPTKLSPISVLYKDDSSNVILKYHY

SEQ ID NO: 93489 - protein, 21 aa, Artificial Sequence
  Cyclic GFR-binding peptide
NAISMLYFNDKQQIILKKYRG

SEQ ID NO: 93490 - protein, 37 aa, Artificial Sequence; identical to SEQ ID NO: 6535
  Cyclic GFR-binding peptide
  MOD_RES (1)..(2)..(34)..(36): Xaa is C or S

SEQ ID NO: 93491 - protein, 26 aa, Artificial Sequence
  Cyclic GFR-binding peptide
  MOD_RES (1)..(1): Xaa is C or S
XVPTELSATSMLYYDENEKVVLRKHR

SEQ ID NO: 93492 - protein, 33 aa, Artificial Sequence; identical to SEQ ID NO: 34911
  Cyclic GFR-binding peptide
  MOD_RES (2)..(3): Xaa is C or S

SEQ ID NO: 93493 - protein, 30 aa, Artificial Sequence; identical to SEQ ID NO: 34915
  Cyclic GFR-binding peptide
  MOD_RES (27)..(29): Xaa is C or S

SEQ ID NO: 93494 - protein, 30 aa, Artificial Sequence; identical to SEQ ID NO: 42081
  Cyclic GFR-binding peptide
  MOD_RES (28)..(30): Xaa is C or S

SEQ ID NO: 93495 - protein, 27 aa, Artificial Sequence
  Cyclic GFR-binding peptide
VPQDLSPISILYKVGRTPKVLKYHYMV

SEQ ID NO: 93496 - protein, 39 aa, Artificial Sequence
  Cyclic GFR-binding peptide
  MOD_RES (4)..(5)..(37)..(39): Xaa is C or S
AGPXXTPTKMSPISMLYKNDKQQIILKYHYGMVVDRXGX

SEQ ID NO: 93497 - protein, 29 aa, Artificial Sequence
  Cyclic GFR-binding peptide
  MOD_RES (29)..(29): Xaa is C or S
VKTNAISMLYFDNGRVLLLKKYRMIVEEX

SEQ ID NO: 93498 - protein, 33 aa, Artificial Sequence; identical to SEQ ID NO: 42084
  Cyclic GFR-binding peptide
  MOD_RES (32)..(32): Xaa is C or S

SEQ ID NO: 93499 - protein, 36 aa, Artificial Sequence; identical to SEQ ID NO: 6553
  Cyclic GFR-binding peptide
  MOD_RES (3)..(4): Xaa is C or S

SEQ ID NO: 93500 - protein, 34 aa, Artificial Sequence; identical to SEQ ID NO: 6554
  Cyclic GFR-binding peptide
  MOD_RES (5)..(6): Xaa is C or S

SEQ ID NO: 93501 - protein, 33 aa, Artificial Sequence
  Cyclic GFR-binding peptide
  MOD_RES (4)..(5): Xaa is C or S
PEPXXVPEKMEPISILYLDENKNVVKFKYENMT

SEQ ID NO: 93502 - protein, 32 aa, Artificial Sequence; identical to SEQ ID NO: 34920
  Cyclic GFR-binding peptide
  MOD_RES (5)..(6): Xaa is C or S

SEQ ID NO: 93503 - protein, 35 aa, Artificial Sequence; identical to SEQ ID NO: 6558
  Cyclic GFR-binding peptide
  MOD_RES (4)..(5): Xaa is C or S

SEQ ID NO: 93504 - protein, 30 aa, Artificial Sequence; identical to SEQ ID NO: 42102
  Cyclic GFR-binding peptide
  MOD_RES (2)..(3): Xaa is C or S

SEQ ID NO: 93505 - protein, 31 aa, Artificial Sequence
  Cyclic GFR-binding peptide
  MOD_RES (3)..(4): Xaa is C or S
SPXXVSQDLSPINILYFIGKTPKIYGKIPMI

SEQ ID NO: 93506 - protein, 27 aa, Artificial Sequence
  Cyclic GFR-binding peptide
  MOD_RES (1)..(2): Xaa is C or S
XXVPEKMEPISILYLDENKNVVKFKYE

SEQ ID NO: 93507 - protein, 34 aa, Artificial Sequence
  Cyclic GFR-binding peptide
  MOD_RES (31)..(33): Xaa is C or S
PEKMSPINILYFDENKNVVYGKIPNMTVESXAXR

SEQ ID NO: 93508 - protein, 29 aa, Artificial Sequence
  Cyclic GFR-binding peptide
  MOD_RES (3)..(4): Xaa is C or S
KAXXVPTKLNAISILYFDKGVVTYLKKYR

SEQ ID NO: 93509 - protein, 31 aa, Artificial Sequence; identical to SEQ ID NO: 6567
  Cyclic GFR-binding peptide
  MOD_RES (1)..(1): Xaa is C or S

SEQ ID NO: 93510 - protein, 31 aa, Artificial Sequence; identical to SEQ ID NO: 6569
  Cyclic GFR-binding peptide
  MOD_RES (4)..(5): Xaa is C or S

SEQ ID NO: 93511 - protein, 33 aa, Artificial Sequence
  Cyclic GFR-binding peptide
  MOD_RES (2)..(3): Xaa is C or S
TXXVPTRLSPISILYKDSANNVVLKYHYDMVVE

SEQ ID NO: 93512 - protein, 20 aa, Artificial Sequence
  Cyclic GFR-binding peptide
EPISILYLDENKNVVKFKYE

SEQ ID NO: 93513 - protein, 35 aa, Artificial Sequence; identical to SEQ ID NO: 42109
  Cyclic GFR-binding peptide
  MOD_RES (3)..(4): Xaa is C or S

SEQ ID NO: 93514 - protein, 39 aa, Artificial Sequence
  Cyclic GFR-binding peptide
  MOD_RES (3)..(4)..(36)..(38): Xaa is C or S
PTXXVPTRLSATSILYYDSANNVVLRKHRDMVVESXGXR

SEQ ID NO: 93515 - protein, 28 aa, Artificial Sequence
  Cyclic GFR-binding peptide
  MOD_RES (1)..(2): Xaa is C or S
XXVSQDLSATSILYYIGKTPKILRKHRM

SEQ ID NO: 93516 - protein, 35 aa, Artificial Sequence
  Cyclic GFR-binding peptide
  MOD_RES (6)..(7): Xaa is C or S
GIPEPXXVPEKMNAISILYFDENKNVVLKKYRNMT

SEQ ID NO: 93517 - protein, 33 aa, Artificial Sequence; identical to SEQ ID NO: 42115
  Cyclic GFR-binding peptide
  MOD_RES (1)..(2): Xaa is C or S

SEQ ID NO: 93518 - protein, 35 aa, Artificial Sequence; identical to SEQ ID NO: 42116
  Cyclic GFR-binding peptide
  MOD_RES (1)..(33)..(35): Xaa is C or S

SEQ ID NO: 93519 - protein, 29 aa, Artificial Sequence
  Cyclic GFR-binding peptide
  MOD_RES (3)..(4): Xaa is C or S
KAXXVPTKLSPINVLYFDDMGVPTYGKIP

SEQ ID NO: 93520 - protein, 34 aa, Artificial Sequence; identical to SEQ ID NO: 6574
  Cyclic GFR-binding peptide
  MOD_RES (32)..(34): Xaa is C or S

SEQ ID NO: 93521 - protein, 24 aa, Artificial Sequence
  Cyclic GFR-binding peptide
DLEPISILYLIGKTPKIKFKYEMI

SEQ ID NO: 93522 - protein, 21 aa, Artificial Sequence
  Cyclic GFR-binding peptide
SPINILYFDSANNVVYGKIPD

SEQ ID NO: 93523 - protein, 41 aa, Artificial Sequence; identical to SEQ ID NO: 42122
  Cyclic GFR-binding peptide
  MOD_RES (6)..(7)..(39)..(41): Xaa is C or S

SEQ ID NO: 93524 - protein, 28 aa, Artificial Sequence
  Cyclic GFR-binding peptide
  MOD_RES (1)..(1): Xaa is C or S
XVPQALNAISILYFVGRKPKVLKKYRMI

SEQ ID NO: 93525 - protein, 32 aa, Artificial Sequence; identical to SEQ ID NO: 42123
  Cyclic GFR-binding peptide
  MOD_RES (31)..(31): Xaa is C or S

SEQ ID NO: 93526 - protein, 34 aa, Artificial Sequence; identical to SEQ ID NO: 34940
  Cyclic GFR-binding peptide
  MOD_RES (6)..(7): Xaa is C or S

SEQ ID NO: 93527 - protein, 20 aa, Artificial Sequence
  Cyclic GFR-binding peptide
EPISILYLDAANNVVKFKYE

SEQ ID NO: 93528 - protein, 22 aa, Artificial Sequence
  Cyclic GFR-binding peptide
SPISMLYKNDKQQIILKYHYGM

SEQ ID NO: 93529 - protein, 31 aa, Artificial Sequence; identical to SEQ ID NO: 34943
  Cyclic GFR-binding peptide
  MOD_RES (4)..(5): Xaa is C or S

SEQ ID NO: 93530 - protein, 27 aa, Artificial Sequence
  Cyclic GFR-binding peptide
TELSATSMLYYDEYDKVVLRKHREMVV

SEQ ID NO: 93531 - protein, 33 aa, Artificial Sequence; identical to SEQ ID NO: 34945
  Cyclic GFR-binding peptide
  MOD_RES (5)..(6): Xaa is C or S

SEQ ID NO: 93532 - protein, 41 aa, Artificial Sequence; identical to SEQ ID NO: 42137
  Cyclic GFR-binding peptide
  MOD_RES (5)..(6)..(38)..(40): Xaa is C or S

SEQ ID NO: 93533 - protein, 22 aa, Artificial Sequence
  Cyclic GFR-binding peptide
LSPINILYFDKGVVTYYGKIPG

SEQ ID NO: 93534 - protein, 29 aa, Artificial Sequence
  Cyclic GFR-binding peptide
TELEPISMLYLDEYDKVVKFKYEEMVVEG

SEQ ID NO: 93535 - protein, 25 aa, Artificial Sequence
  Cyclic GFR-binding peptide
PVKTSATSMLYYDNGRVLLLRKHRM

SEQ ID NO: 93536 - protein, 32 aa, Artificial Sequence
  Cyclic GFR-binding peptide
  MOD_RES (2)..(3): Xaa is C or S
PXXVPEKMSPISILYKDENKNVVLKYHYNMTV

SEQ ID NO: 93537 - protein, 35 aa, Artificial Sequence; identical to SEQ ID NO: 6599
  Cyclic GFR-binding peptide
  MOD_RES (4)..(5): Xaa is C or S

SEQ ID NO: 93538 - protein, 23 aa, Artificial Sequence
  Cyclic GFR-binding peptide
ALEPISILYLVGRKPKVKFKYEM

SEQ ID NO: 93539 - protein, 37 aa, Artificial Sequence
  Cyclic GFR-binding peptide
  MOD_RES (3)..(4)..(36): Xaa is C or S
EPXXVPEKMSPISILYKDENKNVVLKYHYNMTVESXA

SEQ ID NO: 93540 - protein, 30 aa, Artificial Sequence; identical to SEQ ID NO: 34959
  Cyclic GFR-binding peptide
  MOD_RES (28)..(30): Xaa is C or S

SEQ ID NO: 93541 - protein, 33 aa, Artificial Sequence; identical to SEQ ID NO: 34960
  Cyclic GFR-binding peptide
  MOD_RES (32)..(32): Xaa is C or S

SEQ ID NO: 93542 - protein, 33 aa, Artificial Sequence; identical to SEQ ID NO: 42159
  Cyclic GFR-binding peptide
  MOD_RES (1)..(33): Xaa is C or S

SEQ ID NO: 93543 - protein, 34 aa, Artificial Sequence; identical to SEQ ID NO: 42168
  Cyclic GFR-binding peptide
  MOD_RES (5)..(6): Xaa is C or S

SEQ ID NO: 93544 - protein, 27 aa, Artificial Sequence
  Cyclic GFR-binding peptide
KTEPISMLYLDNGRVLLKFKYEMIVEE

SEQ ID NO: 93545 - protein, 27 aa, Artificial Sequence
  Cyclic GFR-binding peptide
MNAISILYFDENKNVVLKKYRNMTVES

SEQ ID NO: 93546 - protein, 30 aa, Artificial Sequence
  Cyclic GFR-binding peptide
  MOD_RES (4)..(5): Xaa is C or S
AGPXXTPTKMSATSMLYYNDKQQIILRKHR

SEQ ID NO: 93547 - protein, 28 aa, Artificial Sequence
  Cyclic GFR-binding peptide
PTKLNAISVLYFDDMGVPTLKKYREGMS

SEQ ID NO: 93548 - protein, 30 aa, Artificial Sequence; identical to SEQ ID NO: 34973
  Cyclic GFR-binding peptide

SEQ ID NO: 93549 - protein, 23 aa, Artificial Sequence
  Cyclic GFR-binding peptide
EPISVLYLDDMGVPTKFKYEEGM

SEQ ID NO: 93550 - protein, 34 aa, Artificial Sequence; identical to SEQ ID NO: 6614
  Cyclic GFR-binding peptide
  MOD_RES (2)..(3)..(34): Xaa is C or S

SEQ ID NO: 93551 - protein, 25 aa, Artificial Sequence
  Cyclic GFR-binding peptide
PVKTNAISMLYFDNGRVLLLKKYRM

SEQ ID NO: 93552 - protein, 41 aa, Artificial Sequence; identical to SEQ ID NO: 17000
  Cyclic GFR-binding peptide
  MOD_RES (5)..(6)..(38)..(40): Xaa is C or S

SEQ ID NO: 93553 - protein, 20 aa, Artificial Sequence
  Cyclic GFR-binding peptide
SPISILYKVGRTPKVLKYHY

SEQ ID NO: 93554 - protein, 38 aa, Artificial Sequence; identical to SEQ ID NO: 42184
  Cyclic GFR-binding peptide
  MOD_RES (2)..(3)..(35)..(37): Xaa is C or S

SEQ ID NO: 93555 - protein, 34 aa, Artificial Sequence; identical to SEQ ID NO: 6621
  Cyclic GFR-binding peptide
  MOD_RES (31)..(33): Xaa is C or S

SEQ ID NO: 93556 - protein, 27 aa, Artificial Sequence
  Cyclic GFR-binding peptide
  MOD_RES (1)..(1): Xaa is C or S
XAPTKLEPISVLYLDDSSNVIKFKYEN

SEQ ID NO: 93557 - protein, 29 aa, Artificial Sequence
  Cyclic GFR-binding peptide
  MOD_RES (28)..(28): Xaa is C or S
DLSATSILYYVGRTPKVLRKHRMVVKSXK

SEQ ID NO: 93558 - protein, 30 aa, Artificial Sequence; identical to SEQ ID NO: 6624
  Cyclic GFR-binding peptide
  MOD_RES (5)..(5): Xaa is C or S

SEQ ID NO: 93559 - protein, 35 aa, Artificial Sequence; identical to SEQ ID NO: 34982
  Cyclic GFR-binding peptide
  MOD_RES (1)..(33)..(35): Xaa is C or S

SEQ ID NO: 93560 - protein, 24 aa, Artificial Sequence
  Cyclic GFR-binding peptide
LSATSILYYDAANNVVLRKHRDMV

SEQ ID NO: 93561 - protein, 25 aa, Artificial Sequence
  Cyclic GFR-binding peptide
ELNAISMLYFDENEKVVLKKYRDMV

SEQ ID NO: 93562 - protein, 37 aa, Artificial Sequence; identical to SEQ ID NO: 34988
  Cyclic GFR-binding peptide
  MOD_RES (5)..(6): Xaa is C or S

SEQ ID NO: 93563 - protein, 35 aa, Artificial Sequence; identical to SEQ ID NO: 6630
  Cyclic GFR-binding peptide
  MOD_RES (6)..(7): Xaa is C or S

SEQ ID NO: 93564 - protein, 32 aa, Artificial Sequence; identical to SEQ ID NO: 6634
  Cyclic GFR-binding peptide
  MOD_RES (30)..(32): Xaa is C or S

SEQ ID NO: 93565 - protein, 25 aa, Artificial Sequence
  Cyclic GFR-binding peptide
SPINMLYFDNGRVLLYGKIPMIVEE

SEQ ID NO: 93566 - protein, 32 aa, Artificial Sequence
  Cyclic GFR-binding peptide
  MOD_RES (29)..(31): Xaa is C or S
RLSATSILYYDSANNVVLRKHRDMVVESXGXR

SEQ ID NO: 93567 - protein, 27 aa, Artificial Sequence
  Cyclic GFR-binding peptide
  MOD_RES (27)..(27): Xaa is C or S
SPINILYFDKGVVTYYGKIPGMAVSEX

SEQ ID NO: 93568 - protein, 37 aa, Artificial Sequence
  Cyclic GFR-binding peptide
  MOD_RES (5)..(6): Xaa is C or S
TPPTXXVPTRLSATSILYYDSANNVVLRKHRDMVVES

SEQ ID NO: 93569 - protein, 25 aa, Artificial Sequence
  Cyclic GFR-binding peptide
PEKMEPISILYLDENKNVVKFKYEN

SEQ ID NO: 93570 - protein, 28 aa, Artificial Sequence
  Cyclic GFR-binding peptide
RLNAISILYFDSANNVVLKKYRDMVVES

SEQ ID NO: 93571 - protein, 29 aa, Artificial Sequence
  Cyclic GFR-binding peptide
PTKLEPISVLYLDDMGVPTKFKYEEGMSV

SEQ ID NO: 93572 - protein, 27 aa, Artificial Sequence
  Cyclic GFR-binding peptide
RLSPINILYFDSANNVVYGKIPDMVVE

SEQ ID NO: 93573 - protein, 23 aa, Artificial Sequence
  Cyclic GFR-binding peptide
NAISMLYFDNGRVLLLKKYRMIV

SEQ ID NO: 93574 - protein, 24 aa, Artificial Sequence
  Cyclic GFR-binding peptide
QDLSATSILYYIGKTPKILRKHRM

SEQ ID NO: 93575 - protein, 30 aa, Artificial Sequence; identical to SEQ ID NO: 35005
  Cyclic GFR-binding peptide
  MOD_RES (3)..(4): Xaa is C or S

SEQ ID NO: 93576 - protein, 31 aa, Artificial Sequence; identical to SEQ ID NO: 42218
  Cyclic GFR-binding peptide
  MOD_RES (2)..(3): Xaa is C or S

SEQ ID NO: 93577 - protein, 29 aa, Artificial Sequence
  Cyclic GFR-binding peptide
  MOD_RES (3)..(4): Xaa is C or S
KAXXAPTKLNAISVLYFDSSNNVILKKYR

SEQ ID NO: 93578 - protein, 32 aa, Artificial Sequence
  Cyclic GFR-binding peptide
  MOD_RES (29)..(31): Xaa is C or S
KMNAISILYFDENKNVVLKKYRNMTVESXAXR

SEQ ID NO: 93579 - protein, 34 aa, Artificial Sequence
  Cyclic GFR-binding peptide
  MOD_RES (5)..(6): Xaa is C or S
IPEPXXVPEKMSPINILYFDENKNVVYGKIPNMT

SEQ ID NO: 93580 - protein, 34 aa, Artificial Sequence; identical to SEQ ID NO: 17027
  Cyclic GFR-binding peptide
  MOD_RES (32)..(34): Xaa is C or S

SEQ ID NO: 93581 - protein, 30 aa, Artificial Sequence
  Cyclic GFR-binding peptide
  MOD_RES (30)..(30): Xaa is C or S
ARLSATSILYYDAANNVVLRKHRDMVVEAX

SEQ ID NO: 93582 - protein, 30 aa, Artificial Sequence; identical to SEQ ID NO: 6652
  Cyclic GFR-binding peptide
  MOD_RES (28)..(30): Xaa is C or S

SEQ ID NO: 93583 - protein, 29 aa, Artificial Sequence
  Cyclic GFR-binding peptide
  MOD_RES (27)..(29): Xaa is C or S
SATSILYYDKGVVTYLRKHRGMAVSEXGX

SEQ ID NO: 93584 - protein, 35 aa, Artificial Sequence
  Cyclic GFR-binding peptide
  MOD_RES (32)..(34): Xaa is C or S
VPEKMEPISILYLDENKNVVKFKYENMTVESXAXR

SEQ ID NO: 93585 - protein, 31 aa, Artificial Sequence; identical to SEQ ID NO: 42229
  Cyclic GFR-binding peptide
  MOD_RES (30)..(30): Xaa is C or S

SEQ ID NO: 93586 - protein, 38 aa, Artificial Sequence; identical to SEQ ID NO: 35010
  Cyclic GFR-binding peptide
  MOD_RES (3)..(4)..(36)..(38): Xaa is C or S

SEQ ID NO: 93587 - protein, 37 aa, Artificial Sequence
  Cyclic GFR-binding peptide
  MOD_RES (2)..(3)..(34)..(36): Xaa is C or S
TXXAPVKTEPISMLYLDNGRVLLKFKYEMIVEEXGXL

SEQ ID NO: 93588 - protein, 27 aa, Artificial Sequence
  Cyclic GFR-binding peptide
  MOD_RES (27)..(27): Xaa is C or S
LSPISILYKIGKTPKILKYHYMIVKSX

SEQ ID NO: 93589 - protein, 28 aa, Artificial Sequence
  Cyclic GFR-binding peptide
  MOD_RES (28)..(28): Xaa is C or S
DLSATSILYYVGRTPKVLRKHRMVVKSX

SEQ ID NO: 93590 - protein, 35 aa, Artificial Sequence
  Cyclic GFR-binding peptide
  MOD_RES (32)..(34): Xaa is C or S
TPTKMSATSMLYYNDKQQIILRKHRGMVVDRXGXS

SEQ ID NO: 93591 - protein, 28 aa, Artificial Sequence
  Cyclic GFR-binding peptide
  MOD_RES (1)..(2): Xaa is C or S
XXVSQDLNAISILYFIGKTPKILKKYRM

SEQ ID NO: 93592 - protein, 30 aa, Artificial Sequence; identical to SEQ ID NO: 6661
  Cyclic GFR-binding peptide

SEQ ID NO: 93593 - protein, 33 aa, Artificial Sequence; identical to SEQ ID NO: 35016
  Cyclic GFR-binding peptide
  MOD_RES (4)..(5): Xaa is C or S

SEQ ID NO: 93594 - protein, 31 aa, Artificial Sequence
  Cyclic GFR-binding peptide
  MOD_RES (1)..(2): Xaa is C or S
XXAPVKTSATSMLYYDNGRVLLLRKHRMIVE

SEQ ID NO: 93595 - protein, 34 aa, Artificial Sequence; identical to SEQ ID NO: 42234
  Cyclic GFR-binding peptide
  MOD_RES (5)..(6): Xaa is C or S

SEQ ID NO: 93596 - protein, 21 aa, Artificial Sequence
  Cyclic GFR-binding peptide
TNAISMLYFDNGRVLLLKKYR

SEQ ID NO: 93597 - protein, 23 aa, Artificial Sequence
  Cyclic GFR-binding peptide
SATSILYYDKGVVTYLRKHRGMA

SEQ ID NO: 93598 - protein, 28 aa, Artificial Sequence
  Cyclic GFR-binding peptide
TELNAISMLYFDEYDKVVLKKYREMVVE

SEQ ID NO: 93599 - protein, 21 aa, Artificial Sequence
  Cyclic GFR-binding peptide
EPISILYLIGKTPKIKFKYEM

SEQ ID NO: 93600 - protein, 32 aa, Artificial Sequence
  Cyclic GFR-binding peptide
  MOD_RES (31)..(31): Xaa is C or S
PTRLSATSILYYDSANNVVLRKHRDMVVESXG

SEQ ID NO: 93601 - protein, 38 aa, Artificial Sequence; identical to SEQ ID NO: 35023
  Cyclic GFR-binding peptide
  MOD_RES (3)..(4)..(36)..(38): Xaa is C or S

SEQ ID NO: 93602 - protein, 29 aa, Artificial Sequence
  Cyclic GFR-binding peptide
  MOD_RES (29)..(29): Xaa is C or S
ELSPISMLYKDENEKVVLKYHYDMVVEGX

SEQ ID NO: 93603 - protein, 41 aa, Artificial Sequence
  Cyclic GFR-binding peptide
  MOD_RES (5)..(6)..(38)..(40): Xaa is C or S
SAGPXXTPTKMSATSMLYYNDKQQIILRKHRGMVVDRXGXS

SEQ ID NO: 93604 - protein, 29 aa, Artificial Sequence
  Cyclic GFR-binding peptide
  MOD_RES (28)..(28): Xaa is C or S
LSPISILYKDAANNVVLKYHYDMVVEAXG

SEQ ID NO: 93605 - protein, 27 aa, Artificial Sequence
  Cyclic GFR-binding peptide
  MOD_RES (26)..(26): Xaa is C or S
SATSILYYIGKTPKILRKHRMIVKSXK

SEQ ID NO: 93606 - protein, 36 aa, Artificial Sequence; identical to SEQ ID NO: 35030
  Cyclic GFR-binding peptide
  MOD_RES (4)..(5)..(36): Xaa is C or S

SEQ ID NO: 93607 - protein, 31 aa, Artificial Sequence; identical to SEQ ID NO: 35031
  Cyclic GFR-binding peptide
  MOD_RES (1)..(2): Xaa is C or S

SEQ ID NO: 93608 - protein, 32 aa, Artificial Sequence; identical to SEQ ID NO: 17048
  Cyclic GFR-binding peptide
  MOD_RES (1)..(2): Xaa is C or S

SEQ ID NO: 93609 - protein, 20 aa, Artificial Sequence
  Cyclic GFR-binding peptide
SATSILYYDSANNVVLRKHR

SEQ ID NO: 93610 - protein, 37 aa, Artificial Sequence; identical to SEQ ID NO: 42248
  Cyclic GFR-binding peptide
  MOD_RES (1)..(34)..(36): Xaa is C or S

SEQ ID NO: 93611 - protein, 35 aa, Artificial Sequence; identical to SEQ ID NO: 35034
  Cyclic GFR-binding peptide
  MOD_RES (5)..(6): Xaa is C or S

SEQ ID NO: 93612 - protein, 26 aa, Artificial Sequence
  Cyclic GFR-binding peptide
  MOD_RES (26)..(26): Xaa is C or S
NAISILYFVGRTPKVLKKYRMVVKSX

SEQ ID NO: 93613 - protein, 41 aa, Artificial Sequence; identical to SEQ ID NO: 6678
  Cyclic GFR-binding peptide
  MOD_RES (5)..(6)..(38)..(40): Xaa is C or S

SEQ ID NO: 93614 - protein, 35 aa, Artificial Sequence; identical to SEQ ID NO: 35037
  Cyclic GFR-binding peptide
  MOD_RES (4)..(5): Xaa is C or S

SEQ ID NO: 93615 - protein, 35 aa, Artificial Sequence; identical to SEQ ID NO: 6680
  Cyclic GFR-binding peptide
  MOD_RES (1)..(2)..(34): Xaa is C or S

SEQ ID NO: 93616 - protein, 35 aa, Artificial Sequence; identical to SEQ ID NO: 6681
  Cyclic GFR-binding peptide
  MOD_RES (3)..(4): Xaa is C or S

SEQ ID NO: 93617 - protein, 34 aa, Artificial Sequence; identical to SEQ ID NO: 17056
  Cyclic GFR-binding peptide
  MOD_RES (6)..(7): Xaa is C or S

SEQ ID NO: 93618 - protein, 40 aa, Artificial Sequence
  Cyclic GFR-binding peptide
  MOD_RES (4)..(5)..(37)..(39): Xaa is C or S
PEPXXVPEKMEPISILYLDENKNVVKFKYENMTVESXAXR

SEQ ID NO: 93619 - protein, 24 aa, Artificial Sequence
  Cyclic GFR-binding peptide
VKTSATSMLYYDNGRVLLLRKHRM

SEQ ID NO: 93620 - protein, 31 aa, Artificial Sequence
  Cyclic GFR-binding peptide
  MOD_RES (29)..(31): Xaa is C or S
KMSPINILYFDENKNVVYGKIPNMTVESXAX

SEQ ID NO: 93621 - protein, 33 aa, Artificial Sequence
  Cyclic GFR-binding peptide
  MOD_RES (1)..(32): Xaa is C or S
XAPVKTEPISMLYLDNGRVLLKFKYEMIVEEXG

SEQ ID NO: 93622 - protein, 34 aa, Artificial Sequence
  Cyclic GFR-binding peptide
  MOD_RES (4)..(5): Xaa is C or S
PEPXXVPEKMSPISILYKDENKNVVLKYHYNMTV

SEQ ID NO: 93623 - protein, 24 aa, Artificial Sequence
  Cyclic GFR-binding peptide
PTKLSPINVLYFDDSSNVIYGKIP

SEQ ID NO: 93624 - protein, 30 aa, Artificial Sequence; identical to SEQ ID NO: 42264
  Cyclic GFR-binding peptide
  MOD_RES (1)..(2): Xaa is C or S

SEQ ID NO: 93625 - protein, 35 aa, Artificial Sequence
  Cyclic GFR-binding peptide
  MOD_RES (2)..(3)..(35): Xaa is C or S
PXXVPEKMSATSILYYDENKNVVLRKHRNMTVESX

SEQ ID NO: 93626 - protein, 27 aa, Artificial Sequence
  Cyclic GFR-binding peptide
VPTKLEPISVLYLDDMGVPTKFKYEEG

SEQ ID NO: 93627 - protein, 34 aa, Artificial Sequence; identical to SEQ ID NO: 42273
  Cyclic GFR-binding peptide
  MOD_RES (31)..(33): Xaa is C or S

SEQ ID NO: 93628 - protein, 34 aa, Artificial Sequence; identical to SEQ ID NO: 6693
  Cyclic GFR-binding peptide
  MOD_RES (31)..(33): Xaa is C or S

SEQ ID NO: 93629 - protein, 32 aa, Artificial Sequence
  Cyclic GFR-binding peptide
  MOD_RES (29)..(31): Xaa is C or S
QALSPINILYFVGRKPKVYGKIPMIVRSXKXS

SEQ ID NO: 93630 - protein, 34 aa, Artificial Sequence; identical to SEQ ID NO: 35054
  Cyclic GFR-binding peptide
  MOD_RES (5)..(6): Xaa is C or S

SEQ ID NO: 93631 - protein, 37 aa, Artificial Sequence; identical to SEQ ID NO: 35055
  Cyclic GFR-binding peptide
  MOD_RES (4)..(36): Xaa is C or S

SEQ ID NO: 93632 - protein, 38 aa, Artificial Sequence; identical to SEQ ID NO: 6697
  Cyclic GFR-binding peptide
  MOD_RES (3)..(4)..(36)..(38): Xaa is C or S

SEQ ID NO: 93633 - protein, 38 aa, Artificial Sequence
  Cyclic GFR-binding peptide
  MOD_RES (3)..(4)..(35)..(37): Xaa is C or S
STXXAPVKTSPISMLYKDNGRVLLLKYHYMIVEEXGXL

SEQ ID NO: 93634 - protein, 29 aa, Artificial Sequence
  Cyclic GFR-binding peptide
  MOD_RES (2)..(3): Xaa is C or S
PXXVPEKMSATSILYYDENKNVVLRKHRN

SEQ ID NO: 93635 - protein, 41 aa, Artificial Sequence
  Cyclic GFR-binding peptide
  MOD_RES (6)..(7)..(38)..(40): Xaa is C or S
ASASPXXVSQDLSPINILYFIGKTPKIYGKIPMIVKSXKXS

SEQ ID NO: 93636 - protein, 27 aa, Artificial Sequence
  Cyclic GFR-binding peptide
  MOD_RES (1)..(2): Xaa is C or S
XXVPTRLEPISILYLDSANNVVKFKYE

SEQ ID NO: 93637 - protein, 30 aa, Artificial Sequence; identical to SEQ ID NO: 35063
  Cyclic GFR-binding peptide
  MOD_RES (29)..(29): Xaa is C or S

SEQ ID NO: 93638 - protein, 26 aa, Artificial Sequence
  Cyclic GFR-binding peptide
LSPINILYFDSANNVVYGKIPDMVVE

SEQ ID NO: 93639 - protein, 30 aa, Artificial Sequence; identical to SEQ ID NO: 35064
  Cyclic GFR-binding peptide
  MOD_RES (3)..(4): Xaa is C or S

SEQ ID NO: 93640 - protein, 21 aa, Artificial Sequence
  Cyclic GFR-binding peptide
LEPISVLYLDDMGVPTKFKYE

SEQ ID NO: 93641 - protein, 33 aa, Artificial Sequence; identical to SEQ ID NO: 6700
  Cyclic GFR-binding peptide
  MOD_RES (6)..(7): Xaa is C or S

SEQ ID NO: 93642 - protein, 30 aa, Artificial Sequence; identical to SEQ ID NO: 6701
  Cyclic GFR-binding peptide
  MOD_RES (1)..(1): Xaa is C or S

SEQ ID NO: 93643 - protein, 36 aa, Artificial Sequence
  Cyclic GFR-binding peptide
  MOD_RES (4)..(5): Xaa is C or S
PASXXVPARLSATSILYYDAANNVVLRKHRDMVVEA

SEQ ID NO: 93644 - protein, 27 aa, Artificial Sequence
  Cyclic GFR-binding peptide
QLEPISVLYLDDSSNVIKFKYENMVVR

SEQ ID NO: 93645 - protein, 27 aa, Artificial Sequence
  Cyclic GFR-binding peptide
  MOD_RES (27)..(27): Xaa is C or S
SATSVLYYDDSSNVILRKHRNMVVRAX

SEQ ID NO: 93646 - protein, 38 aa, Artificial Sequence
  Cyclic GFR-binding peptide
  MOD_RES (6)..(7)..(38): Xaa is C or S
RVPSTXXAPVKTSPISMLYKDNGRVLLLKYHYMIVEEX

SEQ ID NO: 93647 - protein, 29 aa, Artificial Sequence
  Cyclic GFR-binding peptide
  MOD_RES (28)..(28): Xaa is C or S
MSPISILYKDENKNVVLKYHYNMTVESXA

SEQ ID NO: 93648 - protein, 39 aa, Artificial Sequence; identical to SEQ ID NO: 35078
  Cyclic GFR-binding peptide
  MOD_RES (3)..(4)..(36)..(38): Xaa is C or S

SEQ ID NO: 93649 - protein, 31 aa, Artificial Sequence
  Cyclic GFR-binding peptide
  MOD_RES (30)..(30): Xaa is C or S
EKMNAISILYFDENKNVVLKKYRNMTVESXA

SEQ ID NO: 93650 - protein, 32 aa, Artificial Sequence; identical to SEQ ID NO: 42303
  Cyclic GFR-binding peptide
  MOD_RES (2)..(3): Xaa is C or S

SEQ ID NO: 93651 - protein, 36 aa, Artificial Sequence; identical to SEQ ID NO: 6716
  Cyclic GFR-binding peptide
  MOD_RES (6)..(7): Xaa is C or S

SEQ ID NO: 93652 - protein, 21 aa, Artificial Sequence
  Cyclic GFR-binding peptide
LSPINILYFIGKTPKIYGKIP

SEQ ID NO: 93653 - protein, 23 aa, Artificial Sequence
  Cyclic GFR-binding peptide
KMSPINILYFDENKNVVYGKIPN

SEQ ID NO: 93654 - protein, 32 aa, Artificial Sequence
  Cyclic GFR-binding peptide
  MOD_RES (5)..(6): Xaa is C or S
SAGPXXTPTKMEPISMLYLNDKQQIIKFKYEG

SEQ ID NO: 93655 - protein, 40 aa, Artificial Sequence
  Cyclic GFR-binding peptide
  MOD_RES (5)..(6)..(38)..(40): Xaa is C or S
TPPTXXVPTRLEPISILYLDSANNVVKFKYEDMVVESXGX

SEQ ID NO: 93656 - protein, 31 aa, Artificial Sequence; identical to SEQ ID NO: 6717
  Cyclic GFR-binding peptide
  MOD_RES (31)..(31): Xaa is C or S

SEQ ID NO: 93657 - protein, 26 aa, Artificial Sequence
  Cyclic GFR-binding peptide
MSPISILYKDENKNVVLKYHYNMTVE

SEQ ID NO: 93658 - protein, 29 aa, Artificial Sequence
  Cyclic GFR-binding peptide
  MOD_RES (3)..(4): Xaa is C or S
APXXVPQALEPISILYLVGRKPKVKFKYE

SEQ ID NO: 93659 - protein, 38 aa, Artificial Sequence
  Cyclic GFR-binding peptide
  MOD_RES (6)..(7)..(38): Xaa is C or S
ASASPXXVSQDLSPINILYFIGKTPKIYGKIPMIVKSX

SEQ ID NO: 93660 - protein, 33 aa, Artificial Sequence
  Cyclic GFR-binding peptide
  MOD_RES (3)..(4): Xaa is C or S
KAXXVPTKLSATSILYYDKGVVTYLRKHRGMAV

SEQ ID NO: 93661 - protein, 38 aa, Artificial Sequence; identical to SEQ ID NO: 35093
  Cyclic GFR-binding peptide
  MOD_RES (4)..(5)..(37): Xaa is C or S

SEQ ID NO: 93662 - protein, 33 aa, Artificial Sequence; identical to SEQ ID NO: 6727
  Cyclic GFR-binding peptide
  MOD_RES (6)..(7): Xaa is C or S

SEQ ID NO: 93663 - protein, 25 aa, Artificial Sequence
  Cyclic GFR-binding peptide
ARLEPISILYLDAANNVVKFKYEDM

SEQ ID NO: 93664 - protein, 30 aa, Artificial Sequence; identical to SEQ ID NO: 6729
  Cyclic GFR-binding peptide
  MOD_RES (27)..(29): Xaa is C or S

SEQ ID NO: 93665 - protein, 32 aa, Artificial Sequence
  Cyclic GFR-binding peptide
  MOD_RES (32)..(32): Xaa is C or S
TPTKMSPISMLYKNDKQQIILKYHYGMVVDRX

SEQ ID NO: 93666 - protein, 28 aa, Artificial Sequence
  Cyclic GFR-binding peptide
KLEPISVLYLDDMGVPTKFKYEEGMSVA

SEQ ID NO: 93667 - protein, 32 aa, Artificial Sequence
  Cyclic GFR-binding peptide
  MOD_RES (5)..(6): Xaa is C or S
SAGPXXTPTKMSPISMLYKNDKQQIILKYHYG

SEQ ID NO: 93668 - protein, 31 aa, Artificial Sequence
  Cyclic GFR-binding peptide
  MOD_RES (5)..(6): Xaa is C or S
VPSTXXAPVKTEPISMLYLDNGRVLLKFKYE

SEQ ID NO: 93669 - protein, 28 aa, Artificial Sequence
  Cyclic GFR-binding peptide
PVKTEPISMLYLDNGRVLLKFKYEMIVE

SEQ ID NO: 93670 - protein, 40 aa, Artificial Sequence
  Cyclic GFR-binding peptide
  MOD_RES (6)..(7)..(38)..(40): Xaa is C or S
RVPSTXXAPVKTSATSMLYYDNGRVLLLRKHRMIVEEXGX

SEQ ID NO: 93671 - protein, 33 aa, Artificial Sequence; identical to SEQ ID NO: 35100
  Cyclic GFR-binding peptide
  MOD_RES (7)..(7): Xaa is C or S

SEQ ID NO: 93672 - protein, 30 aa, Artificial Sequence; identical to SEQ ID NO: 35102
  Cyclic GFR-binding peptide
  MOD_RES (1)..(2): Xaa is C or S

SEQ ID NO: 93673 - protein, 32 aa, Artificial Sequence; identical to SEQ ID NO: 6732
  Cyclic GFR-binding peptide
  MOD_RES (30)..(32): Xaa is C or S

SEQ ID NO: 93674 - protein, 36 aa, Artificial Sequence
  Cyclic GFR-binding peptide
  MOD_RES (3)..(4)..(36): Xaa is C or S
GPXXTPTKMSPISMLYKNDKQQIILKYHYGMVVDRX

SEQ ID NO: 93675 - protein, 35 aa, Artificial Sequence; identical to SEQ ID NO: 35105
  Cyclic GFR-binding peptide
  MOD_RES (3)..(4): Xaa is C or S

SEQ ID NO: 93676 - protein, 28 aa, Artificial Sequence
  Cyclic GFR-binding peptide
  MOD_RES (1)..(1): Xaa is C or S
XVPTELSPINMLYFDEYDKVVYGKIPEM

SEQ ID NO: 93677 - protein, 32 aa, Artificial Sequence; identical to SEQ ID NO: 42327
  Cyclic GFR-binding peptide
  MOD_RES (6)..(7): Xaa is C or S

SEQ ID NO: 93678 - protein, 29 aa, Artificial Sequence
  Cyclic GFR-binding peptide
  MOD_RES (29)..(29): Xaa is C or S
LNAISVLYFDDMGVPTLKKYREGMSVAEX

SEQ ID NO: 93679 - protein, 30 aa, Artificial Sequence; identical to SEQ ID NO: 76964
  Cyclic GFR-binding peptide
  MOD_RES (28)..(30): Xaa is C or S

SEQ ID NO: 93680 - protein, 40 aa, Artificial Sequence; identical to SEQ ID NO: 42333
  Cyclic GFR-binding peptide
  MOD_RES (5)..(6)..(39): Xaa is C or S

SEQ ID NO: 93681 - protein, 28 aa, Artificial Sequence
  Cyclic GFR-binding peptide
  MOD_RES (2)..(3): Xaa is C or S
TXXVPTRLSATSILYYDSANNVVLRKHR

SEQ ID NO: 93682 - protein, 23 aa, Artificial Sequence
  Cyclic GFR-binding peptide
NAISILYFDAANNVVLKKYRDMV

SEQ ID NO: 93683 - protein, 32 aa, Artificial Sequence
  Cyclic GFR-binding peptide
  MOD_RES (5)..(6): Xaa is C or S
ASKAXXVPTKLSATSILYYDKGVVTYLRKHRG

SEQ ID NO: 93684 - protein, 23 aa, Artificial Sequence
  Cyclic GFR-binding peptide
KMSPISMLYKNDKQQIILKYHYG

SEQ ID NO: 93685 - protein, 36 aa, Artificial Sequence; identical to SEQ ID NO: 6748
  Cyclic GFR-binding peptide
  MOD_RES (4)..(5): Xaa is C or S

SEQ ID NO: 93686 - protein, 33 aa, Artificial Sequence; identical to SEQ ID NO: 42339
  Cyclic GFR-binding peptide
  MOD_RES (3)..(4): Xaa is C or S

SEQ ID NO: 93687 - protein, 29 aa, Artificial Sequence
  Cyclic GFR-binding peptide
  MOD_RES (3)..(4): Xaa is C or S
KPXXAPTQLEPISVLYLDDSSNVIKFKYE

SEQ ID NO: 93688 - protein, 31 aa, Artificial Sequence; identical to SEQ ID NO: 6751
  Cyclic GFR-binding peptide
  MOD_RES (31)..(31): Xaa is C or S

SEQ ID NO: 93689 - protein, 29 aa, Artificial Sequence
  Cyclic GFR-binding peptide
  MOD_RES (3)..(4): Xaa is C or S
KAXXVPTELSPISMLYKDEYDKVVLKYHY

SEQ ID NO: 93690 - protein, 31 aa, Artificial Sequence; identical to SEQ ID NO: 42344
  Cyclic GFR-binding peptide
  MOD_RES (1)..(2): Xaa is C or S

SEQ ID NO: 93691 - protein, 23 aa, Artificial Sequence
  Cyclic GFR-binding peptide
LNAISILYFDKGVVTYLKKYRGM

SEQ ID NO: 93692 - protein, 24 aa, Artificial Sequence
  Cyclic GFR-binding peptide
SPISILYKDKGVVTYLKYHYGMAV

SEQ ID NO: 93693 - protein, 26 aa, Artificial Sequence
  Cyclic GFR-binding peptide
VPTRLNAISILYFDSANNVVLKKYRD

SEQ ID NO: 93694 - protein, 27 aa, Artificial Sequence
  Cyclic GFR-binding peptide
VPQDLSATSILYYVGRTPKVLRKHRMV

SEQ ID NO: 93695 - protein, 29 aa, Artificial Sequence
  Cyclic GFR-binding peptide
  MOD_RES (2)..(3): Xaa is C or S
PXXAPTQLEPISVLYLDDSSNVIKFKYEN

SEQ ID NO: 93696 - protein, 30 aa, Artificial Sequence; identical to SEQ ID NO: 6758
  Cyclic GFR-binding peptide
  MOD_RES (30)..(30): Xaa is C or S

SEQ ID NO: 93697 - protein, 41 aa, Artificial Sequence; identical to SEQ ID NO: 35130
  Cyclic GFR-binding peptide
  MOD_RES (5)..(6)..(38)..(40): Xaa is C or S

SEQ ID NO: 93698 - protein, 38 aa, Artificial Sequence; identical to SEQ ID NO: 35131
  Cyclic GFR-binding peptide
  MOD_RES (2)..(3)..(36)..(38): Xaa is C or S

SEQ ID NO: 93699 - protein, 29 aa, Artificial Sequence
  Cyclic GFR-binding peptide
  MOD_RES (1)..(2): Xaa is C or S
XXVPTKLNAISVLYFDDMGVPTLKKYREG

SEQ ID NO: 93700 - protein, 33 aa, Artificial Sequence; identical to SEQ ID NO: 42350
  Cyclic GFR-binding peptide
  MOD_RES (2)..(3): Xaa is C or S

SEQ ID NO: 93701 - protein, 29 aa, Artificial Sequence
  Cyclic GFR-binding peptide
  MOD_RES (1)..(1): Xaa is C or S
XAPTKLSPINVLYFDDSSNVIYGKIPNMV

SEQ ID NO: 93702 - protein, 29 aa, Artificial Sequence
  Cyclic GFR-binding peptide
KLNAISVLYFDDMGVPTLKKYREGMSVAE

SEQ ID NO: 93703 - protein, 27 aa, Artificial Sequence
  Cyclic GFR-binding peptide
EKMSPISILYKDENKNVVLKYHYNMTV

SEQ ID NO: 93704 - protein, 40 aa, Artificial Sequence; identical to SEQ ID NO: 35135
  Cyclic GFR-binding peptide
  MOD_RES (4)..(5)..(37)..(39): Xaa is C or S

SEQ ID NO: 93705 - protein, 27 aa, Artificial Sequence
  Cyclic GFR-binding peptide
  MOD_RES (27)..(27): Xaa is C or S
LSPISILYKVGRTPKVLKYHYMVVKSX

SEQ ID NO: 93706 - protein, 26 aa, Artificial Sequence
  Cyclic GFR-binding peptide
KLNAISVLYFDDMGVPTLKKYREGMS

SEQ ID NO: 93707 - protein, 35 aa, Artificial Sequence; identical to SEQ ID NO: 6768
  Cyclic GFR-binding peptide
  MOD_RES (1)..(32)..(34): Xaa is C or S

SEQ ID NO: 93708 - protein, 36 aa, Artificial Sequence; identical to SEQ ID NO: 6769
  Cyclic GFR-binding peptide
  MOD_RES (3)..(35): Xaa is C or S

SEQ ID NO: 93709 - protein, 28 aa, Artificial Sequence
  Cyclic GFR-binding peptide
VKTNAISMLYFDNGRVLLLKKYRMIVEE

SEQ ID NO: 93710 - protein, 29 aa, Artificial Sequence
  Cyclic GFR-binding peptide
  MOD_RES (1)..(2): Xaa is C or S
XXVPARLNAISILYFDAANNVVLKKYRDM

SEQ ID NO: 93711 - protein, 32 aa, Artificial Sequence
  Cyclic GFR-binding peptide
  MOD_RES (1)..(1): Xaa is C or S
XVPEKMNAISILYFDENKNVVLKKYRNMTVES

SEQ ID NO: 93712 - protein, 33 aa, Artificial Sequence
  Cyclic GFR-binding peptide
  MOD_RES (1)..(2)..(33): Xaa is C or S
XXVSQDLSPINILYFIGKTPKIYGKIPMIVKSX

SEQ ID NO: 93713 - protein, 25 aa, Artificial Sequence
  Cyclic GFR-binding peptide
APTKLEPISVLYLDSSNNVIKFKYE

SEQ ID NO: 93714 - protein, 23 aa, Artificial Sequence
  Cyclic GFR-binding peptide
KMEPISMLYLNDKQQIIKFKYEG

SEQ ID NO: 93715 - protein, 32 aa, Artificial Sequence
  Cyclic GFR-binding peptide
  MOD_RES (1)..(2): Xaa is C or S
XXVPQDLSPINILYFVGRTPKVYGKIPMVVKS

SEQ ID NO: 93716 - protein, 29 aa, Artificial Sequence
  Cyclic GFR-binding peptide
  MOD_RES (28)..(28): Xaa is C or S
SATSVLYYDDMGVPTLRKHREGMSVAEXG

SEQ ID NO: 93717 - protein, 30 aa, Artificial Sequence; identical to SEQ ID NO: 76986
  Cyclic GFR-binding peptide
  MOD_RES (30)..(30): Xaa is C or S

SEQ ID NO: 93718 - protein, 31 aa, Artificial Sequence; identical to SEQ ID NO: 6775
  Cyclic GFR-binding peptide
  MOD_RES (4)..(5): Xaa is C or S

SEQ ID NO: 93719 - protein, 36 aa, Artificial Sequence; identical to SEQ ID NO: 35150
  Cyclic GFR-binding peptide
  MOD_RES (1)..(33)..(35): Xaa is C or S

SEQ ID NO: 93720 - protein, 27 aa, Artificial Sequence
  Cyclic GFR-binding peptide
  MOD_RES (1)..(2): Xaa is C or S
XXAPTQLSPINVLYFDDSSNVIYGKIP

SEQ ID NO: 93721 - protein, 26 aa, Artificial Sequence
  Cyclic GFR-binding peptide
PARLSPISILYKDAANNVVLKYHYDM

SEQ ID NO: 93722 - protein, 30 aa, Artificial Sequence; identical to SEQ ID NO: 35154
  Cyclic GFR-binding peptide

SEQ ID NO: 93723 - protein, 32 aa, Artificial Sequence; identical to SEQ ID NO: 35156
  Cyclic GFR-binding peptide
  MOD_RES (29)..(31): Xaa is C or S

SEQ ID NO: 93724 - protein, 27 aa, Artificial Sequence
  Cyclic GFR-binding peptide
  MOD_RES (2)..(2): Xaa is C or S
TXAPTKLSPINVLYFDDSSNVIYGKIP

SEQ ID NO: 93725 - protein, 32 aa, Artificial Sequence; identical to SEQ ID NO: 35157
  Cyclic GFR-binding peptide
  MOD_RES (30)..(32): Xaa is C or S

SEQ ID NO: 93726 - protein, 25 aa, Artificial Sequence
  Cyclic GFR-binding peptide
QALSPINILYFVGRKPKVYGKIPMI

SEQ ID NO: 93727 - protein, 36 aa, Artificial Sequence
  Cyclic GFR-binding peptide
  MOD_RES (2)..(3)..(35): Xaa is C or S
PXXVPEKMEPISILYLDENKNVVKFKYENMTVESXA

SEQ ID NO: 93728 - protein, 34 aa, Artificial Sequence
  Cyclic GFR-binding peptide
  MOD_RES (4)..(5): Xaa is C or S
PEPXXVPEKMSATSILYYDENKNVVLRKHRNMTV

SEQ ID NO: 93729 - protein, 26 aa, Artificial Sequence
  Cyclic GFR-binding peptide
PARLSATSILYYDAANNVVLRKHRDM

SEQ ID NO: 93730 - protein, 30 aa, Artificial Sequence
  Cyclic GFR-binding peptide
  MOD_RES (27)..(29): Xaa is C or S
SATSILYYDKGVVTYLRKHRGMAVSEXGXR

SEQ ID NO: 93731 - protein, 33 aa, Artificial Sequence; identical to SEQ ID NO: 6786
  Cyclic GFR-binding peptide
  MOD_RES (2)..(3): Xaa is C or S

SEQ ID NO: 93732 - protein, 33 aa, Artificial Sequence; identical to SEQ ID NO: 6787
  Cyclic GFR-binding peptide
  MOD_RES (3)..(4): Xaa is C or S

SEQ ID NO: 93733 - protein, 30 aa, Artificial Sequence; identical to SEQ ID NO: 6791
  Cyclic GFR-binding peptide
  MOD_RES (28)..(30): Xaa is C or S

SEQ ID NO: 93734 - protein, 33 aa, Artificial Sequence; identical to SEQ ID NO: 35168
  Cyclic GFR-binding peptide
  MOD_RES (1)..(2): Xaa is C or S

SEQ ID NO: 93735 - protein, 27 aa, Artificial Sequence
  Cyclic GFR-binding peptide
KLSPINVLYFDSSNNVIYGKIPNMVVK

SEQ ID NO: 93736 - protein, 34 aa, Artificial Sequence; identical to SEQ ID NO: 6793
  Cyclic GFR-binding peptide
  MOD_RES (5)..(6): Xaa is C or S

SEQ ID NO: 93737 - protein, 35 aa, Artificial Sequence
  Cyclic GFR-binding peptide
  MOD_RES (6)..(7): Xaa is C or S
GSAGPXXTPTKMSPISMLYKNDKQQIILKYHYGMV

SEQ ID NO: 93738 - protein, 38 aa, Artificial Sequence
  Cyclic GFR-binding peptide
  MOD_RES (2)..(3)..(35)..(37): Xaa is C or S
SXXVPARLSATSILYYDAANNVVLRKHRDMVVEAXGXR

SEQ ID NO: 93739 - protein, 28 aa, Artificial Sequence
  Cyclic GFR-binding peptide
  MOD_RES (2)..(3): Xaa is C or S
SXXVPARLSPISILYKDAANNVVLKYHY

SEQ ID NO: 93740 - protein, 40 aa, Artificial Sequence; identical to SEQ ID NO: 42385
  Cyclic GFR-binding peptide
  MOD_RES (5)..(6)..(38)..(40): Xaa is C or S

SEQ ID NO: 93741 - protein, 31 aa, Artificial Sequence
  Cyclic GFR-binding peptide
  MOD_RES (2)..(3): Xaa is C or S
TXXAPVKTSPISMLYKDNGRVLLLKYHYMIV

SEQ ID NO: 93742 - protein, 34 aa, Artificial Sequence; identical to SEQ ID NO: 35172
  Cyclic GFR-binding peptide
  MOD_RES (5)..(6): Xaa is C or S

SEQ ID NO: 93743 - protein, 25 aa, Artificial Sequence
  Cyclic GFR-binding peptide
NAISILYFDSANNVVLKKYRDMVVE

SEQ ID NO: 93744 - protein, 25 aa, Artificial Sequence
  Cyclic GFR-binding peptide
KTSPINMLYFDNGRVLLYGKIPMIV

SEQ ID NO: 93745 - protein, 34 aa, Artificial Sequence; identical to SEQ ID NO: 35177
  Cyclic GFR-binding peptide
  MOD_RES (3)..(4): Xaa is C or S

SEQ ID NO: 93746 - protein, 37 aa, Artificial Sequence; identical to SEQ ID NO: 6798
  Cyclic GFR-binding peptide
  MOD_RES (5)..(6): Xaa is C or S

SEQ ID NO: 93747 - protein, 28 aa, Artificial Sequence
  Cyclic GFR-binding peptide
KLSPINVLYFDDMGVPTYGKIPEGMSVA

SEQ ID NO: 93748 - protein, 37 aa, Artificial Sequence
  Cyclic GFR-binding peptide
  MOD_RES (6)..(7): Xaa is C or S
GIPEPXXVPEKMSPINILYFDENKNVVYGKIPNMTVE

SEQ ID NO: 93749 - protein, 28 aa, Artificial Sequence
  Cyclic GFR-binding peptide
  MOD_RES (28)..(28): Xaa is C or S
LSPINVLYFDDSSNVIYGKIPNMVVRSX

SEQ ID NO: 93750 - protein, 37 aa, Artificial Sequence; identical to SEQ ID NO: 6803
  Cyclic GFR-binding peptide
  MOD_RES (6)..(7): Xaa is C or S

SEQ ID NO: 93751 - protein, 37 aa, Artificial Sequence; identical to SEQ ID NO: 35184
  Cyclic GFR-binding peptide
  MOD_RES (4)..(5)..(37): Xaa is C or S

SEQ ID NO: 93752 - protein, 29 aa, Artificial Sequence
  Cyclic GFR-binding peptide
  MOD_RES (2)..(3): Xaa is C or S
AXXVPTKLNAISILYFDKGVVTYLKKYRG

SEQ ID NO: 93753 - protein, 33 aa, Artificial Sequence
  Cyclic GFR-binding peptide
  MOD_RES (1)..(2)..(33): Xaa is C or S
XXAPVKTEPISMLYLDNGRVLLKFKYEMIVEEX

SEQ ID NO: 93754 - protein, 39 aa, Artificial Sequence; identical to SEQ ID NO: 6808
  Cyclic GFR-binding peptide
  MOD_RES (5)..(6)..(38): Xaa is C or S

SEQ ID NO: 93755 - protein, 35 aa, Artificial Sequence; identical to SEQ ID NO: 42407
  Cyclic GFR-binding peptide
  MOD_RES (5)..(6): Xaa is C or S

SEQ ID NO: 93756 - protein, 35 aa, Artificial Sequence; identical to SEQ ID NO: 42409
  Cyclic GFR-binding peptide
  MOD_RES (1)..(2)..(34): Xaa is C or S

SEQ ID NO: 93757 - protein, 28 aa, Artificial Sequence
  Cyclic GFR-binding peptide
KLSPISVLYKDDSSNVILKYHYNMVVRS

SEQ ID NO: 93758 - protein, 35 aa, Artificial Sequence; identical to SEQ ID NO: 35192
  Cyclic GFR-binding peptide
  MOD_RES (4)..(5): Xaa is C or S

SEQ ID NO: 93759 - protein, 24 aa, Artificial Sequence
  Cyclic GFR-binding peptide
KLEPISVLYLDSSNNVIKFKYENM

SEQ ID NO: 93760 - protein, 32 aa, Artificial Sequence; identical to SEQ ID NO: 42422
  Cyclic GFR-binding peptide
  MOD_RES (2)..(3): Xaa is C or S

SEQ ID NO: 93761 - protein, 26 aa, Artificial Sequence
  Cyclic GFR-binding peptide
TQLEPISVLYLDDSSNVIKFKYENMV

SEQ ID NO: 93762 - protein, 29 aa, Artificial Sequence
  Cyclic GFR-binding peptide
VPQALSPISILYKVGRKPKVLKYHYMIVR

SEQ ID NO: 93763 - protein, 24 aa, Artificial Sequence
  Cyclic GFR-binding peptide
PTKLSPINILYFDKGVVTYYGKIP

SEQ ID NO: 93764 - protein, 28 aa, Artificial Sequence
  Cyclic GFR-binding peptide
  MOD_RES (1)..(2): Xaa is C or S
XXVPQDLNAISILYFVGRTPKVLKKYRM

SEQ ID NO: 93765 - protein, 37 aa, Artificial Sequence; identical to SEQ ID NO: 6824
  Cyclic GFR-binding peptide
  MOD_RES (5)..(6): Xaa is C or S

SEQ ID NO: 93766 - protein, 28 aa, Artificial Sequence
  Cyclic GFR-binding peptide
  MOD_RES (28)..(28): Xaa is C or S
LEPISMLYLDENEKVVKFKYEDMVVEGX

SEQ ID NO: 93767 - protein, 26 aa, Artificial Sequence
  Cyclic GFR-binding peptide
  MOD_RES (1)..(1): Xaa is C or S
XVPEKMSATSILYYDENKNVVLRKHR

SEQ ID NO: 93768 - protein, 32 aa, Artificial Sequence
  Cyclic GFR-binding peptide
  MOD_RES (3)..(4): Xaa is C or S
STXXAPVKTSATSMLYYDNGRVLLLRKHRMIV

SEQ ID NO: 93769 - protein, 36 aa, Artificial Sequence; identical to SEQ ID NO: 42436
  Cyclic GFR-binding peptide
  MOD_RES (1)..(2)..(34)..(36): Xaa is C or S

SEQ ID NO: 93770 - protein, 34 aa, Artificial Sequence; identical to SEQ ID NO: 35206
  Cyclic GFR-binding peptide
  MOD_RES (31)..(33): Xaa is C or S

SEQ ID NO: 93771 - protein, 21 aa, Artificial Sequence
  Cyclic GFR-binding peptide
LEPISILYLDSANNVVKFKYE

SEQ ID NO: 93772 - protein, 28 aa, Artificial Sequence
  Cyclic GFR-binding peptide
QLEPISVLYLDDSSNVIKFKYENMVVRA

SEQ ID NO: 93773 - protein, 38 aa, Artificial Sequence
  Cyclic GFR-binding peptide
  MOD_RES (6)..(7): Xaa is C or S
GIPEPXXVPEKMSATSILYYDENKNVVLRKHRNMTVES

SEQ ID NO: 93774 - protein, 39 aa, Artificial Sequence
  Cyclic GFR-binding peptide
  MOD_RES (4)..(5)..(36)..(38): Xaa is C or S
PSTXXAPVKTSATSMLYYDNGRVLLLRKHRMIVEEXGXL

SEQ ID NO: 93775 - protein, 32 aa, Artificial Sequence
  Cyclic GFR-binding peptide
  MOD_RES (3)..(4): Xaa is C or S
STXXAPVKTSPISMLYKDNGRVLLLKYHYMIV

SEQ ID NO: 93776 - protein, 31 aa, Artificial Sequence; identical to SEQ ID NO: 6831
  Cyclic GFR-binding peptide
  MOD_RES (1)..(1): Xaa is C or S

SEQ ID NO: 93777 - protein, 31 aa, Artificial Sequence; identical to SEQ ID NO: 42443
  Cyclic GFR-binding peptide
  MOD_RES (3)..(3): Xaa is C or S

SEQ ID NO: 93778 - protein, 22 aa, Artificial Sequence
  Cyclic GFR-binding peptide
TNAISMLYFDNGRVLLLKKYRM

SEQ ID NO: 93779 - protein, 29 aa, Artificial Sequence
  Cyclic GFR-binding peptide
  MOD_RES (28)..(28): Xaa is C or S
LEPISVLYLDDSSNVIKFKYENMVVRSXG

SEQ ID NO: 93780 - protein, 38 aa, Artificial Sequence
  Cyclic GFR-binding peptide
  MOD_RES (4)..(5)..(37): Xaa is C or S
PEPXXVPEKMSPISILYKDENKNVVLKYHYNMTVESXA

SEQ ID NO: 93781 - protein, 30 aa, Artificial Sequence
  Cyclic GFR-binding peptide
  MOD_RES (30)..(30): Xaa is C or S
TRLEPISILYLDSANNVVKFKYEDMVVESX

SEQ ID NO: 93782 - protein, 35 aa, Artificial Sequence; identical to SEQ ID NO: 6835
  Cyclic GFR-binding peptide
  MOD_RES (5)..(6): Xaa is C or S

SEQ ID NO: 93783 - protein, 27 aa, Artificial Sequence
  Cyclic GFR-binding peptide
VPARLEPISILYLDAANNVVKFKYEDM

SEQ ID NO: 93784 - protein, 34 aa, Artificial Sequence; identical to SEQ ID NO: 6839
  Cyclic GFR-binding peptide
  MOD_RES (5)..(6): Xaa is C or S

SEQ ID NO: 93785 - protein, 35 aa, Artificial Sequence; identical to SEQ ID NO: 35216
  Cyclic GFR-binding peptide
  MOD_RES (32)..(34): Xaa is C or S

SEQ ID NO: 93786 - protein, 40 aa, Artificial Sequence; identical to SEQ ID NO: 35218
  Cyclic GFR-binding peptide
  MOD_RES (5)..(6)..(38)..(40): Xaa is C or S

SEQ ID NO: 93787 - protein, 33 aa, Artificial Sequence
  Cyclic GFR-binding peptide
  MOD_RES (6)..(7): Xaa is C or S
ASASPXXVSQDLSPINILYFIGKTPKIYGKIPM

SEQ ID NO: 93788 - protein, 27 aa, Artificial Sequence
  Cyclic GFR-binding peptide
PTKLSPINVLYFDDMGVPTYGKIPEGM

SEQ ID NO: 93789 - protein, 31 aa, Artificial Sequence; identical to SEQ ID NO: 6849
  Cyclic GFR-binding peptide
  MOD_RES (5)..(6): Xaa is C or S

SEQ ID NO: 93790 - protein, 30 aa, Artificial Sequence
  Cyclic GFR-binding peptide
PEKMSPINILYFDENKNVVYGKIPNMTVES

SEQ ID NO: 93791 - protein, 25 aa, Artificial Sequence
  Cyclic GFR-binding peptide
TPTKMEPISMLYLNDKQQIIKFKYE

SEQ ID NO: 93792 - protein, 33 aa, Artificial Sequence
  Cyclic GFR-binding peptide
  MOD_RES (6)..(7): Xaa is C or S
ASAAPXXVPQALSPINILYFVGRKPKVYGKIPM

SEQ ID NO: 93793 - protein, 29 aa, Artificial Sequence
  Cyclic GFR-binding peptide
  MOD_RES (1)..(2): Xaa is C or S
XXAPTQLSATSVLYYDDSSNVILRKHRNM

SEQ ID NO: 93794 - protein, 32 aa, Artificial Sequence; identical to SEQ ID NO: 6855
  Cyclic GFR-binding peptide
  MOD_RES (3)..(4): Xaa is C or S

SEQ ID NO: 93795 - protein, 24 aa, Artificial Sequence
  Cyclic GFR-binding peptide
PTKLSATSVLYYDDMGVPTLRKHR

SEQ ID NO: 93796 - protein, 34 aa, Artificial Sequence; identical to SEQ ID NO: 35224
  Cyclic GFR-binding peptide
  MOD_RES (6)..(7): Xaa is C or S

SEQ ID NO: 93797 - protein, 39 aa, Artificial Sequence
  Cyclic GFR-binding peptide
  MOD_RES (4)..(5)..(36)..(38): Xaa is C or S
AAPXXVPQALSPINILYFVGRKPKVYGKIPMIVRSXKXS

SEQ ID NO: 93798 - protein, 29 aa, Artificial Sequence
  Cyclic GFR-binding peptide
  MOD_RES (2)..(3): Xaa is C or S
PXXAPTQLSPISVLYKDDSSNVILKYHYN

SEQ ID NO: 93799 - protein, 36 aa, Artificial Sequence; identical to SEQ ID NO: 6863
  Cyclic GFR-binding peptide
  MOD_RES (2)..(34)..(36): Xaa is C or S

SEQ ID NO: 93800 - protein, 28 aa, Artificial Sequence
  Cyclic GFR-binding peptide
ARLSPINILYFDAANNVVYGKIPDMVVE

SEQ ID NO: 93801 - protein, 34 aa, Artificial Sequence
  Cyclic GFR-binding peptide
  MOD_RES (5)..(6): Xaa is C or S
SASPXXVSQDLSPINILYFIGKTPKIYGKIPMIV

SEQ ID NO: 93802 - protein, 30 aa, Artificial Sequence; identical to SEQ ID NO: 6867
  Cyclic GFR-binding peptide
  MOD_RES (28)..(30): Xaa is C or S

SEQ ID NO: 93803 - protein, 37 aa, Artificial Sequence
  Cyclic GFR-binding peptide
  MOD_RES (4)..(5)..(37): Xaa is C or S
SKAXXVPTKLSATSILYYDKGVVTYLRKHRGMAVSEX

SEQ ID NO: 93804 - protein, 28 aa, Artificial Sequence
  Cyclic GFR-binding peptide
  MOD_RES (1)..(1): Xaa is C or S
XVPTKLSPISILYKDKGVVTYLKYHYGM

SEQ ID NO: 93805 - protein, 35 aa, Artificial Sequence; identical to SEQ ID NO: 35231
  Cyclic GFR-binding peptide
  MOD_RES (3)..(4): Xaa is C or S

SEQ ID NO: 93806 - protein, 30 aa, Artificial Sequence
  Cyclic GFR-binding peptide
  MOD_RES (27)..(29): Xaa is C or S
TSPISMLYKDNGRVLLLKYHYMIVEEXGXL

SEQ ID NO: 93807 - protein, 33 aa, Artificial Sequence; identical to SEQ ID NO: 42465
  Cyclic GFR-binding peptide
  MOD_RES (31)..(33): Xaa is C or S

SEQ ID NO: 93808 - protein, 22 aa, Artificial Sequence
  Cyclic GFR-binding peptide
TSPINMLYFDNGRVLLYGKIPM

SEQ ID NO: 93809 - protein, 27 aa, Artificial Sequence
  Cyclic GFR-binding peptide
KTSATSMLYYDNGRVLLLRKHRMIVEE

SEQ ID NO: 93810 - protein, 38 aa, Artificial Sequence; identical to SEQ ID NO: 35236
  Cyclic GFR-binding peptide
  MOD_RES (2)..(3)..(35)..(37): Xaa is C or S

SEQ ID NO: 93811 - protein, 36 aa, Artificial Sequence
  Cyclic GFR-binding peptide
  MOD_RES (2)..(3)..(35): Xaa is C or S
PXXTPTKMEPISMLYLNDKQQIIKFKYEGMVVDRXG

SEQ ID NO: 93812 - protein, 36 aa, Artificial Sequence; identical to SEQ ID NO: 6871
  Cyclic GFR-binding peptide
  MOD_RES (4)..(5): Xaa is C or S

SEQ ID NO: 93813 - protein, 32 aa, Artificial Sequence; identical to SEQ ID NO: 35239
  Cyclic GFR-binding peptide
  MOD_RES (4)..(5): Xaa is C or S

SEQ ID NO: 93814 - protein, 27 aa, Artificial Sequence
  Cyclic GFR-binding peptide
APTKLEPISVLYLDSSNNVIKFKYENM

SEQ ID NO: 93815 - protein, 28 aa, Artificial Sequence
  Cyclic GFR-binding peptide
VPTKLSATSVLYYDDMGVPTLRKHREGM

SEQ ID NO: 93816 - protein, 33 aa, Artificial Sequence
  Cyclic GFR-binding peptide
  MOD_RES (3)..(4): Xaa is C or S
GPXXTPTKMSATSMLYYNDKQQIILRKHRGMVV

SEQ ID NO: 93817 - protein, 41 aa, Artificial Sequence; identical to SEQ ID NO: 35244
  Cyclic GFR-binding peptide
  MOD_RES (4)..(5)..(38)..(40): Xaa is C or S

SEQ ID NO: 93818 - protein, 24 aa, Artificial Sequence
  Cyclic GFR-binding peptide
ELNAISMLYFDEYDKVVLKKYREM

SEQ ID NO: 93819 - protein, 33 aa, Artificial Sequence; identical to SEQ ID NO: 6880
  Cyclic GFR-binding peptide
  MOD_RES (1)..(2): Xaa is C or S

SEQ ID NO: 93820 - protein, 34 aa, Artificial Sequence
  Cyclic GFR-binding peptide
  MOD_RES (1)..(33): Xaa is C or S
XVPEKMSPISILYKDENKNVVLKYHYNMTVESXA

SEQ ID NO: 93821 - protein, 26 aa, Artificial Sequence
  Cyclic GFR-binding peptide
RLNAISILYFDSANNVVLKKYRDMVV

SEQ ID NO: 93822 - protein, 28 aa, Artificial Sequence
  Cyclic GFR-binding peptide
PTKLSPINVLYFDSSNNVIYGKIPNMVV

SEQ ID NO: 93823 - protein, 29 aa, Artificial Sequence
  Cyclic GFR-binding peptide
TPTKMSPISMLYKNDKQQIILKYHYGMVV

SEQ ID NO: 93824 - protein, 34 aa, Artificial Sequence; identical to SEQ ID NO: 6881
  Cyclic GFR-binding peptide
  MOD_RES (1)..(2)..(33): Xaa is C or S

SEQ ID NO: 93825 - protein, 25 aa, Artificial Sequence
  Cyclic GFR-binding peptide
LSPINILYFIGKTPKIYGKIPMIVK

SEQ ID NO: 93826 - protein, 28 aa, Artificial Sequence
  Cyclic GFR-binding peptide
  MOD_RES (28)..(28): Xaa is C or S
LNAISMLYFDENEKVVLKKYRDMVVEGX

SEQ ID NO: 93827 - protein, 26 aa, Artificial Sequence
  Cyclic GFR-binding peptide
LSPINMLYFDENEKVVYGKIPDMVVE

SEQ ID NO: 93828 - protein, 21 aa, Artificial Sequence
  Cyclic GFR-binding peptide
SPISILYKIGKTPKILKYHYM

SEQ ID NO: 93829 - protein, 31 aa, Artificial Sequence
  Cyclic GFR-binding peptide
  MOD_RES (1)..(1): Xaa is C or S
XVPTRLSATSILYYDSANNVVLRKHRDMVVE

SEQ ID NO: 93830 - protein, 28 aa, Artificial Sequence
  Cyclic GFR-binding peptide
TKLSATSVLYYDDMGVPTLRKHREGMSV

SEQ ID NO: 93831 - protein, 32 aa, Artificial Sequence
  Cyclic GFR-binding peptide
  MOD_RES (29)..(31): Xaa is C or S
KLSATSILYYDKGVVTYLRKHRGMAVSEXGXR

SEQ ID NO: 93832 - protein, 25 aa, Artificial Sequence
  Cyclic GFR-binding peptide
VPQALSPINILYFVGRKPKVYGKIP

SEQ ID NO: 93833 - protein, 22 aa, Artificial Sequence
  Cyclic GFR-binding peptide
NAISILYFDENKNVVLKKYRNM

SEQ ID NO: 93834 - protein, 32 aa, Artificial Sequence
  Cyclic GFR-binding peptide
  MOD_RES (4)..(5): Xaa is C or S
AAPXXVPQALSPINILYFVGRKPKVYGKIPMI

SEQ ID NO: 93835 - protein, 30 aa, Artificial Sequence
  Cyclic GFR-binding peptide
  MOD_RES (27)..(29): Xaa is C or S
EPISILYLDSANNVVKFKYEDMVVESXGXR

SEQ ID NO: 93836 - protein, 34 aa, Artificial Sequence; identical to SEQ ID NO: 6893
  Cyclic GFR-binding peptide
  MOD_RES (4)..(5): Xaa is C or S

SEQ ID NO: 93837 - protein, 30 aa, Artificial Sequence; identical to SEQ ID NO: 6894
  Cyclic GFR-binding peptide

SEQ ID NO: 93838 - protein, 25 aa, Artificial Sequence
  Cyclic GFR-binding peptide
VPTELNAISMLYFDENEKVVLKKYR

SEQ ID NO: 93839 - protein, 23 aa, Artificial Sequence
  Cyclic GFR-binding peptide
ALSPISILYKVGRKPKVLKYHYM

SEQ ID NO: 93840 - protein, 30 aa, Artificial Sequence; identical to SEQ ID NO: 6898
  Cyclic GFR-binding peptide
  MOD_RES (1)..(2): Xaa is C or S

SEQ ID NO: 93841 - protein, 35 aa, Artificial Sequence; identical to SEQ ID NO: 42505
  Cyclic GFR-binding peptide
  MOD_RES (4)..(5): Xaa is C or S

SEQ ID NO: 93842 - protein, 31 aa, Artificial Sequence; identical to SEQ ID NO: 17265
  Cyclic GFR-binding peptide
  MOD_RES (2)..(3): Xaa is C or S

SEQ ID NO: 93843 - protein, 29 aa, Artificial Sequence
  Cyclic GFR-binding peptide
  MOD_RES (2)..(3): Xaa is C or S
SXXVPARLNAISILYFDAANNVVLKKYRD

SEQ ID NO: 93844 - protein, 32 aa, Artificial Sequence; identical to SEQ ID NO: 42511
  Cyclic GFR-binding peptide
  MOD_RES (6)..(7): Xaa is C or S

SEQ ID NO: 93845 - protein, 27 aa, Artificial Sequence
  Cyclic GFR-binding peptide
SQDLSPINILYFIGKTPKIYGKIPMIV

SEQ ID NO: 93846 - protein, 39 aa, Artificial Sequence; identical to SEQ ID NO: 42513
  Cyclic GFR-binding peptide
  MOD_RES (5)..(6)..(38): Xaa is C or S

SEQ ID NO: 93847 - protein, 26 aa, Artificial Sequence
  Cyclic GFR-binding peptide
APTKLEPISVLYLDDSSNVIKFKYEN

SEQ ID NO: 93848 - protein, 26 aa, Artificial Sequence
  Cyclic GFR-binding peptide
QDLSPINILYFVGRTPKVYGKIPMVV

SEQ ID NO: 93849 - protein, 25 aa, Artificial Sequence
  Cyclic GFR-binding peptide
NAISMLYFDENEKVVLKKYRDMVVE

SEQ ID NO: 93850 - protein, 34 aa, Artificial Sequence; identical to SEQ ID NO: 6910
  Cyclic GFR-binding peptide
  MOD_RES (4)..(5): Xaa is C or S

SEQ ID NO: 93851 - protein, 28 aa, Artificial Sequence
  Cyclic GFR-binding peptide
  MOD_RES (3)..(3): Xaa is C or S
PTXAPTKLSPINVLYFDDSSNVIYGKIP

SEQ ID NO: 93852 - protein, 31 aa, Artificial Sequence
  Cyclic GFR-binding peptide
  MOD_RES (2)..(3): Xaa is C or S
PXXVPQALSPINILYFVGRKPKVYGKIPMIV

SEQ ID NO: 93853 - protein, 30 aa, Artificial Sequence; identical to SEQ ID NO: 35286
  Cyclic GFR-binding peptide
  MOD_RES (30)..(30): Xaa is C or S

SEQ ID NO: 93854 - protein, 29 aa, Artificial Sequence
  Cyclic GFR-binding peptide
  MOD_RES (2)..(3): Xaa is C or S
TXXAPVKTSPISMLYKDNGRVLLLKYHYM

SEQ ID NO: 93855 - protein, 39 aa, Artificial Sequence; identical to SEQ ID NO: 6916
  Cyclic GFR-binding peptide
  MOD_RES (5)..(37)..(39): Xaa is C or S

SEQ ID NO: 93856 - protein, 40 aa, Artificial Sequence; identical to SEQ ID NO: 35290
  Cyclic GFR-binding peptide
  MOD_RES (6)..(7)..(38)..(40): Xaa is C or S

SEQ ID NO: 93857 - protein, 38 aa, Artificial Sequence
  Cyclic GFR-binding peptide
  MOD_RES (6)..(7): Xaa is C or S
GSAGPXXTPTKMSATSMLYYNDKQQIILRKHRGMVVDR

SEQ ID NO: 93858 - protein, 28 aa, Artificial Sequence
  Cyclic GFR-binding peptide
  MOD_RES (28)..(28): Xaa is C or S
LEPISMLYLDEYDKVVKFKYEEMVVEGX

SEQ ID NO: 93859 - protein, 32 aa, Artificial Sequence; identical to SEQ ID NO: 35295
  Cyclic GFR-binding peptide
  MOD_RES (31)..(31): Xaa is C or S

SEQ ID NO: 93860 - protein, 35 aa, Artificial Sequence; identical to SEQ ID NO: 35296
  Cyclic GFR-binding peptide
  MOD_RES (1)..(33)..(35): Xaa is C or S

SEQ ID NO: 93861 - protein, 28 aa, Artificial Sequence
  Cyclic GFR-binding peptide
  MOD_RES (2)..(2): Xaa is C or S
TXAPTKLSATSVLYYDDSSNVILRKHRN

SEQ ID NO: 93862 - protein, 32 aa, Artificial Sequence; identical to SEQ ID NO: 35297
  Cyclic GFR-binding peptide
  MOD_RES (29)..(31): Xaa is C or S

SEQ ID NO: 93863 - protein, 27 aa, Artificial Sequence
  Cyclic GFR-binding peptide
ARLSATSILYYDAANNVVLRKHRDMVV

SEQ ID NO: 93864 - protein, 30 aa, Artificial Sequence; identical to SEQ ID NO: 35300
  Cyclic GFR-binding peptide
  MOD_RES (1)..(1): Xaa is C or S

SEQ ID NO: 93865 - protein, 32 aa, Artificial Sequence; identical to SEQ ID NO: 6924
  Cyclic GFR-binding peptide
  MOD_RES (5)..(6): Xaa is C or S

SEQ ID NO: 93866 - protein, 29 aa, Artificial Sequence
  Cyclic GFR-binding peptide
  MOD_RES (3)..(4): Xaa is C or S
ASXXVPARLEPISILYLDAANNVVKFKYE

SEQ ID NO: 93867 - protein, 32 aa, Artificial Sequence; identical to SEQ ID NO: 35303
  Cyclic GFR-binding peptide
  MOD_RES (30)..(32): Xaa is C or S

SEQ ID NO: 93868 - protein, 20 aa, Artificial Sequence
  Cyclic GFR-binding peptide
NAISILYFDENKNVVLKKYR

SEQ ID NO: 93869 - protein, 39 aa, Artificial Sequence
  Cyclic GFR-binding peptide
  MOD_RES (3)..(4)..(36)..(38): Xaa is C or S
EPXXVPEKMSATSILYYDENKNVVLRKHRNMTVESXAXR

SEQ ID NO: 93870 - protein, 28 aa, Artificial Sequence
  Cyclic GFR-binding peptide
  MOD_RES (1)..(1): Xaa is C or S
XVPEKMSPISILYKDENKNVVLKYHYNM

SEQ ID NO: 93871 - protein, 36 aa, Artificial Sequence; identical to SEQ ID NO: 35307
  Cyclic GFR-binding peptide
  MOD_RES (5)..(6): Xaa is C or S

SEQ ID NO: 93872 - protein, 28 aa, Artificial Sequence
  Cyclic GFR-binding peptide
VSQDLEPISILYLIGKTPKIKFKYEMIV

SEQ ID NO: 93873 - protein, 31 aa, Artificial Sequence; identical to SEQ ID NO: 6936
  Cyclic GFR-binding peptide
  MOD_RES (31)..(31): Xaa is C or S

SEQ ID NO: 93874 - protein, 28 aa, Artificial Sequence
  Cyclic GFR-binding peptide
  MOD_RES (2)..(3): Xaa is C or S
PXXVPQALNAISILYFVGRKPKVLKKYR

SEQ ID NO: 93875 - protein, 29 aa, Artificial Sequence
  Cyclic GFR-binding peptide
  MOD_RES (2)..(3): Xaa is C or S
AXXVPTELSPISMLYKDEYDKVVLKYHYE

SEQ ID NO: 93876 - protein, 33 aa, Artificial Sequence; identical to SEQ ID NO: 42554
  Cyclic GFR-binding peptide
  MOD_RES (3)..(4): Xaa is C or S

SEQ ID NO: 93877 - protein, 29 aa, Artificial Sequence
  Cyclic GFR-binding peptide
  MOD_RES (29)..(29): Xaa is C or S
ELSPISMLYKDEYDKVVLKYHYEMVVEGX

SEQ ID NO: 93878 - protein, 34 aa, Artificial Sequence; identical to SEQ ID NO: 6940
  Cyclic GFR-binding peptide
  MOD_RES (4)..(5): Xaa is C or S

SEQ ID NO: 93879 - protein, 28 aa, Artificial Sequence
  Cyclic GFR-binding peptide
QDLSPISILYKIGKTPKILKYHYMIVKS

SEQ ID NO: 93880 - protein, 38 aa, Artificial Sequence
  Cyclic GFR-binding peptide
  MOD_RES (3)..(4)..(35)..(37): Xaa is C or S
SPXXVSQDLSPINILYFIGKTPKIYGKIPMIVKSXKXS

SEQ ID NO: 93881 - protein, 36 aa, Artificial Sequence; identical to SEQ ID NO: 6942
  Cyclic GFR-binding peptide
  MOD_RES (2)..(3)..(34)..(36): Xaa is C or S

SEQ ID NO: 93882 - protein, 28 aa, Artificial Sequence
  Cyclic GFR-binding peptide
  MOD_RES (1)..(1): Xaa is C or S
XVPTKLSATSILYYDKGVVTYLRKHRGM

SEQ ID NO: 93883 - protein, 41 aa, Artificial Sequence; identical to SEQ ID NO: 42558
  Cyclic GFR-binding peptide
  MOD_RES (4)..(5)..(38)..(40): Xaa is C or S

SEQ ID NO: 93884 - protein, 36 aa, Artificial Sequence
  Cyclic GFR-binding peptide
  MOD_RES (1)..(2)..(33)..(35): Xaa is C or S
XXAPVKTSATSMLYYDNGRVLLLRKHRMIVEEXGXL

SEQ ID NO: 93885 - protein, 25 aa, Artificial Sequence
  Cyclic GFR-binding peptide
TSPINMLYFDNGRVLLYGKIPMIVE

SEQ ID NO: 93886 - protein, 41 aa, Artificial Sequence; identical to SEQ ID NO: 42565
  Cyclic GFR-binding peptide
  MOD_RES (5)..(6)..(38)..(40): Xaa is C or S

SEQ ID NO: 93887 - protein, 37 aa, Artificial Sequence; identical to SEQ ID NO: 6949
  Cyclic GFR-binding peptide
  MOD_RES (2)..(3)..(36): Xaa is C or S

SEQ ID NO: 93888 - protein, 35 aa, Artificial Sequence; identical to SEQ ID NO: 35329
  Cyclic GFR-binding peptide
  MOD_RES (4)..(5): Xaa is C or S

SEQ ID NO: 93889 - protein, 29 aa, Artificial Sequence
  Cyclic GFR-binding peptide
  MOD_RES (26)..(28): Xaa is C or S
EPISILYLVGRTPKVKFKYEMVVKSXKXS

SEQ ID NO: 93890 - protein, 34 aa, Artificial Sequence
  Cyclic GFR-binding peptide
  MOD_RES (2)..(3): Xaa is C or S
PXXVPEKMSPISILYKDENKNVVLKYHYNMTVES

SEQ ID NO: 93891 - protein, 35 aa, Artificial Sequence; identical to SEQ ID NO: 42574
  Cyclic GFR-binding peptide
  MOD_RES (4)..(5): Xaa is C or S

SEQ ID NO: 93892 - protein, 30 aa, Artificial Sequence; identical to SEQ ID NO: 42576
  Cyclic GFR-binding peptide
  MOD_RES (30)..(30): Xaa is C or S

SEQ ID NO: 93893 - protein, 39 aa, Artificial Sequence
  Cyclic GFR-binding peptide
  MOD_RES (6)..(7)..(39): Xaa is C or S
GIPEPXXVPEKMSPINILYFDENKNVVYGKIPNMTVESX

SEQ ID NO: 93894 - protein, 27 aa, Artificial Sequence
  Cyclic GFR-binding peptide
  MOD_RES (1)..(1): Xaa is C or S
XAPTKLSPISVLYKDDSSNVILKYHYN

SEQ ID NO: 93895 - protein, 27 aa, Artificial Sequence
  Cyclic GFR-binding peptide
ALNAISILYFVGRKPKVLKKYRMIVRS

SEQ ID NO: 93896 - protein, 40 aa, Artificial Sequence
  Cyclic GFR-binding peptide
  MOD_RES (5)..(6)..(38)..(40): Xaa is C or S
APASXXVPARLSATSILYYDAANNVVLRKHRDMVVEAXGX

SEQ ID NO: 93897 - protein, 34 aa, Artificial Sequence
  Cyclic GFR-binding peptide
  MOD_RES (1)..(33): Xaa is C or S
XTPTKMSPISMLYKNDKQQIILKYHYGMVVDRXG

SEQ ID NO: 93898 - protein, 29 aa, Artificial Sequence
  Cyclic GFR-binding peptide
  MOD_RES (28)..(28): Xaa is C or S
DLEPISILYLIGKTPKIKFKYEMIVKSXK

SEQ ID NO: 93899 - protein, 29 aa, Artificial Sequence
  Cyclic GFR-binding peptide
  MOD_RES (2)..(3): Xaa is C or S
PXXVPQALSPINILYFVGRKPKVYGKIPM

SEQ ID NO: 93900 - protein, 31 aa, Artificial Sequence; identical to SEQ ID NO: 6958
  Cyclic GFR-binding peptide
  MOD_RES (29)..(31): Xaa is C or S

SEQ ID NO: 93901 - protein, 32 aa, Artificial Sequence
  Cyclic GFR-binding peptide
  MOD_RES (6)..(7): Xaa is C or S
GIPEPXXVPEKMSATSILYYDENKNVVLRKHR

SEQ ID NO: 93902 - protein, 32 aa, Artificial Sequence
  Cyclic GFR-binding peptide
  MOD_RES (1)..(2): Xaa is C or S
XXVPTKLSATSILYYDKGVVTYLRKHRGMAVS

SEQ ID NO: 93903 - protein, 29 aa, Artificial Sequence
  Cyclic GFR-binding peptide
  MOD_RES (1)..(2): Xaa is C or S
XXAPTQLSPISVLYKDDSSNVILKYHYNM

SEQ ID NO: 93904 - protein, 35 aa, Artificial Sequence; identical to SEQ ID NO: 77077
  Cyclic GFR-binding peptide
  MOD_RES (4)..(5): Xaa is C or S

SEQ ID NO: 93905 - protein, 34 aa, Artificial Sequence; identical to SEQ ID NO: 42588
  Cyclic GFR-binding peptide
  MOD_RES (1)..(2): Xaa is C or S

SEQ ID NO: 93906 - protein, 35 aa, Artificial Sequence; identical to SEQ ID NO: 42591
  Cyclic GFR-binding peptide
  MOD_RES (2)..(3)..(35): Xaa is C or S

SEQ ID NO: 93907 - protein, 31 aa, Artificial Sequence
  Cyclic GFR-binding peptide
  MOD_RES (3)..(4): Xaa is C or S
APXXVPQALSPINILYFVGRKPKVYGKIPMI

SEQ ID NO: 93908 - protein, 39 aa, Artificial Sequence; identical to SEQ ID NO: 35350
  Cyclic GFR-binding peptide
  MOD_RES (3)..(4)..(36)..(38): Xaa is C or S

SEQ ID NO: 93909 - protein, 29 aa, Artificial Sequence
  Cyclic GFR-binding peptide
  MOD_RES (2)..(3): Xaa is C or S
PXXAPTKLSPINVLYFDDSSNVIYGKIPN

SEQ ID NO: 93910 - protein, 35 aa, Artificial Sequence
  Cyclic GFR-binding peptide
  MOD_RES (2)..(3)..(35): Xaa is C or S
PXXTPTKMEPISMLYLNDKQQIIKFKYEGMVVDRX

SEQ ID NO: 93911 - protein, 33 aa, Artificial Sequence; identical to SEQ ID NO: 77078
  Cyclic GFR-binding peptide
  MOD_RES (1)..(32): Xaa is C or S

SEQ ID NO: 93912 - protein, 41 aa, Artificial Sequence; identical to SEQ ID NO: 6964
  Cyclic GFR-binding peptide
  MOD_RES (6)..(7)..(39)..(41): Xaa is C or S

SEQ ID NO: 93913 - protein, 39 aa, Artificial Sequence
  Cyclic GFR-binding peptide
  MOD_RES (5)..(6)..(38): Xaa is C or S
IPEPXXVPEKMEPISILYLDENKNVVKFKYENMTVESXA

SEQ ID NO: 93914 - protein, 24 aa, Artificial Sequence
  Cyclic GFR-binding peptide
PARLSPINILYFDAANNVVYGKIP

SEQ ID NO: 93915 - protein, 37 aa, Artificial Sequence; identical to SEQ ID NO: 6967
  Cyclic GFR-binding peptide
  MOD_RES (4)..(5)..(37): Xaa is C or S

SEQ ID NO: 93916 - protein, 33 aa, Artificial Sequence; identical to SEQ ID NO: 6969
  Cyclic GFR-binding peptide
  MOD_RES (31)..(33): Xaa is C or S

SEQ ID NO: 93917 - protein, 34 aa, Artificial Sequence; identical to SEQ ID NO: 35355
  Cyclic GFR-binding peptide
  MOD_RES (3)..(4): Xaa is C or S

SEQ ID NO: 93918 - protein, 32 aa, Artificial Sequence; identical to SEQ ID NO: 42606
  Cyclic GFR-binding peptide
  MOD_RES (1)..(2): Xaa is C or S

SEQ ID NO: 93919 - protein, 34 aa, Artificial Sequence
  Cyclic GFR-binding peptide
  MOD_RES (3)..(4): Xaa is C or S
STXXAPVKTSATSMLYYDNGRVLLLRKHRMIVEE

SEQ ID NO: 93920 - protein, 34 aa, Artificial Sequence; identical to SEQ ID NO: 6972
  Cyclic GFR-binding peptide
  MOD_RES (31)..(33): Xaa is C or S

SEQ ID NO: 93921 - protein, 26 aa, Artificial Sequence
  Cyclic GFR-binding peptide
KLSPINVLYFDSSNNVIYGKIPNMVV

SEQ ID NO: 93922 - protein, 27 aa, Artificial Sequence
  Cyclic GFR-binding peptide
LSPINMLYFDEYDKVVYGKIPEMVVEG

SEQ ID NO: 93923 - protein, 32 aa, Artificial Sequence; identical to SEQ ID NO: 42614
  Cyclic GFR-binding peptide

SEQ ID NO: 93924 - protein, 29 aa, Artificial Sequence
  Cyclic GFR-binding peptide
PARLSPINILYFDAANNVVYGKIPDMVVE

SEQ ID NO: 93925 - protein, 26 aa, Artificial Sequence
  Cyclic GFR-binding peptide
TELSATSMLYYDEYDKVVLRKHREMV

SEQ ID NO: 93926 - protein, 32 aa, Artificial Sequence
  Cyclic GFR-binding peptide
  MOD_RES (31)..(31): Xaa is C or S
VPQALSPINILYFVGRKPKVYGKIPMIVRSXK

SEQ ID NO: 93927 - protein, 35 aa, Artificial Sequence; identical to SEQ ID NO: 42619
  Cyclic GFR-binding peptide
  MOD_RES (1)..(2)..(34): Xaa is C or S

SEQ ID NO: 93928 - protein, 32 aa, Artificial Sequence
  Cyclic GFR-binding peptide
  MOD_RES (1)..(2): Xaa is C or S
XXAPVKTSPISMLYKDNGRVLLLKYHYMIVEE

SEQ ID NO: 93929 - protein, 35 aa, Artificial Sequence
  Cyclic GFR-binding peptide
  MOD_RES (5)..(6): Xaa is C or S
SAGPXXTPTKMSATSMLYYNDKQQIILRKHRGMVV

SEQ ID NO: 93930 - protein, 33 aa, Artificial Sequence; identical to SEQ ID NO: 6980
  Cyclic GFR-binding peptide
  MOD_RES (1)..(2): Xaa is C or S

SEQ ID NO: 93931 - protein, 35 aa, Artificial Sequence; identical to SEQ ID NO: 6983
  Cyclic GFR-binding peptide
  MOD_RES (3)..(4): Xaa is C or S

SEQ ID NO: 93932 - protein, 32 aa, Artificial Sequence; identical to SEQ ID NO: 6985
  Cyclic GFR-binding peptide
  MOD_RES (6)..(7): Xaa is C or S

SEQ ID NO: 93933 - protein, 29 aa, Artificial Sequence
  Cyclic GFR-binding peptide
  MOD_RES (28)..(28): Xaa is C or S
LSPISMLYKDEYDKVVLKYHYEMVVEGXG

SEQ ID NO: 93934 - protein, 36 aa, Artificial Sequence; identical to SEQ ID NO: 6989
  Cyclic GFR-binding peptide
  MOD_RES (4)..(5): Xaa is C or S

SEQ ID NO: 93935 - protein, 31 aa, Artificial Sequence; identical to SEQ ID NO: 17344
  Cyclic GFR-binding peptide
  MOD_RES (1)..(2): Xaa is C or S

SEQ ID NO: 93936 - protein, 33 aa, Artificial Sequence
  Cyclic GFR-binding peptide
  MOD_RES (4)..(5): Xaa is C or S
PEPXXVPEKMSPISILYKDENKNVVLKYHYNMT

SEQ ID NO: 93937 - protein, 30 aa, Artificial Sequence
  Cyclic GFR-binding peptide
  MOD_RES (3)..(4): Xaa is C or S
GPXXTPTKMSATSMLYYNDKQQIILRKHRG

SEQ ID NO: 93938 - protein, 34 aa, Artificial Sequence; identical to SEQ ID NO: 6993
  Cyclic GFR-binding peptide
  MOD_RES (3)..(4): Xaa is C or S

SEQ ID NO: 93939 - protein, 25 aa, Artificial Sequence
  Cyclic GFR-binding peptide
QDLSPINILYFVGRTPKVYGKIPMV

SEQ ID NO: 93940 - protein, 39 aa, Artificial Sequence; identical to SEQ ID NO: 6996
  Cyclic GFR-binding peptide
  MOD_RES (6)..(7)..(39): Xaa is C or S

SEQ ID NO: 93941 - protein, 24 aa, Artificial Sequence
  Cyclic GFR-binding peptide
PTQLEPISVLYLDDSSNVIKFKYE

SEQ ID NO: 93942 - protein, 27 aa, Artificial Sequence
  Cyclic GFR-binding peptide
  MOD_RES (27)..(27): Xaa is C or S
SPISILYKDSANNVVLKYHYDMVVESX

SEQ ID NO: 93943 - protein, 37 aa, Artificial Sequence; identical to SEQ ID NO: 42635
  Cyclic GFR-binding peptide
  MOD_RES (2)..(3)..(35)..(37): Xaa is C or S

SEQ ID NO: 93944 - protein, 37 aa, Artificial Sequence; identical to SEQ ID NO: 6999
  Cyclic GFR-binding peptide
  MOD_RES (4)..(5): Xaa is C or S

SEQ ID NO: 93945 - protein, 34 aa, Artificial Sequence; identical to SEQ ID NO: 7001
  Cyclic GFR-binding peptide
  MOD_RES (1)..(2)..(34): Xaa is C or S

SEQ ID NO: 93946 - protein, 32 aa, Artificial Sequence; identical to SEQ ID NO: 35386
  Cyclic GFR-binding peptide
  MOD_RES (1)..(2): Xaa is C or S

SEQ ID NO: 93947 - protein, 36 aa, Artificial Sequence; identical to SEQ ID NO: 7003
  Cyclic GFR-binding peptide
  MOD_RES (3)..(4)..(35): Xaa is C or S

SEQ ID NO: 93948 - protein, 35 aa, Artificial Sequence; identical to SEQ ID NO: 42640
  Cyclic GFR-binding peptide
  MOD_RES (5)..(6): Xaa is C or S

SEQ ID NO: 93949 - protein, 23 aa, Artificial Sequence
  Cyclic GFR-binding peptide
KMNAISILYFDENKNVVLKKYRN

SEQ ID NO: 93950 - protein, 27 aa, Artificial Sequence
  Cyclic GFR-binding peptide
  MOD_RES (1)..(2): Xaa is C or S
XXVPTELSPINMLYFDEYDKVVYGKIP

SEQ ID NO: 93951 - protein, 36 aa, Artificial Sequence; identical to SEQ ID NO: 7007
  Cyclic GFR-binding peptide
  MOD_RES (4)..(36): Xaa is C or S

SEQ ID NO: 93952 - protein, 31 aa, Artificial Sequence; identical to SEQ ID NO: 7008
  Cyclic GFR-binding peptide
  MOD_RES (5)..(5): Xaa is C or S

SEQ ID NO: 93953 - protein, 33 aa, Artificial Sequence; identical to SEQ ID NO: 42645
  Cyclic GFR-binding peptide
  MOD_RES (30)..(32): Xaa is C or S

SEQ ID NO: 93954 - protein, 29 aa, Artificial Sequence
  Cyclic GFR-binding peptide
  MOD_RES (27)..(29): Xaa is C or S
LSATSILYYVGRTPKVLRKHRMVVKSXKX

SEQ ID NO: 93955 - protein, 32 aa, Artificial Sequence; identical to SEQ ID NO: 7010
  Cyclic GFR-binding peptide
  MOD_RES (3)..(4): Xaa is C or S

SEQ ID NO: 93956 - protein, 28 aa, Artificial Sequence
  Cyclic GFR-binding peptide
PTRLNAISILYFDSANNVVLKKYRDMVV

SEQ ID NO: 93957 - protein, 41 aa, Artificial Sequence
  Cyclic GFR-binding peptide
  MOD_RES (5)..(6)..(38)..(40): Xaa is C or S
IPEPXXVPEKMSPISILYKDENKNVVLKYHYNMTVESXAXR

SEQ ID NO: 93958 - protein, 32 aa, Artificial Sequence
  Cyclic GFR-binding peptide
  MOD_RES (6)..(7): Xaa is C or S
RVPSTXXAPVKTEPISMLYLDNGRVLLKFKYE

SEQ ID NO: 93959 - protein, 33 aa, Artificial Sequence; identical to SEQ ID NO: 35396
  Cyclic GFR-binding peptide
  MOD_RES (1)..(2): Xaa is C or S

SEQ ID NO: 93960 - protein, 24 aa, Artificial Sequence
  Cyclic GFR-binding peptide
MSPISMLYKNDKQQIILKYHYGMV

SEQ ID NO: 93961 - protein, 22 aa, Artificial Sequence
  Cyclic GFR-binding peptide
LNAISILYFDKGVVTYLKKYRG

SEQ ID NO: 93962 - protein, 35 aa, Artificial Sequence; identical to SEQ ID NO: 7013
  Cyclic GFR-binding peptide
  MOD_RES (3)..(4): Xaa is C or S

SEQ ID NO: 93963 - protein, 35 aa, Artificial Sequence
  Cyclic GFR-binding peptide
  MOD_RES (1)..(32)..(34): Xaa is C or S
XVPQALSPINILYFVGRKPKVYGKIPMIVRSXKXS

SEQ ID NO: 93964 - protein, 26 aa, Artificial Sequence
  Cyclic GFR-binding peptide
SATSMLYYDEYDKVVLRKHREMVVEG

SEQ ID NO: 93965 - protein, 27 aa, Artificial Sequence
  Cyclic GFR-binding peptide
PEKMEPISILYLDENKNVVKFKYENMT

SEQ ID NO: 93966 - protein, 36 aa, Artificial Sequence; identical to SEQ ID NO: 42652
  Cyclic GFR-binding peptide
  MOD_RES (1)..(33)..(35): Xaa is C or S

SEQ ID NO: 93967 - protein, 28 aa, Artificial Sequence
  Cyclic GFR-binding peptide
  MOD_RES (1)..(1): Xaa is C or S
XVPTRLEPISILYLDSANNVVKFKYEDM

SEQ ID NO: 93968 - protein, 29 aa, Artificial Sequence
  Cyclic GFR-binding peptide
  MOD_RES (27)..(29): Xaa is C or S
EPISILYLDENKNVVKFKYENMTVESXAX

SEQ ID NO: 93969 - protein, 34 aa, Artificial Sequence; identical to SEQ ID NO: 7021
  Cyclic GFR-binding peptide
  MOD_RES (1)..(32)..(34): Xaa is C or S

SEQ ID NO: 93970 - protein, 36 aa, Artificial Sequence; identical to SEQ ID NO: 42657
  Cyclic GFR-binding peptide
  MOD_RES (1)..(33)..(35): Xaa is C or S

SEQ ID NO: 93971 - protein, 27 aa, Artificial Sequence
  Cyclic GFR-binding peptide
  MOD_RES (1)..(1): Xaa is C or S
XVPARLSATSILYYDAANNVVLRKHRD

SEQ ID NO: 93972 - protein, 29 aa, Artificial Sequence
  Cyclic GFR-binding peptide
  MOD_RES (29)..(29): Xaa is C or S
KLSATSILYYDKGVVTYLRKHRGMAVSEX

SEQ ID NO: 93973 - protein, 23 aa, Artificial Sequence
  Cyclic GFR-binding peptide
LEPISVLYLDSSNNVIKFKYENM

SEQ ID NO: 93974 - protein, 39 aa, Artificial Sequence
  Cyclic GFR-binding peptide
  MOD_RES (3)..(4)..(36)..(38): Xaa is C or S
GPXXTPTKMEPISMLYLNDKQQIIKFKYEGMVVDRXGXS

SEQ ID NO: 93975 - protein, 29 aa, Artificial Sequence
  Cyclic GFR-binding peptide
  MOD_RES (3)..(4): Xaa is C or S
EPXXVPEKMEPISILYLDENKNVVKFKYE

SEQ ID NO: 93976 - protein, 32 aa, Artificial Sequence; identical to SEQ ID NO: 17378
  Cyclic GFR-binding peptide
  MOD_RES (4)..(5): Xaa is C or S

SEQ ID NO: 93977 - protein, 33 aa, Artificial Sequence; identical to SEQ ID NO: 7025
  Cyclic GFR-binding peptide
  MOD_RES (1)..(2): Xaa is C or S

SEQ ID NO: 93978 - protein, 31 aa, Artificial Sequence
  Cyclic GFR-binding peptide
  MOD_RES (5)..(6): Xaa is C or S
SAAPXXVPQALSPINILYFVGRKPKVYGKIP

SEQ ID NO: 93979 - protein, 42 aa, Artificial Sequence; identical to SEQ ID NO: 35408
  Cyclic GFR-binding peptide
  MOD_RES (6)..(7)..(40)..(42): Xaa is C or S

SEQ ID NO: 93980 - protein, 34 aa, Artificial Sequence; identical to SEQ ID NO: 7029
  Cyclic GFR-binding peptide
  MOD_RES (31)..(33): Xaa is C or S

SEQ ID NO: 93981 - protein, 40 aa, Artificial Sequence; identical to SEQ ID NO: 42665
  Cyclic GFR-binding peptide
  MOD_RES (6)..(7)..(39): Xaa is C or S

SEQ ID NO: 93982 - protein, 36 aa, Artificial Sequence; identical to SEQ ID NO: 7030
  Cyclic GFR-binding peptide
  MOD_RES (2)..(3)..(34)..(36): Xaa is C or S

SEQ ID NO: 93983 - protein, 29 aa, Artificial Sequence
  Cyclic GFR-binding peptide
PTKMNAISMLYFNDKQQIILKKYRGMVVD

SEQ ID NO: 93984 - protein, 30 aa, Artificial Sequence; identical to SEQ ID NO: 7032
  Cyclic GFR-binding peptide
  MOD_RES (1)..(1): Xaa is C or S

SEQ ID NO: 93985 - protein, 31 aa, Artificial Sequence
  Cyclic GFR-binding peptide
  MOD_RES (29)..(31): Xaa is C or S
KMEPISMLYLNDKQQIIKFKYEGMVVDRXGX

SEQ ID NO: 93986 - protein, 32 aa, Artificial Sequence
  Cyclic GFR-binding peptide
  MOD_RES (30)..(32): Xaa is C or S
PQALSPINILYFVGRKPKVYGKIPMIVRSXKX

SEQ ID NO: 93987 - protein, 33 aa, Artificial Sequence; identical to SEQ ID NO: 7034
  Cyclic GFR-binding peptide
  MOD_RES (2)..(3): Xaa is C or S

SEQ ID NO: 93988 - protein, 34 aa, Artificial Sequence; identical to SEQ ID NO: 7035
  Cyclic GFR-binding peptide
  MOD_RES (6)..(7): Xaa is C or S

SEQ ID NO: 93989 - protein, 34 aa, Artificial Sequence; identical to SEQ ID NO: 35419
  Cyclic GFR-binding peptide
  MOD_RES (6)..(7): Xaa is C or S

SEQ ID NO: 93990 - protein, 35 aa, Artificial Sequence
  Cyclic GFR-binding peptide
  MOD_RES (1)..(33)..(35): Xaa is C or S
XTPTKMSATSMLYYNDKQQIILRKHRGMVVDRXGX

SEQ ID NO: 93991 - protein, 32 aa, Artificial Sequence; identical to SEQ ID NO: 7036
  Cyclic GFR-binding peptide
  MOD_RES (1)..(32): Xaa is C or S

SEQ ID NO: 93992 - protein, 32 aa, Artificial Sequence; identical to SEQ ID NO: 7037
  Cyclic GFR-binding peptide
  MOD_RES (1)..(2): Xaa is C or S

SEQ ID NO: 93993 - protein, 30 aa, Artificial Sequence
  Cyclic GFR-binding peptide
  MOD_RES (3)..(4): Xaa is C or S
EPXXVPEKMSATSILYYDENKNVVLRKHRN

SEQ ID NO: 93994 - protein, 22 aa, Artificial Sequence
  Cyclic GFR-binding peptide
EPISVLYLDSSNNVIKFKYENM

SEQ ID NO: 93995 - protein, 34 aa, Artificial Sequence; identical to SEQ ID NO: 35427
  Cyclic GFR-binding peptide
  MOD_RES (1)..(33): Xaa is C or S

SEQ ID NO: 93996 - protein, 31 aa, Artificial Sequence; identical to SEQ ID NO: 35429
  Cyclic GFR-binding peptide
  MOD_RES (5)..(6): Xaa is C or S

SEQ ID NO: 93997 - protein, 35 aa, Artificial Sequence; identical to SEQ ID NO: 7043
  Cyclic GFR-binding peptide
  MOD_RES (6)..(7): Xaa is C or S

SEQ ID NO: 93998 - protein, 33 aa, Artificial Sequence; identical to SEQ ID NO: 7044
  Cyclic GFR-binding peptide
  MOD_RES (3)..(4): Xaa is C or S

SEQ ID NO: 93999 - protein, 29 aa, Artificial Sequence
  Cyclic GFR-binding peptide
  MOD_RES (28)..(28): Xaa is C or S
ALSPINILYFVGRKPKVYGKIPMIVRSXK

SEQ ID NO: 94000 - protein, 22 aa, Artificial Sequence
  Cyclic GFR-binding peptide
KLSPISILYKDKGVVTYLKYHY

SEQ ID NO: 94001 - protein, 34 aa, Artificial Sequence; identical to SEQ ID NO: 7047
  Cyclic GFR-binding peptide
  MOD_RES (5)..(6): Xaa is C or S

SEQ ID NO: 94002 - protein, 31 aa, Artificial Sequence; identical to SEQ ID NO: 35433
  Cyclic GFR-binding peptide
  MOD_RES (4)..(5): Xaa is C or S

SEQ ID NO: 94003 - protein, 28 aa, Artificial Sequence
  Cyclic GFR-binding peptide
  MOD_RES (1)..(2): Xaa is C or S
XXAPVKTSPINMLYFDNGRVLLYGKIPM

SEQ ID NO: 94004 - protein, 25 aa, Artificial Sequence
  Cyclic GFR-binding peptide
LEPISVLYLDDSSNVIKFKYENMVV

SEQ ID NO: 94005 - protein, 35 aa, Artificial Sequence; identical to SEQ ID NO: 42679
  Cyclic GFR-binding peptide
  MOD_RES (1)..(2)..(34): Xaa is C or S

SEQ ID NO: 94006 - protein, 33 aa, Artificial Sequence
  Cyclic GFR-binding peptide
  MOD_RES (32)..(32): Xaa is C or S
VPEKMEPISILYLDENKNVVKFKYENMTVESXA

SEQ ID NO: 94007 - protein, 36 aa, Artificial Sequence
  Cyclic GFR-binding peptide
  MOD_RES (3)..(4)..(36): Xaa is C or S
EPXXVPEKMNAISILYFDENKNVVLKKYRNMTVESX

SEQ ID NO: 94008 - protein, 30 aa, Artificial Sequence
  Cyclic GFR-binding peptide
  MOD_RES (1)..(2): Xaa is C or S
XXVPEKMSPINILYFDENKNVVYGKIPNMT

SEQ ID NO: 94009 - protein, 30 aa, Artificial Sequence; identical to SEQ ID NO: 42681
  Cyclic GFR-binding peptide
  MOD_RES (28)..(30): Xaa is C or S

SEQ ID NO: 94010 - protein, 37 aa, Artificial Sequence; identical to SEQ ID NO: 35438
  Cyclic GFR-binding peptide
  MOD_RES (4)..(5)..(37): Xaa is C or S

SEQ ID NO: 94011 - protein, 32 aa, Artificial Sequence; identical to SEQ ID NO: 42693
  Cyclic GFR-binding peptide
  MOD_RES (29)..(31): Xaa is C or S

SEQ ID NO: 94012 - protein, 30 aa, Artificial Sequence
  Cyclic GFR-binding peptide
  MOD_RES (29)..(29): Xaa is C or S
KMSATSMLYYNDKQQIILRKHRGMVVDRXG

SEQ ID NO: 94013 - protein, 32 aa, Artificial Sequence
  Cyclic GFR-binding peptide
  MOD_RES (6)..(7): Xaa is C or S
STPPTXXVPTRLSPISILYKDSANNVVLKYHY

SEQ ID NO: 94014 - protein, 28 aa, Artificial Sequence
  Cyclic GFR-binding peptide
  MOD_RES (28)..(28): Xaa is C or S
LNAISMLYFDEYDKVVLKKYREMVVEGX

SEQ ID NO: 94015 - protein, 28 aa, Artificial Sequence
  Cyclic GFR-binding peptide
  MOD_RES (28)..(28): Xaa is C or S
MSPISMLYKNDKQQIILKYHYGMVVDRX

SEQ ID NO: 94016 - protein, 30 aa, Artificial Sequence
  Cyclic GFR-binding peptide
  MOD_RES (4)..(5): Xaa is C or S
PSTXXAPVKTSATSMLYYDNGRVLLLRKHR

SEQ ID NO: 94017 - protein, 28 aa, Artificial Sequence
  Cyclic GFR-binding peptide
VPTKLSPISILYKDKGVVTYLKYHYGMA

SEQ ID NO: 94018 - protein, 38 aa, Artificial Sequence; identical to SEQ ID NO: 42702
  Cyclic GFR-binding peptide
  MOD_RES (4)..(5)..(37): Xaa is C or S

SEQ ID NO: 94019 - protein, 24 aa, Artificial Sequence
  Cyclic GFR-binding peptide
SPISMLYKDENEKVVLKYHYDMVV

SEQ ID NO: 94020 - protein, 22 aa, Artificial Sequence
  Cyclic GFR-binding peptide
LEPISMLYLDENEKVVKFKYED

SEQ ID NO: 94021 - protein, 32 aa, Artificial Sequence; identical to SEQ ID NO: 7066
  Cyclic GFR-binding peptide
  MOD_RES (29)..(31): Xaa is C or S

SEQ ID NO: 94022 - protein, 30 aa, Artificial Sequence; identical to SEQ ID NO: 7069
  Cyclic GFR-binding peptide
  MOD_RES (30)..(30): Xaa is C or S

SEQ ID NO: 94023 - protein, 40 aa, Artificial Sequence; identical to SEQ ID NO: 42707
  Cyclic GFR-binding peptide
  MOD_RES (5)..(6)..(37)..(39): Xaa is C or S

SEQ ID NO: 94024 - protein, 32 aa, Artificial Sequence
  Cyclic GFR-binding peptide
  MOD_RES (3)..(4): Xaa is C or S
APXXVPQALSPINILYFVGRKPKVYGKIPMIV

SEQ ID NO: 94025 - protein, 38 aa, Artificial Sequence; identical to SEQ ID NO: 7070
  Cyclic GFR-binding peptide
  MOD_RES (2)..(3)..(35)..(37): Xaa is C or S

SEQ ID NO: 94026 - protein, 29 aa, Artificial Sequence
  Cyclic GFR-binding peptide
  MOD_RES (2)..(3): Xaa is C or S
AXXVPTELSATSMLYYDENEKVVLRKHRD

SEQ ID NO: 94027 - protein, 33 aa, Artificial Sequence; identical to SEQ ID NO: 42716
  Cyclic GFR-binding peptide
  MOD_RES (30)..(32): Xaa is C or S

SEQ ID NO: 94028 - protein, 29 aa, Artificial Sequence
  Cyclic GFR-binding peptide
  MOD_RES (27)..(29): Xaa is C or S
SPISMLYKDENEKVVLKYHYDMVVEGXGX

SEQ ID NO: 94029 - protein, 28 aa, Artificial Sequence
  Cyclic GFR-binding peptide
  MOD_RES (26)..(28): Xaa is C or S
EPISILYLVGRKPKVKFKYEMIVRSXKX

SEQ ID NO: 94030 - protein, 33 aa, Artificial Sequence; identical to SEQ ID NO: 7080
  Cyclic GFR-binding peptide
  MOD_RES (5)..(6): Xaa is C or S

SEQ ID NO: 94031 - protein, 30 aa, Artificial Sequence
  Cyclic GFR-binding peptide
  MOD_RES (29)..(29): Xaa is C or S
QALSPINILYFVGRKPKVYGKIPMIVRSXK

SEQ ID NO: 94032 - protein, 27 aa, Artificial Sequence
  Cyclic GFR-binding peptide
  MOD_RES (27)..(27): Xaa is C or S
LSATSILYYIGKTPKILRKHRMIVKSX

SEQ ID NO: 94033 - protein, 30 aa, Artificial Sequence
  Cyclic GFR-binding peptide
  MOD_RES (2)..(3): Xaa is C or S
TXXVPTRLSPISILYKDSANNVVLKYHYDM

SEQ ID NO: 94034 - protein, 35 aa, Artificial Sequence; identical to SEQ ID NO: 35469
  Cyclic GFR-binding peptide
  MOD_RES (5)..(6): Xaa is C or S

SEQ ID NO: 94035 - protein, 29 aa, Artificial Sequence
  Cyclic GFR-binding peptide
  MOD_RES (28)..(28): Xaa is C or S
MNAISMLYFNDKQQIILKKYRGMVVDRXG

SEQ ID NO: 94036 - protein, 24 aa, Artificial Sequence
  Cyclic GFR-binding peptide
EPISILYLDSANNVVKFKYEDMVV

SEQ ID NO: 94037 - protein, 27 aa, Artificial Sequence
  Cyclic GFR-binding peptide
MSPINILYFDENKNVVYGKIPNMTVES

SEQ ID NO: 94038 - protein, 32 aa, Artificial Sequence
  Cyclic GFR-binding peptide
  MOD_RES (3)..(4): Xaa is C or S
EPXXVPEKMSPISILYKDENKNVVLKYHYNMT

SEQ ID NO: 94039 - protein, 28 aa, Artificial Sequence
  Cyclic GFR-binding peptide
APVKTEPISMLYLDNGRVLLKFKYEMIV

SEQ ID NO: 94040 - protein, 29 aa, Artificial Sequence
  Cyclic GFR-binding peptide
  MOD_RES (3)..(4): Xaa is C or S
KPXXAPTKLSPINVLYFDDSSNVIYGKIP

SEQ ID NO: 94041 - protein, 33 aa, Artificial Sequence; identical to SEQ ID NO: 35472
  Cyclic GFR-binding peptide
  MOD_RES (3)..(4): Xaa is C or S

SEQ ID NO: 94042 - protein, 31 aa, Artificial Sequence; identical to SEQ ID NO: 35473
  Cyclic GFR-binding peptide
  MOD_RES (1)..(1): Xaa is C or S

SEQ ID NO: 94043 - protein, 30 aa, Artificial Sequence; identical to SEQ ID NO: 7084
  Cyclic GFR-binding peptide
  MOD_RES (1)..(2): Xaa is C or S

SEQ ID NO: 94044 - protein, 30 aa, Artificial Sequence; identical to SEQ ID NO: 35477
  Cyclic GFR-binding peptide
  MOD_RES (1)..(2): Xaa is C or S

SEQ ID NO: 94045 - protein, 35 aa, Artificial Sequence
  Cyclic GFR-binding peptide
  MOD_RES (6)..(7): Xaa is C or S
HVPKPXXAPTKLSPISVLYKDDSSNVILKYHYNMV

SEQ ID NO: 94046 - protein, 34 aa, Artificial Sequence; identical to SEQ ID NO: 7087
  Cyclic GFR-binding peptide
  MOD_RES (2)..(3)..(34): Xaa is C or S

SEQ ID NO: 94047 - protein, 25 aa, Artificial Sequence
  Cyclic GFR-binding peptide
VPARLEPISILYLDAANNVVKFKYE

SEQ ID NO: 94048 - protein, 33 aa, Artificial Sequence; identical to SEQ ID NO: 7088
  Cyclic GFR-binding peptide
  MOD_RES (7)..(7): Xaa is C or S

SEQ ID NO: 94049 - protein, 29 aa, Artificial Sequence
  Cyclic GFR-binding peptide
  MOD_RES (1)..(2): Xaa is C or S
XXVPEKMEPISILYLDENKNVVKFKYENM

SEQ ID NO: 94050 - protein, 34 aa, Artificial Sequence; identical to SEQ ID NO: 7089
  Cyclic GFR-binding peptide
  MOD_RES (2)..(3): Xaa is C or S

SEQ ID NO: 94051 - protein, 25 aa, Artificial Sequence
  Cyclic GFR-binding peptide
SPISMLYKDNGRVLLLKYHYMIVEE

SEQ ID NO: 94052 - protein, 35 aa, Artificial Sequence; identical to SEQ ID NO: 42742
  Cyclic GFR-binding peptide
  MOD_RES (5)..(5): Xaa is C or S

SEQ ID NO: 94053 - protein, 33 aa, Artificial Sequence
  Cyclic GFR-binding peptide
  MOD_RES (2)..(3): Xaa is C or S
TXXVPTRLSATSILYYDSANNVVLRKHRDMVVE

SEQ ID NO: 94054 - protein, 33 aa, Artificial Sequence; identical to SEQ ID NO: 7091
  Cyclic GFR-binding peptide
  MOD_RES (32)..(32): Xaa is C or S

SEQ ID NO: 94055 - protein, 33 aa, Artificial Sequence
  Cyclic GFR-binding peptide
  MOD_RES (1)..(2): Xaa is C or S
XXVPTKLSATSILYYDKGVVTYLRKHRGMAVSE

SEQ ID NO: 94056 - protein, 31 aa, Artificial Sequence
  Cyclic GFR-binding peptide
  MOD_RES (3)..(4): Xaa is C or S
STXXAPVKTEPISMLYLDNGRVLLKFKYEMI

SEQ ID NO: 94057 - protein, 27 aa, Artificial Sequence
  Cyclic GFR-binding peptide
  MOD_RES (1)..(2): Xaa is C or S
XXVPTELEPISMLYLDENEKVVKFKYE

SEQ ID NO: 94058 - protein, 33 aa, Artificial Sequence; identical to SEQ ID NO: 35486
  Cyclic GFR-binding peptide
  MOD_RES (1)..(2): Xaa is C or S

SEQ ID NO: 94059 - protein, 39 aa, Artificial Sequence; identical to SEQ ID NO: 35487
  Cyclic GFR-binding peptide
  MOD_RES (5)..(6)..(37)..(39): Xaa is C or S

SEQ ID NO: 94060 - protein, 31 aa, Artificial Sequence; identical to SEQ ID NO: 42748
  Cyclic GFR-binding peptide
  MOD_RES (1)..(2): Xaa is C or S

SEQ ID NO: 94061 - protein, 35 aa, Artificial Sequence
  Cyclic GFR-binding peptide
  MOD_RES (32)..(34): Xaa is C or S
APTQLSPINVLYFDDSSNVIYGKIPNMVVRAXGXH

SEQ ID NO: 94062 - protein, 34 aa, Artificial Sequence
  Cyclic GFR-binding peptide
  MOD_RES (3)..(4): Xaa is C or S
EPXXVPEKMEPISILYLDENKNVVKFKYENMTVE

SEQ ID NO: 94063 - protein, 32 aa, Artificial Sequence
  Cyclic GFR-binding peptide
  MOD_RES (29)..(31): Xaa is C or S
RLSATSILYYDAANNVVLRKHRDMVVEAXGXR

SEQ ID NO: 94064 - protein, 35 aa, Artificial Sequence; identical to SEQ ID NO: 42752
  Cyclic GFR-binding peptide
  MOD_RES (2)..(3)..(35): Xaa is C or S

SEQ ID NO: 94065 - protein, 37 aa, Artificial Sequence; identical to SEQ ID NO: 7096
  Cyclic GFR-binding peptide
  MOD_RES (4)..(5)..(36): Xaa is C or S

SEQ ID NO: 94066 - protein, 27 aa, Artificial Sequence
  Cyclic GFR-binding peptide
VPQALSPINILYFVGRKPKVYGKIPMI

SEQ ID NO: 94067 - protein, 29 aa, Artificial Sequence
  Cyclic GFR-binding peptide
  MOD_RES (28)..(28): Xaa is C or S
DLNAISILYFIGKTPKILKKYRMIVKSXK

SEQ ID NO: 94068 - protein, 25 aa, Artificial Sequence
  Cyclic GFR-binding peptide
PVKTSPINMLYFDNGRVLLYGKIPM

SEQ ID NO: 94069 - protein, 25 aa, Artificial Sequence
  Cyclic GFR-binding peptide
SATSILYYVGRKPKVLRKHRMIVRS

SEQ ID NO: 94070 - protein, 37 aa, Artificial Sequence; identical to SEQ ID NO: 35495
  Cyclic GFR-binding peptide
  MOD_RES (6)..(7): Xaa is C or S

SEQ ID NO: 94071 - protein, 40 aa, Artificial Sequence; identical to SEQ ID NO: 42763
  Cyclic GFR-binding peptide
  MOD_RES (5)..(6)..(38)..(40): Xaa is C or S

SEQ ID NO: 94072 - protein, 30 aa, Artificial Sequence
  Cyclic GFR-binding peptide
  MOD_RES (3)..(4): Xaa is C or S
EPXXVPEKMNAISILYFDENKNVVLKKYRN

SEQ ID NO: 94073 - protein, 32 aa, Artificial Sequence; identical to SEQ ID NO: 7101
  Cyclic GFR-binding peptide
  MOD_RES (2)..(3): Xaa is C or S

SEQ ID NO: 94074 - protein, 30 aa, Artificial Sequence
  Cyclic GFR-binding peptide
  MOD_RES (28)..(30): Xaa is C or S
MEPISILYLDENKNVVKFKYENMTVESXAX

SEQ ID NO: 94075 - protein, 38 aa, Artificial Sequence; identical to SEQ ID NO: 42767
  Cyclic GFR-binding peptide
  MOD_RES (6)..(7): Xaa is C or S

SEQ ID NO: 94076 - protein, 36 aa, Artificial Sequence; identical to SEQ ID NO: 42769
  Cyclic GFR-binding peptide
  MOD_RES (1)..(33)..(35): Xaa is C or S

SEQ ID NO: 94077 - protein, 28 aa, Artificial Sequence
  Cyclic GFR-binding peptide
  MOD_RES (2)..(2): Xaa is C or S
TXAPTKLSPINVLYFDDSSNVIYGKIPN

SEQ ID NO: 94078 - protein, 34 aa, Artificial Sequence; identical to SEQ ID NO: 7103
  Cyclic GFR-binding peptide
  MOD_RES (32)..(34): Xaa is C or S

SEQ ID NO: 94079 - protein, 38 aa, Artificial Sequence; identical to SEQ ID NO: 35499
  Cyclic GFR-binding peptide
  MOD_RES (3)..(35)..(37): Xaa is C or S

SEQ ID NO: 94080 - protein, 38 aa, Artificial Sequence
  Cyclic GFR-binding peptide
  MOD_RES (6)..(7)..(38): Xaa is C or S
RVPSTXXAPVKTEPISMLYLDNGRVLLKFKYEMIVEEX

SEQ ID NO: 94081 - protein, 23 aa, Artificial Sequence
  Cyclic GFR-binding peptide
LSATSVLYYDDSSNVILRKHRNM

SEQ ID NO: 94082 - protein, 33 aa, Artificial Sequence
  Cyclic GFR-binding peptide
  MOD_RES (32)..(32): Xaa is C or S
VPTKLSATSILYYDKGVVTYLRKHRGMAVSEXG

SEQ ID NO: 94083 - protein, 24 aa, Artificial Sequence
  Cyclic GFR-binding peptide
TKLSPINVLYFDSSNNVIYGKIPN

SEQ ID NO: 94084 - protein, 33 aa, Artificial Sequence; identical to SEQ ID NO: 7110
  Cyclic GFR-binding peptide
  MOD_RES (30)..(32): Xaa is C or S

SEQ ID NO: 94085 - protein, 30 aa, Artificial Sequence; identical to SEQ ID NO: 7111
  Cyclic GFR-binding peptide
  MOD_RES (2)..(3): Xaa is C or S

SEQ ID NO: 94086 - protein, 25 aa, Artificial Sequence
  Cyclic GFR-binding peptide
LEPISILYLIGKTPKIKFKYEMIVK

SEQ ID NO: 94087 - protein, 22 aa, Artificial Sequence
  Cyclic GFR-binding peptide
EPISILYLDAANNVVKFKYEDM

SEQ ID NO: 94088 - protein, 31 aa, Artificial Sequence; identical to SEQ ID NO: 7112
  Cyclic GFR-binding peptide
  MOD_RES (5)..(6): Xaa is C or S

SEQ ID NO: 94089 - protein, 24 aa, Artificial Sequence
  Cyclic GFR-binding peptide
LSPISMLYKDENEKVVLKYHYDMV

SEQ ID NO: 94090 - protein, 30 aa, Artificial Sequence; identical to SEQ ID NO: 7114
  Cyclic GFR-binding peptide
  MOD_RES (27)..(29): Xaa is C or S

SEQ ID NO: 94091 - protein, 35 aa, Artificial Sequence; identical to SEQ ID NO: 42785
  Cyclic GFR-binding peptide
  MOD_RES (3)..(4): Xaa is C or S

SEQ ID NO: 94092 - protein, 37 aa, Artificial Sequence
  Cyclic GFR-binding peptide
  MOD_RES (4)..(5)..(36): Xaa is C or S
PSTXXAPVKTEPISMLYLDNGRVLLKFKYEMIVEEXG

SEQ ID NO: 94093 - protein, 22 aa, Artificial Sequence
  Cyclic GFR-binding peptide
LSATSILYYDKGVVTYLRKHRG

SEQ ID NO: 94094 - protein, 35 aa, Artificial Sequence; identical to SEQ ID NO: 35518
  Cyclic GFR-binding peptide
  MOD_RES (3)..(4): Xaa is C or S

SEQ ID NO: 94095 - protein, 27 aa, Artificial Sequence
  Cyclic GFR-binding peptide
EKMNAISILYFDENKNVVLKKYRNMTV

SEQ ID NO: 94096 - protein, 26 aa, Artificial Sequence
  Cyclic GFR-binding peptide
LEPISVLYLDDMGVPTKFKYEEGMSV

SEQ ID NO: 94097 - protein, 29 aa, Artificial Sequence
  Cyclic GFR-binding peptide
  MOD_RES (3)..(4): Xaa is C or S
SPXXVSQDLSPINILYFIGKTPKIYGKIP

SEQ ID NO: 94098 - protein, 30 aa, Artificial Sequence
  Cyclic GFR-binding peptide
  MOD_RES (2)..(3): Xaa is C or S
PXXVPEKMSPISILYKDENKNVVLKYHYNM

SEQ ID NO: 94099 - protein, 35 aa, Artificial Sequence; identical to SEQ ID NO: 35524
  Cyclic GFR-binding peptide
  MOD_RES (6)..(6): Xaa is C or S

SEQ ID NO: 94100 - protein, 30 aa, Artificial Sequence; identical to SEQ ID NO: 7123
  Cyclic GFR-binding peptide

SEQ ID NO: 94101 - protein, 33 aa, Artificial Sequence; identical to SEQ ID NO: 35526
  Cyclic GFR-binding peptide
  MOD_RES (4)..(5): Xaa is C or S

SEQ ID NO: 94102 - protein, 24 aa, Artificial Sequence
  Cyclic GFR-binding peptide
SQDLNAISILYFIGKTPKILKKYR

SEQ ID NO: 94103 - protein, 31 aa, Artificial Sequence
  Cyclic GFR-binding peptide
  MOD_RES (31)..(31): Xaa is C or S
APVKTEPISMLYLDNGRVLLKFKYEMIVEEX

SEQ ID NO: 94104 - protein, 33 aa, Artificial Sequence; identical to SEQ ID NO: 35529
  Cyclic GFR-binding peptide
  MOD_RES (31)..(33): Xaa is C or S

SEQ ID NO: 94105 - protein, 31 aa, Artificial Sequence; identical to SEQ ID NO: 7129
  Cyclic GFR-binding peptide
  MOD_RES (2)..(3): Xaa is C or S

SEQ ID NO: 94106 - protein, 36 aa, Artificial Sequence; identical to SEQ ID NO: 42798
  Cyclic GFR-binding peptide
  MOD_RES (4)..(5): Xaa is C or S

SEQ ID NO: 94107 - protein, 25 aa, Artificial Sequence
  Cyclic GFR-binding peptide
VPTELSPISMLYKDEYDKVVLKYHY

SEQ ID NO: 94108 - protein, 31 aa, Artificial Sequence; identical to SEQ ID NO: 7134
  Cyclic GFR-binding peptide
  MOD_RES (1)..(1): Xaa is C or S

SEQ ID NO: 94109 - protein, 34 aa, Artificial Sequence; identical to SEQ ID NO: 35537
  Cyclic GFR-binding peptide
  MOD_RES (2)..(34): Xaa is C or S

SEQ ID NO: 94110 - protein, 35 aa, Artificial Sequence
  Cyclic GFR-binding peptide
  MOD_RES (4)..(5): Xaa is C or S
ASPXXVSQDLSPINILYFIGKTPKIYGKIPMIVKS

SEQ ID NO: 94111 - protein, 20 aa, Artificial Sequence
  Cyclic GFR-binding peptide
EPISMLYLDEYDKVVKFKYE

SEQ ID NO: 94112 - protein, 31 aa, Artificial Sequence; identical to SEQ ID NO: 77159
  Cyclic GFR-binding peptide
  MOD_RES (5)..(6): Xaa is C or S

SEQ ID NO: 94113 - protein, 28 aa, Artificial Sequence
  Cyclic GFR-binding peptide
TKMNAISMLYFNDKQQIILKKYRGMVVD

SEQ ID NO: 94114 - protein, 32 aa, Artificial Sequence
  Cyclic GFR-binding peptide
  MOD_RES (2)..(3): Xaa is C or S
PXXVPEKMSATSILYYDENKNVVLRKHRNMTV

SEQ ID NO: 94115 - protein, 33 aa, Artificial Sequence
  Cyclic GFR-binding peptide
  MOD_RES (6)..(7): Xaa is C or S
GIPEPXXVPEKMEPISILYLDENKNVVKFKYEN

SEQ ID NO: 94116 - protein, 31 aa, Artificial Sequence; identical to SEQ ID NO: 42813
  Cyclic GFR-binding peptide
  MOD_RES (3)..(4): Xaa is C or S

SEQ ID NO: 94117 - protein, 29 aa, Artificial Sequence
  Cyclic GFR-binding peptide
  MOD_RES (27)..(29): Xaa is C or S
EPISMLYLDEYDKVVKFKYEEMVVEGXGX

SEQ ID NO: 94118 - protein, 23 aa, Artificial Sequence
  Cyclic GFR-binding peptide
SPINVLYFDDSSNVIYGKIPNMV

SEQ ID NO: 94119 - protein, 32 aa, Artificial Sequence
  Cyclic GFR-binding peptide
  MOD_RES (1)..(1): Xaa is C or S
XVPEKMSPINILYFDENKNVVYGKIPNMTVES

SEQ ID NO: 94120 - protein, 24 aa, Artificial Sequence
  Cyclic GFR-binding peptide
SATSILYYDKGVVTYLRKHRGMAV

SEQ ID NO: 94121 - protein, 39 aa, Artificial Sequence; identical to SEQ ID NO: 35550
  Cyclic GFR-binding peptide
  MOD_RES (5)..(6)..(38): Xaa is C or S

SEQ ID NO: 94122 - protein, 33 aa, Artificial Sequence; identical to SEQ ID NO: 42820
  Cyclic GFR-binding peptide
  MOD_RES (30)..(32): Xaa is C or S

SEQ ID NO: 94123 - protein, 24 aa, Artificial Sequence
  Cyclic GFR-binding peptide
PTRLEPISILYLDSANNVVKFKYE

SEQ ID NO: 94124 - protein, 31 aa, Artificial Sequence; identical to SEQ ID NO: 7144
  Cyclic GFR-binding peptide
  MOD_RES (29)..(31): Xaa is C or S

SEQ ID NO: 94125 - protein, 24 aa, Artificial Sequence
  Cyclic GFR-binding peptide
PVKTSPISMLYKDNGRVLLLKYHY

SEQ ID NO: 94126 - protein, 40 aa, Artificial Sequence; identical to SEQ ID NO: 35556
  Cyclic GFR-binding peptide
  MOD_RES (4)..(5)..(37)..(39): Xaa is C or S

SEQ ID NO: 94127 - protein, 38 aa, Artificial Sequence; identical to SEQ ID NO: 42822
  Cyclic GFR-binding peptide
  MOD_RES (5)..(6)..(38): Xaa is C or S

SEQ ID NO: 94128 - protein, 28 aa, Artificial Sequence
  Cyclic GFR-binding peptide
PTQLSATSVLYYDDSSNVILRKHRNMVV

SEQ ID NO: 94129 - protein, 27 aa, Artificial Sequence
  Cyclic GFR-binding peptide
  MOD_RES (1)..(1): Xaa is C or S
XVPQALSPISILYKVGRKPKVLKYHYM

SEQ ID NO: 94130 - protein, 31 aa, Artificial Sequence
  Cyclic GFR-binding peptide
  MOD_RES (30)..(30): Xaa is C or S
ARLSATSILYYDAANNVVLRKHRDMVVEAXG

SEQ ID NO: 94131 - protein, 29 aa, Artificial Sequence
  Cyclic GFR-binding peptide
  MOD_RES (2)..(3): Xaa is C or S
AXXVPTKLEPISVLYLDDMGVPTKFKYEE

SEQ ID NO: 94132 - protein, 36 aa, Artificial Sequence; identical to SEQ ID NO: 42826
  Cyclic GFR-binding peptide
  MOD_RES (1)..(2)..(34)..(36): Xaa is C or S

SEQ ID NO: 94133 - protein, 23 aa, Artificial Sequence
  Cyclic GFR-binding peptide
EPISILYLVGRTPKVKFKYEMVV

SEQ ID NO: 94134 - protein, 36 aa, Artificial Sequence; identical to SEQ ID NO: 35566
  Cyclic GFR-binding peptide
  MOD_RES (1)..(2)..(34)..(36): Xaa is C or S

SEQ ID NO: 94135 - protein, 40 aa, Artificial Sequence; identical to SEQ ID NO: 7155
  Cyclic GFR-binding peptide
  MOD_RES (5)..(6)..(37)..(39): Xaa is C or S

SEQ ID NO: 94136 - protein, 35 aa, Artificial Sequence; identical to SEQ ID NO: 42834
  Cyclic GFR-binding peptide
  MOD_RES (6)..(7): Xaa is C or S

SEQ ID NO: 94137 - protein, 32 aa, Artificial Sequence; identical to SEQ ID NO: 35571
  Cyclic GFR-binding peptide
  MOD_RES (3)..(4): Xaa is C or S

SEQ ID NO: 94138 - protein, 26 aa, Artificial Sequence
  Cyclic GFR-binding peptide
LSPINVLYFDDMGVPTYGKIPEGMSV

SEQ ID NO: 94139 - protein, 25 aa, Artificial Sequence
  Cyclic GFR-binding peptide
TEPISMLYLDNGRVLLKFKYEMIVE

SEQ ID NO: 94140 - protein, 38 aa, Artificial Sequence; identical to SEQ ID NO: 7161
  Cyclic GFR-binding peptide
  MOD_RES (4)..(5)..(37): Xaa is C or S

SEQ ID NO: 94141 - protein, 41 aa, Artificial Sequence; identical to SEQ ID NO: 7163
  Cyclic GFR-binding peptide
  MOD_RES (6)..(7)..(39)..(41): Xaa is C or S

SEQ ID NO: 94142 - protein, 24 aa, Artificial Sequence
  Cyclic GFR-binding peptide
TKMNAISMLYFNDKQQIILKKYRG

SEQ ID NO: 94143 - protein, 37 aa, Artificial Sequence; identical to SEQ ID NO: 7165
  Cyclic GFR-binding peptide
  MOD_RES (4)..(5)..(37): Xaa is C or S

SEQ ID NO: 94144 - protein, 36 aa, Artificial Sequence
  Cyclic GFR-binding peptide
  MOD_RES (1)..(33)..(35): Xaa is C or S
XVPTRLSPISILYKDSANNVVLKYHYDMVVESXGXR

SEQ ID NO: 94145 - protein, 35 aa, Artificial Sequence; identical to SEQ ID NO: 7166
  Cyclic GFR-binding peptide
  MOD_RES (1)..(2)..(33)..(35): Xaa is C or S

SEQ ID NO: 94146 - protein, 38 aa, Artificial Sequence; identical to SEQ ID NO: 7168
  Cyclic GFR-binding peptide
  MOD_RES (4)..(5)..(37): Xaa is C or S

SEQ ID NO: 94147 - protein, 38 aa, Artificial Sequence; identical to SEQ ID NO: 7171
  Cyclic GFR-binding peptide
  MOD_RES (6)..(7): Xaa is C or S

SEQ ID NO: 94148 - protein, 22 aa, Artificial Sequence
  Cyclic GFR-binding peptide
RLSATSILYYDAANNVVLRKHR

SEQ ID NO: 94149 - protein, 28 aa, Artificial Sequence
  Cyclic GFR-binding peptide
  MOD_RES (1)..(2): Xaa is C or S
XXAPTKLSPINVLYFDSSNNVIYGKIPN

SEQ ID NO: 94150 - protein, 21 aa, Artificial Sequence
  Cyclic GFR-binding peptide
MEPISMLYLNDKQQIIKFKYE

SEQ ID NO: 94151 - protein, 33 aa, Artificial Sequence
  Cyclic GFR-binding peptide
  MOD_RES (32)..(32): Xaa is C or S
VPEKMNAISILYFDENKNVVLKKYRNMTVESXA

SEQ ID NO: 94152 - protein, 24 aa, Artificial Sequence
  Cyclic GFR-binding peptide
VKTSPINMLYFDNGRVLLYGKIPM

SEQ ID NO: 94153 - protein, 38 aa, Artificial Sequence; identical to SEQ ID NO: 7177
  Cyclic GFR-binding peptide
  MOD_RES (3)..(4)..(35)..(37): Xaa is C or S

SEQ ID NO: 94154 - protein, 27 aa, Artificial Sequence
  Cyclic GFR-binding peptide
APVKTNAISMLYFDNGRVLLLKKYRMI

SEQ ID NO: 94155 - protein, 27 aa, Artificial Sequence
  Cyclic GFR-binding peptide
TKLSPINILYFDKGVVTYYGKIPGMAV

SEQ ID NO: 94156 - protein, 22 aa, Artificial Sequence
  Cyclic GFR-binding peptide
LSPISMLYKDENEKVVLKYHYD

SEQ ID NO: 94157 - protein, 30 aa, Artificial Sequence; identical to SEQ ID NO: 35590
  Cyclic GFR-binding peptide
  MOD_RES (29)..(29): Xaa is C or S

SEQ ID NO: 94158 - protein, 31 aa, Artificial Sequence; identical to SEQ ID NO: 42873
  Cyclic GFR-binding peptide
  MOD_RES (5)..(6): Xaa is C or S

SEQ ID NO: 94159 - protein, 33 aa, Artificial Sequence; identical to SEQ ID NO: 42874
  Cyclic GFR-binding peptide
  MOD_RES (5)..(6): Xaa is C or S

SEQ ID NO: 94160 - protein, 26 aa, Artificial Sequence
  Cyclic GFR-binding peptide
ELEPISMLYLDEYDKVVKFKYEEMVV

SEQ ID NO: 94161 - protein, 41 aa, Artificial Sequence; identical to SEQ ID NO: 7181
  Cyclic GFR-binding peptide
  MOD_RES (7)..(39)..(41): Xaa is C or S

SEQ ID NO: 94162 - protein, 33 aa, Artificial Sequence
  Cyclic GFR-binding peptide
  MOD_RES (3)..(4): Xaa is C or S
EPXXVPEKMNAISILYFDENKNVVLKKYRNMTV

SEQ ID NO: 94163 - protein, 41 aa, Artificial Sequence; identical to SEQ ID NO: 7184
  Cyclic GFR-binding peptide
  MOD_RES (6)..(7)..(39)..(41): Xaa is C or S

SEQ ID NO: 94164 - protein, 27 aa, Artificial Sequence
  Cyclic GFR-binding peptide
  MOD_RES (26)..(26): Xaa is C or S
EPISILYLIGKTPKIKFKYEMIVKSXK

SEQ ID NO: 94165 - protein, 38 aa, Artificial Sequence; identical to SEQ ID NO: 35601
  Cyclic GFR-binding peptide
  MOD_RES (4)..(36)..(38): Xaa is C or S

SEQ ID NO: 94166 - protein, 41 aa, Artificial Sequence; identical to SEQ ID NO: 7190
  Cyclic GFR-binding peptide
  MOD_RES (6)..(38)..(40): Xaa is C or S

SEQ ID NO: 94167 - protein, 21 aa, Artificial Sequence
  Cyclic GFR-binding peptide
TSPISMLYKDNGRVLLLKYHY

SEQ ID NO: 94168 - protein, 24 aa, Artificial Sequence
  Cyclic GFR-binding peptide
QLSATSVLYYDDSSNVILRKHRNM

SEQ ID NO: 94169 - protein, 25 aa, Artificial Sequence
  Cyclic GFR-binding peptide
TKLSPISVLYKDSSNNVILKYHYNM

SEQ ID NO: 94170 - protein, 35 aa, Artificial Sequence; identical to SEQ ID NO: 7193
  Cyclic GFR-binding peptide
  MOD_RES (4)..(5): Xaa is C or S

SEQ ID NO: 94171 - protein, 31 aa, Artificial Sequence
  Cyclic GFR-binding peptide
VPEKMEPISILYLDENKNVVKFKYENMTVES

SEQ ID NO: 94172 - protein, 24 aa, Artificial Sequence
  Cyclic GFR-binding peptide
PEKMSPINILYFDENKNVVYGKIP

SEQ ID NO: 94173 - protein, 27 aa, Artificial Sequence
  Cyclic GFR-binding peptide
TKLEPISVLYLDDSSNVIKFKYENMVV

SEQ ID NO: 94174 - protein, 24 aa, Artificial Sequence
  Cyclic GFR-binding peptide
LSPISILYKDAANNVVLKYHYDMV

SEQ ID NO: 94175 - protein, 38 aa, Artificial Sequence
  Cyclic GFR-binding peptide
  MOD_RES (2)..(3)..(35)..(37): Xaa is C or S
TXXVPTRLEPISILYLDSANNVVKFKYEDMVVESXGXR

SEQ ID NO: 94176 - protein, 32 aa, Artificial Sequence; identical to SEQ ID NO: 7207
  Cyclic GFR-binding peptide
  MOD_RES (1)..(2): Xaa is C or S

SEQ ID NO: 94177 - protein, 28 aa, Artificial Sequence
  Cyclic GFR-binding peptide
PQALEPISILYLVGRKPKVKFKYEMIVR

SEQ ID NO: 94178 - protein, 26 aa, Artificial Sequence
  Cyclic GFR-binding peptide
ELSPISMLYKDENEKVVLKYHYDMVV

SEQ ID NO: 94179 - protein, 25 aa, Artificial Sequence
  Cyclic GFR-binding peptide
KLSPINILYFDKGVVTYYGKIPGMA

SEQ ID NO: 94180 - protein, 29 aa, Artificial Sequence
  Cyclic GFR-binding peptide
  MOD_RES (3)..(4): Xaa is C or S
KAXXVPTELNAISMLYFDENEKVVLKKYR

SEQ ID NO: 94181 - protein, 32 aa, Artificial Sequence
  Cyclic GFR-binding peptide
  MOD_RES (6)..(7): Xaa is C or S
RVPSTXXAPVKTSPISMLYKDNGRVLLLKYHY

SEQ ID NO: 94182 - protein, 37 aa, Artificial Sequence
  Cyclic GFR-binding peptide
  MOD_RES (1)..(2)..(34)..(36): Xaa is C or S
XXVPTRLEPISILYLDSANNVVKFKYEDMVVESXGXR

SEQ ID NO: 94183 - protein, 31 aa, Artificial Sequence
  Cyclic GFR-binding peptide
VPARLSATSILYYDAANNVVLRKHRDMVVEA

SEQ ID NO: 94184 - protein, 33 aa, Artificial Sequence; identical to SEQ ID NO: 42917
  Cyclic GFR-binding peptide
  MOD_RES (5)..(5): Xaa is C or S

SEQ ID NO: 94185 - protein, 27 aa, Artificial Sequence
  Cyclic GFR-binding peptide
  MOD_RES (1)..(2): Xaa is C or S
XXAPVKTNAISMLYFDNGRVLLLKKYR

SEQ ID NO: 94186 - protein, 26 aa, Artificial Sequence
  Cyclic GFR-binding peptide
PTELSPISMLYKDENEKVVLKYHYDM

SEQ ID NO: 94187 - protein, 35 aa, Artificial Sequence
  Cyclic GFR-binding peptide
  MOD_RES (4)..(5): Xaa is C or S
PEPXXVPEKMSPISILYKDENKNVVLKYHYNMTVE

SEQ ID NO: 94188 - protein, 23 aa, Artificial Sequence
  Cyclic GFR-binding peptide
QDLNAISILYFVGRTPKVLKKYR

SEQ ID NO: 94189 - protein, 34 aa, Artificial Sequence; identical to SEQ ID NO: 7221
  Cyclic GFR-binding peptide
  MOD_RES (4)..(5): Xaa is C or S

SEQ ID NO: 94190 - protein, 36 aa, Artificial Sequence; identical to SEQ ID NO: 7223
  Cyclic GFR-binding peptide
  MOD_RES (4)..(5)..(36): Xaa is C or S

SEQ ID NO: 94191 - protein, 29 aa, Artificial Sequence
  Cyclic GFR-binding peptide
  MOD_RES (3)..(4): Xaa is C or S
ASXXVPARLNAISILYFDAANNVVLKKYR

SEQ ID NO: 94192 - protein, 30 aa, Artificial Sequence; identical to SEQ ID NO: 35647
  Cyclic GFR-binding peptide
  MOD_RES (4)..(5): Xaa is C or S

SEQ ID NO: 94193 - protein, 24 aa, Artificial Sequence
  Cyclic GFR-binding peptide
LSATSMLYYDENEKVVLRKHRDMV

SEQ ID NO: 94194 - protein, 27 aa, Artificial Sequence
  Cyclic GFR-binding peptide
DLNAISILYFIGKTPKILKKYRMIVKS

SEQ ID NO: 94195 - protein, 20 aa, Artificial Sequence
  Cyclic GFR-binding peptide
SATSVLYYDDMGVPTLRKHR

SEQ ID NO: 94196 - protein, 31 aa, Artificial Sequence
  Cyclic GFR-binding peptide
  MOD_RES (3)..(4): Xaa is C or S
ASXXVPARLSATSILYYDAANNVVLRKHRDM

SEQ ID NO: 94197 - protein, 33 aa, Artificial Sequence
  Cyclic GFR-binding peptide
  MOD_RES (30)..(32): Xaa is C or S
TKMSATSMLYYNDKQQIILRKHRGMVVDRXGXS

SEQ ID NO: 94198 - protein, 36 aa, Artificial Sequence; identical to SEQ ID NO: 77211
  Cyclic GFR-binding peptide
  MOD_RES (2)..(3)..(35): Xaa is C or S

SEQ ID NO: 94199 - protein, 31 aa, Artificial Sequence
  Cyclic GFR-binding peptide
  MOD_RES (1)..(2): Xaa is C or S
XXAPVKTSPISMLYKDNGRVLLLKYHYMIVE

SEQ ID NO: 94200 - protein, 36 aa, Artificial Sequence; identical to SEQ ID NO: 35658
  Cyclic GFR-binding peptide
  MOD_RES (3)..(4): Xaa is C or S

SEQ ID NO: 94201 - protein, 27 aa, Artificial Sequence
  Cyclic GFR-binding peptide
  MOD_RES (27)..(27): Xaa is C or S
SATSMLYYNDKQQIILRKHRGMVVDRX

SEQ ID NO: 94202 - protein, 22 aa, Artificial Sequence
  Cyclic GFR-binding peptide
KLSPISVLYKDDSSNVILKYHY

SEQ ID NO: 94203 - protein, 33 aa, Artificial Sequence; identical to SEQ ID NO: 7237
  Cyclic GFR-binding peptide
  MOD_RES (1)..(2)..(33): Xaa is C or S

SEQ ID NO: 94204 - protein, 34 aa, Artificial Sequence
  Cyclic GFR-binding peptide
  MOD_RES (3)..(4): Xaa is C or S
EPXXVPEKMSATSILYYDENKNVVLRKHRNMTVE

SEQ ID NO: 94205 - protein, 36 aa, Artificial Sequence; identical to SEQ ID NO: 42940
  Cyclic GFR-binding peptide
  MOD_RES (2)..(3)..(35): Xaa is C or S

SEQ ID NO: 94206 - protein, 35 aa, Artificial Sequence; identical to SEQ ID NO: 42944
  Cyclic GFR-binding peptide
  MOD_RES (4)..(5): Xaa is C or S

SEQ ID NO: 94207 - protein, 25 aa, Artificial Sequence
  Cyclic GFR-binding peptide
VSQDLSPISILYKIGKTPKILKYHY

SEQ ID NO: 94208 - protein, 31 aa, Artificial Sequence
  Cyclic GFR-binding peptide
  MOD_RES (28)..(30): Xaa is C or S
MEPISMLYLNDKQQIIKFKYEGMVVDRXGXS

SEQ ID NO: 94209 - protein, 39 aa, Artificial Sequence; identical to SEQ ID NO: 7243
  Cyclic GFR-binding peptide
  MOD_RES (5)..(6)..(38): Xaa is C or S

SEQ ID NO: 94210 - protein, 37 aa, Artificial Sequence; identical to SEQ ID NO: 7244
  Cyclic GFR-binding peptide
  MOD_RES (3)..(4)..(36): Xaa is C or S

SEQ ID NO: 94211 - protein, 21 aa, Artificial Sequence
  Cyclic GFR-binding peptide
LNAISILYFDSANNVVLKKYR

SEQ ID NO: 94212 - protein, 24 aa, Artificial Sequence
  Cyclic GFR-binding peptide
DLSPINILYFVGRTPKVYGKIPMV

SEQ ID NO: 94213 - protein, 31 aa, Artificial Sequence
  Cyclic GFR-binding peptide
  MOD_RES (30)..(30): Xaa is C or S
EKMEPISILYLDENKNVVKFKYENMTVESXA

SEQ ID NO: 94214 - protein, 26 aa, Artificial Sequence
  Cyclic GFR-binding peptide
MSATSILYYDENKNVVLRKHRNMTVE

SEQ ID NO: 94215 - protein, 32 aa, Artificial Sequence
  Cyclic GFR-binding peptide
  MOD_RES (4)..(5): Xaa is C or S
AGPXXTPTKMSPISMLYKNDKQQIILKYHYGM

SEQ ID NO: 94216 - protein, 32 aa, Artificial Sequence
  Cyclic GFR-binding peptide
  MOD_RES (30)..(32): Xaa is C or S
EKMNAISILYFDENKNVVLKKYRNMTVESXAX

SEQ ID NO: 94217 - protein, 30 aa, Artificial Sequence
  Cyclic GFR-binding peptide
  MOD_RES (28)..(30): Xaa is C or S
LSATSILYYDKGVVTYLRKHRGMAVSEXGX

SEQ ID NO: 94218 - protein, 36 aa, Artificial Sequence; identical to SEQ ID NO: 42952
  Cyclic GFR-binding peptide
  MOD_RES (2)..(3)..(35): Xaa is C or S

SEQ ID NO: 94219 - protein, 36 aa, Artificial Sequence; identical to SEQ ID NO: 7249
  Cyclic GFR-binding peptide
  MOD_RES (1)..(33)..(35): Xaa is C or S

SEQ ID NO: 94220 - protein, 29 aa, Artificial Sequence
  Cyclic GFR-binding peptide
VPTRLEPISILYLDSANNVVKFKYEDMVV

SEQ ID NO: 94221 - protein, 34 aa, Artificial Sequence; identical to SEQ ID NO: 42955
  Cyclic GFR-binding peptide
  MOD_RES (3)..(4): Xaa is C or S

SEQ ID NO: 94222 - protein, 39 aa, Artificial Sequence; identical to SEQ ID NO: 7250
  Cyclic GFR-binding peptide
  MOD_RES (4)..(5)..(37)..(39): Xaa is C or S

SEQ ID NO: 94223 - protein, 22 aa, Artificial Sequence
  Cyclic GFR-binding peptide
KLEPISVLYLDDMGVPTKFKYE

SEQ ID NO: 94224 - protein, 30 aa, Artificial Sequence; identical to SEQ ID NO: 42958
  Cyclic GFR-binding peptide
  MOD_RES (4)..(4): Xaa is C or S

SEQ ID NO: 94225 - protein, 27 aa, Artificial Sequence
  Cyclic GFR-binding peptide
RLSATSILYYDAANNVVLRKHRDMVVE

SEQ ID NO: 94226 - protein, 27 aa, Artificial Sequence
  Cyclic GFR-binding peptide
TQLSPISVLYKDDSSNVILKYHYNMVV

SEQ ID NO: 94227 - protein, 24 aa, Artificial Sequence
  Cyclic GFR-binding peptide
TELSPISMLYKDENEKVVLKYHYD

SEQ ID NO: 94228 - protein, 34 aa, Artificial Sequence; identical to SEQ ID NO: 7254
  Cyclic GFR-binding peptide
  MOD_RES (33)..(33): Xaa is C or S

SEQ ID NO: 94229 - protein, 30 aa, Artificial Sequence; identical to SEQ ID NO: 7255
  Cyclic GFR-binding peptide
  MOD_RES (4)..(5): Xaa is C or S

SEQ ID NO: 94230 - protein, 29 aa, Artificial Sequence
  Cyclic GFR-binding peptide
  MOD_RES (1)..(2): Xaa is C or S
XXVPTRLSATSILYYDSANNVVLRKHRDM

SEQ ID NO: 94231 - protein, 31 aa, Artificial Sequence; identical to SEQ ID NO: 7257
  Cyclic GFR-binding peptide
  MOD_RES (1)..(2): Xaa is C or S

SEQ ID NO: 94232 - protein, 30 aa, Artificial Sequence
  Cyclic GFR-binding peptide
  MOD_RES (29)..(29): Xaa is C or S
KMEPISILYLDENKNVVKFKYENMTVESXA

SEQ ID NO: 94233 - protein, 28 aa, Artificial Sequence
  Cyclic GFR-binding peptide
ELSPISMLYKDENEKVVLKYHYDMVVEG

SEQ ID NO: 94234 - protein, 40 aa, Artificial Sequence
  Cyclic GFR-binding peptide
  MOD_RES (4)..(5)..(37)..(39): Xaa is C or S
PPTXXVPTRLSATSILYYDSANNVVLRKHRDMVVESXGXR

SEQ ID NO: 94235 - protein, 25 aa, Artificial Sequence
  Cyclic GFR-binding peptide
PTKMNAISMLYFNDKQQIILKKYRG

SEQ ID NO: 94236 - protein, 24 aa, Artificial Sequence
  Cyclic GFR-binding peptide
SPISILYKIGKTPKILKYHYMIVK

SEQ ID NO: 94237 - protein, 27 aa, Artificial Sequence
  Cyclic GFR-binding peptide
  MOD_RES (27)..(27): Xaa is C or S
EPISVLYLDSSNNVIKFKYENMVVKAX

SEQ ID NO: 94238 - protein, 27 aa, Artificial Sequence
  Cyclic GFR-binding peptide
  MOD_RES (1)..(2): Xaa is C or S
XXVSQDLNAISILYFIGKTPKILKKYR

SEQ ID NO: 94239 - protein, 30 aa, Artificial Sequence
  Cyclic GFR-binding peptide
  MOD_RES (1)..(2): Xaa is C or S
XXVPTRLSPISILYKDSANNVVLKYHYDMV

SEQ ID NO: 94240 - protein, 30 aa, Artificial Sequence; identical to SEQ ID NO: 35696
  Cyclic GFR-binding peptide
  MOD_RES (3)..(4): Xaa is C or S

SEQ ID NO: 94241 - protein, 39 aa, Artificial Sequence; identical to SEQ ID NO: 42975
  Cyclic GFR-binding peptide
  MOD_RES (4)..(5)..(37)..(39): Xaa is C or S

SEQ ID NO: 94242 - protein, 35 aa, Artificial Sequence; identical to SEQ ID NO: 7268
  Cyclic GFR-binding peptide
  MOD_RES (3)..(4)..(35): Xaa is C or S

SEQ ID NO: 94243 - protein, 34 aa, Artificial Sequence; identical to SEQ ID NO: 7269
  Cyclic GFR-binding peptide
  MOD_RES (2)..(3): Xaa is C or S

SEQ ID NO: 94244 - protein, 40 aa, Artificial Sequence
  Cyclic GFR-binding peptide
  MOD_RES (5)..(6)..(37)..(39): Xaa is C or S
SASPXXVPQDLSPINILYFVGRTPKVYGKIPMVVKSXKXS

SEQ ID NO: 94245 - protein, 36 aa, Artificial Sequence; identical to SEQ ID NO: 35703
  Cyclic GFR-binding peptide
  MOD_RES (4)..(5): Xaa is C or S

SEQ ID NO: 94246 - protein, 33 aa, Artificial Sequence
  Cyclic GFR-binding peptide
  MOD_RES (4)..(5): Xaa is C or S
PEPXXVPEKMSATSILYYDENKNVVLRKHRNMT

SEQ ID NO: 94247 - protein, 32 aa, Artificial Sequence; identical to SEQ ID NO: 35704
  Cyclic GFR-binding peptide
  MOD_RES (1)..(2): Xaa is C or S

SEQ ID NO: 94248 - protein, 32 aa, Artificial Sequence; identical to SEQ ID NO: 7272
  Cyclic GFR-binding peptide
  MOD_RES (31)..(31): Xaa is C or S

SEQ ID NO: 94249 - protein, 37 aa, Artificial Sequence; identical to SEQ ID NO: 7277
  Cyclic GFR-binding peptide
  MOD_RES (6)..(6): Xaa is C or S

SEQ ID NO: 94250 - protein, 36 aa, Artificial Sequence; identical to SEQ ID NO: 35708
  Cyclic GFR-binding peptide
  MOD_RES (5)..(6): Xaa is C or S

SEQ ID NO: 94251 - protein, 32 aa, Artificial Sequence
  Cyclic GFR-binding peptide
  MOD_RES (30)..(32): Xaa is C or S
TKMSATSMLYYNDKQQIILRKHRGMVVDRXGX

SEQ ID NO: 94252 - protein, 27 aa, Artificial Sequence
  Cyclic GFR-binding peptide
QDLEPISILYLIGKTPKIKFKYEMIVK

SEQ ID NO: 94253 - protein, 34 aa, Artificial Sequence; identical to SEQ ID NO: 42986
  Cyclic GFR-binding peptide
  MOD_RES (1)..(2)..(34): Xaa is C or S

SEQ ID NO: 94254 - protein, 28 aa, Artificial Sequence
  Cyclic GFR-binding peptide
  MOD_RES (1)..(2): Xaa is C or S
XXVPTELNAISMLYFDENEKVVLKKYRD

SEQ ID NO: 94255 - protein, 34 aa, Artificial Sequence; identical to SEQ ID NO: 7282
  Cyclic GFR-binding peptide
  MOD_RES (4)..(5): Xaa is C or S

SEQ ID NO: 94256 - protein, 31 aa, Artificial Sequence; identical to SEQ ID NO: 7285
  Cyclic GFR-binding peptide
  MOD_RES (3)..(4): Xaa is C or S

SEQ ID NO: 94257 - protein, 27 aa, Artificial Sequence
  Cyclic GFR-binding peptide
  MOD_RES (27)..(27): Xaa is C or S
SATSVLYYDDSSNVILRKHRNMVVRSX

SEQ ID NO: 94258 - protein, 29 aa, Artificial Sequence
  Cyclic GFR-binding peptide
PQDLSATSILYYVGRTPKVLRKHRMVVKS

SEQ ID NO: 94259 - protein, 24 aa, Artificial Sequence
  Cyclic GFR-binding peptide
NAISMLYFDENEKVVLKKYRDMVV

SEQ ID NO: 94260 - protein, 27 aa, Artificial Sequence
  Cyclic GFR-binding peptide
  MOD_RES (1)..(2): Xaa is C or S
XXVPQDLSATSILYYVGRTPKVLRKHR

SEQ ID NO: 94261 - protein, 25 aa, Artificial Sequence
  Cyclic GFR-binding peptide
LSATSILYYDAANNVVLRKHRDMVV

SEQ ID NO: 94262 - protein, 40 aa, Artificial Sequence; identical to SEQ ID NO: 42998
  Cyclic GFR-binding peptide
  MOD_RES (4)..(5)..(37)..(39): Xaa is C or S

SEQ ID NO: 94263 - protein, 28 aa, Artificial Sequence
  Cyclic GFR-binding peptide
VPTRLSPINILYFDSANNVVYGKIPDMV

SEQ ID NO: 94264 - protein, 31 aa, Artificial Sequence; identical to SEQ ID NO: 7301
  Cyclic GFR-binding peptide
  MOD_RES (5)..(6): Xaa is C or S

SEQ ID NO: 94265 - protein, 32 aa, Artificial Sequence
  Cyclic GFR-binding peptide
  MOD_RES (1)..(1): Xaa is C or S
XVPEKMEPISILYLDENKNVVKFKYENMTVES

SEQ ID NO: 94266 - protein, 24 aa, Artificial Sequence
  Cyclic GFR-binding peptide
ELSPINMLYFDENEKVVYGKIPDM

SEQ ID NO: 94267 - protein, 32 aa, Artificial Sequence; identical to SEQ ID NO: 35730
  Cyclic GFR-binding peptide
  MOD_RES (5)..(6): Xaa is C or S

SEQ ID NO: 94268 - protein, 26 aa, Artificial Sequence
  Cyclic GFR-binding peptide
TELSPISMLYKDEYDKVVLKYHYEMV

SEQ ID NO: 94269 - protein, 26 aa, Artificial Sequence
  Cyclic GFR-binding peptide
SPINILYFDKGVVTYYGKIPGMAVSE

SEQ ID NO: 94270 - protein, 26 aa, Artificial Sequence
  Cyclic GFR-binding peptide
PTKLSPINILYFDKGVVTYYGKIPGM

SEQ ID NO: 94271 - protein, 34 aa, Artificial Sequence
  Cyclic GFR-binding peptide
  MOD_RES (6)..(7): Xaa is C or S
KASKAXXVPTKLSATSILYYDKGVVTYLRKHRGM

SEQ ID NO: 94272 - protein, 28 aa, Artificial Sequence
  Cyclic GFR-binding peptide
  MOD_RES (27)..(27): Xaa is C or S
SPINVLYFDDSSNVIYGKIPNMVVRAXG

SEQ ID NO: 94273 - protein, 42 aa, Artificial Sequence; identical to SEQ ID NO: 35737
  Cyclic GFR-binding peptide
  MOD_RES (5)..(6)..(39)..(41): Xaa is C or S

SEQ ID NO: 94274 - protein, 35 aa, Artificial Sequence; identical to SEQ ID NO: 35738
  Cyclic GFR-binding peptide
  MOD_RES (32)..(34): Xaa is C or S

SEQ ID NO: 94275 - protein, 28 aa, Artificial Sequence
  Cyclic GFR-binding peptide
  MOD_RES (28)..(28): Xaa is C or S
DLEPISILYLVGRTPKVKFKYEMVVKSX

SEQ ID NO: 94276 - protein, 28 aa, Artificial Sequence
  Cyclic GFR-binding peptide
KMEPISMLYLNDKQQIIKFKYEGMVVDR

SEQ ID NO: 94277 - protein, 42 aa, Artificial Sequence; identical to SEQ ID NO: 7307
  Cyclic GFR-binding peptide
  MOD_RES (6)..(7)..(39)..(41): Xaa is C or S

SEQ ID NO: 94278 - protein, 29 aa, Artificial Sequence
  Cyclic GFR-binding peptide
  MOD_RES (27)..(29): Xaa is C or S
SATSVLYYDDSSNVILRKHRNMVVRAXGX

SEQ ID NO: 94279 - protein, 33 aa, Artificial Sequence
  Cyclic GFR-binding peptide
  MOD_RES (32)..(32): Xaa is C or S
VPARLSATSILYYDAANNVVLRKHRDMVVEAXG

SEQ ID NO: 94280 - protein, 33 aa, Artificial Sequence
  Cyclic GFR-binding peptide
  MOD_RES (30)..(32): Xaa is C or S
SQDLSPINILYFIGKTPKIYGKIPMIVKSXKXS

SEQ ID NO: 94281 - protein, 32 aa, Artificial Sequence
  Cyclic GFR-binding peptide
  MOD_RES (3)..(4): Xaa is C or S
STXXAPVKTEPISMLYLDNGRVLLKFKYEMIV

SEQ ID NO: 94282 - protein, 37 aa, Artificial Sequence; identical to SEQ ID NO: 7316
  Cyclic GFR-binding peptide
  MOD_RES (4)..(5)..(36): Xaa is C or S

SEQ ID NO: 94283 - protein, 25 aa, Artificial Sequence
  Cyclic GFR-binding peptide
PTKLSPINVLYFDSSNNVIYGKIPN

SEQ ID NO: 94284 - protein, 28 aa, Artificial Sequence
  Cyclic GFR-binding peptide
  MOD_RES (2)..(3): Xaa is C or S
PXXAPTQLSPISVLYKDDSSNVILKYHY

SEQ ID NO: 94285 - protein, 33 aa, Artificial Sequence; identical to SEQ ID NO: 7319
  Cyclic GFR-binding peptide
  MOD_RES (5)..(6): Xaa is C or S

SEQ ID NO: 94286 - protein, 34 aa, Artificial Sequence; identical to SEQ ID NO: 35748
  Cyclic GFR-binding peptide
  MOD_RES (2)..(3)..(34): Xaa is C or S

SEQ ID NO: 94287 - protein, 29 aa, Artificial Sequence
  Cyclic GFR-binding peptide
  MOD_RES (1)..(2): Xaa is C or S
XXAPVKTNAISMLYFDNGRVLLLKKYRMI

SEQ ID NO: 94288 - protein, 31 aa, Artificial Sequence; identical to SEQ ID NO: 7321
  Cyclic GFR-binding peptide
  MOD_RES (4)..(5): Xaa is C or S

SEQ ID NO: 94289 - protein, 28 aa, Artificial Sequence
  Cyclic GFR-binding peptide
  MOD_RES (1)..(2): Xaa is C or S
XXVPTELNAISMLYFDEYDKVVLKKYRE

SEQ ID NO: 94290 - protein, 32 aa, Artificial Sequence; identical to SEQ ID NO: 77256
  Cyclic GFR-binding peptide
  MOD_RES (1)..(32): Xaa is C or S

SEQ ID NO: 94291 - protein, 31 aa, Artificial Sequence
  Cyclic GFR-binding peptide
  MOD_RES (28)..(30): Xaa is C or S
MEPISILYLDENKNVVKFKYENMTVESXAXR

SEQ ID NO: 94292 - protein, 32 aa, Artificial Sequence
  Cyclic GFR-binding peptide
  MOD_RES (31)..(31): Xaa is C or S
PTKMSPISMLYKNDKQQIILKYHYGMVVDRXG

SEQ ID NO: 94293 - protein, 34 aa, Artificial Sequence
  Cyclic GFR-binding peptide
  MOD_RES (5)..(6): Xaa is C or S
TPPTXXVPTRLSPISILYKDSANNVVLKYHYDMV

SEQ ID NO: 94294 - protein, 26 aa, Artificial Sequence
  Cyclic GFR-binding peptide
QLSATSVLYYDDSSNVILRKHRNMVV

SEQ ID NO: 94295 - protein, 29 aa, Artificial Sequence
  Cyclic GFR-binding peptide
  MOD_RES (1)..(1): Xaa is C or S
XAPVKTNAISMLYFDNGRVLLLKKYRMIV

SEQ ID NO: 94296 - protein, 27 aa, Artificial Sequence
  Cyclic GFR-binding peptide
  MOD_RES (1)..(2): Xaa is C or S
XXVPEKMNAISILYFDENKNVVLKKYR

SEQ ID NO: 94297 - protein, 28 aa, Artificial Sequence
  Cyclic GFR-binding peptide
  MOD_RES (27)..(27): Xaa is C or S
SPISILYKDAANNVVLKYHYDMVVEAXG

SEQ ID NO: 94298 - protein, 30 aa, Artificial Sequence; identical to SEQ ID NO: 7329
  Cyclic GFR-binding peptide
  MOD_RES (29)..(29): Xaa is C or S

SEQ ID NO: 94299 - protein, 35 aa, Artificial Sequence; identical to SEQ ID NO: 35759
  Cyclic GFR-binding peptide
  MOD_RES (3)..(4): Xaa is C or S

SEQ ID NO: 94300 - protein, 27 aa, Artificial Sequence
  Cyclic GFR-binding peptide
QLSPISVLYKDDSSNVILKYHYNMVVR

SEQ ID NO: 94301 - protein, 33 aa, Artificial Sequence; identical to SEQ ID NO: 7332
  Cyclic GFR-binding peptide
  MOD_RES (1)..(2): Xaa is C or S

SEQ ID NO: 94302 - protein, 37 aa, Artificial Sequence
  Cyclic GFR-binding peptide
  MOD_RES (2)..(3)..(35)..(37): Xaa is C or S
PXXVPEKMSPISILYKDENKNVVLKYHYNMTVESXAX

SEQ ID NO: 94303 - protein, 33 aa, Artificial Sequence
  Cyclic GFR-binding peptide
  MOD_RES (1)..(2)..(33): Xaa is C or S
XXAPVKTSATSMLYYDNGRVLLLRKHRMIVEEX

SEQ ID NO: 94304 - protein, 20 aa, Artificial Sequence
  Cyclic GFR-binding peptide
SPINILYFVGRKPKVYGKIP

SEQ ID NO: 94305 - protein, 22 aa, Artificial Sequence
  Cyclic GFR-binding peptide
DLSPISILYKVGRTPKVLKYHY

SEQ ID NO: 94306 - protein, 28 aa, Artificial Sequence
  Cyclic GFR-binding peptide
VPTKLSATSILYYDKGVVTYLRKHRGMA

SEQ ID NO: 94307 - protein, 26 aa, Artificial Sequence
  Cyclic GFR-binding peptide
ELSATSMLYYDENEKVVLRKHRDMVV

SEQ ID NO: 94308 - protein, 31 aa, Artificial Sequence; identical to SEQ ID NO: 43037
  Cyclic GFR-binding peptide
  MOD_RES (1)..(1): Xaa is C or S

SEQ ID NO: 94309 - protein, 26 aa, Artificial Sequence
  Cyclic GFR-binding peptide
TQLSPISVLYKDDSSNVILKYHYNMV

SEQ ID NO: 94310 - protein, 36 aa, Artificial Sequence
  Cyclic GFR-binding peptide
  MOD_RES (1)..(33)..(35): Xaa is C or S
XVPEKMEPISILYLDENKNVVKFKYENMTVESXAXR

SEQ ID NO: 94311 - protein, 28 aa, Artificial Sequence
  Cyclic GFR-binding peptide
QDLSPINILYFIGKTPKIYGKIPMIVKS

SEQ ID NO: 94312 - protein, 35 aa, Artificial Sequence; identical to SEQ ID NO: 77265
  Cyclic GFR-binding peptide
  MOD_RES (1)..(32)..(34): Xaa is C or S

SEQ ID NO: 94313 - protein, 40 aa, Artificial Sequence; identical to SEQ ID NO: 7340
  Cyclic GFR-binding peptide
  MOD_RES (6)..(7)..(39): Xaa is C or S

SEQ ID NO: 94314 - protein, 28 aa, Artificial Sequence
  Cyclic GFR-binding peptide
  MOD_RES (1)..(2): Xaa is C or S
XXTPTKMNAISMLYFNDKQQIILKKYRG

SEQ ID NO: 94315 - protein, 32 aa, Artificial Sequence; identical to SEQ ID NO: 7342
  Cyclic GFR-binding peptide
  MOD_RES (3)..(4): Xaa is C or S

SEQ ID NO: 94316 - protein, 32 aa, Artificial Sequence; identical to SEQ ID NO: 7343
  Cyclic GFR-binding peptide
  MOD_RES (6)..(7): Xaa is C or S

SEQ ID NO: 94317 - protein, 35 aa, Artificial Sequence; identical to SEQ ID NO: 7344
  Cyclic GFR-binding peptide
  MOD_RES (6)..(7): Xaa is C or S

SEQ ID NO: 94318 - protein, 42 aa, Artificial Sequence; identical to SEQ ID NO: 35779
  Cyclic GFR-binding peptide
  MOD_RES (6)..(7)..(39)..(41): Xaa is C or S

SEQ ID NO: 94319 - protein, 36 aa, Artificial Sequence; identical to SEQ ID NO: 7345
  Cyclic GFR-binding peptide
  MOD_RES (6)..(7): Xaa is C or S

SEQ ID NO: 94320 - protein, 36 aa, Artificial Sequence
  Cyclic GFR-binding peptide
  MOD_RES (1)..(2)..(33)..(35): Xaa is C or S
XXAPVKTEPISMLYLDNGRVLLKFKYEMIVEEXGXL

SEQ ID NO: 94321 - protein, 31 aa, Artificial Sequence
  Cyclic GFR-binding peptide
  MOD_RES (3)..(4): Xaa is C or S
EPXXVPEKMSATSILYYDENKNVVLRKHRNM

SEQ ID NO: 94322 - protein, 39 aa, Artificial Sequence; identical to SEQ ID NO: 7347
  Cyclic GFR-binding peptide
  MOD_RES (6)..(7)..(39): Xaa is C or S

SEQ ID NO: 94323 - protein, 31 aa, Artificial Sequence; identical to SEQ ID NO: 7348
  Cyclic GFR-binding peptide
  MOD_RES (1)..(1): Xaa is C or S

SEQ ID NO: 94324 - protein, 35 aa, Artificial Sequence
  Cyclic GFR-binding peptide
  MOD_RES (6)..(7): Xaa is C or S
HVPKPXXAPTKLSATSVLYYDDSSNVILRKHRNMV

SEQ ID NO: 94325 - protein, 35 aa, Artificial Sequence
  Cyclic GFR-binding peptide
  MOD_RES (1)..(2)..(34): Xaa is C or S
XXVPTRLSPISILYKDSANNVVLKYHYDMVVESXG

SEQ ID NO: 94326 - protein, 31 aa, Artificial Sequence; identical to SEQ ID NO: 35791
  Cyclic GFR-binding peptide
  MOD_RES (4)..(5): Xaa is C or S

SEQ ID NO: 94327 - protein, 35 aa, Artificial Sequence
  Cyclic GFR-binding peptide
  MOD_RES (4)..(5): Xaa is C or S
PSTXXAPVKTSPISMLYKDNGRVLLLKYHYMIVEE

SEQ ID NO: 94328 - protein, 38 aa, Artificial Sequence; identical to SEQ ID NO: 43062
  Cyclic GFR-binding peptide
  MOD_RES (1)..(2)..(35)..(37): Xaa is C or S

SEQ ID NO: 94329 - protein, 29 aa, Artificial Sequence
  Cyclic GFR-binding peptide
  MOD_RES (1)..(2): Xaa is C or S
XXVSQDLNAISILYFIGKTPKILKKYRMI

SEQ ID NO: 94330 - protein, 26 aa, Artificial Sequence
  Cyclic GFR-binding peptide
SQDLSPISILYKIGKTPKILKYHYMI

SEQ ID NO: 94331 - protein, 34 aa, Artificial Sequence; identical to SEQ ID NO: 43077
  Cyclic GFR-binding peptide
  MOD_RES (6)..(7): Xaa is C or S

SEQ ID NO: 94332 - protein, 31 aa, Artificial Sequence; identical to SEQ ID NO: 7371
  Cyclic GFR-binding peptide
  MOD_RES (30)..(30): Xaa is C or S

SEQ ID NO: 94333 - protein, 38 aa, Artificial Sequence; identical to SEQ ID NO: 7372
  Cyclic GFR-binding peptide
  MOD_RES (6)..(7)..(38): Xaa is C or S

SEQ ID NO: 94334 - protein, 32 aa, Artificial Sequence
  Cyclic GFR-binding peptide
  MOD_RES (1)..(2): Xaa is C or S
XXAPVKTSATSMLYYDNGRVLLLRKHRMIVEE

SEQ ID NO: 94335 - protein, 24 aa, Artificial Sequence
  Cyclic GFR-binding peptide
TRLSPINILYFDSANNVVYGKIPD

SEQ ID NO: 94336 - protein, 26 aa, Artificial Sequence
  Cyclic GFR-binding peptide
RLSPISILYKDSANNVVLKYHYDMVV

SEQ ID NO: 94337 - protein, 35 aa, Artificial Sequence
  Cyclic GFR-binding peptide
  MOD_RES (4)..(5): Xaa is C or S
PEPXXVPEKMSPINILYFDENKNVVYGKIPNMTVE

SEQ ID NO: 94338 - protein, 30 aa, Artificial Sequence
  Cyclic GFR-binding peptide
  MOD_RES (30)..(30): Xaa is C or S
TRLSATSILYYDSANNVVLRKHRDMVVESX

SEQ ID NO: 94339 - protein, 36 aa, Artificial Sequence
  Cyclic GFR-binding peptide
  MOD_RES (1)..(33)..(35): Xaa is C or S
XTPTKMSATSMLYYNDKQQIILRKHRGMVVDRXGXS

SEQ ID NO: 94340 - protein, 24 aa, Artificial Sequence
  Cyclic GFR-binding peptide
PTKMSATSMLYYNDKQQIILRKHR

SEQ ID NO: 94341 - protein, 31 aa, Artificial Sequence; identical to SEQ ID NO: 35817
  Cyclic GFR-binding peptide
  MOD_RES (31)..(31): Xaa is C or S

SEQ ID NO: 94342 - protein, 32 aa, Artificial Sequence; identical to SEQ ID NO: 7375
  Cyclic GFR-binding peptide
  MOD_RES (5)..(6): Xaa is C or S

SEQ ID NO: 94343 - protein, 40 aa, Artificial Sequence; identical to SEQ ID NO: 35820
  Cyclic GFR-binding peptide
  MOD_RES (6)..(7)..(40): Xaa is C or S

SEQ ID NO: 94344 - protein, 22 aa, Artificial Sequence
  Cyclic GFR-binding peptide
MSPISILYKDENKNVVLKYHYN

SEQ ID NO: 94345 - protein, 28 aa, Artificial Sequence
  Cyclic GFR-binding peptide
  MOD_RES (28)..(28): Xaa is C or S
DLSATSILYYIGKTPKILRKHRMIVKSX

SEQ ID NO: 94346 - protein, 31 aa, Artificial Sequence
  Cyclic GFR-binding peptide
  MOD_RES (1)..(2): Xaa is C or S
XXVPTRLSPISILYKDSANNVVLKYHYDMVV

SEQ ID NO: 94347 - protein, 20 aa, Artificial Sequence
  Cyclic GFR-binding peptide
SPISMLYKNDKQQIILKYHY

SEQ ID NO: 94348 - protein, 39 aa, Artificial Sequence; identical to SEQ ID NO: 35821
  Cyclic GFR-binding peptide
  MOD_RES (3)..(4)..(36)..(38): Xaa is C or S

SEQ ID NO: 94349 - protein, 29 aa, Artificial Sequence
  Cyclic GFR-binding peptide
PTELNAISMLYFDEYDKVVLKKYREMVVE

SEQ ID NO: 94350 - protein, 33 aa, Artificial Sequence; identical to SEQ ID NO: 7379
  Cyclic GFR-binding peptide
  MOD_RES (4)..(5): Xaa is C or S

SEQ ID NO: 94351 - protein, 30 aa, Artificial Sequence; identical to SEQ ID NO: 35823
  Cyclic GFR-binding peptide

SEQ ID NO: 94352 - protein, 37 aa, Artificial Sequence; identical to SEQ ID NO: 7381
  Cyclic GFR-binding peptide
  MOD_RES (2)..(3)..(35)..(37): Xaa is C or S

SEQ ID NO: 94353 - protein, 32 aa, Artificial Sequence; identical to SEQ ID NO: 77292
  Cyclic GFR-binding peptide
  MOD_RES (31)..(31): Xaa is C or S

SEQ ID NO: 94354 - protein, 32 aa, Artificial Sequence
  Cyclic GFR-binding peptide
  MOD_RES (3)..(4): Xaa is C or S
EPXXVPEKMSATSILYYDENKNVVLRKHRNMT

SEQ ID NO: 94355 - protein, 31 aa, Artificial Sequence; identical to SEQ ID NO: 35829
  Cyclic GFR-binding peptide
  MOD_RES (30)..(30): Xaa is C or S

SEQ ID NO: 94356 - protein, 26 aa, Artificial Sequence
  Cyclic GFR-binding peptide
PQALEPISILYLVGRKPKVKFKYEMI

SEQ ID NO: 94357 - protein, 22 aa, Artificial Sequence
  Cyclic GFR-binding peptide
LSPISVLYKDDSSNVILKYHYN

SEQ ID NO: 94358 - protein, 28 aa, Artificial Sequence
  Cyclic GFR-binding peptide
VPTELSPINMLYFDENEKVVYGKIPDMV

SEQ ID NO: 94359 - protein, 36 aa, Artificial Sequence
  Cyclic GFR-binding peptide
  MOD_RES (6)..(7): Xaa is C or S
RVPSTXXAPVKTEPISMLYLDNGRVLLKFKYEMIVE

SEQ ID NO: 94360 - protein, 30 aa, Artificial Sequence; identical to SEQ ID NO: 43102
  Cyclic GFR-binding peptide

SEQ ID NO: 94361 - protein, 28 aa, Artificial Sequence
  Cyclic GFR-binding peptide
  MOD_RES (28)..(28): Xaa is C or S
EPISVLYLDDMGVPTKFKYEEGMSVAEX

SEQ ID NO: 94362 - protein, 29 aa, Artificial Sequence
  Cyclic GFR-binding peptide
  MOD_RES (28)..(28): Xaa is C or S
DLNAISILYFVGRTPKVLKKYRMVVKSXK

SEQ ID NO: 94363 - protein, 21 aa, Artificial Sequence
  Cyclic GFR-binding peptide
TEPISMLYLDNGRVLLKFKYE

SEQ ID NO: 94364 - protein, 31 aa, Artificial Sequence; identical to SEQ ID NO: 35839
  Cyclic GFR-binding peptide
  MOD_RES (1)..(2): Xaa is C or S

SEQ ID NO: 94365 - protein, 28 aa, Artificial Sequence
  Cyclic GFR-binding peptide
  MOD_RES (1)..(2): Xaa is C or S
XXVPTKLSATSILYYDKGVVTYLRKHRG

SEQ ID NO: 94366 - protein, 31 aa, Artificial Sequence; identical to SEQ ID NO: 7392
  Cyclic GFR-binding peptide
  MOD_RES (2)..(3): Xaa is C or S

SEQ ID NO: 94367 - protein, 28 aa, Artificial Sequence
  Cyclic GFR-binding peptide
  MOD_RES (27)..(27): Xaa is C or S
SPISILYKDKGVVTYLKYHYGMAVSEXG

SEQ ID NO: 94368 - protein, 35 aa, Artificial Sequence; identical to SEQ ID NO: 43113
  Cyclic GFR-binding peptide
  MOD_RES (6)..(7): Xaa is C or S

SEQ ID NO: 94369 - protein, 34 aa, Artificial Sequence; identical to SEQ ID NO: 7394
  Cyclic GFR-binding peptide
  MOD_RES (3)..(4): Xaa is C or S

SEQ ID NO: 94370 - protein, 33 aa, Artificial Sequence; identical to SEQ ID NO: 43118
  Cyclic GFR-binding peptide
  MOD_RES (33)..(33): Xaa is C or S

SEQ ID NO: 94371 - protein, 37 aa, Artificial Sequence; identical to SEQ ID NO: 35847
  Cyclic GFR-binding peptide
  MOD_RES (4)..(5)..(37): Xaa is C or S

SEQ ID NO: 94372 - protein, 34 aa, Artificial Sequence; identical to SEQ ID NO: 7396
  Cyclic GFR-binding peptide
  MOD_RES (3)..(3): Xaa is C or S

SEQ ID NO: 94373 - protein, 32 aa, Artificial Sequence; identical to SEQ ID NO: 35849
  Cyclic GFR-binding peptide
  MOD_RES (4)..(5): Xaa is C or S

SEQ ID NO: 94374 - protein, 28 aa, Artificial Sequence
  Cyclic GFR-binding peptide
  MOD_RES (1)..(1): Xaa is C or S
XAPTKLSPISVLYKDSSNNVILKYHYNM

SEQ ID NO: 94375 - protein, 29 aa, Artificial Sequence
  Cyclic GFR-binding peptide
  MOD_RES (3)..(4): Xaa is C or S
STXXAPVKTNAISMLYFDNGRVLLLKKYR

SEQ ID NO: 94376 - protein, 32 aa, Artificial Sequence; identical to SEQ ID NO: 7400
  Cyclic GFR-binding peptide
  MOD_RES (32)..(32): Xaa is C or S

SEQ ID NO: 94377 - protein, 28 aa, Artificial Sequence
  Cyclic GFR-binding peptide
  MOD_RES (28)..(28): Xaa is C or S
LNAISILYFDAANNVVLKKYRDMVVEAX

SEQ ID NO: 94378 - protein, 31 aa, Artificial Sequence
  Cyclic GFR-binding peptide
  MOD_RES (1)..(2): Xaa is C or S
XXVPTRLSATSILYYDSANNVVLRKHRDMVV

SEQ ID NO: 94379 - protein, 25 aa, Artificial Sequence
  Cyclic GFR-binding peptide
NAISILYFDAANNVVLKKYRDMVVE

SEQ ID NO: 94380 - protein, 29 aa, Artificial Sequence
  Cyclic GFR-binding peptide
  MOD_RES (1)..(1): Xaa is C or S
XVPARLSPINILYFDAANNVVYGKIPDMV

SEQ ID NO: 94381 - protein, 30 aa, Artificial Sequence
  Cyclic GFR-binding peptide
  MOD_RES (1)..(2): Xaa is C or S
XXVPTRLEPISILYLDSANNVVKFKYEDMV

SEQ ID NO: 94382 - protein, 32 aa, Artificial Sequence; identical to SEQ ID NO: 7403
  Cyclic GFR-binding peptide
  MOD_RES (30)..(32): Xaa is C or S

SEQ ID NO: 94383 - protein, 23 aa, Artificial Sequence
  Cyclic GFR-binding peptide
KMSATSILYYDENKNVVLRKHRN

SEQ ID NO: 94384 - protein, 29 aa, Artificial Sequence
  Cyclic GFR-binding peptide
  MOD_RES (1)..(2): Xaa is C or S
XXVPQALSPISILYKVGRKPKVLKYHYMI

SEQ ID NO: 94385 - protein, 27 aa, Artificial Sequence
  Cyclic GFR-binding peptide
QDLSATSILYYVGRTPKVLRKHRMVVK

SEQ ID NO: 94386 - protein, 30 aa, Artificial Sequence; identical to SEQ ID NO: 7408
  Cyclic GFR-binding peptide
  MOD_RES (1)..(2): Xaa is C or S

SEQ ID NO: 94387 - protein, 25 aa, Artificial Sequence
  Cyclic GFR-binding peptide
LSPINMLYFDENEKVVYGKIPDMVV

SEQ ID NO: 94388 - protein, 33 aa, Artificial Sequence
  Cyclic GFR-binding peptide
  MOD_RES (5)..(6): Xaa is C or S
SASPXXVPQDLSPINILYFVGRTPKVYGKIPMV

SEQ ID NO: 94389 - protein, 37 aa, Artificial Sequence; identical to SEQ ID NO: 7410
  Cyclic GFR-binding peptide
  MOD_RES (3)..(4)..(36): Xaa is C or S

SEQ ID NO: 94390 - protein, 23 aa, Artificial Sequence
  Cyclic GFR-binding peptide
KLSATSVLYYDDSSNVILRKHRN

SEQ ID NO: 94391 - protein, 36 aa, Artificial Sequence; identical to SEQ ID NO: 7412
  Cyclic GFR-binding peptide
  MOD_RES (6)..(7): Xaa is C or S

SEQ ID NO: 94392 - protein, 30 aa, Artificial Sequence; identical to SEQ ID NO: 7413
  Cyclic GFR-binding peptide
  MOD_RES (1)..(2): Xaa is C or S

SEQ ID NO: 94393 - protein, 30 aa, Artificial Sequence; identical to SEQ ID NO: 7414
  Cyclic GFR-binding peptide
  MOD_RES (1)..(2): Xaa is C or S

SEQ ID NO: 94394 - protein, 29 aa, Artificial Sequence
  Cyclic GFR-binding peptide
  MOD_RES (3)..(4): Xaa is C or S
KAXXAPTKLSPISVLYKDSSNNVILKYHY

SEQ ID NO: 94395 - protein, 23 aa, Artificial Sequence
  Cyclic GFR-binding peptide
TKMNAISMLYFNDKQQIILKKYR

SEQ ID NO: 94396 - protein, 31 aa, Artificial Sequence; identical to SEQ ID NO: 7417
  Cyclic GFR-binding peptide
  MOD_RES (28)..(30): Xaa is C or S

SEQ ID NO: 94397 - protein, 27 aa, Artificial Sequence
  Cyclic GFR-binding peptide
VPEKMEPISILYLDENKNVVKFKYENM

SEQ ID NO: 94398 - protein, 30 aa, Artificial Sequence; identical to SEQ ID NO: 35876
  Cyclic GFR-binding peptide
  MOD_RES (5)..(5): Xaa is C or S

SEQ ID NO: 94399 - protein, 29 aa, Artificial Sequence
  Cyclic GFR-binding peptide
  MOD_RES (2)..(3): Xaa is C or S
PXXVPEKMNAISILYFDENKNVVLKKYRN

SEQ ID NO: 94400 - protein, 34 aa, Artificial Sequence; identical to SEQ ID NO: 43137
  Cyclic GFR-binding peptide
  MOD_RES (1)..(33): Xaa is C or S

SEQ ID NO: 94401 - protein, 38 aa, Artificial Sequence; identical to SEQ ID NO: 7420
  Cyclic GFR-binding peptide
  MOD_RES (5)..(6)..(37): Xaa is C or S

SEQ ID NO: 94402 - protein, 27 aa, Artificial Sequence
  Cyclic GFR-binding peptide
  MOD_RES (26)..(26): Xaa is C or S
NAISILYFVGRTPKVLKKYRMVVKSXK

SEQ ID NO: 94403 - protein, 24 aa, Artificial Sequence
  Cyclic GFR-binding peptide
ELSPISMLYKDENEKVVLKYHYDM

SEQ ID NO: 94404 - protein, 28 aa, Artificial Sequence
  Cyclic GFR-binding peptide
APVKTSATSMLYYDNGRVLLLRKHRMIV

SEQ ID NO: 94405 - protein, 37 aa, Artificial Sequence; identical to SEQ ID NO: 43147
  Cyclic GFR-binding peptide
  MOD_RES (4)..(5)..(37): Xaa is C or S

SEQ ID NO: 94406 - protein, 33 aa, Artificial Sequence; identical to SEQ ID NO: 43152
  Cyclic GFR-binding peptide
  MOD_RES (31)..(33): Xaa is C or S

SEQ ID NO: 94407 - protein, 34 aa, Artificial Sequence; identical to SEQ ID NO: 43155
  Cyclic GFR-binding peptide
  MOD_RES (32)..(34): Xaa is C or S

SEQ ID NO: 94408 - protein, 32 aa, Artificial Sequence; identical to SEQ ID NO: 35894
  Cyclic GFR-binding peptide
  MOD_RES (3)..(4): Xaa is C or S

SEQ ID NO: 94409 - protein, 37 aa, Artificial Sequence
  Cyclic GFR-binding peptide
  MOD_RES (2)..(3)..(35)..(37): Xaa is C or S
AXXVPTKLSATSILYYDKGVVTYLRKHRGMAVSEXGX

SEQ ID NO: 94410 - protein, 33 aa, Artificial Sequence; identical to SEQ ID NO: 7429
  Cyclic GFR-binding peptide
  MOD_RES (31)..(33): Xaa is C or S

SEQ ID NO: 94411 - protein, 35 aa, Artificial Sequence
  Cyclic GFR-binding peptide
  MOD_RES (1)..(2)..(34): Xaa is C or S
XXVPEKMSATSILYYDENKNVVLRKHRNMTVESXA

SEQ ID NO: 94412 - protein, 31 aa, Artificial Sequence; identical to SEQ ID NO: 7430
  Cyclic GFR-binding peptide
  MOD_RES (30)..(30): Xaa is C or S

SEQ ID NO: 94413 - protein, 28 aa, Artificial Sequence
  Cyclic GFR-binding peptide
PTELNAISMLYFDENEKVVLKKYRDMVV

SEQ ID NO: 94414 - protein, 34 aa, Artificial Sequence; identical to SEQ ID NO: 7434
  Cyclic GFR-binding peptide
  MOD_RES (31)..(33): Xaa is C or S

SEQ ID NO: 94415 - protein, 29 aa, Artificial Sequence
  Cyclic GFR-binding peptide
  MOD_RES (26)..(28): Xaa is C or S
SATSMLYYDNGRVLLLRKHRMIVEEXGXL

SEQ ID NO: 94416 - protein, 31 aa, Artificial Sequence; identical to SEQ ID NO: 7435
  Cyclic GFR-binding peptide
  MOD_RES (1)..(1): Xaa is C or S

SEQ ID NO: 94417 - protein, 33 aa, Artificial Sequence; identical to SEQ ID NO: 7437
  Cyclic GFR-binding peptide
  MOD_RES (6)..(7): Xaa is C or S

SEQ ID NO: 94418 - protein, 32 aa, Artificial Sequence; identical to SEQ ID NO: 43163
  Cyclic GFR-binding peptide
  MOD_RES (3)..(4): Xaa is C or S

SEQ ID NO: 94419 - protein, 27 aa, Artificial Sequence
  Cyclic GFR-binding peptide
LEPISMLYLDEYDKVVKFKYEEMVVEG

SEQ ID NO: 94420 - protein, 30 aa, Artificial Sequence; identical to SEQ ID NO: 43164
  Cyclic GFR-binding peptide
  MOD_RES (29)..(29): Xaa is C or S

SEQ ID NO: 94421 - protein, 29 aa, Artificial Sequence
  Cyclic GFR-binding peptide
  MOD_RES (29)..(29): Xaa is C or S
RLNAISILYFDAANNVVLKKYRDMVVEAX

SEQ ID NO: 94422 - protein, 29 aa, Artificial Sequence
  Cyclic GFR-binding peptide
  MOD_RES (2)..(3): Xaa is C or S
PXXTPTKMEPISMLYLNDKQQIIKFKYEG

SEQ ID NO: 94423 - protein, 28 aa, Artificial Sequence
  Cyclic GFR-binding peptide
VPQALSPINILYFVGRKPKVYGKIPMIV

SEQ ID NO: 94424 - protein, 35 aa, Artificial Sequence
  Cyclic GFR-binding peptide
  MOD_RES (32)..(34): Xaa is C or S
VPTRLSPISILYKDSANNVVLKYHYDMVVESXGXR

SEQ ID NO: 94425 - protein, 33 aa, Artificial Sequence; identical to SEQ ID NO: 35908
  Cyclic GFR-binding peptide
  MOD_RES (32)..(32): Xaa is C or S

SEQ ID NO: 94426 - protein, 25 aa, Artificial Sequence
  Cyclic GFR-binding peptide
TELNAISMLYFDENEKVVLKKYRDM

SEQ ID NO: 94427 - protein, 32 aa, Artificial Sequence; identical to SEQ ID NO: 7444
  Cyclic GFR-binding peptide
  MOD_RES (6)..(7): Xaa is C or S

SEQ ID NO: 94428 - protein, 38 aa, Artificial Sequence; identical to SEQ ID NO: 7447
  Cyclic GFR-binding peptide
  MOD_RES (4)..(5)..(37): Xaa is C or S

SEQ ID NO: 94429 - protein, 30 aa, Artificial Sequence; identical to SEQ ID NO: 35913
  Cyclic GFR-binding peptide
  MOD_RES (2)..(3): Xaa is C or S

SEQ ID NO: 94430 - protein, 28 aa, Artificial Sequence
  Cyclic GFR-binding peptide
  MOD_RES (27)..(27): Xaa is C or S
LSPISILYKIGKTPKILKYHYMIVKSXK

SEQ ID NO: 94431 - protein, 29 aa, Artificial Sequence
  Cyclic GFR-binding peptide
  MOD_RES (2)..(3): Xaa is C or S
AXXAPTKLNAISVLYFDSSNNVILKKYRN

SEQ ID NO: 94432 - protein, 25 aa, Artificial Sequence
  Cyclic GFR-binding peptide
PTRLSPINILYFDSANNVVYGKIPD

SEQ ID NO: 94433 - protein, 25 aa, Artificial Sequence
  Cyclic GFR-binding peptide
SPINILYFIGKTPKIYGKIPMIVKS

SEQ ID NO: 94434 - protein, 33 aa, Artificial Sequence
  Cyclic GFR-binding peptide
  MOD_RES (3)..(4): Xaa is C or S
SPXXVPQDLSPINILYFVGRTPKVYGKIPMVVK

SEQ ID NO: 94435 - protein, 34 aa, Artificial Sequence; identical to SEQ ID NO: 7459
  Cyclic GFR-binding peptide
  MOD_RES (1)..(32)..(34): Xaa is C or S

SEQ ID NO: 94436 - protein, 31 aa, Artificial Sequence; identical to SEQ ID NO: 43185
  Cyclic GFR-binding peptide
  MOD_RES (31)..(31): Xaa is C or S

SEQ ID NO: 94437 - protein, 25 aa, Artificial Sequence
  Cyclic GFR-binding peptide
APTQLEPISVLYLDDSSNVIKFKYE

SEQ ID NO: 94438 - protein, 37 aa, Artificial Sequence; identical to SEQ ID NO: 7460
  Cyclic GFR-binding peptide
  MOD_RES (3)..(4)..(36): Xaa is C or S

SEQ ID NO: 94439 - protein, 35 aa, Artificial Sequence
  Cyclic GFR-binding peptide
  MOD_RES (4)..(5): Xaa is C or S
PPTXXVPTRLSPISILYKDSANNVVLKYHYDMVVE

SEQ ID NO: 94440 - protein, 36 aa, Artificial Sequence; identical to SEQ ID NO: 43189
  Cyclic GFR-binding peptide
  MOD_RES (4)..(5)..(36): Xaa is C or S

SEQ ID NO: 94441 - protein, 36 aa, Artificial Sequence
  Cyclic GFR-binding peptide
  MOD_RES (4)..(5): Xaa is C or S
SKAXXVPTKLSATSILYYDKGVVTYLRKHRGMAVSE

SEQ ID NO: 94442 - protein, 35 aa, Artificial Sequence; identical to SEQ ID NO: 43190
  Cyclic GFR-binding peptide
  MOD_RES (2)..(3)..(35): Xaa is C or S

SEQ ID NO: 94443 - protein, 34 aa, Artificial Sequence; identical to SEQ ID NO: 35929
  Cyclic GFR-binding peptide
  MOD_RES (4)..(5): Xaa is C or S

SEQ ID NO: 94444 - protein, 29 aa, Artificial Sequence
  Cyclic GFR-binding peptide
TELNAISMLYFDEYDKVVLKKYREMVVEG

SEQ ID NO: 94445 - protein, 33 aa, Artificial Sequence
  Cyclic GFR-binding peptide
  MOD_RES (1)..(2)..(33): Xaa is C or S
XXAPVKTSPISMLYKDNGRVLLLKYHYMIVEEX

SEQ ID NO: 94446 - protein, 30 aa, Artificial Sequence; identical to SEQ ID NO: 7464
  Cyclic GFR-binding peptide
  MOD_RES (30)..(30): Xaa is C or S

SEQ ID NO: 94447 - protein, 31 aa, Artificial Sequence; identical to SEQ ID NO: 43192
  Cyclic GFR-binding peptide
  MOD_RES (1)..(1): Xaa is C or S

SEQ ID NO: 94448 - protein, 30 aa, Artificial Sequence; identical to SEQ ID NO: 43193
  Cyclic GFR-binding peptide
  MOD_RES (2)..(3): Xaa is C or S

SEQ ID NO: 94449 - protein, 33 aa, Artificial Sequence; identical to SEQ ID NO: 43195
  Cyclic GFR-binding peptide
  MOD_RES (1)..(33): Xaa is C or S

SEQ ID NO: 94450 - protein, 37 aa, Artificial Sequence; identical to SEQ ID NO: 35940
  Cyclic GFR-binding peptide
  MOD_RES (4)..(5)..(36): Xaa is C or S

SEQ ID NO: 94451 - protein, 28 aa, Artificial Sequence
  Cyclic GFR-binding peptide
  MOD_RES (28)..(28): Xaa is C or S
LSPISVLYKDSSNNVILKYHYNMVVKAX

SEQ ID NO: 94452 - protein, 22 aa, Artificial Sequence
  Cyclic GFR-binding peptide
ELSPISMLYKDEYDKVVLKYHY

SEQ ID NO: 94453 - protein, 28 aa, Artificial Sequence
  Cyclic GFR-binding peptide
TKLEPISVLYLDDMGVPTKFKYEEGMSV

SEQ ID NO: 94454 - protein, 27 aa, Artificial Sequence
  Cyclic GFR-binding peptide
VSQDLNAISILYFIGKTPKILKKYRMI

SEQ ID NO: 94455 - protein, 38 aa, Artificial Sequence; identical to SEQ ID NO: 7476
  Cyclic GFR-binding peptide
  MOD_RES (3)..(4)..(35)..(37): Xaa is C or S

SEQ ID NO: 94456 - protein, 34 aa, Artificial Sequence; identical to SEQ ID NO: 35946
  Cyclic GFR-binding peptide
  MOD_RES (1)..(2)..(34): Xaa is C or S

SEQ ID NO: 94457 - protein, 26 aa, Artificial Sequence
  Cyclic GFR-binding peptide
KMEPISMLYLNDKQQIIKFKYEGMVV

SEQ ID NO: 94458 - protein, 32 aa, Artificial Sequence
  Cyclic GFR-binding peptide
  MOD_RES (1)..(1): Xaa is C or S
XVPARLSATSILYYDAANNVVLRKHRDMVVEA

SEQ ID NO: 94459 - protein, 32 aa, Artificial Sequence; identical to SEQ ID NO: 35948
  Cyclic GFR-binding peptide
  MOD_RES (5)..(6): Xaa is C or S

SEQ ID NO: 94460 - protein, 29 aa, Artificial Sequence
  Cyclic GFR-binding peptide
  MOD_RES (27)..(29): Xaa is C or S
EPISMLYLNDKQQIIKFKYEGMVVDRXGX

SEQ ID NO: 94461 - protein, 33 aa, Artificial Sequence; identical to SEQ ID NO: 17795
  Cyclic GFR-binding peptide
  MOD_RES (4)..(5): Xaa is C or S

SEQ ID NO: 94462 - protein, 25 aa, Artificial Sequence
  Cyclic GFR-binding peptide
LSATSILYYVGRKPKVLRKHRMIVR

SEQ ID NO: 94463 - protein, 34 aa, Artificial Sequence; identical to SEQ ID NO: 7480
  Cyclic GFR-binding peptide
  MOD_RES (1)..(33): Xaa is C or S

SEQ ID NO: 94464 - protein, 35 aa, Artificial Sequence
  Cyclic GFR-binding peptide
  MOD_RES (32)..(34): Xaa is C or S
APTKLSPINVLYFDSSNNVIYGKIPNMVVKAXGXH

SEQ ID NO: 94465 - protein, 34 aa, Artificial Sequence; identical to SEQ ID NO: 35957
  Cyclic GFR-binding peptide
  MOD_RES (1)..(33): Xaa is C or S

SEQ ID NO: 94466 - protein, 31 aa, Artificial Sequence; identical to SEQ ID NO: 35958
  Cyclic GFR-binding peptide
  MOD_RES (5)..(6): Xaa is C or S

SEQ ID NO: 94467 - protein, 20 aa, Artificial Sequence
  Cyclic GFR-binding peptide
NAISMLYFDENEKVVLKKYR

SEQ ID NO: 94468 - protein, 28 aa, Artificial Sequence
  Cyclic GFR-binding peptide
  MOD_RES (2)..(3): Xaa is C or S
AXXVPTKLNAISVLYFDDMGVPTLKKYR

SEQ ID NO: 94469 - protein, 34 aa, Artificial Sequence
  Cyclic GFR-binding peptide
  MOD_RES (3)..(4): Xaa is C or S
PTXXVPTRLSATSILYYDSANNVVLRKHRDMVVE

SEQ ID NO: 94470 - protein, 35 aa, Artificial Sequence; identical to SEQ ID NO: 43217
  Cyclic GFR-binding peptide
  MOD_RES (5)..(6): Xaa is C or S

SEQ ID NO: 94471 - protein, 24 aa, Artificial Sequence
  Cyclic GFR-binding peptide
PQDLSATSILYYVGRTPKVLRKHR

SEQ ID NO: 94472 - protein, 36 aa, Artificial Sequence; identical to SEQ ID NO: 7491
  Cyclic GFR-binding peptide
  MOD_RES (1)..(2)..(34)..(36): Xaa is C or S

SEQ ID NO: 94473 - protein, 31 aa, Artificial Sequence; identical to SEQ ID NO: 35968
  Cyclic GFR-binding peptide
  MOD_RES (30)..(30): Xaa is C or S

SEQ ID NO: 94474 - protein, 31 aa, Artificial Sequence
  Cyclic GFR-binding peptide
  MOD_RES (4)..(5): Xaa is C or S
PPTXXVPTRLSATSILYYDSANNVVLRKHRD

SEQ ID NO: 94475 - protein, 27 aa, Artificial Sequence
  Cyclic GFR-binding peptide
PQDLSPISILYKVGRTPKVLKYHYMVV

SEQ ID NO: 94476 - protein, 27 aa, Artificial Sequence
  Cyclic GFR-binding peptide
PQDLSATSILYYVGRTPKVLRKHRMVV

SEQ ID NO: 94477 - protein, 31 aa, Artificial Sequence; identical to SEQ ID NO: 77357
  Cyclic GFR-binding peptide
  MOD_RES (5)..(6): Xaa is C or S

SEQ ID NO: 94478 - protein, 25 aa, Artificial Sequence
  Cyclic GFR-binding peptide
PARLNAISILYFDAANNVVLKKYRD

SEQ ID NO: 94479 - protein, 31 aa, Artificial Sequence; identical to SEQ ID NO: 7495
  Cyclic GFR-binding peptide

SEQ ID NO: 94480 - protein, 23 aa, Artificial Sequence
  Cyclic GFR-binding peptide
LEPISILYLVGRKPKVKFKYEMI

SEQ ID NO: 94481 - protein, 32 aa, Artificial Sequence; identical to SEQ ID NO: 35974
  Cyclic GFR-binding peptide
  MOD_RES (6)..(7): Xaa is C or S

SEQ ID NO: 94482 - protein, 31 aa, Artificial Sequence; identical to SEQ ID NO: 7496
  Cyclic GFR-binding peptide
  MOD_RES (28)..(30): Xaa is C or S

SEQ ID NO: 94483 - protein, 30 aa, Artificial Sequence; identical to SEQ ID NO: 35977
  Cyclic GFR-binding peptide
  MOD_RES (1)..(1): Xaa is C or S

SEQ ID NO: 94484 - protein, 34 aa, Artificial Sequence; identical to SEQ ID NO: 35979
  Cyclic GFR-binding peptide
  MOD_RES (32)..(34): Xaa is C or S

SEQ ID NO: 94485 - protein, 27 aa, Artificial Sequence
  Cyclic GFR-binding peptide
  MOD_RES (1)..(2): Xaa is C or S
XXVPARLSPINILYFDAANNVVYGKIP

SEQ ID NO: 94486 - protein, 37 aa, Artificial Sequence; identical to SEQ ID NO: 7497
  Cyclic GFR-binding peptide
  MOD_RES (2)..(3)..(35)..(37): Xaa is C or S

SEQ ID NO: 94487 - protein, 34 aa, Artificial Sequence; identical to SEQ ID NO: 35982
  Cyclic GFR-binding peptide
  MOD_RES (32)..(34): Xaa is C or S

SEQ ID NO: 94488 - protein, 32 aa, Artificial Sequence; identical to SEQ ID NO: 35990
  Cyclic GFR-binding peptide
  MOD_RES (1)..(2): Xaa is C or S

SEQ ID NO: 94489 - protein, 30 aa, Artificial Sequence; identical to SEQ ID NO: 43232
  Cyclic GFR-binding peptide
  MOD_RES (28)..(30): Xaa is C or S

SEQ ID NO: 94490 - protein, 40 aa, Artificial Sequence; identical to SEQ ID NO: 7505
  Cyclic GFR-binding peptide
  MOD_RES (4)..(5)..(37)..(39): Xaa is C or S

SEQ ID NO: 94491 - protein, 28 aa, Artificial Sequence
  Cyclic GFR-binding peptide
  MOD_RES (27)..(27): Xaa is C or S
TSPISMLYKDNGRVLLLKYHYMIVEEXG

SEQ ID NO: 94492 - protein, 27 aa, Artificial Sequence
  Cyclic GFR-binding peptide
VPTELNAISMLYFDENEKVVLKKYRDM

SEQ ID NO: 94493 - protein, 33 aa, Artificial Sequence; identical to SEQ ID NO: 7507
  Cyclic GFR-binding peptide
  MOD_RES (1)..(32): Xaa is C or S

SEQ ID NO: 94494 - protein, 24 aa, Artificial Sequence
  Cyclic GFR-binding peptide
LEPISILYLDAANNVVKFKYEDMV

SEQ ID NO: 94495 - protein, 31 aa, Artificial Sequence; identical to SEQ ID NO: 35997
  Cyclic GFR-binding peptide
  MOD_RES (3)..(4): Xaa is C or S

SEQ ID NO: 94496 - protein, 24 aa, Artificial Sequence
  Cyclic GFR-binding peptide
RLEPISILYLDAANNVVKFKYEDM

SEQ ID NO: 94497 - protein, 37 aa, Artificial Sequence
  Cyclic GFR-binding peptide
  MOD_RES (5)..(6): Xaa is C or S
ASKAXXVPTKLSATSILYYDKGVVTYLRKHRGMAVSE

SEQ ID NO: 94498 - protein, 31 aa, Artificial Sequence
  Cyclic GFR-binding peptide
VPEKMSPINILYFDENKNVVYGKIPNMTVES

SEQ ID NO: 94499 - protein, 33 aa, Artificial Sequence; identical to SEQ ID NO: 7513
  Cyclic GFR-binding peptide
  MOD_RES (6)..(7): Xaa is C or S

SEQ ID NO: 94500 - protein, 36 aa, Artificial Sequence
  Cyclic GFR-binding peptide
  MOD_RES (1)..(2)..(34)..(36): Xaa is C or S
XXTPTKMEPISMLYLNDKQQIIKFKYEGMVVDRXGX

SEQ ID NO: 94501 - protein, 31 aa, Artificial Sequence; identical to SEQ ID NO: 43236
  Cyclic GFR-binding peptide
  MOD_RES (29)..(31): Xaa is C or S

SEQ ID NO: 94502 - protein, 34 aa, Artificial Sequence
  Cyclic GFR-binding peptide
  MOD_RES (4)..(5): Xaa is C or S
PEPXXVPEKMNAISILYFDENKNVVLKKYRNMTV

SEQ ID NO: 94503 - protein, 25 aa, Artificial Sequence
  Cyclic GFR-binding peptide
EPISILYLIGKTPKIKFKYEMIVKS

SEQ ID NO: 94504 - protein, 25 aa, Artificial Sequence
  Cyclic GFR-binding peptide
SPISMLYKDEYDKVVLKYHYEMVVE

SEQ ID NO: 94505 - protein, 24 aa, Artificial Sequence
  Cyclic GFR-binding peptide
EKMSPISILYKDENKNVVLKYHYN

SEQ ID NO: 94506 - protein, 33 aa, Artificial Sequence
  Cyclic GFR-binding peptide
  MOD_RES (1)..(33): Xaa is C or S
XVPEKMNAISILYFDENKNVVLKKYRNMTVESX

SEQ ID NO: 94507 - protein, 30 aa, Artificial Sequence; identical to SEQ ID NO: 7521
  Cyclic GFR-binding peptide
  MOD_RES (1)..(1): Xaa is C or S

SEQ ID NO: 94508 - protein, 28 aa, Artificial Sequence
  Cyclic GFR-binding peptide
  MOD_RES (2)..(3): Xaa is C or S
PXXVPQDLSPINILYFVGRTPKVYGKIP

SEQ ID NO: 94509 - protein, 31 aa, Artificial Sequence; identical to SEQ ID NO: 36017
  Cyclic GFR-binding peptide
  MOD_RES (4)..(5): Xaa is C or S

SEQ ID NO: 94510 - protein, 24 aa, Artificial Sequence
  Cyclic GFR-binding peptide
PTELEPISMLYLDENEKVVKFKYE

SEQ ID NO: 94511 - protein, 34 aa, Artificial Sequence; identical to SEQ ID NO: 36020
  Cyclic GFR-binding peptide
  MOD_RES (1)..(34): Xaa is C or S

SEQ ID NO: 94512 - protein, 41 aa, Artificial Sequence; identical to SEQ ID NO: 7526
  Cyclic GFR-binding peptide
  MOD_RES (6)..(7)..(38)..(40): Xaa is C or S

SEQ ID NO: 94513 - protein, 25 aa, Artificial Sequence
  Cyclic GFR-binding peptide
SATSMLYYDNGRVLLLRKHRMIVEE

SEQ ID NO: 94514 - protein, 32 aa, Artificial Sequence; identical to SEQ ID NO: 36024
  Cyclic GFR-binding peptide
  MOD_RES (30)..(32): Xaa is C or S

SEQ ID NO: 94515 - protein, 25 aa, Artificial Sequence
  Cyclic GFR-binding peptide
LSPINILYFDKGVVTYYGKIPGMAV

SEQ ID NO: 94516 - protein, 34 aa, Artificial Sequence
  Cyclic GFR-binding peptide
  MOD_RES (1)..(2)..(34): Xaa is C or S
XXVPEKMNAISILYFDENKNVVLKKYRNMTVESX

SEQ ID NO: 94517 - protein, 36 aa, Artificial Sequence; identical to SEQ ID NO: 7530
  Cyclic GFR-binding peptide
  MOD_RES (1)..(2)..(35): Xaa is C or S

SEQ ID NO: 94518 - protein, 22 aa, Artificial Sequence
  Cyclic GFR-binding peptide
EPISILYLIGKTPKIKFKYEMI

SEQ ID NO: 94519 - protein, 39 aa, Artificial Sequence; identical to SEQ ID NO: 7534
  Cyclic GFR-binding peptide
  MOD_RES (6)..(7)..(39): Xaa is C or S

SEQ ID NO: 94520 - protein, 33 aa, Artificial Sequence; identical to SEQ ID NO: 7537
  Cyclic GFR-binding peptide
  MOD_RES (1)..(2): Xaa is C or S

SEQ ID NO: 94521 - protein, 36 aa, Artificial Sequence
  Cyclic GFR-binding peptide
  MOD_RES (1)..(2)..(34)..(36): Xaa is C or S
XXVPTKLSATSILYYDKGVVTYLRKHRGMAVSEXGX

SEQ ID NO: 94522 - protein, 28 aa, Artificial Sequence
  Cyclic GFR-binding peptide
QDLSATSILYYVGRTPKVLRKHRMVVKS

SEQ ID NO: 94523 - protein, 31 aa, Artificial Sequence; identical to SEQ ID NO: 7542
  Cyclic GFR-binding peptide
  MOD_RES (31)..(31): Xaa is C or S

SEQ ID NO: 94524 - protein, 31 aa, Artificial Sequence; identical to SEQ ID NO: 43272
  Cyclic GFR-binding peptide
  MOD_RES (4)..(5): Xaa is C or S

SEQ ID NO: 94525 - protein, 25 aa, Artificial Sequence
  Cyclic GFR-binding peptide
APVKTSPISMLYKDNGRVLLLKYHY

SEQ ID NO: 94526 - protein, 25 aa, Artificial Sequence
  Cyclic GFR-binding peptide
PEKMSPISILYKDENKNVVLKYHYN

SEQ ID NO: 94527 - protein, 28 aa, Artificial Sequence
  Cyclic GFR-binding peptide
  MOD_RES (28)..(28): Xaa is C or S
LSPISVLYKDDSSNVILKYHYNMVVRAX

SEQ ID NO: 94528 - protein, 25 aa, Artificial Sequence
  Cyclic GFR-binding peptide
VPEKMEPISILYLDENKNVVKFKYE

SEQ ID NO: 94529 - protein, 22 aa, Artificial Sequence
  Cyclic GFR-binding peptide
NAISILYFVGRKPKVLKKYRMI

SEQ ID NO: 94530 - protein, 36 aa, Artificial Sequence; identical to SEQ ID NO: 7550
  Cyclic GFR-binding peptide
  MOD_RES (2)..(3)..(34)..(36): Xaa is C or S

SEQ ID NO: 94531 - protein, 30 aa, Artificial Sequence; identical to SEQ ID NO: 43275
  Cyclic GFR-binding peptide

SEQ ID NO: 94532 - protein, 22 aa, Artificial Sequence
  Cyclic GFR-binding peptide
TSATSMLYYDNGRVLLLRKHRM

SEQ ID NO: 94533 - protein, 36 aa, Artificial Sequence; identical to SEQ ID NO: 36040
  Cyclic GFR-binding peptide
  MOD_RES (1)..(33)..(35): Xaa is C or S

SEQ ID NO: 94534 - protein, 34 aa, Artificial Sequence; identical to SEQ ID NO: 7553
  Cyclic GFR-binding peptide
  MOD_RES (1)..(2)..(33): Xaa is C or S

SEQ ID NO: 94535 - protein, 26 aa, Artificial Sequence
  Cyclic GFR-binding peptide
EKMSPINILYFDENKNVVYGKIPNMT

SEQ ID NO: 94536 - protein, 33 aa, Artificial Sequence
  Cyclic GFR-binding peptide
  MOD_RES (1)..(2): Xaa is C or S
XXVPTRLSATSILYYDSANNVVLRKHRDMVVES

SEQ ID NO: 94537 - protein, 30 aa, Artificial Sequence; identical to SEQ ID NO: 7561
  Cyclic GFR-binding peptide
  MOD_RES (2)..(3): Xaa is C or S

SEQ ID NO: 94538 - protein, 30 aa, Artificial Sequence
  Cyclic GFR-binding peptide
  MOD_RES (4)..(5): Xaa is C or S
ASPXXVPQDLSPINILYFVGRTPKVYGKIP

SEQ ID NO: 94539 - protein, 33 aa, Artificial Sequence; identical to SEQ ID NO: 7563
  Cyclic GFR-binding peptide
  MOD_RES (4)..(5): Xaa is C or S

SEQ ID NO: 94540 - protein, 25 aa, Artificial Sequence
  Cyclic GFR-binding peptide
RLNAISILYFDSANNVVLKKYRDMV

SEQ ID NO: 94541 - protein, 31 aa, Artificial Sequence
  Cyclic GFR-binding peptide
  MOD_RES (1)..(2): Xaa is C or S
XXVPEKMEPISILYLDENKNVVKFKYENMTV

SEQ ID NO: 94542 - protein, 32 aa, Artificial Sequence; identical to SEQ ID NO: 36054
  Cyclic GFR-binding peptide
  MOD_RES (31)..(31): Xaa is C or S

SEQ ID NO: 94543 - protein, 34 aa, Artificial Sequence; identical to SEQ ID NO: 43291
  Cyclic GFR-binding peptide
  MOD_RES (1)..(33): Xaa is C or S

SEQ ID NO: 94544 - protein, 28 aa, Artificial Sequence
  Cyclic GFR-binding peptide
KLNAISVLYFDDMGVPTLKKYREGMSVA

SEQ ID NO: 94545 - protein, 33 aa, Artificial Sequence; identical to SEQ ID NO: 77395
  Cyclic GFR-binding peptide
  MOD_RES (3)..(4): Xaa is C or S

SEQ ID NO: 94546 - protein, 30 aa, Artificial Sequence; identical to SEQ ID NO: 43299
  Cyclic GFR-binding peptide

SEQ ID NO: 94547 - protein, 26 aa, Artificial Sequence
  Cyclic GFR-binding peptide
PTKLEPISVLYLDDSSNVIKFKYENM

SEQ ID NO: 94548 - protein, 29 aa, Artificial Sequence
  Cyclic GFR-binding peptide
  MOD_RES (2)..(3): Xaa is C or S
SXXVPARLSATSILYYDAANNVVLRKHRD

SEQ ID NO: 94549 - protein, 30 aa, Artificial Sequence; identical to SEQ ID NO: 7571
  Cyclic GFR-binding peptide
  MOD_RES (3)..(4): Xaa is C or S

SEQ ID NO: 94550 - protein, 29 aa, Artificial Sequence
  Cyclic GFR-binding peptide
  MOD_RES (3)..(4): Xaa is C or S
KAXXAPTKLEPISVLYLDSSNNVIKFKYE

SEQ ID NO: 94551 - protein, 30 aa, Artificial Sequence; identical to SEQ ID NO: 36064
  Cyclic GFR-binding peptide
  MOD_RES (30)..(30): Xaa is C or S

SEQ ID NO: 94552 - protein, 30 aa, Artificial Sequence; identical to SEQ ID NO: 7574
  Cyclic GFR-binding peptide

SEQ ID NO: 94553 - protein, 20 aa, Artificial Sequence
  Cyclic GFR-binding peptide
EPISVLYLDSSNNVIKFKYE

SEQ ID NO: 94554 - protein, 32 aa, Artificial Sequence; identical to SEQ ID NO: 43310
  Cyclic GFR-binding peptide
  MOD_RES (30)..(32): Xaa is C or S

SEQ ID NO: 94555 - protein, 28 aa, Artificial Sequence
  Cyclic GFR-binding peptide
  MOD_RES (1)..(1): Xaa is C or S
XVPQDLNAISILYFVGRTPKVLKKYRMV

SEQ ID NO: 94556 - protein, 35 aa, Artificial Sequence; identical to SEQ ID NO: 7577
  Cyclic GFR-binding peptide
  MOD_RES (32)..(34): Xaa is C or S

SEQ ID NO: 94557 - protein, 42 aa, Artificial Sequence; identical to SEQ ID NO: 7581
  Cyclic GFR-binding peptide
  MOD_RES (6)..(7)..(39)..(41): Xaa is C or S

SEQ ID NO: 94558 - protein, 33 aa, Artificial Sequence; identical to SEQ ID NO: 36077
  Cyclic GFR-binding peptide
  MOD_RES (1)..(33): Xaa is C or S

SEQ ID NO: 94559 - protein, 20 aa, Artificial Sequence
  Cyclic GFR-binding peptide
SATSMLYYDNGRVLLLRKHR

SEQ ID NO: 94560 - protein, 29 aa, Artificial Sequence
  Cyclic GFR-binding peptide
  MOD_RES (27)..(29): Xaa is C or S
TSATSMLYYDNGRVLLLRKHRMIVEEXGX

SEQ ID NO: 94561 - protein, 33 aa, Artificial Sequence
  Cyclic GFR-binding peptide
  MOD_RES (3)..(4): Xaa is C or S
EPXXVPEKMSPISILYKDENKNVVLKYHYNMTV

SEQ ID NO: 94562 - protein, 41 aa, Artificial Sequence
  Cyclic GFR-binding peptide
  MOD_RES (6)..(7)..(39)..(41): Xaa is C or S
HVPKPXXAPTKLSPISVLYKDDSSNVILKYHYNMVVRSXGX

SEQ ID NO: 94563 - protein, 32 aa, Artificial Sequence; identical to SEQ ID NO: 7584
  Cyclic GFR-binding peptide
  MOD_RES (4)..(5): Xaa is C or S

SEQ ID NO: 94564 - protein, 32 aa, Artificial Sequence; identical to SEQ ID NO: 7585
  Cyclic GFR-binding peptide
  MOD_RES (6)..(7): Xaa is C or S

SEQ ID NO: 94565 - protein, 37 aa, Artificial Sequence; identical to SEQ ID NO: 41831
  Cyclic GFR-binding peptide
  MOD_RES (5)..(6): Xaa is C or S

SEQ ID NO: 94566 - protein, 30 aa, Artificial Sequence; identical to SEQ ID NO: 7586
  Cyclic GFR-binding peptide
  MOD_RES (27)..(29): Xaa is C or S

SEQ ID NO: 94567 - protein, 41 aa, Artificial Sequence; identical to SEQ ID NO: 7588
  Cyclic GFR-binding peptide
  MOD_RES (6)..(7)..(40): Xaa is C or S

SEQ ID NO: 94568 - protein, 39 aa, Artificial Sequence; identical to SEQ ID NO: 36083
  Cyclic GFR-binding peptide
  MOD_RES (4)..(5)..(38): Xaa is C or S

SEQ ID NO: 94569 - protein, 31 aa, Artificial Sequence; identical to SEQ ID NO: 36084
  Cyclic GFR-binding peptide
  MOD_RES (2)..(3): Xaa is C or S

SEQ ID NO: 94570 - protein, 34 aa, Artificial Sequence; identical to SEQ ID NO: 7591
  Cyclic GFR-binding peptide
  MOD_RES (6)..(7): Xaa is C or S

SEQ ID NO: 94571 - protein, 33 aa, Artificial Sequence; identical to SEQ ID NO: 7592
  Cyclic GFR-binding peptide
  MOD_RES (1)..(32): Xaa is C or S

SEQ ID NO: 94572 - protein, 31 aa, Artificial Sequence; identical to SEQ ID NO: 7593
  Cyclic GFR-binding peptide
  MOD_RES (30)..(30): Xaa is C or S

SEQ ID NO: 94573 - protein, 35 aa, Artificial Sequence; identical to SEQ ID NO: 36089
  Cyclic GFR-binding peptide
  MOD_RES (4)..(5): Xaa is C or S

SEQ ID NO: 94574 - protein, 32 aa, Artificial Sequence; identical to SEQ ID NO: 7595
  Cyclic GFR-binding peptide
  MOD_RES (5)..(6): Xaa is C or S

SEQ ID NO: 94575 - protein, 38 aa, Artificial Sequence; identical to SEQ ID NO: 77405
  Cyclic GFR-binding peptide
  MOD_RES (6)..(7): Xaa is C or S

SEQ ID NO: 94576 - protein, 29 aa, Artificial Sequence
  Cyclic GFR-binding peptide
  MOD_RES (4)..(4): Xaa is C or S
KPTXAPTKLSATSVLYYDDSSNVILRKHR

SEQ ID NO: 94577 - protein, 30 aa, Artificial Sequence; identical to SEQ ID NO: 36091
  Cyclic GFR-binding peptide
  MOD_RES (30)..(30): Xaa is C or S

SEQ ID NO: 94578 - protein, 31 aa, Artificial Sequence; identical to SEQ ID NO: 36092
  Cyclic GFR-binding peptide
  MOD_RES (1)..(2): Xaa is C or S

SEQ ID NO: 94579 - protein, 38 aa, Artificial Sequence; identical to SEQ ID NO: 36094
  Cyclic GFR-binding peptide
  MOD_RES (7)..(7): Xaa is C or S

SEQ ID NO: 94580 - protein, 27 aa, Artificial Sequence
  Cyclic GFR-binding peptide
LNAISILYFDSANNVVLKKYRDMVVES

SEQ ID NO: 94581 - protein, 35 aa, Artificial Sequence; identical to SEQ ID NO: 7604
  Cyclic GFR-binding peptide
  MOD_RES (7)..(7): Xaa is C or S

SEQ ID NO: 94582 - protein, 37 aa, Artificial Sequence; identical to SEQ ID NO: 7607
  Cyclic GFR-binding peptide
  MOD_RES (4)..(5)..(37): Xaa is C or S

SEQ ID NO: 94583 - protein, 34 aa, Artificial Sequence
  Cyclic GFR-binding peptide
  MOD_RES (5)..(6): Xaa is C or S
TPPTXXVPTRLSATSILYYDSANNVVLRKHRDMV

SEQ ID NO: 94584 - protein, 25 aa, Artificial Sequence
  Cyclic GFR-binding peptide
VKTSPISMLYKDNGRVLLLKYHYMI

SEQ ID NO: 94585 - protein, 26 aa, Artificial Sequence
  Cyclic GFR-binding peptide
DLNAISILYFIGKTPKILKKYRMIVK

SEQ ID NO: 94586 - protein, 29 aa, Artificial Sequence
  Cyclic GFR-binding peptide
  MOD_RES (2)..(3): Xaa is C or S
PXXVSQDLSPISILYKIGKTPKILKYHYM

SEQ ID NO: 94587 - protein, 36 aa, Artificial Sequence
  Cyclic GFR-binding peptide
  MOD_RES (5)..(6): Xaa is C or S
APASXXVPARLSATSILYYDAANNVVLRKHRDMVVE

SEQ ID NO: 94588 - protein, 28 aa, Artificial Sequence
  Cyclic GFR-binding peptide
  MOD_RES (1)..(1): Xaa is C or S
XVPARLSATSILYYDAANNVVLRKHRDM

SEQ ID NO: 94589 - protein, 33 aa, Artificial Sequence; identical to SEQ ID NO: 7614
  Cyclic GFR-binding peptide
  MOD_RES (1)..(32): Xaa is C or S

SEQ ID NO: 94590 - protein, 26 aa, Artificial Sequence
  Cyclic GFR-binding peptide
ARLSPISILYKDAANNVVLKYHYDMV

SEQ ID NO: 94591 - protein, 21 aa, Artificial Sequence
  Cyclic GFR-binding peptide
LEPISILYLIGKTPKIKFKYE

SEQ ID NO: 94592 - protein, 29 aa, Artificial Sequence
  Cyclic GFR-binding peptide
EKMSATSILYYDENKNVVLRKHRNMTVES

SEQ ID NO: 94593 - protein, 42 aa, Artificial Sequence; identical to SEQ ID NO: 41862
  Cyclic GFR-binding peptide
  MOD_RES (5)..(6)..(39)..(41): Xaa is C or S

SEQ ID NO: 94594 - protein, 37 aa, Artificial Sequence
  Cyclic GFR-binding peptide
  MOD_RES (3)..(4)..(36): Xaa is C or S
PTXXVPTRLSPISILYKDSANNVVLKYHYDMVVESXG

SEQ ID NO: 94595 - protein, 30 aa, Artificial Sequence
  Cyclic GFR-binding peptide
  MOD_RES (1)..(1): Xaa is C or S
XVPTRLSPISILYKDSANNVVLKYHYDMVV

SEQ ID NO: 94596 - protein, 26 aa, Artificial Sequence
  Cyclic GFR-binding peptide
ELNAISMLYFDENEKVVLKKYRDMVV

SEQ ID NO: 94597 - protein, 30 aa, Artificial Sequence
  Cyclic GFR-binding peptide
PEKMSPISILYKDENKNVVLKYHYNMTVES

SEQ ID NO: 94598 - protein, 33 aa, Artificial Sequence; identical to SEQ ID NO: 7624
  Cyclic GFR-binding peptide
  MOD_RES (4)..(5): Xaa is C or S

SEQ ID NO: 94599 - protein, 22 aa, Artificial Sequence
  Cyclic GFR-binding peptide
LEPISILYLDAANNVVKFKYED

SEQ ID NO: 94600 - protein, 27 aa, Artificial Sequence
  Cyclic GFR-binding peptide
  MOD_RES (27)..(27): Xaa is C or S
SPISVLYKDDSSNVILKYHYNMVVRSX

SEQ ID NO: 94601 - protein, 28 aa, Artificial Sequence
  Cyclic GFR-binding peptide
QDLEPISILYLIGKTPKIKFKYEMIVKS

SEQ ID NO: 94602 - protein, 25 aa, Artificial Sequence
  Cyclic GFR-binding peptide
TPTKMNAISMLYFNDKQQIILKKYR

SEQ ID NO: 94603 - protein, 30 aa, Artificial Sequence; identical to SEQ ID NO: 7634
  Cyclic GFR-binding peptide
  MOD_RES (27)..(29): Xaa is C or S

SEQ ID NO: 94604 - protein, 28 aa, Artificial Sequence
  Cyclic GFR-binding peptide
  MOD_RES (1)..(2): Xaa is C or S
XXAPTKLNAISVLYFDSSNNVILKKYRN

SEQ ID NO: 94605 - protein, 31 aa, Artificial Sequence; identical to SEQ ID NO: 7636
  Cyclic GFR-binding peptide
  MOD_RES (1)..(1): Xaa is C or S

SEQ ID NO: 94606 - protein, 36 aa, Artificial Sequence; identical to SEQ ID NO: 7637
  Cyclic GFR-binding peptide
  MOD_RES (2)..(3)..(34)..(36): Xaa is C or S

SEQ ID NO: 94607 - protein, 28 aa, Artificial Sequence
  Cyclic GFR-binding peptide
  MOD_RES (27)..(27): Xaa is C or S
SPINILYFDENKNVVYGKIPNMTVESXA

SEQ ID NO: 94608 - protein, 26 aa, Artificial Sequence
  Cyclic GFR-binding peptide
VPTRLSPINILYFDSANNVVYGKIPD

SEQ ID NO: 94609 - protein, 34 aa, Artificial Sequence; identical to SEQ ID NO: 7639
  Cyclic GFR-binding peptide
  MOD_RES (1)..(34): Xaa is C or S

SEQ ID NO: 94610 - protein, 37 aa, Artificial Sequence
  Cyclic GFR-binding peptide
  MOD_RES (6)..(7): Xaa is C or S
GIPEPXXVPEKMSPISILYKDENKNVVLKYHYNMTVE

SEQ ID NO: 94611 - protein, 37 aa, Artificial Sequence; identical to SEQ ID NO: 7643
  Cyclic GFR-binding peptide
  MOD_RES (6)..(7): Xaa is C or S

SEQ ID NO: 94612 - protein, 36 aa, Artificial Sequence
  Cyclic GFR-binding peptide
  MOD_RES (1)..(33)..(35): Xaa is C or S
XTPTKMEPISMLYLNDKQQIIKFKYEGMVVDRXGXS

SEQ ID NO: 94613 - protein, 29 aa, Artificial Sequence
  Cyclic GFR-binding peptide
PTKLNAISVLYFDSSNNVILKKYRNMVVK

SEQ ID NO: 94614 - protein, 30 aa, Artificial Sequence; identical to SEQ ID NO: 7648
  Cyclic GFR-binding peptide
  MOD_RES (3)..(4): Xaa is C or S

SEQ ID NO: 94615 - protein, 31 aa, Artificial Sequence; identical to SEQ ID NO: 7649
  Cyclic GFR-binding peptide
  MOD_RES (30)..(30): Xaa is C or S

SEQ ID NO: 94616 - protein, 34 aa, Artificial Sequence; identical to SEQ ID NO: 7652
  Cyclic GFR-binding peptide
  MOD_RES (33)..(33): Xaa is C or S

SEQ ID NO: 94617 - protein, 42 aa, Artificial Sequence; identical to SEQ ID NO: 7653
  Cyclic GFR-binding peptide
  MOD_RES (7)..(39)..(41): Xaa is C or S

SEQ ID NO: 94618 - protein, 30 aa, Artificial Sequence
  Cyclic GFR-binding peptide
  MOD_RES (1)..(2): Xaa is C or S
XXVPQDLSPINILYFVGRTPKVYGKIPMVV

SEQ ID NO: 94619 - protein, 40 aa, Artificial Sequence; identical to SEQ ID NO: 77427
  Cyclic GFR-binding peptide
  MOD_RES (4)..(5)..(37)..(39): Xaa is C or S

SEQ ID NO: 94620 - protein, 33 aa, Artificial Sequence; identical to SEQ ID NO: 7654
  Cyclic GFR-binding peptide
  MOD_RES (33)..(33): Xaa is C or S

SEQ ID NO: 94621 - protein, 37 aa, Artificial Sequence; identical to SEQ ID NO: 36143
  Cyclic GFR-binding peptide
  MOD_RES (3)..(4)..(35)..(37): Xaa is C or S

SEQ ID NO: 94622 - protein, 22 aa, Artificial Sequence
  Cyclic GFR-binding peptide
SATSILYYDSANNVVLRKHRDM

SEQ ID NO: 94623 - protein, 30 aa, Artificial Sequence; identical to SEQ ID NO: 7655
  Cyclic GFR-binding peptide
  MOD_RES (2)..(3): Xaa is C or S

SEQ ID NO: 94624 - protein, 23 aa, Artificial Sequence
  Cyclic GFR-binding peptide
EPISILYLVGRKPKVKFKYEMIV

SEQ ID NO: 94625 - protein, 33 aa, Artificial Sequence; identical to SEQ ID NO: 41900
  Cyclic GFR-binding peptide
  MOD_RES (3)..(4): Xaa is C or S

SEQ ID NO: 94626 - protein, 40 aa, Artificial Sequence; identical to SEQ ID NO: 36149
  Cyclic GFR-binding peptide
  MOD_RES (5)..(37)..(39): Xaa is C or S

SEQ ID NO: 94627 - protein, 31 aa, Artificial Sequence; identical to SEQ ID NO: 41905
  Cyclic GFR-binding peptide
  MOD_RES (3)..(4): Xaa is C or S

SEQ ID NO: 94628 - protein, 40 aa, Artificial Sequence
  Cyclic GFR-binding peptide
  MOD_RES (5)..(6)..(38)..(40): Xaa is C or S
SAGPXXTPTKMEPISMLYLNDKQQIIKFKYEGMVVDRXGX

SEQ ID NO: 94629 - protein, 36 aa, Artificial Sequence; identical to SEQ ID NO: 7661
  Cyclic GFR-binding peptide
  MOD_RES (6)..(7): Xaa is C or S

SEQ ID NO: 94630 - protein, 29 aa, Artificial Sequence
  Cyclic GFR-binding peptide
APTQLEPISVLYLDDSSNVIKFKYENMVV

SEQ ID NO: 94631 - protein, 26 aa, Artificial Sequence
  Cyclic GFR-binding peptide
LSPISILYKDSANNVVLKYHYDMVVE

SEQ ID NO: 94632 - protein, 25 aa, Artificial Sequence
  Cyclic GFR-binding peptide
EPISILYLVGRTPKVKFKYEMVVKS

SEQ ID NO: 94633 - protein, 23 aa, Artificial Sequence
  Cyclic GFR-binding peptide
DLNAISILYFIGKTPKILKKYRM

SEQ ID NO: 94634 - protein, 26 aa, Artificial Sequence
  Cyclic GFR-binding peptide
TKLEPISVLYLDDSSNVIKFKYENMV

SEQ ID NO: 94635 - protein, 35 aa, Artificial Sequence; identical to SEQ ID NO: 7667
  Cyclic GFR-binding peptide
  MOD_RES (32)..(34): Xaa is C or S

SEQ ID NO: 94636 - protein, 39 aa, Artificial Sequence; identical to SEQ ID NO: 7668
  Cyclic GFR-binding peptide
  MOD_RES (6)..(7)..(39): Xaa is C or S

SEQ ID NO: 94637 - protein, 40 aa, Artificial Sequence
  Cyclic GFR-binding peptide
  MOD_RES (6)..(7)..(39): Xaa is C or S
GSAGPXXTPTKMSATSMLYYNDKQQIILRKHRGMVVDRXG

SEQ ID NO: 94638 - protein, 37 aa, Artificial Sequence
  Cyclic GFR-binding peptide
  MOD_RES (4)..(5)..(37): Xaa is C or S
PEPXXVPEKMNAISILYFDENKNVVLKKYRNMTVESX

SEQ ID NO: 94639 - protein, 35 aa, Artificial Sequence
  Cyclic GFR-binding peptide
  MOD_RES (1)..(32)..(34): Xaa is C or S
XAPVKTSATSMLYYDNGRVLLLRKHRMIVEEXGXL

SEQ ID NO: 94640 - protein, 39 aa, Artificial Sequence; identical to SEQ ID NO: 7673
  Cyclic GFR-binding peptide
  MOD_RES (6)..(7)..(38): Xaa is C or S

SEQ ID NO: 94641 - protein, 30 aa, Artificial Sequence; identical to SEQ ID NO: 7676
  Cyclic GFR-binding peptide
  MOD_RES (2)..(3): Xaa is C or S

SEQ ID NO: 94642 - protein, 36 aa, Artificial Sequence; identical to SEQ ID NO: 77443
  Cyclic GFR-binding peptide
  MOD_RES (6)..(7): Xaa is C or S

SEQ ID NO: 94643 - protein, 23 aa, Artificial Sequence
  Cyclic GFR-binding peptide
NAISILYFIGKTPKILKKYRMIV

SEQ ID NO: 94644 - protein, 36 aa, Artificial Sequence; identical to SEQ ID NO: 41927
  Cyclic GFR-binding peptide
  MOD_RES (6)..(7): Xaa is C or S

SEQ ID NO: 94645 - protein, 24 aa, Artificial Sequence
  Cyclic GFR-binding peptide
LEPISVLYLDDSSNVIKFKYENMV

SEQ ID NO: 94646 - protein, 31 aa, Artificial Sequence
  Cyclic GFR-binding peptide
  MOD_RES (5)..(6): Xaa is C or S
TPPTXXVPTRLSPISILYKDSANNVVLKYHY

SEQ ID NO: 94647 - protein, 24 aa, Artificial Sequence
  Cyclic GFR-binding peptide
LEPISVLYLDSSNNVIKFKYENMV

SEQ ID NO: 94648 - protein, 25 aa, Artificial Sequence
  Cyclic GFR-binding peptide
EPISILYLDENKNVVKFKYENMTVE

SEQ ID NO: 94649 - protein, 30 aa, Artificial Sequence; identical to SEQ ID NO: 36172
  Cyclic GFR-binding peptide
  MOD_RES (27)..(29): Xaa is C or S

SEQ ID NO: 94650 - protein, 28 aa, Artificial Sequence
  Cyclic GFR-binding peptide
  MOD_RES (27)..(27): Xaa is C or S
SATSVLYYDDSSNVILRKHRNMVVRSXG

SEQ ID NO: 94651 - protein, 29 aa, Artificial Sequence
  Cyclic GFR-binding peptide
  MOD_RES (2)..(3): Xaa is C or S
PXXAPTKLSATSVLYYDDSSNVILRKHRN

SEQ ID NO: 94652 - protein, 40 aa, Artificial Sequence; identical to SEQ ID NO: 7686
  Cyclic GFR-binding peptide
  MOD_RES (4)..(5)..(37)..(39): Xaa is C or S

SEQ ID NO: 94653 - protein, 28 aa, Artificial Sequence
  Cyclic GFR-binding peptide
ELEPISMLYLDENEKVVKFKYEDMVVEG

SEQ ID NO: 94654 - protein, 31 aa, Artificial Sequence
  Cyclic GFR-binding peptide
  MOD_RES (28)..(30): Xaa is C or S
ALSPINILYFVGRKPKVYGKIPMIVRSXKXS

SEQ ID NO: 94655 - protein, 23 aa, Artificial Sequence
  Cyclic GFR-binding peptide
KLSPINVLYFDDMGVPTYGKIPE

SEQ ID NO: 94656 - protein, 37 aa, Artificial Sequence; identical to SEQ ID NO: 41943
  Cyclic GFR-binding peptide
  MOD_RES (5)..(6): Xaa is C or S

SEQ ID NO: 94657 - protein, 28 aa, Artificial Sequence
  Cyclic GFR-binding peptide
PTQLSPISVLYKDDSSNVILKYHYNMVV

SEQ ID NO: 94658 - protein, 28 aa, Artificial Sequence
  Cyclic GFR-binding peptide
  MOD_RES (1)..(1): Xaa is C or S
XVPTELSATSMLYYDEYDKVVLRKHREM

SEQ ID NO: 94659 - protein, 29 aa, Artificial Sequence
  Cyclic GFR-binding peptide
  MOD_RES (27)..(29): Xaa is C or S
SPISILYKDKGVVTYLKYHYGMAVSEXGX

SEQ ID NO: 94660 - protein, 41 aa, Artificial Sequence
  Cyclic GFR-binding peptide
  MOD_RES (6)..(7)..(39)..(41): Xaa is C or S
GSAGPXXTPTKMSPISMLYKNDKQQIILKYHYGMVVDRXGX

SEQ ID NO: 94661 - protein, 25 aa, Artificial Sequence
  Cyclic GFR-binding peptide
VPARLNAISILYFDAANNVVLKKYR

SEQ ID NO: 94662 - protein, 25 aa, Artificial Sequence
  Cyclic GFR-binding peptide
TKLEPISVLYLDDMGVPTKFKYEEG

SEQ ID NO: 94663 - protein, 35 aa, Artificial Sequence; identical to SEQ ID NO: 7695
  Cyclic GFR-binding peptide
  MOD_RES (1)..(2)..(33)..(35): Xaa is C or S

SEQ ID NO: 94664 - protein, 34 aa, Artificial Sequence
  Cyclic GFR-binding peptide
  MOD_RES (3)..(4): Xaa is C or S
KAXXVPTKLSATSILYYDKGVVTYLRKHRGMAVS

SEQ ID NO: 94665 - protein, 32 aa, Artificial Sequence; identical to SEQ ID NO: 41961
  Cyclic GFR-binding peptide
  MOD_RES (31)..(31): Xaa is C or S

SEQ ID NO: 94666 - protein, 34 aa, Artificial Sequence
  Cyclic GFR-binding peptide
  MOD_RES (5)..(6): Xaa is C or S
SAGPXXTPTKMEPISMLYLNDKQQIIKFKYEGMV

SEQ ID NO: 94667 - protein, 36 aa, Artificial Sequence; identical to SEQ ID NO: 7703
  Cyclic GFR-binding peptide
  MOD_RES (6)..(7): Xaa is C or S

SEQ ID NO: 94668 - protein, 30 aa, Artificial Sequence; identical to SEQ ID NO: 7704
  Cyclic GFR-binding peptide
  MOD_RES (2)..(2): Xaa is C or S

SEQ ID NO: 94669 - protein, 35 aa, Artificial Sequence
  Cyclic GFR-binding peptide
  MOD_RES (2)..(3)..(35): Xaa is C or S
PXXTPTKMSATSMLYYNDKQQIILRKHRGMVVDRX

SEQ ID NO: 94670 - protein, 31 aa, Artificial Sequence; identical to SEQ ID NO: 41968
  Cyclic GFR-binding peptide

SEQ ID NO: 94671 - protein, 34 aa, Artificial Sequence; identical to SEQ ID NO: 36192
  Cyclic GFR-binding peptide
  MOD_RES (3)..(4): Xaa is C or S

SEQ ID NO: 94672 - protein, 26 aa, Artificial Sequence
  Cyclic GFR-binding peptide
KLSATSVLYYDDMGVPTLRKHREGMS

SEQ ID NO: 94673 - protein, 31 aa, Artificial Sequence
  Cyclic GFR-binding peptide
  MOD_RES (28)..(30): Xaa is C or S
KTEPISMLYLDNGRVLLKFKYEMIVEEXGXL

SEQ ID NO: 94674 - protein, 34 aa, Artificial Sequence; identical to SEQ ID NO: 7706
  Cyclic GFR-binding peptide
  MOD_RES (2)..(3)..(34): Xaa is C or S

SEQ ID NO: 94675 - protein, 40 aa, Artificial Sequence
  Cyclic GFR-binding peptide
  MOD_RES (5)..(6)..(38)..(40): Xaa is C or S
SAGPXXTPTKMSPISMLYKNDKQQIILKYHYGMVVDRXGX

SEQ ID NO: 94676 - protein, 32 aa, Artificial Sequence; identical to SEQ ID NO: 41969
  Cyclic GFR-binding peptide
  MOD_RES (4)..(5): Xaa is C or S

SEQ ID NO: 94677 - protein, 39 aa, Artificial Sequence; identical to SEQ ID NO: 36194
  Cyclic GFR-binding peptide
  MOD_RES (6)..(7)..(39): Xaa is C or S

SEQ ID NO: 94678 - protein, 36 aa, Artificial Sequence; identical to SEQ ID NO: 36196
  Cyclic GFR-binding peptide
  MOD_RES (33)..(35): Xaa is C or S

SEQ ID NO: 94679 - protein, 33 aa, Artificial Sequence; identical to SEQ ID NO: 7709
  Cyclic GFR-binding peptide
  MOD_RES (2)..(3): Xaa is C or S

SEQ ID NO: 94680 - protein, 32 aa, Artificial Sequence; identical to SEQ ID NO: 41972
  Cyclic GFR-binding peptide
  MOD_RES (2)..(3): Xaa is C or S

SEQ ID NO: 94681 - protein, 29 aa, Artificial Sequence
  Cyclic GFR-binding peptide
  MOD_RES (27)..(29): Xaa is C or S
EPISVLYLDSSNNVIKFKYENMVVKAXGX

SEQ ID NO: 94682 - protein, 36 aa, Artificial Sequence
  Cyclic GFR-binding peptide
  MOD_RES (2)..(3)..(35): Xaa is C or S
PXXTPTKMSATSMLYYNDKQQIILRKHRGMVVDRXG

SEQ ID NO: 94683 - protein, 34 aa, Artificial Sequence; identical to SEQ ID NO: 41975
  Cyclic GFR-binding peptide
  MOD_RES (4)..(5): Xaa is C or S

SEQ ID NO: 94684 - protein, 35 aa, Artificial Sequence; identical to SEQ ID NO: 41978
  Cyclic GFR-binding peptide
  MOD_RES (1)..(2)..(34): Xaa is C or S

SEQ ID NO: 94685 - protein, 31 aa, Artificial Sequence; identical to SEQ ID NO: 77457
  Cyclic GFR-binding peptide
  MOD_RES (1)..(2): Xaa is C or S

SEQ ID NO: 94686 - protein, 23 aa, Artificial Sequence
  Cyclic GFR-binding peptide
VKTSATSMLYYDNGRVLLLRKHR

SEQ ID NO: 94687 - protein, 37 aa, Artificial Sequence; identical to SEQ ID NO: 7716
  Cyclic GFR-binding peptide
  MOD_RES (1)..(2)..(34)..(36): Xaa is C or S

SEQ ID NO: 94688 - protein, 32 aa, Artificial Sequence
  Cyclic GFR-binding peptide
  MOD_RES (30)..(32): Xaa is C or S
TKMSPISMLYKNDKQQIILKYHYGMVVDRXGX

SEQ ID NO: 94689 - protein, 22 aa, Artificial Sequence
  Cyclic GFR-binding peptide
KMSATSILYYDENKNVVLRKHR

SEQ ID NO: 94690 - protein, 32 aa, Artificial Sequence; identical to SEQ ID NO: 7719
  Cyclic GFR-binding peptide
  MOD_RES (3)..(3): Xaa is C or S

SEQ ID NO: 94691 - protein, 28 aa, Artificial Sequence
  Cyclic GFR-binding peptide
KLNAISILYFDKGVVTYLKKYRGMAVSE

SEQ ID NO: 94692 - protein, 34 aa, Artificial Sequence; identical to SEQ ID NO: 77463
  Cyclic GFR-binding peptide
  MOD_RES (5)..(6): Xaa is C or S

SEQ ID NO: 94693 - protein, 22 aa, Artificial Sequence
  Cyclic GFR-binding peptide
SPINMLYFDENEKVVYGKIPDM

SEQ ID NO: 94694 - protein, 35 aa, Artificial Sequence; identical to SEQ ID NO: 41997
  Cyclic GFR-binding peptide
  MOD_RES (3)..(4)..(35): Xaa is C or S

SEQ ID NO: 94695 - protein, 32 aa, Artificial Sequence; identical to SEQ ID NO: 36218
  Cyclic GFR-binding peptide
  MOD_RES (2)..(3): Xaa is C or S

SEQ ID NO: 94696 - protein, 39 aa, Artificial Sequence; identical to SEQ ID NO: 36221
  Cyclic GFR-binding peptide
  MOD_RES (5)..(6)..(38): Xaa is C or S

SEQ ID NO: 94697 - protein, 37 aa, Artificial Sequence; identical to SEQ ID NO: 7726
  Cyclic GFR-binding peptide
  MOD_RES (4)..(5)..(37): Xaa is C or S

SEQ ID NO: 94698 - protein, 28 aa, Artificial Sequence
  Cyclic GFR-binding peptide
  MOD_RES (2)..(3): Xaa is C or S
AXXVPTKLSPISILYKDKGVVTYLKYHY

SEQ ID NO: 94699 - protein, 26 aa, Artificial Sequence
  Cyclic GFR-binding peptide
LSPISMLYKDENEKVVLKYHYDMVVE

SEQ ID NO: 94700 - protein, 28 aa, Artificial Sequence
  Cyclic GFR-binding peptide
  MOD_RES (1)..(2): Xaa is C or S
XXVPTKLSATSVLYYDDMGVPTLRKHRE

SEQ ID NO: 94701 - protein, 27 aa, Artificial Sequence
  Cyclic GFR-binding peptide
RLEPISILYLDAANNVVKFKYEDMVVE

SEQ ID NO: 94702 - protein, 25 aa, Artificial Sequence
  Cyclic GFR-binding peptide
APTKLNAISVLYFDSSNNVILKKYR

SEQ ID NO: 94703 - protein, 25 aa, Artificial Sequence
  Cyclic GFR-binding peptide
KTNAISMLYFDNGRVLLLKKYRMIV

SEQ ID NO: 94704 - protein, 30 aa, Artificial Sequence
  Cyclic GFR-binding peptide
  MOD_RES (1)..(1): Xaa is C or S
XAPVKTSATSMLYYDNGRVLLLRKHRMIVE

SEQ ID NO: 94705 - protein, 40 aa, Artificial Sequence
  Cyclic GFR-binding peptide
  MOD_RES (5)..(6)..(38)..(40): Xaa is C or S
IPEPXXVPEKMNAISILYFDENKNVVLKKYRNMTVESXAX

SEQ ID NO: 94706 - protein, 33 aa, Artificial Sequence
  Cyclic GFR-binding peptide
  MOD_RES (32)..(32): Xaa is C or S
VPEKMSATSILYYDENKNVVLRKHRNMTVESXA

SEQ ID NO: 94707 - protein, 33 aa, Artificial Sequence; identical to SEQ ID NO: 36232
  Cyclic GFR-binding peptide
  MOD_RES (1)..(1): Xaa is C or S

SEQ ID NO: 94708 - protein, 24 aa, Artificial Sequence
  Cyclic GFR-binding peptide
SATSMLYYDENEKVVLRKHRDMVV

SEQ ID NO: 94709 - protein, 28 aa, Artificial Sequence
  Cyclic GFR-binding peptide
  MOD_RES (1)..(1): Xaa is C or S
XVPTELSPISMLYKDEYDKVVLKYHYEM

SEQ ID NO: 94710 - protein, 31 aa, Artificial Sequence
  Cyclic GFR-binding peptide
  MOD_RES (28)..(30): Xaa is C or S
KTSPISMLYKDNGRVLLLKYHYMIVEEXGXL

SEQ ID NO: 94711 - protein, 33 aa, Artificial Sequence; identical to SEQ ID NO: 42018
  Cyclic GFR-binding peptide
  MOD_RES (1)..(2): Xaa is C or S

SEQ ID NO: 94712 - protein, 36 aa, Artificial Sequence; identical to SEQ ID NO: 7748
  Cyclic GFR-binding peptide
  MOD_RES (5)..(6): Xaa is C or S

SEQ ID NO: 94713 - protein, 33 aa, Artificial Sequence; identical to SEQ ID NO: 42030
  Cyclic GFR-binding peptide
  MOD_RES (5)..(6): Xaa is C or S

SEQ ID NO: 94714 - protein, 25 aa, Artificial Sequence
  Cyclic GFR-binding peptide
NAISILYFVGRTPKVLKKYRMVVKS

SEQ ID NO: 94715 - protein, 37 aa, Artificial Sequence
  Cyclic GFR-binding peptide
  MOD_RES (4)..(5)..(37): Xaa is C or S
PEPXXVPEKMSPISILYKDENKNVVLKYHYNMTVESX

SEQ ID NO: 94716 - protein, 39 aa, Artificial Sequence
  Cyclic GFR-binding peptide
  MOD_RES (5)..(6)..(38): Xaa is C or S
TPPTXXVPTRLSPISILYKDSANNVVLKYHYDMVVESXG

SEQ ID NO: 94717 - protein, 32 aa, Artificial Sequence
  Cyclic GFR-binding peptide
  MOD_RES (30)..(32): Xaa is C or S
TKMEPISMLYLNDKQQIIKFKYEGMVVDRXGX

SEQ ID NO: 94718 - protein, 42 aa, Artificial Sequence; identical to SEQ ID NO: 36247
  Cyclic GFR-binding peptide
  MOD_RES (6)..(7)..(39)..(41): Xaa is C or S

SEQ ID NO: 94719 - protein, 25 aa, Artificial Sequence
  Cyclic GFR-binding peptide
PTKMSATSMLYYNDKQQIILRKHRG

SEQ ID NO: 94720 - protein, 22 aa, Artificial Sequence
  Cyclic GFR-binding peptide
LSATSILYYIGKTPKILRKHRM

SEQ ID NO: 94721 - protein, 27 aa, Artificial Sequence
  Cyclic GFR-binding peptide
VKTSPISMLYKDNGRVLLLKYHYMIVE

SEQ ID NO: 94722 - protein, 34 aa, Artificial Sequence; identical to SEQ ID NO: 7765
  Cyclic GFR-binding peptide
  MOD_RES (5)..(6): Xaa is C or S

SEQ ID NO: 94723 - protein, 27 aa, Artificial Sequence
  Cyclic GFR-binding peptide
APTKLSATSVLYYDDSSNVILRKHRNM

SEQ ID NO: 94724 - protein, 36 aa, Artificial Sequence
  Cyclic GFR-binding peptide
  MOD_RES (1)..(2)..(33)..(35): Xaa is C or S
XXVPQALSPINILYFVGRKPKVYGKIPMIVRSXKXS

SEQ ID NO: 94725 - protein, 36 aa, Artificial Sequence
  Cyclic GFR-binding peptide
  MOD_RES (2)..(3)..(35): Xaa is C or S
PXXVPEKMSATSILYYDENKNVVLRKHRNMTVESXA

SEQ ID NO: 94726 - protein, 41 aa, Artificial Sequence; identical to SEQ ID NO: 7771
  Cyclic GFR-binding peptide
  MOD_RES (5)..(6)..(38)..(40): Xaa is C or S

SEQ ID NO: 94727 - protein, 34 aa, Artificial Sequence; identical to SEQ ID NO: 77491
  Cyclic GFR-binding peptide
  MOD_RES (3)..(4): Xaa is C or S

SEQ ID NO: 94728 - protein, 40 aa, Artificial Sequence
  Cyclic GFR-binding peptide
  MOD_RES (4)..(5)..(37)..(39): Xaa is C or S
AGPXXTPTKMEPISMLYLNDKQQIIKFKYEGMVVDRXGXS

SEQ ID NO: 94729 - protein, 28 aa, Artificial Sequence
  Cyclic GFR-binding peptide
  MOD_RES (1)..(2): Xaa is C or S
XXAPVKTSATSMLYYDNGRVLLLRKHRM

SEQ ID NO: 94730 - protein, 36 aa, Artificial Sequence; identical to SEQ ID NO: 42051
  Cyclic GFR-binding peptide
  MOD_RES (2)..(3)..(35): Xaa is C or S

SEQ ID NO: 94731 - protein, 35 aa, Artificial Sequence
  Cyclic GFR-binding peptide
  MOD_RES (4)..(5): Xaa is C or S
PEPXXVPEKMSATSILYYDENKNVVLRKHRNMTVE

SEQ ID NO: 94732 - protein, 30 aa, Artificial Sequence; identical to SEQ ID NO: 36261
  Cyclic GFR-binding peptide
  MOD_RES (29)..(29): Xaa is C or S

SEQ ID NO: 94733 - protein, 28 aa, Artificial Sequence
  Cyclic GFR-binding peptide
  MOD_RES (28)..(28): Xaa is C or S
LSATSMLYYDEYDKVVLRKHREMVVEGX

SEQ ID NO: 94734 - protein, 29 aa, Artificial Sequence
  Cyclic GFR-binding peptide
TKLSPINILYFDKGVVTYYGKIPGMAVSE

SEQ ID NO: 94735 - protein, 31 aa, Artificial Sequence
  Cyclic GFR-binding peptide
  MOD_RES (31)..(31): Xaa is C or S
APVKTSATSMLYYDNGRVLLLRKHRMIVEEX

SEQ ID NO: 94736 - protein, 33 aa, Artificial Sequence; identical to SEQ ID NO: 36266
  Cyclic GFR-binding peptide
  MOD_RES (6)..(7): Xaa is C or S

SEQ ID NO: 94737 - protein, 28 aa, Artificial Sequence
  Cyclic GFR-binding peptide
  MOD_RES (28)..(28): Xaa is C or S
LSATSILYYDAANNVVLRKHRDMVVEAX

SEQ ID NO: 94738 - protein, 27 aa, Artificial Sequence
  Cyclic GFR-binding peptide
  MOD_RES (27)..(27): Xaa is C or S
EPISVLYLDDSSNVIKFKYENMVVRAX

SEQ ID NO: 94739 - protein, 27 aa, Artificial Sequence
  Cyclic GFR-binding peptide
TQLSATSVLYYDDSSNVILRKHRNMVV

SEQ ID NO: 94740 - protein, 31 aa, Artificial Sequence; identical to SEQ ID NO: 7779
  Cyclic GFR-binding peptide

SEQ ID NO: 94741 - protein, 34 aa, Artificial Sequence; identical to SEQ ID NO: 36272
  Cyclic GFR-binding peptide
  MOD_RES (1)..(33): Xaa is C or S

SEQ ID NO: 94742 - protein, 36 aa, Artificial Sequence; identical to SEQ ID NO: 42063
  Cyclic GFR-binding peptide
  MOD_RES (1)..(2)..(34)..(36): Xaa is C or S

SEQ ID NO: 94743 - protein, 32 aa, Artificial Sequence; identical to SEQ ID NO: 36274
  Cyclic GFR-binding peptide
  MOD_RES (2)..(3): Xaa is C or S

SEQ ID NO: 94744 - protein, 35 aa, Artificial Sequence; identical to SEQ ID NO: 7784
  Cyclic GFR-binding peptide
  MOD_RES (5)..(6): Xaa is C or S

SEQ ID NO: 94745 - protein, 23 aa, Artificial Sequence
  Cyclic GFR-binding peptide
EPISILYLDENKNVVKFKYENMT

SEQ ID NO: 94746 - protein, 30 aa, Artificial Sequence; identical to SEQ ID NO: 7785
  Cyclic GFR-binding peptide

SEQ ID NO: 94747 - protein, 27 aa, Artificial Sequence
  Cyclic GFR-binding peptide
EKMSATSILYYDENKNVVLRKHRNMTV

SEQ ID NO: 94748 - protein, 41 aa, Artificial Sequence
  Cyclic GFR-binding peptide
  MOD_RES (5)..(6)..(38)..(40): Xaa is C or S
ASKAXXVPTKLSATSILYYDKGVVTYLRKHRGMAVSEXGXR

SEQ ID NO: 94749 - protein, 27 aa, Artificial Sequence
  Cyclic GFR-binding peptide
LSATSMLYYDEYDKVVLRKHREMVVEG

SEQ ID NO: 94750 - protein, 30 aa, Artificial Sequence
  Cyclic GFR-binding peptide
  MOD_RES (1)..(1): Xaa is C or S
XVPEKMSATSILYYDENKNVVLRKHRNMTV

SEQ ID NO: 94751 - protein, 40 aa, Artificial Sequence; identical to SEQ ID NO: 42070
  Cyclic GFR-binding peptide
  MOD_RES (5)..(37)..(39): Xaa is C or S

SEQ ID NO: 94752 - protein, 31 aa, Artificial Sequence; identical to SEQ ID NO: 7787
  Cyclic GFR-binding peptide

SEQ ID NO: 94753 - protein, 24 aa, Artificial Sequence
  Cyclic GFR-binding peptide
LEPISILYLDSANNVVKFKYEDMV

SEQ ID NO: 94754 - protein, 29 aa, Artificial Sequence
  Cyclic GFR-binding peptide
VPQALSATSILYYVGRKPKVLRKHRMIVR

SEQ ID NO: 94755 - protein, 22 aa, Artificial Sequence
  Cyclic GFR-binding peptide
ELNAISMLYFDEYDKVVLKKYR

SEQ ID NO: 94756 - protein, 32 aa, Artificial Sequence; identical to SEQ ID NO: 36291
  Cyclic GFR-binding peptide
  MOD_RES (1)..(2): Xaa is C or S

SEQ ID NO: 94757 - protein, 35 aa, Artificial Sequence; identical to SEQ ID NO: 7795
  Cyclic GFR-binding peptide
  MOD_RES (6)..(7): Xaa is C or S

SEQ ID NO: 94758 - protein, 39 aa, Artificial Sequence; identical to SEQ ID NO: 42085
  Cyclic GFR-binding peptide
  MOD_RES (4)..(5)..(37)..(39): Xaa is C or S

SEQ ID NO: 94759 - protein, 35 aa, Artificial Sequence; identical to SEQ ID NO: 36295
  Cyclic GFR-binding peptide
  MOD_RES (2)..(3)..(35): Xaa is C or S

SEQ ID NO: 94760 - protein, 31 aa, Artificial Sequence; identical to SEQ ID NO: 7798
  Cyclic GFR-binding peptide
  MOD_RES (1)..(2): Xaa is C or S

SEQ ID NO: 94761 - protein, 25 aa, Artificial Sequence
  Cyclic GFR-binding peptide
TPTKMSPISMLYKNDKQQIILKYHY

SEQ ID NO: 94762 - protein, 24 aa, Artificial Sequence
  Cyclic GFR-binding peptide
QDLEPISILYLVGRTPKVKFKYEM

SEQ ID NO: 94763 - protein, 33 aa, Artificial Sequence; identical to SEQ ID NO: 42087
  Cyclic GFR-binding peptide
  MOD_RES (32)..(32): Xaa is C or S

SEQ ID NO: 94764 - protein, 29 aa, Artificial Sequence
  Cyclic GFR-binding peptide
  MOD_RES (27)..(29): Xaa is C or S
SPISMLYKNDKQQIILKYHYGMVVDRXGX

SEQ ID NO: 94765 - protein, 31 aa, Artificial Sequence; identical to SEQ ID NO: 7801
  Cyclic GFR-binding peptide
  MOD_RES (28)..(30): Xaa is C or S

SEQ ID NO: 94766 - protein, 20 aa, Artificial Sequence
  Cyclic GFR-binding peptide
SPINMLYFDEYDKVVYGKIP

SEQ ID NO: 94767 - protein, 36 aa, Artificial Sequence; identical to SEQ ID NO: 77508
  Cyclic GFR-binding peptide
  MOD_RES (5)..(6): Xaa is C or S

SEQ ID NO: 94768 - protein, 26 aa, Artificial Sequence
  Cyclic GFR-binding peptide
  MOD_RES (1)..(1): Xaa is C or S
XVPTKLSATSILYYDKGVVTYLRKHR

SEQ ID NO: 94769 - protein, 39 aa, Artificial Sequence
  Cyclic GFR-binding peptide
  MOD_RES (4)..(5)..(37)..(39): Xaa is C or S
AGPXXTPTKMSATSMLYYNDKQQIILRKHRGMVVDRXGX

SEQ ID NO: 94770 - protein, 28 aa, Artificial Sequence
  Cyclic GFR-binding peptide
  MOD_RES (2)..(3): Xaa is C or S
TXXAPVKTSPINMLYFDNGRVLLYGKIP

SEQ ID NO: 94771 - protein, 39 aa, Artificial Sequence
  Cyclic GFR-binding peptide
  MOD_RES (5)..(6)..(38): Xaa is C or S
IPEPXXVPEKMSPISILYKDENKNVVLKYHYNMTVESXA

SEQ ID NO: 94772 - protein, 22 aa, Artificial Sequence
  Cyclic GFR-binding peptide
LSPISILYKDAANNVVLKYHYD

SEQ ID NO: 94773 - protein, 32 aa, Artificial Sequence; identical to SEQ ID NO: 36307
  Cyclic GFR-binding peptide
  MOD_RES (5)..(6): Xaa is C or S

SEQ ID NO: 94774 - protein, 33 aa, Artificial Sequence; identical to SEQ ID NO: 36309
  Cyclic GFR-binding peptide
  MOD_RES (3)..(4): Xaa is C or S

SEQ ID NO: 94775 - protein, 29 aa, Artificial Sequence
  Cyclic GFR-binding peptide
  MOD_RES (2)..(3): Xaa is C or S
PXXVSQDLEPISILYLIGKTPKIKFKYEM

SEQ ID NO: 94776 - protein, 27 aa, Artificial Sequence
  Cyclic GFR-binding peptide
LSPISILYKDKGVVTYLKYHYGMAVSE

SEQ ID NO: 94777 - protein, 32 aa, Artificial Sequence
  Cyclic GFR-binding peptide
  MOD_RES (3)..(4): Xaa is C or S
EPXXVPEKMEPISILYLDENKNVVKFKYENMT

SEQ ID NO: 94778 - protein, 28 aa, Artificial Sequence
  Cyclic GFR-binding peptide
ARLSPISILYKDAANNVVLKYHYDMVVE

SEQ ID NO: 94779 - protein, 22 aa, Artificial Sequence
  Cyclic GFR-binding peptide
DLNAISILYFVGRTPKVLKKYR

SEQ ID NO: 94780 - protein, 31 aa, Artificial Sequence; identical to SEQ ID NO: 36317
  Cyclic GFR-binding peptide
  MOD_RES (2)..(3): Xaa is C or S

SEQ ID NO: 94781 - protein, 30 aa, Artificial Sequence; identical to SEQ ID NO: 7811
  Cyclic GFR-binding peptide
  MOD_RES (1)..(1): Xaa is C or S

SEQ ID NO: 94782 - protein, 33 aa, Artificial Sequence
  Cyclic GFR-binding peptide
  MOD_RES (2)..(3): Xaa is C or S
PXXTPTKMSPISMLYKNDKQQIILKYHYGMVVD

SEQ ID NO: 94783 - protein, 24 aa, Artificial Sequence
  Cyclic GFR-binding peptide
NAISILYFDKGVVTYLKKYRGMAV

SEQ ID NO: 94784 - protein, 35 aa, Artificial Sequence
  Cyclic GFR-binding peptide
  MOD_RES (5)..(6): Xaa is C or S
IPEPXXVPEKMSPISILYKDENKNVVLKYHYNMTV

SEQ ID NO: 94785 - protein, 29 aa, Artificial Sequence
  Cyclic GFR-binding peptide
APTKLSPINVLYFDSSNNVIYGKIPNMVV

SEQ ID NO: 94786 - protein, 28 aa, Artificial Sequence
  Cyclic GFR-binding peptide
  MOD_RES (26)..(28): Xaa is C or S
EPISMLYLDNGRVLLKFKYEMIVEEXGX

SEQ ID NO: 94787 - protein, 24 aa, Artificial Sequence
  Cyclic GFR-binding peptide
EPISVLYLDDMGVPTKFKYEEGMS

SEQ ID NO: 94788 - protein, 29 aa, Artificial Sequence
  Cyclic GFR-binding peptide
TPTKMNAISMLYFNDKQQIILKKYRGMVV

SEQ ID NO: 94789 - protein, 26 aa, Artificial Sequence
  Cyclic GFR-binding peptide
VPTKLSPINVLYFDDMGVPTYGKIPE

SEQ ID NO: 94790 - protein, 23 aa, Artificial Sequence
  Cyclic GFR-binding peptide
LSPINILYFVGRTPKVYGKIPMV

SEQ ID NO: 94791 - protein, 29 aa, Artificial Sequence
  Cyclic GFR-binding peptide
  MOD_RES (1)..(2): Xaa is C or S
XXAPTKLEPISVLYLDSSNNVIKFKYENM

SEQ ID NO: 94792 - protein, 38 aa, Artificial Sequence; identical to SEQ ID NO: 36326
  Cyclic GFR-binding peptide
  MOD_RES (5)..(6)..(37): Xaa is C or S

SEQ ID NO: 94793 - protein, 40 aa, Artificial Sequence; identical to SEQ ID NO: 7818
  Cyclic GFR-binding peptide
  MOD_RES (4)..(5)..(38)..(40): Xaa is C or S

SEQ ID NO: 94794 - protein, 24 aa, Artificial Sequence
  Cyclic GFR-binding peptide
LSATSILYYIGKTPKILRKHRMIV

SEQ ID NO: 94795 - protein, 33 aa, Artificial Sequence
  Cyclic GFR-binding peptide
  MOD_RES (4)..(5): Xaa is C or S
PSTXXAPVKTEPISMLYLDNGRVLLKFKYEMIV

SEQ ID NO: 94796 - protein, 33 aa, Artificial Sequence; identical to SEQ ID NO: 7821
  Cyclic GFR-binding peptide
  MOD_RES (1)..(2): Xaa is C or S

SEQ ID NO: 94797 - protein, 33 aa, Artificial Sequence; identical to SEQ ID NO: 36332
  Cyclic GFR-binding peptide
  MOD_RES (30)..(32): Xaa is C or S

SEQ ID NO: 94798 - protein, 34 aa, Artificial Sequence
  Cyclic GFR-binding peptide
  MOD_RES (6)..(7): Xaa is C or S
STPPTXXVPTRLEPISILYLDSANNVVKFKYEDM

SEQ ID NO: 94799 - protein, 23 aa, Artificial Sequence
  Cyclic GFR-binding peptide
DLSPISILYKIGKTPKILKYHYM

SEQ ID NO: 94800 - protein, 23 aa, Artificial Sequence
  Cyclic GFR-binding peptide
SPINMLYFDNGRVLLYGKIPMIV

SEQ ID NO: 94801 - protein, 38 aa, Artificial Sequence
  Cyclic GFR-binding peptide
  MOD_RES (4)..(5)..(36)..(38): Xaa is C or S
PSTXXAPVKTSPISMLYKDNGRVLLLKYHYMIVEEXGX

SEQ ID NO: 94802 - protein, 27 aa, Artificial Sequence
  Cyclic GFR-binding peptide
  MOD_RES (27)..(27): Xaa is C or S
SPINILYFDENKNVVYGKIPNMTVESX

SEQ ID NO: 94803 - protein, 33 aa, Artificial Sequence; identical to SEQ ID NO: 77522
  Cyclic GFR-binding peptide
  MOD_RES (31)..(33): Xaa is C or S

SEQ ID NO: 94804 - protein, 21 aa, Artificial Sequence
  Cyclic GFR-binding peptide
LNAISVLYFDDMGVPTLKKYR

SEQ ID NO: 94805 - protein, 36 aa, Artificial Sequence
  Cyclic GFR-binding peptide
  MOD_RES (33)..(35): Xaa is C or S
VPTKLSPINVLYFDDMGVPTYGKIPEGMSVAEXGXR

SEQ ID NO: 94806 - protein, 34 aa, Artificial Sequence; identical to SEQ ID NO: 7834
  Cyclic GFR-binding peptide
  MOD_RES (3)..(4): Xaa is C or S

SEQ ID NO: 94807 - protein, 31 aa, Artificial Sequence; identical to SEQ ID NO: 36342
  Cyclic GFR-binding peptide
  MOD_RES (28)..(30): Xaa is C or S

SEQ ID NO: 94808 - protein, 33 aa, Artificial Sequence; identical to SEQ ID NO: 7836
  Cyclic GFR-binding peptide
  MOD_RES (4)..(5): Xaa is C or S

SEQ ID NO: 94809 - protein, 35 aa, Artificial Sequence; identical to SEQ ID NO: 36344
  Cyclic GFR-binding peptide
  MOD_RES (5)..(6): Xaa is C or S

SEQ ID NO: 94810 - protein, 39 aa, Artificial Sequence; identical to SEQ ID NO: 7838
  Cyclic GFR-binding peptide
  MOD_RES (5)..(6)..(38): Xaa is C or S

SEQ ID NO: 94811 - protein, 31 aa, Artificial Sequence; identical to SEQ ID NO: 7842
  Cyclic GFR-binding peptide
  MOD_RES (30)..(30): Xaa is C or S

SEQ ID NO: 94812 - protein, 35 aa, Artificial Sequence; identical to SEQ ID NO: 42152
  Cyclic GFR-binding peptide
  MOD_RES (4)..(5): Xaa is C or S

SEQ ID NO: 94813 - protein, 36 aa, Artificial Sequence
  Cyclic GFR-binding peptide
  MOD_RES (3)..(4)..(35): Xaa is C or S
SPXXVSQDLSPINILYFIGKTPKIYGKIPMIVKSXK

SEQ ID NO: 94814 - protein, 27 aa, Artificial Sequence
  Cyclic GFR-binding peptide
KLSPISVLYKDSSNNVILKYHYNMVVK

SEQ ID NO: 94815 - protein, 37 aa, Artificial Sequence
  Cyclic GFR-binding peptide
  MOD_RES (4)..(5)..(37): Xaa is C or S
AGPXXTPTKMSPISMLYKNDKQQIILKYHYGMVVDRX

SEQ ID NO: 94816 - protein, 28 aa, Artificial Sequence
  Cyclic GFR-binding peptide
  MOD_RES (1)..(2): Xaa is C or S
XXVPARLEPISILYLDAANNVVKFKYED

SEQ ID NO: 94817 - protein, 34 aa, Artificial Sequence; identical to SEQ ID NO: 36354
  Cyclic GFR-binding peptide
  MOD_RES (2)..(3): Xaa is C or S

SEQ ID NO: 94818 - protein, 39 aa, Artificial Sequence; identical to SEQ ID NO: 36361
  Cyclic GFR-binding peptide
  MOD_RES (4)..(5)..(37)..(39): Xaa is C or S

SEQ ID NO: 94819 - protein, 25 aa, Artificial Sequence
  Cyclic GFR-binding peptide
SATSILYYVGRTPKVLRKHRMVVKS

SEQ ID NO: 94820 - protein, 26 aa, Artificial Sequence
  Cyclic GFR-binding peptide
SPINILYFDENKNVVYGKIPNMTVES

SEQ ID NO: 94821 - protein, 34 aa, Artificial Sequence; identical to SEQ ID NO: 7849
  Cyclic GFR-binding peptide
  MOD_RES (31)..(33): Xaa is C or S

SEQ ID NO: 94822 - protein, 33 aa, Artificial Sequence
  Cyclic GFR-binding peptide
  MOD_RES (5)..(6): Xaa is C or S
VPSTXXAPVKTEPISMLYLDNGRVLLKFKYEMI

SEQ ID NO: 94823 - protein, 33 aa, Artificial Sequence; identical to SEQ ID NO: 42163
  Cyclic GFR-binding peptide
  MOD_RES (5)..(6): Xaa is C or S

SEQ ID NO: 94824 - protein, 39 aa, Artificial Sequence; identical to SEQ ID NO: 7850
  Cyclic GFR-binding peptide
  MOD_RES (4)..(5)..(37)..(39): Xaa is C or S

SEQ ID NO: 94825 - protein, 39 aa, Artificial Sequence; identical to SEQ ID NO: 42165
  Cyclic GFR-binding peptide
  MOD_RES (3)..(4)..(37)..(39): Xaa is C or S

SEQ ID NO: 94826 - protein, 35 aa, Artificial Sequence; identical to SEQ ID NO: 42166
  Cyclic GFR-binding peptide
  MOD_RES (6)..(7): Xaa is C or S

SEQ ID NO: 94827 - protein, 34 aa, Artificial Sequence; identical to SEQ ID NO: 42167
  Cyclic GFR-binding peptide
  MOD_RES (2)..(3): Xaa is C or S

SEQ ID NO: 94828 - protein, 35 aa, Artificial Sequence; identical to SEQ ID NO: 7852
  Cyclic GFR-binding peptide
  MOD_RES (4)..(5): Xaa is C or S

SEQ ID NO: 94829 - protein, 29 aa, Artificial Sequence
  Cyclic GFR-binding peptide
  MOD_RES (2)..(3): Xaa is C or S
AXXVPTKLSPINILYFDKGVVTYYGKIPG

SEQ ID NO: 94830 - protein, 27 aa, Artificial Sequence
  Cyclic GFR-binding peptide
  MOD_RES (1)..(2): Xaa is C or S
XXVPTRLSPISILYKDSANNVVLKYHY

SEQ ID NO: 94831 - protein, 32 aa, Artificial Sequence
  Cyclic GFR-binding peptide
  MOD_RES (32)..(32): Xaa is C or S
VPTRLSPISILYKDSANNVVLKYHYDMVVESX

SEQ ID NO: 94832 - protein, 39 aa, Artificial Sequence; identical to SEQ ID NO: 42172
  Cyclic GFR-binding peptide
  MOD_RES (4)..(5)..(37)..(39): Xaa is C or S

SEQ ID NO: 94833 - protein, 35 aa, Artificial Sequence; identical to SEQ ID NO: 7858
  Cyclic GFR-binding peptide
  MOD_RES (2)..(34): Xaa is C or S

SEQ ID NO: 94834 - protein, 24 aa, Artificial Sequence
  Cyclic GFR-binding peptide
MSATSILYYDENKNVVLRKHRNMT

SEQ ID NO: 94835 - protein, 22 aa, Artificial Sequence
  Cyclic GFR-binding peptide
EPISILYLDENKNVVKFKYENM

SEQ ID NO: 94836 - protein, 29 aa, Artificial Sequence
  Cyclic GFR-binding peptide
VPQDLSPISILYKVGRTPKVLKYHYMVVK

SEQ ID NO: 94837 - protein, 30 aa, Artificial Sequence
  Cyclic GFR-binding peptide
  MOD_RES (2)..(3): Xaa is C or S
PXXTPTKMSATSMLYYNDKQQIILRKHRGM

SEQ ID NO: 94838 - protein, 26 aa, Artificial Sequence
  Cyclic GFR-binding peptide
PVKTSPINMLYFDNGRVLLYGKIPMI

SEQ ID NO: 94839 - protein, 32 aa, Artificial Sequence; identical to SEQ ID NO: 18161
  Cyclic GFR-binding peptide
  MOD_RES (32)..(32): Xaa is C or S

SEQ ID NO: 94840 - protein, 26 aa, Artificial Sequence
  Cyclic GFR-binding peptide
TKMEPISMLYLNDKQQIIKFKYEGMV

SEQ ID NO: 94841 - protein, 34 aa, Artificial Sequence; identical to SEQ ID NO: 36374
  Cyclic GFR-binding peptide
  MOD_RES (5)..(6): Xaa is C or S

SEQ ID NO: 94842 - protein, 30 aa, Artificial Sequence
  Cyclic GFR-binding peptide
  MOD_RES (28)..(30): Xaa is C or S
MSPISMLYKNDKQQIILKYHYGMVVDRXGX

SEQ ID NO: 94843 - protein, 29 aa, Artificial Sequence
  Cyclic GFR-binding peptide
  MOD_RES (1)..(2): Xaa is C or S
XXVPTELNAISMLYFDENEKVVLKKYRDM

SEQ ID NO: 94844 - protein, 42 aa, Artificial Sequence
  Cyclic GFR-binding peptide
  MOD_RES (6)..(7)..(39)..(41): Xaa is C or S
HVPKPXXAPTKLSPISVLYKDDSSNVILKYHYNMVVRSXGXH

SEQ ID NO: 94845 - protein, 30 aa, Artificial Sequence; identical to SEQ ID NO: 7863
  Cyclic GFR-binding peptide

SEQ ID NO: 94846 - protein, 35 aa, Artificial Sequence; identical to SEQ ID NO: 7864
  Cyclic GFR-binding peptide
  MOD_RES (6)..(7): Xaa is C or S

SEQ ID NO: 94847 - protein, 30 aa, Artificial Sequence; identical to SEQ ID NO: 42186
  Cyclic GFR-binding peptide
  MOD_RES (28)..(30): Xaa is C or S

SEQ ID NO: 94848 - protein, 27 aa, Artificial Sequence
  Cyclic GFR-binding peptide
  MOD_RES (1)..(2): Xaa is C or S
XXVPTELSPINMLYFDENEKVVYGKIP

SEQ ID NO: 94849 - protein, 35 aa, Artificial Sequence
  Cyclic GFR-binding peptide
  MOD_RES (5)..(6): Xaa is C or S
SAAPXXVPQALSPINILYFVGRKPKVYGKIPMIVR

SEQ ID NO: 94850 - protein, 35 aa, Artificial Sequence
  Cyclic GFR-binding peptide
  MOD_RES (3)..(4): Xaa is C or S
ASXXVPARLSATSILYYDAANNVVLRKHRDMVVEA

SEQ ID NO: 94851 - protein, 29 aa, Artificial Sequence
  Cyclic GFR-binding peptide
  MOD_RES (29)..(29): Xaa is C or S
KMNAISILYFDENKNVVLKKYRNMTVESX

SEQ ID NO: 94852 - protein, 28 aa, Artificial Sequence
  Cyclic GFR-binding peptide
  MOD_RES (28)..(28): Xaa is C or S
MSPINILYFDENKNVVYGKIPNMTVESX

SEQ ID NO: 94853 - protein, 34 aa, Artificial Sequence
  Cyclic GFR-binding peptide
  MOD_RES (5)..(6): Xaa is C or S
ASKAXXVPTKLSATSILYYDKGVVTYLRKHRGMA

SEQ ID NO: 94854 - protein, 31 aa, Artificial Sequence; identical to SEQ ID NO: 42197
  Cyclic GFR-binding peptide
  MOD_RES (3)..(4): Xaa is C or S

SEQ ID NO: 94855 - protein, 36 aa, Artificial Sequence
  Cyclic GFR-binding peptide
  MOD_RES (5)..(6): Xaa is C or S
SAGPXXTPTKMEPISMLYLNDKQQIIKFKYEGMVVD

SEQ ID NO: 94856 - protein, 23 aa, Artificial Sequence
  Cyclic GFR-binding peptide
VKTSPINMLYFDNGRVLLYGKIP

SEQ ID NO: 94857 - protein, 40 aa, Artificial Sequence; identical to SEQ ID NO: 36394
  Cyclic GFR-binding peptide
  MOD_RES (6)..(38)..(40): Xaa is C or S

SEQ ID NO: 94858 - protein, 40 aa, Artificial Sequence; identical to SEQ ID NO: 7872
  Cyclic GFR-binding peptide
  MOD_RES (5)..(6)..(37)..(39): Xaa is C or S

SEQ ID NO: 94859 - protein, 35 aa, Artificial Sequence
  Cyclic GFR-binding peptide
  MOD_RES (4)..(5): Xaa is C or S
PSTXXAPVKTSATSMLYYDNGRVLLLRKHRMIVEE

SEQ ID NO: 94860 - protein, 32 aa, Artificial Sequence; identical to SEQ ID NO: 36400
  Cyclic GFR-binding peptide
  MOD_RES (4)..(5): Xaa is C or S

SEQ ID NO: 94861 - protein, 38 aa, Artificial Sequence; identical to SEQ ID NO: 7873
  Cyclic GFR-binding peptide
  MOD_RES (4)..(5)..(36)..(38): Xaa is C or S

SEQ ID NO: 94862 - protein, 28 aa, Artificial Sequence
  Cyclic GFR-binding peptide
  MOD_RES (1)..(2): Xaa is C or S
XXVPTRLSPISILYKDSANNVVLKYHYD

SEQ ID NO: 94863 - protein, 29 aa, Artificial Sequence
  Cyclic GFR-binding peptide
VPTELNAISMLYFDEYDKVVLKKYREMVV

SEQ ID NO: 94864 - protein, 32 aa, Artificial Sequence; identical to SEQ ID NO: 7876
  Cyclic GFR-binding peptide
  MOD_RES (4)..(5): Xaa is C or S

SEQ ID NO: 94865 - protein, 28 aa, Artificial Sequence
  Cyclic GFR-binding peptide
  MOD_RES (27)..(27): Xaa is C or S
EPISMLYLDEYDKVVKFKYEEMVVEGXG

SEQ ID NO: 94866 - protein, 33 aa, Artificial Sequence; identical to SEQ ID NO: 42212
  Cyclic GFR-binding peptide
  MOD_RES (31)..(33): Xaa is C or S

SEQ ID NO: 94867 - protein, 27 aa, Artificial Sequence
  Cyclic GFR-binding peptide
KMNAISILYFDENKNVVLKKYRNMTVE

SEQ ID NO: 94868 - protein, 33 aa, Artificial Sequence
  Cyclic GFR-binding peptide
  MOD_RES (31)..(33): Xaa is C or S
PEKMNAISILYFDENKNVVLKKYRNMTVESXAX

SEQ ID NO: 94869 - protein, 37 aa, Artificial Sequence; identical to SEQ ID NO: 7879
  Cyclic GFR-binding peptide
  MOD_RES (2)..(3)..(34)..(36): Xaa is C or S

SEQ ID NO: 94870 - protein, 33 aa, Artificial Sequence; identical to SEQ ID NO: 7882
  Cyclic GFR-binding peptide
  MOD_RES (5)..(6): Xaa is C or S

SEQ ID NO: 94871 - protein, 35 aa, Artificial Sequence; identical to SEQ ID NO: 36421
  Cyclic GFR-binding peptide
  MOD_RES (1)..(2)..(34): Xaa is C or S

SEQ ID NO: 94872 - protein, 41 aa, Artificial Sequence; identical to SEQ ID NO: 42221
  Cyclic GFR-binding peptide
  MOD_RES (6)..(7)..(38)..(40): Xaa is C or S

SEQ ID NO: 94873 - protein, 25 aa, Artificial Sequence
  Cyclic GFR-binding peptide
VPTKLSATSVLYYDDMGVPTLRKHR

SEQ ID NO: 94874 - protein, 40 aa, Artificial Sequence; identical to SEQ ID NO: 7887
  Cyclic GFR-binding peptide
  MOD_RES (6)..(7)..(39): Xaa is C or S

SEQ ID NO: 94875 - protein, 32 aa, Artificial Sequence; identical to SEQ ID NO: 42226
  Cyclic GFR-binding peptide
  MOD_RES (1)..(2): Xaa is C or S

SEQ ID NO: 94876 - protein, 37 aa, Artificial Sequence
  Cyclic GFR-binding peptide
  MOD_RES (5)..(6): Xaa is C or S
TPPTXXVPTRLEPISILYLDSANNVVKFKYEDMVVES

SEQ ID NO: 94877 - protein, 29 aa, Artificial Sequence
  Cyclic GFR-binding peptide
APVKTEPISMLYLDNGRVLLKFKYEMIVE

SEQ ID NO: 94878 - protein, 26 aa, Artificial Sequence
  Cyclic GFR-binding peptide
LNAISILYFVGRKPKVLKKYRMIVRS

SEQ ID NO: 94879 - protein, 35 aa, Artificial Sequence; identical to SEQ ID NO: 36426
  Cyclic GFR-binding peptide
  MOD_RES (2)..(3)..(34): Xaa is C or S

SEQ ID NO: 94880 - protein, 31 aa, Artificial Sequence; identical to SEQ ID NO: 36429
  Cyclic GFR-binding peptide
  MOD_RES (2)..(3): Xaa is C or S

SEQ ID NO: 94881 - protein, 32 aa, Artificial Sequence; identical to SEQ ID NO: 36432
  Cyclic GFR-binding peptide
  MOD_RES (32)..(32): Xaa is C or S

SEQ ID NO: 94882 - protein, 32 aa, Artificial Sequence; identical to SEQ ID NO: 36433
  Cyclic GFR-binding peptide
  MOD_RES (30)..(32): Xaa is C or S

SEQ ID NO: 94883 - protein, 36 aa, Artificial Sequence; identical to SEQ ID NO: 7893
  Cyclic GFR-binding peptide
  MOD_RES (2)..(3)..(34)..(36): Xaa is C or S

SEQ ID NO: 94884 - protein, 25 aa, Artificial Sequence
  Cyclic GFR-binding peptide
DLEPISILYLVGRTPKVKFKYEMVV

SEQ ID NO: 94885 - protein, 26 aa, Artificial Sequence
  Cyclic GFR-binding peptide
VPARLNAISILYFDAANNVVLKKYRD

SEQ ID NO: 94886 - protein, 21 aa, Artificial Sequence
  Cyclic GFR-binding peptide
EPISILYLVGRKPKVKFKYEM

SEQ ID NO: 94887 - protein, 35 aa, Artificial Sequence
  Cyclic GFR-binding peptide
  MOD_RES (1)..(33)..(35): Xaa is C or S
XTPTKMEPISMLYLNDKQQIIKFKYEGMVVDRXGX

SEQ ID NO: 94888 - protein, 29 aa, Artificial Sequence
  Cyclic GFR-binding peptide
  MOD_RES (1)..(1): Xaa is C or S
XVPTRLSPISILYKDSANNVVLKYHYDMV

SEQ ID NO: 94889 - protein, 43 aa, Artificial Sequence; identical to SEQ ID NO: 7899
  Cyclic GFR-binding peptide
  MOD_RES (6)..(7)..(40)..(42): Xaa is C or S

SEQ ID NO: 94890 - protein, 25 aa, Artificial Sequence
  Cyclic GFR-binding peptide
EPISMLYLDEYDKVVKFKYEEMVVE

SEQ ID NO: 94891 - protein, 34 aa, Artificial Sequence
  Cyclic GFR-binding peptide
  MOD_RES (4)..(5): Xaa is C or S
PPTXXVPTRLEPISILYLDSANNVVKFKYEDMVV

SEQ ID NO: 94892 - protein, 34 aa, Artificial Sequence; identical to SEQ ID NO: 36448
  Cyclic GFR-binding peptide
  MOD_RES (3)..(4): Xaa is C or S

SEQ ID NO: 94893 - protein, 21 aa, Artificial Sequence
  Cyclic GFR-binding peptide
SATSILYYDSANNVVLRKHRD

SEQ ID NO: 94894 - protein, 38 aa, Artificial Sequence; identical to SEQ ID NO: 36449
  Cyclic GFR-binding peptide
  MOD_RES (4)..(5)..(37): Xaa is C or S

SEQ ID NO: 94895 - protein, 34 aa, Artificial Sequence; identical to SEQ ID NO: 77573
  Cyclic GFR-binding peptide
  MOD_RES (31)..(33): Xaa is C or S

SEQ ID NO: 94896 - protein, 34 aa, Artificial Sequence
  Cyclic GFR-binding peptide
  MOD_RES (3)..(4): Xaa is C or S
ASXXVPARLSATSILYYDAANNVVLRKHRDMVVE

SEQ ID NO: 94897 - protein, 31 aa, Artificial Sequence
  Cyclic GFR-binding peptide
  MOD_RES (5)..(6): Xaa is C or S
ASKAXXVPTKLSATSILYYDKGVVTYLRKHR

SEQ ID NO: 94898 - protein, 39 aa, Artificial Sequence; identical to SEQ ID NO: 36450
  Cyclic GFR-binding peptide
  MOD_RES (6)..(7)..(39): Xaa is C or S

SEQ ID NO: 94899 - protein, 31 aa, Artificial Sequence; identical to SEQ ID NO: 7903
  Cyclic GFR-binding peptide
  MOD_RES (5)..(6): Xaa is C or S

SEQ ID NO: 94900 - protein, 30 aa, Artificial Sequence; identical to SEQ ID NO: 7905
  Cyclic GFR-binding peptide
  MOD_RES (27)..(29): Xaa is C or S

SEQ ID NO: 94901 - protein, 30 aa, Artificial Sequence; identical to SEQ ID NO: 7906
  Cyclic GFR-binding peptide
  MOD_RES (1)..(1): Xaa is C or S

SEQ ID NO: 94902 - protein, 26 aa, Artificial Sequence
  Cyclic GFR-binding peptide
QALEPISILYLVGRKPKVKFKYEMIV

SEQ ID NO: 94903 - protein, 30 aa, Artificial Sequence
  Cyclic GFR-binding peptide
  MOD_RES (30)..(30): Xaa is C or S
PQDLSPINILYFVGRTPKVYGKIPMVVKSX

SEQ ID NO: 94904 - protein, 35 aa, Artificial Sequence; identical to SEQ ID NO: 7910
  Cyclic GFR-binding peptide
  MOD_RES (2)..(3)..(34): Xaa is C or S

SEQ ID NO: 94905 - protein, 29 aa, Artificial Sequence
  Cyclic GFR-binding peptide
  MOD_RES (28)..(28): Xaa is C or S
LSPINVLYFDDSSNVIYGKIPNMVVRAXG

SEQ ID NO: 94906 - protein, 32 aa, Artificial Sequence
  Cyclic GFR-binding peptide
  MOD_RES (6)..(7): Xaa is C or S
HVPKPXXAPTKLEPISVLYLDDSSNVIKFKYE

SEQ ID NO: 94907 - protein, 37 aa, Artificial Sequence; identical to SEQ ID NO: 36459
  Cyclic GFR-binding peptide
  MOD_RES (6)..(7): Xaa is C or S

SEQ ID NO: 94908 - protein, 24 aa, Artificial Sequence
  Cyclic GFR-binding peptide
SATSMLYYDEYDKVVLRKHREMVV

SEQ ID NO: 94909 - protein, 30 aa, Artificial Sequence; identical to SEQ ID NO: 7914
  Cyclic GFR-binding peptide
  MOD_RES (3)..(4): Xaa is C or S

SEQ ID NO: 94910 - protein, 30 aa, Artificial Sequence; identical to SEQ ID NO: 7918
  Cyclic GFR-binding peptide
  MOD_RES (27)..(29): Xaa is C or S

SEQ ID NO: 94911 - protein, 29 aa, Artificial Sequence
  Cyclic GFR-binding peptide
  MOD_RES (2)..(3): Xaa is C or S
SXXVPARLSPINILYFDAANNVVYGKIPD

SEQ ID NO: 94912 - protein, 38 aa, Artificial Sequence; identical to SEQ ID NO: 7919
  Cyclic GFR-binding peptide
  MOD_RES (3)..(4)..(36)..(38): Xaa is C or S

SEQ ID NO: 94913 - protein, 36 aa, Artificial Sequence; identical to SEQ ID NO: 36468
  Cyclic GFR-binding peptide
  MOD_RES (4)..(5): Xaa is C or S

SEQ ID NO: 94914 - protein, 33 aa, Artificial Sequence; identical to SEQ ID NO: 42274
  Cyclic GFR-binding peptide
  MOD_RES (1)..(33): Xaa is C or S

SEQ ID NO: 94915 - protein, 37 aa, Artificial Sequence; identical to SEQ ID NO: 36471
  Cyclic GFR-binding peptide
  MOD_RES (1)..(2)..(34)..(36): Xaa is C or S

SEQ ID NO: 94916 - protein, 30 aa, Artificial Sequence; identical to SEQ ID NO: 7922
  Cyclic GFR-binding peptide
  MOD_RES (2)..(3): Xaa is C or S

SEQ ID NO: 94917 - protein, 30 aa, Artificial Sequence; identical to SEQ ID NO: 42276
  Cyclic GFR-binding peptide
  MOD_RES (30)..(30): Xaa is C or S

SEQ ID NO: 94918 - protein, 36 aa, Artificial Sequence; identical to SEQ ID NO: 42278
  Cyclic GFR-binding peptide
  MOD_RES (2)..(3)..(35): Xaa is C or S

SEQ ID NO: 94919 - protein, 33 aa, Artificial Sequence
  Cyclic GFR-binding peptide
  MOD_RES (2)..(3): Xaa is C or S
PXXVPQDLSPINILYFVGRTPKVYGKIPMVVKS

SEQ ID NO: 94920 - protein, 32 aa, Artificial Sequence
  Cyclic GFR-binding peptide
  MOD_RES (2)..(3): Xaa is C or S
AXXVPTKLSATSILYYDKGVVTYLRKHRGMAV

SEQ ID NO: 94921 - protein, 34 aa, Artificial Sequence; identical to SEQ ID NO: 42279
  Cyclic GFR-binding peptide
  MOD_RES (5)..(6): Xaa is C or S

SEQ ID NO: 94922 - protein, 26 aa, Artificial Sequence
  Cyclic GFR-binding peptide
SPISMLYKDENEKVVLKYHYDMVVEG

SEQ ID NO: 94923 - protein, 27 aa, Artificial Sequence
  Cyclic GFR-binding peptide
APTQLSATSVLYYDDSSNVILRKHRNM

SEQ ID NO: 94924 - protein, 28 aa, Artificial Sequence
  Cyclic GFR-binding peptide
PTELEPISMLYLDEYDKVVKFKYEEMVV

SEQ ID NO: 94925 - protein, 26 aa, Artificial Sequence
  Cyclic GFR-binding peptide
  MOD_RES (26)..(26): Xaa is C or S
NAISILYFIGKTPKILKKYRMIVKSX

SEQ ID NO: 94926 - protein, 34 aa, Artificial Sequence; identical to SEQ ID NO: 42284
  Cyclic GFR-binding peptide
  MOD_RES (4)..(5): Xaa is C or S

SEQ ID NO: 94927 - protein, 24 aa, Artificial Sequence
  Cyclic GFR-binding peptide
PTKLNAISVLYFDSSNNVILKKYR

SEQ ID NO: 94928 - protein, 24 aa, Artificial Sequence
  Cyclic GFR-binding peptide
SATSILYYIGKTPKILRKHRMIVK

SEQ ID NO: 94929 - protein, 35 aa, Artificial Sequence; identical to SEQ ID NO: 42290
  Cyclic GFR-binding peptide
  MOD_RES (7)..(7): Xaa is C or S

SEQ ID NO: 94930 - protein, 37 aa, Artificial Sequence
  Cyclic GFR-binding peptide
  MOD_RES (5)..(6)..(37): Xaa is C or S
SAAPXXVPQALSPINILYFVGRKPKVYGKIPMIVRSX

SEQ ID NO: 94931 - protein, 28 aa, Artificial Sequence
  Cyclic GFR-binding peptide
PQDLSPINILYFVGRTPKVYGKIPMVVK

SEQ ID NO: 94932 - protein, 29 aa, Artificial Sequence
  Cyclic GFR-binding peptide
  MOD_RES (27)..(29): Xaa is C or S
LSPINILYFVGRKPKVYGKIPMIVRSXKX

SEQ ID NO: 94933 - protein, 39 aa, Artificial Sequence
  Cyclic GFR-binding peptide
  MOD_RES (5)..(6)..(38): Xaa is C or S
ASKAXXVPTKLSATSILYYDKGVVTYLRKHRGMAVSEXG

SEQ ID NO: 94934 - protein, 32 aa, Artificial Sequence
  Cyclic GFR-binding peptide
  MOD_RES (4)..(5): Xaa is C or S
SKAXXVPTKLSATSILYYDKGVVTYLRKHRGM

SEQ ID NO: 94935 - protein, 39 aa, Artificial Sequence; identical to SEQ ID NO: 7940
  Cyclic GFR-binding peptide
  MOD_RES (6)..(7)..(39): Xaa is C or S

SEQ ID NO: 94936 - protein, 40 aa, Artificial Sequence; identical to SEQ ID NO: 36494
  Cyclic GFR-binding peptide
  MOD_RES (6)..(7)..(39): Xaa is C or S

SEQ ID NO: 94937 - protein, 38 aa, Artificial Sequence
  Cyclic GFR-binding peptide
  MOD_RES (4)..(5)..(37): Xaa is C or S
PPTXXVPTRLSPISILYKDSANNVVLKYHYDMVVESXG

SEQ ID NO: 94938 - protein, 39 aa, Artificial Sequence; identical to SEQ ID NO: 7945
  Cyclic GFR-binding peptide
  MOD_RES (6)..(7)..(38): Xaa is C or S

SEQ ID NO: 94939 - protein, 23 aa, Artificial Sequence
  Cyclic GFR-binding peptide
SPISILYKVGRTPKVLKYHYMVV

SEQ ID NO: 94940 - protein, 29 aa, Artificial Sequence
  Cyclic GFR-binding peptide
  MOD_RES (3)..(4): Xaa is C or S
EPXXVPEKMSPISILYKDENKNVVLKYHY

SEQ ID NO: 94941 - protein, 39 aa, Artificial Sequence; identical to SEQ ID NO: 36499
  Cyclic GFR-binding peptide
  MOD_RES (4)..(5)..(37)..(39): Xaa is C or S

SEQ ID NO: 94942 - protein, 28 aa, Artificial Sequence
  Cyclic GFR-binding peptide
PTKLSATSVLYYDDMGVPTLRKHREGMS

SEQ ID NO: 94943 - protein, 34 aa, Artificial Sequence
  Cyclic GFR-binding peptide
  MOD_RES (1)..(2)..(33): Xaa is C or S
XXAPVKTSATSMLYYDNGRVLLLRKHRMIVEEXG

SEQ ID NO: 94944 - protein, 33 aa, Artificial Sequence; identical to SEQ ID NO: 7952
  Cyclic GFR-binding peptide
  MOD_RES (1)..(33): Xaa is C or S

SEQ ID NO: 94945 - protein, 35 aa, Artificial Sequence; identical to SEQ ID NO: 7953
  Cyclic GFR-binding peptide
  MOD_RES (32)..(34): Xaa is C or S

SEQ ID NO: 94946 - protein, 25 aa, Artificial Sequence
  Cyclic GFR-binding peptide
VPQALEPISILYLVGRKPKVKFKYE

SEQ ID NO: 94947 - protein, 33 aa, Artificial Sequence; identical to SEQ ID NO: 18269
  Cyclic GFR-binding peptide
  MOD_RES (1)..(2): Xaa is C or S

SEQ ID NO: 94948 - protein, 33 aa, Artificial Sequence; identical to SEQ ID NO: 7959
  Cyclic GFR-binding peptide
  MOD_RES (2)..(3): Xaa is C or S

SEQ ID NO: 94949 - protein, 32 aa, Artificial Sequence; identical to SEQ ID NO: 7962
  Cyclic GFR-binding peptide
  MOD_RES (29)..(31): Xaa is C or S

SEQ ID NO: 94950 - protein, 31 aa, Artificial Sequence; identical to SEQ ID NO: 36510
  Cyclic GFR-binding peptide
  MOD_RES (4)..(5): Xaa is C or S

SEQ ID NO: 94951 - protein, 28 aa, Artificial Sequence
  Cyclic GFR-binding peptide
RLSATSILYYDAANNVVLRKHRDMVVEA

SEQ ID NO: 94952 - protein, 36 aa, Artificial Sequence
  Cyclic GFR-binding peptide
  MOD_RES (1)..(2)..(34)..(36): Xaa is C or S
XXVPEKMSATSILYYDENKNVVLRKHRNMTVESXAX

SEQ ID NO: 94953 - protein, 32 aa, Artificial Sequence
  Cyclic GFR-binding peptide
  MOD_RES (4)..(5): Xaa is C or S
PSTXXAPVKTSATSMLYYDNGRVLLLRKHRMI

SEQ ID NO: 94954 - protein, 35 aa, Artificial Sequence; identical to SEQ ID NO: 7967
  Cyclic GFR-binding peptide
  MOD_RES (1)..(2)..(34): Xaa is C or S

SEQ ID NO: 94955 - protein, 35 aa, Artificial Sequence
  Cyclic GFR-binding peptide
  MOD_RES (4)..(5): Xaa is C or S
PPTXXVPTRLSATSILYYDSANNVVLRKHRDMVVE

SEQ ID NO: 94956 - protein, 27 aa, Artificial Sequence
  Cyclic GFR-binding peptide
VPARLNAISILYFDAANNVVLKKYRDM

SEQ ID NO: 94957 - protein, 30 aa, Artificial Sequence; identical to SEQ ID NO: 7968
  Cyclic GFR-binding peptide

SEQ ID NO: 94958 - protein, 29 aa, Artificial Sequence
  Cyclic GFR-binding peptide
VPTKLEPISVLYLDDMGVPTKFKYEEGMS

SEQ ID NO: 94959 - protein, 26 aa, Artificial Sequence
  Cyclic GFR-binding peptide
LEPISILYLDAANNVVKFKYEDMVVE

SEQ ID NO: 94960 - protein, 30 aa, Artificial Sequence; identical to SEQ ID NO: 42331
  Cyclic GFR-binding peptide
  MOD_RES (28)..(30): Xaa is C or S

SEQ ID NO: 94961 - protein, 25 aa, Artificial Sequence
  Cyclic GFR-binding peptide
PQDLEPISILYLVGRTPKVKFKYEM

SEQ ID NO: 94962 - protein, 32 aa, Artificial Sequence; identical to SEQ ID NO: 36526
  Cyclic GFR-binding peptide
  MOD_RES (30)..(32): Xaa is C or S

SEQ ID NO: 94963 - protein, 25 aa, Artificial Sequence
  Cyclic GFR-binding peptide
MSATSMLYYNDKQQIILRKHRGMVV

SEQ ID NO: 94964 - protein, 32 aa, Artificial Sequence; identical to SEQ ID NO: 7975
  Cyclic GFR-binding peptide
  MOD_RES (32)..(32): Xaa is C or S

SEQ ID NO: 94965 - protein, 30 aa, Artificial Sequence; identical to SEQ ID NO: 7977
  Cyclic GFR-binding peptide
  MOD_RES (27)..(29): Xaa is C or S

SEQ ID NO: 94966 - protein, 34 aa, Artificial Sequence; identical to SEQ ID NO: 36529
  Cyclic GFR-binding peptide
  MOD_RES (3)..(4): Xaa is C or S

SEQ ID NO: 94967 - protein, 38 aa, Artificial Sequence; identical to SEQ ID NO: 7978
  Cyclic GFR-binding peptide
  MOD_RES (6)..(7): Xaa is C or S

SEQ ID NO: 94968 - protein, 28 aa, Artificial Sequence
  Cyclic GFR-binding peptide
KLSATSVLYYDDMGVPTLRKHREGMSVA

SEQ ID NO: 94969 - protein, 25 aa, Artificial Sequence
  Cyclic GFR-binding peptide
PTRLSATSILYYDSANNVVLRKHRD

SEQ ID NO: 94970 - protein, 34 aa, Artificial Sequence; identical to SEQ ID NO: 7983
  Cyclic GFR-binding peptide
  MOD_RES (1)..(2)..(34): Xaa is C or S

SEQ ID NO: 94971 - protein, 39 aa, Artificial Sequence; identical to SEQ ID NO: 7984
  Cyclic GFR-binding peptide
  MOD_RES (3)..(4)..(36)..(38): Xaa is C or S

SEQ ID NO: 94972 - protein, 30 aa, Artificial Sequence
  Cyclic GFR-binding peptide
  MOD_RES (27)..(29): Xaa is C or S
SATSILYYDAANNVVLRKHRDMVVEAXGXR

SEQ ID NO: 94973 - protein, 22 aa, Artificial Sequence
  Cyclic GFR-binding peptide
KTNAISMLYFDNGRVLLLKKYR

SEQ ID NO: 94974 - protein, 40 aa, Artificial Sequence; identical to SEQ ID NO: 7986
  Cyclic GFR-binding peptide
  MOD_RES (6)..(7)..(38)..(40): Xaa is C or S

SEQ ID NO: 94975 - protein, 41 aa, Artificial Sequence; identical to SEQ ID NO: 7987
  Cyclic GFR-binding peptide
  MOD_RES (5)..(6)..(39)..(41): Xaa is C or S

SEQ ID NO: 94976 - protein, 32 aa, Artificial Sequence
  Cyclic GFR-binding peptide
  MOD_RES (4)..(5): Xaa is C or S
PSTXXAPVKTSPISMLYKDNGRVLLLKYHYMI

SEQ ID NO: 94977 - protein, 33 aa, Artificial Sequence
  Cyclic GFR-binding peptide
  MOD_RES (1)..(32): Xaa is C or S
XAPVKTSATSMLYYDNGRVLLLRKHRMIVEEXG

SEQ ID NO: 94978 - protein, 29 aa, Artificial Sequence
  Cyclic GFR-binding peptide
  MOD_RES (3)..(4): Xaa is C or S
GPXXTPTKMSPISMLYKNDKQQIILKYHY

SEQ ID NO: 94979 - protein, 32 aa, Artificial Sequence
  Cyclic GFR-binding peptide
  MOD_RES (6)..(7): Xaa is C or S
KASKAXXVPTKLSATSILYYDKGVVTYLRKHR

SEQ ID NO: 94980 - protein, 34 aa, Artificial Sequence
  Cyclic GFR-binding peptide
  MOD_RES (6)..(7): Xaa is C or S
ASASPXXVPQDLSPINILYFVGRTPKVYGKIPMV

SEQ ID NO: 94981 - protein, 34 aa, Artificial Sequence; identical to SEQ ID NO: 42356
  Cyclic GFR-binding peptide
  MOD_RES (1)..(2)..(34): Xaa is C or S

SEQ ID NO: 94982 - protein, 25 aa, Artificial Sequence
  Cyclic GFR-binding peptide
SATSILYYDENKNVVLRKHRNMTVE

SEQ ID NO: 94983 - protein, 37 aa, Artificial Sequence
  Cyclic GFR-binding peptide
  MOD_RES (4)..(5)..(36): Xaa is C or S
PSTXXAPVKTSATSMLYYDNGRVLLLRKHRMIVEEXG

SEQ ID NO: 94984 - protein, 34 aa, Artificial Sequence; identical to SEQ ID NO: 42357
  Cyclic GFR-binding peptide
  MOD_RES (4)..(5): Xaa is C or S

SEQ ID NO: 94985 - protein, 36 aa, Artificial Sequence; identical to SEQ ID NO: 36543
  Cyclic GFR-binding peptide
  MOD_RES (4)..(5): Xaa is C or S

SEQ ID NO: 94986 - protein, 32 aa, Artificial Sequence; identical to SEQ ID NO: 7989
  Cyclic GFR-binding peptide
  MOD_RES (31)..(31): Xaa is C or S

SEQ ID NO: 94987 - protein, 35 aa, Artificial Sequence; identical to SEQ ID NO: 7994
  Cyclic GFR-binding peptide
  MOD_RES (5)..(6): Xaa is C or S

SEQ ID NO: 94988 - protein, 26 aa, Artificial Sequence
  Cyclic GFR-binding peptide
PTKLSATSVLYYDDMGVPTLRKHREG

SEQ ID NO: 94989 - protein, 37 aa, Artificial Sequence; identical to SEQ ID NO: 36550
  Cyclic GFR-binding peptide
  MOD_RES (3)..(4)..(35)..(37): Xaa is C or S

SEQ ID NO: 94990 - protein, 38 aa, Artificial Sequence; identical to SEQ ID NO: 7997
  Cyclic GFR-binding peptide
  MOD_RES (2)..(3)..(36)..(38): Xaa is C or S

SEQ ID NO: 94991 - protein, 33 aa, Artificial Sequence; identical to SEQ ID NO: 36551
  Cyclic GFR-binding peptide
  MOD_RES (30)..(32): Xaa is C or S

SEQ ID NO: 94992 - protein, 35 aa, Artificial Sequence
  Cyclic GFR-binding peptide
  MOD_RES (2)..(3)..(35): Xaa is C or S
PXXVPEKMEPISILYLDENKNVVKFKYENMTVESX

SEQ ID NO: 94993 - protein, 28 aa, Artificial Sequence
  Cyclic GFR-binding peptide
TPTKMSPISMLYKNDKQQIILKYHYGMV

SEQ ID NO: 94994 - protein, 25 aa, Artificial Sequence
  Cyclic GFR-binding peptide
QDLSATSILYYVGRTPKVLRKHRMV

SEQ ID NO: 94995 - protein, 25 aa, Artificial Sequence
  Cyclic GFR-binding peptide
LNAISILYFDSANNVVLKKYRDMVV

SEQ ID NO: 94996 - protein, 31 aa, Artificial Sequence; identical to SEQ ID NO: 8004
  Cyclic GFR-binding peptide
  MOD_RES (28)..(30): Xaa is C or S

SEQ ID NO: 94997 - protein, 32 aa, Artificial Sequence; identical to SEQ ID NO: 36557
  Cyclic GFR-binding peptide
  MOD_RES (5)..(6): Xaa is C or S

SEQ ID NO: 94998 - protein, 38 aa, Artificial Sequence; identical to SEQ ID NO: 36562
  Cyclic GFR-binding peptide
  MOD_RES (2)..(3)..(35)..(37): Xaa is C or S

SEQ ID NO: 94999 - protein, 30 aa, Artificial Sequence; identical to SEQ ID NO: 8008
  Cyclic GFR-binding peptide
  MOD_RES (29)..(29): Xaa is C or S

SEQ ID NO: 95000 - protein, 32 aa, Artificial Sequence
  Cyclic GFR-binding peptide
  MOD_RES (4)..(5): Xaa is C or S
PEPXXVPEKMSATSILYYDENKNVVLRKHRNM

SEQ ID NO: 95001 - protein, 34 aa, Artificial Sequence; identical to SEQ ID NO: 42380
  Cyclic GFR-binding peptide
  MOD_RES (32)..(34): Xaa is C or S

SEQ ID NO: 95002 - protein, 25 aa, Artificial Sequence
  Cyclic GFR-binding peptide
LSPISILYKVGRTPKVLKYHYMVVK

SEQ ID NO: 95003 - protein, 32 aa, Artificial Sequence
  Cyclic GFR-binding peptide
  MOD_RES (4)..(5): Xaa is C or S
PEPXXVPEKMSPISILYKDENKNVVLKYHYNM

SEQ ID NO: 95004 - protein, 34 aa, Artificial Sequence; identical to SEQ ID NO: 8013
  Cyclic GFR-binding peptide
  MOD_RES (3)..(4): Xaa is C or S

SEQ ID NO: 95005 - protein, 34 aa, Artificial Sequence; identical to SEQ ID NO: 8016
  Cyclic GFR-binding peptide
  MOD_RES (4)..(5): Xaa is C or S

SEQ ID NO: 95006 - protein, 31 aa, Artificial Sequence; identical to SEQ ID NO: 42390
  Cyclic GFR-binding peptide
  MOD_RES (30)..(30): Xaa is C or S

SEQ ID NO: 95007 - protein, 27 aa, Artificial Sequence
  Cyclic GFR-binding peptide
TKMSPISMLYKNDKQQIILKYHYGMVV

SEQ ID NO: 95008 - protein, 39 aa, Artificial Sequence; identical to SEQ ID NO: 8023
  Cyclic GFR-binding peptide
  MOD_RES (3)..(4)..(36)..(38): Xaa is C or S

SEQ ID NO: 95009 - protein, 36 aa, Artificial Sequence; identical to SEQ ID NO: 36585
  Cyclic GFR-binding peptide
  MOD_RES (5)..(6): Xaa is C or S

SEQ ID NO: 95010 - protein, 29 aa, Artificial Sequence
  Cyclic GFR-binding peptide
  MOD_RES (2)..(3): Xaa is C or S
PXXVSQDLNAISILYFIGKTPKILKKYRM

SEQ ID NO: 95011 - protein, 23 aa, Artificial Sequence
  Cyclic GFR-binding peptide
SPINMLYFDENEKVVYGKIPDMV

SEQ ID NO: 95012 - protein, 35 aa, Artificial Sequence; identical to SEQ ID NO: 8027
  Cyclic GFR-binding peptide
  MOD_RES (1)..(34): Xaa is C or S

SEQ ID NO: 95013 - protein, 33 aa, Artificial Sequence; identical to SEQ ID NO: 8029
  Cyclic GFR-binding peptide
  MOD_RES (6)..(7): Xaa is C or S

SEQ ID NO: 95014 - protein, 31 aa, Artificial Sequence
  Cyclic GFR-binding peptide
  MOD_RES (1)..(2): Xaa is C or S
XXVPQALSPINILYFVGRKPKVYGKIPMIVR

SEQ ID NO: 95015 - protein, 31 aa, Artificial Sequence; identical to SEQ ID NO: 8031
  Cyclic GFR-binding peptide
  MOD_RES (30)..(30): Xaa is C or S

SEQ ID NO: 95016 - protein, 29 aa, Artificial Sequence
  Cyclic GFR-binding peptide
  MOD_RES (2)..(2): Xaa is C or S
TXAPTKLSATSVLYYDDSSNVILRKHRNM

SEQ ID NO: 95017 - protein, 21 aa, Artificial Sequence
  Cyclic GFR-binding peptide
LSPISILYKDKGVVTYLKYHY

SEQ ID NO: 95018 - protein, 35 aa, Artificial Sequence; identical to SEQ ID NO: 36592
  Cyclic GFR-binding peptide
  MOD_RES (7)..(7): Xaa is C or S

SEQ ID NO: 95019 - protein, 25 aa, Artificial Sequence
  Cyclic GFR-binding peptide
VPTKLSPINILYFDKGVVTYYGKIP

SEQ ID NO: 95020 - protein, 38 aa, Artificial Sequence; identical to SEQ ID NO: 42412
  Cyclic GFR-binding peptide
  MOD_RES (3)..(4)..(36)..(38): Xaa is C or S

SEQ ID NO: 95021 - protein, 31 aa, Artificial Sequence; identical to SEQ ID NO: 8036
  Cyclic GFR-binding peptide
  MOD_RES (30)..(30): Xaa is C or S

SEQ ID NO: 95022 - protein, 32 aa, Artificial Sequence
  Cyclic GFR-binding peptide
  MOD_RES (4)..(5): Xaa is C or S
PPTXXVPTRLEPISILYLDSANNVVKFKYEDM

SEQ ID NO: 95023 - protein, 31 aa, Artificial Sequence; identical to SEQ ID NO: 42414
  Cyclic GFR-binding peptide
  MOD_RES (30)..(30): Xaa is C or S

SEQ ID NO: 95024 - protein, 37 aa, Artificial Sequence
  Cyclic GFR-binding peptide
  MOD_RES (5)..(6)..(37): Xaa is C or S
SASPXXVSQDLSPINILYFIGKTPKIYGKIPMIVKSX

SEQ ID NO: 95025 - protein, 29 aa, Artificial Sequence
  Cyclic GFR-binding peptide
  MOD_RES (28)..(28): Xaa is C or S
LEPISMLYLDEYDKVVKFKYEEMVVEGXG

SEQ ID NO: 95026 - protein, 24 aa, Artificial Sequence
  Cyclic GFR-binding peptide
KTEPISMLYLDNGRVLLKFKYEMI

SEQ ID NO: 95027 - protein, 32 aa, Artificial Sequence; identical to SEQ ID NO: 8038
  Cyclic GFR-binding peptide
  MOD_RES (5)..(6): Xaa is C or S

SEQ ID NO: 95028 - protein, 39 aa, Artificial Sequence; identical to SEQ ID NO: 8041
  Cyclic GFR-binding peptide
  MOD_RES (6)..(7): Xaa is C or S

SEQ ID NO: 95029 - protein, 20 aa, Artificial Sequence
  Cyclic GFR-binding peptide
SPINILYFDAANNVVYGKIP

SEQ ID NO: 95030 - protein, 35 aa, Artificial Sequence; identical to SEQ ID NO: 8044
  Cyclic GFR-binding peptide
  MOD_RES (1)..(2)..(34): Xaa is C or S

SEQ ID NO: 95031 - protein, 30 aa, Artificial Sequence; identical to SEQ ID NO: 77633
  Cyclic GFR-binding peptide
  MOD_RES (2)..(3): Xaa is C or S

SEQ ID NO: 95032 - protein, 29 aa, Artificial Sequence
  Cyclic GFR-binding peptide
  MOD_RES (1)..(1): Xaa is C or S
XVPQALSATSILYYVGRKPKVLRKHRMIV

SEQ ID NO: 95033 - protein, 30 aa, Artificial Sequence; identical to SEQ ID NO: 77634
  Cyclic GFR-binding peptide
  MOD_RES (27)..(29): Xaa is C or S

SEQ ID NO: 95034 - protein, 30 aa, Artificial Sequence; identical to SEQ ID NO: 36614
  Cyclic GFR-binding peptide
  MOD_RES (3)..(4): Xaa is C or S

SEQ ID NO: 95035 - protein, 28 aa, Artificial Sequence
  Cyclic GFR-binding peptide
  MOD_RES (1)..(1): Xaa is C or S
XVSQDLSPISILYKIGKTPKILKYHYMI

SEQ ID NO: 95036 - protein, 34 aa, Artificial Sequence; identical to SEQ ID NO: 8051
  Cyclic GFR-binding peptide
  MOD_RES (1)..(2)..(34): Xaa is C or S

SEQ ID NO: 95037 - protein, 23 aa, Artificial Sequence
  Cyclic GFR-binding peptide
KLSPINVLYFDDSSNVIYGKIPN

SEQ ID NO: 95038 - protein, 36 aa, Artificial Sequence; identical to SEQ ID NO: 8053
  Cyclic GFR-binding peptide
  MOD_RES (1)..(2)..(33)..(35): Xaa is C or S

SEQ ID NO: 95039 - protein, 26 aa, Artificial Sequence
  Cyclic GFR-binding peptide
LSPISILYKDAANNVVLKYHYDMVVE

SEQ ID NO: 95040 - protein, 27 aa, Artificial Sequence
  Cyclic GFR-binding peptide
  MOD_RES (1)..(2): Xaa is C or S
XXAPVKTEPISMLYLDNGRVLLKFKYE

SEQ ID NO: 95041 - protein, 26 aa, Artificial Sequence
  Cyclic GFR-binding peptide
  MOD_RES (1)..(1): Xaa is C or S
XVPQDLNAISILYFVGRTPKVLKKYR

SEQ ID NO: 95042 - protein, 29 aa, Artificial Sequence
  Cyclic GFR-binding peptide
  MOD_RES (3)..(4): Xaa is C or S
APXXVPQALNAISILYFVGRKPKVLKKYR

SEQ ID NO: 95043 - protein, 33 aa, Artificial Sequence
  Cyclic GFR-binding peptide
  MOD_RES (2)..(3): Xaa is C or S
TXXVPTRLEPISILYLDSANNVVKFKYEDMVVE

SEQ ID NO: 95044 - protein, 26 aa, Artificial Sequence
  Cyclic GFR-binding peptide
TKLNAISILYFDKGVVTYLKKYRGMA

SEQ ID NO: 95045 - protein, 22 aa, Artificial Sequence
  Cyclic GFR-binding peptide
KTSPISMLYKDNGRVLLLKYHY

SEQ ID NO: 95046 - protein, 37 aa, Artificial Sequence; identical to SEQ ID NO: 42446
  Cyclic GFR-binding peptide
  MOD_RES (6)..(7): Xaa is C or S

SEQ ID NO: 95047 - protein, 28 aa, Artificial Sequence
  Cyclic GFR-binding peptide
  MOD_RES (1)..(2): Xaa is C or S
XXVPTELSATSMLYYDEYDKVVLRKHRE

SEQ ID NO: 95048 - protein, 40 aa, Artificial Sequence
  Cyclic GFR-binding peptide
  MOD_RES (6)..(7)..(38)..(40): Xaa is C or S
RVPSTXXAPVKTSPISMLYKDNGRVLLLKYHYMIVEEXGX

SEQ ID NO: 95049 - protein, 35 aa, Artificial Sequence; identical to SEQ ID NO: 42449
  Cyclic GFR-binding peptide
  MOD_RES (3)..(4): Xaa is C or S

SEQ ID NO: 95050 - protein, 36 aa, Artificial Sequence; identical to SEQ ID NO: 42450
  Cyclic GFR-binding peptide
  MOD_RES (3)..(4)..(36): Xaa is C or S

SEQ ID NO: 95051 - protein, 39 aa, Artificial Sequence; identical to SEQ ID NO: 8063
  Cyclic GFR-binding peptide
  MOD_RES (5)..(37)..(39): Xaa is C or S

SEQ ID NO: 95052 - protein, 37 aa, Artificial Sequence; identical to SEQ ID NO: 77643
  Cyclic GFR-binding peptide
  MOD_RES (4)..(5)..(36): Xaa is C or S

SEQ ID NO: 95053 - protein, 29 aa, Artificial Sequence
  Cyclic GFR-binding peptide
PQDLSPISILYKVGRTPKVLKYHYMVVKS

SEQ ID NO: 95054 - protein, 31 aa, Artificial Sequence; identical to SEQ ID NO: 8070
  Cyclic GFR-binding peptide
  MOD_RES (5)..(6): Xaa is C or S

SEQ ID NO: 95055 - protein, 23 aa, Artificial Sequence
  Cyclic GFR-binding peptide
TELSATSMLYYDENEKVVLRKHR

SEQ ID NO: 95056 - protein, 33 aa, Artificial Sequence
  Cyclic GFR-binding peptide
  MOD_RES (6)..(7): Xaa is C or S
RVPSTXXAPVKTEPISMLYLDNGRVLLKFKYEM

SEQ ID NO: 95057 - protein, 35 aa, Artificial Sequence; identical to SEQ ID NO: 8073
  Cyclic GFR-binding peptide
  MOD_RES (3)..(4): Xaa is C or S

SEQ ID NO: 95058 - protein, 32 aa, Artificial Sequence
  Cyclic GFR-binding peptide
  MOD_RES (6)..(7): Xaa is C or S
GIPEPXXVPEKMSPINILYFDENKNVVYGKIP

SEQ ID NO: 95059 - protein, 24 aa, Artificial Sequence
  Cyclic GFR-binding peptide
ALSPINILYFVGRKPKVYGKIPMI

SEQ ID NO: 95060 - protein, 31 aa, Artificial Sequence; identical to SEQ ID NO: 8076
  Cyclic GFR-binding peptide
  MOD_RES (1)..(2): Xaa is C or S

SEQ ID NO: 95061 - protein, 31 aa, Artificial Sequence; identical to SEQ ID NO: 42460
  Cyclic GFR-binding peptide
  MOD_RES (5)..(6): Xaa is C or S

SEQ ID NO: 95062 - protein, 31 aa, Artificial Sequence; identical to SEQ ID NO: 77653
  Cyclic GFR-binding peptide
  MOD_RES (2)..(3): Xaa is C or S

SEQ ID NO: 95063 - protein, 26 aa, Artificial Sequence
  Cyclic GFR-binding peptide
  MOD_RES (1)..(1): Xaa is C or S
XAPVKTSPINMLYFDNGRVLLYGKIP

SEQ ID NO: 95064 - protein, 39 aa, Artificial Sequence; identical to SEQ ID NO: 8079
  Cyclic GFR-binding peptide
  MOD_RES (5)..(6)..(37)..(39): Xaa is C or S

SEQ ID NO: 95065 - protein, 28 aa, Artificial Sequence
  Cyclic GFR-binding peptide
  MOD_RES (27)..(27): Xaa is C or S
LSPISILYKVGRTPKVLKYHYMVVKSXK

SEQ ID NO: 95066 - protein, 27 aa, Artificial Sequence
  Cyclic GFR-binding peptide
  MOD_RES (27)..(27): Xaa is C or S
SPISILYKDENKNVVLKYHYNMTVESX

SEQ ID NO: 95067 - protein, 25 aa, Artificial Sequence
  Cyclic GFR-binding peptide
NAISMLYFNDKQQIILKKYRGMVVD

SEQ ID NO: 95068 - protein, 32 aa, Artificial Sequence; identical to SEQ ID NO: 8085
  Cyclic GFR-binding peptide
  MOD_RES (4)..(5): Xaa is C or S

SEQ ID NO: 95069 - protein, 24 aa, Artificial Sequence
  Cyclic GFR-binding peptide
LNAISVLYFDDMGVPTLKKYREGM

SEQ ID NO: 95070 - protein, 20 aa, Artificial Sequence
  Cyclic GFR-binding peptide
SPISILYKDENKNVVLKYHY

SEQ ID NO: 95071 - protein, 24 aa, Artificial Sequence
  Cyclic GFR-binding peptide
RLSATSILYYDSANNVVLRKHRDM

SEQ ID NO: 95072 - protein, 28 aa, Artificial Sequence
  Cyclic GFR-binding peptide
  MOD_RES (28)..(28): Xaa is C or S
LSPISVLYKDDSSNVILKYHYNMVVRSX

SEQ ID NO: 95073 - protein, 29 aa, Artificial Sequence
  Cyclic GFR-binding peptide
TQLSPISVLYKDDSSNVILKYHYNMVVRA

SEQ ID NO: 95074 - protein, 27 aa, Artificial Sequence
  Cyclic GFR-binding peptide
EPISVLYLDDMGVPTKFKYEEGMSVAE

SEQ ID NO: 95075 - protein, 41 aa, Artificial Sequence; identical to SEQ ID NO: 8094
  Cyclic GFR-binding peptide
  MOD_RES (6)..(7)..(39)..(41): Xaa is C or S

SEQ ID NO: 95076 - protein, 36 aa, Artificial Sequence; identical to SEQ ID NO: 8096
  Cyclic GFR-binding peptide
  MOD_RES (7)..(7): Xaa is C or S

SEQ ID NO: 95077 - protein, 31 aa, Artificial Sequence; identical to SEQ ID NO: 8098
  Cyclic GFR-binding peptide
  MOD_RES (4)..(5): Xaa is C or S

SEQ ID NO: 95078 - protein, 32 aa, Artificial Sequence; identical to SEQ ID NO: 42478
  Cyclic GFR-binding peptide
  MOD_RES (30)..(32): Xaa is C or S

SEQ ID NO: 95079 - protein, 24 aa, Artificial Sequence
  Cyclic GFR-binding peptide
NAISVLYFDSSNNVILKKYRNMVV

SEQ ID NO: 95080 - protein, 34 aa, Artificial Sequence
  Cyclic GFR-binding peptide
  MOD_RES (2)..(3)..(34): Xaa is C or S
TXXAPVKTEPISMLYLDNGRVLLKFKYEMIVEEX

SEQ ID NO: 95081 - protein, 28 aa, Artificial Sequence
  Cyclic GFR-binding peptide
PARLEPISILYLDAANNVVKFKYEDMVV

SEQ ID NO: 95082 - protein, 26 aa, Artificial Sequence
  Cyclic GFR-binding peptide
PTRLEPISILYLDSANNVVKFKYEDM

SEQ ID NO: 95083 - protein, 32 aa, Artificial Sequence; identical to SEQ ID NO: 36681
  Cyclic GFR-binding peptide
  MOD_RES (6)..(7): Xaa is C or S

SEQ ID NO: 95084 - protein, 33 aa, Artificial Sequence; identical to SEQ ID NO: 36682
  Cyclic GFR-binding peptide
  MOD_RES (30)..(32): Xaa is C or S

SEQ ID NO: 95085 - protein, 31 aa, Artificial Sequence; identical to SEQ ID NO: 42488
  Cyclic GFR-binding peptide
  MOD_RES (2)..(3): Xaa is C or S

SEQ ID NO: 95086 - protein, 37 aa, Artificial Sequence; identical to SEQ ID NO: 42489
  Cyclic GFR-binding peptide
  MOD_RES (1)..(2)..(34)..(36): Xaa is C or S

SEQ ID NO: 95087 - protein, 34 aa, Artificial Sequence; identical to SEQ ID NO: 8107
  Cyclic GFR-binding peptide
  MOD_RES (2)..(3)..(34): Xaa is C or S

SEQ ID NO: 95088 - protein, 33 aa, Artificial Sequence; identical to SEQ ID NO: 77666
  Cyclic GFR-binding peptide
  MOD_RES (1)..(33): Xaa is C or S

SEQ ID NO: 95089 - protein, 38 aa, Artificial Sequence; identical to SEQ ID NO: 8109
  Cyclic GFR-binding peptide
  MOD_RES (5)..(6)..(37): Xaa is C or S

SEQ ID NO: 95090 - protein, 23 aa, Artificial Sequence
  Cyclic GFR-binding peptide
TELSATSMLYYDEYDKVVLRKHR

SEQ ID NO: 95091 - protein, 28 aa, Artificial Sequence
  Cyclic GFR-binding peptide
  MOD_RES (27)..(27): Xaa is C or S
NAISMLYFDEYDKVVLKKYREMVVEGXG

SEQ ID NO: 95092 - protein, 38 aa, Artificial Sequence
  Cyclic GFR-binding peptide
  MOD_RES (6)..(7)..(38): Xaa is C or S
RVPSTXXAPVKTSATSMLYYDNGRVLLLRKHRMIVEEX

SEQ ID NO: 95093 - protein, 28 aa, Artificial Sequence
  Cyclic GFR-binding peptide
PTELSATSMLYYDENEKVVLRKHRDMVV

SEQ ID NO: 95094 - protein, 32 aa, Artificial Sequence
  Cyclic GFR-binding peptide
  MOD_RES (4)..(5): Xaa is C or S
ASPXXVSQDLSPINILYFIGKTPKIYGKIPMI

SEQ ID NO: 95095 - protein, 39 aa, Artificial Sequence; identical to SEQ ID NO: 77668
  Cyclic GFR-binding peptide
  MOD_RES (3)..(4)..(36)..(38): Xaa is C or S

SEQ ID NO: 95096 - protein, 26 aa, Artificial Sequence
  Cyclic GFR-binding peptide
QDLNAISILYFVGRTPKVLKKYRMVV

SEQ ID NO: 95097 - protein, 21 aa, Artificial Sequence
  Cyclic GFR-binding peptide
SPISILYKVGRKPKVLKYHYM

SEQ ID NO: 95098 - protein, 28 aa, Artificial Sequence
  Cyclic GFR-binding peptide
  MOD_RES (1)..(2): Xaa is C or S
XXVPARLSPISILYKDAANNVVLKYHYD

SEQ ID NO: 95099 - protein, 34 aa, Artificial Sequence; identical to SEQ ID NO: 42508
  Cyclic GFR-binding peptide
  MOD_RES (1)..(2)..(34): Xaa is C or S

SEQ ID NO: 95100 - protein, 33 aa, Artificial Sequence
  Cyclic GFR-binding peptide
  MOD_RES (4)..(5): Xaa is C or S
PSTXXAPVKTSATSMLYYDNGRVLLLRKHRMIV

SEQ ID NO: 95101 - protein, 25 aa, Artificial Sequence
  Cyclic GFR-binding peptide
LNAISILYFVGRKPKVLKKYRMIVR

SEQ ID NO: 95102 - protein, 31 aa, Artificial Sequence
  Cyclic GFR-binding peptide
  MOD_RES (4)..(5): Xaa is C or S
PSTXXAPVKTSATSMLYYDNGRVLLLRKHRM

SEQ ID NO: 95103 - protein, 40 aa, Artificial Sequence
  Cyclic GFR-binding peptide
  MOD_RES (4)..(5)..(37)..(39): Xaa is C or S
PEPXXVPEKMSATSILYYDENKNVVLRKHRNMTVESXAXR

SEQ ID NO: 95104 - protein, 30 aa, Artificial Sequence; identical to SEQ ID NO: 8122
  Cyclic GFR-binding peptide
  MOD_RES (28)..(30): Xaa is C or S

SEQ ID NO: 95105 - protein, 28 aa, Artificial Sequence
  Cyclic GFR-binding peptide
  MOD_RES (1)..(2): Xaa is C or S
XXVPEKMNAISILYFDENKNVVLKKYRN

SEQ ID NO: 95106 - protein, 34 aa, Artificial Sequence; identical to SEQ ID NO: 8125
  Cyclic GFR-binding peptide
  MOD_RES (1)..(33): Xaa is C or S

SEQ ID NO: 95107 - protein, 30 aa, Artificial Sequence; identical to SEQ ID NO: 8126
  Cyclic GFR-binding peptide
  MOD_RES (1)..(1): Xaa is C or S

SEQ ID NO: 95108 - protein, 31 aa, Artificial Sequence; identical to SEQ ID NO: 36705
  Cyclic GFR-binding peptide

SEQ ID NO: 95109 - protein, 29 aa, Artificial Sequence
  Cyclic GFR-binding peptide
  MOD_RES (28)..(28): Xaa is C or S
LSATSVLYYDDSSNVILRKHRNMVVRSXG

SEQ ID NO: 95110 - protein, 29 aa, Artificial Sequence
  Cyclic GFR-binding peptide
  MOD_RES (1)..(2): Xaa is C or S
XXVPQDLSPISILYKVGRTPKVLKYHYMV

SEQ ID NO: 95111 - protein, 30 aa, Artificial Sequence; identical to SEQ ID NO: 36708
  Cyclic GFR-binding peptide
  MOD_RES (28)..(30): Xaa is C or S

SEQ ID NO: 95112 - protein, 35 aa, Artificial Sequence; identical to SEQ ID NO: 42525
  Cyclic GFR-binding peptide
  MOD_RES (4)..(5): Xaa is C or S

SEQ ID NO: 95113 - protein, 33 aa, Artificial Sequence; identical to SEQ ID NO: 36714
  Cyclic GFR-binding peptide
  MOD_RES (3)..(4): Xaa is C or S

SEQ ID NO: 95114 - protein, 23 aa, Artificial Sequence
  Cyclic GFR-binding peptide
LEPISILYLDAANNVVKFKYEDM

SEQ ID NO: 95115 - protein, 33 aa, Artificial Sequence; identical to SEQ ID NO: 8138
  Cyclic GFR-binding peptide
  MOD_RES (6)..(7): Xaa is C or S

SEQ ID NO: 95116 - protein, 38 aa, Artificial Sequence
  Cyclic GFR-binding peptide
  MOD_RES (3)..(4)..(36)..(38): Xaa is C or S
ASXXVPARLSATSILYYDAANNVVLRKHRDMVVEAXGX

SEQ ID NO: 95117 - protein, 28 aa, Artificial Sequence
  Cyclic GFR-binding peptide
  MOD_RES (27)..(27): Xaa is C or S
SATSILYYDENKNVVLRKHRNMTVESXA

SEQ ID NO: 95118 - protein, 28 aa, Artificial Sequence
  Cyclic GFR-binding peptide
  MOD_RES (1)..(1): Xaa is C or S
XVPQALEPISILYLVGRKPKVKFKYEMI

SEQ ID NO: 95119 - protein, 42 aa, Artificial Sequence
  Cyclic GFR-binding peptide
  MOD_RES (6)..(7)..(39)..(41): Xaa is C or S
GSAGPXXTPTKMEPISMLYLNDKQQIIKFKYEGMVVDRXGXS

SEQ ID NO: 95120 - protein, 26 aa, Artificial Sequence
  Cyclic GFR-binding peptide
LNAISVLYFDSSNNVILKKYRNMVVK

SEQ ID NO: 95121 - protein, 32 aa, Artificial Sequence
  Cyclic GFR-binding peptide
  MOD_RES (31)..(31): Xaa is C or S
PTKMEPISMLYLNDKQQIIKFKYEGMVVDRXG

SEQ ID NO: 95122 - protein, 37 aa, Artificial Sequence; identical to SEQ ID NO: 8149
  Cyclic GFR-binding peptide
  MOD_RES (1)..(2)..(34)..(36): Xaa is C or S

SEQ ID NO: 95123 - protein, 36 aa, Artificial Sequence; identical to SEQ ID NO: 42536
  Cyclic GFR-binding peptide
  MOD_RES (6)..(7): Xaa is C or S

SEQ ID NO: 95124 - protein, 35 aa, Artificial Sequence; identical to SEQ ID NO: 36732
  Cyclic GFR-binding peptide
  MOD_RES (3)..(4)..(35): Xaa is C or S

SEQ ID NO: 95125 - protein, 34 aa, Artificial Sequence; identical to SEQ ID NO: 8151
  Cyclic GFR-binding peptide
  MOD_RES (6)..(7): Xaa is C or S

SEQ ID NO: 95126 - protein, 38 aa, Artificial Sequence; identical to SEQ ID NO: 8153
  Cyclic GFR-binding peptide
  MOD_RES (2)..(3)..(35)..(37): Xaa is C or S

SEQ ID NO: 95127 - protein, 35 aa, Artificial Sequence; identical to SEQ ID NO: 8154
  Cyclic GFR-binding peptide
  MOD_RES (6)..(7): Xaa is C or S

SEQ ID NO: 95128 - protein, 27 aa, Artificial Sequence
  Cyclic GFR-binding peptide
PEKMSPISILYKDENKNVVLKYHYNMT

SEQ ID NO: 95129 - protein, 26 aa, Artificial Sequence
  Cyclic GFR-binding peptide
  MOD_RES (1)..(1): Xaa is C or S
XAPVKTSATSMLYYDNGRVLLLRKHR

SEQ ID NO: 95130 - protein, 32 aa, Artificial Sequence
  Cyclic GFR-binding peptide
  MOD_RES (2)..(3): Xaa is C or S
PXXVSQDLSPINILYFIGKTPKIYGKIPMIVK

SEQ ID NO: 95131 - protein, 37 aa, Artificial Sequence; identical to SEQ ID NO: 42543
  Cyclic GFR-binding peptide
  MOD_RES (6)..(7): Xaa is C or S

SEQ ID NO: 95132 - protein, 34 aa, Artificial Sequence
  Cyclic GFR-binding peptide
  MOD_RES (5)..(6): Xaa is C or S
TPPTXXVPTRLEPISILYLDSANNVVKFKYEDMV

SEQ ID NO: 95133 - protein, 26 aa, Artificial Sequence
  Cyclic GFR-binding peptide
ELSPINMLYFDEYDKVVYGKIPEMVV

SEQ ID NO: 95134 - protein, 36 aa, Artificial Sequence; identical to SEQ ID NO: 8157
  Cyclic GFR-binding peptide
  MOD_RES (5)..(6): Xaa is C or S

SEQ ID NO: 95135 - protein, 32 aa, Artificial Sequence; identical to SEQ ID NO: 8159
  Cyclic GFR-binding peptide
  MOD_RES (3)..(4): Xaa is C or S

SEQ ID NO: 95136 - protein, 26 aa, Artificial Sequence
  Cyclic GFR-binding peptide
ARLSPINILYFDAANNVVYGKIPDMV

SEQ ID NO: 95137 - protein, 34 aa, Artificial Sequence
  Cyclic GFR-binding peptide
  MOD_RES (1)..(33): Xaa is C or S
XVPEKMNAISILYFDENKNVVLKKYRNMTVESXA

SEQ ID NO: 95138 - protein, 28 aa, Artificial Sequence
  Cyclic GFR-binding peptide
  MOD_RES (1)..(2): Xaa is C or S
XXVPTRLEPISILYLDSANNVVKFKYED

SEQ ID NO: 95139 - protein, 27 aa, Artificial Sequence
  Cyclic GFR-binding peptide
KLSPISVLYKDDSSNVILKYHYNMVVR

SEQ ID NO: 95140 - protein, 39 aa, Artificial Sequence; identical to SEQ ID NO: 8170
  Cyclic GFR-binding peptide
  MOD_RES (5)..(6)..(37)..(39): Xaa is C or S

SEQ ID NO: 95141 - protein, 35 aa, Artificial Sequence
  Cyclic GFR-binding peptide
  MOD_RES (5)..(6): Xaa is C or S
TPPTXXVPTRLEPISILYLDSANNVVKFKYEDMVV

SEQ ID NO: 95142 - protein, 28 aa, Artificial Sequence
  Cyclic GFR-binding peptide
PEKMSPISILYKDENKNVVLKYHYNMTV

SEQ ID NO: 95143 - protein, 39 aa, Artificial Sequence; identical to SEQ ID NO: 8173
  Cyclic GFR-binding peptide
  MOD_RES (6)..(7)..(38): Xaa is C or S

SEQ ID NO: 95144 - protein, 30 aa, Artificial Sequence
  Cyclic GFR-binding peptide
  MOD_RES (28)..(30): Xaa is C or S
MEPISMLYLNDKQQIIKFKYEGMVVDRXGX

SEQ ID NO: 95145 - protein, 35 aa, Artificial Sequence
  Cyclic GFR-binding peptide
  MOD_RES (32)..(34): Xaa is C or S
VPARLSPINILYFDAANNVVYGKIPDMVVEAXGXR

SEQ ID NO: 95146 - protein, 28 aa, Artificial Sequence
  Cyclic GFR-binding peptide
QLSPISVLYKDDSSNVILKYHYNMVVRA

SEQ ID NO: 95147 - protein, 22 aa, Artificial Sequence
  Cyclic GFR-binding peptide
NAISVLYFDSSNNVILKKYRNM

SEQ ID NO: 95148 - protein, 28 aa, Artificial Sequence
  Cyclic GFR-binding peptide
  MOD_RES (1)..(2): Xaa is C or S
XXTPTKMSATSMLYYNDKQQIILRKHRG

SEQ ID NO: 95149 - protein, 24 aa, Artificial Sequence
  Cyclic GFR-binding peptide
SPINILYFVGRKPKVYGKIPMIVR

SEQ ID NO: 95150 - protein, 38 aa, Artificial Sequence; identical to SEQ ID NO: 36766
  Cyclic GFR-binding peptide
  MOD_RES (6)..(7): Xaa is C or S

SEQ ID NO: 95151 - protein, 38 aa, Artificial Sequence
  Cyclic GFR-binding peptide
  MOD_RES (3)..(4)..(35)..(37): Xaa is C or S
STXXAPVKTSATSMLYYDNGRVLLLRKHRMIVEEXGXL

SEQ ID NO: 95152 - protein, 36 aa, Artificial Sequence
  Cyclic GFR-binding peptide
  MOD_RES (5)..(6): Xaa is C or S
SAGPXXTPTKMSPISMLYKNDKQQIILKYHYGMVVD

SEQ ID NO: 95153 - protein, 27 aa, Artificial Sequence
  Cyclic GFR-binding peptide
ARLSPISILYKDAANNVVLKYHYDMVV

SEQ ID NO: 95154 - protein, 32 aa, Artificial Sequence; identical to SEQ ID NO: 8189
  Cyclic GFR-binding peptide
  MOD_RES (2)..(3): Xaa is C or S

SEQ ID NO: 95155 - protein, 23 aa, Artificial Sequence
  Cyclic GFR-binding peptide
DLEPISILYLIGKTPKIKFKYEM

SEQ ID NO: 95156 - protein, 39 aa, Artificial Sequence; identical to SEQ ID NO: 36775
  Cyclic GFR-binding peptide
  MOD_RES (4)..(5)..(37)..(39): Xaa is C or S

SEQ ID NO: 95157 - protein, 31 aa, Artificial Sequence; identical to SEQ ID NO: 8194
  Cyclic GFR-binding peptide
  MOD_RES (3)..(4): Xaa is C or S

SEQ ID NO: 95158 - protein, 24 aa, Artificial Sequence
  Cyclic GFR-binding peptide
EPISMLYLDEYDKVVKFKYEEMVV

SEQ ID NO: 95159 - protein, 27 aa, Artificial Sequence
  Cyclic GFR-binding peptide
  MOD_RES (1)..(2): Xaa is C or S
XXAPTKLSPINVLYFDDSSNVIYGKIP

SEQ ID NO: 95160 - protein, 35 aa, Artificial Sequence; identical to SEQ ID NO: 42583
  Cyclic GFR-binding peptide
  MOD_RES (2)..(3)..(35): Xaa is C or S

SEQ ID NO: 95161 - protein, 37 aa, Artificial Sequence; identical to SEQ ID NO: 36782
  Cyclic GFR-binding peptide
  MOD_RES (2)..(3)..(35)..(37): Xaa is C or S

SEQ ID NO: 95162 - protein, 25 aa, Artificial Sequence
  Cyclic GFR-binding peptide
NAISILYFDENKNVVLKKYRNMTVE

SEQ ID NO: 95163 - protein, 28 aa, Artificial Sequence
  Cyclic GFR-binding peptide
  MOD_RES (27)..(27): Xaa is C or S
EPISILYLDENKNVVKFKYENMTVESXA

SEQ ID NO: 95164 - protein, 37 aa, Artificial Sequence; identical to SEQ ID NO: 8200
  Cyclic GFR-binding peptide
  MOD_RES (6)..(7): Xaa is C or S

SEQ ID NO: 95165 - protein, 32 aa, Artificial Sequence; identical to SEQ ID NO: 8204
  Cyclic GFR-binding peptide
  MOD_RES (31)..(31): Xaa is C or S

SEQ ID NO: 95166 - protein, 37 aa, Artificial Sequence; identical to SEQ ID NO: 36787
  Cyclic GFR-binding peptide
  MOD_RES (6)..(7): Xaa is C or S

SEQ ID NO: 95167 - protein, 31 aa, Artificial Sequence
  Cyclic GFR-binding peptide
  MOD_RES (30)..(30): Xaa is C or S
EKMSPISILYKDENKNVVLKYHYNMTVESXA

SEQ ID NO: 95168 - protein, 36 aa, Artificial Sequence; identical to SEQ ID NO: 8205
  Cyclic GFR-binding peptide
  MOD_RES (5)..(6): Xaa is C or S

SEQ ID NO: 95169 - protein, 38 aa, Artificial Sequence; identical to SEQ ID NO: 8206
  Cyclic GFR-binding peptide
  MOD_RES (6)..(7): Xaa is C or S

SEQ ID NO: 95170 - protein, 38 aa, Artificial Sequence; identical to SEQ ID NO: 8207
  Cyclic GFR-binding peptide
  MOD_RES (6)..(7): Xaa is C or S

SEQ ID NO: 95171 - protein, 30 aa, Artificial Sequence; identical to SEQ ID NO: 42590
  Cyclic GFR-binding peptide
  MOD_RES (1)..(2): Xaa is C or S

SEQ ID NO: 95172 - protein, 23 aa, Artificial Sequence
  Cyclic GFR-binding peptide
LEPISILYLIGKTPKIKFKYEMI

SEQ ID NO: 95173 - protein, 31 aa, Artificial Sequence; identical to SEQ ID NO: 36795
  Cyclic GFR-binding peptide

SEQ ID NO: 95174 - protein, 25 aa, Artificial Sequence
  Cyclic GFR-binding peptide
KLNAISILYFDKGVVTYLKKYRGMA

SEQ ID NO: 95175 - protein, 27 aa, Artificial Sequence
  Cyclic GFR-binding peptide
  MOD_RES (1)..(2): Xaa is C or S
XXVPTELSPISMLYKDEYDKVVLKYHY

SEQ ID NO: 95176 - protein, 38 aa, Artificial Sequence; identical to SEQ ID NO: 36799
  Cyclic GFR-binding peptide
  MOD_RES (2)..(3)..(35)..(37): Xaa is C or S

SEQ ID NO: 95177 - protein, 30 aa, Artificial Sequence; identical to SEQ ID NO: 8214
  Cyclic GFR-binding peptide
  MOD_RES (1)..(1): Xaa is C or S

SEQ ID NO: 95178 - protein, 40 aa, Artificial Sequence; identical to SEQ ID NO: 42594
  Cyclic GFR-binding peptide
  MOD_RES (4)..(5)..(37)..(39): Xaa is C or S

SEQ ID NO: 95179 - protein, 31 aa, Artificial Sequence; identical to SEQ ID NO: 18519
  Cyclic GFR-binding peptide
  MOD_RES (4)..(5): Xaa is C or S

SEQ ID NO: 95180 - protein, 39 aa, Artificial Sequence; identical to SEQ ID NO: 8216
  Cyclic GFR-binding peptide
  MOD_RES (5)..(6)..(37)..(39): Xaa is C or S

SEQ ID NO: 95181 - protein, 36 aa, Artificial Sequence; identical to SEQ ID NO: 36808
  Cyclic GFR-binding peptide
  MOD_RES (6)..(7): Xaa is C or S

SEQ ID NO: 95182 - protein, 22 aa, Artificial Sequence
  Cyclic GFR-binding peptide
RLSPINILYFDAANNVVYGKIP

SEQ ID NO: 95183 - protein, 25 aa, Artificial Sequence
  Cyclic GFR-binding peptide
PTQLSPISVLYKDDSSNVILKYHYN

SEQ ID NO: 95184 - protein, 28 aa, Artificial Sequence
  Cyclic GFR-binding peptide
  MOD_RES (1)..(1): Xaa is C or S
XVPTELEPISMLYLDENEKVVKFKYEDM

SEQ ID NO: 95185 - protein, 27 aa, Artificial Sequence
  Cyclic GFR-binding peptide
KTSPISMLYKDNGRVLLLKYHYMIVEE

SEQ ID NO: 95186 - protein, 28 aa, Artificial Sequence
  Cyclic GFR-binding peptide
  MOD_RES (1)..(1): Xaa is C or S
XTPTKMSATSMLYYNDKQQIILRKHRGM

SEQ ID NO: 95187 - protein, 32 aa, Artificial Sequence; identical to SEQ ID NO: 8223
  Cyclic GFR-binding peptide
  MOD_RES (5)..(5): Xaa is C or S

SEQ ID NO: 95188 - protein, 37 aa, Artificial Sequence; identical to SEQ ID NO: 36815
  Cyclic GFR-binding peptide
  MOD_RES (5)..(6): Xaa is C or S

SEQ ID NO: 95189 - protein, 25 aa, Artificial Sequence
  Cyclic GFR-binding peptide
MEPISMLYLNDKQQIIKFKYEGMVV

SEQ ID NO: 95190 - protein, 32 aa, Artificial Sequence; identical to SEQ ID NO: 77721
  Cyclic GFR-binding peptide
  MOD_RES (3)..(4): Xaa is C or S

SEQ ID NO: 95191 - protein, 23 aa, Artificial Sequence
  Cyclic GFR-binding peptide
KLEPISVLYLDSSNNVIKFKYEN

SEQ ID NO: 95192 - protein, 35 aa, Artificial Sequence; identical to SEQ ID NO: 8226
  Cyclic GFR-binding peptide
  MOD_RES (32)..(34): Xaa is C or S

SEQ ID NO: 95193 - protein, 33 aa, Artificial Sequence
  Cyclic GFR-binding peptide
  MOD_RES (6)..(7): Xaa is C or S
RVPSTXXAPVKTSPISMLYKDNGRVLLLKYHYM

SEQ ID NO: 95194 - protein, 29 aa, Artificial Sequence
  Cyclic GFR-binding peptide
  MOD_RES (1)..(1): Xaa is C or S
XVPEKMSPISILYKDENKNVVLKYHYNMT

SEQ ID NO: 95195 - protein, 33 aa, Artificial Sequence
  Cyclic GFR-binding peptide
  MOD_RES (5)..(6): Xaa is C or S
TPPTXXVPTRLSATSILYYDSANNVVLRKHRDM

SEQ ID NO: 95196 - protein, 34 aa, Artificial Sequence; identical to SEQ ID NO: 8228
  Cyclic GFR-binding peptide
  MOD_RES (31)..(33): Xaa is C or S

SEQ ID NO: 95197 - protein, 26 aa, Artificial Sequence
  Cyclic GFR-binding peptide
PQDLEPISILYLVGRTPKVKFKYEMV

SEQ ID NO: 95198 - protein, 25 aa, Artificial Sequence
  Cyclic GFR-binding peptide
SPISILYKVGRTPKVLKYHYMVVKS

SEQ ID NO: 95199 - protein, 31 aa, Artificial Sequence; identical to SEQ ID NO: 42617
  Cyclic GFR-binding peptide
  MOD_RES (4)..(5): Xaa is C or S

SEQ ID NO: 95200 - protein, 25 aa, Artificial Sequence
  Cyclic GFR-binding peptide
QALSATSILYYVGRKPKVLRKHRMI

SEQ ID NO: 95201 - protein, 34 aa, Artificial Sequence
  Cyclic GFR-binding peptide
  MOD_RES (1)..(33): Xaa is C or S
XVPEKMEPISILYLDENKNVVKFKYENMTVESXA

SEQ ID NO: 95202 - protein, 26 aa, Artificial Sequence
  Cyclic GFR-binding peptide
VKTSPISMLYKDNGRVLLLKYHYMIV

SEQ ID NO: 95203 - protein, 30 aa, Artificial Sequence
  Cyclic GFR-binding peptide
PEKMEPISILYLDENKNVVKFKYENMTVES

SEQ ID NO: 95204 - protein, 33 aa, Artificial Sequence; identical to SEQ ID NO: 8238
  Cyclic GFR-binding peptide
  MOD_RES (2)..(3): Xaa is C or S

SEQ ID NO: 95205 - protein, 36 aa, Artificial Sequence
  Cyclic GFR-binding peptide
  MOD_RES (6)..(7): Xaa is C or S
AAPASXXVPARLSATSILYYDAANNVVLRKHRDMVV

SEQ ID NO: 95206 - protein, 41 aa, Artificial Sequence; identical to SEQ ID NO: 42629
  Cyclic GFR-binding peptide
  MOD_RES (6)..(7)..(39)..(41): Xaa is C or S

SEQ ID NO: 95207 - protein, 31 aa, Artificial Sequence; identical to SEQ ID NO: 8242
  Cyclic GFR-binding peptide
  MOD_RES (29)..(31): Xaa is C or S

SEQ ID NO: 95208 - protein, 23 aa, Artificial Sequence
  Cyclic GFR-binding peptide
LNAISVLYFDDMGVPTLKKYREG

SEQ ID NO: 95209 - protein, 36 aa, Artificial Sequence; identical to SEQ ID NO: 36838
  Cyclic GFR-binding peptide
  MOD_RES (1)..(2)..(33)..(35): Xaa is C or S

SEQ ID NO: 95210 - protein, 31 aa, Artificial Sequence; identical to SEQ ID NO: 8249
  Cyclic GFR-binding peptide
  MOD_RES (3)..(4): Xaa is C or S

SEQ ID NO: 95211 - protein, 33 aa, Artificial Sequence; identical to SEQ ID NO: 36842
  Cyclic GFR-binding peptide
  MOD_RES (6)..(7): Xaa is C or S

SEQ ID NO: 95212 - protein, 30 aa, Artificial Sequence; identical to SEQ ID NO: 8252
  Cyclic GFR-binding peptide
  MOD_RES (3)..(4): Xaa is C or S

SEQ ID NO: 95213 - protein, 34 aa, Artificial Sequence; identical to SEQ ID NO: 8253
  Cyclic GFR-binding peptide
  MOD_RES (1)..(34): Xaa is C or S

SEQ ID NO: 95214 - protein, 26 aa, Artificial Sequence
  Cyclic GFR-binding peptide
PTKLNAISVLYFDSSNNVILKKYRNM

SEQ ID NO: 95215 - protein, 30 aa, Artificial Sequence
  Cyclic GFR-binding peptide
  MOD_RES (28)..(30): Xaa is C or S
MSATSMLYYNDKQQIILRKHRGMVVDRXGX

SEQ ID NO: 95216 - protein, 35 aa, Artificial Sequence; identical to SEQ ID NO: 8260
  Cyclic GFR-binding peptide
  MOD_RES (1)..(33)..(35): Xaa is C or S

SEQ ID NO: 95217 - protein, 35 aa, Artificial Sequence; identical to SEQ ID NO: 36851
  Cyclic GFR-binding peptide
  MOD_RES (1)..(32)..(34): Xaa is C or S

SEQ ID NO: 95218 - protein, 29 aa, Artificial Sequence
  Cyclic GFR-binding peptide
  MOD_RES (28)..(28): Xaa is C or S
MEPISMLYLNDKQQIIKFKYEGMVVDRXG

SEQ ID NO: 95219 - protein, 24 aa, Artificial Sequence
  Cyclic GFR-binding peptide
LEPISILYLIGKTPKIKFKYEMIV

SEQ ID NO: 95220 - protein, 28 aa, Artificial Sequence
  Cyclic GFR-binding peptide
TRLNAISILYFDSANNVVLKKYRDMVVE

SEQ ID NO: 95221 - protein, 29 aa, Artificial Sequence
  Cyclic GFR-binding peptide
PQDLEPISILYLVGRTPKVKFKYEMVVKS

SEQ ID NO: 95222 - protein, 21 aa, Artificial Sequence
  Cyclic GFR-binding peptide
NAISILYFDKGVVTYLKKYRG

SEQ ID NO: 95223 - protein, 22 aa, Artificial Sequence
  Cyclic GFR-binding peptide
SPINILYFDKGVVTYYGKIPGM

SEQ ID NO: 95224 - protein, 41 aa, Artificial Sequence; identical to SEQ ID NO: 36863
  Cyclic GFR-binding peptide
  MOD_RES (6)..(7)..(38)..(40): Xaa is C or S

SEQ ID NO: 95225 - protein, 24 aa, Artificial Sequence
  Cyclic GFR-binding peptide
MEPISILYLDENKNVVKFKYENMT

SEQ ID NO: 95226 - protein, 38 aa, Artificial Sequence
  Cyclic GFR-binding peptide
  MOD_RES (2)..(3)..(35)..(37): Xaa is C or S
PXXVPEKMSATSILYYDENKNVVLRKHRNMTVESXAXR

SEQ ID NO: 95227 - protein, 29 aa, Artificial Sequence
  Cyclic GFR-binding peptide
TELSPINMLYFDEYDKVVYGKIPEMVVEG

SEQ ID NO: 95228 - protein, 31 aa, Artificial Sequence; identical to SEQ ID NO: 36865
  Cyclic GFR-binding peptide
  MOD_RES (1)..(2): Xaa is C or S

SEQ ID NO: 95229 - protein, 30 aa, Artificial Sequence
  Cyclic GFR-binding peptide
  MOD_RES (27)..(29): Xaa is C or S
SATSILYYDSANNVVLRKHRDMVVESXGXR

SEQ ID NO: 95230 - protein, 31 aa, Artificial Sequence; identical to SEQ ID NO: 42658
  Cyclic GFR-binding peptide
  MOD_RES (1)..(1): Xaa is C or S

SEQ ID NO: 95231 - protein, 35 aa, Artificial Sequence
  Cyclic GFR-binding peptide
  MOD_RES (5)..(6): Xaa is C or S
IPEPXXVPEKMNAISILYFDENKNVVLKKYRNMTV

SEQ ID NO: 95232 - protein, 40 aa, Artificial Sequence; identical to SEQ ID NO: 42666
  Cyclic GFR-binding peptide
  MOD_RES (6)..(7)..(39): Xaa is C or S

SEQ ID NO: 95233 - protein, 35 aa, Artificial Sequence; identical to SEQ ID NO: 8280
  Cyclic GFR-binding peptide
  MOD_RES (3)..(4)..(35): Xaa is C or S

SEQ ID NO: 95234 - protein, 36 aa, Artificial Sequence; identical to SEQ ID NO: 8281
  Cyclic GFR-binding peptide
  MOD_RES (2)..(3)..(34)..(36): Xaa is C or S

SEQ ID NO: 95235 - protein, 39 aa, Artificial Sequence; identical to SEQ ID NO: 36871
  Cyclic GFR-binding peptide
  MOD_RES (3)..(4)..(36)..(38): Xaa is C or S

SEQ ID NO: 95236 - protein, 23 aa, Artificial Sequence
  Cyclic GFR-binding peptide
SPINILYFDSANNVVYGKIPDMV

SEQ ID NO: 95237 - protein, 29 aa, Artificial Sequence
  Cyclic GFR-binding peptide
PTELSPINMLYFDENEKVVYGKIPDMVVE

SEQ ID NO: 95238 - protein, 33 aa, Artificial Sequence; identical to SEQ ID NO: 8283
  Cyclic GFR-binding peptide
  MOD_RES (32)..(32): Xaa is C or S

SEQ ID NO: 95239 - protein, 33 aa, Artificial Sequence
  Cyclic GFR-binding peptide
  MOD_RES (4)..(5): Xaa is C or S
ASPXXVPQDLSPINILYFVGRTPKVYGKIPMVV

SEQ ID NO: 95240 - protein, 32 aa, Artificial Sequence; identical to SEQ ID NO: 36874
  Cyclic GFR-binding peptide
  MOD_RES (31)..(31): Xaa is C or S

SEQ ID NO: 95241 - protein, 30 aa, Artificial Sequence
  Cyclic GFR-binding peptide
  MOD_RES (29)..(29): Xaa is C or S
KMNAISILYFDENKNVVLKKYRNMTVESXA

SEQ ID NO: 95242 - protein, 30 aa, Artificial Sequence; identical to SEQ ID NO: 8286
  Cyclic GFR-binding peptide
  MOD_RES (2)..(3): Xaa is C or S

SEQ ID NO: 95243 - protein, 28 aa, Artificial Sequence
  Cyclic GFR-binding peptide
  MOD_RES (27)..(27): Xaa is C or S
LSPINILYFVGRTPKVYGKIPMVVKSXK

SEQ ID NO: 95244 - protein, 26 aa, Artificial Sequence
  Cyclic GFR-binding peptide
DLSPINILYFVGRTPKVYGKIPMVVK

SEQ ID NO: 95245 - protein, 24 aa, Artificial Sequence
  Cyclic GFR-binding peptide
KLNAISILYFDKGVVTYLKKYRGM

SEQ ID NO: 95246 - protein, 29 aa, Artificial Sequence
  Cyclic GFR-binding peptide
  MOD_RES (2)..(3): Xaa is C or S
AXXVPTELNAISMLYFDENEKVVLKKYRD

SEQ ID NO: 95247 - protein, 27 aa, Artificial Sequence
  Cyclic GFR-binding peptide
  MOD_RES (1)..(1): Xaa is C or S
XVPEKMEPISILYLDENKNVVKFKYEN

SEQ ID NO: 95248 - protein, 34 aa, Artificial Sequence; identical to SEQ ID NO: 42690
  Cyclic GFR-binding peptide
  MOD_RES (3)..(4): Xaa is C or S

SEQ ID NO: 95249 - protein, 40 aa, Artificial Sequence; identical to SEQ ID NO: 36888
  Cyclic GFR-binding peptide
  MOD_RES (5)..(6)..(38)..(40): Xaa is C or S

SEQ ID NO: 95250 - protein, 29 aa, Artificial Sequence
  Cyclic GFR-binding peptide
  MOD_RES (1)..(1): Xaa is C or S
XVPTELSPISMLYKDEYDKVVLKYHYEMV

SEQ ID NO: 95251 - protein, 35 aa, Artificial Sequence; identical to SEQ ID NO: 8300
  Cyclic GFR-binding peptide
  MOD_RES (2)..(3)..(34): Xaa is C or S

SEQ ID NO: 95252 - protein, 41 aa, Artificial Sequence; identical to SEQ ID NO: 42698
  Cyclic GFR-binding peptide
  MOD_RES (6)..(7)..(39)..(41): Xaa is C or S

SEQ ID NO: 95253 - protein, 31 aa, Artificial Sequence; identical to SEQ ID NO: 8301
  Cyclic GFR-binding peptide

SEQ ID NO: 95254 - protein, 34 aa, Artificial Sequence; identical to SEQ ID NO: 8303
  Cyclic GFR-binding peptide
  MOD_RES (32)..(34): Xaa is C or S

SEQ ID NO: 95255 - protein, 35 aa, Artificial Sequence; identical to SEQ ID NO: 8305
  Cyclic GFR-binding peptide
  MOD_RES (2)..(3)..(34): Xaa is C or S

SEQ ID NO: 95256 - protein, 32 aa, Artificial Sequence
  Cyclic GFR-binding peptide
  MOD_RES (2)..(3): Xaa is C or S
TXXVPTRLEPISILYLDSANNVVKFKYEDMVV

SEQ ID NO: 95257 - protein, 35 aa, Artificial Sequence; identical to SEQ ID NO: 36903
  Cyclic GFR-binding peptide
  MOD_RES (4)..(5): Xaa is C or S

SEQ ID NO: 95258 - protein, 37 aa, Artificial Sequence; identical to SEQ ID NO: 36904
  Cyclic GFR-binding peptide
  MOD_RES (5)..(37): Xaa is C or S

SEQ ID NO: 95259 - protein, 37 aa, Artificial Sequence; identical to SEQ ID NO: 36906
  Cyclic GFR-binding peptide
  MOD_RES (2)..(3)..(35)..(37): Xaa is C or S

SEQ ID NO: 95260 - protein, 30 aa, Artificial Sequence; identical to SEQ ID NO: 8309
  Cyclic GFR-binding peptide
  MOD_RES (28)..(30): Xaa is C or S

SEQ ID NO: 95261 - protein, 31 aa, Artificial Sequence; identical to SEQ ID NO: 36909
  Cyclic GFR-binding peptide
  MOD_RES (2)..(2): Xaa is C or S

SEQ ID NO: 95262 - protein, 33 aa, Artificial Sequence; identical to SEQ ID NO: 36910
  Cyclic GFR-binding peptide
  MOD_RES (2)..(3): Xaa is C or S

SEQ ID NO: 95263 - protein, 25 aa, Artificial Sequence
  Cyclic GFR-binding peptide
SPISILYKDENKNVVLKYHYNMTVE

SEQ ID NO: 95264 - protein, 31 aa, Artificial Sequence; identical to SEQ ID NO: 8314
  Cyclic GFR-binding peptide
  MOD_RES (4)..(5): Xaa is C or S

SEQ ID NO: 95265 - protein, 32 aa, Artificial Sequence; identical to SEQ ID NO: 8316
  Cyclic GFR-binding peptide
  MOD_RES (32)..(32): Xaa is C or S

SEQ ID NO: 95266 - protein, 27 aa, Artificial Sequence
  Cyclic GFR-binding peptide
  MOD_RES (1)..(1): Xaa is C or S
XVPEKMSPISILYKDENKNVVLKYHYN

SEQ ID NO: 95267 - protein, 33 aa, Artificial Sequence; identical to SEQ ID NO: 8317
  Cyclic GFR-binding peptide
  MOD_RES (30)..(32): Xaa is C or S

SEQ ID NO: 95268 - protein, 35 aa, Artificial Sequence; identical to SEQ ID NO: 8319
  Cyclic GFR-binding peptide
  MOD_RES (1)..(2)..(34): Xaa is C or S

SEQ ID NO: 95269 - protein, 20 aa, Artificial Sequence
  Cyclic GFR-binding peptide
SPINILYFDKGVVTYYGKIP

SEQ ID NO: 95270 - protein, 35 aa, Artificial Sequence
  Cyclic GFR-binding peptide
  MOD_RES (1)..(32)..(34): Xaa is C or S
XVSQDLSPINILYFIGKTPKIYGKIPMIVKSXKXS

SEQ ID NO: 95271 - protein, 31 aa, Artificial Sequence; identical to SEQ ID NO: 8322
  Cyclic GFR-binding peptide
  MOD_RES (3)..(4): Xaa is C or S

SEQ ID NO: 95272 - protein, 31 aa, Artificial Sequence; identical to SEQ ID NO: 36921
  Cyclic GFR-binding peptide
  MOD_RES (2)..(3): Xaa is C or S

SEQ ID NO: 95273 - protein, 35 aa, Artificial Sequence; identical to SEQ ID NO: 8323
  Cyclic GFR-binding peptide
  MOD_RES (5)..(6): Xaa is C or S

SEQ ID NO: 95274 - protein, 33 aa, Artificial Sequence; identical to SEQ ID NO: 42719
  Cyclic GFR-binding peptide
  MOD_RES (6)..(7): Xaa is C or S

SEQ ID NO: 95275 - protein, 36 aa, Artificial Sequence; identical to SEQ ID NO: 42720
  Cyclic GFR-binding peptide
  MOD_RES (1)..(34)..(36): Xaa is C or S

SEQ ID NO: 95276 - protein, 31 aa, Artificial Sequence; identical to SEQ ID NO: 42721
  Cyclic GFR-binding peptide
  MOD_RES (1)..(1): Xaa is C or S

SEQ ID NO: 95277 - protein, 30 aa, Artificial Sequence; identical to SEQ ID NO: 42722
  Cyclic GFR-binding peptide

SEQ ID NO: 95278 - protein, 40 aa, Artificial Sequence; identical to SEQ ID NO: 36923
  Cyclic GFR-binding peptide
  MOD_RES (5)..(6)..(38)..(40): Xaa is C or S

SEQ ID NO: 95279 - protein, 35 aa, Artificial Sequence; identical to SEQ ID NO: 8325
  Cyclic GFR-binding peptide
  MOD_RES (3)..(4): Xaa is C or S

SEQ ID NO: 95280 - protein, 26 aa, Artificial Sequence
  Cyclic GFR-binding peptide
SPISILYKDKGVVTYLKYHYGMAVSE

SEQ ID NO: 95281 - protein, 29 aa, Artificial Sequence
  Cyclic GFR-binding peptide
  MOD_RES (29)..(29): Xaa is C or S
QDLNAISILYFIGKTPKILKKYRMIVKSX

SEQ ID NO: 95282 - protein, 36 aa, Artificial Sequence; identical to SEQ ID NO: 8329
  Cyclic GFR-binding peptide
  MOD_RES (4)..(5): Xaa is C or S

SEQ ID NO: 95283 - protein, 35 aa, Artificial Sequence; identical to SEQ ID NO: 36931
  Cyclic GFR-binding peptide
  MOD_RES (6)..(7): Xaa is C or S

SEQ ID NO: 95284 - protein, 34 aa, Artificial Sequence; identical to SEQ ID NO: 36932
  Cyclic GFR-binding peptide
  MOD_RES (4)..(5): Xaa is C or S

SEQ ID NO: 95285 - protein, 37 aa, Artificial Sequence
  Cyclic GFR-binding peptide
  MOD_RES (2)..(3)..(35)..(37): Xaa is C or S
PXXVPEKMSATSILYYDENKNVVLRKHRNMTVESXAX

SEQ ID NO: 95286 - protein, 31 aa, Artificial Sequence; identical to SEQ ID NO: 8331
  Cyclic GFR-binding peptide
  MOD_RES (28)..(30): Xaa is C or S

SEQ ID NO: 95287 - protein, 32 aa, Artificial Sequence; identical to SEQ ID NO: 36935
  Cyclic GFR-binding peptide
  MOD_RES (29)..(31): Xaa is C or S

SEQ ID NO: 95288 - protein, 31 aa, Artificial Sequence
  Cyclic GFR-binding peptide
  MOD_RES (30)..(30): Xaa is C or S
PVKTSPISMLYKDNGRVLLLKYHYMIVEEXG

SEQ ID NO: 95289 - protein, 31 aa, Artificial Sequence; identical to SEQ ID NO: 36937
  Cyclic GFR-binding peptide
  MOD_RES (3)..(4): Xaa is C or S

SEQ ID NO: 95290 - protein, 30 aa, Artificial Sequence
  Cyclic GFR-binding peptide
  MOD_RES (2)..(3): Xaa is C or S
TXXVPTRLSATSILYYDSANNVVLRKHRDM

SEQ ID NO: 95291 - protein, 42 aa, Artificial Sequence; identical to SEQ ID NO: 36938
  Cyclic GFR-binding peptide
  MOD_RES (6)..(7)..(39)..(41): Xaa is C or S

SEQ ID NO: 95292 - protein, 25 aa, Artificial Sequence
  Cyclic GFR-binding peptide
SPINILYFVGRKPKVYGKIPMIVRS

SEQ ID NO: 95293 - protein, 35 aa, Artificial Sequence
  Cyclic GFR-binding peptide
  MOD_RES (6)..(7): Xaa is C or S
KASKAXXVPTKLSATSILYYDKGVVTYLRKHRGMA

SEQ ID NO: 95294 - protein, 33 aa, Artificial Sequence
  Cyclic GFR-binding peptide
  MOD_RES (32)..(32): Xaa is C or S
VPTRLSPISILYKDSANNVVLKYHYDMVVESXG

SEQ ID NO: 95295 - protein, 32 aa, Artificial Sequence; identical to SEQ ID NO: 36941
  Cyclic GFR-binding peptide
  MOD_RES (32)..(32): Xaa is C or S

SEQ ID NO: 95296 - protein, 35 aa, Artificial Sequence
  Cyclic GFR-binding peptide
  MOD_RES (6)..(7): Xaa is C or S
GSAGPXXTPTKMEPISMLYLNDKQQIIKFKYEGMV

SEQ ID NO: 95297 - protein, 29 aa, Artificial Sequence
  Cyclic GFR-binding peptide
  MOD_RES (1)..(1): Xaa is C or S
XVPQALEPISILYLVGRKPKVKFKYEMIV

SEQ ID NO: 95298 - protein, 32 aa, Artificial Sequence; identical to SEQ ID NO: 8338
  Cyclic GFR-binding peptide
  MOD_RES (29)..(31): Xaa is C or S

SEQ ID NO: 95299 - protein, 25 aa, Artificial Sequence
  Cyclic GFR-binding peptide
LEPISMLYLDENEKVVKFKYEDMVV

SEQ ID NO: 95300 - protein, 27 aa, Artificial Sequence
  Cyclic GFR-binding peptide
  MOD_RES (1)..(1): Xaa is C or S
XVPARLNAISILYFDAANNVVLKKYRD

SEQ ID NO: 95301 - protein, 37 aa, Artificial Sequence
  Cyclic GFR-binding peptide
  MOD_RES (1)..(2)..(34)..(36): Xaa is C or S
XXVPTKLSATSILYYDKGVVTYLRKHRGMAVSEXGXR

SEQ ID NO: 95302 - protein, 31 aa, Artificial Sequence; identical to SEQ ID NO: 77779
  Cyclic GFR-binding peptide
  MOD_RES (28)..(30): Xaa is C or S

SEQ ID NO: 95303 - protein, 34 aa, Artificial Sequence
  Cyclic GFR-binding peptide
  MOD_RES (6)..(7): Xaa is C or S
GIPEPXXVPEKMSATSILYYDENKNVVLRKHRNM

SEQ ID NO: 95304 - protein, 39 aa, Artificial Sequence; identical to SEQ ID NO: 36957
  Cyclic GFR-binding peptide
  MOD_RES (6)..(7)..(38): Xaa is C or S

SEQ ID NO: 95305 - protein, 34 aa, Artificial Sequence; identical to SEQ ID NO: 8348
  Cyclic GFR-binding peptide
  MOD_RES (1)..(2)..(33): Xaa is C or S

SEQ ID NO: 95306 - protein, 34 aa, Artificial Sequence; identical to SEQ ID NO: 36962
  Cyclic GFR-binding peptide
  MOD_RES (3)..(4): Xaa is C or S

SEQ ID NO: 95307 - protein, 33 aa, Artificial Sequence; identical to SEQ ID NO: 42764
  Cyclic GFR-binding peptide
  MOD_RES (1)..(33): Xaa is C or S

SEQ ID NO: 95308 - protein, 32 aa, Artificial Sequence; identical to SEQ ID NO: 8354
  Cyclic GFR-binding peptide
  MOD_RES (2)..(3): Xaa is C or S

SEQ ID NO: 95309 - protein, 33 aa, Artificial Sequence; identical to SEQ ID NO: 36972
  Cyclic GFR-binding peptide
  MOD_RES (6)..(7): Xaa is C or S

SEQ ID NO: 95310 - protein, 26 aa, Artificial Sequence
  Cyclic GFR-binding peptide
RLEPISILYLDAANNVVKFKYEDMVV

SEQ ID NO: 95311 - protein, 33 aa, Artificial Sequence; identical to SEQ ID NO: 8355
  Cyclic GFR-binding peptide
  MOD_RES (30)..(32): Xaa is C or S

SEQ ID NO: 95312 - protein, 26 aa, Artificial Sequence
  Cyclic GFR-binding peptide
  MOD_RES (26)..(26): Xaa is C or S
SATSILYYVGRKPKVLRKHRMIVRSX

SEQ ID NO: 95313 - protein, 35 aa, Artificial Sequence
  Cyclic GFR-binding peptide
  MOD_RES (1)..(33)..(35): Xaa is C or S
XVPEKMNAISILYFDENKNVVLKKYRNMTVESXAX

SEQ ID NO: 95314 - protein, 28 aa, Artificial Sequence
  Cyclic GFR-binding peptide
RLSPINILYFDSANNVVYGKIPDMVVES

SEQ ID NO: 95315 - protein, 36 aa, Artificial Sequence; identical to SEQ ID NO: 36977
  Cyclic GFR-binding peptide
  MOD_RES (1)..(2)..(34)..(36): Xaa is C or S

SEQ ID NO: 95316 - protein, 27 aa, Artificial Sequence
  Cyclic GFR-binding peptide
ARLNAISILYFDAANNVVLKKYRDMVV

SEQ ID NO: 95317 - protein, 22 aa, Artificial Sequence
  Cyclic GFR-binding peptide
KLSPINVLYFDDMGVPTYGKIP

SEQ ID NO: 95318 - protein, 22 aa, Artificial Sequence
  Cyclic GFR-binding peptide
SATSVLYYDDSSNVILRKHRNM

SEQ ID NO: 95319 - protein, 31 aa, Artificial Sequence; identical to SEQ ID NO: 8364
  Cyclic GFR-binding peptide
  MOD_RES (1)..(1): Xaa is C or S

SEQ ID NO: 95320 - protein, 24 aa, Artificial Sequence
  Cyclic GFR-binding peptide
ARLSPINILYFDAANNVVYGKIPD

SEQ ID NO: 95321 - protein, 36 aa, Artificial Sequence; identical to SEQ ID NO: 8366
  Cyclic GFR-binding peptide
  MOD_RES (2)..(3)..(34)..(36): Xaa is C or S

SEQ ID NO: 95322 - protein, 22 aa, Artificial Sequence
  Cyclic GFR-binding peptide
KLNAISILYFDKGVVTYLKKYR

SEQ ID NO: 95323 - protein, 27 aa, Artificial Sequence
  Cyclic GFR-binding peptide
  MOD_RES (27)..(27): Xaa is C or S
LEPISILYLVGRTPKVKFKYEMVVKSX

SEQ ID NO: 95324 - protein, 39 aa, Artificial Sequence
  Cyclic GFR-binding peptide
  MOD_RES (6)..(7)..(39): Xaa is C or S
HVPKPXXAPTKLSPISVLYKDDSSNVILKYHYNMVVRSX

SEQ ID NO: 95325 - protein, 39 aa, Artificial Sequence
  Cyclic GFR-binding peptide
  MOD_RES (5)..(6)..(37)..(39): Xaa is C or S
SASPXXVSQDLSPINILYFIGKTPKIYGKIPMIVKSXKX

SEQ ID NO: 95326 - protein, 34 aa, Artificial Sequence
  Cyclic GFR-binding peptide
  MOD_RES (32)..(34): Xaa is C or S
VPTKLSATSILYYDKGVVTYLRKHRGMAVSEXGX

SEQ ID NO: 95327 - protein, 38 aa, Artificial Sequence
  Cyclic GFR-binding peptide
  MOD_RES (6)..(7): Xaa is C or S
GIPEPXXVPEKMEPISILYLDENKNVVKFKYENMTVES

SEQ ID NO: 95328 - protein, 36 aa, Artificial Sequence
  Cyclic GFR-binding peptide
  MOD_RES (2)..(3)..(35): Xaa is C or S
AXXVPTKLSATSILYYDKGVVTYLRKHRGMAVSEXG

SEQ ID NO: 95329 - protein, 33 aa, Artificial Sequence; identical to SEQ ID NO: 36994
  Cyclic GFR-binding peptide
  MOD_RES (3)..(4): Xaa is C or S

SEQ ID NO: 95330 - protein, 34 aa, Artificial Sequence; identical to SEQ ID NO: 42787
  Cyclic GFR-binding peptide
  MOD_RES (32)..(34): Xaa is C or S

SEQ ID NO: 95331 - protein, 30 aa, Artificial Sequence
  Cyclic GFR-binding peptide
  MOD_RES (3)..(4): Xaa is C or S
STXXAPVKTSPISMLYKDNGRVLLLKYHYM

SEQ ID NO: 95332 - protein, 28 aa, Artificial Sequence
  Cyclic GFR-binding peptide
  MOD_RES (1)..(1): Xaa is C or S
XVPTRLNAISILYFDSANNVVLKKYRDM

SEQ ID NO: 95333 - protein, 30 aa, Artificial Sequence; identical to SEQ ID NO: 37000
  Cyclic GFR-binding peptide
  MOD_RES (3)..(4): Xaa is C or S

SEQ ID NO: 95334 - protein, 31 aa, Artificial Sequence
  Cyclic GFR-binding peptide
  MOD_RES (1)..(2): Xaa is C or S
XXVPEKMSPINILYFDENKNVVYGKIPNMTV

SEQ ID NO: 95335 - protein, 36 aa, Artificial Sequence
  Cyclic GFR-binding peptide
  MOD_RES (2)..(3)..(34)..(36): Xaa is C or S
PXXVSQDLSPINILYFIGKTPKIYGKIPMIVKSXKX

SEQ ID NO: 95336 - protein, 34 aa, Artificial Sequence; identical to SEQ ID NO: 8373
  Cyclic GFR-binding peptide
  MOD_RES (3)..(4): Xaa is C or S

SEQ ID NO: 95337 - protein, 36 aa, Artificial Sequence; identical to SEQ ID NO: 8374
  Cyclic GFR-binding peptide
  MOD_RES (6)..(7): Xaa is C or S

SEQ ID NO: 95338 - protein, 32 aa, Artificial Sequence; identical to SEQ ID NO: 8376
  Cyclic GFR-binding peptide
  MOD_RES (31)..(31): Xaa is C or S

SEQ ID NO: 95339 - protein, 26 aa, Artificial Sequence
  Cyclic GFR-binding peptide
NAISILYFDENKNVVLKKYRNMTVES

SEQ ID NO: 95340 - protein, 31 aa, Artificial Sequence; identical to SEQ ID NO: 8381
  Cyclic GFR-binding peptide
  MOD_RES (2)..(3): Xaa is C or S

SEQ ID NO: 95341 - protein, 28 aa, Artificial Sequence
  Cyclic GFR-binding peptide
  MOD_RES (1)..(2): Xaa is C or S
XXVPEKMSPINILYFDENKNVVYGKIPN

SEQ ID NO: 95342 - protein, 28 aa, Artificial Sequence
  Cyclic GFR-binding peptide
PTELSATSMLYYDEYDKVVLRKHREMVV

SEQ ID NO: 95343 - protein, 25 aa, Artificial Sequence
  Cyclic GFR-binding peptide
VPQALNAISILYFVGRKPKVLKKYR

SEQ ID NO: 95344 - protein, 36 aa, Artificial Sequence; identical to SEQ ID NO: 37009
  Cyclic GFR-binding peptide
  MOD_RES (5)..(6): Xaa is C or S

SEQ ID NO: 95345 - protein, 31 aa, Artificial Sequence; identical to SEQ ID NO: 77793
  Cyclic GFR-binding peptide
  MOD_RES (30)..(30): Xaa is C or S

SEQ ID NO: 95346 - protein, 31 aa, Artificial Sequence
  Cyclic GFR-binding peptide
VPEKMNAISILYFDENKNVVLKKYRNMTVES

SEQ ID NO: 95347 - protein, 33 aa, Artificial Sequence; identical to SEQ ID NO: 37012
  Cyclic GFR-binding peptide
  MOD_RES (5)..(6): Xaa is C or S

SEQ ID NO: 95348 - protein, 33 aa, Artificial Sequence; identical to SEQ ID NO: 8390
  Cyclic GFR-binding peptide
  MOD_RES (31)..(33): Xaa is C or S

SEQ ID NO: 95349 - protein, 26 aa, Artificial Sequence
  Cyclic GFR-binding peptide
NAISMLYFDEYDKVVLKKYREMVVEG

SEQ ID NO: 95350 - protein, 31 aa, Artificial Sequence; identical to SEQ ID NO: 37015
  Cyclic GFR-binding peptide
  MOD_RES (5)..(6): Xaa is C or S

SEQ ID NO: 95351 - protein, 34 aa, Artificial Sequence; identical to SEQ ID NO: 37016
  Cyclic GFR-binding peptide
  MOD_RES (1)..(33): Xaa is C or S

SEQ ID NO: 95352 - protein, 29 aa, Artificial Sequence
  Cyclic GFR-binding peptide
  MOD_RES (3)..(4): Xaa is C or S
PTXXVPTRLSATSILYYDSANNVVLRKHR

SEQ ID NO: 95353 - protein, 25 aa, Artificial Sequence
  Cyclic GFR-binding peptide
KLSPINVLYFDDMGVPTYGKIPEGM

SEQ ID NO: 95354 - protein, 30 aa, Artificial Sequence; identical to SEQ ID NO: 8396
  Cyclic GFR-binding peptide
  MOD_RES (28)..(30): Xaa is C or S

SEQ ID NO: 95355 - protein, 36 aa, Artificial Sequence
  Cyclic GFR-binding peptide
  MOD_RES (2)..(3)..(35): Xaa is C or S
SXXVPARLSATSILYYDAANNVVLRKHRDMVVEAXG

SEQ ID NO: 95356 - protein, 36 aa, Artificial Sequence; identical to SEQ ID NO: 37023
  Cyclic GFR-binding peptide
  MOD_RES (4)..(5): Xaa is C or S

SEQ ID NO: 95357 - protein, 30 aa, Artificial Sequence
  Cyclic GFR-binding peptide
PARLSATSILYYDAANNVVLRKHRDMVVEA

SEQ ID NO: 95358 - protein, 25 aa, Artificial Sequence
  Cyclic GFR-binding peptide
VSQDLNAISILYFIGKTPKILKKYR

SEQ ID NO: 95359 - protein, 34 aa, Artificial Sequence; identical to SEQ ID NO: 42809
  Cyclic GFR-binding peptide
  MOD_RES (2)..(3): Xaa is C or S

SEQ ID NO: 95360 - protein, 26 aa, Artificial Sequence
  Cyclic GFR-binding peptide
TKLSPISVLYKDSSNNVILKYHYNMV

SEQ ID NO: 95361 - protein, 23 aa, Artificial Sequence
  Cyclic GFR-binding peptide
TSATSMLYYDNGRVLLLRKHRMI

SEQ ID NO: 95362 - protein, 21 aa, Artificial Sequence
  Cyclic GFR-binding peptide
EPISMLYLDENEKVVKFKYED

SEQ ID NO: 95363 - protein, 24 aa, Artificial Sequence
  Cyclic GFR-binding peptide
SATSVLYYDDMGVPTLRKHREGMS

SEQ ID NO: 95364 - protein, 23 aa, Artificial Sequence
  Cyclic GFR-binding peptide
SPINVLYFDSSNNVIYGKIPNMV

SEQ ID NO: 95365 - protein, 28 aa, Artificial Sequence
  Cyclic GFR-binding peptide
  MOD_RES (2)..(3): Xaa is C or S
PXXAPTKLEPISVLYLDDSSNVIKFKYE

SEQ ID NO: 95366 - protein, 28 aa, Artificial Sequence
  Cyclic GFR-binding peptide
  MOD_RES (1)..(1): Xaa is C or S
XVPTKLSATSVLYYDDMGVPTLRKHREG

SEQ ID NO: 95367 - protein, 36 aa, Artificial Sequence
  Cyclic GFR-binding peptide
  MOD_RES (2)..(3)..(35): Xaa is C or S
PXXVPEKMNAISILYFDENKNVVLKKYRNMTVESXA

SEQ ID NO: 95368 - protein, 24 aa, Artificial Sequence
  Cyclic GFR-binding peptide
VKTNAISMLYFDNGRVLLLKKYRM

SEQ ID NO: 95369 - protein, 28 aa, Artificial Sequence
  Cyclic GFR-binding peptide
  MOD_RES (27)..(27): Xaa is C or S
EPISVLYLDDSSNVIKFKYENMVVRSXG

SEQ ID NO: 95370 - protein, 23 aa, Artificial Sequence
  Cyclic GFR-binding peptide
KLSPISVLYKDSSNNVILKYHYN

SEQ ID NO: 95371 - protein, 29 aa, Artificial Sequence
  Cyclic GFR-binding peptide
  MOD_RES (3)..(4): Xaa is C or S
KAXXVPTKLEPISVLYLDDMGVPTKFKYE

SEQ ID NO: 95372 - protein, 25 aa, Artificial Sequence
  Cyclic GFR-binding peptide
PTQLEPISVLYLDDSSNVIKFKYEN

SEQ ID NO: 95373 - protein, 23 aa, Artificial Sequence
  Cyclic GFR-binding peptide
SATSILYYVGRKPKVLRKHRMIV

SEQ ID NO: 95374 - protein, 38 aa, Artificial Sequence; identical to SEQ ID NO: 8414
  Cyclic GFR-binding peptide
  MOD_RES (3)..(4)..(36)..(38): Xaa is C or S

SEQ ID NO: 95375 - protein, 32 aa, Artificial Sequence; identical to SEQ ID NO: 8415
  Cyclic GFR-binding peptide
  MOD_RES (3)..(4): Xaa is C or S

SEQ ID NO: 95376 - protein, 38 aa, Artificial Sequence; identical to SEQ ID NO: 8416
  Cyclic GFR-binding peptide
  MOD_RES (4)..(5)..(36)..(38): Xaa is C or S

SEQ ID NO: 95377 - protein, 35 aa, Artificial Sequence
  Cyclic GFR-binding peptide
  MOD_RES (32)..(34): Xaa is C or S
APTKLSPINVLYFDDSSNVIYGKIPNMVVRSXGXH

SEQ ID NO: 95378 - protein, 33 aa, Artificial Sequence
  Cyclic GFR-binding peptide
  MOD_RES (1)..(2): Xaa is C or S
XXVPEKMSPISILYKDENKNVVLKYHYNMTVES

SEQ ID NO: 95379 - protein, 31 aa, Artificial Sequence; identical to SEQ ID NO: 42833
  Cyclic GFR-binding peptide
  MOD_RES (5)..(6): Xaa is C or S

SEQ ID NO: 95380 - protein, 26 aa, Artificial Sequence
  Cyclic GFR-binding peptide
TKLSATSVLYYDDSSNVILRKHRNMV

SEQ ID NO: 95381 - protein, 23 aa, Artificial Sequence
  Cyclic GFR-binding peptide
ELSATSMLYYDEYDKVVLRKHRE

SEQ ID NO: 95382 - protein, 38 aa, Artificial Sequence; identical to SEQ ID NO: 42837
  Cyclic GFR-binding peptide
  MOD_RES (6)..(38): Xaa is C or S

SEQ ID NO: 95383 - protein, 27 aa, Artificial Sequence
  Cyclic GFR-binding peptide
RLSPISILYKDAANNVVLKYHYDMVVE

SEQ ID NO: 95384 - protein, 34 aa, Artificial Sequence
  Cyclic GFR-binding peptide
  MOD_RES (1)..(2)..(33): Xaa is C or S
XXAPVKTEPISMLYLDNGRVLLKFKYEMIVEEXG

SEQ ID NO: 95385 - protein, 38 aa, Artificial Sequence; identical to SEQ ID NO: 77815
  Cyclic GFR-binding peptide
  MOD_RES (4)..(5)..(36)..(38): Xaa is C or S

SEQ ID NO: 95386 - protein, 42 aa, Artificial Sequence; identical to SEQ ID NO: 8423
  Cyclic GFR-binding peptide
  MOD_RES (6)..(7)..(39)..(41): Xaa is C or S

SEQ ID NO: 95387 - protein, 32 aa, Artificial Sequence
  Cyclic GFR-binding peptide
  MOD_RES (30)..(32): Xaa is C or S
EKMSPISILYKDENKNVVLKYHYNMTVESXAX

SEQ ID NO: 95388 - protein, 37 aa, Artificial Sequence; identical to SEQ ID NO: 8425
  Cyclic GFR-binding peptide
  MOD_RES (5)..(6): Xaa is C or S

SEQ ID NO: 95389 - protein, 34 aa, Artificial Sequence; identical to SEQ ID NO: 8426
  Cyclic GFR-binding peptide
  MOD_RES (32)..(34): Xaa is C or S

SEQ ID NO: 95390 - protein, 34 aa, Artificial Sequence; identical to SEQ ID NO: 42846
  Cyclic GFR-binding peptide
  MOD_RES (5)..(6): Xaa is C or S

SEQ ID NO: 95391 - protein, 36 aa, Artificial Sequence; identical to SEQ ID NO: 37061
  Cyclic GFR-binding peptide
  MOD_RES (6)..(7): Xaa is C or S

SEQ ID NO: 95392 - protein, 38 aa, Artificial Sequence; identical to SEQ ID NO: 37063
  Cyclic GFR-binding peptide
  MOD_RES (1)..(2)..(35)..(37): Xaa is C or S

SEQ ID NO: 95393 - protein, 34 aa, Artificial Sequence; identical to SEQ ID NO: 8428
  Cyclic GFR-binding peptide
  MOD_RES (5)..(6): Xaa is C or S

SEQ ID NO: 95394 - protein, 32 aa, Artificial Sequence; identical to SEQ ID NO: 37068
  Cyclic GFR-binding peptide
  MOD_RES (6)..(7): Xaa is C or S

SEQ ID NO: 95395 - protein, 30 aa, Artificial Sequence; identical to SEQ ID NO: 37072
  Cyclic GFR-binding peptide
  MOD_RES (1)..(1): Xaa is C or S

SEQ ID NO: 95396 - protein, 27 aa, Artificial Sequence
  Cyclic GFR-binding peptide
VPTKLNAISVLYFDDMGVPTLKKYREG

SEQ ID NO: 95397 - protein, 36 aa, Artificial Sequence
  Cyclic GFR-binding peptide
  MOD_RES (4)..(5): Xaa is C or S
PEPXXVPEKMSPINILYFDENKNVVYGKIPNMTVES

SEQ ID NO: 95398 - protein, 35 aa, Artificial Sequence; identical to SEQ ID NO: 42858
  Cyclic GFR-binding peptide
  MOD_RES (3)..(4): Xaa is C or S

SEQ ID NO: 95399 - protein, 35 aa, Artificial Sequence
  Cyclic GFR-binding peptide
  MOD_RES (32)..(34): Xaa is C or S
VPEKMSATSILYYDENKNVVLRKHRNMTVESXAXR

SEQ ID NO: 95400 - protein, 29 aa, Artificial Sequence
  Cyclic GFR-binding peptide
  MOD_RES (1)..(2): Xaa is C or S
XXVSQDLEPISILYLIGKTPKIKFKYEMI

SEQ ID NO: 95401 - protein, 37 aa, Artificial Sequence; identical to SEQ ID NO: 77827
  Cyclic GFR-binding peptide
  MOD_RES (5)..(6)..(37): Xaa is C or S

SEQ ID NO: 95402 - protein, 36 aa, Artificial Sequence; identical to SEQ ID NO: 8436
  Cyclic GFR-binding peptide
  MOD_RES (5)..(6): Xaa is C or S

SEQ ID NO: 95403 - protein, 32 aa, Artificial Sequence; identical to SEQ ID NO: 37079
  Cyclic GFR-binding peptide
  MOD_RES (32)..(32): Xaa is C or S

SEQ ID NO: 95404 - protein, 31 aa, Artificial Sequence; identical to SEQ ID NO: 8437
  Cyclic GFR-binding peptide
  MOD_RES (3)..(4): Xaa is C or S

SEQ ID NO: 95405 - protein, 33 aa, Artificial Sequence; identical to SEQ ID NO: 8440
  Cyclic GFR-binding peptide
  MOD_RES (31)..(33): Xaa is C or S

SEQ ID NO: 95406 - protein, 40 aa, Artificial Sequence
  Cyclic GFR-binding peptide
  MOD_RES (6)..(7)..(38)..(40): Xaa is C or S
ASASPXXVPQDLSPINILYFVGRTPKVYGKIPMVVKSXKX

SEQ ID NO: 95407 - protein, 34 aa, Artificial Sequence; identical to SEQ ID NO: 8441
  Cyclic GFR-binding peptide
  MOD_RES (1)..(2)..(34): Xaa is C or S

SEQ ID NO: 95408 - protein, 35 aa, Artificial Sequence; identical to SEQ ID NO: 8442
  Cyclic GFR-binding peptide
  MOD_RES (6)..(7): Xaa is C or S

SEQ ID NO: 95409 - protein, 20 aa, Artificial Sequence
  Cyclic GFR-binding peptide
SPINILYFDENKNVVYGKIP

SEQ ID NO: 95410 - protein, 37 aa, Artificial Sequence; identical to SEQ ID NO: 37087
  Cyclic GFR-binding peptide
  MOD_RES (5)..(6): Xaa is C or S

SEQ ID NO: 95411 - protein, 30 aa, Artificial Sequence; identical to SEQ ID NO: 37089
  Cyclic GFR-binding peptide

SEQ ID NO: 95412 - protein, 22 aa, Artificial Sequence
  Cyclic GFR-binding peptide
LSPINILYFVGRKPKVYGKIPM

SEQ ID NO: 95413 - protein, 36 aa, Artificial Sequence
  Cyclic GFR-binding peptide
  MOD_RES (4)..(5): Xaa is C or S
PEPXXVPEKMSPISILYKDENKNVVLKYHYNMTVES

SEQ ID NO: 95414 - protein, 30 aa, Artificial Sequence; identical to SEQ ID NO: 42884
  Cyclic GFR-binding peptide
  MOD_RES (2)..(3): Xaa is C or S

SEQ ID NO: 95415 - protein, 30 aa, Artificial Sequence
  Cyclic GFR-binding peptide
  MOD_RES (1)..(1): Xaa is C or S
XVPQDLSPINILYFVGRTPKVYGKIPMVVK

SEQ ID NO: 95416 - protein, 32 aa, Artificial Sequence
  Cyclic GFR-binding peptide
  MOD_RES (4)..(5): Xaa is C or S
AGPXXTPTKMSATSMLYYNDKQQIILRKHRGM

SEQ ID NO: 95417 - protein, 40 aa, Artificial Sequence; identical to SEQ ID NO: 8448
  Cyclic GFR-binding peptide
  MOD_RES (5)..(6)..(39): Xaa is C or S

SEQ ID NO: 95418 - protein, 24 aa, Artificial Sequence
  Cyclic GFR-binding peptide
LSPINMLYFDEYDKVVYGKIPEMV

SEQ ID NO: 95419 - protein, 27 aa, Artificial Sequence
  Cyclic GFR-binding peptide
  MOD_RES (1)..(1): Xaa is C or S
XVPTRLSPINILYFDSANNVVYGKIPD

SEQ ID NO: 95420 - protein, 34 aa, Artificial Sequence; identical to SEQ ID NO: 37101
  Cyclic GFR-binding peptide
  MOD_RES (5)..(6): Xaa is C or S

SEQ ID NO: 95421 - protein, 30 aa, Artificial Sequence; identical to SEQ ID NO: 18736
  Cyclic GFR-binding peptide
  MOD_RES (1)..(1): Xaa is C or S

SEQ ID NO: 95422 - protein, 31 aa, Artificial Sequence; identical to SEQ ID NO: 77838
  Cyclic GFR-binding peptide
  MOD_RES (3)..(4): Xaa is C or S

SEQ ID NO: 95423 - protein, 34 aa, Artificial Sequence; identical to SEQ ID NO: 8451
  Cyclic GFR-binding peptide
  MOD_RES (1)..(2)..(33): Xaa is C or S

SEQ ID NO: 95424 - protein, 27 aa, Artificial Sequence
  Cyclic GFR-binding peptide
LSPINILYFDSANNVVYGKIPDMVVES

SEQ ID NO: 95425 - protein, 34 aa, Artificial Sequence
  Cyclic GFR-binding peptide
  MOD_RES (31)..(33): Xaa is C or S
VPQDLSPINILYFVGRTPKVYGKIPMVVKSXKXS

SEQ ID NO: 95426 - protein, 32 aa, Artificial Sequence; identical to SEQ ID NO: 37106
  Cyclic GFR-binding peptide
  MOD_RES (3)..(4): Xaa is C or S

SEQ ID NO: 95427 - protein, 28 aa, Artificial Sequence
  Cyclic GFR-binding peptide
VSQDLSPISILYKIGKTPKILKYHYMIV

SEQ ID NO: 95428 - protein, 31 aa, Artificial Sequence; identical to SEQ ID NO: 37109
  Cyclic GFR-binding peptide
  MOD_RES (29)..(31): Xaa is C or S

SEQ ID NO: 95429 - protein, 37 aa, Artificial Sequence; identical to SEQ ID NO: 42901
  Cyclic GFR-binding peptide
  MOD_RES (2)..(3)..(35)..(37): Xaa is C or S

SEQ ID NO: 95430 - protein, 28 aa, Artificial Sequence
  Cyclic GFR-binding peptide
  MOD_RES (28)..(28): Xaa is C or S
DLSPISILYKVGRTPKVLKYHYMVVKSX

SEQ ID NO: 95431 - protein, 25 aa, Artificial Sequence
  Cyclic GFR-binding peptide
LSPINVLYFDSSNNVIYGKIPNMVV

SEQ ID NO: 95432 - protein, 30 aa, Artificial Sequence; identical to SEQ ID NO: 42904
  Cyclic GFR-binding peptide
  MOD_RES (4)..(5): Xaa is C or S

SEQ ID NO: 95433 - protein, 30 aa, Artificial Sequence; identical to SEQ ID NO: 77842
  Cyclic GFR-binding peptide
  MOD_RES (3)..(4): Xaa is C or S

SEQ ID NO: 95434 - protein, 30 aa, Artificial Sequence; identical to SEQ ID NO: 42905
  Cyclic GFR-binding peptide
  MOD_RES (1)..(1): Xaa is C or S

SEQ ID NO: 95435 - protein, 30 aa, Artificial Sequence; identical to SEQ ID NO: 42908
  Cyclic GFR-binding peptide

SEQ ID NO: 95436 - protein, 35 aa, Artificial Sequence
  Cyclic GFR-binding peptide
  MOD_RES (5)..(6): Xaa is C or S
SASPXXVPQDLSPINILYFVGRTPKVYGKIPMVVK

SEQ ID NO: 95437 - protein, 24 aa, Artificial Sequence
  Cyclic GFR-binding peptide
QLSPISVLYKDDSSNVILKYHYNM

SEQ ID NO: 95438 - protein, 28 aa, Artificial Sequence
  Cyclic GFR-binding peptide
VPTRLSPISILYKDSANNVVLKYHYDMV

SEQ ID NO: 95439 - protein, 27 aa, Artificial Sequence
  Cyclic GFR-binding peptide
TKLEPISVLYLDSSNNVIKFKYENMVV

SEQ ID NO: 95440 - protein, 36 aa, Artificial Sequence; identical to SEQ ID NO: 37117
  Cyclic GFR-binding peptide
  MOD_RES (1)..(33)..(35): Xaa is C or S

SEQ ID NO: 95441 - protein, 30 aa, Artificial Sequence
  Cyclic GFR-binding peptide
  MOD_RES (1)..(2): Xaa is C or S
XXTPTKMSPISMLYKNDKQQIILKYHYGMV

SEQ ID NO: 95442 - protein, 30 aa, Artificial Sequence; identical to SEQ ID NO: 37123
  Cyclic GFR-binding peptide
  MOD_RES (2)..(3): Xaa is C or S

SEQ ID NO: 95443 - protein, 42 aa, Artificial Sequence
  Cyclic GFR-binding peptide
  MOD_RES (6)..(7)..(39)..(41): Xaa is C or S
GIPEPXXVPEKMSATSILYYDENKNVVLRKHRNMTVESXAXR

SEQ ID NO: 95444 - protein, 30 aa, Artificial Sequence
  Cyclic GFR-binding peptide
VPTKLSATSILYYDKGVVTYLRKHRGMAVS

SEQ ID NO: 95445 - protein, 29 aa, Artificial Sequence
  Cyclic GFR-binding peptide
  MOD_RES (2)..(3): Xaa is C or S
TXXAPVKTEPISMLYLDNGRVLLKFKYEM

SEQ ID NO: 95446 - protein, 32 aa, Artificial Sequence; identical to SEQ ID NO: 8473
  Cyclic GFR-binding peptide
  MOD_RES (1)..(2): Xaa is C or S

SEQ ID NO: 95447 - protein, 34 aa, Artificial Sequence; identical to SEQ ID NO: 42921
  Cyclic GFR-binding peptide
  MOD_RES (3)..(3): Xaa is C or S

SEQ ID NO: 95448 - protein, 33 aa, Artificial Sequence; identical to SEQ ID NO: 8475
  Cyclic GFR-binding peptide
  MOD_RES (1)..(2)..(33): Xaa is C or S

SEQ ID NO: 95449 - protein, 20 aa, Artificial Sequence
  Cyclic GFR-binding peptide
NAISVLYFDSSNNVILKKYR

SEQ ID NO: 95450 - protein, 32 aa, Artificial Sequence; identical to SEQ ID NO: 37134
  Cyclic GFR-binding peptide
  MOD_RES (31)..(31): Xaa is C or S

SEQ ID NO: 95451 - protein, 24 aa, Artificial Sequence
  Cyclic GFR-binding peptide
TKMSATSMLYYNDKQQIILRKHRG

SEQ ID NO: 95452 - protein, 27 aa, Artificial Sequence
  Cyclic GFR-binding peptide
APTQLSPISVLYKDDSSNVILKYHYNM

SEQ ID NO: 95453 - protein, 30 aa, Artificial Sequence; identical to SEQ ID NO: 8481
  Cyclic GFR-binding peptide
  MOD_RES (3)..(4): Xaa is C or S

SEQ ID NO: 95454 - protein, 32 aa, Artificial Sequence
  Cyclic GFR-binding peptide
  MOD_RES (29)..(31): Xaa is C or S
RLEPISILYLDSANNVVKFKYEDMVVESXGXR

SEQ ID NO: 95455 - protein, 25 aa, Artificial Sequence
  Cyclic GFR-binding peptide
SQDLSPISILYKIGKTPKILKYHYM

SEQ ID NO: 95456 - protein, 27 aa, Artificial Sequence
  Cyclic GFR-binding peptide
TELSPISMLYKDEYDKVVLKYHYEMVV

SEQ ID NO: 95457 - protein, 23 aa, Artificial Sequence
  Cyclic GFR-binding peptide
LNAISVLYFDSSNNVILKKYRNM

SEQ ID NO: 95458 - protein, 30 aa, Artificial Sequence; identical to SEQ ID NO: 8489
  Cyclic GFR-binding peptide
  MOD_RES (28)..(30): Xaa is C or S

SEQ ID NO: 95459 - protein, 23 aa, Artificial Sequence
  Cyclic GFR-binding peptide
MNAISILYFDENKNVVLKKYRNM

SEQ ID NO: 95460 - protein, 27 aa, Artificial Sequence
  Cyclic GFR-binding peptide
  MOD_RES (27)..(27): Xaa is C or S
SPISVLYKDDSSNVILKYHYNMVVRAX

SEQ ID NO: 95461 - protein, 34 aa, Artificial Sequence
  Cyclic GFR-binding peptide
  MOD_RES (5)..(6): Xaa is C or S
IPEPXXVPEKMNAISILYFDENKNVVLKKYRNMT

SEQ ID NO: 95462 - protein, 31 aa, Artificial Sequence
  Cyclic GFR-binding peptide
  MOD_RES (31)..(31): Xaa is C or S
PTKLSATSILYYDKGVVTYLRKHRGMAVSEX

SEQ ID NO: 95463 - protein, 33 aa, Artificial Sequence; identical to SEQ ID NO: 8491
  Cyclic GFR-binding peptide
  MOD_RES (1)..(2): Xaa is C or S

SEQ ID NO: 95464 - protein, 32 aa, Artificial Sequence
  Cyclic GFR-binding peptide
  MOD_RES (31)..(31): Xaa is C or S
PTRLEPISILYLDSANNVVKFKYEDMVVESXG

SEQ ID NO: 95465 - protein, 33 aa, Artificial Sequence; identical to SEQ ID NO: 37149
  Cyclic GFR-binding peptide
  MOD_RES (4)..(5): Xaa is C or S

SEQ ID NO: 95466 - protein, 28 aa, Artificial Sequence
  Cyclic GFR-binding peptide
ARLSATSILYYDAANNVVLRKHRDMVVE

SEQ ID NO: 95467 - protein, 20 aa, Artificial Sequence
  Cyclic GFR-binding peptide
NAISMLYFNDKQQIILKKYR

SEQ ID NO: 95468 - protein, 34 aa, Artificial Sequence
  Cyclic GFR-binding peptide
  MOD_RES (3)..(4): Xaa is C or S
APXXVPQALSPINILYFVGRKPKVYGKIPMIVRS

SEQ ID NO: 95469 - protein, 34 aa, Artificial Sequence; identical to SEQ ID NO: 8497
  Cyclic GFR-binding peptide
  MOD_RES (3)..(4): Xaa is C or S

SEQ ID NO: 95470 - protein, 33 aa, Artificial Sequence
  Cyclic GFR-binding peptide
  MOD_RES (30)..(32): Xaa is C or S
TKMEPISMLYLNDKQQIIKFKYEGMVVDRXGXS

SEQ ID NO: 95471 - protein, 35 aa, Artificial Sequence; identical to SEQ ID NO: 42946
  Cyclic GFR-binding peptide
  MOD_RES (2)..(3)..(35): Xaa is C or S

SEQ ID NO: 95472 - protein, 28 aa, Artificial Sequence
  Cyclic GFR-binding peptide
  MOD_RES (1)..(1): Xaa is C or S
XAPTKLSPISVLYKDDSSNVILKYHYNM

SEQ ID NO: 95473 - protein, 41 aa, Artificial Sequence; identical to SEQ ID NO: 8504
  Cyclic GFR-binding peptide
  MOD_RES (6)..(7)..(39)..(41): Xaa is C or S

SEQ ID NO: 95474 - protein, 34 aa, Artificial Sequence; identical to SEQ ID NO: 42950
  Cyclic GFR-binding peptide
  MOD_RES (1)..(2)..(34): Xaa is C or S

SEQ ID NO: 95475 - protein, 30 aa, Artificial Sequence
  Cyclic GFR-binding peptide
  MOD_RES (2)..(3): Xaa is C or S
PXXVPEKMSATSILYYDENKNVVLRKHRNM

SEQ ID NO: 95476 - protein, 35 aa, Artificial Sequence
  Cyclic GFR-binding peptide
  MOD_RES (3)..(4): Xaa is C or S
EPXXVPEKMSPISILYKDENKNVVLKYHYNMTVES

SEQ ID NO: 95477 - protein, 28 aa, Artificial Sequence
  Cyclic GFR-binding peptide
KLEPISVLYLDDSSNVIKFKYENMVVRS

SEQ ID NO: 95478 - protein, 28 aa, Artificial Sequence
  Cyclic GFR-binding peptide
QALSPISILYKVGRKPKVLKYHYMIVRS

SEQ ID NO: 95479 - protein, 26 aa, Artificial Sequence
  Cyclic GFR-binding peptide
APTKLSPISVLYKDDSSNVILKYHYN

SEQ ID NO: 95480 - protein, 34 aa, Artificial Sequence
  Cyclic GFR-binding peptide
  MOD_RES (2)..(3): Xaa is C or S
PXXVPEKMNAISILYFDENKNVVLKKYRNMTVES

SEQ ID NO: 95481 - protein, 26 aa, Artificial Sequence
  Cyclic GFR-binding peptide
  MOD_RES (1)..(1): Xaa is C or S
XVPTELSATSMLYYDEYDKVVLRKHR

SEQ ID NO: 95482 - protein, 25 aa, Artificial Sequence
  Cyclic GFR-binding peptide
SPINVLYFDDSSNVIYGKIPNMVVR

SEQ ID NO: 95483 - protein, 29 aa, Artificial Sequence
  Cyclic GFR-binding peptide
PQALSPINILYFVGRKPKVYGKIPMIVRS

SEQ ID NO: 95484 - protein, 32 aa, Artificial Sequence; identical to SEQ ID NO: 37169
  Cyclic GFR-binding peptide
  MOD_RES (31)..(31): Xaa is C or S

SEQ ID NO: 95485 - protein, 32 aa, Artificial Sequence
  Cyclic GFR-binding peptide
  MOD_RES (30)..(32): Xaa is C or S
PVKTEPISMLYLDNGRVLLKFKYEMIVEEXGX

SEQ ID NO: 95486 - protein, 25 aa, Artificial Sequence
  Cyclic GFR-binding peptide
ELSPINMLYFDENEKVVYGKIPDMV

SEQ ID NO: 95487 - protein, 25 aa, Artificial Sequence
  Cyclic GFR-binding peptide
VPQDLSATSILYYVGRTPKVLRKHR

SEQ ID NO: 95488 - protein, 34 aa, Artificial Sequence; identical to SEQ ID NO: 8515
  Cyclic GFR-binding peptide
  MOD_RES (6)..(7): Xaa is C or S

SEQ ID NO: 95489 - protein, 36 aa, Artificial Sequence
  Cyclic GFR-binding peptide
  MOD_RES (2)..(3)..(34)..(36): Xaa is C or S
PXXVPQDLSPINILYFVGRTPKVYGKIPMVVKSXKX

SEQ ID NO: 95490 - protein, 39 aa, Artificial Sequence; identical to SEQ ID NO: 42972
  Cyclic GFR-binding peptide
  MOD_RES (3)..(4)..(36)..(38): Xaa is C or S

SEQ ID NO: 95491 - protein, 33 aa, Artificial Sequence; identical to SEQ ID NO: 8518
  Cyclic GFR-binding peptide
  MOD_RES (6)..(7): Xaa is C or S

SEQ ID NO: 95492 - protein, 34 aa, Artificial Sequence
  Cyclic GFR-binding peptide
  MOD_RES (31)..(33): Xaa is C or S
PTRLSPISILYKDSANNVVLKYHYDMVVESXGXR

SEQ ID NO: 95493 - protein, 24 aa, Artificial Sequence
  Cyclic GFR-binding peptide
TQLEPISVLYLDDSSNVIKFKYEN

SEQ ID NO: 95494 - protein, 29 aa, Artificial Sequence
  Cyclic GFR-binding peptide
  MOD_RES (1)..(2): Xaa is C or S
XXVPTRLSPISILYKDSANNVVLKYHYDM

SEQ ID NO: 95495 - protein, 32 aa, Artificial Sequence; identical to SEQ ID NO: 37180
  Cyclic GFR-binding peptide
  MOD_RES (3)..(4): Xaa is C or S

SEQ ID NO: 95496 - protein, 26 aa, Artificial Sequence
  Cyclic GFR-binding peptide
TKMSATSMLYYNDKQQIILRKHRGMV

SEQ ID NO: 95497 - protein, 26 aa, Artificial Sequence
  Cyclic GFR-binding peptide
VPTELSATSMLYYDEYDKVVLRKHRE

SEQ ID NO: 95498 - protein, 29 aa, Artificial Sequence
  Cyclic GFR-binding peptide
  MOD_RES (29)..(29): Xaa is C or S
KLEPISVLYLDDSSNVIKFKYENMVVRSX

SEQ ID NO: 95499 - protein, 29 aa, Artificial Sequence
  Cyclic GFR-binding peptide
  MOD_RES (26)..(28): Xaa is C or S
NAISILYFIGKTPKILKKYRMIVKSXKXS

SEQ ID NO: 95500 - protein, 23 aa, Artificial Sequence
  Cyclic GFR-binding peptide
LSPISMLYKDEYDKVVLKYHYEM

SEQ ID NO: 95501 - protein, 21 aa, Artificial Sequence
  Cyclic GFR-binding peptide
EPISVLYLDDSSNVIKFKYEN

SEQ ID NO: 95502 - protein, 28 aa, Artificial Sequence
  Cyclic GFR-binding peptide
  MOD_RES (28)..(28): Xaa is C or S
LSPINVLYFDSSNNVIYGKIPNMVVKAX

SEQ ID NO: 95503 - protein, 36 aa, Artificial Sequence; identical to SEQ ID NO: 8525
  Cyclic GFR-binding peptide
  MOD_RES (2)..(3)..(34)..(36): Xaa is C or S

SEQ ID NO: 95504 - protein, 39 aa, Artificial Sequence; identical to SEQ ID NO: 77878
  Cyclic GFR-binding peptide
  MOD_RES (5)..(6)..(38): Xaa is C or S

SEQ ID NO: 95505 - protein, 27 aa, Artificial Sequence
  Cyclic GFR-binding peptide
VSQDLEPISILYLIGKTPKIKFKYEMI

SEQ ID NO: 95506 - protein, 29 aa, Artificial Sequence
  Cyclic GFR-binding peptide
  MOD_RES (29)..(29): Xaa is C or S
KLNAISILYFDKGVVTYLKKYRGMAVSEX

SEQ ID NO: 95507 - protein, 26 aa, Artificial Sequence
  Cyclic GFR-binding peptide
PEKMSPISILYKDENKNVVLKYHYNM

SEQ ID NO: 95508 - protein, 29 aa, Artificial Sequence
  Cyclic GFR-binding peptide
  MOD_RES (3)..(4): Xaa is C or S
EPXXVPEKMSPINILYFDENKNVVYGKIP

SEQ ID NO: 95509 - protein, 34 aa, Artificial Sequence; identical to SEQ ID NO: 37198
  Cyclic GFR-binding peptide
  MOD_RES (5)..(6): Xaa is C or S

SEQ ID NO: 95510 - protein, 27 aa, Artificial Sequence
  Cyclic GFR-binding peptide
TPTKMSATSMLYYNDKQQIILRKHRGM

SEQ ID NO: 95511 - protein, 29 aa, Artificial Sequence
  Cyclic GFR-binding peptide
  MOD_RES (29)..(29): Xaa is C or S
KLSPISILYKDKGVVTYLKYHYGMAVSEX

SEQ ID NO: 95512 - protein, 36 aa, Artificial Sequence
  Cyclic GFR-binding peptide
  MOD_RES (2)..(3)..(34)..(36): Xaa is C or S
TXXAPVKTEPISMLYLDNGRVLLKFKYEMIVEEXGX

SEQ ID NO: 95513 - protein, 28 aa, Artificial Sequence
  Cyclic GFR-binding peptide
  MOD_RES (27)..(27): Xaa is C or S
SPISILYKDSANNVVLKYHYDMVVESXG

SEQ ID NO: 95514 - protein, 38 aa, Artificial Sequence; identical to SEQ ID NO: 8537
  Cyclic GFR-binding peptide
  MOD_RES (3)..(4)..(35)..(37): Xaa is C or S

SEQ ID NO: 95515 - protein, 41 aa, Artificial Sequence; identical to SEQ ID NO: 37210
  Cyclic GFR-binding peptide
  MOD_RES (6)..(38)..(40): Xaa is C or S

SEQ ID NO: 95516 - protein, 35 aa, Artificial Sequence; identical to SEQ ID NO: 77888
  Cyclic GFR-binding peptide
  MOD_RES (2)..(3)..(35): Xaa is C or S

SEQ ID NO: 95517 - protein, 30 aa, Artificial Sequence
  Cyclic GFR-binding peptide
  MOD_RES (3)..(4): Xaa is C or S
STXXAPVKTEPISMLYLDNGRVLLKFKYEM

SEQ ID NO: 95518 - protein, 26 aa, Artificial Sequence
  Cyclic GFR-binding peptide
  MOD_RES (26)..(26): Xaa is C or S
SPISILYKVGRKPKVLKYHYMIVRSX

SEQ ID NO: 95519 - protein, 34 aa, Artificial Sequence
  Cyclic GFR-binding peptide
  MOD_RES (5)..(6): Xaa is C or S
SAGPXXTPTKMSATSMLYYNDKQQIILRKHRGMV

SEQ ID NO: 95520 - protein, 32 aa, Artificial Sequence
  Cyclic GFR-binding peptide
  MOD_RES (2)..(3): Xaa is C or S
TXXVPTRLSATSILYYDSANNVVLRKHRDMVV

SEQ ID NO: 95521 - protein, 29 aa, Artificial Sequence
  Cyclic GFR-binding peptide
  MOD_RES (28)..(28): Xaa is C or S
LNAISILYFDKGVVTYLKKYRGMAVSEXG

SEQ ID NO: 95522 - protein, 28 aa, Artificial Sequence
  Cyclic GFR-binding peptide
KMSPISMLYKNDKQQIILKYHYGMVVDR

SEQ ID NO: 95523 - protein, 35 aa, Artificial Sequence
  Cyclic GFR-binding peptide
  MOD_RES (1)..(32)..(34): Xaa is C or S
XAPVKTSPISMLYKDNGRVLLLKYHYMIVEEXGXL

SEQ ID NO: 95524 - protein, 31 aa, Artificial Sequence; identical to SEQ ID NO: 37218
  Cyclic GFR-binding peptide
  MOD_RES (29)..(31): Xaa is C or S

SEQ ID NO: 95525 - protein, 31 aa, Artificial Sequence
  Cyclic GFR-binding peptide
  MOD_RES (3)..(4): Xaa is C or S
EPXXVPEKMSPISILYKDENKNVVLKYHYNM

SEQ ID NO: 95526 - protein, 34 aa, Artificial Sequence
  Cyclic GFR-binding peptide
  MOD_RES (1)..(2)..(34): Xaa is C or S
XXVPEKMSATSILYYDENKNVVLRKHRNMTVESX

SEQ ID NO: 95527 - protein, 30 aa, Artificial Sequence; identical to SEQ ID NO: 8548
  Cyclic GFR-binding peptide
  MOD_RES (30)..(30): Xaa is C or S

SEQ ID NO: 95528 - protein, 38 aa, Artificial Sequence; identical to SEQ ID NO: 8549
  Cyclic GFR-binding peptide
  MOD_RES (4)..(5)..(36)..(38): Xaa is C or S

SEQ ID NO: 95529 - protein, 41 aa, Artificial Sequence; identical to SEQ ID NO: 8550
  Cyclic GFR-binding peptide
  MOD_RES (6)..(7)..(38)..(40): Xaa is C or S

SEQ ID NO: 95530 - protein, 30 aa, Artificial Sequence; identical to SEQ ID NO: 8551
  Cyclic GFR-binding peptide
  MOD_RES (28)..(30): Xaa is C or S

SEQ ID NO: 95531 - protein, 29 aa, Artificial Sequence
  Cyclic GFR-binding peptide
TELSPISMLYKDEYDKVVLKYHYEMVVEG

SEQ ID NO: 95532 - protein, 31 aa, Artificial Sequence
  Cyclic GFR-binding peptide
  MOD_RES (31)..(31): Xaa is C or S
APVKTSPISMLYKDNGRVLLLKYHYMIVEEX

SEQ ID NO: 95533 - protein, 22 aa, Artificial Sequence
  Cyclic GFR-binding peptide
NAISMLYFDNGRVLLLKKYRMI

SEQ ID NO: 95534 - protein, 39 aa, Artificial Sequence; identical to SEQ ID NO: 37227
  Cyclic GFR-binding peptide
  MOD_RES (3)..(4)..(37)..(39): Xaa is C or S

SEQ ID NO: 95535 - protein, 31 aa, Artificial Sequence; identical to SEQ ID NO: 37228
  Cyclic GFR-binding peptide
  MOD_RES (5)..(6): Xaa is C or S

SEQ ID NO: 95536 - protein, 25 aa, Artificial Sequence
  Cyclic GFR-binding peptide
PARLSPINILYFDAANNVVYGKIPD

SEQ ID NO: 95537 - protein, 28 aa, Artificial Sequence
  Cyclic GFR-binding peptide
  MOD_RES (1)..(1): Xaa is C or S
XVPQDLEPISILYLVGRTPKVKFKYEMV

SEQ ID NO: 95538 - protein, 32 aa, Artificial Sequence; identical to SEQ ID NO: 37231
  Cyclic GFR-binding peptide
  MOD_RES (29)..(31): Xaa is C or S

SEQ ID NO: 95539 - protein, 30 aa, Artificial Sequence; identical to SEQ ID NO: 37232
  Cyclic GFR-binding peptide
  MOD_RES (2)..(3): Xaa is C or S

SEQ ID NO: 95540 - protein, 42 aa, Artificial Sequence; identical to SEQ ID NO: 43022
  Cyclic GFR-binding peptide
  MOD_RES (6)..(7)..(39)..(41): Xaa is C or S

SEQ ID NO: 95541 - protein, 26 aa, Artificial Sequence
  Cyclic GFR-binding peptide
VPEKMEPISILYLDENKNVVKFKYEN

SEQ ID NO: 95542 - protein, 36 aa, Artificial Sequence; identical to SEQ ID NO: 8558
  Cyclic GFR-binding peptide
  MOD_RES (4)..(5)..(36): Xaa is C or S

SEQ ID NO: 95543 - protein, 42 aa, Artificial Sequence; identical to SEQ ID NO: 8559
  Cyclic GFR-binding peptide
  MOD_RES (6)..(7)..(40)..(42): Xaa is C or S

SEQ ID NO: 95544 - protein, 35 aa, Artificial Sequence; identical to SEQ ID NO: 43025
  Cyclic GFR-binding peptide
  MOD_RES (1)..(33)..(35): Xaa is C or S

SEQ ID NO: 95545 - protein, 29 aa, Artificial Sequence
  Cyclic GFR-binding peptide
  MOD_RES (27)..(29): Xaa is C or S
SATSMLYYDENEKVVLRKHRDMVVEGXGX

SEQ ID NO: 95546 - protein, 21 aa, Artificial Sequence
  Cyclic GFR-binding peptide
SPISMLYKDENEKVVLKYHYD

SEQ ID NO: 95547 - protein, 26 aa, Artificial Sequence
  Cyclic GFR-binding peptide
TELSPINMLYFDEYDKVVYGKIPEMV

SEQ ID NO: 95548 - protein, 30 aa, Artificial Sequence; identical to SEQ ID NO: 37239
  Cyclic GFR-binding peptide
  MOD_RES (29)..(29): Xaa is C or S

SEQ ID NO: 95549 - protein, 27 aa, Artificial Sequence
  Cyclic GFR-binding peptide
  MOD_RES (1)..(2): Xaa is C or S
XXVPTELEPISMLYLDEYDKVVKFKYE

SEQ ID NO: 95550 - protein, 31 aa, Artificial Sequence
  Cyclic GFR-binding peptide
  MOD_RES (28)..(30): Xaa is C or S
KTSATSMLYYDNGRVLLLRKHRMIVEEXGXL

SEQ ID NO: 95551 - protein, 38 aa, Artificial Sequence
  Cyclic GFR-binding peptide
  MOD_RES (3)..(4)..(36)..(38): Xaa is C or S
EPXXVPEKMNAISILYFDENKNVVLKKYRNMTVESXAX

SEQ ID NO: 95552 - protein, 33 aa, Artificial Sequence; identical to SEQ ID NO: 8567
  Cyclic GFR-binding peptide
  MOD_RES (31)..(33): Xaa is C or S

SEQ ID NO: 95553 - protein, 31 aa, Artificial Sequence
  Cyclic GFR-binding peptide
  MOD_RES (4)..(5): Xaa is C or S
PEPXXVPEKMSPINILYFDENKNVVYGKIPN

SEQ ID NO: 95554 - protein, 32 aa, Artificial Sequence; identical to SEQ ID NO: 43034
  Cyclic GFR-binding peptide
  MOD_RES (32)..(32): Xaa is C or S

SEQ ID NO: 95555 - protein, 33 aa, Artificial Sequence; identical to SEQ ID NO: 43035
  Cyclic GFR-binding peptide
  MOD_RES (32)..(32): Xaa is C or S

SEQ ID NO: 95556 - protein, 27 aa, Artificial Sequence
  Cyclic GFR-binding peptide
VPTELEPISMLYLDENEKVVKFKYEDM

SEQ ID NO: 95557 - protein, 26 aa, Artificial Sequence
  Cyclic GFR-binding peptide
PTELNAISMLYFDEYDKVVLKKYREM

SEQ ID NO: 95558 - protein, 28 aa, Artificial Sequence
  Cyclic GFR-binding peptide
VPQALNAISILYFVGRKPKVLKKYRMIV

SEQ ID NO: 95559 - protein, 34 aa, Artificial Sequence; identical to SEQ ID NO: 37257
  Cyclic GFR-binding peptide
  MOD_RES (5)..(6): Xaa is C or S

SEQ ID NO: 95560 - protein, 36 aa, Artificial Sequence; identical to SEQ ID NO: 37258
  Cyclic GFR-binding peptide
  MOD_RES (1)..(34)..(36): Xaa is C or S

SEQ ID NO: 95561 - protein, 29 aa, Artificial Sequence
  Cyclic GFR-binding peptide
  MOD_RES (1)..(2): Xaa is C or S
XXVPEKMNAISILYFDENKNVVLKKYRNM

SEQ ID NO: 95562 - protein, 29 aa, Artificial Sequence
  Cyclic GFR-binding peptide
  MOD_RES (1)..(1): Xaa is C or S
XVPARLSPISILYKDAANNVVLKYHYDMV

SEQ ID NO: 95563 - protein, 36 aa, Artificial Sequence
  Cyclic GFR-binding peptide
  MOD_RES (1)..(33)..(35): Xaa is C or S
XVPEKMNAISILYFDENKNVVLKKYRNMTVESXAXR

SEQ ID NO: 95564 - protein, 36 aa, Artificial Sequence
  Cyclic GFR-binding peptide
  MOD_RES (6)..(7): Xaa is C or S
STPPTXXVPTRLSPISILYKDSANNVVLKYHYDMVV

SEQ ID NO: 95565 - protein, 30 aa, Artificial Sequence; identical to SEQ ID NO: 8581
  Cyclic GFR-binding peptide
  MOD_RES (28)..(30): Xaa is C or S

SEQ ID NO: 95566 - protein, 24 aa, Artificial Sequence
  Cyclic GFR-binding peptide
PTRLNAISILYFDSANNVVLKKYR

SEQ ID NO: 95567 - protein, 34 aa, Artificial Sequence; identical to SEQ ID NO: 37264
  Cyclic GFR-binding peptide
  MOD_RES (6)..(7): Xaa is C or S

SEQ ID NO: 95568 - protein, 28 aa, Artificial Sequence
  Cyclic GFR-binding peptide
  MOD_RES (27)..(27): Xaa is C or S
NAISILYFDENKNVVLKKYRNMTVESXA

SEQ ID NO: 95569 - protein, 23 aa, Artificial Sequence
  Cyclic GFR-binding peptide
KLNAISVLYFDSSNNVILKKYRN

SEQ ID NO: 95570 - protein, 29 aa, Artificial Sequence
  Cyclic GFR-binding peptide
TRLSPISILYKDSANNVVLKYHYDMVVES

SEQ ID NO: 95571 - protein, 36 aa, Artificial Sequence; identical to SEQ ID NO: 37266
  Cyclic GFR-binding peptide
  MOD_RES (5)..(6): Xaa is C or S

SEQ ID NO: 95572 - protein, 31 aa, Artificial Sequence; identical to SEQ ID NO: 8585
  Cyclic GFR-binding peptide
  MOD_RES (29)..(31): Xaa is C or S

SEQ ID NO: 95573 - protein, 32 aa, Artificial Sequence
  Cyclic GFR-binding peptide
  MOD_RES (1)..(1): Xaa is C or S
XTPTKMSPISMLYKNDKQQIILKYHYGMVVDR

SEQ ID NO: 95574 - protein, 29 aa, Artificial Sequence
  Cyclic GFR-binding peptide
  MOD_RES (2)..(3): Xaa is C or S
AXXVPTKLSPISILYKDKGVVTYLKYHYG

SEQ ID NO: 95575 - protein, 33 aa, Artificial Sequence; identical to SEQ ID NO: 8586
  Cyclic GFR-binding peptide
  MOD_RES (31)..(33): Xaa is C or S

SEQ ID NO: 95576 - protein, 34 aa, Artificial Sequence; identical to SEQ ID NO: 8588
  Cyclic GFR-binding peptide
  MOD_RES (1)..(33): Xaa is C or S

SEQ ID NO: 95577 - protein, 32 aa, Artificial Sequence
  Cyclic GFR-binding peptide
  MOD_RES (1)..(1): Xaa is C or S
XVPEKMSPISILYKDENKNVVLKYHYNMTVES

SEQ ID NO: 95578 - protein, 29 aa, Artificial Sequence
  Cyclic GFR-binding peptide
  MOD_RES (1)..(1): Xaa is C or S
XVPTELSPISMLYKDENEKVVLKYHYDMV

SEQ ID NO: 95579 - protein, 33 aa, Artificial Sequence; identical to SEQ ID NO: 43068
  Cyclic GFR-binding peptide
  MOD_RES (30)..(32): Xaa is C or S

SEQ ID NO: 95580 - protein, 37 aa, Artificial Sequence
  Cyclic GFR-binding peptide
  MOD_RES (6)..(7): Xaa is C or S
GIPEPXXVPEKMSATSILYYDENKNVVLRKHRNMTVE

SEQ ID NO: 95581 - protein, 22 aa, Artificial Sequence
  Cyclic GFR-binding peptide
EPISMLYLDEYDKVVKFKYEEM

SEQ ID NO: 95582 - protein, 26 aa, Artificial Sequence
  Cyclic GFR-binding peptide
EKMSPISILYKDENKNVVLKYHYNMT

SEQ ID NO: 95583 - protein, 35 aa, Artificial Sequence
  Cyclic GFR-binding peptide
  MOD_RES (1)..(33)..(35): Xaa is C or S
XTPTKMSPISMLYKNDKQQIILKYHYGMVVDRXGX

SEQ ID NO: 95584 - protein, 39 aa, Artificial Sequence
  Cyclic GFR-binding peptide
  MOD_RES (4)..(5)..(37)..(39): Xaa is C or S
PEPXXVPEKMNAISILYFDENKNVVLKKYRNMTVESXAX

SEQ ID NO: 95585 - protein, 33 aa, Artificial Sequence; identical to SEQ ID NO: 8601
  Cyclic GFR-binding peptide
  MOD_RES (1)..(2)..(33): Xaa is C or S

SEQ ID NO: 95586 - protein, 28 aa, Artificial Sequence
  Cyclic GFR-binding peptide
  MOD_RES (27)..(27): Xaa is C or S
LSPINILYFIGKTPKIYGKIPMIVKSXK

SEQ ID NO: 95587 - protein, 34 aa, Artificial Sequence
  Cyclic GFR-binding peptide
  MOD_RES (1)..(2)..(34): Xaa is C or S
XXVPEKMEPISILYLDENKNVVKFKYENMTVESX

SEQ ID NO: 95588 - protein, 29 aa, Artificial Sequence
  Cyclic GFR-binding peptide
  MOD_RES (3)..(4): Xaa is C or S
KAXXVPTKLSATSVLYYDDMGVPTLRKHR

SEQ ID NO: 95589 - protein, 33 aa, Artificial Sequence
  Cyclic GFR-binding peptide
  MOD_RES (2)..(3): Xaa is C or S
PXXTPTKMEPISMLYLNDKQQIIKFKYEGMVVD

SEQ ID NO: 95590 - protein, 23 aa, Artificial Sequence
  Cyclic GFR-binding peptide
LEPISMLYLDENEKVVKFKYEDM

SEQ ID NO: 95591 - protein, 31 aa, Artificial Sequence; identical to SEQ ID NO: 43094
  Cyclic GFR-binding peptide
  MOD_RES (28)..(30): Xaa is C or S

SEQ ID NO: 95592 - protein, 27 aa, Artificial Sequence
  Cyclic GFR-binding peptide
APVKTEPISMLYLDNGRVLLKFKYEMI

SEQ ID NO: 95593 - protein, 33 aa, Artificial Sequence
  Cyclic GFR-binding peptide
  MOD_RES (6)..(7): Xaa is C or S
GSAGPXXTPTKMSATSMLYYNDKQQIILRKHRG

SEQ ID NO: 95594 - protein, 32 aa, Artificial Sequence; identical to SEQ ID NO: 8609
  Cyclic GFR-binding peptide
  MOD_RES (29)..(31): Xaa is C or S

SEQ ID NO: 95595 - protein, 32 aa, Artificial Sequence; identical to SEQ ID NO: 8611
  Cyclic GFR-binding peptide
  MOD_RES (5)..(6): Xaa is C or S

SEQ ID NO: 95596 - protein, 26 aa, Artificial Sequence
  Cyclic GFR-binding peptide
PTKMEPISMLYLNDKQQIIKFKYEGM

SEQ ID NO: 95597 - protein, 28 aa, Artificial Sequence
  Cyclic GFR-binding peptide
  MOD_RES (1)..(2): Xaa is C or S
XXAPTQLSATSVLYYDDSSNVILRKHRN

SEQ ID NO: 95598 - protein, 30 aa, Artificial Sequence; identical to SEQ ID NO: 43107
  Cyclic GFR-binding peptide
  MOD_RES (1)..(2): Xaa is C or S

SEQ ID NO: 95599 - protein, 24 aa, Artificial Sequence
  Cyclic GFR-binding peptide
KMSPINILYFDENKNVVYGKIPNM

SEQ ID NO: 95600 - protein, 22 aa, Artificial Sequence
  Cyclic GFR-binding peptide
ELSPISMLYKDENEKVVLKYHY

SEQ ID NO: 95601 - protein, 35 aa, Artificial Sequence; identical to SEQ ID NO: 8626
  Cyclic GFR-binding peptide
  MOD_RES (3)..(4): Xaa is C or S

SEQ ID NO: 95602 - protein, 29 aa, Artificial Sequence
  Cyclic GFR-binding peptide
VPTELSPINMLYFDENEKVVYGKIPDMVV

SEQ ID NO: 95603 - protein, 31 aa, Artificial Sequence; identical to SEQ ID NO: 37312
  Cyclic GFR-binding peptide
  MOD_RES (4)..(5): Xaa is C or S

SEQ ID NO: 95604 - protein, 30 aa, Artificial Sequence; identical to SEQ ID NO: 8630
  Cyclic GFR-binding peptide
  MOD_RES (29)..(29): Xaa is C or S

SEQ ID NO: 95605 - protein, 40 aa, Artificial Sequence
  Cyclic GFR-binding peptide
  MOD_RES (5)..(6)..(38)..(40): Xaa is C or S
SAGPXXTPTKMSATSMLYYNDKQQIILRKHRGMVVDRXGX

SEQ ID NO: 95606 - protein, 31 aa, Artificial Sequence; identical to SEQ ID NO: 8634
  Cyclic GFR-binding peptide
  MOD_RES (3)..(4): Xaa is C or S

SEQ ID NO: 95607 - protein, 32 aa, Artificial Sequence
  Cyclic GFR-binding peptide
  MOD_RES (2)..(3): Xaa is C or S
PXXVPEKMNAISILYFDENKNVVLKKYRNMTV

SEQ ID NO: 95608 - protein, 34 aa, Artificial Sequence; identical to SEQ ID NO: 43128
  Cyclic GFR-binding peptide
  MOD_RES (1)..(34): Xaa is C or S

SEQ ID NO: 95609 - protein, 33 aa, Artificial Sequence
  Cyclic GFR-binding peptide
  MOD_RES (1)..(33): Xaa is C or S
XVPEKMSATSILYYDENKNVVLRKHRNMTVESX

SEQ ID NO: 95610 - protein, 24 aa, Artificial Sequence
  Cyclic GFR-binding peptide
KLSPINVLYFDDMGVPTYGKIPEG

SEQ ID NO: 95611 - protein, 36 aa, Artificial Sequence; identical to SEQ ID NO: 37325
  Cyclic GFR-binding peptide
  MOD_RES (4)..(5): Xaa is C or S

SEQ ID NO: 95612 - protein, 26 aa, Artificial Sequence
  Cyclic GFR-binding peptide
TPTKMSATSMLYYNDKQQIILRKHRG

SEQ ID NO: 95613 - protein, 38 aa, Artificial Sequence; identical to SEQ ID NO: 37327
  Cyclic GFR-binding peptide
  MOD_RES (3)..(4)..(35)..(37): Xaa is C or S

SEQ ID NO: 95614 - protein, 29 aa, Artificial Sequence
  Cyclic GFR-binding peptide
  MOD_RES (2)..(3): Xaa is C or S
TXXVPTRLSATSILYYDSANNVVLRKHRD

SEQ ID NO: 95615 - protein, 39 aa, Artificial Sequence; identical to SEQ ID NO: 43132
  Cyclic GFR-binding peptide
  MOD_RES (6)..(7)..(39): Xaa is C or S

SEQ ID NO: 95616 - protein, 30 aa, Artificial Sequence; identical to SEQ ID NO: 37329
  Cyclic GFR-binding peptide
  MOD_RES (2)..(2): Xaa is C or S

SEQ ID NO: 95617 - protein, 29 aa, Artificial Sequence
  Cyclic GFR-binding peptide
PTKLNAISILYFDKGVVTYLKKYRGMAVS

SEQ ID NO: 95618 - protein, 26 aa, Artificial Sequence
  Cyclic GFR-binding peptide
VPTRLSPISILYKDSANNVVLKYHYD

SEQ ID NO: 95619 - protein, 39 aa, Artificial Sequence; identical to SEQ ID NO: 37331
  Cyclic GFR-binding peptide
  MOD_RES (5)..(37)..(39): Xaa is C or S

SEQ ID NO: 95620 - protein, 21 aa, Artificial Sequence
  Cyclic GFR-binding peptide
EPISVLYLDDMGVPTKFKYEE

SEQ ID NO: 95621 - protein, 33 aa, Artificial Sequence
  Cyclic GFR-binding peptide
  MOD_RES (1)..(33): Xaa is C or S
XVPEKMEPISILYLDENKNVVKFKYENMTVESX

SEQ ID NO: 95622 - protein, 25 aa, Artificial Sequence
  Cyclic GFR-binding peptide
VPTRLSPISILYKDSANNVVLKYHY

SEQ ID NO: 95623 - protein, 38 aa, Artificial Sequence; identical to SEQ ID NO: 8643
  Cyclic GFR-binding peptide
  MOD_RES (4)..(5)..(36)..(38): Xaa is C or S
